United States Patent Application Publication US 2020/0095579 A1 - sequence listing, part 15

SEQ ID NO: 225315 - DNA, 20 bp, Artificial Sequence
  Description of Artificial Sequence: Synthetic oligonucleotide
  Target: LAMA2; (-) strand; PAM type: YTN; PAM sequence: CTG
tgatagtagctctcgatggc

SEQ ID NO: 225316 - DNA, 20 bp, Artificial Sequence
  Description of Artificial Sequence: Synthetic oligonucleotide
  Target: LAMA2; (-) strand; PAM type: YTN; PAM sequence: TTG
ggctgtgatagtagctctcg

SEQ ID NO: 225317 - DNA, 20 bp, Artificial Sequence
  Description of Artificial Sequence: Synthetic oligonucleotide
  Target: LAMA2; (-) strand; PAM type: YTN; PAM sequence: CTT
gggctgtgatagtagctctc

SEQ ID NO: 225318 - DNA, 20 bp, Artificial Sequence
  Description of Artificial Sequence: Synthetic oligonucleotide
  Target: LAMA2; (-) strand; PAM type: YTN; PAM sequence: CTG
cagaggcagcacttgggctg

SEQ ID NO: 225319 - DNA, 20 bp, Artificial Sequence
  Description of Artificial Sequence: Synthetic oligonucleotide
  Target: LAMA2; (-) strand; PAM type: YTN; PAM sequence: TTC
tgcagaggcagcacttgggc

SEQ ID NO: 225320 - DNA, 20 bp, Artificial Sequence
  Description of Artificial Sequence: Synthetic oligonucleotide
  Target: LAMA2; (-) strand; PAM type: YTN; PAM sequence: TTT
ctgcagaggcagcacttggg

SEQ ID NO: 225321 - DNA, 20 bp, Artificial Sequence
  Description of Artificial Sequence: Synthetic oligonucleotide
  Target: LAMA2; (-) strand; PAM type: YTN; PAM sequence: CTT
tctgcagaggcagcacttgg

SEQ ID NO: 225322 - DNA, 20 bp, Artificial Sequence
  Description of Artificial Sequence: Synthetic oligonucleotide
  Target: LAMA2; (-) strand; PAM type: YTN; PAM sequence: CTG
ctttctgcagaggcagcact

SEQ ID NO: 225323 - DNA, 20 bp, Artificial Sequence
  Description of Artificial Sequence: Synthetic oligonucleotide
  Target: LAMA2; (-) strand; PAM type: YTN; PAM sequence: CTA
ctgctttctgcagaggcagc

SEQ ID NO: 225324 - DNA, 20 bp, Artificial Sequence
  Description of Artificial Sequence: Synthetic oligonucleotide
  Target: LAMA2; (-) strand; PAM type: YTN; PAM sequence: CTG
ggctactgctttctgcagag

SEQ ID NO: 225325 - DNA, 20 bp, Artificial Sequence
  Description of Artificial Sequence: Synthetic oligonucleotide
  Target: LAMA2; (-) strand; PAM type: YTN; PAM sequence: CTC
aatagcatctgggctactgc

SEQ ID NO: 225326 - DNA, 20 bp, Artificial Sequence
  Description of Artificial Sequence: Synthetic oligonucleotide
  Target: LAMA2; (-) strand; PAM type: YTN; PAM sequence: TTC
tcaatagcatctgggctact

SEQ ID NO: 225327 - DNA, 20 bp, Artificial Sequence
  Description of Artificial Sequence: Synthetic oligonucleotide
  Target: LAMA2; (-) strand; PAM type: YTN; PAM sequence: TTG
taagcagttctcaatagcat

SEQ ID NO: 225328 - DNA, 20 bp, Artificial Sequence
  Description of Artificial Sequence: Synthetic oligonucleotide
  Target: LAMA2; (-) strand; PAM type: YTN; PAM sequence: CTT
gtaagcagttctcaatagca

SEQ ID NO: 225329 - DNA, 20 bp, Artificial Sequence
  Description of Artificial Sequence: Synthetic oligonucleotide
  Target: LAMA2; (-) strand; PAM type: YTN; PAM sequence: TTC
ttgtaagcagttctcaatag

SEQ ID NO: 225330 - DNA, 20 bp, Artificial Sequence
  Description of Artificial Sequence: Synthetic oligonucleotide
  Target: LAMA2; (-) strand; PAM type: YTN; PAM sequence: TTC
caagtggcagttcttgtaag

SEQ ID NO: 225331 - DNA, 20 bp, Artificial Sequence
  Description of Artificial Sequence: Synthetic oligonucleotide
  Target: LAMA2; (-) strand; PAM type: YTN; PAM sequence: CTT
ccaagtggcagttcttgtaa

SEQ ID NO: 225332 - DNA, 20 bp, Artificial Sequence
  Description of Artificial Sequence: Synthetic oligonucleotide
  Target: LAMA2; (-) strand; PAM type: YTN; PAM sequence: CTC
agggtgcttccaagtggcag

SEQ ID NO: 225333 - DNA, 20 bp, Artificial Sequence
  Description of Artificial Sequence: Synthetic oligonucleotide
  Target: LAMA2; (-) strand; PAM type: YTN; PAM sequence: TTC
tcagggtgcttccaagtggc

SEQ ID NO: 225334 - DNA, 20 bp, Artificial Sequence
  Description of Artificial Sequence: Synthetic oligonucleotide
  Target: LAMA2; (-) strand; PAM type: YTN; PAM sequence: TTC
caagtaaagccaagttctca

SEQ ID NO: 225335 - DNA, 20 bp, Artificial Sequence
  Description of Artificial Sequence: Synthetic oligonucleotide
  Target: LAMA2; (-) strand; PAM type: YTN; PAM sequence: TTT
ccaagtaaagccaagttctc

SEQ ID NO: 225336 - DNA, 20 bp, Artificial Sequence
  Description of Artificial Sequence: Synthetic oligonucleotide
  Target: LAMA2; (-) strand; PAM type: YTN; PAM sequence: CTA
ggtgatttccaagtaaagcc

SEQ ID NO: 225337 - DNA, 20 bp, Artificial Sequence
  Description of Artificial Sequence: Synthetic oligonucleotide
  Target: LAMA2; (-) strand; PAM type: YTN; PAM sequence: CTC
ctaggtgatttccaagtaaa

SEQ ID NO: 225338 - DNA, 20 bp, Artificial Sequence
  Description of Artificial Sequence: Synthetic oligonucleotide
  Target: LAMA2; (-) strand; PAM type: YTN; PAM sequence: TTC
aaatgctcctaggtgatttc

SEQ ID NO: 225339 - DNA, 20 bp, Artificial Sequence
  Description of Artificial Sequence: Synthetic oligonucleotide
  Target: LAMA2; (-) strand; PAM type: YTN; PAM sequence: TTT
caaatgctcctaggtgattt

SEQ ID NO: 225340 - DNA, 20 bp, Artificial Sequence
  Description of Artificial Sequence: Synthetic oligonucleotide
  Target: LAMA2; (-) strand; PAM type: YTN; PAM sequence: TTT
tcaaatgctcctaggtgatt

SEQ ID NO: 225341 - DNA, 20 bp, Artificial Sequence
  Description of Artificial Sequence: Synthetic oligonucleotide
  Target: LAMA2; (-) strand; PAM type: YTN; PAM sequence: TTT
ttcaaatgctcctaggtgat

SEQ ID NO: 225342 - DNA, 20 bp, Artificial Sequence
  Description of Artificial Sequence: Synthetic oligonucleotide
  Target: LAMA2; (-) strand; PAM type: YTN; PAM sequence: CTA
tttttcaaatgctcctaggt

SEQ ID NO: 225343 - DNA, 20 bp, Artificial Sequence
  Description of Artificial Sequence: Synthetic oligonucleotide
  Target: LAMA2; (-) strand; PAM type: YTN; PAM sequence: CTC
aggagtagctatttttcaaa

SEQ ID NO: 225344 - DNA, 20 bp, Artificial Sequence
  Description of Artificial Sequence: Synthetic oligonucleotide
  Target: LAMA2; (-) strand; PAM type: YTN; PAM sequence: CTG
gtctcaggagtagctatttt

SEQ ID NO: 225345 - DNA, 20 bp, Artificial Sequence
  Description of Artificial Sequence: Synthetic oligonucleotide
  Target: LAMA2; (-) strand; PAM type: YTN; PAM sequence: TTC
tggtctcaggagtagctatt

SEQ ID NO: 225346 - DNA, 20 bp, Artificial Sequence
  Description of Artificial Sequence: Synthetic oligonucleotide
  Target: LAMA2; (-) strand; PAM type: YTN; PAM sequence: TTA
aaagttctggtctcaggagt

SEQ ID NO: 225347 - DNA, 20 bp, Artificial Sequence
  Description of Artificial Sequence: Synthetic oligonucleotide
  Target: LAMA2; (-) strand; PAM type: YTN; PAM sequence: CTG
acaaatataatgaattaaaa

SEQ ID NO: 225348 - DNA, 20 bp, Artificial Sequence
  Description of Artificial Sequence: Synthetic oligonucleotide
  Target: LAMA2; (-) strand; PAM type: YTN; PAM sequence: CTC
tgacaaatataatgaattaa

SEQ ID NO: 225349 - DNA, 20 bp, Artificial Sequence
  Description of Artificial Sequence: Synthetic oligonucleotide
  Target: LAMA2; (-) strand; PAM type: YTN; PAM sequence: TTA
atgagcctctgacaaatata

SEQ ID NO: 225350 - DNA, 20 bp, Artificial Sequence
  Description of Artificial Sequence: Synthetic oligonucleotide
  Target: LAMA2; (-) strand; PAM type: YTN; PAM sequence: CTT
aatgagcctctgacaaatat

SEQ ID NO: 225351 - DNA, 20 bp, Artificial Sequence
  Description of Artificial Sequence: Synthetic oligonucleotide
  Target: LAMA2; (-) strand; PAM type: YTN; PAM sequence: TTA
aaatatacatagggcttaat

SEQ ID NO: 225352 - DNA, 20 bp, Artificial Sequence
  Description of Artificial Sequence: Synthetic oligonucleotide
  Target: LAMA2; (-) strand; PAM type: YTN; PAM sequence: TTT
aaaatatacatagggcttaa

SEQ ID NO: 225353 - DNA, 20 bp, Artificial Sequence
  Description of Artificial Sequence: Synthetic oligonucleotide
  Target: LAMA2; (-) strand; PAM type: YTN; PAM sequence: TTG
tttaaaatatacatagggct

SEQ ID NO: 225354 - DNA, 20 bp, Artificial Sequence
  Description of Artificial Sequence: Synthetic oligonucleotide
  Target: LAMA2; (-) strand; PAM type: YTN; PAM sequence: CTT
gtttaaaatatacatagggc

SEQ ID NO: 225355 - DNA, 20 bp, Artificial Sequence
  Description of Artificial Sequence: Synthetic oligonucleotide
  Target: LAMA2; (-) strand; PAM type: YTN; PAM sequence: TTA
agccaggaatacagacataa

SEQ ID NO: 225356 - DNA, 20 bp, Artificial Sequence
  Description of Artificial Sequence: Synthetic oligonucleotide
  Target: LAMA2; (-) strand; PAM type: YTN; PAM sequence: CTG
aacattaagccaggaataca

SEQ ID NO: 225357 - DNA, 20 bp, Artificial Sequence
  Description of Artificial Sequence: Synthetic oligonucleotide
  Target: LAMA2; (-) strand; PAM type: YTN; PAM sequence: CTG
gaaatagctgaacattaagc

SEQ ID NO: 225358 - DNA, 20 bp, Artificial Sequence
  Description of Artificial Sequence: Synthetic oligonucleotide
  Target: LAMA2; (-) strand; PAM type: YTN; PAM sequence: TTA
aaaggctggaaatagctgaa

SEQ ID NO: 225359 - DNA, 20 bp, Artificial Sequence
  Description of Artificial Sequence: Synthetic oligonucleotide
  Target: LAMA2; (-) strand; PAM type: YTN; PAM sequence: TTT
aaaaggctggaaatagctga

SEQ ID NO: 225360 - DNA, 20 bp, Artificial Sequence
  Description of Artificial Sequence: Synthetic oligonucleotide
  Target: LAMA2; (-) strand; PAM type: YTN; PAM sequence: CTA
cagggtttaaaaggctggaa

SEQ ID NO: 225361 - DNA, 20 bp, Artificial Sequence
  Description of Artificial Sequence: Synthetic oligonucleotide
  Target: LAMA2; (-) strand; PAM type: YTN; PAM sequence: CTC
ctacagggtttaaaaggctg

SEQ ID NO: 225362 - DNA, 20 bp, Artificial Sequence
  Description of Artificial Sequence: Synthetic oligonucleotide
  Target: LAMA2; (-) strand; PAM type: YTN; PAM sequence: TTC
tcctacagggtttaaaaggc

SEQ ID NO: 225363 - DNA, 20 bp, Artificial Sequence
  Description of Artificial Sequence: Synthetic oligonucleotide
  Target: LAMA2; (-) strand; PAM type: YTN; PAM sequence: CTG
ttctcctacagggtttaaaa

SEQ ID NO: 225364 - DNA, 20 bp, Artificial Sequence
  Description of Artificial Sequence: Synthetic oligonucleotide
  Target: LAMA2; (-) strand; PAM type: YTN; PAM sequence: CTG
gtgccctgttctcctacagg

SEQ ID NO: 225365 - DNA, 20 bp, Artificial Sequence
  Description of Artificial Sequence: Synthetic oligonucleotide
  Target: LAMA2; (-) strand; PAM type: YTN; PAM sequence: CTA
aataactggtgccctgttct

SEQ ID NO: 225366 - DNA, 20 bp, Artificial Sequence
  Description of Artificial Sequence: Synthetic oligonucleotide
  Target: LAMA2; (-) strand; PAM type: YTN; PAM sequence: TTC
cctaaataactggtgccctg

SEQ ID NO: 225367 - DNA, 20 bp, Artificial Sequence
  Description of Artificial Sequence: Synthetic oligonucleotide
  Target: LAMA2; (-) strand; PAM type: YTN; PAM sequence: TTT
ccctaaataactggtgccct

SEQ ID NO: 225368 - DNA, 20 bp, Artificial Sequence
  Description of Artificial Sequence: Synthetic oligonucleotide
  Target: LAMA2; (-) strand; PAM type: YTN; PAM sequence: CTT
tccctaaataactggtgccc

SEQ ID NO: 225369 - DNA, 20 bp, Artificial Sequence
  Description of Artificial Sequence: Synthetic oligonucleotide
  Target: LAMA2; (-) strand; PAM type: YTN; PAM sequence: TTC
tttccctaaataactggtgc

SEQ ID NO: 225370 - DNA, 20 bp, Artificial Sequence
  Description of Artificial Sequence: Synthetic oligonucleotide
  Target: LAMA2; (-) strand; PAM type: YTN; PAM sequence: TTA
gaatgaccaatattctttcc

SEQ ID NO: 225371 - DNA, 20 bp, Artificial Sequence
  Description of Artificial Sequence: Synthetic oligonucleotide
  Target: LAMA2; (-) strand; PAM type: YTN; PAM sequence: TTG
gaagtagttagaatgaccaa

SEQ ID NO: 225372 - DNA, 20 bp, Artificial Sequence
  Description of Artificial Sequence: Synthetic oligonucleotide
  Target: LAMA2; (-) strand; PAM type: YTN; PAM sequence: TTC
agttggaagtagttagaatg

SEQ ID NO: 225373 - DNA, 20 bp, Artificial Sequence
  Description of Artificial Sequence: Synthetic oligonucleotide
  Target: LAMA2; (-) strand; PAM type: YTN; PAM sequence: CTT
cagttggaagtagttagaat

SEQ ID NO: 225374 - DNA, 20 bp, Artificial Sequence
  Description of Artificial Sequence: Synthetic oligonucleotide
  Target: LAMA2; (-) strand; PAM type: YTN; PAM sequence: TTC
ttcagttggaagtagttaga

SEQ ID NO: 225375 - DNA, 20 bp, Artificial Sequence
  Description of Artificial Sequence: Synthetic oligonucleotide
  Target: LAMA2; (-) strand; PAM type: YTN; PAM sequence: TTT
cttcagttggaagtagttag

SEQ ID NO: 225376 - DNA, 20 bp, Artificial Sequence
  Description of Artificial Sequence: Synthetic oligonucleotide
  Target: LAMA2; (-) strand; PAM type: YTN; PAM sequence: CTT
tcttcagttggaagtagtta

SEQ ID NO: 225377 - DNA, 20 bp, Artificial Sequence
  Description of Artificial Sequence: Synthetic oligonucleotide
  Target: LAMA2; (-) strand; PAM type: YTN; PAM sequence: CTC
tttcttcagttggaagtagt

SEQ ID NO: 225378 - DNA, 20 bp, Artificial Sequence
  Description of Artificial Sequence: Synthetic oligonucleotide
  Target: LAMA2; (-) strand; PAM type: YTN; PAM sequence: TTA
gtctctttcttcagttggaa

SEQ ID NO: 225379 - DNA, 20 bp, Artificial Sequence
  Description of Artificial Sequence: Synthetic oligonucleotide
  Target: LAMA2; (-) strand; PAM type: YTN; PAM sequence: TTG
acagaaaaagttagtctctt

SEQ ID NO: 225380 - DNA, 20 bp, Artificial Sequence
  Description of Artificial Sequence: Synthetic oligonucleotide
  Target: LAMA2; (-) strand; PAM type: YTN; PAM sequence: TTG
ttgacagaaaaagttagtct

SEQ ID NO: 225381 - DNA, 20 bp, Artificial Sequence
  Description of Artificial Sequence: Synthetic oligonucleotide
  Target: LAMA2; (-) strand; PAM type: YTN; PAM sequence: TTT
gttgacagaaaaagttagtc

SEQ ID NO: 225382 - DNA, 20 bp, Artificial Sequence
  Description of Artificial Sequence: Synthetic oligonucleotide
  Target: LAMA2; (-) strand; PAM type: YTN; PAM sequence: CTA
tcacatttgttgacagaaaa

SEQ ID NO: 225383 - DNA, 20 bp, Artificial Sequence
  Description of Artificial Sequence: Synthetic oligonucleotide
  Target: LAMA2; (-) strand; PAM type: YTN; PAM sequence: CTC
agtccaccaaaacctatcac

SEQ ID NO: 225384 - DNA, 20 bp, Artificial Sequence
  Description of Artificial Sequence: Synthetic oligonucleotide
  Target: LAMA2; (-) strand; PAM type: YTN; PAM sequence: CTG
ccaagagactcagtccacca

SEQ ID NO: 225385 - DNA, 20 bp, Artificial Sequence
  Description of Artificial Sequence: Synthetic oligonucleotide
  Target: LAMA2; (-) strand; PAM type: YTN; PAM sequence: CTC
aaacctgccaagagactcag

SEQ ID NO: 225386 - DNA, 20 bp, Artificial Sequence
  Description of Artificial Sequence: Synthetic oligonucleotide
  Target: LAMA2; (-) strand; PAM type: YTN; PAM sequence: CTC
aactcaaacctgccaagaga

SEQ ID NO: 225387 - DNA, 20 bp, Artificial Sequence
  Description of Artificial Sequence: Synthetic oligonucleotide
  Target: LAMA2; (-) strand; PAM type: YTN; PAM sequence: TTG
ctcaactcaaacctgccaag

SEQ ID NO: 225388 - DNA, 20 bp, Artificial Sequence
  Description of Artificial Sequence: Synthetic oligonucleotide
  Target: LAMA2; (-) strand; PAM type: YTN; PAM sequence: TTT
gctcaactcaaacctgccaa

SEQ ID NO: 225389 - DNA, 20 bp, Artificial Sequence
  Description of Artificial Sequence: Synthetic oligonucleotide
  Target: LAMA2; (-) strand; PAM type: YTN; PAM sequence: TTA
tttgctcaactcaaacctgc

SEQ ID NO: 225390 - DNA, 20 bp, Artificial Sequence
  Description of Artificial Sequence: Synthetic oligonucleotide
  Target: LAMA2; (-) strand; PAM type: YTN; PAM sequence: TTT
atttgctcaactcaaacctg

SEQ ID NO: 225391 - DNA, 20 bp, Artificial Sequence
  Description of Artificial Sequence: Synthetic oligonucleotide
  Target: LAMA2; (-) strand; PAM type: YTN; PAM sequence: TTC
gaagtttatttgctcaactc

SEQ ID NO: 225392 - DNA, 20 bp, Artificial Sequence
  Description of Artificial Sequence: Synthetic oligonucleotide
  Target: LAMA2; (-) strand; PAM type: YTN; PAM sequence: TTA
gttcgaagtttatttgctca

SEQ ID NO: 225393 - DNA, 20 bp, Artificial Sequence
  Description of Artificial Sequence: Synthetic oligonucleotide
  Target: LAMA2; (-) strand; PAM type: YTN; PAM sequence: TTT
agttcgaagtttatttgctc

SEQ ID NO: 225394 - DNA, 20 bp, Artificial Sequence
  Description of Artificial Sequence: Synthetic oligonucleotide
  Target: LAMA2; (-) strand; PAM type: YTN; PAM sequence: TTT
tagttcgaagtttatttgct

SEQ ID NO: 225395 - DNA, 20 bp, Artificial Sequence
  Description of Artificial Sequence: Synthetic oligonucleotide
  Target: LAMA2; (-) strand; PAM type: YTN; PAM sequence: CTA
gttttagttcgaagtttatt

SEQ ID NO: 225396 - DNA, 20 bp, Artificial Sequence
  Description of Artificial Sequence: Synthetic oligonucleotide
  Target: LAMA2; (-) strand; PAM type: YTN; PAM sequence: TTG
accatcaataacctagtttt

SEQ ID NO: 225397 - DNA, 20 bp, Artificial Sequence
  Description of Artificial Sequence: Synthetic oligonucleotide
  Target: LAMA2; (-) strand; PAM type: YTN; PAM sequence: TTT
gaccatcaataacctagttt

SEQ ID NO: 225398 - DNA, 20 bp, Artificial Sequence
  Description of Artificial Sequence: Synthetic oligonucleotide
  Target: LAMA2; (-) strand; PAM type: YTN; PAM sequence: CTT
tgaccatcaataacctagtt

SEQ ID NO: 225399 - DNA, 20 bp, Artificial Sequence
  Description of Artificial Sequence: Synthetic oligonucleotide
  Target: LAMA2; (-) strand; PAM type: YTN; PAM sequence: CTC
agatacccctttgaccatca

SEQ ID NO: 225400 - DNA, 20 bp, Artificial Sequence
  Description of Artificial Sequence: Synthetic oligonucleotide
  Target: LAMA2; (-) strand; PAM type: YTN; PAM sequence: CTC
tcagatacccctttgaccat

SEQ ID NO: 225401 - DNA, 20 bp, Artificial Sequence
  Description of Artificial Sequence: Synthetic oligonucleotide
  Target: LAMA2; (-) strand; PAM type: YTN; PAM sequence: TTC
tctcagatacccctttgacc

SEQ ID NO: 225402 - DNA, 20 bp, Artificial Sequence
  Description of Artificial Sequence: Synthetic oligonucleotide
  Target: LAMA2; (-) strand; PAM type: YTN; PAM sequence: CTT
ctctcagatacccctttgac

SEQ ID NO: 225403 - DNA, 20 bp, Artificial Sequence
  Description of Artificial Sequence: Synthetic oligonucleotide
  Target: LAMA2; (-) strand; PAM type: YTN; PAM sequence: TTC
ttctctcagatacccctttg

SEQ ID NO: 225404 - DNA, 20 bp, Artificial Sequence
  Description of Artificial Sequence: Synthetic oligonucleotide
  Target: LAMA2; (-) strand; PAM type: YTN; PAM sequence: CTG
tgattcttctctcagatacc

SEQ ID NO: 225405 - DNA, 20 bp, Artificial Sequence
  Description of Artificial Sequence: Synthetic oligonucleotide
  Target: LAMA2; (-) strand; PAM type: YTN; PAM sequence: TTA
ctgtgattcttctctcagat

SEQ ID NO: 225406 - DNA, 20 bp, Artificial Sequence
  Description of Artificial Sequence: Synthetic oligonucleotide
  Target: LAMA2; (-) strand; PAM type: YTN; PAM sequence: TTA
ttactgtgattcttctctca

SEQ ID NO: 225407 - DNA, 20 bp, Artificial Sequence
  Description of Artificial Sequence: Synthetic oligonucleotide
  Target: LAMA2; (-) strand; PAM type: YTN; PAM sequence: CTC
aatattattactgtgattct

SEQ ID NO: 225408 - DNA, 20 bp, Artificial Sequence
  Description of Artificial Sequence: Synthetic oligonucleotide
  Target: LAMA2; (-) strand; PAM type: YTN; PAM sequence: CTC
ctcaatattattactgtgat

SEQ ID NO: 225409 - DNA, 20 bp, Artificial Sequence
  Description of Artificial Sequence: Synthetic oligonucleotide
  Target: LAMA2; (-) strand; PAM type: YTN; PAM sequence: TTC
gtcctcctcaatattattac

SEQ ID NO: 225410 - DNA, 20 bp, Artificial Sequence
  Description of Artificial Sequence: Synthetic oligonucleotide
  Target: LAMA2; (-) strand; PAM type: YTN; PAM sequence: CTA
gaaagttcgtcctcctcaat

SEQ ID NO: 225411 - DNA, 20 bp, Artificial Sequence
  Description of Artificial Sequence: Synthetic oligonucleotide
  Target: LAMA2; (-) strand; PAM type: YTN; PAM sequence: CTA
aagcagtgccatctagaaag

SEQ ID NO: 225412 - DNA, 20 bp, Artificial Sequence
  Description of Artificial Sequence: Synthetic oligonucleotide
  Target: LAMA2; (-) strand; PAM type: YTN; PAM sequence: CTC
taaagcagtgccatctagaa

SEQ ID NO: 225413 - DNA, 20 bp, Artificial Sequence
  Description of Artificial Sequence: Synthetic oligonucleotide
  Target: LAMA2; (-) strand; PAM type: YTN; PAM sequence: CTA
ggatctctaaagcagtgcca

SEQ ID NO: 225414 - DNA, 20 bp, Artificial Sequence
  Description of Artificial Sequence: Synthetic oligonucleotide
  Target: LAMA2; (-) strand; PAM type: YTN; PAM sequence: TTC
taggatctctaaagcagtgc

SEQ ID NO: 225415 - DNA, 20 bp, Artificial Sequence
  Description of Artificial Sequence: Synthetic oligonucleotide
  Target: LAMA2; (-) strand; PAM type: YTN; PAM sequence: TTA
attctaggatctctaaagca

SEQ ID NO: 225416 - DNA, 20 bp, Artificial Sequence
  Description of Artificial Sequence: Synthetic oligonucleotide
  Target: LAMA2; (-) strand; PAM type: YTN; PAM sequence: TTT
aattctaggatctctaaagc

SEQ ID NO: 225417 - DNA, 20 bp, Artificial Sequence
  Description of Artificial Sequence: Synthetic oligonucleotide
  Target: LAMA2; (-) strand; PAM type: YTN; PAM sequence: TTT
taattctaggatctctaaag

SEQ ID NO: 225418 - DNA, 20 bp, Artificial Sequence
  Description of Artificial Sequence: Synthetic oligonucleotide
  Target: LAMA2; (-) strand; PAM type: YTN; PAM sequence: TTA
taattttaattctaggatct

SEQ ID NO: 225419 - DNA, 20 bp, Artificial Sequence
  Description of Artificial Sequence: Synthetic oligonucleotide
  Target: LAMA2; (-) strand; PAM type: YTN; PAM sequence: CTC
atacaacagaaaaatattat

SEQ ID NO: 225420 - DNA, 20 bp, Artificial Sequence
  Description of Artificial Sequence: Synthetic oligonucleotide
  Target: LAMA2; (-) strand; PAM type: YTN; PAM sequence: TTA
aaagcaataatgtgagtcaa

SEQ ID NO: 225421 - DNA, 20 bp, Artificial Sequence
  Description of Artificial Sequence: Synthetic oligonucleotide
  Target: LAMA2; (-) strand; PAM type: YTN; PAM sequence: CTA
gtgacaatccaaataaatta

SEQ ID NO: 225422 - DNA, 20 bp, Artificial Sequence
  Description of Artificial Sequence: Synthetic oligonucleotide
  Target: LAMA2; (-) strand; PAM type: YTN; PAM sequence: CTA
gcagtctagtgacaatccaa

SEQ ID NO: 225423 - DNA, 20 bp, Artificial Sequence
  Description of Artificial Sequence: Synthetic oligonucleotide
  Target: LAMA2; (-) strand; PAM type: YTN; PAM sequence: TTA
gctagcagtctagtgacaat

SEQ ID NO: 225424 - DNA, 20 bp, Artificial Sequence
  Description of Artificial Sequence: Synthetic oligonucleotide
  Target: LAMA2; (-) strand; PAM type: YTN; PAM sequence: TTT
agctagcagtctagtgacaa

SEQ ID NO: 225425 - DNA, 20 bp, Artificial Sequence
  Description of Artificial Sequence: Synthetic oligonucleotide
  Target: LAMA2; (-) strand; PAM type: YTN; PAM sequence: CTA
tggtaaccacgaatatttag

SEQ ID NO: 225426 - DNA, 20 bp, Artificial Sequence
  Description of Artificial Sequence: Synthetic oligonucleotide
  Target: LAMA2; (-) strand; PAM type: YTN; PAM sequence: CTG
tatgaggaaatggaagcaaa

SEQ ID NO: 225427 - DNA, 20 bp, Artificial Sequence
  Description of Artificial Sequence: Synthetic oligonucleotide
  Target: LAMA2; (-) strand; PAM type: YTN; PAM sequence: CTC
tgtatgaggaaatggaagca

SEQ ID NO: 225428 - DNA, 20 bp, Artificial Sequence
  Description of Artificial Sequence: Synthetic oligonucleotide
  Target: LAMA2; (-) strand; PAM type: YTN; PAM sequence: TTA
aaggcctctgtatgaggaaa

SEQ ID NO: 225429 - DNA, 20 bp, Artificial Sequence
  Description of Artificial Sequence: Synthetic oligonucleotide
  Target: LAMA2; (-) strand; PAM type: YTN; PAM sequence: CTT
aaaggcctctgtatgaggaa

SEQ ID NO: 225430 - DNA, 20 bp, Artificial Sequence
  Description of Artificial Sequence: Synthetic oligonucleotide
  Target: LAMA2; (-) strand; PAM type: YTN; PAM sequence: CTG
cagtccaggagagtgagaag

SEQ ID NO: 225431 - DNA, 20 bp, Artificial Sequence
  Description of Artificial Sequence: Synthetic oligonucleotide
  Target: LAMA2; (-) strand; PAM type: YTN; PAM sequence: TTG
agctgcagtccaggagagtg

SEQ ID NO: 225432 - DNA, 20 bp, Artificial Sequence
  Description of Artificial Sequence: Synthetic oligonucleotide
  Target: LAMA2; (-) strand; PAM type: YTN; PAM sequence: TTC
cattgagctgcagtccagga

SEQ ID NO: 225433 - DNA, 20 bp, Artificial Sequence
  Description of Artificial Sequence: Synthetic oligonucleotide
  Target: LAMA2; (-) strand; PAM type: YTN; PAM sequence: CTA
agttccattgagctgcagtc

SEQ ID NO: 225434 - DNA, 20 bp, Artificial Sequence
  Description of Artificial Sequence: Synthetic oligonucleotide
  Target: LAMA2; (-) strand; PAM type: YTN; PAM sequence: TTC
aaagcagaatcaaagtgaat

SEQ ID NO: 225435 - DNA, 20 bp, Artificial Sequence
  Description of Artificial Sequence: Synthetic oligonucleotide
  Target: LAMA2; (-) strand; PAM type: YTN; PAM sequence: TTT
caaagcagaatcaaagtgaa

SEQ ID NO: 225436 - DNA, 20 bp, Artificial Sequence
  Description of Artificial Sequence: Synthetic oligonucleotide
  Target: LAMA2; (-) strand; PAM type: YTN; PAM sequence: CTG
ccatgtttcaaagcagaatc

SEQ ID NO: 225437 - DNA, 20 bp, Artificial Sequence
  Description of Artificial Sequence: Synthetic oligonucleotide
  Target: LAMA2; (-) strand; PAM type: YTN; PAM sequence: TTA
tacaagcctgccatgtttca

SEQ ID NO: 225438 - DNA, 20 bp, Artificial Sequence
  Description of Artificial Sequence: Synthetic oligonucleotide
  Target: LAMA2; (-) strand; PAM type: YTN; PAM sequence: TTT
atacaagcctgccatgtttc

SEQ ID NO: 225439 - DNA, 20 bp, Artificial Sequence
  Description of Artificial Sequence: Synthetic oligonucleotide
  Target: LAMA2; (-) strand; PAM type: YTN; PAM sequence: TTT
tatacaagcctgccatgttt

SEQ ID NO: 225440 - DNA, 20 bp, Artificial Sequence
  Description of Artificial Sequence: Synthetic oligonucleotide
  Target: LAMA2; (-) strand; PAM type: YTN; PAM sequence: TTT
ttatacaagcctgccatgtt

SEQ ID NO: 225441 - DNA, 20 bp, Artificial Sequence
  Description of Artificial Sequence: Synthetic oligonucleotide
  Target: LAMA2; (-) strand; PAM type: YTN; PAM sequence: CTC
cagggatttttatacaagcc

SEQ ID NO: 225442 - DNA, 20 bp, Artificial Sequence
  Description of Artificial Sequence: Synthetic oligonucleotide
  Target: LAMA2; (-) strand; PAM type: YTN; PAM sequence: TTC
tccagggatttttatacaag

SEQ ID NO: 225443 - DNA, 20 bp, Artificial Sequence
  Description of Artificial Sequence: Synthetic oligonucleotide
  Target: LAMA2; (-) strand; PAM type: YTN; PAM sequence: TTT
ctccagggatttttatacaa

SEQ ID NO: 225444 - DNA, 20 bp, Artificial Sequence
  Description of Artificial Sequence: Synthetic oligonucleotide
  Target: LAMA2; (-) strand; PAM type: YTN; PAM sequence: TTA
atgatggtttctccagggat

SEQ ID NO: 225445 - DNA, 20 bp, Artificial Sequence
  Description of Artificial Sequence: Synthetic oligonucleotide
  Target: LAMA2; (-) strand; PAM type: YTN; PAM sequence: TTT
aatgatggtttctccaggga

SEQ ID NO: 225446 - DNA, 20 bp, Artificial Sequence
  Description of Artificial Sequence: Synthetic oligonucleotide
  Target: LAMA2; (-) strand; PAM type: YTN; PAM sequence: TTC
aagatttaatgatggtttct

SEQ ID NO: 225447 - DNA, 20 bp, Artificial Sequence
  Description of Artificial Sequence: Synthetic oligonucleotide
  Target: LAMA2; (-) strand; PAM type: YTN; PAM sequence: CTT
caagatttaatgatggtttc

SEQ ID NO: 225448 - DNA, 20 bp, Artificial Sequence
  Description of Artificial Sequence: Synthetic oligonucleotide
  Target: LAMA2; (-) strand; PAM type: YTN; PAM sequence: TTA
caaaaaaaaaaaaaagtgtc

SEQ ID NO: 225449 - DNA, 20 bp, Artificial Sequence
  Description of Artificial Sequence: Synthetic oligonucleotide
  Target: LAMA2; (-) strand; PAM type: YTN; PAM sequence: TTT
acaaaaaaaaaaaaaagtgt

SEQ ID NO: 225450 - DNA, 20 bp, Artificial Sequence
  Description of Artificial Sequence: Synthetic oligonucleotide
  Target: LAMA2; (-) strand; PAM type: YTN; PAM sequence: CTA
catacagtttacaaaaaaaa

SEQ ID NO: 225451 - DNA, 20 bp, Artificial Sequence
  Description of Artificial Sequence: Synthetic oligonucleotide
  Target: LAMA2; (-) strand; PAM type: YTN; PAM sequence: CTC
tacatacagtttacaaaaaa

SEQ ID NO: 225452 - DNA, 20 bp, Artificial Sequence
  Description of Artificial Sequence: Synthetic oligonucleotide
  Target: LAMA2; (-) strand; PAM type: YTN; PAM sequence: CTG
tcacataggaaatcaaaata

SEQ ID NO: 225453 - DNA, 20 bp, Artificial Sequence
  Description of Artificial Sequence: Synthetic oligonucleotide
  Target: LAMA2; (-) strand; PAM type: YTN; PAM sequence: TTC
tgtcacataggaaatcaaaa

SEQ ID NO: 225454 - DNA, 20 bp, Artificial Sequence
  Description of Artificial Sequence: Synthetic oligonucleotide
  Target: LAMA2; (-) strand; PAM type: YTN; PAM sequence: CTG
tatatataaaattctgtcac

SEQ ID NO: 225455 - DNA, 20 bp, Artificial Sequence
  Description of Artificial Sequence: Synthetic oligonucleotide
  Target: LAMA2; (-) strand; PAM type: YTN; PAM sequence: CTG
tctgtatatataaaattctg

SEQ ID NO: 225456 - DNA, 20 bp, Artificial Sequence
  Description of Artificial Sequence: Synthetic oligonucleotide
  Target: LAMA2; (-) strand; PAM type: YTN; PAM sequence: TTC
tgtctgtatatataaaattc

SEQ ID NO: 225457 - DNA, 20 bp, Artificial Sequence
  Description of Artificial Sequence: Synthetic oligonucleotide
  Target: LAMA2; (-) strand; PAM type: YTN; PAM sequence: CTA
aggaccaccataatgtcaga

SEQ ID NO: 225458 - DNA, 20 bp, Artificial Sequence
  Description of Artificial Sequence: Synthetic oligonucleotide
  Target: LAMA2; (-) strand; PAM type: YTN; PAM sequence: TTC
taaggaccaccataatgtca

SEQ ID NO: 225459 - DNA, 20 bp, Artificial Sequence
  Description of Artificial Sequence: Synthetic oligonucleotide
  Target: LAMA2; (-) strand; PAM type: YTN; PAM sequence: TTG
caattctaaggaccaccata

SEQ ID NO: 225460 - DNA, 20 bp, Artificial Sequence
  Description of Artificial Sequence: Synthetic oligonucleotide
  Target: LAMA2; (-) strand; PAM type: YTN; PAM sequence: TTT
gcaattctaaggaccaccat

SEQ ID NO: 225461 - DNA, 20 bp, Artificial Sequence
  Description of Artificial Sequence: Synthetic oligonucleotide
  Target: LAMA2; (-) strand; PAM type: YTN; PAM sequence: CTG
tatttgcaattctaaggacc

SEQ ID NO: 225462 - DNA, 20 bp, Artificial Sequence
  Description of Artificial Sequence: Synthetic oligonucleotide
  Target: LAMA2; (-) strand; PAM type: YTN; PAM sequence: CTC
ctgtatttgcaattctaagg

SEQ ID NO: 225463 - DNA, 20 bp, Artificial Sequence
  Description of Artificial Sequence: Synthetic oligonucleotide
  Target: LAMA2; (-) strand; PAM type: YTN; PAM sequence: TTC
tcctgtatttgcaattctaa

SEQ ID NO: 225464 - DNA, 20 bp, Artificial Sequence
  Description of Artificial Sequence: Synthetic oligonucleotide
  Target: LAMA2; (-) strand; PAM type: YTN; PAM sequence: CTT
ctcctgtatttgcaattcta

SEQ ID NO: 225465 - DNA, 20 bp, Artificial Sequence
  Description of Artificial Sequence: Synthetic oligonucleotide
  Target: LAMA2; (-) strand; PAM type: YTN; PAM sequence: TTC
cttctcctgtatttgcaatt

SEQ ID NO: 225466 - DNA, 20 bp, Artificial Sequence
  Description of Artificial Sequence: Synthetic oligonucleotide
  Target: LAMA2; (-) strand; PAM type: YTN; PAM sequence: CTT
ccttctcctgtatttgcaat

SEQ ID NO: 225467 - DNA, 20 bp, Artificial Sequence
  Description of Artificial Sequence: Synthetic oligonucleotide
  Target: LAMA2; (-) strand; PAM type: YTN; PAM sequence: TTG
tgtcttccttctcctgtatt

SEQ ID NO: 225468 - DNA, 20 bp, Artificial Sequence
  Description of Artificial Sequence: Synthetic oligonucleotide
  Target: LAMA2; (-) strand; PAM type: YTN; PAM sequence: TTT
gtgtcttccttctcctgtat

SEQ ID NO: 225469 - DNA, 20 bp, Artificial Sequence
  Description of Artificial Sequence: Synthetic oligonucleotide
  Target: LAMA2; (-) strand; PAM type: YTN; PAM sequence: TTG
ggtttgtgtcttccttctcc

SEQ ID NO: 225470 - DNA, 20 bp, Artificial Sequence
  Description of Artificial Sequence: Synthetic oligonucleotide
  Target: LAMA2; (-) strand; PAM type: YTN; PAM sequence: CTT
gggtttgtgtcttccttctc

SEQ ID NO: 225471 - DNA, 20 bp, Artificial Sequence
  Description of Artificial Sequence: Synthetic oligonucleotide
  Target: LAMA2; (-) strand; PAM type: YTN; PAM sequence: TTA
atacagtcttgggtttgtgt

SEQ ID NO: 225472 - DNA, 20 bp, Artificial Sequence
  Description of Artificial Sequence: Synthetic oligonucleotide
  Target: LAMA2; (-) strand; PAM type: YTN; PAM sequence: TTT
aatacagtcttgggtttgtg

SEQ ID NO: 225473 - DNA, 20 bp, Artificial Sequence
  Description of Artificial Sequence: Synthetic oligonucleotide
  Target: LAMA2; (-) strand; PAM type: YTN; PAM sequence: TTT
taatacagtcttgggtttgt

SEQ ID NO: 225474 - DNA, 20 bp, Artificial Sequence
  Description of Artificial Sequence: Synthetic oligonucleotide
  Target: LAMA2; (-) strand; PAM type: YTN; PAM sequence: TTT
ttaatacagtcttgggtttg

SEQ ID NO: 225475 - DNA, 20 bp, Artificial Sequence
  Description of Artificial Sequence: Synthetic oligonucleotide
  Target: LAMA2; (-) strand; PAM type: YTN; PAM sequence: TTT
tttaatacagtcttgggttt

SEQ ID NO: 225476 - DNA, 20 bp, Artificial Sequence
  Description of Artificial Sequence: Synthetic oligonucleotide
  Target: LAMA2; (-) strand; PAM type: YTN; PAM sequence: CTG
aaacattttttaatacagtc

SEQ ID NO: 225477 - DNA, 20 bp, Artificial Sequence
  Description of Artificial Sequence: Synthetic oligonucleotide
  Target: LAMA2; (-) strand; PAM type: YTN; PAM sequence: TTC
tgaaacattttttaatacag

SEQ ID NO: 225478 - DNA, 20 bp, Artificial Sequence
  Description of Artificial Sequence: Synthetic oligonucleotide
  Target: LAMA2; (-) strand; PAM type: YTN; PAM sequence: TTT
ctgaaacattttttaataca

SEQ ID NO: 225479 - DNA, 20 bp, Artificial Sequence
  Description of Artificial Sequence: Synthetic oligonucleotide
  Target: LAMA2; (-) strand; PAM type: YTN; PAM sequence: TTA
tatcaaaggagaatttctga

SEQ ID NO: 225480 - DNA, 20 bp, Artificial Sequence
  Description of Artificial Sequence: Synthetic oligonucleotide
  Target: LAMA2; (-) strand; PAM type: YTN; PAM sequence: TTA
acaatgttatatcaaaggag

SEQ ID NO: 225481 - DNA, 20 bp, Artificial Sequence
  Description of Artificial Sequence: Synthetic oligonucleotide
  Target: LAMA2; (-) strand; PAM type: YTN; PAM sequence: CTT
aacaatgttatatcaaagga

SEQ ID NO: 225482 - DNA, 20 bp, Artificial Sequence
  Description of Artificial Sequence: Synthetic oligonucleotide
  Target: LAMA2; (-) strand; PAM type: YTN; PAM sequence: TTA
taaccttaacaatgttatat

SEQ ID NO: 225483 - DNA, 20 bp, Artificial Sequence
  Description of Artificial Sequence: Synthetic oligonucleotide
  Target: LAMA2; (-) strand; PAM type: YTN; PAM sequence: CTC
acatgcaaaatcatgttata

SEQ ID NO: 225484 - DNA, 20 bp, Artificial Sequence
  Description of Artificial Sequence: Synthetic oligonucleotide
  Target: LAMA2; (-) strand; PAM type: YTN; PAM sequence: TTC
catacaaactcacatgcaaa

SEQ ID NO: 225485 - DNA, 20 bp, Artificial Sequence
  Description of Artificial Sequence: Synthetic oligonucleotide
  Target: LAMA2; (-) strand; PAM type: YTN; PAM sequence: TTT
ccatacaaactcacatgcaa

SEQ ID NO: 225486 - DNA, 20 bp, Artificial Sequence
  Description of Artificial Sequence: Synthetic oligonucleotide
  Target: LAMA2; (-) strand; PAM type: YTN; PAM sequence: CTC
atttccatacaaactcacat

SEQ ID NO: 225487 - DNA, 20 bp, Artificial Sequence
  Description of Artificial Sequence: Synthetic oligonucleotide
  Target: LAMA2; (-) strand; PAM type: YTN; PAM sequence: TTC
cctcatttccatacaaactc

SEQ ID NO: 225488 - DNA, 20 bp, Artificial Sequence
  Description of Artificial Sequence: Synthetic oligonucleotide
  Target: LAMA2; (-) strand; PAM type: YTN; PAM sequence: TTC
cattccctcatttccataca

SEQ ID NO: 225489 - DNA, 20 bp, Artificial Sequence
  Description of Artificial Sequence: Synthetic oligonucleotide
  Target: LAMA2; (-) strand; PAM type: YTN; PAM sequence: TTT
ccattccctcatttccatac

SEQ ID NO: 225490 - DNA, 20 bp, Artificial Sequence
  Description of Artificial Sequence: Synthetic oligonucleotide
  Target: LAMA2; (-) strand; PAM type: YTN; PAM sequence: TTC
atttccattccctcatttcc

SEQ ID NO: 225491 - DNA, 20 bp, Artificial Sequence
  Description of Artificial Sequence: Synthetic oligonucleotide
  Target: LAMA2; (-) strand; PAM type: YTN; PAM sequence: CTT
catttccattccctcatttc

SEQ ID NO: 225492 - DNA, 20 bp, Artificial Sequence
  Description of Artificial Sequence: Synthetic oligonucleotide
  Target: LAMA2; (-) strand; PAM type: YTN; PAM sequence: CTA
ggtcttcatttccattccct

SEQ ID NO: 225493 - DNA, 20 bp, Artificial Sequence
  Description of Artificial Sequence: Synthetic oligonucleotide
  Target: LAMA2; (-) strand; PAM type: YTN; PAM sequence: TTG
agaaaggctaggtcttcatt

SEQ ID NO: 225494 - DNA, 20 bp, Artificial Sequence
  Description of Artificial Sequence: Synthetic oligonucleotide
  Target: LAMA2; (-) strand; PAM type: YTN; PAM sequence: TTG
caagggtaattgagaaaggc

SEQ ID NO: 225495 - DNA, 20 bp, Artificial Sequence
  Description of Artificial Sequence: Synthetic oligonucleotide
  Target: LAMA2; (-) strand; PAM type: YTN; PAM sequence: CTA
aaggaacaattgcaagggta

SEQ ID NO: 225496 - DNA, 20 bp, Artificial Sequence
  Description of Artificial Sequence: Synthetic oligonucleotide
  Target: LAMA2; (-) strand; PAM type: YTN; PAM sequence: CTC
cctaaaggaacaattgcaag

SEQ ID NO: 225497 - DNA, 20 bp, Artificial Sequence
  Description of Artificial Sequence: Synthetic oligonucleotide
  Target: LAMA2; (-) strand; PAM type: YTN; PAM sequence: TTC
tccctaaaggaacaattgca

SEQ ID NO: 225498 - DNA, 20 bp, Artificial Sequence
  Description of Artificial Sequence: Synthetic oligonucleotide
  Target: LAMA2; (-) strand; PAM type: YTN; PAM sequence: TTT
ctccctaaaggaacaattgc

SEQ ID NO: 225499 - DNA, 20 bp, Artificial Sequence
  Description of Artificial Sequence: Synthetic oligonucleotide
  Target: LAMA2; (-) strand; PAM type: YTN; PAM sequence: CTG
tttctccctaaaggaacaat

SEQ ID NO: 225500 - DNA, 20 bp, Artificial Sequence
  Description of Artificial Sequence: Synthetic oligonucleotide
  Target: LAMA2; (-) strand; PAM type: YTN; PAM sequence: CTC
cgctgtttctccctaaagga

SEQ ID NO: 225501 - DNA, 20 bp, Artificial Sequence
  Description of Artificial Sequence: Synthetic oligonucleotide
  Target: LAMA2; (-) strand; PAM type: YTN; PAM sequence: TTA
gtaatactccgctgtttctc

SEQ ID NO: 225502 - DNA, 20 bp, Artificial Sequence
  Description of Artificial Sequence: Synthetic oligonucleotide
  Target: LAMA2; (-) strand; PAM type: YTN; PAM sequence: TTG
aaaaccaatacaaattagta

SEQ ID NO: 225503 - DNA, 20 bp, Artificial Sequence
  Description of Artificial Sequence: Synthetic oligonucleotide
  Target: LAMA2; (-) strand; PAM type: YTN; PAM sequence: CTA
ttgaaaaccaatacaaatta

SEQ ID NO: 225504 - DNA, 20 bp, Artificial Sequence
  Description of Artificial Sequence: Synthetic oligonucleotide
  Target: LAMA2; (-) strand; PAM type: YTN; PAM sequence: TTC
tattgaaaaccaatacaaat

SEQ ID NO: 225505 - DNA, 20 bp, Artificial Sequence
  Description of Artificial Sequence: Synthetic oligonucleotide
  Target: LAMA2; (-) strand; PAM type: YTN; PAM sequence: TTT
ctattgaaaaccaatacaaa

SEQ ID NO: 225506 - DNA, 20 bp, Artificial Sequence
  Description of Artificial Sequence: Synthetic oligonucleotide
  Target: LAMA2; (-) strand; PAM type: YTN; PAM sequence: CTA
aatttctattgaaaaccaat

SEQ ID NO: 225507 - DNA, 20 bp, Artificial Sequence
  Description of Artificial Sequence: Synthetic oligonucleotide
  Target: LAMA2; (-) strand; PAM type: YTN; PAM sequence: TTA
cctaaatttctattgaaaac

SEQ ID NO: 225508 - DNA, 20 bp, Artificial Sequence
  Description of Artificial Sequence: Synthetic oligonucleotide
  Target: LAMA2; (-) strand; PAM type: YTN; PAM sequence: TTT
acctaaatttctattgaaaa

SEQ ID NO: 225509 - DNA, 20 bp, Artificial Sequence
  Description of Artificial Sequence: Synthetic oligonucleotide
  Target: LAMA2; (-) strand; PAM type: YTN; PAM sequence: TTA
tttacctaaatttctattga

SEQ ID NO: 225510 - DNA, 20 bp, Artificial Sequence
  Description of Artificial Sequence: Synthetic oligonucleotide
  Target: LAMA2; (-) strand; PAM type: YTN; PAM sequence: CTG
aaaccccaaataattattta

SEQ ID NO: 225511 - DNA, 20 bp, Artificial Sequence
  Description of Artificial Sequence: Synthetic oligonucleotide
  Target: LAMA2; (-) strand; PAM type: YTN; PAM sequence: TTA
gagaaaggaagcctgaaacc

SEQ ID NO: 225512 - DNA, 20 bp, Artificial Sequence
  Description of Artificial Sequence: Synthetic oligonucleotide
  Target: LAMA2; (-) strand; PAM type: YTN; PAM sequence: TTT
agagaaaggaagcctgaaac

SEQ ID NO: 225513 - DNA, 20 bp, Artificial Sequence
  Description of Artificial Sequence: Synthetic oligonucleotide
  Target: LAMA2; (-) strand; PAM type: YTN; PAM sequence: TTT
tagagaaaggaagcctgaaa

SEQ ID NO: 225514 - DNA, 20 bp, Artificial Sequence
  Description of Artificial Sequence: Synthetic oligonucleotide
  Target: LAMA2; (-) strand; PAM type: YTN; PAM sequence: TTT
ttagagaaaggaagcctgaa

SEQ ID NO: 225515 - DNA, 20 bp, Artificial Sequence
  Description of Artificial Sequence: Synthetic oligonucleotide
  Target: LAMA2; (-) strand; PAM type: YTN; PAM sequence: TTA
tttttagagaaaggaagcct

SEQ ID NO: 225516 - DNA, 20 bp, Artificial Sequence
  Description of Artificial Sequence: Synthetic oligonucleotide
  Target: LAMA2; (-) strand; PAM type: YTN; PAM sequence: CTA
aaaagaattatttttagaga

SEQ ID NO: 225517 - DNA, 20 bp, Artificial Sequence
  Description of Artificial Sequence: Synthetic oligonucleotide
  Target: LAMA2; (-) strand; PAM type: YTN; PAM sequence: TTG
gtctaaaaagaattattttt

SEQ ID NO: 225518 - DNA, 20 bp, Artificial Sequence
  Description of Artificial Sequence: Synthetic oligonucleotide
  Target: LAMA2; (-) strand; PAM type: YTN; PAM sequence: TTG
gccccacattggtctaaaaa

SEQ ID NO: 225519 - DNA, 20 bp, Artificial Sequence
  Description of Artificial Sequence: Synthetic oligonucleotide
  Target: LAMA2; (-) strand; PAM type: YTN; PAM sequence: CTG
attggccccacattggtcta

SEQ ID NO: 225520 - DNA, 20 bp, Artificial Sequence
  Description of Artificial Sequence: Synthetic oligonucleotide
  Target: LAMA2; (-) strand; PAM type: YTN; PAM sequence: CTC
caggtactgattggccccac

SEQ ID NO: 225521 - DNA, 20 bp, Artificial Sequence
  Description of Artificial Sequence: Synthetic oligonucleotide
  Target: LAMA2; (-) strand; PAM type: YTN; PAM sequence: TTG
ctccaggtactgattggccc

SEQ ID NO: 225522 - DNA, 20 bp, Artificial Sequence
  Description of Artificial Sequence: Synthetic oligonucleotide
  Target: LAMA2; (-) strand; PAM type: YTN; PAM sequence: TTG
ttgctccaggtactgattgg

SEQ ID NO: 225523 - DNA, 20 bp, Artificial Sequence
  Description of Artificial Sequence: Synthetic oligonucleotide
  Target: LAMA2; (-) strand; PAM type: YTN; PAM sequence: TTA
atattgttgctccaggtact

SEQ ID NO: 225524 - DNA, 20 bp, Artificial Sequence
  Description of Artificial Sequence: Synthetic oligonucleotide
  Target: LAMA2; (-) strand; PAM type: YTN; PAM sequence: TTT
aatattgttgctccaggtac

SEQ ID NO: 225525 - DNA, 20 bp, Artificial Sequence
  Description of Artificial Sequence: Synthetic oligonucleotide
  Target: LAMA2; (-) strand; PAM type: YTN; PAM sequence: CTT
taatattgttgctccaggta

SEQ ID NO: 225526 - DNA, 20 bp, Artificial Sequence
  Description of Artificial Sequence: Synthetic oligonucleotide
  Target: LAMA2; (-) strand; PAM type: YTN; PAM sequence: CTG
taaggaggtactttaatatt

SEQ ID NO: 225527 - DNA, 20 bp, Artificial Sequence
  Description of Artificial Sequence: Synthetic oligonucleotide
  Target: LAMA2; (-) strand; PAM type: YTN; PAM sequence: CTC
actgtaaggaggtactttaa

SEQ ID NO: 225528 - DNA, 20 bp, Artificial Sequence
  Description of Artificial Sequence: Synthetic oligonucleotide
  Target: LAMA2; (-) strand; PAM type: YTN; PAM sequence: CTC
catataaacctcactgtaag

SEQ ID NO: 225529 - DNA, 20 bp, Artificial Sequence
  Description of Artificial Sequence: Synthetic oligonucleotide
  Target: LAMA2; (-) strand; PAM type: YTN; PAM sequence: TTA
gaggactccatataaacctc

SEQ ID NO: 225530 - DNA, 20 bp, Artificial Sequence
  Description of Artificial Sequence: Synthetic oligonucleotide
  Target: LAMA2; (-) strand; PAM type: YTN; PAM sequence: TTT
agaggactccatataaacct

SEQ ID NO: 225531 - DNA, 20 bp, Artificial Sequence
  Description of Artificial Sequence: Synthetic oligonucleotide
  Target: LAMA2; (-) strand; PAM type: YTN; PAM sequence: TTT
tagaggactccatataaacc

SEQ ID NO: 225532 - DNA, 20 bp, Artificial Sequence
  Description of Artificial Sequence: Synthetic oligonucleotide
  Target: LAMA2; (-) strand; PAM type: YTN; PAM sequence: TTT
ttagaggactccatataaac

SEQ ID NO: 225533 - DNA, 20 bp, Artificial Sequence
  Description of Artificial Sequence: Synthetic oligonucleotide
  Target: LAMA2; (-) strand; PAM type: YTN; PAM sequence: TTT
tttagaggactccatataaa

SEQ ID NO: 225534 - DNA, 20 bp, Artificial Sequence
  Description of Artificial Sequence: Synthetic oligonucleotide
  Target: LAMA2; (-) strand; PAM type: YTN; PAM sequence: TTC
attttttagaggactccata

SEQ ID NO: 225535 - DNA, 20 bp, Artificial Sequence
  Description of Artificial Sequence: Synthetic oligonucleotide
  Target: LAMA2; (-) strand; PAM type: YTN; PAM sequence: TTT
cattttttagaggactccat

SEQ ID NO: 225536 - DNA, 20 bp, Artificial Sequence
  Description of Artificial Sequence: Synthetic oligonucleotide
  Target: LAMA2; (-) strand; PAM type: YTN; PAM sequence: TTG
aaacatttcattttttagag

SEQ ID NO: 225537 - DNA, 20 bp, Artificial Sequence
  Description of Artificial Sequence: Synthetic oligonucleotide
  Target: LAMA2; (-) strand; PAM type: YTN; PAM sequence: TTC
caaccagagttgaaacattt

SEQ ID NO: 225538 - DNA, 20 bp, Artificial Sequence
  Description of Artificial Sequence: Synthetic oligonucleotide
  Target: LAMA2; (-) strand; PAM type: YTN; PAM sequence: CTG
tgtattccaaccagagttga

SEQ ID NO: 225539 - DNA, 20 bp, Artificial Sequence
  Description of Artificial Sequence: Synthetic oligonucleotide
  Target: LAMA2; (-) strand; PAM type: YTN; PAM sequence: CTC
tgtgtattccaaccagagtt

SEQ ID NO: 225540 - DNA, 20 bp, Artificial Sequence
  Description of Artificial Sequence: Synthetic oligonucleotide
  Target: LAMA2; (-) strand; PAM type: YTN; PAM sequence: CTG
ctctgtgtattccaaccaga

SEQ ID NO: 225541 - DNA, 20 bp, Artificial Sequence
  Description of Artificial Sequence: Synthetic oligonucleotide
  Target: LAMA2; (-) strand; PAM type: YTN; PAM sequence: TTC
agctgctctgtgtattccaa

SEQ ID NO: 225542 - DNA, 20 bp, Artificial Sequence
  Description of Artificial Sequence: Synthetic oligonucleotide
  Target: LAMA2; (-) strand; PAM type: YTN; PAM sequence: TTT
cagctgctctgtgtattcca

SEQ ID NO: 225543 - DNA, 20 bp, Artificial Sequence
  Description of Artificial Sequence: Synthetic oligonucleotide
  Target: LAMA2; (-) strand; PAM type: YTN; PAM sequence: TTC
aaaatatttcagctgctctg

SEQ ID NO: 225544 - DNA, 20 bp, Artificial Sequence
  Description of Artificial Sequence: Synthetic oligonucleotide
  Target: LAMA2; (-) strand; PAM type: YTN; PAM sequence: TTT
caaaatatttcagctgctct

SEQ ID NO: 225545 - DNA, 20 bp, Artificial Sequence
  Description of Artificial Sequence: Synthetic oligonucleotide
  Target: LAMA2; (-) strand; PAM type: YTN; PAM sequence: TTA
tgtgtgtgtcatttcaaaat

SEQ ID NO: 225546 - DNA, 20 bp, Artificial Sequence
  Description of Artificial Sequence: Synthetic oligonucleotide
  Target: LAMA2; (-) strand; PAM type: YTN; PAM sequence: TTT
atgtgtgtgtcatttcaaaa

SEQ ID NO: 225547 - DNA, 20 bp, Artificial Sequence
  Description of Artificial Sequence: Synthetic oligonucleotide
  Target: LAMA2; (-) strand; PAM type: YTN; PAM sequence: TTT
tatgtgtgtgtcatttcaaa

SEQ ID NO: 225548 - DNA, 20 bp, Artificial Sequence
  Description of Artificial Sequence: Synthetic oligonucleotide
  Target: LAMA2; (-) strand; PAM type: YTN; PAM sequence: TTA
tgtattttatgtgtgtgtca

SEQ ID NO: 225549 - DNA, 20 bp, Artificial Sequence
  Description of Artificial Sequence: Synthetic oligonucleotide
  Target: LAMA2; (-) strand; PAM type: YTN; PAM sequence: TTA
aataaattatgtattttatg

SEQ ID NO: 225550 - DNA, 20 bp, Artificial Sequence
  Description of Artificial Sequence: Synthetic oligonucleotide
  Target: LAMA2; (-) strand; PAM type: YTN; PAM sequence: CTT
aaataaattatgtattttat

SEQ ID NO: 225551 - DNA, 20 bp, Artificial Sequence
  Description of Artificial Sequence: Synthetic oligonucleotide
  Target: LAMA2; (-) strand; PAM type: YTN; PAM sequence: TTA
ccttaaataaattatgtatt

SEQ ID NO: 225552 - DNA, 20 bp, Artificial Sequence
  Description of Artificial Sequence: Synthetic oligonucleotide
  Target: LAMA2; (-) strand; PAM type: YTN; PAM sequence: TTA
aaatgtaacaataaattacc

SEQ ID NO: 225553 - DNA, 20 bp, Artificial Sequence
  Description of Artificial Sequence: Synthetic oligonucleotide
  Target: LAMA2; (-) strand; PAM type: YTN; PAM sequence: TTT
aaaatgtaacaataaattac

SEQ ID NO: 225554 - DNA, 20 bp, Artificial Sequence
  Description of Artificial Sequence: Synthetic oligonucleotide
  Target: LAMA2; (-) strand; PAM type: YTN; PAM sequence: TTT
taaaatgtaacaataaatta

SEQ ID NO: 225555 - DNA, 20 bp, Artificial Sequence
  Description of Artificial Sequence: Synthetic oligonucleotide
  Target: LAMA2; (-) strand; PAM type: YTN; PAM sequence: TTT
ttaaaatgtaacaataaatt

SEQ ID NO: 225556 - DNA, 20 bp, Artificial Sequence
  Description of Artificial Sequence: Synthetic oligonucleotide
  Target: LAMA2; (-) strand; PAM type: YTN; PAM sequence: TTA
aaaagatgtatttttaaaat

SEQ ID NO: 225557 - DNA, 20 bp, Artificial Sequence
  Description of Artificial Sequence: Synthetic oligonucleotide
  Target: LAMA2; (-) strand; PAM type: YTN; PAM sequence: TTA
ttaaaaagatgtatttttaa

SEQ ID NO: 225558 - DNA, 20 bp, Artificial Sequence
  Description of Artificial Sequence: Synthetic oligonucleotide
  Target: LAMA2; (-) strand; PAM type: YTN; PAM sequence: TTT
attaaaaagatgtattttta

SEQ ID NO: 225559 - DNA, 20 bp, Artificial Sequence
  Description of Artificial Sequence: Synthetic oligonucleotide
  Target: LAMA2; (-) strand; PAM type: YTN; PAM sequence: TTT
tattaaaaagatgtattttt

SEQ ID NO: 225560 - DNA, 20 bp, Artificial Sequence
  Description of Artificial Sequence: Synthetic oligonucleotide
  Target: LAMA2; (-) strand; PAM type: YTN; PAM sequence: TTA
ttttattaaaaagatgtatt

SEQ ID NO: 225561 - DNA, 20 bp, Artificial Sequence
  Description of Artificial Sequence: Synthetic oligonucleotide
  Target: LAMA2; (-) strand; PAM type: YTN; PAM sequence: TTT
attttattaaaaagatgtat

SEQ ID NO: 225562 - DNA, 20 bp, Artificial Sequence
  Description of Artificial Sequence: Synthetic oligonucleotide
  Target: LAMA2; (-) strand; PAM type: YTN; PAM sequence: CTT
tattttattaaaaagatgta

SEQ ID NO: 225563 - DNA, 20 bp, Artificial Sequence
  Description of Artificial Sequence: Synthetic oligonucleotide
  Target: LAMA2; (-) strand; PAM type: YTN; PAM sequence: TTA
tctttattttattaaaaaga

SEQ ID NO: 225564 - DNA, 20 bp, Artificial Sequence
  Description of Artificial Sequence: Synthetic oligonucleotide
  Target: LAMA2; (-) strand; PAM type: YTN; PAM sequence: TTT
atctttattttattaaaaag

SEQ ID NO: 225565 - DNA, 20 bp, Artificial Sequence
  Description of Artificial Sequence: Synthetic oligonucleotide
  Target: LAMA2; (-) strand; PAM type: YTN; PAM sequence: TTT
tatctttattttattaaaaa

SEQ ID NO: 225566 - DNA, 20 bp, Artificial Sequence
  Description of Artificial Sequence: Synthetic oligonucleotide
  Target: LAMA2; (-) strand; PAM type: YTN; PAM sequence: TTA
attttatctttattttatta

SEQ ID NO: 225567 - DNA, 20 bp, Artificial Sequence
  Description of Artificial Sequence: Synthetic oligonucleotide
  Target: LAMA2; (-) strand; PAM type: YTN; PAM sequence: CTT
aattttatctttattttatt

SEQ ID NO: 225568 - DNA, 20 bp, Artificial Sequence
  Description of Artificial Sequence: Synthetic oligonucleotide
  Target: LAMA2; (-) strand; PAM type: YTN; PAM sequence: CTC
ttaattttatctttatttta

SEQ ID NO: 225569 - DNA, 20 bp, Artificial Sequence
  Description of Artificial Sequence: Synthetic oligonucleotide
  Target: LAMA2; (-) strand; PAM type: YTN; PAM sequence: CTG
atcaacaaagaaaaaggagg

SEQ ID NO: 225570 - DNA, 20 bp, Artificial Sequence
  Description of Artificial Sequence: Synthetic oligonucleotide
  Target: LAMA2; (-) strand; PAM type: YTN; PAM sequence: CTA
gtaactgatcaacaaagaaa

SEQ ID NO: 225571 - DNA, 20 bp, Artificial Sequence
  Description of Artificial Sequence: Synthetic oligonucleotide
  Target: LAMA2; (-) strand; PAM type: YTN; PAM sequence: TTG
gaggagtaagggagtctagt

SEQ ID NO: 225572 - DNA, 20 bp, Artificial Sequence
  Description of Artificial Sequence: Synthetic oligonucleotide
  Target: LAMA2; (-) strand; PAM type: YTN; PAM sequence: TTT
ggaggagtaagggagtctag

SEQ ID NO: 225573 - DNA, 20 bp, Artificial Sequence
  Description of Artificial Sequence: Synthetic oligonucleotide
  Target: LAMA2; (-) strand; PAM type: YTN; PAM sequence: TTT
tggaggagtaagggagtcta

SEQ ID NO: 225574 - DNA, 20 bp, Artificial Sequence
  Description of Artificial Sequence: Synthetic oligonucleotide
  Target: LAMA2; (-) strand; PAM type: YTN; PAM sequence: TTT
ttggaggagtaagggagtct

SEQ ID NO: 225575 - DNA, 20 bp, Artificial Sequence
  Description of Artificial Sequence: Synthetic oligonucleotide
  Target: LAMA2; (-) strand; PAM type: YTN; PAM sequence: TTT
tttggaggagtaagggagtc

SEQ ID NO: 225576 - DNA, 20 bp, Artificial Sequence
  Description of Artificial Sequence: Synthetic oligonucleotide
  Target: LAMA2; (-) strand; PAM type: YTN; PAM sequence: TTT
ttttggaggagtaagggagt

SEQ ID NO: 225577 - DNA, 20 bp, Artificial Sequence
  Description of Artificial Sequence: Synthetic oligonucleotide
  Target: LAMA2; (-) strand; PAM type: YTN; PAM sequence: TTT
tttttggaggagtaagggag

SEQ ID NO: 225578 - DNA, 20 bp, Artificial Sequence
  Description of Artificial Sequence: Synthetic oligonucleotide
  Target: LAMA2; (-) strand; PAM type: YTN; PAM sequence: TTT
ttttttggaggagtaaggga

SEQ ID NO: 225579 - DNA, 20 bp, Artificial Sequence
  Description of Artificial Sequence: Synthetic oligonucleotide
  Target: LAMA2; (-) strand; PAM type: YTN; PAM sequence: TTT
tttttttggaggagtaaggg

SEQ ID NO: 225580 - DNA, 20 bp, Artificial Sequence
  Description of Artificial Sequence: Synthetic oligonucleotide
  Target: LAMA2; (-) strand; PAM type: YTN; PAM sequence: TTT
ttttttttggaggagtaagg

SEQ ID NO: 225581 - DNA, 20 bp, Artificial Sequence
  Description of Artificial Sequence: Synthetic oligonucleotide
  Target: LAMA2; (-) strand; PAM type: YTN; PAM sequence: TTT
tttttttttggaggagtaag

SEQ ID NO: 225582 - DNA, 20 bp, Artificial Sequence
  Description of Artificial Sequence: Synthetic oligonucleotide
  Target: LAMA2; (-) strand; PAM type: YTN; PAM sequence: TTT
ttttttttttggaggagtaa

SEQ ID NO: 225583 - DNA, 20 bp, Artificial Sequence
  Description of Artificial Sequence: Synthetic oligonucleotide
  Target: LAMA2; (-) strand; PAM type: YTN; PAM sequence: TTT
tttttttttttggaggagta

SEQ ID NO: 225584 - DNA, 20 bp, Artificial Sequence
  Description of Artificial Sequence: Synthetic oligonucleotide
  Target: LAMA2; (-) strand; PAM type: YTN; PAM sequence: TTT
ttttttttttttggaggagt

SEQ ID NO: 225585 - DNA, 20 bp, Artificial Sequence
  Description of Artificial Sequence: Synthetic oligonucleotide
  Target: LAMA2; (-) strand; PAM type: YTN; PAM sequence: TTG
tatatatatatatatttttt

SEQ ID NO: 225586 - DNA, 20 bp, Artificial Sequence
  Description of Artificial Sequence: Synthetic oligonucleotide
  Target: LAMA2; (-) strand; PAM type: YTN; PAM sequence: CTG
ggcattgtatatatatatat

SEQ ID NO: 225587 - DNA, 20 bp, Artificial Sequence
  Description of Artificial Sequence: Synthetic oligonucleotide
  Target: LAMA2; (-) strand; PAM type: YTN; PAM sequence: TTC
tgggcattgtatatatatat

SEQ ID NO: 225588 - DNA, 20 bp, Artificial Sequence
  Description of Artificial Sequence: Synthetic oligonucleotide
  Target: LAMA2; (-) strand; PAM type: YTN; PAM sequence: TTT
ctgggcattgtatatatata

SEQ ID NO: 225589 - DNA, 20 bp, Artificial Sequence
  Description of Artificial Sequence: Synthetic oligonucleotide
  Target: LAMA2; (-) strand; PAM type: YTN; PAM sequence: CTT
tctgggcattgtatatatat

SEQ ID NO: 225590 - DNA, 20 bp, Artificial Sequence
  Description of Artificial Sequence: Synthetic oligonucleotide
  Target: LAMA2; (-) strand; PAM type: YTN; PAM sequence: TTG
tggatactttctgggcattg

SEQ ID NO: 225591 - DNA, 20 bp, Artificial Sequence
  Description of Artificial Sequence: Synthetic oligonucleotide
  Target: LAMA2; (-) strand; PAM type: YTN; PAM sequence: TTT
gtggatactttctgggcatt

SEQ ID NO: 225592 - DNA, 20 bp, Artificial Sequence
  Description of Artificial Sequence: Synthetic oligonucleotide
  Target: LAMA2; (-) strand; PAM type: YTN; PAM sequence: TTA
acagggatttgtggatactt

SEQ ID NO: 225593 - DNA, 20 bp, Artificial Sequence
  Description of Artificial Sequence: Synthetic oligonucleotide
  Target: LAMA2; (-) strand; PAM type: YTN; PAM sequence: TTT
aacagggatttgtggatact

SEQ ID NO: 225594 - DNA, 20 bp, Artificial Sequence
  Description of Artificial Sequence: Synthetic oligonucleotide
  Target: LAMA2; (-) strand; PAM type: YTN; PAM sequence: TTA
atttaacagggatttgtgga

SEQ ID NO: 225595 - DNA, 20 bp, Artificial Sequence
  Description of Artificial Sequence: Synthetic oligonucleotide
  Target: LAMA2; (-) strand; PAM type: YTN; PAM sequence: CTG
cattaatttaacagggattt

SEQ ID NO: 225596 - DNA, 20 bp, Artificial Sequence
  Description of Artificial Sequence: Synthetic oligonucleotide
  Target: LAMA2; (-) strand; PAM type: YTN; PAM sequence: TTC
aacaatactgcattaattta

SEQ ID NO: 225597 - DNA, 20 bp, Artificial Sequence
  Description of Artificial Sequence: Synthetic oligonucleotide
  Target: LAMA2; (-) strand; PAM type: YTN; PAM sequence: TTT
caacaatactgcattaattt

SEQ ID NO: 225598 - DNA, 20 bp, Artificial Sequence
  Description of Artificial Sequence: Synthetic oligonucleotide
  Target: LAMA2; (-) strand; PAM type: YTN; PAM sequence: TTT
tcaacaatactgcattaatt

SEQ ID NO: 225599 - DNA, 20 bp, Artificial Sequence
  Description of Artificial Sequence: Synthetic oligonucleotide
  Target: LAMA2; (-) strand; PAM type: YTN; PAM sequence: TTT
ttcaacaatactgcattaat

SEQ ID NO: 225600 - DNA, 20 bp, Artificial Sequence
  Description of Artificial Sequence: Synthetic oligonucleotide
  Target: LAMA2; (-) strand; PAM type: YTN; PAM sequence: TTG
tttttcaacaatactgcatt

SEQ ID NO: 225601 - DNA, 20 bp, Artificial Sequence
  Description of Artificial Sequence: Synthetic oligonucleotide
  Target: LAMA2; (-) strand; PAM type: YTN; PAM sequence: TTT
gtttttcaacaatactgcat

SEQ ID NO: 225602 - DNA, 20 bp, Artificial Sequence
  Description of Artificial Sequence: Synthetic oligonucleotide
  Target: LAMA2; (-) strand; PAM type: YTN; PAM sequence: CTT
tgtttttcaacaatactgca

SEQ ID NO: 225603 - DNA, 20 bp, Artificial Sequence
  Description of Artificial Sequence: Synthetic oligonucleotide
  Target: LAMA2; (-) strand; PAM type: YTN; PAM sequence: CTG
gccatctttgtttttcaaca

SEQ ID NO: 225604 - DNA, 20 bp, Artificial Sequence
  Description of Artificial Sequence: Synthetic oligonucleotide
  Target: LAMA2; (-) strand; PAM type: YTN; PAM sequence: CTC
tggccatctttgtttttcaa

SEQ ID NO: 225605 - DNA, 20 bp, Artificial Sequence
  Description of Artificial Sequence: Synthetic oligonucleotide
  Target: LAMA2; (-) strand; PAM type: YTN; PAM sequence: TTC
tctggccatctttgtttttc

SEQ ID NO: 225606 - DNA, 20 bp, Artificial Sequence
  Description of Artificial Sequence: Synthetic oligonucleotide
  Target: LAMA2; (-) strand; PAM type: YTN; PAM sequence: TTT
ctctggccatctttgttttt

SEQ ID NO: 225607 - DNA, 20 bp, Artificial Sequence
  Description of Artificial Sequence: Synthetic oligonucleotide
  Target: LAMA2; (-) strand; PAM type: YTN; PAM sequence: TTC
agtttctctggccatctttg

SEQ ID NO: 225608 - DNA, 20 bp, Artificial Sequence
  Description of Artificial Sequence: Synthetic oligonucleotide
  Target: LAMA2; (-) strand; PAM type: YTN; PAM sequence: CTC
attcagtttctctggccatc

SEQ ID NO: 225609 - DNA, 20 bp, Artificial Sequence
  Description of Artificial Sequence: Synthetic oligonucleotide
  Target: LAMA2; (-) strand; PAM type: YTN; PAM sequence: TTC
tcattcagtttctctggcca

SEQ ID NO: 225610 - DNA, 20 bp, Artificial Sequence
  Description of Artificial Sequence: Synthetic oligonucleotide
  Target: LAMA2; (-) strand; PAM type: YTN; PAM sequence: TTC
cattctcattcagtttctct

SEQ ID NO: 225611 - DNA, 20 bp, Artificial Sequence
  Description of Artificial Sequence: Synthetic oligonucleotide
  Target: LAMA2; (-) strand; PAM type: YTN; PAM sequence: CTC
aggattccattctcattcag

SEQ ID NO: 225612 - DNA, 20 bp, Artificial Sequence
  Description of Artificial Sequence: Synthetic oligonucleotide
  Target: LAMA2; (-) strand; PAM type: YTN; PAM sequence: CTC
ctcaggattccattctcatt

SEQ ID NO: 225613 - DNA, 20 bp, Artificial Sequence
  Description of Artificial Sequence: Synthetic oligonucleotide
  Target: LAMA2; (-) strand; PAM type: YTN; PAM sequence: TTC
tcctcaggattccattctca

SEQ ID NO: 225614 - DNA, 20 bp, Artificial Sequence
  Description of Artificial Sequence: Synthetic oligonucleotide
  Target: LAMA2; (-) strand; PAM type: YTN; PAM sequence: TTT
ctcctcaggattccattctc

SEQ ID NO: 225615 - DNA, 20 bp, Artificial Sequence
  Description of Artificial Sequence: Synthetic oligonucleotide
  Target: LAMA2; (-) strand; PAM type: YTN; PAM sequence: TTT
tctcctcaggattccattct

SEQ ID NO: 225616 - DNA, 20 bp, Artificial Sequence
  Description of Artificial Sequence: Synthetic oligonucleotide
  Target: LAMA2; (-) strand; PAM type: YTN; PAM sequence: TTG
gtgttttctcctcaggattc

SEQ ID NO: 225617 - DNA, 20 bp, Artificial Sequence
  Description of Artificial Sequence: Synthetic oligonucleotide
  Target: LAMA2; (-) strand; PAM type: YTN; PAM sequence: TTA
aatattggtgttttctcctc

SEQ ID NO: 225618 - DNA, 20 bp, Artificial Sequence
  Description of Artificial Sequence: Synthetic oligonucleotide
  Target: LAMA2; (-) strand; PAM type: YTN; PAM sequence: CTT
aaatattggtgttttctcct

SEQ ID NO: 225619 - DNA, 20 bp, Artificial Sequence
  Description of Artificial Sequence: Synthetic oligonucleotide
  Target: LAMA2; (-) strand; PAM type: YTN; PAM sequence: CTC
ttaaatattggtgttttctc

SEQ ID NO: 225620 - DNA, 20 bp, Artificial Sequence
  Description of Artificial Sequence: Synthetic oligonucleotide
  Target: LAMA2; (-) strand; PAM type: YTN; PAM sequence: CTG
agagaaccaggtctcttaaa

SEQ ID NO: 225621 - DNA, 20 bp, Artificial Sequence
  Description of Artificial Sequence: Synthetic oligonucleotide
  Target: LAMA2; (-) strand; PAM type: YTN; PAM sequence: TTC
cacaacactgagagaaccag

SEQ ID NO: 225622 - DNA, 20 bp, Artificial Sequence
  Description of Artificial Sequence: Synthetic oligonucleotide
  Target: LAMA2; (-) strand; PAM type: YTN; PAM sequence: CTG
ttccacaacactgagagaac

SEQ ID NO: 225623 - DNA, 20 bp, Artificial Sequence
  Description of Artificial Sequence: Synthetic oligonucleotide
  Target: LAMA2; (-) strand; PAM type: YTN; PAM sequence: TTC
catatcagtggatcctgttc

SEQ ID NO: 225624 - DNA, 20 bp, Artificial Sequence
  Description of Artificial Sequence: Synthetic oligonucleotide
  Target: LAMA2; (-) strand; PAM type: YTN; PAM sequence: CTG
ttccatatcagtggatcctg

SEQ ID NO: 225625 - DNA, 20 bp, Artificial Sequence
  Description of Artificial Sequence: Synthetic oligonucleotide
  Target: LAMA2; (-) strand; PAM type: YTN; PAM sequence: TTC
tgttccatatcagtggatcc

SEQ ID NO: 225626 - DNA, 20 bp, Artificial Sequence
  Description of Artificial Sequence: Synthetic oligonucleotide
  Target: LAMA2; (-) strand; PAM type: YTN; PAM sequence: CTT
ctgttccatatcagtggatc

SEQ ID NO: 225627 - DNA, 20 bp, Artificial Sequence
  Description of Artificial Sequence: Synthetic oligonucleotide
  Target: LAMA2; (-) strand; PAM type: YTN; PAM sequence: TTA
cccttctgttccatatcagt

SEQ ID NO: 225628 - DNA, 20 bp, Artificial Sequence
  Description of Artificial Sequence: Synthetic oligonucleotide
  Target: LAMA2; (-) strand; PAM type: YTN; PAM sequence: CTT
acccttctgttccatatcag

SEQ ID NO: 225629 - DNA, 20 bp, Artificial Sequence
  Description of Artificial Sequence: Synthetic oligonucleotide
  Target: LAMA2; (-) strand; PAM type: YTN; PAM sequence: TTA
acagaagcttacccttctgt

SEQ ID NO: 225630 - DNA, 20 bp, Artificial Sequence
  Description of Artificial Sequence: Synthetic oligonucleotide
  Target: LAMA2; (-) strand; PAM type: YTN; PAM sequence: CTT
aacagaagcttacccttctg

SEQ ID NO: 225631 - DNA, 20 bp, Artificial Sequence
  Description of Artificial Sequence: Synthetic oligonucleotide
  Target: LAMA2; (-) strand; PAM type: YTN; PAM sequence: CTA
gcttaacagaagcttaccct

SEQ ID NO: 225632 - DNA, 20 bp, Artificial Sequence
  Description of Artificial Sequence: Synthetic oligonucleotide
  Target: LAMA2; (-) strand; PAM type: YTN; PAM sequence: TTA
cctagcttaacagaagctta

SEQ ID NO: 225633 - DNA, 20 bp, Artificial Sequence
  Description of Artificial Sequence: Synthetic oligonucleotide
  Target: LAMA2; (-) strand; PAM type: YTN; PAM sequence: CTT
acctagcttaacagaagctt

SEQ ID NO: 225634 - DNA, 20 bp, Artificial Sequence
  Description of Artificial Sequence: Synthetic oligonucleotide
  Target: LAMA2; (-) strand; PAM type: YTN; PAM sequence: TTC
cttacctagcttaacagaag

SEQ ID NO: 225635 - DNA, 20 bp, Artificial Sequence
  Description of Artificial Sequence: Synthetic oligonucleotide
  Target: LAMA2; (-) strand; PAM type: YTN; PAM sequence: CTT
ccttacctagcttaacagaa

SEQ ID NO: 225636 - DNA, 20 bp, Artificial Sequence
  Description of Artificial Sequence: Synthetic oligonucleotide
  Target: LAMA2; (-) strand; PAM type: YTN; PAM sequence: CTA
agcttccttacctagcttaa

SEQ ID NO: 225637 - DNA, 20 bp, Artificial Sequence
  Description of Artificial Sequence: Synthetic oligonucleotide
  Target: LAMA2; (-) strand; PAM type: YTN; PAM sequence: TTC
acaaccctaagcttccttac

SEQ ID NO: 225638 - DNA, 20 bp, Artificial Sequence
  Description of Artificial Sequence: Synthetic oligonucleotide
  Target: LAMA2; (-) strand; PAM type: YTN; PAM sequence: TTT
cacaaccctaagcttcctta

SEQ ID NO: 225639 - DNA, 20 bp, Artificial Sequence
  Description of Artificial Sequence: Synthetic oligonucleotide
  Target: LAMA2; (-) strand; PAM type: YTN; PAM sequence: CTT
tcacaaccctaagcttcctt

SEQ ID NO: 225640 - DNA, 20 bp, Artificial Sequence
  Description of Artificial Sequence: Synthetic oligonucleotide
  Target: LAMA2; (-) strand; PAM type: YTN; PAM sequence: TTC
tttcacaaccctaagcttcc

SEQ ID NO: 225641 - DNA, 20 bp, Artificial Sequence
  Description of Artificial Sequence: Synthetic oligonucleotide
  Target: LAMA2; (-) strand; PAM type: YTN; PAM sequence: CTT
ctttcacaaccctaagcttc

SEQ ID NO: 225642 - DNA, 20 bp, Artificial Sequence
  Description of Artificial Sequence: Synthetic oligonucleotide
  Target: LAMA2; (-) strand; PAM type: YTN; PAM sequence: TTG
taccttctttcacaacccta

SEQ ID NO: 225643 - DNA, 20 bp, Artificial Sequence
  Description of Artificial Sequence: Synthetic oligonucleotide
  Target: LAMA2; (-) strand; PAM type: YTN; PAM sequence: TTT
gtaccttctttcacaaccct

SEQ ID NO: 225644 - DNA, 20 bp, Artificial Sequence
  Description of Artificial Sequence: Synthetic oligonucleotide
  Target: LAMA2; (-) strand; PAM type: YTN; PAM sequence: CTT
tgtaccttctttcacaaccc

SEQ ID NO: 225645 - DNA, 20 bp, Artificial Sequence
  Description of Artificial Sequence: Synthetic oligonucleotide
  Target: LAMA2; (-) strand; PAM type: YTN; PAM sequence: TTC
cccaaaagtcagtgtgcagt

SEQ ID NO: 225646 - DNA, 20 bp, Artificial Sequence
  Description of Artificial Sequence: Synthetic oligonucleotide
  Target: LAMA2; (-) strand; PAM type: YTN; PAM sequence: CTG
aaagccaaatccaggtaatt

SEQ ID NO: 225647 - DNA, 20 bp, Artificial Sequence
  Description of Artificial Sequence: Synthetic oligonucleotide
  Target: LAMA2; (-) strand; PAM type: YTN; PAM sequence: CTA
cctgaaagccaaatccaggt

SEQ ID NO: 225648 - DNA, 20 bp, Artificial Sequence
  Description of Artificial Sequence: Synthetic oligonucleotide
  Target: LAMA2; (-) strand; PAM type: YTN; PAM sequence: TTG
gcagagctacctgaaagcca

SEQ ID NO: 225649 - DNA, 20 bp, Artificial Sequence
  Description of Artificial Sequence: Synthetic oligonucleotide
  Target: LAMA2; (-) strand; PAM type: YTN; PAM sequence: CTT
ggcagagctacctgaaagcc

SEQ ID NO: 225650 - DNA, 20 bp, Artificial Sequence
  Description of Artificial Sequence: Synthetic oligonucleotide
  Target: LAMA2; (-) strand; PAM type: YTN; PAM sequence: TTA
atccttggcagagctacctg

SEQ ID NO: 225651 - DNA, 20 bp, Artificial Sequence
  Description of Artificial Sequence: Synthetic oligonucleotide
  Target: LAMA2; (-) strand; PAM type: YTN; PAM sequence: TTG
ttaatccttggcagagctac

SEQ ID NO: 225652 - DNA, 20 bp, Artificial Sequence
  Description of Artificial Sequence: Synthetic oligonucleotide
  Target: LAMA2; (-) strand; PAM type: YTN; PAM sequence: CTA
ttgttaatccttggcagagc

SEQ ID NO: 225653 - DNA, 20 bp, Artificial Sequence
  Description of Artificial Sequence: Synthetic oligonucleotide
  Target: LAMA2; (-) strand; PAM type: YTN; PAM sequence: CTG
aaccctattgttaatccttg

SEQ ID NO: 225654 - DNA, 20 bp, Artificial Sequence
  Description of Artificial Sequence: Synthetic oligonucleotide
  Target: LAMA2; (-) strand; PAM type: YTN; PAM sequence: TTC
tgaaccctattgttaatcct

SEQ ID NO: 225655 - DNA, 20 bp, Artificial Sequence
  Description of Artificial Sequence: Synthetic oligonucleotide
  Target: LAMA2; (-) strand; PAM type: YTN; PAM sequence: TTT
ctgaaccctattgttaatcc

SEQ ID NO: 225656 - DNA, 20 bp, Artificial Sequence
  Description of Artificial Sequence: Synthetic oligonucleotide
  Target: LAMA2; (-) strand; PAM type: YTN; PAM sequence: CTT
tctgaaccctattgttaatc

SEQ ID NO: 225657 - DNA, 20 bp, Artificial Sequence
  Description of Artificial Sequence: Synthetic oligonucleotide
  Target: LAMA2; (-) strand; PAM type: YTN; PAM sequence: TTC
tttctgaaccctattgttaa

SEQ ID NO: 225658 - DNA, 20 bp, Artificial Sequence
  Description of Artificial Sequence: Synthetic oligonucleotide
  Target: LAMA2; (-) strand; PAM type: YTN; PAM sequence: CTT
ctttctgaaccctattgtta

SEQ ID NO: 225659 - DNA, 20 bp, Artificial Sequence
  Description of Artificial Sequence: Synthetic oligonucleotide
  Target: LAMA2; (-) strand; PAM type: YTN; PAM sequence: CTC
ttctttctgaaccctattgt

SEQ ID NO: 225660 - DNA, 20 bp, Artificial Sequence
  Description of Artificial Sequence: Synthetic oligonucleotide
  Target: LAMA2; (-) strand; PAM type: YTN; PAM sequence: TTA
ctcttctttctgaaccctat

SEQ ID NO: 225661 - DNA, 20 bp, Artificial Sequence
  Description of Artificial Sequence: Synthetic oligonucleotide
  Target: LAMA2; (-) strand; PAM type: YTN; PAM sequence: TTT
actcttctttctgaacccta

SEQ ID NO: 225662 - DNA, 20 bp, Artificial Sequence
  Description of Artificial Sequence: Synthetic oligonucleotide
  Target: LAMA2; (-) strand; PAM type: YTN; PAM sequence: TTA
gatggtttactcttctttct

SEQ ID NO: 225663 - DNA, 20 bp, Artificial Sequence
  Description of Artificial Sequence: Synthetic oligonucleotide
  Target: LAMA2; (-) strand; PAM type: YTN; PAM sequence: CTG
gggcacatattagatggttt

SEQ ID NO: 225664 - DNA, 20 bp, Artificial Sequence
  Description of Artificial Sequence: Synthetic oligonucleotide
  Target: LAMA2; (-) strand; PAM type: YTN; PAM sequence: CTG
gctggggcacatattagatg

SEQ ID NO: 225665 - DNA, 20 bp, Artificial Sequence
  Description of Artificial Sequence: Synthetic oligonucleotide
  Target: LAMA2; (-) strand; PAM type: YTN; PAM sequence: TTA
taaccacgtaaactggctgg

SEQ ID NO: 225666 - DNA, 20 bp, Artificial Sequence
  Description of Artificial Sequence: Synthetic oligonucleotide
  Target: LAMA2; (-) strand; PAM type: YTN; PAM sequence: TTA
ttataaccacgtaaactggc

SEQ ID NO: 225667 - DNA, 20 bp, Artificial Sequence
  Description of Artificial Sequence: Synthetic oligonucleotide
  Target: LAMA2; (-) strand; PAM type: YTN; PAM sequence: TTG
atcgttattataaccacgta

SEQ ID NO: 225668 - DNA, 20 bp, Artificial Sequence
  Description of Artificial Sequence: Synthetic oligonucleotide
  Target: LAMA2; (-) strand; PAM type: YTN; PAM sequence: TTT
gatcgttattataaccacgt

SEQ ID NO: 225669 - DNA, 20 bp, Artificial Sequence
  Description of Artificial Sequence: Synthetic oligonucleotide
  Target: LAMA2; (-) strand; PAM type: YTN; PAM sequence: CTA
atttgatcgttattataacc

SEQ ID NO: 225670 - DNA, 20 bp, Artificial Sequence
  Description of Artificial Sequence: Synthetic oligonucleotide
  Target: LAMA2; (-) strand; PAM type: YTN; PAM sequence: TTG
ccataaaaatctaatttgat

SEQ ID NO: 225671 - DNA, 20 bp, Artificial Sequence
  Description of Artificial Sequence: Synthetic oligonucleotide
  Target: LAMA2; (-) strand; PAM type: YTN; PAM sequence: TTT
gccataaaaatctaatttga

SEQ ID NO: 225672 - DNA, 20 bp, Artificial Sequence
  Description of Artificial Sequence: Synthetic oligonucleotide
  Target: LAMA2; (-) strand; PAM type: YTN; PAM sequence: TTT
tgccataaaaatctaatttg

SEQ ID NO: 225673 - DNA, 20 bp, Artificial Sequence
  Description of Artificial Sequence: Synthetic oligonucleotide
  Target: LAMA2; (-) strand; PAM type: YTN; PAM sequence: TTA
aagagagttttgccataaaa

SEQ ID NO: 225674 - DNA, 20 bp, Artificial Sequence
  Description of Artificial Sequence: Synthetic oligonucleotide
  Target: LAMA2; (-) strand; PAM type: YTN; PAM sequence: CTA
tcatatcgtagaggttaaag

SEQ ID NO: 225675 - DNA, 20 bp, Artificial Sequence
  Description of Artificial Sequence: Synthetic oligonucleotide
  Target: LAMA2; (-) strand; PAM type: YTN; PAM sequence: CTG
gaaatactatcatatcgtag

SEQ ID NO: 225676 - DNA, 20 bp, Artificial Sequence
  Description of Artificial Sequence: Synthetic oligonucleotide
  Target: LAMA2; (-) strand; PAM type: YTN; PAM sequence: TTG
agaataaaaaggctggaaat

SEQ ID NO: 225677 - DNA, 20 bp, Artificial Sequence
  Description of Artificial Sequence: Synthetic oligonucleotide
  Target: LAMA2; (-) strand; PAM type: YTN; PAM sequence: CTT
gagaataaaaaggctggaaa

SEQ ID NO: 225678 - DNA, 20 bp, Artificial Sequence
  Description of Artificial Sequence: Synthetic oligonucleotide
  Target: LAMA2; (-) strand; PAM type: YTN; PAM sequence: CTG
aaccttgagaataaaaaggc

SEQ ID NO: 225679 - DNA, 20 bp, Artificial Sequence
  Description of Artificial Sequence: Synthetic oligonucleotide
  Target: LAMA2; (-) strand; PAM type: YTN; PAM sequence: CTA
ctgaaccttgagaataaaaa

SEQ ID NO: 225680 - DNA, 20 bp, Artificial Sequence
  Description of Artificial Sequence: Synthetic oligonucleotide
  Target: LAMA2; (-) strand; PAM type: YTN; PAM sequence: TTA
gctactgaaccttgagaata

SEQ ID NO: 225681 - DNA, 20 bp, Artificial Sequence
  Description of Artificial Sequence: Synthetic oligonucleotide
  Target: LAMA2; (-) strand; PAM type: YTN; PAM sequence: TTA
agccaatgttagctactgaa

SEQ ID NO: 225682 - DNA, 20 bp, Artificial Sequence
  Description of Artificial Sequence: Synthetic oligonucleotide
  Target: LAMA2; (-) strand; PAM type: YTN; PAM sequence: CTT
aagccaatgttagctactga

SEQ ID NO: 225683 - DNA, 20 bp, Artificial Sequence
  Description of Artificial Sequence: Synthetic oligonucleotide
  Target: LAMA2; (-) strand; PAM type: YTN; PAM sequence: TTA
ggagtgggcttaagccaatg

SEQ ID NO: 225684 - DNA, 20 bp, Artificial Sequence
  Description of Artificial Sequence: Synthetic oligonucleotide
  Target: LAMA2; (-) strand; PAM type: YTN; PAM sequence: TTC
atagttaggagtgggcttaa

SEQ ID NO: 225685 - DNA, 20 bp, Artificial Sequence
  Description of Artificial Sequence: Synthetic oligonucleotide
  Target: LAMA2; (-) strand; PAM type: YTN; PAM sequence: TTT
catagttaggagtgggctta

SEQ ID NO: 225686 - DNA, 20 bp, Artificial Sequence
  Description of Artificial Sequence: Synthetic oligonucleotide
  Target: LAMA2; (-) strand; PAM type: YTN; PAM sequence: CTC
agtcatttcatagttaggag

SEQ ID NO: 225687 - DNA, 20 bp, Artificial Sequence
  Description of Artificial Sequence: Synthetic oligonucleotide
  Target: LAMA2; (-) strand; PAM type: YTN; PAM sequence: CTG
agccagctcagtcatttcat

SEQ ID NO: 225688 - DNA, 20 bp, Artificial Sequence
  Description of Artificial Sequence: Synthetic oligonucleotide
  Target: LAMA2; (-) strand; PAM type: YTN; PAM sequence: TTC
caggctgagccagctcagtc

SEQ ID NO: 225689 - DNA, 20 bp, Artificial Sequence
  Description of Artificial Sequence: Synthetic oligonucleotide
  Target: LAMA2; (-) strand; PAM type: YTN; PAM sequence: CTC
attccaggctgagccagctc

SEQ ID NO: 225690 - DNA, 20 bp, Artificial Sequence
  Description of Artificial Sequence: Synthetic oligonucleotide
  Target: LAMA2; (-) strand; PAM type: YTN; PAM sequence: CTC
tcattccaggctgagccagc

SEQ ID NO: 225691 - DNA, 20 bp, Artificial Sequence
  Description of Artificial Sequence: Synthetic oligonucleotide
  Target: LAMA2; (-) strand; PAM type: YTN; PAM sequence: CTC
cccactctcattccaggctg

SEQ ID NO: 225692 - DNA, 20 bp, Artificial Sequence
  Description of Artificial Sequence: Synthetic oligonucleotide
  Target: LAMA2; (-) strand; PAM type: YTN; PAM sequence: CTC
atgctccccactctcattcc

SEQ ID NO: 225693 - DNA, 20 bp, Artificial Sequence
  Description of Artificial Sequence: Synthetic oligonucleotide
  Target: LAMA2; (-) strand; PAM type: YTN; PAM sequence: CTC
tcatgctccccactctcatt

SEQ ID NO: 225694 - DNA, 20 bp, Artificial Sequence
  Description of Artificial Sequence: Synthetic oligonucleotide
  Target: LAMA2; (-) strand; PAM type: YTN; PAM sequence: CTG
tgtccctctcatgctcccca

SEQ ID NO: 225695 - DNA, 20 bp, Artificial Sequence
  Description of Artificial Sequence: Synthetic oligonucleotide
  Target: LAMA2; (-) strand; PAM type: YTN; PAM sequence: CTC
atgtggtatggctgtgtccc

SEQ ID NO: 225696 - DNA, 20 bp, Artificial Sequence
  Description of Artificial Sequence: Synthetic oligonucleotide
  Target: LAMA2; (-) strand; PAM type: YTN; PAM sequence: CTA
gccatggcctcatgtggtat

SEQ ID NO: 225697 - DNA, 20 bp, Artificial Sequence
  Description of Artificial Sequence: Synthetic oligonucleotide
  Target: LAMA2; (-) strand; PAM type: YTN; PAM sequence: TTC
cctagccatggcctcatgtg

SEQ ID NO: 225698 - DNA, 20 bp, Artificial Sequence
  Description of Artificial Sequence: Synthetic oligonucleotide
  Target: LAMA2; (-) strand; PAM type: YTN; PAM sequence: CTT
ccctagccatggcctcatgt

SEQ ID NO: 225699 - DNA, 20 bp, Artificial Sequence
  Description of Artificial Sequence: Synthetic oligonucleotide
  Target: LAMA2; (-) strand; PAM type: YTN; PAM sequence: CTG
ccttccctagccatggcctc

SEQ ID NO: 225700 - DNA, 20 bp, Artificial Sequence
  Description of Artificial Sequence: Synthetic oligonucleotide
  Target: LAMA2; (-) strand; PAM type: YTN; PAM sequence: CTC
tgccttccctagccatggcc

SEQ ID NO: 225701 - DNA, 20 bp, Artificial Sequence
  Description of Artificial Sequence: Synthetic oligonucleotide
  Target: LAMA2; (-) strand; PAM type: YTN; PAM sequence: TTC
agtagcctctgccttcccta

SEQ ID NO: 225702 - DNA, 20 bp, Artificial Sequence
  Description of Artificial Sequence: Synthetic oligonucleotide
  Target: LAMA2; (-) strand; PAM type: YTN; PAM sequence: TTG
ttcagtagcctctgccttcc

SEQ ID NO: 225703 - DNA, 20 bp, Artificial Sequence
  Description of Artificial Sequence: Synthetic oligonucleotide
  Target: LAMA2; (-) strand; PAM type: YTN; PAM sequence: CTT
gttcagtagcctctgccttc

SEQ ID NO: 225704 - DNA, 20 bp, Artificial Sequence
  Description of Artificial Sequence: Synthetic oligonucleotide
  Target: LAMA2; (-) strand; PAM type: YTN; PAM sequence: TTC
agtcttgttcagtagcctct

SEQ ID NO: 225705 - DNA, 20 bp, Artificial Sequence
  Description of Artificial Sequence: Synthetic oligonucleotide
  Target: LAMA2; (-) strand; PAM type: YTN; PAM sequence: CTT
cagtcttgttcagtagcctc

SEQ ID NO: 225706 - DNA, 20 bp, Artificial Sequence
  Description of Artificial Sequence: Synthetic oligonucleotide
  Target: LAMA2; (-) strand; PAM type: YTN; PAM sequence: TTC
cttcagtcttgttcagtagc

SEQ ID NO: 225707 - DNA, 20 bp, Artificial Sequence
  Description of Artificial Sequence: Synthetic oligonucleotide
  Target: LAMA2; (-) strand; PAM type: YTN; PAM sequence: TTA
ttccttcagtcttgttcagt

SEQ ID NO: 225708 - DNA, 20 bp, Artificial Sequence
  Description of Artificial Sequence: Synthetic oligonucleotide
  Target: LAMA2; (-) strand; PAM type: YTN; PAM sequence: CTT
attccttcagtcttgttcag

SEQ ID NO: 225709 - DNA, 20 bp, Artificial Sequence
  Description of Artificial Sequence: Synthetic oligonucleotide
  Target: LAMA2; (-) strand; PAM type: YTN; PAM sequence: TTG
cttattccttcagtcttgtt

SEQ ID NO: 225710 - DNA, 20 bp, Artificial Sequence
  Description of Artificial Sequence: Synthetic oligonucleotide
  Target: LAMA2; (-) strand; PAM type: YTN; PAM sequence: TTT
gcttattccttcagtcttgt

SEQ ID NO: 225711 - DNA, 20 bp, Artificial Sequence
  Description of Artificial Sequence: Synthetic oligonucleotide
  Target: LAMA2; (-) strand; PAM type: YTN; PAM sequence: CTT
tgcttattccttcagtcttg

SEQ ID NO: 225712 - DNA, 20 bp, Artificial Sequence
  Description of Artificial Sequence: Synthetic oligonucleotide
  Target: LAMA2; (-) strand; PAM type: YTN; PAM sequence: TTG
ctttgcttattccttcagtc

SEQ ID NO: 225713 - DNA, 20 bp, Artificial Sequence
  Description of Artificial Sequence: Synthetic oligonucleotide
  Target: LAMA2; (-) strand; PAM type: YTN; PAM sequence: TTT
gctttgcttattccttcagt

SEQ ID NO: 225714 - DNA, 20 bp, Artificial Sequence
  Description of Artificial Sequence: Synthetic oligonucleotide
  Target: LAMA2; (-) strand; PAM type: YTN; PAM sequence: TTT
tgctttgcttattccttcag

SEQ ID NO: 225715 - DNA, 20 bp, Artificial Sequence
  Description of Artificial Sequence: Synthetic oligonucleotide
  Target: LAMA2; (-) strand; PAM type: YTN; PAM sequence: TTT
ttgctttgcttattccttca

SEQ ID NO: 225716 - DNA, 20 bp, Artificial Sequence
  Description of Artificial Sequence: Synthetic oligonucleotide
  Target: LAMA2; (-) strand; PAM type: YTN; PAM sequence: TTT
tttgctttgcttattccttc

SEQ ID NO: 225717 - DNA, 20 bp, Artificial Sequence
  Description of Artificial Sequence: Synthetic oligonucleotide
  Target: LAMA2; (-) strand; PAM type: YTN; PAM sequence: TTG
tggttttttgctttgcttat

SEQ ID NO: 225718 - DNA, 20 bp, Artificial Sequence
  Description of Artificial Sequence: Synthetic oligonucleotide
  Target: LAMA2; (-) strand; PAM type: YTN; PAM sequence: CTT
gtggttttttgctttgctta

SEQ ID NO: 225719 - DNA, 20 bp, Artificial Sequence
  Description of Artificial Sequence: Synthetic oligonucleotide
  Target: LAMA2; (-) strand; PAM type: YTN; PAM sequence: TTC
agcaagcttgtggttttttg

SEQ ID NO: 225720 - DNA, 20 bp, Artificial Sequence
  Description of Artificial Sequence: Synthetic oligonucleotide
  Target: LAMA2; (-) strand; PAM type: YTN; PAM sequence: CTT
cagcaagcttgtggtttttt

SEQ ID NO: 225721 - DNA, 20 bp, Artificial Sequence
  Description of Artificial Sequence: Synthetic oligonucleotide
  Target: LAMA2; (-) strand; PAM type: YTN; PAM sequence: CTC
caacttcagcaagcttgtgg

SEQ ID NO: 225722 - DNA, 20 bp, Artificial Sequence
  Description of Artificial Sequence: Synthetic oligonucleotide
  Target: LAMA2; (-) strand; PAM type: YTN; PAM sequence: CTG
gtcctccaacttcagcaagc

SEQ ID NO: 225723 - DNA, 20 bp, Artificial Sequence
  Description of Artificial Sequence: Synthetic oligonucleotide
  Target: LAMA2; (-) strand; PAM type: YTN; PAM sequence: TTC
tggtcctccaacttcagcaa

SEQ ID NO: 225724 - DNA, 20 bp, Artificial Sequence
  Description of Artificial Sequence: Synthetic oligonucleotide
  Target: LAMA2; (-) strand; PAM type: YTN; PAM sequence: CTT
ctggtcctccaacttcagca

SEQ ID NO: 225725 - DNA, 20 bp, Artificial Sequence
  Description of Artificial Sequence: Synthetic oligonucleotide
  Target: LAMA2; (-) strand; PAM type: YTN; PAM sequence: TTC
cttctggtcctccaacttca

SEQ ID NO: 225726 - DNA, 20 bp, Artificial Sequence
  Description of Artificial Sequence: Synthetic oligonucleotide
  Target: LAMA2; (-) strand; PAM type: YTN; PAM sequence: CTA
ttccttctggtcctccaact

SEQ ID NO: 225727 - DNA, 20 bp, Artificial Sequence
  Description of Artificial Sequence: Synthetic oligonucleotide
  Target: LAMA2; (-) strand; PAM type: YTN; PAM sequence: CTC
acctattccttctggtcctc

SEQ ID NO: 225728 - DNA, 20 bp, Artificial Sequence
  Description of Artificial Sequence: Synthetic oligonucleotide
  Target: LAMA2; (-) strand; PAM type: YTN; PAM sequence: CTG
agaccctcacctattccttc

SEQ ID NO: 225729 - DNA, 20 bp, Artificial Sequence
  Description of Artificial Sequence: Synthetic oligonucleotide
  Target: LAMA2; (-) strand; PAM type: YTN; PAM sequence: TTA
gcactgagaccctcacctat

SEQ ID NO: 225730 - DNA, 20 bp, Artificial Sequence
  Description of Artificial Sequence: Synthetic oligonucleotide
  Target: LAMA2; (-) strand; PAM type: YTN; PAM sequence: CTA
cattagcactgagaccctca

SEQ ID NO: 225731 - DNA, 20 bp, Artificial Sequence
  Description of Artificial Sequence: Synthetic oligonucleotide
  Target: LAMA2; (-) strand; PAM type: YTN; PAM sequence: TTA
accctacattagcactgaga

SEQ ID NO: 225732 - DNA, 20 bp, Artificial Sequence
  Description of Artificial Sequence: Synthetic oligonucleotide
  Target: LAMA2; (-) strand; PAM type: YTN; PAM sequence: CTG
gattaaccctacattagcac

SEQ ID NO: 225733 - DNA, 20 bp, Artificial Sequence
  Description of Artificial Sequence: Synthetic oligonucleotide
  Target: LAMA2; (-) strand; PAM type: YTN; PAM sequence: TTG
gccctggattaaccctacat

SEQ ID NO: 225734 - DNA, 20 bp, Artificial Sequence
  Description of Artificial Sequence: Synthetic oligonucleotide
  Target: LAMA2; (-) strand; PAM type: YTN; PAM sequence: CTT
ggccctggattaaccctaca

SEQ ID NO: 225735 - DNA, 20 bp, Artificial Sequence
  Description of Artificial Sequence: Synthetic oligonucleotide
  Target: LAMA2; (-) strand; PAM type: YTN; PAM sequence: CTA
cttggccctggattaaccct

SEQ ID NO: 225736 - DNA, 20 bp, Artificial Sequence
  Description of Artificial Sequence: Synthetic oligonucleotide
  Target: LAMA2; (-) strand; PAM type: YTN; PAM sequence: TTG
tctacttggccctggattaa

SEQ ID NO: 225737 - DNA, 20 bp, Artificial Sequence
  Description of Artificial Sequence: Synthetic oligonucleotide
  Target: LAMA2; (-) strand; PAM type: YTN; PAM sequence: TTT
gtctacttggccctggatta

SEQ ID NO: 225738 - DNA, 20 bp, Artificial Sequence
  Description of Artificial Sequence: Synthetic oligonucleotide
  Target: LAMA2; (-) strand; PAM type: YTN; PAM sequence: TTT
tgtctacttggccctggatt

SEQ ID NO: 225739 - DNA, 20 bp, Artificial Sequence
  Description of Artificial Sequence: Synthetic oligonucleotide
  Target: LAMA2; (-) strand; PAM type: YTN; PAM sequence: TTT
ttgtctacttggccctggat

SEQ ID NO: 225740 - DNA, 20 bp, Artificial Sequence
  Description of Artificial Sequence: Synthetic oligonucleotide
  Target: LAMA2; (-) strand; PAM type: YTN; PAM sequence: TTA
tttttgtctacttggccctg

SEQ ID NO: 225741 - DNA, 20 bp, Artificial Sequence
  Description of Artificial Sequence: Synthetic oligonucleotide
  Target: LAMA2; (-) strand; PAM type: YTN; PAM sequence: TTA
ttatttttgtctacttggcc

SEQ ID NO: 225742 - DNA, 20 bp, Artificial Sequence
  Description of Artificial Sequence: Synthetic oligonucleotide
  Target: LAMA2; (-) strand; PAM type: YTN; PAM sequence: TTA
ttattatttttgtctacttg

SEQ ID NO: 225743 - DNA, 20 bp, Artificial Sequence
  Description of Artificial Sequence: Synthetic oligonucleotide
  Target: LAMA2; (-) strand; PAM type: YTN; PAM sequence: TTT
attattatttttgtctactt

SEQ ID NO: 225744 - DNA, 20 bp, Artificial Sequence
  Description of Artificial Sequence: Synthetic oligonucleotide
  Target: LAMA2; (-) strand; PAM type: YTN; PAM sequence: TTT
tattattatttttgtctact

SEQ ID NO: 225745 - DNA, 20 bp, Artificial Sequence
  Description of Artificial Sequence: Synthetic oligonucleotide
  Target: LAMA2; (-) strand; PAM type: YTN; PAM sequence: TTG
tggttttattattatttttg

SEQ ID NO: 225746 - DNA, 20 bp, Artificial Sequence
  Description of Artificial Sequence: Synthetic oligonucleotide
  Target: LAMA2; (-) strand; PAM type: YTN; PAM sequence: TTG
ttgtggttttattattattt

SEQ ID NO: 225747 - DNA, 20 bp, Artificial Sequence
  Description of Artificial Sequence: Synthetic oligonucleotide
  Target: LAMA2; (-) strand; PAM type: YTN; PAM sequence: TTA
ttgttgtggttttattatta

SEQ ID NO: 225748 - DNA, 20 bp, Artificial Sequence
  Description of Artificial Sequence: Synthetic oligonucleotide
  Target: LAMA2; (-) strand; PAM type: YTN; PAM sequence: TTA
ttattgttgtggttttatta

SEQ ID NO: 225749 - DNA, 20 bp, Artificial Sequence
  Description of Artificial Sequence: Synthetic oligonucleotide
  Target: LAMA2; (-) strand; PAM type: YTN; PAM sequence: TTA
ttattattgttgtggtttta

SEQ ID NO: 225750 - DNA, 20 bp, Artificial Sequence
  Description of Artificial Sequence: Synthetic oligonucleotide
  Target: LAMA2; (-) strand; PAM type: YTN; PAM sequence: TTA
ttattattattgttgtggtt

SEQ ID NO: 225751 - DNA, 20 bp, Artificial Sequence
  Description of Artificial Sequence: Synthetic oligonucleotide
  Target: LAMA2; (-) strand; PAM type: YTN; PAM sequence: TTA
ttattattattattgttgtg

SEQ ID NO: 225752 - DNA, 20 bp, Artificial Sequence
  Description of Artificial Sequence: Synthetic oligonucleotide
  Target: LAMA2; (-) strand; PAM type: YTN; PAM sequence: TTT
attattattattattgttgt

SEQ ID NO: 225753 - DNA, 20 bp, Artificial Sequence
  Description of Artificial Sequence: Synthetic oligonucleotide
  Target: LAMA2; (-) strand; PAM type: YTN; PAM sequence: CTA
gccatcatttattattatta

SEQ ID NO: 225754 - DNA, 20 bp, Artificial Sequence
  Description of Artificial Sequence: Synthetic oligonucleotide
  Target: LAMA2; (-) strand; PAM type: YTN; PAM sequence: CTC
cataaaataaatgtgcaaca

SEQ ID NO: 225755 - DNA, 20 bp, Artificial Sequence
  Description of Artificial Sequence: Synthetic oligonucleotide
  Target: LAMA2; (-) strand; PAM type: YTN; PAM sequence: TTA
acaccctccataaaataaat

SEQ ID NO: 225756 - DNA, 20 bp, Artificial Sequence
  Description of Artificial Sequence: Synthetic oligonucleotide
  Target: LAMA2; (-) strand; PAM type: YTN; PAM sequence: TTA
gattaacaccctccataaaa

SEQ ID NO: 225757 - DNA, 20 bp, Artificial Sequence
  Description of Artificial Sequence: Synthetic oligonucleotide
  Target: LAMA2; (-) strand; PAM type: YTN; PAM sequence: CTT
agattaacaccctccataaa

SEQ ID NO: 225758 - DNA, 20 bp, Artificial Sequence
  Description of Artificial Sequence: Synthetic oligonucleotide
  Target: LAMA2; (-) strand; PAM type: YTN; PAM sequence: TTC
ttagattaacaccctccata

SEQ ID NO: 225759 - DNA, 20 bp, Artificial Sequence
  Description of Artificial Sequence: Synthetic oligonucleotide
  Target: LAMA2; (-) strand; PAM type: YTN; PAM sequence: TTT
cttagattaacaccctccat

SEQ ID NO: 225760 - DNA, 20 bp, Artificial Sequence
  Description of Artificial Sequence: Synthetic oligonucleotide
  Target: LAMA2; (-) strand; PAM type: YTN; PAM sequence: TTA
tacatgggaaatttcttaga

SEQ ID NO: 225761 - DNA, 20 bp, Artificial Sequence
  Description of Artificial Sequence: Synthetic oligonucleotide
  Target: LAMA2; (-) strand; PAM type: YTN; PAM sequence: TTT
atacatgggaaatttcttag

SEQ ID NO: 225762 - DNA, 20 bp, Artificial Sequence
  Description of Artificial Sequence: Synthetic oligonucleotide
  Target: LAMA2; (-) strand; PAM type: YTN; PAM sequence: TTA
gtatatatgaatttatacat

SEQ ID NO: 225763 - DNA, 20 bp, Artificial Sequence
  Description of Artificial Sequence: Synthetic oligonucleotide
  Target: LAMA2; (-) strand; PAM type: YTN; PAM sequence: CTG
taaaatgcgacaagtattag

SEQ ID NO: 225764 - DNA, 20 bp, Artificial Sequence
  Description of Artificial Sequence: Synthetic oligonucleotide
  Target: LAMA2; (-) strand; PAM type: YTN; PAM sequence: CTC
aactgtaaaatgcgacaagt

SEQ ID NO: 225765 - DNA, 20 bp, Artificial Sequence
  Description of Artificial Sequence: Synthetic oligonucleotide
  Target: LAMA2; (-) strand; PAM type: YTN; PAM sequence: TTC
tcaactgtaaaatgcgacaa

SEQ ID NO: 225766 - DNA, 20 bp, Artificial Sequence
  Description of Artificial Sequence: Synthetic oligonucleotide
  Target: LAMA2; (-) strand; PAM type: YTN; PAM sequence: TTT
ctcaactgtaaaatgcgaca

SEQ ID NO: 225767 - DNA, 20 bp, Artificial Sequence
  Description of Artificial Sequence: Synthetic oligonucleotide
  Target: LAMA2; (-) strand; PAM type: YTN; PAM sequence: CTG
tttctcaactgtaaaatgcg

SEQ ID NO: 225768 - DNA, 20 bp, Artificial Sequence
  Description of Artificial Sequence: Synthetic oligonucleotide
  Target: LAMA2; (-) strand; PAM type: YTN; PAM sequence: CTG
taatacctgtttctcaactg

SEQ ID NO: 225769 - DNA, 20 bp, Artificial Sequence
  Description of Artificial Sequence: Synthetic oligonucleotide
  Target: LAMA2; (-) strand; PAM type: YTN; PAM sequence: CTC
tgtaatacctgtttctcaac

SEQ ID NO: 225770 - DNA, 20 bp, Artificial Sequence
  Description of Artificial Sequence: Synthetic oligonucleotide
  Target: LAMA2; (-) strand; PAM type: YTN; PAM sequence: CTC
tctgtaatacctgtttctca

SEQ ID NO: 225771 - DNA, 20 bp, Artificial Sequence
  Description of Artificial Sequence: Synthetic oligonucleotide
  Target: LAMA2; (-) strand; PAM type: YTN; PAM sequence: TTG
acctctctgtaatacctgtt

SEQ ID NO: 225772 - DNA, 20 bp, Artificial Sequence
  Description of Artificial Sequence: Synthetic oligonucleotide
  Target: LAMA2; (-) strand; PAM type: YTN; PAM sequence: TTT
gacctctctgtaatacctgt

SEQ ID NO: 225773 - DNA, 20 bp, Artificial Sequence
  Description of Artificial Sequence: Synthetic oligonucleotide
  Target: LAMA2; (-) strand; PAM type: YTN; PAM sequence: TTA
tttgacctctctgtaatacc

SEQ ID NO: 225774 - DNA, 20 bp, Artificial Sequence
  Description of Artificial Sequence: Synthetic oligonucleotide
  Target: LAMA2; (-) strand; PAM type: YTN; PAM sequence: CTG
ggaaagttatttgacctctc

SEQ ID NO: 225775 - DNA, 20 bp, Artificial Sequence
  Description of Artificial Sequence: Synthetic oligonucleotide
  Target: LAMA2; (-) strand; PAM type: YTN; PAM sequence: CTG
tggaaccctgggaaagttat

SEQ ID NO: 225776 - DNA, 20 bp, Artificial Sequence
  Description of Artificial Sequence: Synthetic oligonucleotide
  Target: LAMA2; (-) strand; PAM type: YTN; PAM sequence: CTA
gctgtggaaccctgggaaag

SEQ ID NO: 225777 - DNA, 20 bp, Artificial Sequence
  Description of Artificial Sequence: Synthetic oligonucleotide
  Target: LAMA2; (-) strand; PAM type: YTN; PAM sequence: TTA
ctagctgtggaaccctggga

SEQ ID NO: 225778 - DNA, 20 bp, Artificial Sequence
  Description of Artificial Sequence: Synthetic oligonucleotide
  Target: LAMA2; (-) strand; PAM type: YTN; PAM sequence: CTC
caaaaattactagctgtgga

SEQ ID NO: 225779 - DNA, 20 bp, Artificial Sequence
  Description of Artificial Sequence: Synthetic oligonucleotide
  Target: LAMA2; (-) strand; PAM type: YTN; PAM sequence: TTC
aaatcacagctccaaaaatt

SEQ ID NO: 225780 - DNA, 20 bp, Artificial Sequence
  Description of Artificial Sequence: Synthetic oligonucleotide
  Target: LAMA2; (-) strand; PAM type: YTN; PAM sequence: CTG
aattcaaatcacagctccaa

SEQ ID NO: 225781 - DNA, 20 bp, Artificial Sequence
  Description of Artificial Sequence: Synthetic oligonucleotide
  Target: LAMA2; (-) strand; PAM type: YTN; PAM sequence: CTG
agaatacactgaattcaaat

SEQ ID NO: 225782 - DNA, 20 bp, Artificial Sequence
  Description of Artificial Sequence: Synthetic oligonucleotide
  Target: LAMA2; (-) strand; PAM type: YTN; PAM sequence: CTC
tgagaatacactgaattcaa

SEQ ID NO: 225783 - DNA, 20 bp, Artificial Sequence
  Description of Artificial Sequence: Synthetic oligonucleotide
  Target: LAMA2; (-) strand; PAM type: YTN; PAM sequence: CTG
gtgctctgagaatacactga

SEQ ID NO: 225784 - DNA, 20 bp, Artificial Sequence
  Description of Artificial Sequence: Synthetic oligonucleotide
  Target: LAMA2; (-) strand; PAM type: YTN; PAM sequence: TTC
tggtgctctgagaatacact

SEQ ID NO: 225785 - DNA, 20 bp, Artificial Sequence
  Description of Artificial Sequence: Synthetic oligonucleotide
  Target: LAMA2; (-) strand; PAM type: YTN; PAM sequence: TTT
ctggtgctctgagaatacac

SEQ ID NO: 225786 - DNA, 20 bp, Artificial Sequence
  Description of Artificial Sequence: Synthetic oligonucleotide
  Target: LAMA2; (-) strand; PAM type: YTN; PAM sequence: CTT
tctggtgctctgagaataca

SEQ ID NO: 225787 - DNA, 20 bp, Artificial Sequence
  Description of Artificial Sequence: Synthetic oligonucleotide
  Target: LAMA2; (-) strand; PAM type: YTN; PAM sequence: TTG
tacctttctggtgctctgag

SEQ ID NO: 225788 - DNA, 20 bp, Artificial Sequence
  Description of Artificial Sequence: Synthetic oligonucleotide
  Target: LAMA2; (-) strand; PAM type: YTN; PAM sequence: TTT
gtacctttctggtgctctga

SEQ ID NO: 225789 - DNA, 20 bp, Artificial Sequence
  Description of Artificial Sequence: Synthetic oligonucleotide
  Target: LAMA2; (-) strand; PAM type: YTN; PAM sequence: CTT
tgtacctttctggtgctctg

SEQ ID NO: 225790 - DNA, 20 bp, Artificial Sequence
  Description of Artificial Sequence: Synthetic oligonucleotide
  Target: LAMA2; (-) strand; PAM type: YTN; PAM sequence: TTA
gctttgtacctttctggtgc

SEQ ID NO: 225791 - DNA, 20 bp, Artificial Sequence
  Description of Artificial Sequence: Synthetic oligonucleotide
  Target: LAMA2; (-) strand; PAM type: YTN; PAM sequence: TTT
agctttgtacctttctggtg

SEQ ID NO: 225792 - DNA, 20 bp, Artificial Sequence
  Description of Artificial Sequence: Synthetic oligonucleotide
  Target: LAMA2; (-) strand; PAM type: YTN; PAM sequence: TTT
tagctttgtacctttctggt

SEQ ID NO: 225793 - DNA, 20 bp, Artificial Sequence
  Description of Artificial Sequence: Synthetic oligonucleotide
  Target: LAMA2; (-) strand; PAM type: YTN; PAM sequence: CTT
ttagctttgtacctttctgg

SEQ ID NO: 225794 - DNA, 20 bp, Artificial Sequence
  Description of Artificial Sequence: Synthetic oligonucleotide
  Target: LAMA2; (-) strand; PAM type: YTN; PAM sequence: TTC
caggaaaccccagacacaga

SEQ ID NO: 225795 - DNA, 20 bp, Artificial Sequence
  Description of Artificial Sequence: Synthetic oligonucleotide
  Target: LAMA2; (-) strand; PAM type: YTN; PAM sequence: TTT
ccaggaaaccccagacacag

SEQ ID NO: 225796 - DNA, 20 bp, Artificial Sequence
  Description of Artificial Sequence: Synthetic oligonucleotide
  Target: LAMA2; (-) strand; PAM type: YTN; PAM sequence: TTT
tccaggaaaccccagacaca

SEQ ID NO: 225797 - DNA, 20 bp, Artificial Sequence
  Description of Artificial Sequence: Synthetic oligonucleotide
  Target: LAMA2; (-) strand; PAM type: YTN; PAM sequence: TTA
tagggcagagcagattttcc

SEQ ID NO: 225798 - DNA, 20 bp, Artificial Sequence
  Description of Artificial Sequence: Synthetic oligonucleotide
  Target: LAMA2; (-) strand; PAM type: YTN; PAM sequence: CTT
atagggcagagcagattttc

SEQ ID NO: 225799 - DNA, 20 bp, Artificial Sequence
  Description of Artificial Sequence: Synthetic oligonucleotide
  Target: LAMA2; (-) strand; PAM type: YTN; PAM sequence: CTG
agcttatagggcagagcaga

SEQ ID NO: 225800 - DNA, 20 bp, Artificial Sequence
  Description of Artificial Sequence: Synthetic oligonucleotide
  Target: LAMA2; (-) strand; PAM type: YTN; PAM sequence: CTC
ctgagcttatagggcagagc

SEQ ID NO: 225801 - DNA, 20 bp, Artificial Sequence
  Description of Artificial Sequence: Synthetic oligonucleotide
  Target: LAMA2; (-) strand; PAM type: YTN; PAM sequence: CTA
ggaggggggactcctgagct

SEQ ID NO: 225802 - DNA, 20 bp, Artificial Sequence
  Description of Artificial Sequence: Synthetic oligonucleotide
  Target: LAMA2; (-) strand; PAM type: YTN; PAM sequence: CTG
ctaggaggggggactcctga

SEQ ID NO: 225803 - DNA, 20 bp, Artificial Sequence
  Description of Artificial Sequence: Synthetic oligonucleotide
  Target: LAMA2; (-) strand; PAM type: YTN; PAM sequence: TTC
agcaggaactgctaggaggg

SEQ ID NO: 225804 - DNA, 20 bp, Artificial Sequence
  Description of Artificial Sequence: Synthetic oligonucleotide
  Target: LAMA2; (-) strand; PAM type: YTN; PAM sequence: CTT
cagcaggaactgctaggagg

SEQ ID NO: 225805 - DNA, 20 bp, Artificial Sequence
  Description of Artificial Sequence: Synthetic oligonucleotide
  Target: LAMA2; (-) strand; PAM type: YTN; PAM sequence: CTC
acatagagcttcagcaggaa

SEQ ID NO: 225806 - DNA, 20 bp, Artificial Sequence
  Description of Artificial Sequence: Synthetic oligonucleotide
  Target: LAMA2; (-) strand; PAM type: YTN; PAM sequence: CTG
tgcaatctcacatagagctt

SEQ ID NO: 225807 - DNA, 20 bp, Artificial Sequence
  Description of Artificial Sequence: Synthetic oligonucleotide
  Target: LAMA2; (-) strand; PAM type: YTN; PAM sequence: CTC
aggtctgtgcaatctcacat

SEQ ID NO: 225808 - DNA, 20 bp, Artificial Sequence
  Description of Artificial Sequence: Synthetic oligonucleotide
  Target: LAMA2; (-) strand; PAM type: YTN; PAM sequence: CTC
aaactcaggtctgtgcaatc

SEQ ID NO: 225809 - DNA, 20 bp, Artificial Sequence
  Description of Artificial Sequence: Synthetic oligonucleotide
  Target: LAMA2; (-) strand; PAM type: YTN; PAM sequence: CTA
aaaccccaaaataaaaaata

SEQ ID NO: 225810 - DNA, 20 bp, Artificial Sequence
  Description of Artificial Sequence: Synthetic oligonucleotide
  Target: LAMA2; (-) strand; PAM type: YTN; PAM sequence: CTA
aaacatgaaaatactaaaac

SEQ ID NO: 225811 - DNA, 20 bp, Artificial Sequence
  Description of Artificial Sequence: Synthetic oligonucleotide
  Target: LAMA2; (-) strand; PAM type: YTN; PAM sequence: TTA
acctaaaacatgaaaatact

SEQ ID NO: 225812 - DNA, 20 bp, Artificial Sequence
  Description of Artificial Sequence: Synthetic oligonucleotide
  Target: LAMA2; (-) strand; PAM type: YTN; PAM sequence: TTT
aacctaaaacatgaaaatac

SEQ ID NO: 225813 - DNA, 20 bp, Artificial Sequence
  Description of Artificial Sequence: Synthetic oligonucleotide
  Target: LAMA2; (-) strand; PAM type: YTN; PAM sequence: TTT
taacctaaaacatgaaaata

SEQ ID NO: 225814 - DNA, 20 bp, Artificial Sequence
  Description of Artificial Sequence: Synthetic oligonucleotide
  Target: LAMA2; (-) strand; PAM type: YTN; PAM sequence: TTT
ttaacctaaaacatgaaaat

SEQ ID NO: 225815 - DNA, 20 bp, Artificial Sequence
  Description of Artificial Sequence: Synthetic oligonucleotide
  Target: LAMA2; (-) strand; PAM type: YTN; PAM sequence: TTT
tttaacctaaaacatgaaaa

SEQ ID NO: 225816 - DNA, 20 bp, Artificial Sequence
  Description of Artificial Sequence: Synthetic oligonucleotide
  Target: LAMA2; (-) strand; PAM type: YTN; PAM sequence: TTT
ttttaacctaaaacatgaaa

SEQ ID NO: 225817 - DNA, 20 bp, Artificial Sequence
  Description of Artificial Sequence: Synthetic oligonucleotide
  Target: LAMA2; (-) strand; PAM type: YTN; PAM sequence: CTA
aaaggtaaagaattttttta

SEQ ID NO: 225818 - DNA, 20 bp, Artificial Sequence
  Description of Artificial Sequence: Synthetic oligonucleotide
  Target: LAMA2; (-) strand; PAM type: YTN; PAM sequence: TTC
atcaaagctaaaaggtaaag

SEQ ID NO: 225819 - DNA, 20 bp, Artificial Sequence
  Description of Artificial Sequence: Synthetic oligonucleotide
  Target: LAMA2; (-) strand; PAM type: YTN; PAM sequence: TTA
gatataaaaatgaagtaatt

SEQ ID NO: 225820 - DNA, 20 bp, Artificial Sequence
  Description of Artificial Sequence: Synthetic oligonucleotide
  Target: LAMA2; (-) strand; PAM type: YTN; PAM sequence: CTA
ttagatataaaaatgaagta

SEQ ID NO: 225821 - DNA, 20 bp, Artificial Sequence
  Description of Artificial Sequence: Synthetic oligonucleotide
  Target: LAMA2; (-) strand; PAM type: YTN; PAM sequence: TTA
aaaaaacctattagatataa

SEQ ID NO: 225822 - DNA, 20 bp, Artificial Sequence
  Description of Artificial Sequence: Synthetic oligonucleotide
  Target: LAMA2; (-) strand; PAM type: YTN; PAM sequence: TTA
aagtgaaggttaaaaaaacc

SEQ ID NO: 225823 - DNA, 20 bp, Artificial Sequence
  Description of Artificial Sequence: Synthetic oligonucleotide
  Target: LAMA2; (-) strand; PAM type: YTN; PAM sequence: TTA
agaaatcaattaaagtgaag

SEQ ID NO: 225824 - DNA, 20 bp, Artificial Sequence
  Description of Artificial Sequence: Synthetic oligonucleotide
  Target: LAMA2; (-) strand; PAM type: YTN; PAM sequence: TTA
aaaaatgagcaagataaaga

SEQ ID NO: 225825 - DNA, 20 bp, Artificial Sequence
  Description of Artificial Sequence: Synthetic oligonucleotide
  Target: LAMA2; (-) strand; PAM type: YTN; PAM sequence: TTA
aaaagattaaaaaatgagca

SEQ ID NO: 225826 - DNA, 20 bp, Artificial Sequence
  Description of Artificial Sequence: Synthetic oligonucleotide
  Target: LAMA2; (-) strand; PAM type: YTN; PAM sequence: TTA
aaatcattaaaaagattaaa

SEQ ID NO: 225827 - DNA, 20 bp, Artificial Sequence
  Description of Artificial Sequence: Synthetic oligonucleotide
  Target: LAMA2; (-) strand; PAM type: YTN; PAM sequence: TTT
aaaatcattaaaaagattaa

SEQ ID NO: 225828 - DNA, 20 bp, Artificial Sequence
  Description of Artificial Sequence: Synthetic oligonucleotide
  Target: LAMA2; (-) strand; PAM type: YTN; PAM sequence: TTT
taaaatcattaaaaagatta

SEQ ID NO: 225829 - DNA, 20 bp, Artificial Sequence
  Description of Artificial Sequence: Synthetic oligonucleotide
  Target: LAMA2; (-) strand; PAM type: YTN; PAM sequence: TTA
aaatcagcattttaaaatca

SEQ ID NO: 225830 - DNA, 20 bp, Artificial Sequence
  Description of Artificial Sequence: Synthetic oligonucleotide
  Target: LAMA2; (-) strand; PAM type: YTN; PAM sequence: TTA
ttaaaatcagcattttaaaa

SEQ ID NO: 225831 - DNA, 20 bp, Artificial Sequence
  Description of Artificial Sequence: Synthetic oligonucleotide
  Target: LAMA2; (-) strand; PAM type: YTN; PAM sequence: CTG
ataaatataaatatgccaag

SEQ ID NO: 225832 - DNA, 20 bp, Artificial Sequence
  Description of Artificial Sequence: Synthetic oligonucleotide
  Target: LAMA2; (-) strand; PAM type: YTN; PAM sequence: TTG
aagcagaaaaactgataaat

SEQ ID NO: 225833 - DNA, 20 bp, Artificial Sequence
  Description of Artificial Sequence: Synthetic oligonucleotide
  Target: LAMA2; (-) strand; PAM type: YTN; PAM sequence: CTT
gaagcagaaaaactgataaa

SEQ ID NO: 225834 - DNA, 20 bp, Artificial Sequence
  Description of Artificial Sequence: Synthetic oligonucleotide
  Target: LAMA2; (-) strand; PAM type: YTN; PAM sequence: TTG
ccagaataaagcttgaagca

SEQ ID NO: 225835 - DNA, 20 bp, Artificial Sequence
  Description of Artificial Sequence: Synthetic oligonucleotide
  Target: LAMA2; (-) strand; PAM type: YTN; PAM sequence: TTT
gccagaataaagcttgaagc

SEQ ID NO: 225836 - DNA, 20 bp, Artificial Sequence
  Description of Artificial Sequence: Synthetic oligonucleotide
  Target: LAMA2; (-) strand; PAM type: YTN; PAM sequence: TTA
aaaaacaacacaaaagaaat

SEQ ID NO: 225837 - DNA, 20 bp, Artificial Sequence
  Description of Artificial Sequence: Synthetic oligonucleotide
  Target: LAMA2; (-) strand; PAM type: YTN; PAM sequence: TTT
aaaaaacaacacaaaagaaa

SEQ ID NO: 225838 - DNA, 20 bp, Artificial Sequence
  Description of Artificial Sequence: Synthetic oligonucleotide
  Target: LAMA2; (-) strand; PAM type: YTN; PAM sequence: TTC
cagaaacaaaaataaaaaat

SEQ ID NO: 225839 - DNA, 20 bp, Artificial Sequence
  Description of Artificial Sequence: Synthetic oligonucleotide
  Target: LAMA2; (-) strand; PAM type: YTN; PAM sequence: TTA
aattccagaaacaaaaataa

SEQ ID NO: 225840 - DNA, 20 bp, Artificial Sequence
  Description of Artificial Sequence: Synthetic oligonucleotide
  Target: LAMA2; (-) strand; PAM type: YTN; PAM sequence: CTG
acatacattaaattccagaa

SEQ ID NO: 225841 - DNA, 20 bp, Artificial Sequence
  Description of Artificial Sequence: Synthetic oligonucleotide
  Target: LAMA2; (-) strand; PAM type: YTN; PAM sequence: TTG
cacaactgacatacattaaa

SEQ ID NO: 225842 - DNA, 20 bp, Artificial Sequence
  Description of Artificial Sequence: Synthetic oligonucleotide
  Target: LAMA2; (-) strand; PAM type: YTN; PAM sequence: CTA
ttgcacaactgacatacatt

SEQ ID NO: 225843 - DNA, 20 bp, Artificial Sequence
  Description of Artificial Sequence: Synthetic oligonucleotide
  Target: LAMA2; (-) strand; PAM type: YTN; PAM sequence: CTA
acaagtctattgcacaactg

SEQ ID NO: 225844 - DNA, 20 bp, Artificial Sequence
  Description of Artificial Sequence: Synthetic oligonucleotide
  Target: LAMA2; (-) strand; PAM type: YTN; PAM sequence: TTC
taacaagtctattgcacaac

SEQ ID NO: 225845 - DNA, 20 bp, Artificial Sequence
  Description of Artificial Sequence: Synthetic oligonucleotide
  Target: LAMA2; (-) strand; PAM type: YTN; PAM sequence: TTA
aagcaaacaaaattctaaca

SEQ ID NO: 225846 - DNA, 20 bp, Artificial Sequence
  Description of Artificial Sequence: Synthetic oligonucleotide
  Target: LAMA2; (-) strand; PAM type: YTN; PAM sequence: TTA
ttaaagcaaacaaaattcta

SEQ ID NO: 225847 - DNA, 20 bp, Artificial Sequence
  Description of Artificial Sequence: Synthetic oligonucleotide
  Target: LAMA2; (-) strand; PAM type: YTN; PAM sequence: TTA
aaaattattaaagcaaacaa

SEQ ID NO: 225848 - DNA, 20 bp, Artificial Sequence
  Description of Artificial Sequence: Synthetic oligonucleotide
  Target: LAMA2; (-) strand; PAM type: YTN; PAM sequence: TTT
aaaaattattaaagcaaaca

SEQ ID NO: 225849 - DNA, 20 bp, Artificial Sequence
  Description of Artificial Sequence: Synthetic oligonucleotide
  Target: LAMA2; (-) strand; PAM type: YTN; PAM sequence: CTT
taaaaattattaaagcaaac

SEQ ID NO: 225850 - DNA, 20 bp, Artificial Sequence
  Description of Artificial Sequence: Synthetic oligonucleotide
  Target: LAMA2; (-) strand; PAM type: YTN; PAM sequence: CTA
agagtaaaatgatcaaaagt

SEQ ID NO: 225851 - DNA, 20 bp, Artificial Sequence
  Description of Artificial Sequence: Synthetic oligonucleotide
  Target: LAMA2; (-) strand; PAM type: YTN; PAM sequence: CTC
aaaataagctaagagtaaaa

SEQ ID NO: 225852 - DNA, 20 bp, Artificial Sequence
  Description of Artificial Sequence: Synthetic oligonucleotide
  Target: LAMA2; (-) strand; PAM type: YTN; PAM sequence: TTA
gacatcaaaagctcaaaata

SEQ ID NO: 225853 - DNA, 20 bp, Artificial Sequence
  Description of Artificial Sequence: Synthetic oligonucleotide
  Target: LAMA2; (-) strand; PAM type: YTN; PAM sequence: TTT
agacatcaaaagctcaaaat

SEQ ID NO: 225854 - DNA, 20 bp, Artificial Sequence
  Description of Artificial Sequence: Synthetic oligonucleotide
  Target: LAMA2; (-) strand; PAM type: YTN; PAM sequence: TTA
tatttagacatcaaaagctc

SEQ ID NO: 225855 - DNA, 20 bp, Artificial Sequence
  Description of Artificial Sequence: Synthetic oligonucleotide
  Target: LAMA2; (-) strand; PAM type: YTN; PAM sequence: CTA
gacaaacaaagttatattta

SEQ ID NO: 225856 - DNA, 20 bp, Artificial Sequence
  Description of Artificial Sequence: Synthetic oligonucleotide
  Target: LAMA2; (-) strand; PAM type: YTN; PAM sequence: CTA
aaacactagacaaacaaagt

SEQ ID NO: 225857 - DNA, 20 bp, Artificial Sequence
  Description of Artificial Sequence: Synthetic oligonucleotide
  Target: LAMA2; (-) strand; PAM type: YTN; PAM sequence: CTA
aagacactaaaacactagac

SEQ ID NO: 225858 - DNA, 20 bp, Artificial Sequence
  Description of Artificial Sequence: Synthetic oligonucleotide
  Target: LAMA2; (-) strand; PAM type: YTN; PAM sequence: TTG
ccatgtagaagcaatgacta

SEQ ID NO: 225859 - DNA, 20 bp, Artificial Sequence
  Description of Artificial Sequence: Synthetic oligonucleotide
  Target: LAMA2; (-) strand; PAM type: YTN; PAM sequence: CTA
ttgccatgtagaagcaatga

SEQ ID NO: 225860 - DNA, 20 bp, Artificial Sequence
  Description of Artificial Sequence: Synthetic oligonucleotide
  Target: LAMA2; (-) strand; PAM type: YTN; PAM sequence: TTC
ctattgccatgtagaagcaa

SEQ ID NO: 225861 - DNA, 20 bp, Artificial Sequence
  Description of Artificial Sequence: Synthetic oligonucleotide
  Target: LAMA2; (-) strand; PAM type: YTN; PAM sequence: TTT
cctattgccatgtagaagca

SEQ ID NO: 225862 - DNA, 20 bp, Artificial Sequence
  Description of Artificial Sequence: Synthetic oligonucleotide
  Target: LAMA2; (-) strand; PAM type: YTN; PAM sequence: TTA
tggtcatatttcctattgcc

SEQ ID NO: 225863 - DNA, 20 bp, Artificial Sequence
  Description of Artificial Sequence: Synthetic oligonucleotide
  Target: LAMA2; (-) strand; PAM type: YTN; PAM sequence: TTT
atggtcatatttcctattgc

SEQ ID NO: 225864 - DNA, 20 bp, Artificial Sequence
  Description of Artificial Sequence: Synthetic oligonucleotide
  Target: LAMA2; (-) strand; PAM type: YTN; PAM sequence: TTT
tatggtcatatttcctattg

SEQ ID NO: 225865 - DNA, 20 bp, Artificial Sequence
  Description of Artificial Sequence: Synthetic oligonucleotide
  Target: LAMA2; (-) strand; PAM type: YTN; PAM sequence: TTT
ttatggtcatatttcctatt

SEQ ID NO: 225866 - DNA, 20 bp, Artificial Sequence
  Description of Artificial Sequence: Synthetic oligonucleotide
  Target: LAMA2; (-) strand; PAM type: YTN; PAM sequence: CTG
aggtttttatggtcatattt

SEQ ID NO: 225867 - DNA, 20 bp, Artificial Sequence
  Description of Artificial Sequence: Synthetic oligonucleotide
  Target: LAMA2; (-) strand; PAM type: YTN; PAM sequence: TTC
actgaggtttttatggtcat

SEQ ID NO: 225868 - DNA, 20 bp, Artificial Sequence
  Description of Artificial Sequence: Synthetic oligonucleotide
  Target: LAMA2; (-) strand; PAM type: YTN; PAM sequence: TTT
cactgaggtttttatggtca

SEQ ID NO: 225869 - DNA, 20 bp, Artificial Sequence
  Description of Artificial Sequence: Synthetic oligonucleotide
  Target: LAMA2; (-) strand; PAM type: YTN; PAM sequence: CTT
tcactgaggtttttatggtc

SEQ ID NO: 225870 - DNA, 20 bp, Artificial Sequence
  Description of Artificial Sequence: Synthetic oligonucleotide
  Target: LAMA2; (-) strand; PAM type: YTN; PAM sequence: TTA
ctttcactgaggtttttatg

SEQ ID NO: 225871 - DNA, 20 bp, Artificial Sequence
  Description of Artificial Sequence: Synthetic oligonucleotide
  Target: LAMA2; (-) strand; PAM type: YTN; PAM sequence: CTA
aatgtgggttactttcactg

SEQ ID NO: 225872 - DNA, 20 bp, Artificial Sequence
  Description of Artificial Sequence: Synthetic oligonucleotide
  Target: LAMA2; (-) strand; PAM type: YTN; PAM sequence: CTC
taaatgtgggttactttcac

SEQ ID NO: 225873 - DNA, 20 bp, Artificial Sequence
  Description of Artificial Sequence: Synthetic oligonucleotide
  Target: LAMA2; (-) strand; PAM type: YTN; PAM sequence: TTC
tctaaatgtgggttactttc

SEQ ID NO: 225874 - DNA, 20 bp, Artificial Sequence
  Description of Artificial Sequence: Synthetic oligonucleotide
  Target: LAMA2; (-) strand; PAM type: YTN; PAM sequence: CTT
ctctaaatgtgggttacttt

SEQ ID NO: 225875 - DNA, 20 bp, Artificial Sequence
  Description of Artificial Sequence: Synthetic oligonucleotide
  Target: LAMA2; (-) strand; PAM type: YTN; PAM sequence: TTA
aggaatacaagccttctcta

SEQ ID NO: 225876 - DNA, 20 bp, Artificial Sequence
  Description of Artificial Sequence: Synthetic oligonucleotide
  Target: LAMA2; (-) strand; PAM type: YTN; PAM sequence: TTG
aatgggtggggtgtgtagag

SEQ ID NO: 225877 - DNA, 20 bp, Artificial Sequence
  Description of Artificial Sequence: Synthetic oligonucleotide
  Target: LAMA2; (-) strand; PAM type: YTN; PAM sequence: CTA
cagatgggttgaatgggtgg

SEQ ID NO: 225878 - DNA, 20 bp, Artificial Sequence
  Description of Artificial Sequence: Synthetic oligonucleotide
  Target: LAMA2; (-) strand; PAM type: YTN; PAM sequence: CTG
aaagggaggctacagatggg

SEQ ID NO: 225879 - DNA, 20 bp, Artificial Sequence
  Description of Artificial Sequence: Synthetic oligonucleotide
  Target: LAMA2; (-) strand; PAM type: YTN; PAM sequence: TTA
agaacagctgaaagggaggc

SEQ ID NO: 225880 - DNA, 20 bp, Artificial Sequence
  Description of Artificial Sequence: Synthetic oligonucleotide
  Target: LAMA2; (-) strand; PAM type: YTN; PAM sequence: TTT
aagaacagctgaaagggagg

SEQ ID NO: 225881 - DNA, 20 bp, Artificial Sequence
  Description of Artificial Sequence: Synthetic oligonucleotide
  Target: LAMA2; (-) strand; PAM type: YTN; PAM sequence: TTT
taagaacagctgaaagggag

SEQ ID NO: 225882 - DNA, 20 bp, Artificial Sequence
  Description of Artificial Sequence: Synthetic oligonucleotide
  Target: LAMA2; (-) strand; PAM type: YTN; PAM sequence: CTT
ttaagaacagctgaaaggga

SEQ ID NO: 225883 - DNA, 20 bp, Artificial Sequence
  Description of Artificial Sequence: Synthetic oligonucleotide
  Target: LAMA2; (-) strand; PAM type: YTN; PAM sequence: TTA
aaagggaaggtcttttaaga

SEQ ID NO: 225884 - DNA, 20 bp, Artificial Sequence
  Description of Artificial Sequence: Synthetic oligonucleotide
  Target: LAMA2; (-) strand; PAM type: YTN; PAM sequence: CTT
aaaagggaaggtcttttaag

SEQ ID NO: 225885 - DNA, 20 bp, Artificial Sequence
  Description of Artificial Sequence: Synthetic oligonucleotide
  Target: LAMA2; (-) strand; PAM type: YTN; PAM sequence: TTC
ccttaaaagggaaggtcttt

SEQ ID NO: 225886 - DNA, 20 bp, Artificial Sequence
  Description of Artificial Sequence: Synthetic oligonucleotide
  Target: LAMA2; (-) strand; PAM type: YTN; PAM sequence: TTG
aagggaaaatgtaagttccc

SEQ ID NO: 225887 - DNA, 20 bp, Artificial Sequence
  Description of Artificial Sequence: Synthetic oligonucleotide
  Target: LAMA2; (-) strand; PAM type: YTN; PAM sequence: TTA
gtattgaagggaaaatgtaa

SEQ ID NO: 225888 - DNA, 20 bp, Artificial Sequence
  Description of Artificial Sequence: Synthetic oligonucleotide
  Target: LAMA2; (-) strand; PAM type: YTN; PAM sequence: TTT
agtattgaagggaaaatgta

SEQ ID NO: 225889 - DNA, 20 bp, Artificial Sequence
  Description of Artificial Sequence: Synthetic oligonucleotide
  Target: LAMA2; (-) strand; PAM type: YTN; PAM sequence: TTG
ggatttagtattgaagggaa

SEQ ID NO: 225890 - DNA, 20 bp, Artificial Sequence
  Description of Artificial Sequence: Synthetic oligonucleotide
  Target: LAMA2; (-) strand; PAM type: YTN; PAM sequence: TTT
gggatttagtattgaaggga

SEQ ID NO: 225891 - DNA, 20 bp, Artificial Sequence
  Description of Artificial Sequence: Synthetic oligonucleotide
  Target: LAMA2; (-) strand; PAM type: YTN; PAM sequence: TTT
tgggatttagtattgaaggg

SEQ ID NO: 225892 - DNA, 20 bp, Artificial Sequence
  Description of Artificial Sequence: Synthetic oligonucleotide
  Target: LAMA2; (-) strand; PAM type: YTN; PAM sequence: CTT
ttgggatttagtattgaagg

SEQ ID NO: 225893 - DNA, 20 bp, Artificial Sequence
  Description of Artificial Sequence: Synthetic oligonucleotide
  Target: LAMA2; (-) strand; PAM type: YTN; PAM sequence: TTA
gcttttgggatttagtattg

SEQ ID NO: 225894 - DNA, 20 bp, Artificial Sequence
  Description of Artificial Sequence: Synthetic oligonucleotide
  Target: LAMA2; (-) strand; PAM type: YTN; PAM sequence: CTA
ttagcttttgggatttagta

SEQ ID NO: 225895 - DNA, 20 bp, Artificial Sequence
  Description of Artificial Sequence: Synthetic oligonucleotide
  Target: LAMA2; (-) strand; PAM type: YTN; PAM sequence: TTG
ctattagcttttgggattta

SEQ ID NO: 225896 - DNA, 20 bp, Artificial Sequence
  Description of Artificial Sequence: Synthetic oligonucleotide
  Target: LAMA2; (-) strand; PAM type: YTN; PAM sequence: CTG
tattgctattagcttttggg

SEQ ID NO: 225897 - DNA, 20 bp, Artificial Sequence
  Description of Artificial Sequence: Synthetic oligonucleotide
  Target: LAMA2; (-) strand; PAM type: YTN; PAM sequence: TTC
tgtattgctattagcttttg

SEQ ID NO: 225898 - DNA, 20 bp, Artificial Sequence
  Description of Artificial Sequence: Synthetic oligonucleotide
  Target: LAMA2; (-) strand; PAM type: YTN; PAM sequence: CTT
ctgtattgctattagctttt

SEQ ID NO: 225899 - DNA, 20 bp, Artificial Sequence
  Description of Artificial Sequence: Synthetic oligonucleotide
  Target: LAMA2; (-) strand; PAM type: YTN; PAM sequence: TTG
gtcagtggatcttctgtatt

SEQ ID NO: 225900 - DNA, 20 bp, Artificial Sequence
  Description of Artificial Sequence: Synthetic oligonucleotide
  Target: LAMA2; (-) strand; PAM type: YTN; PAM sequence: TTG
ggaagaaatgttggtcagtg

SEQ ID NO: 225901 - DNA, 20 bp, Artificial Sequence
  Description of Artificial Sequence: Synthetic oligonucleotide
  Target: LAMA2; (-) strand; PAM type: YTN; PAM sequence: CTT
gggaagaaatgttggtcagt

SEQ ID NO: 225902 - DNA, 20 bp, Artificial Sequence
  Description of Artificial Sequence: Synthetic oligonucleotide
  Target: LAMA2; (-) strand; PAM type: YTN; PAM sequence: TTG
tcttgggaagaaatgttggt

SEQ ID NO: 225903 - DNA, 20 bp, Artificial Sequence
  Description of Artificial Sequence: Synthetic oligonucleotide
  Target: LAMA2; (-) strand; PAM type: YTN; PAM sequence: TTA
ttgtcttgggaagaaatgtt

SEQ ID NO: 225904 - DNA, 20 bp, Artificial Sequence
  Description of Artificial Sequence: Synthetic oligonucleotide
  Target: LAMA2; (-) strand; PAM type: YTN; PAM sequence: CTA
ttattgtcttgggaagaaat

SEQ ID NO: 225905 - DNA, 20 bp, Artificial Sequence
  Description of Artificial Sequence: Synthetic oligonucleotide
  Target: LAMA2; (-) strand; PAM type: YTN; PAM sequence: TTA
ctattattgtcttgggaaga

SEQ ID NO: 225906 - DNA, 20 bp, Artificial Sequence
  Description of Artificial Sequence: Synthetic oligonucleotide
  Target: LAMA2; (-) strand; PAM type: YTN; PAM sequence: TTA
tgcatataagttactattat

SEQ ID NO: 225907 - DNA, 20 bp, Artificial Sequence
  Description of Artificial Sequence: Synthetic oligonucleotide
  Target: LAMA2; (-) strand; PAM type: YTN; PAM sequence: TTA
acaattatgcatataagtta

SEQ ID NO: 225908 - DNA, 20 bp, Artificial Sequence
  Description of Artificial Sequence: Synthetic oligonucleotide
  Target: LAMA2; (-) strand; PAM type: YTN; PAM sequence: TTT
aacaattatgcatataagtt

SEQ ID NO: 225909 - DNA, 20 bp, Artificial Sequence
  Description of Artificial Sequence: Synthetic oligonucleotide
  Target: LAMA2; (-) strand; PAM type: YTN; PAM sequence: CTT
taacaattatgcatataagt

SEQ ID NO: 225910 - DNA, 20 bp, Artificial Sequence
  Description of Artificial Sequence: Synthetic oligonucleotide
  Target: LAMA2; (-) strand; PAM type: YTN; PAM sequence: TTG
ctttaacaattatgcatata

SEQ ID NO: 225911 - DNA, 20 bp, Artificial Sequence
  Description of Artificial Sequence: Synthetic oligonucleotide
  Target: LAMA2; (-) strand; PAM type: YTN; PAM sequence: TTA
aaattgctttaacaattatg

SEQ ID NO: 225912 - DNA, 20 bp, Artificial Sequence
  Description of Artificial Sequence: Synthetic oligonucleotide
  Target: LAMA2; (-) strand; PAM type: YTN; PAM sequence: CTT
aaaattgctttaacaattat

SEQ ID NO: 225913 - DNA, 20 bp, Artificial Sequence
  Description of Artificial Sequence: Synthetic oligonucleotide
  Target: LAMA2; (-) strand; PAM type: YTN; PAM sequence: TTG
gatagcaaaaaacaaaacaa

SEQ ID NO: 225914 - DNA, 20 bp, Artificial Sequence
  Description of Artificial Sequence: Synthetic oligonucleotide
  Target: LAMA2; (-) strand; PAM type: YTN; PAM sequence: CTT
ggatagcaaaaaacaaaaca

SEQ ID NO: 225915 - DNA, 20 bp, Artificial Sequence
  Description of Artificial Sequence: Synthetic oligonucleotide
  Target: LAMA2; (-) strand; PAM type: YTN; PAM sequence: TTA
ggaacttggatagcaaaaaa

SEQ ID NO: 225916 - DNA, 20 bp, Artificial Sequence
  Description of Artificial Sequence: Synthetic oligonucleotide
  Target: LAMA2; (-) strand; PAM type: YTN; PAM sequence: CTT
aggaacttggatagcaaaaa

SEQ ID NO: 225917 - DNA, 20 bp, Artificial Sequence
  Description of Artificial Sequence: Synthetic oligonucleotide
  Target: LAMA2; (-) strand; PAM type: YTN; PAM sequence: TTA
gaggaataacatgtcttagg

SEQ ID NO: 225918 - DNA, 20 bp, Artificial Sequence
  Description of Artificial Sequence: Synthetic oligonucleotide
  Target: LAMA2; (-) strand; PAM type: YTN; PAM sequence: TTT
agaggaataacatgtcttag

SEQ ID NO: 225919 - DNA, 20 bp, Artificial Sequence
  Description of Artificial Sequence: Synthetic oligonucleotide
  Target: LAMA2; (-) strand; PAM type: YTN; PAM sequence: TTT
tagaggaataacatgtctta

SEQ ID NO: 225920 - DNA, 20 bp, Artificial Sequence
  Description of Artificial Sequence: Synthetic oligonucleotide
  Target: LAMA2; (-) strand; PAM type: YTN; PAM sequence: CTT
ttagaggaataacatgtctt

SEQ ID NO: 225921 - DNA, 20 bp, Artificial Sequence
  Description of Artificial Sequence: Synthetic oligonucleotide
  Target: LAMA2; (-) strand; PAM type: YTN; PAM sequence: TTC
atatagtaaacttttagagg

SEQ ID NO: 225922 - DNA, 20 bp, Artificial Sequence
  Description of Artificial Sequence: Synthetic oligonucleotide
  Target: LAMA2; (-) strand; PAM type: YTN; PAM sequence: TTT
catatagtaaacttttagag

SEQ ID NO: 225923 - DNA, 20 bp, Artificial Sequence
  Description of Artificial Sequence: Synthetic oligonucleotide
  Target: LAMA2; (-) strand; PAM type: YTN; PAM sequence: TTA
gtcaatcatttcatatagta

SEQ ID NO: 225924 - DNA, 20 bp, Artificial Sequence
  Description of Artificial Sequence: Synthetic oligonucleotide
  Target: LAMA2; (-) strand; PAM type: YTN; PAM sequence: TTC
aaccattagtcaatcatttc

SEQ ID NO: 225925 - DNA, 20 bp, Artificial Sequence
  Description of Artificial Sequence: Synthetic oligonucleotide
  Target: LAMA2; (-) strand; PAM type: YTN; PAM sequence: TTG
ttcaaccattagtcaatcat

SEQ ID NO: 225926 - DNA, 20 bp, Artificial Sequence
  Description of Artificial Sequence: Synthetic oligonucleotide
  Target: LAMA2; (-) strand; PAM type: YTN; PAM sequence: TTT
gttcaaccattagtcaatca

SEQ ID NO: 225927 - DNA, 20 bp, Artificial Sequence
  Description of Artificial Sequence: Synthetic oligonucleotide
  Target: LAMA2; (-) strand; PAM type: YTN; PAM sequence: TTA
tagtatttgttcaaccatta

SEQ ID NO: 225928 - DNA, 20 bp, Artificial Sequence
  Description of Artificial Sequence: Synthetic oligonucleotide
  Target: LAMA2; (-) strand; PAM type: YTN; PAM sequence: TTT
atagtatttgttcaaccatt

SEQ ID NO: 225929 - DNA, 20 bp, Artificial Sequence
  Description of Artificial Sequence: Synthetic oligonucleotide
  Target: LAMA2; (-) strand; PAM type: YTN; PAM sequence: TTA
tgtgtttatagtatttgttc

SEQ ID NO: 225930 - DNA, 20 bp, Artificial Sequence
  Description of Artificial Sequence: Synthetic oligonucleotide
  Target: LAMA2; (-) strand; PAM type: YTN; PAM sequence: CTT
atgtgtttatagtatttgtt

SEQ ID NO: 225931 - DNA, 20 bp, Artificial Sequence
  Description of Artificial Sequence: Synthetic oligonucleotide
  Target: LAMA2; (-) strand; PAM type: YTN; PAM sequence: TTC
cttatgtgtttatagtattt

SEQ ID NO: 225932 - DNA, 20 bp, Artificial Sequence
  Description of Artificial Sequence: Synthetic oligonucleotide
  Target: LAMA2; (-) strand; PAM type: YTN; PAM sequence: CTT
ccttatgtgtttatagtatt

SEQ ID NO: 225933 - DNA, 20 bp, Artificial Sequence
  Description of Artificial Sequence: Synthetic oligonucleotide
  Target: LAMA2; (-) strand; PAM type: YTN; PAM sequence: CTG
tgagtaaaacccatatcacc

SEQ ID NO: 225934 - DNA, 20 bp, Artificial Sequence
  Description of Artificial Sequence: Synthetic oligonucleotide
  Target: LAMA2; (-) strand; PAM type: YTN; PAM sequence: TTC
tgtgagtaaaacccatatca

SEQ ID NO: 225935 - DNA, 20 bp, Artificial Sequence
  Description of Artificial Sequence: Synthetic oligonucleotide
  Target: LAMA2; (-) strand; PAM type: YTN; PAM sequence: CTT
ctgtgagtaaaacccatatc

SEQ ID NO: 225936 - DNA, 20 bp, Artificial Sequence
  Description of Artificial Sequence: Synthetic oligonucleotide
  Target: LAMA2; (-) strand; PAM type: YTN; PAM sequence: TTG
aggaatcttctgtgagtaaa

SEQ ID NO: 225937 - DNA, 20 bp, Artificial Sequence
  Description of Artificial Sequence: Synthetic oligonucleotide
  Target: LAMA2; (-) strand; PAM type: YTN; PAM sequence: TTT
gaggaatcttctgtgagtaa

SEQ ID NO: 225938 - DNA, 20 bp, Artificial Sequence
  Description of Artificial Sequence: Synthetic oligonucleotide
  Target: LAMA2; (-) strand; PAM type: YTN; PAM sequence: TTT
tgaggaatcttctgtgagta

SEQ ID NO: 225939 - DNA, 20 bp, Artificial Sequence
  Description of Artificial Sequence: Synthetic oligonucleotide
  Target: LAMA2; (-) strand; PAM type: YTN; PAM sequence: TTA
aaaccaaatcaggtatgcgt

SEQ ID NO: 225940 - DNA, 20 bp, Artificial Sequence
  Description of Artificial Sequence: Synthetic oligonucleotide
  Target: LAMA2; (-) strand; PAM type: YTN; PAM sequence: TTA
ttaaaaccaaatcaggtatg

SEQ ID NO: 225941 - DNA, 20 bp, Artificial Sequence
  Description of Artificial Sequence: Synthetic oligonucleotide
  Target: LAMA2; (-) strand; PAM type: YTN; PAM sequence: CTT
attaaaaccaaatcaggtat

SEQ ID NO: 225942 - DNA, 20 bp, Artificial Sequence
  Description of Artificial Sequence: Synthetic oligonucleotide
  Target: LAMA2; (-) strand; PAM type: YTN; PAM sequence: CTG
taatgtgatccttattaaaa

SEQ ID NO: 225943 - DNA, 20 bp, Artificial Sequence
  Description of Artificial Sequence: Synthetic oligonucleotide
  Target: LAMA2; (-) strand; PAM type: YTN; PAM sequence: CTC
ctgtaatgtgatccttatta

SEQ ID NO: 225944 - DNA, 20 bp, Artificial Sequence
  Description of Artificial Sequence: Synthetic oligonucleotide
  Target: LAMA2; (-) strand; PAM type: YTN; PAM sequence: TTG
gatctcctgtaatgtgatcc

SEQ ID NO: 225945 - DNA, 20 bp, Artificial Sequence
  Description of Artificial Sequence: Synthetic oligonucleotide
  Target: LAMA2; (-) strand; PAM type: YTN; PAM sequence: CTA
ttggatctcctgtaatgtga

SEQ ID NO: 225946 - DNA, 20 bp, Artificial Sequence
  Description of Artificial Sequence: Synthetic oligonucleotide
  Target: LAMA2; (-) strand; PAM type: YTN; PAM sequence: TTC
tattggatctcctgtaatgt

SEQ ID NO: 225947 - DNA, 20 bp, Artificial Sequence
  Description of Artificial Sequence: Synthetic oligonucleotide
  Target: LAMA2; (-) strand; PAM type: YTN; PAM sequence: CTT
ctattggatctcctgtaatg

SEQ ID NO: 225948 - DNA, 20 bp, Artificial Sequence
  Description of Artificial Sequence: Synthetic oligonucleotide
  Target: LAMA2; (-) strand; PAM type: YTN; PAM sequence: TTA
agtagcttctattggatctc

SEQ ID NO: 225949 - DNA, 20 bp, Artificial Sequence
  Description of Artificial Sequence: Synthetic oligonucleotide
  Target: LAMA2; (-) strand; PAM type: YTN; PAM sequence: TTT
aagtagcttctattggatct

SEQ ID NO: 225950 - DNA, 20 bp, Artificial Sequence
  Description of Artificial Sequence: Synthetic oligonucleotide
  Target: LAMA2; (-) strand; PAM type: YTN; PAM sequence: TTT
taagtagcttctattggatc

SEQ ID NO: 225951 - DNA, 20 bp, Artificial Sequence
  Description of Artificial Sequence: Synthetic oligonucleotide
  Target: LAMA2; (-) strand; PAM type: YTN; PAM sequence: TTT
ttaagtagcttctattggat

SEQ ID NO: 225952 - DNA, 20 bp, Artificial Sequence
  Description of Artificial Sequence: Synthetic oligonucleotide
  Target: LAMA2; (-) strand; PAM type: YTN; PAM sequence: CTT
tttaagtagcttctattgga

SEQ ID NO: 225953 - DNA, 20 bp, Artificial Sequence
  Description of Artificial Sequence: Synthetic oligonucleotide
  Target: LAMA2; (-) strand; PAM type: YTN; PAM sequence: CTA
aaacactttttaagtagctt

SEQ ID NO: 225954 - DNA, 20 bp, Artificial Sequence
  Description of Artificial Sequence: Synthetic oligonucleotide
  Target: LAMA2; (-) strand; PAM type: YTN; PAM sequence: TTC
taaaacactttttaagtagc

SEQ ID NO: 225955 - DNA, 20 bp, Artificial Sequence
  Description of Artificial Sequence: Synthetic oligonucleotide
  Target: LAMA2; (-) strand; PAM type: YTN; PAM sequence: TTT
ctaaaacactttttaagtag

SEQ ID NO: 225956 - DNA, 20 bp, Artificial Sequence
  Description of Artificial Sequence: Synthetic oligonucleotide
  Target: LAMA2; (-) strand; PAM type: YTN; PAM sequence: TTT
tctaaaacactttttaagta

SEQ ID NO: 225957 - DNA, 20 bp, Artificial Sequence
  Description of Artificial Sequence: Synthetic oligonucleotide
  Target: LAMA2; (-) strand; PAM type: YTN; PAM sequence: TTA
aaaacattttctaaaacact

SEQ ID NO: 225958 - DNA, 20 bp, Artificial Sequence
  Description of Artificial Sequence: Synthetic oligonucleotide
  Target: LAMA2; (-) strand; PAM type: YTN; PAM sequence: TTT
aaaaacattttctaaaacac

SEQ ID NO: 225959 - DNA, 20 bp, Artificial Sequence
  Description of Artificial Sequence: Synthetic oligonucleotide
  Target: LAMA2; (-) strand; PAM type: YTN; PAM sequence: TTA
atatttaaaaacattttcta

SEQ ID NO: 225960 - DNA, 20 bp, Artificial Sequence
  Description of Artificial Sequence: Synthetic oligonucleotide
  Target: LAMA2; (-) strand; PAM type: YTN; PAM sequence: TTA
taatggatgcaaattaatat

SEQ ID NO: 225961 - DNA, 20 bp, Artificial Sequence
  Description of Artificial Sequence: Synthetic oligonucleotide
  Target: LAMA2; (-) strand; PAM type: YTN; PAM sequence: TTC
aaatagtaatgttataatgg

SEQ ID NO: 225962 - DNA, 20 bp, Artificial Sequence
  Description of Artificial Sequence: Synthetic oligonucleotide
  Target: LAMA2; (-) strand; PAM type: YTN; PAM sequence: TTA
aattcaaatagtaatgttat

SEQ ID NO: 225963 - DNA, 20 bp, Artificial Sequence
  Description of Artificial Sequence: Synthetic oligonucleotide
  Target: LAMA2; (-) strand; PAM type: YTN; PAM sequence: TTG
gaaggaagttaaattcaaat

SEQ ID NO: 225964 - DNA, 20 bp, Artificial Sequence
  Description of Artificial Sequence: Synthetic oligonucleotide
  Target: LAMA2; (-) strand; PAM type: YTN; PAM sequence: CTA
caggtatattggaaggaagt

SEQ ID NO: 225965 - DNA, 20 bp, Artificial Sequence
  Description of Artificial Sequence: Synthetic oligonucleotide
  Target: LAMA2; (-) strand; PAM type: YTN; PAM sequence: TTC
tacaggtatattggaaggaa

SEQ ID NO: 225966 - DNA, 20 bp, Artificial Sequence
  Description of Artificial Sequence: Synthetic oligonucleotide
  Target: LAMA2; (-) strand; PAM type: YTN; PAM sequence: CTC
attctacaggtatattggaa

SEQ ID NO: 225967 - DNA, 20 bp, Artificial Sequence
  Description of Artificial Sequence: Synthetic oligonucleotide
  Target: LAMA2; (-) strand; PAM type: YTN; PAM sequence: CTC
aatagctcattctacaggta

SEQ ID NO: 225968 - DNA, 20 bp, Artificial Sequence
  Description of Artificial Sequence: Synthetic oligonucleotide
  Target: LAMA2; (-) strand; PAM type: YTN; PAM sequence: TTA
aactcaatagctcattctac

SEQ ID NO: 225969 - DNA, 20 bp, Artificial Sequence
  Description of Artificial Sequence: Synthetic oligonucleotide
  Target: LAMA2; (-) strand; PAM type: YTN; PAM sequence: CTG
gaaagaagttaaactcaata

SEQ ID NO: 225970 - DNA, 20 bp, Artificial Sequence
  Description of Artificial Sequence: Synthetic oligonucleotide
  Target: LAMA2; (-) strand; PAM type: YTN; PAM sequence: CTC
cataaccatgcctggaaaga

SEQ ID NO: 225971 - DNA, 20 bp, Artificial Sequence
  Description of Artificial Sequence: Synthetic oligonucleotide
  Target: LAMA2; (-) strand; PAM type: YTN; PAM sequence: CTA
gcaggctccataaccatgcc

SEQ ID NO: 225972 - DNA, 20 bp, Artificial Sequence
  Description of Artificial Sequence: Synthetic oligonucleotide
  Target: LAMA2; (-) strand; PAM type: YTN; PAM sequence: TTA
atacggtgtggccccgggac

SEQ ID NO: 225973 - DNA, 20 bp, Artificial Sequence
  Description of Artificial Sequence: Synthetic oligonucleotide
  Target: LAMA2; (-) strand; PAM type: YTN; PAM sequence: TTT
aatacggtgtggccccggga

SEQ ID NO: 225974 - DNA, 20 bp, Artificial Sequence
  Description of Artificial Sequence: Synthetic oligonucleotide
  Target: LAMA2; (-) strand; PAM type: YTN; PAM sequence: CTA
tttaatacggtgtggccccg

SEQ ID NO: 225975 - DNA, 20 bp, Artificial Sequence
  Description of Artificial Sequence: Synthetic oligonucleotide
  Target: LAMA2; (-) strand; PAM type: YTN; PAM sequence: CTA
gcctatttaatacggtgtgg

SEQ ID NO: 225976 - DNA, 20 bp, Artificial Sequence
  Description of Artificial Sequence: Synthetic oligonucleotide
  Target: LAMA2; (-) strand; PAM type: YTN; PAM sequence: TTA
tcactagcctatttaatacg

SEQ ID NO: 225977 - DNA, 20 bp, Artificial Sequence
  Description of Artificial Sequence: Synthetic oligonucleotide
  Target: LAMA2; (-) strand; PAM type: YTN; PAM sequence: TTT
atcactagcctatttaatac

SEQ ID NO: 225978 - DNA, 20 bp, Artificial Sequence
  Description of Artificial Sequence: Synthetic oligonucleotide
  Target: LAMA2; (-) strand; PAM type: YTN; PAM sequence: TTT
tatcactagcctatttaata

SEQ ID NO: 225979 - DNA, 20 bp, Artificial Sequence
  Description of Artificial Sequence: Synthetic oligonucleotide
  Target: LAMA2; (-) strand; PAM type: YTN; PAM sequence: CTA
tccattttatcactagccta

SEQ ID NO: 225980 - DNA, 20 bp, Artificial Sequence
  Description of Artificial Sequence: Synthetic oligonucleotide
  Target: LAMA2; (-) strand; PAM type: YTN; PAM sequence: TTG
tcctatccattttatcacta

SEQ ID NO: 225981 - DNA, 20 bp, Artificial Sequence
  Description of Artificial Sequence: Synthetic oligonucleotide
  Target: LAMA2; (-) strand; PAM type: YTN; PAM sequence: CTT
gtcctatccattttatcact

SEQ ID NO: 225982 - DNA, 20 bp, Artificial Sequence
  Description of Artificial Sequence: Synthetic oligonucleotide
  Target: LAMA2; (-) strand; PAM type: YTN; PAM sequence: CTG
atgagaaatcttgtcctatc

SEQ ID NO: 225983 - DNA, 20 bp, Artificial Sequence
  Description of Artificial Sequence: Synthetic oligonucleotide
  Target: LAMA2; (-) strand; PAM type: YTN; PAM sequence: TTC
ctgatgagaaatcttgtcct

SEQ ID NO: 225984 - DNA, 20 bp, Artificial Sequence
  Description of Artificial Sequence: Synthetic oligonucleotide
  Target: LAMA2; (-) strand; PAM type: YTN; PAM sequence: TTA
aaaatgttcctgatgagaaa

SEQ ID NO: 225985 - DNA, 20 bp, Artificial Sequence
  Description of Artificial Sequence: Synthetic oligonucleotide
  Target: LAMA2; (-) strand; PAM type: YTN; PAM sequence: TTT
aaaaatgttcctgatgagaa

SEQ ID NO: 225986 - DNA, 20 bp, Artificial Sequence
  Description of Artificial Sequence: Synthetic oligonucleotide
  Target: LAMA2; (-) strand; PAM type: YTN; PAM sequence: CTG
tgtttaaaaatgttcctgat

SEQ ID NO: 225987 - DNA, 20 bp, Artificial Sequence
  Description of Artificial Sequence: Synthetic oligonucleotide
  Target: LAMA2; (-) strand; PAM type: YTN; PAM sequence: TTC
tgtgtttaaaaatgttcctg

SEQ ID NO: 225988 - DNA, 20 bp, Artificial Sequence
  Description of Artificial Sequence: Synthetic oligonucleotide
  Target: LAMA2; (-) strand; PAM type: YTN; PAM sequence: CTG
cccccaacacagaatcaaca

SEQ ID NO: 225989 - DNA, 20 bp, Artificial Sequence
  Description of Artificial Sequence: Synthetic oligonucleotide
  Target: LAMA2; (-) strand; PAM type: YTN; PAM sequence: CTC
tgcccccaacacagaatcaa

SEQ ID NO: 225990 - DNA, 20 bp, Artificial Sequence
  Description of Artificial Sequence: Synthetic oligonucleotide
  Target: LAMA2; (-) strand; PAM type: YTN; PAM sequence: CTC
ccagcctctgcccccaacac

SEQ ID NO: 225991 - DNA, 20 bp, Artificial Sequence
  Description of Artificial Sequence: Synthetic oligonucleotide
  Target: LAMA2; (-) strand; PAM type: YTN; PAM sequence: TTC
tcccagcctctgcccccaac

SEQ ID NO: 225992 - DNA, 20 bp, Artificial Sequence
  Description of Artificial Sequence: Synthetic oligonucleotide
  Target: LAMA2; (-) strand; PAM type: YTN; PAM sequence: TTT
ctcccagcctctgcccccaa

SEQ ID NO: 225993 - DNA, 20 bp, Artificial Sequence
  Description of Artificial Sequence: Synthetic oligonucleotide
  Target: LAMA2; (-) strand; PAM type: YTN; PAM sequence: CTA
tttctcccagcctctgcccc

SEQ ID NO: 225994 - DNA, 20 bp, Artificial Sequence
  Description of Artificial Sequence: Synthetic oligonucleotide
  Target: LAMA2; (-) strand; PAM type: YTN; PAM sequence: CTC
cctatttctcccagcctctg

SEQ ID NO: 225995 - DNA, 20 bp, Artificial Sequence
  Description of Artificial Sequence: Synthetic oligonucleotide
  Target: LAMA2; (-) strand; PAM type: YTN; PAM sequence: CTA
atatctccctatttctccca

SEQ ID NO: 225996 - DNA, 20 bp, Artificial Sequence
  Description of Artificial Sequence: Synthetic oligonucleotide
  Target: LAMA2; (-) strand; PAM type: YTN; PAM sequence: TTG
actaatatctccctatttct

SEQ ID NO: 225997 - DNA, 20 bp, Artificial Sequence
  Description of Artificial Sequence: Synthetic oligonucleotide
  Target: LAMA2; (-) strand; PAM type: YTN; PAM sequence: TTA
taaaagtaatgcattgacta

SEQ ID NO: 225998 - DNA, 20 bp, Artificial Sequence
  Description of Artificial Sequence: Synthetic oligonucleotide
  Target: LAMA2; (-) strand; PAM type: YTN; PAM sequence: CTT
ataaaagtaatgcattgact

SEQ ID NO: 225999 - DNA, 20 bp, Artificial Sequence
  Description of Artificial Sequence: Synthetic oligonucleotide
  Target: LAMA2; (-) strand; PAM type: YTN; PAM sequence: TTG
cccacttataaaagtaatgc

SEQ ID NO: 226000 - DNA, 20 bp, Artificial Sequence
  Description of Artificial Sequence: Synthetic oligonucleotide
  Target: LAMA2; (-) strand; PAM type: YTN; PAM sequence: CTG
ttgcccacttataaaagtaa

SEQ ID NO: 226001 - DNA, 20 bp, Artificial Sequence
  Description of Artificial Sequence: Synthetic oligonucleotide
  Target: LAMA2; (-) strand; PAM type: YTN; PAM sequence: TTC
tgttgcccacttataaaagt

SEQ ID NO: 226002 - DNA, 20 bp, Artificial Sequence
  Description of Artificial Sequence: Synthetic oligonucleotide
  Target: LAMA2; (-) strand; PAM type: YTN; PAM sequence: TTG
accacacaacatgggttctg

SEQ ID NO: 226003 - DNA, 20 bp, Artificial Sequence
  Description of Artificial Sequence: Synthetic oligonucleotide
  Target: LAMA2; (-) strand; PAM type: YTN; PAM sequence: TTT
gaccacacaacatgggttct

SEQ ID NO: 226004 - DNA, 20 bp, Artificial Sequence
  Description of Artificial Sequence: Synthetic oligonucleotide
  Target: LAMA2; (-) strand; PAM type: YTN; PAM sequence: CTT
tgaccacacaacatgggttc

SEQ ID NO: 226005 - DNA, 20 bp, Artificial Sequence
  Description of Artificial Sequence: Synthetic oligonucleotide
  Target: LAMA2; (-) strand; PAM type: YTN; PAM sequence: CTG
cagtactttgaccacacaac

SEQ ID NO: 226006 - DNA, 20 bp, Artificial Sequence
  Description of Artificial Sequence: Synthetic oligonucleotide
  Target: LAMA2; (-) strand; PAM type: YTN; PAM sequence: TTC
tgcagtactttgaccacaca

SEQ ID NO: 226007 - DNA, 20 bp, Artificial Sequence
  Description of Artificial Sequence: Synthetic oligonucleotide
  Target: LAMA2; (-) strand; PAM type: YTN; PAM sequence: TTG
agaagttctgcagtactttg

SEQ ID NO: 226008 - DNA, 20 bp, Artificial Sequence
  Description of Artificial Sequence: Synthetic oligonucleotide
  Target: LAMA2; (-) strand; PAM type: YTN; PAM sequence: CTT
gagaagttctgcagtacttt

SEQ ID NO: 226009 - DNA, 20 bp, Artificial Sequence
  Description of Artificial Sequence: Synthetic oligonucleotide
  Target: LAMA2; (-) strand; PAM type: YTN; PAM sequence: CTG
aaacgtgtacaatgcttgag

SEQ ID NO: 226010 - DNA, 20 bp, Artificial Sequence
  Description of Artificial Sequence: Synthetic oligonucleotide
  Target: LAMA2; (-) strand; PAM type: YTN; PAM sequence: TTA
aagtcgtagtcaaaaactga

SEQ ID NO: 226011 - DNA, 20 bp, Artificial Sequence
  Description of Artificial Sequence: Synthetic oligonucleotide
  Target: LAMA2; (-) strand; PAM type: YTN; PAM sequence: TTG
tggaccattaaagtcgtagt

SEQ ID NO: 226012 - DNA, 20 bp, Artificial Sequence
  Description of Artificial Sequence: Synthetic oligonucleotide
  Target: LAMA2; (-) strand; PAM type: YTN; PAM sequence: CTT
gtggaccattaaagtcgtag

SEQ ID NO: 226013 - DNA, 20 bp, Artificial Sequence
  Description of Artificial Sequence: Synthetic oligonucleotide
  Target: LAMA2; (-) strand; PAM type: YTN; PAM sequence: TTC
ttgtggaccattaaagtcgt

SEQ ID NO: 226014 - DNA, 20 bp, Artificial Sequence
  Description of Artificial Sequence: Synthetic oligonucleotide
  Target: LAMA2; (-) strand; PAM type: YTN; PAM sequence: TTT
cttgtggaccattaaagtcg

SEQ ID NO: 226015 - DNA, 20 bp, Artificial Sequence
  Description of Artificial Sequence: Synthetic oligonucleotide
  Target: LAMA2; (-) strand; PAM type: YTN; PAM sequence: CTT
tcttgtggaccattaaagtc

SEQ ID NO: 226016 - DNA, 20 bp, Artificial Sequence
  Description of Artificial Sequence: Synthetic oligonucleotide
  Target: LAMA2; (-) strand; PAM type: YTN; PAM sequence: TTA
gaggcctttcttgtggacca

SEQ ID NO: 226017 - DNA, 20 bp, Artificial Sequence
  Description of Artificial Sequence: Synthetic oligonucleotide
  Target: LAMA2; (-) strand; PAM type: YTN; PAM sequence: CTT
agaggcctttcttgtggacc

SEQ ID NO: 226018 - DNA, 20 bp, Artificial Sequence
  Description of Artificial Sequence: Synthetic oligonucleotide
  Target: LAMA2; (-) strand; PAM type: YTN; PAM sequence: TTC
ttagaggcctttcttgtgga

SEQ ID NO: 226019 - DNA, 20 bp, Artificial Sequence
  Description of Artificial Sequence: Synthetic oligonucleotide
  Target: LAMA2; (-) strand; PAM type: YTN; PAM sequence: TTA
tagaaatggacacgaaaaag

SEQ ID NO: 226020 - DNA, 20 bp, Artificial Sequence
  Description of Artificial Sequence: Synthetic oligonucleotide
  Target: LAMA2; (-) strand; PAM type: YTN; PAM sequence: CTT
atagaaatggacacgaaaaa

SEQ ID NO: 226021 - DNA, 20 bp, Artificial Sequence
  Description of Artificial Sequence: Synthetic oligonucleotide
  Target: LAMA2; (-) strand; PAM type: YTN; PAM sequence: CTC
ttatagaaatggacacgaaa

SEQ ID NO: 226022 - DNA, 20 bp, Artificial Sequence
  Description of Artificial Sequence: Synthetic oligonucleotide
  Target: LAMA2; (-) strand; PAM type: YTN; PAM sequence: CTC
tcttatagaaatggacacga

SEQ ID NO: 226023 - DNA, 20 bp, Artificial Sequence
  Description of Artificial Sequence: Synthetic oligonucleotide
  Target: LAMA2; (-) strand; PAM type: YTN; PAM sequence: TTC
tctcttatagaaatggacac

SEQ ID NO: 226024 - DNA, 20 bp, Artificial Sequence
  Description of Artificial Sequence: Synthetic oligonucleotide
  Target: LAMA2; (-) strand; PAM type: YTN; PAM sequence: TTA
tgttctctcttatagaaatg

SEQ ID NO: 226025 - DNA, 20 bp, Artificial Sequence
  Description of Artificial Sequence: Synthetic oligonucleotide
  Target: LAMA2; (-) strand; PAM type: YTN; PAM sequence: CTA
acacagcattatgttctctc

SEQ ID NO: 226026 - DNA, 20 bp, Artificial Sequence
  Description of Artificial Sequence: Synthetic oligonucleotide
  Target: LAMA2; (-) strand; PAM type: YTN; PAM sequence: CTA
tgtctaacacagcattatgt

SEQ ID NO: 226027 - DNA, 20 bp, Artificial Sequence
  Description of Artificial Sequence: Synthetic oligonucleotide
  Target: LAMA2; (-) strand; PAM type: YTN; PAM sequence: CTC
aactatgtctaacacagcat

SEQ ID NO: 226028 - DNA, 20 bp, Artificial Sequence
  Description of Artificial Sequence: Synthetic oligonucleotide
  Target: LAMA2; (-) strand; PAM type: YTN; PAM sequence: TTA
taatggatctcaactatgtc

SEQ ID NO: 226029 - DNA, 20 bp, Artificial Sequence
  Description of Artificial Sequence: Synthetic oligonucleotide
  Target: LAMA2; (-) strand; PAM type: YTN; PAM sequence: TTA
ttataatggatctcaactat

SEQ ID NO: 226030 - DNA, 20 bp, Artificial Sequence
  Description of Artificial Sequence: Synthetic oligonucleotide
  Target: LAMA2; (-) strand; PAM type: YTN; PAM sequence: TTC
aaaatgtagtgacattatta

SEQ ID NO: 226031 - DNA, 20 bp, Artificial Sequence
  Description of Artificial Sequence: Synthetic oligonucleotide
  Target: LAMA2; (-) strand; PAM type: YTN; PAM sequence: TTT
caaaatgtagtgacattatt

SEQ ID NO: 226032 - DNA, 20 bp, Artificial Sequence
  Description of Artificial Sequence: Synthetic oligonucleotide
  Target: LAMA2; (-) strand; PAM type: YTN; PAM sequence: TTA
tttcaaaatgtagtgacatt

SEQ ID NO: 226033 - DNA, 20 bp, Artificial Sequence
  Description of Artificial Sequence: Synthetic oligonucleotide
  Target: LAMA2; (-) strand; PAM type: YTN; PAM sequence: TTT
atttcaaaatgtagtgacat

SEQ ID NO: 226034 - DNA, 20 bp, Artificial Sequence
  Description of Artificial Sequence: Synthetic oligonucleotide
  Target: LAMA2; (-) strand; PAM type: YTN; PAM sequence: TTT
tatttcaaaatgtagtgaca

SEQ ID NO: 226035 - DNA, 20 bp, Artificial Sequence
  Description of Artificial Sequence: Synthetic oligonucleotide
  Target: LAMA2; (-) strand; PAM type: YTN; PAM sequence: TTC
agaattttatttcaaaatgt

SEQ ID NO: 226036 - DNA, 20 bp, Artificial Sequence
  Description of Artificial Sequence: Synthetic oligonucleotide
  Target: LAMA2; (-) strand; PAM type: YTN; PAM sequence: TTT
cagaattttatttcaaaatg

SEQ ID NO: 226037 - DNA, 20 bp, Artificial Sequence
  Description of Artificial Sequence: Synthetic oligonucleotide
  Target: LAMA2; (-) strand; PAM type: YTN; PAM sequence: TTA
aggcatttcagaattttatt

SEQ ID NO: 226038 - DNA, 20 bp, Artificial Sequence
  Description of Artificial Sequence: Synthetic oligonucleotide
  Target: LAMA2; (-) strand; PAM type: YTN; PAM sequence: TTA
tgtattaaggcatttcagaa

SEQ ID NO: 226039 - DNA, 20 bp, Artificial Sequence
  Description of Artificial Sequence: Synthetic oligonucleotide
  Target: LAMA2; (-) strand; PAM type: YTN; PAM sequence: TTT
atgtattaaggcatttcaga

SEQ ID NO: 226040 - DNA, 20 bp, Artificial Sequence
  Description of Artificial Sequence: Synthetic oligonucleotide
  Target: LAMA2; (-) strand; PAM type: YTN; PAM sequence: TTC
ataaaaggatttatgtatta

SEQ ID NO: 226041 - DNA, 20 bp, Artificial Sequence
  Description of Artificial Sequence: Synthetic oligonucleotide
  Target: LAMA2; (-) strand; PAM type: YTN; PAM sequence: CTT
cataaaaggatttatgtatt

SEQ ID NO: 226042 - DNA, 20 bp, Artificial Sequence
  Description of Artificial Sequence: Synthetic oligonucleotide
  Target: LAMA2; (-) strand; PAM type: YTN; PAM sequence: TTA
aagacttcataaaaggattt

SEQ ID NO: 226043 - DNA, 20 bp, Artificial Sequence
  Description of Artificial Sequence: Synthetic oligonucleotide
  Target: LAMA2; (-) strand; PAM type: YTN; PAM sequence: TTT
aaagacttcataaaaggatt

SEQ ID NO: 226044 - DNA, 20 bp, Artificial Sequence
  Description of Artificial Sequence: Synthetic oligonucleotide
  Target: LAMA2; (-) strand; PAM type: YTN; PAM sequence: TTT
taaagacttcataaaaggat

SEQ ID NO: 226045 - DNA, 20 bp, Artificial Sequence
  Description of Artificial Sequence: Synthetic oligonucleotide
  Target: LAMA2; (-) strand; PAM type: YTN; PAM sequence: TTA
gcagccaattttaaagactt

SEQ ID NO: 226046 - DNA, 20 bp, Artificial Sequence
  Description of Artificial Sequence: Synthetic oligonucleotide
  Target: LAMA2; (-) strand; PAM type: YTN; PAM sequence: TTT
agcagccaattttaaagact

SEQ ID NO: 226047 - DNA, 20 bp, Artificial Sequence
  Description of Artificial Sequence: Synthetic oligonucleotide
  Target: LAMA2; (-) strand; PAM type: YTN; PAM sequence: TTT
tagcagccaattttaaagac

SEQ ID NO: 226048 - DNA, 20 bp, Artificial Sequence
  Description of Artificial Sequence: Synthetic oligonucleotide
  Target: LAMA2; (-) strand; PAM type: YTN; PAM sequence: TTG
gttttagcagccaattttaa

SEQ ID NO: 226049 - DNA, 20 bp, Artificial Sequence
  Description of Artificial Sequence: Synthetic oligonucleotide
  Target: LAMA2; (-) strand; PAM type: YTN; PAM sequence: TTA
ttggttttagcagccaattt

SEQ ID NO: 226050 - DNA, 20 bp, Artificial Sequence
  Description of Artificial Sequence: Synthetic oligonucleotide
  Target: LAMA2; (-) strand; PAM type: YTN; PAM sequence: TTT
attggttttagcagccaatt

SEQ ID NO: 226051 - DNA, 20 bp, Artificial Sequence
  Description of Artificial Sequence: Synthetic oligonucleotide
  Target: LAMA2; (-) strand; PAM type: YTN; PAM sequence: TTT
tattggttttagcagccaat

SEQ ID NO: 226052 - DNA, 20 bp, Artificial Sequence
  Description of Artificial Sequence: Synthetic oligonucleotide
  Target: LAMA2; (-) strand; PAM type: YTN; PAM sequence: TTC
caaaaatataattttattgg

SEQ ID NO: 226053 - DNA, 20 bp, Artificial Sequence
  Description of Artificial Sequence: Synthetic oligonucleotide
  Target: LAMA2; (-) strand; PAM type: YTN; PAM sequence: CTA
tgttccaaaaatataatttt

SEQ ID NO: 226054 - DNA, 20 bp, Artificial Sequence
  Description of Artificial Sequence: Synthetic oligonucleotide
  Target: LAMA2; (-) strand; PAM type: YTN; PAM sequence: TTA
actatgttccaaaaatataa

SEQ ID NO: 226055 - DNA, 20 bp, Artificial Sequence
  Description of Artificial Sequence: Synthetic oligonucleotide
  Target: LAMA2; (-) strand; PAM type: YTN; PAM sequence: TTA
tgtgcacaaagtggttaact

SEQ ID NO: 226056 - DNA, 20 bp, Artificial Sequence
  Description of Artificial Sequence: Synthetic oligonucleotide
  Target: LAMA2; (-) strand; PAM type: YTN; PAM sequence: CTT
atgtgcacaaagtggttaac

SEQ ID NO: 226057 - DNA, 20 bp, Artificial Sequence
  Description of Artificial Sequence: Synthetic oligonucleotide
  Target: LAMA2; (-) strand; PAM type: YTN; PAM sequence: CTC
acttatgtgcacaaagtggt

SEQ ID NO: 226058 - DNA, 20 bp, Artificial Sequence
  Description of Artificial Sequence: Synthetic oligonucleotide
  Target: LAMA2; (-) strand; PAM type: YTN; PAM sequence: CTA
cagcctcacttatgtgcaca

SEQ ID NO: 226059 - DNA, 20 bp, Artificial Sequence
  Description of Artificial Sequence: Synthetic oligonucleotide
  Target: LAMA2; (-) strand; PAM type: YTN; PAM sequence: TTC
tacagcctcacttatgtgca

SEQ ID NO: 226060 - DNA, 20 bp, Artificial Sequence
  Description of Artificial Sequence: Synthetic oligonucleotide
  Target: LAMA2; (-) strand; PAM type: YTN; PAM sequence: TTT
ctacagcctcacttatgtgc

SEQ ID NO: 226061 - DNA, 20 bp, Artificial Sequence
  Description of Artificial Sequence: Synthetic oligonucleotide
  Target: LAMA2; (-) strand; PAM type: YTN; PAM sequence: CTA
gtttctacagcctcacttat

SEQ ID NO: 226062 - DNA, 20 bp, Artificial Sequence
  Description of Artificial Sequence: Synthetic oligonucleotide
  Target: LAMA2; (-) strand; PAM type: YTN; PAM sequence: TTA
aaaaccctagtttctacagc

SEQ ID NO: 226063 - DNA, 20 bp, Artificial Sequence
  Description of Artificial Sequence: Synthetic oligonucleotide
  Target: LAMA2; (-) strand; PAM type: YTN; PAM sequence: TTT
aaaaaccctagtttctacag

SEQ ID NO: 226064 - DNA, 20 bp, Artificial Sequence
  Description of Artificial Sequence: Synthetic oligonucleotide
  Target: LAMA2; (-) strand; PAM type: YTN; PAM sequence: TTA
agtcatttaaaaaccctagt

SEQ ID NO: 226065 - DNA, 20 bp, Artificial Sequence
  Description of Artificial Sequence: Synthetic oligonucleotide
  Target: LAMA2; (-) strand; PAM type: YTN; PAM sequence: TTT
aagtcatttaaaaaccctag

SEQ ID NO: 226066 - DNA, 20 bp, Artificial Sequence
  Description of Artificial Sequence: Synthetic oligonucleotide
  Target: LAMA2; (-) strand; PAM type: YTN; PAM sequence: TTT
taagtcatttaaaaacccta

SEQ ID NO: 226067 - DNA, 20 bp, Artificial Sequence
  Description of Artificial Sequence: Synthetic oligonucleotide
  Target: LAMA2; (-) strand; PAM type: YTN; PAM sequence: CTT
ttaagtcatttaaaaaccct

SEQ ID NO: 226068 - DNA, 20 bp, Artificial Sequence
  Description of Artificial Sequence: Synthetic oligonucleotide
  Target: LAMA2; (-) strand; PAM type: YTN; PAM sequence: TTG
gagaaatatatatcttttaa

SEQ ID NO: 226069 - DNA, 20 bp, Artificial Sequence
  Description of Artificial Sequence: Synthetic oligonucleotide
  Target: LAMA2; (-) strand; PAM type: YTN; PAM sequence: TTT
ggagaaatatatatctttta

SEQ ID NO: 226070 - DNA, 20 bp, Artificial Sequence
  Description of Artificial Sequence: Synthetic oligonucleotide
  Target: LAMA2; (-) strand; PAM type: YTN; PAM sequence: CTA
tagtttggagaaatatatat

SEQ ID NO: 226071 - DNA, 20 bp, Artificial Sequence
  Description of Artificial Sequence: Synthetic oligonucleotide
  Target: LAMA2; (-) strand; PAM type: YTN; PAM sequence: TTA
cctatagtttggagaaatat

SEQ ID NO: 226072 - DNA, 20 bp, Artificial Sequence
  Description of Artificial Sequence: Synthetic oligonucleotide
  Target: LAMA2; (-) strand; PAM type: YTN; PAM sequence: TTG
atataattacctatagtttg

SEQ ID NO: 226073 - DNA, 20 bp, Artificial Sequence
  Description of Artificial Sequence: Synthetic oligonucleotide
  Target: LAMA2; (-) strand; PAM type: YTN; PAM sequence: CTG
tcaaagtaatattgatataa

SEQ ID NO: 226074 - DNA, 20 bp, Artificial Sequence
  Description of Artificial Sequence: Synthetic oligonucleotide
  Target: LAMA2; (-) strand; PAM type: YTN; PAM sequence: CTC
tgtcaaagtaatattgatat

SEQ ID NO: 226075 - DNA, 20 bp, Artificial Sequence
  Description of Artificial Sequence: Synthetic oligonucleotide
  Target: LAMA2; (-) strand; PAM type: YTN; PAM sequence: CTA
tatctctgtcaaagtaatat

SEQ ID NO: 226076 - DNA, 20 bp, Artificial Sequence
  Description of Artificial Sequence: Synthetic oligonucleotide
  Target: LAMA2; (-) strand; PAM type: YTN; PAM sequence: TTA
ctatatctctgtcaaagtaa

SEQ ID NO: 226077 - DNA, 20 bp, Artificial Sequence
  Description of Artificial Sequence: Synthetic oligonucleotide
  Target: LAMA2; (-) strand; PAM type: YTN; PAM sequence: CTA
taagatggagaattactata

SEQ ID NO: 226078 - DNA, 20 bp, Artificial Sequence
  Description of Artificial Sequence: Synthetic oligonucleotide
  Target: LAMA2; (-) strand; PAM type: YTN; PAM sequence: TTA
ctataagatggagaattact

SEQ ID NO: 226079 - DNA, 20 bp, Artificial Sequence
  Description of Artificial Sequence: Synthetic oligonucleotide
  Target: LAMA2; (-) strand; PAM type: YTN; PAM sequence: TTT
actataagatggagaattac

SEQ ID NO: 226080 - DNA, 20 bp, Artificial Sequence
  Description of Artificial Sequence: Synthetic oligonucleotide
  Target: LAMA2; (-) strand; PAM type: YTN; PAM sequence: TTT
tactataagatggagaatta

SEQ ID NO: 226081 - DNA, 20 bp, Artificial Sequence
  Description of Artificial Sequence: Synthetic oligonucleotide
  Target: LAMA2; (-) strand; PAM type: YTN; PAM sequence: TTC
ataaattttactataagatg

SEQ ID NO: 226082 - DNA, 20 bp, Artificial Sequence
  Description of Artificial Sequence: Synthetic oligonucleotide
  Target: LAMA2; (-) strand; PAM type: YTN; PAM sequence: TTT
cataaattttactataagat

SEQ ID NO: 226083 - DNA, 20 bp, Artificial Sequence
  Description of Artificial Sequence: Synthetic oligonucleotide
  Target: LAMA2; (-) strand; PAM type: YTN; PAM sequence: TTT
tcataaattttactataaga

SEQ ID NO: 226084 - DNA, 20 bp, Artificial Sequence
  Description of Artificial Sequence: Synthetic oligonucleotide
  Target: LAMA2; (-) strand; PAM type: YTN; PAM sequence: TTA
atgttttcataaattttact

SEQ ID NO: 226085 - DNA, 20 bp, Artificial Sequence
  Description of Artificial Sequence: Synthetic oligonucleotide
  Target: LAMA2; (-) strand; PAM type: YTN; PAM sequence: CTT
aatgttttcataaattttac

SEQ ID NO: 226086 - DNA, 20 bp, Artificial Sequence
  Description of Artificial Sequence: Synthetic oligonucleotide
  Target: LAMA2; (-) strand; PAM type: YTN; PAM sequence: TTA
cttaatgttttcataaattt

SEQ ID NO: 226087 - DNA, 20 bp, Artificial Sequence
  Description of Artificial Sequence: Synthetic oligonucleotide
  Target: LAMA2; (-) strand; PAM type: YTN; PAM sequence: TTT
acttaatgttttcataaatt

SEQ ID NO: 226088 - DNA, 20 bp, Artificial Sequence
  Description of Artificial Sequence: Synthetic oligonucleotide
  Target: LAMA2; (-) strand; PAM type: YTN; PAM sequence: TTG
gtttacttaatgttttcata

SEQ ID NO: 226089 - DNA, 20 bp, Artificial Sequence
  Description of Artificial Sequence: Synthetic oligonucleotide
  Target: LAMA2; (-) strand; PAM type: YTN; PAM sequence: CTG
ttggtttacttaatgttttc

SEQ ID NO: 226090 - DNA, 20 bp, Artificial Sequence
  Description of Artificial Sequence: Synthetic oligonucleotide
  Target: LAMA2; (-) strand; PAM type: YTN; PAM sequence: TTA
cctgttggtttacttaatgt

SEQ ID NO: 226091 - DNA, 20 bp, Artificial Sequence
  Description of Artificial Sequence: Synthetic oligonucleotide
  Target: LAMA2; (-) strand; PAM type: YTN; PAM sequence: TTT
acctgttggtttacttaatg

SEQ ID NO: 226092 - DNA, 20 bp, Artificial Sequence
  Description of Artificial Sequence: Synthetic oligonucleotide
  Target: LAMA2; (-) strand; PAM type: YTN; PAM sequence: TTG
accaaaaatgtatttacctg

SEQ ID NO: 226093 - DNA, 20 bp, Artificial Sequence
  Description of Artificial Sequence: Synthetic oligonucleotide
  Target: LAMA2; (-) strand; PAM type: YTN; PAM sequence: TTT
gaccaaaaatgtatttacct

SEQ ID NO: 226094 - DNA, 20 bp, Artificial Sequence
  Description of Artificial Sequence: Synthetic oligonucleotide
  Target: LAMA2; (-) strand; PAM type: YTN; PAM sequence: TTG
tttgaccaaaaatgtattta

SEQ ID NO: 226095 - DNA, 20 bp, Artificial Sequence
  Description of Artificial Sequence: Synthetic oligonucleotide
  Target: LAMA2; (-) strand; PAM type: YTN; PAM sequence: TTT
gtttgaccaaaaatgtattt

SEQ ID NO: 226096 - DNA, 20 bp, Artificial Sequence
  Description of Artificial Sequence: Synthetic oligonucleotide
  Target: LAMA2; (-) strand; PAM type: YTN; PAM sequence: TTT
tgtttgaccaaaaatgtatt

SEQ ID NO: 226097 - DNA, 20 bp, Artificial Sequence
  Description of Artificial Sequence: Synthetic oligonucleotide
  Target: LAMA2; (-) strand; PAM type: YTN; PAM sequence: TTA
aagttttgtttgaccaaaaa

SEQ ID NO: 226098 - DNA, 20 bp, Artificial Sequence
  Description of Artificial Sequence: Synthetic oligonucleotide
  Target: LAMA2; (-) strand; PAM type: YTN; PAM sequence: TTT
aaagttttgtttgaccaaaa

SEQ ID NO: 226099 - DNA, 20 bp, Artificial Sequence
  Description of Artificial Sequence: Synthetic oligonucleotide
  Target: LAMA2; (-) strand; PAM type: YTN; PAM sequence: TTT
taaagttttgtttgaccaaa

SEQ ID NO: 226100 - DNA, 20 bp, Artificial Sequence
  Description of Artificial Sequence: Synthetic oligonucleotide
  Target: LAMA2; (-) strand; PAM type: YTN; PAM sequence: TTT
ttaaagttttgtttgaccaa

SEQ ID NO: 226101 - DNA, 20 bp, Artificial Sequence
  Description of Artificial Sequence: Synthetic oligonucleotide
  Target: LAMA2; (-) strand; PAM type: YTN; PAM sequence: TTG
agccaaataaaagaaaaaca

SEQ ID NO: 226102 - DNA, 20 bp, Artificial Sequence
  Description of Artificial Sequence: Synthetic oligonucleotide
  Target: LAMA2; (-) strand; PAM type: YTN; PAM sequence: CTT
gagccaaataaaagaaaaac

SEQ ID NO: 226103 - DNA, 20 bp, Artificial Sequence
  Description of Artificial Sequence: Synthetic oligonucleotide
  Target: LAMA2; (-) strand; PAM type: YTN; PAM sequence: TTA
gcttgagccaaataaaagaa

SEQ ID NO: 226104 - DNA, 20 bp, Artificial Sequence
  Description of Artificial Sequence: Synthetic oligonucleotide
  Target: LAMA2; (-) strand; PAM type: YTN; PAM sequence: TTA
ataataaaaataacagaaag

SEQ ID NO: 226105 - DNA, 20 bp, Artificial Sequence
  Description of Artificial Sequence: Synthetic oligonucleotide
  Target: LAMA2; (-) strand; PAM type: YTN; PAM sequence: CTG
agtagtcaattaataataaa

SEQ ID NO: 226106 - DNA, 20 bp, Artificial Sequence
  Description of Artificial Sequence: Synthetic oligonucleotide
  Target: LAMA2; (-) strand; PAM type: YTN; PAM sequence: TTA
cctgagtagtcaattaataa

SEQ ID NO: 226107 - DNA, 20 bp, Artificial Sequence
  Description of Artificial Sequence: Synthetic oligonucleotide
  Target: LAMA2; (-) strand; PAM type: YTN; PAM sequence: TTT
acctgagtagtcaattaata

SEQ ID NO: 226108 - DNA, 20 bp, Artificial Sequence
  Description of Artificial Sequence: Synthetic oligonucleotide
  Target: LAMA2; (-) strand; PAM type: YTN; PAM sequence: TTT
tacctgagtagtcaattaat

SEQ ID NO: 226109 - DNA, 20 bp, Artificial Sequence
  Description of Artificial Sequence: Synthetic oligonucleotide
  Target: LAMA2; (-) strand; PAM type: YTN; PAM sequence: TTC
agatagaattttacctgagt

SEQ ID NO: 226110 - DNA, 20 bp, Artificial Sequence
  Description of Artificial Sequence: Synthetic oligonucleotide
  Target: LAMA2; (-) strand; PAM type: YTN; PAM sequence: TTC
aattcagatagaattttacc

SEQ ID NO: 226111 - DNA, 20 bp, Artificial Sequence
  Description of Artificial Sequence: Synthetic oligonucleotide
  Target: LAMA2; (-) strand; PAM type: YTN; PAM sequence: CTG
acaatgggatcaatgatgtc

SEQ ID NO: 226112 - DNA, 20 bp, Artificial Sequence
  Description of Artificial Sequence: Synthetic oligonucleotide
  Target: LAMA2; (-) strand; PAM type: YTN; PAM sequence: TTC
tgacaatgggatcaatgatg

SEQ ID NO: 226113 - DNA, 20 bp, Artificial Sequence
  Description of Artificial Sequence: Synthetic oligonucleotide
  Target: LAMA2; (-) strand; PAM type: YTN; PAM sequence: TTT
ctgacaatgggatcaatgat

SEQ ID NO: 226114 - DNA, 20 bp, Artificial Sequence
  Description of Artificial Sequence: Synthetic oligonucleotide
  Target: LAMA2; (-) strand; PAM type: YTN; PAM sequence: TTT
tctgacaatgggatcaatga

SEQ ID NO: 226115 - DNA, 20 bp, Artificial Sequence
  Description of Artificial Sequence: Synthetic oligonucleotide
  Target: LAMA2; (-) strand; PAM type: YTN; PAM sequence: CTT
ttctgacaatgggatcaatg

SEQ ID NO: 226116 - DNA, 20 bp, Artificial Sequence
  Description of Artificial Sequence: Synthetic oligonucleotide
  Target: LAMA2; (-) strand; PAM type: YTN; PAM sequence: CTG
tcttttctgacaatgggatc

SEQ ID NO: 226117 - DNA, 20 bp, Artificial Sequence
  Description of Artificial Sequence: Synthetic oligonucleotide
  Target: LAMA2; (-) strand; PAM type: YTN; PAM sequence: TTG
aatgggatagagggctgtct

SEQ ID NO: 226118 - DNA, 20 bp, Artificial Sequence
  Description of Artificial Sequence: Synthetic oligonucleotide
  Target: LAMA2; (-) strand; PAM type: YTN; PAM sequence: TTA
ataaattgaatgggatagag

SEQ ID NO: 226119 - DNA, 20 bp, Artificial Sequence
  Description of Artificial Sequence: Synthetic oligonucleotide
  Target: LAMA2; (-) strand; PAM type: YTN; PAM sequence: TTT
aataaattgaatgggataga

SEQ ID NO: 226120 - DNA, 20 bp, Artificial Sequence
  Description of Artificial Sequence: Synthetic oligonucleotide
  Target: LAMA2; (-) strand; PAM type: YTN; PAM sequence: TTA
gcagtttaataaattgaatg

SEQ ID NO: 226121 - DNA, 20 bp, Artificial Sequence
  Description of Artificial Sequence: Synthetic oligonucleotide
  Target: LAMA2; (-) strand; PAM type: YTN; PAM sequence: TTG
aagaaaagtccagaagatta

SEQ ID NO: 226122 - DNA, 20 bp, Artificial Sequence
  Description of Artificial Sequence: Synthetic oligonucleotide
  Target: LAMA2; (-) strand; PAM type: YTN; PAM sequence: TTT
gaagaaaagtccagaagatt

SEQ ID NO: 226123 - DNA, 20 bp, Artificial Sequence
  Description of Artificial Sequence: Synthetic oligonucleotide
  Target: LAMA2; (-) strand; PAM type: YTN; PAM sequence: CTT
tgaagaaaagtccagaagat

SEQ ID NO: 226124 - DNA, 20 bp, Artificial Sequence
  Description of Artificial Sequence: Synthetic oligonucleotide
  Target: LAMA2; (-) strand; PAM type: YTN; PAM sequence: CTG
acaagctttgaagaaaagtc

SEQ ID NO: 226125 - DNA, 20 bp, Artificial Sequence
  Description of Artificial Sequence: Synthetic oligonucleotide
  Target: LAMA2; (-) strand; PAM type: YTN; PAM sequence: TTG
gatcaaaactgacaagcttt

SEQ ID NO: 226126 - DNA, 20 bp, Artificial Sequence
  Description of Artificial Sequence: Synthetic oligonucleotide
  Target: LAMA2; (-) strand; PAM type: YTN; PAM sequence: TTT
ggatcaaaactgacaagctt

SEQ ID NO: 226127 - DNA, 20 bp, Artificial Sequence
  Description of Artificial Sequence: Synthetic oligonucleotide
  Target: LAMA2; (-) strand; PAM type: YTN; PAM sequence: TTT
tggatcaaaactgacaagct

SEQ ID NO: 226128 - DNA, 20 bp, Artificial Sequence
  Description of Artificial Sequence: Synthetic oligonucleotide
  Target: LAMA2; (-) strand; PAM type: YTN; PAM sequence: TTT
ttggatcaaaactgacaagc

SEQ ID NO: 226129 - DNA, 20 bp, Artificial Sequence
  Description of Artificial Sequence: Synthetic oligonucleotide
  Target: LAMA2; (-) strand; PAM type: YTN; PAM sequence: TTT
tttggatcaaaactgacaag

SEQ ID NO: 226130 - DNA, 20 bp, Artificial Sequence
  Description of Artificial Sequence: Synthetic oligonucleotide
  Target: LAMA2; (-) strand; PAM type: YTN; PAM sequence: TTT
ttttggatcaaaactgacaa

SEQ ID NO: 226131 - DNA, 20 bp, Artificial Sequence
  Description of Artificial Sequence: Synthetic oligonucleotide
  Target: LAMA2; (-) strand; PAM type: YTN; PAM sequence: CTG
aagtttttttggatcaaaac

SEQ ID NO: 226132 - DNA, 20 bp, Artificial Sequence
  Description of Artificial Sequence: Synthetic oligonucleotide
  Target: LAMA2; (-) strand; PAM type: YTN; PAM sequence: TTC
acacaagaagtaacaggtcc

SEQ ID NO: 226133 - DNA, 20 bp, Artificial Sequence
  Description of Artificial Sequence: Synthetic oligonucleotide
  Target: LAMA2; (-) strand; PAM type: YTN; PAM sequence: TTT
cacacaagaagtaacaggtc

SEQ ID NO: 226134 - DNA, 20 bp, Artificial Sequence
  Description of Artificial Sequence: Synthetic oligonucleotide
  Target: LAMA2; (-) strand; PAM type: YTN; PAM sequence: TTT
tcacacaagaagtaacaggt

SEQ ID NO: 226135 - DNA, 20 bp, Artificial Sequence
  Description of Artificial Sequence: Synthetic oligonucleotide
  Target: LAMA2; (-) strand; PAM type: YTN; PAM sequence: TTT
ttcacacaagaagtaacagg

SEQ ID NO: 226136 - DNA, 20 bp, Artificial Sequence
  Description of Artificial Sequence: Synthetic oligonucleotide
  Target: LAMA2; (-) strand; PAM type: YTN; PAM sequence: CTG
tttttcacacaagaagtaac

SEQ ID NO: 226137 - DNA, 20 bp, Artificial Sequence
  Description of Artificial Sequence: Synthetic oligonucleotide
  Target: LAMA2; (-) strand; PAM type: YTN; PAM sequence: TTC
catgaaaccatactgttttt

SEQ ID NO: 226138 - DNA, 20 bp, Artificial Sequence
  Description of Artificial Sequence: Synthetic oligonucleotide
  Target: LAMA2; (-) strand; PAM type: YTN; PAM sequence: TTA
acaatggccaagagtggatt

SEQ ID NO: 226139 - DNA, 20 bp, Artificial Sequence
  Description of Artificial Sequence: Synthetic oligonucleotide
  Target: LAMA2; (-) strand; PAM type: YTN; PAM sequence: CTG
tacaatattaacaatggcca

SEQ ID NO: 226140 - DNA, 20 bp, Artificial Sequence
  Description of Artificial Sequence: Synthetic oligonucleotide
  Target: LAMA2; (-) strand; PAM type: YTN; PAM sequence: CTA
tctgtacaatattaacaatg

SEQ ID NO: 226141 - DNA, 20 bp, Artificial Sequence
  Description of Artificial Sequence: Synthetic oligonucleotide
  Target: LAMA2; (-) strand; PAM type: YTN; PAM sequence: TTG
tgtgcctatctgtacaatat

SEQ ID NO: 226142 - DNA, 20 bp, Artificial Sequence
  Description of Artificial Sequence: Synthetic oligonucleotide
  Target: LAMA2; (-) strand; PAM type: YTN; PAM sequence: CTT
gtgtgcctatctgtacaata

SEQ ID NO: 226143 - DNA, 20 bp, Artificial Sequence
  Description of Artificial Sequence: Synthetic oligonucleotide
  Target: LAMA2; (-) strand; PAM type: YTN; PAM sequence: TTA
aatgcttgtgtgcctatctg

SEQ ID NO: 226144 - DNA, 20 bp, Artificial Sequence
  Description of Artificial Sequence: Synthetic oligonucleotide
  Target: LAMA2; (-) strand; PAM type: YTN; PAM sequence: TTT
aaatgcttgtgtgcctatct

SEQ ID NO: 226145 - DNA, 20 bp, Artificial Sequence
  Description of Artificial Sequence: Synthetic oligonucleotide
  Target: LAMA2; (-) strand; PAM type: YTN; PAM sequence: CTA
gcatatttaaatgcttgtgt

SEQ ID NO: 226146 - DNA, 20 bp, Artificial Sequence
  Description of Artificial Sequence: Synthetic oligonucleotide
  Target: LAMA2; (-) strand; PAM type: YTN; PAM sequence: TTG
caataaggtgctagcatatt

SEQ ID NO: 226147 - DNA, 20 bp, Artificial Sequence
  Description of Artificial Sequence: Synthetic oligonucleotide
  Target: LAMA2; (-) strand; PAM type: YTN; PAM sequence: TTT
gcaataaggtgctagcatat

SEQ ID NO: 226148 - DNA, 20 bp, Artificial Sequence
  Description of Artificial Sequence: Synthetic oligonucleotide
  Target: LAMA2; (-) strand; PAM type: YTN; PAM sequence: TTT
tgcaataaggtgctagcata

SEQ ID NO: 226149 - DNA, 20 bp, Artificial Sequence
  Description of Artificial Sequence: Synthetic oligonucleotide
  Target: LAMA2; (-) strand; PAM type: YTN; PAM sequence: TTT
ttgcaataaggtgctagcat

SEQ ID NO: 226150 - DNA, 20 bp, Artificial Sequence
  Description of Artificial Sequence: Synthetic oligonucleotide
  Target: LAMA2; (-) strand; PAM type: YTN; PAM sequence: TTT
tttgcaataaggtgctagca

SEQ ID NO: 226151 - DNA, 20 bp, Artificial Sequence
  Description of Artificial Sequence: Synthetic oligonucleotide
  Target: LAMA2; (-) strand; PAM type: YTN; PAM sequence: TTT
ttttgcaataaggtgctagc

SEQ ID NO: 226152 - DNA, 20 bp, Artificial Sequence
  Description of Artificial Sequence: Synthetic oligonucleotide
  Target: LAMA2; (-) strand; PAM type: YTN; PAM sequence: TTT
tttttgcaataaggtgctag

SEQ ID NO: 226153 - DNA, 20 bp, Artificial Sequence
  Description of Artificial Sequence: Synthetic oligonucleotide
  Target: LAMA2; (-) strand; PAM type: YTN; PAM sequence: TTT
ttttttgcaataaggtgcta

SEQ ID NO: 226154 - DNA, 20 bp, Artificial Sequence
  Description of Artificial Sequence: Synthetic oligonucleotide
  Target: LAMA2; (-) strand; PAM type: YTN; PAM sequence: TTT
tttttttgcaataaggtgct

SEQ ID NO: 226155 - DNA, 20 bp, Artificial Sequence
  Description of Artificial Sequence: Synthetic oligonucleotide
  Target: LAMA2; (-) strand; PAM type: YTN; PAM sequence: TTT
ttttttttgcaataaggtgc

SEQ ID NO: 226156 - DNA, 20 bp, Artificial Sequence
  Description of Artificial Sequence: Synthetic oligonucleotide
  Target: LAMA2; (-) strand; PAM type: YTN; PAM sequence: TTT
tttttttttgcaataaggtg

SEQ ID NO: 226157 - DNA, 20 bp, Artificial Sequence
  Description of Artificial Sequence: Synthetic oligonucleotide
  Target: LAMA2; (-) strand; PAM type: YTN; PAM sequence: CTT
ttttttttttgcaataaggt

SEQ ID NO: 226158 - DNA, 20 bp, Artificial Sequence
  Description of Artificial Sequence: Synthetic oligonucleotide
  Target: LAMA2; (-) strand; PAM type: YTN; PAM sequence: TTG
caatgaatataagtagaact

SEQ ID NO: 226159 - DNA, 20 bp, Artificial Sequence
  Description of Artificial Sequence: Synthetic oligonucleotide
  Target: LAMA2; (-) strand; PAM type: YTN; PAM sequence: CTA
taataaattgcaatgaatat

SEQ ID NO: 226160 - DNA, 20 bp, Artificial Sequence
  Description of Artificial Sequence: Synthetic oligonucleotide
  Target: LAMA2; (-) strand; PAM type: YTN; PAM sequence: TTC
tataataaattgcaatgaat

SEQ ID NO: 226161 - DNA, 20 bp, Artificial Sequence
  Description of Artificial Sequence: Synthetic oligonucleotide
  Target: LAMA2; (-) strand; PAM type: YTN; PAM sequence: TTT
ctataataaattgcaatgaa

SEQ ID NO: 226162 - DNA, 20 bp, Artificial Sequence
  Description of Artificial Sequence: Synthetic oligonucleotide
  Target: LAMA2; (-) strand; PAM type: YTN; PAM sequence: TTT
tctataataaattgcaatga

SEQ ID NO: 226163 - DNA, 20 bp, Artificial Sequence
  Description of Artificial Sequence: Synthetic oligonucleotide
  Target: LAMA2; (-) strand; PAM type: YTN; PAM sequence: TTC
agaaaacattttctataata

SEQ ID NO: 226164 - DNA, 20 bp, Artificial Sequence
  Description of Artificial Sequence: Synthetic oligonucleotide
  Target: LAMA2; (-) strand; PAM type: YTN; PAM sequence: TTC
agttcagaaaacattttcta

SEQ ID NO: 226165 - DNA, 20 bp, Artificial Sequence
  Description of Artificial Sequence: Synthetic oligonucleotide
  Target: LAMA2; (-) strand; PAM type: YTN; PAM sequence: TTT
cagttcagaaaacattttct

SEQ ID NO: 226166 - DNA, 20 bp, Artificial Sequence
  Description of Artificial Sequence: Synthetic oligonucleotide
  Target: LAMA2; (-) strand; PAM type: YTN; PAM sequence: TTT
tcagttcagaaaacattttc

SEQ ID NO: 226167 - DNA, 20 bp, Artificial Sequence
  Description of Artificial Sequence: Synthetic oligonucleotide
  Target: LAMA2; (-) strand; PAM type: YTN; PAM sequence: TTA
taattttcagttcagaaaac

SEQ ID NO: 226168 - DNA, 20 bp, Artificial Sequence
  Description of Artificial Sequence: Synthetic oligonucleotide
  Target: LAMA2; (-) strand; PAM type: YTN; PAM sequence: TTT
ataattttcagttcagaaaa

SEQ ID NO: 226169 - DNA, 20 bp, Artificial Sequence
  Description of Artificial Sequence: Synthetic oligonucleotide
  Target: LAMA2; (-) strand; PAM type: YTN; PAM sequence: TTG
acaacagtttataattttca

SEQ ID NO: 226170 - DNA, 20 bp, Artificial Sequence
  Description of Artificial Sequence: Synthetic oligonucleotide
  Target: LAMA2; (-) strand; PAM type: YTN; PAM sequence: TTA
ttgacaacagtttataattt

SEQ ID NO: 226171 - DNA, 20 bp, Artificial Sequence
  Description of Artificial Sequence: Synthetic oligonucleotide
  Target: LAMA2; (-) strand; PAM type: YTN; PAM sequence: CTG
aattattgacaacagtttat

SEQ ID NO: 226172 - DNA, 20 bp, Artificial Sequence
  Description of Artificial Sequence: Synthetic oligonucleotide
  Target: LAMA2; (-) strand; PAM type: YTN; PAM sequence: TTG
ggacctgaattattgacaac

SEQ ID NO: 226173 - DNA, 20 bp, Artificial Sequence
  Description of Artificial Sequence: Synthetic oligonucleotide
  Target: LAMA2; (-) strand; PAM type: YTN; PAM sequence: TTC
agaattgggacctgaattat

SEQ ID NO: 226174 - DNA, 20 bp, Artificial Sequence
  Description of Artificial Sequence: Synthetic oligonucleotide
  Target: LAMA2; (-) strand; PAM type: YTN; PAM sequence: CTT
cagaattgggacctgaatta

SEQ ID NO: 226175 - DNA, 20 bp, Artificial Sequence
  Description of Artificial Sequence: Synthetic oligonucleotide
  Target: LAMA2; (-) strand; PAM type: YTN; PAM sequence: CTC
aatacacttcagaattggga

SEQ ID NO: 226176 - DNA, 20 bp, Artificial Sequence
  Description of Artificial Sequence: Synthetic oligonucleotide
  Target: LAMA2; (-) strand; PAM type: YTN; PAM sequence: TTG
gtaatctcaatacacttcag

SEQ ID NO: 226177 - DNA, 20 bp, Artificial Sequence
  Description of Artificial Sequence: Synthetic oligonucleotide
  Target: LAMA2; (-) strand; PAM type: YTN; PAM sequence: TTT
ggtaatctcaatacacttca

SEQ ID NO: 226178 - DNA, 20 bp, Artificial Sequence
  Description of Artificial Sequence: Synthetic oligonucleotide
  Target: LAMA2; (-) strand; PAM type: YTN; PAM sequence: TTC
acagtttggtaatctcaata

SEQ ID NO: 226179 - DNA, 20 bp, Artificial Sequence
  Description of Artificial Sequence: Synthetic oligonucleotide
  Target: LAMA2; (-) strand; PAM type: YTN; PAM sequence: CTT
cacagtttggtaatctcaat

SEQ ID NO: 226180 - DNA, 20 bp, Artificial Sequence
  Description of Artificial Sequence: Synthetic oligonucleotide
  Target: LAMA2; (-) strand; PAM type: YTN; PAM sequence: CTG
cttcacagtttggtaatctc

SEQ ID NO: 226181 - DNA, 20 bp, Artificial Sequence
  Description of Artificial Sequence: Synthetic oligonucleotide
  Target: LAMA2; (-) strand; PAM type: YTN; PAM sequence: TTC
ctgcttcacagtttggtaat

SEQ ID NO: 226182 - DNA, 20 bp, Artificial Sequence
  Description of Artificial Sequence: Synthetic oligonucleotide
  Target: LAMA2; (-) strand; PAM type: YTN; PAM sequence: TTG
ttcctgcttcacagtttggt

SEQ ID NO: 226183 - DNA, 20 bp, Artificial Sequence
  Description of Artificial Sequence: Synthetic oligonucleotide
  Target: LAMA2; (-) strand; PAM type: YTN; PAM sequence: TTA
tgtagagaataaatattgtt

SEQ ID NO: 226184 - DNA, 20 bp, Artificial Sequence
  Description of Artificial Sequence: Synthetic oligonucleotide
  Target: LAMA2; (-) strand; PAM type: YTN; PAM sequence: TTT
atgtagagaataaatattgt

SEQ ID NO: 226185 - DNA, 20 bp, Artificial Sequence
  Description of Artificial Sequence: Synthetic oligonucleotide
  Target: LAMA2; (-) strand; PAM type: YTN; PAM sequence: CTT
tatgtagagaataaatattg

SEQ ID NO: 226186 - DNA, 20 bp, Artificial Sequence
  Description of Artificial Sequence: Synthetic oligonucleotide
  Target: LAMA2; (-) strand; PAM type: YTN; PAM sequence: TTC
tttatgtagagaataaatat

SEQ ID NO: 226187 - DNA, 20 bp, Artificial Sequence
  Description of Artificial Sequence: Synthetic oligonucleotide
  Target: LAMA2; (-) strand; PAM type: YTN; PAM sequence: TTT
ctttatgtagagaataaata

SEQ ID NO: 226188 - DNA, 20 bp, Artificial Sequence
  Description of Artificial Sequence: Synthetic oligonucleotide
  Target: LAMA2; (-) strand; PAM type: YTN; PAM sequence: CTT
tctttatgtagagaataaat

SEQ ID NO: 226189 - DNA, 20 bp, Artificial Sequence
  Description of Artificial Sequence: Synthetic oligonucleotide
  Target: LAMA2; (-) strand; PAM type: YTN; PAM sequence: TTC
tttctttatgtagagaataa

SEQ ID NO: 226190 - DNA, 20 bp, Artificial Sequence
  Description of Artificial Sequence: Synthetic oligonucleotide
  Target: LAMA2; (-) strand; PAM type: YTN; PAM sequence: TTT
ctttctttatgtagagaata

SEQ ID NO: 226191 - DNA, 20 bp, Artificial Sequence
  Description of Artificial Sequence: Synthetic oligonucleotide
  Target: LAMA2; (-) strand; PAM type: YTN; PAM sequence: TTT
tctttctttatgtagagaat

SEQ ID NO: 226192 - DNA, 20 bp, Artificial Sequence
  Description of Artificial Sequence: Synthetic oligonucleotide
  Target: LAMA2; (-) strand; PAM type: YTN; PAM sequence: CTT
ttctttctttatgtagagaa

SEQ ID NO: 226193 - DNA, 20 bp, Artificial Sequence
  Description of Artificial Sequence: Synthetic oligonucleotide
  Target: LAMA2; (-) strand; PAM type: YTN; PAM sequence: TTC
ttttctttctttatgtagag

SEQ ID NO: 226194 - DNA, 20 bp, Artificial Sequence
  Description of Artificial Sequence: Synthetic oligonucleotide
  Target: LAMA2; (-) strand; PAM type: YTN; PAM sequence: TTA
atagttcttttctttcttta

SEQ ID NO: 226195 - DNA, 20 bp, Artificial Sequence
  Description of Artificial Sequence: Synthetic oligonucleotide
  Target: LAMA2; (-) strand; PAM type: YTN; PAM sequence: TTT
aatagttcttttctttcttt

SEQ ID NO: 226196 - DNA, 20 bp, Artificial Sequence
  Description of Artificial Sequence: Synthetic oligonucleotide
  Target: LAMA2; (-) strand; PAM type: YTN; PAM sequence: TTC
atttaatagttcttttcttt

SEQ ID NO: 226197 - DNA, 20 bp, Artificial Sequence
  Description of Artificial Sequence: Synthetic oligonucleotide
  Target: LAMA2; (-) strand; PAM type: YTN; PAM sequence: TTA
taatatcaagttcatttaat

SEQ ID NO: 226198 - DNA, 20 bp, Artificial Sequence
  Description of Artificial Sequence: Synthetic oligonucleotide
  Target: LAMA2; (-) strand; PAM type: YTN; PAM sequence: CTT
ataatatcaagttcatttaa

SEQ ID NO: 226199 - DNA, 20 bp, Artificial Sequence
  Description of Artificial Sequence: Synthetic oligonucleotide
  Target: LAMA2; (-) strand; PAM type: YTN; PAM sequence: TTC
ttataatatcaagttcattt

SEQ ID NO: 226200 - DNA, 20 bp, Artificial Sequence
  Description of Artificial Sequence: Synthetic oligonucleotide
  Target: LAMA2; (-) strand; PAM type: YTN; PAM sequence: CTT
cttataatatcaagttcatt

SEQ ID NO: 226201 - DNA, 20 bp, Artificial Sequence
  Description of Artificial Sequence: Synthetic oligonucleotide
  Target: LAMA2; (-) strand; PAM type: YTN; PAM sequence: CTG
aagtgcttcttataatatca

SEQ ID NO: 226202 - DNA, 20 bp, Artificial Sequence
  Description of Artificial Sequence: Synthetic oligonucleotide
  Target: LAMA2; (-) strand; PAM type: YTN; PAM sequence: TTG
acaacctgaagtgcttctta

SEQ ID NO: 226203 - DNA, 20 bp, Artificial Sequence
  Description of Artificial Sequence: Synthetic oligonucleotide
  Target: LAMA2; (-) strand; PAM type: YTN; PAM sequence: TTT
gacaacctgaagtgcttctt

SEQ ID NO: 226204 - DNA, 20 bp, Artificial Sequence
  Description of Artificial Sequence: Synthetic oligonucleotide
  Target: LAMA2; (-) strand; PAM type: YTN; PAM sequence: TTT
tgacaacctgaagtgcttct

SEQ ID NO: 226205 - DNA, 20 bp, Artificial Sequence
  Description of Artificial Sequence: Synthetic oligonucleotide
  Target: LAMA2; (-) strand; PAM type: YTN; PAM sequence: TTA
tagatgtcataatatgagtt

SEQ ID NO: 226206 - DNA, 20 bp, Artificial Sequence
  Description of Artificial Sequence: Synthetic oligonucleotide
  Target: LAMA2; (-) strand; PAM type: YTN; PAM sequence: TTA
ggccagattatagatgtcat

SEQ ID NO: 226207 - DNA, 20 bp, Artificial Sequence
  Description of Artificial Sequence: Synthetic oligonucleotide
  Target: LAMA2; (-) strand; PAM type: YTN; PAM sequence: TTT
aggccagattatagatgtca

SEQ ID NO: 226208 - DNA, 20 bp, Artificial Sequence
  Description of Artificial Sequence: Synthetic oligonucleotide
  Target: LAMA2; (-) strand; PAM type: YTN; PAM sequence: TTT
taggccagattatagatgtc

SEQ ID NO: 226209 - DNA, 20 bp, Artificial Sequence
  Description of Artificial Sequence: Synthetic oligonucleotide
  Target: LAMA2; (-) strand; PAM type: YTN; PAM sequence: TTG
tgattttaggccagattata

SEQ ID NO: 226210 - DNA, 20 bp, Artificial Sequence
  Description of Artificial Sequence: Synthetic oligonucleotide
  Target: LAMA2; (-) strand; PAM type: YTN; PAM sequence: CTT
gtgattttaggccagattat

SEQ ID NO: 226211 - DNA, 20 bp, Artificial Sequence
  Description of Artificial Sequence: Synthetic oligonucleotide
  Target: LAMA2; (-) strand; PAM type: YTN; PAM sequence: TTG
cttgtgattttaggccagat

SEQ ID NO: 226212 - DNA, 20 bp, Artificial Sequence
  Description of Artificial Sequence: Synthetic oligonucleotide
  Target: LAMA2; (-) strand; PAM type: YTN; PAM sequence: TTT
gcttgtgattttaggccaga

SEQ ID NO: 226213 - DNA, 20 bp, Artificial Sequence
  Description of Artificial Sequence: Synthetic oligonucleotide
  Target: LAMA2; (-) strand; PAM type: YTN; PAM sequence: TTC
catcatggaatgtttgcttg

SEQ ID NO: 226214 - DNA, 20 bp, Artificial Sequence
  Description of Artificial Sequence: Synthetic oligonucleotide
  Target: LAMA2; (-) strand; PAM type: YTN; PAM sequence: CTG
ccattccatcatggaatgtt

SEQ ID NO: 226215 - DNA, 20 bp, Artificial Sequence
  Description of Artificial Sequence: Synthetic oligonucleotide
  Target: LAMA2; (-) strand; PAM type: YTN; PAM sequence: CTA
gcatgatctgccattccatc

SEQ ID NO: 226216 - DNA, 20 bp, Artificial Sequence
  Description of Artificial Sequence: Synthetic oligonucleotide
  Target: LAMA2; (-) strand; PAM type: YTN; PAM sequence: CTG
ataataaccagcaaatctag

SEQ ID NO: 226217 - DNA, 20 bp, Artificial Sequence
  Description of Artificial Sequence: Synthetic oligonucleotide
  Target: LAMA2; (-) strand; PAM type: YTN; PAM sequence: TTA
ggtaacgtaaaataaaactg

SEQ ID NO: 226218 - DNA, 20 bp, Artificial Sequence
  Description of Artificial Sequence: Synthetic oligonucleotide
  Target: LAMA2; (-) strand; PAM type: YTN; PAM sequence: CTT
aggtaacgtaaaataaaact

SEQ ID NO: 226219 - DNA, 20 bp, Artificial Sequence
  Description of Artificial Sequence: Synthetic oligonucleotide
  Target: LAMA2; (-) strand; PAM type: YTN; PAM sequence: CTA
cttaggtaacgtaaaataaa

SEQ ID NO: 226220 - DNA, 20 bp, Artificial Sequence
  Description of Artificial Sequence: Synthetic oligonucleotide
  Target: LAMA2; (-) strand; PAM type: YTN; PAM sequence: TTC
tacttaggtaacgtaaaata

SEQ ID NO: 226221 - DNA, 20 bp, Artificial Sequence
  Description of Artificial Sequence: Synthetic oligonucleotide
  Target: LAMA2; (-) strand; PAM type: YTN; PAM sequence: TTA
aattctacttaggtaacgta

SEQ ID NO: 226222 - DNA, 20 bp, Artificial Sequence
  Description of Artificial Sequence: Synthetic oligonucleotide
  Target: LAMA2; (-) strand; PAM type: YTN; PAM sequence: CTT
aaattctacttaggtaacgt

SEQ ID NO: 226223 - DNA, 20 bp, Artificial Sequence
  Description of Artificial Sequence: Synthetic oligonucleotide
  Target: LAMA2; (-) strand; PAM type: YTN; PAM sequence: CTG
aaaggcttaaattctactta

SEQ ID NO: 226224 - DNA, 20 bp, Artificial Sequence
  Description of Artificial Sequence: Synthetic oligonucleotide
  Target: LAMA2; (-) strand; PAM type: YTN; PAM sequence: TTA
actgaaaggcttaaattcta

SEQ ID NO: 226225 - DNA, 20 bp, Artificial Sequence
  Description of Artificial Sequence: Synthetic oligonucleotide
  Target: LAMA2; (-) strand; PAM type: YTN; PAM sequence: TTT
aactgaaaggcttaaattct

SEQ ID NO: 226226 - DNA, 20 bp, Artificial Sequence
  Description of Artificial Sequence: Synthetic oligonucleotide
  Target: LAMA2; (-) strand; PAM type: YTN; PAM sequence: TTT
taactgaaaggcttaaattc

SEQ ID NO: 226227 - DNA, 20 bp, Artificial Sequence
  Description of Artificial Sequence: Synthetic oligonucleotide
  Target: LAMA2; (-) strand; PAM type: YTN; PAM sequence: TTG
ggagtcatattttaactgaa

SEQ ID NO: 226228 - DNA, 20 bp, Artificial Sequence
  Description of Artificial Sequence: Synthetic oligonucleotide
  Target: LAMA2; (-) strand; PAM type: YTN; PAM sequence: CTT
gggagtcatattttaactga

SEQ ID NO: 226229 - DNA, 20 bp, Artificial Sequence
  Description of Artificial Sequence: Synthetic oligonucleotide
  Target: LAMA2; (-) strand; PAM type: YTN; PAM sequence: TTG
cttgggagtcatattttaac

SEQ ID NO: 226230 - DNA, 20 bp, Artificial Sequence
  Description of Artificial Sequence: Synthetic oligonucleotide
  Target: LAMA2; (-) strand; PAM type: YTN; PAM sequence: TTT
gcttgggagtcatattttaa

SEQ ID NO: 226231 - DNA, 20 bp, Artificial Sequence
  Description of Artificial Sequence: Synthetic oligonucleotide
  Target: LAMA2; (-) strand; PAM type: YTN; PAM sequence: TTT
tgcttgggagtcatatttta

SEQ ID NO: 226232 - DNA, 20 bp, Artificial Sequence
  Description of Artificial Sequence: Synthetic oligonucleotide
  Target: LAMA2; (-) strand; PAM type: YTN; PAM sequence: CTT
ttgcttgggagtcatatttt

SEQ ID NO: 226233 - DNA, 20 bp, Artificial Sequence
  Description of Artificial Sequence: Synthetic oligonucleotide
  Target: LAMA2; (-) strand; PAM type: YTN; PAM sequence: TTC
cttttgcttgggagtcatat

SEQ ID NO: 226234 - DNA, 20 bp, Artificial Sequence
  Description of Artificial Sequence: Synthetic oligonucleotide
  Target: LAMA2; (-) strand; PAM type: YTN; PAM sequence: CTT
ccttttgcttgggagtcata

SEQ ID NO: 226235 - DNA, 20 bp, Artificial Sequence
  Description of Artificial Sequence: Synthetic oligonucleotide
  Target: LAMA2; (-) strand; PAM type: YTN; PAM sequence: CTC
ttccttttgcttgggagtca

SEQ ID NO: 226236 - DNA, 20 bp, Artificial Sequence
  Description of Artificial Sequence: Synthetic oligonucleotide
  Target: LAMA2; (-) strand; PAM type: YTN; PAM sequence: TTA
atcctcttccttttgcttgg

SEQ ID NO: 226237 - DNA, 20 bp, Artificial Sequence
  Description of Artificial Sequence: Synthetic oligonucleotide
  Target: LAMA2; (-) strand; PAM type: YTN; PAM sequence: TTA
atccattaatcctcttcctt

SEQ ID NO: 226238 - DNA, 20 bp, Artificial Sequence
  Description of Artificial Sequence: Synthetic oligonucleotide
  Target: LAMA2; (-) strand; PAM type: YTN; PAM sequence: TTG
ataacacaaacaatagttaa

SEQ ID NO: 226239 - DNA, 20 bp, Artificial Sequence
  Description of Artificial Sequence: Synthetic oligonucleotide
  Target: LAMA2; (-) strand; PAM type: YTN; PAM sequence: TTA
ttgataacacaaacaatagt

SEQ ID NO: 226240 - DNA, 20 bp, Artificial Sequence
  Description of Artificial Sequence: Synthetic oligonucleotide
  Target: LAMA2; (-) strand; PAM type: YTN; PAM sequence: TTG
ccaatattattgataacaca

SEQ ID NO: 226241 - DNA, 20 bp, Artificial Sequence
  Description of Artificial Sequence: Synthetic oligonucleotide
  Target: LAMA2; (-) strand; PAM type: YTN; PAM sequence: TTA
ttgccaatattattgataac

SEQ ID NO: 226242 - DNA, 20 bp, Artificial Sequence
  Description of Artificial Sequence: Synthetic oligonucleotide
  Target: LAMA2; (-) strand; PAM type: YTN; PAM sequence: CTG
acacagcaccatagacaaat

SEQ ID NO: 226243 - DNA, 20 bp, Artificial Sequence
  Description of Artificial Sequence: Synthetic oligonucleotide
  Target: LAMA2; (-) strand; PAM type: YTN; PAM sequence: TTG
taactgacacagcaccatag

SEQ ID NO: 226244 - DNA, 20 bp, Artificial Sequence
  Description of Artificial Sequence: Synthetic oligonucleotide
  Target: LAMA2; (-) strand; PAM type: YTN; PAM sequence: CTT
gtaactgacacagcaccata

SEQ ID NO: 226245 - DNA, 20 bp, Artificial Sequence
  Description of Artificial Sequence: Synthetic oligonucleotide
  Target: LAMA2; (-) strand; PAM type: YTN; PAM sequence: TTG
gtgaggatcagatggaagaa

SEQ ID NO: 226246 - DNA, 20 bp, Artificial Sequence
  Description of Artificial Sequence: Synthetic oligonucleotide
  Target: LAMA2; (-) strand; PAM type: YTN; PAM sequence: TTT
ggtgaggatcagatggaaga

SEQ ID NO: 226247 - DNA, 20 bp, Artificial Sequence
  Description of Artificial Sequence: Synthetic oligonucleotide
  Target: LAMA2; (-) strand; PAM type: YTN; PAM sequence: CTT
tggtgaggatcagatggaag

SEQ ID NO: 226248 - DNA, 20 bp, Artificial Sequence
  Description of Artificial Sequence: Synthetic oligonucleotide
  Target: LAMA2; (-) strand; PAM type: YTN; PAM sequence: CTC
caaggctttggtgaggatca

SEQ ID NO: 226249 - DNA, 20 bp, Artificial Sequence
  Description of Artificial Sequence: Synthetic oligonucleotide
  Target: LAMA2; (-) strand; PAM type: YTN; PAM sequence: TTG
aagcatctccaaggctttgg

SEQ ID NO: 226250 - DNA, 20 bp, Artificial Sequence
  Description of Artificial Sequence: Synthetic oligonucleotide
  Target: LAMA2; (-) strand; PAM type: YTN; PAM sequence: CTT
gaagcatctccaaggctttg

SEQ ID NO: 226251 - DNA, 20 bp, Artificial Sequence
  Description of Artificial Sequence: Synthetic oligonucleotide
  Target: LAMA2; (-) strand; PAM type: YTN; PAM sequence: TTG
gcttgaagcatctccaaggc

SEQ ID NO: 226252 - DNA, 20 bp, Artificial Sequence
  Description of Artificial Sequence: Synthetic oligonucleotide
  Target: LAMA2; (-) strand; PAM type: YTN; PAM sequence: TTT
ggcttgaagcatctccaagg

SEQ ID NO: 226253 - DNA, 20 bp, Artificial Sequence
  Description of Artificial Sequence: Synthetic oligonucleotide
  Target: LAMA2; (-) strand; PAM type: YTN; PAM sequence: TTT
tggcttgaagcatctccaag

SEQ ID NO: 226254 - DNA, 20 bp, Artificial Sequence
  Description of Artificial Sequence: Synthetic oligonucleotide
  Target: LAMA2; (-) strand; PAM type: YTN; PAM sequence: CTG
taaaatgagaataataacaa

SEQ ID NO: 226255 - DNA, 20 bp, Artificial Sequence
  Description of Artificial Sequence: Synthetic oligonucleotide
  Target: LAMA2; (-) strand; PAM type: YTN; PAM sequence: CTC
catctgtaaaatgagaataa

SEQ ID NO: 226256 - DNA, 20 bp, Artificial Sequence
  Description of Artificial Sequence: Synthetic oligonucleotide
  Target: LAMA2; (-) strand; PAM type: YTN; PAM sequence: TTC
acctccatctgtaaaatgag

SEQ ID NO: 226257 - DNA, 20 bp, Artificial Sequence
  Description of Artificial Sequence: Synthetic oligonucleotide
  Target: LAMA2; (-) strand; PAM type: YTN; PAM sequence: CTT
cacctccatctgtaaaatga

SEQ ID NO: 226258 - DNA, 20 bp, Artificial Sequence
  Description of Artificial Sequence: Synthetic oligonucleotide
  Target: LAMA2; (-) strand; PAM type: YTN; PAM sequence: TTC
cttcacctccatctgtaaaa

SEQ ID NO: 226259 - DNA, 20 bp, Artificial Sequence
  Description of Artificial Sequence: Synthetic oligonucleotide
  Target: LAMA2; (-) strand; PAM type: YTN; PAM sequence: CTC
aaatcagttccttcacctcc

SEQ ID NO: 226260 - DNA, 20 bp, Artificial Sequence
  Description of Artificial Sequence: Synthetic oligonucleotide
  Target: LAMA2; (-) strand; PAM type: YTN; PAM sequence: TTA
ccacagtgtgacctcaaatc

SEQ ID NO: 226261 - DNA, 20 bp, Artificial Sequence
  Description of Artificial Sequence: Synthetic oligonucleotide
  Target: LAMA2; (-) strand; PAM type: YTN; PAM sequence: TTT
accacagtgtgacctcaaat

SEQ ID NO: 226262 - DNA, 20 bp, Artificial Sequence
  Description of Artificial Sequence: Synthetic oligonucleotide
  Target: LAMA2; (-) strand; PAM type: YTN; PAM sequence: TTG
aacatttaccacagtgtgac

SEQ ID NO: 226263 - DNA, 20 bp, Artificial Sequence
  Description of Artificial Sequence: Synthetic oligonucleotide
  Target: LAMA2; (-) strand; PAM type: YTN; PAM sequence: TTA
gtgttgaacatttaccacag

SEQ ID NO: 226264 - DNA, 20 bp, Artificial Sequence
  Description of Artificial Sequence: Synthetic oligonucleotide
  Target: LAMA2; (-) strand; PAM type: YTN; PAM sequence: CTG
gaccagagattagtgttgaa

SEQ ID NO: 226265 - DNA, 20 bp, Artificial Sequence
  Description of Artificial Sequence: Synthetic oligonucleotide
  Target: LAMA2; (-) strand; PAM type: YTN; PAM sequence: CTG
gacctggaccagagattagt

SEQ ID NO: 226266 - DNA, 20 bp, Artificial Sequence
  Description of Artificial Sequence: Synthetic oligonucleotide
  Target: LAMA2; (-) strand; PAM type: YTN; PAM sequence: CTG
gactggacctggaccagaga

SEQ ID NO: 226267 - DNA, 20 bp, Artificial Sequence
  Description of Artificial Sequence: Synthetic oligonucleotide
  Target: LAMA2; (-) strand; PAM type: YTN; PAM sequence: TTG
ccatcagaagatctggactg

SEQ ID NO: 226268 - DNA, 20 bp, Artificial Sequence
  Description of Artificial Sequence: Synthetic oligonucleotide
  Target: LAMA2; (-) strand; PAM type: YTN; PAM sequence: TTT
gccatcagaagatctggact

SEQ ID NO: 226269 - DNA, 20 bp, Artificial Sequence
  Description of Artificial Sequence: Synthetic oligonucleotide
  Target: LAMA2; (-) strand; PAM type: YTN; PAM sequence: TTA
taaggtttgccatcagaaga

SEQ ID NO: 226270 - DNA, 20 bp, Artificial Sequence
  Description of Artificial Sequence: Synthetic oligonucleotide
  Target: LAMA2; (-) strand; PAM type: YTN; PAM sequence: TTA
tgaagtggaatgattataag

SEQ ID NO: 226271 - DNA, 20 bp, Artificial Sequence
  Description of Artificial Sequence: Synthetic oligonucleotide
  Target: LAMA2; (-) strand; PAM type: YTN; PAM sequence: TTT
atgaagtggaatgattataa

SEQ ID NO: 226272 - DNA, 20 bp, Artificial Sequence
  Description of Artificial Sequence: Synthetic oligonucleotide
  Target: LAMA2; (-) strand; PAM type: YTN; PAM sequence: TTC
catttatgaagtggaatgat

SEQ ID NO: 226273 - DNA, 20 bp, Artificial Sequence
  Description of Artificial Sequence: Synthetic oligonucleotide
  Target: LAMA2; (-) strand; PAM type: YTN; PAM sequence: CTA
agtgttccatttatgaagtg

SEQ ID NO: 226274 - DNA, 20 bp, Artificial Sequence
  Description of Artificial Sequence: Synthetic oligonucleotide
  Target: LAMA2; (-) strand; PAM type: YTN; PAM sequence: TTG
gacctaagtgttccatttat

SEQ ID NO: 226275 - DNA, 20 bp, Artificial Sequence
  Description of Artificial Sequence: Synthetic oligonucleotide
  Target: LAMA2; (-) strand; PAM type: YTN; PAM sequence: CTG
attggacctaagtgttccat

SEQ ID NO: 226276 - DNA, 20 bp, Artificial Sequence
  Description of Artificial Sequence: Synthetic oligonucleotide
  Target: LAMA2; (-) strand; PAM type: YTN; PAM sequence: TTA
gaaaatgactgattggacct

SEQ ID NO: 226277 - DNA, 20 bp, Artificial Sequence
  Description of Artificial Sequence: Synthetic oligonucleotide
  Target: LAMA2; (-) strand; PAM type: YTN; PAM sequence: TTT
agaaaatgactgattggacc

SEQ ID NO: 226278 - DNA, 20 bp, Artificial Sequence
  Description of Artificial Sequence: Synthetic oligonucleotide
  Target: LAMA2; (-) strand; PAM type: YTN; PAM sequence: TTG
tgaccaacagtaaatacaca

SEQ ID NO: 226279 - DNA, 20 bp, Artificial Sequence
  Description of Artificial Sequence: Synthetic oligonucleotide
  Target: LAMA2; (-) strand; PAM type: YTN; PAM sequence: CTT
gtgaccaacagtaaatacac

SEQ ID NO: 226280 - DNA, 20 bp, Artificial Sequence
  Description of Artificial Sequence: Synthetic oligonucleotide
  Target: LAMA2; (-) strand; PAM type: YTN; PAM sequence: CTC
ttgtgaccaacagtaaatac

SEQ ID NO: 226281 - DNA, 20 bp, Artificial Sequence
  Description of Artificial Sequence: Synthetic oligonucleotide
  Target: LAMA2; (-) strand; PAM type: YTN; PAM sequence: TTA
tccacacagtgtcacacaaa

SEQ ID NO: 226282 - DNA, 20 bp, Artificial Sequence
  Description of Artificial Sequence: Synthetic oligonucleotide
  Target: LAMA2; (-) strand; PAM type: YTN; PAM sequence: TTA
attatccacacagtgtcaca

SEQ ID NO: 226283 - DNA, 20 bp, Artificial Sequence
  Description of Artificial Sequence: Synthetic oligonucleotide
  Target: LAMA2; (-) strand; PAM type: YTN; PAM sequence: TTT
aattatccacacagtgtcac

SEQ ID NO: 226284 - DNA, 20 bp, Artificial Sequence
  Description of Artificial Sequence: Synthetic oligonucleotide
  Target: LAMA2; (-) strand; PAM type: YTN; PAM sequence: TTC
cgagtagagatggtggatgg

SEQ ID NO: 226285 - DNA, 20 bp, Artificial Sequence
  Description of Artificial Sequence: Synthetic oligonucleotide
  Target: LAMA2; (-) strand; PAM type: YTN; PAM sequence: TTT
ccgagtagagatggtggatg

SEQ ID NO: 226286 - DNA, 20 bp, Artificial Sequence
  Description of Artificial Sequence: Synthetic oligonucleotide
  Target: LAMA2; (-) strand; PAM type: YTN; PAM sequence: TTT
tccgagtagagatggtggat

SEQ ID NO: 226287 - DNA, 20 bp, Artificial Sequence
  Description of Artificial Sequence: Synthetic oligonucleotide
  Target: LAMA2; (-) strand; PAM type: YTN; PAM sequence: TTT
ttccgagtagagatggtgga

SEQ ID NO: 226288 - DNA, 20 bp, Artificial Sequence
  Description of Artificial Sequence: Synthetic oligonucleotide
  Target: LAMA2; (-) strand; PAM type: YTN; PAM sequence: TTG
ggtttttccgagtagagatg

SEQ ID NO: 226289 - DNA, 20 bp, Artificial Sequence
  Description of Artificial Sequence: Synthetic oligonucleotide
  Target: LAMA2; (-) strand; PAM type: YTN; PAM sequence: CTT
gggtttttccgagtagagat

SEQ ID NO: 226290 - DNA, 20 bp, Artificial Sequence
  Description of Artificial Sequence: Synthetic oligonucleotide
  Target: LAMA2; (-) strand; PAM type: YTN; PAM sequence: CTG
acacacccttgggtttttcc

SEQ ID NO: 226291 - DNA, 20 bp, Artificial Sequence
  Description of Artificial Sequence: Synthetic oligonucleotide
  Target: LAMA2; (-) strand; PAM type: YTN; PAM sequence: TTA
actgacacacccttgggttt

SEQ ID NO: 226292 - DNA, 20 bp, Artificial Sequence
  Description of Artificial Sequence: Synthetic oligonucleotide
  Target: LAMA2; (-) strand; PAM type: YTN; PAM sequence: CTG
attaactgacacacccttgg

SEQ ID NO: 226293 - DNA, 20 bp, Artificial Sequence
  Description of Artificial Sequence: Synthetic oligonucleotide
  Target: LAMA2; (-) strand; PAM type: YTN; PAM sequence: TTA
agactgattaactgacacac

SEQ ID NO: 226294 - DNA, 20 bp, Artificial Sequence
  Description of Artificial Sequence: Synthetic oligonucleotide
  Target: LAMA2; (-) strand; PAM type: YTN; PAM sequence: CTG
ttaagactgattaactgaca

SEQ ID NO: 226295 - DNA, 20 bp, Artificial Sequence
  Description of Artificial Sequence: Synthetic oligonucleotide
  Target: LAMA2; (-) strand; PAM type: YTN; PAM sequence: TTC
ctgttaagactgattaactg

SEQ ID NO: 226296 - DNA, 20 bp, Artificial Sequence
  Description of Artificial Sequence: Synthetic oligonucleotide
  Target: LAMA2; (-) strand; PAM type: YTN; PAM sequence: TTT
cctgttaagactgattaact

SEQ ID NO: 226297 - DNA, 20 bp, Artificial Sequence
  Description of Artificial Sequence: Synthetic oligonucleotide
  Target: LAMA2; (-) strand; PAM type: YTN; PAM sequence: CTT
tcctgttaagactgattaac

SEQ ID NO: 226298 - DNA, 20 bp, Artificial Sequence
  Description of Artificial Sequence: Synthetic oligonucleotide
  Target: LAMA2; (-) strand; PAM type: YTN; PAM sequence: TTA
tctttcctgttaagactgat

SEQ ID NO: 226299 - DNA, 20 bp, Artificial Sequence
  Description of Artificial Sequence: Synthetic oligonucleotide
  Target: LAMA2; (-) strand; PAM type: YTN; PAM sequence: TTG
ccataatgataatagtacat

SEQ ID NO: 226300 - DNA, 20 bp, Artificial Sequence
  Description of Artificial Sequence: Synthetic oligonucleotide
  Target: LAMA2; (-) strand; PAM type: YTN; PAM sequence: TTT
gccataatgataatagtaca

SEQ ID NO: 226301 - DNA, 20 bp, Artificial Sequence
  Description of Artificial Sequence: Synthetic oligonucleotide
  Target: LAMA2; (-) strand; PAM type: YTN; PAM sequence: TTT
tgccataatgataatagtac

SEQ ID NO: 226302 - DNA, 20 bp, Artificial Sequence
  Description of Artificial Sequence: Synthetic oligonucleotide
  Target: LAMA2; (-) strand; PAM type: YTN; PAM sequence: CTT
ttgccataatgataatagta

SEQ ID NO: 226303 - DNA, 20 bp, Artificial Sequence
  Description of Artificial Sequence: Synthetic oligonucleotide
  Target: LAMA2; (-) strand; PAM type: YTN; PAM sequence: TTC
aagtgtacttttgccataat

SEQ ID NO: 226304 - DNA, 20 bp, Artificial Sequence
  Description of Artificial Sequence: Synthetic oligonucleotide
  Target: LAMA2; (-) strand; PAM type: YTN; PAM sequence: TTT
caagtgtacttttgccataa

SEQ ID NO: 226305 - DNA, 20 bp, Artificial Sequence
  Description of Artificial Sequence: Synthetic oligonucleotide
  Target: LAMA2; (-) strand; PAM type: YTN; PAM sequence: TTT
tcaagtgtacttttgccata

SEQ ID NO: 226306 - DNA, 20 bp, Artificial Sequence
  Description of Artificial Sequence: Synthetic oligonucleotide
  Target: LAMA2; (-) strand; PAM type: YTN; PAM sequence: TTG
tattttcaagtgtacttttg

SEQ ID NO: 226307 - DNA, 20 bp, Artificial Sequence
  Description of Artificial Sequence: Synthetic oligonucleotide
  Target: LAMA2; (-) strand; PAM type: YTN; PAM sequence: TTG
ttgtattttcaagtgtactt

SEQ ID NO: 226308 - DNA, 20 bp, Artificial Sequence
  Description of Artificial Sequence: Synthetic oligonucleotide
  Target: LAMA2; (-) strand; PAM type: YTN; PAM sequence: TTT
gttgtattttcaagtgtact

SEQ ID NO: 226309 - DNA, 20 bp, Artificial Sequence
  Description of Artificial Sequence: Synthetic oligonucleotide
  Target: LAMA2; (-) strand; PAM type: YTN; PAM sequence: CTT
tgttgtattttcaagtgtac

SEQ ID NO: 226310 - DNA, 20 bp, Artificial Sequence
  Description of Artificial Sequence: Synthetic oligonucleotide
  Target: LAMA2; (-) strand; PAM type: YTN; PAM sequence: TTC
aatatcctttgttgtatttt

SEQ ID NO: 226311 - DNA, 20 bp, Artificial Sequence
  Description of Artificial Sequence: Synthetic oligonucleotide
  Target: LAMA2; (-) strand; PAM type: YTN; PAM sequence: CTT
caatatcctttgttgtattt

SEQ ID NO: 226312 - DNA, 20 bp, Artificial Sequence
  Description of Artificial Sequence: Synthetic oligonucleotide
  Target: LAMA2; (-) strand; PAM type: YTN; PAM sequence: TTA
atagcttcaatatcctttgt

SEQ ID NO: 226313 - DNA, 20 bp, Artificial Sequence
  Description of Artificial Sequence: Synthetic oligonucleotide
  Target: LAMA2; (-) strand; PAM type: YTN; PAM sequence: TTT
aatagcttcaatatcctttg

SEQ ID NO: 226314 - DNA, 20 bp, Artificial Sequence
  Description of Artificial Sequence: Synthetic oligonucleotide
  Target: LAMA2; (-) strand; PAM type: YTN; PAM sequence: TTT
taatagcttcaatatccttt

SEQ ID NO: 226315 - DNA, 20 bp, Artificial Sequence
  Description of Artificial Sequence: Synthetic oligonucleotide
  Target: LAMA2; (-) strand; PAM type: YTN; PAM sequence: TTA
ttttaatagcttcaatatcc

SEQ ID NO: 226316 - DNA, 20 bp, Artificial Sequence
  Description of Artificial Sequence: Synthetic oligonucleotide
  Target: LAMA2; (-) strand; PAM type: YTN; PAM sequence: CTT
attttaatagcttcaatatc

SEQ ID NO: 226317 - DNA, 20 bp, Artificial Sequence
  Description of Artificial Sequence: Synthetic oligonucleotide
  Target: LAMA2; (-) strand; PAM type: YTN; PAM sequence: CTA
aggataagaagcttatttta

SEQ ID NO: 226318 - DNA, 20 bp, Artificial Sequence
  Description of Artificial Sequence: Synthetic oligonucleotide
  Target: LAMA2; (-) strand; PAM type: YTN; PAM sequence: TTC
cctaaggataagaagcttat

SEQ ID NO: 226319 - DNA, 20 bp, Artificial Sequence
  Description of Artificial Sequence: Synthetic oligonucleotide
  Target: LAMA2; (-) strand; PAM type: YTN; PAM sequence: TTT
ccctaaggataagaagctta

SEQ ID NO: 226320 - DNA, 20 bp, Artificial Sequence
  Description of Artificial Sequence: Synthetic oligonucleotide
  Target: LAMA2; (-) strand; PAM type: YTN; PAM sequence: TTG
aaatagtttccctaaggata

SEQ ID NO: 226321 - DNA, 20 bp, Artificial Sequence
  Description of Artificial Sequence: Synthetic oligonucleotide
  Target: LAMA2; (-) strand; PAM type: YTN; PAM sequence: CTA
gtgttgaaatagtttcccta

SEQ ID NO: 226322 - DNA, 20 bp, Artificial Sequence
  Description of Artificial Sequence: Synthetic oligonucleotide
  Target: LAMA2; (-) strand; PAM type: YTN; PAM sequence: CTC
tagtgttgaaatagtttccc

SEQ ID NO: 226323 - DNA, 20 bp, Artificial Sequence
  Description of Artificial Sequence: Synthetic oligonucleotide
  Target: LAMA2; (-) strand; PAM type: YTN; PAM sequence: TTG
atgatagctctagtgttgaa

SEQ ID NO: 226324 - DNA, 20 bp, Artificial Sequence
  Description of Artificial Sequence: Synthetic oligonucleotide
  Target: LAMA2; (-) strand; PAM type: YTN; PAM sequence: TTT
gatgatagctctagtgttga

SEQ ID NO: 226325 - DNA, 20 bp, Artificial Sequence
  Description of Artificial Sequence: Synthetic oligonucleotide
  Target: LAMA2; (-) strand; PAM type: YTN; PAM sequence: TTT
tgatgatagctctagtgttg

SEQ ID NO: 226326 - DNA, 20 bp, Artificial Sequence
  Description of Artificial Sequence: Synthetic oligonucleotide
  Target: LAMA2; (-) strand; PAM type: YTN; PAM sequence: CTT
ttgatgatagctctagtgtt

SEQ ID NO: 226327 - DNA, 20 bp, Artificial Sequence
  Description of Artificial Sequence: Synthetic oligonucleotide
  Target: LAMA2; (-) strand; PAM type: YTN; PAM sequence: CTC
aaggacttttgatgatagct

SEQ ID NO: 226328 - DNA, 20 bp, Artificial Sequence
  Description of Artificial Sequence: Synthetic oligonucleotide
  Target: LAMA2; (-) strand; PAM type: YTN; PAM sequence: TTG
tctcaaggacttttgatgat

SEQ ID NO: 226329 - DNA, 20 bp, Artificial Sequence
  Description of Artificial Sequence: Synthetic oligonucleotide
  Target: LAMA2; (-) strand; PAM type: YTN; PAM sequence: CTT
gtctcaaggacttttgatga

SEQ ID NO: 226330 - DNA, 20 bp, Artificial Sequence
  Description of Artificial Sequence: Synthetic oligonucleotide
  Target: LAMA2; (-) strand; PAM type: YTN; PAM sequence: TTA
cttgtctcaaggacttttga

SEQ ID NO: 226331 - DNA, 20 bp, Artificial Sequence
  Description of Artificial Sequence: Synthetic oligonucleotide
  Target: LAMA2; (-) strand; PAM type: YTN; PAM sequence: CTG
ggttacttgtctcaaggact

SEQ ID NO: 226332 - DNA, 20 bp, Artificial Sequence
  Description of Artificial Sequence: Synthetic oligonucleotide
  Target: LAMA2; (-) strand; PAM type: YTN; PAM sequence: CTC
ctgggttacttgtctcaagg

SEQ ID NO: 226333 - DNA, 20 bp, Artificial Sequence
  Description of Artificial Sequence: Synthetic oligonucleotide
  Target: LAMA2; (-) strand; PAM type: YTN; PAM sequence: TTC
cactcctgggttacttgtct

SEQ ID NO: 226334 - DNA, 20 bp, Artificial Sequence
  Description of Artificial Sequence: Synthetic oligonucleotide
  Target: LAMA2; (-) strand; PAM type: YTN; PAM sequence: TTA
taaagtgtaatcataaccat

SEQ ID NO: 226335 - DNA, 20 bp, Artificial Sequence
  Description of Artificial Sequence: Synthetic oligonucleotide
  Target: LAMA2; (-) strand; PAM type: YTN; PAM sequence: CTT
ataaagtgtaatcataacca

SEQ ID NO: 226336 - DNA, 20 bp, Artificial Sequence
  Description of Artificial Sequence: Synthetic oligonucleotide
  Target: LAMA2; (-) strand; PAM type: YTN; PAM sequence: TTG
cttataaagtgtaatcataa

SEQ ID NO: 226337 - DNA, 20 bp, Artificial Sequence
  Description of Artificial Sequence: Synthetic oligonucleotide
  Target: LAMA2; (-) strand; PAM type: YTN; PAM sequence: TTT
gcttataaagtgtaatcata

SEQ ID NO: 226338 - DNA, 20 bp, Artificial Sequence
  Description of Artificial Sequence: Synthetic oligonucleotide
  Target: LAMA2; (-) strand; PAM type: YTN; PAM sequence: TTA
agtttgcttataaagtgtaa

SEQ ID NO: 226339 - DNA, 20 bp, Artificial Sequence
  Description of Artificial Sequence: Synthetic oligonucleotide
  Target: LAMA2; (-) strand; PAM type: YTN; PAM sequence: TTT
aagtttgcttataaagtgta

SEQ ID NO: 226340 - DNA, 20 bp, Artificial Sequence
  Description of Artificial Sequence: Synthetic oligonucleotide
  Target: LAMA2; (-) strand; PAM type: YTN; PAM sequence: TTT
taagtttgcttataaagtgt

SEQ ID NO: 226341 - DNA, 20 bp, Artificial Sequence
  Description of Artificial Sequence: Synthetic oligonucleotide
  Target: LAMA2; (-) strand; PAM type: YTN; PAM sequence: TTT
ttaagtttgcttataaagtg

SEQ ID NO: 226342 - DNA, 20 bp, Artificial Sequence
  Description of Artificial Sequence: Synthetic oligonucleotide
  Target: LAMA2; (-) strand; PAM type: YTN; PAM sequence: CTT
tttaagtttgcttataaagt

SEQ ID NO: 226343 - DNA, 20 bp, Artificial Sequence
  Description of Artificial Sequence: Synthetic oligonucleotide
  Target: LAMA2; (-) strand; PAM type: YTN; PAM sequence: CTG
atatctttttaagtttgctt

SEQ ID NO: 226344 - DNA, 20 bp, Artificial Sequence
  Description of Artificial Sequence: Synthetic oligonucleotide
  Target: LAMA2; (-) strand; PAM type: YTN; PAM sequence: CTC
ctgatatctttttaagtttg

SEQ ID NO: 226345 - DNA, 20 bp, Artificial Sequence
  Description of Artificial Sequence: Synthetic oligonucleotide
  Target: LAMA2; (-) strand; PAM type: YTN; PAM sequence: CTA
gtaaagcagctcctgatatc

SEQ ID NO: 226346 - DNA, 20 bp, Artificial Sequence
  Description of Artificial Sequence: Synthetic oligonucleotide
  Target: LAMA2; (-) strand; PAM type: YTN; PAM sequence: TTC
atagcaggggcctagtaaag

SEQ ID NO: 226347 - DNA, 20 bp, Artificial Sequence
  Description of Artificial Sequence: Synthetic oligonucleotide
  Target: LAMA2; (-) strand; PAM type: YTN; PAM sequence: CTT
catagcaggggcctagtaaa

SEQ ID NO: 226348 - DNA, 20 bp, Artificial Sequence
  Description of Artificial Sequence: Synthetic oligonucleotide
  Target: LAMA2; (-) strand; PAM type: YTN; PAM sequence: TTC
acttcatagcaggggcctag

SEQ ID NO: 226349 - DNA, 20 bp, Artificial Sequence
  Description of Artificial Sequence: Synthetic oligonucleotide
  Target: LAMA2; (-) strand; PAM type: YTN; PAM sequence: TTT
cacttcatagcaggggccta

SEQ ID NO: 226350 - DNA, 20 bp, Artificial Sequence
  Description of Artificial Sequence: Synthetic oligonucleotide
  Target: LAMA2; (-) strand; PAM type: YTN; PAM sequence: TTT
tcacttcatagcaggggcct

SEQ ID NO: 226351 - DNA, 20 bp, Artificial Sequence
  Description of Artificial Sequence: Synthetic oligonucleotide
  Target: LAMA2; (-) strand; PAM type: YTN; PAM sequence: CTC
cagttttcacttcatagcag

SEQ ID NO: 226352 - DNA, 20 bp, Artificial Sequence
  Description of Artificial Sequence: Synthetic oligonucleotide
  Target: LAMA2; (-) strand; PAM type: YTN; PAM sequence: TTC
tccagttttcacttcatagc

SEQ ID NO: 226353 - DNA, 20 bp, Artificial Sequence
  Description of Artificial Sequence: Synthetic oligonucleotide
  Target: LAMA2; (-) strand; PAM type: YTN; PAM sequence: TTT
ctccagttttcacttcatag

SEQ ID NO: 226354 - DNA, 20 bp, Artificial Sequence
  Description of Artificial Sequence: Synthetic oligonucleotide
  Target: LAMA2; (-) strand; PAM type: YTN; PAM sequence: TTT
tctccagttttcacttcata

SEQ ID NO: 226355 - DNA, 20 bp, Artificial Sequence
  Description of Artificial Sequence: Synthetic oligonucleotide
  Target: LAMA2; (-) strand; PAM type: YTN; PAM sequence: TTT
ttctccagttttcacttcat

SEQ ID NO: 226356 - DNA, 20 bp, Artificial Sequence
  Description of Artificial Sequence: Synthetic oligonucleotide
  Target: LAMA2; (-) strand; PAM type: YTN; PAM sequence: CTG
tagatttttctccagttttc

SEQ ID NO: 226357 - DNA, 20 bp, Artificial Sequence
  Description of Artificial Sequence: Synthetic oligonucleotide
  Target: LAMA2; (-) strand; PAM type: YTN; PAM sequence: TTG
ctgtagatttttctccagtt

SEQ ID NO: 226358 - DNA, 20 bp, Artificial Sequence
  Description of Artificial Sequence: Synthetic oligonucleotide
  Target: LAMA2; (-) strand; PAM type: YTN; PAM sequence: TTT
gctgtagatttttctccagt

SEQ ID NO: 226359 - DNA, 20 bp, Artificial Sequence
  Description of Artificial Sequence: Synthetic oligonucleotide
  Target: LAMA2; (-) strand; PAM type: YTN; PAM sequence: CTT
tgctgtagatttttctccag

SEQ ID NO: 226360 - DNA, 20 bp, Artificial Sequence
  Description of Artificial Sequence: Synthetic oligonucleotide
  Target: LAMA2; (-) strand; PAM type: YTN; PAM sequence: CTA
gaatgctttgctgtagattt

SEQ ID NO: 226361 - DNA, 20 bp, Artificial Sequence
  Description of Artificial Sequence: Synthetic oligonucleotide
  Target: LAMA2; (-) strand; PAM type: YTN; PAM sequence: CTC
aggctagaatgctttgctgt

SEQ ID NO: 226362 - DNA, 20 bp, Artificial Sequence
  Description of Artificial Sequence: Synthetic oligonucleotide
  Target: LAMA2; (-) strand; PAM type: YTN; PAM sequence: TTG
caaaatagtacacatcctca

SEQ ID NO: 226363 - DNA, 20 bp, Artificial Sequence
  Description of Artificial Sequence: Synthetic oligonucleotide
  Target: LAMA2; (-) strand; PAM type: YTN; PAM sequence: CTG
tgttgcaaaatagtacacat

SEQ ID NO: 226364 - DNA, 20 bp, Artificial Sequence
  Description of Artificial Sequence: Synthetic oligonucleotide
  Target: LAMA2; (-) strand; PAM type: YTN; PAM sequence: CTG
ctgtgttgcaaaatagtaca

SEQ ID NO: 226365 - DNA, 20 bp, Artificial Sequence
  Description of Artificial Sequence: Synthetic oligonucleotide
  Target: LAMA2; (-) strand; PAM type: YTN; PAM sequence: CTG
tagtcagtctgctgtgttgc

SEQ ID NO: 226366 - DNA, 20 bp, Artificial Sequence
  Description of Artificial Sequence: Synthetic oligonucleotide
  Target: LAMA2; (-) strand; PAM type: YTN; PAM sequence: TTG
gctgtagtcagtctgctgtg

SEQ ID NO: 226367 - DNA, 20 bp, Artificial Sequence
  Description of Artificial Sequence: Synthetic oligonucleotide
  Target: LAMA2; (-) strand; PAM type: YTN; PAM sequence: TTT
ggctgtagtcagtctgctgt

SEQ ID NO: 226368 - DNA, 20 bp, Artificial Sequence
  Description of Artificial Sequence: Synthetic oligonucleotide
  Target: LAMA2; (-) strand; PAM type: YTN; PAM sequence: TTC
caatgaaaatatttggctgt

SEQ ID NO: 226369 - DNA, 20 bp, Artificial Sequence
  Description of Artificial Sequence: Synthetic oligonucleotide
  Target: LAMA2; (-) strand; PAM type: YTN; PAM sequence: TTT
ccaatgaaaatatttggctg

SEQ ID NO: 226370 - DNA, 20 bp, Artificial Sequence
  Description of Artificial Sequence: Synthetic oligonucleotide
  Target: LAMA2; (-) strand; PAM type: YTN; PAM sequence: TTT
tccaatgaaaatatttggct

SEQ ID NO: 226371 - DNA, 20 bp, Artificial Sequence
  Description of Artificial Sequence: Synthetic oligonucleotide
  Target: LAMA2; (-) strand; PAM type: YTN; PAM sequence: TTT
ttccaatgaaaatatttggc

SEQ ID NO: 226372 - DNA, 20 bp, Artificial Sequence
  Description of Artificial Sequence: Synthetic oligonucleotide
  Target: LAMA2; (-) strand; PAM type: YTN; PAM sequence: TTA
catttttccaatgaaaatat

SEQ ID NO: 226373 - DNA, 20 bp, Artificial Sequence
  Description of Artificial Sequence: Synthetic oligonucleotide
  Target: LAMA2; (-) strand; PAM type: YTN; PAM sequence: TTT
acatttttccaatgaaaata

SEQ ID NO: 226374 - DNA, 20 bp, Artificial Sequence
  Description of Artificial Sequence: Synthetic oligonucleotide
  Target: LAMA2; (-) strand; PAM type: YTN; PAM sequence: TTC
atttacatttttccaatgaa

SEQ ID NO: 226375 - DNA, 20 bp, Artificial Sequence
  Description of Artificial Sequence: Synthetic oligonucleotide
  Target: LAMA2; (-) strand; PAM type: YTN; PAM sequence: TTT
catttacatttttccaatga

SEQ ID NO: 226376 - DNA, 20 bp, Artificial Sequence
  Description of Artificial Sequence: Synthetic oligonucleotide
  Target: LAMA2; (-) strand; PAM type: YTN; PAM sequence: TTT
tcatttacatttttccaatg

SEQ ID NO: 226377 - DNA, 20 bp, Artificial Sequence
  Description of Artificial Sequence: Synthetic oligonucleotide
  Target: LAMA2; (-) strand; PAM type: YTN; PAM sequence: TTT
ttcatttacatttttccaat

SEQ ID NO: 226378 - DNA, 20 bp, Artificial Sequence
  Description of Artificial Sequence: Synthetic oligonucleotide
  Target: LAMA2; (-) strand; PAM type: YTN; PAM sequence: TTG
agcaacatttttcatttaca

SEQ ID NO: 226379 - DNA, 20 bp, Artificial Sequence
  Description of Artificial Sequence: Synthetic oligonucleotide
  Target: LAMA2; (-) strand; PAM type: YTN; PAM sequence: CTA
cccaggtagcagaattgagc

SEQ ID NO: 226380 - DNA, 20 bp, Artificial Sequence
  Description of Artificial Sequence: Synthetic oligonucleotide
  Target: LAMA2; (-) strand; PAM type: YTN; PAM sequence: TTA
tgtactacccaggtagcaga

SEQ ID NO: 226381 - DNA, 20 bp, Artificial Sequence
  Description of Artificial Sequence: Synthetic oligonucleotide
  Target: LAMA2; (-) strand; PAM type: YTN; PAM sequence: CTT
atgtactacccaggtagcag

SEQ ID NO: 226382 - DNA, 20 bp, Artificial Sequence
  Description of Artificial Sequence: Synthetic oligonucleotide
  Target: LAMA2; (-) strand; PAM type: YTN; PAM sequence: TTA
catgtcttatgtactaccca

SEQ ID NO: 226383 - DNA, 20 bp, Artificial Sequence
  Description of Artificial Sequence: Synthetic oligonucleotide
  Target: LAMA2; (-) strand; PAM type: YTN; PAM sequence: TTA
aattacatgtcttatgtact

SEQ ID NO: 226384 - DNA, 20 bp, Artificial Sequence
  Description of Artificial Sequence: Synthetic oligonucleotide
  Target: LAMA2; (-) strand; PAM type: YTN; PAM sequence: TTT
aaattacatgtcttatgtac

SEQ ID NO: 226385 - DNA, 20 bp, Artificial Sequence
  Description of Artificial Sequence: Synthetic oligonucleotide
  Target: LAMA2; (-) strand; PAM type: YTN; PAM sequence: TTA
gaatttaaattacatgtctt

SEQ ID NO: 226386 - DNA, 20 bp, Artificial Sequence
  Description of Artificial Sequence: Synthetic oligonucleotide
  Target: LAMA2; (-) strand; PAM type: YTN; PAM sequence: CTG
attagaatttaaattacatg

SEQ ID NO: 226387 - DNA, 20 bp, Artificial Sequence
  Description of Artificial Sequence: Synthetic oligonucleotide
  Target: LAMA2; (-) strand; PAM type: YTN; PAM sequence: TTA
tccctgattagaatttaaat

SEQ ID NO: 226388 - DNA, 20 bp, Artificial Sequence
  Description of Artificial Sequence: Synthetic oligonucleotide
  Target: LAMA2; (-) strand; PAM type: YTN; PAM sequence: TTG
ttatccctgattagaattta

SEQ ID NO: 226389 - DNA, 20 bp, Artificial Sequence
  Description of Artificial Sequence: Synthetic oligonucleotide
  Target: LAMA2; (-) strand; PAM type: YTN; PAM sequence: TTT
gttatccctgattagaattt

SEQ ID NO: 226390 - DNA, 20 bp, Artificial Sequence
  Description of Artificial Sequence: Synthetic oligonucleotide
  Target: LAMA2; (-) strand; PAM type: YTN; PAM sequence: TTT
tgttatccctgattagaatt

SEQ ID NO: 226391 - DNA, 20 bp, Artificial Sequence
  Description of Artificial Sequence: Synthetic oligonucleotide
  Target: LAMA2; (-) strand; PAM type: YTN; PAM sequence: TTT
ttgttatccctgattagaat

SEQ ID NO: 226392 - DNA, 20 bp, Artificial Sequence
  Description of Artificial Sequence: Synthetic oligonucleotide
  Target: LAMA2; (-) strand; PAM type: YTN; PAM sequence: TTG
caaaataagtatcataggat

SEQ ID NO: 226393 - DNA, 20 bp, Artificial Sequence
  Description of Artificial Sequence: Synthetic oligonucleotide
  Target: LAMA2; (-) strand; PAM type: YTN; PAM sequence: TTT
gcaaaataagtatcatagga

SEQ ID NO: 226394 - DNA, 20 bp, Artificial Sequence
  Description of Artificial Sequence: Synthetic oligonucleotide
  Target: LAMA2; (-) strand; PAM type: YTN; PAM sequence: CTT
tgcaaaataagtatcatagg

SEQ ID NO: 226395 - DNA, 20 bp, Artificial Sequence
  Description of Artificial Sequence: Synthetic oligonucleotide
  Target: LAMA2; (-) strand; PAM type: YTN; PAM sequence: TTC
ctttgcaaaataagtatcat

SEQ ID NO: 226396 - DNA, 20 bp, Artificial Sequence
  Description of Artificial Sequence: Synthetic oligonucleotide
  Target: LAMA2; (-) strand; PAM type: YTN; PAM sequence: TTT
cctttgcaaaataagtatca

SEQ ID NO: 226397 - DNA, 20 bp, Artificial Sequence
  Description of Artificial Sequence: Synthetic oligonucleotide
  Target: LAMA2; (-) strand; PAM type: YTN; PAM sequence: TTT
tcctttgcaaaataagtatc

SEQ ID NO: 226398 - DNA, 20 bp, Artificial Sequence
  Description of Artificial Sequence: Synthetic oligonucleotide
  Target: LAMA2; (-) strand; PAM type: YTN; PAM sequence: CTG
ccattttcctttgcaaaata

SEQ ID NO: 226399 - DNA, 20 bp, Artificial Sequence
  Description of Artificial Sequence: Synthetic oligonucleotide
  Target: LAMA2; (-) strand; PAM type: YTN; PAM sequence: TTG
ccaggactgccattttcctt

SEQ ID NO: 226400 - DNA, 20 bp, Artificial Sequence
  Description of Artificial Sequence: Synthetic oligonucleotide
  Target: LAMA2; (-) strand; PAM type: YTN; PAM sequence: CTT
gccaggactgccattttcct

SEQ ID NO: 226401 - DNA, 20 bp, Artificial Sequence
  Description of Artificial Sequence: Synthetic oligonucleotide
  Target: LAMA2; (-) strand; PAM type: YTN; PAM sequence: TTA
taaccttgccaggactgcca

SEQ ID NO: 226402 - DNA, 20 bp, Artificial Sequence
  Description of Artificial Sequence: Synthetic oligonucleotide
  Target: LAMA2; (-) strand; PAM type: YTN; PAM sequence: CTT
ataaccttgccaggactgcc

SEQ ID NO: 226403 - DNA, 20 bp, Artificial Sequence
  Description of Artificial Sequence: Synthetic oligonucleotide
  Target: LAMA2; (-) strand; PAM type: YTN; PAM sequence: CTA
acttataaccttgccaggac

SEQ ID NO: 226404 - DNA, 20 bp, Artificial Sequence
  Description of Artificial Sequence: Synthetic oligonucleotide
  Target: LAMA2; (-) strand; PAM type: YTN; PAM sequence: TTC
taacttataaccttgccagg

SEQ ID NO: 226405 - DNA, 20 bp, Artificial Sequence
  Description of Artificial Sequence: Synthetic oligonucleotide
  Target: LAMA2; (-) strand; PAM type: YTN; PAM sequence: TTT
ctaacttataaccttgccag

SEQ ID NO: 226406 - DNA, 20 bp, Artificial Sequence
  Description of Artificial Sequence: Synthetic oligonucleotide
  Target: LAMA2; (-) strand; PAM type: YTN; PAM sequence: TTT
tctaacttataaccttgcca

SEQ ID NO: 226407 - DNA, 20 bp, Artificial Sequence
  Description of Artificial Sequence: Synthetic oligonucleotide
  Target: LAMA2; (-) strand; PAM type: YTN; PAM sequence: TTA
cacaaagaaaatataatttt

SEQ ID NO: 226408 - DNA, 20 bp, Artificial Sequence
  Description of Artificial Sequence: Synthetic oligonucleotide
  Target: LAMA2; (-) strand; PAM type: YTN; PAM sequence: TTT
acacaaagaaaatataattt

SEQ ID NO: 226409 - DNA, 20 bp, Artificial Sequence
  Description of Artificial Sequence: Synthetic oligonucleotide
  Target: LAMA2; (-) strand; PAM type: YTN; PAM sequence: CTA
aagaacaaatttacacaaag

SEQ ID NO: 226410 - DNA, 20 bp, Artificial Sequence
  Description of Artificial Sequence: Synthetic oligonucleotide
  Target: LAMA2; (-) strand; PAM type: YTN; PAM sequence: CTG
aatgaagctaaagaacaaat

SEQ ID NO: 226411 - DNA, 20 bp, Artificial Sequence
  Description of Artificial Sequence: Synthetic oligonucleotide
  Target: LAMA2; (-) strand; PAM type: YTN; PAM sequence: TTA
ctgaatgaagctaaagaaca

SEQ ID NO: 226412 - DNA, 20 bp, Artificial Sequence
  Description of Artificial Sequence: Synthetic oligonucleotide
  Target: LAMA2; (-) strand; PAM type: YTN; PAM sequence: CTG
attactgaatgaagctaaag

SEQ ID NO: 226413 - DNA, 20 bp, Artificial Sequence
  Description of Artificial Sequence: Synthetic oligonucleotide
  Target: LAMA2; (-) strand; PAM type: YTN; PAM sequence: TTC
tgattactgaatgaagctaa

SEQ ID NO: 226414 - DNA, 20 bp, Artificial Sequence
  Description of Artificial Sequence: Synthetic oligonucleotide
  Target: LAMA2; (-) strand; PAM type: YTN; PAM sequence: TTG
aataaggaaataaataattc

SEQ ID NO: 226415 - DNA, 20 bp, Artificial Sequence
  Description of Artificial Sequence: Synthetic oligonucleotide
  Target: LAMA2; (-) strand; PAM type: YTN; PAM sequence: TTT
gaataaggaaataaataatt

SEQ ID NO: 226416 - DNA, 20 bp, Artificial Sequence
  Description of Artificial Sequence: Synthetic oligonucleotide
  Target: LAMA2; (-) strand; PAM type: YTN; PAM sequence: TTA
caatttgaataaggaaataa

SEQ ID NO: 226417 - DNA, 20 bp, Artificial Sequence
  Description of Artificial Sequence: Synthetic oligonucleotide
  Target: LAMA2; (-) strand; PAM type: YTN; PAM sequence: CTT
acaatttgaataaggaaata

SEQ ID NO: 226418 - DNA, 20 bp, Artificial Sequence
  Description of Artificial Sequence: Synthetic oligonucleotide
  Target: LAMA2; (-) strand; PAM type: YTN; PAM sequence: TTA
gaaggcacttacaatttgaa

SEQ ID NO: 226419 - DNA, 20 bp, Artificial Sequence
  Description of Artificial Sequence: Synthetic oligonucleotide
  Target: LAMA2; (-) strand; PAM type: YTN; PAM sequence: TTT
agaaggcacttacaatttga

SEQ ID NO: 226420 - DNA, 20 bp, Artificial Sequence
  Description of Artificial Sequence: Synthetic oligonucleotide
  Target: LAMA2; (-) strand; PAM type: YTN; PAM sequence: CTC
gggtttagaaggcacttaca

SEQ ID NO: 226421 - DNA, 20 bp, Artificial Sequence
  Description of Artificial Sequence: Synthetic oligonucleotide
  Target: LAMA2; (-) strand; PAM type: YTN; PAM sequence: CTC
aacataatagtagtaggctc

SEQ ID NO: 226422 - DNA, 20 bp, Artificial Sequence
  Description of Artificial Sequence: Synthetic oligonucleotide
  Target: LAMA2; (-) strand; PAM type: YTN; PAM sequence: TTC
ccatggctcaacataatagt

SEQ ID NO: 226423 - DNA, 20 bp, Artificial Sequence
  Description of Artificial Sequence: Synthetic oligonucleotide
  Target: LAMA2; (-) strand; PAM type: YTN; PAM sequence: TTT
cccatggctcaacataatag

SEQ ID NO: 226424 - DNA, 20 bp, Artificial Sequence
  Description of Artificial Sequence: Synthetic oligonucleotide
  Target: LAMA2; (-) strand; PAM type: YTN; PAM sequence: TTG
gcaatttcccatggctcaac

SEQ ID NO: 226425 - DNA, 20 bp, Artificial Sequence
  Description of Artificial Sequence: Synthetic oligonucleotide
  Target: LAMA2; (-) strand; PAM type: YTN; PAM sequence: CTA
aaatagtcaaatattggcaa

SEQ ID NO: 226426 - DNA, 20 bp, Artificial Sequence
  Description of Artificial Sequence: Synthetic oligonucleotide
  Target: LAMA2; (-) strand; PAM type: YTN; PAM sequence: TTA
atggactaaaatagtcaaat

SEQ ID NO: 226427 - DNA, 20 bp, Artificial Sequence
  Description of Artificial Sequence: Synthetic oligonucleotide
  Target: LAMA2; (-) strand; PAM type: YTN; PAM sequence: TTT
aatggactaaaatagtcaaa

SEQ ID NO: 226428 - DNA, 20 bp, Artificial Sequence
  Description of Artificial Sequence: Synthetic oligonucleotide
  Target: LAMA2; (-) strand; PAM type: YTN; PAM sequence: TTT
taatggactaaaatagtcaa

SEQ ID NO: 226429 - DNA, 20 bp, Artificial Sequence
  Description of Artificial Sequence: Synthetic oligonucleotide
  Target: LAMA2; (-) strand; PAM type: YTN; PAM sequence: CTG
cattttaatggactaaaata

SEQ ID NO: 226430 - DNA, 20 bp, Artificial Sequence
  Description of Artificial Sequence: Synthetic oligonucleotide
  Target: LAMA2; (-) strand; PAM type: YTN; PAM sequence: TTA
aaccatatgaaactgcattt

SEQ ID NO: 226431 - DNA, 20 bp, Artificial Sequence
  Description of Artificial Sequence: Synthetic oligonucleotide
  Target: LAMA2; (-) strand; PAM type: YTN; PAM sequence: TTT
aaaccatatgaaactgcatt

SEQ ID NO: 226432 - DNA, 20 bp, Artificial Sequence
  Description of Artificial Sequence: Synthetic oligonucleotide
  Target: LAMA2; (-) strand; PAM type: YTN; PAM sequence: TTA
gtttaaaccatatgaaactg

SEQ ID NO: 226433 - DNA, 20 bp, Artificial Sequence
  Description of Artificial Sequence: Synthetic oligonucleotide
  Target: LAMA2; (-) strand; PAM type: YTN; PAM sequence: TTG
gcacatattagtttaaacca

SEQ ID NO: 226434 - DNA, 20 bp, Artificial Sequence
  Description of Artificial Sequence: Synthetic oligonucleotide
  Target: LAMA2; (-) strand; PAM type: YTN; PAM sequence: TTT
ggcacatattagtttaaacc

SEQ ID NO: 226435 - DNA, 20 bp, Artificial Sequence
  Description of Artificial Sequence: Synthetic oligonucleotide
  Target: LAMA2; (-) strand; PAM type: YTN; PAM sequence: CTT
tggcacatattagtttaaac

SEQ ID NO: 226436 - DNA, 20 bp, Artificial Sequence
  Description of Artificial Sequence: Synthetic oligonucleotide
  Target: LAMA2; (-) strand; PAM type: YTN; PAM sequence: TTC
atgctttggcacatattagt

SEQ ID NO: 226437 - DNA, 20 bp, Artificial Sequence
  Description of Artificial Sequence: Synthetic oligonucleotide
  Target: LAMA2; (-) strand; PAM type: YTN; PAM sequence: CTA
ttcatgctttggcacatatt

SEQ ID NO: 226438 - DNA, 20 bp, Artificial Sequence
  Description of Artificial Sequence: Synthetic oligonucleotide
  Target: LAMA2; (-) strand; PAM type: YTN; PAM sequence: TTC
tattcatgctttggcacata

SEQ ID NO: 226439 - DNA, 20 bp, Artificial Sequence
  Description of Artificial Sequence: Synthetic oligonucleotide
  Target: LAMA2; (-) strand; PAM type: YTN; PAM sequence: TTT
ctattcatgctttggcacat

SEQ ID NO: 226440 - DNA, 20 bp, Artificial Sequence
  Description of Artificial Sequence: Synthetic oligonucleotide
  Target: LAMA2; (-) strand; PAM type: YTN; PAM sequence: CTG
caagtatttctattcatgct

SEQ ID NO: 226441 - DNA, 20 bp, Artificial Sequence
  Description of Artificial Sequence: Synthetic oligonucleotide
  Target: LAMA2; (-) strand; PAM type: YTN; PAM sequence: TTC
ctgcaagtatttctattcat

SEQ ID NO: 226442 - DNA, 20 bp, Artificial Sequence
  Description of Artificial Sequence: Synthetic oligonucleotide
  Target: LAMA2; (-) strand; PAM type: YTN; PAM sequence: TTA
ggacagtattcctgcaagta

SEQ ID NO: 226443 - DNA, 20 bp, Artificial Sequence
  Description of Artificial Sequence: Synthetic oligonucleotide
  Target: LAMA2; (-) strand; PAM type: YTN; PAM sequence: CTT
aggacagtattcctgcaagt

SEQ ID NO: 226444 - DNA, 20 bp, Artificial Sequence
  Description of Artificial Sequence: Synthetic oligonucleotide
  Target: LAMA2; (-) strand; PAM type: YTN; PAM sequence: TTA
tacttaggacagtattcctg

SEQ ID NO: 226445 - DNA, 20 bp, Artificial Sequence
  Description of Artificial Sequence: Synthetic oligonucleotide
  Target: LAMA2; (-) strand; PAM type: YTN; PAM sequence: CTG
aggttatacttaggacagta

SEQ ID NO: 226446 - DNA, 20 bp, Artificial Sequence
  Description of Artificial Sequence: Synthetic oligonucleotide
  Target: LAMA2; (-) strand; PAM type: YTN; PAM sequence: CTG
tgtgcatctgaggttatact

SEQ ID NO: 226447 - DNA, 20 bp, Artificial Sequence
  Description of Artificial Sequence: Synthetic oligonucleotide
  Target: LAMA2; (-) strand; PAM type: YTN; PAM sequence: CTA
aaatactgtgtgcatctgag

SEQ ID NO: 226448 - DNA, 20 bp, Artificial Sequence
  Description of Artificial Sequence: Synthetic oligonucleotide
  Target: LAMA2; (-) strand; PAM type: YTN; PAM sequence: TTG
ctaaaatactgtgtgcatct

SEQ ID NO: 226449 - DNA, 20 bp, Artificial Sequence
  Description of Artificial Sequence: Synthetic oligonucleotide
  Target: LAMA2; (-) strand; PAM type: YTN; PAM sequence: TTT
gctaaaatactgtgtgcatc

SEQ ID NO: 226450 - DNA, 20 bp, Artificial Sequence
  Description of Artificial Sequence: Synthetic oligonucleotide
  Target: LAMA2; (-) strand; PAM type: YTN; PAM sequence: TTT
tgctaaaatactgtgtgcat

SEQ ID NO: 226451 - DNA, 20 bp, Artificial Sequence
  Description of Artificial Sequence: Synthetic oligonucleotide
  Target: LAMA2; (-) strand; PAM type: YTN; PAM sequence: CTT
ttgctaaaatactgtgtgca

SEQ ID NO: 226452 - DNA, 20 bp, Artificial Sequence
  Description of Artificial Sequence: Synthetic oligonucleotide
  Target: LAMA2; (-) strand; PAM type: YTN; PAM sequence: TTG
atacttttgctaaaatactg

SEQ ID NO: 226453 - DNA, 20 bp, Artificial Sequence
  Description of Artificial Sequence: Synthetic oligonucleotide
  Target: LAMA2; (-) strand; PAM type: YTN; PAM sequence: TTC
ccattgatacttttgctaaa

SEQ ID NO: 226454 - DNA, 20 bp, Artificial Sequence
  Description of Artificial Sequence: Synthetic oligonucleotide
  Target: LAMA2; (-) strand; PAM type: YTN; PAM sequence: TTT
cccattgatacttttgctaa

SEQ ID NO: 226455 - DNA, 20 bp, Artificial Sequence
  Description of Artificial Sequence: Synthetic oligonucleotide
  Target: LAMA2; (-) strand; PAM type: YTN; PAM sequence: CTG
atttcccattgatacttttg

SEQ ID NO: 226456 - DNA, 20 bp, Artificial Sequence
  Description of Artificial Sequence: Synthetic oligonucleotide
  Target: LAMA2; (-) strand; PAM type: YTN; PAM sequence: TTG
cctgatttcccattgatact

SEQ ID NO: 226457 - DNA, 20 bp, Artificial Sequence
  Description of Artificial Sequence: Synthetic oligonucleotide
  Target: LAMA2; (-) strand; PAM type: YTN; PAM sequence: CTT
gcctgatttcccattgatac

SEQ ID NO: 226458 - DNA, 20 bp, Artificial Sequence
  Description of Artificial Sequence: Synthetic oligonucleotide
  Target: LAMA2; (-) strand; PAM type: YTN; PAM sequence: TTC
agtgaaaggacttgcctgat

SEQ ID NO: 226459 - DNA, 20 bp, Artificial Sequence
  Description of Artificial Sequence: Synthetic oligonucleotide
  Target: LAMA2; (-) strand; PAM type: YTN; PAM sequence: TTT
cagtgaaaggacttgcctga

SEQ ID NO: 226460 - DNA, 20 bp, Artificial Sequence
  Description of Artificial Sequence: Synthetic oligonucleotide
  Target: LAMA2; (-) strand; PAM type: YTN; PAM sequence: TTG
tttcagtgaaaggacttgcc

SEQ ID NO: 226461 - DNA, 20 bp, Artificial Sequence
  Description of Artificial Sequence: Synthetic oligonucleotide
  Target: LAMA2; (-) strand; PAM type: YTN; PAM sequence: TTA
taaattgtttcagtgaaagg

SEQ ID NO: 226462 - DNA, 20 bp, Artificial Sequence
  Description of Artificial Sequence: Synthetic oligonucleotide
  Target: LAMA2; (-) strand; PAM type: YTN; PAM sequence: CTT
ataaattgtttcagtgaaag

SEQ ID NO: 226463 - DNA, 20 bp, Artificial Sequence
  Description of Artificial Sequence: Synthetic oligonucleotide
  Target: LAMA2; (-) strand; PAM type: YTN; PAM sequence: TTA
tacttataaattgtttcagt

SEQ ID NO: 226464 - DNA, 20 bp, Artificial Sequence
  Description of Artificial Sequence: Synthetic oligonucleotide
  Target: LAMA2; (-) strand; PAM type: YTN; PAM sequence: TTA
ttatacttataaattgtttc

SEQ ID NO: 226465 - DNA, 20 bp, Artificial Sequence
  Description of Artificial Sequence: Synthetic oligonucleotide
  Target: LAMA2; (-) strand; PAM type: YTN; PAM sequence: TTC
acaaaataaattattatact

SEQ ID NO: 226466 - DNA, 20 bp, Artificial Sequence
  Description of Artificial Sequence: Synthetic oligonucleotide
  Target: LAMA2; (-) strand; PAM type: YTN; PAM sequence: CTT
cacaaaataaattattatac

SEQ ID NO: 226467 - DNA, 20 bp, Artificial Sequence
  Description of Artificial Sequence: Synthetic oligonucleotide
  Target: LAMA2; (-) strand; PAM type: YTN; PAM sequence: TTG
gtaaagaaaaggccttcaca

SEQ ID NO: 226468 - DNA, 20 bp, Artificial Sequence
  Description of Artificial Sequence: Synthetic oligonucleotide
  Target: LAMA2; (-) strand; PAM type: YTN; PAM sequence: TTT
ggtaaagaaaaggccttcac

SEQ ID NO: 226469 - DNA, 20 bp, Artificial Sequence
  Description of Artificial Sequence: Synthetic oligonucleotide
  Target: LAMA2; (-) strand; PAM type: YTN; PAM sequence: CTA
atttggtaaagaaaaggcct

SEQ ID NO: 226470 - DNA, 20 bp, Artificial Sequence
  Description of Artificial Sequence: Synthetic oligonucleotide
  Target: LAMA2; (-) strand; PAM type: YTN; PAM sequence: TTA
ctaatttggtaaagaaaagg

SEQ ID NO: 226471 - DNA, 20 bp, Artificial Sequence
  Description of Artificial Sequence: Synthetic oligonucleotide
  Target: LAMA2; (-) strand; PAM type: YTN; PAM sequence: TTC
accatattactaatttggta

SEQ ID NO: 226472 - DNA, 20 bp, Artificial Sequence
  Description of Artificial Sequence: Synthetic oligonucleotide
  Target: LAMA2; (-) strand; PAM type: YTN; PAM sequence: TTA
atattcaccatattactaat

SEQ ID NO: 226473 - DNA, 20 bp, Artificial Sequence
  Description of Artificial Sequence: Synthetic oligonucleotide
  Target: LAMA2; (-) strand; PAM type: YTN; PAM sequence: TTT
aatattcaccatattactaa

SEQ ID NO: 226474 - DNA, 20 bp, Artificial Sequence
  Description of Artificial Sequence: Synthetic oligonucleotide
  Target: LAMA2; (-) strand; PAM type: YTN; PAM sequence: TTA
gtttaatattcaccatatta

SEQ ID NO: 226475 - DNA, 20 bp, Artificial Sequence
  Description of Artificial Sequence: Synthetic oligonucleotide
  Target: LAMA2; (-) strand; PAM type: YTN; PAM sequence: TTT
agtttaatattcaccatatt

SEQ ID NO: 226476 - DNA, 20 bp, Artificial Sequence
  Description of Artificial Sequence: Synthetic oligonucleotide
  Target: LAMA2; (-) strand; PAM type: YTN; PAM sequence: CTC
aggtttagtttaatattcac

SEQ ID NO: 226477 - DNA, 20 bp, Artificial Sequence
  Description of Artificial Sequence: Synthetic oligonucleotide
  Target: LAMA2; (-) strand; PAM type: YTN; PAM sequence: TTA
aaaacaaatgtagtatgact

SEQ ID NO: 226478 - DNA, 20 bp, Artificial Sequence
  Description of Artificial Sequence: Synthetic oligonucleotide
  Target: LAMA2; (-) strand; PAM type: YTN; PAM sequence: TTT
aaaaacaaatgtagtatgac

SEQ ID NO: 226479 - DNA, 20 bp, Artificial Sequence
  Description of Artificial Sequence: Synthetic oligonucleotide
  Target: LAMA2; (-) strand; PAM type: YTN; PAM sequence: CTA
caaaatttaaaaacaaatgt

SEQ ID NO: 226480 - DNA, 20 bp, Artificial Sequence
  Description of Artificial Sequence: Synthetic oligonucleotide
  Target: LAMA2; (-) strand; PAM type: YTN; PAM sequence: TTC
cctacaaaatttaaaaacaa

SEQ ID NO: 226481 - DNA, 20 bp, Artificial Sequence
  Description of Artificial Sequence: Synthetic oligonucleotide
  Target: LAMA2; (-) strand; PAM type: YTN; PAM sequence: CTT
ccctacaaaatttaaaaaca

SEQ ID NO: 226482 - DNA, 20 bp, Artificial Sequence
  Description of Artificial Sequence: Synthetic oligonucleotide
  Target: LAMA2; (-) strand; PAM type: YTN; PAM sequence: TTC
cccccttccctacaaaattt

SEQ ID NO: 226483 - DNA, 20 bp, Artificial Sequence
  Description of Artificial Sequence: Synthetic oligonucleotide
  Target: LAMA2; (-) strand; PAM type: YTN; PAM sequence: CTA
ttccccccttccctacaaaa

SEQ ID NO: 226484 - DNA, 20 bp, Artificial Sequence
  Description of Artificial Sequence: Synthetic oligonucleotide
  Target: LAMA2; (-) strand; PAM type: YTN; PAM sequence: TTG
ctattccccccttccctaca

SEQ ID NO: 226485 - DNA, 20 bp, Artificial Sequence
  Description of Artificial Sequence: Synthetic oligonucleotide
  Target: LAMA2; (-) strand; PAM type: YTN; PAM sequence: TTT
gctattccccccttccctac

SEQ ID NO: 226486 - DNA, 20 bp, Artificial Sequence
  Description of Artificial Sequence: Synthetic oligonucleotide
  Target: LAMA2; (-) strand; PAM type: YTN; PAM sequence: TTA
tttgctattccccccttccc

SEQ ID NO: 226487 - DNA, 20 bp, Artificial Sequence
  Description of Artificial Sequence: Synthetic oligonucleotide
  Target: LAMA2; (-) strand; PAM type: YTN; PAM sequence: CTA
gcataaaatattatttgcta

SEQ ID NO: 226488 - DNA, 20 bp, Artificial Sequence
  Description of Artificial Sequence: Synthetic oligonucleotide
  Target: LAMA2; (-) strand; PAM type: YTN; PAM sequence: TTA
ctagcataaaatattatttg

SEQ ID NO: 226489 - DNA, 20 bp, Artificial Sequence
  Description of Artificial Sequence: Synthetic oligonucleotide
  Target: LAMA2; (-) strand; PAM type: YTN; PAM sequence: CTG
attactagcataaaatatta

SEQ ID NO: 226490 - DNA, 20 bp, Artificial Sequence
  Description of Artificial Sequence: Synthetic oligonucleotide
  Target: LAMA2; (-) strand; PAM type: YTN; PAM sequence: CTG
atataatgcctgattactag

SEQ ID NO: 226491 - DNA, 20 bp, Artificial Sequence
  Description of Artificial Sequence: Synthetic oligonucleotide
  Target: LAMA2; (-) strand; PAM type: YTN; PAM sequence: TTA
caacaactgatataatgcct

SEQ ID NO: 226492 - DNA, 20 bp, Artificial Sequence
  Description of Artificial Sequence: Synthetic oligonucleotide
  Target: LAMA2; (-) strand; PAM type: YTN; PAM sequence: CTT
acaacaactgatataatgcc

SEQ ID NO: 226493 - DNA, 20 bp, Artificial Sequence
  Description of Artificial Sequence: Synthetic oligonucleotide
  Target: LAMA2; (-) strand; PAM type: YTN; PAM sequence: TTC
cttacaacaactgatataat

SEQ ID NO: 226494 - DNA, 20 bp, Artificial Sequence
  Description of Artificial Sequence: Synthetic oligonucleotide
  Target: LAMA2; (-) strand; PAM type: YTN; PAM sequence: TTC
atgtagttccttacaacaac

SEQ ID NO: 226495 - DNA, 20 bp, Artificial Sequence
  Description of Artificial Sequence: Synthetic oligonucleotide
  Target: LAMA2; (-) strand; PAM type: YTN; PAM sequence: TTT
catgtagttccttacaacaa

SEQ ID NO: 226496 - DNA, 20 bp, Artificial Sequence
  Description of Artificial Sequence: Synthetic oligonucleotide
  Target: LAMA2; (-) strand; PAM type: YTN; PAM sequence: CTT
tcatgtagttccttacaaca

SEQ ID NO: 226497 - DNA, 20 bp, Artificial Sequence
  Description of Artificial Sequence: Synthetic oligonucleotide
  Target: LAMA2; (-) strand; PAM type: YTN; PAM sequence: CTG
tataccaccaactttcatgt

SEQ ID NO: 226498 - DNA, 20 bp, Artificial Sequence
  Description of Artificial Sequence: Synthetic oligonucleotide
  Target: LAMA2; (-) strand; PAM type: YTN; PAM sequence: CTG
gtaacctgtataccaccaac

SEQ ID NO: 226499 - DNA, 20 bp, Artificial Sequence
  Description of Artificial Sequence: Synthetic oligonucleotide
  Target: LAMA2; (-) strand; PAM type: YTN; PAM sequence: CTA
ctggtaacctgtataccacc

SEQ ID NO: 226500 - DNA, 20 bp, Artificial Sequence
  Description of Artificial Sequence: Synthetic oligonucleotide
  Target: LAMA2; (-) strand; PAM type: YTN; PAM sequence: TTA
ctactggtaacctgtatacc

SEQ ID NO: 226501 - DNA, 20 bp, Artificial Sequence
  Description of Artificial Sequence: Synthetic oligonucleotide
  Target: LAMA2; (-) strand; PAM type: YTN; PAM sequence: CTT
actactggtaacctgtatac

SEQ ID NO: 226502 - DNA, 20 bp, Artificial Sequence
  Description of Artificial Sequence: Synthetic oligonucleotide
  Target: LAMA2; (-) strand; PAM type: YTN; PAM sequence: TTC
ccaaacttactactggtaac

SEQ ID NO: 226503 - DNA, 20 bp, Artificial Sequence
  Description of Artificial Sequence: Synthetic oligonucleotide
  Target: LAMA2; (-) strand; PAM type: YTN; PAM sequence: CTG
tgagccaaaacaacacagtt

SEQ ID NO: 226504 - DNA, 20 bp, Artificial Sequence
  Description of Artificial Sequence: Synthetic oligonucleotide
  Target: LAMA2; (-) strand; PAM type: YTN; PAM sequence: TTC
tgtgagccaaaacaacacag

SEQ ID NO: 226505 - DNA, 20 bp, Artificial Sequence
  Description of Artificial Sequence: Synthetic oligonucleotide
  Target: LAMA2; (-) strand; PAM type: YTN; PAM sequence: TTA
tattctgtgagccaaaacaa

SEQ ID NO: 226506 - DNA, 20 bp, Artificial Sequence
  Description of Artificial Sequence: Synthetic oligonucleotide
  Target: LAMA2; (-) strand; PAM type: YTN; PAM sequence: TTT
atattctgtgagccaaaaca

SEQ ID NO: 226507 - DNA, 20 bp, Artificial Sequence
  Description of Artificial Sequence: Synthetic oligonucleotide
  Target: LAMA2; (-) strand; PAM type: YTN; PAM sequence: CTT
tatattctgtgagccaaaac

SEQ ID NO: 226508 - DNA, 20 bp, Artificial Sequence
  Description of Artificial Sequence: Synthetic oligonucleotide
  Target: LAMA2; (-) strand; PAM type: YTN; PAM sequence: CTA
tgtggaaacacaggtatata

SEQ ID NO: 226509 - DNA, 20 bp, Artificial Sequence
  Description of Artificial Sequence: Synthetic oligonucleotide
  Target: LAMA2; (-) strand; PAM type: YTN; PAM sequence: TTA
tacaatacatataagggtaa

SEQ ID NO: 226510 - DNA, 20 bp, Artificial Sequence
  Description of Artificial Sequence: Synthetic oligonucleotide
  Target: LAMA2; (-) strand; PAM type: YTN; PAM sequence: CTA
cacatgtgattatacaatac

SEQ ID NO: 226511 - DNA, 20 bp, Artificial Sequence
  Description of Artificial Sequence: Synthetic oligonucleotide
  Target: LAMA2; (-) strand; PAM type: YTN; PAM sequence: CTC
cagatacaatgaacatctac

SEQ ID NO: 226512 - DNA, 20 bp, Artificial Sequence
  Description of Artificial Sequence: Synthetic oligonucleotide
  Target: LAMA2; (-) strand; PAM type: YTN; PAM sequence: CTG
tcactccagatacaatgaac

SEQ ID NO: 226513 - DNA, 20 bp, Artificial Sequence
  Description of Artificial Sequence: Synthetic oligonucleotide
  Target: LAMA2; (-) strand; PAM type: YTN; PAM sequence: CTA
aaaggtgtcaactgtcactc

SEQ ID NO: 226514 - DNA, 20 bp, Artificial Sequence
  Description of Artificial Sequence: Synthetic oligonucleotide
  Target: LAMA2; (-) strand; PAM type: YTN; PAM sequence: TTA
aaacatgtaaaatgccccta

SEQ ID NO: 226515 - DNA, 20 bp, Artificial Sequence
  Description of Artificial Sequence: Synthetic oligonucleotide
  Target: LAMA2; (-) strand; PAM type: YTN; PAM sequence: TTT
aaaacatgtaaaatgcccct

SEQ ID NO: 226516 - DNA, 20 bp, Artificial Sequence
  Description of Artificial Sequence: Synthetic oligonucleotide
  Target: LAMA2; (-) strand; PAM type: YTN; PAM sequence: TTT
taaaacatgtaaaatgcccc

SEQ ID NO: 226517 - DNA, 20 bp, Artificial Sequence
  Description of Artificial Sequence: Synthetic oligonucleotide
  Target: LAMA2; (-) strand; PAM type: YTN; PAM sequence: CTG
taagtggatgtcaggtttta

SEQ ID NO: 226518 - DNA, 20 bp, Artificial Sequence
  Description of Artificial Sequence: Synthetic oligonucleotide
  Target: LAMA2; (-) strand; PAM type: YTN; PAM sequence: CTG
aagagagtagtagataagtg

SEQ ID NO: 226519 - DNA, 20 bp, Artificial Sequence
  Description of Artificial Sequence: Synthetic oligonucleotide
  Target: LAMA2; (-) strand; PAM type: YTN; PAM sequence: TTA
tcctgaagagagtagtagat

SEQ ID NO: 226520 - DNA, 20 bp, Artificial Sequence
  Description of Artificial Sequence: Synthetic oligonucleotide
  Target: LAMA2; (-) strand; PAM type: YTN; PAM sequence: TTT
atcctgaagagagtagtaga

SEQ ID NO: 226521 - DNA, 20 bp, Artificial Sequence
  Description of Artificial Sequence: Synthetic oligonucleotide
  Target: LAMA2; (-) strand; PAM type: YTN; PAM sequence: TTG
caataaaggtagtttatcct

SEQ ID NO: 226522 - DNA, 20 bp, Artificial Sequence
  Description of Artificial Sequence: Synthetic oligonucleotide
  Target: LAMA2; (-) strand; PAM type: YTN; PAM sequence: CTT
gcaataaaggtagtttatcc

SEQ ID NO: 226523 - DNA, 20 bp, Artificial Sequence
  Description of Artificial Sequence: Synthetic oligonucleotide
  Target: LAMA2; (-) strand; PAM type: YTN; PAM sequence: TTA
gcaaaagtcttgcaataaag

SEQ ID NO: 226524 - DNA, 20 bp, Artificial Sequence
  Description of Artificial Sequence: Synthetic oligonucleotide
  Target: LAMA2; (-) strand; PAM type: YTN; PAM sequence: TTT
agcaaaagtcttgcaataaa

SEQ ID NO: 226525 - DNA, 20 bp, Artificial Sequence
  Description of Artificial Sequence: Synthetic oligonucleotide
  Target: LAMA2; (-) strand; PAM type: YTN; PAM sequence: TTT
tagcaaaagtcttgcaataa

SEQ ID NO: 226526 - DNA, 20 bp, Artificial Sequence
  Description of Artificial Sequence: Synthetic oligonucleotide
  Target: LAMA2; (-) strand; PAM type: YTN; PAM sequence: TTT
ttagcaaaagtcttgcaata

SEQ ID NO: 226527 - DNA, 20 bp, Artificial Sequence
  Description of Artificial Sequence: Synthetic oligonucleotide
  Target: LAMA2; (-) strand; PAM type: YTN; PAM sequence: CTA
agaatttttagcaaaagtct

SEQ ID NO: 226528 - DNA, 20 bp, Artificial Sequence
  Description of Artificial Sequence: Synthetic oligonucleotide
  Target: LAMA2; (-) strand; PAM type: YTN; PAM sequence: TTG
acataatctaagaattttta

SEQ ID NO: 226529 - DNA, 20 bp, Artificial Sequence
  Description of Artificial Sequence: Synthetic oligonucleotide
  Target: LAMA2; (-) strand; PAM type: YTN; PAM sequence: CTT
gacataatctaagaattttt

SEQ ID NO: 226530 - DNA, 20 bp, Artificial Sequence
  Description of Artificial Sequence: Synthetic oligonucleotide
  Target: LAMA2; (-) strand; PAM type: YTN; PAM sequence: TTC
ccttgacataatctaagaat

SEQ ID NO: 226531 - DNA, 20 bp, Artificial Sequence
  Description of Artificial Sequence: Synthetic oligonucleotide
  Target: LAMA2; (-) strand; PAM type: YTN; PAM sequence: TTT
cccttgacataatctaagaa

SEQ ID NO: 226532 - DNA, 20 bp, Artificial Sequence
  Description of Artificial Sequence: Synthetic oligonucleotide
  Target: LAMA2; (-) strand; PAM type: YTN; PAM sequence: TTT
tcccttgacataatctaaga

SEQ ID NO: 226533 - DNA, 20 bp, Artificial Sequence
  Description of Artificial Sequence: Synthetic oligonucleotide
  Target: LAMA2; (-) strand; PAM type: YTN; PAM sequence: TTT
ttcccttgacataatctaag

SEQ ID NO: 226534 - DNA, 20 bp, Artificial Sequence
  Description of Artificial Sequence: Synthetic oligonucleotide
  Target: LAMA2; (-) strand; PAM type: YTN; PAM sequence: TTT
tttcccttgacataatctaa

SEQ ID NO: 226535 - DNA, 20 bp, Artificial Sequence
  Description of Artificial Sequence: Synthetic oligonucleotide
  Target: LAMA2; (-) strand; PAM type: YTN; PAM sequence: TTT
ttttcccttgacataatcta

SEQ ID NO: 226536 - DNA, 20 bp, Artificial Sequence
  Description of Artificial Sequence: Synthetic oligonucleotide
  Target: LAMA2; (-) strand; PAM type: YTN; PAM sequence: TTA
aaaagcaatagaggattttt

SEQ ID NO: 226537 - DNA, 20 bp, Artificial Sequence
  Description of Artificial Sequence: Synthetic oligonucleotide
  Target: LAMA2; (-) strand; PAM type: YTN; PAM sequence: TTT
aaaaagcaatagaggatttt

SEQ ID NO: 226538 - DNA, 20 bp, Artificial Sequence
  Description of Artificial Sequence: Synthetic oligonucleotide
  Target: LAMA2; (-) strand; PAM type: YTN; PAM sequence: CTT
taaaaagcaatagaggattt

SEQ ID NO: 226539 - DNA, 20 bp, Artificial Sequence
  Description of Artificial Sequence: Synthetic oligonucleotide
  Target: LAMA2; (-) strand; PAM type: YTN; PAM sequence: TTC
tttaaaaagcaatagaggat

SEQ ID NO: 226540 - DNA, 20 bp, Artificial Sequence
  Description of Artificial Sequence: Synthetic oligonucleotide
  Target: LAMA2; (-) strand; PAM type: YTN; PAM sequence: TTT
ctttaaaaagcaatagagga

SEQ ID NO: 226541 - DNA, 20 bp, Artificial Sequence
  Description of Artificial Sequence: Synthetic oligonucleotide
  Target: LAMA2; (-) strand; PAM type: YTN; PAM sequence: TTT
tctttaaaaagcaatagagg

SEQ ID NO: 226542 - DNA, 20 bp, Artificial Sequence
  Description of Artificial Sequence: Synthetic oligonucleotide
  Target: LAMA2; (-) strand; PAM type: YTN; PAM sequence: TTT
ttctttaaaaagcaatagag

SEQ ID NO: 226543 - DNA, 20 bp, Artificial Sequence
  Description of Artificial Sequence: Synthetic oligonucleotide
  Target: LAMA2; (-) strand; PAM type: YTN; PAM sequence: TTT
tttctttaaaaagcaataga

SEQ ID NO: 226544 - DNA, 20 bp, Artificial Sequence
  Description of Artificial Sequence: Synthetic oligonucleotide
  Target: LAMA2; (-) strand; PAM type: YTN; PAM sequence: CTG
ataattttttctttaaaaag

SEQ ID NO: 226545 - DNA, 20 bp, Artificial Sequence
  Description of Artificial Sequence: Synthetic oligonucleotide
  Target: LAMA2; (-) strand; PAM type: YTN; PAM sequence: TTC
tgataattttttctttaaaa

SEQ ID NO: 226546 - DNA, 20 bp, Artificial Sequence
  Description of Artificial Sequence: Synthetic oligonucleotide
  Target: LAMA2; (-) strand; PAM type: YTN; PAM sequence: TTA
aatcattctgataatttttt

SEQ ID NO: 226547 - DNA, 20 bp, Artificial Sequence
  Description of Artificial Sequence: Synthetic oligonucleotide
  Target: LAMA2; (-) strand; PAM type: YTN; PAM sequence: CTA
atgtggagataaaaaataac

SEQ ID NO: 226548 - DNA, 20 bp, Artificial Sequence
  Description of Artificial Sequence: Synthetic oligonucleotide
  Target: LAMA2; (-) strand; PAM type: YTN; PAM sequence: CTG
aaataacaaactaatgtgga

SEQ ID NO: 226549 - DNA, 20 bp, Artificial Sequence
  Description of Artificial Sequence: Synthetic oligonucleotide
  Target: LAMA2; (-) strand; PAM type: YTN; PAM sequence: CTG
aaataaccactgaaataaca

SEQ ID NO: 226550 - DNA, 20 bp, Artificial Sequence
  Description of Artificial Sequence: Synthetic oligonucleotide
  Target: LAMA2; (-) strand; PAM type: YTN; PAM sequence: TTA
actgaaataaccactgaaat

SEQ ID NO: 226551 - DNA, 20 bp, Artificial Sequence
  Description of Artificial Sequence: Synthetic oligonucleotide
  Target: LAMA2; (-) strand; PAM type: YTN; PAM sequence: TTT
aactgaaataaccactgaaa

SEQ ID NO: 226552 - DNA, 20 bp, Artificial Sequence
  Description of Artificial Sequence: Synthetic oligonucleotide
  Target: LAMA2; (-) strand; PAM type: YTN; PAM sequence: CTT
taactgaaataaccactgaa

SEQ ID NO: 226553 - DNA, 20 bp, Artificial Sequence
  Description of Artificial Sequence: Synthetic oligonucleotide
  Target: LAMA2; (-) strand; PAM type: YTN; PAM sequence: TTG
aaataatggaagagaaaaat

SEQ ID NO: 226554 - DNA, 20 bp, Artificial Sequence
  Description of Artificial Sequence: Synthetic oligonucleotide
  Target: LAMA2; (-) strand; PAM type: YTN; PAM sequence: CTA
tgagataaatggatacaatg

SEQ ID NO: 226555 - DNA, 20 bp, Artificial Sequence
  Description of Artificial Sequence: Synthetic oligonucleotide
  Target: LAMA2; (-) strand; PAM type: YTN; PAM sequence: TTC
tatgagataaatggatacaa

SEQ ID NO: 226556 - DNA, 20 bp, Artificial Sequence
  Description of Artificial Sequence: Synthetic oligonucleotide
  Target: LAMA2; (-) strand; PAM type: YTN; PAM sequence: TTT
ctatgagataaatggataca

SEQ ID NO: 226557 - DNA, 20 bp, Artificial Sequence
  Description of Artificial Sequence: Synthetic oligonucleotide
  Target: LAMA2; (-) strand; PAM type: YTN; PAM sequence: CTT
tctatgagataaatggatac

SEQ ID NO: 226558 - DNA, 20 bp, Artificial Sequence
  Description of Artificial Sequence: Synthetic oligonucleotide
  Target: LAMA2; (-) strand; PAM type: YTN; PAM sequence: TTA
tctttctatgagataaatgg

SEQ ID NO: 226559 - DNA, 20 bp, Artificial Sequence
  Description of Artificial Sequence: Synthetic oligonucleotide
  Target: LAMA2; (-) strand; PAM type: YTN; PAM sequence: TTT
atctttctatgagataaatg

SEQ ID NO: 226560 - DNA, 20 bp, Artificial Sequence
  Description of Artificial Sequence: Synthetic oligonucleotide
  Target: LAMA2; (-) strand; PAM type: YTN; PAM sequence: TTC
aacacaaaagtttatctttc

SEQ ID NO: 226561 - DNA, 20 bp, Artificial Sequence
  Description of Artificial Sequence: Synthetic oligonucleotide
  Target: LAMA2; (-) strand; PAM type: YTN; PAM sequence: CTA
attcaacacaaaagtttatc

SEQ ID NO: 226562 - DNA, 20 bp, Artificial Sequence
  Description of Artificial Sequence: Synthetic oligonucleotide
  Target: LAMA2; (-) strand; PAM type: YTN; PAM sequence: TTC
cacagctaattcaacacaaa

SEQ ID NO: 226563 - DNA, 20 bp, Artificial Sequence
  Description of Artificial Sequence: Synthetic oligonucleotide
  Target: LAMA2; (-) strand; PAM type: YTN; PAM sequence: CTT
ccacagctaattcaacacaa

SEQ ID NO: 226564 - DNA, 20 bp, Artificial Sequence
  Description of Artificial Sequence: Synthetic oligonucleotide
  Target: LAMA2; (-) strand; PAM type: YTN; PAM sequence: CTG
gtcttccacagctaattcaa

SEQ ID NO: 226565 - DNA, 20 bp, Artificial Sequence
  Description of Artificial Sequence: Synthetic oligonucleotide
  Target: LAMA2; (-) strand; PAM type: YTN; PAM sequence: TTA
atgtgtgagctggtcttcca

SEQ ID NO: 226566 - DNA, 20 bp, Artificial Sequence
  Description of Artificial Sequence: Synthetic oligonucleotide
  Target: LAMA2; (-) strand; PAM type: YTN; PAM sequence: TTA
gtagtgattaatgtgtgagc

SEQ ID NO: 226567 - DNA, 20 bp, Artificial Sequence
  Description of Artificial Sequence: Synthetic oligonucleotide
  Target: LAMA2; (-) strand; PAM type: YTN; PAM sequence: CTT
agtagtgattaatgtgtgag

SEQ ID NO: 226568 - DNA, 20 bp, Artificial Sequence
  Description of Artificial Sequence: Synthetic oligonucleotide
  Target: LAMA2; (-) strand; PAM type: YTN; PAM sequence: TTG
cttagtagtgattaatgtgt

SEQ ID NO: 226569 - DNA, 20 bp, Artificial Sequence
  Description of Artificial Sequence: Synthetic oligonucleotide
  Target: LAMA2; (-) strand; PAM type: YTN; PAM sequence: TTT
gcttagtagtgattaatgtg

SEQ ID NO: 226570 - DNA, 20 bp, Artificial Sequence
  Description of Artificial Sequence: Synthetic oligonucleotide
  Target: LAMA2; (-) strand; PAM type: YTN; PAM sequence: TTG
taacgcatttgcttagtagt

SEQ ID NO: 226571 - DNA, 20 bp, Artificial Sequence
  Description of Artificial Sequence: Synthetic oligonucleotide
  Target: LAMA2; (-) strand; PAM type: YTN; PAM sequence: TTT
gtaacgcatttgcttagtag

SEQ ID NO: 226572 - DNA, 20 bp, Artificial Sequence
  Description of Artificial Sequence: Synthetic oligonucleotide
  Target: LAMA2; (-) strand; PAM type: YTN; PAM sequence: TTT
tgtaacgcatttgcttagta

SEQ ID NO: 226573 - DNA, 20 bp, Artificial Sequence
  Description of Artificial Sequence: Synthetic oligonucleotide
  Target: LAMA2; (-) strand; PAM type: YTN; PAM sequence: TTT
ttgtaacgcatttgcttagt

SEQ ID NO: 226574 - DNA, 20 bp, Artificial Sequence
  Description of Artificial Sequence: Synthetic oligonucleotide
  Target: LAMA2; (-) strand; PAM type: YTN; PAM sequence: TTT
tttgtaacgcatttgcttag

SEQ ID NO: 226575 - DNA, 20 bp, Artificial Sequence
  Description of Artificial Sequence: Synthetic oligonucleotide
  Target: LAMA2; (-) strand; PAM type: YTN; PAM sequence: CTT
ttttgtaacgcatttgctta

SEQ ID NO: 226576 - DNA, 20 bp, Artificial Sequence
  Description of Artificial Sequence: Synthetic oligonucleotide
  Target: LAMA2; (-) strand; PAM type: YTN; PAM sequence: CTC
ttttttgtaacgcatttgct

SEQ ID NO: 226577 - DNA, 20 bp, Artificial Sequence
  Description of Artificial Sequence: Synthetic oligonucleotide
  Target: LAMA2; (-) strand; PAM type: YTN; PAM sequence: CTC
tcttttttgtaacgcatttg

SEQ ID NO: 226578 - DNA, 20 bp, Artificial Sequence
  Description of Artificial Sequence: Synthetic oligonucleotide
  Target: LAMA2; (-) strand; PAM type: YTN; PAM sequence: TTG
tcctctcttttttgtaacgc

SEQ ID NO: 226579 - DNA, 20 bp, Artificial Sequence
  Description of Artificial Sequence: Synthetic oligonucleotide
  Target: LAMA2; (-) strand; PAM type: YTN; PAM sequence: TTG
ttgtcctctcttttttgtaa

SEQ ID NO: 226580 - DNA, 20 bp, Artificial Sequence
  Description of Artificial Sequence: Synthetic oligonucleotide
  Target: LAMA2; (-) strand; PAM type: YTN; PAM sequence: TTT
gttgtcctctcttttttgta

SEQ ID NO: 226581 - DNA, 20 bp, Artificial Sequence
  Description of Artificial Sequence: Synthetic oligonucleotide
  Target: LAMA2; (-) strand; PAM type: YTN; PAM sequence: TTT
tgttgtcctctcttttttgt

SEQ ID NO: 226582 - DNA, 20 bp, Artificial Sequence
  Description of Artificial Sequence: Synthetic oligonucleotide
  Target: LAMA2; (-) strand; PAM type: YTN; PAM sequence: TTT
ttgttgtcctctcttttttg

SEQ ID NO: 226583 - DNA, 20 bp, Artificial Sequence
  Description of Artificial Sequence: Synthetic oligonucleotide
  Target: LAMA2; (-) strand; PAM type: YTN; PAM sequence: CTC
atttttgttgtcctctcttt

SEQ ID NO: 226584 - DNA, 20 bp, Artificial Sequence
  Description of Artificial Sequence: Synthetic oligonucleotide
  Target: LAMA2; (-) strand; PAM type: YTN; PAM sequence: TTC
cagctcatttttgttgtcct

SEQ ID NO: 226585 - DNA, 20 bp, Artificial Sequence
  Description of Artificial Sequence: Synthetic oligonucleotide
  Target: LAMA2; (-) strand; PAM type: YTN; PAM sequence: CTG
tattccagctcatttttgtt

SEQ ID NO: 226586 - DNA, 20 bp, Artificial Sequence
  Description of Artificial Sequence: Synthetic oligonucleotide
  Target: LAMA2; (-) strand; PAM type: YTN; PAM sequence: CTG
aaactgtattccagctcatt

SEQ ID NO: 226587 - DNA, 20 bp, Artificial Sequence
  Description of Artificial Sequence: Synthetic oligonucleotide
  Target: LAMA2; (-) strand; PAM type: YTN; PAM sequence: TTG
aactgaaactgtattccagc

SEQ ID NO: 226588 - DNA, 20 bp, Artificial Sequence
  Description of Artificial Sequence: Synthetic oligonucleotide
  Target: LAMA2; (-) strand; PAM type: YTN; PAM sequence: TTG
gtggttgaactgaaactgta

SEQ ID NO: 226589 - DNA, 20 bp, Artificial Sequence
  Description of Artificial Sequence: Synthetic oligonucleotide
  Target: LAMA2; (-) strand; PAM type: YTN; PAM sequence: TTT
ggtggttgaactgaaactgt

SEQ ID NO: 226590 - DNA, 20 bp, Artificial Sequence
  Description of Artificial Sequence: Synthetic oligonucleotide
  Target: LAMA2; (-) strand; PAM type: YTN; PAM sequence: TTC
atgatatcaaatcgtttggt

SEQ ID NO: 226591 - DNA, 20 bp, Artificial Sequence
  Description of Artificial Sequence: Synthetic oligonucleotide
  Target: LAMA2; (-) strand; PAM type: YTN; PAM sequence: TTA
ttcatgatatcaaatcgttt

SEQ ID NO: 226592 - DNA, 20 bp, Artificial Sequence
  Description of Artificial Sequence: Synthetic oligonucleotide
  Target: LAMA2; (-) strand; PAM type: YTN; PAM sequence: TTT
attcatgatatcaaatcgtt

SEQ ID NO: 226593 - DNA, 20 bp, Artificial Sequence
  Description of Artificial Sequence: Synthetic oligonucleotide
  Target: LAMA2; (-) strand; PAM type: YTN; PAM sequence: CTA
catatacccaagaaatttat

SEQ ID NO: 226594 - DNA, 20 bp, Artificial Sequence
  Description of Artificial Sequence: Synthetic oligonucleotide
  Target: LAMA2; (-) strand; PAM type: YTN; PAM sequence: CTG
gctacatatacccaagaaat

SEQ ID NO: 226595 - DNA, 20 bp, Artificial Sequence
  Description of Artificial Sequence: Synthetic oligonucleotide
  Target: LAMA2; (-) strand; PAM type: YTN; PAM sequence: TTA
ctggctacatatacccaaga

SEQ ID NO: 226596 - DNA, 20 bp, Artificial Sequence
  Description of Artificial Sequence: Synthetic oligonucleotide
  Target: LAMA2; (-) strand; PAM type: YTN; PAM sequence: CTT
actggctacatatacccaag

SEQ ID NO: 226597 - DNA, 20 bp, Artificial Sequence
  Description of Artificial Sequence: Synthetic oligonucleotide
  Target: LAMA2; (-) strand; PAM type: YTN; PAM sequence: CTA
cttactggctacatataccc

SEQ ID NO: 226598 - DNA, 20 bp, Artificial Sequence
  Description of Artificial Sequence: Synthetic oligonucleotide
  Target: LAMA2; (-) strand; PAM type: YTN; PAM sequence: TTG
aggtctacttactggctaca

SEQ ID NO: 226599 - DNA, 20 bp, Artificial Sequence
  Description of Artificial Sequence: Synthetic oligonucleotide
  Target: LAMA2; (-) strand; PAM type: YTN; PAM sequence: CTA
aatgttgaggtctacttact

SEQ ID NO: 226600 - DNA, 20 bp, Artificial Sequence
  Description of Artificial Sequence: Synthetic oligonucleotide
  Target: LAMA2; (-) strand; PAM type: YTN; PAM sequence: TTG
aaaaaaatagctaaatgttg

SEQ ID NO: 226601 - DNA, 20 bp, Artificial Sequence
  Description of Artificial Sequence: Synthetic oligonucleotide
  Target: LAMA2; (-) strand; PAM type: YTN; PAM sequence: TTA
ttgaaaaaaatagctaaatg

SEQ ID NO: 226602 - DNA, 20 bp, Artificial Sequence
  Description of Artificial Sequence: Synthetic oligonucleotide
  Target: LAMA2; (-) strand; PAM type: YTN; PAM sequence: TTT
attgaaaaaaatagctaaat

SEQ ID NO: 226603 - DNA, 20 bp, Artificial Sequence
  Description of Artificial Sequence: Synthetic oligonucleotide
  Target: LAMA2; (-) strand; PAM type: YTN; PAM sequence: TTA
tttattgaaaaaaatagcta

SEQ ID NO: 226604 - DNA, 20 bp, Artificial Sequence
  Description of Artificial Sequence: Synthetic oligonucleotide
  Target: LAMA2; (-) strand; PAM type: YTN; PAM sequence: TTT
atttattgaaaaaaatagct

SEQ ID NO: 226605 - DNA, 20 bp, Artificial Sequence
  Description of Artificial Sequence: Synthetic oligonucleotide
  Target: LAMA2; (-) strand; PAM type: YTN; PAM sequence: CTC
aatatttatttattgaaaaa

SEQ ID NO: 226606 - DNA, 20 bp, Artificial Sequence
  Description of Artificial Sequence: Synthetic oligonucleotide
  Target: LAMA2; (-) strand; PAM type: YTN; PAM sequence: TTG
ccataaagacagtgctcaat

SEQ ID NO: 226607 - DNA, 20 bp, Artificial Sequence
  Description of Artificial Sequence: Synthetic oligonucleotide
  Target: LAMA2; (-) strand; PAM type: YTN; PAM sequence: TTT
gccataaagacagtgctcaa

SEQ ID NO: 226608 - DNA, 20 bp, Artificial Sequence
  Description of Artificial Sequence: Synthetic oligonucleotide
  Target: LAMA2; (-) strand; PAM type: YTN; PAM sequence: CTA
agacagtgtttgccataaag

SEQ ID NO: 226609 - DNA, 20 bp, Artificial Sequence
  Description of Artificial Sequence: Synthetic oligonucleotide
  Target: LAMA2; (-) strand; PAM type: YTN; PAM sequence: CTG
cacctaagacagtgtttgcc

SEQ ID NO: 226610 - DNA, 20 bp, Artificial Sequence
  Description of Artificial Sequence: Synthetic oligonucleotide
  Target: LAMA2; (-) strand; PAM type: YTN; PAM sequence: TTA
tcccctgcacctaagacagt

SEQ ID NO: 226611 - DNA, 20 bp, Artificial Sequence
  Description of Artificial Sequence: Synthetic oligonucleotide
  Target: LAMA2; (-) strand; PAM type: YTN; PAM sequence: CTA
atcccccaaaagcataatgt

SEQ ID NO: 226612 - DNA, 20 bp, Artificial Sequence
  Description of Artificial Sequence: Synthetic oligonucleotide
  Target: LAMA2; (-) strand; PAM type: YTN; PAM sequence: TTA
tctaatcccccaaaagcata

SEQ ID NO: 226613 - DNA, 20 bp, Artificial Sequence
  Description of Artificial Sequence: Synthetic oligonucleotide
  Target: LAMA2; (-) strand; PAM type: YTN; PAM sequence: CTT
atctaatcccccaaaagcat

SEQ ID NO: 226614 - DNA, 20 bp, Artificial Sequence
  Description of Artificial Sequence: Synthetic oligonucleotide
  Target: LAMA2; (-) strand; PAM type: YTN; PAM sequence: CTC
ttatctaatcccccaaaagc

SEQ ID NO: 226615 - DNA, 20 bp, Artificial Sequence
  Description of Artificial Sequence: Synthetic oligonucleotide
  Target: LAMA2; (-) strand; PAM type: YTN; PAM sequence: CTC
tcttatctaatcccccaaaa

SEQ ID NO: 226616 - DNA, 20 bp, Artificial Sequence
  Description of Artificial Sequence: Synthetic oligonucleotide
  Target: LAMA2; (-) strand; PAM type: YTN; PAM sequence: TTC
ctctcttatctaatccccca

SEQ ID NO: 226617 - DNA, 20 bp, Artificial Sequence
  Description of Artificial Sequence: Synthetic oligonucleotide
  Target: LAMA2; (-) strand; PAM type: YTN; PAM sequence: TTT
cctctcttatctaatccccc

SEQ ID NO: 226618 - DNA, 20 bp, Artificial Sequence
  Description of Artificial Sequence: Synthetic oligonucleotide
  Target: LAMA2; (-) strand; PAM type: YTN; PAM sequence: TTA
tttcctctcttatctaatcc

SEQ ID NO: 226619 - DNA, 20 bp, Artificial Sequence
  Description of Artificial Sequence: Synthetic oligonucleotide
  Target: LAMA2; (-) strand; PAM type: YTN; PAM sequence: CTT
atttcctctcttatctaatc

SEQ ID NO: 226620 - DNA, 20 bp, Artificial Sequence
  Description of Artificial Sequence: Synthetic oligonucleotide
  Target: LAMA2; (-) strand; PAM type: YTN; PAM sequence: CTG
acttatttcctctcttatct

SEQ ID NO: 226621 - DNA, 20 bp, Artificial Sequence
  Description of Artificial Sequence: Synthetic oligonucleotide
  Target: LAMA2; (-) strand; PAM type: YTN; PAM sequence: CTC
tgacttatttcctctcttat

SEQ ID NO: 226622 - DNA, 20 bp, Artificial Sequence
  Description of Artificial Sequence: Synthetic oligonucleotide
  Target: LAMA2; (-) strand; PAM type: YTN; PAM sequence: TTC
tctgacttatttcctctctt

SEQ ID NO: 226623 - DNA, 20 bp, Artificial Sequence
  Description of Artificial Sequence: Synthetic oligonucleotide
  Target: LAMA2; (-) strand; PAM type: YTN; PAM sequence: TTT
ctctgacttatttcctctct

SEQ ID NO: 226624 - DNA, 20 bp, Artificial Sequence
  Description of Artificial Sequence: Synthetic oligonucleotide
  Target: LAMA2; (-) strand; PAM type: YTN; PAM sequence: TTT
tctctgacttatttcctctc

SEQ ID NO: 226625 - DNA, 20 bp, Artificial Sequence
  Description of Artificial Sequence: Synthetic oligonucleotide
  Target: LAMA2; (-) strand; PAM type: YTN; PAM sequence: CTT
ttctctgacttatttcctct

SEQ ID NO: 226626 - DNA, 20 bp, Artificial Sequence
  Description of Artificial Sequence: Synthetic oligonucleotide
  Target: LAMA2; (-) strand; PAM type: YTN; PAM sequence: CTA
gagatcttttctctgactta

SEQ ID NO: 226627 - DNA, 20 bp, Artificial Sequence
  Description of Artificial Sequence: Synthetic oligonucleotide
  Target: LAMA2; (-) strand; PAM type: YTN; PAM sequence: CTG
tgctagagatcttttctctg

SEQ ID NO: 226628 - DNA, 20 bp, Artificial Sequence
  Description of Artificial Sequence: Synthetic oligonucleotide
  Target: LAMA2; (-) strand; PAM type: YTN; PAM sequence: TTC
tgtgctagagatcttttctc

SEQ ID NO: 226629 - DNA, 20 bp, Artificial Sequence
  Description of Artificial Sequence: Synthetic oligonucleotide
  Target: LAMA2; (-) strand; PAM type: YTN; PAM sequence: TTT
ctgtgctagagatcttttct

SEQ ID NO: 226630 - DNA, 20 bp, Artificial Sequence
  Description of Artificial Sequence: Synthetic oligonucleotide
  Target: LAMA2; (-) strand; PAM type: YTN; PAM sequence: TTT
tctgtgctagagatcttttc

SEQ ID NO: 226631 - DNA, 20 bp, Artificial Sequence
  Description of Artificial Sequence: Synthetic oligonucleotide
  Target: LAMA2; (-) strand; PAM type: YTN; PAM sequence: CTT
ttctgtgctagagatctttt

SEQ ID NO: 226632 - DNA, 20 bp, Artificial Sequence
  Description of Artificial Sequence: Synthetic oligonucleotide
  Target: LAMA2; (-) strand; PAM type: YTN; PAM sequence: TTG
taaccagacttttctgtgct

SEQ ID NO: 226633 - DNA, 20 bp, Artificial Sequence
  Description of Artificial Sequence: Synthetic oligonucleotide
  Target: LAMA2; (-) strand; PAM type: YTN; PAM sequence: CTT
gtaaccagacttttctgtgc

SEQ ID NO: 226634 - DNA, 20 bp, Artificial Sequence
  Description of Artificial Sequence: Synthetic oligonucleotide
  Target: LAMA2; (-) strand; PAM type: YTN; PAM sequence: CTG
taatcttgtaaccagacttt

SEQ ID NO: 226635 - DNA, 20 bp, Artificial Sequence
  Description of Artificial Sequence: Synthetic oligonucleotide
  Target: LAMA2; (-) strand; PAM type: YTN; PAM sequence: CTC
tgtaatcttgtaaccagact

SEQ ID NO: 226636 - DNA, 20 bp, Artificial Sequence
  Description of Artificial Sequence: Synthetic oligonucleotide
  Target: LAMA2; (-) strand; PAM type: YTN; PAM sequence: CTC
tctgtaatcttgtaaccaga

SEQ ID NO: 226637 - DNA, 20 bp, Artificial Sequence
  Description of Artificial Sequence: Synthetic oligonucleotide
  Target: LAMA2; (-) strand; PAM type: YTN; PAM sequence: CTC
tctctgtaatcttgtaacca

SEQ ID NO: 226638 - DNA, 20 bp, Artificial Sequence
  Description of Artificial Sequence: Synthetic oligonucleotide
  Target: LAMA2; (-) strand; PAM type: YTN; PAM sequence: CTC
tctctctgtaatcttgtaac

SEQ ID NO: 226639 - DNA, 20 bp, Artificial Sequence
  Description of Artificial Sequence: Synthetic oligonucleotide
  Target: LAMA2; (-) strand; PAM type: YTN; PAM sequence: CTC
tctctctctgtaatcttgta

SEQ ID NO: 226640 - DNA, 20 bp, Artificial Sequence
  Description of Artificial Sequence: Synthetic oligonucleotide
  Target: LAMA2; (-) strand; PAM type: YTN; PAM sequence: TTC
tctctctctctgtaatcttg

SEQ ID NO: 226641 - DNA, 20 bp, Artificial Sequence
  Description of Artificial Sequence: Synthetic oligonucleotide
  Target: LAMA2; (-) strand; PAM type: YTN; PAM sequence: TTT
ctctctctctctgtaatctt

SEQ ID NO: 226642 - DNA, 20 bp, Artificial Sequence
  Description of Artificial Sequence: Synthetic oligonucleotide
  Target: LAMA2; (-) strand; PAM type: YTN; PAM sequence: TTT
tctctctctctctgtaatct

SEQ ID NO: 226643 - DNA, 20 bp, Artificial Sequence
  Description of Artificial Sequence: Synthetic oligonucleotide
  Target: LAMA2; (-) strand; PAM type: YTN; PAM sequence: TTT
ttctctctctctctgtaatc

SEQ ID NO: 226644 - DNA, 20 bp, Artificial Sequence
  Description of Artificial Sequence: Synthetic oligonucleotide
  Target: LAMA2; (-) strand; PAM type: YTN; PAM sequence: TTT
tttctctctctctctgtaat

SEQ ID NO: 226645 - DNA, 20 bp, Artificial Sequence
  Description of Artificial Sequence: Synthetic oligonucleotide
  Target: LAMA2; (-) strand; PAM type: YTN; PAM sequence: TTT
ttttctctctctctctgtaa

SEQ ID NO: 226646 - DNA, 20 bp, Artificial Sequence
  Description of Artificial Sequence: Synthetic oligonucleotide
  Target: LAMA2; (-) strand; PAM type: YTN; PAM sequence: TTT
tttttctctctctctctgta

SEQ ID NO: 226647 - DNA, 20 bp, Artificial Sequence
  Description of Artificial Sequence: Synthetic oligonucleotide
  Target: LAMA2; (-) strand; PAM type: YTN; PAM sequence: TTT
ttttttctctctctctctgt

SEQ ID NO: 226648 - DNA, 20 bp, Artificial Sequence
  Description of Artificial Sequence: Synthetic oligonucleotide
  Target: LAMA2; (-) strand; PAM type: YTN; PAM sequence: TTT
tttttttctctctctctctg

SEQ ID NO: 226649 - DNA, 20 bp, Artificial Sequence
  Description of Artificial Sequence: Synthetic oligonucleotide
  Target: LAMA2; (-) strand; PAM type: YTN; PAM sequence: CTA
cagttttttttttctctctc

SEQ ID NO: 226650 - DNA, 20 bp, Artificial Sequence
  Description of Artificial Sequence: Synthetic oligonucleotide
  Target: LAMA2; (-) strand; PAM type: YTN; PAM sequence: CTA
gacaagtcactacagttttt

SEQ ID NO: 226651 - DNA, 20 bp, Artificial Sequence
  Description of Artificial Sequence: Synthetic oligonucleotide
  Target: LAMA2; (-) strand; PAM type: YTN; PAM sequence: TTC
cctagacaagtcactacagt

SEQ ID NO: 226652 - DNA, 20 bp, Artificial Sequence
  Description of Artificial Sequence: Synthetic oligonucleotide
  Target: LAMA2; (-) strand; PAM type: YTN; PAM sequence: CTA
tgtggcaaccacacagttcc

SEQ ID NO: 226653 - DNA, 20 bp, Artificial Sequence
  Description of Artificial Sequence: Synthetic oligonucleotide
  Target: LAMA2; (-) strand; PAM type: YTN; PAM sequence: TTC
tatgtggcaaccacacagtt

SEQ ID NO: 226654 - DNA, 20 bp, Artificial Sequence
  Description of Artificial Sequence: Synthetic oligonucleotide
  Target: LAMA2; (-) strand; PAM type: YTN; PAM sequence: TTT
ctatgtggcaaccacacagt

SEQ ID NO: 226655 - DNA, 20 bp, Artificial Sequence
  Description of Artificial Sequence: Synthetic oligonucleotide
  Target: LAMA2; (-) strand; PAM type: YTN; PAM sequence: TTT
tctatgtggcaaccacacag

SEQ ID NO: 226656 - DNA, 20 bp, Artificial Sequence
  Description of Artificial Sequence: Synthetic oligonucleotide
  Target: LAMA2; (-) strand; PAM type: YTN; PAM sequence: TTC
cacattttctatgtggcaac

SEQ ID NO: 226657 - DNA, 20 bp, Artificial Sequence
  Description of Artificial Sequence: Synthetic oligonucleotide
  Target: LAMA2; (-) strand; PAM type: YTN; PAM sequence: CTT
ccacattttctatgtggcaa

SEQ ID NO: 226658 - DNA, 20 bp, Artificial Sequence
  Description of Artificial Sequence: Synthetic oligonucleotide
  Target: LAMA2; (-) strand; PAM type: YTN; PAM sequence: CTC
ccttccacattttctatgtg

SEQ ID NO: 226659 - DNA, 20 bp, Artificial Sequence
  Description of Artificial Sequence: Synthetic oligonucleotide
  Target: LAMA2; (-) strand; PAM type: YTN; PAM sequence: CTC
ccatcactcccttccacatt

SEQ ID NO: 226660 - DNA, 20 bp, Artificial Sequence
  Description of Artificial Sequence: Synthetic oligonucleotide
  Target: LAMA2; (-) strand; PAM type: YTN; PAM sequence: CTG
tctcccatcactcccttcca

SEQ ID NO: 226661 - DNA, 20 bp, Artificial Sequence
  Description of Artificial Sequence: Synthetic oligonucleotide
  Target: LAMA2; (-) strand; PAM type: YTN; PAM sequence: CTA
ggaacatagcctgtctccca

SEQ ID NO: 226662 - DNA, 20 bp, Artificial Sequence
  Description of Artificial Sequence: Synthetic oligonucleotide
  Target: LAMA2; (-) strand; PAM type: YTN; PAM sequence: TTG
ctaggaacatagcctgtctc

SEQ ID NO: 226663 - DNA, 20 bp, Artificial Sequence
  Description of Artificial Sequence: Synthetic oligonucleotide
  Target: LAMA2; (-) strand; PAM type: YTN; PAM sequence: TTA
tggtgagtcaaggcaattgc

SEQ ID NO: 226664 - DNA, 20 bp, Artificial Sequence
  Description of Artificial Sequence: Synthetic oligonucleotide
  Target: LAMA2; (-) strand; PAM type: YTN; PAM sequence: TTC
agtaggtgaaataattatgg

SEQ ID NO: 226665 - DNA, 20 bp, Artificial Sequence
  Description of Artificial Sequence: Synthetic oligonucleotide
  Target: LAMA2; (-) strand; PAM type: YTN; PAM sequence: TTA
ttcagtaggtgaaataatta

SEQ ID NO: 226666 - DNA, 20 bp, Artificial Sequence
  Description of Artificial Sequence: Synthetic oligonucleotide
  Target: LAMA2; (-) strand; PAM type: YTN; PAM sequence: TTC
agttattcagtaggtgaaat

SEQ ID NO: 226667 - DNA, 20 bp, Artificial Sequence
  Description of Artificial Sequence: Synthetic oligonucleotide
  Target: LAMA2; (-) strand; PAM type: YTN; PAM sequence: TTA
ttcagttattcagtaggtga

SEQ ID NO: 226668 - DNA, 20 bp, Artificial Sequence
  Description of Artificial Sequence: Synthetic oligonucleotide
  Target: LAMA2; (-) strand; PAM type: YTN; PAM sequence: TTT
attcagttattcagtaggtg

SEQ ID NO: 226669 - DNA, 20 bp, Artificial Sequence
  Description of Artificial Sequence: Synthetic oligonucleotide
  Target: LAMA2; (-) strand; PAM type: YTN; PAM sequence: CTC
aatttattcagttattcagt

SEQ ID NO: 226670 - DNA, 20 bp, Artificial Sequence
  Description of Artificial Sequence: Synthetic oligonucleotide
  Target: LAMA2; (-) strand; PAM type: YTN; PAM sequence: CTA
ctcaatttattcagttattc

SEQ ID NO: 226671 - DNA, 20 bp, Artificial Sequence
  Description of Artificial Sequence: Synthetic oligonucleotide
  Target: LAMA2; (-) strand; PAM type: YTN; PAM sequence: CTC
tactcaatttattcagttat

SEQ ID NO: 226672 - DNA, 20 bp, Artificial Sequence
  Description of Artificial Sequence: Synthetic oligonucleotide
  Target: LAMA2; (-) strand; PAM type: YTN; PAM sequence: CTC
tctactcaatttattcagtt

SEQ ID NO: 226673 - DNA, 20 bp, Artificial Sequence
  Description of Artificial Sequence: Synthetic oligonucleotide
  Target: LAMA2; (-) strand; PAM type: YTN; PAM sequence: TTG
gtacaagcagcctctctact

SEQ ID NO: 226674 - DNA, 20 bp, Artificial Sequence
  Description of Artificial Sequence: Synthetic oligonucleotide
  Target: LAMA2; (-) strand; PAM type: YTN; PAM sequence: TTT
ggtacaagcagcctctctac

SEQ ID NO: 226675 - DNA, 20 bp, Artificial Sequence
  Description of Artificial Sequence: Synthetic oligonucleotide
  Target: LAMA2; (-) strand; PAM type: YTN; PAM sequence: TTA
cagtttggtacaagcagcct

SEQ ID NO: 226676 - DNA, 20 bp, Artificial Sequence
  Description of Artificial Sequence: Synthetic oligonucleotide
  Target: LAMA2; (-) strand; PAM type: YTN; PAM sequence: TTT
acagtttggtacaagcagcc

SEQ ID NO: 226677 - DNA, 20 bp, Artificial Sequence
  Description of Artificial Sequence: Synthetic oligonucleotide
  Target: LAMA2; (-) strand; PAM type: YTN; PAM sequence: TTT
tacagtttggtacaagcagc

SEQ ID NO: 226678 - DNA, 20 bp, Artificial Sequence
  Description of Artificial Sequence: Synthetic oligonucleotide
  Target: LAMA2; (-) strand; PAM type: YTN; PAM sequence: CTG
ttttacagtttggtacaagc

SEQ ID NO: 226679 - DNA, 20 bp, Artificial Sequence
  Description of Artificial Sequence: Synthetic oligonucleotide
  Target: LAMA2; (-) strand; PAM type: YTN; PAM sequence: CTG
aaactgttttacagtttggt

SEQ ID NO: 226680 - DNA, 20 bp, Artificial Sequence
  Description of Artificial Sequence: Synthetic oligonucleotide
  Target: LAMA2; (-) strand; PAM type: YTN; PAM sequence: CTC
atcctgaaactgttttacag

SEQ ID NO: 226681 - DNA, 20 bp, Artificial Sequence
  Description of Artificial Sequence: Synthetic oligonucleotide
  Target: LAMA2; (-) strand; PAM type: YTN; PAM sequence: TTC
tcatcctgaaactgttttac

SEQ ID NO: 226682 - DNA, 20 bp, Artificial Sequence
  Description of Artificial Sequence: Synthetic oligonucleotide
  Target: LAMA2; (-) strand; PAM type: YTN; PAM sequence: TTT
ctcatcctgaaactgtttta

SEQ ID NO: 226683 - DNA, 20 bp, Artificial Sequence
  Description of Artificial Sequence: Synthetic oligonucleotide
  Target: LAMA2; (-) strand; PAM type: YTN; PAM sequence: TTT
tctcatcctgaaactgtttt

SEQ ID NO: 226684 - DNA, 20 bp, Artificial Sequence
  Description of Artificial Sequence: Synthetic oligonucleotide
  Target: LAMA2; (-) strand; PAM type: YTN; PAM sequence: TTA
aaatgtaattttctcatcct

SEQ ID NO: 226685 - DNA, 20 bp, Artificial Sequence
  Description of Artificial Sequence: Synthetic oligonucleotide
  Target: LAMA2; (-) strand; PAM type: YTN; PAM sequence: TTT
aaaatgtaattttctcatcc

SEQ ID NO: 226686 - DNA, 20 bp, Artificial Sequence
  Description of Artificial Sequence: Synthetic oligonucleotide
  Target: LAMA2; (-) strand; PAM type: YTN; PAM sequence: CTA
agtgtatgtttaaaatgtaa

SEQ ID NO: 226687 - DNA, 20 bp, Artificial Sequence
  Description of Artificial Sequence: Synthetic oligonucleotide
  Target: LAMA2; (-) strand; PAM type: YTN; PAM sequence: TTC
cctaagtgtatgtttaaaat

SEQ ID NO: 226688 - DNA, 20 bp, Artificial Sequence
  Description of Artificial Sequence: Synthetic oligonucleotide
  Target: LAMA2; (-) strand; PAM type: YTN; PAM sequence: TTT
ccctaagtgtatgtttaaaa

SEQ ID NO: 226689 - DNA, 20 bp, Artificial Sequence
  Description of Artificial Sequence: Synthetic oligonucleotide
  Target: LAMA2; (-) strand; PAM type: YTN; PAM sequence: TTT
tccctaagtgtatgtttaaa

SEQ ID NO: 226690 - DNA, 20 bp, Artificial Sequence
  Description of Artificial Sequence: Synthetic oligonucleotide
  Target: LAMA2; (-) strand; PAM type: YTN; PAM sequence: TTG
ttttccctaagtgtatgttt

SEQ ID NO: 226691 - DNA, 20 bp, Artificial Sequence
  Description of Artificial Sequence: Synthetic oligonucleotide
  Target: LAMA2; (-) strand; PAM type: YTN; PAM sequence: TTT
gttttccctaagtgtatgtt

SEQ ID NO: 226692 - DNA, 20 bp, Artificial Sequence
  Description of Artificial Sequence: Synthetic oligonucleotide
  Target: LAMA2; (-) strand; PAM type: YTN; PAM sequence: TTT
tgttttccctaagtgtatgt

SEQ ID NO: 226693 - DNA, 20 bp, Artificial Sequence
  Description of Artificial Sequence: Synthetic oligonucleotide
  Target: LAMA2; (-) strand; PAM type: YTN; PAM sequence: TTT
ttgttttccctaagtgtatg

SEQ ID NO: 226694 - DNA, 20 bp, Artificial Sequence
  Description of Artificial Sequence: Synthetic oligonucleotide
  Target: LAMA2; (-) strand; PAM type: YTN; PAM sequence: TTG
tttttgttttccctaagtgt

SEQ ID NO: 226695 - DNA, 20 bp, Artificial Sequence
  Description of Artificial Sequence: Synthetic oligonucleotide
  Target: LAMA2; (-) strand; PAM type: YTN; PAM sequence: TTT
gtttttgttttccctaagtg

SEQ ID NO: 226696 - DNA, 20 bp, Artificial Sequence
  Description of Artificial Sequence: Synthetic oligonucleotide
  Target: LAMA2; (-) strand; PAM type: YTN; PAM sequence: TTT
tgtttttgttttccctaagt

SEQ ID NO: 226697 - DNA, 20 bp, Artificial Sequence
  Description of Artificial Sequence: Synthetic oligonucleotide
  Target: LAMA2; (-) strand; PAM type: YTN; PAM sequence: TTT
ttgtttttgttttccctaag

SEQ ID NO: 226698 - DNA, 20 bp, Artificial Sequence
  Description of Artificial Sequence: Synthetic oligonucleotide
  Target: LAMA2; (-) strand; PAM type: YTN; PAM sequence: TTG
tttttgtttttgttttccct

SEQ ID NO: 226699 - DNA, 20 bp, Artificial Sequence
  Description of Artificial Sequence: Synthetic oligonucleotide
  Target: LAMA2; (-) strand; PAM type: YTN; PAM sequence: TTT
gtttttgtttttgttttccc

SEQ ID NO: 226700 - DNA, 20 bp, Artificial Sequence
  Description of Artificial Sequence: Synthetic oligonucleotide
  Target: LAMA2; (-) strand; PAM type: YTN; PAM sequence: TTT
tgtttttgtttttgttttcc

SEQ ID NO: 226701 - DNA, 20 bp, Artificial Sequence
  Description of Artificial Sequence: Synthetic oligonucleotide
  Target: LAMA2; (-) strand; PAM type: YTN; PAM sequence: CTG
caaggcaggtgttttgtttt

SEQ ID NO: 226702 - DNA, 20 bp, Artificial Sequence
  Description of Artificial Sequence: Synthetic oligonucleotide
  Target: LAMA2; (-) strand; PAM type: YTN; PAM sequence: TTC
tgcaaggcaggtgttttgtt

SEQ ID NO: 226703 - DNA, 20 bp, Artificial Sequence
  Description of Artificial Sequence: Synthetic oligonucleotide
  Target: LAMA2; (-) strand; PAM type: YTN; PAM sequence: TTT
ctgcaaggcaggtgttttgt

SEQ ID NO: 226704 - DNA, 20 bp, Artificial Sequence
  Description of Artificial Sequence: Synthetic oligonucleotide
  Target: LAMA2; (-) strand; PAM type: YTN; PAM sequence: CTA
tgacatgtttctgcaaggca

SEQ ID NO: 226705 - DNA, 20 bp, Artificial Sequence
  Description of Artificial Sequence: Synthetic oligonucleotide
  Target: LAMA2; (-) strand; PAM type: YTN; PAM sequence: TTC
tatgacatgtttctgcaagg

SEQ ID NO: 226706 - DNA, 20 bp, Artificial Sequence
  Description of Artificial Sequence: Synthetic oligonucleotide
  Target: LAMA2; (-) strand; PAM type: YTN; PAM sequence: TTT
ctatgacatgtttctgcaag

SEQ ID NO: 226707 - DNA, 20 bp, Artificial Sequence
  Description of Artificial Sequence: Synthetic oligonucleotide
  Target: LAMA2; (-) strand; PAM type: YTN; PAM sequence: CTG
tttctatgacatgtttctgc

SEQ ID NO: 226708 - DNA, 20 bp, Artificial Sequence
  Description of Artificial Sequence: Synthetic oligonucleotide
  Target: LAMA2; (-) strand; PAM type: YTN; PAM sequence: CTA
aaatctgtttctatgacatg

SEQ ID NO: 226709 - DNA, 20 bp, Artificial Sequence
  Description of Artificial Sequence: Synthetic oligonucleotide
  Target: LAMA2; (-) strand; PAM type: YTN; PAM sequence: CTG
cctaaaatctgtttctatga

SEQ ID NO: 226710 - DNA, 20 bp, Artificial Sequence
  Description of Artificial Sequence: Synthetic oligonucleotide
  Target: LAMA2; (-) strand; PAM type: YTN; PAM sequence: TTC
tgcctaaaatctgtttctat

SEQ ID NO: 226711 - DNA, 20 bp, Artificial Sequence
  Description of Artificial Sequence: Synthetic oligonucleotide
  Target: LAMA2; (-) strand; PAM type: YTN; PAM sequence: TTG
tacagggaaataattctgcc

SEQ ID NO: 226712 - DNA, 20 bp, Artificial Sequence
  Description of Artificial Sequence: Synthetic oligonucleotide
  Target: LAMA2; (-) strand; PAM type: YTN; PAM sequence: TTG
ttgtacagggaaataattct

SEQ ID NO: 226713 - DNA, 20 bp, Artificial Sequence
  Description of Artificial Sequence: Synthetic oligonucleotide
  Target: LAMA2; (-) strand; PAM type: YTN; PAM sequence: TTA
atcacaattgttgtacaggg

SEQ ID NO: 226714 - DNA, 20 bp, Artificial Sequence
  Description of Artificial Sequence: Synthetic oligonucleotide
  Target: LAMA2; (-) strand; PAM type: YTN; PAM sequence: CTT
aatcacaattgttgtacagg

SEQ ID NO: 226715 - DNA, 20 bp, Artificial Sequence
  Description of Artificial Sequence: Synthetic oligonucleotide
  Target: LAMA2; (-) strand; PAM type: YTN; PAM sequence: TTA
cttaatcacaattgttgtac

SEQ ID NO: 226716 - DNA, 20 bp, Artificial Sequence
  Description of Artificial Sequence: Synthetic oligonucleotide
  Target: LAMA2; (-) strand; PAM type: YTN; PAM sequence: TTT
acttaatcacaattgttgta

SEQ ID NO: 226717 - DNA, 20 bp, Artificial Sequence
  Description of Artificial Sequence: Synthetic oligonucleotide
  Target: LAMA2; (-) strand; PAM type: YTN; PAM sequence: TTA
acatttacttaatcacaatt

SEQ ID NO: 226718 - DNA, 20 bp, Artificial Sequence
  Description of Artificial Sequence: Synthetic oligonucleotide
  Target: LAMA2; (-) strand; PAM type: YTN; PAM sequence: TTT
aacatttacttaatcacaat

SEQ ID NO: 226719 - DNA, 20 bp, Artificial Sequence
  Description of Artificial Sequence: Synthetic oligonucleotide
  Target: LAMA2; (-) strand; PAM type: YTN; PAM sequence: TTT
taacatttacttaatcacaa

SEQ ID NO: 226720 - DNA, 20 bp, Artificial Sequence
  Description of Artificial Sequence: Synthetic oligonucleotide
  Target: LAMA2; (-) strand; PAM type: YTN; PAM sequence: TTA
ttttaacatttacttaatca

SEQ ID NO: 226721 - DNA, 20 bp, Artificial Sequence
  Description of Artificial Sequence: Synthetic oligonucleotide
  Target: LAMA2; (-) strand; PAM type: YTN; PAM sequence: TTT
attttaacatttacttaatc

SEQ ID NO: 226722 - DNA, 20 bp, Artificial Sequence
  Description of Artificial Sequence: Synthetic oligonucleotide
  Target: LAMA2; (-) strand; PAM type: YTN; PAM sequence: TTT
tattttaacatttacttaat

SEQ ID NO: 226723 - DNA, 20 bp, Artificial Sequence
  Description of Artificial Sequence: Synthetic oligonucleotide
  Target: LAMA2; (-) strand; PAM type: YTN; PAM sequence: TTT
ttattttaacatttacttaa

SEQ ID NO: 226724 - DNA, 20 bp, Artificial Sequence
  Description of Artificial Sequence: Synthetic oligonucleotide
  Target: LAMA2; (-) strand; PAM type: YTN; PAM sequence: CTT
tttattttaacatttactta

SEQ ID NO: 226725 - DNA, 20 bp, Artificial Sequence
  Description of Artificial Sequence: Synthetic oligonucleotide
  Target: LAMA2; (-) strand; PAM type: YTN; PAM sequence: TTC
tttttattttaacatttact

SEQ ID NO: 226726 - DNA, 20 bp, Artificial Sequence
  Description of Artificial Sequence: Synthetic oligonucleotide
  Target: LAMA2; (-) strand; PAM type: YTN; PAM sequence: CTT
ctttttattttaacatttac

SEQ ID NO: 226727 - DNA, 20 bp, Artificial Sequence
  Description of Artificial Sequence: Synthetic oligonucleotide
  Target: LAMA2; (-) strand; PAM type: YTN; PAM sequence: CTA
aacatccttctttttatttt

SEQ ID NO: 226728 - DNA, 20 bp, Artificial Sequence
  Description of Artificial Sequence: Synthetic oligonucleotide
  Target: LAMA2; (-) strand; PAM type: YTN; PAM sequence: CTG
ctaaacatccttctttttat

SEQ ID NO: 226729 - DNA, 20 bp, Artificial Sequence
  Description of Artificial Sequence: Synthetic oligonucleotide
  Target: LAMA2; (-) strand; PAM type: YTN; PAM sequence: TTA
tgctgctaaacatccttctt

SEQ ID NO: 226730 - DNA, 20 bp, Artificial Sequence
  Description of Artificial Sequence: Synthetic oligonucleotide
  Target: LAMA2; (-) strand; PAM type: YTN; PAM sequence: CTT
atgctgctaaacatccttct

SEQ ID NO: 226731 - DNA, 20 bp, Artificial Sequence
  Description of Artificial Sequence: Synthetic oligonucleotide
  Target: LAMA2; (-) strand; PAM type: YTN; PAM sequence: TTC
cttatgctgctaaacatcct

SEQ ID NO: 226732 - DNA, 20 bp, Artificial Sequence
  Description of Artificial Sequence: Synthetic oligonucleotide
  Target: LAMA2; (-) strand; PAM type: YTN; PAM sequence: CTA
ttccttatgctgctaaacat

SEQ ID NO: 226733 - DNA, 20 bp, Artificial Sequence
  Description of Artificial Sequence: Synthetic oligonucleotide
  Target: LAMA2; (-) strand; PAM type: YTN; PAM sequence: TTC
tattccttatgctgctaaac

SEQ ID NO: 226734 - DNA, 20 bp, Artificial Sequence
  Description of Artificial Sequence: Synthetic oligonucleotide
  Target: LAMA2; (-) strand; PAM type: YTN; PAM sequence: TTT
ctattccttatgctgctaaa

SEQ ID NO: 226735 - DNA, 20 bp, Artificial Sequence
  Description of Artificial Sequence: Synthetic oligonucleotide
  Target: LAMA2; (-) strand; PAM type: YTN; PAM sequence: CTC
caaatgtttctattccttat

SEQ ID NO: 226736 - DNA, 20 bp, Artificial Sequence
  Description of Artificial Sequence: Synthetic oligonucleotide
  Target: LAMA2; (-) strand; PAM type: YTN; PAM sequence: CTA
aaactccaaatgtttctatt

SEQ ID NO: 226737 - DNA, 20 bp, Artificial Sequence
  Description of Artificial Sequence: Synthetic oligonucleotide
  Target: LAMA2; (-) strand; PAM type: YTN; PAM sequence: CTA
aagctaaaactccaaatgtt

SEQ ID NO: 226738 - DNA, 20 bp, Artificial Sequence
  Description of Artificial Sequence: Synthetic oligonucleotide
  Target: LAMA2; (-) strand; PAM type: YTN; PAM sequence: TTG
tataagctaaagctaaaact

SEQ ID NO: 226739 - DNA, 20 bp, Artificial Sequence
  Description of Artificial Sequence: Synthetic oligonucleotide
  Target: LAMA2; (-) strand; PAM type: YTN; PAM sequence: TTA
taaaacaggatgcattgtat

SEQ ID NO: 226740 - DNA, 20 bp, Artificial Sequence
  Description of Artificial Sequence: Synthetic oligonucleotide
  Target: LAMA2; (-) strand; PAM type: YTN; PAM sequence: TTG
gaaaacaattataaaacagg

SEQ ID NO: 226741 - DNA, 20 bp, Artificial Sequence
  Description of Artificial Sequence: Synthetic oligonucleotide
  Target: LAMA2; (-) strand; PAM type: YTN; PAM sequence: TTG
ttggaaaacaattataaaac

SEQ ID NO: 226742 - DNA, 20 bp, Artificial Sequence
  Description of Artificial Sequence: Synthetic oligonucleotide
  Target: LAMA2; (-) strand; PAM type: YTN; PAM sequence: TTA
tgtaaacattgttggaaaac

SEQ ID NO: 226743 - DNA, 20 bp, Artificial Sequence
  Description of Artificial Sequence: Synthetic oligonucleotide
  Target: LAMA2; (-) strand; PAM type: YTN; PAM sequence: CTC
ccattatgtaaacattgttg

SEQ ID NO: 226744 - DNA, 20 bp, Artificial Sequence
  Description of Artificial Sequence: Synthetic oligonucleotide
  Target: LAMA2; (-) strand; PAM type: YTN; PAM sequence: TTA
aagagtgaccctcccattat

SEQ ID NO: 226745 - DNA, 20 bp, Artificial Sequence
  Description of Artificial Sequence: Synthetic oligonucleotide
  Target: LAMA2; (-) strand; PAM type: YTN; PAM sequence: CTC
atgttaaagagtgaccctcc

SEQ ID NO: 226746 - DNA, 20 bp, Artificial Sequence
  Description of Artificial Sequence: Synthetic oligonucleotide
  Target: LAMA2; (-) strand; PAM type: YTN; PAM sequence: CTA
gtgacagagcccctcatgtt

SEQ ID NO: 226747 - DNA, 20 bp, Artificial Sequence
  Description of Artificial Sequence: Synthetic oligonucleotide
  Target: LAMA2; (-) strand; PAM type: YTN; PAM sequence: TTC
tagtgacagagcccctcatg

SEQ ID NO: 226748 - DNA, 20 bp, Artificial Sequence
  Description of Artificial Sequence: Synthetic oligonucleotide
  Target: LAMA2; (-) strand; PAM type: YTN; PAM sequence: CTG
caattctagtgacagagccc

SEQ ID NO: 226749 - DNA, 20 bp, Artificial Sequence
  Description of Artificial Sequence: Synthetic oligonucleotide
  Target: LAMA2; (-) strand; PAM type: YTN; PAM sequence: CTA
acacactgcaattctagtga

SEQ ID NO: 226750 - DNA, 20 bp, Artificial Sequence
  Description of Artificial Sequence: Synthetic oligonucleotide
  Target: LAMA2; (-) strand; PAM type: YTN; PAM sequence: CTG
gagaaaatgaggggctaaca

SEQ ID NO: 226751 - DNA, 20 bp, Artificial Sequence
  Description of Artificial Sequence: Synthetic oligonucleotide
  Target: LAMA2; (-) strand; PAM type: YTN; PAM sequence: TTA
caaaaacactggagaaaatg

SEQ ID NO: 226752 - DNA, 20 bp, Artificial Sequence
  Description of Artificial Sequence: Synthetic oligonucleotide
  Target: LAMA2; (-) strand; PAM type: YTN; PAM sequence: TTT
acaaaaacactggagaaaat

SEQ ID NO: 226753 - DNA, 20 bp, Artificial Sequence
  Description of Artificial Sequence: Synthetic oligonucleotide
  Target: LAMA2; (-) strand; PAM type: YTN; PAM sequence: TTG
tcaatggaaagatttacaaa

SEQ ID NO: 226754 - DNA, 20 bp, Artificial Sequence
  Description of Artificial Sequence: Synthetic oligonucleotide
  Target: LAMA2; (-) strand; PAM type: YTN; PAM sequence: TTA
aaagattgtcaatggaaaga

SEQ ID NO: 226755 - DNA, 20 bp, Artificial Sequence
  Description of Artificial Sequence: Synthetic oligonucleotide
  Target: LAMA2; (-) strand; PAM type: YTN; PAM sequence: TTA
ttaaaagattgtcaatggaa

SEQ ID NO: 226756 - DNA, 20 bp, Artificial Sequence
  Description of Artificial Sequence: Synthetic oligonucleotide
  Target: LAMA2; (-) strand; PAM type: YTN; PAM sequence: TTG
gaaattattaaaagattgtc

SEQ ID NO: 226757 - DNA, 20 bp, Artificial Sequence
  Description of Artificial Sequence: Synthetic oligonucleotide
  Target: LAMA2; (-) strand; PAM type: YTN; PAM sequence: TTT
ggaaattattaaaagattgt

SEQ ID NO: 226758 - DNA, 20 bp, Artificial Sequence
  Description of Artificial Sequence: Synthetic oligonucleotide
  Target: LAMA2; (-) strand; PAM type: YTN; PAM sequence: TTT
tggaaattattaaaagattg

SEQ ID NO: 226759 - DNA, 20 bp, Artificial Sequence
  Description of Artificial Sequence: Synthetic oligonucleotide
  Target: LAMA2; (-) strand; PAM type: YTN; PAM sequence: TTG
ttttggaaattattaaaaga

SEQ ID NO: 226760 - DNA, 20 bp, Artificial Sequence
  Description of Artificial Sequence: Synthetic oligonucleotide
  Target: LAMA2; (-) strand; PAM type: YTN; PAM sequence: TTA
cccccgattgttttggaaat

SEQ ID NO: 226761 - DNA, 20 bp, Artificial Sequence
  Description of Artificial Sequence: Synthetic oligonucleotide
  Target: LAMA2; (-) strand; PAM type: YTN; PAM sequence: TTC
gaacattacccccgattgtt

SEQ ID NO: 226762 - DNA, 20 bp, Artificial Sequence
  Description of Artificial Sequence: Synthetic oligonucleotide
  Target: LAMA2; (-) strand; PAM type: YTN; PAM sequence: TTA
gaattcgaacattacccccg

SEQ ID NO: 226763 - DNA, 20 bp, Artificial Sequence
  Description of Artificial Sequence: Synthetic oligonucleotide
  Target: LAMA2; (-) strand; PAM type: YTN; PAM sequence: CTT
agaattcgaacattaccccc

SEQ ID NO: 226764 - DNA, 20 bp, Artificial Sequence
  Description of Artificial Sequence: Synthetic oligonucleotide
  Target: LAMA2; (-) strand; PAM type: YTN; PAM sequence: TTA
tgacaagaacttagaattcg

SEQ ID NO: 226765 - DNA, 20 bp, Artificial Sequence
  Description of Artificial Sequence: Synthetic oligonucleotide
  Target: LAMA2; (-) strand; PAM type: YTN; PAM sequence: TTT
atgacaagaacttagaattc

SEQ ID NO: 226766 - DNA, 20 bp, Artificial Sequence
  Description of Artificial Sequence: Synthetic oligonucleotide
  Target: LAMA2; (-) strand; PAM type: YTN; PAM sequence: TTC
atttatgacaagaacttaga

SEQ ID NO: 226767 - DNA, 20 bp, Artificial Sequence
  Description of Artificial Sequence: Synthetic oligonucleotide
  Target: LAMA2; (-) strand; PAM type: YTN; PAM sequence: TTG
attcatttatgacaagaact

SEQ ID NO: 226768 - DNA, 20 bp, Artificial Sequence
  Description of Artificial Sequence: Synthetic oligonucleotide
  Target: LAMA2; (-) strand; PAM type: YTN; PAM sequence: CTG
gattgattcatttatgacaa

SEQ ID NO: 226769 - DNA, 20 bp, Artificial Sequence
  Description of Artificial Sequence: Synthetic oligonucleotide
  Target: LAMA2; (-) strand; PAM type: YTN; PAM sequence: CTG
ccaactggattgattcattt

SEQ ID NO: 226770 - DNA, 20 bp, Artificial Sequence
  Description of Artificial Sequence: Synthetic oligonucleotide
  Target: LAMA2; (-) strand; PAM type: YTN; PAM sequence: CTC
ctgccaactggattgattca

SEQ ID NO: 226771 - DNA, 20 bp, Artificial Sequence
  Description of Artificial Sequence: Synthetic oligonucleotide
  Target: LAMA2; (-) strand; PAM type: YTN; PAM sequence: CTA
catccatctcctgccaactg

SEQ ID NO: 226772 - DNA, 20 bp, Artificial Sequence
  Description of Artificial Sequence: Synthetic oligonucleotide
  Target: LAMA2; (-) strand; PAM type: YTN; PAM sequence: TTA
gcacggaacaccagcaaaaa

SEQ ID NO: 226773 - DNA, 20 bp, Artificial Sequence
  Description of Artificial Sequence: Synthetic oligonucleotide
  Target: LAMA2; (-) strand; PAM type: YTN; PAM sequence: CTT
agcacggaacaccagcaaaa

SEQ ID NO: 226774 - DNA, 20 bp, Artificial Sequence
  Description of Artificial Sequence: Synthetic oligonucleotide
  Target: LAMA2; (-) strand; PAM type: YTN; PAM sequence: TTC
ttagcacggaacaccagcaa

SEQ ID NO: 226775 - DNA, 20 bp, Artificial Sequence
  Description of Artificial Sequence: Synthetic oligonucleotide
  Target: LAMA2; (-) strand; PAM type: YTN; PAM sequence: TTT
cttagcacggaacaccagca

SEQ ID NO: 226776 - DNA, 20 bp, Artificial Sequence
  Description of Artificial Sequence: Synthetic oligonucleotide
  Target: LAMA2; (-) strand; PAM type: YTN; PAM sequence: TTT
tcttagcacggaacaccagc

SEQ ID NO: 226777 - DNA, 20 bp, Artificial Sequence
  Description of Artificial Sequence: Synthetic oligonucleotide
  Target: LAMA2; (-) strand; PAM type: YTN; PAM sequence: CTT
ttcttagcacggaacaccag

SEQ ID NO: 226778 - DNA, 20 bp, Artificial Sequence
  Description of Artificial Sequence: Synthetic oligonucleotide
  Target: LAMA2; (-) strand; PAM type: YTN; PAM sequence: CTC
aagaaaaatgtgtgtgcttt

SEQ ID NO: 226779 - DNA, 20 bp, Artificial Sequence
  Description of Artificial Sequence: Synthetic oligonucleotide
  Target: LAMA2; (-) strand; PAM type: YTN; PAM sequence: CTC
tcaagaaaaatgtgtgtgct

SEQ ID NO: 226780 - DNA, 20 bp, Artificial Sequence
  Description of Artificial Sequence: Synthetic oligonucleotide
  Target: LAMA2; (-) strand; PAM type: YTN; PAM sequence: CTA
gccatactctcaagaaaaat

SEQ ID NO: 226781 - DNA, 20 bp, Artificial Sequence
  Description of Artificial Sequence: Synthetic oligonucleotide
  Target: LAMA2; (-) strand; PAM type: YTN; PAM sequence: TTC
ggctagccatactctcaaga

SEQ ID NO: 226782 - DNA, 20 bp, Artificial Sequence
  Description of Artificial Sequence: Synthetic oligonucleotide
  Target: LAMA2; (-) strand; PAM type: YTN; PAM sequence: TTT
cggctagccatactctcaag

SEQ ID NO: 226783 - DNA, 20 bp, Artificial Sequence
  Description of Artificial Sequence: Synthetic oligonucleotide
  Target: LAMA2; (-) strand; PAM type: YTN; PAM sequence: TTT
tcggctagccatactctcaa

SEQ ID NO: 226784 - DNA, 20 bp, Artificial Sequence
  Description of Artificial Sequence: Synthetic oligonucleotide
  Target: LAMA2; (-) strand; PAM type: YTN; PAM sequence: CTT
ttcggctagccatactctca

SEQ ID NO: 226785 - DNA, 20 bp, Artificial Sequence
  Description of Artificial Sequence: Synthetic oligonucleotide
  Target: LAMA2; (-) strand; PAM type: YTN; PAM sequence: CTC
agatgcttttcggctagcca

SEQ ID NO: 226786 - DNA, 20 bp, Artificial Sequence
  Description of Artificial Sequence: Synthetic oligonucleotide
  Target: LAMA2; (-) strand; PAM type: YTN; PAM sequence: TTC
tcagatgcttttcggctagc

SEQ ID NO: 226787 - DNA, 20 bp, Artificial Sequence
  Description of Artificial Sequence: Synthetic oligonucleotide
  Target: LAMA2; (-) strand; PAM type: YTN; PAM sequence: TTC
catcaattctcagatgcttt

SEQ ID NO: 226788 - DNA, 20 bp, Artificial Sequence
  Description of Artificial Sequence: Synthetic oligonucleotide
  Target: LAMA2; (-) strand; PAM type: YTN; PAM sequence: TTA
ggattccatcaattctcaga

SEQ ID NO: 226789 - DNA, 20 bp, Artificial Sequence
  Description of Artificial Sequence: Synthetic oligonucleotide
  Target: LAMA2; (-) strand; PAM type: YTN; PAM sequence: CTT
aggattccatcaattctcag

SEQ ID NO: 226790 - DNA, 20 bp, Artificial Sequence
  Description of Artificial Sequence: Synthetic oligonucleotide
  Target: LAMA2; (-) strand; PAM type: YTN; PAM sequence: CTG
ccttaggattccatcaattc

SEQ ID NO: 226791 - DNA, 20 bp, Artificial Sequence
  Description of Artificial Sequence: Synthetic oligonucleotide
  Target: LAMA2; (-) strand; PAM type: YTN; PAM sequence: CTG
tctgccttaggattccatca

SEQ ID NO: 226792 - DNA, 20 bp, Artificial Sequence
  Description of Artificial Sequence: Synthetic oligonucleotide
  Target: LAMA2; (-) strand; PAM type: YTN; PAM sequence: TTC
tgtctgccttaggattccat

SEQ ID NO: 226793 - DNA, 20 bp, Artificial Sequence
  Description of Artificial Sequence: Synthetic oligonucleotide
  Target: LAMA2; (-) strand; PAM type: YTN; PAM sequence: TTT
ctgtctgccttaggattcca

SEQ ID NO: 226794 - DNA, 20 bp, Artificial Sequence
  Description of Artificial Sequence: Synthetic oligonucleotide
  Target: LAMA2; (-) strand; PAM type: YTN; PAM sequence: TTG
gcgtttctgtctgccttagg

SEQ ID NO: 226795 - DNA, 20 bp, Artificial Sequence
  Description of Artificial Sequence: Synthetic oligonucleotide
  Target: LAMA2; (-) strand; PAM type: YTN; PAM sequence: TTT
ggcgtttctgtctgccttag

SEQ ID NO: 226796 - DNA, 20 bp, Artificial Sequence
  Description of Artificial Sequence: Synthetic oligonucleotide
  Target: LAMA2; (-) strand; PAM type: YTN; PAM sequence: TTT
tggcgtttctgtctgcctta

SEQ ID NO: 226797 - DNA, 20 bp, Artificial Sequence
  Description of Artificial Sequence: Synthetic oligonucleotide
  Target: LAMA2; (-) strand; PAM type: YTN; PAM sequence: CTT
ttggcgtttctgtctgcctt

SEQ ID NO: 226798 - DNA, 20 bp, Artificial Sequence
  Description of Artificial Sequence: Synthetic oligonucleotide
  Target: LAMA2; (-) strand; PAM type: YTN; PAM sequence: TTG
acttttggcgtttctgtctg

SEQ ID NO: 226799 - DNA, 20 bp, Artificial Sequence
  Description of Artificial Sequence: Synthetic oligonucleotide
  Target: LAMA2; (-) strand; PAM type: YTN; PAM sequence: CTT
gacttttggcgtttctgtct

SEQ ID NO: 226800 - DNA, 20 bp, Artificial Sequence
  Description of Artificial Sequence: Synthetic oligonucleotide
  Target: LAMA2; (-) strand; PAM type: YTN; PAM sequence: TTA
cttgacttttggcgtttctg

SEQ ID NO: 226801 - DNA, 20 bp, Artificial Sequence
  Description of Artificial Sequence: Synthetic oligonucleotide
  Target: LAMA2; (-) strand; PAM type: YTN; PAM sequence: CTG
gagacaaaaccagttacttg

SEQ ID NO: 226802 - DNA, 20 bp, Artificial Sequence
  Description of Artificial Sequence: Synthetic oligonucleotide
  Target: LAMA2; (-) strand; PAM type: YTN; PAM sequence: CTG
taagtgctggagacaaaacc

SEQ ID NO: 226803 - DNA, 20 bp, Artificial Sequence
  Description of Artificial Sequence: Synthetic oligonucleotide
  Target: LAMA2; (-) strand; PAM type: YTN; PAM sequence: CTA
gtagagggtatgtcatggca

SEQ ID NO: 226804 - DNA, 20 bp, Artificial Sequence
  Description of Artificial Sequence: Synthetic oligonucleotide
  Target: LAMA2; (-) strand; PAM type: YTN; PAM sequence: TTA
actagtagagggtatgtcat

SEQ ID NO: 226805 - DNA, 20 bp, Artificial Sequence
  Description of Artificial Sequence: Synthetic oligonucleotide
  Target: LAMA2; (-) strand; PAM type: YTN; PAM sequence: TTA
atggaattaactagtagagg

SEQ ID NO: 226806 - DNA, 20 bp, Artificial Sequence
  Description of Artificial Sequence: Synthetic oligonucleotide
  Target: LAMA2; (-) strand; PAM type: YTN; PAM sequence: CTT
aatggaattaactagtagag

SEQ ID NO: 226807 - DNA, 20 bp, Artificial Sequence
  Description of Artificial Sequence: Synthetic oligonucleotide
  Target: LAMA2; (-) strand; PAM type: YTN; PAM sequence: TTG
cttaatggaattaactagta

SEQ ID NO: 226808 - DNA, 20 bp, Artificial Sequence
  Description of Artificial Sequence: Synthetic oligonucleotide
  Target: LAMA2; (-) strand; PAM type: YTN; PAM sequence: TTA
aatggcccatgttgcttaat

SEQ ID NO: 226809 - DNA, 20 bp, Artificial Sequence
  Description of Artificial Sequence: Synthetic oligonucleotide
  Target: LAMA2; (-) strand; PAM type: YTN; PAM sequence: TTT
aaatggcccatgttgcttaa

SEQ ID NO: 226810 - DNA, 20 bp, Artificial Sequence
  Description of Artificial Sequence: Synthetic oligonucleotide
  Target: LAMA2; (-) strand; PAM type: YTN; PAM sequence: CTA
tatttaaatggcccatgttg

SEQ ID NO: 226811 - DNA, 20 bp, Artificial Sequence
  Description of Artificial Sequence: Synthetic oligonucleotide
  Target: LAMA2; (-) strand; PAM type: YTN; PAM sequence: TTG
cctatatttaaatggcccat

SEQ ID NO: 226812 - DNA, 20 bp, Artificial Sequence
  Description of Artificial Sequence: Synthetic oligonucleotide
  Target: LAMA2; (-) strand; PAM type: YTN; PAM sequence: TTT
gcctatatttaaatggccca

SEQ ID NO: 226813 - DNA, 20 bp, Artificial Sequence
  Description of Artificial Sequence: Synthetic oligonucleotide
  Target: LAMA2; (-) strand; PAM type: YTN; PAM sequence: TTT
tgcctatatttaaatggccc

SEQ ID NO: 226814 - DNA, 20 bp, Artificial Sequence
  Description of Artificial Sequence: Synthetic oligonucleotide
  Target: LAMA2; (-) strand; PAM type: YTN; PAM sequence: TTG
ttttgcctatatttaaatgg

SEQ ID NO: 226815 - DNA, 20 bp, Artificial Sequence
  Description of Artificial Sequence: Synthetic oligonucleotide
  Target: LAMA2; (-) strand; PAM type: YTN; PAM sequence: TTG
ttgttttgcctatatttaaa

SEQ ID NO: 226816 - DNA, 20 bp, Artificial Sequence
  Description of Artificial Sequence: Synthetic oligonucleotide
  Target: LAMA2; (-) strand; PAM type: YTN; PAM sequence: TTG
ttgttgttttgcctatattt

SEQ ID NO: 226817 - DNA, 20 bp, Artificial Sequence
  Description of Artificial Sequence: Synthetic oligonucleotide
  Target: LAMA2; (-) strand; PAM type: YTN; PAM sequence: TTT
gttgttgttttgcctatatt

SEQ ID NO: 226818 - DNA, 20 bp, Artificial Sequence
  Description of Artificial Sequence: Synthetic oligonucleotide
  Target: LAMA2; (-) strand; PAM type: YTN; PAM sequence: TTT
tgttgttgttttgcctatat

SEQ ID NO: 226819 - DNA, 20 bp, Artificial Sequence
  Description of Artificial Sequence: Synthetic oligonucleotide
  Target: LAMA2; (-) strand; PAM type: YTN; PAM sequence: TTG
ttttgttgttgttttgccta

SEQ ID NO: 226820 - DNA, 20 bp, Artificial Sequence
  Description of Artificial Sequence: Synthetic oligonucleotide
  Target: LAMA2; (-) strand; PAM type: YTN; PAM sequence: TTT
gttttgttgttgttttgcct

SEQ ID NO: 226821 - DNA, 20 bp, Artificial Sequence
  Description of Artificial Sequence: Synthetic oligonucleotide
  Target: LAMA2; (-) strand; PAM type: YTN; PAM sequence: CTT
tgttttgttgttgttttgcc

SEQ ID NO: 226822 - DNA, 20 bp, Artificial Sequence
  Description of Artificial Sequence: Synthetic oligonucleotide
  Target: LAMA2; (-) strand; PAM type: YTN; PAM sequence: TTG
ctttgttttgttgttgtttt

SEQ ID NO: 226823 - DNA, 20 bp, Artificial Sequence
  Description of Artificial Sequence: Synthetic oligonucleotide
  Target: LAMA2; (-) strand; PAM type: YTN; PAM sequence: TTT
gctttgttttgttgttgttt

SEQ ID NO: 226824 - DNA, 20 bp, Artificial Sequence
  Description of Artificial Sequence: Synthetic oligonucleotide
  Target: LAMA2; (-) strand; PAM type: YTN; PAM sequence: TTG
tttgctttgttttgttgttg

SEQ ID NO: 226825 - DNA, 20 bp, Artificial Sequence
  Description of Artificial Sequence: Synthetic oligonucleotide
  Target: LAMA2; (-) strand; PAM type: YTN; PAM sequence: CTT
gtttgctttgttttgttgtt

SEQ ID NO: 226826 - DNA, 20 bp, Artificial Sequence
  Description of Artificial Sequence: Synthetic oligonucleotide
  Target: LAMA2; (-) strand; PAM type: YTN; PAM sequence: TTA
cttgtttgctttgttttgtt

SEQ ID NO: 226827 - DNA, 20 bp, Artificial Sequence
  Description of Artificial Sequence: Synthetic oligonucleotide
  Target: LAMA2; (-) strand; PAM type: YTN; PAM sequence: TTT
acttgtttgctttgttttgt

SEQ ID NO: 226828 - DNA, 20 bp, Artificial Sequence
  Description of Artificial Sequence: Synthetic oligonucleotide
  Target: LAMA2; (-) strand; PAM type: YTN; PAM sequence: TTT
tacttgtttgctttgttttg

SEQ ID NO: 226829 - DNA, 20 bp, Artificial Sequence
  Description of Artificial Sequence: Synthetic oligonucleotide
  Target: LAMA2; (-) strand; PAM type: YTN; PAM sequence: TTT
ttacttgtttgctttgtttt

SEQ ID NO: 226830 - DNA, 20 bp, Artificial Sequence
  Description of Artificial Sequence: Synthetic oligonucleotide
  Target: LAMA2; (-) strand; PAM type: YTN; PAM sequence: CTG
tggtcacagagtttttactt

SEQ ID NO: 226831 - DNA, 20 bp, Artificial Sequence
  Description of Artificial Sequence: Synthetic oligonucleotide
  Target: LAMA2; (-) strand; PAM type: YTN; PAM sequence: TTC
tgtggtcacagagtttttac

SEQ ID NO: 226832 - DNA, 20 bp, Artificial Sequence
  Description of Artificial Sequence: Synthetic oligonucleotide
  Target: LAMA2; (-) strand; PAM type: YTN; PAM sequence: TTT
ctgtggtcacagagttttta

SEQ ID NO: 226833 - DNA, 20 bp, Artificial Sequence
  Description of Artificial Sequence: Synthetic oligonucleotide
  Target: LAMA2; (-) strand; PAM type: YTN; PAM sequence: CTT
tctgtggtcacagagttttt

SEQ ID NO: 226834 - DNA, 20 bp, Artificial Sequence
  Description of Artificial Sequence: Synthetic oligonucleotide
  Target: LAMA2; (-) strand; PAM type: YTN; PAM sequence: CTC
tttctgtggtcacagagttt

SEQ ID NO: 226835 - DNA, 20 bp, Artificial Sequence
  Description of Artificial Sequence: Synthetic oligonucleotide
  Target: LAMA2; (-) strand; PAM type: YTN; PAM sequence: TTA
caggctctttctgtggtcac

SEQ ID NO: 226836 - DNA, 20 bp, Artificial Sequence
  Description of Artificial Sequence: Synthetic oligonucleotide
  Target: LAMA2; (-) strand; PAM type: YTN; PAM sequence: CTA
tgttacaggctctttctgtg

SEQ ID NO: 226837 - DNA, 20 bp, Artificial Sequence
  Description of Artificial Sequence: Synthetic oligonucleotide
  Target: LAMA2; (-) strand; PAM type: YTN; PAM sequence: CTG
tctatgttacaggctctttc

SEQ ID NO: 226838 - DNA, 20 bp, Artificial Sequence
  Description of Artificial Sequence: Synthetic oligonucleotide
  Target: LAMA2; (-) strand; PAM type: YTN; PAM sequence: TTC
tgtctatgttacaggctctt

SEQ ID NO: 226839 - DNA, 20 bp, Artificial Sequence
  Description of Artificial Sequence: Synthetic oligonucleotide
  Target: LAMA2; (-) strand; PAM type: YTN; PAM sequence: CTT
ctgtctatgttacaggctct

SEQ ID NO: 226840 - DNA, 20 bp, Artificial Sequence
  Description of Artificial Sequence: Synthetic oligonucleotide
  Target: LAMA2; (-) strand; PAM type: YTN; PAM sequence: TTG
tagtcttctgtctatgttac

SEQ ID NO: 226841 - DNA, 20 bp, Artificial Sequence
  Description of Artificial Sequence: Synthetic oligonucleotide
  Target: LAMA2; (-) strand; PAM type: YTN; PAM sequence: TTT
gtagtcttctgtctatgtta

SEQ ID NO: 226842 - DNA, 20 bp, Artificial Sequence
  Description of Artificial Sequence: Synthetic oligonucleotide
  Target: LAMA2; (-) strand; PAM type: YTN; PAM sequence: CTA
tttgtagtcttctgtctatg

SEQ ID NO: 226843 - DNA, 20 bp, Artificial Sequence
  Description of Artificial Sequence: Synthetic oligonucleotide
  Target: LAMA2; (-) strand; PAM type: YTN; PAM sequence: CTA
agaacactatttgtagtctt

SEQ ID NO: 226844 - DNA, 20 bp, Artificial Sequence
  Description of Artificial Sequence: Synthetic oligonucleotide
  Target: LAMA2; (-) strand; PAM type: YTN; PAM sequence: TTC
taagaacactatttgtagtc

SEQ ID NO: 226845 - DNA, 20 bp, Artificial Sequence
  Description of Artificial Sequence: Synthetic oligonucleotide
  Target: LAMA2; (-) strand; PAM type: YTN; PAM sequence: CTT
ctaagaacactatttgtagt

SEQ ID NO: 226846 - DNA, 20 bp, Artificial Sequence
  Description of Artificial Sequence: Synthetic oligonucleotide
  Target: LAMA2; (-) strand; PAM type: YTN; PAM sequence: TTA
tcttctaagaacactatttg

SEQ ID NO: 226847 - DNA, 20 bp, Artificial Sequence
  Description of Artificial Sequence: Synthetic oligonucleotide
  Target: LAMA2; (-) strand; PAM type: YTN; PAM sequence: TTT
atcttctaagaacactattt

SEQ ID NO: 226848 - DNA, 20 bp, Artificial Sequence
  Description of Artificial Sequence: Synthetic oligonucleotide
  Target: LAMA2; (-) strand; PAM type: YTN; PAM sequence: TTA
atgatttatcttctaagaac

SEQ ID NO: 226849 - DNA, 20 bp, Artificial Sequence
  Description of Artificial Sequence: Synthetic oligonucleotide
  Target: LAMA2; (-) strand; PAM type: YTN; PAM sequence: CTT
aatgatttatcttctaagaa

SEQ ID NO: 226850 - DNA, 20 bp, Artificial Sequence
  Description of Artificial Sequence: Synthetic oligonucleotide
  Target: LAMA2; (-) strand; PAM type: YTN; PAM sequence: CTG
tcttaatgatttatcttcta

SEQ ID NO: 226851 - DNA, 20 bp, Artificial Sequence
  Description of Artificial Sequence: Synthetic oligonucleotide
  Target: LAMA2; (-) strand; PAM type: YTN; PAM sequence: CTA
ctgtcttaatgatttatctt

SEQ ID NO: 226852 - DNA, 20 bp, Artificial Sequence
  Description of Artificial Sequence: Synthetic oligonucleotide
  Target: LAMA2; (-) strand; PAM type: YTN; PAM sequence: TTG
ctactgtcttaatgatttat

SEQ ID NO: 226853 - DNA, 20 bp, Artificial Sequence
  Description of Artificial Sequence: Synthetic oligonucleotide
  Target: LAMA2; (-) strand; PAM type: YTN; PAM sequence: TTT
gctactgtcttaatgattta

SEQ ID NO: 226854 - DNA, 20 bp, Artificial Sequence
  Description of Artificial Sequence: Synthetic oligonucleotide
  Target: LAMA2; (-) strand; PAM type: YTN; PAM sequence: TTT
tgctactgtcttaatgattt

SEQ ID NO: 226855 - DNA, 20 bp, Artificial Sequence
  Description of Artificial Sequence: Synthetic oligonucleotide
  Target: LAMA2; (-) strand; PAM type: YTN; PAM sequence: CTC
attttgctactgtcttaatg

SEQ ID NO: 226856 - DNA, 20 bp, Artificial Sequence
  Description of Artificial Sequence: Synthetic oligonucleotide
  Target: LAMA2; (-) strand; PAM type: YTN; PAM sequence: TTC
tcattttgctactgtcttaa

SEQ ID NO: 226857 - DNA, 20 bp, Artificial Sequence
  Description of Artificial Sequence: Synthetic oligonucleotide
  Target: LAMA2; (-) strand; PAM type: YTN; PAM sequence: CTT
ctcattttgctactgtctta

SEQ ID NO: 226858 - DNA, 20 bp, Artificial Sequence
  Description of Artificial Sequence: Synthetic oligonucleotide
  Target: LAMA2; (-) strand; PAM type: YTN; PAM sequence: TTC
cttctcattttgctactgtc

SEQ ID NO: 226859 - DNA, 20 bp, Artificial Sequence
  Description of Artificial Sequence: Synthetic oligonucleotide
  Target: LAMA2; (-) strand; PAM type: YTN; PAM sequence: CTA
ttccttctcattttgctact

SEQ ID NO: 226860 - DNA, 20 bp, Artificial Sequence
  Description of Artificial Sequence: Synthetic oligonucleotide
  Target: LAMA2; (-) strand; PAM type: YTN; PAM sequence: TTG
cccaggacactattccttct

SEQ ID NO: 226861 - DNA, 20 bp, Artificial Sequence
  Description of Artificial Sequence: Synthetic oligonucleotide
  Target: LAMA2; (-) strand; PAM type: YTN; PAM sequence: TTA
tgttgcccaggacactattc

SEQ ID NO: 226862 - DNA, 20 bp, Artificial Sequence
  Description of Artificial Sequence: Synthetic oligonucleotide
  Target: LAMA2; (-) strand; PAM type: YTN; PAM sequence: TTT
atgttgcccaggacactatt

SEQ ID NO: 226863 - DNA, 20 bp, Artificial Sequence
  Description of Artificial Sequence: Synthetic oligonucleotide
  Target: LAMA2; (-) strand; PAM type: YTN; PAM sequence: CTT
tatgttgcccaggacactat

SEQ ID NO: 226864 - DNA, 20 bp, Artificial Sequence
  Description of Artificial Sequence: Synthetic oligonucleotide
  Target: LAMA2; (-) strand; PAM type: YTN; PAM sequence: TTG
tgcaggtagaagggtacaca

SEQ ID NO: 226865 - DNA, 20 bp, Artificial Sequence
  Description of Artificial Sequence: Synthetic oligonucleotide
  Target: LAMA2; (-) strand; PAM type: YTN; PAM sequence: TTT
gtgcaggtagaagggtacac

SEQ ID NO: 226866 - DNA, 20 bp, Artificial Sequence
  Description of Artificial Sequence: Synthetic oligonucleotide
  Target: LAMA2; (-) strand; PAM type: YTN; PAM sequence: TTG
agtgtttgtgcaggtagaag

SEQ ID NO: 226867 - DNA, 20 bp, Artificial Sequence
  Description of Artificial Sequence: Synthetic oligonucleotide
  Target: LAMA2; (-) strand; PAM type: YTN; PAM sequence: TTC
agttgagtgtttgtgcaggt

SEQ ID NO: 226868 - DNA, 20 bp, Artificial Sequence
  Description of Artificial Sequence: Synthetic oligonucleotide
  Target: LAMA2; (-) strand; PAM type: YTN; PAM sequence: TTT
cagttgagtgtttgtgcagg

SEQ ID NO: 226869 - DNA, 20 bp, Artificial Sequence
  Description of Artificial Sequence: Synthetic oligonucleotide
  Target: LAMA2; (-) strand; PAM type: YTN; PAM sequence: TTG
gcaaatttcagttgagtgtt

SEQ ID NO: 226870 - DNA, 20 bp, Artificial Sequence
  Description of Artificial Sequence: Synthetic oligonucleotide
  Target: LAMA2; (-) strand; PAM type: YTN; PAM sequence: CTT
ggcaaatttcagttgagtgt

SEQ ID NO: 226871 - DNA, 20 bp, Artificial Sequence
  Description of Artificial Sequence: Synthetic oligonucleotide
  Target: LAMA2; (-) strand; PAM type: YTN; PAM sequence: CTA
gtgagccttggcaaatttca

SEQ ID NO: 226872 - DNA, 20 bp, Artificial Sequence
  Description of Artificial Sequence: Synthetic oligonucleotide
  Target: LAMA2; (-) strand; PAM type: YTN; PAM sequence: CTC
aaagacactagtgagccttg

SEQ ID NO: 226873 - DNA, 20 bp, Artificial Sequence
  Description of Artificial Sequence: Synthetic oligonucleotide
  Target: LAMA2; (-) strand; PAM type: YTN; PAM sequence: CTA
gggtgcctcaaagacactag

SEQ ID NO: 226874 - DNA, 20 bp, Artificial Sequence
  Description of Artificial Sequence: Synthetic oligonucleotide
  Target: LAMA2; (-) strand; PAM type: YTN; PAM sequence: CTC
tagggtgcctcaaagacact

SEQ ID NO: 226875 - DNA, 20 bp, Artificial Sequence
  Description of Artificial Sequence: Synthetic oligonucleotide
  Target: LAMA2; (-) strand; PAM type: YTN; PAM sequence: CTC
tctagggtgcctcaaagaca

SEQ ID NO: 226876 - DNA, 20 bp, Artificial Sequence
  Description of Artificial Sequence: Synthetic oligonucleotide
  Target: LAMA2; (-) strand; PAM type: YTN; PAM sequence: CTC
ccctctctagggtgcctcaa

SEQ ID NO: 226877 - DNA, 20 bp, Artificial Sequence
  Description of Artificial Sequence: Synthetic oligonucleotide
  Target: LAMA2; (-) strand; PAM type: YTN; PAM sequence: CTA
gcctcccctctctagggtgc

SEQ ID NO: 226878 - DNA, 20 bp, Artificial Sequence
  Description of Artificial Sequence: Synthetic oligonucleotide
  Target: LAMA2; (-) strand; PAM type: YTN; PAM sequence: TTC
tagcctcccctctctagggt

SEQ ID NO: 226879 - DNA, 20 bp, Artificial Sequence
  Description of Artificial Sequence: Synthetic oligonucleotide
  Target: LAMA2; (-) strand; PAM type: YTN; PAM sequence: TTT
ctagcctcccctctctaggg

SEQ ID NO: 226880 - DNA, 20 bp, Artificial Sequence
  Description of Artificial Sequence: Synthetic oligonucleotide
  Target: LAMA2; (-) strand; PAM type: YTN; PAM sequence: TTA
tttctagcctcccctctcta

SEQ ID NO: 226881 - DNA, 20 bp, Artificial Sequence
  Description of Artificial Sequence: Synthetic oligonucleotide
  Target: LAMA2; (-) strand; PAM type: YTN; PAM sequence: CTG
aggatgatggttatttctag

SEQ ID NO: 226882 - DNA, 20 bp, Artificial Sequence
  Description of Artificial Sequence: Synthetic oligonucleotide
  Target: LAMA2; (-) strand; PAM type: YTN; PAM sequence: TTA
ccatggaacagctgaggatg

SEQ ID NO: 226883 - DNA, 20 bp, Artificial Sequence
  Description of Artificial Sequence: Synthetic oligonucleotide
  Target: LAMA2; (-) strand; PAM type: YTN; PAM sequence: CTT
accatggaacagctgaggat

SEQ ID NO: 226884 - DNA, 20 bp, Artificial Sequence
  Description of Artificial Sequence: Synthetic oligonucleotide
  Target: LAMA2; (-) strand; PAM type: YTN; PAM sequence: CTA
gtgtagggccttaccatgga

SEQ ID NO: 226885 - DNA, 20 bp, Artificial Sequence
  Description of Artificial Sequence: Synthetic oligonucleotide
  Target: LAMA2; (-) strand; PAM type: YTN; PAM sequence: CTG
agtcctagtgtagggcctta

SEQ ID NO: 226886 - DNA, 20 bp, Artificial Sequence
  Description of Artificial Sequence: Synthetic oligonucleotide
  Target: LAMA2; (-) strand; PAM type: YTN; PAM sequence: CTC
tgagtcctagtgtagggcct

SEQ ID NO: 226887 - DNA, 20 bp, Artificial Sequence
  Description of Artificial Sequence: Synthetic oligonucleotide
  Target: LAMA2; (-) strand; PAM type: YTN; PAM sequence: CTC
ctctgagtcctagtgtaggg

SEQ ID NO: 226888 - DNA, 20 bp, Artificial Sequence
  Description of Artificial Sequence: Synthetic oligonucleotide
  Target: LAMA2; (-) strand; PAM type: YTN; PAM sequence: CTC
tcctctgagtcctagtgtag

SEQ ID NO: 226889 - DNA, 20 bp, Artificial Sequence
  Description of Artificial Sequence: Synthetic oligonucleotide
  Target: LAMA2; (-) strand; PAM type: YTN; PAM sequence: CTA
tctctcctctgagtcctagt

SEQ ID NO: 226890 - DNA, 20 bp, Artificial Sequence
  Description of Artificial Sequence: Synthetic oligonucleotide
  Target: LAMA2; (-) strand; PAM type: YTN; PAM sequence: TTC
caaactatctctcctctgag

SEQ ID NO: 226891 - DNA, 20 bp, Artificial Sequence
  Description of Artificial Sequence: Synthetic oligonucleotide
  Target: LAMA2; (-) strand; PAM type: YTN; PAM sequence: CTG
atagggataaaatgttccaa

SEQ ID NO: 226892 - DNA, 20 bp, Artificial Sequence
  Description of Artificial Sequence: Synthetic oligonucleotide
  Target: LAMA2; (-) strand; PAM type: YTN; PAM sequence: TTC
cactgatagggataaaatgt

SEQ ID NO: 226893 - DNA, 20 bp, Artificial Sequence
  Description of Artificial Sequence: Synthetic oligonucleotide
  Target: LAMA2; (-) strand; PAM type: YTN; PAM sequence: TTT
ccactgatagggataaaatg

SEQ ID NO: 226894 - DNA, 20 bp, Artificial Sequence
  Description of Artificial Sequence: Synthetic oligonucleotide
  Target: LAMA2; (-) strand; PAM type: YTN; PAM sequence: TTT
tccactgatagggataaaat

SEQ ID NO: 226895 - DNA, 20 bp, Artificial Sequence
  Description of Artificial Sequence: Synthetic oligonucleotide
  Target: LAMA2; (-) strand; PAM type: YTN; PAM sequence: CTA
ttttccactgatagggataa

SEQ ID NO: 226896 - DNA, 20 bp, Artificial Sequence
  Description of Artificial Sequence: Synthetic oligonucleotide
  Target: LAMA2; (-) strand; PAM type: YTN; PAM sequence: CTG
tgctattttccactgatagg

SEQ ID NO: 226897 - DNA, 20 bp, Artificial Sequence
  Description of Artificial Sequence: Synthetic oligonucleotide
  Target: LAMA2; (-) strand; PAM type: YTN; PAM sequence: TTA
ggcaccaactgtgctatttt

SEQ ID NO: 226898 - DNA, 20 bp, Artificial Sequence
  Description of Artificial Sequence: Synthetic oligonucleotide
  Target: LAMA2; (-) strand; PAM type: YTN; PAM sequence: TTC
aacgaaaggaagttaggcac

SEQ ID NO: 226899 - DNA, 20 bp, Artificial Sequence
  Description of Artificial Sequence: Synthetic oligonucleotide
  Target: LAMA2; (-) strand; PAM type: YTN; PAM sequence: TTT
caacgaaaggaagttaggca

SEQ ID NO: 226900 - DNA, 20 bp, Artificial Sequence
  Description of Artificial Sequence: Synthetic oligonucleotide
  Target: LAMA2; (-) strand; PAM type: YTN; PAM sequence: TTT
tcaacgaaaggaagttaggc

SEQ ID NO: 226901 - DNA, 20 bp, Artificial Sequence
  Description of Artificial Sequence: Synthetic oligonucleotide
  Target: LAMA2; (-) strand; PAM type: YTN; PAM sequence: TTA
ttttcaacgaaaggaagtta

SEQ ID NO: 226902 - DNA, 20 bp, Artificial Sequence
  Description of Artificial Sequence: Synthetic oligonucleotide
  Target: LAMA2; (-) strand; PAM type: YTN; PAM sequence: CTG
tgttattttcaacgaaagga

SEQ ID NO: 226903 - DNA, 20 bp, Artificial Sequence
  Description of Artificial Sequence: Synthetic oligonucleotide
  Target: LAMA2; (-) strand; PAM type: YTN; PAM sequence: TTA
cctgtgttattttcaacgaa

SEQ ID NO: 226904 - DNA, 20 bp, Artificial Sequence
  Description of Artificial Sequence: Synthetic oligonucleotide
  Target: LAMA2; (-) strand; PAM type: YTN; PAM sequence: CTA
aaaaattacctgtgttattt

SEQ ID NO: 226905 - DNA, 20 bp, Artificial Sequence
  Description of Artificial Sequence: Synthetic oligonucleotide
  Target: LAMA2; (-) strand; PAM type: YTN; PAM sequence: TTG
gctaaaaaattacctgtgtt

SEQ ID NO: 226906 - DNA, 20 bp, Artificial Sequence
  Description of Artificial Sequence: Synthetic oligonucleotide
  Target: LAMA2; (-) strand; PAM type: YTN; PAM sequence: TTT
ggctaaaaaattacctgtgt

SEQ ID NO: 226907 - DNA, 20 bp, Artificial Sequence
  Description of Artificial Sequence: Synthetic oligonucleotide
  Target: LAMA2; (-) strand; PAM type: YTN; PAM sequence: CTC
atttggctaaaaaattacct

SEQ ID NO: 226908 - DNA, 20 bp, Artificial Sequence
  Description of Artificial Sequence: Synthetic oligonucleotide
  Target: LAMA2; (-) strand; PAM type: YTN; PAM sequence: TTG
ataaaaatctcatttggcta

SEQ ID NO: 226909 - DNA, 20 bp, Artificial Sequence
  Description of Artificial Sequence: Synthetic oligonucleotide
  Target: LAMA2; (-) strand; PAM type: YTN; PAM sequence: TTT
gataaaaatctcatttggct

SEQ ID NO: 226910 - DNA, 20 bp, Artificial Sequence
  Description of Artificial Sequence: Synthetic oligonucleotide
  Target: LAMA2; (-) strand; PAM type: YTN; PAM sequence: TTT
tgataaaaatctcatttggc

SEQ ID NO: 226911 - DNA, 20 bp, Artificial Sequence
  Description of Artificial Sequence: Synthetic oligonucleotide
  Target: LAMA2; (-) strand; PAM type: YTN; PAM sequence: TTT
ttgataaaaatctcatttgg

SEQ ID NO: 226912 - DNA, 20 bp, Artificial Sequence
  Description of Artificial Sequence: Synthetic oligonucleotide
  Target: LAMA2; (-) strand; PAM type: YTN; PAM sequence: TTT
tttgataaaaatctcatttg

SEQ ID NO: 226913 - DNA, 20 bp, Artificial Sequence
  Description of Artificial Sequence: Synthetic oligonucleotide
  Target: LAMA2; (-) strand; PAM type: YTN; PAM sequence: CTT
ttttgataaaaatctcattt

SEQ ID NO: 226914 - DNA, 20 bp, Artificial Sequence
  Description of Artificial Sequence: Synthetic oligonucleotide
  Target: LAMA2; (-) strand; PAM type: YTN; PAM sequence: TTG
cttttttgataaaaatctca

SEQ ID NO: 226915 - DNA, 20 bp, Artificial Sequence
  Description of Artificial Sequence: Synthetic oligonucleotide
  Target: LAMA2; (-) strand; PAM type: YTN; PAM sequence: CTT
gcttttttgataaaaatctc

SEQ ID NO: 226916 - DNA, 20 bp, Artificial Sequence
  Description of Artificial Sequence: Synthetic oligonucleotide
  Target: LAMA2; (-) strand; PAM type: YTN; PAM sequence: TTG
cttgcttttttgataaaaat

SEQ ID NO: 226917 - DNA, 20 bp, Artificial Sequence
  Description of Artificial Sequence: Synthetic oligonucleotide
  Target: LAMA2; (-) strand; PAM type: YTN; PAM sequence: TTT
gcttgcttttttgataaaaa

SEQ ID NO: 226918 - DNA, 20 bp, Artificial Sequence
  Description of Artificial Sequence: Synthetic oligonucleotide
  Target: LAMA2; (-) strand; PAM type: YTN; PAM sequence: CTT
tgcttgcttttttgataaaa

SEQ ID NO: 226919 - DNA, 20 bp, Artificial Sequence
  Description of Artificial Sequence: Synthetic oligonucleotide
  Target: LAMA2; (-) strand; PAM type: YTN; PAM sequence: CTG
cctttgcttgcttttttgat

SEQ ID NO: 226920 - DNA, 20 bp, Artificial Sequence
  Description of Artificial Sequence: Synthetic oligonucleotide
  Target: LAMA2; (-) strand; PAM type: YTN; PAM sequence: TTC
tgcctttgcttgcttttttg

SEQ ID NO: 226921 - DNA, 20 bp, Artificial Sequence
  Description of Artificial Sequence: Synthetic oligonucleotide
  Target: LAMA2; (-) strand; PAM type: YTN; PAM sequence: TTC
acattctgcctttgcttgct

SEQ ID NO: 226922 - DNA, 20 bp, Artificial Sequence
  Description of Artificial Sequence: Synthetic oligonucleotide
  Target: LAMA2; (-) strand; PAM type: YTN; PAM sequence: TTT
cacattctgcctttgcttgc

SEQ ID NO: 226923 - DNA, 20 bp, Artificial Sequence
  Description of Artificial Sequence: Synthetic oligonucleotide
  Target: LAMA2; (-) strand; PAM type: YTN; PAM sequence: TTT
tcacattctgcctttgcttg

SEQ ID NO: 226924 - DNA, 20 bp, Artificial Sequence
  Description of Artificial Sequence: Synthetic oligonucleotide
  Target: LAMA2; (-) strand; PAM type: YTN; PAM sequence: CTT
ttcacattctgcctttgctt

SEQ ID NO: 226925 - DNA, 20 bp, Artificial Sequence
  Description of Artificial Sequence: Synthetic oligonucleotide
  Target: LAMA2; (-) strand; PAM type: YTN; PAM sequence: CTC
cttttcacattctgcctttg

SEQ ID NO: 226926 - DNA, 20 bp, Artificial Sequence
  Description of Artificial Sequence: Synthetic oligonucleotide
  Target: LAMA2; (-) strand; PAM type: YTN; PAM sequence: CTG
atatcagctccttttcacat

SEQ ID NO: 226927 - DNA, 20 bp, Artificial Sequence
  Description of Artificial Sequence: Synthetic oligonucleotide
  Target: LAMA2; (-) strand; PAM type: YTN; PAM sequence: TTA
ctgatatcagctccttttca

SEQ ID NO: 226928 - DNA, 20 bp, Artificial Sequence
  Description of Artificial Sequence: Synthetic oligonucleotide
  Target: LAMA2; (-) strand; PAM type: YTN; PAM sequence: TTG
gaattactgatatcagctcc

SEQ ID NO: 226929 - DNA, 20 bp, Artificial Sequence
  Description of Artificial Sequence: Synthetic oligonucleotide
  Target: LAMA2; (-) strand; PAM type: YTN; PAM sequence: CTT
ggaattactgatatcagctc

SEQ ID NO: 226930 - DNA, 20 bp, Artificial Sequence
  Description of Artificial Sequence: Synthetic oligonucleotide
  Target: LAMA2; (-) strand; PAM type: YTN; PAM sequence: TTA
gtatccttggaattactgat

SEQ ID NO: 226931 - DNA, 20 bp, Artificial Sequence
  Description of Artificial Sequence: Synthetic oligonucleotide
  Target: LAMA2; (-) strand; PAM type: YTN; PAM sequence: TTT
agtatccttggaattactga

SEQ ID NO: 226932 - DNA, 20 bp, Artificial Sequence
  Description of Artificial Sequence: Synthetic oligonucleotide
  Target: LAMA2; (-) strand; PAM type: YTN; PAM sequence: TTT
tagtatccttggaattactg

SEQ ID NO: 226933 - DNA, 20 bp, Artificial Sequence
  Description of Artificial Sequence: Synthetic oligonucleotide
  Target: LAMA2; (-) strand; PAM type: YTN; PAM sequence: TTA
aaacaaattttagtatcctt

SEQ ID NO: 226934 - DNA, 20 bp, Artificial Sequence
  Description of Artificial Sequence: Synthetic oligonucleotide
  Target: LAMA2; (-) strand; PAM type: YTN; PAM sequence: TTT
aaaacaaattttagtatcct

SEQ ID NO: 226935 - DNA, 20 bp, Artificial Sequence
  Description of Artificial Sequence: Synthetic oligonucleotide
  Target: LAMA2; (-) strand; PAM type: YTN; PAM sequence: TTA
tttaaaacaaattttagtat

SEQ ID NO: 226936 - DNA, 20 bp, Artificial Sequence
  Description of Artificial Sequence: Synthetic oligonucleotide
  Target: LAMA2; (-) strand; PAM type: YTN; PAM sequence: TTA
ttatttaaaacaaattttag

SEQ ID NO: 226937 - DNA, 20 bp, Artificial Sequence
  Description of Artificial Sequence: Synthetic oligonucleotide
  Target: LAMA2; (-) strand; PAM type: YTN; PAM sequence: TTT
attatttaaaacaaatttta

SEQ ID NO: 226938 - DNA, 20 bp, Artificial Sequence
  Description of Artificial Sequence: Synthetic oligonucleotide
  Target: LAMA2; (-) strand; PAM type: YTN; PAM sequence: CTT
tattatttaaaacaaatttt

SEQ ID NO: 226939 - DNA, 20 bp, Artificial Sequence
  Description of Artificial Sequence: Synthetic oligonucleotide
  Target: LAMA2; (-) strand; PAM type: YTN; PAM sequence: TTC
tttattatttaaaacaaatt

SEQ ID NO: 226940 - DNA, 20 bp, Artificial Sequence
  Description of Artificial Sequence: Synthetic oligonucleotide
  Target: LAMA2; (-) strand; PAM type: YTN; PAM sequence: TTT
ctttattatttaaaacaaat

SEQ ID NO: 226941 - DNA, 20 bp, Artificial Sequence
  Description of Artificial Sequence: Synthetic oligonucleotide
  Target: LAMA2; (-) strand; PAM type: YTN; PAM sequence: CTA
tttctttattatttaaaaca

SEQ ID NO: 226942 - DNA, 20 bp, Artificial Sequence
  Description of Artificial Sequence: Synthetic oligonucleotide
  Target: LAMA2; (-) strand; PAM type: YTN; PAM sequence: CTG
aagatgctatttctttatta

SEQ ID NO: 226943 - DNA, 20 bp, Artificial Sequence
  Description of Artificial Sequence: Synthetic oligonucleotide
  Target: LAMA2; (-) strand; PAM type: YTN; PAM sequence: CTA
aagggcctgaagatgctatt

SEQ ID NO: 226944 - DNA, 20 bp, Artificial Sequence
  Description of Artificial Sequence: Synthetic oligonucleotide
  Target: LAMA2; (-) strand; PAM type: YTN; PAM sequence: TTG
gagtccaaagtctaaagggc

SEQ ID NO: 226945 - DNA, 20 bp, Artificial Sequence
  Description of Artificial Sequence: Synthetic oligonucleotide
  Target: LAMA2; (-) strand; PAM type: YTN; PAM sequence: TTT
ggagtccaaagtctaaaggg

SEQ ID NO: 226946 - DNA, 20 bp, Artificial Sequence
  Description of Artificial Sequence: Synthetic oligonucleotide
  Target: LAMA2; (-) strand; PAM type: YTN; PAM sequence: TTT
tggagtccaaagtctaaagg

SEQ ID NO: 226947 - DNA, 20 bp, Artificial Sequence
  Description of Artificial Sequence: Synthetic oligonucleotide
  Target: LAMA2; (-) strand; PAM type: YTN; PAM sequence: CTG
catccaattttggagtccaa

SEQ ID NO: 226948 - DNA, 20 bp, Artificial Sequence
  Description of Artificial Sequence: Synthetic oligonucleotide
  Target: LAMA2; (-) strand; PAM type: YTN; PAM sequence: TTG
atctgcatccaattttggag

SEQ ID NO: 226949 - DNA, 20 bp, Artificial Sequence
  Description of Artificial Sequence: Synthetic oligonucleotide
  Target: LAMA2; (-) strand; PAM type: YTN; PAM sequence: TTT
gatctgcatccaattttgga

SEQ ID NO: 226950 - DNA, 20 bp, Artificial Sequence
  Description of Artificial Sequence: Synthetic oligonucleotide
  Target: LAMA2; (-) strand; PAM type: YTN; PAM sequence: CTA
tttgatctgcatccaatttt

SEQ ID NO: 226951 - DNA, 20 bp, Artificial Sequence
  Description of Artificial Sequence: Synthetic oligonucleotide
  Target: LAMA2; (-) strand; PAM type: YTN; PAM sequence: TTA
atatataaatatcctatttg

SEQ ID NO: 226952 - DNA, 20 bp, Artificial Sequence
  Description of Artificial Sequence: Synthetic oligonucleotide
  Target: LAMA2; (-) strand; PAM type: YTN; PAM sequence: TTT
aatatataaatatcctattt

SEQ ID NO: 226953 - DNA, 20 bp, Artificial Sequence
  Description of Artificial Sequence: Synthetic oligonucleotide
  Target: LAMA2; (-) strand; PAM type: YTN; PAM sequence: TTT
taatatataaatatcctatt

SEQ ID NO: 226954 - DNA, 20 bp, Artificial Sequence
  Description of Artificial Sequence: Synthetic oligonucleotide
  Target: LAMA2; (-) strand; PAM type: YTN; PAM sequence: TTT
ttaatatataaatatcctat

SEQ ID NO: 226955 - DNA, 20 bp, Artificial Sequence
  Description of Artificial Sequence: Synthetic oligonucleotide
  Target: LAMA2; (-) strand; PAM type: YTN; PAM sequence: TTT
tttaatatataaatatccta

SEQ ID NO: 226956 - DNA, 20 bp, Artificial Sequence
  Description of Artificial Sequence: Synthetic oligonucleotide
  Target: LAMA2; (-) strand; PAM type: YTN; PAM sequence: TTG
ggattttttaatatataaat

SEQ ID NO: 226957 - DNA, 20 bp, Artificial Sequence
  Description of Artificial Sequence: Synthetic oligonucleotide
  Target: LAMA2; (-) strand; PAM type: YTN; PAM sequence: CTT
gggattttttaatatataaa

SEQ ID NO: 226958 - DNA, 20 bp, Artificial Sequence
  Description of Artificial Sequence: Synthetic oligonucleotide
  Target: LAMA2; (-) strand; PAM type: YTN; PAM sequence: CTC
ttgggattttttaatatata

SEQ ID NO: 226959 - DNA, 20 bp, Artificial Sequence
  Description of Artificial Sequence: Synthetic oligonucleotide
  Target: LAMA2; (-) strand; PAM type: YTN; PAM sequence: TTC
tcttgggattttttaatata

SEQ ID NO: 226960 - DNA, 20 bp, Artificial Sequence
  Description of Artificial Sequence: Synthetic oligonucleotide
  Target: LAMA2; (-) strand; PAM type: YTN; PAM sequence: CTG
tacaagttctcttgggattt

SEQ ID NO: 226961 - DNA, 20 bp, Artificial Sequence
  Description of Artificial Sequence: Synthetic oligonucleotide
  Target: LAMA2; (-) strand; PAM type: YTN; PAM sequence: TTA
tgctgtacaagttctcttgg

SEQ ID NO: 226962 - DNA, 20 bp, Artificial Sequence
  Description of Artificial Sequence: Synthetic oligonucleotide
  Target: LAMA2; (-) strand; PAM type: YTN; PAM sequence: CTT
atgctgtacaagttctcttg

SEQ ID NO: 226963 - DNA, 20 bp, Artificial Sequence
  Description of Artificial Sequence: Synthetic oligonucleotide
  Target: LAMA2; (-) strand; PAM type: YTN; PAM sequence: TTA
ccttatgctgtacaagttct

SEQ ID NO: 226964 - DNA, 20 bp, Artificial Sequence
  Description of Artificial Sequence: Synthetic oligonucleotide
  Target: LAMA2; (-) strand; PAM type: YTN; PAM sequence: TTT
accttatgctgtacaagttc

SEQ ID NO: 226965 - DNA, 20 bp, Artificial Sequence
  Description of Artificial Sequence: Synthetic oligonucleotide
  Target: LAMA2; (-) strand; PAM type: YTN; PAM sequence: TTG
tatttaccttatgctgtaca

SEQ ID NO: 226966 - DNA, 20 bp, Artificial Sequence
  Description of Artificial Sequence: Synthetic oligonucleotide
  Target: LAMA2; (-) strand; PAM type: YTN; PAM sequence: TTT
gtatttaccttatgctgtac

SEQ ID NO: 226967 - DNA, 20 bp, Artificial Sequence
  Description of Artificial Sequence: Synthetic oligonucleotide
  Target: LAMA2; (-) strand; PAM type: YTN; PAM sequence: TTG
atttgtatttaccttatgct

SEQ ID NO: 226968 - DNA, 20 bp, Artificial Sequence
  Description of Artificial Sequence: Synthetic oligonucleotide
  Target: LAMA2; (-) strand; PAM type: YTN; PAM sequence: CTT
gatttgtatttaccttatgc

SEQ ID NO: 226969 - DNA, 20 bp, Artificial Sequence
  Description of Artificial Sequence: Synthetic oligonucleotide
  Target: LAMA2; (-) strand; PAM type: YTN; PAM sequence: TTC
aaccttgatttgtatttacc

SEQ ID NO: 226970 - DNA, 20 bp, Artificial Sequence
  Description of Artificial Sequence: Synthetic oligonucleotide
  Target: LAMA2; (-) strand; PAM type: YTN; PAM sequence: CTG
ttcaaccttgatttgtattt

SEQ ID NO: 226971 - DNA, 20 bp, Artificial Sequence
  Description of Artificial Sequence: Synthetic oligonucleotide
  Target: LAMA2; (-) strand; PAM type: YTN; PAM sequence: TTA
tacctgttcaaccttgattt

SEQ ID NO: 226972 - DNA, 20 bp, Artificial Sequence
  Description of Artificial Sequence: Synthetic oligonucleotide
  Target: LAMA2; (-) strand; PAM type: YTN; PAM sequence: TTT
atacctgttcaaccttgatt

SEQ ID NO: 226973 - DNA, 20 bp, Artificial Sequence
  Description of Artificial Sequence: Synthetic oligonucleotide
  Target: LAMA2; (-) strand; PAM type: YTN; PAM sequence: TTT
tatacctgttcaaccttgat

SEQ ID NO: 226974 - DNA, 20 bp, Artificial Sequence
  Description of Artificial Sequence: Synthetic oligonucleotide
  Target: LAMA2; (-) strand; PAM type: YTN; PAM sequence: TTA
ttttatacctgttcaacctt

SEQ ID NO: 226975 - DNA, 20 bp, Artificial Sequence
  Description of Artificial Sequence: Synthetic oligonucleotide
  Target: LAMA2; (-) strand; PAM type: YTN; PAM sequence: CTA
attattttatacctgttcaa

SEQ ID NO: 226976 - DNA, 20 bp, Artificial Sequence
  Description of Artificial Sequence: Synthetic oligonucleotide
  Target: LAMA2; (-) strand; PAM type: YTN; PAM sequence: TTG
acctaattattttatacctg

SEQ ID NO: 226977 - DNA, 20 bp, Artificial Sequence
  Description of Artificial Sequence: Synthetic oligonucleotide
  Target: LAMA2; (-) strand; PAM type: YTN; PAM sequence: CTT
gacctaattattttatacct

SEQ ID NO: 226978 - DNA, 20 bp, Artificial Sequence
  Description of Artificial Sequence: Synthetic oligonucleotide
  Target: LAMA2; (-) strand; PAM type: YTN; PAM sequence: CTC
ttgacctaattattttatac

SEQ ID NO: 226979 - DNA, 20 bp, Artificial Sequence
  Description of Artificial Sequence: Synthetic oligonucleotide
  Target: LAMA2; (-) strand; PAM type: YTN; PAM sequence: TTG
ctcttgacctaattatttta

SEQ ID NO: 226980 - DNA, 20 bp, Artificial Sequence
  Description of Artificial Sequence: Synthetic oligonucleotide
  Target: LAMA2; (-) strand; PAM type: YTN; PAM sequence: CTG
attgctcttgacctaattat

SEQ ID NO: 226981 - DNA, 20 bp, Artificial Sequence
  Description of Artificial Sequence: Synthetic oligonucleotide
  Target: LAMA2; (-) strand; PAM type: YTN; PAM sequence: TTG
ctgattgctcttgacctaat

SEQ ID NO: 226982 - DNA, 20 bp, Artificial Sequence
  Description of Artificial Sequence: Synthetic oligonucleotide
  Target: LAMA2; (-) strand; PAM type: YTN; PAM sequence: TTT
gctgattgctcttgacctaa

SEQ ID NO: 226983 - DNA, 20 bp, Artificial Sequence
  Description of Artificial Sequence: Synthetic oligonucleotide
  Target: LAMA2; (-) strand; PAM type: YTN; PAM sequence: TTT
tgctgattgctcttgaccta

SEQ ID NO: 226984 - DNA, 20 bp, Artificial Sequence
  Description of Artificial Sequence: Synthetic oligonucleotide
  Target: LAMA2; (-) strand; PAM type: YTN; PAM sequence: CTG
catatattttgctgattgct

SEQ ID NO: 226985 - DNA, 20 bp, Artificial Sequence
  Description of Artificial Sequence: Synthetic oligonucleotide
  Target: LAMA2; (-) strand; PAM type: YTN; PAM sequence: TTC
tgcatatattttgctgattg

SEQ ID NO: 226986 - DNA, 20 bp, Artificial Sequence
  Description of Artificial Sequence: Synthetic oligonucleotide
  Target: LAMA2; (-) strand; PAM type: YTN; PAM sequence: TTG
gttctgcatatattttgctg

SEQ ID NO: 226987 - DNA, 20 bp, Artificial Sequence
  Description of Artificial Sequence: Synthetic oligonucleotide
  Target: LAMA2; (-) strand; PAM type: YTN; PAM sequence: TTT
ggttctgcatatattttgct

SEQ ID NO: 226988 - DNA, 20 bp, Artificial Sequence
  Description of Artificial Sequence: Synthetic oligonucleotide
  Target: LAMA2; (-) strand; PAM type: YTN; PAM sequence: TTG
tttggttctgcatatatttt

SEQ ID NO: 226989 - DNA, 20 bp, Artificial Sequence
  Description of Artificial Sequence: Synthetic oligonucleotide
  Target: LAMA2; (-) strand; PAM type: YTN; PAM sequence: TTC
cagaccagaatatcaaagta

SEQ ID NO: 226990 - DNA, 20 bp, Artificial Sequence
  Description of Artificial Sequence: Synthetic oligonucleotide
  Target: LAMA2; (-) strand; PAM type: YTN; PAM sequence: TTT
ccagaccagaatatcaaagt

SEQ ID NO: 226991 - DNA, 20 bp, Artificial Sequence
  Description of Artificial Sequence: Synthetic oligonucleotide
  Target: LAMA2; (-) strand; PAM type: YTN; PAM sequence: CTT
tccagaccagaatatcaaag

SEQ ID NO: 226992 - DNA, 20 bp, Artificial Sequence
  Description of Artificial Sequence: Synthetic oligonucleotide
  Target: LAMA2; (-) strand; PAM type: YTN; PAM sequence: CTC
tttccagaccagaatatcaa

SEQ ID NO: 226993 - DNA, 20 bp, Artificial Sequence
  Description of Artificial Sequence: Synthetic oligonucleotide
  Target: LAMA2; (-) strand; PAM type: YTN; PAM sequence: TTC
tctttccagaccagaatatc

SEQ ID NO: 226994 - DNA, 20 bp, Artificial Sequence
  Description of Artificial Sequence: Synthetic oligonucleotide
  Target: LAMA2; (-) strand; PAM type: YTN; PAM sequence: TTC
agaataaccccaaattctct

SEQ ID NO: 226995 - DNA, 20 bp, Artificial Sequence
  Description of Artificial Sequence: Synthetic oligonucleotide
  Target: LAMA2; (-) strand; PAM type: YTN; PAM sequence: TTT
cagaataaccccaaattctc

SEQ ID NO: 226996 - DNA, 20 bp, Artificial Sequence
  Description of Artificial Sequence: Synthetic oligonucleotide
  Target: LAMA2; (-) strand; PAM type: YTN; PAM sequence: TTT
tcagaataaccccaaattct

SEQ ID NO: 226997 - DNA, 20 bp, Artificial Sequence
  Description of Artificial Sequence: Synthetic oligonucleotide
  Target: LAMA2; (-) strand; PAM type: YTN; PAM sequence: TTT
ttcagaataaccccaaattc

SEQ ID NO: 226998 - DNA, 20 bp, Artificial Sequence
  Description of Artificial Sequence: Synthetic oligonucleotide
  Target: LAMA2; (-) strand; PAM type: YTN; PAM sequence: TTG
tagtgacagtatttttcaga

SEQ ID NO: 226999 - DNA, 20 bp, Artificial Sequence
  Description of Artificial Sequence: Synthetic oligonucleotide
  Target: LAMA2; (-) strand; PAM type: YTN; PAM sequence: CTG
gacagagttgtagtgacagt

SEQ ID NO: 227000 - DNA, 20 bp, Artificial Sequence
  Description of Artificial Sequence: Synthetic oligonucleotide
  Target: LAMA2; (-) strand; PAM type: YTN; PAM sequence: TTC
tggacagagttgtagtgaca

SEQ ID NO: 227001 - DNA, 20 bp, Artificial Sequence
  Description of Artificial Sequence: Synthetic oligonucleotide
  Target: LAMA2; (-) strand; PAM type: YTN; PAM sequence: CTG
tgggttctggacagagttgt

SEQ ID NO: 227002 - DNA, 20 bp, Artificial Sequence
  Description of Artificial Sequence: Synthetic oligonucleotide
  Target: LAMA2; (-) strand; PAM type: YTN; PAM sequence: CTG
cagctgtgggttctggacag

SEQ ID NO: 227003 - DNA, 20 bp, Artificial Sequence
  Description of Artificial Sequence: Synthetic oligonucleotide
  Target: LAMA2; (-) strand; PAM type: YTN; PAM sequence: TTC
tgcagctgtgggttctggac

SEQ ID NO: 227004 - DNA, 20 bp, Artificial Sequence
  Description of Artificial Sequence: Synthetic oligonucleotide
  Target: LAMA2; (-) strand; PAM type: YTN; PAM sequence: TTT
ctgcagctgtgggttctgga

SEQ ID NO: 227005 - DNA, 20 bp, Artificial Sequence
  Description of Artificial Sequence: Synthetic oligonucleotide
  Target: LAMA2; (-) strand; PAM type: YTN; PAM sequence: CTC
atttctgcagctgtgggttc

SEQ ID NO: 227006 - DNA, 20 bp, Artificial Sequence
  Description of Artificial Sequence: Synthetic oligonucleotide
  Target: LAMA2; (-) strand; PAM type: YTN; PAM sequence: TTA
ctcatttctgcagctgtggg

SEQ ID NO: 227007 - DNA, 20 bp, Artificial Sequence
  Description of Artificial Sequence: Synthetic oligonucleotide
  Target: LAMA2; (-) strand; PAM type: YTN; PAM sequence: TTT
actcatttctgcagctgtgg

SEQ ID NO: 227008 - DNA, 20 bp, Artificial Sequence
  Description of Artificial Sequence: Synthetic oligonucleotide
  Target: LAMA2; (-) strand; PAM type: YTN; PAM sequence: TTG
tttactcatttctgcagctg

SEQ ID NO: 227009 - DNA, 20 bp, Artificial Sequence
  Description of Artificial Sequence: Synthetic oligonucleotide
  Target: LAMA2; (-) strand; PAM type: YTN; PAM sequence: CTT
gtttactcatttctgcagct

SEQ ID NO: 227010 - DNA, 20 bp, Artificial Sequence
  Description of Artificial Sequence: Synthetic oligonucleotide
  Target: LAMA2; (-) strand; PAM type: YTN; PAM sequence: CTA
ataagatgacttgtttactc

SEQ ID NO: 227011 - DNA, 20 bp, Artificial Sequence
  Description of Artificial Sequence: Synthetic oligonucleotide
  Target: LAMA2; (-) strand; PAM type: YTN; PAM sequence: TTC
taataagatgacttgtttac

SEQ ID NO: 227012 - DNA, 20 bp, Artificial Sequence
  Description of Artificial Sequence: Synthetic oligonucleotide
  Target: LAMA2; (-) strand; PAM type: YTN; PAM sequence: CTT
ctaataagatgacttgttta

SEQ ID NO: 227013 - DNA, 20 bp, Artificial Sequence
  Description of Artificial Sequence: Synthetic oligonucleotide
  Target: LAMA2; (-) strand; PAM type: YTN; PAM sequence: TTG
cagtcttctaataagatgac

SEQ ID NO: 227014 - DNA, 20 bp, Artificial Sequence
  Description of Artificial Sequence: Synthetic oligonucleotide
  Target: LAMA2; (-) strand; PAM type: YTN; PAM sequence: CTT
gcagtcttctaataagatga

SEQ ID NO: 227015 - DNA, 20 bp, Artificial Sequence
  Description of Artificial Sequence: Synthetic oligonucleotide
  Target: LAMA2; (-) strand; PAM type: YTN; PAM sequence: TTA
accttgcagtcttctaataa

SEQ ID NO: 227016 - DNA, 20 bp, Artificial Sequence
  Description of Artificial Sequence: Synthetic oligonucleotide
  Target: LAMA2; (-) strand; PAM type: YTN; PAM sequence: TTT
aaccttgcagtcttctaata

SEQ ID NO: 227017 - DNA, 20 bp, Artificial Sequence
  Description of Artificial Sequence: Synthetic oligonucleotide
  Target: LAMA2; (-) strand; PAM type: YTN; PAM sequence: CTT
taaccttgcagtcttctaat

SEQ ID NO: 227018 - DNA, 20 bp, Artificial Sequence
  Description of Artificial Sequence: Synthetic oligonucleotide
  Target: LAMA2; (-) strand; PAM type: YTN; PAM sequence: TTC
tttaaccttgcagtcttcta

SEQ ID NO: 227019 - DNA, 20 bp, Artificial Sequence
  Description of Artificial Sequence: Synthetic oligonucleotide
  Target: LAMA2; (-) strand; PAM type: YTN; PAM sequence: CTG
ttctttaaccttgcagtctt

SEQ ID NO: 227020 - DNA, 20 bp, Artificial Sequence
  Description of Artificial Sequence: Synthetic oligonucleotide
  Target: LAMA2; (-) strand; PAM type: YTN; PAM sequence: TTA
gctgttctttaaccttgcag

SEQ ID NO: 227021 - DNA, 20 bp, Artificial Sequence
  Description of Artificial Sequence: Synthetic oligonucleotide
  Target: LAMA2; (-) strand; PAM type: YTN; PAM sequence: TTT
agctgttctttaaccttgca

SEQ ID NO: 227022 - DNA, 20 bp, Artificial Sequence
  Description of Artificial Sequence: Synthetic oligonucleotide
  Target: LAMA2; (-) strand; PAM type: YTN; PAM sequence: CTT
tagctgttctttaaccttgc

SEQ ID NO: 227023 - DNA, 20 bp, Artificial Sequence
  Description of Artificial Sequence: Synthetic oligonucleotide
  Target: LAMA2; (-) strand; PAM type: YTN; PAM sequence: TTG
aatctttagctgttctttaa

SEQ ID NO: 227024 - DNA, 20 bp, Artificial Sequence
  Description of Artificial Sequence: Synthetic oligonucleotide
  Target: LAMA2; (-) strand; PAM type: YTN; PAM sequence: TTT
gaatctttagctgttcttta

SEQ ID NO: 227025 - DNA, 20 bp, Artificial Sequence
  Description of Artificial Sequence: Synthetic oligonucleotide
  Target: LAMA2; (-) strand; PAM type: YTN; PAM sequence: TTT
tgaatctttagctgttcttt

SEQ ID NO: 227026 - DNA, 20 bp, Artificial Sequence
  Description of Artificial Sequence: Synthetic oligonucleotide
  Target: LAMA2; (-) strand; PAM type: YTN; PAM sequence: TTA
gttttgaatctttagctgtt

SEQ ID NO: 227027 - DNA, 20 bp, Artificial Sequence
  Description of Artificial Sequence: Synthetic oligonucleotide
  Target: LAMA2; (-) strand; PAM type: YTN; PAM sequence: TTT
agttttgaatctttagctgt

SEQ ID NO: 227028 - DNA, 20 bp, Artificial Sequence
  Description of Artificial Sequence: Synthetic oligonucleotide
  Target: LAMA2; (-) strand; PAM type: YTN; PAM sequence: CTA
acaagaatgtcatttagttt

SEQ ID NO: 227029 - DNA, 20 bp, Artificial Sequence
  Description of Artificial Sequence: Synthetic oligonucleotide
  Target: LAMA2; (-) strand; PAM type: YTN; PAM sequence: TTA
taatcgtatcaatgggaact

SEQ ID NO: 227030 - DNA, 20 bp, Artificial Sequence
  Description of Artificial Sequence: Synthetic oligonucleotide
  Target: LAMA2; (-) strand; PAM type: YTN; PAM sequence: TTG
tgtgagttataatcgtatca

SEQ ID NO: 227031 - DNA, 20 bp, Artificial Sequence
  Description of Artificial Sequence: Synthetic oligonucleotide
  Target: LAMA2; (-) strand; PAM type: YTN; PAM sequence: TTA
gggaattgtgtgagttataa

SEQ ID NO: 227032 - DNA, 20 bp, Artificial Sequence
  Description of Artificial Sequence: Synthetic oligonucleotide
  Target: LAMA2; (-) strand; PAM type: YTN; PAM sequence: TTT
agggaattgtgtgagttata

SEQ ID NO: 227033 - DNA, 20 bp, Artificial Sequence
  Description of Artificial Sequence: Synthetic oligonucleotide
  Target: LAMA2; (-) strand; PAM type: YTN; PAM sequence: CTT
tagggaattgtgtgagttat

SEQ ID NO: 227034 - DNA, 20 bp, Artificial Sequence
  Description of Artificial Sequence: Synthetic oligonucleotide
  Target: LAMA2; (-) strand; PAM type: YTN; PAM sequence: TTC
ctttagggaattgtgtgagt

SEQ ID NO: 227035 - DNA, 20 bp, Artificial Sequence
  Description of Artificial Sequence: Synthetic oligonucleotide
  Target: LAMA2; (-) strand; PAM type: YTN; PAM sequence: TTT
cctttagggaattgtgtgag

SEQ ID NO: 227036 - DNA, 20 bp, Artificial Sequence
  Description of Artificial Sequence: Synthetic oligonucleotide
  Target: LAMA2; (-) strand; PAM type: YTN; PAM sequence: TTT
tcctttagggaattgtgtga

SEQ ID NO: 227037 - DNA, 20 bp, Artificial Sequence
  Description of Artificial Sequence: Synthetic oligonucleotide
  Target: LAMA2; (-) strand; PAM type: YTN; PAM sequence: TTG
tagttttcctttagggaatt

SEQ ID NO: 227038 - DNA, 20 bp, Artificial Sequence
  Description of Artificial Sequence: Synthetic oligonucleotide
  Target: LAMA2; (-) strand; PAM type: YTN; PAM sequence: TTT
gtagttttcctttagggaat

SEQ ID NO: 227039 - DNA, 20 bp, Artificial Sequence
  Description of Artificial Sequence: Synthetic oligonucleotide
  Target: LAMA2; (-) strand; PAM type: YTN; PAM sequence: TTT
tgtagttttcctttagggaa

SEQ ID NO: 227040 - DNA, 20 bp, Artificial Sequence
  Description of Artificial Sequence: Synthetic oligonucleotide
  Target: LAMA2; (-) strand; PAM type: YTN; PAM sequence: TTT
ttgtagttttcctttaggga

SEQ ID NO: 227041 - DNA, 20 bp, Artificial Sequence
  Description of Artificial Sequence: Synthetic oligonucleotide
  Target: LAMA2; (-) strand; PAM type: YTN; PAM sequence: CTT
tttgtagttttcctttaggg

SEQ ID NO: 227042 - DNA, 20 bp, Artificial Sequence
  Description of Artificial Sequence: Synthetic oligonucleotide
  Target: LAMA2; (-) strand; PAM type: YTN; PAM sequence: CTC
aagaaacatcctttttgtag

SEQ ID NO: 227043 - DNA, 20 bp, Artificial Sequence
  Description of Artificial Sequence: Synthetic oligonucleotide
  Target: LAMA2; (-) strand; PAM type: YTN; PAM sequence: CTA
tctcaagaaacatccttttt

SEQ ID NO: 227044 - DNA, 20 bp, Artificial Sequence
  Description of Artificial Sequence: Synthetic oligonucleotide
  Target: LAMA2; (-) strand; PAM type: YTN; PAM sequence: TTC
ctatctcaagaaacatcctt

SEQ ID NO: 227045 - DNA, 20 bp, Artificial Sequence
  Description of Artificial Sequence: Synthetic oligonucleotide
  Target: LAMA2; (-) strand; PAM type: YTN; PAM sequence: TTG
tattcctatctcaagaaaca

SEQ ID NO: 227046 - DNA, 20 bp, Artificial Sequence
  Description of Artificial Sequence: Synthetic oligonucleotide
  Target: LAMA2; (-) strand; PAM type: YTN; PAM sequence: TTT
gtattcctatctcaagaaac

SEQ ID NO: 227047 - DNA, 20 bp, Artificial Sequence
  Description of Artificial Sequence: Synthetic oligonucleotide
  Target: LAMA2; (-) strand; PAM type: YTN; PAM sequence: TTA
tttgtattcctatctcaaga

SEQ ID NO: 227048 - DNA, 20 bp, Artificial Sequence
  Description of Artificial Sequence: Synthetic oligonucleotide
  Target: LAMA2; (-) strand; PAM type: YTN; PAM sequence: TTT
atttgtattcctatctcaag

SEQ ID NO: 227049 - DNA, 20 bp, Artificial Sequence
  Description of Artificial Sequence: Synthetic oligonucleotide
  Target: LAMA2; (-) strand; PAM type: YTN; PAM sequence: TTA
aaacaaaacaaacaaacaag

SEQ ID NO: 227050 - DNA, 20 bp, Artificial Sequence
  Description of Artificial Sequence: Synthetic oligonucleotide
  Target: LAMA2; (-) strand; PAM type: YTN; PAM sequence: TTT
aaaacaaaacaaacaaacaa

SEQ ID NO: 227051 - DNA, 20 bp, Artificial Sequence
  Description of Artificial Sequence: Synthetic oligonucleotide
  Target: LAMA2; (-) strand; PAM type: YTN; PAM sequence: CTG
gatttaaaacaaaacaaaca

SEQ ID NO: 227052 - DNA, 20 bp, Artificial Sequence
  Description of Artificial Sequence: Synthetic oligonucleotide
  Target: LAMA2; (-) strand; PAM type: YTN; PAM sequence: TTA
tcactggatttaaaacaaaa

SEQ ID NO: 227053 - DNA, 20 bp, Artificial Sequence
  Description of Artificial Sequence: Synthetic oligonucleotide
  Target: LAMA2; (-) strand; PAM type: YTN; PAM sequence: CTT
atcactggatttaaaacaaa

SEQ ID NO: 227054 - DNA, 20 bp, Artificial Sequence
  Description of Artificial Sequence: Synthetic oligonucleotide
  Target: LAMA2; (-) strand; PAM type: YTN; PAM sequence: TTC
ttatcactggatttaaaaca

SEQ ID NO: 227055 - DNA, 20 bp, Artificial Sequence
  Description of Artificial Sequence: Synthetic oligonucleotide
  Target: LAMA2; (-) strand; PAM type: YTN; PAM sequence: TTC
attcttatcactggatttaa

SEQ ID NO: 227056 - DNA, 20 bp, Artificial Sequence
  Description of Artificial Sequence: Synthetic oligonucleotide
  Target: LAMA2; (-) strand; PAM type: YTN; PAM sequence: TTA
aaaaaagcaaatacagaaaa

SEQ ID NO: 227057 - DNA, 20 bp, Artificial Sequence
  Description of Artificial Sequence: Synthetic oligonucleotide
  Target: LAMA2; (-) strand; PAM type: YTN; PAM sequence: TTT
aaaaaaagcaaatacagaaa

SEQ ID NO: 227058 - DNA, 20 bp, Artificial Sequence
  Description of Artificial Sequence: Synthetic oligonucleotide
  Target: LAMA2; (-) strand; PAM type: YTN; PAM sequence: TTT
taaaaaaagcaaatacagaa

SEQ ID NO: 227059 - DNA, 20 bp, Artificial Sequence
  Description of Artificial Sequence: Synthetic oligonucleotide
  Target: LAMA2; (-) strand; PAM type: YTN; PAM sequence: TTT
ttaaaaaaagcaaatacaga

SEQ ID NO: 227060 - DNA, 20 bp, Artificial Sequence
  Description of Artificial Sequence: Synthetic oligonucleotide
  Target: LAMA2; (-) strand; PAM type: YTN; PAM sequence: TTT
tttaaaaaaagcaaatacag

SEQ ID NO: 227061 - DNA, 20 bp, Artificial Sequence
  Description of Artificial Sequence: Synthetic oligonucleotide
  Target: LAMA2; (-) strand; PAM type: YTN; PAM sequence: TTT
ttttaaaaaaagcaaataca

SEQ ID NO: 227062 - DNA, 20 bp, Artificial Sequence
  Description of Artificial Sequence: Synthetic oligonucleotide
  Target: LAMA2; (-) strand; PAM type: YTN; PAM sequence: CTG
cacataaaatatagagtttt

SEQ ID NO: 227063 - DNA, 20 bp, Artificial Sequence
  Description of Artificial Sequence: Synthetic oligonucleotide
  Target: LAMA2; (-) strand; PAM type: YTN; PAM sequence: TTA
aatgtctgcacataaaatat

SEQ ID NO: 227064 - DNA, 20 bp, Artificial Sequence
  Description of Artificial Sequence: Synthetic oligonucleotide
  Target: LAMA2; (-) strand; PAM type: YTN; PAM sequence: TTA
tgttaaatgtctgcacataa

SEQ ID NO: 227065 - DNA, 20 bp, Artificial Sequence
  Description of Artificial Sequence: Synthetic oligonucleotide
  Target: LAMA2; (-) strand; PAM type: YTN; PAM sequence: TTT
atgttaaatgtctgcacata

SEQ ID NO: 227066 - DNA, 20 bp, Artificial Sequence
  Description of Artificial Sequence: Synthetic oligonucleotide
  Target: LAMA2; (-) strand; PAM type: YTN; PAM sequence: TTT
tatgttaaatgtctgcacat

SEQ ID NO: 227067 - DNA, 20 bp, Artificial Sequence
  Description of Artificial Sequence: Synthetic oligonucleotide
  Target: LAMA2; (-) strand; PAM type: YTN; PAM sequence: TTG
ggaaaagattttatgttaaa

SEQ ID NO: 227068 - DNA, 20 bp, Artificial Sequence
  Description of Artificial Sequence: Synthetic oligonucleotide
  Target: LAMA2; (-) strand; PAM type: YTN; PAM sequence: CTA
agaaagacattgggaaaaga

SEQ ID NO: 227069 - DNA, 20 bp, Artificial Sequence
  Description of Artificial Sequence: Synthetic oligonucleotide
  Target: LAMA2; (-) strand; PAM type: YTN; PAM sequence: CTA
atcatctaagaaagacattg

SEQ ID NO: 227070 - DNA, 20 bp, Artificial Sequence
  Description of Artificial Sequence: Synthetic oligonucleotide
  Target: LAMA2; (-) strand; PAM type: YTN; PAM sequence: CTA
cctaatcatctaagaaagac

SEQ ID NO: 227071 - DNA, 20 bp, Artificial Sequence
  Description of Artificial Sequence: Synthetic oligonucleotide
  Target: LAMA2; (-) strand; PAM type: YTN; PAM sequence: TTC
aactacctaatcatctaaga

SEQ ID NO: 227072 - DNA, 20 bp, Artificial Sequence
  Description of Artificial Sequence: Synthetic oligonucleotide
  Target: LAMA2; (-) strand; PAM type: YTN; PAM sequence: TTT
caactacctaatcatctaag

SEQ ID NO: 227073 - DNA, 20 bp, Artificial Sequence
  Description of Artificial Sequence: Synthetic oligonucleotide
  Target: LAMA2; (-) strand; PAM type: YTN; PAM sequence: CTT
tcaactacctaatcatctaa

SEQ ID NO: 227074 - DNA, 20 bp, Artificial Sequence
  Description of Artificial Sequence: Synthetic oligonucleotide
  Target: LAMA2; (-) strand; PAM type: YTN; PAM sequence: CTC
gtaaacagtagcgtctttca

SEQ ID NO: 227075 - DNA, 20 bp, Artificial Sequence
  Description of Artificial Sequence: Synthetic oligonucleotide
  Target: LAMA2; (-) strand; PAM type: YTN; PAM sequence: TTA
gcaatgcctcgtaaacagta

SEQ ID NO: 227076 - DNA, 20 bp, Artificial Sequence
  Description of Artificial Sequence: Synthetic oligonucleotide
  Target: LAMA2; (-) strand; PAM type: YTN; PAM sequence: TTT
agcaatgcctcgtaaacagt

SEQ ID NO: 227077 - DNA, 20 bp, Artificial Sequence
  Description of Artificial Sequence: Synthetic oligonucleotide
  Target: LAMA2; (-) strand; PAM type: YTN; PAM sequence: TTT
tagcaatgcctcgtaaacag

SEQ ID NO: 227078 - DNA, 20 bp, Artificial Sequence
  Description of Artificial Sequence: Synthetic oligonucleotide
  Target: LAMA2; (-) strand; PAM type: YTN; PAM sequence: CTT
ttagcaatgcctcgtaaaca

SEQ ID NO: 227079 - DNA, 20 bp, Artificial Sequence
  Description of Artificial Sequence: Synthetic oligonucleotide
  Target: LAMA2; (-) strand; PAM type: YTN; PAM sequence: CTC
atggaacccaaaagctttta

SEQ ID NO: 227080 - DNA, 20 bp, Artificial Sequence
  Description of Artificial Sequence: Synthetic oligonucleotide
  Target: LAMA2; (-) strand; PAM type: YTN; PAM sequence: CTC
cctcatggaacccaaaagct

SEQ ID NO: 227081 - DNA, 20 bp, Artificial Sequence
  Description of Artificial Sequence: Synthetic oligonucleotide
  Target: LAMA2; (-) strand; PAM type: YTN; PAM sequence: CTC
tccctcatggaacccaaaag

SEQ ID NO: 227082 - DNA, 20 bp, Artificial Sequence
  Description of Artificial Sequence: Synthetic oligonucleotide
  Target: LAMA2; (-) strand; PAM type: YTN; PAM sequence: TTA
tgtgatgtaaacggaggagt

SEQ ID NO: 227083 - DNA, 20 bp, Artificial Sequence
  Description of Artificial Sequence: Synthetic oligonucleotide
  Target: LAMA2; (-) strand; PAM type: YTN; PAM sequence: TTT
atgtgatgtaaacggaggag

SEQ ID NO: 227084 - DNA, 20 bp, Artificial Sequence
  Description of Artificial Sequence: Synthetic oligonucleotide
  Target: LAMA2; (-) strand; PAM type: YTN; PAM sequence: CTG
catggaagaccatacatata

SEQ ID NO: 227085 - DNA, 20 bp, Artificial Sequence
  Description of Artificial Sequence: Synthetic oligonucleotide
  Target: LAMA2; (-) strand; PAM type: YTN; PAM sequence: CTG
actgcatggaagaccataca

SEQ ID NO: 227086 - DNA, 20 bp, Artificial Sequence
  Description of Artificial Sequence: Synthetic oligonucleotide
  Target: LAMA2; (-) strand; PAM type: YTN; PAM sequence: TTG
gctgactgcatggaagacca

SEQ ID NO: 227087 - DNA, 20 bp, Artificial Sequence
  Description of Artificial Sequence: Synthetic oligonucleotide
  Target: LAMA2; (-) strand; PAM type: YTN; PAM sequence: TTT
ggctgactgcatggaagacc

SEQ ID NO: 227088 - DNA, 20 bp, Artificial Sequence
  Description of Artificial Sequence: Synthetic oligonucleotide
  Target: LAMA2; (-) strand; PAM type: YTN; PAM sequence: CTG
atttggctgactgcatggaa

SEQ ID NO: 227089 - DNA, 20 bp, Artificial Sequence
  Description of Artificial Sequence: Synthetic oligonucleotide
  Target: LAMA2; (-) strand; PAM type: YTN; PAM sequence: TTG
tctgatttggctgactgcat

SEQ ID NO: 227090 - DNA, 20 bp, Artificial Sequence
  Description of Artificial Sequence: Synthetic oligonucleotide
  Target: LAMA2; (-) strand; PAM type: YTN; PAM sequence: TTT
gtctgatttggctgactgca

SEQ ID NO: 227091 - DNA, 20 bp, Artificial Sequence
  Description of Artificial Sequence: Synthetic oligonucleotide
  Target: LAMA2; (-) strand; PAM type: YTN; PAM sequence: CTA
ggcatgatttgtctgatttg

SEQ ID NO: 227092 - DNA, 20 bp, Artificial Sequence
  Description of Artificial Sequence: Synthetic oligonucleotide
  Target: LAMA2; (-) strand; PAM type: YTN; PAM sequence: CTC
ctaggcatgatttgtctgat

SEQ ID NO: 227093 - DNA, 20 bp, Artificial Sequence
  Description of Artificial Sequence: Synthetic oligonucleotide
  Target: LAMA2; (-) strand; PAM type: YTN; PAM sequence: TTC
aactcctaggcatgatttgt

SEQ ID NO: 227094 - DNA, 20 bp, Artificial Sequence
  Description of Artificial Sequence: Synthetic oligonucleotide
  Target: LAMA2; (-) strand; PAM type: YTN; PAM sequence: TTT
caactcctaggcatgatttg

SEQ ID NO: 227095 - DNA, 20 bp, Artificial Sequence
  Description of Artificial Sequence: Synthetic oligonucleotide
  Target: LAMA2; (-) strand; PAM type: YTN; PAM sequence: CTT
tcaactcctaggcatgattt

SEQ ID NO: 227096 - DNA, 20 bp, Artificial Sequence
  Description of Artificial Sequence: Synthetic oligonucleotide
  Target: LAMA2; (-) strand; PAM type: YTN; PAM sequence: TTC
ccactttcaactcctaggca

SEQ ID NO: 227097 - DNA, 20 bp, Artificial Sequence
  Description of Artificial Sequence: Synthetic oligonucleotide
  Target: LAMA2; (-) strand; PAM type: YTN; PAM sequence: CTA
gacaaatcagttcccacttt

SEQ ID NO: 227098 - DNA, 20 bp, Artificial Sequence
  Description of Artificial Sequence: Synthetic oligonucleotide
  Target: LAMA2; (-) strand; PAM type: YTN; PAM sequence: TTC
aaactagacaaatcagttcc

SEQ ID NO: 227099 - DNA, 20 bp, Artificial Sequence
  Description of Artificial Sequence: Synthetic oligonucleotide
  Target: LAMA2; (-) strand; PAM type: YTN; PAM sequence: CTA
atcagaatattcaaactaga

SEQ ID NO: 227100 - DNA, 20 bp, Artificial Sequence
  Description of Artificial Sequence: Synthetic oligonucleotide
  Target: LAMA2; (-) strand; PAM type: YTN; PAM sequence: TTC
actaatcagaatattcaaac

SEQ ID NO: 227101 - DNA, 20 bp, Artificial Sequence
  Description of Artificial Sequence: Synthetic oligonucleotide
  Target: LAMA2; (-) strand; PAM type: YTN; PAM sequence: CTA
gttcactaatcagaatattc

SEQ ID NO: 227102 - DNA, 20 bp, Artificial Sequence
  Description of Artificial Sequence: Synthetic oligonucleotide
  Target: LAMA2; (-) strand; PAM type: YTN; PAM sequence: CTA
gctagttcactaatcagaat

SEQ ID NO: 227103 - DNA, 20 bp, Artificial Sequence
  Description of Artificial Sequence: Synthetic oligonucleotide
  Target: LAMA2; (-) strand; PAM type: YTN; PAM sequence: CTA
agctagctagttcactaatc

SEQ ID NO: 227104 - DNA, 20 bp, Artificial Sequence
  Description of Artificial Sequence: Synthetic oligonucleotide
  Target: LAMA2; (-) strand; PAM type: YTN; PAM sequence: TTC
taagctagctagttcactaa

SEQ ID NO: 227105 - DNA, 20 bp, Artificial Sequence
  Description of Artificial Sequence: Synthetic oligonucleotide
  Target: LAMA2; (-) strand; PAM type: YTN; PAM sequence: CTG
tagtacataaatgaatgaca

SEQ ID NO: 227106 - DNA, 20 bp, Artificial Sequence
  Description of Artificial Sequence: Synthetic oligonucleotide
  Target: LAMA2; (-) strand; PAM type: YTN; PAM sequence: TTA
ggtgtagctgtagtacataa

SEQ ID NO: 227107 - DNA, 20 bp, Artificial Sequence
  Description of Artificial Sequence: Synthetic oligonucleotide
  Target: LAMA2; (-) strand; PAM type: YTN; PAM sequence: TTT
aggtgtagctgtagtacata

SEQ ID NO: 227108 - DNA, 20 bp, Artificial Sequence
  Description of Artificial Sequence: Synthetic oligonucleotide
  Target: LAMA2; (-) strand; PAM type: YTN; PAM sequence: CTG
ggatttaggtgtagctgtag

SEQ ID NO: 227109 - DNA, 20 bp, Artificial Sequence
  Description of Artificial Sequence: Synthetic oligonucleotide
  Target: LAMA2; (-) strand; PAM type: YTN; PAM sequence: TTC
tgggatttaggtgtagctgt

SEQ ID NO: 227110 - DNA, 20 bp, Artificial Sequence
  Description of Artificial Sequence: Synthetic oligonucleotide
  Target: LAMA2; (-) strand; PAM type: YTN; PAM sequence: TTT
ctgggatttaggtgtagctg

SEQ ID NO: 227111 - DNA, 20 bp, Artificial Sequence
  Description of Artificial Sequence: Synthetic oligonucleotide
  Target: LAMA2; (-) strand; PAM type: YTN; PAM sequence: TTT
tctgggatttaggtgtagct

SEQ ID NO: 227112 - DNA, 20 bp, Artificial Sequence
  Description of Artificial Sequence: Synthetic oligonucleotide
  Target: LAMA2; (-) strand; PAM type: YTN; PAM sequence: TTT
ttctgggatttaggtgtagc

SEQ ID NO: 227113 - DNA, 20 bp, Artificial Sequence
  Description of Artificial Sequence: Synthetic oligonucleotide
  Target: LAMA2; (-) strand; PAM type: YTN; PAM sequence: TTA
ccgatttttctgggatttag

SEQ ID NO: 227114 - DNA, 20 bp, Artificial Sequence
  Description of Artificial Sequence: Synthetic oligonucleotide
  Target: LAMA2; (-) strand; PAM type: YTN; PAM sequence: TTG
ttaccgatttttctgggatt

SEQ ID NO: 227115 - DNA, 20 bp, Artificial Sequence
  Description of Artificial Sequence: Synthetic oligonucleotide
  Target: LAMA2; (-) strand; PAM type: YTN; PAM sequence: TTT
gttaccgatttttctgggat

SEQ ID NO: 227116 - DNA, 20 bp, Artificial Sequence
  Description of Artificial Sequence: Synthetic oligonucleotide
  Target: LAMA2; (-) strand; PAM type: YTN; PAM sequence: TTT
tgttaccgatttttctggga

SEQ ID NO: 227117 - DNA, 20 bp, Artificial Sequence
  Description of Artificial Sequence: Synthetic oligonucleotide
  Target: LAMA2; (-) strand; PAM type: YTN; PAM sequence: TTA
ttttgttaccgatttttctg

SEQ ID NO: 227118 - DNA, 20 bp, Artificial Sequence
  Description of Artificial Sequence: Synthetic oligonucleotide
  Target: LAMA2; (-) strand; PAM type: YTN; PAM sequence: CTA
gaataataggttattttgtt

SEQ ID NO: 227119 - DNA, 20 bp, Artificial Sequence
  Description of Artificial Sequence: Synthetic oligonucleotide
  Target: LAMA2; (-) strand; PAM type: YTN; PAM sequence: TTA
aatctagaataataggttat

SEQ ID NO: 227120 - DNA, 20 bp, Artificial Sequence
  Description of Artificial Sequence: Synthetic oligonucleotide
  Target: LAMA2; (-) strand; PAM type: YTN; PAM sequence: TTT
aaatctagaataataggtta

SEQ ID NO: 227121 - DNA, 20 bp, Artificial Sequence
  Description of Artificial Sequence: Synthetic oligonucleotide
  Target: LAMA2; (-) strand; PAM type: YTN; PAM sequence: TTA
aaatttaaatctagaataat

SEQ ID NO: 227122 - DNA, 20 bp, Artificial Sequence
  Description of Artificial Sequence: Synthetic oligonucleotide
  Target: LAMA2; (-) strand; PAM type: YTN; PAM sequence: TTT
aaaatttaaatctagaataa

SEQ ID NO: 227123 - DNA, 20 bp, Artificial Sequence
  Description of Artificial Sequence: Synthetic oligonucleotide
  Target: LAMA2; (-) strand; PAM type: YTN; PAM sequence: TTT
taaaatttaaatctagaata

SEQ ID NO: 227124 - DNA, 20 bp, Artificial Sequence
  Description of Artificial Sequence: Synthetic oligonucleotide
  Target: LAMA2; (-) strand; PAM type: YTN; PAM sequence: TTA
tgtggattttaaaatttaaa

SEQ ID NO: 227125 - DNA, 20 bp, Artificial Sequence
  Description of Artificial Sequence: Synthetic oligonucleotide
  Target: LAMA2; (-) strand; PAM type: YTN; PAM sequence: CTT
atgtggattttaaaatttaa

SEQ ID NO: 227126 - DNA, 20 bp, Artificial Sequence
  Description of Artificial Sequence: Synthetic oligonucleotide
  Target: LAMA2; (-) strand; PAM type: YTN; PAM sequence: TTC
ttatgtggattttaaaattt

SEQ ID NO: 227127 - DNA, 20 bp, Artificial Sequence
  Description of Artificial Sequence: Synthetic oligonucleotide
  Target: LAMA2; (-) strand; PAM type: YTN; PAM sequence: TTA
atattcttatgtggatttta

SEQ ID NO: 227128 - DNA, 20 bp, Artificial Sequence
  Description of Artificial Sequence: Synthetic oligonucleotide
  Target: LAMA2; (-) strand; PAM type: YTN; PAM sequence: TTA
ttaatattcttatgtggatt

SEQ ID NO: 227129 - DNA, 20 bp, Artificial Sequence
  Description of Artificial Sequence: Synthetic oligonucleotide
  Target: LAMA2; (-) strand; PAM type: YTN; PAM sequence: TTG
tgttattaatattcttatgt

SEQ ID NO: 227130 - DNA, 20 bp, Artificial Sequence
  Description of Artificial Sequence: Synthetic oligonucleotide
  Target: LAMA2; (-) strand; PAM type: YTN; PAM sequence: TTT
gtgttattaatattcttatg

SEQ ID NO: 227131 - DNA, 20 bp, Artificial Sequence
  Description of Artificial Sequence: Synthetic oligonucleotide
  Target: LAMA2; (-) strand; PAM type: YTN; PAM sequence: TTG
tcatacaaataatttgtgtt

SEQ ID NO: 227132 - DNA, 20 bp, Artificial Sequence
  Description of Artificial Sequence: Synthetic oligonucleotide
  Target: LAMA2; (-) strand; PAM type: YTN; PAM sequence: CTG
agggtgaaatgaaaaaaata

SEQ ID NO: 227133 - DNA, 20 bp, Artificial Sequence
  Description of Artificial Sequence: Synthetic oligonucleotide
  Target: LAMA2; (-) strand; PAM type: YTN; PAM sequence: CTC
tgagggtgaaatgaaaaaaa

SEQ ID NO: 227134 - DNA, 20 bp, Artificial Sequence
  Description of Artificial Sequence: Synthetic oligonucleotide
  Target: LAMA2; (-) strand; PAM type: YTN; PAM sequence: TTG
gatagaggaagtatatagat

SEQ ID NO: 227135 - DNA, 20 bp, Artificial Sequence
  Description of Artificial Sequence: Synthetic oligonucleotide
  Target: LAMA2; (-) strand; PAM type: YTN; PAM sequence: TTT
ggatagaggaagtatataga

SEQ ID NO: 227136 - DNA, 20 bp, Artificial Sequence
  Description of Artificial Sequence: Synthetic oligonucleotide
  Target: LAMA2; (-) strand; PAM type: YTN; PAM sequence: TTT
tggatagaggaagtatatag

SEQ ID NO: 227137 - DNA, 20 bp, Artificial Sequence
  Description of Artificial Sequence: Synthetic oligonucleotide
  Target: LAMA2; (-) strand; PAM type: YTN; PAM sequence: TTT
ttggatagaggaagtatata

SEQ ID NO: 227138 - DNA, 20 bp, Artificial Sequence
  Description of Artificial Sequence: Synthetic oligonucleotide
  Target: LAMA2; (-) strand; PAM type: YTN; PAM sequence: TTG
tttttggatagaggaagtat

SEQ ID NO: 227139 - DNA, 20 bp, Artificial Sequence
  Description of Artificial Sequence: Synthetic oligonucleotide
  Target: LAMA2; (-) strand; PAM type: YTN; PAM sequence: CTG
tgttgtttttggatagagga

SEQ ID NO: 227140 - DNA, 20 bp, Artificial Sequence
  Description of Artificial Sequence: Synthetic oligonucleotide
  Target: LAMA2; (-) strand; PAM type: YTN; PAM sequence: TTC
tgtgttgtttttggatagag

SEQ ID NO: 227141 - DNA, 20 bp, Artificial Sequence
  Description of Artificial Sequence: Synthetic oligonucleotide
  Target: LAMA2; (-) strand; PAM type: YTN; PAM sequence: CTT
ctgtgttgtttttggataga

SEQ ID NO: 227142 - DNA, 20 bp, Artificial Sequence
  Description of Artificial Sequence: Synthetic oligonucleotide
  Target: LAMA2; (-) strand; PAM type: YTN; PAM sequence: TTG
cttctgtgttgtttttggat

SEQ ID NO: 227143 - DNA, 20 bp, Artificial Sequence
  Description of Artificial Sequence: Synthetic oligonucleotide
  Target: LAMA2; (-) strand; PAM type: YTN; PAM sequence: TTT
gcttctgtgttgtttttgga

SEQ ID NO: 227144 - DNA, 20 bp, Artificial Sequence
  Description of Artificial Sequence: Synthetic oligonucleotide
  Target: LAMA2; (-) strand; PAM type: YTN; PAM sequence: TTT
tgcttctgtgttgtttttgg

SEQ ID NO: 227145 - DNA, 20 bp, Artificial Sequence
  Description of Artificial Sequence: Synthetic oligonucleotide
  Target: LAMA2; (-) strand; PAM type: YTN; PAM sequence: CTG
taacattttgcttctgtgtt

SEQ ID NO: 227146 - DNA, 20 bp, Artificial Sequence
  Description of Artificial Sequence: Synthetic oligonucleotide
  Target: LAMA2; (-) strand; PAM type: YTN; PAM sequence: CTC
tgtaacattttgcttctgtg

SEQ ID NO: 227147 - DNA, 20 bp, Artificial Sequence
  Description of Artificial Sequence: Synthetic oligonucleotide
  Target: LAMA2; (-) strand; PAM type: YTN; PAM sequence: CTG
gtgtctctgtaacattttgc

SEQ ID NO: 227148 - DNA, 20 bp, Artificial Sequence
  Description of Artificial Sequence: Synthetic oligonucleotide
  Target: LAMA2; (-) strand; PAM type: YTN; PAM sequence: TTC
tggtgtctctgtaacatttt

SEQ ID NO: 227149 - DNA, 20 bp, Artificial Sequence
  Description of Artificial Sequence: Synthetic oligonucleotide
  Target: LAMA2; (-) strand; PAM type: YTN; PAM sequence: CTG
ggcaacattctggtgtctct

SEQ ID NO: 227150 - DNA, 20 bp, Artificial Sequence
  Description of Artificial Sequence: Synthetic oligonucleotide
  Target: LAMA2; (-) strand; PAM type: YTN; PAM sequence: TTC
tgggcaacattctggtgtct

SEQ ID NO: 227151 - DNA, 20 bp, Artificial Sequence
  Description of Artificial Sequence: Synthetic oligonucleotide
  Target: LAMA2; (-) strand; PAM type: YTN; PAM sequence: TTT
ctgggcaacattctggtgtc

SEQ ID NO: 227152 - DNA, 20 bp, Artificial Sequence
  Description of Artificial Sequence: Synthetic oligonucleotide
  Target: LAMA2; (-) strand; PAM type: YTN; PAM sequence: TTT
tctgggcaacattctggtgt

SEQ ID NO: 227153 - DNA, 20 bp, Artificial Sequence
  Description of Artificial Sequence: Synthetic oligonucleotide
  Target: LAMA2; (-) strand; PAM type: YTN; PAM sequence: TTA
atgcatggttttctgggcaa

SEQ ID NO: 227154 - DNA, 20 bp, Artificial Sequence
  Description of Artificial Sequence: Synthetic oligonucleotide
  Target: LAMA2; (-) strand; PAM type: YTN; PAM sequence: TTG
agtaattaatgcatggtttt

SEQ ID NO: 227155 - DNA, 20 bp, Artificial Sequence
  Description of Artificial Sequence: Synthetic oligonucleotide
  Target: LAMA2; (-) strand; PAM type: YTN; PAM sequence: CTT
gagtaattaatgcatggttt

SEQ ID NO: 227156 - DNA, 20 bp, Artificial Sequence
  Description of Artificial Sequence: Synthetic oligonucleotide
  Target: LAMA2; (-) strand; PAM type: YTN; PAM sequence: CTG
gcttgagtaattaatgcatg

SEQ ID NO: 227157 - DNA, 20 bp, Artificial Sequence
  Description of Artificial Sequence: Synthetic oligonucleotide
  Target: LAMA2; (-) strand; PAM type: YTN; PAM sequence: TTC
ctggcttgagtaattaatgc

SEQ ID NO: 227158 - DNA, 20 bp, Artificial Sequence
  Description of Artificial Sequence: Synthetic oligonucleotide
  Target: LAMA2; (-) strand; PAM type: YTN; PAM sequence: TTT
cctggcttgagtaattaatg

SEQ ID NO: 227159 - DNA, 20 bp, Artificial Sequence
  Description of Artificial Sequence: Synthetic oligonucleotide
  Target: LAMA2; (-) strand; PAM type: YTN; PAM sequence: TTG
ggaatttcctggcttgagta

SEQ ID NO: 227160 - DNA, 20 bp, Artificial Sequence
  Description of Artificial Sequence: Synthetic oligonucleotide
  Target: LAMA2; (-) strand; PAM type: YTN; PAM sequence: TTG
caaaattgggaatttcctgg

SEQ ID NO: 227161 - DNA, 20 bp, Artificial Sequence
  Description of Artificial Sequence: Synthetic oligonucleotide
  Target: LAMA2; (-) strand; PAM type: YTN; PAM sequence: TTA
aatgataaaatagagttgca

SEQ ID NO: 227162 - DNA, 20 bp, Artificial Sequence
  Description of Artificial Sequence: Synthetic oligonucleotide
  Target: LAMA2; (-) strand; PAM type: YTN; PAM sequence: CTT
aaatgataaaatagagttgc

SEQ ID NO: 227163 - DNA, 20 bp, Artificial Sequence
  Description of Artificial Sequence: Synthetic oligonucleotide
  Target: LAMA2; (-) strand; PAM type: YTN; PAM sequence: CTC
ttaaatgataaaatagagtt

SEQ ID NO: 227164 - DNA, 20 bp, Artificial Sequence
  Description of Artificial Sequence: Synthetic oligonucleotide
  Target: LAMA2; (-) strand; PAM type: YTN; PAM sequence: CTC
tcttaaatgataaaatagag

SEQ ID NO: 227165 - DNA, 20 bp, Artificial Sequence
  Description of Artificial Sequence: Synthetic oligonucleotide
  Target: LAMA2; (-) strand; PAM type: YTN; PAM sequence: TTA
gaacacacatgtggaaagat

SEQ ID NO: 227166 - DNA, 20 bp, Artificial Sequence
  Description of Artificial Sequence: Synthetic oligonucleotide
  Target: LAMA2; (-) strand; PAM type: YTN; PAM sequence: TTT
agaacacacatgtggaaaga

SEQ ID NO: 227167 - DNA, 20 bp, Artificial Sequence
  Description of Artificial Sequence: Synthetic oligonucleotide
  Target: LAMA2; (-) strand; PAM type: YTN; PAM sequence: TTT
tagaacacacatgtggaaag

SEQ ID NO: 227168 - DNA, 20 bp, Artificial Sequence
  Description of Artificial Sequence: Synthetic oligonucleotide
  Target: LAMA2; (-) strand; PAM type: YTN; PAM sequence: TTT
ttagaacacacatgtggaaa

SEQ ID NO: 227169 - DNA, 20 bp, Artificial Sequence
  Description of Artificial Sequence: Synthetic oligonucleotide
  Target: LAMA2; (-) strand; PAM type: YTN; PAM sequence: TTT
tttagaacacacatgtggaa

SEQ ID NO: 227170 - DNA, 20 bp, Artificial Sequence
  Description of Artificial Sequence: Synthetic oligonucleotide
  Target: LAMA2; (-) strand; PAM type: YTN; PAM sequence: CTT
ttttagaacacacatgtgga

SEQ ID NO: 227171 - DNA, 20 bp, Artificial Sequence
  Description of Artificial Sequence: Synthetic oligonucleotide
  Target: LAMA2; (-) strand; PAM type: YTN; PAM sequence: TTC
ttttttagaacacacatgtg

SEQ ID NO: 227172 - DNA, 20 bp, Artificial Sequence
  Description of Artificial Sequence: Synthetic oligonucleotide
  Target: LAMA2; (-) strand; PAM type: YTN; PAM sequence: CTG
ttcttttttagaacacacat

SEQ ID NO: 227173 - DNA, 20 bp, Artificial Sequence
  Description of Artificial Sequence: Synthetic oligonucleotide
  Target: LAMA2; (-) strand; PAM type: YTN; PAM sequence: CTC
tgttcttttttagaacacac

SEQ ID NO: 227174 - DNA, 20 bp, Artificial Sequence
  Description of Artificial Sequence: Synthetic oligonucleotide
  Target: LAMA2; (-) strand; PAM type: YTN; PAM sequence: TTC
tctgttcttttttagaacac

SEQ ID NO: 227175 - DNA, 20 bp, Artificial Sequence
  Description of Artificial Sequence: Synthetic oligonucleotide
  Target: LAMA2; (-) strand; PAM type: YTN; PAM sequence: TTT
ctctgttcttttttagaaca

SEQ ID NO: 227176 - DNA, 20 bp, Artificial Sequence
  Description of Artificial Sequence: Synthetic oligonucleotide
  Target: LAMA2; (-) strand; PAM type: YTN; PAM sequence: TTA
tttctctgttcttttttaga

SEQ ID NO: 227177 - DNA, 20 bp, Artificial Sequence
  Description of Artificial Sequence: Synthetic oligonucleotide
  Target: LAMA2; (-) strand; PAM type: YTN; PAM sequence: CTG
gttatttctctgttcttttt

SEQ ID NO: 227178 - DNA, 20 bp, Artificial Sequence
  Description of Artificial Sequence: Synthetic oligonucleotide
  Target: LAMA2; (-) strand; PAM type: YTN; PAM sequence: TTA
cagaggactggttatttctc

SEQ ID NO: 227179 - DNA, 20 bp, Artificial Sequence
  Description of Artificial Sequence: Synthetic oligonucleotide
  Target: LAMA2; (-) strand; PAM type: YTN; PAM sequence: CTA
agttacagaggactggttat

SEQ ID NO: 227180 - DNA, 20 bp, Artificial Sequence
  Description of Artificial Sequence: Synthetic oligonucleotide
  Target: LAMA2; (-) strand; PAM type: YTN; PAM sequence: TTG
ctaagttacagaggactggt

SEQ ID NO: 227181 - DNA, 20 bp, Artificial Sequence
  Description of Artificial Sequence: Synthetic oligonucleotide
  Target: LAMA2; (-) strand; PAM type: YTN; PAM sequence: TTT
gctaagttacagaggactgg

SEQ ID NO: 227182 - DNA, 20 bp, Artificial Sequence
  Description of Artificial Sequence: Synthetic oligonucleotide
  Target: LAMA2; (-) strand; PAM type: YTN; PAM sequence: TTT
tgctaagttacagaggactg

SEQ ID NO: 227183 - DNA, 20 bp, Artificial Sequence
  Description of Artificial Sequence: Synthetic oligonucleotide
  Target: LAMA2; (-) strand; PAM type: YTN; PAM sequence: TTT
ttgctaagttacagaggact

SEQ ID NO: 227184 - DNA, 20 bp, Artificial Sequence
  Description of Artificial Sequence: Synthetic oligonucleotide
  Target: LAMA2; (-) strand; PAM type: YTN; PAM sequence: TTG
tatttttgctaagttacaga

SEQ ID NO: 227185 - DNA, 20 bp, Artificial Sequence
  Description of Artificial Sequence: Synthetic oligonucleotide
  Target: LAMA2; (-) strand; PAM type: YTN; PAM sequence: TTT
gtatttttgctaagttacag

SEQ ID NO: 227186 - DNA, 20 bp, Artificial Sequence
  Description of Artificial Sequence: Synthetic oligonucleotide
  Target: LAMA2; (-) strand; PAM type: YTN; PAM sequence: TTC
aaaaagagaaatcaaagtgg

SEQ ID NO: 227187 - DNA, 20 bp, Artificial Sequence
  Description of Artificial Sequence: Synthetic oligonucleotide
  Target: LAMA2; (-) strand; PAM type: YTN; PAM sequence: TTT
caaaaagagaaatcaaagtg

SEQ ID NO: 227188 - DNA, 20 bp, Artificial Sequence
  Description of Artificial Sequence: Synthetic oligonucleotide
  Target: LAMA2; (-) strand; PAM type: YTN; PAM sequence: TTA
tttcaaaaagagaaatcaaa

SEQ ID NO: 227189 - DNA, 20 bp, Artificial Sequence
  Description of Artificial Sequence: Synthetic oligonucleotide
  Target: LAMA2; (-) strand; PAM type: YTN; PAM sequence: TTT
atttcaaaaagagaaatcaa

SEQ ID NO: 227190 - DNA, 20 bp, Artificial Sequence
  Description of Artificial Sequence: Synthetic oligonucleotide
  Target: LAMA2; (-) strand; PAM type: YTN; PAM sequence: CTG
aaaatttatttcaaaaagag

SEQ ID NO: 227191 - DNA, 20 bp, Artificial Sequence
  Description of Artificial Sequence: Synthetic oligonucleotide
  Target: LAMA2; (-) strand; PAM type: YTN; PAM sequence: CTA
caaaatgataatccagaata

SEQ ID NO: 227192 - DNA, 20 bp, Artificial Sequence
  Description of Artificial Sequence: Synthetic oligonucleotide
  Target: LAMA2; (-) strand; PAM type: YTN; PAM sequence: TTA
tccagatgctacaaaatgat

SEQ ID NO: 227193 - DNA, 20 bp, Artificial Sequence
  Description of Artificial Sequence: Synthetic oligonucleotide
  Target: LAMA2; (-) strand; PAM type: YTN; PAM sequence: TTA
atgtaaaattatccagatgc

SEQ ID NO: 227194 - DNA, 20 bp, Artificial Sequence
  Description of Artificial Sequence: Synthetic oligonucleotide
  Target: LAMA2; (-) strand; PAM type: YTN; PAM sequence: CTC
cagatgttaatgtaaaatta

SEQ ID NO: 227195 - DNA, 20 bp, Artificial Sequence
  Description of Artificial Sequence: Synthetic oligonucleotide
  Target: LAMA2; (-) strand; PAM type: YTN; PAM sequence: CTC
aactccagatgttaatgtaa

SEQ ID NO: 227196 - DNA, 20 bp, Artificial Sequence
  Description of Artificial Sequence: Synthetic oligonucleotide
  Target: LAMA2; (-) strand; PAM type: YTN; PAM sequence: CTA
tatgcatccgacaaataaaa

SEQ ID NO: 227197 - DNA, 20 bp, Artificial Sequence
  Description of Artificial Sequence: Synthetic oligonucleotide
  Target: LAMA2; (-) strand; PAM type: YTN; PAM sequence: TTC
tatatgcatccgacaaataa

SEQ ID NO: 227198 - DNA, 20 bp, Artificial Sequence
  Description of Artificial Sequence: Synthetic oligonucleotide
  Target: LAMA2; (-) strand; PAM type: YTN; PAM sequence: TTA
cagaagtattctatatgcat

SEQ ID NO: 227199 - DNA, 20 bp, Artificial Sequence
  Description of Artificial Sequence: Synthetic oligonucleotide
  Target: LAMA2; (-) strand; PAM type: YTN; PAM sequence: CTT
acagaagtattctatatgca

SEQ ID NO: 227200 - DNA, 20 bp, Artificial Sequence
  Description of Artificial Sequence: Synthetic oligonucleotide
  Target: LAMA2; (-) strand; PAM type: YTN; PAM sequence: TTC
ttacagaagtattctatatg

SEQ ID NO: 227201 - DNA, 20 bp, Artificial Sequence
  Description of Artificial Sequence: Synthetic oligonucleotide
  Target: LAMA2; (-) strand; PAM type: YTN; PAM sequence: TTT
cttacagaagtattctatat

SEQ ID NO: 227202 - DNA, 20 bp, Artificial Sequence
  Description of Artificial Sequence: Synthetic oligonucleotide
  Target: LAMA2; (-) strand; PAM type: YTN; PAM sequence: CTG
ggaaaatacatttcttacag

SEQ ID NO: 227203 - DNA, 20 bp, Artificial Sequence
  Description of Artificial Sequence: Synthetic oligonucleotide
  Target: LAMA2; (-) strand; PAM type: YTN; PAM sequence: TTA
aaatgaataaacagcagctg

SEQ ID NO: 227204 - DNA, 20 bp, Artificial Sequence
  Description of Artificial Sequence: Synthetic oligonucleotide
  Target: LAMA2; (-) strand; PAM type: YTN; PAM sequence: TTT
aaaatgaataaacagcagct

SEQ ID NO: 227205 - DNA, 20 bp, Artificial Sequence
  Description of Artificial Sequence: Synthetic oligonucleotide
  Target: LAMA2; (-) strand; PAM type: YTN; PAM sequence: CTT
taaaatgaataaacagcagc

SEQ ID NO: 227206 - DNA, 20 bp, Artificial Sequence
  Description of Artificial Sequence: Synthetic oligonucleotide
  Target: LAMA2; (-) strand; PAM type: YTN; PAM sequence: CTC
tttaaaatgaataaacagca

SEQ ID NO: 227207 - DNA, 20 bp, Artificial Sequence
  Description of Artificial Sequence: Synthetic oligonucleotide
  Target: LAMA2; (-) strand; PAM type: YTN; PAM sequence: TTA
accatgtctctttaaaatga

SEQ ID NO: 227208 - DNA, 20 bp, Artificial Sequence
  Description of Artificial Sequence: Synthetic oligonucleotide
  Target: LAMA2; (-) strand; PAM type: YTN; PAM sequence: CTT
aaccatgtctctttaaaatg

SEQ ID NO: 227209 - DNA, 20 bp, Artificial Sequence
  Description of Artificial Sequence: Synthetic oligonucleotide
  Target: LAMA2; (-) strand; PAM type: YTN; PAM sequence: TTA
cttaaccatgtctctttaaa

SEQ ID NO: 227210 - DNA, 20 bp, Artificial Sequence
  Description of Artificial Sequence: Synthetic oligonucleotide
  Target: LAMA2; (-) strand; PAM type: YTN; PAM sequence: CTT
acttaaccatgtctctttaa

SEQ ID NO: 227211 - DNA, 20 bp, Artificial Sequence
  Description of Artificial Sequence: Synthetic oligonucleotide
  Target: LAMA2; (-) strand; PAM type: YTN; PAM sequence: TTA
gacttacttaaccatgtctc

SEQ ID NO: 227212 - DNA, 20 bp, Artificial Sequence
  Description of Artificial Sequence: Synthetic oligonucleotide
  Target: LAMA2; (-) strand; PAM type: YTN; PAM sequence: CTG
ttagacttacttaaccatgt

SEQ ID NO: 227213 - DNA, 20 bp, Artificial Sequence
  Description of Artificial Sequence: Synthetic oligonucleotide
  Target: LAMA2; (-) strand; PAM type: YTN; PAM sequence: CTA
aggaggctgttagacttact

SEQ ID NO: 227214 - DNA, 20 bp, Artificial Sequence
  Description of Artificial Sequence: Synthetic oligonucleotide
  Target: LAMA2; (-) strand; PAM type: YTN; PAM sequence: TTC
ctaaggaggctgttagactt

SEQ ID NO: 227215 - DNA, 20 bp, Artificial Sequence
  Description of Artificial Sequence: Synthetic oligonucleotide
  Target: LAMA2; (-) strand; PAM type: YTN; PAM sequence: TTT
cctaaggaggctgttagact

SEQ ID NO: 227216 - DNA, 20 bp, Artificial Sequence
  Description of Artificial Sequence: Synthetic oligonucleotide
  Target: LAMA2; (-) strand; PAM type: YTN; PAM sequence: TTG
aatttcctaaggaggctgtt

SEQ ID NO: 227217 - DNA, 20 bp, Artificial Sequence
  Description of Artificial Sequence: Synthetic oligonucleotide
  Target: LAMA2; (-) strand; PAM type: YTN; PAM sequence: TTA
ggaattgaatttcctaagga

SEQ ID NO: 227218 - DNA, 20 bp, Artificial Sequence
  Description of Artificial Sequence: Synthetic oligonucleotide
  Target: LAMA2; (-) strand; PAM type: YTN; PAM sequence: TTT
aggaattgaatttcctaagg

SEQ ID NO: 227219 - DNA, 20 bp, Artificial Sequence
  Description of Artificial Sequence: Synthetic oligonucleotide
  Target: LAMA2; (-) strand; PAM type: YTN; PAM sequence: CTA
aggaatttaggaattgaatt

SEQ ID NO: 227220 - DNA, 20 bp, Artificial Sequence
  Description of Artificial Sequence: Synthetic oligonucleotide
  Target: LAMA2; (-) strand; PAM type: YTN; PAM sequence: TTC
ctaaggaatttaggaattga

SEQ ID NO: 227221 - DNA, 20 bp, Artificial Sequence
  Description of Artificial Sequence: Synthetic oligonucleotide
  Target: LAMA2; (-) strand; PAM type: YTN; PAM sequence: TTT
cctaaggaatttaggaattg

SEQ ID NO: 227222 - DNA, 20 bp, Artificial Sequence
  Description of Artificial Sequence: Synthetic oligonucleotide
  Target: LAMA2; (-) strand; PAM type: YTN; PAM sequence: TTG
tgtttcctaaggaatttagg

SEQ ID NO: 227223 - DNA, 20 bp, Artificial Sequence
  Description of Artificial Sequence: Synthetic oligonucleotide
  Target: LAMA2; (-) strand; PAM type: YTN; PAM sequence: TTT
gtgtttcctaaggaatttag

SEQ ID NO: 227224 - DNA, 20 bp, Artificial Sequence
  Description of Artificial Sequence: Synthetic oligonucleotide
  Target: LAMA2; (-) strand; PAM type: YTN; PAM sequence: TTA
aacatggtttgtgtttccta

SEQ ID NO: 227225 - DNA, 20 bp, Artificial Sequence
  Description of Artificial Sequence: Synthetic oligonucleotide
  Target: LAMA2; (-) strand; PAM type: YTN; PAM sequence: TTC
agattaaacatggtttgtgt

SEQ ID NO: 227226 - DNA, 20 bp, Artificial Sequence
  Description of Artificial Sequence: Synthetic oligonucleotide
  Target: LAMA2; (-) strand; PAM type: YTN; PAM sequence: CTT
cagattaaacatggtttgtg

SEQ ID NO: 227227 - DNA, 20 bp, Artificial Sequence
  Description of Artificial Sequence: Synthetic oligonucleotide
  Target: LAMA2; (-) strand; PAM type: YTN; PAM sequence: CTG
gcaggacttcagattaaaca

SEQ ID NO: 227228 - DNA, 20 bp, Artificial Sequence
  Description of Artificial Sequence: Synthetic oligonucleotide
  Target: LAMA2; (-) strand; PAM type: YTN; PAM sequence: CTG
gtaggagagaaaacagactg

SEQ ID NO: 227229 - DNA, 20 bp, Artificial Sequence
  Description of Artificial Sequence: Synthetic oligonucleotide
  Target: LAMA2; (-) strand; PAM type: YTN; PAM sequence: CTG
ccatgggaaaagctggtagg

SEQ ID NO: 227230 - DNA, 20 bp, Artificial Sequence
  Description of Artificial Sequence: Synthetic oligonucleotide
  Target: LAMA2; (-) strand; PAM type: YTN; PAM sequence: TTC
tgccatgggaaaagctggta

SEQ ID NO: 227231 - DNA, 20 bp, Artificial Sequence
  Description of Artificial Sequence: Synthetic oligonucleotide
  Target: LAMA2; (-) strand; PAM type: YTN; PAM sequence: TTT
ctgccatgggaaaagctggt

SEQ ID NO: 227232 - DNA, 20 bp, Artificial Sequence
  Description of Artificial Sequence: Synthetic oligonucleotide
  Target: LAMA2; (-) strand; PAM type: YTN; PAM sequence: CTC
aaccatttctgccatgggaa

SEQ ID NO: 227233 - DNA, 20 bp, Artificial Sequence
  Description of Artificial Sequence: Synthetic oligonucleotide
  Target: LAMA2; (-) strand; PAM type: YTN; PAM sequence: CTG
tacagatctcaaccatttct

SEQ ID NO: 227234 - DNA, 20 bp, Artificial Sequence
  Description of Artificial Sequence: Synthetic oligonucleotide
  Target: LAMA2; (-) strand; PAM type: YTN; PAM sequence: TTC
tgtacagatctcaaccattt

SEQ ID NO: 227235 - DNA, 20 bp, Artificial Sequence
  Description of Artificial Sequence: Synthetic oligonucleotide
  Target: LAMA2; (-) strand; PAM type: YTN; PAM sequence: CTT
ctgtacagatctcaaccatt

SEQ ID NO: 227236 - DNA, 20 bp, Artificial Sequence
  Description of Artificial Sequence: Synthetic oligonucleotide
  Target: LAMA2; (-) strand; PAM type: YTN; PAM sequence: CTC
cttctgtacagatctcaacc

SEQ ID NO: 227237 - DNA, 20 bp, Artificial Sequence
  Description of Artificial Sequence: Synthetic oligonucleotide
  Target: LAMA2; (-) strand; PAM type: YTN; PAM sequence: CTA
aagtcctccttctgtacaga

SEQ ID NO: 227238 - DNA, 20 bp, Artificial Sequence
  Description of Artificial Sequence: Synthetic oligonucleotide
  Target: LAMA2; (-) strand; PAM type: YTN; PAM sequence: TTA
ccagactaaagtcctccttc

SEQ ID NO: 227239 - DNA, 20 bp, Artificial Sequence
  Description of Artificial Sequence: Synthetic oligonucleotide
  Target: LAMA2; (-) strand; PAM type: YTN; PAM sequence: CTG
ttaccagactaaagtcctcc

SEQ ID NO: 227240 - DNA, 20 bp, Artificial Sequence
  Description of Artificial Sequence: Synthetic oligonucleotide
  Target: LAMA2; (-) strand; PAM type: YTN; PAM sequence: CTC
agcaacaccacctgttacca

SEQ ID NO: 227241 - DNA, 20 bp, Artificial Sequence
  Description of Artificial Sequence: Synthetic oligonucleotide
  Target: LAMA2; (-) strand; PAM type: YTN; PAM sequence: TTG
cactcagcaacaccacctgt

SEQ ID NO: 227242 - DNA, 20 bp, Artificial Sequence
  Description of Artificial Sequence: Synthetic oligonucleotide
  Target: LAMA2; (-) strand; PAM type: YTN; PAM sequence: CTT
gcactcagcaacaccacctg

SEQ ID NO: 227243 - DNA, 20 bp, Artificial Sequence
  Description of Artificial Sequence: Synthetic oligonucleotide
  Target: LAMA2; (-) strand; PAM type: YTN; PAM sequence: TTC
aaaggcccttgcactcagca

SEQ ID NO: 227244 - DNA, 20 bp, Artificial Sequence
  Description of Artificial Sequence: Synthetic oligonucleotide
  Target: LAMA2; (-) strand; PAM type: YTN; PAM sequence: TTT
caaaggcccttgcactcagc

SEQ ID NO: 227245 - DNA, 20 bp, Artificial Sequence
  Description of Artificial Sequence: Synthetic oligonucleotide
  Target: LAMA2; (-) strand; PAM type: YTN; PAM sequence: CTG
atttcaaaggcccttgcact

SEQ ID NO: 227246 - DNA, 20 bp, Artificial Sequence
  Description of Artificial Sequence: Synthetic oligonucleotide
  Target: LAMA2; (-) strand; PAM type: YTN; PAM sequence: TTC
caaaccaggcctgatttcaa

SEQ ID NO: 227247 - DNA, 20 bp, Artificial Sequence
  Description of Artificial Sequence: Synthetic oligonucleotide
  Target: LAMA2; (-) strand; PAM type: YTN; PAM sequence: CTG
gaccaagattccaaaccagg

SEQ ID NO: 227248 - DNA, 20 bp, Artificial Sequence
  Description of Artificial Sequence: Synthetic oligonucleotide
  Target: LAMA2; (-) strand; PAM type: YTN; PAM sequence: TTG
ctggaccaagattccaaacc

SEQ ID NO: 227249 - DNA, 20 bp, Artificial Sequence
  Description of Artificial Sequence: Synthetic oligonucleotide
  Target: LAMA2; (-) strand; PAM type: YTN; PAM sequence: TTG
attgctggaccaagattcca

SEQ ID NO: 227250 - DNA, 20 bp, Artificial Sequence
  Description of Artificial Sequence: Synthetic oligonucleotide
  Target: LAMA2; (-) strand; PAM type: YTN; PAM sequence: CTA
ttgattgctggaccaagatt

SEQ ID NO: 227251 - DNA, 20 bp, Artificial Sequence
  Description of Artificial Sequence: Synthetic oligonucleotide
  Target: LAMA2; (-) strand; PAM type: YTN; PAM sequence: TTA
cacagctattgattgctgga

SEQ ID NO: 227252 - DNA, 20 bp, Artificial Sequence
  Description of Artificial Sequence: Synthetic oligonucleotide
  Target: LAMA2; (-) strand; PAM type: YTN; PAM sequence: CTA
agattacacagctattgatt

SEQ ID NO: 227253 - DNA, 20 bp, Artificial Sequence
  Description of Artificial Sequence: Synthetic oligonucleotide
  Target: LAMA2; (-) strand; PAM type: YTN; PAM sequence: TTA
cctaagattacacagctatt

SEQ ID NO: 227254 - DNA, 20 bp, Artificial Sequence
  Description of Artificial Sequence: Synthetic oligonucleotide
  Target: LAMA2; (-) strand; PAM type: YTN; PAM sequence: TTC
aaagagttacctaagattac

SEQ ID NO: 227255 - DNA, 20 bp, Artificial Sequence
  Description of Artificial Sequence: Synthetic oligonucleotide
  Target: LAMA2; (-) strand; PAM type: YTN; PAM sequence: CTT
caaagagttacctaagatta

SEQ ID NO: 227256 - DNA, 20 bp, Artificial Sequence
  Description of Artificial Sequence: Synthetic oligonucleotide
  Target: LAMA2; (-) strand; PAM type: YTN; PAM sequence: CTA
aacttcaaagagttacctaa

SEQ ID NO: 227257 - DNA, 20 bp, Artificial Sequence
  Description of Artificial Sequence: Synthetic oligonucleotide
  Target: LAMA2; (-) strand; PAM type: YTN; PAM sequence: TTA
gatgcggaaactaaacttca

SEQ ID NO: 227258 - DNA, 20 bp, Artificial Sequence
  Description of Artificial Sequence: Synthetic oligonucleotide
  Target: LAMA2; (-) strand; PAM type: YTN; PAM sequence: CTT
agatgcggaaactaaacttc

SEQ ID NO: 227259 - DNA, 20 bp, Artificial Sequence
  Description of Artificial Sequence: Synthetic oligonucleotide
  Target: LAMA2; (-) strand; PAM type: YTN; PAM sequence: TTC
ttagatgcggaaactaaact

SEQ ID NO: 227260 - DNA, 20 bp, Artificial Sequence
  Description of Artificial Sequence: Synthetic oligonucleotide
  Target: LAMA2; (-) strand; PAM type: YTN; PAM sequence: CTC
attcttagatgcggaaacta

SEQ ID NO: 227261 - DNA, 20 bp, Artificial Sequence
  Description of Artificial Sequence: Synthetic oligonucleotide
  Target: LAMA2; (-) strand; PAM type: YTN; PAM sequence: TTC
ctcattcttagatgcggaaa

SEQ ID NO: 227262 - DNA, 20 bp, Artificial Sequence
  Description of Artificial Sequence: Synthetic oligonucleotide
  Target: LAMA2; (-) strand; PAM type: YTN; PAM sequence: CTT
cctcattcttagatgcggaa

SEQ ID NO: 227263 - DNA, 20 bp, Artificial Sequence
  Description of Artificial Sequence: Synthetic oligonucleotide
  Target: LAMA2; (-) strand; PAM type: YTN; PAM sequence: TTA
tacttcctcattcttagatg

SEQ ID NO: 227264 - DNA, 20 bp, Artificial Sequence
  Description of Artificial Sequence: Synthetic oligonucleotide
  Target: LAMA2; (-) strand; PAM type: YTN; PAM sequence: TTT
atacttcctcattcttagat

SEQ ID NO: 227265 - DNA, 20 bp, Artificial Sequence
  Description of Artificial Sequence: Synthetic oligonucleotide
  Target: LAMA2; (-) strand; PAM type: YTN; PAM sequence: TTA
atacaaccaacgtgggcaga

SEQ ID NO: 227266 - DNA, 20 bp, Artificial Sequence
  Description of Artificial Sequence: Synthetic oligonucleotide
  Target: LAMA2; (-) strand; PAM type: YTN; PAM sequence: TTT
aatacaaccaacgtgggcag

SEQ ID NO: 227267 - DNA, 20 bp, Artificial Sequence
  Description of Artificial Sequence: Synthetic oligonucleotide
  Target: LAMA2; (-) strand; PAM type: YTN; PAM sequence: CTC
atttaatacaaccaacgtgg

SEQ ID NO: 227268 - DNA, 20 bp, Artificial Sequence
  Description of Artificial Sequence: Synthetic oligonucleotide
  Target: LAMA2; (-) strand; PAM type: YTN; PAM sequence: TTA
tctcatttaatacaaccaac

SEQ ID NO: 227269 - DNA, 20 bp, Artificial Sequence
  Description of Artificial Sequence: Synthetic oligonucleotide
  Target: LAMA2; (-) strand; PAM type: YTN; PAM sequence: TTA
tgtaaattatctcatttaat

SEQ ID NO: 227270 - DNA, 20 bp, Artificial Sequence
  Description of Artificial Sequence: Synthetic oligonucleotide
  Target: LAMA2; (-) strand; PAM type: YTN; PAM sequence: TTA
gtcggatgtgttatgtaaat

SEQ ID NO: 227271 - DNA, 20 bp, Artificial Sequence
  Description of Artificial Sequence: Synthetic oligonucleotide
  Target: LAMA2; (-) strand; PAM type: YTN; PAM sequence: CTT
agtcggatgtgttatgtaaa

SEQ ID NO: 227272 - DNA, 20 bp, Artificial Sequence
  Description of Artificial Sequence: Synthetic oligonucleotide
  Target: LAMA2; (-) strand; PAM type: YTN; PAM sequence: CTG
caccttagtcggatgtgtta

SEQ ID NO: 227273 - DNA, 20 bp, Artificial Sequence
  Description of Artificial Sequence: Synthetic oligonucleotide
  Target: LAMA2; (-) strand; PAM type: YTN; PAM sequence: TTA
catctgcaccttagtcggat

SEQ ID NO: 227274 - DNA, 20 bp, Artificial Sequence
  Description of Artificial Sequence: Synthetic oligonucleotide
  Target: LAMA2; (-) strand; PAM type: YTN; PAM sequence: TTA
ttacatctgcaccttagtcg

SEQ ID NO: 227275 - DNA, 20 bp, Artificial Sequence
  Description of Artificial Sequence: Synthetic oligonucleotide
  Target: LAMA2; (-) strand; PAM type: YTN; PAM sequence: TTT
attacatctgcaccttagtc

SEQ ID NO: 227276 - DNA, 20 bp, Artificial Sequence
  Description of Artificial Sequence: Synthetic oligonucleotide
  Target: LAMA2; (-) strand; PAM type: YTN; PAM sequence: CTG
tcatttattacatctgcacc

SEQ ID NO: 227277 - DNA, 20 bp, Artificial Sequence
  Description of Artificial Sequence: Synthetic oligonucleotide
  Target: LAMA2; (-) strand; PAM type: YTN; PAM sequence: CTG
aaataaatgataataacagc

SEQ ID NO: 227278 - DNA, 20 bp, Artificial Sequence
  Description of Artificial Sequence: Synthetic oligonucleotide
  Target: LAMA2; (-) strand; PAM type: YTN; PAM sequence: CTG
caacgtgctgaaataaatga

SEQ ID NO: 227279 - DNA, 20 bp, Artificial Sequence
  Description of Artificial Sequence: Synthetic oligonucleotide
  Target: LAMA2; (-) strand; PAM type: YTN; PAM sequence: TTC
tgcaacgtgctgaaataaat

SEQ ID NO: 227280 - DNA, 20 bp, Artificial Sequence
  Description of Artificial Sequence: Synthetic oligonucleotide
  Target: LAMA2; (-) strand; PAM type: YTN; PAM sequence: TTT
ctgcaacgtgctgaaataaa

SEQ ID NO: 227281 - DNA, 20 bp, Artificial Sequence
  Description of Artificial Sequence: Synthetic oligonucleotide
  Target: LAMA2; (-) strand; PAM type: YTN; PAM sequence: CTT
tctgcaacgtgctgaaataa

SEQ ID NO: 227282 - DNA, 20 bp, Artificial Sequence
  Description of Artificial Sequence: Synthetic oligonucleotide
  Target: LAMA2; (-) strand; PAM type: YTN; PAM sequence: TTG
ctttctgcaacgtgctgaaa

SEQ ID NO: 227283 - DNA, 20 bp, Artificial Sequence
  Description of Artificial Sequence: Synthetic oligonucleotide
  Target: LAMA2; (-) strand; PAM type: YTN; PAM sequence: TTG
taagttgctttctgcaacgt

SEQ ID NO: 227284 - DNA, 20 bp, Artificial Sequence
  Description of Artificial Sequence: Synthetic oligonucleotide
  Target: LAMA2; (-) strand; PAM type: YTN; PAM sequence: CTA
ggaggtcaggaaaagaagaa

SEQ ID NO: 227285 - DNA, 20 bp, Artificial Sequence
  Description of Artificial Sequence: Synthetic oligonucleotide
  Target: LAMA2; (-) strand; PAM type: YTN; PAM sequence: TTG
catgcataaaagccctagga

SEQ ID NO: 227286 - DNA, 20 bp, Artificial Sequence
  Description of Artificial Sequence: Synthetic oligonucleotide
  Target: LAMA2; (-) strand; PAM type: YTN; PAM sequence: CTA
attgcatgcataaaagccct

SEQ ID NO: 227287 - DNA, 20 bp, Artificial Sequence
  Description of Artificial Sequence: Synthetic oligonucleotide
  Target: LAMA2; (-) strand; PAM type: YTN; PAM sequence: TTG
ctaattgcatgcataaaagc

SEQ ID NO: 227288 - DNA, 20 bp, Artificial Sequence
  Description of Artificial Sequence: Synthetic oligonucleotide
  Target: LAMA2; (-) strand; PAM type: YTN; PAM sequence: TTG
tgcaaatcccaaattgctaa

SEQ ID NO: 227289 - DNA, 20 bp, Artificial Sequence
  Description of Artificial Sequence: Synthetic oligonucleotide
  Target: LAMA2; (-) strand; PAM type: YTN; PAM sequence: CTT
gtgcaaatcccaaattgcta

SEQ ID NO: 227290 - DNA, 20 bp, Artificial Sequence
  Description of Artificial Sequence: Synthetic oligonucleotide
  Target: LAMA2; (-) strand; PAM type: YTN; PAM sequence: CTG
gaaaaaccttgtgcaaatcc

SEQ ID NO: 227291 - DNA, 20 bp, Artificial Sequence
  Description of Artificial Sequence: Synthetic oligonucleotide
  Target: LAMA2; (-) strand; PAM type: YTN; PAM sequence: CTC
tggaaaaaccttgtgcaaat

SEQ ID NO: 227292 - DNA, 20 bp, Artificial Sequence
  Description of Artificial Sequence: Synthetic oligonucleotide
  Target: LAMA2; (-) strand; PAM type: YTN; PAM sequence: TTG
tactctggaaaaaccttgtg

SEQ ID NO: 227293 - DNA, 20 bp, Artificial Sequence
  Description of Artificial Sequence: Synthetic oligonucleotide
  Target: LAMA2; (-) strand; PAM type: YTN; PAM sequence: CTT
gtactctggaaaaaccttgt

SEQ ID NO: 227294 - DNA, 20 bp, Artificial Sequence
  Description of Artificial Sequence: Synthetic oligonucleotide
  Target: LAMA2; (-) strand; PAM type: YTN; PAM sequence: CTC
aaaaatcttgtactctggaa

SEQ ID NO: 227295 - DNA, 20 bp, Artificial Sequence
  Description of Artificial Sequence: Synthetic oligonucleotide
  Target: LAMA2; (-) strand; PAM type: YTN; PAM sequence: CTC
tcaaaaatcttgtactctgg

SEQ ID NO: 227296 - DNA, 20 bp, Artificial Sequence
  Description of Artificial Sequence: Synthetic oligonucleotide
  Target: LAMA2; (-) strand; PAM type: YTN; PAM sequence: TTC
agtcacagctctcaaaaatc

SEQ ID NO: 227297 - DNA, 20 bp, Artificial Sequence
  Description of Artificial Sequence: Synthetic oligonucleotide
  Target: LAMA2; (-) strand; PAM type: YTN; PAM sequence: CTA
aagaataagattcagtcaca

SEQ ID NO: 227298 - DNA, 20 bp, Artificial Sequence
  Description of Artificial Sequence: Synthetic oligonucleotide
  Target: LAMA2; (-) strand; PAM type: YTN; PAM sequence: TTC
taaagaataagattcagtca

SEQ ID NO: 227299 - DNA, 20 bp, Artificial Sequence
  Description of Artificial Sequence: Synthetic oligonucleotide
  Target: LAMA2; (-) strand; PAM type: YTN; PAM sequence: TTT
ctaaagaataagattcagtc

SEQ ID NO: 227300 - DNA, 20 bp, Artificial Sequence
  Description of Artificial Sequence: Synthetic oligonucleotide
  Target: LAMA2; (-) strand; PAM type: YTN; PAM sequence: CTC
aaagagcaagtttctaaaga

SEQ ID NO: 227301 - DNA, 20 bp, Artificial Sequence
  Description of Artificial Sequence: Synthetic oligonucleotide
  Target: LAMA2; (-) strand; PAM type: YTN; PAM sequence: CTC
cactcaaagagcaagtttct

SEQ ID NO: 227302 - DNA, 20 bp, Artificial Sequence
  Description of Artificial Sequence: Synthetic oligonucleotide
  Target: LAMA2; (-) strand; PAM type: YTN; PAM sequence: TTC
ctccactcaaagagcaagtt

SEQ ID NO: 227303 - DNA, 20 bp, Artificial Sequence
  Description of Artificial Sequence: Synthetic oligonucleotide
  Target: LAMA2; (-) strand; PAM type: YTN; PAM sequence: TTT
cctccactcaaagagcaagt

SEQ ID NO: 227304 - DNA, 20 bp, Artificial Sequence
  Description of Artificial Sequence: Synthetic oligonucleotide
  Target: LAMA2; (-) strand; PAM type: YTN; PAM sequence: TTT
tcctccactcaaagagcaag

SEQ ID NO: 227305 - DNA, 20 bp, Artificial Sequence
  Description of Artificial Sequence: Synthetic oligonucleotide
  Target: LAMA2; (-) strand; PAM type: YTN; PAM sequence: CTT
ttcctccactcaaagagcaa

SEQ ID NO: 227306 - DNA, 20 bp, Artificial Sequence
  Description of Artificial Sequence: Synthetic oligonucleotide
  Target: LAMA2; (-) strand; PAM type: YTN; PAM sequence: TTC
cttttcctccactcaaagag

SEQ ID NO: 227307 - DNA, 20 bp, Artificial Sequence
  Description of Artificial Sequence: Synthetic oligonucleotide
  Target: LAMA2; (-) strand; PAM type: YTN; PAM sequence: CTT
ccttttcctccactcaaaga

SEQ ID NO: 227308 - DNA, 20 bp, Artificial Sequence
  Description of Artificial Sequence: Synthetic oligonucleotide
  Target: LAMA2; (-) strand; PAM type: YTN; PAM sequence: TTC
ttccttttcctccactcaaa

SEQ ID NO: 227309 - DNA, 20 bp, Artificial Sequence
  Description of Artificial Sequence: Synthetic oligonucleotide
  Target: LAMA2; (-) strand; PAM type: YTN; PAM sequence: TTT
cttccttttcctccactcaa

SEQ ID NO: 227310 - DNA, 20 bp, Artificial Sequence
  Description of Artificial Sequence: Synthetic oligonucleotide
  Target: LAMA2; (-) strand; PAM type: YTN; PAM sequence: TTA
gtttcttccttttcctccac

SEQ ID NO: 227311 - DNA, 20 bp, Artificial Sequence
  Description of Artificial Sequence: Synthetic oligonucleotide
  Target: LAMA2; (-) strand; PAM type: YTN; PAM sequence: CTT
agtttcttccttttcctcca

SEQ ID NO: 227312 - DNA, 20 bp, Artificial Sequence
  Description of Artificial Sequence: Synthetic oligonucleotide
  Target: LAMA2; (-) strand; PAM type: YTN; PAM sequence: TTA
gtcaacttagtttcttcctt

SEQ ID NO: 227313 - DNA, 20 bp, Artificial Sequence
  Description of Artificial Sequence: Synthetic oligonucleotide
  Target: LAMA2; (-) strand; PAM type: YTN; PAM sequence: TTA
taatgtcattagtcaactta

SEQ ID NO: 227314 - DNA, 20 bp, Artificial Sequence
  Description of Artificial Sequence: Synthetic oligonucleotide
  Target: LAMA2; (-) strand; PAM type: YTN; PAM sequence: TTT
ataatgtcattagtcaactt

SEQ ID NO: 227315 - DNA, 20 bp, Artificial Sequence
  Description of Artificial Sequence: Synthetic oligonucleotide
  Target: LAMA2; (-) strand; PAM type: YTN; PAM sequence: TTT
tataatgtcattagtcaact

SEQ ID NO: 227316 - DNA, 20 bp, Artificial Sequence
  Description of Artificial Sequence: Synthetic oligonucleotide
  Target: LAMA2; (-) strand; PAM type: YTN; PAM sequence: CTT
ttataatgtcattagtcaac

SEQ ID NO: 227317 - DNA, 20 bp, Artificial Sequence
  Description of Artificial Sequence: Synthetic oligonucleotide
  Target: LAMA2; (-) strand; PAM type: YTN; PAM sequence: CTG
cttttataatgtcattagtc

SEQ ID NO: 227318 - DNA, 20 bp, Artificial Sequence
  Description of Artificial Sequence: Synthetic oligonucleotide
  Target: LAMA2; (-) strand; PAM type: YTN; PAM sequence: CTA
cctgcttttataatgtcatt

SEQ ID NO: 227319 - DNA, 20 bp, Artificial Sequence
  Description of Artificial Sequence: Synthetic oligonucleotide
  Target: LAMA2; (-) strand; PAM type: YTN; PAM sequence: CTC
tacctgcttttataatgtca

SEQ ID NO: 227320 - DNA, 20 bp, Artificial Sequence
  Description of Artificial Sequence: Synthetic oligonucleotide
  Target: LAMA2; (-) strand; PAM type: YTN; PAM sequence: TTC
tctacctgcttttataatgt

SEQ ID NO: 227321 - DNA, 20 bp, Artificial Sequence
  Description of Artificial Sequence: Synthetic oligonucleotide
  Target: LAMA2; (-) strand; PAM type: YTN; PAM sequence: CTC
agaaagaaatgattctctac

SEQ ID NO: 227322 - DNA, 20 bp, Artificial Sequence
  Description of Artificial Sequence: Synthetic oligonucleotide
  Target: LAMA2; (-) strand; PAM type: YTN; PAM sequence: CTA
cagaagctcagaaagaaatg

SEQ ID NO: 227323 - DNA, 20 bp, Artificial Sequence
  Description of Artificial Sequence: Synthetic oligonucleotide
  Target: LAMA2; (-) strand; PAM type: YTN; PAM sequence: CTG
tgctacagaagctcagaaag

SEQ ID NO: 227324 - DNA, 20 bp, Artificial Sequence
  Description of Artificial Sequence: Synthetic oligonucleotide
  Target: LAMA2; (-) strand; PAM type: YTN; PAM sequence: TTC
atagcctgtgctacagaagc

SEQ ID NO: 227325 - DNA, 20 bp, Artificial Sequence
  Description of Artificial Sequence: Synthetic oligonucleotide
  Target: LAMA2; (-) strand; PAM type: YTN; PAM sequence: CTT
catagcctgtgctacagaag

SEQ ID NO: 227326 - DNA, 20 bp, Artificial Sequence
  Description of Artificial Sequence: Synthetic oligonucleotide
  Target: LAMA2; (-) strand; PAM type: YTN; PAM sequence: CTA
gcacacttcatagcctgtgc

SEQ ID NO: 227327 - DNA, 20 bp, Artificial Sequence
  Description of Artificial Sequence: Synthetic oligonucleotide
  Target: LAMA2; (-) strand; PAM type: YTN; PAM sequence: TTA
ctagcacacttcatagcctg

SEQ ID NO: 227328 - DNA, 20 bp, Artificial Sequence
  Description of Artificial Sequence: Synthetic oligonucleotide
  Target: LAMA2; (-) strand; PAM type: YTN; PAM sequence: TTT
actagcacacttcatagcct

SEQ ID NO: 227329 - DNA, 20 bp, Artificial Sequence
  Description of Artificial Sequence: Synthetic oligonucleotide
  Target: LAMA2; (-) strand; PAM type: YTN; PAM sequence: CTT
tactagcacacttcatagcc

SEQ ID NO: 227330 - DNA, 20 bp, Artificial Sequence
  Description of Artificial Sequence: Synthetic oligonucleotide
  Target: LAMA2; (-) strand; PAM type: YTN; PAM sequence: TTA
ctttactagcacacttcata

SEQ ID NO: 227331 - DNA, 20 bp, Artificial Sequence
  Description of Artificial Sequence: Synthetic oligonucleotide
  Target: LAMA2; (-) strand; PAM type: YTN; PAM sequence: TTT
actttactagcacacttcat

SEQ ID NO: 227332 - DNA, 20 bp, Artificial Sequence
  Description of Artificial Sequence: Synthetic oligonucleotide
  Target: LAMA2; (-) strand; PAM type: YTN; PAM sequence: TTG
tatttactttactagcacac

SEQ ID NO: 227333 - DNA, 20 bp, Artificial Sequence
  Description of Artificial Sequence: Synthetic oligonucleotide
  Target: LAMA2; (-) strand; PAM type: YTN; PAM sequence: TTA
aaattgtatttactttacta

SEQ ID NO: 227334 - DNA, 20 bp, Artificial Sequence
  Description of Artificial Sequence: Synthetic oligonucleotide
  Target: LAMA2; (-) strand; PAM type: YTN; PAM sequence: CTT
aaaattgtatttactttact

SEQ ID NO: 227335 - DNA, 20 bp, Artificial Sequence
  Description of Artificial Sequence: Synthetic oligonucleotide
  Target: LAMA2; (-) strand; PAM type: YTN; PAM sequence: TTG
cttaaaattgtatttacttt

SEQ ID NO: 227336 - DNA, 20 bp, Artificial Sequence
  Description of Artificial Sequence: Synthetic oligonucleotide
  Target: LAMA2; (-) strand; PAM type: YTN; PAM sequence: TTT
gcttaaaattgtatttactt

SEQ ID NO: 227337 - DNA, 20 bp, Artificial Sequence
  Description of Artificial Sequence: Synthetic oligonucleotide
  Target: LAMA2; (-) strand; PAM type: YTN; PAM sequence: CTT
tgcttaaaattgtatttact

SEQ ID NO: 227338 - DNA, 20 bp, Artificial Sequence
  Description of Artificial Sequence: Synthetic oligonucleotide
  Target: LAMA2; (-) strand; PAM type: YTN; PAM sequence: CTG
aaactttgcttaaaattgta

SEQ ID NO: 227339 - DNA, 20 bp, Artificial Sequence
  Description of Artificial Sequence: Synthetic oligonucleotide
  Target: LAMA2; (-) strand; PAM type: YTN; PAM sequence: TTC
tgaaactttgcttaaaattg

SEQ ID NO: 227340 - DNA, 20 bp, Artificial Sequence
  Description of Artificial Sequence: Synthetic oligonucleotide
  Target: LAMA2; (-) strand; PAM type: YTN; PAM sequence: TTT
ctgaaactttgcttaaaatt

SEQ ID NO: 227341 - DNA, 20 bp, Artificial Sequence
  Description of Artificial Sequence: Synthetic oligonucleotide
  Target: LAMA2; (-) strand; PAM type: YTN; PAM sequence: TTA
tggtgatttctgaaactttg

SEQ ID NO: 227342 - DNA, 20 bp, Artificial Sequence
  Description of Artificial Sequence: Synthetic oligonucleotide
  Target: LAMA2; (-) strand; PAM type: YTN; PAM sequence: TTA
ttatggtgatttctgaaact

SEQ ID NO: 227343 - DNA, 20 bp, Artificial Sequence
  Description of Artificial Sequence: Synthetic oligonucleotide
  Target: LAMA2; (-) strand; PAM type: YTN; PAM sequence: TTT
attatggtgatttctgaaac

SEQ ID NO: 227344 - DNA, 20 bp, Artificial Sequence
  Description of Artificial Sequence: Synthetic oligonucleotide
  Target: LAMA2; (-) strand; PAM type: YTN; PAM sequence: TTT
tattatggtgatttctgaaa

SEQ ID NO: 227345 - DNA, 20 bp, Artificial Sequence
  Description of Artificial Sequence: Synthetic oligonucleotide
  Target: LAMA2; (-) strand; PAM type: YTN; PAM sequence: TTA
ttttattatggtgatttctg

SEQ ID NO: 227346 - DNA, 20 bp, Artificial Sequence
  Description of Artificial Sequence: Synthetic oligonucleotide
  Target: LAMA2; (-) strand; PAM type: YTN; PAM sequence: TTT
attttattatggtgatttct

SEQ ID NO: 227347 - DNA, 20 bp, Artificial Sequence
  Description of Artificial Sequence: Synthetic oligonucleotide
  Target: LAMA2; (-) strand; PAM type: YTN; PAM sequence: CTT
tattttattatggtgatttc

SEQ ID NO: 227348 - DNA, 20 bp, Artificial Sequence
  Description of Artificial Sequence: Synthetic oligonucleotide
  Target: LAMA2; (-) strand; PAM type: YTN; PAM sequence: TTA
cagactttattttattatgg

SEQ ID NO: 227349 - DNA, 20 bp, Artificial Sequence
  Description of Artificial Sequence: Synthetic oligonucleotide
  Target: LAMA2; (-) strand; PAM type: YTN; PAM sequence: CTT
acagactttattttattatg

SEQ ID NO: 227350 - DNA, 20 bp, Artificial Sequence
  Description of Artificial Sequence: Synthetic oligonucleotide
  Target: LAMA2; (-) strand; PAM type: YTN; PAM sequence: CTG
ggacttacagactttatttt

SEQ ID NO: 227351 - DNA, 20 bp, Artificial Sequence
  Description of Artificial Sequence: Synthetic oligonucleotide
  Target: LAMA2; (-) strand; PAM type: YTN; PAM sequence: TTA
atagctgggacttacagact

SEQ ID NO: 227352 - DNA, 20 bp, Artificial Sequence
  Description of Artificial Sequence: Synthetic oligonucleotide
  Target: LAMA2; (-) strand; PAM type: YTN; PAM sequence: TTT
aatagctgggacttacagac

SEQ ID NO: 227353 - DNA, 20 bp, Artificial Sequence
  Description of Artificial Sequence: Synthetic oligonucleotide
  Target: LAMA2; (-) strand; PAM type: YTN; PAM sequence: CTG
ccagtttaatagctgggact

SEQ ID NO: 227354 - DNA, 20 bp, Artificial Sequence
  Description of Artificial Sequence: Synthetic oligonucleotide
  Target: LAMA2; (-) strand; PAM type: YTN; PAM sequence: TTA
atgaatgtaggtccctgcca

SEQ ID NO: 227355 - DNA, 20 bp, Artificial Sequence
  Description of Artificial Sequence: Synthetic oligonucleotide
  Target: LAMA2; (-) strand; PAM type: YTN; PAM sequence: TTT
aatgaatgtaggtccctgcc

SEQ ID NO: 227356 - DNA, 20 bp, Artificial Sequence
  Description of Artificial Sequence: Synthetic oligonucleotide
  Target: LAMA2; (-) strand; PAM type: YTN; PAM sequence: TTA
atttaatgaatgtaggtccc

SEQ ID NO: 227357 - DNA, 20 bp, Artificial Sequence
  Description of Artificial Sequence: Synthetic oligonucleotide
  Target: LAMA2; (-) strand; PAM type: YTN; PAM sequence: TTT
aatttaatgaatgtaggtcc

SEQ ID NO: 227358 - DNA, 20 bp, Artificial Sequence
  Description of Artificial Sequence: Synthetic oligonucleotide
  Target: LAMA2; (-) strand; PAM type: YTN; PAM sequence: TTG
catttaatttaatgaatgta

SEQ ID NO: 227359 - DNA, 20 bp, Artificial Sequence
  Description of Artificial Sequence: Synthetic oligonucleotide
  Target: LAMA2; (-) strand; PAM type: YTN; PAM sequence: TTG
cacattgcatttaatttaat

SEQ ID NO: 227360 - DNA, 20 bp, Artificial Sequence
  Description of Artificial Sequence: Synthetic oligonucleotide
  Target: LAMA2; (-) strand; PAM type: YTN; PAM sequence: TTC
gaacaacattgcacattgca

SEQ ID NO: 227361 - DNA, 20 bp, Artificial Sequence
  Description of Artificial Sequence: Synthetic oligonucleotide
  Target: LAMA2; (-) strand; PAM type: YTN; PAM sequence: TTT
cgaacaacattgcacattgc

SEQ ID NO: 227362 - DNA, 20 bp, Artificial Sequence
  Description of Artificial Sequence: Synthetic oligonucleotide
  Target: LAMA2; (-) strand; PAM type: YTN; PAM sequence: CTT
tcgaacaacattgcacattg

SEQ ID NO: 227363 - DNA, 20 bp, Artificial Sequence
  Description of Artificial Sequence: Synthetic oligonucleotide
  Target: LAMA2; (-) strand; PAM type: YTN; PAM sequence: TTG
aacaactttcgaacaacatt

SEQ ID NO: 227364 - DNA, 20 bp, Artificial Sequence
  Description of Artificial Sequence: Synthetic oligonucleotide
  Target: LAMA2; (-) strand; PAM type: YTN; PAM sequence: TTT
gaacaactttcgaacaacat

SEQ ID NO: 227365 - DNA, 20 bp, Artificial Sequence
  Description of Artificial Sequence: Synthetic oligonucleotide
  Target: LAMA2; (-) strand; PAM type: YTN; PAM sequence: TTT
tgaacaactttcgaacaaca

SEQ ID NO: 227366 - DNA, 20 bp, Artificial Sequence
  Description of Artificial Sequence: Synthetic oligonucleotide
  Target: LAMA2; (-) strand; PAM type: YTN; PAM sequence: CTA
aaaacattttgaacaacttt

SEQ ID NO: 227367 - DNA, 20 bp, Artificial Sequence
  Description of Artificial Sequence: Synthetic oligonucleotide
  Target: LAMA2; (-) strand; PAM type: YTN; PAM sequence: TTC
taaaaacattttgaacaact

SEQ ID NO: 227368 - DNA, 20 bp, Artificial Sequence
  Description of Artificial Sequence: Synthetic oligonucleotide
  Target: LAMA2; (-) strand; PAM type: YTN; PAM sequence: CTC
caagaaaaattctaaaaaca

SEQ ID NO: 227369 - DNA, 20 bp, Artificial Sequence
  Description of Artificial Sequence: Synthetic oligonucleotide
  Target: LAMA2; (-) strand; PAM type: YTN; PAM sequence: TTA
taaaagcaatcaactccaag

SEQ ID NO: 227370 - DNA, 20 bp, Artificial Sequence
  Description of Artificial Sequence: Synthetic oligonucleotide
  Target: LAMA2; (-) strand; PAM type: YTN; PAM sequence: CTG
agagtcaagacgtgaagtca

SEQ ID NO: 227371 - DNA, 20 bp, Artificial Sequence
  Description of Artificial Sequence: Synthetic oligonucleotide
  Target: LAMA2; (-) strand; PAM type: YTN; PAM sequence: CTA
aggagacaaacaaaatcact

SEQ ID NO: 227372 - DNA, 20 bp, Artificial Sequence
  Description of Artificial Sequence: Synthetic oligonucleotide
  Target: LAMA2; (-) strand; PAM type: YTN; PAM sequence: TTG
gggctaaggagacaaacaaa

SEQ ID NO: 227373 - DNA, 20 bp, Artificial Sequence
  Description of Artificial Sequence: Synthetic oligonucleotide
  Target: LAMA2; (-) strand; PAM type: YTN; PAM sequence: TTT
ggggctaaggagacaaacaa

SEQ ID NO: 227374 - DNA, 20 bp, Artificial Sequence
  Description of Artificial Sequence: Synthetic oligonucleotide
  Target: LAMA2; (-) strand; PAM type: YTN; PAM sequence: TTT
tggggctaaggagacaaaca

SEQ ID NO: 227375 - DNA, 20 bp, Artificial Sequence
  Description of Artificial Sequence: Synthetic oligonucleotide
  Target: LAMA2; (-) strand; PAM type: YTN; PAM sequence: TTA
aggtgaataattttggggct

SEQ ID NO: 227376 - DNA, 20 bp, Artificial Sequence
  Description of Artificial Sequence: Synthetic oligonucleotide
  Target: LAMA2; (-) strand; PAM type: YTN; PAM sequence: TTT
aaggtgaataattttggggc

SEQ ID NO: 227377 - DNA, 20 bp, Artificial Sequence
  Description of Artificial Sequence: Synthetic oligonucleotide
  Target: LAMA2; (-) strand; PAM type: YTN; PAM sequence: TTT
taaggtgaataattttgggg

SEQ ID NO: 227378 - DNA, 20 bp, Artificial Sequence
  Description of Artificial Sequence: Synthetic oligonucleotide
  Target: LAMA2; (-) strand; PAM type: YTN; PAM sequence: CTT
ttaaggtgaataattttggg

SEQ ID NO: 227379 - DNA, 20 bp, Artificial Sequence
  Description of Artificial Sequence: Synthetic oligonucleotide
  Target: LAMA2; (-) strand; PAM type: YTN; PAM sequence: TTC
atcttttaaggtgaataatt

SEQ ID NO: 227380 - DNA, 20 bp, Artificial Sequence
  Description of Artificial Sequence: Synthetic oligonucleotide
  Target: LAMA2; (-) strand; PAM type: YTN; PAM sequence: TTT
catcttttaaggtgaataat

SEQ ID NO: 227381 - DNA, 20 bp, Artificial Sequence
  Description of Artificial Sequence: Synthetic oligonucleotide
  Target: LAMA2; (-) strand; PAM type: YTN; PAM sequence: TTA
ccaaatttcatcttttaagg

SEQ ID NO: 227382 - DNA, 20 bp, Artificial Sequence
  Description of Artificial Sequence: Synthetic oligonucleotide
  Target: LAMA2; (-) strand; PAM type: YTN; PAM sequence: TTA
atattaccaaatttcatctt

SEQ ID NO: 227383 - DNA, 20 bp, Artificial Sequence
  Description of Artificial Sequence: Synthetic oligonucleotide
  Target: LAMA2; (-) strand; PAM type: YTN; PAM sequence: CTT
aatattaccaaatttcatct

SEQ ID NO: 227384 - DNA, 20 bp, Artificial Sequence
  Description of Artificial Sequence: Synthetic oligonucleotide
  Target: LAMA2; (-) strand; PAM type: YTN; PAM sequence: CTG
tcttaatattaccaaatttc

SEQ ID NO: 227385 - DNA, 20 bp, Artificial Sequence
  Description of Artificial Sequence: Synthetic oligonucleotide
  Target: LAMA2; (-) strand; PAM type: YTN; PAM sequence: TTG
actgtcttaatattaccaaa

SEQ ID NO: 227386 - DNA, 20 bp, Artificial Sequence
  Description of Artificial Sequence: Synthetic oligonucleotide
  Target: LAMA2; (-) strand; PAM type: YTN; PAM sequence: TTT
gactgtcttaatattaccaa

SEQ ID NO: 227387 - DNA, 20 bp, Artificial Sequence
  Description of Artificial Sequence: Synthetic oligonucleotide
  Target: LAMA2; (-) strand; PAM type: YTN; PAM sequence: CTT
tgactgtcttaatattacca

SEQ ID NO: 227388 - DNA, 20 bp, Artificial Sequence
  Description of Artificial Sequence: Synthetic oligonucleotide
  Target: LAMA2; (-) strand; PAM type: YTN; PAM sequence: TTC
ctttgactgtcttaatatta

SEQ ID NO: 227389 - DNA, 20 bp, Artificial Sequence
  Description of Artificial Sequence: Synthetic oligonucleotide
  Target: LAMA2; (-) strand; PAM type: YTN; PAM sequence: TTC
aggacattcctttgactgtc

SEQ ID NO: 227390 - DNA, 20 bp, Artificial Sequence
  Description of Artificial Sequence: Synthetic oligonucleotide
  Target: LAMA2; (-) strand; PAM type: YTN; PAM sequence: CTT
caggacattcctttgactgt

SEQ ID NO: 227391 - DNA, 20 bp, Artificial Sequence
  Description of Artificial Sequence: Synthetic oligonucleotide
  Target: LAMA2; (-) strand; PAM type: YTN; PAM sequence: CTG
tgatcagaacttcaggacat

SEQ ID NO: 227392 - DNA, 20 bp, Artificial Sequence
  Description of Artificial Sequence: Synthetic oligonucleotide
  Target: LAMA2; (-) strand; PAM type: YTN; PAM sequence: TTC
atagctgtgatcagaacttc

SEQ ID NO: 227393 - DNA, 20 bp, Artificial Sequence
  Description of Artificial Sequence: Synthetic oligonucleotide
  Target: LAMA2; (-) strand; PAM type: YTN; PAM sequence: CTA
ttcatagctgtgatcagaac

SEQ ID NO: 227394 - DNA, 20 bp, Artificial Sequence
  Description of Artificial Sequence: Synthetic oligonucleotide
  Target: LAMA2; (-) strand; PAM type: YTN; PAM sequence: TTA
gaactattcatagctgtgat

SEQ ID NO: 227395 - DNA, 20 bp, Artificial Sequence
  Description of Artificial Sequence: Synthetic oligonucleotide
  Target: LAMA2; (-) strand; PAM type: YTN; PAM sequence: TTT
agaactattcatagctgtga

SEQ ID NO: 227396 - DNA, 20 bp, Artificial Sequence
  Description of Artificial Sequence: Synthetic oligonucleotide
  Target: LAMA2; (-) strand; PAM type: YTN; PAM sequence: TTT
tagaactattcatagctgtg

SEQ ID NO: 227397 - DNA, 20 bp, Artificial Sequence
  Description of Artificial Sequence: Synthetic oligonucleotide
  Target: LAMA2; (-) strand; PAM type: YTN; PAM sequence: TTA
gaagattttagaactattca

SEQ ID NO: 227398 - DNA, 20 bp, Artificial Sequence
  Description of Artificial Sequence: Synthetic oligonucleotide
  Target: LAMA2; (-) strand; PAM type: YTN; PAM sequence: TTT
agaagattttagaactattc

SEQ ID NO: 227399 - DNA, 20 bp, Artificial Sequence
  Description of Artificial Sequence: Synthetic oligonucleotide
  Target: LAMA2; (-) strand; PAM type: YTN; PAM sequence: CTA
tacatatcccaaaaatattt

SEQ ID NO: 227400 - DNA, 20 bp, Artificial Sequence
  Description of Artificial Sequence: Synthetic oligonucleotide
  Target: LAMA2; (-) strand; PAM type: YTN; PAM sequence: TTC
tatacatatcccaaaaatat

SEQ ID NO: 227401 - DNA, 20 bp, Artificial Sequence
  Description of Artificial Sequence: Synthetic oligonucleotide
  Target: LAMA2; (-) strand; PAM type: YTN; PAM sequence: TTG
gttctatacatatcccaaaa

SEQ ID NO: 227402 - DNA, 20 bp, Artificial Sequence
  Description of Artificial Sequence: Synthetic oligonucleotide
  Target: LAMA2; (-) strand; PAM type: YTN; PAM sequence: CTT
ggttctatacatatcccaaa

SEQ ID NO: 227403 - DNA, 20 bp, Artificial Sequence
  Description of Artificial Sequence: Synthetic oligonucleotide
  Target: LAMA2; (-) strand; PAM type: YTN; PAM sequence: TTC
acacaaatcatcttggttct

SEQ ID NO: 227404 - DNA, 20 bp, Artificial Sequence
  Description of Artificial Sequence: Synthetic oligonucleotide
  Target: LAMA2; (-) strand; PAM type: YTN; PAM sequence: CTT
cacacaaatcatcttggttc

SEQ ID NO: 227405 - DNA, 20 bp, Artificial Sequence
  Description of Artificial Sequence: Synthetic oligonucleotide
  Target: LAMA2; (-) strand; PAM type: YTN; PAM sequence: CTA
agtgaatggaaaaacccttc

SEQ ID NO: 227406 - DNA, 20 bp, Artificial Sequence
  Description of Artificial Sequence: Synthetic oligonucleotide
  Target: LAMA2; (-) strand; PAM type: YTN; PAM sequence: TTA
aaatataatacaactaagtg

SEQ ID NO: 227407 - DNA, 20 bp, Artificial Sequence
  Description of Artificial Sequence: Synthetic oligonucleotide
  Target: LAMA2; (-) strand; PAM type: YTN; PAM sequence: TTA
tattaaaatataatacaact

SEQ ID NO: 227408 - DNA, 20 bp, Artificial Sequence
  Description of Artificial Sequence: Synthetic oligonucleotide
  Target: LAMA2; (-) strand; PAM type: YTN; PAM sequence: TTA
aacaattatattaaaatata

SEQ ID NO: 227409 - DNA, 20 bp, Artificial Sequence
  Description of Artificial Sequence: Synthetic oligonucleotide
  Target: LAMA2; (-) strand; PAM type: YTN; PAM sequence: TTT
aaacaattatattaaaatat

SEQ ID NO: 227410 - DNA, 20 bp, Artificial Sequence
  Description of Artificial Sequence: Synthetic oligonucleotide
  Target: LAMA2; (-) strand; PAM type: YTN; PAM sequence: TTT
taaacaattatattaaaata

SEQ ID NO: 227411 - DNA, 20 bp, Artificial Sequence
  Description of Artificial Sequence: Synthetic oligonucleotide
  Target: LAMA2; (-) strand; PAM type: YTN; PAM sequence: TTT
ttaaacaattatattaaaat

SEQ ID NO: 227412 - DNA, 20 bp, Artificial Sequence
  Description of Artificial Sequence: Synthetic oligonucleotide
  Target: LAMA2; (-) strand; PAM type: YTN; PAM sequence: TTT
tttaaacaattatattaaaa

SEQ ID NO: 227413 - DNA, 20 bp, Artificial Sequence
  Description of Artificial Sequence: Synthetic oligonucleotide
  Target: LAMA2; (-) strand; PAM type: YTN; PAM sequence: CTT
ttttaaacaattatattaaa

SEQ ID NO: 227414 - DNA, 20 bp, Artificial Sequence
  Description of Artificial Sequence: Synthetic oligonucleotide
  Target: LAMA2; (-) strand; PAM type: YTN; PAM sequence: CTA
taacatgaatcttttttaaa

SEQ ID NO: 227415 - DNA, 20 bp, Artificial Sequence
  Description of Artificial Sequence: Synthetic oligonucleotide
  Target: LAMA2; (-) strand; PAM type: YTN; PAM sequence: CTG
tgactataacatgaatcttt

SEQ ID NO: 227416 - DNA, 20 bp, Artificial Sequence
  Description of Artificial Sequence: Synthetic oligonucleotide
  Target: LAMA2; (-) strand; PAM type: YTN; PAM sequence: TTA
atctgtgactataacatgaa

SEQ ID NO: 227417 - DNA, 20 bp, Artificial Sequence
  Description of Artificial Sequence: Synthetic oligonucleotide
  Target: LAMA2; (-) strand; PAM type: YTN; PAM sequence: TTT
aatctgtgactataacatga

SEQ ID NO: 227418 - DNA, 20 bp, Artificial Sequence
  Description of Artificial Sequence: Synthetic oligonucleotide
  Target: LAMA2; (-) strand; PAM type: YTN; PAM sequence: TTT
taatctgtgactataacatg

SEQ ID NO: 227419 - DNA, 20 bp, Artificial Sequence
  Description of Artificial Sequence: Synthetic oligonucleotide
  Target: LAMA2; (-) strand; PAM type: YTN; PAM sequence: CTT
ttaatctgtgactataacat

SEQ ID NO: 227420 - DNA, 20 bp, Artificial Sequence
  Description of Artificial Sequence: Synthetic oligonucleotide
  Target: LAMA2; (-) strand; PAM type: YTN; PAM sequence: CTG
ccttttaatctgtgactata

SEQ ID NO: 227421 - DNA, 20 bp, Artificial Sequence
  Description of Artificial Sequence: Synthetic oligonucleotide
  Target: LAMA2; (-) strand; PAM type: YTN; PAM sequence: TTA
aaaactgccttttaatctgt

SEQ ID NO: 227422 - DNA, 20 bp, Artificial Sequence
  Description of Artificial Sequence: Synthetic oligonucleotide
  Target: LAMA2; (-) strand; PAM type: YTN; PAM sequence: TTT
aaaaactgccttttaatctg

SEQ ID NO: 227423 - DNA, 20 bp, Artificial Sequence
  Description of Artificial Sequence: Synthetic oligonucleotide
  Target: LAMA2; (-) strand; PAM type: YTN; PAM sequence: CTT
taaaaactgccttttaatct

SEQ ID NO: 227424 - DNA, 20 bp, Artificial Sequence
  Description of Artificial Sequence: Synthetic oligonucleotide
  Target: LAMA2; (-) strand; PAM type: YTN; PAM sequence: CTC
ctttaaaaactgccttttaa

SEQ ID NO: 227425 - DNA, 20 bp, Artificial Sequence
  Description of Artificial Sequence: Synthetic oligonucleotide
  Target: LAMA2; (-) strand; PAM type: YTN; PAM sequence: TTC
atctcctttaaaaactgcct

SEQ ID NO: 227426 - DNA, 20 bp, Artificial Sequence
  Description of Artificial Sequence: Synthetic oligonucleotide
  Target: LAMA2; (-) strand; PAM type: YTN; PAM sequence: TTA
attcatctcctttaaaaact

SEQ ID NO: 227427 - DNA, 20 bp, Artificial Sequence
  Description of Artificial Sequence: Synthetic oligonucleotide
  Target: LAMA2; (-) strand; PAM type: YTN; PAM sequence: CTG
ttaattcatctcctttaaaa

SEQ ID NO: 227428 - DNA, 20 bp, Artificial Sequence
  Description of Artificial Sequence: Synthetic oligonucleotide
  Target: LAMA2; (-) strand; PAM type: YTN; PAM sequence: CTG
aaactgttaattcatctcct

SEQ ID NO: 227429 - DNA, 20 bp, Artificial Sequence
  Description of Artificial Sequence: Synthetic oligonucleotide
  Target: LAMA2; (-) strand; PAM type: YTN; PAM sequence: CTC
tgaaactgttaattcatctc

SEQ ID NO: 227430 - DNA, 20 bp, Artificial Sequence
  Description of Artificial Sequence: Synthetic oligonucleotide
  Target: LAMA2; (-) strand; PAM type: YTN; PAM sequence: TTC
tctgaaactgttaattcatc

SEQ ID NO: 227431 - DNA, 20 bp, Artificial Sequence
  Description of Artificial Sequence: Synthetic oligonucleotide
  Target: LAMA2; (-) strand; PAM type: YTN; PAM sequence: TTT
ctctgaaactgttaattcat

SEQ ID NO: 227432 - DNA, 20 bp, Artificial Sequence
  Description of Artificial Sequence: Synthetic oligonucleotide
  Target: LAMA2; (-) strand; PAM type: YTN; PAM sequence: TTG
tttctctgaaactgttaatt

SEQ ID NO: 227433 - DNA, 20 bp, Artificial Sequence
  Description of Artificial Sequence: Synthetic oligonucleotide
  Target: LAMA2; (-) strand; PAM type: YTN; PAM sequence: TTA
aaattgtttctctgaaactg

SEQ ID NO: 227434 - DNA, 20 bp, Artificial Sequence
  Description of Artificial Sequence: Synthetic oligonucleotide
  Target: LAMA2; (-) strand; PAM type: YTN; PAM sequence: TTA
ttaaaattgtttctctgaaa

SEQ ID NO: 227435 - DNA, 20 bp, Artificial Sequence
  Description of Artificial Sequence: Synthetic oligonucleotide
  Target: LAMA2; (-) strand; PAM type: YTN; PAM sequence: TTC
agaataaataaatgtataaa

SEQ ID NO: 227436 - DNA, 20 bp, Artificial Sequence
  Description of Artificial Sequence: Synthetic oligonucleotide
  Target: LAMA2; (-) strand; PAM type: YTN; PAM sequence: TTT
cagaataaataaatgtataa

SEQ ID NO: 227437 - DNA, 20 bp, Artificial Sequence
  Description of Artificial Sequence: Synthetic oligonucleotide
  Target: LAMA2; (-) strand; PAM type: YTN; PAM sequence: TTT
tcagaataaataaatgtata

SEQ ID NO: 227438 - DNA, 20 bp, Artificial Sequence
  Description of Artificial Sequence: Synthetic oligonucleotide
  Target: LAMA2; (-) strand; PAM type: YTN; PAM sequence: CTG
ttttcagaataaataaatgt

SEQ ID NO: 227439 - DNA, 20 bp, Artificial Sequence
  Description of Artificial Sequence: Synthetic oligonucleotide
  Target: LAMA2; (-) strand; PAM type: YTN; PAM sequence: TTA
ctgttttcagaataaataaa

SEQ ID NO: 227440 - DNA, 20 bp, Artificial Sequence
  Description of Artificial Sequence: Synthetic oligonucleotide
  Target: LAMA2; (-) strand; PAM type: YTN; PAM sequence: TTG
aaaattactgttttcagaat

SEQ ID NO: 227441 - DNA, 20 bp, Artificial Sequence
  Description of Artificial Sequence: Synthetic oligonucleotide
  Target: LAMA2; (-) strand; PAM type: YTN; PAM sequence: TTA
taagaaaatagtatattgaa

SEQ ID NO: 227442 - DNA, 20 bp, Artificial Sequence
  Description of Artificial Sequence: Synthetic oligonucleotide
  Target: LAMA2; (-) strand; PAM type: YTN; PAM sequence: TTA
aagtggttataagaaaatag

SEQ ID NO: 227443 - DNA, 20 bp, Artificial Sequence
  Description of Artificial Sequence: Synthetic oligonucleotide
  Target: LAMA2; (-) strand; PAM type: YTN; PAM sequence: TTT
aaagtggttataagaaaata

SEQ ID NO: 227444 - DNA, 20 bp, Artificial Sequence
  Description of Artificial Sequence: Synthetic oligonucleotide
  Target: LAMA2; (-) strand; PAM type: YTN; PAM sequence: CTT
taaagtggttataagaaaat

SEQ ID NO: 227445 - DNA, 20 bp, Artificial Sequence
  Description of Artificial Sequence: Synthetic oligonucleotide
  Target: LAMA2; (-) strand; PAM type: YTN; PAM sequence: TTC
tttaaagtggttataagaaa

SEQ ID NO: 227446 - DNA, 20 bp, Artificial Sequence
  Description of Artificial Sequence: Synthetic oligonucleotide
  Target: LAMA2; (-) strand; PAM type: YTN; PAM sequence: TTT
ctttaaagtggttataagaa

SEQ ID NO: 227447 - DNA, 20 bp, Artificial Sequence
  Description of Artificial Sequence: Synthetic oligonucleotide
  Target: LAMA2; (-) strand; PAM type: YTN; PAM sequence: TTA
atttctttaaagtggttata

SEQ ID NO: 227448 - DNA, 20 bp, Artificial Sequence
  Description of Artificial Sequence: Synthetic oligonucleotide
  Target: LAMA2; (-) strand; PAM type: YTN; PAM sequence: CTT
aatttctttaaagtggttat

SEQ ID NO: 227449 - DNA, 20 bp, Artificial Sequence
  Description of Artificial Sequence: Synthetic oligonucleotide
  Target: LAMA2; (-) strand; PAM type: YTN; PAM sequence: CTG
caagtccttaatttctttaa

SEQ ID NO: 227450 - DNA, 20 bp, Artificial Sequence
  Description of Artificial Sequence: Synthetic oligonucleotide
  Target: LAMA2; (-) strand; PAM type: YTN; PAM sequence: CTA
tggataagaaaaatagtaaa

SEQ ID NO: 227451 - DNA, 20 bp, Artificial Sequence
  Description of Artificial Sequence: Synthetic oligonucleotide
  Target: LAMA2; (-) strand; PAM type: YTN; PAM sequence: TTG
ctatggataagaaaaatagt

SEQ ID NO: 227452 - DNA, 20 bp, Artificial Sequence
  Description of Artificial Sequence: Synthetic oligonucleotide
  Target: LAMA2; (-) strand; PAM type: YTN; PAM sequence: CTT
gctatggataagaaaaatag

SEQ ID NO: 227453 - DNA, 20 bp, Artificial Sequence
  Description of Artificial Sequence: Synthetic oligonucleotide
  Target: LAMA2; (-) strand; PAM type: YTN; PAM sequence: TTG
agcaccaaccttgctatgga

SEQ ID NO: 227454 - DNA, 20 bp, Artificial Sequence
  Description of Artificial Sequence: Synthetic oligonucleotide
  Target: LAMA2; (-) strand; PAM type: YTN; PAM sequence: TTA
ttgagcaccaaccttgctat

SEQ ID NO: 227455 - DNA, 20 bp, Artificial Sequence
  Description of Artificial Sequence: Synthetic oligonucleotide
  Target: LAMA2; (-) strand; PAM type: YTN; PAM sequence: CTA
gtattattgagcaccaacct

SEQ ID NO: 227456 - DNA, 20 bp, Artificial Sequence
  Description of Artificial Sequence: Synthetic oligonucleotide
  Target: LAMA2; (-) strand; PAM type: YTN; PAM sequence: CTC
atctagtattattgagcacc

SEQ ID NO: 227457 - DNA, 20 bp, Artificial Sequence
  Description of Artificial Sequence: Synthetic oligonucleotide
  Target: LAMA2; (-) strand; PAM type: YTN; PAM sequence: TTG
ctcatctagtattattgagc

SEQ ID NO: 227458 - DNA, 20 bp, Artificial Sequence
  Description of Artificial Sequence: Synthetic oligonucleotide
  Target: LAMA2; (-) strand; PAM type: YTN; PAM sequence: TTC
agttgctcatctagtattat

SEQ ID NO: 227459 - DNA, 20 bp, Artificial Sequence
  Description of Artificial Sequence: Synthetic oligonucleotide
  Target: LAMA2; (-) strand; PAM type: YTN; PAM sequence: TTC
attcagttgctcatctagta

SEQ ID NO: 227460 - DNA, 20 bp, Artificial Sequence
  Description of Artificial Sequence: Synthetic oligonucleotide
  Target: LAMA2; (-) strand; PAM type: YTN; PAM sequence: CTT
cattcagttgctcatctagt

SEQ ID NO: 227461 - DNA, 20 bp, Artificial Sequence
  Description of Artificial Sequence: Synthetic oligonucleotide
  Target: LAMA2; (-) strand; PAM type: YTN; PAM sequence: CTC
ttcattcagttgctcatcta

SEQ ID NO: 227462 - DNA, 20 bp, Artificial Sequence
  Description of Artificial Sequence: Synthetic oligonucleotide
  Target: LAMA2; (-) strand; PAM type: YTN; PAM sequence: TTG
tcatctcttcattcagttgc

SEQ ID NO: 227463 - DNA, 20 bp, Artificial Sequence
  Description of Artificial Sequence: Synthetic oligonucleotide
  Target: LAMA2; (-) strand; PAM type: YTN; PAM sequence: TTT
gtcatctcttcattcagttg

SEQ ID NO: 227464 - DNA, 20 bp, Artificial Sequence
  Description of Artificial Sequence: Synthetic oligonucleotide
  Target: LAMA2; (-) strand; PAM type: YTN; PAM sequence: TTT
tgtcatctcttcattcagtt

SEQ ID NO: 227465 - DNA, 20 bp, Artificial Sequence
  Description of Artificial Sequence: Synthetic oligonucleotide
  Target: LAMA2; (-) strand; PAM type: YTN; PAM sequence: TTT
ttgtcatctcttcattcagt

SEQ ID NO: 227466 - DNA, 20 bp, Artificial Sequence
  Description of Artificial Sequence: Synthetic oligonucleotide
  Target: LAMA2; (-) strand; PAM type: YTN; PAM sequence: TTA
tttttgtcatctcttcattc

SEQ ID NO: 227467 - DNA, 20 bp, Artificial Sequence
  Description of Artificial Sequence: Synthetic oligonucleotide
  Target: LAMA2; (-) strand; PAM type: YTN; PAM sequence: TTT
atttttgtcatctcttcatt

SEQ ID NO: 227468 - DNA, 20 bp, Artificial Sequence
  Description of Artificial Sequence: Synthetic oligonucleotide
  Target: LAMA2; (-) strand; PAM type: YTN; PAM sequence: TTC
atttatttttgtcatctctt

SEQ ID NO: 227469 - DNA, 20 bp, Artificial Sequence
  Description of Artificial Sequence: Synthetic oligonucleotide
  Target: LAMA2; (-) strand; PAM type: YTN; PAM sequence: TTA
acatgcagtggtaataaatt

SEQ ID NO: 227470 - DNA, 20 bp, Artificial Sequence
  Description of Artificial Sequence: Synthetic oligonucleotide
  Target: LAMA2; (-) strand; PAM type: YTN; PAM sequence: TTT
aacatgcagtggtaataaat

SEQ ID NO: 227471 - DNA, 20 bp, Artificial Sequence
  Description of Artificial Sequence: Synthetic oligonucleotide
  Target: LAMA2; (-) strand; PAM type: YTN; PAM sequence: CTT
taacatgcagtggtaataaa

SEQ ID NO: 227472 - DNA, 20 bp, Artificial Sequence
  Description of Artificial Sequence: Synthetic oligonucleotide
  Target: LAMA2; (-) strand; PAM type: YTN; PAM sequence: TTC
tttaacatgcagtggtaata

SEQ ID NO: 227473 - DNA, 20 bp, Artificial Sequence
  Description of Artificial Sequence: Synthetic oligonucleotide
  Target: LAMA2; (-) strand; PAM type: YTN; PAM sequence: CTT
ctttaacatgcagtggtaat

SEQ ID NO: 227474 - DNA, 20 bp, Artificial Sequence
  Description of Artificial Sequence: Synthetic oligonucleotide
  Target: LAMA2; (-) strand; PAM type: YTN; PAM sequence: CTC
aaagacaagcataaaaaagt

SEQ ID NO: 227475 - DNA, 20 bp, Artificial Sequence
  Description of Artificial Sequence: Synthetic oligonucleotide
  Target: LAMA2; (-) strand; PAM type: YTN; PAM sequence: TTC
tcaaagacaagcataaaaaa

SEQ ID NO: 227476 - DNA, 20 bp, Artificial Sequence
  Description of Artificial Sequence: Synthetic oligonucleotide
  Target: LAMA2; (-) strand; PAM type: YTN; PAM sequence: TTT
ctcaaagacaagcataaaaa

SEQ ID NO: 227477 - DNA, 20 bp, Artificial Sequence
  Description of Artificial Sequence: Synthetic oligonucleotide
  Target: LAMA2; (-) strand; PAM type: YTN; PAM sequence: TTT
tctcaaagacaagcataaaa

SEQ ID NO: 227478 - DNA, 20 bp, Artificial Sequence
  Description of Artificial Sequence: Synthetic oligonucleotide
  Target: LAMA2; (-) strand; PAM type: YTN; PAM sequence: CTT
ttctcaaagacaagcataaa

SEQ ID NO: 227479 - DNA, 20 bp, Artificial Sequence
  Description of Artificial Sequence: Synthetic oligonucleotide
  Target: LAMA2; (-) strand; PAM type: YTN; PAM sequence: TTG
acacttttctcaaagacaag

SEQ ID NO: 227480 - DNA, 20 bp, Artificial Sequence
  Description of Artificial Sequence: Synthetic oligonucleotide
  Target: LAMA2; (-) strand; PAM type: YTN; PAM sequence: CTT
gacacttttctcaaagacaa

SEQ ID NO: 227481 - DNA, 20 bp, Artificial Sequence
  Description of Artificial Sequence: Synthetic oligonucleotide
  Target: LAMA2; (-) strand; PAM type: YTN; PAM sequence: TTG
tcatgtatgccaccttgaca

SEQ ID NO: 227482 - DNA, 20 bp, Artificial Sequence
  Description of Artificial Sequence: Synthetic oligonucleotide
  Target: LAMA2; (-) strand; PAM type: YTN; PAM sequence: TTT
gtcatgtatgccaccttgac

SEQ ID NO: 227483 - DNA, 20 bp, Artificial Sequence
  Description of Artificial Sequence: Synthetic oligonucleotide
  Target: LAMA2; (-) strand; PAM type: YTN; PAM sequence: TTT
tgtcatgtatgccaccttga

SEQ ID NO: 227484 - DNA, 20 bp, Artificial Sequence
  Description of Artificial Sequence: Synthetic oligonucleotide
  Target: LAMA2; (-) strand; PAM type: YTN; PAM sequence: TTG
tgttttgtcatgtatgccac

SEQ ID NO: 227485 - DNA, 20 bp, Artificial Sequence
  Description of Artificial Sequence: Synthetic oligonucleotide
  Target: LAMA2; (-) strand; PAM type: YTN; PAM sequence: TTA
aagttgtgttttgtcatgta

SEQ ID NO: 227486 - DNA, 20 bp, Artificial Sequence
  Description of Artificial Sequence: Synthetic oligonucleotide
  Target: LAMA2; (-) strand; PAM type: YTN; PAM sequence: TTT
aaagttgtgttttgtcatgt

SEQ ID NO: 227487 - DNA, 20 bp, Artificial Sequence
  Description of Artificial Sequence: Synthetic oligonucleotide
  Target: LAMA2; (-) strand; PAM type: YTN; PAM sequence: TTT
taaagttgtgttttgtcatg

SEQ ID NO: 227488 - DNA, 20 bp, Artificial Sequence
  Description of Artificial Sequence: Synthetic oligonucleotide
  Target: LAMA2; (-) strand; PAM type: YTN; PAM sequence: TTG
tcattttaaagttgtgtttt

SEQ ID NO: 227489 - DNA, 20 bp, Artificial Sequence
  Description of Artificial Sequence: Synthetic oligonucleotide
  Target: LAMA2; (-) strand; PAM type: YTN; PAM sequence: TTG
ttgtcattttaaagttgtgt

SEQ ID NO: 227490 - DNA, 20 bp, Artificial Sequence
  Description of Artificial Sequence: Synthetic oligonucleotide
  Target: LAMA2; (-) strand; PAM type: YTN; PAM sequence: TTT
gttgtcattttaaagttgtg

SEQ ID NO: 227491 - DNA, 20 bp, Artificial Sequence
  Description of Artificial Sequence: Synthetic oligonucleotide
  Target: LAMA2; (-) strand; PAM type: YTN; PAM sequence: TTT
tgttgtcattttaaagttgt

SEQ ID NO: 227492 - DNA, 20 bp, Artificial Sequence
  Description of Artificial Sequence: Synthetic oligonucleotide
  Target: LAMA2; (-) strand; PAM type: YTN; PAM sequence: TTT
ttgttgtcattttaaagttg

SEQ ID NO: 227493 - DNA, 20 bp, Artificial Sequence
  Description of Artificial Sequence: Synthetic oligonucleotide
  Target: LAMA2; (-) strand; PAM type: YTN; PAM sequence: TTT
tttgttgtcattttaaagtt

SEQ ID NO: 227494 - DNA, 20 bp, Artificial Sequence
  Description of Artificial Sequence: Synthetic oligonucleotide
  Target: LAMA2; (-) strand; PAM type: YTN; PAM sequence: TTA
attttttgttgtcattttaa

SEQ ID NO: 227495 - DNA, 20 bp, Artificial Sequence
  Description of Artificial Sequence: Synthetic oligonucleotide
  Target: LAMA2; (-) strand; PAM type: YTN; PAM sequence: TTT
aattttttgttgtcatttta

SEQ ID NO: 227496 - DNA, 20 bp, Artificial Sequence
  Description of Artificial Sequence: Synthetic oligonucleotide
  Target: LAMA2; (-) strand; PAM type: YTN; PAM sequence: TTT
taattttttgttgtcatttt

SEQ ID NO: 227497 - DNA, 20 bp, Artificial Sequence
  Description of Artificial Sequence: Synthetic oligonucleotide
  Target: LAMA2; (-) strand; PAM type: YTN; PAM sequence: TTC
agtgaaattttaattttttg

SEQ ID NO: 227498 - DNA, 20 bp, Artificial Sequence
  Description of Artificial Sequence: Synthetic oligonucleotide
  Target: LAMA2; (-) strand; PAM type: YTN; PAM sequence: TTG
ttcagtgaaattttaatttt

SEQ ID NO: 227499 - DNA, 20 bp, Artificial Sequence
  Description of Artificial Sequence: Synthetic oligonucleotide
  Target: LAMA2; (-) strand; PAM type: YTN; PAM sequence: TTT
gttcagtgaaattttaattt

SEQ ID NO: 227500 - DNA, 20 bp, Artificial Sequence
  Description of Artificial Sequence: Synthetic oligonucleotide
  Target: LAMA2; (-) strand; PAM type: YTN; PAM sequence: TTT
tgttcagtgaaattttaatt

SEQ ID NO: 227501 - DNA, 20 bp, Artificial Sequence
  Description of Artificial Sequence: Synthetic oligonucleotide
  Target: LAMA2; (-) strand; PAM type: YTN; PAM sequence: TTA
ttttgttcagtgaaatttta

SEQ ID NO: 227502 - DNA, 20 bp, Artificial Sequence
  Description of Artificial Sequence: Synthetic oligonucleotide
  Target: LAMA2; (-) strand; PAM type: YTN; PAM sequence: TTT
attttgttcagtgaaatttt

SEQ ID NO: 227503 - DNA, 20 bp, Artificial Sequence
  Description of Artificial Sequence: Synthetic oligonucleotide
  Target: LAMA2; (-) strand; PAM type: YTN; PAM sequence: TTT
tattttgttcagtgaaattt

SEQ ID NO: 227504 - DNA, 20 bp, Artificial Sequence
  Description of Artificial Sequence: Synthetic oligonucleotide
  Target: LAMA2; (-) strand; PAM type: YTN; PAM sequence: TTA
ttttattttgttcagtgaaa

SEQ ID NO: 227505 - DNA, 20 bp, Artificial Sequence
  Description of Artificial Sequence: Synthetic oligonucleotide
  Target: LAMA2; (-) strand; PAM type: YTN; PAM sequence: TTT
attttattttgttcagtgaa

SEQ ID NO: 227506 - DNA, 20 bp, Artificial Sequence
  Description of Artificial Sequence: Synthetic oligonucleotide
  Target: LAMA2; (-) strand; PAM type: YTN; PAM sequence: TTT
tattttattttgttcagtga

SEQ ID NO: 227507 - DNA, 20 bp, Artificial Sequence
  Description of Artificial Sequence: Synthetic oligonucleotide
  Target: LAMA2; (-) strand; PAM type: YTN; PAM sequence: CTT
ttattttattttgttcagtg

SEQ ID NO: 227508 - DNA, 20 bp, Artificial Sequence
  Description of Artificial Sequence: Synthetic oligonucleotide
  Target: LAMA2; (-) strand; PAM type: YTN; PAM sequence: TTC
ttttattttattttgttcag

SEQ ID NO: 227509 - DNA, 20 bp, Artificial Sequence
  Description of Artificial Sequence: Synthetic oligonucleotide
  Target: LAMA2; (-) strand; PAM type: YTN; PAM sequence: TTT
cttttattttattttgttca

SEQ ID NO: 227510 - DNA, 20 bp, Artificial Sequence
  Description of Artificial Sequence: Synthetic oligonucleotide
  Target: LAMA2; (-) strand; PAM type: YTN; PAM sequence: TTT
tcttttattttattttgttc

SEQ ID NO: 227511 - DNA, 20 bp, Artificial Sequence
  Description of Artificial Sequence: Synthetic oligonucleotide
  Target: LAMA2; (-) strand; PAM type: YTN; PAM sequence: TTT
ttcttttattttattttgtt

SEQ ID NO: 227512 - DNA, 20 bp, Artificial Sequence
  Description of Artificial Sequence: Synthetic oligonucleotide
  Target: LAMA2; (-) strand; PAM type: YTN; PAM sequence: CTA
gtatgcatttttcttttatt

SEQ ID NO: 227513 - DNA, 20 bp, Artificial Sequence
  Description of Artificial Sequence: Synthetic oligonucleotide
  Target: LAMA2; (-) strand; PAM type: YTN; PAM sequence: CTC
atcccagatgagcagctagt

SEQ ID NO: 227514 - DNA, 20 bp, Artificial Sequence
  Description of Artificial Sequence: Synthetic oligonucleotide
  Target: LAMA2; (-) strand; PAM type: YTN; PAM sequence: CTA
actcatcccagatgagcagc

SEQ ID NO: 227515 - DNA, 20 bp, Artificial Sequence
  Description of Artificial Sequence: Synthetic oligonucleotide
  Target: LAMA2; (-) strand; PAM type: YTN; PAM sequence: TTG
caataactaactcatcccag

SEQ ID NO: 227516 - DNA, 20 bp, Artificial Sequence
  Description of Artificial Sequence: Synthetic oligonucleotide
  Target: LAMA2; (-) strand; PAM type: YTN; PAM sequence: TTG
aattgcaataactaactcat

SEQ ID NO: 227517 - DNA, 20 bp, Artificial Sequence
  Description of Artificial Sequence: Synthetic oligonucleotide
  Target: LAMA2; (-) strand; PAM type: YTN; PAM sequence: TTA
caagttgaattgcaataact

SEQ ID NO: 227518 - DNA, 20 bp, Artificial Sequence
  Description of Artificial Sequence: Synthetic oligonucleotide
  Target: LAMA2; (-) strand; PAM type: YTN; PAM sequence: TTA
aattacaagttgaattgcaa

SEQ ID NO: 227519 - DNA, 20 bp, Artificial Sequence
  Description of Artificial Sequence: Synthetic oligonucleotide
  Target: LAMA2; (-) strand; PAM type: YTN; PAM sequence: CTG
cattaaattacaagttgaat

SEQ ID NO: 227520 - DNA, 20 bp, Artificial Sequence
  Description of Artificial Sequence: Synthetic oligonucleotide
  Target: LAMA2; (-) strand; PAM type: YTN; PAM sequence: TTC
tgcattaaattacaagttga

SEQ ID NO: 227521 - DNA, 20 bp, Artificial Sequence
  Description of Artificial Sequence: Synthetic oligonucleotide
  Target: LAMA2; (-) strand; PAM type: YTN; PAM sequence: CTG
aaaattctgcattaaattac

SEQ ID NO: 227522 - DNA, 20 bp, Artificial Sequence
  Description of Artificial Sequence: Synthetic oligonucleotide
  Target: LAMA2; (-) strand; PAM type: YTN; PAM sequence: TTG
tctgaaaattctgcattaaa

SEQ ID NO: 227523 - DNA, 20 bp, Artificial Sequence
  Description of Artificial Sequence: Synthetic oligonucleotide
  Target: LAMA2; (-) strand; PAM type: YTN; PAM sequence: CTA
attgtctgaaaattctgcat

SEQ ID NO: 227524 - DNA, 20 bp, Artificial Sequence
  Description of Artificial Sequence: Synthetic oligonucleotide
  Target: LAMA2; (-) strand; PAM type: YTN; PAM sequence: TTG
gccctaattgtctgaaaatt

SEQ ID NO: 227525 - DNA, 20 bp, Artificial Sequence
  Description of Artificial Sequence: Synthetic oligonucleotide
  Target: LAMA2; (-) strand; PAM type: YTN; PAM sequence: TTT
ggccctaattgtctgaaaat

SEQ ID NO: 227526 - DNA, 20 bp, Artificial Sequence
  Description of Artificial Sequence: Synthetic oligonucleotide
  Target: LAMA2; (-) strand; PAM type: YTN; PAM sequence: TTT
tggccctaattgtctgaaaa

SEQ ID NO: 227527 - DNA, 20 bp, Artificial Sequence
  Description of Artificial Sequence: Synthetic oligonucleotide
  Target: LAMA2; (-) strand; PAM type: YTN; PAM sequence: TTT
ttggccctaattgtctgaaa

SEQ ID NO: 227528 - DNA, 20 bp, Artificial Sequence
  Description of Artificial Sequence: Synthetic oligonucleotide
  Target: LAMA2; (-) strand; PAM type: YTN; PAM sequence: TTT
tttggccctaattgtctgaa

SEQ ID NO: 227529 - DNA, 20 bp, Artificial Sequence
  Description of Artificial Sequence: Synthetic oligonucleotide
  Target: LAMA2; (-) strand; PAM type: YTN; PAM sequence: CTT
ttttggccctaattgtctga

SEQ ID NO: 227530 - DNA, 20 bp, Artificial Sequence
  Description of Artificial Sequence: Synthetic oligonucleotide
  Target: LAMA2; (-) strand; PAM type: YTN; PAM sequence: TTC
ttttttggccctaattgtct

SEQ ID NO: 227531 - DNA, 20 bp, Artificial Sequence
  Description of Artificial Sequence: Synthetic oligonucleotide
  Target: LAMA2; (-) strand; PAM type: YTN; PAM sequence: TTT
cttttttggccctaattgtc

SEQ ID NO: 227532 - DNA, 20 bp, Artificial Sequence
  Description of Artificial Sequence: Synthetic oligonucleotide
  Target: LAMA2; (-) strand; PAM type: YTN; PAM sequence: TTT
tcttttttggccctaattgt

SEQ ID NO: 227533 - DNA, 20 bp, Artificial Sequence
  Description of Artificial Sequence: Synthetic oligonucleotide
  Target: LAMA2; (-) strand; PAM type: YTN; PAM sequence: TTA
acattttcttttttggccct

SEQ ID NO: 227534 - DNA, 20 bp, Artificial Sequence
  Description of Artificial Sequence: Synthetic oligonucleotide
  Target: LAMA2; (-) strand; PAM type: YTN; PAM sequence: TTT
aacattttcttttttggccc

SEQ ID NO: 227535 - DNA, 20 bp, Artificial Sequence
  Description of Artificial Sequence: Synthetic oligonucleotide
  Target: LAMA2; (-) strand; PAM type: YTN; PAM sequence: CTA
atttaacattttcttttttg

SEQ ID NO: 227536 - DNA, 20 bp, Artificial Sequence
  Description of Artificial Sequence: Synthetic oligonucleotide
  Target: LAMA2; (-) strand; PAM type: YTN; PAM sequence: CTA
gctaatttaacattttcttt

SEQ ID NO: 227537 - DNA, 20 bp, Artificial Sequence
  Description of Artificial Sequence: Synthetic oligonucleotide
  Target: LAMA2; (-) strand; PAM type: YTN; PAM sequence: TTG
tcagacactagctaatttaa

SEQ ID NO: 227538 - DNA, 20 bp, Artificial Sequence
  Description of Artificial Sequence: Synthetic oligonucleotide
  Target: LAMA2; (-) strand; PAM type: YTN; PAM sequence: TTT
gtcagacactagctaattta

SEQ ID NO: 227539 - DNA, 20 bp, Artificial Sequence
  Description of Artificial Sequence: Synthetic oligonucleotide
  Target: LAMA2; (-) strand; PAM type: YTN; PAM sequence: CTT
tgtcagacactagctaattt

SEQ ID NO: 227540 - DNA, 20 bp, Artificial Sequence
  Description of Artificial Sequence: Synthetic oligonucleotide
  Target: LAMA2; (-) strand; PAM type: YTN; PAM sequence: TTC
tttgtcagacactagctaat

SEQ ID NO: 227541 - DNA, 20 bp, Artificial Sequence
  Description of Artificial Sequence: Synthetic oligonucleotide
  Target: LAMA2; (-) strand; PAM type: YTN; PAM sequence: CTT
ctttgtcagacactagctaa

SEQ ID NO: 227542 - DNA, 20 bp, Artificial Sequence
  Description of Artificial Sequence: Synthetic oligonucleotide
  Target: LAMA2; (-) strand; PAM type: YTN; PAM sequence: TTC
ttctttgtcagacactagct

SEQ ID NO: 227543 - DNA, 20 bp, Artificial Sequence
  Description of Artificial Sequence: Synthetic oligonucleotide
  Target: LAMA2; (-) strand; PAM type: YTN; PAM sequence: TTT
cttctttgtcagacactagc

SEQ ID NO: 227544 - DNA, 20 bp, Artificial Sequence
  Description of Artificial Sequence: Synthetic oligonucleotide
  Target: LAMA2; (-) strand; PAM type: YTN; PAM sequence: CTT
tcttctttgtcagacactag

SEQ ID NO: 227545 - DNA, 20 bp, Artificial Sequence
  Description of Artificial Sequence: Synthetic oligonucleotide
  Target: LAMA2; (-) strand; PAM type: YTN; PAM sequence: TTG
aaagctttcttctttgtcag

SEQ ID NO: 227546 - DNA, 20 bp, Artificial Sequence
  Description of Artificial Sequence: Synthetic oligonucleotide
  Target: LAMA2; (-) strand; PAM type: YTN; PAM sequence: TTT
gaaagctttcttctttgtca

SEQ ID NO: 227547 - DNA, 20 bp, Artificial Sequence
  Description of Artificial Sequence: Synthetic oligonucleotide
  Target: LAMA2; (-) strand; PAM type: YTN; PAM sequence: TTG
aaagtttgaaagctttcttc

SEQ ID NO: 227548 - DNA, 20 bp, Artificial Sequence
  Description of Artificial Sequence: Synthetic oligonucleotide
  Target: LAMA2; (-) strand; PAM type: YTN; PAM sequence: CTT
gaaagtttgaaagctttctt

SEQ ID NO: 227549 - DNA, 20 bp, Artificial Sequence
  Description of Artificial Sequence: Synthetic oligonucleotide
  Target: LAMA2; (-) strand; PAM type: YTN; PAM sequence: TTC
gtcttgaaagtttgaaagct

SEQ ID NO: 227550 - DNA, 20 bp, Artificial Sequence
  Description of Artificial Sequence: Synthetic oligonucleotide
  Target: LAMA2; (-) strand; PAM type: YTN; PAM sequence: CTA
ataaaatgttcgtcttgaaa

SEQ ID NO: 227551 - DNA, 20 bp, Artificial Sequence
  Description of Artificial Sequence: Synthetic oligonucleotide
  Target: LAMA2; (-) strand; PAM type: YTN; PAM sequence: TTG
ctaataaaatgttcgtcttg

SEQ ID NO: 227552 - DNA, 20 bp, Artificial Sequence
  Description of Artificial Sequence: Synthetic oligonucleotide
  Target: LAMA2; (-) strand; PAM type: YTN; PAM sequence: TTC
attgctaataaaatgttcgt

SEQ ID NO: 227553 - DNA, 20 bp, Artificial Sequence
  Description of Artificial Sequence: Synthetic oligonucleotide
  Target: LAMA2; (-) strand; PAM type: YTN; PAM sequence: CTG
agaattcattgctaataaaa

SEQ ID NO: 227554 - DNA, 20 bp, Artificial Sequence
  Description of Artificial Sequence: Synthetic oligonucleotide
  Target: LAMA2; (-) strand; PAM type: YTN; PAM sequence: CTC
tgagaattcattgctaataa

SEQ ID NO: 227555 - DNA, 20 bp, Artificial Sequence
  Description of Artificial Sequence: Synthetic oligonucleotide
  Target: LAMA2; (-) strand; PAM type: YTN; PAM sequence: TTG
ctctgagaattcattgctaa

SEQ ID NO: 227556 - DNA, 20 bp, Artificial Sequence
  Description of Artificial Sequence: Synthetic oligonucleotide
  Target: LAMA2; (-) strand; PAM type: YTN; PAM sequence: TTT
gctctgagaattcattgcta

SEQ ID NO: 227557 - DNA, 20 bp, Artificial Sequence
  Description of Artificial Sequence: Synthetic oligonucleotide
  Target: LAMA2; (-) strand; PAM type: YTN; PAM sequence: TTA
aatttgctctgagaattcat

SEQ ID NO: 227558 - DNA, 20 bp, Artificial Sequence
  Description of Artificial Sequence: Synthetic oligonucleotide
  Target: LAMA2; (-) strand; PAM type: YTN; PAM sequence: CTG
cattaaatttgctctgagaa

SEQ ID NO: 227559 - DNA, 20 bp, Artificial Sequence
  Description of Artificial Sequence: Synthetic oligonucleotide
  Target: LAMA2; (-) strand; PAM type: YTN; PAM sequence: TTA
cataaggactgcattaaatt

SEQ ID NO: 227560 - DNA, 20 bp, Artificial Sequence
  Description of Artificial Sequence: Synthetic oligonucleotide
  Target: LAMA2; (-) strand; PAM type: YTN; PAM sequence: CTT
acataaggactgcattaaat

SEQ ID NO: 227561 - DNA, 20 bp, Artificial Sequence
  Description of Artificial Sequence: Synthetic oligonucleotide
  Target: LAMA2; (-) strand; PAM type: YTN; PAM sequence: CTG
acatccttacataaggactg

SEQ ID NO: 227562 - DNA, 20 bp, Artificial Sequence
  Description of Artificial Sequence: Synthetic oligonucleotide
  Target: LAMA2; (-) strand; PAM type: YTN; PAM sequence: CTA
tctgacatccttacataagg

SEQ ID NO: 227563 - DNA, 20 bp, Artificial Sequence
  Description of Artificial Sequence: Synthetic oligonucleotide
  Target: LAMA2; (-) strand; PAM type: YTN; PAM sequence: TTC
tatctgacatccttacataa

SEQ ID NO: 227564 - DNA, 20 bp, Artificial Sequence
  Description of Artificial Sequence: Synthetic oligonucleotide
  Target: LAMA2; (-) strand; PAM type: YTN; PAM sequence: TTT
ctatctgacatccttacata

SEQ ID NO: 227565 - DNA, 20 bp, Artificial Sequence
  Description of Artificial Sequence: Synthetic oligonucleotide
  Target: LAMA2; (-) strand; PAM type: YTN; PAM sequence: TTT
tctatctgacatccttacat

SEQ ID NO: 227566 - DNA, 20 bp, Artificial Sequence
  Description of Artificial Sequence: Synthetic oligonucleotide
  Target: LAMA2; (-) strand; PAM type: YTN; PAM sequence: TTT
ttctatctgacatccttaca

SEQ ID NO: 227567 - DNA, 20 bp, Artificial Sequence
  Description of Artificial Sequence: Synthetic oligonucleotide
  Target: LAMA2; (-) strand; PAM type: YTN; PAM sequence: TTT
tttctatctgacatccttac

SEQ ID NO: 227568 - DNA, 20 bp, Artificial Sequence
  Description of Artificial Sequence: Synthetic oligonucleotide
  Target: LAMA2; (-) strand; PAM type: YTN; PAM sequence: CTT
ttttctatctgacatcctta

SEQ ID NO: 227569 - DNA, 20 bp, Artificial Sequence
  Description of Artificial Sequence: Synthetic oligonucleotide
  Target: LAMA2; (-) strand; PAM type: YTN; PAM sequence: TTA
cttttttctatctgacatcc

SEQ ID NO: 227570 - DNA, 20 bp, Artificial Sequence
  Description of Artificial Sequence: Synthetic oligonucleotide
  Target: LAMA2; (-) strand; PAM type: YTN; PAM sequence: TTT
acttttttctatctgacatc

SEQ ID NO: 227571 - DNA, 20 bp, Artificial Sequence
  Description of Artificial Sequence: Synthetic oligonucleotide
  Target: LAMA2; (-) strand; PAM type: YTN; PAM sequence: TTT
tacttttttctatctgacat

SEQ ID NO: 227572 - DNA, 20 bp, Artificial Sequence
  Description of Artificial Sequence: Synthetic oligonucleotide
  Target: LAMA2; (-) strand; PAM type: YTN; PAM sequence: CTT
ttacttttttctatctgaca

SEQ ID NO: 227573 - DNA, 20 bp, Artificial Sequence
  Description of Artificial Sequence: Synthetic oligonucleotide
  Target: LAMA2; (-) strand; PAM type: YTN; PAM sequence: TTG
aaatccttttacttttttct

SEQ ID NO: 227574 - DNA, 20 bp, Artificial Sequence
  Description of Artificial Sequence: Synthetic oligonucleotide
  Target: LAMA2; (-) strand; PAM type: YTN; PAM sequence: CTT
gaaatccttttacttttttc

SEQ ID NO: 227575 - DNA, 20 bp, Artificial Sequence
  Description of Artificial Sequence: Synthetic oligonucleotide
  Target: LAMA2; (-) strand; PAM type: YTN; PAM sequence: CTA
gtgatgcttgaaatcctttt

SEQ ID NO: 227576 - DNA, 20 bp, Artificial Sequence
  Description of Artificial Sequence: Synthetic oligonucleotide
  Target: LAMA2; (-) strand; PAM type: YTN; PAM sequence: TTG
cactagtgatgcttgaaatc

SEQ ID NO: 227577 - DNA, 20 bp, Artificial Sequence
  Description of Artificial Sequence: Synthetic oligonucleotide
  Target: LAMA2; (-) strand; PAM type: YTN; PAM sequence: TTT
gcactagtgatgcttgaaat

SEQ ID NO: 227578 - DNA, 20 bp, Artificial Sequence
  Description of Artificial Sequence: Synthetic oligonucleotide
  Target: LAMA2; (-) strand; PAM type: YTN; PAM sequence: CTT
tgcactagtgatgcttgaaa

SEQ ID NO: 227579 - DNA, 20 bp, Artificial Sequence
  Description of Artificial Sequence: Synthetic oligonucleotide
  Target: LAMA2; (-) strand; PAM type: YTN; PAM sequence: TTG
tcctttgcactagtgatgct

SEQ ID NO: 227580 - DNA, 20 bp, Artificial Sequence
  Description of Artificial Sequence: Synthetic oligonucleotide
  Target: LAMA2; (-) strand; PAM type: YTN; PAM sequence: CTG
cagaaataagcaagtaatat

SEQ ID NO: 227581 - DNA, 20 bp, Artificial Sequence
  Description of Artificial Sequence: Synthetic oligonucleotide
  Target: LAMA2; (-) strand; PAM type: YTN; PAM sequence: TTA
cactgcagaaataagcaagt

SEQ ID NO: 227582 - DNA, 20 bp, Artificial Sequence
  Description of Artificial Sequence: Synthetic oligonucleotide
  Target: LAMA2; (-) strand; PAM type: YTN; PAM sequence: TTG
ttacactgcagaaataagca

SEQ ID NO: 227583 - DNA, 20 bp, Artificial Sequence
  Description of Artificial Sequence: Synthetic oligonucleotide
  Target: LAMA2; (-) strand; PAM type: YTN; PAM sequence: TTT
gttacactgcagaaataagc

SEQ ID NO: 227584 - DNA, 20 bp, Artificial Sequence
  Description of Artificial Sequence: Synthetic oligonucleotide
  Target: LAMA2; (-) strand; PAM type: YTN; PAM sequence: CTT
tgttacactgcagaaataag

SEQ ID NO: 227585 - DNA, 20 bp, Artificial Sequence
  Description of Artificial Sequence: Synthetic oligonucleotide
  Target: LAMA2; (-) strand; PAM type: YTN; PAM sequence: TTC
atctttgttacactgcagaa

SEQ ID NO: 227586 - DNA, 20 bp, Artificial Sequence
  Description of Artificial Sequence: Synthetic oligonucleotide
  Target: LAMA2; (-) strand; PAM type: YTN; PAM sequence: CTT
catctttgttacactgcaga

SEQ ID NO: 227587 - DNA, 20 bp, Artificial Sequence
  Description of Artificial Sequence: Synthetic oligonucleotide
  Target: LAMA2; (-) strand; PAM type: YTN; PAM sequence: TTA
agagaatatcttcatctttg

SEQ ID NO: 227588 - DNA, 20 bp, Artificial Sequence
  Description of Artificial Sequence: Synthetic oligonucleotide
  Target: LAMA2; (-) strand; PAM type: YTN; PAM sequence: TTT
aagagaatatcttcatcttt

SEQ ID NO: 227589 - DNA, 20 bp, Artificial Sequence
  Description of Artificial Sequence: Synthetic oligonucleotide
  Target: LAMA2; (-) strand; PAM type: YTN; PAM sequence: TTG
agtaaaaaatttaagagaat

SEQ ID NO: 227590 - DNA, 20 bp, Artificial Sequence
  Description of Artificial Sequence: Synthetic oligonucleotide
  Target: LAMA2; (-) strand; PAM type: YTN; PAM sequence: CTC
agagacacatgaatcatcat

SEQ ID NO: 227591 - DNA, 20 bp, Artificial Sequence
  Description of Artificial Sequence: Synthetic oligonucleotide
  Target: LAMA2; (-) strand; PAM type: YTN; PAM sequence: TTC
tcagagacacatgaatcatc

SEQ ID NO: 227592 - DNA, 20 bp, Artificial Sequence
  Description of Artificial Sequence: Synthetic oligonucleotide
  Target: LAMA2; (-) strand; PAM type: YTN; PAM sequence: TTT
ctcagagacacatgaatcat

SEQ ID NO: 227593 - DNA, 20 bp, Artificial Sequence
  Description of Artificial Sequence: Synthetic oligonucleotide
  Target: LAMA2; (-) strand; PAM type: YTN; PAM sequence: TTA
gtttctcagagacacatgaa

SEQ ID NO: 227594 - DNA, 20 bp, Artificial Sequence
  Description of Artificial Sequence: Synthetic oligonucleotide
  Target: LAMA2; (-) strand; PAM type: YTN; PAM sequence: CTT
agtttctcagagacacatga

SEQ ID NO: 227595 - DNA, 20 bp, Artificial Sequence
  Description of Artificial Sequence: Synthetic oligonucleotide
  Target: LAMA2; (-) strand; PAM type: YTN; PAM sequence: TTA
tcttagtttctcagagacac

SEQ ID NO: 227596 - DNA, 20 bp, Artificial Sequence
  Description of Artificial Sequence: Synthetic oligonucleotide
  Target: LAMA2; (-) strand; PAM type: YTN; PAM sequence: TTA
aatcatattatcttagtttc

SEQ ID NO: 227597 - DNA, 20 bp, Artificial Sequence
  Description of Artificial Sequence: Synthetic oligonucleotide
  Target: LAMA2; (-) strand; PAM type: YTN; PAM sequence: CTA
tcccaaaagcacagaattaa

SEQ ID NO: 227598 - DNA, 20 bp, Artificial Sequence
  Description of Artificial Sequence: Synthetic oligonucleotide
  Target: LAMA2; (-) strand; PAM type: YTN; PAM sequence: TTA
gactatcccaaaagcacaga

SEQ ID NO: 227599 - DNA, 20 bp, Artificial Sequence
  Description of Artificial Sequence: Synthetic oligonucleotide
  Target: LAMA2; (-) strand; PAM type: YTN; PAM sequence: TTA
agttagactatcccaaaagc

SEQ ID NO: 227600 - DNA, 20 bp, Artificial Sequence
  Description of Artificial Sequence: Synthetic oligonucleotide
  Target: LAMA2; (-) strand; PAM type: YTN; PAM sequence: TTC
atgaattaagttagactatc

SEQ ID NO: 227601 - DNA, 20 bp, Artificial Sequence
  Description of Artificial Sequence: Synthetic oligonucleotide
  Target: LAMA2; (-) strand; PAM type: YTN; PAM sequence: CTT
catgaattaagttagactat

SEQ ID NO: 227602 - DNA, 20 bp, Artificial Sequence
  Description of Artificial Sequence: Synthetic oligonucleotide
  Target: LAMA2; (-) strand; PAM type: YTN; PAM sequence: CTC
cttcatgaattaagttagac

SEQ ID NO: 227603 - DNA, 20 bp, Artificial Sequence
  Description of Artificial Sequence: Synthetic oligonucleotide
  Target: LAMA2; (-) strand; PAM type: YTN; PAM sequence: CTG
tactccttcatgaattaagt

SEQ ID NO: 227604 - DNA, 20 bp, Artificial Sequence
  Description of Artificial Sequence: Synthetic oligonucleotide
  Target: LAMA2; (-) strand; PAM type: YTN; PAM sequence: TTG
agagtgacaaacaaagtgga

SEQ ID NO: 227605 - DNA, 20 bp, Artificial Sequence
  Description of Artificial Sequence: Synthetic oligonucleotide
  Target: LAMA2; (-) strand; PAM type: YTN; PAM sequence: TTT
gagagtgacaaacaaagtgg

SEQ ID NO: 227606 - DNA, 20 bp, Artificial Sequence
  Description of Artificial Sequence: Synthetic oligonucleotide
  Target: LAMA2; (-) strand; PAM type: YTN; PAM sequence: CTG
acatttgagagtgacaaaca

SEQ ID NO: 227607 - DNA, 20 bp, Artificial Sequence
  Description of Artificial Sequence: Synthetic oligonucleotide
  Target: LAMA2; (-) strand; PAM type: YTN; PAM sequence: CTG
cacatctgacatttgagagt

SEQ ID NO: 227608 - DNA, 20 bp, Artificial Sequence
  Description of Artificial Sequence: Synthetic oligonucleotide
  Target: LAMA2; (-) strand; PAM type: YTN; PAM sequence: TTG
cctgcacatctgacatttga

SEQ ID NO: 227609 - DNA, 20 bp, Artificial Sequence
  Description of Artificial Sequence: Synthetic oligonucleotide
  Target: LAMA2; (-) strand; PAM type: YTN; PAM sequence: TTT
gcctgcacatctgacatttg

SEQ ID NO: 227610 - DNA, 20 bp, Artificial Sequence
  Description of Artificial Sequence: Synthetic oligonucleotide
  Target: LAMA2; (-) strand; PAM type: YTN; PAM sequence: CTG
agaatttgcctgcacatctg

SEQ ID NO: 227611 - DNA, 20 bp, Artificial Sequence
  Description of Artificial Sequence: Synthetic oligonucleotide
  Target: LAMA2; (-) strand; PAM type: YTN; PAM sequence: CTC
tgagaatttgcctgcacatc

SEQ ID NO: 227612 - DNA, 20 bp, Artificial Sequence
  Description of Artificial Sequence: Synthetic oligonucleotide
  Target: LAMA2; (-) strand; PAM type: YTN; PAM sequence: TTA
actctgagaatttgcctgca

SEQ ID NO: 227613 - DNA, 20 bp, Artificial Sequence
  Description of Artificial Sequence: Synthetic oligonucleotide
  Target: LAMA2; (-) strand; PAM type: YTN; PAM sequence: TTT
aactctgagaatttgcctgc

SEQ ID NO: 227614 - DNA, 20 bp, Artificial Sequence
  Description of Artificial Sequence: Synthetic oligonucleotide
  Target: LAMA2; (-) strand; PAM type: YTN; PAM sequence: CTG
tcaagtaatttaactctgag

SEQ ID NO: 227615 - DNA, 20 bp, Artificial Sequence
  Description of Artificial Sequence: Synthetic oligonucleotide
  Target: LAMA2; (-) strand; PAM type: YTN; PAM sequence: TTC
ctgtcaagtaatttaactct

SEQ ID NO: 227616 - DNA, 20 bp, Artificial Sequence
  Description of Artificial Sequence: Synthetic oligonucleotide
  Target: LAMA2; (-) strand; PAM type: YTN; PAM sequence: TTA
agttcctgtcaagtaattta

SEQ ID NO: 227617 - DNA, 20 bp, Artificial Sequence
  Description of Artificial Sequence: Synthetic oligonucleotide
  Target: LAMA2; (-) strand; PAM type: YTN; PAM sequence: CTT
aagttcctgtcaagtaattt

SEQ ID NO: 227618 - DNA, 20 bp, Artificial Sequence
  Description of Artificial Sequence: Synthetic oligonucleotide
  Target: LAMA2; (-) strand; PAM type: YTN; PAM sequence: CTG
gcaacaaatacggatgctta

SEQ ID NO: 227619 - DNA, 20 bp, Artificial Sequence
  Description of Artificial Sequence: Synthetic oligonucleotide
  Target: LAMA2; (-) strand; PAM type: YTN; PAM sequence: CTA
cctggcaacaaatacggatg

SEQ ID NO: 227620 - DNA, 20 bp, Artificial Sequence
  Description of Artificial Sequence: Synthetic oligonucleotide
  Target: LAMA2; (-) strand; PAM type: YTN; PAM sequence: TTA
accacacagaagactacctg

SEQ ID NO: 227621 - DNA, 20 bp, Artificial Sequence
  Description of Artificial Sequence: Synthetic oligonucleotide
  Target: LAMA2; (-) strand; PAM type: YTN; PAM sequence: TTT
aaccacacagaagactacct

SEQ ID NO: 227622 - DNA, 20 bp, Artificial Sequence
  Description of Artificial Sequence: Synthetic oligonucleotide
  Target: LAMA2; (-) strand; PAM type: YTN; PAM sequence: CTT
taaccacacagaagactacc

SEQ ID NO: 227623 - DNA, 20 bp, Artificial Sequence
  Description of Artificial Sequence: Synthetic oligonucleotide
  Target: LAMA2; (-) strand; PAM type: YTN; PAM sequence: CTG
tactttaaccacacagaaga

SEQ ID NO: 227624 - DNA, 20 bp, Artificial Sequence
  Description of Artificial Sequence: Synthetic oligonucleotide
  Target: LAMA2; (-) strand; PAM type: YTN; PAM sequence: TTC
tgtactttaaccacacagaa

SEQ ID NO: 227625 - DNA, 20 bp, Artificial Sequence
  Description of Artificial Sequence: Synthetic oligonucleotide
  Target: LAMA2; (-) strand; PAM type: YTN; PAM sequence: TTG
taggagtacattctgtactt

SEQ ID NO: 227626 - DNA, 20 bp, Artificial Sequence
  Description of Artificial Sequence: Synthetic oligonucleotide
  Target: LAMA2; (-) strand; PAM type: YTN; PAM sequence: TTT
gtaggagtacattctgtact

SEQ ID NO: 227627 - DNA, 20 bp, Artificial Sequence
  Description of Artificial Sequence: Synthetic oligonucleotide
  Target: LAMA2; (-) strand; PAM type: YTN; PAM sequence: TTT
tgtaggagtacattctgtac

SEQ ID NO: 227628 - DNA, 20 bp, Artificial Sequence
  Description of Artificial Sequence: Synthetic oligonucleotide
  Target: LAMA2; (-) strand; PAM type: YTN; PAM sequence: CTT
ttgtaggagtacattctgta

SEQ ID NO: 227629 - DNA, 20 bp, Artificial Sequence
  Description of Artificial Sequence: Synthetic oligonucleotide
  Target: LAMA2; (-) strand; PAM type: YTN; PAM sequence: CTG
cttttgtaggagtacattct

SEQ ID NO: 227630 - DNA, 20 bp, Artificial Sequence
  Description of Artificial Sequence: Synthetic oligonucleotide
  Target: LAMA2; (-) strand; PAM type: YTN; PAM sequence: CTC
tgcttttgtaggagtacatt

SEQ ID NO: 227631 - DNA, 20 bp, Artificial Sequence
  Description of Artificial Sequence: Synthetic oligonucleotide
  Target: LAMA2; (-) strand; PAM type: YTN; PAM sequence: CTC
tctgcttttgtaggagtaca

SEQ ID NO: 227632 - DNA, 20 bp, Artificial Sequence
  Description of Artificial Sequence: Synthetic oligonucleotide
  Target: LAMA2; (-) strand; PAM type: YTN; PAM sequence: TTG
tgtggcaacgggccgcctct

SEQ ID NO: 227633 - DNA, 20 bp, Artificial Sequence
  Description of Artificial Sequence: Synthetic oligonucleotide
  Target: LAMA2; (-) strand; PAM type: YTN; PAM sequence: TTT
gtgtggcaacgggccgcctc

SEQ ID NO: 227634 - DNA, 20 bp, Artificial Sequence
  Description of Artificial Sequence: Synthetic oligonucleotide
  Target: LAMA2; (-) strand; PAM type: YTN; PAM sequence: TTT
tgtgtggcaacgggccgcct

SEQ ID NO: 227635 - DNA, 20 bp, Artificial Sequence
  Description of Artificial Sequence: Synthetic oligonucleotide
  Target: LAMA2; (-) strand; PAM type: YTN; PAM sequence: CTT
ttgtgtggcaacgggccgcc

SEQ ID NO: 227636 - DNA, 20 bp, Artificial Sequence
  Description of Artificial Sequence: Synthetic oligonucleotide
  Target: LAMA2; (-) strand; PAM type: YTN; PAM sequence: CTG
aaaaaacacttttgtgtggc

SEQ ID NO: 227637 - DNA, 20 bp, Artificial Sequence
  Description of Artificial Sequence: Synthetic oligonucleotide
  Target: LAMA2; (-) strand; PAM type: YTN; PAM sequence: CTA
accataagccatctgaaaaa

SEQ ID NO: 227638 - DNA, 20 bp, Artificial Sequence
  Description of Artificial Sequence: Synthetic oligonucleotide
  Target: LAMA2; (-) strand; PAM type: YTN; PAM sequence: TTC
taaccataagccatctgaaa

SEQ ID NO: 227639 - DNA, 20 bp, Artificial Sequence
  Description of Artificial Sequence: Synthetic oligonucleotide
  Target: LAMA2; (-) strand; PAM type: YTN; PAM sequence: TTG
gttctaaccataagccatct

SEQ ID NO: 227640 - DNA, 20 bp, Artificial Sequence
  Description of Artificial Sequence: Synthetic oligonucleotide
  Target: LAMA2; (-) strand; PAM type: YTN; PAM sequence: CTA
gaaaaatatattggttctaa

SEQ ID NO: 227641 - DNA, 20 bp, Artificial Sequence
  Description of Artificial Sequence: Synthetic oligonucleotide
  Target: LAMA2; (-) strand; PAM type: YTN; PAM sequence: CTG
tatgctagaaaaatatattg

SEQ ID NO: 227642 - DNA, 20 bp, Artificial Sequence
  Description of Artificial Sequence: Synthetic oligonucleotide
  Target: LAMA2; (-) strand; PAM type: YTN; PAM sequence: CTC
aaactgtatgctagaaaaat

SEQ ID NO: 227643 - DNA, 20 bp, Artificial Sequence
  Description of Artificial Sequence: Synthetic oligonucleotide
  Target: LAMA2; (-) strand; PAM type: YTN; PAM sequence: TTA
tcactcaaactgtatgctag

SEQ ID NO: 227644 - DNA, 20 bp, Artificial Sequence
  Description of Artificial Sequence: Synthetic oligonucleotide
  Target: LAMA2; (-) strand; PAM type: YTN; PAM sequence: CTA
ttatcactcaaactgtatgc

SEQ ID NO: 227645 - DNA, 20 bp, Artificial Sequence
  Description of Artificial Sequence: Synthetic oligonucleotide
  Target: LAMA2; (-) strand; PAM type: YTN; PAM sequence: TTG
gcacaaggcatgtgatcggg

SEQ ID NO: 227646 - DNA, 20 bp, Artificial Sequence
  Description of Artificial Sequence: Synthetic oligonucleotide
  Target: LAMA2; (-) strand; PAM type: YTN; PAM sequence: CTT
ggcacaaggcatgtgatcgg

SEQ ID NO: 227647 - DNA, 20 bp, Artificial Sequence
  Description of Artificial Sequence: Synthetic oligonucleotide
  Target: LAMA2; (-) strand; PAM type: YTN; PAM sequence: TTA
gaatggtacttggcacaagg

SEQ ID NO: 227648 - DNA, 20 bp, Artificial Sequence
  Description of Artificial Sequence: Synthetic oligonucleotide
  Target: LAMA2; (-) strand; PAM type: YTN; PAM sequence: TTT
agaatggtacttggcacaag

SEQ ID NO: 227649 - DNA, 20 bp, Artificial Sequence
  Description of Artificial Sequence: Synthetic oligonucleotide
  Target: LAMA2; (-) strand; PAM type: YTN; PAM sequence: TTA
caagatgcaaggcatttaga

SEQ ID NO: 227650 - DNA, 20 bp, Artificial Sequence
  Description of Artificial Sequence: Synthetic oligonucleotide
  Target: LAMA2; (-) strand; PAM type: YTN; PAM sequence: TTA
atgagttacaagatgcaagg

SEQ ID NO: 227651 - DNA, 20 bp, Artificial Sequence
  Description of Artificial Sequence: Synthetic oligonucleotide
  Target: LAMA2; (-) strand; PAM type: YTN; PAM sequence: TTT
aatgagttacaagatgcaag

SEQ ID NO: 227652 - DNA, 20 bp, Artificial Sequence
  Description of Artificial Sequence: Synthetic oligonucleotide
  Target: LAMA2; (-) strand; PAM type: YTN; PAM sequence: CTG
taaaggtttaatgagttaca

SEQ ID NO: 227653 - DNA, 20 bp, Artificial Sequence
  Description of Artificial Sequence: Synthetic oligonucleotide
  Target: LAMA2; (-) strand; PAM type: YTN; PAM sequence: TTA
ctgtaaaggtttaatgagtt

SEQ ID NO: 227654 - DNA, 20 bp, Artificial Sequence
  Description of Artificial Sequence: Synthetic oligonucleotide
  Target: LAMA2; (-) strand; PAM type: YTN; PAM sequence: TTG
catgaggttactgtaaaggt

SEQ ID NO: 227655 - DNA, 20 bp, Artificial Sequence
  Description of Artificial Sequence: Synthetic oligonucleotide
  Target: LAMA2; (-) strand; PAM type: YTN; PAM sequence: TTG
caaaatgggaacaacaagag

SEQ ID NO: 227656 - DNA, 20 bp, Artificial Sequence
  Description of Artificial Sequence: Synthetic oligonucleotide
  Target: LAMA2; (-) strand; PAM type: YTN; PAM sequence: TTT
gcaaaatgggaacaacaaga

SEQ ID NO: 227657 - DNA, 20 bp, Artificial Sequence
  Description of Artificial Sequence: Synthetic oligonucleotide
  Target: LAMA2; (-) strand; PAM type: YTN; PAM sequence: TTA
tttgcaaaatgggaacaaca

SEQ ID NO: 227658 - DNA, 20 bp, Artificial Sequence
  Description of Artificial Sequence: Synthetic oligonucleotide
  Target: LAMA2; (-) strand; PAM type: YTN; PAM sequence: CTT
atttgcaaaatgggaacaac

SEQ ID NO: 227659 - DNA, 20 bp, Artificial Sequence
  Description of Artificial Sequence: Synthetic oligonucleotide
  Target: LAMA2; (-) strand; PAM type: YTN; PAM sequence: TTC
ttatttgcaaaatgggaaca

SEQ ID NO: 227660 - DNA, 20 bp, Artificial Sequence
  Description of Artificial Sequence: Synthetic oligonucleotide
  Target: LAMA2; (-) strand; PAM type: YTN; PAM sequence: TTT
cttatttgcaaaatgggaac

SEQ ID NO: 227661 - DNA, 20 bp, Artificial Sequence
  Description of Artificial Sequence: Synthetic oligonucleotide
  Target: LAMA2; (-) strand; PAM type: YTN; PAM sequence: TTT
tcttatttgcaaaatgggaa

SEQ ID NO: 227662 - DNA, 20 bp, Artificial Sequence
  Description of Artificial Sequence: Synthetic oligonucleotide
  Target: LAMA2; (-) strand; PAM type: YTN; PAM sequence: TTG
cccatcagttttcttatttg

SEQ ID NO: 227663 - DNA, 20 bp, Artificial Sequence
  Description of Artificial Sequence: Synthetic oligonucleotide
  Target: LAMA2; (-) strand; PAM type: YTN; PAM sequence: TTG
ggcaaggtaatattgcccat

SEQ ID NO: 227664 - DNA, 20 bp, Artificial Sequence
  Description of Artificial Sequence: Synthetic oligonucleotide
  Target: LAMA2; (-) strand; PAM type: YTN; PAM sequence: CTT
gggcaaggtaatattgccca

SEQ ID NO: 227665 - DNA, 20 bp, Artificial Sequence
  Description of Artificial Sequence: Synthetic oligonucleotide
  Target: LAMA2; (-) strand; PAM type: YTN; PAM sequence: CTG
tataaacttgggcaaggtaa

SEQ ID NO: 227666 - DNA, 20 bp, Artificial Sequence
  Description of Artificial Sequence: Synthetic oligonucleotide
  Target: LAMA2; (-) strand; PAM type: YTN; PAM sequence: TTA
ccagctgtataaacttgggc

SEQ ID NO: 227667 - DNA, 20 bp, Artificial Sequence
  Description of Artificial Sequence: Synthetic oligonucleotide
  Target: LAMA2; (-) strand; PAM type: YTN; PAM sequence: CTT
accagctgtataaacttggg

SEQ ID NO: 227668 - DNA, 20 bp, Artificial Sequence
  Description of Artificial Sequence: Synthetic oligonucleotide
  Target: LAMA2; (-) strand; PAM type: YTN; PAM sequence: CTG
ccacttaccagctgtataaa

SEQ ID NO: 227669 - DNA, 20 bp, Artificial Sequence
  Description of Artificial Sequence: Synthetic oligonucleotide
  Target: LAMA2; (-) strand; PAM type: YTN; PAM sequence: CTC
tgccacttaccagctgtata

SEQ ID NO: 227670 - DNA, 20 bp, Artificial Sequence
  Description of Artificial Sequence: Synthetic oligonucleotide
  Target: LAMA2; (-) strand; PAM type: YTN; PAM sequence: CTG
actctgccacttaccagctg

SEQ ID NO: 227671 - DNA, 20 bp, Artificial Sequence
  Description of Artificial Sequence: Synthetic oligonucleotide
  Target: LAMA2; (-) strand; PAM type: YTN; PAM sequence: TTC
aaatcctgactctgccactt

SEQ ID NO: 227672 - DNA, 20 bp, Artificial Sequence
  Description of Artificial Sequence: Synthetic oligonucleotide
  Target: LAMA2; (-) strand; PAM type: YTN; PAM sequence: CTG
ggttcaaatcctgactctgc

SEQ ID NO: 227673 - DNA, 20 bp, Artificial Sequence
  Description of Artificial Sequence: Synthetic oligonucleotide
  Target: LAMA2; (-) strand; PAM type: YTN; PAM sequence: CTA
taccatcagcctgggttcaa

SEQ ID NO: 227674 - DNA, 20 bp, Artificial Sequence
  Description of Artificial Sequence: Synthetic oligonucleotide
  Target: LAMA2; (-) strand; PAM type: YTN; PAM sequence: CTG
agcacgcagactataccatc

SEQ ID NO: 227675 - DNA, 20 bp, Artificial Sequence
  Description of Artificial Sequence: Synthetic oligonucleotide
  Target: LAMA2; (-) strand; PAM type: YTN; PAM sequence: TTG
tggctgagcacgcagactat

SEQ ID NO: 227676 - DNA, 20 bp, Artificial Sequence
  Description of Artificial Sequence: Synthetic oligonucleotide
  Target: LAMA2; (-) strand; PAM type: YTN; PAM sequence: TTC
atgattgtggctgagcacgc

SEQ ID NO: 227677 - DNA, 20 bp, Artificial Sequence
  Description of Artificial Sequence: Synthetic oligonucleotide
  Target: LAMA2; (-) strand; PAM type: YTN; PAM sequence: TTG
agggtaagttcatgattgtg

SEQ ID NO: 227678 - DNA, 20 bp, Artificial Sequence
  Description of Artificial Sequence: Synthetic oligonucleotide
  Target: LAMA2; (-) strand; PAM type: YTN; PAM sequence: TTT
gagggtaagttcatgattgt

SEQ ID NO: 227679 - DNA, 20 bp, Artificial Sequence
  Description of Artificial Sequence: Synthetic oligonucleotide
  Target: LAMA2; (-) strand; PAM type: YTN; PAM sequence: TTA
tgcaaacacaggcagtttga

SEQ ID NO: 227680 - DNA, 20 bp, Artificial Sequence
  Description of Artificial Sequence: Synthetic oligonucleotide
  Target: LAMA2; (-) strand; PAM type: YTN; PAM sequence: CTG
tagtatccacatgattatgc

SEQ ID NO: 227681 - DNA, 20 bp, Artificial Sequence
  Description of Artificial Sequence: Synthetic oligonucleotide
  Target: LAMA2; (-) strand; PAM type: YTN; PAM sequence: CTA
tcctgtagtatccacatgat

SEQ ID NO: 227682 - DNA, 20 bp, Artificial Sequence
  Description of Artificial Sequence: Synthetic oligonucleotide
  Target: LAMA2; (-) strand; PAM type: YTN; PAM sequence: CTA
aagaatctatcctgtagtat

SEQ ID NO: 227683 - DNA, 20 bp, Artificial Sequence
  Description of Artificial Sequence: Synthetic oligonucleotide
  Target: LAMA2; (-) strand; PAM type: YTN; PAM sequence: CTA
cataagatgagtctaaagaa

SEQ ID NO: 227684 - DNA, 20 bp, Artificial Sequence
  Description of Artificial Sequence: Synthetic oligonucleotide
  Target: LAMA2; (-) strand; PAM type: YTN; PAM sequence: CTC
ctacataagatgagtctaaa

SEQ ID NO: 227685 - DNA, 20 bp, Artificial Sequence
  Description of Artificial Sequence: Synthetic oligonucleotide
  Target: LAMA2; (-) strand; PAM type: YTN; PAM sequence: TTC
ctcctacataagatgagtct

SEQ ID NO: 227686 - DNA, 20 bp, Artificial Sequence
  Description of Artificial Sequence: Synthetic oligonucleotide
  Target: LAMA2; (-) strand; PAM type: YTN; PAM sequence: CTA
ttcctcctacataagatgag

SEQ ID NO: 227687 - DNA, 20 bp, Artificial Sequence
  Description of Artificial Sequence: Synthetic oligonucleotide
  Target: LAMA2; (-) strand; PAM type: YTN; PAM sequence: TTC
atgtcactattcctcctaca

SEQ ID NO: 227688 - DNA, 20 bp, Artificial Sequence
  Description of Artificial Sequence: Synthetic oligonucleotide
  Target: LAMA2; (-) strand; PAM type: YTN; PAM sequence: TTA
tgatggttcatgtcactatt

SEQ ID NO: 227689 - DNA, 20 bp, Artificial Sequence
  Description of Artificial Sequence: Synthetic oligonucleotide
  Target: LAMA2; (-) strand; PAM type: YTN; PAM sequence: CTT
atgatggttcatgtcactat

SEQ ID NO: 227690 - DNA, 20 bp, Artificial Sequence
  Description of Artificial Sequence: Synthetic oligonucleotide
  Target: LAMA2; (-) strand; PAM type: YTN; PAM sequence: CTC
ttatgatggttcatgtcact

SEQ ID NO: 227691 - DNA, 20 bp, Artificial Sequence
  Description of Artificial Sequence: Synthetic oligonucleotide
  Target: LAMA2; (-) strand; PAM type: YTN; PAM sequence: CTC
ctcttatgatggttcatgtc

SEQ ID NO: 227692 - DNA, 20 bp, Artificial Sequence
  Description of Artificial Sequence: Synthetic oligonucleotide
  Target: LAMA2; (-) strand; PAM type: YTN; PAM sequence: TTA
atgctcctcttatgatggtt

SEQ ID NO: 227693 - DNA, 20 bp, Artificial Sequence
  Description of Artificial Sequence: Synthetic oligonucleotide
  Target: LAMA2; (-) strand; PAM type: YTN; PAM sequence: TTA
gttaatgctcctcttatgat

SEQ ID NO: 227694 - DNA, 20 bp, Artificial Sequence
  Description of Artificial Sequence: Synthetic oligonucleotide
  Target: LAMA2; (-) strand; PAM type: YTN; PAM sequence: TTT
agttaatgctcctcttatga

SEQ ID NO: 227695 - DNA, 20 bp, Artificial Sequence
  Description of Artificial Sequence: Synthetic oligonucleotide
  Target: LAMA2; (-) strand; PAM type: YTN; PAM sequence: TTC
atgggtaagacaagcaaagt

SEQ ID NO: 227696 - DNA, 20 bp, Artificial Sequence
  Description of Artificial Sequence: Synthetic oligonucleotide
  Target: LAMA2; (-) strand; PAM type: YTN; PAM sequence: TTT
catgggtaagacaagcaaag

SEQ ID NO: 227697 - DNA, 20 bp, Artificial Sequence
  Description of Artificial Sequence: Synthetic oligonucleotide
  Target: LAMA2; (-) strand; PAM type: YTN; PAM sequence: CTT
tcatgggtaagacaagcaaa

SEQ ID NO: 227698 - DNA, 20 bp, Artificial Sequence
  Description of Artificial Sequence: Synthetic oligonucleotide
  Target: LAMA2; (-) strand; PAM type: YTN; PAM sequence: TTC
tttcatgggtaagacaagca

SEQ ID NO: 227699 - DNA, 20 bp, Artificial Sequence
  Description of Artificial Sequence: Synthetic oligonucleotide
  Target: LAMA2; (-) strand; PAM type: YTN; PAM sequence: CTG
atgttctttcatgggtaaga

SEQ ID NO: 227700 - DNA, 20 bp, Artificial Sequence
  Description of Artificial Sequence: Synthetic oligonucleotide
  Target: LAMA2; (-) strand; PAM type: YTN; PAM sequence: TTG
gcagggagtcacactgatgt

SEQ ID NO: 227701 - DNA, 20 bp, Artificial Sequence
  Description of Artificial Sequence: Synthetic oligonucleotide
  Target: LAMA2; (-) strand; PAM type: YTN; PAM sequence: TTT
ggcagggagtcacactgatg

SEQ ID NO: 227702 - DNA, 20 bp, Artificial Sequence
  Description of Artificial Sequence: Synthetic oligonucleotide
  Target: LAMA2; (-) strand; PAM type: YTN; PAM sequence: TTA
tcagatatttggcagggagt

SEQ ID NO: 227703 - DNA, 20 bp, Artificial Sequence
  Description of Artificial Sequence: Synthetic oligonucleotide
  Target: LAMA2; (-) strand; PAM type: YTN; PAM sequence: TTC
attatcagatatttggcagg

SEQ ID NO: 227704 - DNA, 20 bp, Artificial Sequence
  Description of Artificial Sequence: Synthetic oligonucleotide
  Target: LAMA2; (-) strand; PAM type: YTN; PAM sequence: TTT
cattatcagatatttggcag

SEQ ID NO: 227705 - DNA, 20 bp, Artificial Sequence
  Description of Artificial Sequence: Synthetic oligonucleotide
  Target: LAMA2; (-) strand; PAM type: YTN; PAM sequence: TTT
tcattatcagatatttggca

SEQ ID NO: 227706 - DNA, 20 bp, Artificial Sequence
  Description of Artificial Sequence: Synthetic oligonucleotide
  Target: LAMA2; (-) strand; PAM type: YTN; PAM sequence: CTT
ttcattatcagatatttggc

SEQ ID NO: 227707 - DNA, 20 bp, Artificial Sequence
  Description of Artificial Sequence: Synthetic oligonucleotide
  Target: LAMA2; (-) strand; PAM type: YTN; PAM sequence: TTC
ttttcattatcagatatttg

SEQ ID NO: 227708 - DNA, 20 bp, Artificial Sequence
  Description of Artificial Sequence: Synthetic oligonucleotide
  Target: LAMA2; (-) strand; PAM type: YTN; PAM sequence: TTT
cttttcattatcagatattt

SEQ ID NO: 227709 - DNA, 20 bp, Artificial Sequence
  Description of Artificial Sequence: Synthetic oligonucleotide
  Target: LAMA2; (-) strand; PAM type: YTN; PAM sequence: CTG
atcacaatgcatttcttttc

SEQ ID NO: 227710 - DNA, 20 bp, Artificial Sequence
  Description of Artificial Sequence: Synthetic oligonucleotide
  Target: LAMA2; (-) strand; PAM type: YTN; PAM sequence: TTG
ctgatcacaatgcatttctt

SEQ ID NO: 227711 - DNA, 20 bp, Artificial Sequence
  Description of Artificial Sequence: Synthetic oligonucleotide
  Target: LAMA2; (-) strand; PAM type: YTN; PAM sequence: CTT
gctgatcacaatgcatttct

SEQ ID NO: 227712 - DNA, 20 bp, Artificial Sequence
  Description of Artificial Sequence: Synthetic oligonucleotide
  Target: LAMA2; (-) strand; PAM type: YTN; PAM sequence: TTA
tcttgctgatcacaatgcat

SEQ ID NO: 227713 - DNA, 20 bp, Artificial Sequence
  Description of Artificial Sequence: Synthetic oligonucleotide
  Target: LAMA2; (-) strand; PAM type: YTN; PAM sequence: TTT
atcttgctgatcacaatgca

SEQ ID NO: 227714 - DNA, 20 bp, Artificial Sequence
  Description of Artificial Sequence: Synthetic oligonucleotide
  Target: LAMA2; (-) strand; PAM type: YTN; PAM sequence: TTT
tatcttgctgatcacaatgc

SEQ ID NO: 227715 - DNA, 20 bp, Artificial Sequence
  Description of Artificial Sequence: Synthetic oligonucleotide
  Target: LAMA2; (-) strand; PAM type: YTN; PAM sequence: TTC
attttatcttgctgatcaca

SEQ ID NO: 227716 - DNA, 20 bp, Artificial Sequence
  Description of Artificial Sequence: Synthetic oligonucleotide
  Target: LAMA2; (-) strand; PAM type: YTN; PAM sequence: CTT
cattttatcttgctgatcac

SEQ ID NO: 227717 - DNA, 20 bp, Artificial Sequence
  Description of Artificial Sequence: Synthetic oligonucleotide
  Target: LAMA2; (-) strand; PAM type: YTN; PAM sequence: TTC
ttcattttatcttgctgatc

SEQ ID NO: 227718 - DNA, 20 bp, Artificial Sequence
  Description of Artificial Sequence: Synthetic oligonucleotide
  Target: LAMA2; (-) strand; PAM type: YTN; PAM sequence: TTT
cttcattttatcttgctgat

SEQ ID NO: 227719 - DNA, 20 bp, Artificial Sequence
  Description of Artificial Sequence: Synthetic oligonucleotide
  Target: LAMA2; (-) strand; PAM type: YTN; PAM sequence: TTT
tcttcattttatcttgctga

SEQ ID NO: 227720 - DNA, 20 bp, Artificial Sequence
  Description of Artificial Sequence: Synthetic oligonucleotide
  Target: LAMA2; (-) strand; PAM type: YTN; PAM sequence: TTA
ttttcttcattttatcttgc

SEQ ID NO: 227721 - DNA, 20 bp, Artificial Sequence
  Description of Artificial Sequence: Synthetic oligonucleotide
  Target: LAMA2; (-) strand; PAM type: YTN; PAM sequence: TTT
attttcttcattttatcttg

SEQ ID NO: 227722 - DNA, 20 bp, Artificial Sequence
  Description of Artificial Sequence: Synthetic oligonucleotide
  Target: LAMA2; (-) strand; PAM type: YTN; PAM sequence: TTT
tattttcttcattttatctt

SEQ ID NO: 227723 - DNA, 20 bp, Artificial Sequence
  Description of Artificial Sequence: Synthetic oligonucleotide
  Target: LAMA2; (-) strand; PAM type: YTN; PAM sequence: TTT
ttattttcttcattttatct

SEQ ID NO: 227724 - DNA, 20 bp, Artificial Sequence
  Description of Artificial Sequence: Synthetic oligonucleotide
  Target: LAMA2; (-) strand; PAM type: YTN; PAM sequence: TTC
agtgtacatttttattttct

SEQ ID NO: 227725 - DNA, 20 bp, Artificial Sequence
  Description of Artificial Sequence: Synthetic oligonucleotide
  Target: LAMA2; (-) strand; PAM type: YTN; PAM sequence: TTT
cagtgtacatttttattttc

SEQ ID NO: 227726 - DNA, 20 bp, Artificial Sequence
  Description of Artificial Sequence: Synthetic oligonucleotide
  Target: LAMA2; (-) strand; PAM type: YTN; PAM sequence: CTA
tttcagtgtacatttttatt

SEQ ID NO: 227727 - DNA, 20 bp, Artificial Sequence
  Description of Artificial Sequence: Synthetic oligonucleotide
  Target: LAMA2; (-) strand; PAM type: YTN; PAM sequence: TTC
agctatttcagtgtacattt

SEQ ID NO: 227728 - DNA, 20 bp, Artificial Sequence
  Description of Artificial Sequence: Synthetic oligonucleotide
  Target: LAMA2; (-) strand; PAM type: YTN; PAM sequence: TTC
gttcagctatttcagtgtac

SEQ ID NO: 227729 - DNA, 20 bp, Artificial Sequence
  Description of Artificial Sequence: Synthetic oligonucleotide
  Target: LAMA2; (-) strand; PAM type: YTN; PAM sequence: TTC
attcgttcagctatttcagt

SEQ ID NO: 227730 - DNA, 20 bp, Artificial Sequence
  Description of Artificial Sequence: Synthetic oligonucleotide
  Target: LAMA2; (-) strand; PAM type: YTN; PAM sequence: TTA
attcattcgttcagctattt

SEQ ID NO: 227731 - DNA, 20 bp, Artificial Sequence
  Description of Artificial Sequence: Synthetic oligonucleotide
  Target: LAMA2; (-) strand; PAM type: YTN; PAM sequence: TTG
ttaattcattcgttcagcta

SEQ ID NO: 227732 - DNA, 20 bp, Artificial Sequence
  Description of Artificial Sequence: Synthetic oligonucleotide
  Target: LAMA2; (-) strand; PAM type: YTN; PAM sequence: CTA
taaaataggttgttaattca

SEQ ID NO: 227733 - DNA, 20 bp, Artificial Sequence
  Description of Artificial Sequence: Synthetic oligonucleotide
  Target: LAMA2; (-) strand; PAM type: YTN; PAM sequence: CTC
cagcacaatgctataaaata

SEQ ID NO: 227734 - DNA, 20 bp, Artificial Sequence
  Description of Artificial Sequence: Synthetic oligonucleotide
  Target: LAMA2; (-) strand; PAM type: YTN; PAM sequence: TTC
tccagcacaatgctataaaa

SEQ ID NO: 227735 - DNA, 20 bp, Artificial Sequence
  Description of Artificial Sequence: Synthetic oligonucleotide
  Target: LAMA2; (-) strand; PAM type: YTN; PAM sequence: CTT
ctccagcacaatgctataaa

SEQ ID NO: 227736 - DNA, 20 bp, Artificial Sequence
  Description of Artificial Sequence: Synthetic oligonucleotide
  Target: LAMA2; (-) strand; PAM type: YTN; PAM sequence: TTC
ttctccagcacaatgctata

SEQ ID NO: 227737 - DNA, 20 bp, Artificial Sequence
  Description of Artificial Sequence: Synthetic oligonucleotide
  Target: LAMA2; (-) strand; PAM type: YTN; PAM sequence: CTG
taagatgagcattcttctcc

SEQ ID NO: 227738 - DNA, 20 bp, Artificial Sequence
  Description of Artificial Sequence: Synthetic oligonucleotide
  Target: LAMA2; (-) strand; PAM type: YTN; PAM sequence: CTC
tgtaagatgagcattcttct

SEQ ID NO: 227739 - DNA, 20 bp, Artificial Sequence
  Description of Artificial Sequence: Synthetic oligonucleotide
  Target: LAMA2; (-) strand; PAM type: YTN; PAM sequence: TTA
gacacaatcacctctgtaag

SEQ ID NO: 227740 - DNA, 20 bp, Artificial Sequence
  Description of Artificial Sequence: Synthetic oligonucleotide
  Target: LAMA2; (-) strand; PAM type: YTN; PAM sequence: TTA
ttagacacaatcacctctgt

SEQ ID NO: 227741 - DNA, 20 bp, Artificial Sequence
  Description of Artificial Sequence: Synthetic oligonucleotide
  Target: LAMA2; (-) strand; PAM type: YTN; PAM sequence: TTT
attagacacaatcacctctg

SEQ ID NO: 227742 - DNA, 20 bp, Artificial Sequence
  Description of Artificial Sequence: Synthetic oligonucleotide
  Target: LAMA2; (-) strand; PAM type: YTN; PAM sequence: TTT
tattagacacaatcacctct

SEQ ID NO: 227743 - DNA, 20 bp, Artificial Sequence
  Description of Artificial Sequence: Synthetic oligonucleotide
  Target: LAMA2; (-) strand; PAM type: YTN; PAM sequence: TTT
ttattagacacaatcacctc

SEQ ID NO: 227744 - DNA, 20 bp, Artificial Sequence
  Description of Artificial Sequence: Synthetic oligonucleotide
  Target: LAMA2; (-) strand; PAM type: YTN; PAM sequence: TTC
aaatccagtgcagtttttat

SEQ ID NO: 227745 - DNA, 20 bp, Artificial Sequence
  Description of Artificial Sequence: Synthetic oligonucleotide
  Target: LAMA2; (-) strand; PAM type: YTN; PAM sequence: CTT
caaatccagtgcagttttta

SEQ ID NO: 227746 - DNA, 20 bp, Artificial Sequence
  Description of Artificial Sequence: Synthetic oligonucleotide
  Target: LAMA2; (-) strand; PAM type: YTN; PAM sequence: TTA
cttcaaatccagtgcagttt

SEQ ID NO: 227747 - DNA, 20 bp, Artificial Sequence
  Description of Artificial Sequence: Synthetic oligonucleotide
  Target: LAMA2; (-) strand; PAM type: YTN; PAM sequence: TTT
acttcaaatccagtgcagtt

SEQ ID NO: 227748 - DNA, 20 bp, Artificial Sequence
  Description of Artificial Sequence: Synthetic oligonucleotide
  Target: LAMA2; (-) strand; PAM type: YTN; PAM sequence: TTT
tacttcaaatccagtgcagt

SEQ ID NO: 227749 - DNA, 20 bp, Artificial Sequence
  Description of Artificial Sequence: Synthetic oligonucleotide
  Target: LAMA2; (-) strand; PAM type: YTN; PAM sequence: TTT
ttacttcaaatccagtgcag

SEQ ID NO: 227750 - DNA, 20 bp, Artificial Sequence
  Description of Artificial Sequence: Synthetic oligonucleotide
  Target: LAMA2; (-) strand; PAM type: YTN; PAM sequence: TTT
tttacttcaaatccagtgca

SEQ ID NO: 227751 - DNA, 20 bp, Artificial Sequence
  Description of Artificial Sequence: Synthetic oligonucleotide
  Target: LAMA2; (-) strand; PAM type: YTN; PAM sequence: TTA
ttttttacttcaaatccagt

SEQ ID NO: 227752 - DNA, 20 bp, Artificial Sequence
  Description of Artificial Sequence: Synthetic oligonucleotide
  Target: LAMA2; (-) strand; PAM type: YTN; PAM sequence: TTT
attttttacttcaaatccag

SEQ ID NO: 227753 - DNA, 20 bp, Artificial Sequence
  Description of Artificial Sequence: Synthetic oligonucleotide
  Target: LAMA2; (-) strand; PAM type: YTN; PAM sequence: TTT
tattttttacttcaaatcca

SEQ ID NO: 227754 - DNA, 20 bp, Artificial Sequence
  Description of Artificial Sequence: Synthetic oligonucleotide
  Target: LAMA2; (-) strand; PAM type: YTN; PAM sequence: TTT
ttattttttacttcaaatcc

SEQ ID NO: 227755 - DNA, 20 bp, Artificial Sequence
  Description of Artificial Sequence: Synthetic oligonucleotide
  Target: LAMA2; (-) strand; PAM type: YTN; PAM sequence: TTT
tttattttttacttcaaatc

SEQ ID NO: 227756 - DNA, 20 bp, Artificial Sequence
  Description of Artificial Sequence: Synthetic oligonucleotide
  Target: LAMA2; (-) strand; PAM type: YTN; PAM sequence: TTG
ttttttattttttacttcaa

SEQ ID NO: 227757 - DNA, 20 bp, Artificial Sequence
  Description of Artificial Sequence: Synthetic oligonucleotide
  Target: LAMA2; (-) strand; PAM type: YTN; PAM sequence: TTT
gttttttattttttacttca

SEQ ID NO: 227758 - DNA, 20 bp, Artificial Sequence
  Description of Artificial Sequence: Synthetic oligonucleotide
  Target: LAMA2; (-) strand; PAM type: YTN; PAM sequence: TTT
tgttttttattttttacttc

SEQ ID NO: 227759 - DNA, 20 bp, Artificial Sequence
  Description of Artificial Sequence: Synthetic oligonucleotide
  Target: LAMA2; (-) strand; PAM type: YTN; PAM sequence: TTT
ttgttttttattttttactt

SEQ ID NO: 227760 - DNA, 20 bp, Artificial Sequence
  Description of Artificial Sequence: Synthetic oligonucleotide
  Target: LAMA2; (-) strand; PAM type: YTN; PAM sequence: TTA
gatccagtttttgtttttta

SEQ ID NO: 227761 - DNA, 20 bp, Artificial Sequence
  Description of Artificial Sequence: Synthetic oligonucleotide
  Target: LAMA2; (-) strand; PAM type: YTN; PAM sequence: TTG
gaaattagatccagtttttg

SEQ ID NO: 227762 - DNA, 20 bp, Artificial Sequence
  Description of Artificial Sequence: Synthetic oligonucleotide
  Target: LAMA2; (-) strand; PAM type: YTN; PAM sequence: CTA
cgagtgatagaattggaaat

SEQ ID NO: 227763 - DNA, 20 bp, Artificial Sequence
  Description of Artificial Sequence: Synthetic oligonucleotide
  Target: LAMA2; (-) strand; PAM type: YTN; PAM sequence: TTA
cagagactacgagtgataga

SEQ ID NO: 227764 - DNA, 20 bp, Artificial Sequence
  Description of Artificial Sequence: Synthetic oligonucleotide
  Target: LAMA2; (-) strand; PAM type: YTN; PAM sequence: CTA
ggaggttacagagactacga

SEQ ID NO: 227765 - DNA, 20 bp, Artificial Sequence
  Description of Artificial Sequence: Synthetic oligonucleotide
  Target: LAMA2; (-) strand; PAM type: YTN; PAM sequence: CTA
agatcccagtgaaagagact

SEQ ID NO: 227766 - DNA, 20 bp, Artificial Sequence
  Description of Artificial Sequence: Synthetic oligonucleotide
  Target: LAMA2; (-) strand; PAM type: YTN; PAM sequence: CTA
agaaggcacatctaagatcc

SEQ ID NO: 227767 - DNA, 20 bp, Artificial Sequence
  Description of Artificial Sequence: Synthetic oligonucleotide
  Target: LAMA2; (-) strand; PAM type: YTN; PAM sequence: TTC
taagaaggcacatctaagat

SEQ ID NO: 227768 - DNA, 20 bp, Artificial Sequence
  Description of Artificial Sequence: Synthetic oligonucleotide
  Target: LAMA2; (-) strand; PAM type: YTN; PAM sequence: CTT
ctaagaaggcacatctaaga

SEQ ID NO: 227769 - DNA, 20 bp, Artificial Sequence
  Description of Artificial Sequence: Synthetic oligonucleotide
  Target: LAMA2; (-) strand; PAM type: YTN; PAM sequence: TTA
gcttctaagaaggcacatct

SEQ ID NO: 227770 - DNA, 20 bp, Artificial Sequence
  Description of Artificial Sequence: Synthetic oligonucleotide
  Target: LAMA2; (-) strand; PAM type: YTN; PAM sequence: TTT
agcttctaagaaggcacatc

SEQ ID NO: 227771 - DNA, 20 bp, Artificial Sequence
  Description of Artificial Sequence: Synthetic oligonucleotide
  Target: LAMA2; (-) strand; PAM type: YTN; PAM sequence: CTC
acagataagaaaatttagct

SEQ ID NO: 227772 - DNA, 20 bp, Artificial Sequence
  Description of Artificial Sequence: Synthetic oligonucleotide
  Target: LAMA2; (-) strand; PAM type: YTN; PAM sequence: TTG
atatcacaataaagtgagtg

SEQ ID NO: 227773 - DNA, 20 bp, Artificial Sequence
  Description of Artificial Sequence: Synthetic oligonucleotide
  Target: LAMA2; (-) strand; PAM type: YTN; PAM sequence: TTT
gatatcacaataaagtgagt

SEQ ID NO: 227774 - DNA, 20 bp, Artificial Sequence
  Description of Artificial Sequence: Synthetic oligonucleotide
  Target: LAMA2; (-) strand; PAM type: YTN; PAM sequence: TTT
tgatatcacaataaagtgag

SEQ ID NO: 227775 - DNA, 20 bp, Artificial Sequence
  Description of Artificial Sequence: Synthetic oligonucleotide
  Target: LAMA2; (-) strand; PAM type: YTN; PAM sequence: TTA
ttttgatatcacaataaagt

SEQ ID NO: 227776 - DNA, 20 bp, Artificial Sequence
  Description of Artificial Sequence: Synthetic oligonucleotide
  Target: LAMA2; (-) strand; PAM type: YTN; PAM sequence: CTT
attttgatatcacaataaag

SEQ ID NO: 227777 - DNA, 20 bp, Artificial Sequence
  Description of Artificial Sequence: Synthetic oligonucleotide
  Target: LAMA2; (-) strand; PAM type: YTN; PAM sequence: CTA
tcttattttgatatcacaat

SEQ ID NO: 227778 - DNA, 20 bp, Artificial Sequence
  Description of Artificial Sequence: Synthetic oligonucleotide
  Target: LAMA2; (-) strand; PAM type: YTN; PAM sequence: CTC
caaggatatgcacatatgct

SEQ ID NO: 227779 - DNA, 20 bp, Artificial Sequence
  Description of Artificial Sequence: Synthetic oligonucleotide
  Target: LAMA2; (-) strand; PAM type: YTN; PAM sequence: TTA
aaatctccaaggatatgcac

SEQ ID NO: 227780 - DNA, 20 bp, Artificial Sequence
  Description of Artificial Sequence: Synthetic oligonucleotide
  Target: LAMA2; (-) strand; PAM type: YTN; PAM sequence: TTT
aaaatctccaaggatatgca

SEQ ID NO: 227781 - DNA, 20 bp, Artificial Sequence
  Description of Artificial Sequence: Synthetic oligonucleotide
  Target: LAMA2; (-) strand; PAM type: YTN; PAM sequence: CTT
taaaatctccaaggatatgc

SEQ ID NO: 227782 - DNA, 20 bp, Artificial Sequence
  Description of Artificial Sequence: Synthetic oligonucleotide
  Target: LAMA2; (-) strand; PAM type: YTN; PAM sequence: TTC
agatagctttaaaatctcca

SEQ ID NO: 227783 - DNA, 20 bp, Artificial Sequence
  Description of Artificial Sequence: Synthetic oligonucleotide
  Target: LAMA2; (-) strand; PAM type: YTN; PAM sequence: TTT
cagatagctttaaaatctcc

SEQ ID NO: 227784 - DNA, 20 bp, Artificial Sequence
  Description of Artificial Sequence: Synthetic oligonucleotide
  Target: LAMA2; (-) strand; PAM type: YTN; PAM sequence: TTT
tcagatagctttaaaatctc

SEQ ID NO: 227785 - DNA, 20 bp, Artificial Sequence
  Description of Artificial Sequence: Synthetic oligonucleotide
  Target: LAMA2; (-) strand; PAM type: YTN; PAM sequence: TTA
aatatggcacattttcagat

SEQ ID NO: 227786 - DNA, 20 bp, Artificial Sequence
  Description of Artificial Sequence: Synthetic oligonucleotide
  Target: LAMA2; (-) strand; PAM type: YTN; PAM sequence: TTT
aaatatggcacattttcaga

SEQ ID NO: 227787 - DNA, 20 bp, Artificial Sequence
  Description of Artificial Sequence: Synthetic oligonucleotide
  Target: LAMA2; (-) strand; PAM type: YTN; PAM sequence: TTC
agtatgtttaaatatggcac

SEQ ID NO: 227788 - DNA, 20 bp, Artificial Sequence
  Description of Artificial Sequence: Synthetic oligonucleotide
  Target: LAMA2; (-) strand; PAM type: YTN; PAM sequence: CTA
tgttcagtatgtttaaatat

SEQ ID NO: 227789 - DNA, 20 bp, Artificial Sequence
  Description of Artificial Sequence: Synthetic oligonucleotide
  Target: LAMA2; (-) strand; PAM type: YTN; PAM sequence: TTA
actatgttcagtatgtttaa

SEQ ID NO: 227790 - DNA, 20 bp, Artificial Sequence
  Description of Artificial Sequence: Synthetic oligonucleotide
  Target: LAMA2; (-) strand; PAM type: YTN; PAM sequence: TTT
aactatgttcagtatgttta

SEQ ID NO: 227791 - DNA, 20 bp, Artificial Sequence
  Description of Artificial Sequence: Synthetic oligonucleotide
  Target: LAMA2; (-) strand; PAM type: YTN; PAM sequence: TTT
taactatgttcagtatgttt

SEQ ID NO: 227792 - DNA, 20 bp, Artificial Sequence
  Description of Artificial Sequence: Synthetic oligonucleotide
  Target: LAMA2; (-) strand; PAM type: YTN; PAM sequence: CTT
ttaactatgttcagtatgtt

SEQ ID NO: 227793 - DNA, 20 bp, Artificial Sequence
  Description of Artificial Sequence: Synthetic oligonucleotide
  Target: LAMA2; (-) strand; PAM type: YTN; PAM sequence: TTA
atcagatgcatgtcttttaa

SEQ ID NO: 227794 - DNA, 20 bp, Artificial Sequence
  Description of Artificial Sequence: Synthetic oligonucleotide
  Target: LAMA2; (-) strand; PAM type: YTN; PAM sequence: TTA
cattaatcagatgcatgtct

SEQ ID NO: 227795 - DNA, 20 bp, Artificial Sequence
  Description of Artificial Sequence: Synthetic oligonucleotide
  Target: LAMA2; (-) strand; PAM type: YTN; PAM sequence: TTT
acattaatcagatgcatgtc

SEQ ID NO: 227796 - DNA, 20 bp, Artificial Sequence
  Description of Artificial Sequence: Synthetic oligonucleotide
  Target: LAMA2; (-) strand; PAM type: YTN; PAM sequence: TTT
tacattaatcagatgcatgt

SEQ ID NO: 227797 - DNA, 20 bp, Artificial Sequence
  Description of Artificial Sequence: Synthetic oligonucleotide
  Target: LAMA2; (-) strand; PAM type: YTN; PAM sequence: TTT
ttacattaatcagatgcatg

SEQ ID NO: 227798 - DNA, 20 bp, Artificial Sequence
  Description of Artificial Sequence: Synthetic oligonucleotide
  Target: LAMA2; (-) strand; PAM type: YTN; PAM sequence: TTG
gtatagtttttacattaatc

SEQ ID NO: 227799 - DNA, 20 bp, Artificial Sequence
  Description of Artificial Sequence: Synthetic oligonucleotide
  Target: LAMA2; (-) strand; PAM type: YTN; PAM sequence: CTA
caataaattggtatagtttt

SEQ ID NO: 227800 - DNA, 20 bp, Artificial Sequence
  Description of Artificial Sequence: Synthetic oligonucleotide
  Target: LAMA2; (-) strand; PAM type: YTN; PAM sequence: TTC
caagtggactacaataaatt

SEQ ID NO: 227801 - DNA, 20 bp, Artificial Sequence
  Description of Artificial Sequence: Synthetic oligonucleotide
  Target: LAMA2; (-) strand; PAM type: YTN; PAM sequence: TTT
ccaagtggactacaataaat

SEQ ID NO: 227802 - DNA, 20 bp, Artificial Sequence
  Description of Artificial Sequence: Synthetic oligonucleotide
  Target: LAMA2; (-) strand; PAM type: YTN; PAM sequence: CTT
tccaagtggactacaataaa

SEQ ID NO: 227803 - DNA, 20 bp, Artificial Sequence
  Description of Artificial Sequence: Synthetic oligonucleotide
  Target: LAMA2; (-) strand; PAM type: YTN; PAM sequence: TTG
tctttccaagtggactacaa

SEQ ID NO: 227804 - DNA, 20 bp, Artificial Sequence
  Description of Artificial Sequence: Synthetic oligonucleotide
  Target: LAMA2; (-) strand; PAM type: YTN; PAM sequence: CTT
gtctttccaagtggactaca

SEQ ID NO: 227805 - DNA, 20 bp, Artificial Sequence
  Description of Artificial Sequence: Synthetic oligonucleotide
  Target: LAMA2; (-) strand; PAM type: YTN; PAM sequence: CTA
cttgtctttccaagtggact

SEQ ID NO: 227806 - DNA, 20 bp, Artificial Sequence
  Description of Artificial Sequence: Synthetic oligonucleotide
  Target: LAMA2; (-) strand; PAM type: YTN; PAM sequence: TTA
agtaagctacttgtctttcc

SEQ ID NO: 227807 - DNA, 20 bp, Artificial Sequence
  Description of Artificial Sequence: Synthetic oligonucleotide
  Target: LAMA2; (-) strand; PAM type: YTN; PAM sequence: TTT
aagtaagctacttgtctttc

SEQ ID NO: 227808 - DNA, 20 bp, Artificial Sequence
  Description of Artificial Sequence: Synthetic oligonucleotide
  Target: LAMA2; (-) strand; PAM type: YTN; PAM sequence: CTT
taagtaagctacttgtcttt

SEQ ID NO: 227809 - DNA, 20 bp, Artificial Sequence
  Description of Artificial Sequence: Synthetic oligonucleotide
  Target: LAMA2; (-) strand; PAM type: YTN; PAM sequence: TTA
aatgcaacaaaatagatctt

SEQ ID NO: 227810 - DNA, 20 bp, Artificial Sequence
  Description of Artificial Sequence: Synthetic oligonucleotide
  Target: LAMA2; (-) strand; PAM type: YTN; PAM sequence: TTT
aaatgcaacaaaatagatct

SEQ ID NO: 227811 - DNA, 20 bp, Artificial Sequence
  Description of Artificial Sequence: Synthetic oligonucleotide
  Target: LAMA2; (-) strand; PAM type: YTN; PAM sequence: CTT
taaatgcaacaaaatagatc

SEQ ID NO: 227812 - DNA, 20 bp, Artificial Sequence
  Description of Artificial Sequence: Synthetic oligonucleotide
  Target: LAMA2; (-) strand; PAM type: YTN; PAM sequence: TTC
caactttaaatgcaacaaaa

SEQ ID NO: 227813 - DNA, 20 bp, Artificial Sequence
  Description of Artificial Sequence: Synthetic oligonucleotide
  Target: LAMA2; (-) strand; PAM type: YTN; PAM sequence: TTT
ccaactttaaatgcaacaaa

SEQ ID NO: 227814 - DNA, 20 bp, Artificial Sequence
  Description of Artificial Sequence: Synthetic oligonucleotide
  Target: LAMA2; (-) strand; PAM type: YTN; PAM sequence: TTC
atttccaactttaaatgcaa

SEQ ID NO: 227815 - DNA, 20 bp, Artificial Sequence
  Description of Artificial Sequence: Synthetic oligonucleotide
  Target: LAMA2; (-) strand; PAM type: YTN; PAM sequence: TTA
tatcaggttcatttccaact

SEQ ID NO: 227816 - DNA, 20 bp, Artificial Sequence
  Description of Artificial Sequence: Synthetic oligonucleotide
  Target: LAMA2; (-) strand; PAM type: YTN; PAM sequence: TTT
atatcaggttcatttccaac

SEQ ID NO: 227817 - DNA, 20 bp, Artificial Sequence
  Description of Artificial Sequence: Synthetic oligonucleotide
  Target: LAMA2; (-) strand; PAM type: YTN; PAM sequence: TTG
ggaagagatttatatcaggt

SEQ ID NO: 227818 - DNA, 20 bp, Artificial Sequence
  Description of Artificial Sequence: Synthetic oligonucleotide
  Target: LAMA2; (-) strand; PAM type: YTN; PAM sequence: TTA
aagacaggatcacagtagtt

SEQ ID NO: 227819 - DNA, 20 bp, Artificial Sequence
  Description of Artificial Sequence: Synthetic oligonucleotide
  Target: LAMA2; (-) strand; PAM type: YTN; PAM sequence: TTG
tattaaagacaggatcacag

SEQ ID NO: 227820 - DNA, 20 bp, Artificial Sequence
  Description of Artificial Sequence: Synthetic oligonucleotide
  Target: LAMA2; (-) strand; PAM type: YTN; PAM sequence: TTA
aagttgtattaaagacagga

SEQ ID NO: 227821 - DNA, 20 bp, Artificial Sequence
  Description of Artificial Sequence: Synthetic oligonucleotide
  Target: LAMA2; (-) strand; PAM type: YTN; PAM sequence: CTA
ttaaagttgtattaaagaca

SEQ ID NO: 227822 - DNA, 20 bp, Artificial Sequence
  Description of Artificial Sequence: Synthetic oligonucleotide
  Target: LAMA2; (-) strand; PAM type: YTN; PAM sequence: TTC
cagtctattaaagttgtatt

SEQ ID NO: 227823 - DNA, 20 bp, Artificial Sequence
  Description of Artificial Sequence: Synthetic oligonucleotide
  Target: LAMA2; (-) strand; PAM type: YTN; PAM sequence: TTG
gcatatgttccagtctatta

SEQ ID NO: 227824 - DNA, 20 bp, Artificial Sequence
  Description of Artificial Sequence: Synthetic oligonucleotide
  Target: LAMA2; (-) strand; PAM type: YTN; PAM sequence: CTT
ggcatatgttccagtctatt

SEQ ID NO: 227825 - DNA, 20 bp, Artificial Sequence
  Description of Artificial Sequence: Synthetic oligonucleotide
  Target: LAMA2; (-) strand; PAM type: YTN; PAM sequence: CTC
ttggcatatgttccagtcta

SEQ ID NO: 227826 - DNA, 20 bp, Artificial Sequence
  Description of Artificial Sequence: Synthetic oligonucleotide
  Target: LAMA2; (-) strand; PAM type: YTN; PAM sequence: CTG
tatactcttggcatatgttc

SEQ ID NO: 227827 - DNA, 20 bp, Artificial Sequence
  Description of Artificial Sequence: Synthetic oligonucleotide
  Target: LAMA2; (-) strand; PAM type: YTN; PAM sequence: CTG
actgtatactcttggcatat

SEQ ID NO: 227828 - DNA, 20 bp, Artificial Sequence
  Description of Artificial Sequence: Synthetic oligonucleotide
  Target: LAMA2; (-) strand; PAM type: YTN; PAM sequence: TTC
tgactgtatactcttggcat

SEQ ID NO: 227829 - DNA, 20 bp, Artificial Sequence
  Description of Artificial Sequence: Synthetic oligonucleotide
  Target: LAMA2; (-) strand; PAM type: YTN; PAM sequence: TTA
gagagattctgactgtatac

SEQ ID NO: 227830 - DNA, 20 bp, Artificial Sequence
  Description of Artificial Sequence: Synthetic oligonucleotide
  Target: LAMA2; (-) strand; PAM type: YTN; PAM sequence: CTT
agagagattctgactgtata

SEQ ID NO: 227831 - DNA, 20 bp, Artificial Sequence
  Description of Artificial Sequence: Synthetic oligonucleotide
  Target: LAMA2; (-) strand; PAM type: YTN; PAM sequence: TTC
ttagagagattctgactgta

SEQ ID NO: 227832 - DNA, 20 bp, Artificial Sequence
  Description of Artificial Sequence: Synthetic oligonucleotide
  Target: LAMA2; (-) strand; PAM type: YTN; PAM sequence: TTG
attcttagagagattctgac

SEQ ID NO: 227833 - DNA, 20 bp, Artificial Sequence
  Description of Artificial Sequence: Synthetic oligonucleotide
  Target: LAMA2; (-) strand; PAM type: YTN; PAM sequence: TTT
gattcttagagagattctga

SEQ ID NO: 227834 - DNA, 20 bp, Artificial Sequence
  Description of Artificial Sequence: Synthetic oligonucleotide
  Target: LAMA2; (-) strand; PAM type: YTN; PAM sequence: CTT
tgattcttagagagattctg

SEQ ID NO: 227835 - DNA, 20 bp, Artificial Sequence
  Description of Artificial Sequence: Synthetic oligonucleotide
  Target: LAMA2; (-) strand; PAM type: YTN; PAM sequence: CTC
atcagtctttgattcttaga

SEQ ID NO: 227836 - DNA, 20 bp, Artificial Sequence
  Description of Artificial Sequence: Synthetic oligonucleotide
  Target: LAMA2; (-) strand; PAM type: YTN; PAM sequence: TTC
tcatcagtctttgattctta

SEQ ID NO: 227837 - DNA, 20 bp, Artificial Sequence
  Description of Artificial Sequence: Synthetic oligonucleotide
  Target: LAMA2; (-) strand; PAM type: YTN; PAM sequence: TTT
ctcatcagtctttgattctt

SEQ ID NO: 227838 - DNA, 20 bp, Artificial Sequence
  Description of Artificial Sequence: Synthetic oligonucleotide
  Target: LAMA2; (-) strand; PAM type: YTN; PAM sequence: TTC
agaggtttctcatcagtctt

SEQ ID NO: 227839 - DNA, 20 bp, Artificial Sequence
  Description of Artificial Sequence: Synthetic oligonucleotide
  Target: LAMA2; (-) strand; PAM type: YTN; PAM sequence: TTT
cagaggtttctcatcagtct

SEQ ID NO: 227840 - DNA, 20 bp, Artificial Sequence
  Description of Artificial Sequence: Synthetic oligonucleotide
  Target: LAMA2; (-) strand; PAM type: YTN; PAM sequence: CTT
tcagaggtttctcatcagtc

SEQ ID NO: 227841 - DNA, 20 bp, Artificial Sequence
  Description of Artificial Sequence: Synthetic oligonucleotide
  Target: LAMA2; (-) strand; PAM type: YTN; PAM sequence: TTC
acagctttcagaggtttctc

SEQ ID NO: 227842 - DNA, 20 bp, Artificial Sequence
  Description of Artificial Sequence: Synthetic oligonucleotide
  Target: LAMA2; (-) strand; PAM type: YTN; PAM sequence: TTT
cacagctttcagaggtttct

SEQ ID NO: 227843 - DNA, 20 bp, Artificial Sequence
  Description of Artificial Sequence: Synthetic oligonucleotide
  Target: LAMA2; (-) strand; PAM type: YTN; PAM sequence: TTT
tcacagctttcagaggtttc

SEQ ID NO: 227844 - DNA, 20 bp, Artificial Sequence
  Description of Artificial Sequence: Synthetic oligonucleotide
  Target: LAMA2; (-) strand; PAM type: YTN; PAM sequence: CTT
ttcacagctttcagaggttt

SEQ ID NO: 227845 - DNA, 20 bp, Artificial Sequence
  Description of Artificial Sequence: Synthetic oligonucleotide
  Target: LAMA2; (-) strand; PAM type: YTN; PAM sequence: TTA
aaaacaataacacacttttc

SEQ ID NO: 227846 - DNA, 20 bp, Artificial Sequence
  Description of Artificial Sequence: Synthetic oligonucleotide
  Target: LAMA2; (-) strand; PAM type: YTN; PAM sequence: TTA
gggaagcaattaaaaacaat

SEQ ID NO: 227847 - DNA, 20 bp, Artificial Sequence
  Description of Artificial Sequence: Synthetic oligonucleotide
  Target: LAMA2; (-) strand; PAM type: YTN; PAM sequence: TTT
agggaagcaattaaaaacaa

SEQ ID NO: 227848 - DNA, 20 bp, Artificial Sequence
  Description of Artificial Sequence: Synthetic oligonucleotide
  Target: LAMA2; (-) strand; PAM type: YTN; PAM sequence: CTT
tagggaagcaattaaaaaca

SEQ ID NO: 227849 - DNA, 20 bp, Artificial Sequence
  Description of Artificial Sequence: Synthetic oligonucleotide
  Target: LAMA2; (-) strand; PAM type: YTN; PAM sequence: TTC
tttagggaagcaattaaaaa

SEQ ID NO: 227850 - DNA, 20 bp, Artificial Sequence
  Description of Artificial Sequence: Synthetic oligonucleotide
  Target: LAMA2; (-) strand; PAM type: YTN; PAM sequence: CTC
attctttagggaagcaatta

SEQ ID NO: 227851 - DNA, 20 bp, Artificial Sequence
  Description of Artificial Sequence: Synthetic oligonucleotide
  Target: LAMA2; (-) strand; PAM type: YTN; PAM sequence: CTC
tcattctttagggaagcaat

SEQ ID NO: 227852 - DNA, 20 bp, Artificial Sequence
  Description of Artificial Sequence: Synthetic oligonucleotide
  Target: LAMA2; (-) strand; PAM type: YTN; PAM sequence: TTC
tctcattctttagggaagca

SEQ ID NO: 227853 - DNA, 20 bp, Artificial Sequence
  Description of Artificial Sequence: Synthetic oligonucleotide
  Target: LAMA2; (-) strand; PAM type: YTN; PAM sequence: CTT
ctctcattctttagggaagc

SEQ ID NO: 227854 - DNA, 20 bp, Artificial Sequence
  Description of Artificial Sequence: Synthetic oligonucleotide
  Target: LAMA2; (-) strand; PAM type: YTN; PAM sequence: TTG
ccttctctcattctttaggg

SEQ ID NO: 227855 - DNA, 20 bp, Artificial Sequence
  Description of Artificial Sequence: Synthetic oligonucleotide
  Target: LAMA2; (-) strand; PAM type: YTN; PAM sequence: TTT
gccttctctcattctttagg

SEQ ID NO: 227856 - DNA, 20 bp, Artificial Sequence
  Description of Artificial Sequence: Synthetic oligonucleotide
  Target: LAMA2; (-) strand; PAM type: YTN; PAM sequence: CTT
tgccttctctcattctttag

SEQ ID NO: 227857 - DNA, 20 bp, Artificial Sequence
  Description of Artificial Sequence: Synthetic oligonucleotide
  Target: LAMA2; (-) strand; PAM type: YTN; PAM sequence: CTA
gggtcccagctttgccttct

SEQ ID NO: 227858 - DNA, 20 bp, Artificial Sequence
  Description of Artificial Sequence: Synthetic oligonucleotide
  Target: LAMA2; (-) strand; PAM type: YTN; PAM sequence: TTA
cacatcatggataaggagca

SEQ ID NO: 227859 - DNA, 20 bp, Artificial Sequence
  Description of Artificial Sequence: Synthetic oligonucleotide
  Target: LAMA2; (-) strand; PAM type: YTN; PAM sequence: CTT
acacatcatggataaggagc

SEQ ID NO: 227860 - DNA, 20 bp, Artificial Sequence
  Description of Artificial Sequence: Synthetic oligonucleotide
  Target: LAMA2; (-) strand; PAM type: YTN; PAM sequence: CTC
ttacacatcatggataagga

SEQ ID NO: 227861 - DNA, 20 bp, Artificial Sequence
  Description of Artificial Sequence: Synthetic oligonucleotide
  Target: LAMA2; (-) strand; PAM type: YTN; PAM sequence: CTC
actcttacacatcatggata

SEQ ID NO: 227862 - DNA, 20 bp, Artificial Sequence
  Description of Artificial Sequence: Synthetic oligonucleotide
  Target: LAMA2; (-) strand; PAM type: YTN; PAM sequence: TTC
ctcactcttacacatcatgg

SEQ ID NO: 227863 - DNA, 20 bp, Artificial Sequence
  Description of Artificial Sequence: Synthetic oligonucleotide
  Target: LAMA2; (-) strand; PAM type: YTN; PAM sequence: TTA
gttcctcactcttacacatc

SEQ ID NO: 227864 - DNA, 20 bp, Artificial Sequence
  Description of Artificial Sequence: Synthetic oligonucleotide
  Target: LAMA2; (-) strand; PAM type: YTN; PAM sequence: CTT
agttcctcactcttacacat

SEQ ID NO: 227865 - DNA, 20 bp, Artificial Sequence
  Description of Artificial Sequence: Synthetic oligonucleotide
  Target: LAMA2; (-) strand; PAM type: YTN; PAM sequence: TTC
agacttagttcctcactctt

SEQ ID NO: 227866 - DNA, 20 bp, Artificial Sequence
  Description of Artificial Sequence: Synthetic oligonucleotide
  Target: LAMA2; (-) strand; PAM type: YTN; PAM sequence: TTT
cagacttagttcctcactct

SEQ ID NO: 227867 - DNA, 20 bp, Artificial Sequence
  Description of Artificial Sequence: Synthetic oligonucleotide
  Target: LAMA2; (-) strand; PAM type: YTN; PAM sequence: TTT
tcagacttagttcctcactc

SEQ ID NO: 227868 - DNA, 20 bp, Artificial Sequence
  Description of Artificial Sequence: Synthetic oligonucleotide
  Target: LAMA2; (-) strand; PAM type: YTN; PAM sequence: TTA
aaaagttttcagacttagtt

SEQ ID NO: 227869 - DNA, 20 bp, Artificial Sequence
  Description of Artificial Sequence: Synthetic oligonucleotide
  Target: LAMA2; (-) strand; PAM type: YTN; PAM sequence: CTT
aaaaagttttcagacttagt

SEQ ID NO: 227870 - DNA, 20 bp, Artificial Sequence
  Description of Artificial Sequence: Synthetic oligonucleotide
  Target: LAMA2; (-) strand; PAM type: YTN; PAM sequence: TTC
cccttaaaaagttttcagac

SEQ ID NO: 227871 - DNA, 20 bp, Artificial Sequence
  Description of Artificial Sequence: Synthetic oligonucleotide
  Target: LAMA2; (-) strand; PAM type: YTN; PAM sequence: TTT
ccccttaaaaagttttcaga

SEQ ID NO: 227872 - DNA, 20 bp, Artificial Sequence
  Description of Artificial Sequence: Synthetic oligonucleotide
  Target: LAMA2; (-) strand; PAM type: YTN; PAM sequence: TTT
tccccttaaaaagttttcag

SEQ ID NO: 227873 - DNA, 20 bp, Artificial Sequence
  Description of Artificial Sequence: Synthetic oligonucleotide
  Target: LAMA2; (-) strand; PAM type: YTN; PAM sequence: CTA
ttttccccttaaaaagtttt

SEQ ID NO: 227874 - DNA, 20 bp, Artificial Sequence
  Description of Artificial Sequence: Synthetic oligonucleotide
  Target: LAMA2; (-) strand; PAM type: YTN; PAM sequence: CTG
ctattttccccttaaaaagt

SEQ ID NO: 227875 - DNA, 20 bp, Artificial Sequence
  Description of Artificial Sequence: Synthetic oligonucleotide
  Target: LAMA2; (-) strand; PAM type: YTN; PAM sequence: CTA
tactgctattttccccttaa

SEQ ID NO: 227876 - DNA, 20 bp, Artificial Sequence
  Description of Artificial Sequence: Synthetic oligonucleotide
  Target: LAMA2; (-) strand; PAM type: YTN; PAM sequence: TTC
agtatgctatactgctattt

SEQ ID NO: 227877 - DNA, 20 bp, Artificial Sequence
  Description of Artificial Sequence: Synthetic oligonucleotide
  Target: LAMA2; (-) strand; PAM type: YTN; PAM sequence: TTT
cagtatgctatactgctatt

SEQ ID NO: 227878 - DNA, 20 bp, Artificial Sequence
  Description of Artificial Sequence: Synthetic oligonucleotide
  Target: LAMA2; (-) strand; PAM type: YTN; PAM sequence: CTT
tcagtatgctatactgctat

SEQ ID NO: 227879 - DNA, 20 bp, Artificial Sequence
  Description of Artificial Sequence: Synthetic oligonucleotide
  Target: LAMA2; (-) strand; PAM type: YTN; PAM sequence: TTA
caacaaaactttcagtatgc

SEQ ID NO: 227880 - DNA, 20 bp, Artificial Sequence
  Description of Artificial Sequence: Synthetic oligonucleotide
  Target: LAMA2; (-) strand; PAM type: YTN; PAM sequence: TTA
aatattacaacaaaactttc

SEQ ID NO: 227881 - DNA, 20 bp, Artificial Sequence
  Description of Artificial Sequence: Synthetic oligonucleotide
  Target: LAMA2; (-) strand; PAM type: YTN; PAM sequence: TTT
aaatattacaacaaaacttt

SEQ ID NO: 227882 - DNA, 20 bp, Artificial Sequence
  Description of Artificial Sequence: Synthetic oligonucleotide
  Target: LAMA2; (-) strand; PAM type: YTN; PAM sequence: TTT
taaatattacaacaaaactt

SEQ ID NO: 227883 - DNA, 20 bp, Artificial Sequence
  Description of Artificial Sequence: Synthetic oligonucleotide
  Target: LAMA2; (-) strand; PAM type: YTN; PAM sequence: TTT
ttaaatattacaacaaaact

SEQ ID NO: 227884 - DNA, 20 bp, Artificial Sequence
  Description of Artificial Sequence: Synthetic oligonucleotide
  Target: LAMA2; (-) strand; PAM type: YTN; PAM sequence: TTG
gcatttttaaatattacaac

SEQ ID NO: 227885 - DNA, 20 bp, Artificial Sequence
  Description of Artificial Sequence: Synthetic oligonucleotide
  Target: LAMA2; (-) strand; PAM type: YTN; PAM sequence: TTA
attggcatttttaaatatta

SEQ ID NO: 227886 - DNA, 20 bp, Artificial Sequence
  Description of Artificial Sequence: Synthetic oligonucleotide
  Target: LAMA2; (-) strand; PAM type: YTN; PAM sequence: TTT
aattggcatttttaaatatt

SEQ ID NO: 227887 - DNA, 20 bp, Artificial Sequence
  Description of Artificial Sequence: Synthetic oligonucleotide
  Target: LAMA2; (-) strand; PAM type: YTN; PAM sequence: TTT
taattggcatttttaaatat

SEQ ID NO: 227888 - DNA, 20 bp, Artificial Sequence
  Description of Artificial Sequence: Synthetic oligonucleotide
  Target: LAMA2; (-) strand; PAM type: YTN; PAM sequence: TTT
ttaattggcatttttaaata

SEQ ID NO: 227889 - DNA, 20 bp, Artificial Sequence
  Description of Artificial Sequence: Synthetic oligonucleotide
  Target: LAMA2; (-) strand; PAM type: YTN; PAM sequence: TTT
tttaattggcatttttaaat

SEQ ID NO: 227890 - DNA, 20 bp, Artificial Sequence
  Description of Artificial Sequence: Synthetic oligonucleotide
  Target: LAMA2; (-) strand; PAM type: YTN; PAM sequence: CTA
ttttttaattggcattttta

SEQ ID NO: 227891 - DNA, 20 bp, Artificial Sequence
  Description of Artificial Sequence: Synthetic oligonucleotide
  Target: LAMA2; (-) strand; PAM type: YTN; PAM sequence: TTG
cactattttttaattggcat

SEQ ID NO: 227892 - DNA, 20 bp, Artificial Sequence
  Description of Artificial Sequence: Synthetic oligonucleotide
  Target: LAMA2; (-) strand; PAM type: YTN; PAM sequence: TTT
gcactattttttaattggca

SEQ ID NO: 227893 - DNA, 20 bp, Artificial Sequence
  Description of Artificial Sequence: Synthetic oligonucleotide
  Target: LAMA2; (-) strand; PAM type: YTN; PAM sequence: TTT
tgcactattttttaattggc

SEQ ID NO: 227894 - DNA, 20 bp, Artificial Sequence
  Description of Artificial Sequence: Synthetic oligonucleotide
  Target: LAMA2; (-) strand; PAM type: YTN; PAM sequence: TTA
tacaattttgcactattttt

SEQ ID NO: 227895 - DNA, 20 bp, Artificial Sequence
  Description of Artificial Sequence: Synthetic oligonucleotide
  Target: LAMA2; (-) strand; PAM type: YTN; PAM sequence: TTG
cgttatacaattttgcacta

SEQ ID NO: 227896 - DNA, 20 bp, Artificial Sequence
  Description of Artificial Sequence: Synthetic oligonucleotide
  Target: LAMA2; (-) strand; PAM type: YTN; PAM sequence: CTC
atataattgcgttatacaat

SEQ ID NO: 227897 - DNA, 20 bp, Artificial Sequence
  Description of Artificial Sequence: Synthetic oligonucleotide
  Target: LAMA2; (-) strand; PAM type: YTN; PAM sequence: TTC
tcatataattgcgttataca

SEQ ID NO: 227898 - DNA, 20 bp, Artificial Sequence
  Description of Artificial Sequence: Synthetic oligonucleotide
  Target: LAMA2; (-) strand; PAM type: YTN; PAM sequence: CTG
atcccaaaacaattctcata

SEQ ID NO: 227899 - DNA, 20 bp, Artificial Sequence
  Description of Artificial Sequence: Synthetic oligonucleotide
  Target: LAMA2; (-) strand; PAM type: YTN; PAM sequence: TTG
gaccgctgatcccaaaacaa

SEQ ID NO: 227900 - DNA, 20 bp, Artificial Sequence
  Description of Artificial Sequence: Synthetic oligonucleotide
  Target: LAMA2; (-) strand; PAM type: YTN; PAM sequence: TTT
ggaccgctgatcccaaaaca

SEQ ID NO: 227901 - DNA, 20 bp, Artificial Sequence
  Description of Artificial Sequence: Synthetic oligonucleotide
  Target: LAMA2; (-) strand; PAM type: YTN; PAM sequence: CTT
tggaccgctgatcccaaaac

SEQ ID NO: 227902 - DNA, 20 bp, Artificial Sequence
  Description of Artificial Sequence: Synthetic oligonucleotide
  Target: LAMA2; (-) strand; PAM type: YTN; PAM sequence: TTG
tctttggaccgctgatccca

SEQ ID NO: 227903 - DNA, 20 bp, Artificial Sequence
  Description of Artificial Sequence: Synthetic oligonucleotide
  Target: LAMA2; (-) strand; PAM type: YTN; PAM sequence: TTT
gtctttggaccgctgatccc

SEQ ID NO: 227904 - DNA, 20 bp, Artificial Sequence
  Description of Artificial Sequence: Synthetic oligonucleotide
  Target: LAMA2; (-) strand; PAM type: YTN; PAM sequence: CTT
tgtctttggaccgctgatcc

SEQ ID NO: 227905 - DNA, 20 bp, Artificial Sequence
  Description of Artificial Sequence: Synthetic oligonucleotide
  Target: LAMA2; (-) strand; PAM type: YTN; PAM sequence: TTC
tttgtctttggaccgctgat

SEQ ID NO: 227906 - DNA, 20 bp, Artificial Sequence
  Description of Artificial Sequence: Synthetic oligonucleotide
  Target: LAMA2; (-) strand; PAM type: YTN; PAM sequence: TTT
ctttgtctttggaccgctga

SEQ ID NO: 227907 - DNA, 20 bp, Artificial Sequence
  Description of Artificial Sequence: Synthetic oligonucleotide
  Target: LAMA2; (-) strand; PAM type: YTN; PAM sequence: CTT
tctttgtctttggaccgctg

SEQ ID NO: 227908 - DNA, 20 bp, Artificial Sequence
  Description of Artificial Sequence: Synthetic oligonucleotide
  Target: LAMA2; (-) strand; PAM type: YTN; PAM sequence: CTA
gcagtgaaaagaacatggag

SEQ ID NO: 227909 - DNA, 20 bp, Artificial Sequence
  Description of Artificial Sequence: Synthetic oligonucleotide
  Target: LAMA2; (-) strand; PAM type: YTN; PAM sequence: CTG
ctagcagtgaaaagaacatg

SEQ ID NO: 227910 - DNA, 20 bp, Artificial Sequence
  Description of Artificial Sequence: Synthetic oligonucleotide
  Target: LAMA2; (-) strand; PAM type: YTN; PAM sequence: TTG
ctgctagcagtgaaaagaac

SEQ ID NO: 227911 - DNA, 20 bp, Artificial Sequence
  Description of Artificial Sequence: Synthetic oligonucleotide
  Target: LAMA2; (-) strand; PAM type: YTN; PAM sequence: TTA
attgctgctagcagtgaaaa

SEQ ID NO: 227912 - DNA, 20 bp, Artificial Sequence
  Description of Artificial Sequence: Synthetic oligonucleotide
  Target: LAMA2; (-) strand; PAM type: YTN; PAM sequence: CTA
ggaggatatatgccaaatgt

SEQ ID NO: 227913 - DNA, 20 bp, Artificial Sequence
  Description of Artificial Sequence: Synthetic oligonucleotide
  Target: LAMA2; (-) strand; PAM type: YTN; PAM sequence: TTA
tgcataaaaaatgaaatcta

SEQ ID NO: 227914 - DNA, 20 bp, Artificial Sequence
  Description of Artificial Sequence: Synthetic oligonucleotide
  Target: LAMA2; (-) strand; PAM type: YTN; PAM sequence: CTT
atgcataaaaaatgaaatct

SEQ ID NO: 227915 - DNA, 20 bp, Artificial Sequence
  Description of Artificial Sequence: Synthetic oligonucleotide
  Target: LAMA2; (-) strand; PAM type: YTN; PAM sequence: TTC
acttatgcataaaaaatgaa

SEQ ID NO: 227916 - DNA, 20 bp, Artificial Sequence
  Description of Artificial Sequence: Synthetic oligonucleotide
  Target: LAMA2; (-) strand; PAM type: YTN; PAM sequence: CTT
cacttatgcataaaaaatga

SEQ ID NO: 227917 - DNA, 20 bp, Artificial Sequence
  Description of Artificial Sequence: Synthetic oligonucleotide
  Target: LAMA2; (-) strand; PAM type: YTN; PAM sequence: TTG
atatgtcttcacttatgcat

SEQ ID NO: 227918 - DNA, 20 bp, Artificial Sequence
  Description of Artificial Sequence: Synthetic oligonucleotide
  Target: LAMA2; (-) strand; PAM type: YTN; PAM sequence: TTA
ttgatatgtcttcacttatg

SEQ ID NO: 227919 - DNA, 20 bp, Artificial Sequence
  Description of Artificial Sequence: Synthetic oligonucleotide
  Target: LAMA2; (-) strand; PAM type: YTN; PAM sequence: TTT
attgatatgtcttcacttat

SEQ ID NO: 227920 - DNA, 20 bp, Artificial Sequence
  Description of Artificial Sequence: Synthetic oligonucleotide
  Target: LAMA2; (-) strand; PAM type: YTN; PAM sequence: TTT
tattgatatgtcttcactta

SEQ ID NO: 227921 - DNA, 20 bp, Artificial Sequence
  Description of Artificial Sequence: Synthetic oligonucleotide
  Target: LAMA2; (-) strand; PAM type: YTN; PAM sequence: CTA
tgtaatataacaagaacaca

SEQ ID NO: 227922 - DNA, 20 bp, Artificial Sequence
  Description of Artificial Sequence: Synthetic oligonucleotide
  Target: LAMA2; (-) strand; PAM type: YTN; PAM sequence: TTA
aaacaagaactatgtaatat

SEQ ID NO: 227923 - DNA, 20 bp, Artificial Sequence
  Description of Artificial Sequence: Synthetic oligonucleotide
  Target: LAMA2; (-) strand; PAM type: YTN; PAM sequence: TTG
tgttaaaacaagaactatgt

SEQ ID NO: 227924 - DNA, 20 bp, Artificial Sequence
  Description of Artificial Sequence: Synthetic oligonucleotide
  Target: LAMA2; (-) strand; PAM type: YTN; PAM sequence: CTT
gtgttaaaacaagaactatg

SEQ ID NO: 227925 - DNA, 20 bp, Artificial Sequence
  Description of Artificial Sequence: Synthetic oligonucleotide
  Target: LAMA2; (-) strand; PAM type: YTN; PAM sequence: TTC
cacttgtgttaaaacaagaa

SEQ ID NO: 227926 - DNA, 20 bp, Artificial Sequence
  Description of Artificial Sequence: Synthetic oligonucleotide
  Target: LAMA2; (-) strand; PAM type: YTN; PAM sequence: CTC
ataagtgcaaaaacaaatca

SEQ ID NO: 227927 - DNA, 20 bp, Artificial Sequence
  Description of Artificial Sequence: Synthetic oligonucleotide
  Target: LAMA2; (-) strand; PAM type: YTN; PAM sequence: TTA
aacacaacctcataagtgca

SEQ ID NO: 227928 - DNA, 20 bp, Artificial Sequence
  Description of Artificial Sequence: Synthetic oligonucleotide
  Target: LAMA2; (-) strand; PAM type: YTN; PAM sequence: TTT
aaacacaacctcataagtgc

SEQ ID NO: 227929 - DNA, 20 bp, Artificial Sequence
  Description of Artificial Sequence: Synthetic oligonucleotide
  Target: LAMA2; (-) strand; PAM type: YTN; PAM sequence: TTT
taaacacaacctcataagtg

SEQ ID NO: 227930 - DNA, 20 bp, Artificial Sequence
  Description of Artificial Sequence: Synthetic oligonucleotide
  Target: LAMA2; (-) strand; PAM type: YTN; PAM sequence: TTA
aaaaaatgtacaacatttta

SEQ ID NO: 227931 - DNA, 20 bp, Artificial Sequence
  Description of Artificial Sequence: Synthetic oligonucleotide
  Target: LAMA2; (-) strand; PAM type: YTN; PAM sequence: CTA
aaattaaaaaaatgtacaac

SEQ ID NO: 227932 - DNA, 20 bp, Artificial Sequence
  Description of Artificial Sequence: Synthetic oligonucleotide
  Target: LAMA2; (-) strand; PAM type: YTN; PAM sequence: TTA
ccaatgctaaaattaaaaaa

SEQ ID NO: 227933 - DNA, 20 bp, Artificial Sequence
  Description of Artificial Sequence: Synthetic oligonucleotide
  Target: LAMA2; (-) strand; PAM type: YTN; PAM sequence: TTT
accaatgctaaaattaaaaa

SEQ ID NO: 227934 - DNA, 20 bp, Artificial Sequence
  Description of Artificial Sequence: Synthetic oligonucleotide
  Target: LAMA2; (-) strand; PAM type: YTN; PAM sequence: TTA
aaataaaaacaaagtaaatt

SEQ ID NO: 227935 - DNA, 20 bp, Artificial Sequence
  Description of Artificial Sequence: Synthetic oligonucleotide
  Target: LAMA2; (-) strand; PAM type: YTN; PAM sequence: CTA
tgttaaaataaaaacaaagt

SEQ ID NO: 227936 - DNA, 20 bp, Artificial Sequence
  Description of Artificial Sequence: Synthetic oligonucleotide
  Target: LAMA2; (-) strand; PAM type: YTN; PAM sequence: TTC
agtggaatactatgttaaaa

SEQ ID NO: 227937 - DNA, 20 bp, Artificial Sequence
  Description of Artificial Sequence: Synthetic oligonucleotide
  Target: LAMA2; (-) strand; PAM type: YTN; PAM sequence: TTT
cagtggaatactatgttaaa

SEQ ID NO: 227938 - DNA, 20 bp, Artificial Sequence
  Description of Artificial Sequence: Synthetic oligonucleotide
  Target: LAMA2; (-) strand; PAM type: YTN; PAM sequence: TTA
catttcagtggaatactatg

SEQ ID NO: 227939 - DNA, 20 bp, Artificial Sequence
  Description of Artificial Sequence: Synthetic oligonucleotide
  Target: LAMA2; (-) strand; PAM type: YTN; PAM sequence: TTG
cagtataattacatttcagt

SEQ ID NO: 227940 - DNA, 20 bp, Artificial Sequence
  Description of Artificial Sequence: Synthetic oligonucleotide
  Target: LAMA2; (-) strand; PAM type: YTN; PAM sequence: TTT
gcagtataattacatttcag

SEQ ID NO: 227941 - DNA, 20 bp, Artificial Sequence
  Description of Artificial Sequence: Synthetic oligonucleotide
  Target: LAMA2; (-) strand; PAM type: YTN; PAM sequence: CTG
aaggaccgtcagtggagata

SEQ ID NO: 227942 - DNA, 20 bp, Artificial Sequence
  Description of Artificial Sequence: Synthetic oligonucleotide
  Target: LAMA2; (-) strand; PAM type: YTN; PAM sequence: TTA
gaaataacctgaaggaccgt

SEQ ID NO: 227943 - DNA, 20 bp, Artificial Sequence
  Description of Artificial Sequence: Synthetic oligonucleotide
  Target: LAMA2; (-) strand; PAM type: YTN; PAM sequence: TTA
taatcaagaaaagttagaaa

SEQ ID NO: 227944 - DNA, 20 bp, Artificial Sequence
  Description of Artificial Sequence: Synthetic oligonucleotide
  Target: LAMA2; (-) strand; PAM type: YTN; PAM sequence: CTT
ataatcaagaaaagttagaa

SEQ ID NO: 227945 - DNA, 20 bp, Artificial Sequence
  Description of Artificial Sequence: Synthetic oligonucleotide
  Target: LAMA2; (-) strand; PAM type: YTN; PAM sequence: TTG
cttataatcaagaaaagtta

SEQ ID NO: 227946 - DNA, 20 bp, Artificial Sequence
  Description of Artificial Sequence: Synthetic oligonucleotide
  Target: LAMA2; (-) strand; PAM type: YTN; PAM sequence: TTA
caacattgcttataatcaag

SEQ ID NO: 227947 - DNA, 20 bp, Artificial Sequence
  Description of Artificial Sequence: Synthetic oligonucleotide
  Target: LAMA2; (-) strand; PAM type: YTN; PAM sequence: TTG
tacaagatagtcattacaac

SEQ ID NO: 227948 - DNA, 20 bp, Artificial Sequence
  Description of Artificial Sequence: Synthetic oligonucleotide
  Target: LAMA2; (-) strand; PAM type: YTN; PAM sequence: CTT
gtacaagatagtcattacaa

SEQ ID NO: 227949 - DNA, 20 bp, Artificial Sequence
  Description of Artificial Sequence: Synthetic oligonucleotide
  Target: LAMA2; (-) strand; PAM type: YTN; PAM sequence: TTA
atggaagagtataaacatac

SEQ ID NO: 227950 - DNA, 20 bp, Artificial Sequence
  Description of Artificial Sequence: Synthetic oligonucleotide
  Target: LAMA2; (-) strand; PAM type: YTN; PAM sequence: TTA
cataagtattaatggaagag

SEQ ID NO: 227951 - DNA, 20 bp, Artificial Sequence
  Description of Artificial Sequence: Synthetic oligonucleotide
  Target: LAMA2; (-) strand; PAM type: YTN; PAM sequence: TTT
acataagtattaatggaaga

SEQ ID NO: 227952 - DNA, 20 bp, Artificial Sequence
  Description of Artificial Sequence: Synthetic oligonucleotide
  Target: LAMA2; (-) strand; PAM type: YTN; PAM sequence: TTA
tttacataagtattaatgga

SEQ ID NO: 227953 - DNA, 20 bp, Artificial Sequence
  Description of Artificial Sequence: Synthetic oligonucleotide
  Target: LAMA2; (-) strand; PAM type: YTN; PAM sequence: TTT
atttacataagtattaatgg

SEQ ID NO: 227954 - DNA, 20 bp, Artificial Sequence
  Description of Artificial Sequence: Synthetic oligonucleotide
  Target: LAMA2; (-) strand; PAM type: YTN; PAM sequence: TTA
tcagatttatttacataagt

SEQ ID NO: 227955 - DNA, 20 bp, Artificial Sequence
  Description of Artificial Sequence: Synthetic oligonucleotide
  Target: LAMA2; (-) strand; PAM type: YTN; PAM sequence: CTT
atcagatttatttacataag

SEQ ID NO: 227956 - DNA, 20 bp, Artificial Sequence
  Description of Artificial Sequence: Synthetic oligonucleotide
  Target: LAMA2; (-) strand; PAM type: YTN; PAM sequence: TTC
ccttatcagatttatttaca

SEQ ID NO: 227957 - DNA, 20 bp, Artificial Sequence
  Description of Artificial Sequence: Synthetic oligonucleotide
  Target: LAMA2; (-) strand; PAM type: YTN; PAM sequence: TTT
cccttatcagatttatttac

SEQ ID NO: 227958 - DNA, 20 bp, Artificial Sequence
  Description of Artificial Sequence: Synthetic oligonucleotide
  Target: LAMA2; (-) strand; PAM type: YTN; PAM sequence: CTA
caatttcccttatcagattt

SEQ ID NO: 227959 - DNA, 20 bp, Artificial Sequence
  Description of Artificial Sequence: Synthetic oligonucleotide
  Target: LAMA2; (-) strand; PAM type: YTN; PAM sequence: TTA
gcctacaatttcccttatca

SEQ ID NO: 227960 - DNA, 20 bp, Artificial Sequence
  Description of Artificial Sequence: Synthetic oligonucleotide
  Target: LAMA2; (-) strand; PAM type: YTN; PAM sequence: TTT
agcctacaatttcccttatc

SEQ ID NO: 227961 - DNA, 20 bp, Artificial Sequence
  Description of Artificial Sequence: Synthetic oligonucleotide
  Target: LAMA2; (-) strand; PAM type: YTN; PAM sequence: CTT
tagcctacaatttcccttat

SEQ ID NO: 227962 - DNA, 20 bp, Artificial Sequence
  Description of Artificial Sequence: Synthetic oligonucleotide
  Target: LAMA2; (-) strand; PAM type: YTN; PAM sequence: TTA
ataaaaaataaaataaaatg

SEQ ID NO: 227963 - DNA, 20 bp, Artificial Sequence
  Description of Artificial Sequence: Synthetic oligonucleotide
  Target: LAMA2; (-) strand; PAM type: YTN; PAM sequence: TTA
attaataaaaaataaaataa

SEQ ID NO: 227964 - DNA, 20 bp, Artificial Sequence
  Description of Artificial Sequence: Synthetic oligonucleotide
  Target: LAMA2; (-) strand; PAM type: YTN; PAM sequence: TTA
attaattaataaaaaataaa

SEQ ID NO: 227965 - DNA, 20 bp, Artificial Sequence
  Description of Artificial Sequence: Synthetic oligonucleotide
  Target: LAMA2; (-) strand; PAM type: YTN; PAM sequence: TTA
attaattaattaataaaaaa

SEQ ID NO: 227966 - DNA, 20 bp, Artificial Sequence
  Description of Artificial Sequence: Synthetic oligonucleotide
  Target: LAMA2; (-) strand; PAM type: YTN; PAM sequence: CTC
aaaaataaataaataattaa

SEQ ID NO: 227967 - DNA, 20 bp, Artificial Sequence
  Description of Artificial Sequence: Synthetic oligonucleotide
  Target: LAMA2; (-) strand; PAM type: YTN; PAM sequence: CTC
cgtctcaaaaataaataaat

SEQ ID NO: 227968 - DNA, 20 bp, Artificial Sequence
  Description of Artificial Sequence: Synthetic oligonucleotide
  Target: LAMA2; (-) strand; PAM type: YTN; PAM sequence: CTG
ggcgacagatcgagactccg

SEQ ID NO: 227969 - DNA, 20 bp, Artificial Sequence
  Description of Artificial Sequence: Synthetic oligonucleotide
  Target: LAMA2; (-) strand; PAM type: YTN; PAM sequence: CTG
cagtccagcctgggcgacag

SEQ ID NO: 227970 - DNA, 20 bp, Artificial Sequence
  Description of Artificial Sequence: Synthetic oligonucleotide
  Target: LAMA2; (-) strand; PAM type: YTN; PAM sequence: TTG
cagtgagccaagatcgagcc

SEQ ID NO: 227971 - DNA, 20 bp, Artificial Sequence
  Description of Artificial Sequence: Synthetic oligonucleotide
  Target: LAMA2; (-) strand; PAM type: YTN; PAM sequence: CTT
gcagtgagccaagatcgagc

SEQ ID NO: 227972 - DNA, 20 bp, Artificial Sequence
  Description of Artificial Sequence: Synthetic oligonucleotide
  Target: LAMA2; (-) strand; PAM type: YTN; PAM sequence: CTG
aggcaggagaatggcgtgaa

SEQ ID NO: 227973 - DNA, 20 bp, Artificial Sequence
  Description of Artificial Sequence: Synthetic oligonucleotide
  Target: LAMA2; (-) strand; PAM type: YTN; PAM sequence: CTC
aggaggctgaggcaggagaa

SEQ ID NO: 227974 - DNA, 20 bp, Artificial Sequence
  Description of Artificial Sequence: Synthetic oligonucleotide
  Target: LAMA2; (-) strand; PAM type: YTN; PAM sequence: CTA
ctcaggaggctgaggcagga

SEQ ID NO: 227975 - DNA, 20 bp, Artificial Sequence
  Description of Artificial Sequence: Synthetic oligonucleotide
  Target: LAMA2; (-) strand; PAM type: YTN; PAM sequence: TTC
cagctactcaggaggctgag

SEQ ID NO: 227976 - DNA, 20 bp, Artificial Sequence
  Description of Artificial Sequence: Synthetic oligonucleotide
  Target: LAMA2; (-) strand; PAM type: YTN; PAM sequence: CTG
tagttccagctactcaggag

SEQ ID NO: 227977 - DNA, 20 bp, Artificial Sequence
  Description of Artificial Sequence: Synthetic oligonucleotide
  Target: LAMA2; (-) strand; PAM type: YTN; PAM sequence: TTA
gccaggcgtggtggcgggcg

SEQ ID NO: 227978 - DNA, 20 bp, Artificial Sequence
  Description of Artificial Sequence: Synthetic oligonucleotide
  Target: LAMA2; (-) strand; PAM type: YTN; PAM sequence: CTA
aaaatacaaaaaaattagcc

SEQ ID NO: 227979 - DNA, 20 bp, Artificial Sequence
  Description of Artificial Sequence: Synthetic oligonucleotide
  Target: LAMA2; (-) strand; PAM type: YTN; PAM sequence: CTG
tactaaaaatacaaaaaaat

SEQ ID NO: 227980 - DNA, 20 bp, Artificial Sequence
  Description of Artificial Sequence: Synthetic oligonucleotide
  Target: LAMA2; (-) strand; PAM type: YTN; PAM sequence: CTA
acacggtgaaaccccgtctg

SEQ ID NO: 227981 - DNA, 20 bp, Artificial Sequence
  Description of Artificial Sequence: Synthetic oligonucleotide
  Target: LAMA2; (-) strand; PAM type: YTN; PAM sequence: CTG
gctaacacggtgaaaccccg

SEQ ID NO: 227982 - DNA, 20 bp, Artificial Sequence
  Description of Artificial Sequence: Synthetic oligonucleotide
  Target: LAMA2; (-) strand; PAM type: YTN; PAM sequence: TTA
agaggccgaggtgggcagat

SEQ ID NO: 227983 - DNA, 20 bp, Artificial Sequence
  Description of Artificial Sequence: Synthetic oligonucleotide
  Target: LAMA2; (-) strand; PAM type: YTN; PAM sequence: TTT
aagaggccgaggtgggcaga

SEQ ID NO: 227984 - DNA, 20 bp, Artificial Sequence
  Description of Artificial Sequence: Synthetic oligonucleotide
  Target: LAMA2; (-) strand; PAM type: YTN; PAM sequence: CTT
taagaggccgaggtgggcag

SEQ ID NO: 227985 - DNA, 20 bp, Artificial Sequence
  Description of Artificial Sequence: Synthetic oligonucleotide
  Target: LAMA2; (-) strand; PAM type: YTN; PAM sequence: CTC
agcactttaagaggccgagg

SEQ ID NO: 227986 - DNA, 20 bp, Artificial Sequence
  Description of Artificial Sequence: Synthetic oligonucleotide
  Target: LAMA2; (-) strand; PAM type: YTN; PAM sequence: CTG
taatctcagcactttaagag

SEQ ID NO: 227987 - DNA, 20 bp, Artificial Sequence
  Description of Artificial Sequence: Synthetic oligonucleotide
  Target: LAMA2; (-) strand; PAM type: YTN; PAM sequence: CTC
acgcctgtaatctcagcact

SEQ ID NO: 227988 - DNA, 20 bp, Artificial Sequence
  Description of Artificial Sequence: Synthetic oligonucleotide
  Target: LAMA2; (-) strand; PAM type: YTN; PAM sequence: TTG
tgccagtgcatatcaaaaat

SEQ ID NO: 227989 - DNA, 20 bp, Artificial Sequence
  Description of Artificial Sequence: Synthetic oligonucleotide
  Target: LAMA2; (-) strand; PAM type: YTN; PAM sequence: TTT
gtgccagtgcatatcaaaaa

SEQ ID NO: 227990 - DNA, 20 bp, Artificial Sequence
  Description of Artificial Sequence: Synthetic oligonucleotide
  Target: LAMA2; (-) strand; PAM type: YTN; PAM sequence: TTT
tgtgccagtgcatatcaaaa

SEQ ID NO: 227991 - DNA, 20 bp, Artificial Sequence
  Description of Artificial Sequence: Synthetic oligonucleotide
  Target: LAMA2; (-) strand; PAM type: YTN; PAM sequence: TTC
acacaattttgtgccagtgc

SEQ ID NO: 227992 - DNA, 20 bp, Artificial Sequence
  Description of Artificial Sequence: Synthetic oligonucleotide
  Target: LAMA2; (-) strand; PAM type: YTN; PAM sequence: CTT
cacacaattttgtgccagtg

SEQ ID NO: 227993 - DNA, 20 bp, Artificial Sequence
  Description of Artificial Sequence: Synthetic oligonucleotide
  Target: LAMA2; (-) strand; PAM type: YTN; PAM sequence: TTC
ttcacacaattttgtgccag

SEQ ID NO: 227994 - DNA, 20 bp, Artificial Sequence
  Description of Artificial Sequence: Synthetic oligonucleotide
  Target: LAMA2; (-) strand; PAM type: YTN; PAM sequence: TTG
gttcttcacacaattttgtg

SEQ ID NO: 227995 - DNA, 20 bp, Artificial Sequence
  Description of Artificial Sequence: Synthetic oligonucleotide
  Target: LAMA2; (-) strand; PAM type: YTN; PAM sequence: TTA
attggttcttcacacaattt

SEQ ID NO: 227996 - DNA, 20 bp, Artificial Sequence
  Description of Artificial Sequence: Synthetic oligonucleotide
  Target: LAMA2; (-) strand; PAM type: YTN; PAM sequence: TTA
ttaattggttcttcacacaa

SEQ ID NO: 227997 - DNA, 20 bp, Artificial Sequence
  Description of Artificial Sequence: Synthetic oligonucleotide
  Target: LAMA2; (-) strand; PAM type: YTN; PAM sequence: TTT
attaattggttcttcacaca

SEQ ID NO: 227998 - DNA, 20 bp, Artificial Sequence
  Description of Artificial Sequence: Synthetic oligonucleotide
  Target: LAMA2; (-) strand; PAM type: YTN; PAM sequence: TTA
gacatatttattaattggtt

SEQ ID NO: 227999 - DNA, 20 bp, Artificial Sequence
  Description of Artificial Sequence: Synthetic oligonucleotide
  Target: LAMA2; (-) strand; PAM type: YTN; PAM sequence: CTT
agacatatttattaattggt

SEQ ID NO: 228000 - DNA, 20 bp, Artificial Sequence
  Description of Artificial Sequence: Synthetic oligonucleotide
  Target: LAMA2; (-) strand; PAM type: YTN; PAM sequence: TTC
cttagacatatttattaatt

SEQ ID NO: 228001 - DNA, 20 bp, Artificial Sequence
  Description of Artificial Sequence: Synthetic oligonucleotide
  Target: LAMA2; (-) strand; PAM type: YTN; PAM sequence: CTA
tattccttagacatatttat

SEQ ID NO: 228002 - DNA, 20 bp, Artificial Sequence
  Description of Artificial Sequence: Synthetic oligonucleotide
  Target: LAMA2; (-) strand; PAM type: YTN; PAM sequence: TTA
aaacaatggaaactatattc

SEQ ID NO: 228003 - DNA, 20 bp, Artificial Sequence
  Description of Artificial Sequence: Synthetic oligonucleotide
  Target: LAMA2; (-) strand; PAM type: YTN; PAM sequence: TTG
ataattaaaacaatggaaac

SEQ ID NO: 228004 - DNA, 20 bp, Artificial Sequence
  Description of Artificial Sequence: Synthetic oligonucleotide
  Target: LAMA2; (-) strand; PAM type: YTN; PAM sequence: TTT
gataattaaaacaatggaaa

SEQ ID NO: 228005 - DNA, 20 bp, Artificial Sequence
  Description of Artificial Sequence: Synthetic oligonucleotide
  Target: LAMA2; (-) strand; PAM type: YTN; PAM sequence: TTT
tgataattaaaacaatggaa

SEQ ID NO: 228006 - DNA, 20 bp, Artificial Sequence
  Description of Artificial Sequence: Synthetic oligonucleotide
  Target: LAMA2; (-) strand; PAM type: YTN; PAM sequence: TTT
ttgataattaaaacaatgga

SEQ ID NO: 228007 - DNA, 20 bp, Artificial Sequence
  Description of Artificial Sequence: Synthetic oligonucleotide
  Target: LAMA2; (-) strand; PAM type: YTN; PAM sequence: TTT
tttgataattaaaacaatgg

SEQ ID NO: 228008 - DNA, 20 bp, Artificial Sequence
  Description of Artificial Sequence: Synthetic oligonucleotide
  Target: LAMA2; (-) strand; PAM type: YTN; PAM sequence: CTA
gagcccatgtaagtgataat

SEQ ID NO: 228009 - DNA, 20 bp, Artificial Sequence
  Description of Artificial Sequence: Synthetic oligonucleotide
  Target: LAMA2; (-) strand; PAM type: YTN; PAM sequence: TTG
gtcatatcatgggtataact

SEQ ID NO: 228010 - DNA, 20 bp, Artificial Sequence
  Description of Artificial Sequence: Synthetic oligonucleotide
  Target: LAMA2; (-) strand; PAM type: YTN; PAM sequence: TTA
aattggtcatatcatgggta

SEQ ID NO: 228011 - DNA, 20 bp, Artificial Sequence
  Description of Artificial Sequence: Synthetic oligonucleotide
  Target: LAMA2; (-) strand; PAM type: YTN; PAM sequence: CTT
aaattggtcatatcatgggt

SEQ ID NO: 228012 - DNA, 20 bp, Artificial Sequence
  Description of Artificial Sequence: Synthetic oligonucleotide
  Target: LAMA2; (-) strand; PAM type: YTN; PAM sequence: TTC
ttaaattggtcatatcatgg

SEQ ID NO: 228013 - DNA, 20 bp, Artificial Sequence
  Description of Artificial Sequence: Synthetic oligonucleotide
  Target: LAMA2; (-) strand; PAM type: YTN; PAM sequence: TTT
cttaaattggtcatatcatg

SEQ ID NO: 228014 - DNA, 20 bp, Artificial Sequence
  Description of Artificial Sequence: Synthetic oligonucleotide
  Target: LAMA2; (-) strand; PAM type: YTN; PAM sequence: TTC
aagtttcttaaattggtcat

SEQ ID NO: 228015 - DNA, 20 bp, Artificial Sequence
  Description of Artificial Sequence: Synthetic oligonucleotide
  Target: LAMA2; (-) strand; PAM type: YTN; PAM sequence: TTT
caagtttcttaaattggtca

SEQ ID NO: 228016 - DNA, 20 bp, Artificial Sequence
  Description of Artificial Sequence: Synthetic oligonucleotide
  Target: LAMA2; (-) strand; PAM type: YTN; PAM sequence: TTT
tcaagtttcttaaattggtc

SEQ ID NO: 228017 - DNA, 20 bp, Artificial Sequence
  Description of Artificial Sequence: Synthetic oligonucleotide
  Target: LAMA2; (-) strand; PAM type: YTN; PAM sequence: TTA
tattttcaagtttcttaaat

SEQ ID NO: 228018 - DNA, 20 bp, Artificial Sequence
  Description of Artificial Sequence: Synthetic oligonucleotide
  Target: LAMA2; (-) strand; PAM type: YTN; PAM sequence: CTA
gaaattatattttcaagttt

SEQ ID NO: 228019 - DNA, 20 bp, Artificial Sequence
  Description of Artificial Sequence: Synthetic oligonucleotide
  Target: LAMA2; (-) strand; PAM type: YTN; PAM sequence: TTA
gtatacacgtgctagaaatt

SEQ ID NO: 228020 - DNA, 20 bp, Artificial Sequence
  Description of Artificial Sequence: Synthetic oligonucleotide
  Target: LAMA2; (-) strand; PAM type: YTN; PAM sequence: CTC
gcattagtatacacgtgcta

SEQ ID NO: 228021 - DNA, 20 bp, Artificial Sequence
  Description of Artificial Sequence: Synthetic oligonucleotide
  Target: LAMA2; (-) strand; PAM type: YTN; PAM sequence: CTA
tctcgcattagtatacacgt

SEQ ID NO: 228022 - DNA, 20 bp, Artificial Sequence
  Description of Artificial Sequence: Synthetic oligonucleotide
  Target: LAMA2; (-) strand; PAM type: YTN; PAM sequence: CTC
tatctcgcattagtatacac

SEQ ID NO: 228023 - DNA, 20 bp, Artificial Sequence
  Description of Artificial Sequence: Synthetic oligonucleotide
  Target: LAMA2; (-) strand; PAM type: YTN; PAM sequence: TTC
tctatctcgcattagtatac

SEQ ID NO: 228024 - DNA, 20 bp, Artificial Sequence
  Description of Artificial Sequence: Synthetic oligonucleotide
  Target: LAMA2; (-) strand; PAM type: YTN; PAM sequence: CTT
ctctatctcgcattagtata

SEQ ID NO: 228025 - DNA, 20 bp, Artificial Sequence
  Description of Artificial Sequence: Synthetic oligonucleotide
  Target: LAMA2; (-) strand; PAM type: YTN; PAM sequence: TTG
taaataaaacttctctatct

SEQ ID NO: 228026 - DNA, 20 bp, Artificial Sequence
  Description of Artificial Sequence: Synthetic oligonucleotide
  Target: LAMA2; (-) strand; PAM type: YTN; PAM sequence: CTG
gttgtaaataaaacttctct

SEQ ID NO: 228027 - DNA, 20 bp, Artificial Sequence
  Description of Artificial Sequence: Synthetic oligonucleotide
  Target: LAMA2; (-) strand; PAM type: YTN; PAM sequence: TTC
tggttgtaaataaaacttct

SEQ ID NO: 228028 - DNA, 20 bp, Artificial Sequence
  Description of Artificial Sequence: Synthetic oligonucleotide
  Target: LAMA2; (-) strand; PAM type: YTN; PAM sequence: TTT
ctggttgtaaataaaacttc

SEQ ID NO: 228029 - DNA, 20 bp, Artificial Sequence
  Description of Artificial Sequence: Synthetic oligonucleotide
  Target: LAMA2; (-) strand; PAM type: YTN; PAM sequence: TTA
tggacccaacaatttctggt

SEQ ID NO: 228030 - DNA, 20 bp, Artificial Sequence
  Description of Artificial Sequence: Synthetic oligonucleotide
  Target: LAMA2; (-) strand; PAM type: YTN; PAM sequence: TTT
atggacccaacaatttctgg

SEQ ID NO: 228031 - DNA, 20 bp, Artificial Sequence
  Description of Artificial Sequence: Synthetic oligonucleotide
  Target: LAMA2; (-) strand; PAM type: YTN; PAM sequence: TTT
tatggacccaacaatttctg

SEQ ID NO: 228032 - DNA, 20 bp, Artificial Sequence
  Description of Artificial Sequence: Synthetic oligonucleotide
  Target: LAMA2; (-) strand; PAM type: YTN; PAM sequence: CTT
ttatggacccaacaatttct

SEQ ID NO: 228033 - DNA, 20 bp, Artificial Sequence
  Description of Artificial Sequence: Synthetic oligonucleotide
  Target: LAMA2; (-) strand; PAM type: YTN; PAM sequence: TTC
ttttatggacccaacaattt

SEQ ID NO: 228034 - DNA, 20 bp, Artificial Sequence
  Description of Artificial Sequence: Synthetic oligonucleotide
  Target: LAMA2; (-) strand; PAM type: YTN; PAM sequence: TTT
cttttatggacccaacaatt

SEQ ID NO: 228035 - DNA, 20 bp, Artificial Sequence
  Description of Artificial Sequence: Synthetic oligonucleotide
  Target: LAMA2; (-) strand; PAM type: YTN; PAM sequence: TTG
tttcttttatggacccaaca

SEQ ID NO: 228036 - DNA, 20 bp, Artificial Sequence
  Description of Artificial Sequence: Synthetic oligonucleotide
  Target: LAMA2; (-) strand; PAM type: YTN; PAM sequence: TTT
gtttcttttatggacccaac

SEQ ID NO: 228037 - DNA, 20 bp, Artificial Sequence
  Description of Artificial Sequence: Synthetic oligonucleotide
  Target: LAMA2; (-) strand; PAM type: YTN; PAM sequence: CTA
gacatatttgtttcttttat

SEQ ID NO: 228038 - DNA, 20 bp, Artificial Sequence
  Description of Artificial Sequence: Synthetic oligonucleotide
  Target: LAMA2; (-) strand; PAM type: YTN; PAM sequence: TTC
tagacatatttgtttctttt

SEQ ID NO: 228039 - DNA, 20 bp, Artificial Sequence
  Description of Artificial Sequence: Synthetic oligonucleotide
  Target: LAMA2; (-) strand; PAM type: YTN; PAM sequence: TTA
aaatgttctagacatatttg

SEQ ID NO: 228040 - DNA, 20 bp, Artificial Sequence
  Description of Artificial Sequence: Synthetic oligonucleotide
  Target: LAMA2; (-) strand; PAM type: YTN; PAM sequence: TTT
aaaatgttctagacatattt

SEQ ID NO: 228041 - DNA, 20 bp, Artificial Sequence
  Description of Artificial Sequence: Synthetic oligonucleotide
  Target: LAMA2; (-) strand; PAM type: YTN; PAM sequence: CTT
taaaatgttctagacatatt

SEQ ID NO: 228042 - DNA, 20 bp, Artificial Sequence
  Description of Artificial Sequence: Synthetic oligonucleotide
  Target: LAMA2; (-) strand; PAM type: YTN; PAM sequence: CTG
gcaactttaaaatgttctag

SEQ ID NO: 228043 - DNA, 20 bp, Artificial Sequence
  Description of Artificial Sequence: Synthetic oligonucleotide
  Target: LAMA2; (-) strand; PAM type: YTN; PAM sequence: CTC
tggcaactttaaaatgttct

SEQ ID NO: 228044 - DNA, 20 bp, Artificial Sequence
  Description of Artificial Sequence: Synthetic oligonucleotide
  Target: LAMA2; (-) strand; PAM type: YTN; PAM sequence: CTG
ctctggcaactttaaaatgt

SEQ ID NO: 228045 - DNA, 20 bp, Artificial Sequence
  Description of Artificial Sequence: Synthetic oligonucleotide
  Target: LAMA2; (-) strand; PAM type: YTN; PAM sequence: TTG
aaatctgctctggcaacttt

SEQ ID NO: 228046 - DNA, 20 bp, Artificial Sequence
  Description of Artificial Sequence: Synthetic oligonucleotide
  Target: LAMA2; (-) strand; PAM type: YTN; PAM sequence: CTT
gaaatctgctctggcaactt

SEQ ID NO: 228047 - DNA, 20 bp, Artificial Sequence
  Description of Artificial Sequence: Synthetic oligonucleotide
  Target: LAMA2; (-) strand; PAM type: YTN; PAM sequence: CTG
gaatatcttgaaatctgctc

SEQ ID NO: 228048 - DNA, 20 bp, Artificial Sequence
  Description of Artificial Sequence: Synthetic oligonucleotide
  Target: LAMA2; (-) strand; PAM type: YTN; PAM sequence: CTC
aggctggaatatcttgaaat

SEQ ID NO: 228049 - DNA, 20 bp, Artificial Sequence
  Description of Artificial Sequence: Synthetic oligonucleotide
  Target: LAMA2; (-) strand; PAM type: YTN; PAM sequence: CTG
agggactcaggctggaatat

SEQ ID NO: 228050 - DNA, 20 bp, Artificial Sequence
  Description of Artificial Sequence: Synthetic oligonucleotide
  Target: LAMA2; (-) strand; PAM type: YTN; PAM sequence: TTA
caatcaccaaaatacatatc

SEQ ID NO: 228051 - DNA, 20 bp, Artificial Sequence
  Description of Artificial Sequence: Synthetic oligonucleotide
  Target: LAMA2; (-) strand; PAM type: YTN; PAM sequence: TTT
acaatcaccaaaatacatat

SEQ ID NO: 228052 - DNA, 20 bp, Artificial Sequence
  Description of Artificial Sequence: Synthetic oligonucleotide
  Target: LAMA2; (-) strand; PAM type: YTN; PAM sequence: TTT
tacaatcaccaaaatacata

SEQ ID NO: 228053 - DNA, 20 bp, Artificial Sequence
  Description of Artificial Sequence: Synthetic oligonucleotide
  Target: LAMA2; (-) strand; PAM type: YTN; PAM sequence: TTT
ttacaatcaccaaaatacat

SEQ ID NO: 228054 - DNA, 20 bp, Artificial Sequence
  Description of Artificial Sequence: Synthetic oligonucleotide
  Target: LAMA2; (-) strand; PAM type: YTN; PAM sequence: TTG
atatttttacaatcaccaaa

SEQ ID NO: 228055 - DNA, 20 bp, Artificial Sequence
  Description of Artificial Sequence: Synthetic oligonucleotide
  Target: LAMA2; (-) strand; PAM type: YTN; PAM sequence: TTT
gatatttttacaatcaccaa

SEQ ID NO: 228056 - DNA, 20 bp, Artificial Sequence
  Description of Artificial Sequence: Synthetic oligonucleotide
  Target: LAMA2; (-) strand; PAM type: YTN; PAM sequence: TTT
tgatatttttacaatcacca

SEQ ID NO: 228057 - DNA, 20 bp, Artificial Sequence
  Description of Artificial Sequence: Synthetic oligonucleotide
  Target: LAMA2; (-) strand; PAM type: YTN; PAM sequence: CTT
ttgatatttttacaatcacc

SEQ ID NO: 228058 - DNA, 20 bp, Artificial Sequence
  Description of Artificial Sequence: Synthetic oligonucleotide
  Target: LAMA2; (-) strand; PAM type: YTN; PAM sequence: TTC
ttttgatatttttacaatca

SEQ ID NO: 228059 - DNA, 20 bp, Artificial Sequence
  Description of Artificial Sequence: Synthetic oligonucleotide
  Target: LAMA2; (-) strand; PAM type: YTN; PAM sequence: TTT
cttttgatatttttacaatc

SEQ ID NO: 228060 - DNA, 20 bp, Artificial Sequence
  Description of Artificial Sequence: Synthetic oligonucleotide
  Target: LAMA2; (-) strand; PAM type: YTN; PAM sequence: TTC
ggacacaaataatttctttt

SEQ ID NO: 228061 - DNA, 20 bp, Artificial Sequence
  Description of Artificial Sequence: Synthetic oligonucleotide
  Target: LAMA2; (-) strand; PAM type: YTN; PAM sequence: TTT
cggacacaaataatttcttt

SEQ ID NO: 228062 - DNA, 20 bp, Artificial Sequence
  Description of Artificial Sequence: Synthetic oligonucleotide
  Target: LAMA2; (-) strand; PAM type: YTN; PAM sequence: CTT
tcggacacaaataatttctt

SEQ ID NO: 228063 - DNA, 20 bp, Artificial Sequence
  Description of Artificial Sequence: Synthetic oligonucleotide
  Target: LAMA2; (-) strand; PAM type: YTN; PAM sequence: TTG
tgactttcggacacaaataa

SEQ ID NO: 228064 - DNA, 20 bp, Artificial Sequence
  Description of Artificial Sequence: Synthetic oligonucleotide
  Target: LAMA2; (-) strand; PAM type: YTN; PAM sequence: CTC
acgcatattgtgactttcgg

SEQ ID NO: 228065 - DNA, 20 bp, Artificial Sequence
  Description of Artificial Sequence: Synthetic oligonucleotide
  Target: LAMA2; (-) strand; PAM type: YTN; PAM sequence: TTG
atgactcacgcatattgtga

SEQ ID NO: 228066 - DNA, 20 bp, Artificial Sequence
  Description of Artificial Sequence: Synthetic oligonucleotide
  Target: LAMA2; (-) strand; PAM type: YTN; PAM sequence: TTG
tgttgatgactcacgcatat

SEQ ID NO: 228067 - DNA, 20 bp, Artificial Sequence
  Description of Artificial Sequence: Synthetic oligonucleotide
  Target: LAMA2; (-) strand; PAM type: YTN; PAM sequence: TTA
ttgtgttgatgactcacgca

SEQ ID NO: 228068 - DNA, 20 bp, Artificial Sequence
  Description of Artificial Sequence: Synthetic oligonucleotide
  Target: LAMA2; (-) strand; PAM type: YTN; PAM sequence: CTT
attgtgttgatgactcacgc

SEQ ID NO: 228069 - DNA, 20 bp, Artificial Sequence
  Description of Artificial Sequence: Synthetic oligonucleotide
  Target: LAMA2; (-) strand; PAM type: YTN; PAM sequence: TTA
tcttattgtgttgatgactc

SEQ ID NO: 228070 - DNA, 20 bp, Artificial Sequence
  Description of Artificial Sequence: Synthetic oligonucleotide
  Target: LAMA2; (-) strand; PAM type: YTN; PAM sequence: CTT
atcttattgtgttgatgact

SEQ ID NO: 228071 - DNA, 20 bp, Artificial Sequence
  Description of Artificial Sequence: Synthetic oligonucleotide
  Target: LAMA2; (-) strand; PAM type: YTN; PAM sequence: TTA
gccttatcttattgtgttga

SEQ ID NO: 228072 - DNA, 20 bp, Artificial Sequence
  Description of Artificial Sequence: Synthetic oligonucleotide
  Target: LAMA2; (-) strand; PAM type: YTN; PAM sequence: TTT
agccttatcttattgtgttg

SEQ ID NO: 228073 - DNA, 20 bp, Artificial Sequence
  Description of Artificial Sequence: Synthetic oligonucleotide
  Target: LAMA2; (-) strand; PAM type: YTN; PAM sequence: TTT
tagccttatcttattgtgtt

SEQ ID NO: 228074 - DNA, 20 bp, Artificial Sequence
  Description of Artificial Sequence: Synthetic oligonucleotide
  Target: LAMA2; (-) strand; PAM type: YTN; PAM sequence: CTC
aattttagccttatcttatt

SEQ ID NO: 228075 - DNA, 20 bp, Artificial Sequence
  Description of Artificial Sequence: Synthetic oligonucleotide
  Target: LAMA2; (-) strand; PAM type: YTN; PAM sequence: CTG
aaactcaattttagccttat

SEQ ID NO: 228076 - DNA, 20 bp, Artificial Sequence
  Description of Artificial Sequence: Synthetic oligonucleotide
  Target: LAMA2; (-) strand; PAM type: YTN; PAM sequence: TTC
agaaatcccaaaatatctga

SEQ ID NO: 228077 - DNA, 20 bp, Artificial Sequence
  Description of Artificial Sequence: Synthetic oligonucleotide
  Target: LAMA2; (-) strand; PAM type: YTN; PAM sequence: TTT
cagaaatcccaaaatatctg

SEQ ID NO: 228078 - DNA, 20 bp, Artificial Sequence
  Description of Artificial Sequence: Synthetic oligonucleotide
  Target: LAMA2; (-) strand; PAM type: YTN; PAM sequence: TTT
tcagaaatcccaaaatatct

SEQ ID NO: 228079 - DNA, 20 bp, Artificial Sequence
  Description of Artificial Sequence: Synthetic oligonucleotide
  Target: LAMA2; (-) strand; PAM type: YTN; PAM sequence: TTT
ttcagaaatcccaaaatatc

SEQ ID NO: 228080 - DNA, 20 bp, Artificial Sequence
  Description of Artificial Sequence: Synthetic oligonucleotide
  Target: LAMA2; (-) strand; PAM type: YTN; PAM sequence: TTT
tttcagaaatcccaaaatat

SEQ ID NO: 228081 - DNA, 20 bp, Artificial Sequence
  Description of Artificial Sequence: Synthetic oligonucleotide
  Target: LAMA2; (-) strand; PAM type: YTN; PAM sequence: TTT
ttttcagaaatcccaaaata

SEQ ID NO: 228082 - DNA, 20 bp, Artificial Sequence
  Description of Artificial Sequence: Synthetic oligonucleotide
  Target: LAMA2; (-) strand; PAM type: YTN; PAM sequence: TTA
taaatttttttcagaaatcc

SEQ ID NO: 228083 - DNA, 20 bp, Artificial Sequence
  Description of Artificial Sequence: Synthetic oligonucleotide
  Target: LAMA2; (-) strand; PAM type: YTN; PAM sequence: TTT
ataaatttttttcagaaatc

SEQ ID NO: 228084 - DNA, 20 bp, Artificial Sequence
  Description of Artificial Sequence: Synthetic oligonucleotide
  Target: LAMA2; (-) strand; PAM type: YTN; PAM sequence: TTT
tataaatttttttcagaaat

SEQ ID NO: 228085 - DNA, 20 bp, Artificial Sequence
  Description of Artificial Sequence: Synthetic oligonucleotide
  Target: LAMA2; (-) strand; PAM type: YTN; PAM sequence: TTT
ttataaatttttttcagaaa

SEQ ID NO: 228086 - DNA, 20 bp, Artificial Sequence
  Description of Artificial Sequence: Synthetic oligonucleotide
  Target: LAMA2; (-) strand; PAM type: YTN; PAM sequence: TTA
tggatttttataaatttttt

SEQ ID NO: 228087 - DNA, 20 bp, Artificial Sequence
  Description of Artificial Sequence: Synthetic oligonucleotide
  Target: LAMA2; (-) strand; PAM type: YTN; PAM sequence: TTA
cattatggatttttataaat

SEQ ID NO: 228088 - DNA, 20 bp, Artificial Sequence
  Description of Artificial Sequence: Synthetic oligonucleotide
  Target: LAMA2; (-) strand; PAM type: YTN; PAM sequence: TTA
caaatgattacattatggat

SEQ ID NO: 228089 - DNA, 20 bp, Artificial Sequence
  Description of Artificial Sequence: Synthetic oligonucleotide
  Target: LAMA2; (-) strand; PAM type: YTN; PAM sequence: TTT
acaaatgattacattatgga

SEQ ID NO: 228090 - DNA, 20 bp, Artificial Sequence
  Description of Artificial Sequence: Synthetic oligonucleotide
  Target: LAMA2; (-) strand; PAM type: YTN; PAM sequence: TTT
tacaaatgattacattatgg

SEQ ID NO: 228091 - DNA, 20 bp, Artificial Sequence
  Description of Artificial Sequence: Synthetic oligonucleotide
  Target: LAMA2; (-) strand; PAM type: YTN; PAM sequence: TTA
aaattttacaaatgattaca

SEQ ID NO: 228092 - DNA, 20 bp, Artificial Sequence
  Description of Artificial Sequence: Synthetic oligonucleotide
  Target: LAMA2; (-) strand; PAM type: YTN; PAM sequence: TTT
aaaattttacaaatgattac

SEQ ID NO: 228093 - DNA, 20 bp, Artificial Sequence
  Description of Artificial Sequence: Synthetic oligonucleotide
  Target: LAMA2; (-) strand; PAM type: YTN; PAM sequence: CTT
taaaattttacaaatgatta

SEQ ID NO: 228094 - DNA, 20 bp, Artificial Sequence
  Description of Artificial Sequence: Synthetic oligonucleotide
  Target: LAMA2; (-) strand; PAM type: YTN; PAM sequence: TTC
gtaatgataaactttaaaat

SEQ ID NO: 228095 - DNA, 20 bp, Artificial Sequence
  Description of Artificial Sequence: Synthetic oligonucleotide
  Target: LAMA2; (-) strand; PAM type: YTN; PAM sequence: TTT
cgtaatgataaactttaaaa

SEQ ID NO: 228096 - DNA, 20 bp, Artificial Sequence
  Description of Artificial Sequence: Synthetic oligonucleotide
  Target: LAMA2; (-) strand; PAM type: YTN; PAM sequence: TTT
tcgtaatgataaactttaaa

SEQ ID NO: 228097 - DNA, 20 bp, Artificial Sequence
  Description of Artificial Sequence: Synthetic oligonucleotide
  Target: LAMA2; (-) strand; PAM type: YTN; PAM sequence: CTT
ttcgtaatgataaactttaa

SEQ ID NO: 228098 - DNA, 20 bp, Artificial Sequence
  Description of Artificial Sequence: Synthetic oligonucleotide
  Target: LAMA2; (-) strand; PAM type: YTN; PAM sequence: TTC
cttttcgtaatgataaactt

SEQ ID NO: 228099 - DNA, 20 bp, Artificial Sequence
  Description of Artificial Sequence: Synthetic oligonucleotide
  Target: LAMA2; (-) strand; PAM type: YTN; PAM sequence: TTT
ccttttcgtaatgataaact

SEQ ID NO: 228100 - DNA, 20 bp, Artificial Sequence
  Description of Artificial Sequence: Synthetic oligonucleotide
  Target: LAMA2; (-) strand; PAM type: YTN; PAM sequence: CTT
tccttttcgtaatgataaac

SEQ ID NO: 228101 - DNA, 20 bp, Artificial Sequence
  Description of Artificial Sequence: Synthetic oligonucleotide
  Target: LAMA2; (-) strand; PAM type: YTN; PAM sequence: TTG
actttccttttcgtaatgat

SEQ ID NO: 228102 - DNA, 20 bp, Artificial Sequence
  Description of Artificial Sequence: Synthetic oligonucleotide
  Target: LAMA2; (-) strand; PAM type: YTN; PAM sequence: TTT
gactttccttttcgtaatga

SEQ ID NO: 228103 - DNA, 20 bp, Artificial Sequence
  Description of Artificial Sequence: Synthetic oligonucleotide
  Target: LAMA2; (-) strand; PAM type: YTN; PAM sequence: TTT
tgactttccttttcgtaatg

SEQ ID NO: 228104 - DNA, 20 bp, Artificial Sequence
  Description of Artificial Sequence: Synthetic oligonucleotide
  Target: LAMA2; (-) strand; PAM type: YTN; PAM sequence: TTG
attttgactttccttttcgt

SEQ ID NO: 228105 - DNA, 20 bp, Artificial Sequence
  Description of Artificial Sequence: Synthetic oligonucleotide
  Target: LAMA2; (-) strand; PAM type: YTN; PAM sequence: TTT
gattttgactttccttttcg

SEQ ID NO: 228106 - DNA, 20 bp, Artificial Sequence
  Description of Artificial Sequence: Synthetic oligonucleotide
  Target: LAMA2; (-) strand; PAM type: YTN; PAM sequence: TTC
atttgattttgactttcctt

SEQ ID NO: 228107 - DNA, 20 bp, Artificial Sequence
  Description of Artificial Sequence: Synthetic oligonucleotide
  Target: LAMA2; (-) strand; PAM type: YTN; PAM sequence: TTT
catttgattttgactttcct

SEQ ID NO: 228108 - DNA, 20 bp, Artificial Sequence
  Description of Artificial Sequence: Synthetic oligonucleotide
  Target: LAMA2; (-) strand; PAM type: YTN; PAM sequence: TTA
tttcatttgattttgacttt

SEQ ID NO: 228109 - DNA, 20 bp, Artificial Sequence
  Description of Artificial Sequence: Synthetic oligonucleotide
  Target: LAMA2; (-) strand; PAM type: YTN; PAM sequence: TTT
atttcatttgattttgactt

SEQ ID NO: 228110 - DNA, 20 bp, Artificial Sequence
  Description of Artificial Sequence: Synthetic oligonucleotide
  Target: LAMA2; (-) strand; PAM type: YTN; PAM sequence: TTT
tatttcatttgattttgact

SEQ ID NO: 228111 - DNA, 20 bp, Artificial Sequence
  Description of Artificial Sequence: Synthetic oligonucleotide
  Target: LAMA2; (-) strand; PAM type: YTN; PAM sequence: TTG
ttttatttcatttgattttg

SEQ ID NO: 228112 - DNA, 20 bp, Artificial Sequence
  Description of Artificial Sequence: Synthetic oligonucleotide
  Target: LAMA2; (-) strand; PAM type: YTN; PAM sequence: CTT
gttttatttcatttgatttt

SEQ ID NO: 228113 - DNA, 20 bp, Artificial Sequence
  Description of Artificial Sequence: Synthetic oligonucleotide
  Target: LAMA2; (-) strand; PAM type: YTN; PAM sequence: CTA
tcccatggaacaaagcttgt

SEQ ID NO: 228114 - DNA, 20 bp, Artificial Sequence
  Description of Artificial Sequence: Synthetic oligonucleotide
  Target: LAMA2; (-) strand; PAM type: YTN; PAM sequence: CTG
acactatcccatggaacaaa

SEQ ID NO: 228115 - DNA, 20 bp, Artificial Sequence
  Description of Artificial Sequence: Synthetic oligonucleotide
  Target: LAMA2; (-) strand; PAM type: YTN; PAM sequence: TTA
tgactgacactatcccatgg

SEQ ID NO: 228116 - DNA, 20 bp, Artificial Sequence
  Description of Artificial Sequence: Synthetic oligonucleotide
  Target: LAMA2; (-) strand; PAM type: YTN; PAM sequence: TTT
atgactgacactatcccatg

SEQ ID NO: 228117 - DNA, 20 bp, Artificial Sequence
  Description of Artificial Sequence: Synthetic oligonucleotide
  Target: LAMA2; (-) strand; PAM type: YTN; PAM sequence: CTT
tatgactgacactatcccat

SEQ ID NO: 228118 - DNA, 20 bp, Artificial Sequence
  Description of Artificial Sequence: Synthetic oligonucleotide
  Target: LAMA2; (-) strand; PAM type: YTN; PAM sequence: CTA
gtaagtctttatgactgaca

SEQ ID NO: 228119 - DNA, 20 bp, Artificial Sequence
  Description of Artificial Sequence: Synthetic oligonucleotide
  Target: LAMA2; (-) strand; PAM type: YTN; PAM sequence: CTA
actagtaagtctttatgact

SEQ ID NO: 228120 - DNA, 20 bp, Artificial Sequence
  Description of Artificial Sequence: Synthetic oligonucleotide
  Target: LAMA2; (-) strand; PAM type: YTN; PAM sequence: TTA
gcacctaactagtaagtctt

SEQ ID NO: 228121 - DNA, 20 bp, Artificial Sequence
  Description of Artificial Sequence: Synthetic oligonucleotide
  Target: LAMA2; (-) strand; PAM type: YTN; PAM sequence: CTC
aaaatgaattagcacctaac

SEQ ID NO: 228122 - DNA, 20 bp, Artificial Sequence
  Description of Artificial Sequence: Synthetic oligonucleotide
  Target: LAMA2; (-) strand; PAM type: YTN; PAM sequence: CTG
taagctcaaaatgaattagc

SEQ ID NO: 228123 - DNA, 20 bp, Artificial Sequence
  Description of Artificial Sequence: Synthetic oligonucleotide
  Target: LAMA2; (-) strand; PAM type: YTN; PAM sequence: CTG
ataaaaccctgtaagctcaa

SEQ ID NO: 228124 - DNA, 20 bp, Artificial Sequence
  Description of Artificial Sequence: Synthetic oligonucleotide
  Target: LAMA2; (-) strand; PAM type: YTN; PAM sequence: CTG
atcctgataaaaccctgtaa

SEQ ID NO: 228125 - DNA, 20 bp, Artificial Sequence
  Description of Artificial Sequence: Synthetic oligonucleotide
  Target: LAMA2; (-) strand; PAM type: YTN; PAM sequence: TTA
gtctgatcctgataaaaccc

SEQ ID NO: 228126 - DNA, 20 bp, Artificial Sequence
  Description of Artificial Sequence: Synthetic oligonucleotide
  Target: LAMA2; (-) strand; PAM type: YTN; PAM sequence: CTT
agtctgatcctgataaaacc

SEQ ID NO: 228127 - DNA, 20 bp, Artificial Sequence
  Description of Artificial Sequence: Synthetic oligonucleotide
  Target: LAMA2; (-) strand; PAM type: YTN; PAM sequence: TTA
cttagtctgatcctgataaa

SEQ ID NO: 228128 - DNA, 20 bp, Artificial Sequence
  Description of Artificial Sequence: Synthetic oligonucleotide
  Target: LAMA2; (-) strand; PAM type: YTN; PAM sequence: TTT
acttagtctgatcctgataa

SEQ ID NO: 228129 - DNA, 20 bp, Artificial Sequence
  Description of Artificial Sequence: Synthetic oligonucleotide
  Target: LAMA2; (-) strand; PAM type: YTN; PAM sequence: TTT
tacttagtctgatcctgata

SEQ ID NO: 228130 - DNA, 20 bp, Artificial Sequence
  Description of Artificial Sequence: Synthetic oligonucleotide
  Target: LAMA2; (-) strand; PAM type: YTN; PAM sequence: TTT
ttacttagtctgatcctgat

SEQ ID NO: 228131 - DNA, 20 bp, Artificial Sequence
  Description of Artificial Sequence: Synthetic oligonucleotide
  Target: LAMA2; (-) strand; PAM type: YTN; PAM sequence: TTA
tacatttttacttagtctga

SEQ ID NO: 228132 - DNA, 20 bp, Artificial Sequence
  Description of Artificial Sequence: Synthetic oligonucleotide
  Target: LAMA2; (-) strand; PAM type: YTN; PAM sequence: TTA
taaaataattatacattttt

SEQ ID NO: 228133 - DNA, 20 bp, Artificial Sequence
  Description of Artificial Sequence: Synthetic oligonucleotide
  Target: LAMA2; (-) strand; PAM type: YTN; PAM sequence: TTT
ataaaataattatacatttt

SEQ ID NO: 228134 - DNA, 20 bp, Artificial Sequence
  Description of Artificial Sequence: Synthetic oligonucleotide
  Target: LAMA2; (-) strand; PAM type: YTN; PAM sequence: TTA
tttataaaataattatacat

SEQ ID NO: 228135 - DNA, 20 bp, Artificial Sequence
  Description of Artificial Sequence: Synthetic oligonucleotide
  Target: LAMA2; (-) strand; PAM type: YTN; PAM sequence: TTT
atttataaaataattataca

SEQ ID NO: 228136 - DNA, 20 bp, Artificial Sequence
  Description of Artificial Sequence: Synthetic oligonucleotide
  Target: LAMA2; (-) strand; PAM type: YTN; PAM sequence: TTT
tatttataaaataattatac

SEQ ID NO: 228137 - DNA, 20 bp, Artificial Sequence
  Description of Artificial Sequence: Synthetic oligonucleotide
  Target: LAMA2; (-) strand; PAM type: YTN; PAM sequence: TTT
ttatttataaaataattata

SEQ ID NO: 228138 - DNA, 20 bp, Artificial Sequence
  Description of Artificial Sequence: Synthetic oligonucleotide
  Target: LAMA2; (-) strand; PAM type: YTN; PAM sequence: CTG
aaaccccaaaacatttttat

SEQ ID NO: 228139 - DNA, 20 bp, Artificial Sequence
  Description of Artificial Sequence: Synthetic oligonucleotide
  Target: LAMA2; (-) strand; PAM type: YTN; PAM sequence: TTA
aatctgaaaccccaaaacat

SEQ ID NO: 228140 - DNA, 20 bp, Artificial Sequence
  Description of Artificial Sequence: Synthetic oligonucleotide
  Target: LAMA2; (-) strand; PAM type: YTN; PAM sequence: TTT
aaatctgaaaccccaaaaca

SEQ ID NO: 228141 - DNA, 20 bp, Artificial Sequence
  Description of Artificial Sequence: Synthetic oligonucleotide
  Target: LAMA2; (-) strand; PAM type: YTN; PAM sequence: TTT
taaatctgaaaccccaaaac

SEQ ID NO: 228142 - DNA, 20 bp, Artificial Sequence
  Description of Artificial Sequence: Synthetic oligonucleotide
  Target: LAMA2; (-) strand; PAM type: YTN; PAM sequence: TTT
ttaaatctgaaaccccaaaa

SEQ ID NO: 228143 - DNA, 20 bp, Artificial Sequence
  Description of Artificial Sequence: Synthetic oligonucleotide
  Target: LAMA2; (-) strand; PAM type: YTN; PAM sequence: TTG
atttttaaatctgaaacccc

SEQ ID NO: 228144 - DNA, 20 bp, Artificial Sequence
  Description of Artificial Sequence: Synthetic oligonucleotide
  Target: LAMA2; (-) strand; PAM type: YTN; PAM sequence: CTT
gatttttaaatctgaaaccc

SEQ ID NO: 228145 - DNA, 20 bp, Artificial Sequence
  Description of Artificial Sequence: Synthetic oligonucleotide
  Target: LAMA2; (-) strand; PAM type: YTN; PAM sequence: CTC
ttgatttttaaatctgaaac

SEQ ID NO: 228146 - DNA, 20 bp, Artificial Sequence
  Description of Artificial Sequence: Synthetic oligonucleotide
  Target: LAMA2; (-) strand; PAM type: YTN; PAM sequence: TTA
ctcttgatttttaaatctga

SEQ ID NO: 228147 - DNA, 20 bp, Artificial Sequence
  Description of Artificial Sequence: Synthetic oligonucleotide
  Target: LAMA2; (-) strand; PAM type: YTN; PAM sequence: CTT
actcttgatttttaaatctg

SEQ ID NO: 228148 - DNA, 20 bp, Artificial Sequence
  Description of Artificial Sequence: Synthetic oligonucleotide
  Target: LAMA2; (-) strand; PAM type: YTN; PAM sequence: TTC
ttactcttgatttttaaatc

SEQ ID NO: 228149 - DNA, 20 bp, Artificial Sequence
  Description of Artificial Sequence: Synthetic oligonucleotide
  Target: LAMA2; (-) strand; PAM type: YTN; PAM sequence: CTT
cttactcttgatttttaaat

SEQ ID NO: 228150 - DNA, 20 bp, Artificial Sequence
  Description of Artificial Sequence: Synthetic oligonucleotide
  Target: LAMA2; (-) strand; PAM type: YTN; PAM sequence: TTG
taaaacttcttactcttgat

SEQ ID NO: 228151 - DNA, 20 bp, Artificial Sequence
  Description of Artificial Sequence: Synthetic oligonucleotide
  Target: LAMA2; (-) strand; PAM type: YTN; PAM sequence: TTA
gtaaatattgtaaaacttct

SEQ ID NO: 228152 - DNA, 20 bp, Artificial Sequence
  Description of Artificial Sequence: Synthetic oligonucleotide
  Target: LAMA2; (-) strand; PAM type: YTN; PAM sequence: TTT
agtaaatattgtaaaacttc

SEQ ID NO: 228153 - DNA, 20 bp, Artificial Sequence
  Description of Artificial Sequence: Synthetic oligonucleotide
  Target: LAMA2; (-) strand; PAM type: YTN; PAM sequence: CTT
tagtaaatattgtaaaactt

SEQ ID NO: 228154 - DNA, 20 bp, Artificial Sequence
  Description of Artificial Sequence: Synthetic oligonucleotide
  Target: LAMA2; (-) strand; PAM type: YTN; PAM sequence: CTA
atcgtaatctttagtaaata

SEQ ID NO: 228155 - DNA, 20 bp, Artificial Sequence
  Description of Artificial Sequence: Synthetic oligonucleotide
  Target: LAMA2; (-) strand; PAM type: YTN; PAM sequence: TTG
tggtatactaatcgtaatct

SEQ ID NO: 228156 - DNA, 20 bp, Artificial Sequence
  Description of Artificial Sequence: Synthetic oligonucleotide
  Target: LAMA2; (-) strand; PAM type: YTN; PAM sequence: TTT
gtggtatactaatcgtaatc

SEQ ID NO: 228157 - DNA, 20 bp, Artificial Sequence
  Description of Artificial Sequence: Synthetic oligonucleotide
  Target: LAMA2; (-) strand; PAM type: YTN; PAM sequence: TTT
tgtggtatactaatcgtaat

SEQ ID NO: 228158 - DNA, 20 bp, Artificial Sequence
  Description of Artificial Sequence: Synthetic oligonucleotide
  Target: LAMA2; (-) strand; PAM type: YTN; PAM sequence: TTC
agatgttttgtggtatacta

SEQ ID NO: 228159 - DNA, 20 bp, Artificial Sequence
  Description of Artificial Sequence: Synthetic oligonucleotide
  Target: LAMA2; (-) strand; PAM type: YTN; PAM sequence: CTA
aagttcagatgttttgtggt

SEQ ID NO: 228160 - DNA, 20 bp, Artificial Sequence
  Description of Artificial Sequence: Synthetic oligonucleotide
  Target: LAMA2; (-) strand; PAM type: YTN; PAM sequence: TTA
aggtcatataaataatatct

SEQ ID NO: 228161 - DNA, 20 bp, Artificial Sequence
  Description of Artificial Sequence: Synthetic oligonucleotide
  Target: LAMA2; (-) strand; PAM type: YTN; PAM sequence: TTT
aaggtcatataaataatatc

SEQ ID NO: 228162 - DNA, 20 bp, Artificial Sequence
  Description of Artificial Sequence: Synthetic oligonucleotide
  Target: LAMA2; (-) strand; PAM type: YTN; PAM sequence: TTT
taaggtcatataaataatat

SEQ ID NO: 228163 - DNA, 20 bp, Artificial Sequence
  Description of Artificial Sequence: Synthetic oligonucleotide
  Target: LAMA2; (-) strand; PAM type: YTN; PAM sequence: CTT
ttaaggtcatataaataata

SEQ ID NO: 228164 - DNA, 20 bp, Artificial Sequence
  Description of Artificial Sequence: Synthetic oligonucleotide
  Target: LAMA2; (-) strand; PAM type: YTN; PAM sequence: CTG
acttttaaggtcatataaat

SEQ ID NO: 228165 - DNA, 20 bp, Artificial Sequence
  Description of Artificial Sequence: Synthetic oligonucleotide
  Target: LAMA2; (-) strand; PAM type: YTN; PAM sequence: TTG
gcagggaaaggtctgacttt

SEQ ID NO: 228166 - DNA, 20 bp, Artificial Sequence
  Description of Artificial Sequence: Synthetic oligonucleotide
  Target: LAMA2; (-) strand; PAM type: YTN; PAM sequence: TTA
agtcattggcagggaaaggt

SEQ ID NO: 228167 - DNA, 20 bp, Artificial Sequence
  Description of Artificial Sequence: Synthetic oligonucleotide
  Target: LAMA2; (-) strand; PAM type: YTN; PAM sequence: CTA
aagacagaagttaagtcatt

SEQ ID NO: 228168 - DNA, 20 bp, Artificial Sequence
  Description of Artificial Sequence: Synthetic oligonucleotide
  Target: LAMA2; (-) strand; PAM type: YTN; PAM sequence: TTC
aaacaaaatagcactaaaga

SEQ ID NO: 228169 - DNA, 20 bp, Artificial Sequence
  Description of Artificial Sequence: Synthetic oligonucleotide
  Target: LAMA2; (-) strand; PAM type: YTN; PAM sequence: CTT
caaacaaaatagcactaaag

SEQ ID NO: 228170 - DNA, 20 bp, Artificial Sequence
  Description of Artificial Sequence: Synthetic oligonucleotide
  Target: LAMA2; (-) strand; PAM type: YTN; PAM sequence: TTC
atagcagataaataagcctt

SEQ ID NO: 228171 - DNA, 20 bp, Artificial Sequence
  Description of Artificial Sequence: Synthetic oligonucleotide
  Target: LAMA2; (-) strand; PAM type: YTN; PAM sequence: CTT
catagcagataaataagcct

SEQ ID NO: 228172 - DNA, 20 bp, Artificial Sequence
  Description of Artificial Sequence: Synthetic oligonucleotide
  Target: LAMA2; (-) strand; PAM type: YTN; PAM sequence: CTA
acccaatgtgaagagacatg

SEQ ID NO: 228173 - DNA, 20 bp, Artificial Sequence
  Description of Artificial Sequence: Synthetic oligonucleotide
  Target: LAMA2; (-) strand; PAM type: YTN; PAM sequence: TTC
ctaacccaatgtgaagagac

SEQ ID NO: 228174 - DNA, 20 bp, Artificial Sequence
  Description of Artificial Sequence: Synthetic oligonucleotide
  Target: LAMA2; (-) strand; PAM type: YTN; PAM sequence: TTT
cctaacccaatgtgaagaga

SEQ ID NO: 228175 - DNA, 20 bp, Artificial Sequence
  Description of Artificial Sequence: Synthetic oligonucleotide
  Target: LAMA2; (-) strand; PAM type: YTN; PAM sequence: TTG
aagatttcctaacccaatgt

SEQ ID NO: 228176 - DNA, 20 bp, Artificial Sequence
  Description of Artificial Sequence: Synthetic oligonucleotide
  Target: LAMA2; (-) strand; PAM type: YTN; PAM sequence: CTT
gaagatttcctaacccaatg

SEQ ID NO: 228177 - DNA, 20 bp, Artificial Sequence
  Description of Artificial Sequence: Synthetic oligonucleotide
  Target: LAMA2; (-) strand; PAM type: YTN; PAM sequence: TTC
cttgaagatttcctaaccca

SEQ ID NO: 228178 - DNA, 20 bp, Artificial Sequence
  Description of Artificial Sequence: Synthetic oligonucleotide
  Target: LAMA2; (-) strand; PAM type: YTN; PAM sequence: TTT
ccttgaagatttcctaaccc

SEQ ID NO: 228179 - DNA, 20 bp, Artificial Sequence
  Description of Artificial Sequence: Synthetic oligonucleotide
  Target: LAMA2; (-) strand; PAM type: YTN; PAM sequence: TTA
atttccttgaagatttccta

SEQ ID NO: 228180 - DNA, 20 bp, Artificial Sequence
  Description of Artificial Sequence: Synthetic oligonucleotide
  Target: LAMA2; (-) strand; PAM type: YTN; PAM sequence: TTG
tgtatacccgaggatattaa

SEQ ID NO: 228181 - DNA, 20 bp, Artificial Sequence
  Description of Artificial Sequence: Synthetic oligonucleotide
  Target: LAMA2; (-) strand; PAM type: YTN; PAM sequence: TTC
catgtcagagcaaataccac

SEQ ID NO: 228182 - DNA, 20 bp, Artificial Sequence
  Description of Artificial Sequence: Synthetic oligonucleotide
  Target: LAMA2; (-) strand; PAM type: YTN; PAM sequence: TTG
ttccatgtcagagcaaatac

SEQ ID NO: 228183 - DNA, 20 bp, Artificial Sequence
  Description of Artificial Sequence: Synthetic oligonucleotide
  Target: LAMA2; (-) strand; PAM type: YTN; PAM sequence: TTT
gttccatgtcagagcaaata

SEQ ID NO: 228184 - DNA, 20 bp, Artificial Sequence
  Description of Artificial Sequence: Synthetic oligonucleotide
  Target: LAMA2; (-) strand; PAM type: YTN; PAM sequence: CTT
tgttccatgtcagagcaaat

SEQ ID NO: 228185 - DNA, 20 bp, Artificial Sequence
  Description of Artificial Sequence: Synthetic oligonucleotide
  Target: LAMA2; (-) strand; PAM type: YTN; PAM sequence: TTG
cctttgttccatgtcagagc

SEQ ID NO: 228186 - DNA, 20 bp, Artificial Sequence
  Description of Artificial Sequence: Synthetic oligonucleotide
  Target: LAMA2; (-) strand; PAM type: YTN; PAM sequence: TTT
gcctttgttccatgtcagag

SEQ ID NO: 228187 - DNA, 20 bp, Artificial Sequence
  Description of Artificial Sequence: Synthetic oligonucleotide
  Target: LAMA2; (-) strand; PAM type: YTN; PAM sequence: TTT
tgcctttgttccatgtcaga

SEQ ID NO: 228188 - DNA, 20 bp, Artificial Sequence
  Description of Artificial Sequence: Synthetic oligonucleotide
  Target: LAMA2; (-) strand; PAM type: YTN; PAM sequence: CTT
ttgcctttgttccatgtcag

SEQ ID NO: 228189 - DNA, 20 bp, Artificial Sequence
  Description of Artificial Sequence: Synthetic oligonucleotide
  Target: LAMA2; (-) strand; PAM type: YTN; PAM sequence: TTC
ccgtatcttttgcctttgtt

SEQ ID NO: 228190 - DNA, 20 bp, Artificial Sequence
  Description of Artificial Sequence: Synthetic oligonucleotide
  Target: LAMA2; (-) strand; PAM type: YTN; PAM sequence: TTT
cccgtatcttttgcctttgt

SEQ ID NO: 228191 - DNA, 20 bp, Artificial Sequence
  Description of Artificial Sequence: Synthetic oligonucleotide
  Target: LAMA2; (-) strand; PAM type: YTN; PAM sequence: TTT
tcccgtatcttttgcctttg

SEQ ID NO: 228192 - DNA, 20 bp, Artificial Sequence
  Description of Artificial Sequence: Synthetic oligonucleotide
  Target: LAMA2; (-) strand; PAM type: YTN; PAM sequence: CTA
cattttcccgtatcttttgc

SEQ ID NO: 228193 - DNA, 20 bp, Artificial Sequence
  Description of Artificial Sequence: Synthetic oligonucleotide
  Target: LAMA2; (-) strand; PAM type: YTN; PAM sequence: TTC
tacattttcccgtatctttt

SEQ ID NO: 228194 - DNA, 20 bp, Artificial Sequence
  Description of Artificial Sequence: Synthetic oligonucleotide
  Target: LAMA2; (-) strand; PAM type: YTN; PAM sequence: CTT
ctacattttcccgtatcttt

SEQ ID NO: 228195 - DNA, 20 bp, Artificial Sequence
  Description of Artificial Sequence: Synthetic oligonucleotide
  Target: LAMA2; (-) strand; PAM type: YTN; PAM sequence: CTA
taatgcccacttctacattt

SEQ ID NO: 228196 - DNA, 20 bp, Artificial Sequence
  Description of Artificial Sequence: Synthetic oligonucleotide
  Target: LAMA2; (-) strand; PAM type: YTN; PAM sequence: TTC
tataatgcccacttctacat

SEQ ID NO: 228197 - DNA, 20 bp, Artificial Sequence
  Description of Artificial Sequence: Synthetic oligonucleotide
  Target: LAMA2; (-) strand; PAM type: YTN; PAM sequence: CTT
ctataatgcccacttctaca

SEQ ID NO: 228198 - DNA, 20 bp, Artificial Sequence
  Description of Artificial Sequence: Synthetic oligonucleotide
  Target: LAMA2; (-) strand; PAM type: YTN; PAM sequence: TTC
ttctataatgcccacttcta

SEQ ID NO: 228199 - DNA, 20 bp, Artificial Sequence
  Description of Artificial Sequence: Synthetic oligonucleotide
  Target: LAMA2; (-) strand; PAM type: YTN; PAM sequence: TTG
gattcttctataatgcccac

SEQ ID NO: 228200 - DNA, 20 bp, Artificial Sequence
  Description of Artificial Sequence: Synthetic oligonucleotide
  Target: LAMA2; (-) strand; PAM type: YTN; PAM sequence: TTT
ggattcttctataatgccca

SEQ ID NO: 228201 - DNA, 20 bp, Artificial Sequence
  Description of Artificial Sequence: Synthetic oligonucleotide
  Target: LAMA2; (-) strand; PAM type: YTN; PAM sequence: TTA
gacacatttggattcttcta

SEQ ID NO: 228202 - DNA, 20 bp, Artificial Sequence
  Description of Artificial Sequence: Synthetic oligonucleotide
  Target: LAMA2; (-) strand; PAM type: YTN; PAM sequence: TTA
gtatgaagaagacattagac

SEQ ID NO: 228203 - DNA, 20 bp, Artificial Sequence
  Description of Artificial Sequence: Synthetic oligonucleotide
  Target: LAMA2; (-) strand; PAM type: YTN; PAM sequence: CTA
gaaggaattagtatgaagaa

SEQ ID NO: 228204 - DNA, 20 bp, Artificial Sequence
  Description of Artificial Sequence: Synthetic oligonucleotide
  Target: LAMA2; (-) strand; PAM type: YTN; PAM sequence: TTA
aataaaggctagaaggaatt

SEQ ID NO: 228205 - DNA, 20 bp, Artificial Sequence
  Description of Artificial Sequence: Synthetic oligonucleotide
  Target: LAMA2; (-) strand; PAM type: YTN; PAM sequence: TTT
aaataaaggctagaaggaat

SEQ ID NO: 228206 - DNA, 20 bp, Artificial Sequence
  Description of Artificial Sequence: Synthetic oligonucleotide
  Target: LAMA2; (-) strand; PAM type: YTN; PAM sequence: TTT
taaataaaggctagaaggaa

SEQ ID NO: 228207 - DNA, 20 bp, Artificial Sequence
  Description of Artificial Sequence: Synthetic oligonucleotide
  Target: LAMA2; (-) strand; PAM type: YTN; PAM sequence: TTT
ttaaataaaggctagaagga

SEQ ID NO: 228208 - DNA, 20 bp, Artificial Sequence
  Description of Artificial Sequence: Synthetic oligonucleotide
  Target: LAMA2; (-) strand; PAM type: YTN; PAM sequence: TTT
tttaaataaaggctagaagg

SEQ ID NO: 228209 - DNA, 20 bp, Artificial Sequence
  Description of Artificial Sequence: Synthetic oligonucleotide
  Target: LAMA2; (-) strand; PAM type: YTN; PAM sequence: CTA
ttttttaaataaaggctaga

SEQ ID NO: 228210 - DNA, 20 bp, Artificial Sequence
  Description of Artificial Sequence: Synthetic oligonucleotide
  Target: LAMA2; (-) strand; PAM type: YTN; PAM sequence: TTC
agaagctattttttaaataa

SEQ ID NO: 228211 - DNA, 20 bp, Artificial Sequence
  Description of Artificial Sequence: Synthetic oligonucleotide
  Target: LAMA2; (-) strand; PAM type: YTN; PAM sequence: TTG
caattcagaagctatttttt

SEQ ID NO: 228212 - DNA, 20 bp, Artificial Sequence
  Description of Artificial Sequence: Synthetic oligonucleotide
  Target: LAMA2; (-) strand; PAM type: YTN; PAM sequence: CTT
gcaattcagaagctattttt

SEQ ID NO: 228213 - DNA, 20 bp, Artificial Sequence
  Description of Artificial Sequence: Synthetic oligonucleotide
  Target: LAMA2; (-) strand; PAM type: YTN; PAM sequence: TTA
aaaatatccttgcaattcag

SEQ ID NO: 228214 - DNA, 20 bp, Artificial Sequence
  Description of Artificial Sequence: Synthetic oligonucleotide
  Target: LAMA2; (-) strand; PAM type: YTN; PAM sequence: CTT
aaaaatatccttgcaattca

SEQ ID NO: 228215 - DNA, 20 bp, Artificial Sequence
  Description of Artificial Sequence: Synthetic oligonucleotide
  Target: LAMA2; (-) strand; PAM type: YTN; PAM sequence: TTC
atgtggcttaaaaatatcct

SEQ ID NO: 228216 - DNA, 20 bp, Artificial Sequence
  Description of Artificial Sequence: Synthetic oligonucleotide
  Target: LAMA2; (-) strand; PAM type: YTN; PAM sequence: CTG
attcatgtggcttaaaaata

SEQ ID NO: 228217 - DNA, 20 bp, Artificial Sequence
  Description of Artificial Sequence: Synthetic oligonucleotide
  Target: LAMA2; (-) strand; PAM type: YTN; PAM sequence: CTG
aaggggcatactgattcatg

SEQ ID NO: 228218 - DNA, 20 bp, Artificial Sequence
  Description of Artificial Sequence: Synthetic oligonucleotide
  Target: LAMA2; (-) strand; PAM type: YTN; PAM sequence: TTG
aaaagtccagctgaaggggc

SEQ ID NO: 228219 - DNA, 20 bp, Artificial Sequence
  Description of Artificial Sequence: Synthetic oligonucleotide
  Target: LAMA2; (-) strand; PAM type: YTN; PAM sequence: CTT
gaaaagtccagctgaagggg

SEQ ID NO: 228220 - DNA, 20 bp, Artificial Sequence
  Description of Artificial Sequence: Synthetic oligonucleotide
  Target: LAMA2; (-) strand; PAM type: YTN; PAM sequence: CTC
cttgaaaagtccagctgaag

SEQ ID NO: 228221 - DNA, 20 bp, Artificial Sequence
  Description of Artificial Sequence: Synthetic oligonucleotide
  Target: LAMA2; (-) strand; PAM type: YTN; PAM sequence: TTC
acaggctccttgaaaagtcc

SEQ ID NO: 228222 - DNA, 20 bp, Artificial Sequence
  Description of Artificial Sequence: Synthetic oligonucleotide
  Target: LAMA2; (-) strand; PAM type: YTN; PAM sequence: TTC
agcattcacaggctccttga

SEQ ID NO: 228223 - DNA, 20 bp, Artificial Sequence
  Description of Artificial Sequence: Synthetic oligonucleotide
  Target: LAMA2; (-) strand; PAM type: YTN; PAM sequence: TTT
cagcattcacaggctccttg

SEQ ID NO: 228224 - DNA, 20 bp, Artificial Sequence
  Description of Artificial Sequence: Synthetic oligonucleotide
  Target: LAMA2; (-) strand; PAM type: YTN; PAM sequence: TTA
atcatttcagcattcacagg

SEQ ID NO: 228225 - DNA, 20 bp, Artificial Sequence
  Description of Artificial Sequence: Synthetic oligonucleotide
  Target: LAMA2; (-) strand; PAM type: YTN; PAM sequence: TTC
acataatgttaatcatttca

SEQ ID NO: 228226 - DNA, 20 bp, Artificial Sequence
  Description of Artificial Sequence: Synthetic oligonucleotide
  Target: LAMA2; (-) strand; PAM type: YTN; PAM sequence: CTT
cacataatgttaatcatttc

SEQ ID NO: 228227 - DNA, 20 bp, Artificial Sequence
  Description of Artificial Sequence: Synthetic oligonucleotide
  Target: LAMA2; (-) strand; PAM type: YTN; PAM sequence: TTA
gcttcacataatgttaatca

SEQ ID NO: 228228 - DNA, 20 bp, Artificial Sequence
  Description of Artificial Sequence: Synthetic oligonucleotide
  Target: LAMA2; (-) strand; PAM type: YTN; PAM sequence: TTT
agcttcacataatgttaatc

SEQ ID NO: 228229 - DNA, 20 bp, Artificial Sequence
  Description of Artificial Sequence: Synthetic oligonucleotide
  Target: LAMA2; (-) strand; PAM type: YTN; PAM sequence: TTC
agtgcaatttagcttcacat

SEQ ID NO: 228230 - DNA, 20 bp, Artificial Sequence
  Description of Artificial Sequence: Synthetic oligonucleotide
  Target: LAMA2; (-) strand; PAM type: YTN; PAM sequence: TTC
cacggttcagtgcaatttag

SEQ ID NO: 228231 - DNA, 20 bp, Artificial Sequence
  Description of Artificial Sequence: Synthetic oligonucleotide
  Target: LAMA2; (-) strand; PAM type: YTN; PAM sequence: TTG
ccacaccacatggttccacg

SEQ ID NO: 228232 - DNA, 20 bp, Artificial Sequence
  Description of Artificial Sequence: Synthetic oligonucleotide
  Target: LAMA2; (-) strand; PAM type: YTN; PAM sequence: CTA
ttgccacaccacatggttcc

SEQ ID NO: 228233 - DNA, 20 bp, Artificial Sequence
  Description of Artificial Sequence: Synthetic oligonucleotide
  Target: LAMA2; (-) strand; PAM type: YTN; PAM sequence: CTC
cccacccactattgccacac

SEQ ID NO: 228234 - DNA, 20 bp, Artificial Sequence
  Description of Artificial Sequence: Synthetic oligonucleotide
  Target: LAMA2; (-) strand; PAM type: YTN; PAM sequence: CTA
atatgtctccccacccacta

SEQ ID NO: 228235 - DNA, 20 bp, Artificial Sequence
  Description of Artificial Sequence: Synthetic oligonucleotide
  Target: LAMA2; (-) strand; PAM type: YTN; PAM sequence: CTA
gactaatatgtctccccacc

SEQ ID NO: 228236 - DNA, 20 bp, Artificial Sequence
  Description of Artificial Sequence: Synthetic oligonucleotide
  Target: LAMA2; (-) strand; PAM type: YTN; PAM sequence: CTC
tagactaatatgtctcccca

SEQ ID NO: 228237 - DNA, 20 bp, Artificial Sequence
  Description of Artificial Sequence: Synthetic oligonucleotide
  Target: LAMA2; (-) strand; PAM type: YTN; PAM sequence: CTC
agcagggacctctagactaa

SEQ ID NO: 228238 - DNA, 20 bp, Artificial Sequence
  Description of Artificial Sequence: Synthetic oligonucleotide
  Target: LAMA2; (-) strand; PAM type: YTN; PAM sequence: TTG
ctcagcagggacctctagac

SEQ ID NO: 228239 - DNA, 20 bp, Artificial Sequence
  Description of Artificial Sequence: Synthetic oligonucleotide
  Target: LAMA2; (-) strand; PAM type: YTN; PAM sequence: TTT
gctcagcagggacctctaga

SEQ ID NO: 228240 - DNA, 20 bp, Artificial Sequence
  Description of Artificial Sequence: Synthetic oligonucleotide
  Target: LAMA2; (-) strand; PAM type: YTN; PAM sequence: TTT
tgctcagcagggacctctag

SEQ ID NO: 228241 - DNA, 20 bp, Artificial Sequence
  Description of Artificial Sequence: Synthetic oligonucleotide
  Target: LAMA2; (-) strand; PAM type: YTN; PAM sequence: CTT
ttgctcagcagggacctcta

SEQ ID NO: 228242 - DNA, 20 bp, Artificial Sequence
  Description of Artificial Sequence: Synthetic oligonucleotide
  Target: LAMA2; (-) strand; PAM type: YTN; PAM sequence: TTG
tcttttgctcagcagggacc

SEQ ID NO: 228243 - DNA, 20 bp, Artificial Sequence
  Description of Artificial Sequence: Synthetic oligonucleotide
  Target: LAMA2; (-) strand; PAM type: YTN; PAM sequence: TTT
gtcttttgctcagcagggac

SEQ ID NO: 228244 - DNA, 20 bp, Artificial Sequence
  Description of Artificial Sequence: Synthetic oligonucleotide
  Target: LAMA2; (-) strand; PAM type: YTN; PAM sequence: CTT
tgtcttttgctcagcaggga

SEQ ID NO: 228245 - DNA, 20 bp, Artificial Sequence
  Description of Artificial Sequence: Synthetic oligonucleotide
  Target: LAMA2; (-) strand; PAM type: YTN; PAM sequence: CTG
aaaatacatcccaagcccac

SEQ ID NO: 228246 - DNA, 20 bp, Artificial Sequence
  Description of Artificial Sequence: Synthetic oligonucleotide
  Target: LAMA2; (-) strand; PAM type: YTN; PAM sequence: TTC
tgaaaatacatcccaagccc

SEQ ID NO: 228247 - DNA, 20 bp, Artificial Sequence
  Description of Artificial Sequence: Synthetic oligonucleotide
  Target: LAMA2; (-) strand; PAM type: YTN; PAM sequence: TTT
ctgaaaatacatcccaagcc

SEQ ID NO: 228248 - DNA, 20 bp, Artificial Sequence
  Description of Artificial Sequence: Synthetic oligonucleotide
  Target: LAMA2; (-) strand; PAM type: YTN; PAM sequence: TTA
tttctgaaaatacatcccaa

SEQ ID NO: 228249 - DNA, 20 bp, Artificial Sequence
  Description of Artificial Sequence: Synthetic oligonucleotide
  Target: LAMA2; (-) strand; PAM type: YTN; PAM sequence: CTG
caaataattatttctgaaaa

SEQ ID NO: 228250 - DNA, 20 bp, Artificial Sequence
  Description of Artificial Sequence: Synthetic oligonucleotide
  Target: LAMA2; (-) strand; PAM type: YTN; PAM sequence: TTC
cctgcaaataattatttctg

SEQ ID NO: 228251 - DNA, 20 bp, Artificial Sequence
  Description of Artificial Sequence: Synthetic oligonucleotide
  Target: LAMA2; (-) strand; PAM type: YTN; PAM sequence: TTA
taagttccctgcaaataatt

SEQ ID NO: 228252 - DNA, 20 bp, Artificial Sequence
  Description of Artificial Sequence: Synthetic oligonucleotide
  Target: LAMA2; (-) strand; PAM type: YTN; PAM sequence: TTT
ataagttccctgcaaataat

SEQ ID NO: 228253 - DNA, 20 bp, Artificial Sequence
  Description of Artificial Sequence: Synthetic oligonucleotide
  Target: LAMA2; (-) strand; PAM type: YTN; PAM sequence: TTT
tataagttccctgcaaataa

SEQ ID NO: 228254 - DNA, 20 bp, Artificial Sequence
  Description of Artificial Sequence: Synthetic oligonucleotide
  Target: LAMA2; (-) strand; PAM type: YTN; PAM sequence: TTT
ttataagttccctgcaaata

SEQ ID NO: 228255 - DNA, 20 bp, Artificial Sequence
  Description of Artificial Sequence: Synthetic oligonucleotide
  Target: LAMA2; (-) strand; PAM type: YTN; PAM sequence: TTG
tttttataagttccctgcaa

SEQ ID NO: 228256 - DNA, 20 bp, Artificial Sequence
  Description of Artificial Sequence: Synthetic oligonucleotide
  Target: LAMA2; (-) strand; PAM type: YTN; PAM sequence: TTT
gtttttataagttccctgca

SEQ ID NO: 228257 - DNA, 20 bp, Artificial Sequence
  Description of Artificial Sequence: Synthetic oligonucleotide
  Target: LAMA2; (-) strand; PAM type: YTN; PAM sequence: TTC
atttgtttttataagttccc

SEQ ID NO: 228258 - DNA, 20 bp, Artificial Sequence
  Description of Artificial Sequence: Synthetic oligonucleotide
  Target: LAMA2; (-) strand; PAM type: YTN; PAM sequence: CTA
gtagacaaacatcccaaaac

SEQ ID NO: 228259 - DNA, 20 bp, Artificial Sequence
  Description of Artificial Sequence: Synthetic oligonucleotide
  Target: LAMA2; (-) strand; PAM type: YTN; PAM sequence: TTA
gaaagtctagtagacaaaca

SEQ ID NO: 228260 - DNA, 20 bp, Artificial Sequence
  Description of Artificial Sequence: Synthetic oligonucleotide
  Target: LAMA2; (-) strand; PAM type: YTN; PAM sequence: TTT
agaaagtctagtagacaaac

SEQ ID NO: 228261 - DNA, 20 bp, Artificial Sequence
  Description of Artificial Sequence: Synthetic oligonucleotide
  Target: LAMA2; (-) strand; PAM type: YTN; PAM sequence: CTC
ccaatttagaaagtctagta

SEQ ID NO: 228262 - DNA, 20 bp, Artificial Sequence
  Description of Artificial Sequence: Synthetic oligonucleotide
  Target: LAMA2; (-) strand; PAM type: YTN; PAM sequence: CTA
aatctcccaatttagaaagt

SEQ ID NO: 228263 - DNA, 20 bp, Artificial Sequence
  Description of Artificial Sequence: Synthetic oligonucleotide
  Target: LAMA2; (-) strand; PAM type: YTN; PAM sequence: TTC
taaatctcccaatttagaaa

SEQ ID NO: 228264 - DNA, 20 bp, Artificial Sequence
  Description of Artificial Sequence: Synthetic oligonucleotide
  Target: LAMA2; (-) strand; PAM type: YTN; PAM sequence: TTT
ctaaatctcccaatttagaa

SEQ ID NO: 228265 - DNA, 20 bp, Artificial Sequence
  Description of Artificial Sequence: Synthetic oligonucleotide
  Target: LAMA2; (-) strand; PAM type: YTN; PAM sequence: CTG
aatttctaaatctcccaatt

SEQ ID NO: 228266 - DNA, 20 bp, Artificial Sequence
  Description of Artificial Sequence: Synthetic oligonucleotide
  Target: LAMA2; (-) strand; PAM type: YTN; PAM sequence: TTA
ctgaatttctaaatctccca

SEQ ID NO: 228267 - DNA, 20 bp, Artificial Sequence
  Description of Artificial Sequence: Synthetic oligonucleotide
  Target: LAMA2; (-) strand; PAM type: YTN; PAM sequence: CTT
actgaatttctaaatctccc

SEQ ID NO: 228268 - DNA, 20 bp, Artificial Sequence
  Description of Artificial Sequence: Synthetic oligonucleotide
  Target: LAMA2; (-) strand; PAM type: YTN; PAM sequence: TTC
ttactgaatttctaaatctc

SEQ ID NO: 228269 - DNA, 20 bp, Artificial Sequence
  Description of Artificial Sequence: Synthetic oligonucleotide
  Target: LAMA2; (-) strand; PAM type: YTN; PAM sequence: TTT
cttactgaatttctaaatct

SEQ ID NO: 228270 - DNA, 20 bp, Artificial Sequence
  Description of Artificial Sequence: Synthetic oligonucleotide
  Target: LAMA2; (-) strand; PAM type: YTN; PAM sequence: CTT
tcttactgaatttctaaatc

SEQ ID NO: 228271 - DNA, 20 bp, Artificial Sequence
  Description of Artificial Sequence: Synthetic oligonucleotide
  Target: LAMA2; (-) strand; PAM type: YTN; PAM sequence: TTA
aatatctttcttactgaatt

SEQ ID NO: 228272 - DNA, 20 bp, Artificial Sequence
  Description of Artificial Sequence: Synthetic oligonucleotide
  Target: LAMA2; (-) strand; PAM type: YTN; PAM sequence: TTT
aaatatctttcttactgaat

SEQ ID NO: 228273 - DNA, 20 bp, Artificial Sequence
  Description of Artificial Sequence: Synthetic oligonucleotide
  Target: LAMA2; (-) strand; PAM type: YTN; PAM sequence: TTT
taaatatctttcttactgaa

SEQ ID NO: 228274 - DNA, 20 bp, Artificial Sequence
  Description of Artificial Sequence: Synthetic oligonucleotide
  Target: LAMA2; (-) strand; PAM type: YTN; PAM sequence: TTT
ttaaatatctttcttactga

SEQ ID NO: 228275 - DNA, 20 bp, Artificial Sequence
  Description of Artificial Sequence: Synthetic oligonucleotide
  Target: LAMA2; (-) strand; PAM type: YTN; PAM sequence: TTT
tttaaatatctttcttactg

SEQ ID NO: 228276 - DNA, 20 bp, Artificial Sequence
  Description of Artificial Sequence: Synthetic oligonucleotide
  Target: LAMA2; (-) strand; PAM type: YTN; PAM sequence: TTT
ttttaaatatctttcttact

SEQ ID NO: 228277 - DNA, 20 bp, Artificial Sequence
  Description of Artificial Sequence: Synthetic oligonucleotide
  Target: LAMA2; (-) strand; PAM type: YTN; PAM sequence: CTC
aaaaaatttttttaaatatc

SEQ ID NO: 228278 - DNA, 20 bp, Artificial Sequence
  Description of Artificial Sequence: Synthetic oligonucleotide
  Target: LAMA2; (-) strand; PAM type: YTN; PAM sequence: CTG
aggacctcaaaaaatttttt

SEQ ID NO: 228279 - DNA, 20 bp, Artificial Sequence
  Description of Artificial Sequence: Synthetic oligonucleotide
  Target: LAMA2; (-) strand; PAM type: YTN; PAM sequence: TTG
cagaagacactgaggacctc

SEQ ID NO: 228280 - DNA, 20 bp, Artificial Sequence
  Description of Artificial Sequence: Synthetic oligonucleotide
  Target: LAMA2; (-) strand; PAM type: YTN; PAM sequence: CTT
gcagaagacactgaggacct

SEQ ID NO: 228281 - DNA, 20 bp, Artificial Sequence
  Description of Artificial Sequence: Synthetic oligonucleotide
  Target: LAMA2; (-) strand; PAM type: YTN; PAM sequence: TTG
aaagtgtacttgcagaagac

SEQ ID NO: 228282 - DNA, 20 bp, Artificial Sequence
  Description of Artificial Sequence: Synthetic oligonucleotide
  Target: LAMA2; (-) strand; PAM type: YTN; PAM sequence: CTG
taataaaaattgaaagtgta

SEQ ID NO: 228283 - DNA, 20 bp, Artificial Sequence
  Description of Artificial Sequence: Synthetic oligonucleotide
  Target: LAMA2; (-) strand; PAM type: YTN; PAM sequence: CTG
tctgtaataaaaattgaaag

SEQ ID NO: 228284 - DNA, 20 bp, Artificial Sequence
  Description of Artificial Sequence: Synthetic oligonucleotide
  Target: LAMA2; (-) strand; PAM type: YTN; PAM sequence: TTA
aataaaaatgcaatggtaaa

SEQ ID NO: 228285 - DNA, 20 bp, Artificial Sequence
  Description of Artificial Sequence: Synthetic oligonucleotide
  Target: LAMA2; (-) strand; PAM type: YTN; PAM sequence: TTC
aagttaaataaaaatgcaat

SEQ ID NO: 228286 - DNA, 20 bp, Artificial Sequence
  Description of Artificial Sequence: Synthetic oligonucleotide
  Target: LAMA2; (-) strand; PAM type: YTN; PAM sequence: TTA
aaatattcaagttaaataaa

SEQ ID NO: 228287 - DNA, 20 bp, Artificial Sequence
  Description of Artificial Sequence: Synthetic oligonucleotide
  Target: LAMA2; (-) strand; PAM type: YTN; PAM sequence: CTA
aattaaaatattcaagttaa

SEQ ID NO: 228288 - DNA, 20 bp, Artificial Sequence
  Description of Artificial Sequence: Synthetic oligonucleotide
  Target: LAMA2; (-) strand; PAM type: YTN; PAM sequence: CTC
atgctaaattaaaatattca

SEQ ID NO: 228289 - DNA, 20 bp, Artificial Sequence
  Description of Artificial Sequence: Synthetic oligonucleotide
  Target: LAMA2; (-) strand; PAM type: YTN; PAM sequence: CTA
atccatgggaatgactcatg

SEQ ID NO: 228290 - DNA, 20 bp, Artificial Sequence
  Description of Artificial Sequence: Synthetic oligonucleotide
  Target: LAMA2; (-) strand; PAM type: YTN; PAM sequence: TTG
ctaatccatgggaatgactc

SEQ ID NO: 228291 - DNA, 20 bp, Artificial Sequence
  Description of Artificial Sequence: Synthetic oligonucleotide
  Target: LAMA2; (-) strand; PAM type: YTN; PAM sequence: CTA
gcatacaaagttgctaatcc

SEQ ID NO: 228292 - DNA, 20 bp, Artificial Sequence
  Description of Artificial Sequence: Synthetic oligonucleotide
  Target: LAMA2; (-) strand; PAM type: YTN; PAM sequence: CTA
gatatgctagcatacaaagt

SEQ ID NO: 228293 - DNA, 20 bp, Artificial Sequence
  Description of Artificial Sequence: Synthetic oligonucleotide
  Target: LAMA2; (-) strand; PAM type: YTN; PAM sequence: TTG
aaaacacacagaagatacaa

SEQ ID NO: 228294 - DNA, 20 bp, Artificial Sequence
  Description of Artificial Sequence: Synthetic oligonucleotide
  Target: LAMA2; (-) strand; PAM type: YTN; PAM sequence: TTG
gagtagcagacacaccattg

SEQ ID NO: 228295 - DNA, 20 bp, Artificial Sequence
  Description of Artificial Sequence: Synthetic oligonucleotide
  Target: LAMA2; (-) strand; PAM type: YTN; PAM sequence: TTT
ggagtagcagacacaccatt

SEQ ID NO: 228296 - DNA, 20 bp, Artificial Sequence
  Description of Artificial Sequence: Synthetic oligonucleotide
  Target: LAMA2; (-) strand; PAM type: YTN; PAM sequence: CTT
tggagtagcagacacaccat

SEQ ID NO: 228297 - DNA, 20 bp, Artificial Sequence
  Description of Artificial Sequence: Synthetic oligonucleotide
  Target: LAMA2; (-) strand; PAM type: YTN; PAM sequence: TTC
aggaagatctttggagtagc

SEQ ID NO: 228298 - DNA, 20 bp, Artificial Sequence
  Description of Artificial Sequence: Synthetic oligonucleotide
  Target: LAMA2; (-) strand; PAM type: YTN; PAM sequence: CTA
atatgtaaaattcaggaaga

SEQ ID NO: 228299 - DNA, 20 bp, Artificial Sequence
  Description of Artificial Sequence: Synthetic oligonucleotide
  Target: LAMA2; (-) strand; PAM type: YTN; PAM sequence: TTC
taatatgtaaaattcaggaa

SEQ ID NO: 228300 - DNA, 20 bp, Artificial Sequence
  Description of Artificial Sequence: Synthetic oligonucleotide
  Target: LAMA2; (-) strand; PAM type: YTN; PAM sequence: CTT
ctaatatgtaaaattcagga

SEQ ID NO: 228301 - DNA, 20 bp, Artificial Sequence
  Description of Artificial Sequence: Synthetic oligonucleotide
  Target: LAMA2; (-) strand; PAM type: YTN; PAM sequence: CTA
tgccacttctaatatgtaaa

SEQ ID NO: 228302 - DNA, 20 bp, Artificial Sequence
  Description of Artificial Sequence: Synthetic oligonucleotide
  Target: LAMA2; (-) strand; PAM type: YTN; PAM sequence: TTG
atataaagtgtcatgaggct

SEQ ID NO: 228303 - DNA, 20 bp, Artificial Sequence
  Description of Artificial Sequence: Synthetic oligonucleotide
  Target: LAMA2; (-) strand; PAM type: YTN; PAM sequence: CTT
gatataaagtgtcatgaggc

SEQ ID NO: 228304 - DNA, 20 bp, Artificial Sequence
  Description of Artificial Sequence: Synthetic oligonucleotide
  Target: LAMA2; (-) strand; PAM type: YTN; PAM sequence: CTG
cttgatataaagtgtcatga

SEQ ID NO: 228305 - DNA, 20 bp, Artificial Sequence
  Description of Artificial Sequence: Synthetic oligonucleotide
  Target: LAMA2; (-) strand; PAM type: YTN; PAM sequence: TTC
ctgcttgatataaagtgtca

SEQ ID NO: 228306 - DNA, 20 bp, Artificial Sequence
  Description of Artificial Sequence: Synthetic oligonucleotide
  Target: LAMA2; (-) strand; PAM type: YTN; PAM sequence: CTT
cctgcttgatataaagtgtc

SEQ ID NO: 228307 - DNA, 20 bp, Artificial Sequence
  Description of Artificial Sequence: Synthetic oligonucleotide
  Target: LAMA2; (-) strand; PAM type: YTN; PAM sequence: TTC
cagaacttcctgcttgatat

SEQ ID NO: 228308 - DNA, 20 bp, Artificial Sequence
  Description of Artificial Sequence: Synthetic oligonucleotide
  Target: LAMA2; (-) strand; PAM type: YTN; PAM sequence: CTT
ccagaacttcctgcttgata

SEQ ID NO: 228309 - DNA, 20 bp, Artificial Sequence
  Description of Artificial Sequence: Synthetic oligonucleotide
  Target: LAMA2; (-) strand; PAM type: YTN; PAM sequence: TTA
gcatcatcttccagaacttc

SEQ ID NO: 228310 - DNA, 20 bp, Artificial Sequence
  Description of Artificial Sequence: Synthetic oligonucleotide
  Target: LAMA2; (-) strand; PAM type: YTN; PAM sequence: TTG
ttagcatcatcttccagaac

SEQ ID NO: 228311 - DNA, 20 bp, Artificial Sequence
  Description of Artificial Sequence: Synthetic oligonucleotide
  Target: LAMA2; (-) strand; PAM type: YTN; PAM sequence: TTT
gttagcatcatcttccagaa

SEQ ID NO: 228312 - DNA, 20 bp, Artificial Sequence
  Description of Artificial Sequence: Synthetic oligonucleotide
  Target: LAMA2; (-) strand; PAM type: YTN; PAM sequence: TTG
aggtatttgttagcatcatc

SEQ ID NO: 228313 - DNA, 20 bp, Artificial Sequence
  Description of Artificial Sequence: Synthetic oligonucleotide
  Target: LAMA2; (-) strand; PAM type: YTN; PAM sequence: TTT
gaggtatttgttagcatcat

SEQ ID NO: 228314 - DNA, 20 bp, Artificial Sequence
  Description of Artificial Sequence: Synthetic oligonucleotide
  Target: LAMA2; (-) strand; PAM type: YTN; PAM sequence: TTC
cagatttgaggtatttgtta

SEQ ID NO: 228315 - DNA, 20 bp, Artificial Sequence
  Description of Artificial Sequence: Synthetic oligonucleotide
  Target: LAMA2; (-) strand; PAM type: YTN; PAM sequence: TTT
ccagatttgaggtatttgtt

SEQ ID NO: 228316 - DNA, 20 bp, Artificial Sequence
  Description of Artificial Sequence: Synthetic oligonucleotide
  Target: LAMA2; (-) strand; PAM type: YTN; PAM sequence: CTA
caatttccagatttgaggta

SEQ ID NO: 228317 - DNA, 20 bp, Artificial Sequence
  Description of Artificial Sequence: Synthetic oligonucleotide
  Target: LAMA2; (-) strand; PAM type: YTN; PAM sequence: CTA
aagcctacaatttccagatt

SEQ ID NO: 228318 - DNA, 20 bp, Artificial Sequence
  Description of Artificial Sequence: Synthetic oligonucleotide
  Target: LAMA2; (-) strand; PAM type: YTN; PAM sequence: TTC
taaagcctacaatttccaga

SEQ ID NO: 228319 - DNA, 20 bp, Artificial Sequence
  Description of Artificial Sequence: Synthetic oligonucleotide
  Target: LAMA2; (-) strand; PAM type: YTN; PAM sequence: TTT
ctaaagcctacaatttccag

SEQ ID NO: 228320 - DNA, 20 bp, Artificial Sequence
  Description of Artificial Sequence: Synthetic oligonucleotide
  Target: LAMA2; (-) strand; PAM type: YTN; PAM sequence: TTT
tctaaagcctacaatttcca

SEQ ID NO: 228321 - DNA, 20 bp, Artificial Sequence
  Description of Artificial Sequence: Synthetic oligonucleotide
  Target: LAMA2; (-) strand; PAM type: YTN; PAM sequence: TTT
ttctaaagcctacaatttcc

SEQ ID NO: 228322 - DNA, 20 bp, Artificial Sequence
  Description of Artificial Sequence: Synthetic oligonucleotide
  Target: LAMA2; (-) strand; PAM type: YTN; PAM sequence: TTA
tttttctaaagcctacaatt

SEQ ID NO: 228323 - DNA, 20 bp, Artificial Sequence
  Description of Artificial Sequence: Synthetic oligonucleotide
  Target: LAMA2; (-) strand; PAM type: YTN; PAM sequence: TTT
atttttctaaagcctacaat

SEQ ID NO: 228324 - DNA, 20 bp, Artificial Sequence
  Description of Artificial Sequence: Synthetic oligonucleotide
  Target: LAMA2; (-) strand; PAM type: YTN; PAM sequence: CTT
tatttttctaaagcctacaa

SEQ ID NO: 228325 - DNA, 20 bp, Artificial Sequence
  Description of Artificial Sequence: Synthetic oligonucleotide
  Target: LAMA2; (-) strand; PAM type: YTN; PAM sequence: CTA
acaagatgactttatttttc

SEQ ID NO: 228326 - DNA, 20 bp, Artificial Sequence
  Description of Artificial Sequence: Synthetic oligonucleotide
  Target: LAMA2; (-) strand; PAM type: YTN; PAM sequence: TTC
actaacaagatgactttatt

SEQ ID NO: 228327 - DNA, 20 bp, Artificial Sequence
  Description of Artificial Sequence: Synthetic oligonucleotide
  Target: LAMA2; (-) strand; PAM type: YTN; PAM sequence: CTA
atatagagattcactaacaa

SEQ ID NO: 228328 - DNA, 20 bp, Artificial Sequence
  Description of Artificial Sequence: Synthetic oligonucleotide
  Target: LAMA2; (-) strand; PAM type: YTN; PAM sequence: TTA
gaaagtctaatatagagatt

SEQ ID NO: 228329 - DNA, 20 bp, Artificial Sequence
  Description of Artificial Sequence: Synthetic oligonucleotide
  Target: LAMA2; (-) strand; PAM type: YTN; PAM sequence: TTA
taaggtattagaaagtctaa

SEQ ID NO: 228330 - DNA, 20 bp, Artificial Sequence
  Description of Artificial Sequence: Synthetic oligonucleotide
  Target: LAMA2; (-) strand; PAM type: YTN; PAM sequence: TTT
ataaggtattagaaagtcta

SEQ ID NO: 228331 - DNA, 20 bp, Artificial Sequence
  Description of Artificial Sequence: Synthetic oligonucleotide
  Target: LAMA2; (-) strand; PAM type: YTN; PAM sequence: CTG
tttataaggtattagaaagt

SEQ ID NO: 228332 - DNA, 20 bp, Artificial Sequence
  Description of Artificial Sequence: Synthetic oligonucleotide
  Target: LAMA2; (-) strand; PAM type: YTN; PAM sequence: CTG
aaaacctgtttataaggtat

SEQ ID NO: 228333 - DNA, 20 bp, Artificial Sequence
  Description of Artificial Sequence: Synthetic oligonucleotide
  Target: LAMA2; (-) strand; PAM type: YTN; PAM sequence: TTC
tgaaaacctgtttataaggt

SEQ ID NO: 228334 - DNA, 20 bp, Artificial Sequence
  Description of Artificial Sequence: Synthetic oligonucleotide
  Target: LAMA2; (-) strand; PAM type: YTN; PAM sequence: TTT
ctgaaaacctgtttataagg

SEQ ID NO: 228335 - DNA, 20 bp, Artificial Sequence
  Description of Artificial Sequence: Synthetic oligonucleotide
  Target: LAMA2; (-) strand; PAM type: YTN; PAM sequence: TTA
atttctgaaaacctgtttat

SEQ ID NO: 228336 - DNA, 20 bp, Artificial Sequence
  Description of Artificial Sequence: Synthetic oligonucleotide
  Target: LAMA2; (-) strand; PAM type: YTN; PAM sequence: CTA
taaatataattaatttctga

SEQ ID NO: 228337 - DNA, 20 bp, Artificial Sequence
  Description of Artificial Sequence: Synthetic oligonucleotide
  Target: LAMA2; (-) strand; PAM type: YTN; PAM sequence: CTC
gaggctataaatataattaa

SEQ ID NO: 228338 - DNA, 20 bp, Artificial Sequence
  Description of Artificial Sequence: Synthetic oligonucleotide
  Target: LAMA2; (-) strand; PAM type: YTN; PAM sequence: TTC
tcgaggctataaatataatt

SEQ ID NO: 228339 - DNA, 20 bp, Artificial Sequence
  Description of Artificial Sequence: Synthetic oligonucleotide
  Target: LAMA2; (-) strand; PAM type: YTN; PAM sequence: TTT
ctcgaggctataaatataat

SEQ ID NO: 228340 - DNA, 20 bp, Artificial Sequence
  Description of Artificial Sequence: Synthetic oligonucleotide
  Target: LAMA2; (-) strand; PAM type: YTN; PAM sequence: CTA
gtttctcgaggctataaata

SEQ ID NO: 228341 - DNA, 20 bp, Artificial Sequence
  Description of Artificial Sequence: Synthetic oligonucleotide
  Target: LAMA2; (-) strand; PAM type: YTN; PAM sequence: TTC
cctagtttctcgaggctata

SEQ ID NO: 228342 - DNA, 20 bp, Artificial Sequence
  Description of Artificial Sequence: Synthetic oligonucleotide
  Target: LAMA2; (-) strand; PAM type: YTN; PAM sequence: TTT
ccctagtttctcgaggctat

SEQ ID NO: 228343 - DNA, 20 bp, Artificial Sequence
  Description of Artificial Sequence: Synthetic oligonucleotide
  Target: LAMA2; (-) strand; PAM type: YTN; PAM sequence: TTT
tccctagtttctcgaggcta

SEQ ID NO: 228344 - DNA, 20 bp, Artificial Sequence
  Description of Artificial Sequence: Synthetic oligonucleotide
  Target: LAMA2; (-) strand; PAM type: YTN; PAM sequence: TTT
ttccctagtttctcgaggct

SEQ ID NO: 228345 - DNA, 20 bp, Artificial Sequence
  Description of Artificial Sequence: Synthetic oligonucleotide
  Target: LAMA2; (-) strand; PAM type: YTN; PAM sequence: CTT
tttccctagtttctcgaggc

SEQ ID NO: 228346 - DNA, 20 bp, Artificial Sequence
  Description of Artificial Sequence: Synthetic oligonucleotide
  Target: LAMA2; (-) strand; PAM type: YTN; PAM sequence: TTG
agatccagctttttccctag

SEQ ID NO: 228347 - DNA, 20 bp, Artificial Sequence
  Description of Artificial Sequence: Synthetic oligonucleotide
  Target: LAMA2; (-) strand; PAM type: YTN; PAM sequence: TTT
gagatccagctttttcccta

SEQ ID NO: 228348 - DNA, 20 bp, Artificial Sequence
  Description of Artificial Sequence: Synthetic oligonucleotide
  Target: LAMA2; (-) strand; PAM type: YTN; PAM sequence: CTT
tgagatccagctttttccct

SEQ ID NO: 228349 - DNA, 20 bp, Artificial Sequence
  Description of Artificial Sequence: Synthetic oligonucleotide
  Target: LAMA2; (-) strand; PAM type: YTN; PAM sequence: TTG
taataatgtctttgagatcc

SEQ ID NO: 228350 - DNA, 20 bp, Artificial Sequence
  Description of Artificial Sequence: Synthetic oligonucleotide
  Target: LAMA2; (-) strand; PAM type: YTN; PAM sequence: TTT
gtaataatgtctttgagatc

SEQ ID NO: 228351 - DNA, 20 bp, Artificial Sequence
  Description of Artificial Sequence: Synthetic oligonucleotide
  Target: LAMA2; (-) strand; PAM type: YTN; PAM sequence: CTT
tgtaataatgtctttgagat

SEQ ID NO: 228352 - DNA, 20 bp, Artificial Sequence
  Description of Artificial Sequence: Synthetic oligonucleotide
  Target: LAMA2; (-) strand; PAM type: YTN; PAM sequence: CTG
ctttgtaataatgtctttga

SEQ ID NO: 228353 - DNA, 20 bp, Artificial Sequence
  Description of Artificial Sequence: Synthetic oligonucleotide
  Target: LAMA2; (-) strand; PAM type: YTN; PAM sequence: CTA
ctgctttgtaataatgtctt

SEQ ID NO: 228354 - DNA, 20 bp, Artificial Sequence
  Description of Artificial Sequence: Synthetic oligonucleotide
  Target: LAMA2; (-) strand; PAM type: YTN; PAM sequence: TTA
ctactgctttgtaataatgt

SEQ ID NO: 228355 - DNA, 20 bp, Artificial Sequence
  Description of Artificial Sequence: Synthetic oligonucleotide
  Target: LAMA2; (-) strand; PAM type: YTN; PAM sequence: TTT
actactgctttgtaataatg

SEQ ID NO: 228356 - DNA, 20 bp, Artificial Sequence
  Description of Artificial Sequence: Synthetic oligonucleotide
  Target: LAMA2; (-) strand; PAM type: YTN; PAM sequence: TTA
taatttactactgctttgta

SEQ ID NO: 228357 - DNA, 20 bp, Artificial Sequence
  Description of Artificial Sequence: Synthetic oligonucleotide
  Target: LAMA2; (-) strand; PAM type: YTN; PAM sequence: TTT
ataatttactactgctttgt

SEQ ID NO: 228358 - DNA, 20 bp, Artificial Sequence
  Description of Artificial Sequence: Synthetic oligonucleotide
  Target: LAMA2; (-) strand; PAM type: YTN; PAM sequence: TTG
tttataatttactactgctt

SEQ ID NO: 228359 - DNA, 20 bp, Artificial Sequence
  Description of Artificial Sequence: Synthetic oligonucleotide
  Target: LAMA2; (-) strand; PAM type: YTN; PAM sequence: TTC
aaaatatattgtttataatt

SEQ ID NO: 228360 - DNA, 20 bp, Artificial Sequence
  Description of Artificial Sequence: Synthetic oligonucleotide
  Target: LAMA2; (-) strand; PAM type: YTN; PAM sequence: TTA
tgaattcaaaatatattgtt

SEQ ID NO: 228361 - DNA, 20 bp, Artificial Sequence
  Description of Artificial Sequence: Synthetic oligonucleotide
  Target: LAMA2; (-) strand; PAM type: YTN; PAM sequence: TTA
attatgaattcaaaatatat

SEQ ID NO: 228362 - DNA, 20 bp, Artificial Sequence
  Description of Artificial Sequence: Synthetic oligonucleotide
  Target: LAMA2; (-) strand; PAM type: YTN; PAM sequence: TTT
aattatgaattcaaaatata

SEQ ID NO: 228363 - DNA, 20 bp, Artificial Sequence
  Description of Artificial Sequence: Synthetic oligonucleotide
  Target: LAMA2; (-) strand; PAM type: YTN; PAM sequence: TTT
taattatgaattcaaaatat

SEQ ID NO: 228364 - DNA, 20 bp, Artificial Sequence
  Description of Artificial Sequence: Synthetic oligonucleotide
  Target: LAMA2; (-) strand; PAM type: YTN; PAM sequence: TTA
attttaattatgaattcaaa

SEQ ID NO: 228365 - DNA, 20 bp, Artificial Sequence
  Description of Artificial Sequence: Synthetic oligonucleotide
  Target: LAMA2; (-) strand; PAM type: YTN; PAM sequence: CTC
gttaattttaattatgaatt

SEQ ID NO: 228366 - DNA, 20 bp, Artificial Sequence
  Description of Artificial Sequence: Synthetic oligonucleotide
  Target: LAMA2; (-) strand; PAM type: YTN; PAM sequence: TTG
actcgttaattttaattatg

SEQ ID NO: 228367 - DNA, 20 bp, Artificial Sequence
  Description of Artificial Sequence: Synthetic oligonucleotide
  Target: LAMA2; (-) strand; PAM type: YTN; PAM sequence: CTC
agaaaattgactcgttaatt

SEQ ID NO: 228368 - DNA, 20 bp, Artificial Sequence
  Description of Artificial Sequence: Synthetic oligonucleotide
  Target: LAMA2; (-) strand; PAM type: YTN; PAM sequence: TTA
ataggtcaatgcctcagaaa

SEQ ID NO: 228369 - DNA, 20 bp, Artificial Sequence
  Description of Artificial Sequence: Synthetic oligonucleotide
  Target: LAMA2; (-) strand; PAM type: YTN; PAM sequence: TTT
aataggtcaatgcctcagaa

SEQ ID NO: 228370 - DNA, 20 bp, Artificial Sequence
  Description of Artificial Sequence: Synthetic oligonucleotide
  Target: LAMA2; (-) strand; PAM type: YTN; PAM sequence: CTT
taataggtcaatgcctcaga

SEQ ID NO: 228371 - DNA, 20 bp, Artificial Sequence
  Description of Artificial Sequence: Synthetic oligonucleotide
  Target: LAMA2; (-) strand; PAM type: YTN; PAM sequence: CTC
ataaatctttaataggtcaa

SEQ ID NO: 228372 - DNA, 20 bp, Artificial Sequence
  Description of Artificial Sequence: Synthetic oligonucleotide
  Target: LAMA2; (-) strand; PAM type: YTN; PAM sequence: TTA
ggtaactcataaatctttaa

SEQ ID NO: 228373 - DNA, 20 bp, Artificial Sequence
  Description of Artificial Sequence: Synthetic oligonucleotide
  Target: LAMA2; (-) strand; PAM type: YTN; PAM sequence: TTT
aggtaactcataaatcttta

SEQ ID NO: 228374 - DNA, 20 bp, Artificial Sequence
  Description of Artificial Sequence: Synthetic oligonucleotide
  Target: LAMA2; (-) strand; PAM type: YTN; PAM sequence: TTT
taggtaactcataaatcttt

SEQ ID NO: 228375 - DNA, 20 bp, Artificial Sequence
  Description of Artificial Sequence: Synthetic oligonucleotide
  Target: LAMA2; (-) strand; PAM type: YTN; PAM sequence: TTG
ggattttaggtaactcataa

SEQ ID NO: 228376 - DNA, 20 bp, Artificial Sequence
  Description of Artificial Sequence: Synthetic oligonucleotide
  Target: LAMA2; (-) strand; PAM type: YTN; PAM sequence: TTT
gggattttaggtaactcata

SEQ ID NO: 228377 - DNA, 20 bp, Artificial Sequence
  Description of Artificial Sequence: Synthetic oligonucleotide
  Target: LAMA2; (-) strand; PAM type: YTN; PAM sequence: CTC
agggaagatttgggatttta

SEQ ID NO: 228378 - DNA, 20 bp, Artificial Sequence
  Description of Artificial Sequence: Synthetic oligonucleotide
  Target: LAMA2; (-) strand; PAM type: YTN; PAM sequence: TTA
cctcagggaagatttgggat

SEQ ID NO: 228379 - DNA, 20 bp, Artificial Sequence
  Description of Artificial Sequence: Synthetic oligonucleotide
  Target: LAMA2; (-) strand; PAM type: YTN; PAM sequence: CTA
ttacctcagggaagatttgg

SEQ ID NO: 228380 - DNA, 20 bp, Artificial Sequence
  Description of Artificial Sequence: Synthetic oligonucleotide
  Target: LAMA2; (-) strand; PAM type: YTN; PAM sequence: CTG
aagctattacctcagggaag

SEQ ID NO: 228381 - DNA, 20 bp, Artificial Sequence
  Description of Artificial Sequence: Synthetic oligonucleotide
  Target: LAMA2; (-) strand; PAM type: YTN; PAM sequence: CTC
aactgaagctattacctcag

SEQ ID NO: 228382 - DNA, 20 bp, Artificial Sequence
  Description of Artificial Sequence: Synthetic oligonucleotide
  Target: LAMA2; (-) strand; PAM type: YTN; PAM sequence: TTA
tctcaactgaagctattacc

SEQ ID NO: 228383 - DNA, 20 bp, Artificial Sequence
  Description of Artificial Sequence: Synthetic oligonucleotide
  Target: LAMA2; (-) strand; PAM type: YTN; PAM sequence: TTT
atctcaactgaagctattac

SEQ ID NO: 228384 - DNA, 20 bp, Artificial Sequence
  Description of Artificial Sequence: Synthetic oligonucleotide
  Target: LAMA2; (-) strand; PAM type: YTN; PAM sequence: CTT
tatctcaactgaagctatta

SEQ ID NO: 228385 - DNA, 20 bp, Artificial Sequence
  Description of Artificial Sequence: Synthetic oligonucleotide
  Target: LAMA2; (-) strand; PAM type: YTN; PAM sequence: TTC
cctttatctcaactgaagct

SEQ ID NO: 228386 - DNA, 20 bp, Artificial Sequence
  Description of Artificial Sequence: Synthetic oligonucleotide
  Target: LAMA2; (-) strand; PAM type: YTN; PAM sequence: CTT
ccctttatctcaactgaagc

SEQ ID NO: 228387 - DNA, 20 bp, Artificial Sequence
  Description of Artificial Sequence: Synthetic oligonucleotide
  Target: LAMA2; (-) strand; PAM type: YTN; PAM sequence: CTG
cagtgaagcgacaaataaga

SEQ ID NO: 228388 - DNA, 20 bp, Artificial Sequence
  Description of Artificial Sequence: Synthetic oligonucleotide
  Target: LAMA2; (-) strand; PAM type: YTN; PAM sequence: TTC
ctgcagtgaagcgacaaata

SEQ ID NO: 228389 - DNA, 20 bp, Artificial Sequence
  Description of Artificial Sequence: Synthetic oligonucleotide
  Target: LAMA2; (-) strand; PAM type: YTN; PAM sequence: TTT
cctgcagtgaagcgacaaat

SEQ ID NO: 228390 - DNA, 20 bp, Artificial Sequence
  Description of Artificial Sequence: Synthetic oligonucleotide
  Target: LAMA2; (-) strand; PAM type: YTN; PAM sequence: TTT
tcctgcagtgaagcgacaaa

SEQ ID NO: 228391 - DNA, 20 bp, Artificial Sequence
  Description of Artificial Sequence: Synthetic oligonucleotide
  Target: LAMA2; (-) strand; PAM type: YTN; PAM sequence: TTT
ttcctgcagtgaagcgacaa

SEQ ID NO: 228392 - DNA, 20 bp, Artificial Sequence
  Description of Artificial Sequence: Synthetic oligonucleotide
  Target: LAMA2; (-) strand; PAM type: YTN; PAM sequence: TTT
tttcctgcagtgaagcgaca

SEQ ID NO: 228393 - DNA, 20 bp, Artificial Sequence
  Description of Artificial Sequence: Synthetic oligonucleotide
  Target: LAMA2; (-) strand; PAM type: YTN; PAM sequence: TTA
ttttttcctgcagtgaagcg

SEQ ID NO: 228394 - DNA, 20 bp, Artificial Sequence
  Description of Artificial Sequence: Synthetic oligonucleotide
  Target: LAMA2; (-) strand; PAM type: YTN; PAM sequence: TTT
attttttcctgcagtgaagc

SEQ ID NO: 228395 - DNA, 20 bp, Artificial Sequence
  Description of Artificial Sequence: Synthetic oligonucleotide
  Target: LAMA2; (-) strand; PAM type: YTN; PAM sequence: TTT
tattttttcctgcagtgaag

SEQ ID NO: 228396 - DNA, 20 bp, Artificial Sequence
  Description of Artificial Sequence: Synthetic oligonucleotide
  Target: LAMA2; (-) strand; PAM type: YTN; PAM sequence: TTG
caataggcatcatgataatg

SEQ ID NO: 228397 - DNA, 20 bp, Artificial Sequence
  Description of Artificial Sequence: Synthetic oligonucleotide
  Target: LAMA2; (-) strand; PAM type: YTN; PAM sequence: TTT
gcaataggcatcatgataat

SEQ ID NO: 228398 - DNA, 20 bp, Artificial Sequence
  Description of Artificial Sequence: Synthetic oligonucleotide
  Target: LAMA2; (-) strand; PAM type: YTN; PAM sequence: TTT
tgcaataggcatcatgataa

SEQ ID NO: 228399 - DNA, 20 bp, Artificial Sequence
  Description of Artificial Sequence: Synthetic oligonucleotide
  Target: LAMA2; (-) strand; PAM type: YTN; PAM sequence: CTG
taattttgcaataggcatca

SEQ ID NO: 228400 - DNA, 20 bp, Artificial Sequence
  Description of Artificial Sequence: Synthetic oligonucleotide
  Target: LAMA2; (-) strand; PAM type: YTN; PAM sequence: TTA
agagtgagctgtaattttgc

SEQ ID NO: 228401 - DNA, 20 bp, Artificial Sequence
  Description of Artificial Sequence: Synthetic oligonucleotide
  Target: LAMA2; (-) strand; PAM type: YTN; PAM sequence: TTT
aagagtgagctgtaattttg

SEQ ID NO: 228402 - DNA, 20 bp, Artificial Sequence
  Description of Artificial Sequence: Synthetic oligonucleotide
  Target: LAMA2; (-) strand; PAM type: YTN; PAM sequence: TTT
taagagtgagctgtaatttt

SEQ ID NO: 228403 - DNA, 20 bp, Artificial Sequence
  Description of Artificial Sequence: Synthetic oligonucleotide
  Target: LAMA2; (-) strand; PAM type: YTN; PAM sequence: TTC
acataattttaagagtgagc

SEQ ID NO: 228404 - DNA, 20 bp, Artificial Sequence
  Description of Artificial Sequence: Synthetic oligonucleotide
  Target: LAMA2; (-) strand; PAM type: YTN; PAM sequence: TTT
cacataattttaagagtgag

SEQ ID NO: 228405 - DNA, 20 bp, Artificial Sequence
  Description of Artificial Sequence: Synthetic oligonucleotide
  Target: LAMA2; (-) strand; PAM type: YTN; PAM sequence: TTT
tcacataattttaagagtga

SEQ ID NO: 228406 - DNA, 20 bp, Artificial Sequence
  Description of Artificial Sequence: Synthetic oligonucleotide
  Target: LAMA2; (-) strand; PAM type: YTN; PAM sequence: TTT
ttcacataattttaagagtg

SEQ ID NO: 228407 - DNA, 20 bp, Artificial Sequence
  Description of Artificial Sequence: Synthetic oligonucleotide
  Target: LAMA2; (-) strand; PAM type: YTN; PAM sequence: TTT
tttcacataattttaagagt

SEQ ID NO: 228408 - DNA, 20 bp, Artificial Sequence
  Description of Artificial Sequence: Synthetic oligonucleotide
  Target: LAMA2; (-) strand; PAM type: YTN; PAM sequence: CTT
ttttcacataattttaagag

SEQ ID NO: 228409 - DNA, 20 bp, Artificial Sequence
  Description of Artificial Sequence: Synthetic oligonucleotide
  Target: LAMA2; (-) strand; PAM type: YTN; PAM sequence: TTA
atgatcttttttcacataat

SEQ ID NO: 228410 - DNA, 20 bp, Artificial Sequence
  Description of Artificial Sequence: Synthetic oligonucleotide
  Target: LAMA2; (-) strand; PAM type: YTN; PAM sequence: TTT
aatgatcttttttcacataa

SEQ ID NO: 228411 - DNA, 20 bp, Artificial Sequence
  Description of Artificial Sequence: Synthetic oligonucleotide
  Target: LAMA2; (-) strand; PAM type: YTN; PAM sequence: CTA
aaacatttaatgatcttttt

SEQ ID NO: 228412 - DNA, 20 bp, Artificial Sequence
  Description of Artificial Sequence: Synthetic oligonucleotide
  Target: LAMA2; (-) strand; PAM type: YTN; PAM sequence: TTA
agaaatgtctaaaacattta

SEQ ID NO: 228413 - DNA, 20 bp, Artificial Sequence
  Description of Artificial Sequence: Synthetic oligonucleotide
  Target: LAMA2; (-) strand; PAM type: YTN; PAM sequence: TTT
aagaaatgtctaaaacattt

SEQ ID NO: 228414 - DNA, 20 bp, Artificial Sequence
  Description of Artificial Sequence: Synthetic oligonucleotide
  Target: LAMA2; (-) strand; PAM type: YTN; PAM sequence: TTT
taagaaatgtctaaaacatt

SEQ ID NO: 228415 - DNA, 20 bp, Artificial Sequence
  Description of Artificial Sequence: Synthetic oligonucleotide
  Target: LAMA2; (-) strand; PAM type: YTN; PAM sequence: TTA
taagttttaagaaatgtcta

SEQ ID NO: 228416 - DNA, 20 bp, Artificial Sequence
  Description of Artificial Sequence: Synthetic oligonucleotide
  Target: LAMA2; (-) strand; PAM type: YTN; PAM sequence: CTT
ataagttttaagaaatgtct

SEQ ID NO: 228417 - DNA, 20 bp, Artificial Sequence
  Description of Artificial Sequence: Synthetic oligonucleotide
  Target: LAMA2; (-) strand; PAM type: YTN; PAM sequence: TTG
cttataagttttaagaaatg

SEQ ID NO: 228418 - DNA, 20 bp, Artificial Sequence
  Description of Artificial Sequence: Synthetic oligonucleotide
  Target: LAMA2; (-) strand; PAM type: YTN; PAM sequence: TTT
gcttataagttttaagaaat

SEQ ID NO: 228419 - DNA, 20 bp, Artificial Sequence
  Description of Artificial Sequence: Synthetic oligonucleotide
  Target: LAMA2; (-) strand; PAM type: YTN; PAM sequence: TTT
tgcttataagttttaagaaa

SEQ ID NO: 228420 - DNA, 20 bp, Artificial Sequence
  Description of Artificial Sequence: Synthetic oligonucleotide
  Target: LAMA2; (-) strand; PAM type: YTN; PAM sequence: TTG
aaagttttgcttataagttt

SEQ ID NO: 228421 - DNA, 20 bp, Artificial Sequence
  Description of Artificial Sequence: Synthetic oligonucleotide
  Target: LAMA2; (-) strand; PAM type: YTN; PAM sequence: CTT
gaaagttttgcttataagtt

SEQ ID NO: 228422 - DNA, 20 bp, Artificial Sequence
  Description of Artificial Sequence: Synthetic oligonucleotide
  Target: LAMA2; (-) strand; PAM type: YTN; PAM sequence: TTA
aaaaacttgaaagttttgct

SEQ ID NO: 228423 - DNA, 20 bp, Artificial Sequence
  Description of Artificial Sequence: Synthetic oligonucleotide
  Target: LAMA2; (-) strand; PAM type: YTN; PAM sequence: TTT
aaaaaacttgaaagttttgc

SEQ ID NO: 228424 - DNA, 20 bp, Artificial Sequence
  Description of Artificial Sequence: Synthetic oligonucleotide
  Target: LAMA2; (-) strand; PAM type: YTN; PAM sequence: CTA
catatacaaccagtaaatca

SEQ ID NO: 228425 - DNA, 20 bp, Artificial Sequence
  Description of Artificial Sequence: Synthetic oligonucleotide
  Target: LAMA2; (-) strand; PAM type: YTN; PAM sequence: TTA
gctacatatacaaccagtaa

SEQ ID NO: 228426 - DNA, 20 bp, Artificial Sequence
  Description of Artificial Sequence: Synthetic oligonucleotide
  Target: LAMA2; (-) strand; PAM type: YTN; PAM sequence: TTC
atagtcaattagctacatat

SEQ ID NO: 228427 - DNA, 20 bp, Artificial Sequence
  Description of Artificial Sequence: Synthetic oligonucleotide
  Target: LAMA2; (-) strand; PAM type: YTN; PAM sequence: TTT
catagtcaattagctacata

SEQ ID NO: 228428 - DNA, 20 bp, Artificial Sequence
  Description of Artificial Sequence: Synthetic oligonucleotide
  Target: LAMA2; (-) strand; PAM type: YTN; PAM sequence: TTT
tcatagtcaattagctacat

SEQ ID NO: 228429 - DNA, 20 bp, Artificial Sequence
  Description of Artificial Sequence: Synthetic oligonucleotide
  Target: LAMA2; (-) strand; PAM type: YTN; PAM sequence: TTC
aagttttcatagtcaattag

SEQ ID NO: 228430 - DNA, 20 bp, Artificial Sequence
  Description of Artificial Sequence: Synthetic oligonucleotide
  Target: LAMA2; (-) strand; PAM type: YTN; PAM sequence: CTT
caagttttcatagtcaatta

SEQ ID NO: 228431 - DNA, 20 bp, Artificial Sequence
  Description of Artificial Sequence: Synthetic oligonucleotide
  Target: LAMA2; (-) strand; PAM type: YTN; PAM sequence: TTA
agcttcaagttttcatagtc

SEQ ID NO: 228432 - DNA, 20 bp, Artificial Sequence
  Description of Artificial Sequence: Synthetic oligonucleotide
  Target: LAMA2; (-) strand; PAM type: YTN; PAM sequence: CTA
caaagagttaagcttcaagt

SEQ ID NO: 228433 - DNA, 20 bp, Artificial Sequence
  Description of Artificial Sequence: Synthetic oligonucleotide
  Target: LAMA2; (-) strand; PAM type: YTN; PAM sequence: TTA
taaagcaatggtatgatgga

SEQ ID NO: 228434 - DNA, 20 bp, Artificial Sequence
  Description of Artificial Sequence: Synthetic oligonucleotide
  Target: LAMA2; (-) strand; PAM type: YTN; PAM sequence: TTT
ataaagcaatggtatgatgg

SEQ ID NO: 228435 - DNA, 20 bp, Artificial Sequence
  Description of Artificial Sequence: Synthetic oligonucleotide
  Target: LAMA2; (-) strand; PAM type: YTN; PAM sequence: CTG
gtaataatttataaagcaat

SEQ ID NO: 228436 - DNA, 20 bp, Artificial Sequence
  Description of Artificial Sequence: Synthetic oligonucleotide
  Target: LAMA2; (-) strand; PAM type: YTN; PAM sequence: TTC
tggtaataatttataaagca

SEQ ID NO: 228437 - DNA, 20 bp, Artificial Sequence
  Description of Artificial Sequence: Synthetic oligonucleotide
  Target: LAMA2; (-) strand; PAM type: YTN; PAM sequence: TTC
aatattctggtaataattta

SEQ ID NO: 228438 - DNA, 20 bp, Artificial Sequence
  Description of Artificial Sequence: Synthetic oligonucleotide
  Target: LAMA2; (-) strand; PAM type: YTN; PAM sequence: CTT
caatattctggtaataattt

SEQ ID NO: 228439 - DNA, 20 bp, Artificial Sequence
  Description of Artificial Sequence: Synthetic oligonucleotide
  Target: LAMA2; (-) strand; PAM type: YTN; PAM sequence: TTC
cttcaatattctggtaataa

SEQ ID NO: 228440 - DNA, 20 bp, Artificial Sequence
  Description of Artificial Sequence: Synthetic oligonucleotide
  Target: LAMA2; (-) strand; PAM type: YTN; PAM sequence: TTT
ccttcaatattctggtaata

SEQ ID NO: 228441 - DNA, 20 bp, Artificial Sequence
  Description of Artificial Sequence: Synthetic oligonucleotide
  Target: LAMA2; (-) strand; PAM type: YTN; PAM sequence: TTA
tttccttcaatattctggta

SEQ ID NO: 228442 - DNA, 20 bp, Artificial Sequence
  Description of Artificial Sequence: Synthetic oligonucleotide
  Target: LAMA2; (-) strand; PAM type: YTN; PAM sequence: TTT
atttccttcaatattctggt

SEQ ID NO: 228443 - DNA, 20 bp, Artificial Sequence
  Description of Artificial Sequence: Synthetic oligonucleotide
  Target: LAMA2; (-) strand; PAM type: YTN; PAM sequence: TTA
gaaaaaagtttatttccttc

SEQ ID NO: 228444 - DNA, 20 bp, Artificial Sequence
  Description of Artificial Sequence: Synthetic oligonucleotide
  Target: LAMA2; (-) strand; PAM type: YTN; PAM sequence: TTG
cataaatatggttagaaaaa

SEQ ID NO: 228445 - DNA, 20 bp, Artificial Sequence
  Description of Artificial Sequence: Synthetic oligonucleotide
  Target: LAMA2; (-) strand; PAM type: YTN; PAM sequence: TTG
attgcataaatatggttaga

SEQ ID NO: 228446 - DNA, 20 bp, Artificial Sequence
  Description of Artificial Sequence: Synthetic oligonucleotide
  Target: LAMA2; (-) strand; PAM type: YTN; PAM sequence: CTA
ataaatattgattgcataaa

SEQ ID NO: 228447 - DNA, 20 bp, Artificial Sequence
  Description of Artificial Sequence: Synthetic oligonucleotide
  Target: LAMA2; (-) strand; PAM type: YTN; PAM sequence: CTA
cctaataaatattgattgca

SEQ ID NO: 228448 - DNA, 20 bp, Artificial Sequence
  Description of Artificial Sequence: Synthetic oligonucleotide
  Target: LAMA2; (-) strand; PAM type: YTN; PAM sequence: CTC
aaaaactacctaataaatat

SEQ ID NO: 228449 - DNA, 20 bp, Artificial Sequence
  Description of Artificial Sequence: Synthetic oligonucleotide
  Target: LAMA2; (-) strand; PAM type: YTN; PAM sequence: TTC
tcaaaaactacctaataaat

SEQ ID NO: 228450 - DNA, 20 bp, Artificial Sequence
  Description of Artificial Sequence: Synthetic oligonucleotide
  Target: LAMA2; (-) strand; PAM type: YTN; PAM sequence: TTT
ctcaaaaactacctaataaa

SEQ ID NO: 228451 - DNA, 20 bp, Artificial Sequence
  Description of Artificial Sequence: Synthetic oligonucleotide
  Target: LAMA2; (-) strand; PAM type: YTN; PAM sequence: TTT
tctcaaaaactacctaataa

SEQ ID NO: 228452 - DNA, 20 bp, Artificial Sequence
  Description of Artificial Sequence: Synthetic oligonucleotide
  Target: LAMA2; (-) strand; PAM type: YTN; PAM sequence: CTC
atataagattttctcaaaaa

SEQ ID NO: 228453 - DNA, 20 bp, Artificial Sequence
  Description of Artificial Sequence: Synthetic oligonucleotide
  Target: LAMA2; (-) strand; PAM type: YTN; PAM sequence: TTC
tcatataagattttctcaaa

SEQ ID NO: 228454 - DNA, 20 bp, Artificial Sequence
  Description of Artificial Sequence: Synthetic oligonucleotide
  Target: LAMA2; (-) strand; PAM type: YTN; PAM sequence: TTG
gtatacaaggaataagttct

SEQ ID NO: 228455 - DNA, 20 bp, Artificial Sequence
  Description of Artificial Sequence: Synthetic oligonucleotide
  Target: LAMA2; (-) strand; PAM type: YTN; PAM sequence: TTT
ggtatacaaggaataagttc

SEQ ID NO: 228456 - DNA, 20 bp, Artificial Sequence
  Description of Artificial Sequence: Synthetic oligonucleotide
  Target: LAMA2; (-) strand; PAM type: YTN; PAM sequence: TTC
catgaaacatttggtataca

SEQ ID NO: 228457 - DNA, 20 bp, Artificial Sequence
  Description of Artificial Sequence: Synthetic oligonucleotide
  Target: LAMA2; (-) strand; PAM type: YTN; PAM sequence: CTG
gtggtgttccatgaaacatt

SEQ ID NO: 228458 - DNA, 20 bp, Artificial Sequence
  Description of Artificial Sequence: Synthetic oligonucleotide
  Target: LAMA2; (-) strand; PAM type: YTN; PAM sequence: CTA
tgctggtggtgttccatgaa

SEQ ID NO: 228459 - DNA, 20 bp, Artificial Sequence
  Description of Artificial Sequence: Synthetic oligonucleotide
  Target: LAMA2; (-) strand; PAM type: YTN; PAM sequence: TTG
cacagagtaaacaaaaatgt

SEQ ID NO: 228460 - DNA, 20 bp, Artificial Sequence
  Description of Artificial Sequence: Synthetic oligonucleotide
  Target: LAMA2; (-) strand; PAM type: YTN; PAM sequence: CTC
cccagaacgaaatccagttg

SEQ ID NO: 228461 - DNA, 20 bp, Artificial Sequence
  Description of Artificial Sequence: Synthetic oligonucleotide
  Target: LAMA2; (-) strand; PAM type: YTN; PAM sequence: TTG
aagctccccagaacgaaatc

SEQ ID NO: 228462 - DNA, 20 bp, Artificial Sequence
  Description of Artificial Sequence: Synthetic oligonucleotide
  Target: LAMA2; (-) strand; PAM type: YTN; PAM sequence: CTC
atgtacaaattgaagctccc

SEQ ID NO: 228463 - DNA, 20 bp, Artificial Sequence
  Description of Artificial Sequence: Synthetic oligonucleotide
  Target: LAMA2; (-) strand; PAM type: YTN; PAM sequence: TTG
tgaaaatgagctcatgtaca

SEQ ID NO: 228464 - DNA, 20 bp, Artificial Sequence
  Description of Artificial Sequence: Synthetic oligonucleotide
  Target: LAMA2; (-) strand; PAM type: YTN; PAM sequence: TTT
gtgaaaatgagctcatgtac

SEQ ID NO: 228465 - DNA, 20 bp, Artificial Sequence
  Description of Artificial Sequence: Synthetic oligonucleotide
  Target: LAMA2; (-) strand; PAM type: YTN; PAM sequence: CTA
agtatcggtaagatggtttg

SEQ ID NO: 228466 - DNA, 20 bp, Artificial Sequence
  Description of Artificial Sequence: Synthetic oligonucleotide
  Target: LAMA2; (-) strand; PAM type: YTN; PAM sequence: CTC
taagtatcggtaagatggtt

SEQ ID NO: 228467 - DNA, 20 bp, Artificial Sequence
  Description of Artificial Sequence: Synthetic oligonucleotide
  Target: LAMA2; (-) strand; PAM type: YTN; PAM sequence: TTG
gactctaagtatcggtaaga

SEQ ID NO: 228468 - DNA, 20 bp, Artificial Sequence
  Description of Artificial Sequence: Synthetic oligonucleotide
  Target: LAMA2; (-) strand; PAM type: YTN; PAM sequence: TTT
ggactctaagtatcggtaag

SEQ ID NO: 228469 - DNA, 20 bp, Artificial Sequence
  Description of Artificial Sequence: Synthetic oligonucleotide
  Target: LAMA2; (-) strand; PAM type: YTN; PAM sequence: CTT
tggactctaagtatcggtaa

SEQ ID NO: 228470 - DNA, 20 bp, Artificial Sequence
  Description of Artificial Sequence: Synthetic oligonucleotide
  Target: LAMA2; (-) strand; PAM type: YTN; PAM sequence: TTC
actttggactctaagtatcg

SEQ ID NO: 228471 - DNA, 20 bp, Artificial Sequence
  Description of Artificial Sequence: Synthetic oligonucleotide
  Target: LAMA2; (-) strand; PAM type: YTN; PAM sequence: TTT
cactttggactctaagtatc

SEQ ID NO: 228472 - DNA, 20 bp, Artificial Sequence
  Description of Artificial Sequence: Synthetic oligonucleotide
  Target: LAMA2; (-) strand; PAM type: YTN; PAM sequence: CTG
aatttcactttggactctaa

SEQ ID NO: 228473 - DNA, 20 bp, Artificial Sequence
  Description of Artificial Sequence: Synthetic oligonucleotide
  Target: LAMA2; (-) strand; PAM type: YTN; PAM sequence: TTC
ctgaatttcactttggactc

SEQ ID NO: 228474 - DNA, 20 bp, Artificial Sequence
  Description of Artificial Sequence: Synthetic oligonucleotide
  Target: LAMA2; (-) strand; PAM type: YTN; PAM sequence: CTG
ggccatagttcctgaatttc

SEQ ID NO: 228475 - DNA, 20 bp, Artificial Sequence
  Description of Artificial Sequence: Synthetic oligonucleotide
  Target: LAMA2; (-) strand; PAM type: YTN; PAM sequence: TTG
ctgggccatagttcctgaat

SEQ ID NO: 228476 - DNA, 20 bp, Artificial Sequence
  Description of Artificial Sequence: Synthetic oligonucleotide
  Target: LAMA2; (-) strand; PAM type: YTN; PAM sequence: CTT
gctgggccatagttcctgaa

SEQ ID NO: 228477 - DNA, 20 bp, Artificial Sequence
  Description of Artificial Sequence: Synthetic oligonucleotide
  Target: LAMA2; (-) strand; PAM type: YTN; PAM sequence: TTC
caaagtcatgaagcaaagaa

SEQ ID NO: 228478 - DNA, 20 bp, Artificial Sequence
  Description of Artificial Sequence: Synthetic oligonucleotide
  Target: LAMA2; (-) strand; PAM type: YTN; PAM sequence: TTT
ccaaagtcatgaagcaaaga

SEQ ID NO: 228479 - DNA, 20 bp, Artificial Sequence
  Description of Artificial Sequence: Synthetic oligonucleotide
  Target: LAMA2; (-) strand; PAM type: YTN; PAM sequence: CTC
ccatagatttccaaagtcat

SEQ ID NO: 228480 - DNA, 20 bp, Artificial Sequence
  Description of Artificial Sequence: Synthetic oligonucleotide
  Target: LAMA2; (-) strand; PAM type: YTN; PAM sequence: CTA
gtgatacagggtctcccata

SEQ ID NO: 228481 - DNA, 20 bp, Artificial Sequence
  Description of Artificial Sequence: Synthetic oligonucleotide
  Target: LAMA2; (-) strand; PAM type: YTN; PAM sequence: CTG
tctagtgatacagggtctcc

SEQ ID NO: 228482 - DNA, 20 bp, Artificial Sequence
  Description of Artificial Sequence: Synthetic oligonucleotide
  Target: LAMA2; (-) strand; PAM type: YTN; PAM sequence: TTC
tgtctagtgatacagggtct

SEQ ID NO: 228483 - DNA, 20 bp, Artificial Sequence
  Description of Artificial Sequence: Synthetic oligonucleotide
  Target: LAMA2; (-) strand; PAM type: YTN; PAM sequence: TTC
agtattctgtctagtgatac

SEQ ID NO: 228484 - DNA, 20 bp, Artificial Sequence
  Description of Artificial Sequence: Synthetic oligonucleotide
  Target: LAMA2; (-) strand; PAM type: YTN; PAM sequence: TTT
cagtattctgtctagtgata

SEQ ID NO: 228485 - DNA, 20 bp, Artificial Sequence
  Description of Artificial Sequence: Synthetic oligonucleotide
  Target: LAMA2; (-) strand; PAM type: YTN; PAM sequence: TTT
tcagtattctgtctagtgat

SEQ ID NO: 228486 - DNA, 20 bp, Artificial Sequence
  Description of Artificial Sequence: Synthetic oligonucleotide
  Target: LAMA2; (-) strand; PAM type: YTN; PAM sequence: CTT
ttcagtattctgtctagtga

SEQ ID NO: 228487 - DNA, 20 bp, Artificial Sequence
  Description of Artificial Sequence: Synthetic oligonucleotide
  Target: LAMA2; (-) strand; PAM type: YTN; PAM sequence: CTG
cttttcagtattctgtctag

SEQ ID NO: 228488 - DNA, 20 bp, Artificial Sequence
  Description of Artificial Sequence: Synthetic oligonucleotide
  Target: LAMA2; (-) strand; PAM type: YTN; PAM sequence: TTC
atatgtaatcctgcttttca

SEQ ID NO: 228489 - DNA, 20 bp, Artificial Sequence
  Description of Artificial Sequence: Synthetic oligonucleotide
  Target: LAMA2; (-) strand; PAM type: YTN; PAM sequence: CTT
catatgtaatcctgcttttc

SEQ ID NO: 228490 - DNA, 20 bp, Artificial Sequence
  Description of Artificial Sequence: Synthetic oligonucleotide
  Target: LAMA2; (-) strand; PAM type: YTN; PAM sequence: TTA
ggaaaaaaatcagatggtaa

SEQ ID NO: 228491 - DNA, 20 bp, Artificial Sequence
  Description of Artificial Sequence: Synthetic oligonucleotide
  Target: LAMA2; (-) strand; PAM type: YTN; PAM sequence: CTT
aggaaaaaaatcagatggta

SEQ ID NO: 228492 - DNA, 20 bp, Artificial Sequence
  Description of Artificial Sequence: Synthetic oligonucleotide
  Target: LAMA2; (-) strand; PAM type: YTN; PAM sequence: TTC
atgtaaaaacccttaggaaa

SEQ ID NO: 228493 - DNA, 20 bp, Artificial Sequence
  Description of Artificial Sequence: Synthetic oligonucleotide
  Target: LAMA2; (-) strand; PAM type: YTN; PAM sequence: CTG
aatccacacaaaaagacaag

SEQ ID NO: 228494 - DNA, 20 bp, Artificial Sequence
  Description of Artificial Sequence: Synthetic oligonucleotide
  Target: LAMA2; (-) strand; PAM type: YTN; PAM sequence: TTG
ctgaatccacacaaaaagac

SEQ ID NO: 228495 - DNA, 20 bp, Artificial Sequence
  Description of Artificial Sequence: Synthetic oligonucleotide
  Target: LAMA2; (-) strand; PAM type: YTN; PAM sequence: CTG
gagattgctgaatccacaca

SEQ ID NO: 228496 - DNA, 20 bp, Artificial Sequence
  Description of Artificial Sequence: Synthetic oligonucleotide
  Target: LAMA2; (-) strand; PAM type: YTN; PAM sequence: TTC
agtaaacctggagattgctg

SEQ ID NO: 228497 - DNA, 20 bp, Artificial Sequence
  Description of Artificial Sequence: Synthetic oligonucleotide
  Target: LAMA2; (-) strand; PAM type: YTN; PAM sequence: CTG
ttcagtaaacctggagattg

SEQ ID NO: 228498 - DNA, 20 bp, Artificial Sequence
  Description of Artificial Sequence: Synthetic oligonucleotide
  Target: LAMA2; (-) strand; PAM type: YTN; PAM sequence: TTC
acaacccctgttcagtaaac

SEQ ID NO: 228499 - DNA, 20 bp, Artificial Sequence
  Description of Artificial Sequence: Synthetic oligonucleotide
  Target: LAMA2; (-) strand; PAM type: YTN; PAM sequence: CTT
cacaacccctgttcagtaaa

SEQ ID NO: 228500 - DNA, 20 bp, Artificial Sequence
  Description of Artificial Sequence: Synthetic oligonucleotide
  Target: LAMA2; (-) strand; PAM type: YTN; PAM sequence: CTG
cccttcacaacccctgttca

SEQ ID NO: 228501 - DNA, 20 bp, Artificial Sequence
  Description of Artificial Sequence: Synthetic oligonucleotide
  Target: LAMA2; (-) strand; PAM type: YTN; PAM sequence: TTG
tgaacaactgcccttcacaa

SEQ ID NO: 228502 - DNA, 20 bp, Artificial Sequence
  Description of Artificial Sequence: Synthetic oligonucleotide
  Target: LAMA2; (-) strand; PAM type: YTN; PAM sequence: CTC
agttgtgaacaactgccctt

SEQ ID NO: 228503 - DNA, 20 bp, Artificial Sequence
  Description of Artificial Sequence: Synthetic oligonucleotide
  Target: LAMA2; (-) strand; PAM type: YTN; PAM sequence: CTA
tgtgggggaaccggagtata

SEQ ID NO: 228504 - DNA, 20 bp, Artificial Sequence
  Description of Artificial Sequence: Synthetic oligonucleotide
  Target: LAMA2; (-) strand; PAM type: YTN; PAM sequence: TTA
gcggggtggagctatgtggg

SEQ ID NO: 228505 - DNA, 20 bp, Artificial Sequence
  Description of Artificial Sequence: Synthetic oligonucleotide
  Target: LAMA2; (-) strand; PAM type: YTN; PAM sequence: TTG
ggagttagcggggtggagct

SEQ ID NO: 228506 - DNA, 20 bp, Artificial Sequence
  Description of Artificial Sequence: Synthetic oligonucleotide
  Target: LAMA2; (-) strand; PAM type: YTN; PAM sequence: CTA
tgcatgaggttgggagttag

SEQ ID NO: 228507 - DNA, 20 bp, Artificial Sequence
  Description of Artificial Sequence: Synthetic oligonucleotide
  Target: LAMA2; (-) strand; PAM type: YTN; PAM sequence: TTC
aagcccaatagtgtggtgga

SEQ ID NO: 228508 - DNA, 20 bp, Artificial Sequence
  Description of Artificial Sequence: Synthetic oligonucleotide
  Target: LAMA2; (-) strand; PAM type: YTN; PAM sequence: CTA
gattcaagcccaatagtgtg

SEQ ID NO: 228509 - DNA, 20 bp, Artificial Sequence
  Description of Artificial Sequence: Synthetic oligonucleotide
  Target: LAMA2; (-) strand; PAM type: YTN; PAM sequence: CTA
gaaagtggcagagcctagat

SEQ ID NO: 228510 - DNA, 20 bp, Artificial Sequence
  Description of Artificial Sequence: Synthetic oligonucleotide
  Target: LAMA2; (-) strand; PAM type: YTN; PAM sequence: CTC
aggaaccagctagaaagtgg

SEQ ID NO: 228511 - DNA, 20 bp, Artificial Sequence
  Description of Artificial Sequence: Synthetic oligonucleotide
  Target: LAMA2; (-) strand; PAM type: YTN; PAM sequence: TTG
ctcaggaaccagctagaaag

SEQ ID NO: 228512 - DNA, 20 bp, Artificial Sequence
  Description of Artificial Sequence: Synthetic oligonucleotide
  Target: LAMA2; (-) strand; PAM type: YTN; PAM sequence: CTT
gctcaggaaccagctagaaa

SEQ ID NO: 228513 - DNA, 20 bp, Artificial Sequence
  Description of Artificial Sequence: Synthetic oligonucleotide
  Target: LAMA2; (-) strand; PAM type: YTN; PAM sequence: TTA
aagaacttgctcaggaacca

SEQ ID NO: 228514 - DNA, 20 bp, Artificial Sequence
  Description of Artificial Sequence: Synthetic oligonucleotide
  Target: LAMA2; (-) strand; PAM type: YTN; PAM sequence: CTC
agagaggttaaagaacttgc

SEQ ID NO: 228515 - DNA, 20 bp, Artificial Sequence
  Description of Artificial Sequence: Synthetic oligonucleotide
  Target: LAMA2; (-) strand; PAM type: YTN; PAM sequence: TTG
tggatgaggaaacaggctca

SEQ ID NO: 228516 - DNA, 20 bp, Artificial Sequence
  Description of Artificial Sequence: Synthetic oligonucleotide
  Target: LAMA2; (-) strand; PAM type: YTN; PAM sequence: TTT
gtggatgaggaaacaggctc

SEQ ID NO: 228517 - DNA, 20 bp, Artificial Sequence
  Description of Artificial Sequence: Synthetic oligonucleotide
  Target: LAMA2; (-) strand; PAM type: YTN; PAM sequence: TTT
tgtggatgaggaaacaggct

SEQ ID NO: 228518 - DNA, 20 bp, Artificial Sequence
  Description of Artificial Sequence: Synthetic oligonucleotide
  Target: LAMA2; (-) strand; PAM type: YTN; PAM sequence: TTT
ttgtggatgaggaaacaggc

SEQ ID NO: 228519 - DNA, 20 bp, Artificial Sequence
  Description of Artificial Sequence: Synthetic oligonucleotide
  Target: LAMA2; (-) strand; PAM type: YTN; PAM sequence: CTT
tttgtggatgaggaaacagg

SEQ ID NO: 228520 - DNA, 20 bp, Artificial Sequence
  Description of Artificial Sequence: Synthetic oligonucleotide
  Target: LAMA2; (-) strand; PAM type: YTN; PAM sequence: TTC
atcctttttgtggatgagga

SEQ ID NO: 228521 - DNA, 20 bp, Artificial Sequence
  Description of Artificial Sequence: Synthetic oligonucleotide
  Target: LAMA2; (-) strand; PAM type: YTN; PAM sequence: CTT
catcctttttgtggatgagg

SEQ ID NO: 228522 - DNA, 20 bp, Artificial Sequence
  Description of Artificial Sequence: Synthetic oligonucleotide
  Target: LAMA2; (-) strand; PAM type: YTN; PAM sequence: TTC
ttcatcctttttgtggatga

SEQ ID NO: 228523 - DNA, 20 bp, Artificial Sequence
  Description of Artificial Sequence: Synthetic oligonucleotide
  Target: LAMA2; (-) strand; PAM type: YTN; PAM sequence: TTG
ttcttcatcctttttgtgga

SEQ ID NO: 228524 - DNA, 20 bp, Artificial Sequence
  Description of Artificial Sequence: Synthetic oligonucleotide
  Target: LAMA2; (-) strand; PAM type: YTN; PAM sequence: TTT
gttcttcatcctttttgtgg

SEQ ID NO: 228525 - DNA, 20 bp, Artificial Sequence
  Description of Artificial Sequence: Synthetic oligonucleotide
  Target: LAMA2; (-) strand; PAM type: YTN; PAM sequence: TTT
tgttcttcatcctttttgtg

SEQ ID NO: 228526 - DNA, 20 bp, Artificial Sequence
  Description of Artificial Sequence: Synthetic oligonucleotide
  Target: LAMA2; (-) strand; PAM type: YTN; PAM sequence: TTT
ttgttcttcatcctttttgt

SEQ ID NO: 228527 - DNA, 20 bp, Artificial Sequence
  Description of Artificial Sequence: Synthetic oligonucleotide
  Target: LAMA2; (-) strand; PAM type: YTN; PAM sequence: CTT
tttgttcttcatcctttttg

SEQ ID NO: 228528 - DNA, 20 bp, Artificial Sequence
  Description of Artificial Sequence: Synthetic oligonucleotide
  Target: LAMA2; (-) strand; PAM type: YTN; PAM sequence: CTC
gtcctttttgttcttcatcc

SEQ ID NO: 228529 - DNA, 20 bp, Artificial Sequence
  Description of Artificial Sequence: Synthetic oligonucleotide
  Target: LAMA2; (-) strand; PAM type: YTN; PAM sequence: TTG
cctcgtcctttttgttcttc

SEQ ID NO: 228530 - DNA, 20 bp, Artificial Sequence
  Description of Artificial Sequence: Synthetic oligonucleotide
  Target: LAMA2; (-) strand; PAM type: YTN; PAM sequence: TTA
agaaggtattgcctcgtcct

SEQ ID NO: 228531 - DNA, 20 bp, Artificial Sequence
  Description of Artificial Sequence: Synthetic oligonucleotide
  Target: LAMA2; (-) strand; PAM type: YTN; PAM sequence: TTA
tcagtgttaagaaggtattg

SEQ ID NO: 228532 - DNA, 20 bp, Artificial Sequence
  Description of Artificial Sequence: Synthetic oligonucleotide
  Target: LAMA2; (-) strand; PAM type: YTN; PAM sequence: TTA
attatcagtgttaagaaggt

SEQ ID NO: 228533 - DNA, 20 bp, Artificial Sequence
  Description of Artificial Sequence: Synthetic oligonucleotide
  Target: LAMA2; (-) strand; PAM type: YTN; PAM sequence: TTT
aattatcagtgttaagaagg

SEQ ID NO: 228534 - DNA, 20 bp, Artificial Sequence
  Description of Artificial Sequence: Synthetic oligonucleotide
  Target: LAMA2; (-) strand; PAM type: YTN; PAM sequence: TTA
tttaattatcagtgttaaga

SEQ ID NO: 228535 - DNA, 20 bp, Artificial Sequence
  Description of Artificial Sequence: Synthetic oligonucleotide
  Target: LAMA2; (-) strand; PAM type: YTN; PAM sequence: CTT
atttaattatcagtgttaag

SEQ ID NO: 228536 - DNA, 20 bp, Artificial Sequence
  Description of Artificial Sequence: Synthetic oligonucleotide
  Target: LAMA2; (-) strand; PAM type: YTN; PAM sequence: TTA
tcttatttaattatcagtgt

SEQ ID NO: 228537 - DNA, 20 bp, Artificial Sequence
  Description of Artificial Sequence: Synthetic oligonucleotide
  Target: LAMA2; (-) strand; PAM type: YTN; PAM sequence: CTT
atcttatttaattatcagtg

SEQ ID NO: 228538 - DNA, 20 bp, Artificial Sequence
  Description of Artificial Sequence: Synthetic oligonucleotide
  Target: LAMA2; (-) strand; PAM type: YTN; PAM sequence: TTA
agcttatcttatttaattat

SEQ ID NO: 228539 - DNA, 20 bp, Artificial Sequence
  Description of Artificial Sequence: Synthetic oligonucleotide
  Target: LAMA2; (-) strand; PAM type: YTN; PAM sequence: TTT
aagcttatcttatttaatta

SEQ ID NO: 228540 - DNA, 20 bp, Artificial Sequence
  Description of Artificial Sequence: Synthetic oligonucleotide
  Target: LAMA2; (-) strand; PAM type: YTN; PAM sequence: TTA
taatttaagcttatcttatt

SEQ ID NO: 228541 - DNA, 20 bp, Artificial Sequence
  Description of Artificial Sequence: Synthetic oligonucleotide
  Target: LAMA2; (-) strand; PAM type: YTN; PAM sequence: TTT
ataatttaagcttatcttat

SEQ ID NO: 228542 - DNA, 20 bp, Artificial Sequence
  Description of Artificial Sequence: Synthetic oligonucleotide
  Target: LAMA2; (-) strand; PAM type: YTN; PAM sequence: TTT
tataatttaagcttatctta

SEQ ID NO: 228543 - DNA, 20 bp, Artificial Sequence
  Description of Artificial Sequence: Synthetic oligonucleotide
  Target: LAMA2; (-) strand; PAM type: YTN; PAM sequence: CTG
attttataatttaagcttat

SEQ ID NO: 228544 - DNA, 20 bp, Artificial Sequence
  Description of Artificial Sequence: Synthetic oligonucleotide
  Target: LAMA2; (-) strand; PAM type: YTN; PAM sequence: CTG
tgctgattttataatttaag

SEQ ID NO: 228545 - DNA, 20 bp, Artificial Sequence
  Description of Artificial Sequence: Synthetic oligonucleotide
  Target: LAMA2; (-) strand; PAM type: YTN; PAM sequence: CTC
tgtgctgattttataattta

SEQ ID NO: 228546 - DNA, 20 bp, Artificial Sequence
  Description of Artificial Sequence: Synthetic oligonucleotide
  Target: LAMA2; (-) strand; PAM type: YTN; PAM sequence: TTC
cctctgtgctgattttataa

SEQ ID NO: 228547 - DNA, 20 bp, Artificial Sequence
  Description of Artificial Sequence: Synthetic oligonucleotide
  Target: LAMA2; (-) strand; PAM type: YTN; PAM sequence: TTA
cattccctctgtgctgattt

SEQ ID NO: 228548 - DNA, 20 bp, Artificial Sequence
  Description of Artificial Sequence: Synthetic oligonucleotide
  Target: LAMA2; (-) strand; PAM type: YTN; PAM sequence: TTT
acattccctctgtgctgatt

SEQ ID NO: 228549 - DNA, 20 bp, Artificial Sequence
  Description of Artificial Sequence: Synthetic oligonucleotide
  Target: LAMA2; (-) strand; PAM type: YTN; PAM sequence: TTG
aaccaatttacattccctct

SEQ ID NO: 228550 - DNA, 20 bp, Artificial Sequence
  Description of Artificial Sequence: Synthetic oligonucleotide
  Target: LAMA2; (-) strand; PAM type: YTN; PAM sequence: TTC
cataatggttgaaccaattt

SEQ ID NO: 228551 - DNA, 20 bp, Artificial Sequence
  Description of Artificial Sequence: Synthetic oligonucleotide
  Target: LAMA2; (-) strand; PAM type: YTN; PAM sequence: CTT
ccataatggttgaaccaatt

SEQ ID NO: 228552 - DNA, 20 bp, Artificial Sequence
  Description of Artificial Sequence: Synthetic oligonucleotide
  Target: LAMA2; (-) strand; PAM type: YTN; PAM sequence: TTC
cttccataatggttgaacca

SEQ ID NO: 228553 - DNA, 20 bp, Artificial Sequence
  Description of Artificial Sequence: Synthetic oligonucleotide
  Target: LAMA2; (-) strand; PAM type: YTN; PAM sequence: TTT
ccttccataatggttgaacc

SEQ ID NO: 228554 - DNA, 20 bp, Artificial Sequence
  Description of Artificial Sequence: Synthetic oligonucleotide
  Target: LAMA2; (-) strand; PAM type: YTN; PAM sequence: TTT
tccttccataatggttgaac

SEQ ID NO: 228555 - DNA, 20 bp, Artificial Sequence
  Description of Artificial Sequence: Synthetic oligonucleotide
  Target: LAMA2; (-) strand; PAM type: YTN; PAM sequence: TTT
ttccttccataatggttgaa

SEQ ID NO: 228556 - DNA, 20 bp, Artificial Sequence
  Description of Artificial Sequence: Synthetic oligonucleotide
  Target: LAMA2; (-) strand; PAM type: YTN; PAM sequence: TTT
tttccttccataatggttga

SEQ ID NO: 228557 - DNA, 20 bp, Artificial Sequence
  Description of Artificial Sequence: Synthetic oligonucleotide
  Target: LAMA2; (-) strand; PAM type: YTN; PAM sequence: CTT
ttttccttccataatggttg

SEQ ID NO: 228558 - DNA, 20 bp, Artificial Sequence
  Description of Artificial Sequence: Synthetic oligonucleotide
  Target: LAMA2; (-) strand; PAM type: YTN; PAM sequence: CTA
cttttttccttccataatgg

SEQ ID NO: 228559 - DNA, 20 bp, Artificial Sequence
  Description of Artificial Sequence: Synthetic oligonucleotide
  Target: LAMA2; (-) strand; PAM type: YTN; PAM sequence: TTC
ctacttttttccttccataa

SEQ ID NO: 228560 - DNA, 20 bp, Artificial Sequence
  Description of Artificial Sequence: Synthetic oligonucleotide
  Target: LAMA2; (-) strand; PAM type: YTN; PAM sequence: CTT
cctacttttttccttccata

SEQ ID NO: 228561 - DNA, 20 bp, Artificial Sequence
  Description of Artificial Sequence: Synthetic oligonucleotide
  Target: LAMA2; (-) strand; PAM type: YTN; PAM sequence: TTG
aggaaccttcctactttttt

SEQ ID NO: 228562 - DNA, 20 bp, Artificial Sequence
  Description of Artificial Sequence: Synthetic oligonucleotide
  Target: LAMA2; (-) strand; PAM type: YTN; PAM sequence: TTT
gaggaaccttcctacttttt

SEQ ID NO: 228563 - DNA, 20 bp, Artificial Sequence
  Description of Artificial Sequence: Synthetic oligonucleotide
  Target: LAMA2; (-) strand; PAM type: YTN; PAM sequence: TTT
tgaggaaccttcctactttt

SEQ ID NO: 228564 - DNA, 20 bp, Artificial Sequence
  Description of Artificial Sequence: Synthetic oligonucleotide
  Target: LAMA2; (-) strand; PAM type: YTN; PAM sequence: TTT
ttgaggaaccttcctacttt

SEQ ID NO: 228565 - DNA, 20 bp, Artificial Sequence
  Description of Artificial Sequence: Synthetic oligonucleotide
  Target: LAMA2; (-) strand; PAM type: YTN; PAM sequence: TTT
tttgaggaaccttcctactt

SEQ ID NO: 228566 - DNA, 20 bp, Artificial Sequence
  Description of Artificial Sequence: Synthetic oligonucleotide
  Target: LAMA2; (-) strand; PAM type: YTN; PAM sequence: TTG
aattttttgaggaaccttcc

SEQ ID NO: 228567 - DNA, 20 bp, Artificial Sequence
  Description of Artificial Sequence: Synthetic oligonucleotide
  Target: LAMA2; (-) strand; PAM type: YTN; PAM sequence: TTT
gaattttttgaggaaccttc

SEQ ID NO: 228568 - DNA, 20 bp, Artificial Sequence
  Description of Artificial Sequence: Synthetic oligonucleotide
  Target: LAMA2; (-) strand; PAM type: YTN; PAM sequence: TTT
tgaattttttgaggaacctt

SEQ ID NO: 228569 - DNA, 20 bp, Artificial Sequence
  Description of Artificial Sequence: Synthetic oligonucleotide
  Target: LAMA2; (-) strand; PAM type: YTN; PAM sequence: CTC
gcagtcccattttgaatttt

SEQ ID NO: 228570 - DNA, 20 bp, Artificial Sequence
  Description of Artificial Sequence: Synthetic oligonucleotide
  Target: LAMA2; (-) strand; PAM type: YTN; PAM sequence: TTG
agccaccacacccggcctcg

SEQ ID NO: 228571 - DNA, 20 bp, Artificial Sequence
  Description of Artificial Sequence: Synthetic oligonucleotide
  Target: LAMA2; (-) strand; PAM type: YTN; PAM sequence: CTT
gagccaccacacccggcctc

SEQ ID NO: 228572 - DNA, 20 bp, Artificial Sequence
  Description of Artificial Sequence: Synthetic oligonucleotide
  Target: LAMA2; (-) strand; PAM type: YTN; PAM sequence: TTA
caggcttgagccaccacacc

SEQ ID NO: 228573 - DNA, 20 bp, Artificial Sequence
  Description of Artificial Sequence: Synthetic oligonucleotide
  Target: LAMA2; (-) strand; PAM type: YTN; PAM sequence: CTG
agattacaggcttgagccac

SEQ ID NO: 228574 - DNA, 20 bp, Artificial Sequence
  Description of Artificial Sequence: Synthetic oligonucleotide
  Target: LAMA2; (-) strand; PAM type: YTN; PAM sequence: CTC
ccaaagtgctgagattacag

SEQ ID NO: 228575 - DNA, 20 bp, Artificial Sequence
  Description of Artificial Sequence: Synthetic oligonucleotide
  Target: LAMA2; (-) strand; PAM type: YTN; PAM sequence: CTC
agcctcccaaagtgctgaga

SEQ ID NO: 228576 - DNA, 20 bp, Artificial Sequence
  Description of Artificial Sequence: Synthetic oligonucleotide
  Target: LAMA2; (-) strand; PAM type: YTN; PAM sequence: CTG
cctcagcctcccaaagtgct

SEQ ID NO: 228577 - DNA, 20 bp, Artificial Sequence
  Description of Artificial Sequence: Synthetic oligonucleotide
  Target: LAMA2; (-) strand; PAM type: YTN; PAM sequence: CTG
cctgcctcagcctcccaaag

SEQ ID NO: 228578 - DNA, 20 bp, Artificial Sequence
  Description of Artificial Sequence: Synthetic oligonucleotide
  Target: LAMA2; (-) strand; PAM type: YTN; PAM sequence: CTC
tgcctgcctcagcctcccaa

SEQ ID NO: 228579 - DNA, 20 bp, Artificial Sequence
  Description of Artificial Sequence: Synthetic oligonucleotide
  Target: LAMA2; (-) strand; PAM type: YTN; PAM sequence: CTC
aaaatgctctgcctgcctca

SEQ ID NO: 228580 - DNA, 20 bp, Artificial Sequence
  Description of Artificial Sequence: Synthetic oligonucleotide
  Target: LAMA2; (-) strand; PAM type: YTN; PAM sequence: CTG
acctcaaaatgctctgcctg

SEQ ID NO: 228581 - DNA, 20 bp, Artificial Sequence
  Description of Artificial Sequence: Synthetic oligonucleotide
  Target: LAMA2; (-) strand; PAM type: YTN; PAM sequence: CTC
ctgacctcaaaatgctctgc

SEQ ID NO: 228582 - DNA, 20 bp, Artificial Sequence
  Description of Artificial Sequence: Synthetic oligonucleotide
  Target: LAMA2; (-) strand; PAM type: YTN; PAM sequence: CTC
gaactcctgacctcaaaatg

SEQ ID NO: 228583 - DNA, 20 bp, Artificial Sequence
  Description of Artificial Sequence: Synthetic oligonucleotide
  Target: LAMA2; (-) strand; PAM type: YTN; PAM sequence: CTC
tcgaactcctgacctcaaaa

SEQ ID NO: 228584 - DNA, 20 bp, Artificial Sequence
  Description of Artificial Sequence: Synthetic oligonucleotide
  Target: LAMA2; (-) strand; PAM type: YTN; PAM sequence: CTG
ctctcgaactcctgacctca

SEQ ID NO: 228585 - DNA, 20 bp, Artificial Sequence
  Description of Artificial Sequence: Synthetic oligonucleotide
  Target: LAMA2; (-) strand; PAM type: YTN; PAM sequence: TTG
gccaggctgctctcgaactc

SEQ ID NO: 228586 - DNA, 20 bp, Artificial Sequence
  Description of Artificial Sequence: Synthetic oligonucleotide
  Target: LAMA2; (-) strand; PAM type: YTN; PAM sequence: TTC
accatgttggccaggctgct

SEQ ID NO: 228587 - DNA, 20 bp, Artificial Sequence
  Description of Artificial Sequence: Synthetic oligonucleotide
  Target: LAMA2; (-) strand; PAM type: YTN; PAM sequence: TTT
caccatgttggccaggctgc

SEQ ID NO: 228588 - DNA, 20 bp, Artificial Sequence
  Description of Artificial Sequence: Synthetic oligonucleotide
  Target: LAMA2; (-) strand; PAM type: YTN; PAM sequence: TTA
gtagagacagggtttcacca

SEQ ID NO: 228589 - DNA, 20 bp, Artificial Sequence
  Description of Artificial Sequence: Synthetic oligonucleotide
  Target: LAMA2; (-) strand; PAM type: YTN; PAM sequence: TTT
agtagagacagggtttcacc

SEQ ID NO: 228590 - DNA, 20 bp, Artificial Sequence
  Description of Artificial Sequence: Synthetic oligonucleotide
  Target: LAMA2; (-) strand; PAM type: YTN; PAM sequence: TTT
tagtagagacagggtttcac

SEQ ID NO: 228591 - DNA, 20 bp, Artificial Sequence
  Description of Artificial Sequence: Synthetic oligonucleotide
  Target: LAMA2; (-) strand; PAM type: YTN; PAM sequence: TTT
ttagtagagacagggtttca

SEQ ID NO: 228592 - DNA, 20 bp, Artificial Sequence
  Description of Artificial Sequence: Synthetic oligonucleotide
  Target: LAMA2; (-) strand; PAM type: YTN; PAM sequence: TTT
tttagtagagacagggtttc

SEQ ID NO: 228593 - DNA, 20 bp, Artificial Sequence
  Description of Artificial Sequence: Synthetic oligonucleotide
  Target: LAMA2; (-) strand; PAM type: YTN; PAM sequence: TTG
gatgttttttagtagagaca

SEQ ID NO: 228594 - DNA, 20 bp, Artificial Sequence
  Description of Artificial Sequence: Synthetic oligonucleotide
  Target: LAMA2; (-) strand; PAM type: YTN; PAM sequence: TTT
ggatgttttttagtagagac

SEQ ID NO: 228595 - DNA, 20 bp, Artificial Sequence
  Description of Artificial Sequence: Synthetic oligonucleotide
  Target: LAMA2; (-) strand; PAM type: YTN; PAM sequence: TTT
tggatgttttttagtagaga

SEQ ID NO: 228596 - DNA, 20 bp, Artificial Sequence
  Description of Artificial Sequence: Synthetic oligonucleotide
  Target: LAMA2; (-) strand; PAM type: YTN; PAM sequence: TTT
ttggatgttttttagtagag

SEQ ID NO: 228597 - DNA, 20 bp, Artificial Sequence
  Description of Artificial Sequence: Synthetic oligonucleotide
  Target: LAMA2; (-) strand; PAM type: YTN; PAM sequence: CTA
atttttggatgttttttagt

SEQ ID NO: 228598 - DNA, 20 bp, Artificial Sequence
  Description of Artificial Sequence: Synthetic oligonucleotide
  Target: LAMA2; (-) strand; PAM type: YTN; PAM sequence: CTG
gctaatttttggatgttttt

SEQ ID NO: 228599 - DNA, 20 bp, Artificial Sequence
  Description of Artificial Sequence: Synthetic oligonucleotide
  Target: LAMA2; (-) strand; PAM type: YTN; PAM sequence: CTA
tgcctggctaatttttggat

SEQ ID NO: 228600 - DNA, 20 bp, Artificial Sequence
  Description of Artificial Sequence: Synthetic oligonucleotide
  Target: LAMA2; (-) strand; PAM type: YTN; PAM sequence: TTA
cagacgtgcaccactatgcc

SEQ ID NO: 228601 - DNA, 20 bp, Artificial Sequence
  Description of Artificial Sequence: Synthetic oligonucleotide
  Target: LAMA2; (-) strand; PAM type: YTN; PAM sequence: CTG
ggattacagacgtgcaccac

SEQ ID NO: 228602 - DNA, 20 bp, Artificial Sequence
  Description of Artificial Sequence: Synthetic oligonucleotide
  Target: LAMA2; (-) strand; PAM type: YTN; PAM sequence: CTC
ccaagtagctgggattacag

SEQ ID NO: 228603 - DNA, 20 bp, Artificial Sequence
  Description of Artificial Sequence: Synthetic oligonucleotide
  Target: LAMA2; (-) strand; PAM type: YTN; PAM sequence: CTC
agcctcccaagtagctggga

SEQ ID NO: 228604 - DNA, 20 bp, Artificial Sequence
  Description of Artificial Sequence: Synthetic oligonucleotide
  Target: LAMA2; (-) strand; PAM type: YTN; PAM sequence: CTG
cctcagcctcccaagtagct

SEQ ID NO: 228605 - DNA, 20 bp, Artificial Sequence
  Description of Artificial Sequence: Synthetic oligonucleotide
  Target: LAMA2; (-) strand; PAM type: YTN; PAM sequence: TTC
tgcctcagcctcccaagtag

SEQ ID NO: 228606 - DNA, 20 bp, Artificial Sequence
  Description of Artificial Sequence: Synthetic oligonucleotide
  Target: LAMA2; (-) strand; PAM type: YTN; PAM sequence: CTT
ctgcctcagcctcccaagta

SEQ ID NO: 228607 - DNA, 20 bp, Artificial Sequence
  Description of Artificial Sequence: Synthetic oligonucleotide
  Target: LAMA2; (-) strand; PAM type: YTN; PAM sequence: TTC
ttctgcctcagcctcccaag

SEQ ID NO: 228608 - DNA, 20 bp, Artificial Sequence
  Description of Artificial Sequence: Synthetic oligonucleotide
  Target: LAMA2; (-) strand; PAM type: YTN; PAM sequence: TTC
acacaattcttctgcctcag

SEQ ID NO: 228609 - DNA, 20 bp, Artificial Sequence
  Description of Artificial Sequence: Synthetic oligonucleotide
  Target: LAMA2; (-) strand; PAM type: YTN; PAM sequence: CTG
cccggttcacacaattcttc

SEQ ID NO: 228610 - DNA, 20 bp, Artificial Sequence
  Description of Artificial Sequence: Synthetic oligonucleotide
  Target: LAMA2; (-) strand; PAM type: YTN; PAM sequence: CTG
cctgcccggttcacacaatt

SEQ ID NO: 228611 - DNA, 20 bp, Artificial Sequence
  Description of Artificial Sequence: Synthetic oligonucleotide
  Target: LAMA2; (-) strand; PAM type: YTN; PAM sequence: CTC
tgcctgcccggttcacacaa

SEQ ID NO: 228612 - DNA, 20 bp, Artificial Sequence
  Description of Artificial Sequence: Synthetic oligonucleotide
  Target: LAMA2; (-) strand; PAM type: YTN; PAM sequence: CTG
caacctctgcctgcccggtt

SEQ ID NO: 228613 - DNA, 20 bp, Artificial Sequence
  Description of Artificial Sequence: Synthetic oligonucleotide
  Target: LAMA2; (-) strand; PAM type: YTN; PAM sequence: TTC
actgcaacctctgcctgccc

SEQ ID NO: 228614 - DNA, 20 bp, Artificial Sequence
  Description of Artificial Sequence: Synthetic oligonucleotide
  Target: LAMA2; (-) strand; PAM type: YTN; PAM sequence: CTC
agttcactgcaacctctgcc

SEQ ID NO: 228615 - DNA, 20 bp, Artificial Sequence
  Description of Artificial Sequence: Synthetic oligonucleotide
  Target: LAMA2; (-) strand; PAM type: YTN; PAM sequence: CTG
aagtgcagtggcaccatctc

SEQ ID NO: 228616 - DNA, 20 bp, Artificial Sequence
  Description of Artificial Sequence: Synthetic oligonucleotide
  Target: LAMA2; (-) strand; PAM type: YTN; PAM sequence: CTC
aggctgaagtgcagtggcac

SEQ ID NO: 228617 - DNA, 20 bp, Artificial Sequence
  Description of Artificial Sequence: Synthetic oligonucleotide
  Target: LAMA2; (-) strand; PAM type: YTN; PAM sequence: CTA
tcgctcaggctgaagtgcag

SEQ ID NO: 228618 - DNA, 20 bp, Artificial Sequence
  Description of Artificial Sequence: Synthetic oligonucleotide
  Target: LAMA2; (-) strand; PAM type: YTN; PAM sequence: CTC
tatcgctcaggctgaagtgc

SEQ ID NO: 228619 - DNA, 20 bp, Artificial Sequence
  Description of Artificial Sequence: Synthetic oligonucleotide
  Target: LAMA2; (-) strand; PAM type: YTN; PAM sequence: TTA
ctctatcgctcaggctgaag

SEQ ID NO: 228620 - DNA, 20 bp, Artificial Sequence
  Description of Artificial Sequence: Synthetic oligonucleotide
  Target: LAMA2; (-) strand; PAM type: YTN; PAM sequence: CTT
actctatcgctcaggctgaa

SEQ ID NO: 228621 - DNA, 20 bp, Artificial Sequence
  Description of Artificial Sequence: Synthetic oligonucleotide
  Target: LAMA2; (-) strand; PAM type: YTN; PAM sequence: TTG
agacagagtcttactctatc

SEQ ID NO: 228622 - DNA, 20 bp, Artificial Sequence
  Description of Artificial Sequence: Synthetic oligonucleotide
  Target: LAMA2; (-) strand; PAM type: YTN; PAM sequence: TTT
gagacagagtcttactctat

SEQ ID NO: 228623 - DNA, 20 bp, Artificial Sequence
  Description of Artificial Sequence: Synthetic oligonucleotide
  Target: LAMA2; (-) strand; PAM type: YTN; PAM sequence: TTT
tgagacagagtcttactcta

SEQ ID NO: 228624 - DNA, 20 bp, Artificial Sequence
  Description of Artificial Sequence: Synthetic oligonucleotide
  Target: LAMA2; (-) strand; PAM type: YTN; PAM sequence: TTT
ttgagacagagtcttactct

SEQ ID NO: 228625 - DNA, 20 bp, Artificial Sequence
  Description of Artificial Sequence: Synthetic oligonucleotide
  Target: LAMA2; (-) strand; PAM type: YTN; PAM sequence: TTT
tttgagacagagtcttactc

SEQ ID NO: 228626 - DNA, 20 bp, Artificial Sequence
  Description of Artificial Sequence: Synthetic oligonucleotide
  Target: LAMA2; (-) strand; PAM type: YTN; PAM sequence: TTT
ttttgagacagagtcttact

SEQ ID NO: 228627 - DNA, 20 bp, Artificial Sequence
  Description of Artificial Sequence: Synthetic oligonucleotide
  Target: LAMA2; (-) strand; PAM type: YTN; PAM sequence: TTT
tttttgagacagagtcttac

SEQ ID NO: 228628 - DNA, 20 bp, Artificial Sequence
  Description of Artificial Sequence: Synthetic oligonucleotide
  Target: LAMA2; (-) strand; PAM type: YTN; PAM sequence: TTT
ttttttgagacagagtctta

SEQ ID NO: 228629 - DNA, 20 bp, Artificial Sequence
  Description of Artificial Sequence: Synthetic oligonucleotide
  Target: LAMA2; (-) strand; PAM type: YTN; PAM sequence: TTT
tttttttgagacagagtctt

SEQ ID NO: 228630 - DNA, 20 bp, Artificial Sequence
  Description of Artificial Sequence: Synthetic oligonucleotide
  Target: LAMA2; (-) strand; PAM type: YTN; PAM sequence: TTT
ttttttttgagacagagtct

SEQ ID NO: 228631 - DNA, 20 bp, Artificial Sequence
  Description of Artificial Sequence: Synthetic oligonucleotide
  Target: LAMA2; (-) strand; PAM type: YTN; PAM sequence: TTT
tttttttttgagacagagtc

SEQ ID NO: 228632 - DNA, 20 bp, Artificial Sequence
  Description of Artificial Sequence: Synthetic oligonucleotide
  Target: LAMA2; (-) strand; PAM type: YTN; PAM sequence: TTT
ttttttttttgagacagagt

SEQ ID NO: 228633 - DNA, 20 bp, Artificial Sequence
  Description of Artificial Sequence: Synthetic oligonucleotide
  Target: LAMA2; (-) strand; PAM type: YTN; PAM sequence: TTT
tttttttttttgagacagag

SEQ ID NO: 228634 - DNA, 20 bp, Artificial Sequence
  Description of Artificial Sequence: Synthetic oligonucleotide
  Target: LAMA2; (-) strand; PAM type: YTN; PAM sequence: TTT
ttttttttttttgagacaga

SEQ ID NO: 228635 - DNA, 20 bp, Artificial Sequence
  Description of Artificial Sequence: Synthetic oligonucleotide
  Target: LAMA2; (-) strand; PAM type: YTN; PAM sequence: CTT
tttttttttttttgagacag

SEQ ID NO: 228636 - DNA, 20 bp, Artificial Sequence
  Description of Artificial Sequence: Synthetic oligonucleotide
  Target: LAMA2; (-) strand; PAM type: YTN; PAM sequence: TTC
ctttttttttttttttgaga

SEQ ID NO: 228637 - DNA, 20 bp, Artificial Sequence
  Description of Artificial Sequence: Synthetic oligonucleotide
  Target: LAMA2; (-) strand; PAM type: YTN; PAM sequence: CTG
gatcatatggtagttccttt

SEQ ID NO: 228638 - DNA, 20 bp, Artificial Sequence
  Description of Artificial Sequence: Synthetic oligonucleotide
  Target: LAMA2; (-) strand; PAM type: YTN; PAM sequence: CTC
acacacatatatatatgtgt

SEQ ID NO: 228639 - DNA, 20 bp, Artificial Sequence
  Description of Artificial Sequence: Synthetic oligonucleotide
  Target: LAMA2; (-) strand; PAM type: YTN; PAM sequence: TTG
aatatatatatatatatatc

SEQ ID NO: 228640 - DNA, 20 bp, Artificial Sequence
  Description of Artificial Sequence: Synthetic oligonucleotide
  Target: LAMA2; (-) strand; PAM type: YTN; PAM sequence: TTT
gaatatatatatatatatat

SEQ ID NO: 228641 - DNA, 20 bp, Artificial Sequence
  Description of Artificial Sequence: Synthetic oligonucleotide
  Target: LAMA2; (-) strand; PAM type: YTN; PAM sequence: CTT
tgaatatatatatatatata

SEQ ID NO: 228642 - DNA, 20 bp, Artificial Sequence
  Description of Artificial Sequence: Synthetic oligonucleotide
  Target: LAMA2; (-) strand; PAM type: YTN; PAM sequence: TTG
ctttgaatatatatatatat

SEQ ID NO: 228643 - DNA, 20 bp, Artificial Sequence
  Description of Artificial Sequence: Synthetic oligonucleotide
  Target: LAMA2; (-) strand; PAM type: YTN; PAM sequence: TTC
aattgctttgaatatatata

SEQ ID NO: 228644 - DNA, 20 bp, Artificial Sequence
  Description of Artificial Sequence: Synthetic oligonucleotide
  Target: LAMA2; (-) strand; PAM type: YTN; PAM sequence: TTT
caattgctttgaatatatat

SEQ ID NO: 228645 - DNA, 20 bp, Artificial Sequence
  Description of Artificial Sequence: Synthetic oligonucleotide
  Target: LAMA2; (-) strand; PAM type: YTN; PAM sequence: CTG
atttcaattgctttgaatat

SEQ ID NO: 228646 - DNA, 20 bp, Artificial Sequence
  Description of Artificial Sequence: Synthetic oligonucleotide
  Target: LAMA2; (-) strand; PAM type: YTN; PAM sequence: TTG
agatcctgatttcaattgct

SEQ ID NO: 228647 - DNA, 20 bp, Artificial Sequence
  Description of Artificial Sequence: Synthetic oligonucleotide
  Target: LAMA2; (-) strand; PAM type: YTN; PAM sequence: TTT
gagatcctgatttcaattgc

SEQ ID NO: 228648 - DNA, 20 bp, Artificial Sequence
  Description of Artificial Sequence: Synthetic oligonucleotide
  Target: LAMA2; (-) strand; PAM type: YTN; PAM sequence: CTT
tgagatcctgatttcaattg

SEQ ID NO: 228649 - DNA, 20 bp, Artificial Sequence
  Description of Artificial Sequence: Synthetic oligonucleotide
  Target: LAMA2; (-) strand; PAM type: YTN; PAM sequence: CTC
tttgagatcctgatttcaat

SEQ ID NO: 228650 - DNA, 20 bp, Artificial Sequence
  Description of Artificial Sequence: Synthetic oligonucleotide
  Target: LAMA2; (-) strand; PAM type: YTN; PAM sequence: CTA
aaatgaatacggaaatgcag

SEQ ID NO: 228651 - DNA, 20 bp, Artificial Sequence
  Description of Artificial Sequence: Synthetic oligonucleotide
  Target: LAMA2; (-) strand; PAM type: YTN; PAM sequence: TTG
tgaataatgctaaaatgaat

SEQ ID NO: 228652 - DNA, 20 bp, Artificial Sequence
  Description of Artificial Sequence: Synthetic oligonucleotide
  Target: LAMA2; (-) strand; PAM type: YTN; PAM sequence: CTA
ttgtgaataatgctaaaatg

SEQ ID NO: 228653 - DNA, 20 bp, Artificial Sequence
  Description of Artificial Sequence: Synthetic oligonucleotide
  Target: LAMA2; (-) strand; PAM type: YTN; PAM sequence: TTG
actattgtgaataatgctaa

SEQ ID NO: 228654 - DNA, 20 bp, Artificial Sequence
  Description of Artificial Sequence: Synthetic oligonucleotide
  Target: LAMA2; (-) strand; PAM type: YTN; PAM sequence: CTT
gactattgtgaataatgcta

SEQ ID NO: 228655 - DNA, 20 bp, Artificial Sequence
  Description of Artificial Sequence: Synthetic oligonucleotide
  Target: LAMA2; (-) strand; PAM type: YTN; PAM sequence: TTC
catatcttgactattgtgaa

SEQ ID NO: 228656 - DNA, 20 bp, Artificial Sequence
  Description of Artificial Sequence: Synthetic oligonucleotide
  Target: LAMA2; (-) strand; PAM type: YTN; PAM sequence: CTT
ccatatcttgactattgtga

SEQ ID NO: 228657 - DNA, 20 bp, Artificial Sequence
  Description of Artificial Sequence: Synthetic oligonucleotide
  Target: LAMA2; (-) strand; PAM type: YTN; PAM sequence: TTG
cttccatatcttgactattg

SEQ ID NO: 228658 - DNA, 20 bp, Artificial Sequence
  Description of Artificial Sequence: Synthetic oligonucleotide
  Target: LAMA2; (-) strand; PAM type: YTN; PAM sequence: TTA
ggttgcttccatatcttgac

SEQ ID NO: 228659 - DNA, 20 bp, Artificial Sequence
  Description of Artificial Sequence: Synthetic oligonucleotide
  Target: LAMA2; (-) strand; PAM type: YTN; PAM sequence: TTT
aggttgcttccatatcttga

SEQ ID NO: 228660 - DNA, 20 bp, Artificial Sequence
  Description of Artificial Sequence: Synthetic oligonucleotide
  Target: LAMA2; (-) strand; PAM type: YTN; PAM sequence: CTG
tcaacagatatttaggttgc

SEQ ID NO: 228661 - DNA, 20 bp, Artificial Sequence
  Description of Artificial Sequence: Synthetic oligonucleotide
  Target: LAMA2; (-) strand; PAM type: YTN; PAM sequence: TTC
atctgtcaacagatatttag

SEQ ID NO: 228662 - DNA, 20 bp, Artificial Sequence
  Description of Artificial Sequence: Synthetic oligonucleotide
  Target: LAMA2; (-) strand; PAM type: YTN; PAM sequence: TTA
ttcatctgtcaacagatatt

SEQ ID NO: 228663 - DNA, 20 bp, Artificial Sequence
  Description of Artificial Sequence: Synthetic oligonucleotide
  Target: LAMA2; (-) strand; PAM type: YTN; PAM sequence: TTT
attcatctgtcaacagatat

SEQ ID NO: 228664 - DNA, 20 bp, Artificial Sequence
  Description of Artificial Sequence: Synthetic oligonucleotide
  Target: LAMA2; (-) strand; PAM type: YTN; PAM sequence: TTA
tttattcatctgtcaacaga

SEQ ID NO: 228665 - DNA, 20 bp, Artificial Sequence
  Description of Artificial Sequence: Synthetic oligonucleotide
  Target: LAMA2; (-) strand; PAM type: YTN; PAM sequence: CTT
atttattcatctgtcaacag

SEQ ID NO: 228666 - DNA, 20 bp, Artificial Sequence
  Description of Artificial Sequence: Synthetic oligonucleotide
  Target: LAMA2; (-) strand; PAM type: YTN; PAM sequence: TTC
cttatttattcatctgtcaa

SEQ ID NO: 228667 - DNA, 20 bp, Artificial Sequence
  Description of Artificial Sequence: Synthetic oligonucleotide
  Target: LAMA2; (-) strand; PAM type: YTN; PAM sequence: TTT
ccttatttattcatctgtca

SEQ ID NO: 228668 - DNA, 20 bp, Artificial Sequence
  Description of Artificial Sequence: Synthetic oligonucleotide
  Target: LAMA2; (-) strand; PAM type: YTN; PAM sequence: TTT
tccttatttattcatctgtc

SEQ ID NO: 228669 - DNA, 20 bp, Artificial Sequence
  Description of Artificial Sequence: Synthetic oligonucleotide
  Target: LAMA2; (-) strand; PAM type: YTN; PAM sequence: TTG
tatgtatataccacattttc

SEQ ID NO: 228670 - DNA, 20 bp, Artificial Sequence
  Description of Artificial Sequence: Synthetic oligonucleotide
  Target: LAMA2; (-) strand; PAM type: YTN; PAM sequence: CTA
ttgtatgtatataccacatt

SEQ ID NO: 228671 - DNA, 20 bp, Artificial Sequence
  Description of Artificial Sequence: Synthetic oligonucleotide
  Target: LAMA2; (-) strand; PAM type: YTN; PAM sequence: CTA
agtaatatcctattgtatgt

SEQ ID NO: 228672 - DNA, 20 bp, Artificial Sequence
  Description of Artificial Sequence: Synthetic oligonucleotide
  Target: LAMA2; (-) strand; PAM type: YTN; PAM sequence: CTA
aggctaagtaatatcctatt

SEQ ID NO: 228673 - DNA, 20 bp, Artificial Sequence
  Description of Artificial Sequence: Synthetic oligonucleotide
  Target: LAMA2; (-) strand; PAM type: YTN; PAM sequence: TTC
taaggctaagtaatatccta

SEQ ID NO: 228674 - DNA, 20 bp, Artificial Sequence
  Description of Artificial Sequence: Synthetic oligonucleotide
  Target: LAMA2; (-) strand; PAM type: YTN; PAM sequence: TTT
ctaaggctaagtaatatcct

SEQ ID NO: 228675 - DNA, 20 bp, Artificial Sequence
  Description of Artificial Sequence: Synthetic oligonucleotide
  Target: LAMA2; (-) strand; PAM type: YTN; PAM sequence: TTT
tctaaggctaagtaatatcc

SEQ ID NO: 228676 - DNA, 20 bp, Artificial Sequence
  Description of Artificial Sequence: Synthetic oligonucleotide
  Target: LAMA2; (-) strand; PAM type: YTN; PAM sequence: TTT
ttctaaggctaagtaatatc

SEQ ID NO: 228677 - DNA, 20 bp, Artificial Sequence
  Description of Artificial Sequence: Synthetic oligonucleotide
  Target: LAMA2; (-) strand; PAM type: YTN; PAM sequence: CTT
tttctaaggctaagtaatat

SEQ ID NO: 228678 - DNA, 20 bp, Artificial Sequence
  Description of Artificial Sequence: Synthetic oligonucleotide
  Target: LAMA2; (-) strand; PAM type: YTN; PAM sequence: TTC
tttttctaaggctaagtaat

SEQ ID NO: 228679 - DNA, 20 bp, Artificial Sequence
  Description of Artificial Sequence: Synthetic oligonucleotide
  Target: LAMA2; (-) strand; PAM type: YTN; PAM sequence: CTT
ctttttctaaggctaagtaa

SEQ ID NO: 228680 - DNA, 20 bp, Artificial Sequence
  Description of Artificial Sequence: Synthetic oligonucleotide
  Target: LAMA2; (-) strand; PAM type: YTN; PAM sequence: TTC
cttctttttctaaggctaag

SEQ ID NO: 228681 - DNA, 20 bp, Artificial Sequence
  Description of Artificial Sequence: Synthetic oligonucleotide
  Target: LAMA2; (-) strand; PAM type: YTN; PAM sequence: TTT
ccttctttttctaaggctaa

SEQ ID NO: 228682 - DNA, 20 bp, Artificial Sequence
  Description of Artificial Sequence: Synthetic oligonucleotide
  Target: LAMA2; (-) strand; PAM type: YTN; PAM sequence: CTG
aaatggcaggatttccttct

SEQ ID NO: 228683 - DNA, 20 bp, Artificial Sequence
  Description of Artificial Sequence: Synthetic oligonucleotide
  Target: LAMA2; (-) strand; PAM type: YTN; PAM sequence: TTG
cctgaaatggcaggatttcc

SEQ ID NO: 228684 - DNA, 20 bp, Artificial Sequence
  Description of Artificial Sequence: Synthetic oligonucleotide
  Target: LAMA2; (-) strand; PAM type: YTN; PAM sequence: TTG
tccacattgcctgaaatggc

SEQ ID NO: 228685 - DNA, 20 bp, Artificial Sequence
  Description of Artificial Sequence: Synthetic oligonucleotide
  Target: LAMA2; (-) strand; PAM type: YTN; PAM sequence: TTC
atgttgtccacattgcctga

SEQ ID NO: 228686 - DNA, 20 bp, Artificial Sequence
  Description of Artificial Sequence: Synthetic oligonucleotide
  Target: LAMA2; (-) strand; PAM type: YTN; PAM sequence: CTT
catgttgtccacattgcctg

SEQ ID NO: 228687 - DNA, 20 bp, Artificial Sequence
  Description of Artificial Sequence: Synthetic oligonucleotide
  Target: LAMA2; (-) strand; PAM type: YTN; PAM sequence: TTA
acataatgtccttcatgttg

SEQ ID NO: 228688 - DNA, 20 bp, Artificial Sequence
  Description of Artificial Sequence: Synthetic oligonucleotide
  Target: LAMA2; (-) strand; PAM type: YTN; PAM sequence: CTT
aacataatgtccttcatgtt

SEQ ID NO: 228689 - DNA, 20 bp, Artificial Sequence
  Description of Artificial Sequence: Synthetic oligonucleotide
  Target: LAMA2; (-) strand; PAM type: YTN; PAM sequence: TTC
acttaacataatgtccttca

SEQ ID NO: 228690 - DNA, 20 bp, Artificial Sequence
  Description of Artificial Sequence: Synthetic oligonucleotide
  Target: LAMA2; (-) strand; PAM type: YTN; PAM sequence: CTT
cacttaacataatgtccttc

SEQ ID NO: 228691 - DNA, 20 bp, Artificial Sequence
  Description of Artificial Sequence: Synthetic oligonucleotide
  Target: LAMA2; (-) strand; PAM type: YTN; PAM sequence: TTA
cttcacttaacataatgtcc

SEQ ID NO: 228692 - DNA, 20 bp, Artificial Sequence
  Description of Artificial Sequence: Synthetic oligonucleotide
  Target: LAMA2; (-) strand; PAM type: YTN; PAM sequence: CTT
acttcacttaacataatgtc

SEQ ID NO: 228693 - DNA, 20 bp, Artificial Sequence
  Description of Artificial Sequence: Synthetic oligonucleotide
  Target: LAMA2; (-) strand; PAM type: YTN; PAM sequence: CTG
gcttacttcacttaacataa

SEQ ID NO: 228694 - DNA, 20 bp, Artificial Sequence
  Description of Artificial Sequence: Synthetic oligonucleotide
  Target: LAMA2; (-) strand; PAM type: YTN; PAM sequence: CTC
ctggcttacttcacttaaca

SEQ ID NO: 228695 - DNA, 20 bp, Artificial Sequence
  Description of Artificial Sequence: Synthetic oligonucleotide
  Target: LAMA2; (-) strand; PAM type: YTN; PAM sequence: TTC
cactcctggcttacttcact

SEQ ID NO: 228696 - DNA, 20 bp, Artificial Sequence
  Description of Artificial Sequence: Synthetic oligonucleotide
  Target: LAMA2; (-) strand; PAM type: YTN; PAM sequence: CTT
ccactcctggcttacttcac

SEQ ID NO: 228697 - DNA, 20 bp, Artificial Sequence
  Description of Artificial Sequence: Synthetic oligonucleotide
  Target: LAMA2; (-) strand; PAM type: YTN; PAM sequence: TTG
tccttccactcctggcttac

SEQ ID NO: 228698 - DNA, 20 bp, Artificial Sequence
  Description of Artificial Sequence: Synthetic oligonucleotide
  Target: LAMA2; (-) strand; PAM type: YTN; PAM sequence: TTT
gtccttccactcctggctta

SEQ ID NO: 228699 - DNA, 20 bp, Artificial Sequence
  Description of Artificial Sequence: Synthetic oligonucleotide
  Target: LAMA2; (-) strand; PAM type: YTN; PAM sequence: TTA
tataaatgatatcatgtaat

SEQ ID NO: 228700 - DNA, 20 bp, Artificial Sequence
  Description of Artificial Sequence: Synthetic oligonucleotide
  Target: LAMA2; (-) strand; PAM type: YTN; PAM sequence: CTT
atataaatgatatcatgtaa

SEQ ID NO: 228701 - DNA, 20 bp, Artificial Sequence
  Description of Artificial Sequence: Synthetic oligonucleotide
  Target: LAMA2; (-) strand; PAM type: YTN; PAM sequence: TTC
cttatataaatgatatcatg

SEQ ID NO: 228702 - DNA, 20 bp, Artificial Sequence
  Description of Artificial Sequence: Synthetic oligonucleotide
  Target: LAMA2; (-) strand; PAM type: YTN; PAM sequence: TTT
ccttatataaatgatatcat

SEQ ID NO: 228703 - DNA, 20 bp, Artificial Sequence
  Description of Artificial Sequence: Synthetic oligonucleotide
  Target: LAMA2; (-) strand; PAM type: YTN; PAM sequence: TTA
gtttccttatataaatgata

SEQ ID NO: 228704 - DNA, 20 bp, Artificial Sequence
  Description of Artificial Sequence: Synthetic oligonucleotide
  Target: LAMA2; (-) strand; PAM type: YTN; PAM sequence: TTT
agtttccttatataaatgat

SEQ ID NO: 228705 - DNA, 20 bp, Artificial Sequence
  Description of Artificial Sequence: Synthetic oligonucleotide
  Target: LAMA2; (-) strand; PAM type: YTN; PAM sequence: TTT
tagtttccttatataaatga

SEQ ID NO: 228706 - DNA, 20 bp, Artificial Sequence
  Description of Artificial Sequence: Synthetic oligonucleotide
  Target: LAMA2; (-) strand; PAM type: YTN; PAM sequence: CTA
ttttagtttccttatataaa

SEQ ID NO: 228707 - DNA, 20 bp, Artificial Sequence
  Description of Artificial Sequence: Synthetic oligonucleotide
  Target: LAMA2; (-) strand; PAM type: YTN; PAM sequence: TTG
actattttagtttccttata

SEQ ID NO: 228708 - DNA, 20 bp, Artificial Sequence
  Description of Artificial Sequence: Synthetic oligonucleotide
  Target: LAMA2; (-) strand; PAM type: YTN; PAM sequence: TTT
gactattttagtttccttat

SEQ ID NO: 228709 - DNA, 20 bp, Artificial Sequence
  Description of Artificial Sequence: Synthetic oligonucleotide
  Target: LAMA2; (-) strand; PAM type: YTN; PAM sequence: TTT
tgactattttagtttcctta

SEQ ID NO: 228710 - DNA, 20 bp, Artificial Sequence
  Description of Artificial Sequence: Synthetic oligonucleotide
  Target: LAMA2; (-) strand; PAM type: YTN; PAM sequence: CTG
agttttgactattttagttt

SEQ ID NO: 228711 - DNA, 20 bp, Artificial Sequence
  Description of Artificial Sequence: Synthetic oligonucleotide
  Target: LAMA2; (-) strand; PAM type: YTN; PAM sequence: TTC
tgagttttgactattttagt

SEQ ID NO: 228712 - DNA, 20 bp, Artificial Sequence
  Description of Artificial Sequence: Synthetic oligonucleotide
  Target: LAMA2; (-) strand; PAM type: YTN; PAM sequence: TTT
ctgagttttgactattttag

SEQ ID NO: 228713 - DNA, 20 bp, Artificial Sequence
  Description of Artificial Sequence: Synthetic oligonucleotide
  Target: LAMA2; (-) strand; PAM type: YTN; PAM sequence: CTC
atgtttctgagttttgacta

SEQ ID NO: 228714 - DNA, 20 bp, Artificial Sequence
  Description of Artificial Sequence: Synthetic oligonucleotide
  Target: LAMA2; (-) strand; PAM type: YTN; PAM sequence: CTC
tcatgtttctgagttttgac

SEQ ID NO: 228715 - DNA, 20 bp, Artificial Sequence
  Description of Artificial Sequence: Synthetic oligonucleotide
  Target: LAMA2; (-) strand; PAM type: YTN; PAM sequence: CTA
ctctcatgtttctgagtttt

SEQ ID NO: 228716 - DNA, 20 bp, Artificial Sequence
  Description of Artificial Sequence: Synthetic oligonucleotide
  Target: LAMA2; (-) strand; PAM type: YTN; PAM sequence: TTC
tactctcatgtttctgagtt

SEQ ID NO: 228717 - DNA, 20 bp, Artificial Sequence
  Description of Artificial Sequence: Synthetic oligonucleotide
  Target: LAMA2; (-) strand; PAM type: YTN; PAM sequence: CTA
ccattctactctcatgtttc

SEQ ID NO: 228718 - DNA, 20 bp, Artificial Sequence
  Description of Artificial Sequence: Synthetic oligonucleotide
  Target: LAMA2; (-) strand; PAM type: YTN; PAM sequence: CTG
gtaactaccattctactctc

SEQ ID NO: 228719 - DNA, 20 bp, Artificial Sequence
  Description of Artificial Sequence: Synthetic oligonucleotide
  Target: LAMA2; (-) strand; PAM type: YTN; PAM sequence: CTC
caacccagaccctggtaact

SEQ ID NO: 228720 - DNA, 20 bp, Artificial Sequence
  Description of Artificial Sequence: Synthetic oligonucleotide
  Target: LAMA2; (-) strand; PAM type: YTN; PAM sequence: TTC
cccctccaacccagaccctg

SEQ ID NO: 228721 - DNA, 20 bp, Artificial Sequence
  Description of Artificial Sequence: Synthetic oligonucleotide
  Target: LAMA2; (-) strand; PAM type: YTN; PAM sequence: TTT
ccccctccaacccagaccct

SEQ ID NO: 228722 - DNA, 20 bp, Artificial Sequence
  Description of Artificial Sequence: Synthetic oligonucleotide
  Target: LAMA2; (-) strand; PAM type: YTN; PAM sequence: CTG
tttccccctccaacccagac

SEQ ID NO: 228723 - DNA, 20 bp, Artificial Sequence
  Description of Artificial Sequence: Synthetic oligonucleotide
  Target: LAMA2; (-) strand; PAM type: YTN; PAM sequence: TTC
ctgtttccccctccaaccca

SEQ ID NO: 228724 - DNA, 20 bp, Artificial Sequence
  Description of Artificial Sequence: Synthetic oligonucleotide
  Target: LAMA2; (-) strand; PAM type: YTN; PAM sequence: TTT
cctgtttccccctccaaccc

SEQ ID NO: 228725 - DNA, 20 bp, Artificial Sequence
  Description of Artificial Sequence: Synthetic oligonucleotide
  Target: LAMA2; (-) strand; PAM type: YTN; PAM sequence: CTT
tcctgtttccccctccaacc

SEQ ID NO: 228726 - DNA, 20 bp, Artificial Sequence
  Description of Artificial Sequence: Synthetic oligonucleotide
  Target: LAMA2; (-) strand; PAM type: YTN; PAM sequence: CTA
atactttcctgtttccccct

SEQ ID NO: 228727 - DNA, 20 bp, Artificial Sequence
  Description of Artificial Sequence: Synthetic oligonucleotide
  Target: LAMA2; (-) strand; PAM type: YTN; PAM sequence: TTC
actaatactttcctgtttcc

SEQ ID NO: 228728 - DNA, 20 bp, Artificial Sequence
  Description of Artificial Sequence: Synthetic oligonucleotide
  Target: LAMA2; (-) strand; PAM type: YTN; PAM sequence: TTT
cactaatactttcctgtttc

SEQ ID NO: 228729 - DNA, 20 bp, Artificial Sequence
  Description of Artificial Sequence: Synthetic oligonucleotide
  Target: LAMA2; (-) strand; PAM type: YTN; PAM sequence: CTT
tcactaatactttcctgttt

SEQ ID NO: 228730 - DNA, 20 bp, Artificial Sequence
  Description of Artificial Sequence: Synthetic oligonucleotide
  Target: LAMA2; (-) strand; PAM type: YTN; PAM sequence: TTA
tcctttcactaatactttcc

SEQ ID NO: 228731 - DNA, 20 bp, Artificial Sequence
  Description of Artificial Sequence: Synthetic oligonucleotide
  Target: LAMA2; (-) strand; PAM type: YTN; PAM sequence: TTT
atcctttcactaatactttc

SEQ ID NO: 228732 - DNA, 20 bp, Artificial Sequence
  Description of Artificial Sequence: Synthetic oligonucleotide
  Target: LAMA2; (-) strand; PAM type: YTN; PAM sequence: TTT
tatcctttcactaatacttt

SEQ ID NO: 228733 - DNA, 20 bp, Artificial Sequence
  Description of Artificial Sequence: Synthetic oligonucleotide
  Target: LAMA2; (-) strand; PAM type: YTN; PAM sequence: TTT
ttatcctttcactaatactt

SEQ ID NO: 228734 - DNA, 20 bp, Artificial Sequence
  Description of Artificial Sequence: Synthetic oligonucleotide
  Target: LAMA2; (-) strand; PAM type: YTN; PAM sequence: CTT
tttatcctttcactaatact

SEQ ID NO: 228735 - DNA, 20 bp, Artificial Sequence
  Description of Artificial Sequence: Synthetic oligonucleotide
  Target: LAMA2; (-) strand; PAM type: YTN; PAM sequence: TTG
tataaataaaactttttatc

SEQ ID NO: 228736 - DNA, 20 bp, Artificial Sequence
  Description of Artificial Sequence: Synthetic oligonucleotide
  Target: LAMA2; (-) strand; PAM type: YTN; PAM sequence: CTT
gtataaataaaactttttat

SEQ ID NO: 228737 - DNA, 20 bp, Artificial Sequence
  Description of Artificial Sequence: Synthetic oligonucleotide
  Target: LAMA2; (-) strand; PAM type: YTN; PAM sequence: TTC
atcttgtataaataaaactt

SEQ ID NO: 228738 - DNA, 20 bp, Artificial Sequence
  Description of Artificial Sequence: Synthetic oligonucleotide
  Target: LAMA2; (-) strand; PAM type: YTN; PAM sequence: TTA
attcatcttgtataaataaa

SEQ ID NO: 228739 - DNA, 20 bp, Artificial Sequence
  Description of Artificial Sequence: Synthetic oligonucleotide
  Target: LAMA2; (-) strand; PAM type: YTN; PAM sequence: CTT
aattcatcttgtataaataa

SEQ ID NO: 228740 - DNA, 20 bp, Artificial Sequence
  Description of Artificial Sequence: Synthetic oligonucleotide
  Target: LAMA2; (-) strand; PAM type: YTN; PAM sequence: CTC
gaggacttaattcatcttgt

SEQ ID NO: 228741 - DNA, 20 bp, Artificial Sequence
  Description of Artificial Sequence: Synthetic oligonucleotide
  Target: LAMA2; (-) strand; PAM type: YTN; PAM sequence: CTA
tgcggtacagtagatctcga

SEQ ID NO: 228742 - DNA, 20 bp, Artificial Sequence
  Description of Artificial Sequence: Synthetic oligonucleotide
  Target: LAMA2; (-) strand; PAM type: YTN; PAM sequence: CTA
ggcactatgcggtacagtag

SEQ ID NO: 228743 - DNA, 20 bp, Artificial Sequence
  Description of Artificial Sequence: Synthetic oligonucleotide
  Target: LAMA2; (-) strand; PAM type: YTN; PAM sequence: TTA
agtctaggcactatgcggta

SEQ ID NO: 228744 - DNA, 20 bp, Artificial Sequence
  Description of Artificial Sequence: Synthetic oligonucleotide
  Target: LAMA2; (-) strand; PAM type: YTN; PAM sequence: TTC
aagcatacgatacagtaatg

SEQ ID NO: 228745 - DNA, 20 bp, Artificial Sequence
  Description of Artificial Sequence: Synthetic oligonucleotide
  Target: LAMA2; (-) strand; PAM type: YTN; PAM sequence: TTT
caagcatacgatacagtaat

SEQ ID NO: 228746 - DNA, 20 bp, Artificial Sequence
  Description of Artificial Sequence: Synthetic oligonucleotide
  Target: LAMA2; (-) strand; PAM type: YTN; PAM sequence: TTA
ggaaaatttcaagcatacga

SEQ ID NO: 228747 - DNA, 20 bp, Artificial Sequence
  Description of Artificial Sequence: Synthetic oligonucleotide
  Target: LAMA2; (-) strand; PAM type: YTN; PAM sequence: TTG
ttaggaaaatttcaagcata

SEQ ID NO: 228748 - DNA, 20 bp, Artificial Sequence
  Description of Artificial Sequence: Synthetic oligonucleotide
  Target: LAMA2; (-) strand; PAM type: YTN; PAM sequence: TTT
gttaggaaaatttcaagcat

SEQ ID NO: 228749 - DNA, 20 bp, Artificial Sequence
  Description of Artificial Sequence: Synthetic oligonucleotide
  Target: LAMA2; (-) strand; PAM type: YTN; PAM sequence: CTT
tgttaggaaaatttcaagca

SEQ ID NO: 228750 - DNA, 20 bp, Artificial Sequence
  Description of Artificial Sequence: Synthetic oligonucleotide
  Target: LAMA2; (-) strand; PAM type: YTN; PAM sequence: TTG
actttgttaggaaaatttca

SEQ ID NO: 228751 - DNA, 20 bp, Artificial Sequence
  Description of Artificial Sequence: Synthetic oligonucleotide
  Target: LAMA2; (-) strand; PAM type: YTN; PAM sequence: TTG
taagattgactttgttagga

SEQ ID NO: 228752 - DNA, 20 bp, Artificial Sequence
  Description of Artificial Sequence: Synthetic oligonucleotide
  Target: LAMA2; (-) strand; PAM type: YTN; PAM sequence: TTT
gtaagattgactttgttagg

SEQ ID NO: 228753 - DNA, 20 bp, Artificial Sequence
  Description of Artificial Sequence: Synthetic oligonucleotide
  Target: LAMA2; (-) strand; PAM type: YTN; PAM sequence: TTG
tgataagaacatttgtaaga

SEQ ID NO: 228754 - DNA, 20 bp, Artificial Sequence
  Description of Artificial Sequence: Synthetic oligonucleotide
  Target: LAMA2; (-) strand; PAM type: YTN; PAM sequence: TTT
gtgataagaacatttgtaag

SEQ ID NO: 228755 - DNA, 20 bp, Artificial Sequence
  Description of Artificial Sequence: Synthetic oligonucleotide
  Target: LAMA2; (-) strand; PAM type: YTN; PAM sequence: TTT
tgtgataagaacatttgtaa

SEQ ID NO: 228756 - DNA, 20 bp, Artificial Sequence
  Description of Artificial Sequence: Synthetic oligonucleotide
  Target: LAMA2; (-) strand; PAM type: YTN; PAM sequence: TTA
ttttgtgataagaacatttg

SEQ ID NO: 228757 - DNA, 20 bp, Artificial Sequence
  Description of Artificial Sequence: Synthetic oligonucleotide
  Target: LAMA2; (-) strand; PAM type: YTN; PAM sequence: TTA
ttattttgtgataagaacat

SEQ ID NO: 228758 - DNA, 20 bp, Artificial Sequence
  Description of Artificial Sequence: Synthetic oligonucleotide
  Target: LAMA2; (-) strand; PAM type: YTN; PAM sequence: TTA
ttattattttgtgataagaa

SEQ ID NO: 228759 - DNA, 20 bp, Artificial Sequence
  Description of Artificial Sequence: Synthetic oligonucleotide
  Target: LAMA2; (-) strand; PAM type: YTN; PAM sequence: TTA
ttattattattttgtgataa

SEQ ID NO: 228760 - DNA, 20 bp, Artificial Sequence
  Description of Artificial Sequence: Synthetic oligonucleotide
  Target: LAMA2; (-) strand; PAM type: YTN; PAM sequence: TTT
attattattattttgtgata

SEQ ID NO: 228761 - DNA, 20 bp, Artificial Sequence
  Description of Artificial Sequence: Synthetic oligonucleotide
  Target: LAMA2; (-) strand; PAM type: YTN; PAM sequence: CTT
tattattattattttgtgat

SEQ ID NO: 228762 - DNA, 20 bp, Artificial Sequence
  Description of Artificial Sequence: Synthetic oligonucleotide
  Target: LAMA2; (-) strand; PAM type: YTN; PAM sequence: CTC
tttattattattattttgtg

SEQ ID NO: 228763 - DNA, 20 bp, Artificial Sequence
  Description of Artificial Sequence: Synthetic oligonucleotide
  Target: LAMA2; (-) strand; PAM type: YTN; PAM sequence: CTC
tctttattattattattttg

SEQ ID NO: 228764 - DNA, 20 bp, Artificial Sequence
  Description of Artificial Sequence: Synthetic oligonucleotide
  Target: LAMA2; (-) strand; PAM type: YTN; PAM sequence: CTC
actctctttattattattat

SEQ ID NO: 228765 - DNA, 20 bp, Artificial Sequence
  Description of Artificial Sequence: Synthetic oligonucleotide
  Target: LAMA2; (-) strand; PAM type: YTN; PAM sequence: CTC
tcactctctttattattatt

SEQ ID NO: 228766 - DNA, 20 bp, Artificial Sequence
  Description of Artificial Sequence: Synthetic oligonucleotide
  Target: LAMA2; (-) strand; PAM type: YTN; PAM sequence: TTC
tctcactctctttattatta

SEQ ID NO: 228767 - DNA, 20 bp, Artificial Sequence
  Description of Artificial Sequence: Synthetic oligonucleotide
  Target: LAMA2; (-) strand; PAM type: YTN; PAM sequence: TTT
ctctcactctctttattatt

SEQ ID NO: 228768 - DNA, 20 bp, Artificial Sequence
  Description of Artificial Sequence: Synthetic oligonucleotide
  Target: LAMA2; (-) strand; PAM type: YTN; PAM sequence: TTT
tctctcactctctttattat

SEQ ID NO: 228769 - DNA, 20 bp, Artificial Sequence
  Description of Artificial Sequence: Synthetic oligonucleotide
  Target: LAMA2; (-) strand; PAM type: YTN; PAM sequence: CTC
caaaagttttctctcactct

SEQ ID NO: 228770 - DNA, 20 bp, Artificial Sequence
  Description of Artificial Sequence: Synthetic oligonucleotide
  Target: LAMA2; (-) strand; PAM type: YTN; PAM sequence: CTG
ccacatatatatcaataacc

SEQ ID NO: 228771 - DNA, 20 bp, Artificial Sequence
  Description of Artificial Sequence: Synthetic oligonucleotide
  Target: LAMA2; (-) strand; PAM type: YTN; PAM sequence: CTC
tgccacatatatatcaataa

SEQ ID NO: 228772 - DNA, 20 bp, Artificial Sequence
  Description of Artificial Sequence: Synthetic oligonucleotide
  Target: LAMA2; (-) strand; PAM type: YTN; PAM sequence: TTG
gagataagtatgcaccagcg

SEQ ID NO: 228773 - DNA, 20 bp, Artificial Sequence
  Description of Artificial Sequence: Synthetic oligonucleotide
  Target: LAMA2; (-) strand; PAM type: YTN; PAM sequence: TTT
ggagataagtatgcaccagc

SEQ ID NO: 228774 - DNA, 20 bp, Artificial Sequence
  Description of Artificial Sequence: Synthetic oligonucleotide
  Target: LAMA2; (-) strand; PAM type: YTN; PAM sequence: CTA
atgagtttggagataagtat

SEQ ID NO: 228775 - DNA, 20 bp, Artificial Sequence
  Description of Artificial Sequence: Synthetic oligonucleotide
  Target: LAMA2; (-) strand; PAM type: YTN; PAM sequence: TTG
atgtatacaacctaatgagt

SEQ ID NO: 228776 - DNA, 20 bp, Artificial Sequence
  Description of Artificial Sequence: Synthetic oligonucleotide
  Target: LAMA2; (-) strand; PAM type: YTN; PAM sequence: TTT
gatgtatacaacctaatgag

SEQ ID NO: 228777 - DNA, 20 bp, Artificial Sequence
  Description of Artificial Sequence: Synthetic oligonucleotide
  Target: LAMA2; (-) strand; PAM type: YTN; PAM sequence: TTA
cgtatttgatgtatacaacc

SEQ ID NO: 228778 - DNA, 20 bp, Artificial Sequence
  Description of Artificial Sequence: Synthetic oligonucleotide
  Target: LAMA2; (-) strand; PAM type: YTN; PAM sequence: CTT
acgtatttgatgtatacaac

SEQ ID NO: 228779 - DNA, 20 bp, Artificial Sequence
  Description of Artificial Sequence: Synthetic oligonucleotide
  Target: LAMA2; (-) strand; PAM type: YTN; PAM sequence: TTG
acatacaaaaagccttacgt

SEQ ID NO: 228780 - DNA, 20 bp, Artificial Sequence
  Description of Artificial Sequence: Synthetic oligonucleotide
  Target: LAMA2; (-) strand; PAM type: YTN; PAM sequence: TTG
attgacatacaaaaagcctt

SEQ ID NO: 228781 - DNA, 20 bp, Artificial Sequence
  Description of Artificial Sequence: Synthetic oligonucleotide
  Target: LAMA2; (-) strand; PAM type: YTN; PAM sequence: TTG
aggttgattgacatacaaaa

SEQ ID NO: 228782 - DNA, 20 bp, Artificial Sequence
  Description of Artificial Sequence: Synthetic oligonucleotide
  Target: LAMA2; (-) strand; PAM type: YTN; PAM sequence: TTA
aaaaaaacatgttgaggttg

SEQ ID NO: 228783 - DNA, 20 bp, Artificial Sequence
  Description of Artificial Sequence: Synthetic oligonucleotide
  Target: LAMA2; (-) strand; PAM type: YTN; PAM sequence: TTT
aaaaaaaacatgttgaggtt

SEQ ID NO: 228784 - DNA, 20 bp, Artificial Sequence
  Description of Artificial Sequence: Synthetic oligonucleotide
  Target: LAMA2; (-) strand; PAM type: YTN; PAM sequence: CTT
taaaaaaaacatgttgaggt

SEQ ID NO: 228785 - DNA, 20 bp, Artificial Sequence
  Description of Artificial Sequence: Synthetic oligonucleotide
  Target: LAMA2; (-) strand; PAM type: YTN; PAM sequence: CTG
ctttaaaaaaaacatgttga

SEQ ID NO: 228786 - DNA, 20 bp, Artificial Sequence
  Description of Artificial Sequence: Synthetic oligonucleotide
  Target: LAMA2; (-) strand; PAM type: YTN; PAM sequence: CTA
tactgctttaaaaaaaacat

SEQ ID NO: 228787 - DNA, 20 bp, Artificial Sequence
  Description of Artificial Sequence: Synthetic oligonucleotide
  Target: LAMA2; (-) strand; PAM type: YTN; PAM sequence: TTC
tatactgctttaaaaaaaac

SEQ ID NO: 228788 - DNA, 20 bp, Artificial Sequence
  Description of Artificial Sequence: Synthetic oligonucleotide
  Target: LAMA2; (-) strand; PAM type: YTN; PAM sequence: TTT
ctatactgctttaaaaaaaa

SEQ ID NO: 228789 - DNA, 20 bp, Artificial Sequence
  Description of Artificial Sequence: Synthetic oligonucleotide
  Target: LAMA2; (-) strand; PAM type: YTN; PAM sequence: TTA
aaaaataggtatttctatac

SEQ ID NO: 228790 - DNA, 20 bp, Artificial Sequence
  Description of Artificial Sequence: Synthetic oligonucleotide
  Target: LAMA2; (-) strand; PAM type: YTN; PAM sequence: TTT
aaaaaataggtatttctata

SEQ ID NO: 228791 - DNA, 20 bp, Artificial Sequence
  Description of Artificial Sequence: Synthetic oligonucleotide
  Target: LAMA2; (-) strand; PAM type: YTN; PAM sequence: TTT
taaaaaataggtatttctat

SEQ ID NO: 228792 - DNA, 20 bp, Artificial Sequence
  Description of Artificial Sequence: Synthetic oligonucleotide
  Target: LAMA2; (-) strand; PAM type: YTN; PAM sequence: TTG
taataattttaaaaaatagg

SEQ ID NO: 228793 - DNA, 20 bp, Artificial Sequence
  Description of Artificial Sequence: Synthetic oligonucleotide
  Target: LAMA2; (-) strand; PAM type: YTN; PAM sequence: TTC
agttgtaataattttaaaaa

SEQ ID NO: 228794 - DNA, 20 bp, Artificial Sequence
  Description of Artificial Sequence: Synthetic oligonucleotide
  Target: LAMA2; (-) strand; PAM type: YTN; PAM sequence: TTT
cagttgtaataattttaaaa

SEQ ID NO: 228795 - DNA, 20 bp, Artificial Sequence
  Description of Artificial Sequence: Synthetic oligonucleotide
  Target: LAMA2; (-) strand; PAM type: YTN; PAM sequence: CTT
tcagttgtaataattttaaa

SEQ ID NO: 228796 - DNA, 20 bp, Artificial Sequence
  Description of Artificial Sequence: Synthetic oligonucleotide
  Target: LAMA2; (-) strand; PAM type: YTN; PAM sequence: TTA
gaaggctttcagttgtaata

SEQ ID NO: 228797 - DNA, 20 bp, Artificial Sequence
  Description of Artificial Sequence: Synthetic oligonucleotide
  Target: LAMA2; (-) strand; PAM type: YTN; PAM sequence: TTC
aagaaaacaccacaagttag

SEQ ID NO: 228798 - DNA, 20 bp, Artificial Sequence
  Description of Artificial Sequence: Synthetic oligonucleotide
  Target: LAMA2; (-) strand; PAM type: YTN; PAM sequence: TTT
caagaaaacaccacaagtta

SEQ ID NO: 228799 - DNA, 20 bp, Artificial Sequence
  Description of Artificial Sequence: Synthetic oligonucleotide
  Target: LAMA2; (-) strand; PAM type: YTN; PAM sequence: TTA
tttcaagaaaacaccacaag

SEQ ID NO: 228800 - DNA, 20 bp, Artificial Sequence
  Description of Artificial Sequence: Synthetic oligonucleotide
  Target: LAMA2; (-) strand; PAM type: YTN; PAM sequence: TTA
ttatttcaagaaaacaccac

SEQ ID NO: 228801 - DNA, 20 bp, Artificial Sequence
  Description of Artificial Sequence: Synthetic oligonucleotide
  Target: LAMA2; (-) strand; PAM type: YTN; PAM sequence: TTA
accaagatacgattattatt

SEQ ID NO: 228802 - DNA, 20 bp, Artificial Sequence
  Description of Artificial Sequence: Synthetic oligonucleotide
  Target: LAMA2; (-) strand; PAM type: YTN; PAM sequence: CTA
ttaaccaagatacgattatt

SEQ ID NO: 228803 - DNA, 20 bp, Artificial Sequence
  Description of Artificial Sequence: Synthetic oligonucleotide
  Target: LAMA2; (-) strand; PAM type: YTN; PAM sequence: CTC
aactattaaccaagatacga

SEQ ID NO: 228804 - DNA, 20 bp, Artificial Sequence
  Description of Artificial Sequence: Synthetic oligonucleotide
  Target: LAMA2; (-) strand; PAM type: YTN; PAM sequence: TTA
gatctcaactattaaccaag

SEQ ID NO: 228805 - DNA, 20 bp, Artificial Sequence
  Description of Artificial Sequence: Synthetic oligonucleotide
  Target: LAMA2; (-) strand; PAM type: YTN; PAM sequence: TTT
agatctcaactattaaccaa

SEQ ID NO: 228806 - DNA, 20 bp, Artificial Sequence
  Description of Artificial Sequence: Synthetic oligonucleotide
  Target: LAMA2; (-) strand; PAM type: YTN; PAM sequence: TTT
tagatctcaactattaacca

SEQ ID NO: 228807 - DNA, 20 bp, Artificial Sequence
  Description of Artificial Sequence: Synthetic oligonucleotide
  Target: LAMA2; (-) strand; PAM type: YTN; PAM sequence: CTT
ttagatctcaactattaacc

SEQ ID NO: 228808 - DNA, 20 bp, Artificial Sequence
  Description of Artificial Sequence: Synthetic oligonucleotide
  Target: LAMA2; (-) strand; PAM type: YTN; PAM sequence: CTA
agcttttagatctcaactat

SEQ ID NO: 228809 - DNA, 20 bp, Artificial Sequence
  Description of Artificial Sequence: Synthetic oligonucleotide
  Target: LAMA2; (-) strand; PAM type: YTN; PAM sequence: TTA
ggcctaagcttttagatctc

SEQ ID NO: 228810 - DNA, 20 bp, Artificial Sequence
  Description of Artificial Sequence: Synthetic oligonucleotide
  Target: LAMA2; (-) strand; PAM type: YTN; PAM sequence: TTT
aggcctaagcttttagatct

SEQ ID NO: 228811 - DNA, 20 bp, Artificial Sequence
  Description of Artificial Sequence: Synthetic oligonucleotide
  Target: LAMA2; (-) strand; PAM type: YTN; PAM sequence: CTG
aatttaggcctaagctttta

SEQ ID NO: 228812 - DNA, 20 bp, Artificial Sequence
  Description of Artificial Sequence: Synthetic oligonucleotide
  Target: LAMA2; (-) strand; PAM type: YTN; PAM sequence: CTA
tctgaatttaggcctaagct

SEQ ID NO: 228813 - DNA, 20 bp, Artificial Sequence
  Description of Artificial Sequence: Synthetic oligonucleotide
  Target: LAMA2; (-) strand; PAM type: YTN; PAM sequence: TTC
tatctgaatttaggcctaag

SEQ ID NO: 228814 - DNA, 20 bp, Artificial Sequence
  Description of Artificial Sequence: Synthetic oligonucleotide
  Target: LAMA2; (-) strand; PAM type: YTN; PAM sequence: TTT
ctatctgaatttaggcctaa

SEQ ID NO: 228815 - DNA, 20 bp, Artificial Sequence
  Description of Artificial Sequence: Synthetic oligonucleotide
  Target: LAMA2; (-) strand; PAM type: YTN; PAM sequence: CTT
tctatctgaatttaggccta

SEQ ID NO: 228816 - DNA, 20 bp, Artificial Sequence
  Description of Artificial Sequence: Synthetic oligonucleotide
  Target: LAMA2; (-) strand; PAM type: YTN; PAM sequence: TTA
caacagatgtgccaagcttt

SEQ ID NO: 228817 - DNA, 20 bp, Artificial Sequence
  Description of Artificial Sequence: Synthetic oligonucleotide
  Target: LAMA2; (-) strand; PAM type: YTN; PAM sequence: CTT
acaacagatgtgccaagctt

SEQ ID NO: 228818 - DNA, 20 bp, Artificial Sequence
  Description of Artificial Sequence: Synthetic oligonucleotide
  Target: LAMA2; (-) strand; PAM type: YTN; PAM sequence: TTC
aaaacttacaacagatgtgc

SEQ ID NO: 228819 - DNA, 20 bp, Artificial Sequence
  Description of Artificial Sequence: Synthetic oligonucleotide
  Target: LAMA2; (-) strand; PAM type: YTN; PAM sequence: TTT
caaaacttacaacagatgtg

SEQ ID NO: 228820 - DNA, 20 bp, Artificial Sequence
  Description of Artificial Sequence: Synthetic oligonucleotide
  Target: LAMA2; (-) strand; PAM type: YTN; PAM sequence: CTG
gtttcaaaacttacaacaga

SEQ ID NO: 228821 - DNA, 20 bp, Artificial Sequence
  Description of Artificial Sequence: Synthetic oligonucleotide
  Target: LAMA2; (-) strand; PAM type: YTN; PAM sequence: CTG
tgcacctggtttcaaaactt

SEQ ID NO: 228822 - DNA, 20 bp, Artificial Sequence
  Description of Artificial Sequence: Synthetic oligonucleotide
  Target: LAMA2; (-) strand; PAM type: YTN; PAM sequence: CTG
gaacaaagatggtctgtgca

SEQ ID NO: 228823 - DNA, 20 bp, Artificial Sequence
  Description of Artificial Sequence: Synthetic oligonucleotide
  Target: LAMA2; (-) strand; PAM type: YTN; PAM sequence: CTG
agaagatcgtctggaacaaa

SEQ ID NO: 228824 - DNA, 20 bp, Artificial Sequence
  Description of Artificial Sequence: Synthetic oligonucleotide
  Target: LAMA2; (-) strand; PAM type: YTN; PAM sequence: TTA
caaacatccctgagaagatc

SEQ ID NO: 228825 - DNA, 20 bp, Artificial Sequence
  Description of Artificial Sequence: Synthetic oligonucleotide
  Target: LAMA2; (-) strand; PAM type: YTN; PAM sequence: TTT
acaaacatccctgagaagat

SEQ ID NO: 228826 - DNA, 20 bp, Artificial Sequence
  Description of Artificial Sequence: Synthetic oligonucleotide
  Target: LAMA2; (-) strand; PAM type: YTN; PAM sequence: CTT
tacaaacatccctgagaaga

SEQ ID NO: 228827 - DNA, 20 bp, Artificial Sequence
  Description of Artificial Sequence: Synthetic oligonucleotide
  Target: LAMA2; (-) strand; PAM type: YTN; PAM sequence: TTC
actttacaaacatccctgag

SEQ ID NO: 228828 - DNA, 20 bp, Artificial Sequence
  Description of Artificial Sequence: Synthetic oligonucleotide
  Target: LAMA2; (-) strand; PAM type: YTN; PAM sequence: CTG
ttcactttacaaacatccct

SEQ ID NO: 228829 - DNA, 20 bp, Artificial Sequence
  Description of Artificial Sequence: Synthetic oligonucleotide
  Target: LAMA2; (-) strand; PAM type: YTN; PAM sequence: TTC
caaggctgttcactttacaa

SEQ ID NO: 228830 - DNA, 20 bp, Artificial Sequence
  Description of Artificial Sequence: Synthetic oligonucleotide
  Target: LAMA2; (-) strand; PAM type: YTN; PAM sequence: CTT
ccaaggctgttcactttaca

SEQ ID NO: 228831 - DNA, 20 bp, Artificial Sequence
  Description of Artificial Sequence: Synthetic oligonucleotide
  Target: LAMA2; (-) strand; PAM type: YTN; PAM sequence: CTA
ccttccaaggctgttcactt

SEQ ID NO: 228832 - DNA, 20 bp, Artificial Sequence
  Description of Artificial Sequence: Synthetic oligonucleotide
  Target: LAMA2; (-) strand; PAM type: YTN; PAM sequence: CTC
taccttccaaggctgttcac

SEQ ID NO: 228833 - DNA, 20 bp, Artificial Sequence
  Description of Artificial Sequence: Synthetic oligonucleotide
  Target: LAMA2; (-) strand; PAM type: YTN; PAM sequence: TTC
ccagggggacatcatctcta

SEQ ID NO: 228834 - DNA, 20 bp, Artificial Sequence
  Description of Artificial Sequence: Synthetic oligonucleotide
  Target: LAMA2; (-) strand; PAM type: YTN; PAM sequence: CTT
cccagggggacatcatctct

SEQ ID NO: 228835 - DNA, 20 bp, Artificial Sequence
  Description of Artificial Sequence: Synthetic oligonucleotide
  Target: LAMA2; (-) strand; PAM type: YTN; PAM sequence: TTG
cttcccagggggacatcatc

SEQ ID NO: 228836 - DNA, 20 bp, Artificial Sequence
  Description of Artificial Sequence: Synthetic oligonucleotide
  Target: LAMA2; (-) strand; PAM type: YTN; PAM sequence: TTT
gcttcccagggggacatcat

SEQ ID NO: 228837 - DNA, 20 bp, Artificial Sequence
  Description of Artificial Sequence: Synthetic oligonucleotide
  Target: LAMA2; (-) strand; PAM type: YTN; PAM sequence: CTT
tgcttcccagggggacatca

SEQ ID NO: 228838 - DNA, 20 bp, Artificial Sequence
  Description of Artificial Sequence: Synthetic oligonucleotide
  Target: LAMA2; (-) strand; PAM type: YTN; PAM sequence: CTA
ccctttgcttcccaggggga

SEQ ID NO: 228839 - DNA, 20 bp, Artificial Sequence
  Description of Artificial Sequence: Synthetic oligonucleotide
  Target: LAMA2; (-) strand; PAM type: YTN; PAM sequence: CTA
tgagtaaacctaccctttgc

SEQ ID NO: 228840 - DNA, 20 bp, Artificial Sequence
  Description of Artificial Sequence: Synthetic oligonucleotide
  Target: LAMA2; (-) strand; PAM type: YTN; PAM sequence: TTC
ccaagctatgagtaaaccta

SEQ ID NO: 228841 - DNA, 20 bp, Artificial Sequence
  Description of Artificial Sequence: Synthetic oligonucleotide
  Target: LAMA2; (-) strand; PAM type: YTN; PAM sequence: CTT
cccaagctatgagtaaacct

SEQ ID NO: 228842 - DNA, 20 bp, Artificial Sequence
  Description of Artificial Sequence: Synthetic oligonucleotide
  Target: LAMA2; (-) strand; PAM type: YTN; PAM sequence: CTC
ttcccaagctatgagtaaac

SEQ ID NO: 228843 - DNA, 20 bp, Artificial Sequence
  Description of Artificial Sequence: Synthetic oligonucleotide
  Target: LAMA2; (-) strand; PAM type: YTN; PAM sequence: CTC
tcttcccaagctatgagtaa

SEQ ID NO: 228844 - DNA, 20 bp, Artificial Sequence
  Description of Artificial Sequence: Synthetic oligonucleotide
  Target: LAMA2; (-) strand; PAM type: YTN; PAM sequence: CTC
tctcttcccaagctatgagt

SEQ ID NO: 228845 - DNA, 20 bp, Artificial Sequence
  Description of Artificial Sequence: Synthetic oligonucleotide
  Target: LAMA2; (-) strand; PAM type: YTN; PAM sequence: CTG
gagggagacaccatctctct

SEQ ID NO: 228846 - DNA, 20 bp, Artificial Sequence
  Description of Artificial Sequence: Synthetic oligonucleotide
  Target: LAMA2; (-) strand; PAM type: YTN; PAM sequence: CTC
atctggagggagacaccatc

SEQ ID NO: 228847 - DNA, 20 bp, Artificial Sequence
  Description of Artificial Sequence: Synthetic oligonucleotide
  Target: LAMA2; (-) strand; PAM type: YTN; PAM sequence: TTC
ccctcatctggagggagaca

SEQ ID NO: 228848 - DNA, 20 bp, Artificial Sequence
  Description of Artificial Sequence: Synthetic oligonucleotide
  Target: LAMA2; (-) strand; PAM type: YTN; PAM sequence: TTA
tgggtggtaaatatattccc

SEQ ID NO: 228849 - DNA, 20 bp, Artificial Sequence
  Description of Artificial Sequence: Synthetic oligonucleotide
  Target: LAMA2; (-) strand; PAM type: YTN; PAM sequence: CTT
atgggtggtaaatatattcc

SEQ ID NO: 228850 - DNA, 20 bp, Artificial Sequence
  Description of Artificial Sequence: Synthetic oligonucleotide
  Target: LAMA2; (-) strand; PAM type: YTN; PAM sequence: TTC
ttatgggtggtaaatatatt

SEQ ID NO: 228851 - DNA, 20 bp, Artificial Sequence
  Description of Artificial Sequence: Synthetic oligonucleotide
  Target: LAMA2; (-) strand; PAM type: YTN; PAM sequence: TTT
cttatgggtggtaaatatat

SEQ ID NO: 228852 - DNA, 20 bp, Artificial Sequence
  Description of Artificial Sequence: Synthetic oligonucleotide
  Target: LAMA2; (-) strand; PAM type: YTN; PAM sequence: TTT
tcttatgggtggtaaatata

SEQ ID NO: 228853 - DNA, 20 bp, Artificial Sequence
  Description of Artificial Sequence: Synthetic oligonucleotide
  Target: LAMA2; (-) strand; PAM type: YTN; PAM sequence: CTT
ttcttatgggtggtaaatat

SEQ ID NO: 228854 - DNA, 20 bp, Artificial Sequence
  Description of Artificial Sequence: Synthetic oligonucleotide
  Target: LAMA2; (-) strand; PAM type: YTN; PAM sequence: TTC
aaatcttttcttatgggtgg

SEQ ID NO: 228855 - DNA, 20 bp, Artificial Sequence
  Description of Artificial Sequence: Synthetic oligonucleotide
  Target: LAMA2; (-) strand; PAM type: YTN; PAM sequence: TTA
atgggttcaaatcttttctt

SEQ ID NO: 228856 - DNA, 20 bp, Artificial Sequence
  Description of Artificial Sequence: Synthetic oligonucleotide
  Target: LAMA2; (-) strand; PAM type: YTN; PAM sequence: CTT
aatgggttcaaatcttttct

SEQ ID NO: 228857 - DNA, 20 bp, Artificial Sequence
  Description of Artificial Sequence: Synthetic oligonucleotide
  Target: LAMA2; (-) strand; PAM type: YTN; PAM sequence: CTC
agcttaatgggttcaaatct

SEQ ID NO: 228858 - DNA, 20 bp, Artificial Sequence
  Description of Artificial Sequence: Synthetic oligonucleotide
  Target: LAMA2; (-) strand; PAM type: YTN; PAM sequence: TTA
cagaagaggaaccctcagct

SEQ ID NO: 228859 - DNA, 20 bp, Artificial Sequence
  Description of Artificial Sequence: Synthetic oligonucleotide
  Target: LAMA2; (-) strand; PAM type: YTN; PAM sequence: CTC
acagtgggtggtgttacaga

SEQ ID NO: 228860 - DNA, 20 bp, Artificial Sequence
  Description of Artificial Sequence: Synthetic oligonucleotide
  Target: LAMA2; (-) strand; PAM type: YTN; PAM sequence: CTC
cactcacagtgggtggtgtt

SEQ ID NO: 228861 - DNA, 20 bp, Artificial Sequence
  Description of Artificial Sequence: Synthetic oligonucleotide
  Target: LAMA2; (-) strand; PAM type: YTN; PAM sequence: CTG
atgcctccactcacagtggg

SEQ ID NO: 228862 - DNA, 20 bp, Artificial Sequence
  Description of Artificial Sequence: Synthetic oligonucleotide
  Target: LAMA2; (-) strand; PAM type: YTN; PAM sequence: CTG
cagagagatagaaagcaggc

SEQ ID NO: 228863 - DNA, 20 bp, Artificial Sequence
  Description of Artificial Sequence: Synthetic oligonucleotide
  Target: LAMA2; (-) strand; PAM type: YTN; PAM sequence: TTC
ctgcagagagatagaaagca

SEQ ID NO: 228864 - DNA, 20 bp, Artificial Sequence
  Description of Artificial Sequence: Synthetic oligonucleotide
  Target: LAMA2; (-) strand; PAM type: YTN; PAM sequence: CTT
cctgcagagagatagaaagc

SEQ ID NO: 228865 - DNA, 20 bp, Artificial Sequence
  Description of Artificial Sequence: Synthetic oligonucleotide
  Target: LAMA2; (-) strand; PAM type: YTN; PAM sequence: CTA
cttcctgcagagagatagaa

SEQ ID NO: 228866 - DNA, 20 bp, Artificial Sequence
  Description of Artificial Sequence: Synthetic oligonucleotide
  Target: LAMA2; (-) strand; PAM type: YTN; PAM sequence: CTC
tacttcctgcagagagatag

SEQ ID NO: 228867 - DNA, 20 bp, Artificial Sequence
  Description of Artificial Sequence: Synthetic oligonucleotide
  Target: LAMA2; (-) strand; PAM type: YTN; PAM sequence: CTG
ggctctacttcctgcagaga

SEQ ID NO: 228868 - DNA, 20 bp, Artificial Sequence
  Description of Artificial Sequence: Synthetic oligonucleotide
  Target: LAMA2; (-) strand; PAM type: YTN; PAM sequence: TTG
cctgggctctacttcctgca

SEQ ID NO: 228869 - DNA, 20 bp, Artificial Sequence
  Description of Artificial Sequence: Synthetic oligonucleotide
  Target: LAMA2; (-) strand; PAM type: YTN; PAM sequence: TTG
gtgccagttgcctgggctct

SEQ ID NO: 228870 - DNA, 20 bp, Artificial Sequence
  Description of Artificial Sequence: Synthetic oligonucleotide
  Target: LAMA2; (-) strand; PAM type: YTN; PAM sequence: TTT
ggtgccagttgcctgggctc

SEQ ID NO: 228871 - DNA, 20 bp, Artificial Sequence
  Description of Artificial Sequence: Synthetic oligonucleotide
  Target: LAMA2; (-) strand; PAM type: YTN; PAM sequence: TTG
gcatatttggtgccagttgc

SEQ ID NO: 228872 - DNA, 20 bp, Artificial Sequence
  Description of Artificial Sequence: Synthetic oligonucleotide
  Target: LAMA2; (-) strand; PAM type: YTN; PAM sequence: TTT
ggcatatttggtgccagttg

SEQ ID NO: 228873 - DNA, 20 bp, Artificial Sequence
  Description of Artificial Sequence: Synthetic oligonucleotide
  Target: LAMA2; (-) strand; PAM type: YTN; PAM sequence: CTT
tggcatatttggtgccagtt

SEQ ID NO: 228874 - DNA, 20 bp, Artificial Sequence
  Description of Artificial Sequence: Synthetic oligonucleotide
  Target: LAMA2; (-) strand; PAM type: YTN; PAM sequence: CTC
acagcccaggaagcagcata

SEQ ID NO: 228875 - DNA, 20 bp, Artificial Sequence
  Description of Artificial Sequence: Synthetic oligonucleotide
  Target: LAMA2; (-) strand; PAM type: YTN; PAM sequence: TTA
ctcacagcccaggaagcagc

SEQ ID NO: 228876 - DNA, 20 bp, Artificial Sequence
  Description of Artificial Sequence: Synthetic oligonucleotide
  Target: LAMA2; (-) strand; PAM type: YTN; PAM sequence: TTA
ttactcacagcccaggaagc

SEQ ID NO: 228877 - DNA, 20 bp, Artificial Sequence
  Description of Artificial Sequence: Synthetic oligonucleotide
  Target: LAMA2; (-) strand; PAM type: YTN; PAM sequence: TTT
attactcacagcccaggaag

SEQ ID NO: 228878 - DNA, 20 bp, Artificial Sequence
  Description of Artificial Sequence: Synthetic oligonucleotide
  Target: LAMA2; (-) strand; PAM type: YTN; PAM sequence: CTT
tattactcacagcccaggaa

SEQ ID NO: 228879 - DNA, 20 bp, Artificial Sequence
  Description of Artificial Sequence: Synthetic oligonucleotide
  Target: LAMA2; (-) strand; PAM type: YTN; PAM sequence: CTA
aaagagggaaaagggacttt

SEQ ID NO: 228880 - DNA, 20 bp, Artificial Sequence
  Description of Artificial Sequence: Synthetic oligonucleotide
  Target: LAMA2; (-) strand; PAM type: YTN; PAM sequence: TTC
taaaagagggaaaagggact

SEQ ID NO: 228881 - DNA, 20 bp, Artificial Sequence
  Description of Artificial Sequence: Synthetic oligonucleotide
  Target: LAMA2; (-) strand; PAM type: YTN; PAM sequence: CTT
ctaaaagagggaaaagggac

SEQ ID NO: 228882 - DNA, 20 bp, Artificial Sequence
  Description of Artificial Sequence: Synthetic oligonucleotide
  Target: LAMA2; (-) strand; PAM type: YTN; PAM sequence: CTG
acagaacatatgagacttct

SEQ ID NO: 228883 - DNA, 20 bp, Artificial Sequence
  Description of Artificial Sequence: Synthetic oligonucleotide
  Target: LAMA2; (-) strand; PAM type: YTN; PAM sequence: CTG
ctgacagaacatatgagact

SEQ ID NO: 228884 - DNA, 20 bp, Artificial Sequence
  Description of Artificial Sequence: Synthetic oligonucleotide
  Target: LAMA2; (-) strand; PAM type: YTN; PAM sequence: TTG
gtggctgctgacagaacata

SEQ ID NO: 228885 - DNA, 20 bp, Artificial Sequence
  Description of Artificial Sequence: Synthetic oligonucleotide
  Target: LAMA2; (-) strand; PAM type: YTN; PAM sequence: CTT
ggtggctgctgacagaacat

SEQ ID NO: 228886 - DNA, 20 bp, Artificial Sequence
  Description of Artificial Sequence: Synthetic oligonucleotide
  Target: LAMA2; (-) strand; PAM type: YTN; PAM sequence: CTG
acacagcttggtggctgctg

SEQ ID NO: 228887 - DNA, 20 bp, Artificial Sequence
  Description of Artificial Sequence: Synthetic oligonucleotide
  Target: LAMA2; (-) strand; PAM type: YTN; PAM sequence: TTA
gcctgacacagcttggtggc

SEQ ID NO: 228888 - DNA, 20 bp, Artificial Sequence
  Description of Artificial Sequence: Synthetic oligonucleotide
  Target: LAMA2; (-) strand; PAM type: YTN; PAM sequence: TTT
agcctgacacagcttggtgg

SEQ ID NO: 228889 - DNA, 20 bp, Artificial Sequence
  Description of Artificial Sequence: Synthetic oligonucleotide
  Target: LAMA2; (-) strand; PAM type: YTN; PAM sequence: TTG
caagacagcaatttagcctg

SEQ ID NO: 228890 - DNA, 20 bp, Artificial Sequence
  Description of Artificial Sequence: Synthetic oligonucleotide
  Target: LAMA2; (-) strand; PAM type: YTN; PAM sequence: CTT
gcaagacagcaatttagcct

SEQ ID NO: 228891 - DNA, 20 bp, Artificial Sequence
  Description of Artificial Sequence: Synthetic oligonucleotide
  Target: LAMA2; (-) strand; PAM type: YTN; PAM sequence: CTA
cttgcaagacagcaatttag

SEQ ID NO: 228892 - DNA, 20 bp, Artificial Sequence
  Description of Artificial Sequence: Synthetic oligonucleotide
  Target: LAMA2; (-) strand; PAM type: YTN; PAM sequence: TTC
tacttgcaagacagcaattt

SEQ ID NO: 228893 - DNA, 20 bp, Artificial Sequence
  Description of Artificial Sequence: Synthetic oligonucleotide
  Target: LAMA2; (-) strand; PAM type: YTN; PAM sequence: TTA
ttctacttgcaagacagcaa

SEQ ID NO: 228894 - DNA, 20 bp, Artificial Sequence
  Description of Artificial Sequence: Synthetic oligonucleotide
  Target: LAMA2; (-) strand; PAM type: YTN; PAM sequence: TTT
attctacttgcaagacagca

SEQ ID NO: 228895 - DNA, 20 bp, Artificial Sequence
  Description of Artificial Sequence: Synthetic oligonucleotide
  Target: LAMA2; (-) strand; PAM type: YTN; PAM sequence: TTT
tattctacttgcaagacagc

SEQ ID NO: 228896 - DNA, 20 bp, Artificial Sequence
  Description of Artificial Sequence: Synthetic oligonucleotide
  Target: LAMA2; (-) strand; PAM type: YTN; PAM sequence: CTG
ggattttattctacttgcaa

SEQ ID NO: 228897 - DNA, 20 bp, Artificial Sequence
  Description of Artificial Sequence: Synthetic oligonucleotide
  Target: LAMA2; (-) strand; PAM type: YTN; PAM sequence: TTG
caaagggtctgggattttat

SEQ ID NO: 228898 - DNA, 20 bp, Artificial Sequence
  Description of Artificial Sequence: Synthetic oligonucleotide
  Target: LAMA2; (-) strand; PAM type: YTN; PAM sequence: TTA
tgaaaaagattgcaaagggt

SEQ ID NO: 228899 - DNA, 20 bp, Artificial Sequence
  Description of Artificial Sequence: Synthetic oligonucleotide
  Target: LAMA2; (-) strand; PAM type: YTN; PAM sequence: TTT
atgaaaaagattgcaaaggg

SEQ ID NO: 228900 - DNA, 20 bp, Artificial Sequence
  Description of Artificial Sequence: Synthetic oligonucleotide
  Target: LAMA2; (-) strand; PAM type: YTN; PAM sequence: TTT
tatgaaaaagattgcaaagg

SEQ ID NO: 228901 - DNA, 20 bp, Artificial Sequence
  Description of Artificial Sequence: Synthetic oligonucleotide
  Target: LAMA2; (-) strand; PAM type: YTN; PAM sequence: TTT
ttatgaaaaagattgcaaag

SEQ ID NO: 228902 - DNA, 20 bp, Artificial Sequence
  Description of Artificial Sequence: Synthetic oligonucleotide
  Target: LAMA2; (-) strand; PAM type: YTN; PAM sequence: TTT
tttatgaaaaagattgcaaa

SEQ ID NO: 228903 - DNA, 20 bp, Artificial Sequence
  Description of Artificial Sequence: Synthetic oligonucleotide
  Target: LAMA2; (-) strand; PAM type: YTN; PAM sequence: TTT
ttttatgaaaaagattgcaa

SEQ ID NO: 228904 - DNA, 20 bp, Artificial Sequence
  Description of Artificial Sequence: Synthetic oligonucleotide
  Target: LAMA2; (-) strand; PAM type: YTN; PAM sequence: TTT
tttttatgaaaaagattgca

SEQ ID NO: 228905 - DNA, 20 bp, Artificial Sequence
  Description of Artificial Sequence: Synthetic oligonucleotide
  Target: LAMA2; (-) strand; PAM type: YTN; PAM sequence: TTA
aaattttttttatgaaaaag

SEQ ID NO: 228906 - DNA, 20 bp, Artificial Sequence
  Description of Artificial Sequence: Synthetic oligonucleotide
  Target: LAMA2; (-) strand; PAM type: YTN; PAM sequence: TTT
aaaattttttttatgaaaaa

SEQ ID NO: 228907 - DNA, 20 bp, Artificial Sequence
  Description of Artificial Sequence: Synthetic oligonucleotide
  Target: LAMA2; (-) strand; PAM type: YTN; PAM sequence: CTG
tatgcggtaaatatatggta

SEQ ID NO: 228908 - DNA, 20 bp, Artificial Sequence
  Description of Artificial Sequence: Synthetic oligonucleotide
  Target: LAMA2; (-) strand; PAM type: YTN; PAM sequence: CTG
aactgtatgcggtaaatata

SEQ ID NO: 228909 - DNA, 20 bp, Artificial Sequence
  Description of Artificial Sequence: Synthetic oligonucleotide
  Target: LAMA2; (-) strand; PAM type: YTN; PAM sequence: TTC
tgaactgtatgcggtaaata

SEQ ID NO: 228910 - DNA, 20 bp, Artificial Sequence
  Description of Artificial Sequence: Synthetic oligonucleotide
  Target: LAMA2; (-) strand; PAM type: YTN; PAM sequence: TTA
ataaataattctgaactgta

SEQ ID NO: 228911 - DNA, 20 bp, Artificial Sequence
  Description of Artificial Sequence: Synthetic oligonucleotide
  Target: LAMA2; (-) strand; PAM type: YTN; PAM sequence: CTA
ttaataaataattctgaact

SEQ ID NO: 228912 - DNA, 20 bp, Artificial Sequence
  Description of Artificial Sequence: Synthetic oligonucleotide
  Target: LAMA2; (-) strand; PAM type: YTN; PAM sequence: CTG
tgaatatactattaataaat

SEQ ID NO: 228913 - DNA, 20 bp, Artificial Sequence
  Description of Artificial Sequence: Synthetic oligonucleotide
  Target: LAMA2; (-) strand; PAM type: YTN; PAM sequence: CTC
tgtgaatatactattaataa

SEQ ID NO: 228914 - DNA, 20 bp, Artificial Sequence
  Description of Artificial Sequence: Synthetic oligonucleotide
  Target: LAMA2; (-) strand; PAM type: YTN; PAM sequence: TTG
cacaactctgtgaatatact

SEQ ID NO: 228915 - DNA, 20 bp, Artificial Sequence
  Description of Artificial Sequence: Synthetic oligonucleotide
  Target: LAMA2; (-) strand; PAM type: YTN; PAM sequence: TTG
tggtggtggttgcacaactc

SEQ ID NO: 228916 - DNA, 20 bp, Artificial Sequence
  Description of Artificial Sequence: Synthetic oligonucleotide
  Target: LAMA2; (-) strand; PAM type: YTN; PAM sequence: TTG
gattgtggtggtggttgcac

SEQ ID NO: 228917 - DNA, 20 bp, Artificial Sequence
  Description of Artificial Sequence: Synthetic oligonucleotide
  Target: LAMA2; (-) strand; PAM type: YTN; PAM sequence: CTA
aaattggattgtggtggtgg

SEQ ID NO: 228918 - DNA, 20 bp, Artificial Sequence
  Description of Artificial Sequence: Synthetic oligonucleotide
  Target: LAMA2; (-) strand; PAM type: YTN; PAM sequence: TTG
aaatgatctaaaattggatt

SEQ ID NO: 228919 - DNA, 20 bp, Artificial Sequence
  Description of Artificial Sequence: Synthetic oligonucleotide
  Target: LAMA2; (-) strand; PAM type: YTN; PAM sequence: TTG
ttgaaatgatctaaaattgg

SEQ ID NO: 228920 - DNA, 20 bp, Artificial Sequence
  Description of Artificial Sequence: Synthetic oligonucleotide
  Target: LAMA2; (-) strand; PAM type: YTN; PAM sequence: TTG
agttgttgaaatgatctaaa

SEQ ID NO: 228921 - DNA, 20 bp, Artificial Sequence
  Description of Artificial Sequence: Synthetic oligonucleotide
  Target: LAMA2; (-) strand; PAM type: YTN; PAM sequence: TTT
gagttgttgaaatgatctaa

SEQ ID NO: 228922 - DNA, 20 bp, Artificial Sequence
  Description of Artificial Sequence: Synthetic oligonucleotide
  Target: LAMA2; (-) strand; PAM type: YTN; PAM sequence: TTT
tgagttgttgaaatgatcta

SEQ ID NO: 228923 - DNA, 20 bp, Artificial Sequence
  Description of Artificial Sequence: Synthetic oligonucleotide
  Target: LAMA2; (-) strand; PAM type: YTN; PAM sequence: TTT
ttgagttgttgaaatgatct

SEQ ID NO: 228924 - DNA, 20 bp, Artificial Sequence
  Description of Artificial Sequence: Synthetic oligonucleotide
  Target: LAMA2; (-) strand; PAM type: YTN; PAM sequence: CTT
tttgagttgttgaaatgatc

SEQ ID NO: 228925 - DNA, 20 bp, Artificial Sequence
  Description of Artificial Sequence: Synthetic oligonucleotide
  Target: LAMA2; (-) strand; PAM type: YTN; PAM sequence: TTC
tttttgagttgttgaaatga

SEQ ID NO: 228926 - DNA, 20 bp, Artificial Sequence
  Description of Artificial Sequence: Synthetic oligonucleotide
  Target: LAMA2; (-) strand; PAM type: YTN; PAM sequence: TTT
ctttttgagttgttgaaatg

SEQ ID NO: 228927 - DNA, 20 bp, Artificial Sequence
  Description of Artificial Sequence: Synthetic oligonucleotide
  Target: LAMA2; (-) strand; PAM type: YTN; PAM sequence: TTA
acgtgtacaaggtttctttt

SEQ ID NO: 228928 - DNA, 20 bp, Artificial Sequence
  Description of Artificial Sequence: Synthetic oligonucleotide
  Target: LAMA2; (-) strand; PAM type: YTN; PAM sequence: CTT
aacgtgtacaaggtttcttt

SEQ ID NO: 228929 - DNA, 20 bp, Artificial Sequence
  Description of Artificial Sequence: Synthetic oligonucleotide
  Target: LAMA2; (-) strand; PAM type: YTN; PAM sequence: TTC
agggagtgggtacaggaatg

SEQ ID NO: 228930 - DNA, 20 bp, Artificial Sequence
  Description of Artificial Sequence: Synthetic oligonucleotide
  Target: LAMA2; (-) strand; PAM type: YTN; PAM sequence: TTT
cagggagtgggtacaggaat

SEQ ID NO: 228931 - DNA, 20 bp, Artificial Sequence
  Description of Artificial Sequence: Synthetic oligonucleotide
  Target: LAMA2; (-) strand; PAM type: YTN; PAM sequence: TTT
tcagggagtgggtacaggaa

SEQ ID NO: 228932 - DNA, 20 bp, Artificial Sequence
  Description of Artificial Sequence: Synthetic oligonucleotide
  Target: LAMA2; (-) strand; PAM type: YTN; PAM sequence: CTA
gagcaagcagattttcaggg

SEQ ID NO: 228933 - DNA, 20 bp, Artificial Sequence
  Description of Artificial Sequence: Synthetic oligonucleotide
  Target: LAMA2; (-) strand; PAM type: YTN; PAM sequence: CTG
acatcaatccaacacagcta

SEQ ID NO: 228934 - DNA, 20 bp, Artificial Sequence
  Description of Artificial Sequence: Synthetic oligonucleotide
  Target: LAMA2; (-) strand; PAM type: YTN; PAM sequence: TTC
tgacatcaatccaacacagc

SEQ ID NO: 228935 - DNA, 20 bp, Artificial Sequence
  Description of Artificial Sequence: Synthetic oligonucleotide
  Target: LAMA2; (-) strand; PAM type: YTN; PAM sequence: CTG
tgttctgacatcaatccaac

SEQ ID NO: 228936 - DNA, 20 bp, Artificial Sequence
  Description of Artificial Sequence: Synthetic oligonucleotide
  Target: LAMA2; (-) strand; PAM type: YTN; PAM sequence: CTC
ctgtgttctgacatcaatcc

SEQ ID NO: 228937 - DNA, 20 bp, Artificial Sequence
  Description of Artificial Sequence: Synthetic oligonucleotide
  Target: LAMA2; (-) strand; PAM type: YTN; PAM sequence: TTC
cctcctgtgttctgacatca

SEQ ID NO: 228938 - DNA, 20 bp, Artificial Sequence
  Description of Artificial Sequence: Synthetic oligonucleotide
  Target: LAMA2; (-) strand; PAM type: YTN; PAM sequence: CTT
ccctcctgtgttctgacatc

SEQ ID NO: 228939 - DNA, 20 bp, Artificial Sequence
  Description of Artificial Sequence: Synthetic oligonucleotide
  Target: LAMA2; (-) strand; PAM type: YTN; PAM sequence: TTG
cccttccctcctgtgttctg

SEQ ID NO: 228940 - DNA, 20 bp, Artificial Sequence
  Description of Artificial Sequence: Synthetic oligonucleotide
  Target: LAMA2; (-) strand; PAM type: YTN; PAM sequence: TTT
gcccttccctcctgtgttct

SEQ ID NO: 228941 - DNA, 20 bp, Artificial Sequence
  Description of Artificial Sequence: Synthetic oligonucleotide
  Target: LAMA2; (-) strand; PAM type: YTN; PAM sequence: TTG
catttgcccttccctcctgt

SEQ ID NO: 228942 - DNA, 20 bp, Artificial Sequence
  Description of Artificial Sequence: Synthetic oligonucleotide
  Target: LAMA2; (-) strand; PAM type: YTN; PAM sequence: CTT
gcatttgcccttccctcctg

SEQ ID NO: 228943 - DNA, 20 bp, Artificial Sequence
  Description of Artificial Sequence: Synthetic oligonucleotide
  Target: LAMA2; (-) strand; PAM type: YTN; PAM sequence: CTC
ccttgcatttgcccttccct

SEQ ID NO: 228944 - DNA, 20 bp, Artificial Sequence
  Description of Artificial Sequence: Synthetic oligonucleotide
  Target: LAMA2; (-) strand; PAM type: YTN; PAM sequence: CTG
ctcccttgcatttgcccttc

SEQ ID NO: 228945 - DNA, 20 bp, Artificial Sequence
  Description of Artificial Sequence: Synthetic oligonucleotide
  Target: LAMA2; (-) strand; PAM type: YTN; PAM sequence: TTA
cctgctcccttgcatttgcc

SEQ ID NO: 228946 - DNA, 20 bp, Artificial Sequence
  Description of Artificial Sequence: Synthetic oligonucleotide
  Target: LAMA2; (-) strand; PAM type: YTN; PAM sequence: CTT
acctgctcccttgcatttgc

SEQ ID NO: 228947 - DNA, 20 bp, Artificial Sequence
  Description of Artificial Sequence: Synthetic oligonucleotide
  Target: LAMA2; (-) strand; PAM type: YTN; PAM sequence: CTC
ttacctgctcccttgcattt

SEQ ID NO: 228948 - DNA, 20 bp, Artificial Sequence
  Description of Artificial Sequence: Synthetic oligonucleotide
  Target: LAMA2; (-) strand; PAM type: YTN; PAM sequence: CTG
tgaaagcctcttacctgctc

SEQ ID NO: 228949 - DNA, 20 bp, Artificial Sequence
  Description of Artificial Sequence: Synthetic oligonucleotide
  Target: LAMA2; (-) strand; PAM type: YTN; PAM sequence: TTG
ctgtgaaagcctcttacctg

SEQ ID NO: 228950 - DNA, 20 bp, Artificial Sequence
  Description of Artificial Sequence: Synthetic oligonucleotide
  Target: LAMA2; (-) strand; PAM type: YTN; PAM sequence: TTG
tcccgagttgctgtgaaagc

SEQ ID NO: 228951 - DNA, 20 bp, Artificial Sequence
  Description of Artificial Sequence: Synthetic oligonucleotide
  Target: LAMA2; (-) strand; PAM type: YTN; PAM sequence: TTT
gtcccgagttgctgtgaaag

SEQ ID NO: 228952 - DNA, 20 bp, Artificial Sequence
  Description of Artificial Sequence: Synthetic oligonucleotide
  Target: LAMA2; (-) strand; PAM type: YTN; PAM sequence: CTA
tcatttgtcccgagttgctg

SEQ ID NO: 228953 - DNA, 20 bp, Artificial Sequence
  Description of Artificial Sequence: Synthetic oligonucleotide
  Target: LAMA2; (-) strand; PAM type: YTN; PAM sequence: CTC
caagccactatcatttgtcc

SEQ ID NO: 228954 - DNA, 20 bp, Artificial Sequence
  Description of Artificial Sequence: Synthetic oligonucleotide
  Target: LAMA2; (-) strand; PAM type: YTN; PAM sequence: CTG
ctccaagccactatcatttg

SEQ ID NO: 228955 - DNA, 20 bp, Artificial Sequence
  Description of Artificial Sequence: Synthetic oligonucleotide
  Target: LAMA2; (-) strand; PAM type: YTN; PAM sequence: CTA
ccctgctccaagccactatc

SEQ ID NO: 228956 - DNA, 20 bp, Artificial Sequence
  Description of Artificial Sequence: Synthetic oligonucleotide
  Target: LAMA2; (-) strand; PAM type: YTN; PAM sequence: CTG
ctaccctgctccaagccact

SEQ ID NO: 228957 - DNA, 20 bp, Artificial Sequence
  Description of Artificial Sequence: Synthetic oligonucleotide
  Target: LAMA2; (-) strand; PAM type: YTN; PAM sequence: TTC
atgctgctaccctgctccaa

SEQ ID NO: 228958 - DNA, 20 bp, Artificial Sequence
  Description of Artificial Sequence: Synthetic oligonucleotide
  Target: LAMA2; (-) strand; PAM type: YTN; PAM sequence: TTT
catgctgctaccctgctcca

SEQ ID NO: 228959 - DNA, 20 bp, Artificial Sequence
  Description of Artificial Sequence: Synthetic oligonucleotide
  Target: LAMA2; (-) strand; PAM type: YTN; PAM sequence: CTT
tcatgctgctaccctgctcc

SEQ ID NO: 228960 - DNA, 20 bp, Artificial Sequence
  Description of Artificial Sequence: Synthetic oligonucleotide
  Target: LAMA2; (-) strand; PAM type: YTN; PAM sequence: CTA
ctttcatgctgctaccctgc

SEQ ID NO: 228961 - DNA, 20 bp, Artificial Sequence
  Description of Artificial Sequence: Synthetic oligonucleotide
  Target: LAMA2; (-) strand; PAM type: YTN; PAM sequence: CTC
actactttcatgctgctacc

SEQ ID NO: 228962 - DNA, 20 bp, Artificial Sequence
  Description of Artificial Sequence: Synthetic oligonucleotide
  Target: LAMA2; (-) strand; PAM type: YTN; PAM sequence: TTC
tcactactttcatgctgcta

SEQ ID NO: 228963 - DNA, 20 bp, Artificial Sequence
  Description of Artificial Sequence: Synthetic oligonucleotide
  Target: LAMA2; (-) strand; PAM type: YTN; PAM sequence: CTT
ctcactactttcatgctgct

SEQ ID NO: 228964 - DNA, 20 bp, Artificial Sequence
  Description of Artificial Sequence: Synthetic oligonucleotide
  Target: LAMA2; (-) strand; PAM type: YTN; PAM sequence: TTC
cgccacttctcactactttc

SEQ ID NO: 228965 - DNA, 20 bp, Artificial Sequence
  Description of Artificial Sequence: Synthetic oligonucleotide
  Target: LAMA2; (-) strand; PAM type: YTN; PAM sequence: CTA
ttccgccacttctcactact

SEQ ID NO: 228966 - DNA, 20 bp, Artificial Sequence
  Description of Artificial Sequence: Synthetic oligonucleotide
  Target: LAMA2; (-) strand; PAM type: YTN; PAM sequence: TTC
tattccgccacttctcacta

SEQ ID NO: 228967 - DNA, 20 bp, Artificial Sequence
  Description of Artificial Sequence: Synthetic oligonucleotide
  Target: LAMA2; (-) strand; PAM type: YTN; PAM sequence: CTT
ctattccgccacttctcact

SEQ ID NO: 228968 - DNA, 20 bp, Artificial Sequence
  Description of Artificial Sequence: Synthetic oligonucleotide
  Target: LAMA2; (-) strand; PAM type: YTN; PAM sequence: TTG
aaaatgtatcttctattccg

SEQ ID NO: 228969 - DNA, 20 bp, Artificial Sequence
  Description of Artificial Sequence: Synthetic oligonucleotide
  Target: LAMA2; (-) strand; PAM type: YTN; PAM sequence: TTT
gaaaatgtatcttctattcc

SEQ ID NO: 228970 - DNA, 20 bp, Artificial Sequence
  Description of Artificial Sequence: Synthetic oligonucleotide
  Target: LAMA2; (-) strand; PAM type: YTN; PAM sequence: CTT
tgaaaatgtatcttctattc

SEQ ID NO: 228971 - DNA, 20 bp, Artificial Sequence
  Description of Artificial Sequence: Synthetic oligonucleotide
  Target: LAMA2; (-) strand; PAM type: YTN; PAM sequence: TTC
cactttgaaaatgtatcttc

SEQ ID NO: 228972 - DNA, 20 bp, Artificial Sequence
  Description of Artificial Sequence: Synthetic oligonucleotide
  Target: LAMA2; (-) strand; PAM type: YTN; PAM sequence: TTG
gttccactttgaaaatgtat

SEQ ID NO: 228973 - DNA, 20 bp, Artificial Sequence
  Description of Artificial Sequence: Synthetic oligonucleotide
  Target: LAMA2; (-) strand; PAM type: YTN; PAM sequence: CTA
ttggttccactttgaaaatg

SEQ ID NO: 228974 - DNA, 20 bp, Artificial Sequence
  Description of Artificial Sequence: Synthetic oligonucleotide
  Target: LAMA2; (-) strand; PAM type: YTN; PAM sequence: TTG
gtcaggaaatactattggtt

SEQ ID NO: 228975 - DNA, 20 bp, Artificial Sequence
  Description of Artificial Sequence: Synthetic oligonucleotide
  Target: LAMA2; (-) strand; PAM type: YTN; PAM sequence: TTG
gcagagccaattggtcagga

SEQ ID NO: 228976 - DNA, 20 bp, Artificial Sequence
  Description of Artificial Sequence: Synthetic oligonucleotide
  Target: LAMA2; (-) strand; PAM type: YTN; PAM sequence: CTT
ggcagagccaattggtcagg

SEQ ID NO: 228977 - DNA, 20 bp, Artificial Sequence
  Description of Artificial Sequence: Synthetic oligonucleotide
  Target: LAMA2; (-) strand; PAM type: YTN; PAM sequence: CTC
ttggcagagccaattggtca

SEQ ID NO: 228978 - DNA, 20 bp, Artificial Sequence
  Description of Artificial Sequence: Synthetic oligonucleotide
  Target: LAMA2; (-) strand; PAM type: YTN; PAM sequence: TTG
atcagcacatcctcttggca

SEQ ID NO: 228979 - DNA, 20 bp, Artificial Sequence
  Description of Artificial Sequence: Synthetic oligonucleotide
  Target: LAMA2; (-) strand; PAM type: YTN; PAM sequence: CTC
acggaaaattgatcagcaca

SEQ ID NO: 228980 - DNA, 20 bp, Artificial Sequence
  Description of Artificial Sequence: Synthetic oligonucleotide
  Target: LAMA2; (-) strand; PAM type: YTN; PAM sequence: CTC
acacctcacggaaaattgat

SEQ ID NO: 228981 - DNA, 20 bp, Artificial Sequence
  Description of Artificial Sequence: Synthetic oligonucleotide
  Target: LAMA2; (-) strand; PAM type: YTN; PAM sequence: TTC
tcacacctcacggaaaattg

SEQ ID NO: 228982 - DNA, 20 bp, Artificial Sequence
  Description of Artificial Sequence: Synthetic oligonucleotide
  Target: LAMA2; (-) strand; PAM type: YTN; PAM sequence: CTC
attctcacacctcacggaaa

SEQ ID NO: 228983 - DNA, 20 bp, Artificial Sequence
  Description of Artificial Sequence: Synthetic oligonucleotide
  Target: LAMA2; (-) strand; PAM type: YTN; PAM sequence: CTC
agccatctcattctcacacc

SEQ ID NO: 228984 - DNA, 20 bp, Artificial Sequence
  Description of Artificial Sequence: Synthetic oligonucleotide
  Target: LAMA2; (-) strand; PAM type: YTN; PAM sequence: CTC
atccctcagccatctcattc

SEQ ID NO: 228985 - DNA, 20 bp, Artificial Sequence
  Description of Artificial Sequence: Synthetic oligonucleotide
  Target: LAMA2; (-) strand; PAM type: YTN; PAM sequence: CTC
atgccaaaaccatggactca

SEQ ID NO: 228986 - DNA, 20 bp, Artificial Sequence
  Description of Artificial Sequence: Synthetic oligonucleotide
  Target: LAMA2; (-) strand; PAM type: YTN; PAM sequence: TTG
ctcatgccaaaaccatggac

SEQ ID NO: 228987 - DNA, 20 bp, Artificial Sequence
  Description of Artificial Sequence: Synthetic oligonucleotide
  Target: LAMA2; (-) strand; PAM type: YTN; PAM sequence: TTT
gctcatgccaaaaccatgga

SEQ ID NO: 228988 - DNA, 20 bp, Artificial Sequence
  Description of Artificial Sequence: Synthetic oligonucleotide
  Target: LAMA2; (-) strand; PAM type: YTN; PAM sequence: CTT
tgctcatgccaaaaccatgg

SEQ ID NO: 228989 - DNA, 20 bp, Artificial Sequence
  Description of Artificial Sequence: Synthetic oligonucleotide
  Target: LAMA2; (-) strand; PAM type: YTN; PAM sequence: TTC
cctttgctcatgccaaaacc

SEQ ID NO: 228990 - DNA, 20 bp, Artificial Sequence
  Description of Artificial Sequence: Synthetic oligonucleotide
  Target: LAMA2; (-) strand; PAM type: YTN; PAM sequence: CTT
ccctttgctcatgccaaaac

SEQ ID NO: 228991 - DNA, 20 bp, Artificial Sequence
  Description of Artificial Sequence: Synthetic oligonucleotide
  Target: LAMA2; (-) strand; PAM type: YTN; PAM sequence: CTC
aatccttccctttgctcatg

SEQ ID NO: 228992 - DNA, 20 bp, Artificial Sequence
  Description of Artificial Sequence: Synthetic oligonucleotide
  Target: LAMA2; (-) strand; PAM type: YTN; PAM sequence: TTC
aaagcaactcaatccttccc

SEQ ID NO: 228993 - DNA, 20 bp, Artificial Sequence
  Description of Artificial Sequence: Synthetic oligonucleotide
  Target: LAMA2; (-) strand; PAM type: YTN; PAM sequence: TTT
caaagcaactcaatccttcc

SEQ ID NO: 228994 - DNA, 20 bp, Artificial Sequence
  Description of Artificial Sequence: Synthetic oligonucleotide
  Target: LAMA2; (-) strand; PAM type: YTN; PAM sequence: CTC
atttcaaagcaactcaatcc

SEQ ID NO: 228995 - DNA, 20 bp, Artificial Sequence
  Description of Artificial Sequence: Synthetic oligonucleotide
  Target: LAMA2; (-) strand; PAM type: YTN; PAM sequence: TTC
cccaactcatttcaaagcaa

SEQ ID NO: 228996 - DNA, 20 bp, Artificial Sequence
  Description of Artificial Sequence: Synthetic oligonucleotide
  Target: LAMA2; (-) strand; PAM type: YTN; PAM sequence: CTT
ccccaactcatttcaaagca

SEQ ID NO: 228997 - DNA, 20 bp, Artificial Sequence
  Description of Artificial Sequence: Synthetic oligonucleotide
  Target: LAMA2; (-) strand; PAM type: YTN; PAM sequence: CTA
tgcccacagtcttccccaac

SEQ ID NO: 228998 - DNA, 20 bp, Artificial Sequence
  Description of Artificial Sequence: Synthetic oligonucleotide
  Target: LAMA2; (-) strand; PAM type: YTN; PAM sequence: CTG
ctatgcccacagtcttcccc

SEQ ID NO: 228999 - DNA, 20 bp, Artificial Sequence
  Description of Artificial Sequence: Synthetic oligonucleotide
  Target: LAMA2; (-) strand; PAM type: YTN; PAM sequence: CTG
tcaaaacctgctatgcccac

SEQ ID NO: 229000 - DNA, 20 bp, Artificial Sequence
  Description of Artificial Sequence: Synthetic oligonucleotide
  Target: LAMA2; (-) strand; PAM type: YTN; PAM sequence: CTC
tgtcaaaacctgctatgccc

SEQ ID NO: 229001 - DNA, 20 bp, Artificial Sequence
  Description of Artificial Sequence: Synthetic oligonucleotide
  Target: LAMA2; (-) strand; PAM type: YTN; PAM sequence: TTC
tctgtcaaaacctgctatgc

SEQ ID NO: 229002 - DNA, 20 bp, Artificial Sequence
  Description of Artificial Sequence: Synthetic oligonucleotide
  Target: LAMA2; (-) strand; PAM type: YTN; PAM sequence: CTT
ctctgtcaaaacctgctatg

SEQ ID NO: 229003 - DNA, 20 bp, Artificial Sequence
  Description of Artificial Sequence: Synthetic oligonucleotide
  Target: LAMA2; (-) strand; PAM type: YTN; PAM sequence: TTC
ttctctgtcaaaacctgcta

SEQ ID NO: 229004 - DNA, 20 bp, Artificial Sequence
  Description of Artificial Sequence: Synthetic oligonucleotide
  Target: LAMA2; (-) strand; PAM type: YTN; PAM sequence: CTA
ttcttctctgtcaaaacctg

SEQ ID NO: 229005 - DNA, 20 bp, Artificial Sequence
  Description of Artificial Sequence: Synthetic oligonucleotide
  Target: LAMA2; (-) strand; PAM type: YTN; PAM sequence: CTC
ctattcttctctgtcaaaac

SEQ ID NO: 229006 - DNA, 20 bp, Artificial Sequence
  Description of Artificial Sequence: Synthetic oligonucleotide
  Target: LAMA2; (-) strand; PAM type: YTN; PAM sequence: CTG
aactcctattcttctctgtc

SEQ ID NO: 229007 - DNA, 20 bp, Artificial Sequence
  Description of Artificial Sequence: Synthetic oligonucleotide
  Target: LAMA2; (-) strand; PAM type: YTN; PAM sequence: TTA
acatatgcaatgctgaactc

SEQ ID NO: 229008 - DNA, 20 bp, Artificial Sequence
  Description of Artificial Sequence: Synthetic oligonucleotide
  Target: LAMA2; (-) strand; PAM type: YTN; PAM sequence: TTC
agttaacatatgcaatgctg

SEQ ID NO: 229009 - DNA, 20 bp, Artificial Sequence
  Description of Artificial Sequence: Synthetic oligonucleotide
  Target: LAMA2; (-) strand; PAM type: YTN; PAM sequence: TTT
cagttaacatatgcaatgct

SEQ ID NO: 229010 - DNA, 20 bp, Artificial Sequence
  Description of Artificial Sequence: Synthetic oligonucleotide
  Target: LAMA2; (-) strand; PAM type: YTN; PAM sequence: TTT
tcagttaacatatgcaatgc

SEQ ID NO: 229011 - DNA, 20 bp, Artificial Sequence
  Description of Artificial Sequence: Synthetic oligonucleotide
  Target: LAMA2; (-) strand; PAM type: YTN; PAM sequence: CTA
atagacattttcagttaaca

SEQ ID NO: 229012 - DNA, 20 bp, Artificial Sequence
  Description of Artificial Sequence: Synthetic oligonucleotide
  Target: LAMA2; (-) strand; PAM type: YTN; PAM sequence: TTC
accaaaatgtctaatagaca

SEQ ID NO: 229013 - DNA, 20 bp, Artificial Sequence
  Description of Artificial Sequence: Synthetic oligonucleotide
  Target: LAMA2; (-) strand; PAM type: YTN; PAM sequence: CTT
caccaaaatgtctaatagac

SEQ ID NO: 229014 - DNA, 20 bp, Artificial Sequence
  Description of Artificial Sequence: Synthetic oligonucleotide
  Target: LAMA2; (-) strand; PAM type: YTN; PAM sequence: TTC
agcttcaccaaaatgtctaa

SEQ ID NO: 229015 - DNA, 20 bp, Artificial Sequence
  Description of Artificial Sequence: Synthetic oligonucleotide
  Target: LAMA2; (-) strand; PAM type: YTN; PAM sequence: CTA
ttcagcttcaccaaaatgtc

SEQ ID NO: 229016 - DNA, 20 bp, Artificial Sequence
  Description of Artificial Sequence: Synthetic oligonucleotide
  Target: LAMA2; (-) strand; PAM type: YTN; PAM sequence: CTA
tctattcagcttcaccaaaa

SEQ ID NO: 229017 - DNA, 20 bp, Artificial Sequence
  Description of Artificial Sequence: Synthetic oligonucleotide
  Target: LAMA2; (-) strand; PAM type: YTN; PAM sequence: CTA
tacactatctattcagcttc

SEQ ID NO: 229018 - DNA, 20 bp, Artificial Sequence
  Description of Artificial Sequence: Synthetic oligonucleotide
  Target: LAMA2; (-) strand; PAM type: YTN; PAM sequence: TTC
cagaatactatacactatct

SEQ ID NO: 229019 - DNA, 20 bp, Artificial Sequence
  Description of Artificial Sequence: Synthetic oligonucleotide
  Target: LAMA2; (-) strand; PAM type: YTN; PAM sequence: CTG
aattccagaatactatacac

SEQ ID NO: 229020 - DNA, 20 bp, Artificial Sequence
  Description of Artificial Sequence: Synthetic oligonucleotide
  Target: LAMA2; (-) strand; PAM type: YTN; PAM sequence: CTC
atctgaattccagaatacta

SEQ ID NO: 229021 - DNA, 20 bp, Artificial Sequence
  Description of Artificial Sequence: Synthetic oligonucleotide
  Target: LAMA2; (-) strand; PAM type: YTN; PAM sequence: TTC
tcatctgaattccagaatac

SEQ ID NO: 229022 - DNA, 20 bp, Artificial Sequence
  Description of Artificial Sequence: Synthetic oligonucleotide
  Target: LAMA2; (-) strand; PAM type: YTN; PAM sequence: TTT
ctcatctgaattccagaata

SEQ ID NO: 229023 - DNA, 20 bp, Artificial Sequence
  Description of Artificial Sequence: Synthetic oligonucleotide
  Target: LAMA2; (-) strand; PAM type: YTN; PAM sequence: TTA
agcagcatttctcatctgaa

SEQ ID NO: 229024 - DNA, 20 bp, Artificial Sequence
  Description of Artificial Sequence: Synthetic oligonucleotide
  Target: LAMA2; (-) strand; PAM type: YTN; PAM sequence: TTT
aagcagcatttctcatctga

SEQ ID NO: 229025 - DNA, 20 bp, Artificial Sequence
  Description of Artificial Sequence: Synthetic oligonucleotide
  Target: LAMA2; (-) strand; PAM type: YTN; PAM sequence: CTT
taagcagcatttctcatctg

SEQ ID NO: 229026 - DNA, 20 bp, Artificial Sequence
  Description of Artificial Sequence: Synthetic oligonucleotide
  Target: LAMA2; (-) strand; PAM type: YTN; PAM sequence: TTC
gtatctttaagcagcatttc

SEQ ID NO: 229027 - DNA, 20 bp, Artificial Sequence
  Description of Artificial Sequence: Synthetic oligonucleotide
  Target: LAMA2; (-) strand; PAM type: YTN; PAM sequence: CTA
attcgtatctttaagcagca

SEQ ID NO: 229028 - DNA, 20 bp, Artificial Sequence
  Description of Artificial Sequence: Synthetic oligonucleotide
  Target: LAMA2; (-) strand; PAM type: YTN; PAM sequence: CTC
taattcgtatctttaagcag

SEQ ID NO: 229029 - DNA, 20 bp, Artificial Sequence
  Description of Artificial Sequence: Synthetic oligonucleotide
  Target: LAMA2; (-) strand; PAM type: YTN; PAM sequence: TTC
tctaattcgtatctttaagc

SEQ ID NO: 229030 - DNA, 20 bp, Artificial Sequence
  Description of Artificial Sequence: Synthetic oligonucleotide
  Target: LAMA2; (-) strand; PAM type: YTN; PAM sequence: TTA
aattctctaattcgtatctt

SEQ ID NO: 229031 - DNA, 20 bp, Artificial Sequence
  Description of Artificial Sequence: Synthetic oligonucleotide
  Target: LAMA2; (-) strand; PAM type: YTN; PAM sequence: TTT
aaattctctaattcgtatct

SEQ ID NO: 229032 - DNA, 20 bp, Artificial Sequence
  Description of Artificial Sequence: Synthetic oligonucleotide
  Target: LAMA2; (-) strand; PAM type: YTN; PAM sequence: TTT
taaattctctaattcgtatc

SEQ ID NO: 229033 - DNA, 20 bp, Artificial Sequence
  Description of Artificial Sequence: Synthetic oligonucleotide
  Target: LAMA2; (-) strand; PAM type: YTN; PAM sequence: CTC
atgattttaaattctctaat

SEQ ID NO: 229034 - DNA, 20 bp, Artificial Sequence
  Description of Artificial Sequence: Synthetic oligonucleotide
  Target: LAMA2; (-) strand; PAM type: YTN; PAM sequence: TTA
tgcagtctcatgattttaaa

SEQ ID NO: 229035 - DNA, 20 bp, Artificial Sequence
  Description of Artificial Sequence: Synthetic oligonucleotide
  Target: LAMA2; (-) strand; PAM type: YTN; PAM sequence: CTG
ggtgatattatgcagtctca

SEQ ID NO: 229036 - DNA, 20 bp, Artificial Sequence
  Description of Artificial Sequence: Synthetic oligonucleotide
  Target: LAMA2; (-) strand; PAM type: YTN; PAM sequence: TTC
ctgggtgatattatgcagtc

SEQ ID NO: 229037 - DNA, 20 bp, Artificial Sequence
  Description of Artificial Sequence: Synthetic oligonucleotide
  Target: LAMA2; (-) strand; PAM type: YTN; PAM sequence: CTT
cctgggtgatattatgcagt

SEQ ID NO: 229038 - DNA, 20 bp, Artificial Sequence
  Description of Artificial Sequence: Synthetic oligonucleotide
  Target: LAMA2; (-) strand; PAM type: YTN; PAM sequence: TTG
tacttcctgggtgatattat

SEQ ID NO: 229039 - DNA, 20 bp, Artificial Sequence
  Description of Artificial Sequence: Synthetic oligonucleotide
  Target: LAMA2; (-) strand; PAM type: YTN; PAM sequence: CTT
gtacttcctgggtgatatta

SEQ ID NO: 229040 - DNA, 20 bp, Artificial Sequence
  Description of Artificial Sequence: Synthetic oligonucleotide
  Target: LAMA2; (-) strand; PAM type: YTN; PAM sequence: TTC
ttgtacttcctgggtgatat

SEQ ID NO: 229041 - DNA, 20 bp, Artificial Sequence
  Description of Artificial Sequence: Synthetic oligonucleotide
  Target: LAMA2; (-) strand; PAM type: YTN; PAM sequence: CTT
cttgtacttcctgggtgata

SEQ ID NO: 229042 - DNA, 20 bp, Artificial Sequence
  Description of Artificial Sequence: Synthetic oligonucleotide
  Target: LAMA2; (-) strand; PAM type: YTN; PAM sequence: CTA
ggtcttcttgtacttcctgg

SEQ ID NO: 229043 - DNA, 20 bp, Artificial Sequence
  Description of Artificial Sequence: Synthetic oligonucleotide
  Target: LAMA2; (-) strand; PAM type: YTN; PAM sequence: TTC
taggtcttcttgtacttcct

SEQ ID NO: 229044 - DNA, 20 bp, Artificial Sequence
  Description of Artificial Sequence: Synthetic oligonucleotide
  Target: LAMA2; (-) strand; PAM type: YTN; PAM sequence: TTT
ctaggtcttcttgtacttcc

SEQ ID NO: 229045 - DNA, 20 bp, Artificial Sequence
  Description of Artificial Sequence: Synthetic oligonucleotide
  Target: LAMA2; (-) strand; PAM type: YTN; PAM sequence: TTT
tctaggtcttcttgtacttc

SEQ ID NO: 229046 - DNA, 20 bp, Artificial Sequence
  Description of Artificial Sequence: Synthetic oligonucleotide
  Target: LAMA2; (-) strand; PAM type: YTN; PAM sequence: CTT
ttctaggtcttcttgtactt

SEQ ID NO: 229047 - DNA, 20 bp, Artificial Sequence
  Description of Artificial Sequence: Synthetic oligonucleotide
  Target: LAMA2; (-) strand; PAM type: YTN; PAM sequence: TTA
cttttctaggtcttcttgta

SEQ ID NO: 229048 - DNA, 20 bp, Artificial Sequence
  Description of Artificial Sequence: Synthetic oligonucleotide
  Target: LAMA2; (-) strand; PAM type: YTN; PAM sequence: CTG
ttacttttctaggtcttctt

SEQ ID NO: 229049 - DNA, 20 bp, Artificial Sequence
  Description of Artificial Sequence: Synthetic oligonucleotide
  Target: LAMA2; (-) strand; PAM type: YTN; PAM sequence: CTC
agactgttacttttctaggt

SEQ ID NO: 229050 - DNA, 20 bp, Artificial Sequence
  Description of Artificial Sequence: Synthetic oligonucleotide
  Target: LAMA2; (-) strand; PAM type: YTN; PAM sequence: TTC
tcagactgttacttttctag

SEQ ID NO: 229051 - DNA, 20 bp, Artificial Sequence
  Description of Artificial Sequence: Synthetic oligonucleotide
  Target: LAMA2; (-) strand; PAM type: YTN; PAM sequence: CTC
agttctcagactgttacttt

SEQ ID NO: 229052 - DNA, 20 bp, Artificial Sequence
  Description of Artificial Sequence: Synthetic oligonucleotide
  Target: LAMA2; (-) strand; PAM type: YTN; PAM sequence: TTA
gagctcagttctcagactgt

SEQ ID NO: 229053 - DNA, 20 bp, Artificial Sequence
  Description of Artificial Sequence: Synthetic oligonucleotide
  Target: LAMA2; (-) strand; PAM type: YTN; PAM sequence: CTT
agagctcagttctcagactg

SEQ ID NO: 229054 - DNA, 20 bp, Artificial Sequence
  Description of Artificial Sequence: Synthetic oligonucleotide
  Target: LAMA2; (-) strand; PAM type: YTN; PAM sequence: TTC
cttagagctcagttctcaga

SEQ ID NO: 229055 - DNA, 20 bp, Artificial Sequence
  Description of Artificial Sequence: Synthetic oligonucleotide
  Target: LAMA2; (-) strand; PAM type: YTN; PAM sequence: CTA
aaggtagatgttccttagag

SEQ ID NO: 229056 - DNA, 20 bp, Artificial Sequence
  Description of Artificial Sequence: Synthetic oligonucleotide
  Target: LAMA2; (-) strand; PAM type: YTN; PAM sequence: CTC
taaaggtagatgttccttag

SEQ ID NO: 229057 - DNA, 20 bp, Artificial Sequence
  Description of Artificial Sequence: Synthetic oligonucleotide
  Target: LAMA2; (-) strand; PAM type: YTN; PAM sequence: CTG
acctctaaaggtagatgttc

SEQ ID NO: 229058 - DNA, 20 bp, Artificial Sequence
  Description of Artificial Sequence: Synthetic oligonucleotide
  Target: LAMA2; (-) strand; PAM type: YTN; PAM sequence: CTC
tgacctctaaaggtagatgt

SEQ ID NO: 229059 - DNA, 20 bp, Artificial Sequence
  Description of Artificial Sequence: Synthetic oligonucleotide
  Target: LAMA2; (-) strand; PAM type: YTN; PAM sequence: CTC
tctgacctctaaaggtagat

SEQ ID NO: 229060 - DNA, 20 bp, Artificial Sequence
  Description of Artificial Sequence: Synthetic oligonucleotide
  Target: LAMA2; (-) strand; PAM type: YTN; PAM sequence: TTC
atctctctgacctctaaagg

SEQ ID NO: 229061 - DNA, 20 bp, Artificial Sequence
  Description of Artificial Sequence: Synthetic oligonucleotide
  Target: LAMA2; (-) strand; PAM type: YTN; PAM sequence: CTT
catctctctgacctctaaag

SEQ ID NO: 229062 - DNA, 20 bp, Artificial Sequence
  Description of Artificial Sequence: Synthetic oligonucleotide
  Target: LAMA2; (-) strand; PAM type: YTN; PAM sequence: CTA
cttcatctctctgacctcta

SEQ ID NO: 229063 - DNA, 20 bp, Artificial Sequence
  Description of Artificial Sequence: Synthetic oligonucleotide
  Target: LAMA2; (-) strand; PAM type: YTN; PAM sequence: CTC
tacttcatctctctgacctc

SEQ ID NO: 229064 - DNA, 20 bp, Artificial Sequence
  Description of Artificial Sequence: Synthetic oligonucleotide
  Target: LAMA2; (-) strand; PAM type: YTN; PAM sequence: TTA
caagctctacttcatctctc

SEQ ID NO: 229065 - DNA, 20 bp, Artificial Sequence
  Description of Artificial Sequence: Synthetic oligonucleotide
  Target: LAMA2; (-) strand; PAM type: YTN; PAM sequence: TTT
acaagctctacttcatctct

SEQ ID NO: 229066 - DNA, 20 bp, Artificial Sequence
  Description of Artificial Sequence: Synthetic oligonucleotide
  Target: LAMA2; (-) strand; PAM type: YTN; PAM sequence: TTT
tacaagctctacttcatctc

SEQ ID NO: 229067 - DNA, 20 bp, Artificial Sequence
  Description of Artificial Sequence: Synthetic oligonucleotide
  Target: LAMA2; (-) strand; PAM type: YTN; PAM sequence: TTG
gttttacaagctctacttca

SEQ ID NO: 229068 - DNA, 20 bp, Artificial Sequence
  Description of Artificial Sequence: Synthetic oligonucleotide
  Target: LAMA2; (-) strand; PAM type: YTN; PAM sequence: CTT
ggttttacaagctctacttc

SEQ ID NO: 229069 - DNA, 20 bp, Artificial Sequence
  Description of Artificial Sequence: Synthetic oligonucleotide
  Target: LAMA2; (-) strand; PAM type: YTN; PAM sequence: CTC
cttggttttacaagctctac

SEQ ID NO: 229070 - DNA, 20 bp, Artificial Sequence
  Description of Artificial Sequence: Synthetic oligonucleotide
  Target: LAMA2; (-) strand; PAM type: YTN; PAM sequence: TTG
ctccttggttttacaagctc

SEQ ID NO: 229071 - DNA, 20 bp, Artificial Sequence
  Description of Artificial Sequence: Synthetic oligonucleotide
  Target: LAMA2; (-) strand; PAM type: YTN; PAM sequence: CTT
gctccttggttttacaagct

SEQ ID NO: 229072 - DNA, 20 bp, Artificial Sequence
  Description of Artificial Sequence: Synthetic oligonucleotide
  Target: LAMA2; (-) strand; PAM type: YTN; PAM sequence: CTG
tgtgtgcttgctccttggtt

SEQ ID NO: 229073 - DNA, 20 bp, Artificial Sequence
  Description of Artificial Sequence: Synthetic oligonucleotide
  Target: LAMA2; (-) strand; PAM type: YTN; PAM sequence: CTG
tgtccaaaactgtgtgtgct

SEQ ID NO: 229074 - DNA, 20 bp, Artificial Sequence
  Description of Artificial Sequence: Synthetic oligonucleotide
  Target: LAMA2; (-) strand; PAM type: YTN; PAM sequence: CTC
tgtgtccaaaactgtgtgtg

SEQ ID NO: 229075 - DNA, 20 bp, Artificial Sequence
  Description of Artificial Sequence: Synthetic oligonucleotide
  Target: LAMA2; (-) strand; PAM type: YTN; PAM sequence: TTA
tgggaaatctctgtgtccaa

SEQ ID NO: 229076 - DNA, 20 bp, Artificial Sequence
  Description of Artificial Sequence: Synthetic oligonucleotide
  Target: LAMA2; (-) strand; PAM type: YTN; PAM sequence: CTT
atgggaaatctctgtgtcca

SEQ ID NO: 229077 - DNA, 20 bp, Artificial Sequence
  Description of Artificial Sequence: Synthetic oligonucleotide
  Target: LAMA2; (-) strand; PAM type: YTN; PAM sequence: CTC
ttatgggaaatctctgtgtc

SEQ ID NO: 229078 - DNA, 20 bp, Artificial Sequence
  Description of Artificial Sequence: Synthetic oligonucleotide
  Target: LAMA2; (-) strand; PAM type: YTN; PAM sequence: TTG
caatgctcttatgggaaatc

SEQ ID NO: 229079 - DNA, 20 bp, Artificial Sequence
  Description of Artificial Sequence: Synthetic oligonucleotide
  Target: LAMA2; (-) strand; PAM type: YTN; PAM sequence: TTT
gcaatgctcttatgggaaat

SEQ ID NO: 229080 - DNA, 20 bp, Artificial Sequence
  Description of Artificial Sequence: Synthetic oligonucleotide
  Target: LAMA2; (-) strand; PAM type: YTN; PAM sequence: TTC
acatccaacaaagagaatat

SEQ ID NO: 229081 - DNA, 20 bp, Artificial Sequence
  Description of Artificial Sequence: Synthetic oligonucleotide
  Target: LAMA2; (-) strand; PAM type: YTN; PAM sequence: TTT
cacatccaacaaagagaata

SEQ ID NO: 229082 - DNA, 20 bp, Artificial Sequence
  Description of Artificial Sequence: Synthetic oligonucleotide
  Target: LAMA2; (-) strand; PAM type: YTN; PAM sequence: TTT
tcacatccaacaaagagaat

SEQ ID NO: 229083 - DNA, 20 bp, Artificial Sequence
  Description of Artificial Sequence: Synthetic oligonucleotide
  Target: LAMA2; (-) strand; PAM type: YTN; PAM sequence: TTA
ttttcacatccaacaaagag

SEQ ID NO: 229084 - DNA, 20 bp, Artificial Sequence
  Description of Artificial Sequence: Synthetic oligonucleotide
  Target: LAMA2; (-) strand; PAM type: YTN; PAM sequence: TTC
ccaaaagattattttcacat

SEQ ID NO: 229085 - DNA, 20 bp, Artificial Sequence
  Description of Artificial Sequence: Synthetic oligonucleotide
  Target: LAMA2; (-) strand; PAM type: YTN; PAM sequence: TTT
cccaaaagattattttcaca

SEQ ID NO: 229086 - DNA, 20 bp, Artificial Sequence
  Description of Artificial Sequence: Synthetic oligonucleotide
  Target: LAMA2; (-) strand; PAM type: YTN; PAM sequence: CTA
agcacacatttcccaaaaga

SEQ ID NO: 229087 - DNA, 20 bp, Artificial Sequence
  Description of Artificial Sequence: Synthetic oligonucleotide
  Target: LAMA2; (-) strand; PAM type: YTN; PAM sequence: CTA
tgcatcacatcaaggtctaa

SEQ ID NO: 229088 - DNA, 20 bp, Artificial Sequence
  Description of Artificial Sequence: Synthetic oligonucleotide
  Target: LAMA2; (-) strand; PAM type: YTN; PAM sequence: TTG
tccctatgcatcacatcaag

SEQ ID NO: 229089 - DNA, 20 bp, Artificial Sequence
  Description of Artificial Sequence: Synthetic oligonucleotide
  Target: LAMA2; (-) strand; PAM type: YTN; PAM sequence: TTT
gtccctatgcatcacatcaa

SEQ ID NO: 229090 - DNA, 20 bp, Artificial Sequence
  Description of Artificial Sequence: Synthetic oligonucleotide
  Target: LAMA2; (-) strand; PAM type: YTN; PAM sequence: TTA
gaaatttgtccctatgcatc

SEQ ID NO: 229091 - DNA, 20 bp, Artificial Sequence
  Description of Artificial Sequence: Synthetic oligonucleotide
  Target: LAMA2; (-) strand; PAM type: YTN; PAM sequence: TTA
ggaagcaaatagaattagaa

SEQ ID NO: 229092 - DNA, 20 bp, Artificial Sequence
  Description of Artificial Sequence: Synthetic oligonucleotide
  Target: LAMA2; (-) strand; PAM type: YTN; PAM sequence: CTT
aggaagcaaatagaattaga

SEQ ID NO: 229093 - DNA, 20 bp, Artificial Sequence
  Description of Artificial Sequence: Synthetic oligonucleotide
  Target: LAMA2; (-) strand; PAM type: YTN; PAM sequence: TTC
ttaggaagcaaatagaatta

SEQ ID NO: 229094 - DNA, 20 bp, Artificial Sequence
  Description of Artificial Sequence: Synthetic oligonucleotide
  Target: LAMA2; (-) strand; PAM type: YTN; PAM sequence: TTT
cttaggaagcaaatagaatt

SEQ ID NO: 229095 - DNA, 20 bp, Artificial Sequence
  Description of Artificial Sequence: Synthetic oligonucleotide
  Target: LAMA2; (-) strand; PAM type: YTN; PAM sequence: TTT
tcttaggaagcaaatagaat

SEQ ID NO: 229096 - DNA, 20 bp, Artificial Sequence
  Description of Artificial Sequence: Synthetic oligonucleotide
  Target: LAMA2; (-) strand; PAM type: YTN; PAM sequence: TTC
attttcttaggaagcaaata

SEQ ID NO: 229097 - DNA, 20 bp, Artificial Sequence
  Description of Artificial Sequence: Synthetic oligonucleotide
  Target: LAMA2; (-) strand; PAM type: YTN; PAM sequence: TTT
cattttcttaggaagcaaat

SEQ ID NO: 229098 - DNA, 20 bp, Artificial Sequence
  Description of Artificial Sequence: Synthetic oligonucleotide
  Target: LAMA2; (-) strand; PAM type: YTN; PAM sequence: TTA
gtaacatttcattttcttag

SEQ ID NO: 229099 - DNA, 20 bp, Artificial Sequence
  Description of Artificial Sequence: Synthetic oligonucleotide
  Target: LAMA2; (-) strand; PAM type: YTN; PAM sequence: TTT
agtaacatttcattttctta

SEQ ID NO: 229100 - DNA, 20 bp, Artificial Sequence
  Description of Artificial Sequence: Synthetic oligonucleotide
  Target: LAMA2; (-) strand; PAM type: YTN; PAM sequence: TTA
tttagtaacatttcattttc

SEQ ID NO: 229101 - DNA, 20 bp, Artificial Sequence
  Description of Artificial Sequence: Synthetic oligonucleotide
  Target: LAMA2; (-) strand; PAM type: YTN; PAM sequence: TTT
atttagtaacatttcatttt

SEQ ID NO: 229102 - DNA, 20 bp, Artificial Sequence
  Description of Artificial Sequence: Synthetic oligonucleotide
  Target: LAMA2; (-) strand; PAM type: YTN; PAM sequence: CTG
tttatttagtaacatttcat

SEQ ID NO: 229103 - DNA, 20 bp, Artificial Sequence
  Description of Artificial Sequence: Synthetic oligonucleotide
  Target: LAMA2; (-) strand; PAM type: YTN; PAM sequence: CTG
acgctgtttatttagtaaca

SEQ ID NO: 229104 - DNA, 20 bp, Artificial Sequence
  Description of Artificial Sequence: Synthetic oligonucleotide
  Target: LAMA2; (-) strand; PAM type: YTN; PAM sequence: TTG
ccctgacgctgtttatttag

SEQ ID NO: 229105 - DNA, 20 bp, Artificial Sequence
  Description of Artificial Sequence: Synthetic oligonucleotide
  Target: LAMA2; (-) strand; PAM type: YTN; PAM sequence: CTT
gccctgacgctgtttattta

SEQ ID NO: 229106 - DNA, 20 bp, Artificial Sequence
  Description of Artificial Sequence: Synthetic oligonucleotide
  Target: LAMA2; (-) strand; PAM type: YTN; PAM sequence: CTC
cttgccctgacgctgtttat

SEQ ID NO: 229107 - DNA, 20 bp, Artificial Sequence
  Description of Artificial Sequence: Synthetic oligonucleotide
  Target: LAMA2; (-) strand; PAM type: YTN; PAM sequence: CTG
gactccttgccctgacgctg

SEQ ID NO: 229108 - DNA, 20 bp, Artificial Sequence
  Description of Artificial Sequence: Synthetic oligonucleotide
  Target: LAMA2; (-) strand; PAM type: YTN; PAM sequence: TTA
tggacctggactccttgccc

SEQ ID NO: 229109 - DNA, 20 bp, Artificial Sequence
  Description of Artificial Sequence: Synthetic oligonucleotide
  Target: LAMA2; (-) strand; PAM type: YTN; PAM sequence: TTT
atggacctggactccttgcc

SEQ ID NO: 229110 - DNA, 20 bp, Artificial Sequence
  Description of Artificial Sequence: Synthetic oligonucleotide
  Target: LAMA2; (-) strand; PAM type: YTN; PAM sequence: CTT
tatggacctggactccttgc

SEQ ID NO: 229111 - DNA, 20 bp, Artificial Sequence
  Description of Artificial Sequence: Synthetic oligonucleotide
  Target: LAMA2; (-) strand; PAM type: YTN; PAM sequence: TTC
tttatggacctggactcctt

SEQ ID NO: 229112 - DNA, 20 bp, Artificial Sequence
  Description of Artificial Sequence: Synthetic oligonucleotide
  Target: LAMA2; (-) strand; PAM type: YTN; PAM sequence: TTT
ctttatggacctggactcct

SEQ ID NO: 229113 - DNA, 20 bp, Artificial Sequence
  Description of Artificial Sequence: Synthetic oligonucleotide
  Target: LAMA2; (-) strand; PAM type: YTN; PAM sequence: TTT
tctttatggacctggactcc

SEQ ID NO: 229114 - DNA, 20 bp, Artificial Sequence
  Description of Artificial Sequence: Synthetic oligonucleotide
  Target: LAMA2; (-) strand; PAM type: YTN; PAM sequence: TTT
ttctttatggacctggactc

SEQ ID NO: 229115 - DNA, 20 bp, Artificial Sequence
  Description of Artificial Sequence: Synthetic oligonucleotide
  Target: LAMA2; (-) strand; PAM type: YTN; PAM sequence: CTG
tgcaagtttttctttatgga

SEQ ID NO: 229116 - DNA, 20 bp, Artificial Sequence
  Description of Artificial Sequence: Synthetic oligonucleotide
  Target: LAMA2; (-) strand; PAM type: YTN; PAM sequence: TTC
accatgctgtgcaagttttt

SEQ ID NO: 229117 - DNA, 20 bp, Artificial Sequence
  Description of Artificial Sequence: Synthetic oligonucleotide
  Target: LAMA2; (-) strand; PAM type: YTN; PAM sequence: TTA
ttcaccatgctgtgcaagtt

SEQ ID NO: 229118 - DNA, 20 bp, Artificial Sequence
  Description of Artificial Sequence: Synthetic oligonucleotide
  Target: LAMA2; (-) strand; PAM type: YTN; PAM sequence: TTT
attcaccatgctgtgcaagt

SEQ ID NO: 229119 - DNA, 20 bp, Artificial Sequence
  Description of Artificial Sequence: Synthetic oligonucleotide
  Target: LAMA2; (-) strand; PAM type: YTN; PAM sequence: TTT
tattcaccatgctgtgcaag

SEQ ID NO: 229120 - DNA, 20 bp, Artificial Sequence
  Description of Artificial Sequence: Synthetic oligonucleotide
  Target: LAMA2; (-) strand; PAM type: YTN; PAM sequence: TTA
attttattcaccatgctgtg

SEQ ID NO: 229121 - DNA, 20 bp, Artificial Sequence
  Description of Artificial Sequence: Synthetic oligonucleotide
  Target: LAMA2; (-) strand; PAM type: YTN; PAM sequence: TTA
ttaattttattcaccatgct

SEQ ID NO: 229122 - DNA, 20 bp, Artificial Sequence
  Description of Artificial Sequence: Synthetic oligonucleotide
  Target: LAMA2; (-) strand; PAM type: YTN; PAM sequence: CTG
caatacaccattattaattt

SEQ ID NO: 229123 - DNA, 20 bp, Artificial Sequence
  Description of Artificial Sequence: Synthetic oligonucleotide
  Target: LAMA2; (-) strand; PAM type: YTN; PAM sequence: TTA
aaatctgcaatacaccatta

SEQ ID NO: 229124 - DNA, 20 bp, Artificial Sequence
  Description of Artificial Sequence: Synthetic oligonucleotide
  Target: LAMA2; (-) strand; PAM type: YTN; PAM sequence: TTT
aaaatctgcaatacaccatt

SEQ ID NO: 229125 - DNA, 20 bp, Artificial Sequence
  Description of Artificial Sequence: Synthetic oligonucleotide
  Target: LAMA2; (-) strand; PAM type: YTN; PAM sequence: TTT
taaaatctgcaatacaccat

SEQ ID NO: 229126 - DNA, 20 bp, Artificial Sequence
  Description of Artificial Sequence: Synthetic oligonucleotide
  Target: LAMA2; (-) strand; PAM type: YTN; PAM sequence: TTA
gcaattttaaaatctgcaat

SEQ ID NO: 229127 - DNA, 20 bp, Artificial Sequence
  Description of Artificial Sequence: Synthetic oligonucleotide
  Target: LAMA2; (-) strand; PAM type: YTN; PAM sequence: TTT
agcaattttaaaatctgcaa

SEQ ID NO: 229128 - DNA, 20 bp, Artificial Sequence
  Description of Artificial Sequence: Synthetic oligonucleotide
  Target: LAMA2; (-) strand; PAM type: YTN; PAM sequence: TTT
tagcaattttaaaatctgca

SEQ ID NO: 229129 - DNA, 20 bp, Artificial Sequence
  Description of Artificial Sequence: Synthetic oligonucleotide
  Target: LAMA2; (-) strand; PAM type: YTN; PAM sequence: CTT
ttagcaattttaaaatctgc

SEQ ID NO: 229130 - DNA, 20 bp, Artificial Sequence
  Description of Artificial Sequence: Synthetic oligonucleotide
  Target: LAMA2; (-) strand; PAM type: YTN; PAM sequence: CTC
ttttagcaattttaaaatct

SEQ ID NO: 229131 - DNA, 20 bp, Artificial Sequence
  Description of Artificial Sequence: Synthetic oligonucleotide
  Target: LAMA2; (-) strand; PAM type: YTN; PAM sequence: TTA
ctcttttagcaattttaaaa

SEQ ID NO: 229132 - DNA, 20 bp, Artificial Sequence
  Description of Artificial Sequence: Synthetic oligonucleotide
  Target: LAMA2; (-) strand; PAM type: YTN; PAM sequence: TTT
actcttttagcaattttaaa

SEQ ID NO: 229133 - DNA, 20 bp, Artificial Sequence
  Description of Artificial Sequence: Synthetic oligonucleotide
  Target: LAMA2; (-) strand; PAM type: YTN; PAM sequence: TTG
aaatttactcttttagcaat

SEQ ID NO: 229134 - DNA, 20 bp, Artificial Sequence
  Description of Artificial Sequence: Synthetic oligonucleotide
  Target: LAMA2; (-) strand; PAM type: YTN; PAM sequence: TTT
gaaatttactcttttagcaa

SEQ ID NO: 229135 - DNA, 20 bp, Artificial Sequence
  Description of Artificial Sequence: Synthetic oligonucleotide
  Target: LAMA2; (-) strand; PAM type: YTN; PAM sequence: TTA
tgatgagagcatttgaaatt

SEQ ID NO: 229136 - DNA, 20 bp, Artificial Sequence
  Description of Artificial Sequence: Synthetic oligonucleotide
  Target: LAMA2; (-) strand; PAM type: YTN; PAM sequence: TTT
atgatgagagcatttgaaat

SEQ ID NO: 229137 - DNA, 20 bp, Artificial Sequence
  Description of Artificial Sequence: Synthetic oligonucleotide
  Target: LAMA2; (-) strand; PAM type: YTN; PAM sequence: TTT
tatgatgagagcatttgaaa

SEQ ID NO: 229138 - DNA, 20 bp, Artificial Sequence
  Description of Artificial Sequence: Synthetic oligonucleotide
  Target: LAMA2; (-) strand; PAM type: YTN; PAM sequence: TTT
ttatgatgagagcatttgaa

SEQ ID NO: 229139 - DNA, 20 bp, Artificial Sequence
  Description of Artificial Sequence: Synthetic oligonucleotide
  Target: LAMA2; (-) strand; PAM type: YTN; PAM sequence: TTT
tttatgatgagagcatttga

SEQ ID NO: 229140 - DNA, 20 bp, Artificial Sequence
  Description of Artificial Sequence: Synthetic oligonucleotide
  Target: LAMA2; (-) strand; PAM type: YTN; PAM sequence: CTA
atattttttatgatgagagc

SEQ ID NO: 229141 - DNA, 20 bp, Artificial Sequence
  Description of Artificial Sequence: Synthetic oligonucleotide
  Target: LAMA2; (-) strand; PAM type: YTN; PAM sequence: CTC
aaatactaatattttttatg

SEQ ID NO: 229142 - DNA, 20 bp, Artificial Sequence
  Description of Artificial Sequence: Synthetic oligonucleotide
  Target: LAMA2; (-) strand; PAM type: YTN; PAM sequence: TTC
cctcaaatactaatattttt

SEQ ID NO: 229143 - DNA, 20 bp, Artificial Sequence
  Description of Artificial Sequence: Synthetic oligonucleotide
  Target: LAMA2; (-) strand; PAM type: YTN; PAM sequence: CTA
gtaacatacccattccctca

SEQ ID NO: 229144 - DNA, 20 bp, Artificial Sequence
  Description of Artificial Sequence: Synthetic oligonucleotide
  Target: LAMA2; (-) strand; PAM type: YTN; PAM sequence: TTA
agctagtaacatacccattc

SEQ ID NO: 229145 - DNA, 20 bp, Artificial Sequence
  Description of Artificial Sequence: Synthetic oligonucleotide
  Target: LAMA2; (-) strand; PAM type: YTN; PAM sequence: TTC
aattaagctagtaacatacc

SEQ ID NO: 229146 - DNA, 20 bp, Artificial Sequence
  Description of Artificial Sequence: Synthetic oligonucleotide
  Target: LAMA2; (-) strand; PAM type: YTN; PAM sequence: TTA
taatatatgaatgcaatgtg

SEQ ID NO: 229147 - DNA, 20 bp, Artificial Sequence
  Description of Artificial Sequence: Synthetic oligonucleotide
  Target: LAMA2; (-) strand; PAM type: YTN; PAM sequence: TTA
tggggtacaaagtgatgtta

SEQ ID NO: 229148 - DNA, 20 bp, Artificial Sequence
  Description of Artificial Sequence: Synthetic oligonucleotide
  Target: LAMA2; (-) strand; PAM type: YTN; PAM sequence: TTT
atggggtacaaagtgatgtt

SEQ ID NO: 229149 - DNA, 20 bp, Artificial Sequence
  Description of Artificial Sequence: Synthetic oligonucleotide
  Target: LAMA2; (-) strand; PAM type: YTN; PAM sequence: TTA
tgtaaatttatggggtacaa

SEQ ID NO: 229150 - DNA, 20 bp, Artificial Sequence
  Description of Artificial Sequence: Synthetic oligonucleotide
  Target: LAMA2; (-) strand; PAM type: YTN; PAM sequence: CTA
attatgtaaatttatggggt

SEQ ID NO: 229151 - DNA, 20 bp, Artificial Sequence
  Description of Artificial Sequence: Synthetic oligonucleotide
  Target: LAMA2; (-) strand; PAM type: YTN; PAM sequence: TTC
taattatgtaaatttatggg

SEQ ID NO: 229152 - DNA, 20 bp, Artificial Sequence
  Description of Artificial Sequence: Synthetic oligonucleotide
  Target: LAMA2; (-) strand; PAM type: YTN; PAM sequence: TTT
ctaattatgtaaatttatgg

SEQ ID NO: 229153 - DNA, 20 bp, Artificial Sequence
  Description of Artificial Sequence: Synthetic oligonucleotide
  Target: LAMA2; (-) strand; PAM type: YTN; PAM sequence: TTG
acaatttctaattatgtaaa

SEQ ID NO: 229154 - DNA, 20 bp, Artificial Sequence
  Description of Artificial Sequence: Synthetic oligonucleotide
  Target: LAMA2; (-) strand; PAM type: YTN; PAM sequence: TTG
taaattgacaatttctaatt

SEQ ID NO: 229155 - DNA, 20 bp, Artificial Sequence
  Description of Artificial Sequence: Synthetic oligonucleotide
  Target: LAMA2; (-) strand; PAM type: YTN; PAM sequence: TTA
ttgtaaattgacaatttcta

SEQ ID NO: 229156 - DNA, 20 bp, Artificial Sequence
  Description of Artificial Sequence: Synthetic oligonucleotide
  Target: LAMA2; (-) strand; PAM type: YTN; PAM sequence: TTT
attgtaaattgacaatttct

SEQ ID NO: 229157 - DNA, 20 bp, Artificial Sequence
  Description of Artificial Sequence: Synthetic oligonucleotide
  Target: LAMA2; (-) strand; PAM type: YTN; PAM sequence: TTT
tattgtaaattgacaatttc

SEQ ID NO: 229158 - DNA, 20 bp, Artificial Sequence
  Description of Artificial Sequence: Synthetic oligonucleotide
  Target: LAMA2; (-) strand; PAM type: YTN; PAM sequence: TTT
ttattgtaaattgacaattt

SEQ ID NO: 229159 - DNA, 20 bp, Artificial Sequence
  Description of Artificial Sequence: Synthetic oligonucleotide
  Target: LAMA2; (-) strand; PAM type: YTN; PAM sequence: TTT
tttattgtaaattgacaatt

SEQ ID NO: 229160 - DNA, 20 bp, Artificial Sequence
  Description of Artificial Sequence: Synthetic oligonucleotide
  Target: LAMA2; (-) strand; PAM type: YTN; PAM sequence: TTA
ttttttattgtaaattgaca

SEQ ID NO: 229161 - DNA, 20 bp, Artificial Sequence
  Description of Artificial Sequence: Synthetic oligonucleotide
  Target: LAMA2; (-) strand; PAM type: YTN; PAM sequence: TTT
attttttattgtaaattgac

SEQ ID NO: 229162 - DNA, 20 bp, Artificial Sequence
  Description of Artificial Sequence: Synthetic oligonucleotide
  Target: LAMA2; (-) strand; PAM type: YTN; PAM sequence: TTT
tattttttattgtaaattga

SEQ ID NO: 229163 - DNA, 20 bp, Artificial Sequence
  Description of Artificial Sequence: Synthetic oligonucleotide
  Target: LAMA2; (-) strand; PAM type: YTN; PAM sequence: TTT
ttattttttattgtaaattg

SEQ ID NO: 229164 - DNA, 20 bp, Artificial Sequence
  Description of Artificial Sequence: Synthetic oligonucleotide
  Target: LAMA2; (-) strand; PAM type: YTN; PAM sequence: CTT
tttattttttattgtaaatt

SEQ ID NO: 229165 - DNA, 20 bp, Artificial Sequence
  Description of Artificial Sequence: Synthetic oligonucleotide
  Target: LAMA2; (-) strand; PAM type: YTN; PAM sequence: TTG
atggctttttattttttatt

SEQ ID NO: 229166 - DNA, 20 bp, Artificial Sequence
  Description of Artificial Sequence: Synthetic oligonucleotide
  Target: LAMA2; (-) strand; PAM type: YTN; PAM sequence: TTT
gatggctttttattttttat

SEQ ID NO: 229167 - DNA, 20 bp, Artificial Sequence
  Description of Artificial Sequence: Synthetic oligonucleotide
  Target: LAMA2; (-) strand; PAM type: YTN; PAM sequence: TTT
tgatggctttttatttttta

SEQ ID NO: 229168 - DNA, 20 bp, Artificial Sequence
  Description of Artificial Sequence: Synthetic oligonucleotide
  Target: LAMA2; (-) strand; PAM type: YTN; PAM sequence: TTT
ttgatggctttttatttttt

SEQ ID NO: 229169 - DNA, 20 bp, Artificial Sequence
  Description of Artificial Sequence: Synthetic oligonucleotide
  Target: LAMA2; (-) strand; PAM type: YTN; PAM sequence: TTT
tttgatggctttttattttt

SEQ ID NO: 229170 - DNA, 20 bp, Artificial Sequence
  Description of Artificial Sequence: Synthetic oligonucleotide
  Target: LAMA2; (-) strand; PAM type: YTN; PAM sequence: CTG
gcgttttttgatggcttttt

SEQ ID NO: 229171 - DNA, 20 bp, Artificial Sequence
  Description of Artificial Sequence: Synthetic oligonucleotide
  Target: LAMA2; (-) strand; PAM type: YTN; PAM sequence: TTG
cctggcgttttttgatggct

SEQ ID NO: 229172 - DNA, 20 bp, Artificial Sequence
  Description of Artificial Sequence: Synthetic oligonucleotide
  Target: LAMA2; (-) strand; PAM type: YTN; PAM sequence: TTT
gcctggcgttttttgatggc

SEQ ID NO: 229173 - DNA, 20 bp, Artificial Sequence
  Description of Artificial Sequence: Synthetic oligonucleotide
  Target: LAMA2; (-) strand; PAM type: YTN; PAM sequence: TTT
tgcctggcgttttttgatgg

SEQ ID NO: 229174 - DNA, 20 bp, Artificial Sequence
  Description of Artificial Sequence: Synthetic oligonucleotide
  Target: LAMA2; (-) strand; PAM type: YTN; PAM sequence: TTT
ttgcctggcgttttttgatg

SEQ ID NO: 229175 - DNA, 20 bp, Artificial Sequence
  Description of Artificial Sequence: Synthetic oligonucleotide
  Target: LAMA2; (-) strand; PAM type: YTN; PAM sequence: TTA
aatatgggtataagtatatc

SEQ ID NO: 229176 - DNA, 20 bp, Artificial Sequence
  Description of Artificial Sequence: Synthetic oligonucleotide
  Target: LAMA2; (-) strand; PAM type: YTN; PAM sequence: TTT
aaatatgggtataagtatat

SEQ ID NO: 229177 - DNA, 20 bp, Artificial Sequence
  Description of Artificial Sequence: Synthetic oligonucleotide
  Target: LAMA2; (-) strand; PAM type: YTN; PAM sequence: TTA
tggtgtaggtttaaatatgg

SEQ ID NO: 229178 - DNA, 20 bp, Artificial Sequence
  Description of Artificial Sequence: Synthetic oligonucleotide
  Target: LAMA2; (-) strand; PAM type: YTN; PAM sequence: TTT
atggtgtaggtttaaatatg

SEQ ID NO: 229179 - DNA, 20 bp, Artificial Sequence
  Description of Artificial Sequence: Synthetic oligonucleotide
  Target: LAMA2; (-) strand; PAM type: YTN; PAM sequence: TTA
aatataatttatggtgtagg

SEQ ID NO: 229180 - DNA, 20 bp, Artificial Sequence
  Description of Artificial Sequence: Synthetic oligonucleotide
  Target: LAMA2; (-) strand; PAM type: YTN; PAM sequence: TTT
aaatataatttatggtgtag

SEQ ID NO: 229181 - DNA, 20 bp, Artificial Sequence
  Description of Artificial Sequence: Synthetic oligonucleotide
  Target: LAMA2; (-) strand; PAM type: YTN; PAM sequence: TTA
taaatttaaatataatttat

SEQ ID NO: 229182 - DNA, 20 bp, Artificial Sequence
  Description of Artificial Sequence: Synthetic oligonucleotide
  Target: LAMA2; (-) strand; PAM type: YTN; PAM sequence: CTG
aaaacagcagcaggcagaat

SEQ ID NO: 229183 - DNA, 20 bp, Artificial Sequence
  Description of Artificial Sequence: Synthetic oligonucleotide
  Target: LAMA2; (-) strand; PAM type: YTN; PAM sequence: TTA
ctgaaaacagcagcaggcag

SEQ ID NO: 229184 - DNA, 20 bp, Artificial Sequence
  Description of Artificial Sequence: Synthetic oligonucleotide
  Target: LAMA2; (-) strand; PAM type: YTN; PAM sequence: TTA
attactgaaaacagcagcag

SEQ ID NO: 229185 - DNA, 20 bp, Artificial Sequence
  Description of Artificial Sequence: Synthetic oligonucleotide
  Target: LAMA2; (-) strand; PAM type: YTN; PAM sequence: TTA
atgatattaattactgaaaa

SEQ ID NO: 229186 - DNA, 20 bp, Artificial Sequence
  Description of Artificial Sequence: Synthetic oligonucleotide
  Target: LAMA2; (-) strand; PAM type: YTN; PAM sequence: CTT
aatgatattaattactgaaa

SEQ ID NO: 229187 - DNA, 20 bp, Artificial Sequence
  Description of Artificial Sequence: Synthetic oligonucleotide
  Target: LAMA2; (-) strand; PAM type: YTN; PAM sequence: TTC
ttaatgatattaattactga

SEQ ID NO: 229188 - DNA, 20 bp, Artificial Sequence
  Description of Artificial Sequence: Synthetic oligonucleotide
  Target: LAMA2; (-) strand; PAM type: YTN; PAM sequence: TTT
cttaatgatattaattactg

SEQ ID NO: 229189 - DNA, 20 bp, Artificial Sequence
  Description of Artificial Sequence: Synthetic oligonucleotide
  Target: LAMA2; (-) strand; PAM type: YTN; PAM sequence: CTT
tcttaatgatattaattact

SEQ ID NO: 229190 - DNA, 20 bp, Artificial Sequence
  Description of Artificial Sequence: Synthetic oligonucleotide
  Target: LAMA2; (-) strand; PAM type: YTN; PAM sequence: CTG
tgctttcttaatgatattaa

SEQ ID NO: 229191 - DNA, 20 bp, Artificial Sequence
  Description of Artificial Sequence: Synthetic oligonucleotide
  Target: LAMA2; (-) strand; PAM type: YTN; PAM sequence: TTA
acctgtgctttcttaatgat

SEQ ID NO: 229192 - DNA, 20 bp, Artificial Sequence
  Description of Artificial Sequence: Synthetic oligonucleotide
  Target: LAMA2; (-) strand; PAM type: YTN; PAM sequence: TTT
aacctgtgctttcttaatga

SEQ ID NO: 229193 - DNA, 20 bp, Artificial Sequence
  Description of Artificial Sequence: Synthetic oligonucleotide
  Target: LAMA2; (-) strand; PAM type: YTN; PAM sequence: TTG
atttaacctgtgctttctta

SEQ ID NO: 229194 - DNA, 20 bp, Artificial Sequence
  Description of Artificial Sequence: Synthetic oligonucleotide
  Target: LAMA2; (-) strand; PAM type: YTN; PAM sequence: TTT
gatttaacctgtgctttctt

SEQ ID NO: 229195 - DNA, 20 bp, Artificial Sequence
  Description of Artificial Sequence: Synthetic oligonucleotide
  Target: LAMA2; (-) strand; PAM type: YTN; PAM sequence: TTG
aaatttgatttaacctgtgc

SEQ ID NO: 229196 - DNA, 20 bp, Artificial Sequence
  Description of Artificial Sequence: Synthetic oligonucleotide
  Target: LAMA2; (-) strand; PAM type: YTN; PAM sequence: CTG
tgttgaaatttgatttaacc

SEQ ID NO: 229197 - DNA, 20 bp, Artificial Sequence
  Description of Artificial Sequence: Synthetic oligonucleotide
  Target: LAMA2; (-) strand; PAM type: YTN; PAM sequence: CTG
aaatgatactgtgttgaaat

SEQ ID NO: 229198 - DNA, 20 bp, Artificial Sequence
  Description of Artificial Sequence: Synthetic oligonucleotide
  Target: LAMA2; (-) strand; PAM type: YTN; PAM sequence: TTA
tactgaaatgatactgtgtt

SEQ ID NO: 229199 - DNA, 20 bp, Artificial Sequence
  Description of Artificial Sequence: Synthetic oligonucleotide
  Target: LAMA2; (-) strand; PAM type: YTN; PAM sequence: TTT
atactgaaatgatactgtgt

SEQ ID NO: 229200 - DNA, 20 bp, Artificial Sequence
  Description of Artificial Sequence: Synthetic oligonucleotide
  Target: LAMA2; (-) strand; PAM type: YTN; PAM sequence: TTT
tatactgaaatgatactgtg

SEQ ID NO: 229201 - DNA, 20 bp, Artificial Sequence
  Description of Artificial Sequence: Synthetic oligonucleotide
  Target: LAMA2; (-) strand; PAM type: YTN; PAM sequence: TTC
aaaatatgagattttatact

SEQ ID NO: 229202 - DNA, 20 bp, Artificial Sequence
  Description of Artificial Sequence: Synthetic oligonucleotide
  Target: LAMA2; (-) strand; PAM type: YTN; PAM sequence: TTA
ttcaaaatatgagattttat

SEQ ID NO: 229203 - DNA, 20 bp, Artificial Sequence
  Description of Artificial Sequence: Synthetic oligonucleotide
  Target: LAMA2; (-) strand; PAM type: YTN; PAM sequence: TTT
attcaaaatatgagatttta

SEQ ID NO: 229204 - DNA, 20 bp, Artificial Sequence
  Description of Artificial Sequence: Synthetic oligonucleotide
  Target: LAMA2; (-) strand; PAM type: YTN; PAM sequence: TTT
tattcaaaatatgagatttt

SEQ ID NO: 229205 - DNA, 20 bp, Artificial Sequence
  Description of Artificial Sequence: Synthetic oligonucleotide
  Target: LAMA2; (-) strand; PAM type: YTN; PAM sequence: TTG
ttttattcaaaatatgagat

SEQ ID NO: 229206 - DNA, 20 bp, Artificial Sequence
  Description of Artificial Sequence: Synthetic oligonucleotide
  Target: LAMA2; (-) strand; PAM type: YTN; PAM sequence: TTT
gttttattcaaaatatgaga

SEQ ID NO: 229207 - DNA, 20 bp, Artificial Sequence
  Description of Artificial Sequence: Synthetic oligonucleotide
  Target: LAMA2; (-) strand; PAM type: YTN; PAM sequence: TTA
ataatgtgtaaagatatgtt

SEQ ID NO: 229208 - DNA, 20 bp, Artificial Sequence
  Description of Artificial Sequence: Synthetic oligonucleotide
  Target: LAMA2; (-) strand; PAM type: YTN; PAM sequence: TTT
aataatgtgtaaagatatgt

SEQ ID NO: 229209 - DNA, 20 bp, Artificial Sequence
  Description of Artificial Sequence: Synthetic oligonucleotide
  Target: LAMA2; (-) strand; PAM type: YTN; PAM sequence: TTC
atttaataatgtgtaaagat

SEQ ID NO: 229210 - DNA, 20 bp, Artificial Sequence
  Description of Artificial Sequence: Synthetic oligonucleotide
  Target: LAMA2; (-) strand; PAM type: YTN; PAM sequence: TTG
tcagcgtagttcatttaata

SEQ ID NO: 229211 - DNA, 20 bp, Artificial Sequence
  Description of Artificial Sequence: Synthetic oligonucleotide
  Target: LAMA2; (-) strand; PAM type: YTN; PAM sequence: TTT
gtcagcgtagttcatttaat

SEQ ID NO: 229212 - DNA, 20 bp, Artificial Sequence
  Description of Artificial Sequence: Synthetic oligonucleotide
  Target: LAMA2; (-) strand; PAM type: YTN; PAM sequence: CTC
aaaaaaagaaacaaaatttg

SEQ ID NO: 229213 - DNA, 20 bp, Artificial Sequence
  Description of Artificial Sequence: Synthetic oligonucleotide
  Target: LAMA2; (-) strand; PAM type: YTN; PAM sequence: TTC
tcaaaaaaagaaacaaaatt

SEQ ID NO: 229214 - DNA, 20 bp, Artificial Sequence
  Description of Artificial Sequence: Synthetic oligonucleotide
  Target: LAMA2; (-) strand; PAM type: YTN; PAM sequence: CTG
gttctcaaaaaaagaaacaa

SEQ ID NO: 229215 - DNA, 20 bp, Artificial Sequence
  Description of Artificial Sequence: Synthetic oligonucleotide
  Target: LAMA2; (-) strand; PAM type: YTN; PAM sequence: TTC
tggttctcaaaaaaagaaac

SEQ ID NO: 229216 - DNA, 20 bp, Artificial Sequence
  Description of Artificial Sequence: Synthetic oligonucleotide
  Target: LAMA2; (-) strand; PAM type: YTN; PAM sequence: TTT
ctggttctcaaaaaaagaaa

SEQ ID NO: 229217 - DNA, 20 bp, Artificial Sequence
  Description of Artificial Sequence: Synthetic oligonucleotide
  Target: LAMA2; (-) strand; PAM type: YTN; PAM sequence: TTT
tctggttctcaaaaaaagaa

SEQ ID NO: 229218 - DNA, 20 bp, Artificial Sequence
  Description of Artificial Sequence: Synthetic oligonucleotide
  Target: LAMA2; (-) strand; PAM type: YTN; PAM sequence: TTT
ttctggttctcaaaaaaaga

SEQ ID NO: 229219 - DNA, 20 bp, Artificial Sequence
  Description of Artificial Sequence: Synthetic oligonucleotide
  Target: LAMA2; (-) strand; PAM type: YTN; PAM sequence: TTG
tttttctggttctcaaaaaa

SEQ ID NO: 229220 - DNA, 20 bp, Artificial Sequence
  Description of Artificial Sequence: Synthetic oligonucleotide
  Target: LAMA2; (-) strand; PAM type: YTN; PAM sequence: CTA
agtataattgtttttctggt

SEQ ID NO: 229221 - DNA, 20 bp, Artificial Sequence
  Description of Artificial Sequence: Synthetic oligonucleotide
  Target: LAMA2; (-) strand; PAM type: YTN; PAM sequence: TTA
gatggcccatctaagtataa

SEQ ID NO: 229222 - DNA, 20 bp, Artificial Sequence
  Description of Artificial Sequence: Synthetic oligonucleotide
  Target: LAMA2; (-) strand; PAM type: YTN; PAM sequence: TTT
agatggcccatctaagtata

SEQ ID NO: 229223 - DNA, 20 bp, Artificial Sequence
  Description of Artificial Sequence: Synthetic oligonucleotide
  Target: LAMA2; (-) strand; PAM type: YTN; PAM sequence: TTT
tagatggcccatctaagtat

SEQ ID NO: 229224 - DNA, 20 bp, Artificial Sequence
  Description of Artificial Sequence: Synthetic oligonucleotide
  Target: LAMA2; (-) strand; PAM type: YTN; PAM sequence: CTG
gaaggacattttagatggcc

SEQ ID NO: 229225 - DNA, 20 bp, Artificial Sequence
  Description of Artificial Sequence: Synthetic oligonucleotide
  Target: LAMA2; (-) strand; PAM type: YTN; PAM sequence: CTC
cacaagctggaaggacattt

SEQ ID NO: 229226 - DNA, 20 bp, Artificial Sequence
  Description of Artificial Sequence: Synthetic oligonucleotide
  Target: LAMA2; (-) strand; PAM type: YTN; PAM sequence: CTA
ctccacaagctggaaggaca

SEQ ID NO: 229227 - DNA, 20 bp, Artificial Sequence
  Description of Artificial Sequence: Synthetic oligonucleotide
  Target: LAMA2; (-) strand; PAM type: YTN; PAM sequence: TTG
aaaaacaaacacaacctact

SEQ ID NO: 229228 - DNA, 20 bp, Artificial Sequence
  Description of Artificial Sequence: Synthetic oligonucleotide
  Target: LAMA2; (-) strand; PAM type: YTN; PAM sequence: TTC
attgaaaaacaaacacaacc

SEQ ID NO: 229229 - DNA, 20 bp, Artificial Sequence
  Description of Artificial Sequence: Synthetic oligonucleotide
  Target: LAMA2; (-) strand; PAM type: YTN; PAM sequence: TTG
tcaaacagatgttcattgaa

SEQ ID NO: 229230 - DNA, 20 bp, Artificial Sequence
  Description of Artificial Sequence: Synthetic oligonucleotide
  Target: LAMA2; (-) strand; PAM type: YTN; PAM sequence: TTT
gtcaaacagatgttcattga

SEQ ID NO: 229231 - DNA, 20 bp, Artificial Sequence
  Description of Artificial Sequence: Synthetic oligonucleotide
  Target: LAMA2; (-) strand; PAM type: YTN; PAM sequence: TTC
aatttgtcaaacagatgttc

SEQ ID NO: 229232 - DNA, 20 bp, Artificial Sequence
  Description of Artificial Sequence: Synthetic oligonucleotide
  Target: LAMA2; (-) strand; PAM type: YTN; PAM sequence: TTT
caatttgtcaaacagatgtt

SEQ ID NO: 229233 - DNA, 20 bp, Artificial Sequence
  Description of Artificial Sequence: Synthetic oligonucleotide
  Target: LAMA2; (-) strand; PAM type: YTN; PAM sequence: TTA
gcatttcaatttgtcaaaca

SEQ ID NO: 229234 - DNA, 20 bp, Artificial Sequence
  Description of Artificial Sequence: Synthetic oligonucleotide
  Target: LAMA2; (-) strand; PAM type: YTN; PAM sequence: TTG
atgtcatggaaatgataaat

SEQ ID NO: 229235 - DNA, 20 bp, Artificial Sequence
  Description of Artificial Sequence: Synthetic oligonucleotide
  Target: LAMA2; (-) strand; PAM type: YTN; PAM sequence: TTT
gatgtcatggaaatgataaa

SEQ ID NO: 229236 - DNA, 20 bp, Artificial Sequence
  Description of Artificial Sequence: Synthetic oligonucleotide
  Target: LAMA2; (-) strand; PAM type: YTN; PAM sequence: CTG
gatatttgatgtcatggaaa

SEQ ID NO: 229237 - DNA, 20 bp, Artificial Sequence
  Description of Artificial Sequence: Synthetic oligonucleotide
  Target: LAMA2; (-) strand; PAM type: YTN; PAM sequence: CTA
tctggatatttgatgtcatg

SEQ ID NO: 229238 - DNA, 20 bp, Artificial Sequence
  Description of Artificial Sequence: Synthetic oligonucleotide
  Target: LAMA2; (-) strand; PAM type: YTN; PAM sequence: TTA
ctatctggatatttgatgtc

SEQ ID NO: 229239 - DNA, 20 bp, Artificial Sequence
  Description of Artificial Sequence: Synthetic oligonucleotide
  Target: LAMA2; (-) strand; PAM type: YTN; PAM sequence: TTA
ttactatctggatatttgat

SEQ ID NO: 229240 - DNA, 20 bp, Artificial Sequence
  Description of Artificial Sequence: Synthetic oligonucleotide
  Target: LAMA2; (-) strand; PAM type: YTN; PAM sequence: TTT
attactatctggatatttga

SEQ ID NO: 229241 - DNA, 20 bp, Artificial Sequence
  Description of Artificial Sequence: Synthetic oligonucleotide
  Target: LAMA2; (-) strand; PAM type: YTN; PAM sequence: TTA
gtcatcaacgtttattacta

SEQ ID NO: 229242 - DNA, 20 bp, Artificial Sequence
  Description of Artificial Sequence: Synthetic oligonucleotide
  Target: LAMA2; (-) strand; PAM type: YTN; PAM sequence: CTG
aaaaatatagttagtcatca

SEQ ID NO: 229243 - DNA, 20 bp, Artificial Sequence
  Description of Artificial Sequence: Synthetic oligonucleotide
  Target: LAMA2; (-) strand; PAM type: YTN; PAM sequence: CTG
aaactgaaaaatatagttag

SEQ ID NO: 229244 - DNA, 20 bp, Artificial Sequence
  Description of Artificial Sequence: Synthetic oligonucleotide
  Target: LAMA2; (-) strand; PAM type: YTN; PAM sequence: CTG
gctgaaactgaaaaatatag

SEQ ID NO: 229245 - DNA, 20 bp, Artificial Sequence
  Description of Artificial Sequence: Synthetic oligonucleotide
  Target: LAMA2; (-) strand; PAM type: YTN; PAM sequence: TTA
cgtgatgccaaacatctggc

SEQ ID NO: 229246 - DNA, 20 bp, Artificial Sequence
  Description of Artificial Sequence: Synthetic oligonucleotide
  Target: LAMA2; (-) strand; PAM type: YTN; PAM sequence: CTT
acgtgatgccaaacatctgg

SEQ ID NO: 229247 - DNA, 20 bp, Artificial Sequence
  Description of Artificial Sequence: Synthetic oligonucleotide
  Target: LAMA2; (-) strand; PAM type: YTN; PAM sequence: CTA
aggtggtatcttacgtgatg

SEQ ID NO: 229248 - DNA, 20 bp, Artificial Sequence
  Description of Artificial Sequence: Synthetic oligonucleotide
  Target: LAMA2; (-) strand; PAM type: YTN; PAM sequence: TTA
tgtaaaactaaggtggtatc

SEQ ID NO: 229249 - DNA, 20 bp, Artificial Sequence
  Description of Artificial Sequence: Synthetic oligonucleotide
  Target: LAMA2; (-) strand; PAM type: YTN; PAM sequence: TTT
atgtaaaactaaggtggtat

SEQ ID NO: 229250 - DNA, 20 bp, Artificial Sequence
  Description of Artificial Sequence: Synthetic oligonucleotide
  Target: LAMA2; (-) strand; PAM type: YTN; PAM sequence: TTT
tatgtaaaactaaggtggta

SEQ ID NO: 229251 - DNA, 20 bp, Artificial Sequence
  Description of Artificial Sequence: Synthetic oligonucleotide
  Target: LAMA2; (-) strand; PAM type: YTN; PAM sequence: TTT
ttatgtaaaactaaggtggt

SEQ ID NO: 229252 - DNA, 20 bp, Artificial Sequence
  Description of Artificial Sequence: Synthetic oligonucleotide
  Target: LAMA2; (-) strand; PAM type: YTN; PAM sequence: TTA
tttttatgtaaaactaaggt

SEQ ID NO: 229253 - DNA, 20 bp, Artificial Sequence
  Description of Artificial Sequence: Synthetic oligonucleotide
  Target: LAMA2; (-) strand; PAM type: YTN; PAM sequence: TTT
atttttatgtaaaactaagg

SEQ ID NO: 229254 - DNA, 20 bp, Artificial Sequence
  Description of Artificial Sequence: Synthetic oligonucleotide
  Target: LAMA2; (-) strand; PAM type: YTN; PAM sequence: TTT
tatttttatgtaaaactaag

SEQ ID NO: 229255 - DNA, 20 bp, Artificial Sequence
  Description of Artificial Sequence: Synthetic oligonucleotide
  Target: LAMA2; (-) strand; PAM type: YTN; PAM sequence: CTC
aagaaacattttatttttat

SEQ ID NO: 229256 - DNA, 20 bp, Artificial Sequence
  Description of Artificial Sequence: Synthetic oligonucleotide
  Target: LAMA2; (-) strand; PAM type: YTN; PAM sequence: TTA
tgataagccagactcaagaa

SEQ ID NO: 229257 - DNA, 20 bp, Artificial Sequence
  Description of Artificial Sequence: Synthetic oligonucleotide
  Target: LAMA2; (-) strand; PAM type: YTN; PAM sequence: CTC
cccattatgataagccagac

SEQ ID NO: 229258 - DNA, 20 bp, Artificial Sequence
  Description of Artificial Sequence: Synthetic oligonucleotide
  Target: LAMA2; (-) strand; PAM type: YTN; PAM sequence: TTC
ctccccattatgataagcca

SEQ ID NO: 229259 - DNA, 20 bp, Artificial Sequence
  Description of Artificial Sequence: Synthetic oligonucleotide
  Target: LAMA2; (-) strand; PAM type: YTN; PAM sequence: TTT
cctccccattatgataagcc

SEQ ID NO: 229260 - DNA, 20 bp, Artificial Sequence
  Description of Artificial Sequence: Synthetic oligonucleotide
  Target: LAMA2; (-) strand; PAM type: YTN; PAM sequence: TTA
gtttcctccccattatgata

SEQ ID NO: 229261 - DNA, 20 bp, Artificial Sequence
  Description of Artificial Sequence: Synthetic oligonucleotide
  Target: LAMA2; (-) strand; PAM type: YTN; PAM sequence: TTC
atattagtttcctccccatt

SEQ ID NO: 229262 - DNA, 20 bp, Artificial Sequence
  Description of Artificial Sequence: Synthetic oligonucleotide
  Target: LAMA2; (-) strand; PAM type: YTN; PAM sequence: TTC
attcatattagtttcctccc

SEQ ID NO: 229263 - DNA, 20 bp, Artificial Sequence
  Description of Artificial Sequence: Synthetic oligonucleotide
  Target: LAMA2; (-) strand; PAM type: YTN; PAM sequence: CTT
cattcatattagtttcctcc

SEQ ID NO: 229264 - DNA, 20 bp, Artificial Sequence
  Description of Artificial Sequence: Synthetic oligonucleotide
  Target: LAMA2; (-) strand; PAM type: YTN; PAM sequence: CTG
cttcattcatattagtttcc

SEQ ID NO: 229265 - DNA, 20 bp, Artificial Sequence
  Description of Artificial Sequence: Synthetic oligonucleotide
  Target: LAMA2; (-) strand; PAM type: YTN; PAM sequence: TTC
tgcttcattcatattagttt

SEQ ID NO: 229266 - DNA, 20 bp, Artificial Sequence
  Description of Artificial Sequence: Synthetic oligonucleotide
  Target: LAMA2; (-) strand; PAM type: YTN; PAM sequence: TTG
agaaaaaaaatgaaccattc

SEQ ID NO: 229267 - DNA, 20 bp, Artificial Sequence
  Description of Artificial Sequence: Synthetic oligonucleotide
  Target: LAMA2; (-) strand; PAM type: YTN; PAM sequence: TTG
tacacattgagaaaaaaaat

SEQ ID NO: 229268 - DNA, 20 bp, Artificial Sequence
  Description of Artificial Sequence: Synthetic oligonucleotide
  Target: LAMA2; (-) strand; PAM type: YTN; PAM sequence: TTA
ccagtagaattgtacacatt

SEQ ID NO: 229269 - DNA, 20 bp, Artificial Sequence
  Description of Artificial Sequence: Synthetic oligonucleotide
  Target: LAMA2; (-) strand; PAM type: YTN; PAM sequence: CTT
accagtagaattgtacacat

SEQ ID NO: 229270 - DNA, 20 bp, Artificial Sequence
  Description of Artificial Sequence: Synthetic oligonucleotide
  Target: LAMA2; (-) strand; PAM type: YTN; PAM sequence: TTG
taaaagtcttaccagtagaa

SEQ ID NO: 229271 - DNA, 20 bp, Artificial Sequence
  Description of Artificial Sequence: Synthetic oligonucleotide
  Target: LAMA2; (-) strand; PAM type: YTN; PAM sequence: TTA
tgatattgtaaaagtcttac

SEQ ID NO: 229272 - DNA, 20 bp, Artificial Sequence
  Description of Artificial Sequence: Synthetic oligonucleotide
  Target: LAMA2; (-) strand; PAM type: YTN; PAM sequence: TTT
atgatattgtaaaagtctta

SEQ ID NO: 229273 - DNA, 20 bp, Artificial Sequence
  Description of Artificial Sequence: Synthetic oligonucleotide
  Target: LAMA2; (-) strand; PAM type: YTN; PAM sequence: TTA
tttatgatattgtaaaagtc

SEQ ID NO: 229274 - DNA, 20 bp, Artificial Sequence
  Description of Artificial Sequence: Synthetic oligonucleotide
  Target: LAMA2; (-) strand; PAM type: YTN; PAM sequence: TTT
atttatgatattgtaaaagt

SEQ ID NO: 229275 - DNA, 20 bp, Artificial Sequence
  Description of Artificial Sequence: Synthetic oligonucleotide
  Target: LAMA2; (-) strand; PAM type: YTN; PAM sequence: TTT
tatttatgatattgtaaaag

SEQ ID NO: 229276 - DNA, 20 bp, Artificial Sequence
  Description of Artificial Sequence: Synthetic oligonucleotide
  Target: LAMA2; (-) strand; PAM type: YTN; PAM sequence: TTA
aagtacaattttatttatga

SEQ ID NO: 229277 - DNA, 20 bp, Artificial Sequence
  Description of Artificial Sequence: Synthetic oligonucleotide
  Target: LAMA2; (-) strand; PAM type: YTN; PAM sequence: TTT
aaagtacaattttatttatg

SEQ ID NO: 229278 - DNA, 20 bp, Artificial Sequence
  Description of Artificial Sequence: Synthetic oligonucleotide
  Target: LAMA2; (-) strand; PAM type: YTN; PAM sequence: TTT
taaagtacaattttatttat

SEQ ID NO: 229279 - DNA, 20 bp, Artificial Sequence
  Description of Artificial Sequence: Synthetic oligonucleotide
  Target: LAMA2; (-) strand; PAM type: YTN; PAM sequence: TTA
ttttaaagtacaattttatt

SEQ ID NO: 229280 - DNA, 20 bp, Artificial Sequence
  Description of Artificial Sequence: Synthetic oligonucleotide
  Target: LAMA2; (-) strand; PAM type: YTN; PAM sequence: CTT
attttaaagtacaattttat

SEQ ID NO: 229281 - DNA, 20 bp, Artificial Sequence
  Description of Artificial Sequence: Synthetic oligonucleotide
  Target: LAMA2; (-) strand; PAM type: YTN; PAM sequence: TTG
aaagacacttattttaaagt

SEQ ID NO: 229282 - DNA, 20 bp, Artificial Sequence
  Description of Artificial Sequence: Synthetic oligonucleotide
  Target: LAMA2; (-) strand; PAM type: YTN; PAM sequence: TTT
gaaagacacttattttaaag

SEQ ID NO: 229283 - DNA, 20 bp, Artificial Sequence
  Description of Artificial Sequence: Synthetic oligonucleotide
  Target: LAMA2; (-) strand; PAM type: YTN; PAM sequence: TTG
taaaagtttgaaagacactt

SEQ ID NO: 229284 - DNA, 20 bp, Artificial Sequence
  Description of Artificial Sequence: Synthetic oligonucleotide
  Target: LAMA2; (-) strand; PAM type: YTN; PAM sequence: TTT
gtaaaagtttgaaagacact

SEQ ID NO: 229285 - DNA, 20 bp, Artificial Sequence
  Description of Artificial Sequence: Synthetic oligonucleotide
  Target: LAMA2; (-) strand; PAM type: YTN; PAM sequence: TTG
tatttgtaaaagtttgaaag

SEQ ID NO: 229286 - DNA, 20 bp, Artificial Sequence
  Description of Artificial Sequence: Synthetic oligonucleotide
  Target: LAMA2; (-) strand; PAM type: YTN; PAM sequence: TTT
gtatttgtaaaagtttgaaa

SEQ ID NO: 229287 - DNA, 20 bp, Artificial Sequence
  Description of Artificial Sequence: Synthetic oligonucleotide
  Target: LAMA2; (-) strand; PAM type: YTN; PAM sequence: CTT
tgtatttgtaaaagtttgaa

SEQ ID NO: 229288 - DNA, 20 bp, Artificial Sequence
  Description of Artificial Sequence: Synthetic oligonucleotide
  Target: LAMA2; (-) strand; PAM type: YTN; PAM sequence: TTC
tttgtatttgtaaaagtttg

SEQ ID NO: 229289 - DNA, 20 bp, Artificial Sequence
  Description of Artificial Sequence: Synthetic oligonucleotide
  Target: LAMA2; (-) strand; PAM type: YTN; PAM sequence: TTT
ctttgtatttgtaaaagttt

SEQ ID NO: 229290 - DNA, 20 bp, Artificial Sequence
  Description of Artificial Sequence: Synthetic oligonucleotide
  Target: LAMA2; (-) strand; PAM type: YTN; PAM sequence: CTT
tctttgtatttgtaaaagtt

SEQ ID NO: 229291 - DNA, 20 bp, Artificial Sequence
  Description of Artificial Sequence: Synthetic oligonucleotide
  Target: LAMA2; (-) strand; PAM type: YTN; PAM sequence: CTG
gctttctttgtatttgtaaa

SEQ ID NO: 229292 - DNA, 20 bp, Artificial Sequence
  Description of Artificial Sequence: Synthetic oligonucleotide
  Target: LAMA2; (-) strand; PAM type: YTN; PAM sequence: TTC
tggctttctttgtatttgta

SEQ ID NO: 229293 - DNA, 20 bp, Artificial Sequence
  Description of Artificial Sequence: Synthetic oligonucleotide
  Target: LAMA2; (-) strand; PAM type: YTN; PAM sequence: TTG
attctggctttctttgtatt

SEQ ID NO: 229294 - DNA, 20 bp, Artificial Sequence
  Description of Artificial Sequence: Synthetic oligonucleotide
  Target: LAMA2; (-) strand; PAM type: YTN; PAM sequence: TTT
gattctggctttctttgtat

SEQ ID NO: 229295 - DNA, 20 bp, Artificial Sequence
  Description of Artificial Sequence: Synthetic oligonucleotide
  Target: LAMA2; (-) strand; PAM type: YTN; PAM sequence: TTT
tgattctggctttctttgta

SEQ ID NO: 229296 - DNA, 20 bp, Artificial Sequence
  Description of Artificial Sequence: Synthetic oligonucleotide
  Target: LAMA2; (-) strand; PAM type: YTN; PAM sequence: TTG
ggttttgattctggctttct

SEQ ID NO: 229297 - DNA, 20 bp, Artificial Sequence
  Description of Artificial Sequence: Synthetic oligonucleotide
  Target: LAMA2; (-) strand; PAM type: YTN; PAM sequence: TTC
aaaattgggttttgattctg

SEQ ID NO: 229298 - DNA, 20 bp, Artificial Sequence
  Description of Artificial Sequence: Synthetic oligonucleotide
  Target: LAMA2; (-) strand; PAM type: YTN; PAM sequence: TTG
atattcaaaattgggttttg

SEQ ID NO: 229299 - DNA, 20 bp, Artificial Sequence
  Description of Artificial Sequence: Synthetic oligonucleotide
  Target: LAMA2; (-) strand; PAM type: YTN; PAM sequence: CTT
gatattcaaaattgggtttt

SEQ ID NO: 229300 - DNA, 20 bp, Artificial Sequence
  Description of Artificial Sequence: Synthetic oligonucleotide
  Target: LAMA2; (-) strand; PAM type: YTN; PAM sequence: TTA
acacttgatattcaaaattg

SEQ ID NO: 229301 - DNA, 20 bp, Artificial Sequence
  Description of Artificial Sequence: Synthetic oligonucleotide
  Target: LAMA2; (-) strand; PAM type: YTN; PAM sequence: TTT
aacacttgatattcaaaatt

SEQ ID NO: 229302 - DNA, 20 bp, Artificial Sequence
  Description of Artificial Sequence: Synthetic oligonucleotide
  Target: LAMA2; (-) strand; PAM type: YTN; PAM sequence: TTC
atatttaacacttgatattc

SEQ ID NO: 229303 - DNA, 20 bp, Artificial Sequence
  Description of Artificial Sequence: Synthetic oligonucleotide
  Target: LAMA2; (-) strand; PAM type: YTN; PAM sequence: CTG
atattcatatttaacacttg

SEQ ID NO: 229304 - DNA, 20 bp, Artificial Sequence
  Description of Artificial Sequence: Synthetic oligonucleotide
  Target: LAMA2; (-) strand; PAM type: YTN; PAM sequence: TTC
tgatattcatatttaacact

SEQ ID NO: 229305 - DNA, 20 bp, Artificial Sequence
  Description of Artificial Sequence: Synthetic oligonucleotide
  Target: LAMA2; (-) strand; PAM type: YTN; PAM sequence: TTT
ctgatattcatatttaacac

SEQ ID NO: 229306 - DNA, 20 bp, Artificial Sequence
  Description of Artificial Sequence: Synthetic oligonucleotide
  Target: LAMA2; (-) strand; PAM type: YTN; PAM sequence: TTC
agtttctgatattcatattt

SEQ ID NO: 229307 - DNA, 20 bp, Artificial Sequence
  Description of Artificial Sequence: Synthetic oligonucleotide
  Target: LAMA2; (-) strand; PAM type: YTN; PAM sequence: TTG
atgatatattcagtttctga

SEQ ID NO: 229308 - DNA, 20 bp, Artificial Sequence
  Description of Artificial Sequence: Synthetic oligonucleotide
  Target: LAMA2; (-) strand; PAM type: YTN; PAM sequence: TTG
tattgatgatatattcagtt

SEQ ID NO: 229309 - DNA, 20 bp, Artificial Sequence
  Description of Artificial Sequence: Synthetic oligonucleotide
  Target: LAMA2; (-) strand; PAM type: YTN; PAM sequence: TTT
gtattgatgatatattcagt

SEQ ID NO: 229310 - DNA, 20 bp, Artificial Sequence
  Description of Artificial Sequence: Synthetic oligonucleotide
  Target: LAMA2; (-) strand; PAM type: YTN; PAM sequence: TTA
aaatttgtattgatgatata

SEQ ID NO: 229311 - DNA, 20 bp, Artificial Sequence
  Description of Artificial Sequence: Synthetic oligonucleotide
  Target: LAMA2; (-) strand; PAM type: YTN; PAM sequence: TTT
aaaatttgtattgatgatat

SEQ ID NO: 229312 - DNA, 20 bp, Artificial Sequence
  Description of Artificial Sequence: Synthetic oligonucleotide
  Target: LAMA2; (-) strand; PAM type: YTN; PAM sequence: TTT
taaaatttgtattgatgata

SEQ ID NO: 229313 - DNA, 20 bp, Artificial Sequence
  Description of Artificial Sequence: Synthetic oligonucleotide
  Target: LAMA2; (-) strand; PAM type: YTN; PAM sequence: TTT
ttaaaatttgtattgatgat

SEQ ID NO: 229314 - DNA, 20 bp, Artificial Sequence
  Description of Artificial Sequence: Synthetic oligonucleotide
  Target: LAMA2; (-) strand; PAM type: YTN; PAM sequence: TTT
tttaaaatttgtattgatga

SEQ ID NO: 229315 - DNA, 20 bp, Artificial Sequence
  Description of Artificial Sequence: Synthetic oligonucleotide
  Target: LAMA2; (-) strand; PAM type: YTN; PAM sequence: TTT
ttttaaaatttgtattgatg

SEQ ID NO: 229316 - DNA, 20 bp, Artificial Sequence
  Description of Artificial Sequence: Synthetic oligonucleotide
  Target: LAMA2; (-) strand; PAM type: YTN; PAM sequence: TTT
tttttaaaatttgtattgat

SEQ ID NO: 229317 - DNA, 20 bp, Artificial Sequence
  Description of Artificial Sequence: Synthetic oligonucleotide
  Target: LAMA2; (-) strand; PAM type: YTN; PAM sequence: TTA
ttttttttaaaatttgtatt

SEQ ID NO: 229318 - DNA, 20 bp, Artificial Sequence
  Description of Artificial Sequence: Synthetic oligonucleotide
  Target: LAMA2; (-) strand; PAM type: YTN; PAM sequence: CTT
attttttttaaaatttgtat

SEQ ID NO: 229319 - DNA, 20 bp, Artificial Sequence
  Description of Artificial Sequence: Synthetic oligonucleotide
  Target: LAMA2; (-) strand; PAM type: YTN; PAM sequence: TTA
caaacttattttttttaaaa

SEQ ID NO: 229320 - DNA, 20 bp, Artificial Sequence
  Description of Artificial Sequence: Synthetic oligonucleotide
  Target: LAMA2; (-) strand; PAM type: YTN; PAM sequence: TTT
acaaacttattttttttaaa

SEQ ID NO: 229321 - DNA, 20 bp, Artificial Sequence
  Description of Artificial Sequence: Synthetic oligonucleotide
  Target: LAMA2; (-) strand; PAM type: YTN; PAM sequence: CTG
aatttacaaacttatttttt

SEQ ID NO: 229322 - DNA, 20 bp, Artificial Sequence
  Description of Artificial Sequence: Synthetic oligonucleotide
  Target: LAMA2; (-) strand; PAM type: YTN; PAM sequence: CTC
tgaatttacaaacttatttt

SEQ ID NO: 229323 - DNA, 20 bp, Artificial Sequence
  Description of Artificial Sequence: Synthetic oligonucleotide
  Target: LAMA2; (-) strand; PAM type: YTN; PAM sequence: CTG
agggataaactctgaattta

SEQ ID NO: 229324 - DNA, 20 bp, Artificial Sequence
  Description of Artificial Sequence: Synthetic oligonucleotide
  Target: LAMA2; (-) strand; PAM type: YTN; PAM sequence: TTG
aaataacatctgagggataa

SEQ ID NO: 229325 - DNA, 20 bp, Artificial Sequence
  Description of Artificial Sequence: Synthetic oligonucleotide
  Target: LAMA2; (-) strand; PAM type: YTN; PAM sequence: CTT
gaaataacatctgagggata

SEQ ID NO: 229326 - DNA, 20 bp, Artificial Sequence
  Description of Artificial Sequence: Synthetic oligonucleotide
  Target: LAMA2; (-) strand; PAM type: YTN; PAM sequence: CTA
tgatatatgcttgaaataac

SEQ ID NO: 229327 - DNA, 20 bp, Artificial Sequence
  Description of Artificial Sequence: Synthetic oligonucleotide
  Target: LAMA2; (-) strand; PAM type: YTN; PAM sequence: TTC
aaggatatgtcactatgata

SEQ ID NO: 229328 - DNA, 20 bp, Artificial Sequence
  Description of Artificial Sequence: Synthetic oligonucleotide
  Target: LAMA2; (-) strand; PAM type: YTN; PAM sequence: TTA
aatatatattcaaggatatg

SEQ ID NO: 229329 - DNA, 20 bp, Artificial Sequence
  Description of Artificial Sequence: Synthetic oligonucleotide
  Target: LAMA2; (-) strand; PAM type: YTN; PAM sequence: CTT
aaatatatattcaaggatat

SEQ ID NO: 229330 - DNA, 20 bp, Artificial Sequence
  Description of Artificial Sequence: Synthetic oligonucleotide
  Target: LAMA2; (-) strand; PAM type: YTN; PAM sequence: CTA
tcggatcttaaatatatatt

SEQ ID NO: 229331 - DNA, 20 bp, Artificial Sequence
  Description of Artificial Sequence: Synthetic oligonucleotide
  Target: LAMA2; (-) strand; PAM type: YTN; PAM sequence: CTG
tgcccagtccctatcggatc

SEQ ID NO: 229332 - DNA, 20 bp, Artificial Sequence
  Description of Artificial Sequence: Synthetic oligonucleotide
  Target: LAMA2; (-) strand; PAM type: YTN; PAM sequence: CTG
gtgtgagcaactgtgcccag

SEQ ID NO: 229333 - DNA, 20 bp, Artificial Sequence
  Description of Artificial Sequence: Synthetic oligonucleotide
  Target: LAMA2; (-) strand; PAM type: YTN; PAM sequence: CTC
ccaaaatgctggtgtgagca

SEQ ID NO: 229334 - DNA, 20 bp, Artificial Sequence
  Description of Artificial Sequence: Synthetic oligonucleotide
  Target: LAMA2; (-) strand; PAM type: YTN; PAM sequence: CTC
agcctcccaaaatgctggtg

SEQ ID NO: 229335 - DNA, 20 bp, Artificial Sequence
  Description of Artificial Sequence: Synthetic oligonucleotide
  Target: LAMA2; (-) strand; PAM type: YTN; PAM sequence: CTG
cctcagcctcccaaaatgct

SEQ ID NO: 229336 - DNA, 20 bp, Artificial Sequence
  Description of Artificial Sequence: Synthetic oligonucleotide
  Target: LAMA2; (-) strand; PAM type: YTN; PAM sequence: CTC
aagcaatccatctgcctcag

SEQ ID NO: 229337 - DNA, 20 bp, Artificial Sequence
  Description of Artificial Sequence: Synthetic oligonucleotide
  Target: LAMA2; (-) strand; PAM type: YTN; PAM sequence: CTG
agctcaagcaatccatctgc

SEQ ID NO: 229338 - DNA, 20 bp, Artificial Sequence
  Description of Artificial Sequence: Synthetic oligonucleotide
  Target: LAMA2; (-) strand; PAM type: YTN; PAM sequence: CTC
ctgagctcaagcaatccatc

SEQ ID NO: 229339 - DNA, 20 bp, Artificial Sequence
  Description of Artificial Sequence: Synthetic oligonucleotide
  Target: LAMA2; (-) strand; PAM type: YTN; PAM sequence: CTC
aaactcctgagctcaagcaa

SEQ ID NO: 229340 - DNA, 20 bp, Artificial Sequence
  Description of Artificial Sequence: Synthetic oligonucleotide
  Target: LAMA2; (-) strand; PAM type: YTN; PAM sequence: CTG
gtctcaaactcctgagctca

SEQ ID NO: 229341 - DNA, 20 bp, Artificial Sequence
  Description of Artificial Sequence: Synthetic oligonucleotide
  Target: LAMA2; (-) strand; PAM type: YTN; PAM sequence: TTC
tggtctcaaactcctgagct

SEQ ID NO: 229342 - DNA, 20 bp, Artificial Sequence
  Description of Artificial Sequence: Synthetic oligonucleotide
  Target: LAMA2; (-) strand; PAM type: YTN; PAM sequence: TTG
cccattctggtctcaaactc

SEQ ID NO: 229343 - DNA, 20 bp, Artificial Sequence
  Description of Artificial Sequence: Synthetic oligonucleotide
  Target: LAMA2; (-) strand; PAM type: YTN; PAM sequence: TTC
accatgttgcccattctggt

SEQ ID NO: 229344 - DNA, 20 bp, Artificial Sequence
  Description of Artificial Sequence: Synthetic oligonucleotide
  Target: LAMA2; (-) strand; PAM type: YTN; PAM sequence: TTT
caccatgttgcccattctgg

SEQ ID NO: 229345 - DNA, 20 bp, Artificial Sequence
  Description of Artificial Sequence: Synthetic oligonucleotide
  Target: LAMA2; (-) strand; PAM type: YTN; PAM sequence: CTG
gtggcgtttcaccatgttgc

SEQ ID NO: 229346 - DNA, 20 bp, Artificial Sequence
  Description of Artificial Sequence: Synthetic oligonucleotide
  Target: LAMA2; (-) strand; PAM type: YTN; PAM sequence: TTC
tggtggcgtttcaccatgtt

SEQ ID NO: 229347 - DNA, 20 bp, Artificial Sequence
  Description of Artificial Sequence: Synthetic oligonucleotide
  Target: LAMA2; (-) strand; PAM type: YTN; PAM sequence: TTT
ctggtggcgtttcaccatgt

SEQ ID NO: 229348 - DNA, 20 bp, Artificial Sequence
  Description of Artificial Sequence: Synthetic oligonucleotide
  Target: LAMA2; (-) strand; PAM type: YTN; PAM sequence: TTT
tctggtggcgtttcaccatg

SEQ ID NO: 229349 - DNA, 20 bp, Artificial Sequence
  Description of Artificial Sequence: Synthetic oligonucleotide
  Target: LAMA2; (-) strand; PAM type: YTN; PAM sequence: TTT
ttctggtggcgtttcaccat

SEQ ID NO: 229350 - DNA, 20 bp, Artificial Sequence
  Description of Artificial Sequence: Synthetic oligonucleotide
  Target: LAMA2; (-) strand; PAM type: YTN; PAM sequence: TTT
tttctggtggcgtttcacca

SEQ ID NO: 229351 - DNA, 20 bp, Artificial Sequence
  Description of Artificial Sequence: Synthetic oligonucleotide
  Target: LAMA2; (-) strand; PAM type: YTN; PAM sequence: TTG
cattttttctggtggcgttt

SEQ ID NO: 229352 - DNA, 20 bp, Artificial Sequence
  Description of Artificial Sequence: Synthetic oligonucleotide
  Target: LAMA2; (-) strand; PAM type: YTN; PAM sequence: TTT
gcattttttctggtggcgtt

SEQ ID NO: 229353 - DNA, 20 bp, Artificial Sequence
  Description of Artificial Sequence: Synthetic oligonucleotide
  Target: LAMA2; (-) strand; PAM type: YTN; PAM sequence: TTT
tgcattttttctggtggcgt

SEQ ID NO: 229354 - DNA, 20 bp, Artificial Sequence
  Description of Artificial Sequence: Synthetic oligonucleotide
  Target: LAMA2; (-) strand; PAM type: YTN; PAM sequence: CTA
attttgcattttttctggtg

SEQ ID NO: 229355 - DNA, 20 bp, Artificial Sequence
  Description of Artificial Sequence: Synthetic oligonucleotide
  Target: LAMA2; (-) strand; PAM type: YTN; PAM sequence: TTG
ctaattttgcattttttctg

SEQ ID NO: 229356 - DNA, 20 bp, Artificial Sequence
  Description of Artificial Sequence: Synthetic oligonucleotide
  Target: LAMA2; (-) strand; PAM type: YTN; PAM sequence: TTT
gctaattttgcattttttct

SEQ ID NO: 229357 - DNA, 20 bp, Artificial Sequence
  Description of Artificial Sequence: Synthetic oligonucleotide
  Target: LAMA2; (-) strand; PAM type: YTN; PAM sequence: CTT
tgctaattttgcattttttc

SEQ ID NO: 229358 - DNA, 20 bp, Artificial Sequence
  Description of Artificial Sequence: Synthetic oligonucleotide
  Target: LAMA2; (-) strand; PAM type: YTN; PAM sequence: CTA
caggtgcacaccaccgcact

SEQ ID NO: 229359 - DNA, 20 bp, Artificial Sequence
  Description of Artificial Sequence: Synthetic oligonucleotide
  Target: LAMA2; (-) strand; PAM type: YTN; PAM sequence: CTG
ggactacaggtgcacaccac

SEQ ID NO: 229360 - DNA, 20 bp, Artificial Sequence
  Description of Artificial Sequence: Synthetic oligonucleotide
  Target: LAMA2; (-) strand; PAM type: YTN; PAM sequence: CTC
cgaagtcgctgggactacag

SEQ ID NO: 229361 - DNA, 20 bp, Artificial Sequence
  Description of Artificial Sequence: Synthetic oligonucleotide
  Target: LAMA2; (-) strand; PAM type: YTN; PAM sequence: CTC
aacctccgaagtcgctggga

SEQ ID NO: 229362 - DNA, 20 bp, Artificial Sequence
  Description of Artificial Sequence: Synthetic oligonucleotide
  Target: LAMA2; (-) strand; PAM type: YTN; PAM sequence: CTC
ccagctcaacctccgaagtc

SEQ ID NO: 229363 - DNA, 20 bp, Artificial Sequence
  Description of Artificial Sequence: Synthetic oligonucleotide
  Target: LAMA2; (-) strand; PAM type: YTN; PAM sequence: CTC
aagcaatcctcccagctcaa

SEQ ID NO: 229364 - DNA, 20 bp, Artificial Sequence
  Description of Artificial Sequence: Synthetic oligonucleotide
  Target: LAMA2; (-) strand; PAM type: YTN; PAM sequence: CTA
ccaggctcaagcaatcctcc

SEQ ID NO: 229365 - DNA, 20 bp, Artificial Sequence
  Description of Artificial Sequence: Synthetic oligonucleotide
  Target: LAMA2; (-) strand; PAM type: YTN; PAM sequence: CTG
cctaccaggctcaagcaatc

SEQ ID NO: 229366 - DNA, 20 bp, Artificial Sequence
  Description of Artificial Sequence: Synthetic oligonucleotide
  Target: LAMA2; (-) strand; PAM type: YTN; PAM sequence: CTC
tgcctaccaggctcaagcaa

SEQ ID NO: 229367 - DNA, 20 bp, Artificial Sequence
  Description of Artificial Sequence: Synthetic oligonucleotide
  Target: LAMA2; (-) strand; PAM type: YTN; PAM sequence: CTG
caacctctgcctaccaggct

SEQ ID NO: 229368 - DNA, 20 bp, Artificial Sequence
  Description of Artificial Sequence: Synthetic oligonucleotide
  Target: LAMA2; (-) strand; PAM type: YTN; PAM sequence: TTA
ctgcaacctctgcctaccag

SEQ ID NO: 229369 - DNA, 20 bp, Artificial Sequence
  Description of Artificial Sequence: Synthetic oligonucleotide
  Target: LAMA2; (-) strand; PAM type: YTN; PAM sequence: CTT
actgcaacctctgcctacca

SEQ ID NO: 229370 - DNA, 20 bp, Artificial Sequence
  Description of Artificial Sequence: Synthetic oligonucleotide
  Target: LAMA2; (-) strand; PAM type: YTN; PAM sequence: CTC
agcttactgcaacctctgcc

SEQ ID NO: 229371 - DNA, 20 bp, Artificial Sequence
  Description of Artificial Sequence: Synthetic oligonucleotide
  Target: LAMA2; (-) strand; PAM type: YTN; PAM sequence: CTG
aagtgcagtagcacagtctc

SEQ ID NO: 229372 - DNA, 20 bp, Artificial Sequence
  Description of Artificial Sequence: Synthetic oligonucleotide
  Target: LAMA2; (-) strand; PAM type: YTN; PAM sequence: CTG
tgtcatccaggctgaagtgc

SEQ ID NO: 229373 - DNA, 20 bp, Artificial Sequence
  Description of Artificial Sequence: Synthetic oligonucleotide
  Target: LAMA2; (-) strand; PAM type: YTN; PAM sequence: CTG
cctgtgtcatccaggctgaa

SEQ ID NO: 229374 - DNA, 20 bp, Artificial Sequence
  Description of Artificial Sequence: Synthetic oligonucleotide
  Target: LAMA2; (-) strand; PAM type: YTN; PAM sequence: TTG
agacagggtctgcctgtgtc

SEQ ID NO: 229375 - DNA, 20 bp, Artificial Sequence
  Description of Artificial Sequence: Synthetic oligonucleotide
  Target: LAMA2; (-) strand; PAM type: YTN; PAM sequence: TTT
gagacagggtctgcctgtgt

SEQ ID NO: 229376 - DNA, 20 bp, Artificial Sequence
  Description of Artificial Sequence: Synthetic oligonucleotide
  Target: LAMA2; (-) strand; PAM type: YTN; PAM sequence: TTT
tgagacagggtctgcctgtg

SEQ ID NO: 229377 - DNA, 20 bp, Artificial Sequence
  Description of Artificial Sequence: Synthetic oligonucleotide
  Target: LAMA2; (-) strand; PAM type: YTN; PAM sequence: CTT
ttgagacagggtctgcctgt

SEQ ID NO: 229378 - DNA, 20 bp, Artificial Sequence
  Description of Artificial Sequence: Synthetic oligonucleotide
  Target: LAMA2; (-) strand; PAM type: YTN; PAM sequence: TTC
ttttgagacagggtctgcct

SEQ ID NO: 229379 - DNA, 20 bp, Artificial Sequence
  Description of Artificial Sequence: Synthetic oligonucleotide
  Target: LAMA2; (-) strand; PAM type: YTN; PAM sequence: TTT
cttttgagacagggtctgcc

SEQ ID NO: 229380 - DNA, 20 bp, Artificial Sequence
  Description of Artificial Sequence: Synthetic oligonucleotide
  Target: LAMA2; (-) strand; PAM type: YTN; PAM sequence: TTT
tcttttgagacagggtctgc

SEQ ID NO: 229381 - DNA, 20 bp, Artificial Sequence
  Description of Artificial Sequence: Synthetic oligonucleotide
  Target: LAMA2; (-) strand; PAM type: YTN; PAM sequence: TTT
ttcttttgagacagggtctg

SEQ ID NO: 229382 - DNA, 20 bp, Artificial Sequence
  Description of Artificial Sequence: Synthetic oligonucleotide
  Target: LAMA2; (-) strand; PAM type: YTN; PAM sequence: TTT
tttcttttgagacagggtct

SEQ ID NO: 229383 - DNA, 20 bp, Artificial Sequence
  Description of Artificial Sequence: Synthetic oligonucleotide
  Target: LAMA2; (-) strand; PAM type: YTN; PAM sequence: TTT
ttttcttttgagacagggtc

SEQ ID NO: 229384 - DNA, 20 bp, Artificial Sequence
  Description of Artificial Sequence: Synthetic oligonucleotide
  Target: LAMA2; (-) strand; PAM type: YTN; PAM sequence: CTT
tttttcttttgagacagggt

SEQ ID NO: 229385 - DNA, 20 bp, Artificial Sequence
  Description of Artificial Sequence: Synthetic oligonucleotide
  Target: LAMA2; (-) strand; PAM type: YTN; PAM sequence: TTC
tttttttcttttgagacagg

SEQ ID NO: 229386 - DNA, 20 bp, Artificial Sequence
  Description of Artificial Sequence: Synthetic oligonucleotide
  Target: LAMA2; (-) strand; PAM type: YTN; PAM sequence: TTT
ctttttttcttttgagacag

SEQ ID NO: 229387 - DNA, 20 bp, Artificial Sequence
  Description of Artificial Sequence: Synthetic oligonucleotide
  Target: LAMA2; (-) strand; PAM type: YTN; PAM sequence: TTT
tctttttttcttttgagaca

SEQ ID NO: 229388 - DNA, 20 bp, Artificial Sequence
  Description of Artificial Sequence: Synthetic oligonucleotide
  Target: LAMA2; (-) strand; PAM type: YTN; PAM sequence: TTT
ttctttttttcttttgagac

SEQ ID NO: 229389 - DNA, 20 bp, Artificial Sequence
  Description of Artificial Sequence: Synthetic oligonucleotide
  Target: LAMA2; (-) strand; PAM type: YTN; PAM sequence: TTA
tcatatcagatttttctttt

SEQ ID NO: 229390 - DNA, 20 bp, Artificial Sequence
  Description of Artificial Sequence: Synthetic oligonucleotide
  Target: LAMA2; (-) strand; PAM type: YTN; PAM sequence: CTA
aattatcatatcagattttt

SEQ ID NO: 229391 - DNA, 20 bp, Artificial Sequence
  Description of Artificial Sequence: Synthetic oligonucleotide
  Target: LAMA2; (-) strand; PAM type: YTN; PAM sequence: TTC
taaattatcatatcagattt

SEQ ID NO: 229392 - DNA, 20 bp, Artificial Sequence
  Description of Artificial Sequence: Synthetic oligonucleotide
  Target: LAMA2; (-) strand; PAM type: YTN; PAM sequence: CTG
aggacccatattctaaatta

SEQ ID NO: 229393 - DNA, 20 bp, Artificial Sequence
  Description of Artificial Sequence: Synthetic oligonucleotide
  Target: LAMA2; (-) strand; PAM type: YTN; PAM sequence: TTA
tggccctgaggacccatatt

SEQ ID NO: 229394 - DNA, 20 bp, Artificial Sequence
  Description of Artificial Sequence: Synthetic oligonucleotide
  Target: LAMA2; (-) strand; PAM type: YTN; PAM sequence: TTT
atggccctgaggacccatat

SEQ ID NO: 229395 - DNA, 20 bp, Artificial Sequence
  Description of Artificial Sequence: Synthetic oligonucleotide
  Target: LAMA2; (-) strand; PAM type: YTN; PAM sequence: TTT
tatggccctgaggacccata

SEQ ID NO: 229396 - DNA, 20 bp, Artificial Sequence
  Description of Artificial Sequence: Synthetic oligonucleotide
  Target: LAMA2; (-) strand; PAM type: YTN; PAM sequence: CTG
ttttatggccctgaggaccc

SEQ ID NO: 229397 - DNA, 20 bp, Artificial Sequence
  Description of Artificial Sequence: Synthetic oligonucleotide
  Target: LAMA2; (-) strand; PAM type: YTN; PAM sequence: CTA
gcatatgctgttttatggcc

SEQ ID NO: 229398 - DNA, 20 bp, Artificial Sequence
  Description of Artificial Sequence: Synthetic oligonucleotide
  Target: LAMA2; (-) strand; PAM type: YTN; PAM sequence: TTA
gtgcacagcatggtgagtaa

SEQ ID NO: 229399 - DNA, 20 bp, Artificial Sequence
  Description of Artificial Sequence: Synthetic oligonucleotide
  Target: LAMA2; (-) strand; PAM type: YTN; PAM sequence: TTT
agtgcacagcatggtgagta

SEQ ID NO: 229400 - DNA, 20 bp, Artificial Sequence
  Description of Artificial Sequence: Synthetic oligonucleotide
  Target: LAMA2; (-) strand; PAM type: YTN; PAM sequence: TTT
tagtgcacagcatggtgagt

SEQ ID NO: 229401 - DNA, 20 bp, Artificial Sequence
  Description of Artificial Sequence: Synthetic oligonucleotide
  Target: LAMA2; (-) strand; PAM type: YTN; PAM sequence: CTT
ttagtgcacagcatggtgag

SEQ ID NO: 229402 - DNA, 20 bp, Artificial Sequence
  Description of Artificial Sequence: Synthetic oligonucleotide
  Target: LAMA2; (-) strand; PAM type: YTN; PAM sequence: TTA
cttttagtgcacagcatggt

SEQ ID NO: 229403 - DNA, 20 bp, Artificial Sequence
  Description of Artificial Sequence: Synthetic oligonucleotide
  Target: LAMA2; (-) strand; PAM type: YTN; PAM sequence: TTT
acttttagtgcacagcatgg

SEQ ID NO: 229404 - DNA, 20 bp, Artificial Sequence
  Description of Artificial Sequence: Synthetic oligonucleotide
  Target: LAMA2; (-) strand; PAM type: YTN; PAM sequence: TTT
tacttttagtgcacagcatg

SEQ ID NO: 229405 - DNA, 20 bp, Artificial Sequence
  Description of Artificial Sequence: Synthetic oligonucleotide
  Target: LAMA2; (-) strand; PAM type: YTN; PAM sequence: TTT
ttacttttagtgcacagcat

SEQ ID NO: 229406 - DNA, 20 bp, Artificial Sequence
  Description of Artificial Sequence: Synthetic oligonucleotide
  Target: LAMA2; (-) strand; PAM type: YTN; PAM sequence: TTT
tttacttttagtgcacagca

SEQ ID NO: 229407 - DNA, 20 bp, Artificial Sequence
  Description of Artificial Sequence: Synthetic oligonucleotide
  Target: LAMA2; (-) strand; PAM type: YTN; PAM sequence: TTT
ttttacttttagtgcacagc

SEQ ID NO: 229408 - DNA, 20 bp, Artificial Sequence
  Description of Artificial Sequence: Synthetic oligonucleotide
  Target: LAMA2; (-) strand; PAM type: YTN; PAM sequence: TTA
tatttttttacttttagtgc

SEQ ID NO: 229409 - DNA, 20 bp, Artificial Sequence
  Description of Artificial Sequence: Synthetic oligonucleotide
  Target: LAMA2; (-) strand; PAM type: YTN; PAM sequence: TTT
atatttttttacttttagtg

SEQ ID NO: 229410 - DNA, 20 bp, Artificial Sequence
  Description of Artificial Sequence: Synthetic oligonucleotide
  Target: LAMA2; (-) strand; PAM type: YTN; PAM sequence: CTT
tatatttttttacttttagt

SEQ ID NO: 229411 - DNA, 20 bp, Artificial Sequence
  Description of Artificial Sequence: Synthetic oligonucleotide
  Target: LAMA2; (-) strand; PAM type: YTN; PAM sequence: TTA
ctttatatttttttactttt

SEQ ID NO: 229412 - DNA, 20 bp, Artificial Sequence
  Description of Artificial Sequence: Synthetic oligonucleotide
  Target: LAMA2; (-) strand; PAM type: YTN; PAM sequence: TTT
actttatatttttttacttt

SEQ ID NO: 229413 - DNA, 20 bp, Artificial Sequence
  Description of Artificial Sequence: Synthetic oligonucleotide
  Target: LAMA2; (-) strand; PAM type: YTN; PAM sequence: CTT
tactttatatttttttactt

SEQ ID NO: 229414 - DNA, 20 bp, Artificial Sequence
  Description of Artificial Sequence: Synthetic oligonucleotide
  Target: LAMA2; (-) strand; PAM type: YTN; PAM sequence: TTA
aaagaatgggctttacttta

SEQ ID NO: 229415 - DNA, 20 bp, Artificial Sequence
  Description of Artificial Sequence: Synthetic oligonucleotide
  Target: LAMA2; (-) strand; PAM type: YTN; PAM sequence: CTC
agttaaaagaatgggcttta

SEQ ID NO: 229416 - DNA, 20 bp, Artificial Sequence
  Description of Artificial Sequence: Synthetic oligonucleotide
  Target: LAMA2; (-) strand; PAM type: YTN; PAM sequence: TTA
tgtcaaagggcacaaaatct

SEQ ID NO: 229417 - DNA, 20 bp, Artificial Sequence
  Description of Artificial Sequence: Synthetic oligonucleotide
  Target: LAMA2; (-) strand; PAM type: YTN; PAM sequence: CTG
tgggaatggagagattatgt

SEQ ID NO: 229418 - DNA, 20 bp, Artificial Sequence
  Description of Artificial Sequence: Synthetic oligonucleotide
  Target: LAMA2; (-) strand; PAM type: YTN; PAM sequence: CTG
agggctgtgggaatggagag

SEQ ID NO: 229419 - DNA, 20 bp, Artificial Sequence
  Description of Artificial Sequence: Synthetic oligonucleotide
  Target: LAMA2; (-) strand; PAM type: YTN; PAM sequence: TTA
cagaggctgagggctgtggg

SEQ ID NO: 229420 - DNA, 20 bp, Artificial Sequence
  Description of Artificial Sequence: Synthetic oligonucleotide
  Target: LAMA2; (-) strand; PAM type: YTN; PAM sequence: TTA
gaaggagtgagtgaaataga

SEQ ID NO: 229421 - DNA, 20 bp, Artificial Sequence
  Description of Artificial Sequence: Synthetic oligonucleotide
  Target: LAMA2; (-) strand; PAM type: YTN; PAM sequence: CTT
agaaggagtgagtgaaatag

SEQ ID NO: 229422 - DNA, 20 bp, Artificial Sequence
  Description of Artificial Sequence: Synthetic oligonucleotide
  Target: LAMA2; (-) strand; PAM type: YTN; PAM sequence: TTC
ttagaaggagtgagtgaaat

SEQ ID NO: 229423 - DNA, 20 bp, Artificial Sequence
  Description of Artificial Sequence: Synthetic oligonucleotide
  Target: LAMA2; (-) strand; PAM type: YTN; PAM sequence: TTG
catgtgaaatgtaaaacaat

SEQ ID NO: 229424 - DNA, 20 bp, Artificial Sequence
  Description of Artificial Sequence: Synthetic oligonucleotide
  Target: LAMA2; (-) strand; PAM type: YTN; PAM sequence: CTT
gcatgtgaaatgtaaaacaa

SEQ ID NO: 229425 - DNA, 20 bp, Artificial Sequence
  Description of Artificial Sequence: Synthetic oligonucleotide
  Target: LAMA2; (-) strand; PAM type: YTN; PAM sequence: CTC
ccttgcatgtgaaatgtaaa

SEQ ID NO: 229426 - DNA, 20 bp, Artificial Sequence
  Description of Artificial Sequence: Synthetic oligonucleotide
  Target: LAMA2; (-) strand; PAM type: YTN; PAM sequence: TTC
tcccttgcatgtgaaatgta

SEQ ID NO: 229427 - DNA, 20 bp, Artificial Sequence
  Description of Artificial Sequence: Synthetic oligonucleotide
  Target: LAMA2; (-) strand; PAM type: YTN; PAM sequence: TTA
catgttctcccttgcatgtg

SEQ ID NO: 229428 - DNA, 20 bp, Artificial Sequence
  Description of Artificial Sequence: Synthetic oligonucleotide
  Target: LAMA2; (-) strand; PAM type: YTN; PAM sequence: TTG
gaaagattacatgttctccc

SEQ ID NO: 229429 - DNA, 20 bp, Artificial Sequence
  Description of Artificial Sequence: Synthetic oligonucleotide
  Target: LAMA2; (-) strand; PAM type: YTN; PAM sequence: TTT
ggaaagattacatgttctcc

SEQ ID NO: 229430 - DNA, 20 bp, Artificial Sequence
  Description of Artificial Sequence: Synthetic oligonucleotide
  Target: LAMA2; (-) strand; PAM type: YTN; PAM sequence: CTG
tcatttggaaagattacatg

SEQ ID NO: 229431 - DNA, 20 bp, Artificial Sequence
  Description of Artificial Sequence: Synthetic oligonucleotide
  Target: LAMA2; (-) strand; PAM type: YTN; PAM sequence: TTC
tgtcatttggaaagattaca

SEQ ID NO: 229432 - DNA, 20 bp, Artificial Sequence
  Description of Artificial Sequence: Synthetic oligonucleotide
  Target: LAMA2; (-) strand; PAM type: YTN; PAM sequence: TTA
aaaaagaaaattctgtcatt

SEQ ID NO: 229433 - DNA, 20 bp, Artificial Sequence
  Description of Artificial Sequence: Synthetic oligonucleotide
  Target: LAMA2; (-) strand; PAM type: YTN; PAM sequence: TTT
aaaaaagaaaattctgtcat

SEQ ID NO: 229434 - DNA, 20 bp, Artificial Sequence
  Description of Artificial Sequence: Synthetic oligonucleotide
  Target: LAMA2; (-) strand; PAM type: YTN; PAM sequence: CTT
taaaaaagaaaattctgtca

SEQ ID NO: 229435 - DNA, 20 bp, Artificial Sequence
  Description of Artificial Sequence: Synthetic oligonucleotide
  Target: LAMA2; (-) strand; PAM type: YTN; PAM sequence: TTA
gctttaaaaaagaaaattct

SEQ ID NO: 229436 - DNA, 20 bp, Artificial Sequence
  Description of Artificial Sequence: Synthetic oligonucleotide
  Target: LAMA2; (-) strand; PAM type: YTN; PAM sequence: TTT
agctttaaaaaagaaaattc

SEQ ID NO: 229437 - DNA, 20 bp, Artificial Sequence
  Description of Artificial Sequence: Synthetic oligonucleotide
  Target: LAMA2; (-) strand; PAM type: YTN; PAM sequence: CTA
tttagctttaaaaaagaaaa

SEQ ID NO: 229438 - DNA, 20 bp, Artificial Sequence
  Description of Artificial Sequence: Synthetic oligonucleotide
  Target: LAMA2; (-) strand; PAM type: YTN; PAM sequence: CTG
tccatcaacagatgaatgga

SEQ ID NO: 229439 - DNA, 20 bp, Artificial Sequence
  Description of Artificial Sequence: Synthetic oligonucleotide
  Target: LAMA2; (-) strand; PAM type: YTN; PAM sequence: TTG
aaatcaacctgtccatcaac

SEQ ID NO: 229440 - DNA, 20 bp, Artificial Sequence
  Description of Artificial Sequence: Synthetic oligonucleotide
  Target: LAMA2; (-) strand; PAM type: YTN; PAM sequence: TTT
gaaatcaacctgtccatcaa

SEQ ID NO: 229441 - DNA, 20 bp, Artificial Sequence
  Description of Artificial Sequence: Synthetic oligonucleotide
  Target: LAMA2; (-) strand; PAM type: YTN; PAM sequence: TTT
tgaaatcaacctgtccatca

SEQ ID NO: 229442 - DNA, 20 bp, Artificial Sequence
  Description of Artificial Sequence: Synthetic oligonucleotide
  Target: LAMA2; (-) strand; PAM type: YTN; PAM sequence: TTA
gccacattttgaaatcaacc

SEQ ID NO: 229443 - DNA, 20 bp, Artificial Sequence
  Description of Artificial Sequence: Synthetic oligonucleotide
  Target: LAMA2; (-) strand; PAM type: YTN; PAM sequence: TTC
acattagccacattttgaaa

SEQ ID NO: 229444 - DNA, 20 bp, Artificial Sequence
  Description of Artificial Sequence: Synthetic oligonucleotide
  Target: LAMA2; (-) strand; PAM type: YTN; PAM sequence: CTT
cacattagccacattttgaa

SEQ ID NO: 229445 - DNA, 20 bp, Artificial Sequence
  Description of Artificial Sequence: Synthetic oligonucleotide
  Target: LAMA2; (-) strand; PAM type: YTN; PAM sequence: CTG
cagcacttcacattagccac

SEQ ID NO: 229446 - DNA, 20 bp, Artificial Sequence
  Description of Artificial Sequence: Synthetic oligonucleotide
  Target: LAMA2; (-) strand; PAM type: YTN; PAM sequence: TTC
actgcagcacttcacattag

SEQ ID NO: 229447 - DNA, 20 bp, Artificial Sequence
  Description of Artificial Sequence: Synthetic oligonucleotide
  Target: LAMA2; (-) strand; PAM type: YTN; PAM sequence: CTC
ccatgttcactgcagcactt

SEQ ID NO: 229448 - DNA, 20 bp, Artificial Sequence
  Description of Artificial Sequence: Synthetic oligonucleotide
  Target: LAMA2; (-) strand; PAM type: YTN; PAM sequence: CTG
cactcccatgttcactgcag

SEQ ID NO: 229449 - DNA, 20 bp, Artificial Sequence
  Description of Artificial Sequence: Synthetic oligonucleotide
  Target: LAMA2; (-) strand; PAM type: YTN; PAM sequence: TTG
ccgaaaagatatctgcactc

SEQ ID NO: 229450 - DNA, 20 bp, Artificial Sequence
  Description of Artificial Sequence: Synthetic oligonucleotide
  Target: LAMA2; (-) strand; PAM type: YTN; PAM sequence: TTT
gccgaaaagatatctgcact

SEQ ID NO: 229451 - DNA, 20 bp, Artificial Sequence
  Description of Artificial Sequence: Synthetic oligonucleotide
  Target: LAMA2; (-) strand; PAM type: YTN; PAM sequence: TTT
tgccgaaaagatatctgcac

SEQ ID NO: 229452 - DNA, 20 bp, Artificial Sequence
  Description of Artificial Sequence: Synthetic oligonucleotide
  Target: LAMA2; (-) strand; PAM type: YTN; PAM sequence: TTA
cccaaaagatgtgaaatcag

SEQ ID NO: 229453 - DNA, 20 bp, Artificial Sequence
  Description of Artificial Sequence: Synthetic oligonucleotide
  Target: LAMA2; (-) strand; PAM type: YTN; PAM sequence: TTT
acccaaaagatgtgaaatca

SEQ ID NO: 229454 - DNA, 20 bp, Artificial Sequence
  Description of Artificial Sequence: Synthetic oligonucleotide
  Target: LAMA2; (-) strand; PAM type: YTN; PAM sequence: TTC
caggtatttacccaaaagat

SEQ ID NO: 229455 - DNA, 20 bp, Artificial Sequence
  Description of Artificial Sequence: Synthetic oligonucleotide
  Target: LAMA2; (-) strand; PAM type: YTN; PAM sequence: CTT
ccaggtatttacccaaaaga

SEQ ID NO: 229456 - DNA, 20 bp, Artificial Sequence
  Description of Artificial Sequence: Synthetic oligonucleotide
  Target: LAMA2; (-) strand; PAM type: YTN; PAM sequence: CTC
acttccaggtatttacccaa

SEQ ID NO: 229457 - DNA, 20 bp, Artificial Sequence
  Description of Artificial Sequence: Synthetic oligonucleotide
  Target: LAMA2; (-) strand; PAM type: YTN; PAM sequence: CTA
gcaatctcacttccaggtat

SEQ ID NO: 229458 - DNA, 20 bp, Artificial Sequence
  Description of Artificial Sequence: Synthetic oligonucleotide
  Target: LAMA2; (-) strand; PAM type: YTN; PAM sequence: CTA
aaagtagaatcacgatgcga

SEQ ID NO: 229459 - DNA, 20 bp, Artificial Sequence
  Description of Artificial Sequence: Synthetic oligonucleotide
  Target: LAMA2; (-) strand; PAM type: YTN; PAM sequence: TTC
caaaacaactaaaagtagaa

SEQ ID NO: 229460 - DNA, 20 bp, Artificial Sequence
  Description of Artificial Sequence: Synthetic oligonucleotide
  Target: LAMA2; (-) strand; PAM type: YTN; PAM sequence: TTT
ccaaaacaactaaaagtaga

SEQ ID NO: 229461 - DNA, 20 bp, Artificial Sequence
  Description of Artificial Sequence: Synthetic oligonucleotide
  Target: LAMA2; (-) strand; PAM type: YTN; PAM sequence: TTT
tccaaaacaactaaaagtag

SEQ ID NO: 229462 - DNA, 20 bp, Artificial Sequence
  Description of Artificial Sequence: Synthetic oligonucleotide
  Target: LAMA2; (-) strand; PAM type: YTN; PAM sequence: CTA
catggagttttccaaaacaa

SEQ ID NO: 229463 - DNA, 20 bp, Artificial Sequence
  Description of Artificial Sequence: Synthetic oligonucleotide
  Target: LAMA2; (-) strand; PAM type: YTN; PAM sequence: TTA
tggaaaactacatggagttt

SEQ ID NO: 229464 - DNA, 20 bp, Artificial Sequence
  Description of Artificial Sequence: Synthetic oligonucleotide
  Target: LAMA2; (-) strand; PAM type: YTN; PAM sequence: TTA
gtacagccattatggaaaac

SEQ ID NO: 229465 - DNA, 20 bp, Artificial Sequence
  Description of Artificial Sequence: Synthetic oligonucleotide
  Target: LAMA2; (-) strand; PAM type: YTN; PAM sequence: TTG
gtgggaatgtaaattagtac

SEQ ID NO: 229466 - DNA, 20 bp, Artificial Sequence
  Description of Artificial Sequence: Synthetic oligonucleotide
  Target: LAMA2; (-) strand; PAM type: YTN; PAM sequence: CTG
ttggtgggaatgtaaattag

SEQ ID NO: 229467 - DNA, 20 bp, Artificial Sequence
  Description of Artificial Sequence: Synthetic oligonucleotide
  Target: LAMA2; (-) strand; PAM type: YTN; PAM sequence: TTG
tacactgttggtgggaatgt

SEQ ID NO: 229468 - DNA, 20 bp, Artificial Sequence
  Description of Artificial Sequence: Synthetic oligonucleotide
  Target: LAMA2; (-) strand; PAM type: YTN; PAM sequence: CTT
gtacactgttggtgggaatg

SEQ ID NO: 229469 - DNA, 20 bp, Artificial Sequence
  Description of Artificial Sequence: Synthetic oligonucleotide
  Target: LAMA2; (-) strand; PAM type: YTN; PAM sequence: TTG
gcgagaatatggaaaaaaca

SEQ ID NO: 229470 - DNA, 20 bp, Artificial Sequence
  Description of Artificial Sequence: Synthetic oligonucleotide
  Target: LAMA2; (-) strand; PAM type: YTN; PAM sequence: CTG
tcagaataggtaatatcaaa

SEQ ID NO: 229471 - DNA, 20 bp, Artificial Sequence
  Description of Artificial Sequence: Synthetic oligonucleotide
  Target: LAMA2; (-) strand; PAM type: YTN; PAM sequence: CTC
acacctgtcagaataggtaa

SEQ ID NO: 229472 - DNA, 20 bp, Artificial Sequence
  Description of Artificial Sequence: Synthetic oligonucleotide
  Target: LAMA2; (-) strand; PAM type: YTN; PAM sequence: TTA
caatgagatatcatctcaca

SEQ ID NO: 229473 - DNA, 20 bp, Artificial Sequence
  Description of Artificial Sequence: Synthetic oligonucleotide
  Target: LAMA2; (-) strand; PAM type: YTN; PAM sequence: TTA
aaattacaatgagatatcat

SEQ ID NO: 229474 - DNA, 20 bp, Artificial Sequence
  Description of Artificial Sequence: Synthetic oligonucleotide
  Target: LAMA2; (-) strand; PAM type: YTN; PAM sequence: TTA
gggaaatgcaaattaaaatt

SEQ ID NO: 229475 - DNA, 20 bp, Artificial Sequence
  Description of Artificial Sequence: Synthetic oligonucleotide
  Target: LAMA2; (-) strand; PAM type: YTN; PAM sequence: CTA
atcattagggaaatgcaaat

SEQ ID NO: 229476 - DNA, 20 bp, Artificial Sequence
  Description of Artificial Sequence: Synthetic oligonucleotide
  Target: LAMA2; (-) strand; PAM type: YTN; PAM sequence: CTA
acaaatggccaagagataaa

SEQ ID NO: 229477 - DNA, 20 bp, Artificial Sequence
  Description of Artificial Sequence: Synthetic oligonucleotide
  Target: LAMA2; (-) strand; PAM type: YTN; PAM sequence: CTC
aaaagaagactaacaaatgg

SEQ ID NO: 229478 - DNA, 20 bp, Artificial Sequence
  Description of Artificial Sequence: Synthetic oligonucleotide
  Target: LAMA2; (-) strand; PAM type: YTN; PAM sequence: TTG
ctcaaaagaagactaacaaa

SEQ ID NO: 229479 - DNA, 20 bp, Artificial Sequence
  Description of Artificial Sequence: Synthetic oligonucleotide
  Target: LAMA2; (-) strand; PAM type: YTN; PAM sequence: CTG
aatagacattgctcaaaaga

SEQ ID NO: 229480 - DNA, 20 bp, Artificial Sequence
  Description of Artificial Sequence: Synthetic oligonucleotide
  Target: LAMA2; (-) strand; PAM type: YTN; PAM sequence: TTA
aaaatgagcaaggaagctga

SEQ ID NO: 229481 - DNA, 20 bp, Artificial Sequence
  Description of Artificial Sequence: Synthetic oligonucleotide
  Target: LAMA2; (-) strand; PAM type: YTN; PAM sequence: TTA
agaggaagaaaaaaaaatta

SEQ ID NO: 229482 - DNA, 20 bp, Artificial Sequence
  Description of Artificial Sequence: Synthetic oligonucleotide
  Target: LAMA2; (-) strand; PAM type: YTN; PAM sequence: CTT
aagaggaagaaaaaaaaatt

SEQ ID NO: 229483 - DNA, 20 bp, Artificial Sequence
  Description of Artificial Sequence: Synthetic oligonucleotide
  Target: LAMA2; (-) strand; PAM type: YTN; PAM sequence: TTC
catcaacttaagaggaagaa

SEQ ID NO: 229484 - DNA, 20 bp, Artificial Sequence
  Description of Artificial Sequence: Synthetic oligonucleotide
  Target: LAMA2; (-) strand; PAM type: YTN; PAM sequence: TTA
atatccacaaatatataaag

SEQ ID NO: 229485 - DNA, 20 bp, Artificial Sequence
  Description of Artificial Sequence: Synthetic oligonucleotide
  Target: LAMA2; (-) strand; PAM type: YTN; PAM sequence: TTC
aataaaaagttaatatccac

SEQ ID NO: 229486 - DNA, 20 bp, Artificial Sequence
  Description of Artificial Sequence: Synthetic oligonucleotide
  Target: LAMA2; (-) strand; PAM type: YTN; PAM sequence: TTG
taagccatatattcaataaa

SEQ ID NO: 229487 - DNA, 20 bp, Artificial Sequence
  Description of Artificial Sequence: Synthetic oligonucleotide
  Target: LAMA2; (-) strand; PAM type: YTN; PAM sequence: TTT
gtaagccatatattcaataa

SEQ ID NO: 229488 - DNA, 20 bp, Artificial Sequence
  Description of Artificial Sequence: Synthetic oligonucleotide
  Target: LAMA2; (-) strand; PAM type: YTN; PAM sequence: CTA
tgaatgtggagaaaatattt

SEQ ID NO: 229489 - DNA, 20 bp, Artificial Sequence
  Description of Artificial Sequence: Synthetic oligonucleotide
  Target: LAMA2; (-) strand; PAM type: YTN; PAM sequence: CTG
cacaacaaaggaagcaacaa

SEQ ID NO: 229490 - DNA, 20 bp, Artificial Sequence
  Description of Artificial Sequence: Synthetic oligonucleotide
  Target: LAMA2; (-) strand; PAM type: YTN; PAM sequence: TTC
tgcacaacaaaggaagcaac

SEQ ID NO: 229491 - DNA, 20 bp, Artificial Sequence
  Description of Artificial Sequence: Synthetic oligonucleotide
  Target: LAMA2; (-) strand; PAM type: YTN; PAM sequence: CTT
ctgcacaacaaaggaagcaa

SEQ ID NO: 229492 - DNA, 20 bp, Artificial Sequence
  Description of Artificial Sequence: Synthetic oligonucleotide
  Target: LAMA2; (-) strand; PAM type: YTN; PAM sequence: CTA
aaaagcttctgcacaacaaa

SEQ ID NO: 229493 - DNA, 20 bp, Artificial Sequence
  Description of Artificial Sequence: Synthetic oligonucleotide
  Target: LAMA2; (-) strand; PAM type: YTN; PAM sequence: TTG
ggtcatatcaaactaaaaag

SEQ ID NO: 229494 - DNA, 20 bp, Artificial Sequence
  Description of Artificial Sequence: Synthetic oligonucleotide
  Target: LAMA2; (-) strand; PAM type: YTN; PAM sequence: TTG
acccccaaagtataggccac

SEQ ID NO: 229495 - DNA, 20 bp, Artificial Sequence
  Description of Artificial Sequence: Synthetic oligonucleotide
  Target: LAMA2; (-) strand; PAM type: YTN; PAM sequence: TTT
gacccccaaagtataggcca

SEQ ID NO: 229496 - DNA, 20 bp, Artificial Sequence
  Description of Artificial Sequence: Synthetic oligonucleotide
  Target: LAMA2; (-) strand; PAM type: YTN; PAM sequence: TTG
aatttgacccccaaagtata

SEQ ID NO: 229497 - DNA, 20 bp, Artificial Sequence
  Description of Artificial Sequence: Synthetic oligonucleotide
  Target: LAMA2; (-) strand; PAM type: YTN; PAM sequence: TTT
gaatttgacccccaaagtat

SEQ ID NO: 229498 - DNA, 20 bp, Artificial Sequence
  Description of Artificial Sequence: Synthetic oligonucleotide
  Target: LAMA2; (-) strand; PAM type: YTN; PAM sequence: TTT
tgaatttgacccccaaagta

SEQ ID NO: 229499 - DNA, 20 bp, Artificial Sequence
  Description of Artificial Sequence: Synthetic oligonucleotide
  Target: LAMA2; (-) strand; PAM type: YTN; PAM sequence: CTG
ggtaataatgttttgaattt

SEQ ID NO: 229500 - DNA, 20 bp, Artificial Sequence
  Description of Artificial Sequence: Synthetic oligonucleotide
  Target: LAMA2; (-) strand; PAM type: YTN; PAM sequence: TTG
atctgggtaataatgttttg

SEQ ID NO: 229501 - DNA, 20 bp, Artificial Sequence
  Description of Artificial Sequence: Synthetic oligonucleotide
  Target: LAMA2; (-) strand; PAM type: YTN; PAM sequence: CTA
gaagaaaacacaggggagaa

SEQ ID NO: 229502 - DNA, 20 bp, Artificial Sequence
  Description of Artificial Sequence: Synthetic oligonucleotide
  Target: LAMA2; (-) strand; PAM type: YTN; PAM sequence: TTG
ctagaagaaaacacagggga

SEQ ID NO: 229503 - DNA, 20 bp, Artificial Sequence
  Description of Artificial Sequence: Synthetic oligonucleotide
  Target: LAMA2; (-) strand; PAM type: YTN; PAM sequence: CTC
caaattgctagaagaaaaca

SEQ ID NO: 229504 - DNA, 20 bp, Artificial Sequence
  Description of Artificial Sequence: Synthetic oligonucleotide
  Target: LAMA2; (-) strand; PAM type: YTN; PAM sequence: TTA
agtataaggccagcaactcc

SEQ ID NO: 229505 - DNA, 20 bp, Artificial Sequence
  Description of Artificial Sequence: Synthetic oligonucleotide
  Target: LAMA2; (-) strand; PAM type: YTN; PAM sequence: CTT
aagtataaggccagcaactc

SEQ ID NO: 229506 - DNA, 20 bp, Artificial Sequence
  Description of Artificial Sequence: Synthetic oligonucleotide
  Target: LAMA2; (-) strand; PAM type: YTN; PAM sequence: TTA
aagccttaagtataaggcca

SEQ ID NO: 229507 - DNA, 20 bp, Artificial Sequence
  Description of Artificial Sequence: Synthetic oligonucleotide
  Target: LAMA2; (-) strand; PAM type: YTN; PAM sequence: TTC
gaaatgaattaaagccttaa

SEQ ID NO: 229508 - DNA, 20 bp, Artificial Sequence
  Description of Artificial Sequence: Synthetic oligonucleotide
  Target: LAMA2; (-) strand; PAM type: YTN; PAM sequence: CTC
aattcgaaatgaattaaagc

SEQ ID NO: 229509 - DNA, 20 bp, Artificial Sequence
  Description of Artificial Sequence: Synthetic oligonucleotide
  Target: LAMA2; (-) strand; PAM type: YTN; PAM sequence: TTC
acatcatatacaaaactcaa

SEQ ID NO: 229510 - DNA, 20 bp, Artificial Sequence
  Description of Artificial Sequence: Synthetic oligonucleotide
  Target: LAMA2; (-) strand; PAM type: YTN; PAM sequence: TTT
cacatcatatacaaaactca

SEQ ID NO: 229511 - DNA, 20 bp, Artificial Sequence
  Description of Artificial Sequence: Synthetic oligonucleotide
  Target: LAMA2; (-) strand; PAM type: YTN; PAM sequence: TTA
tttcacatcatatacaaaac

SEQ ID NO: 229512 - DNA, 20 bp, Artificial Sequence
  Description of Artificial Sequence: Synthetic oligonucleotide
  Target: LAMA2; (-) strand; PAM type: YTN; PAM sequence: CTT
atttcacatcatatacaaaa

SEQ ID NO: 229513 - DNA, 20 bp, Artificial Sequence
  Description of Artificial Sequence: Synthetic oligonucleotide
  Target: LAMA2; (-) strand; PAM type: YTN; PAM sequence: TTG
gccccttatttcacatcata

SEQ ID NO: 229514 - DNA, 20 bp, Artificial Sequence
  Description of Artificial Sequence: Synthetic oligonucleotide
  Target: LAMA2; (-) strand; PAM type: YTN; PAM sequence: CTA
ggtatccacatgcagaagaa

SEQ ID NO: 229515 - DNA, 20 bp, Artificial Sequence
  Description of Artificial Sequence: Synthetic oligonucleotide
  Target: LAMA2; (-) strand; PAM type: YTN; PAM sequence: TTG
gggaaactaggtatccacat

SEQ ID NO: 229516 - DNA, 20 bp, Artificial Sequence
  Description of Artificial Sequence: Synthetic oligonucleotide
  Target: LAMA2; (-) strand; PAM type: YTN; PAM sequence: TTC
aatgaatggtgttggggaaa

SEQ ID NO: 229517 - DNA, 20 bp, Artificial Sequence
  Description of Artificial Sequence: Synthetic oligonucleotide
  Target: LAMA2; (-) strand; PAM type: YTN; PAM sequence: CTG
ttcaatgaatggtgttgggg

SEQ ID NO: 229518 - DNA, 20 bp, Artificial Sequence
  Description of Artificial Sequence: Synthetic oligonucleotide
  Target: LAMA2; (-) strand; PAM type: YTN; PAM sequence: CTA
agaatacacaatgagaaaag

SEQ ID NO: 229519 - DNA, 20 bp, Artificial Sequence
  Description of Artificial Sequence: Synthetic oligonucleotide
  Target: LAMA2; (-) strand; PAM type: YTN; PAM sequence: TTG
acaaagatgctaagaataca

SEQ ID NO: 229520 - DNA, 20 bp, Artificial Sequence
  Description of Artificial Sequence: Synthetic oligonucleotide
  Target: LAMA2; (-) strand; PAM type: YTN; PAM sequence: TTT
gacaaagatgctaagaatac

SEQ ID NO: 229521 - DNA, 20 bp, Artificial Sequence
  Description of Artificial Sequence: Synthetic oligonucleotide
  Target: LAMA2; (-) strand; PAM type: YTN; PAM sequence: TTT
tgacaaagatgctaagaata

SEQ ID NO: 229522 - DNA, 20 bp, Artificial Sequence
  Description of Artificial Sequence: Synthetic oligonucleotide
  Target: LAMA2; (-) strand; PAM type: YTN; PAM sequence: TTT
ttgacaaagatgctaagaat

SEQ ID NO: 229523 - DNA, 20 bp, Artificial Sequence
  Description of Artificial Sequence: Synthetic oligonucleotide
  Target: LAMA2; (-) strand; PAM type: YTN; PAM sequence: TTA
tttttgacaaagatgctaag

SEQ ID NO: 229524 - DNA, 20 bp, Artificial Sequence
  Description of Artificial Sequence: Synthetic oligonucleotide
  Target: LAMA2; (-) strand; PAM type: YTN; PAM sequence: TTT
atttttgacaaagatgctaa

SEQ ID NO: 229525 - DNA, 20 bp, Artificial Sequence
  Description of Artificial Sequence: Synthetic oligonucleotide
  Target: LAMA2; (-) strand; PAM type: YTN; PAM sequence: TTA
tgcatgtacaaccaatttat

SEQ ID NO: 229526 - DNA, 20 bp, Artificial Sequence
  Description of Artificial Sequence: Synthetic oligonucleotide
  Target: LAMA2; (-) strand; PAM type: YTN; PAM sequence: CTT
atgcatgtacaaccaattta

SEQ ID NO: 229527 - DNA, 20 bp, Artificial Sequence
  Description of Artificial Sequence: Synthetic oligonucleotide
  Target: LAMA2; (-) strand; PAM type: YTN; PAM sequence: CTG
gcaaaaaagaaatataggtc

SEQ ID NO: 229528 - DNA, 20 bp, Artificial Sequence
  Description of Artificial Sequence: Synthetic oligonucleotide
  Target: LAMA2; (-) strand; PAM type: YTN; PAM sequence: TTA
aaatagcatggtactggcaa

SEQ ID NO: 229529 - DNA, 20 bp, Artificial Sequence
  Description of Artificial Sequence: Synthetic oligonucleotide
  Target: LAMA2; (-) strand; PAM type: YTN; PAM sequence: TTA
attaaaatagcatggtactg

SEQ ID NO: 229530 - DNA, 20 bp, Artificial Sequence
  Description of Artificial Sequence: Synthetic oligonucleotide
  Target: LAMA2; (-) strand; PAM type: YTN; PAM sequence: TTG
tagtattaattaaaatagca

SEQ ID NO: 229531 - DNA, 20 bp, Artificial Sequence
  Description of Artificial Sequence: Synthetic oligonucleotide
  Target: LAMA2; (-) strand; PAM type: YTN; PAM sequence: CTA
ttgtagtattaattaaaata

SEQ ID NO: 229532 - DNA, 20 bp, Artificial Sequence
  Description of Artificial Sequence: Synthetic oligonucleotide
  Target: LAMA2; (-) strand; PAM type: YTN; PAM sequence: CTA
caaagctattgtagtattaa

SEQ ID NO: 229533 - DNA, 20 bp, Artificial Sequence
  Description of Artificial Sequence: Synthetic oligonucleotide
  Target: LAMA2; (-) strand; PAM type: YTN; PAM sequence: TTC
aaacaatactacaaagctat

SEQ ID NO: 229534 - DNA, 20 bp, Artificial Sequence
  Description of Artificial Sequence: Synthetic oligonucleotide
  Target: LAMA2; (-) strand; PAM type: YTN; PAM sequence: CTT
caaacaatactacaaagcta

SEQ ID NO: 229535 - DNA, 20 bp, Artificial Sequence
  Description of Artificial Sequence: Synthetic oligonucleotide
  Target: LAMA2; (-) strand; PAM type: YTN; PAM sequence: TTG
acttcaaacaatactacaaa

SEQ ID NO: 229536 - DNA, 20 bp, Artificial Sequence
  Description of Artificial Sequence: Synthetic oligonucleotide
  Target: LAMA2; (-) strand; PAM type: YTN; PAM sequence: CTT
gacttcaaacaatactacaa

SEQ ID NO: 229537 - DNA, 20 bp, Artificial Sequence
  Description of Artificial Sequence: Synthetic oligonucleotide
  Target: LAMA2; (-) strand; PAM type: YTN; PAM sequence: CTA
cttgacttcaaacaatacta

SEQ ID NO: 229538 - DNA, 20 bp, Artificial Sequence
  Description of Artificial Sequence: Synthetic oligonucleotide
  Target: LAMA2; (-) strand; PAM type: YTN; PAM sequence: TTA
aaatcgcacggaaccacaac

SEQ ID NO: 229539 - DNA, 20 bp, Artificial Sequence
  Description of Artificial Sequence: Synthetic oligonucleotide
  Target: LAMA2; (-) strand; PAM type: YTN; PAM sequence: TTT
aaaatcgcacggaaccacaa

SEQ ID NO: 229540 - DNA, 20 bp, Artificial Sequence
  Description of Artificial Sequence: Synthetic oligonucleotide
  Target: LAMA2; (-) strand; PAM type: YTN; PAM sequence: TTT
taaaatcgcacggaaccaca

SEQ ID NO: 229541 - DNA, 20 bp, Artificial Sequence
  Description of Artificial Sequence: Synthetic oligonucleotide
  Target: LAMA2; (-) strand; PAM type: YTN; PAM sequence: TTC
agatatagaaaaaacaattt

SEQ ID NO: 229542 - DNA, 20 bp, Artificial Sequence
  Description of Artificial Sequence: Synthetic oligonucleotide
  Target: LAMA2; (-) strand; PAM type: YTN; PAM sequence: TTT
cagatatagaaaaaacaatt

SEQ ID NO: 229543 - DNA, 20 bp, Artificial Sequence
  Description of Artificial Sequence: Synthetic oligonucleotide
  Target: LAMA2; (-) strand; PAM type: YTN; PAM sequence: TTT
tcagatatagaaaaaacaat

SEQ ID NO: 229544 - DNA, 20 bp, Artificial Sequence
  Description of Artificial Sequence: Synthetic oligonucleotide
  Target: LAMA2; (-) strand; PAM type: YTN; PAM sequence: TTT
ttcagatatagaaaaaacaa

SEQ ID NO: 229545 - DNA, 20 bp, Artificial Sequence
  Description of Artificial Sequence: Synthetic oligonucleotide
  Target: LAMA2; (-) strand; PAM type: YTN; PAM sequence: TTG
atgtcatttttcagatatag

SEQ ID NO: 229546 - DNA, 20 bp, Artificial Sequence
  Description of Artificial Sequence: Synthetic oligonucleotide
  Target: LAMA2; (-) strand; PAM type: YTN; PAM sequence: TTT
gatgtcatttttcagatata

SEQ ID NO: 229547 - DNA, 20 bp, Artificial Sequence
  Description of Artificial Sequence: Synthetic oligonucleotide
  Target: LAMA2; (-) strand; PAM type: YTN; PAM sequence: TTT
tgatgtcatttttcagatat

SEQ ID NO: 229548 - DNA, 20 bp, Artificial Sequence
  Description of Artificial Sequence: Synthetic oligonucleotide
  Target: LAMA2; (-) strand; PAM type: YTN; PAM sequence: CTA
tcaagattttgatgtcattt

SEQ ID NO: 229549 - DNA, 20 bp, Artificial Sequence
  Description of Artificial Sequence: Synthetic oligonucleotide
  Target: LAMA2; (-) strand; PAM type: YTN; PAM sequence: TTC
agtgcaaccactatcaagat

SEQ ID NO: 229550 - DNA, 20 bp, Artificial Sequence
  Description of Artificial Sequence: Synthetic oligonucleotide
  Target: LAMA2; (-) strand; PAM type: YTN; PAM sequence: TTT
cagtgcaaccactatcaaga

SEQ ID NO: 229551 - DNA, 20 bp, Artificial Sequence
  Description of Artificial Sequence: Synthetic oligonucleotide
  Target: LAMA2; (-) strand; PAM type: YTN; PAM sequence: CTA
cagatttcagtgcaaccact

SEQ ID NO: 229552 - DNA, 20 bp, Artificial Sequence
  Description of Artificial Sequence: Synthetic oligonucleotide
  Target: LAMA2; (-) strand; PAM type: YTN; PAM sequence: TTC
ataatacccaaagcaatcta

SEQ ID NO: 229553 - DNA, 20 bp, Artificial Sequence
  Description of Artificial Sequence: Synthetic oligonucleotide
  Target: LAMA2; (-) strand; PAM type: YTN; PAM sequence: TTA
aaatgttcataatacccaaa

SEQ ID NO: 229554 - DNA, 20 bp, Artificial Sequence
  Description of Artificial Sequence: Synthetic oligonucleotide
  Target: LAMA2; (-) strand; PAM type: YTN; PAM sequence: TTG
ttaaaatgttcataataccc

SEQ ID NO: 229555 - DNA, 20 bp, Artificial Sequence
  Description of Artificial Sequence: Synthetic oligonucleotide
  Target: LAMA2; (-) strand; PAM type: YTN; PAM sequence: TTA
atattgttaaaatgttcata

SEQ ID NO: 229556 - DNA, 20 bp, Artificial Sequence
  Description of Artificial Sequence: Synthetic oligonucleotide
  Target: LAMA2; (-) strand; PAM type: YTN; PAM sequence: TTT
aatattgttaaaatgttcat

SEQ ID NO: 229557 - DNA, 20 bp, Artificial Sequence
  Description of Artificial Sequence: Synthetic oligonucleotide
  Target: LAMA2; (-) strand; PAM type: YTN; PAM sequence: TTG
gaagaatttaatattgttaa

SEQ ID NO: 229558 - DNA, 20 bp, Artificial Sequence
  Description of Artificial Sequence: Synthetic oligonucleotide
  Target: LAMA2; (-) strand; PAM type: YTN; PAM sequence: TTC
atggattggaagaatttaat

SEQ ID NO: 229559 - DNA, 20 bp, Artificial Sequence
  Description of Artificial Sequence: Synthetic oligonucleotide
  Target: LAMA2; (-) strand; PAM type: YTN; PAM sequence: CTG
tgttcatggattggaagaat

SEQ ID NO: 229560 - DNA, 20 bp, Artificial Sequence
  Description of Artificial Sequence: Synthetic oligonucleotide
  Target: LAMA2; (-) strand; PAM type: YTN; PAM sequence: TTG
aagaaggcatgaataaatgg

SEQ ID NO: 229561 - DNA, 20 bp, Artificial Sequence
  Description of Artificial Sequence: Synthetic oligonucleotide
  Target: LAMA2; (-) strand; PAM type: YTN; PAM sequence: TTG
atgaaagaaattgaagaagg

SEQ ID NO: 229562 - DNA, 20 bp, Artificial Sequence
  Description of Artificial Sequence: Synthetic oligonucleotide
  Target: LAMA2; (-) strand; PAM type: YTN; PAM sequence: CTG
taaaatgttgatgaaagaaa

SEQ ID NO: 229563 - DNA, 20 bp, Artificial Sequence
  Description of Artificial Sequence: Synthetic oligonucleotide
  Target: LAMA2; (-) strand; PAM type: YTN; PAM sequence: CTG
caaactgtaaaatgttgatg

SEQ ID NO: 229564 - DNA, 20 bp, Artificial Sequence
  Description of Artificial Sequence: Synthetic oligonucleotide
  Target: LAMA2; (-) strand; PAM type: YTN; PAM sequence: CTG
catacactgcaaactgtaaa

SEQ ID NO: 229565 - DNA, 20 bp, Artificial Sequence
  Description of Artificial Sequence: Synthetic oligonucleotide
  Target: LAMA2; (-) strand; PAM type: YTN; PAM sequence: TTG
aaaagatctgcatacactgc

SEQ ID NO: 229566 - DNA, 20 bp, Artificial Sequence
  Description of Artificial Sequence: Synthetic oligonucleotide
  Target: LAMA2; (-) strand; PAM type: YTN; PAM sequence: TTA
accaaggagttgaaaagatc

SEQ ID NO: 229567 - DNA, 20 bp, Artificial Sequence
  Description of Artificial Sequence: Synthetic oligonucleotide
  Target: LAMA2; (-) strand; PAM type: YTN; PAM sequence: TTT
aaccaaggagttgaaaagat

SEQ ID NO: 229568 - DNA, 20 bp, Artificial Sequence
  Description of Artificial Sequence: Synthetic oligonucleotide
  Target: LAMA2; (-) strand; PAM type: YTN; PAM sequence: TTA
ggaataaatttaaccaagga

SEQ ID NO: 229569 - DNA, 20 bp, Artificial Sequence
  Description of Artificial Sequence: Synthetic oligonucleotide
  Target: LAMA2; (-) strand; PAM type: YTN; PAM sequence: CTT
aggaataaatttaaccaagg

SEQ ID NO: 229570 - DNA, 20 bp, Artificial Sequence
  Description of Artificial Sequence: Synthetic oligonucleotide
  Target: LAMA2; (-) strand; PAM type: YTN; PAM sequence: TTA
aatgcttaggaataaattta

SEQ ID NO: 229571 - DNA, 20 bp, Artificial Sequence
  Description of Artificial Sequence: Synthetic oligonucleotide
  Target: LAMA2; (-) strand; PAM type: YTN; PAM sequence: CTA
taaaaaagattaaatgctta

SEQ ID NO: 229572 - DNA, 20 bp, Artificial Sequence
  Description of Artificial Sequence: Synthetic oligonucleotide
  Target: LAMA2; (-) strand; PAM type: YTN; PAM sequence: TTA
caatagctataaaaaagatt

SEQ ID NO: 229573 - DNA, 20 bp, Artificial Sequence
  Description of Artificial Sequence: Synthetic oligonucleotide
  Target: LAMA2; (-) strand; PAM type: YTN; PAM sequence: TTT
acaatagctataaaaaagat

SEQ ID NO: 229574 - DNA, 20 bp, Artificial Sequence
  Description of Artificial Sequence: Synthetic oligonucleotide
  Target: LAMA2; (-) strand; PAM type: YTN; PAM sequence: TTA
aaaaatcccatttacaatag

SEQ ID NO: 229575 - DNA, 20 bp, Artificial Sequence
  Description of Artificial Sequence: Synthetic oligonucleotide
  Target: LAMA2; (-) strand; PAM type: YTN; PAM sequence: TTG
gagttaaaaaatcccattta

SEQ ID NO: 229576 - DNA, 20 bp, Artificial Sequence
  Description of Artificial Sequence: Synthetic oligonucleotide
  Target: LAMA2; (-) strand; PAM type: YTN; PAM sequence: CTT
ggagttaaaaaatcccattt

SEQ ID NO: 229577 - DNA, 20 bp, Artificial Sequence
  Description of Artificial Sequence: Synthetic oligonucleotide
  Target: LAMA2; (-) strand; PAM type: YTN; PAM sequence: CTA
tgaaatatacttggagttaa

SEQ ID NO: 229578 - DNA, 20 bp, Artificial Sequence
  Description of Artificial Sequence: Synthetic oligonucleotide
  Target: LAMA2; (-) strand; PAM type: YTN; PAM sequence: CTG
tatcaatgccatctatgaaa

SEQ ID NO: 229579 - DNA, 20 bp, Artificial Sequence
  Description of Artificial Sequence: Synthetic oligonucleotide
  Target: LAMA2; (-) strand; PAM type: YTN; PAM sequence: TTA
ctgtatcaatgccatctatg

SEQ ID NO: 229580 - DNA, 20 bp, Artificial Sequence
  Description of Artificial Sequence: Synthetic oligonucleotide
  Target: LAMA2; (-) strand; PAM type: YTN; PAM sequence: TTT
actgtatcaatgccatctat

SEQ ID NO: 229581 - DNA, 20 bp, Artificial Sequence
  Description of Artificial Sequence: Synthetic oligonucleotide
  Target: LAMA2; (-) strand; PAM type: YTN; PAM sequence: TTT
tactgtatcaatgccatcta

SEQ ID NO: 229582 - DNA, 20 bp, Artificial Sequence
  Description of Artificial Sequence: Synthetic oligonucleotide
  Target: LAMA2; (-) strand; PAM type: YTN; PAM sequence: TTA
cagaataaaggattttactg

SEQ ID NO: 229583 - DNA, 20 bp, Artificial Sequence
  Description of Artificial Sequence: Synthetic oligonucleotide
  Target: LAMA2; (-) strand; PAM type: YTN; PAM sequence: TTT
acagaataaaggattttact

SEQ ID NO: 229584 - DNA, 20 bp, Artificial Sequence
  Description of Artificial Sequence: Synthetic oligonucleotide
  Target: LAMA2; (-) strand; PAM type: YTN; PAM sequence: CTA
tataaatgccatttacagaa

SEQ ID NO: 229585 - DNA, 20 bp, Artificial Sequence
  Description of Artificial Sequence: Synthetic oligonucleotide
  Target: LAMA2; (-) strand; PAM type: YTN; PAM sequence: TTA
ctatataaatgccatttaca

SEQ ID NO: 229586 - DNA, 20 bp, Artificial Sequence
  Description of Artificial Sequence: Synthetic oligonucleotide
  Target: LAMA2; (-) strand; PAM type: YTN; PAM sequence: TTT
actatataaatgccatttac

SEQ ID NO: 229587 - DNA, 20 bp, Artificial Sequence
  Description of Artificial Sequence: Synthetic oligonucleotide
  Target: LAMA2; (-) strand; PAM type: YTN; PAM sequence: TTT
tactatataaatgccattta

SEQ ID NO: 229588 - DNA, 20 bp, Artificial Sequence
  Description of Artificial Sequence: Synthetic oligonucleotide
  Target: LAMA2; (-) strand; PAM type: YTN; PAM sequence: TTC
accatggaaaagattttact

SEQ ID NO: 229589 - DNA, 20 bp, Artificial Sequence
  Description of Artificial Sequence: Synthetic oligonucleotide
  Target: LAMA2; (-) strand; PAM type: YTN; PAM sequence: CTA
ataatcattcaccatggaaa

SEQ ID NO: 229590 - DNA, 20 bp, Artificial Sequence
  Description of Artificial Sequence: Synthetic oligonucleotide
  Target: LAMA2; (-) strand; PAM type: YTN; PAM sequence: TTA
agactaataatcattcacca

SEQ ID NO: 229591 - DNA, 20 bp, Artificial Sequence
  Description of Artificial Sequence: Synthetic oligonucleotide
  Target: LAMA2; (-) strand; PAM type: YTN; PAM sequence: CTT
aagactaataatcattcacc

SEQ ID NO: 229592 - DNA, 20 bp, Artificial Sequence
  Description of Artificial Sequence: Synthetic oligonucleotide
  Target: LAMA2; (-) strand; PAM type: YTN; PAM sequence: TTC
acttaagactaataatcatt

SEQ ID NO: 229593 - DNA, 20 bp, Artificial Sequence
  Description of Artificial Sequence: Synthetic oligonucleotide
  Target: LAMA2; (-) strand; PAM type: YTN; PAM sequence: TTT
cacttaagactaataatcat

SEQ ID NO: 229594 - DNA, 20 bp, Artificial Sequence
  Description of Artificial Sequence: Synthetic oligonucleotide
  Target: LAMA2; (-) strand; PAM type: YTN; PAM sequence: TTG
tatttcacttaagactaata

SEQ ID NO: 229595 - DNA, 20 bp, Artificial Sequence
  Description of Artificial Sequence: Synthetic oligonucleotide
  Target: LAMA2; (-) strand; PAM type: YTN; PAM sequence: TTT
gtatttcacttaagactaat

SEQ ID NO: 229596 - DNA, 20 bp, Artificial Sequence
  Description of Artificial Sequence: Synthetic oligonucleotide
  Target: LAMA2; (-) strand; PAM type: YTN; PAM sequence: CTT
tgtatttcacttaagactaa

SEQ ID NO: 229597 - DNA, 20 bp, Artificial Sequence
  Description of Artificial Sequence: Synthetic oligonucleotide
  Target: LAMA2; (-) strand; PAM type: YTN; PAM sequence: TTA
taaaatcaaatctttgtatt

SEQ ID NO: 229598 - DNA, 20 bp, Artificial Sequence
  Description of Artificial Sequence: Synthetic oligonucleotide
  Target: LAMA2; (-) strand; PAM type: YTN; PAM sequence: CTT
ataaaatcaaatctttgtat

SEQ ID NO: 229599 - DNA, 20 bp, Artificial Sequence
  Description of Artificial Sequence: Synthetic oligonucleotide
  Target: LAMA2; (-) strand; PAM type: YTN; PAM sequence: TTC
acttataaaatcaaatcttt

SEQ ID NO: 229600 - DNA, 20 bp, Artificial Sequence
  Description of Artificial Sequence: Synthetic oligonucleotide
  Target: LAMA2; (-) strand; PAM type: YTN; PAM sequence: TTT
cacttataaaatcaaatctt

SEQ ID NO: 229601 - DNA, 20 bp, Artificial Sequence
  Description of Artificial Sequence: Synthetic oligonucleotide
  Target: LAMA2; (-) strand; PAM type: YTN; PAM sequence: TTA
agaaatatttcacttataaa

SEQ ID NO: 229602 - DNA, 20 bp, Artificial Sequence
  Description of Artificial Sequence: Synthetic oligonucleotide
  Target: LAMA2; (-) strand; PAM type: YTN; PAM sequence: CTT
aagaaatatttcacttataa

SEQ ID NO: 229603 - DNA, 20 bp, Artificial Sequence
  Description of Artificial Sequence: Synthetic oligonucleotide
  Target: LAMA2; (-) strand; PAM type: YTN; PAM sequence: TTA
cttaagaaatatttcactta

SEQ ID NO: 229604 - DNA, 20 bp, Artificial Sequence
  Description of Artificial Sequence: Synthetic oligonucleotide
  Target: LAMA2; (-) strand; PAM type: YTN; PAM sequence: TTT
acttaagaaatatttcactt

SEQ ID NO: 229605 - DNA, 20 bp, Artificial Sequence
  Description of Artificial Sequence: Synthetic oligonucleotide
  Target: LAMA2; (-) strand; PAM type: YTN; PAM sequence: CTG
gcagccaaggatagtttact

SEQ ID NO: 229606 - DNA, 20 bp, Artificial Sequence
  Description of Artificial Sequence: Synthetic oligonucleotide
  Target: LAMA2; (-) strand; PAM type: YTN; PAM sequence: TTA
agaaagaaactggcagccaa

SEQ ID NO: 229607 - DNA, 20 bp, Artificial Sequence
  Description of Artificial Sequence: Synthetic oligonucleotide
  Target: LAMA2; (-) strand; PAM type: YTN; PAM sequence: TTT
aagaaagaaactggcagcca

SEQ ID NO: 229608 - DNA, 20 bp, Artificial Sequence
  Description of Artificial Sequence: Synthetic oligonucleotide
  Target: LAMA2; (-) strand; PAM type: YTN; PAM sequence: TTT
taagaaagaaactggcagcc

SEQ ID NO: 229609 - DNA, 20 bp, Artificial Sequence
  Description of Artificial Sequence: Synthetic oligonucleotide
  Target: LAMA2; (-) strand; PAM type: YTN; PAM sequence: CTT
ttaagaaagaaactggcagc

SEQ ID NO: 229610 - DNA, 20 bp, Artificial Sequence
  Description of Artificial Sequence: Synthetic oligonucleotide
  Target: LAMA2; (-) strand; PAM type: YTN; PAM sequence: TTA
aacttttaagaaagaaactg

SEQ ID NO: 229611 - DNA, 20 bp, Artificial Sequence
  Description of Artificial Sequence: Synthetic oligonucleotide
  Target: LAMA2; (-) strand; PAM type: YTN; PAM sequence: CTG
ggaaatattaaacttttaag

SEQ ID NO: 229612 - DNA, 20 bp, Artificial Sequence
  Description of Artificial Sequence: Synthetic oligonucleotide
  Target: LAMA2; (-) strand; PAM type: YTN; PAM sequence: TTG
ctgggaaatattaaactttt

SEQ ID NO: 229613 - DNA, 20 bp, Artificial Sequence
  Description of Artificial Sequence: Synthetic oligonucleotide
  Target: LAMA2; (-) strand; PAM type: YTN; PAM sequence: TTA
agagtcaaccacaggaagtt

SEQ ID NO: 229614 - DNA, 20 bp, Artificial Sequence
  Description of Artificial Sequence: Synthetic oligonucleotide
  Target: LAMA2; (-) strand; PAM type: YTN; PAM sequence: CTT
aagagtcaaccacaggaagt

SEQ ID NO: 229615 - DNA, 20 bp, Artificial Sequence
  Description of Artificial Sequence: Synthetic oligonucleotide
  Target: LAMA2; (-) strand; PAM type: YTN; PAM sequence: TTC
agtatccttaagagtcaacc

SEQ ID NO: 229616 - DNA, 20 bp, Artificial Sequence
  Description of Artificial Sequence: Synthetic oligonucleotide
  Target: LAMA2; (-) strand; PAM type: YTN; PAM sequence: CTT
cagtatccttaagagtcaac

SEQ ID NO: 229617 - DNA, 20 bp, Artificial Sequence
  Description of Artificial Sequence: Synthetic oligonucleotide
  Target: LAMA2; (-) strand; PAM type: YTN; PAM sequence: TTC
agcttcagtatccttaagag

SEQ ID NO: 229618 - DNA, 20 bp, Artificial Sequence
  Description of Artificial Sequence: Synthetic oligonucleotide
  Target: LAMA2; (-) strand; PAM type: YTN; PAM sequence: TTT
cagcttcagtatccttaaga

SEQ ID NO: 229619 - DNA, 20 bp, Artificial Sequence
  Description of Artificial Sequence: Synthetic oligonucleotide
  Target: LAMA2; (-) strand; PAM type: YTN; PAM sequence: CTT
tcagcttcagtatccttaag

SEQ ID NO: 229620 - DNA, 20 bp, Artificial Sequence
  Description of Artificial Sequence: Synthetic oligonucleotide
  Target: LAMA2; (-) strand; PAM type: YTN; PAM sequence: CTC
ctttcagcttcagtatcctt

SEQ ID NO: 229621 - DNA, 20 bp, Artificial Sequence
  Description of Artificial Sequence: Synthetic oligonucleotide
  Target: LAMA2; (-) strand; PAM type: YTN; PAM sequence: CTG
ggctcctttcagcttcagta

SEQ ID NO: 229622 - DNA, 20 bp, Artificial Sequence
  Description of Artificial Sequence: Synthetic oligonucleotide
  Target: LAMA2; (-) strand; PAM type: YTN; PAM sequence: TTG
ctgggctcctttcagcttca

SEQ ID NO: 229623 - DNA, 20 bp, Artificial Sequence
  Description of Artificial Sequence: Synthetic oligonucleotide
  Target: LAMA2; (-) strand; PAM type: YTN; PAM sequence: CTC
catcacccagaattgctggg

SEQ ID NO: 229624 - DNA, 20 bp, Artificial Sequence
  Description of Artificial Sequence: Synthetic oligonucleotide
  Target: LAMA2; (-) strand; PAM type: YTN; PAM sequence: TTC
ctccatcacccagaattgct

SEQ ID NO: 229625 - DNA, 20 bp, Artificial Sequence
  Description of Artificial Sequence: Synthetic oligonucleotide
  Target: LAMA2; (-) strand; PAM type: YTN; PAM sequence: TTT
cctccatcacccagaattgc

SEQ ID NO: 229626 - DNA, 20 bp, Artificial Sequence
  Description of Artificial Sequence: Synthetic oligonucleotide
  Target: LAMA2; (-) strand; PAM type: YTN; PAM sequence: CTG
gccacgtatttcctccatca

SEQ ID NO: 229627 - DNA, 20 bp, Artificial Sequence
  Description of Artificial Sequence: Synthetic oligonucleotide
  Target: LAMA2; (-) strand; PAM type: YTN; PAM sequence: TTG
aggaagatacggacagcaga

SEQ ID NO: 229628 - DNA, 20 bp, Artificial Sequence
  Description of Artificial Sequence: Synthetic oligonucleotide
  Target: LAMA2; (-) strand; PAM type: YTN; PAM sequence: TTG
aaaattgaggaagatacgga

SEQ ID NO: 229629 - DNA, 20 bp, Artificial Sequence
  Description of Artificial Sequence: Synthetic oligonucleotide
  Target: LAMA2; (-) strand; PAM type: YTN; PAM sequence: TTC
aagttgaaaattgaggaaga

SEQ ID NO: 229630 - DNA, 20 bp, Artificial Sequence
  Description of Artificial Sequence: Synthetic oligonucleotide
  Target: LAMA2; (-) strand; PAM type: YTN; PAM sequence: TTA
aaggtcagagtagaagtata

SEQ ID NO: 229631 - DNA, 20 bp, Artificial Sequence
  Description of Artificial Sequence: Synthetic oligonucleotide
  Target: LAMA2; (-) strand; PAM type: YTN; PAM sequence: TTA
gatcacaaaaattaaaggtc

SEQ ID NO: 229632 - DNA, 20 bp, Artificial Sequence
  Description of Artificial Sequence: Synthetic oligonucleotide
  Target: LAMA2; (-) strand; PAM type: YTN; PAM sequence: TTG
gggaaaaggaaattagatca

SEQ ID NO: 229633 - DNA, 20 bp, Artificial Sequence
  Description of Artificial Sequence: Synthetic oligonucleotide
  Target: LAMA2; (-) strand; PAM type: YTN; PAM sequence: TTA
ttggggaaaaggaaattaga

SEQ ID NO: 229634 - DNA, 20 bp, Artificial Sequence
  Description of Artificial Sequence: Synthetic oligonucleotide
  Target: LAMA2; (-) strand; PAM type: YTN; PAM sequence: TTC
aaaaacaaatattattgggg

SEQ ID NO: 229635 - DNA, 20 bp, Artificial Sequence
  Description of Artificial Sequence: Synthetic oligonucleotide
  Target: LAMA2; (-) strand; PAM type: YTN; PAM sequence: CTA
gttcaaaaacaaatattatt

SEQ ID NO: 229636 - DNA, 20 bp, Artificial Sequence
  Description of Artificial Sequence: Synthetic oligonucleotide
  Target: LAMA2; (-) strand; PAM type: YTN; PAM sequence: TTA
aatggcatgaggaagactag

SEQ ID NO: 229637 - DNA, 20 bp, Artificial Sequence
  Description of Artificial Sequence: Synthetic oligonucleotide
  Target: LAMA2; (-) strand; PAM type: YTN; PAM sequence: TTT
aaatggcatgaggaagacta

SEQ ID NO: 229638 - DNA, 20 bp, Artificial Sequence
  Description of Artificial Sequence: Synthetic oligonucleotide
  Target: LAMA2; (-) strand; PAM type: YTN; PAM sequence: CTT
taaatggcatgaggaagact

SEQ ID NO: 229639 - DNA, 20 bp, Artificial Sequence
  Description of Artificial Sequence: Synthetic oligonucleotide
  Target: LAMA2; (-) strand; PAM type: YTN; PAM sequence: TTC
tttaaatggcatgaggaaga

SEQ ID NO: 229640 - DNA, 20 bp, Artificial Sequence
  Description of Artificial Sequence: Synthetic oligonucleotide
  Target: LAMA2; (-) strand; PAM type: YTN; PAM sequence: TTT
ctttaaatggcatgaggaag

SEQ ID NO: 229641 - DNA, 20 bp, Artificial Sequence
  Description of Artificial Sequence: Synthetic oligonucleotide
  Target: LAMA2; (-) strand; PAM type: YTN; PAM sequence: TTT
tctttaaatggcatgaggaa

SEQ ID NO: 229642 - DNA, 20 bp, Artificial Sequence
  Description of Artificial Sequence: Synthetic oligonucleotide
  Target: LAMA2; (-) strand; PAM type: YTN; PAM sequence: TTT
ttctttaaatggcatgagga

SEQ ID NO: 229643 - DNA, 20 bp, Artificial Sequence
  Description of Artificial Sequence: Synthetic oligonucleotide
  Target: LAMA2; (-) strand; PAM type: YTN; PAM sequence: CTG
aaatttttctttaaatggca

SEQ ID NO: 229644 - DNA, 20 bp, Artificial Sequence
  Description of Artificial Sequence: Synthetic oligonucleotide
  Target: LAMA2; (-) strand; PAM type: YTN; PAM sequence: TTC
ctgaaatttttctttaaatg

SEQ ID NO: 229645 - DNA, 20 bp, Artificial Sequence
  Description of Artificial Sequence: Synthetic oligonucleotide
  Target: LAMA2; (-) strand; PAM type: YTN; PAM sequence: TTA
ttcctgaaatttttctttaa

SEQ ID NO: 229646 - DNA, 20 bp, Artificial Sequence
  Description of Artificial Sequence: Synthetic oligonucleotide
  Target: LAMA2; (-) strand; PAM type: YTN; PAM sequence: CTT
attcctgaaatttttcttta

SEQ ID NO: 229647 - DNA, 20 bp, Artificial Sequence
  Description of Artificial Sequence: Synthetic oligonucleotide
  Target: LAMA2; (-) strand; PAM type: YTN; PAM sequence: TTC
cttattcctgaaatttttct

SEQ ID NO: 229648 - DNA, 20 bp, Artificial Sequence
  Description of Artificial Sequence: Synthetic oligonucleotide
  Target: LAMA2; (-) strand; PAM type: YTN; PAM sequence: TTT
ccttattcctgaaatttttc

SEQ ID NO: 229649 - DNA, 20 bp, Artificial Sequence
  Description of Artificial Sequence: Synthetic oligonucleotide
  Target: LAMA2; (-) strand; PAM type: YTN; PAM sequence: TTT
tccttattcctgaaattttt

SEQ ID NO: 229650 - DNA, 20 bp, Artificial Sequence
  Description of Artificial Sequence: Synthetic oligonucleotide
  Target: LAMA2; (-) strand; PAM type: YTN; PAM sequence: TTT
ttccttattcctgaaatttt

SEQ ID NO: 229651 - DNA, 20 bp, Artificial Sequence
  Description of Artificial Sequence: Synthetic oligonucleotide
  Target: LAMA2; (-) strand; PAM type: YTN; PAM sequence: CTG
tgtttttccttattcctgaa

SEQ ID NO: 229652 - DNA, 20 bp, Artificial Sequence
  Description of Artificial Sequence: Synthetic oligonucleotide
  Target: LAMA2; (-) strand; PAM type: YTN; PAM sequence: CTC
ctgtgtttttccttattcct

SEQ ID NO: 229653 - DNA, 20 bp, Artificial Sequence
  Description of Artificial Sequence: Synthetic oligonucleotide
  Target: LAMA2; (-) strand; PAM type: YTN; PAM sequence: TTA
atactcctgtgtttttcctt

SEQ ID NO: 229654 - DNA, 20 bp, Artificial Sequence
  Description of Artificial Sequence: Synthetic oligonucleotide
  Target: LAMA2; (-) strand; PAM type: YTN; PAM sequence: TTT
aatactcctgtgtttttcct

SEQ ID NO: 229655 - DNA, 20 bp, Artificial Sequence
  Description of Artificial Sequence: Synthetic oligonucleotide
  Target: LAMA2; (-) strand; PAM type: YTN; PAM sequence: TTT
taatactcctgtgtttttcc

SEQ ID NO: 229656 - DNA, 20 bp, Artificial Sequence
  Description of Artificial Sequence: Synthetic oligonucleotide
  Target: LAMA2; (-) strand; PAM type: YTN; PAM sequence: CTC
cattttaatactcctgtgtt

SEQ ID NO: 229657 - DNA, 20 bp, Artificial Sequence
  Description of Artificial Sequence: Synthetic oligonucleotide
  Target: LAMA2; (-) strand; PAM type: YTN; PAM sequence: TTC
tccattttaatactcctgtg

SEQ ID NO: 229658 - DNA, 20 bp, Artificial Sequence
  Description of Artificial Sequence: Synthetic oligonucleotide
  Target: LAMA2; (-) strand; PAM type: YTN; PAM sequence: TTT
ctccattttaatactcctgt

SEQ ID NO: 229659 - DNA, 20 bp, Artificial Sequence
  Description of Artificial Sequence: Synthetic oligonucleotide
  Target: LAMA2; (-) strand; PAM type: YTN; PAM sequence: TTG
atgtttctccattttaatac

SEQ ID NO: 229660 - DNA, 20 bp, Artificial Sequence
  Description of Artificial Sequence: Synthetic oligonucleotide
  Target: LAMA2; (-) strand; PAM type: YTN; PAM sequence: TTA
taacaatattgatgtttctc

SEQ ID NO: 229661 - DNA, 20 bp, Artificial Sequence
  Description of Artificial Sequence: Synthetic oligonucleotide
  Target: LAMA2; (-) strand; PAM type: YTN; PAM sequence: TTT
ataacaatattgatgtttct

SEQ ID NO: 229662 - DNA, 20 bp, Artificial Sequence
  Description of Artificial Sequence: Synthetic oligonucleotide
  Target: LAMA2; (-) strand; PAM type: YTN; PAM sequence: CTG
tttataacaatattgatgtt

SEQ ID NO: 229663 - DNA, 20 bp, Artificial Sequence
  Description of Artificial Sequence: Synthetic oligonucleotide
  Target: LAMA2; (-) strand; PAM type: YTN; PAM sequence: CTC
tgtttataacaatattgatg

SEQ ID NO: 229664 - DNA, 20 bp, Artificial Sequence
  Description of Artificial Sequence: Synthetic oligonucleotide
  Target: LAMA2; (-) strand; PAM type: YTN; PAM sequence: TTG
gggtgctctgtttataacaa

SEQ ID NO: 229665 - DNA, 20 bp, Artificial Sequence
  Description of Artificial Sequence: Synthetic oligonucleotide
  Target: LAMA2; (-) strand; PAM type: YTN; PAM sequence: TTT
ggggtgctctgtttataaca

SEQ ID NO: 229666 - DNA, 20 bp, Artificial Sequence
  Description of Artificial Sequence: Synthetic oligonucleotide
  Target: LAMA2; (-) strand; PAM type: YTN; PAM sequence: TTT
tggggtgctctgtttataac

SEQ ID NO: 229667 - DNA, 20 bp, Artificial Sequence
  Description of Artificial Sequence: Synthetic oligonucleotide
  Target: LAMA2; (-) strand; PAM type: YTN; PAM sequence: TTA
ttttggggtgctctgtttat

SEQ ID NO: 229668 - DNA, 20 bp, Artificial Sequence
  Description of Artificial Sequence: Synthetic oligonucleotide
  Target: LAMA2; (-) strand; PAM type: YTN; PAM sequence: TTC
aaaataattattttggggtg

SEQ ID NO: 229669 - DNA, 20 bp, Artificial Sequence
  Description of Artificial Sequence: Synthetic oligonucleotide
  Target: LAMA2; (-) strand; PAM type: YTN; PAM sequence: TTT
caaaataattattttggggt

SEQ ID NO: 229670 - DNA, 20 bp, Artificial Sequence
  Description of Artificial Sequence: Synthetic oligonucleotide
  Target: LAMA2; (-) strand; PAM type: YTN; PAM sequence: CTT
tcaaaataattattttgggg

SEQ ID NO: 229671 - DNA, 20 bp, Artificial Sequence
  Description of Artificial Sequence: Synthetic oligonucleotide
  Target: LAMA2; (-) strand; PAM type: YTN; PAM sequence: CTC
tttcaaaataattattttgg

SEQ ID NO: 229672 - DNA, 20 bp, Artificial Sequence
  Description of Artificial Sequence: Synthetic oligonucleotide
  Target: LAMA2; (-) strand; PAM type: YTN; PAM sequence: TTC
aaatgagtgcatctctttca

SEQ ID NO: 229673 - DNA, 20 bp, Artificial Sequence
  Description of Artificial Sequence: Synthetic oligonucleotide
  Target: LAMA2; (-) strand; PAM type: YTN; PAM sequence: TTA
taaattcaaatgagtgcatc

SEQ ID NO: 229674 - DNA, 20 bp, Artificial Sequence
  Description of Artificial Sequence: Synthetic oligonucleotide
  Target: LAMA2; (-) strand; PAM type: YTN; PAM sequence: TTT
ataaattcaaatgagtgcat

SEQ ID NO: 229675 - DNA, 20 bp, Artificial Sequence
  Description of Artificial Sequence: Synthetic oligonucleotide
  Target: LAMA2; (-) strand; PAM type: YTN; PAM sequence: TTC
cagagtttataaattcaaat

SEQ ID NO: 229676 - DNA, 20 bp, Artificial Sequence
  Description of Artificial Sequence: Synthetic oligonucleotide
  Target: LAMA2; (-) strand; PAM type: YTN; PAM sequence: TTA
aaataagcattccagagttt

SEQ ID NO: 229677 - DNA, 20 bp, Artificial Sequence
  Description of Artificial Sequence: Synthetic oligonucleotide
  Target: LAMA2; (-) strand; PAM type: YTN; PAM sequence: TTT
aaaataagcattccagagtt

SEQ ID NO: 229678 - DNA, 20 bp, Artificial Sequence
  Description of Artificial Sequence: Synthetic oligonucleotide
  Target: LAMA2; (-) strand; PAM type: YTN; PAM sequence: TTT
taaaataagcattccagagt

SEQ ID NO: 229679 - DNA, 20 bp, Artificial Sequence
  Description of Artificial Sequence: Synthetic oligonucleotide
  Target: LAMA2; (-) strand; PAM type: YTN; PAM sequence: TTA
attttaaaataagcattcca

SEQ ID NO: 229680 - DNA, 20 bp, Artificial Sequence
  Description of Artificial Sequence: Synthetic oligonucleotide
  Target: LAMA2; (-) strand; PAM type: YTN; PAM sequence: TTA
gttaattttaaaataagcat

SEQ ID NO: 229681 - DNA, 20 bp, Artificial Sequence
  Description of Artificial Sequence: Synthetic oligonucleotide
  Target: LAMA2; (-) strand; PAM type: YTN; PAM sequence: TTA
acacattagttaattttaaa

SEQ ID NO: 229682 - DNA, 20 bp, Artificial Sequence
  Description of Artificial Sequence: Synthetic oligonucleotide
  Target: LAMA2; (-) strand; PAM type: YTN; PAM sequence: TTG
tatgtaggttaacacattag

SEQ ID NO: 229683 - DNA, 20 bp, Artificial Sequence
  Description of Artificial Sequence: Synthetic oligonucleotide
  Target: LAMA2; (-) strand; PAM type: YTN; PAM sequence: TTT
gtatgtaggttaacacatta

SEQ ID NO: 229684 - DNA, 20 bp, Artificial Sequence
  Description of Artificial Sequence: Synthetic oligonucleotide
  Target: LAMA2; (-) strand; PAM type: YTN; PAM sequence: TTC
aagtaaaaatacaaatttgt

SEQ ID NO: 229685 - DNA, 20 bp, Artificial Sequence
  Description of Artificial Sequence: Synthetic oligonucleotide
  Target: LAMA2; (-) strand; PAM type: YTN; PAM sequence: CTT
caagtaaaaatacaaatttg

SEQ ID NO: 229686 - DNA, 20 bp, Artificial Sequence
  Description of Artificial Sequence: Synthetic oligonucleotide
  Target: LAMA2; (-) strand; PAM type: YTN; PAM sequence: TTC
cttcaagtaaaaatacaaat

SEQ ID NO: 229687 - DNA, 20 bp, Artificial Sequence
  Description of Artificial Sequence: Synthetic oligonucleotide
  Target: LAMA2; (-) strand; PAM type: YTN; PAM sequence: TTT
ccttcaagtaaaaatacaaa

SEQ ID NO: 229688 - DNA, 20 bp, Artificial Sequence
  Description of Artificial Sequence: Synthetic oligonucleotide
  Target: LAMA2; (-) strand; PAM type: YTN; PAM sequence: TTT
tccttcaagtaaaaatacaa

SEQ ID NO: 229689 - DNA, 20 bp, Artificial Sequence
  Description of Artificial Sequence: Synthetic oligonucleotide
  Target: LAMA2; (-) strand; PAM type: YTN; PAM sequence: CTT
ttccttcaagtaaaaataca

SEQ ID NO: 229690 - DNA, 20 bp, Artificial Sequence
  Description of Artificial Sequence: Synthetic oligonucleotide
  Target: LAMA2; (-) strand; PAM type: YTN; PAM sequence: CTG
cttttccttcaagtaaaaat

SEQ ID NO: 229691 - DNA, 20 bp, Artificial Sequence
  Description of Artificial Sequence: Synthetic oligonucleotide
  Target: LAMA2; (-) strand; PAM type: YTN; PAM sequence: CTA
ccagcaatgctgcttttcct

SEQ ID NO: 229692 - DNA, 20 bp, Artificial Sequence
  Description of Artificial Sequence: Synthetic oligonucleotide
  Target: LAMA2; (-) strand; PAM type: YTN; PAM sequence: CTG
tatgtacagaagcacatgtg

SEQ ID NO: 229693 - DNA, 20 bp, Artificial Sequence
  Description of Artificial Sequence: Synthetic oligonucleotide
  Target: LAMA2; (-) strand; PAM type: YTN; PAM sequence: CTC
aatgtgtacaatctgtatgt

SEQ ID NO: 229694 - DNA, 20 bp, Artificial Sequence
  Description of Artificial Sequence: Synthetic oligonucleotide
  Target: LAMA2; (-) strand; PAM type: YTN; PAM sequence: TTA
tggcataaacatcatcctca

SEQ ID NO: 229695 - DNA, 20 bp, Artificial Sequence
  Description of Artificial Sequence: Synthetic oligonucleotide
  Target: LAMA2; (-) strand; PAM type: YTN; PAM sequence: CTT
atggcataaacatcatcctc

SEQ ID NO: 229696 - DNA, 20 bp, Artificial Sequence
  Description of Artificial Sequence: Synthetic oligonucleotide
  Target: LAMA2; (-) strand; PAM type: YTN; PAM sequence: CTC
ttatggcataaacatcatcc

SEQ ID NO: 229697 - DNA, 20 bp, Artificial Sequence
  Description of Artificial Sequence: Synthetic oligonucleotide
  Target: LAMA2; (-) strand; PAM type: YTN; PAM sequence: TTC
tcttatggcataaacatcat

SEQ ID NO: 229698 - DNA, 20 bp, Artificial Sequence
  Description of Artificial Sequence: Synthetic oligonucleotide
  Target: LAMA2; (-) strand; PAM type: YTN; PAM sequence: CTG
ataaaaagagaggaaatgat

SEQ ID NO: 229699 - DNA, 20 bp, Artificial Sequence
  Description of Artificial Sequence: Synthetic oligonucleotide
  Target: LAMA2; (-) strand; PAM type: YTN; PAM sequence: TTG
agaaatgatgtaatggccct

SEQ ID NO: 229700 - DNA, 20 bp, Artificial Sequence
  Description of Artificial Sequence: Synthetic oligonucleotide
  Target: LAMA2; (-) strand; PAM type: YTN; PAM sequence: TTT
gagaaatgatgtaatggccc

SEQ ID NO: 229701 - DNA, 20 bp, Artificial Sequence
  Description of Artificial Sequence: Synthetic oligonucleotide
  Target: LAMA2; (-) strand; PAM type: YTN; PAM sequence: CTA
tttgagaaatgatgtaatgg

SEQ ID NO: 229702 - DNA, 20 bp, Artificial Sequence
  Description of Artificial Sequence: Synthetic oligonucleotide
  Target: LAMA2; (-) strand; PAM type: YTN; PAM sequence: CTA
acagtggtctatttgagaaa

SEQ ID NO: 229703 - DNA, 20 bp, Artificial Sequence
  Description of Artificial Sequence: Synthetic oligonucleotide
  Target: LAMA2; (-) strand; PAM type: YTN; PAM sequence: TTC
ctaacagtggtctatttgag

SEQ ID NO: 229704 - DNA, 20 bp, Artificial Sequence
  Description of Artificial Sequence: Synthetic oligonucleotide
  Target: LAMA2; (-) strand; PAM type: YTN; PAM sequence: CTT
cctaacagtggtctatttga

SEQ ID NO: 229705 - DNA, 20 bp, Artificial Sequence
  Description of Artificial Sequence: Synthetic oligonucleotide
  Target: LAMA2; (-) strand; PAM type: YTN; PAM sequence: CTA
cttcctaacagtggtctatt

SEQ ID NO: 229706 - DNA, 20 bp, Artificial Sequence
  Description of Artificial Sequence: Synthetic oligonucleotide
  Target: LAMA2; (-) strand; PAM type: YTN; PAM sequence: TTA
tatatccctacttcctaaca

SEQ ID NO: 229707 - DNA, 20 bp, Artificial Sequence
  Description of Artificial Sequence: Synthetic oligonucleotide
  Target: LAMA2; (-) strand; PAM type: YTN; PAM sequence: CTT
atatatccctacttcctaac

SEQ ID NO: 229708 - DNA, 20 bp, Artificial Sequence
  Description of Artificial Sequence: Synthetic oligonucleotide
  Target: LAMA2; (-) strand; PAM type: YTN; PAM sequence: TTA
tacttatatatccctacttc

SEQ ID NO: 229709 - DNA, 20 bp, Artificial Sequence
  Description of Artificial Sequence: Synthetic oligonucleotide
  Target: LAMA2; (-) strand; PAM type: YTN; PAM sequence: CTT
atacttatatatccctactt

SEQ ID NO: 229710 - DNA, 20 bp, Artificial Sequence
  Description of Artificial Sequence: Synthetic oligonucleotide
  Target: LAMA2; (-) strand; PAM type: YTN; PAM sequence: CTC
ccttatacttatatatccct

SEQ ID NO: 229711 - DNA, 20 bp, Artificial Sequence
  Description of Artificial Sequence: Synthetic oligonucleotide
  Target: LAMA2; (-) strand; PAM type: YTN; PAM sequence: CTC
ctcccttatacttatatatc

SEQ ID NO: 229712 - DNA, 20 bp, Artificial Sequence
  Description of Artificial Sequence: Synthetic oligonucleotide
  Target: LAMA2; (-) strand; PAM type: YTN; PAM sequence: TTG
agtctcctcccttatactta

SEQ ID NO: 229713 - DNA, 20 bp, Artificial Sequence
  Description of Artificial Sequence: Synthetic oligonucleotide
  Target: LAMA2; (-) strand; PAM type: YTN; PAM sequence: CTT
gagtctcctcccttatactt

SEQ ID NO: 229714 - DNA, 20 bp, Artificial Sequence
  Description of Artificial Sequence: Synthetic oligonucleotide
  Target: LAMA2; (-) strand; PAM type: YTN; PAM sequence: TTA
cttgagtctcctcccttata

SEQ ID NO: 229715 - DNA, 20 bp, Artificial Sequence
  Description of Artificial Sequence: Synthetic oligonucleotide
  Target: LAMA2; (-) strand; PAM type: YTN; PAM sequence: TTT
acttgagtctcctcccttat

SEQ ID NO: 229716 - DNA, 20 bp, Artificial Sequence
  Description of Artificial Sequence: Synthetic oligonucleotide
  Target: LAMA2; (-) strand; PAM type: YTN; PAM sequence: TTT
tacttgagtctcctccctta

SEQ ID NO: 229717 - DNA, 20 bp, Artificial Sequence
  Description of Artificial Sequence: Synthetic oligonucleotide
  Target: LAMA2; (-) strand; PAM type: YTN; PAM sequence: CTG
gttttacttgagtctcctcc

SEQ ID NO: 229718 - DNA, 20 bp, Artificial Sequence
  Description of Artificial Sequence: Synthetic oligonucleotide
  Target: LAMA2; (-) strand; PAM type: YTN; PAM sequence: CTC
tggttttacttgagtctcct

SEQ ID NO: 229719 - DNA, 20 bp, Artificial Sequence
  Description of Artificial Sequence: Synthetic oligonucleotide
  Target: LAMA2; (-) strand; PAM type: YTN; PAM sequence: TTG
taggatatgcaccactctgg

SEQ ID NO: 229720 - DNA, 20 bp, Artificial Sequence
  Description of Artificial Sequence: Synthetic oligonucleotide
  Target: LAMA2; (-) strand; PAM type: YTN; PAM sequence: TTT
gtaggatatgcaccactctg

SEQ ID NO: 229721 - DNA, 20 bp, Artificial Sequence
  Description of Artificial Sequence: Synthetic oligonucleotide
  Target: LAMA2; (-) strand; PAM type: YTN; PAM sequence: CTC
aatttgtaggatatgcacca

SEQ ID NO: 229722 - DNA, 20 bp, Artificial Sequence
  Description of Artificial Sequence: Synthetic oligonucleotide
  Target: LAMA2; (-) strand; PAM type: YTN; PAM sequence: TTC
tcaatttgtaggatatgcac

SEQ ID NO: 229723 - DNA, 20 bp, Artificial Sequence
  Description of Artificial Sequence: Synthetic oligonucleotide
  Target: LAMA2; (-) strand; PAM type: YTN; PAM sequence: TTA
ttctcaatttgtaggatatg

SEQ ID NO: 229724 - DNA, 20 bp, Artificial Sequence
  Description of Artificial Sequence: Synthetic oligonucleotide
  Target: LAMA2; (-) strand; PAM type: YTN; PAM sequence: CTT
attctcaatttgtaggatat

SEQ ID NO: 229725 - DNA, 20 bp, Artificial Sequence
  Description of Artificial Sequence: Synthetic oligonucleotide
  Target: LAMA2; (-) strand; PAM type: YTN; PAM sequence: TTA
aaagataaaatatgccttat

SEQ ID NO: 229726 - DNA, 20 bp, Artificial Sequence
  Description of Artificial Sequence: Synthetic oligonucleotide
  Target: LAMA2; (-) strand; PAM type: YTN; PAM sequence: TTT
aaaagataaaatatgcctta

SEQ ID NO: 229727 - DNA, 20 bp, Artificial Sequence
  Description of Artificial Sequence: Synthetic oligonucleotide
  Target: LAMA2; (-) strand; PAM type: YTN; PAM sequence: TTT
taaaagataaaatatgcctt

SEQ ID NO: 229728 - DNA, 20 bp, Artificial Sequence
  Description of Artificial Sequence: Synthetic oligonucleotide
  Target: LAMA2; (-) strand; PAM type: YTN; PAM sequence: TTA
ttttaaaagataaaatatgc

SEQ ID NO: 229729 - DNA, 20 bp, Artificial Sequence
  Description of Artificial Sequence: Synthetic oligonucleotide
  Target: LAMA2; (-) strand; PAM type: YTN; PAM sequence: TTA
caggcgtgagccaccgcgcc

SEQ ID NO: 229730 - DNA, 20 bp, Artificial Sequence
  Description of Artificial Sequence: Synthetic oligonucleotide
  Target: LAMA2; (-) strand; PAM type: YTN; PAM sequence: CTG
ggattacaggcgtgagccac

SEQ ID NO: 229731 - DNA, 20 bp, Artificial Sequence
  Description of Artificial Sequence: Synthetic oligonucleotide
  Target: LAMA2; (-) strand; PAM type: YTN; PAM sequence: CTC
ccaaagtgctgggattacag

SEQ ID NO: 229732 - DNA, 20 bp, Artificial Sequence
  Description of Artificial Sequence: Synthetic oligonucleotide
  Target: LAMA2; (-) strand; PAM type: YTN; PAM sequence: CTC
ggcctcccaaagtgctggga

SEQ ID NO: 229733 - DNA, 20 bp, Artificial Sequence
  Description of Artificial Sequence: Synthetic oligonucleotide
  Target: LAMA2; (-) strand; PAM type: YTN; PAM sequence: CTC
gtgatccgcccgcctcggcc

SEQ ID NO: 229734 - DNA, 20 bp, Artificial Sequence
  Description of Artificial Sequence: Synthetic oligonucleotide
  Target: LAMA2; (-) strand; PAM type: YTN; PAM sequence: CTG
acctcgtgatccgcccgcct

SEQ ID NO: 229735 - DNA, 20 bp, Artificial Sequence
  Description of Artificial Sequence: Synthetic oligonucleotide
  Target: LAMA2; (-) strand; PAM type: YTN; PAM sequence: CTC
ctgacctcgtgatccgcccg

SEQ ID NO: 229736 - DNA, 20 bp, Artificial Sequence
  Description of Artificial Sequence: Synthetic oligonucleotide
  Target: LAMA2; (-) strand; PAM type: YTN; PAM sequence: CTC
gatctcctgacctcgtgatc

SEQ ID NO: 229737 - DNA, 20 bp, Artificial Sequence
  Description of Artificial Sequence: Synthetic oligonucleotide
  Target: LAMA2; (-) strand; PAM type: YTN; PAM sequence: TTA
gccgggatggtctcgatctc

SEQ ID NO: 229738 - DNA, 20 bp, Artificial Sequence
  Description of Artificial Sequence: Synthetic oligonucleotide
  Target: LAMA2; (-) strand; PAM type: YTN; PAM sequence: TTT
agccgggatggtctcgatct

SEQ ID NO: 229739 - DNA, 20 bp, Artificial Sequence
  Description of Artificial Sequence: Synthetic oligonucleotide
  Target: LAMA2; (-) strand; PAM type: YTN; PAM sequence: TTT
tagccgggatggtctcgatc

SEQ ID NO: 229740 - DNA, 20 bp, Artificial Sequence
  Description of Artificial Sequence: Synthetic oligonucleotide
  Target: LAMA2; (-) strand; PAM type: YTN; PAM sequence: TTC
accgttttagccgggatggt

SEQ ID NO: 229741 - DNA, 20 bp, Artificial Sequence
  Description of Artificial Sequence: Synthetic oligonucleotide
  Target: LAMA2; (-) strand; PAM type: YTN; PAM sequence: TTT
caccgttttagccgggatgg

SEQ ID NO: 229742 - DNA, 20 bp, Artificial Sequence
  Description of Artificial Sequence: Synthetic oligonucleotide
  Target: LAMA2; (-) strand; PAM type: YTN; PAM sequence: TTA
gtagagacggggtttcaccg

SEQ ID NO: 229743 - DNA, 20 bp, Artificial Sequence
  Description of Artificial Sequence: Synthetic oligonucleotide
  Target: LAMA2; (-) strand; PAM type: YTN; PAM sequence: TTT
agtagagacggggtttcacc

SEQ ID NO: 229744 - DNA, 20 bp, Artificial Sequence
  Description of Artificial Sequence: Synthetic oligonucleotide
  Target: LAMA2; (-) strand; PAM type: YTN; PAM sequence: TTT
tagtagagacggggtttcac

SEQ ID NO: 229745 - DNA, 20 bp, Artificial Sequence
  Description of Artificial Sequence: Synthetic oligonucleotide
  Target: LAMA2; (-) strand; PAM type: YTN; PAM sequence: TTT
ttagtagagacggggtttca

SEQ ID NO: 229746 - DNA, 20 bp, Artificial Sequence
  Description of Artificial Sequence: Synthetic oligonucleotide
  Target: LAMA2; (-) strand; PAM type: YTN; PAM sequence: TTG
tatttttagtagagacgggg

SEQ ID NO: 229747 - DNA, 20 bp, Artificial Sequence
  Description of Artificial Sequence: Synthetic oligonucleotide
  Target: LAMA2; (-) strand; PAM type: YTN; PAM sequence: TTT
gtatttttagtagagacggg

SEQ ID NO: 229748 - DNA, 20 bp, Artificial Sequence
  Description of Artificial Sequence: Synthetic oligonucleotide
  Target: LAMA2; (-) strand; PAM type: YTN; PAM sequence: TTT
tgtatttttagtagagacgg

SEQ ID NO: 229749 - DNA, 20 bp, Artificial Sequence
  Description of Artificial Sequence: Synthetic oligonucleotide
  Target: LAMA2; (-) strand; PAM type: YTN; PAM sequence: TTT
ttgtatttttagtagagacg

SEQ ID NO: 229750 - DNA, 20 bp, Artificial Sequence
  Description of Artificial Sequence: Synthetic oligonucleotide
  Target: LAMA2; (-) strand; PAM type: YTN; PAM sequence: TTT
tttgtatttttagtagagac

SEQ ID NO: 229751 - DNA, 20 bp, Artificial Sequence
  Description of Artificial Sequence: Synthetic oligonucleotide
  Target: LAMA2; (-) strand; PAM type: YTN; PAM sequence: CTA
attttttgtatttttagtag

SEQ ID NO: 229752 - DNA, 20 bp, Artificial Sequence
  Description of Artificial Sequence: Synthetic oligonucleotide
  Target: LAMA2; (-) strand; PAM type: YTN; PAM sequence: CTG
gctaattttttgtattttta

SEQ ID NO: 229753 - DNA, 20 bp, Artificial Sequence
  Description of Artificial Sequence: Synthetic oligonucleotide
  Target: LAMA2; (-) strand; PAM type: YTN; PAM sequence: CTA
cgcctggctaattttttgta

SEQ ID NO: 229754 - DNA, 20 bp, Artificial Sequence
  Description of Artificial Sequence: Synthetic oligonucleotide
  Target: LAMA2; (-) strand; PAM type: YTN; PAM sequence: CTA
caggcgcccgccactacgcc

SEQ ID NO: 229755 - DNA, 20 bp, Artificial Sequence
  Description of Artificial Sequence: Synthetic oligonucleotide
  Target: LAMA2; (-) strand; PAM type: YTN; PAM sequence: CTG
ggactacaggcgcccgccac

SEQ ID NO: 229756 - DNA, 20 bp, Artificial Sequence
  Description of Artificial Sequence: Synthetic oligonucleotide
  Target: LAMA2; (-) strand; PAM type: YTN; PAM sequence: CTC
ccaagtagctgggactacag

SEQ ID NO: 229757 - DNA, 20 bp, Artificial Sequence
  Description of Artificial Sequence: Synthetic oligonucleotide
  Target: LAMA2; (-) strand; PAM type: YTN; PAM sequence: CTC
agcctcccaagtagctggga

SEQ ID NO: 229758 - DNA, 20 bp, Artificial Sequence
  Description of Artificial Sequence: Synthetic oligonucleotide
  Target: LAMA2; (-) strand; PAM type: YTN; PAM sequence: CTG
cctcagcctcccaagtagct

SEQ ID NO: 229759 - DNA, 20 bp, Artificial Sequence
  Description of Artificial Sequence: Synthetic oligonucleotide
  Target: LAMA2; (-) strand; PAM type: YTN; PAM sequence: CTC
ctgcctcagcctcccaagta

SEQ ID NO: 229760 - DNA, 20 bp, Artificial Sequence
  Description of Artificial Sequence: Synthetic oligonucleotide
  Target: LAMA2; (-) strand; PAM type: YTN; PAM sequence: TTC
tcctgcctcagcctcccaag

SEQ ID NO: 229761 - DNA, 20 bp, Artificial Sequence
  Description of Artificial Sequence: Synthetic oligonucleotide
  Target: LAMA2; (-) strand; PAM type: YTN; PAM sequence: TTC
acgccattctcctgcctcag

SEQ ID NO: 229762 - DNA, 20 bp, Artificial Sequence
  Description of Artificial Sequence: Synthetic oligonucleotide
  Target: LAMA2; (-) strand; PAM type: YTN; PAM sequence: CTC
ccgggttcacgccattctcc

SEQ ID NO: 229763 - DNA, 20 bp, Artificial Sequence
  Description of Artificial Sequence: Synthetic oligonucleotide
  Target: LAMA2; (-) strand; PAM type: YTN; PAM sequence: CTC
cgcctcccgggttcacgcca

SEQ ID NO: 229764 - DNA, 20 bp, Artificial Sequence
  Description of Artificial Sequence: Synthetic oligonucleotide
  Target: LAMA2; (-) strand; PAM type: YTN; PAM sequence: CTG
caagctccgcctcccgggtt

SEQ ID NO: 229765 - DNA, 20 bp, Artificial Sequence
  Description of Artificial Sequence: Synthetic oligonucleotide
  Target: LAMA2; (-) strand; PAM type: YTN; PAM sequence: CTC
actgcaagctccgcctcccg

SEQ ID NO: 229766 - DNA, 20 bp, Artificial Sequence
  Description of Artificial Sequence: Synthetic oligonucleotide
  Target: LAMA2; (-) strand; PAM type: YTN; PAM sequence: CTC
ggctcactgcaagctccgcc

SEQ ID NO: 229767 - DNA, 20 bp, Artificial Sequence
  Description of Artificial Sequence: Synthetic oligonucleotide
  Target: LAMA2; (-) strand; PAM type: YTN; PAM sequence: CTG
gagtgcagtggcgggatctc

SEQ ID NO: 229768 - DNA, 20 bp, Artificial Sequence
  Description of Artificial Sequence: Synthetic oligonucleotide
  Target: LAMA2; (-) strand; PAM type: YTN; PAM sequence: CTG
tcgcccaggctggagtgcag

SEQ ID NO: 229769 - DNA, 20 bp, Artificial Sequence
  Description of Artificial Sequence: Synthetic oligonucleotide
  Target: LAMA2; (-) strand; PAM type: YTN; PAM sequence: CTC
tgtcgcccaggctggagtgc

SEQ ID NO: 229770 - DNA, 20 bp, Artificial Sequence
  Description of Artificial Sequence: Synthetic oligonucleotide
  Target: LAMA2; (-) strand; PAM type: YTN; PAM sequence: CTC
gctctgtcgcccaggctgga

SEQ ID NO: 229771 - DNA, 20 bp, Artificial Sequence
  Description of Artificial Sequence: Synthetic oligonucleotide
  Target: LAMA2; (-) strand; PAM type: YTN; PAM sequence: TTG
agacggaatctcgctctgtc

SEQ ID NO: 229772 - DNA, 20 bp, Artificial Sequence
  Description of Artificial Sequence: Synthetic oligonucleotide
  Target: LAMA2; (-) strand; PAM type: YTN; PAM sequence: TTT
gagacggaatctcgctctgt

SEQ ID NO: 229773 - DNA, 20 bp, Artificial Sequence
  Description of Artificial Sequence: Synthetic oligonucleotide
  Target: LAMA2; (-) strand; PAM type: YTN; PAM sequence: TTT
tgagacggaatctcgctctg

SEQ ID NO: 229774 - DNA, 20 bp, Artificial Sequence
  Description of Artificial Sequence: Synthetic oligonucleotide
  Target: LAMA2; (-) strand; PAM type: YTN; PAM sequence: TTT
ttgagacggaatctcgctct

SEQ ID NO: 229775 - DNA, 20 bp, Artificial Sequence
  Description of Artificial Sequence: Synthetic oligonucleotide
  Target: LAMA2; (-) strand; PAM type: YTN; PAM sequence: TTT
tttgagacggaatctcgctc

SEQ ID NO: 229776 - DNA, 20 bp, Artificial Sequence
  Description of Artificial Sequence: Synthetic oligonucleotide
  Target: LAMA2; (-) strand; PAM type: YTN; PAM sequence: TTT
ttttgagacggaatctcgct

SEQ ID NO: 229777 - DNA, 20 bp, Artificial Sequence
  Description of Artificial Sequence: Synthetic oligonucleotide
  Target: LAMA2; (-) strand; PAM type: YTN; PAM sequence: TTT
tttttgagacggaatctcgc

SEQ ID NO: 229778 - DNA, 20 bp, Artificial Sequence
  Description of Artificial Sequence: Synthetic oligonucleotide
  Target: LAMA2; (-) strand; PAM type: YTN; PAM sequence: TTT
ttttttgagacggaatctcg

SEQ ID NO: 229779 - DNA, 20 bp, Artificial Sequence
  Description of Artificial Sequence: Synthetic oligonucleotide
  Target: LAMA2; (-) strand; PAM type: YTN; PAM sequence: TTT
tttttttgagacggaatctc

SEQ ID NO: 229780 - DNA, 20 bp, Artificial Sequence
  Description of Artificial Sequence: Synthetic oligonucleotide
  Target: LAMA2; (-) strand; PAM type: YTN; PAM sequence: TTT
ttttttttgagacggaatct

SEQ ID NO: 229781 - DNA, 20 bp, Artificial Sequence
  Description of Artificial Sequence: Synthetic oligonucleotide
  Target: LAMA2; (-) strand; PAM type: YTN; PAM sequence: TTT
tttttttttgagacggaatc

SEQ ID NO: 229782 - DNA, 20 bp, Artificial Sequence
  Description of Artificial Sequence: Synthetic oligonucleotide
  Target: LAMA2; (-) strand; PAM type: YTN; PAM sequence: TTT
ttttttttttgagacggaat

SEQ ID NO: 229783 - DNA, 20 bp, Artificial Sequence
  Description of Artificial Sequence: Synthetic oligonucleotide
  Target: LAMA2; (-) strand; PAM type: YTN; PAM sequence: TTT
tttttttttttgagacggaa

SEQ ID NO: 229784 - DNA, 20 bp, Artificial Sequence
  Description of Artificial Sequence: Synthetic oligonucleotide
  Target: LAMA2; (-) strand; PAM type: YTN; PAM sequence: TTT
ttttttttttttgagacgga

SEQ ID NO: 229785 - DNA, 20 bp, Artificial Sequence
  Description of Artificial Sequence: Synthetic oligonucleotide
  Target: LAMA2; (-) strand; PAM type: YTN; PAM sequence: TTT
tttttttttttttgagacgg

SEQ ID NO: 229786 - DNA, 20 bp, Artificial Sequence
  Description of Artificial Sequence: Synthetic oligonucleotide
  Target: LAMA2; (-) strand; PAM type: YTN; PAM sequence: TTT
ttttttttttttttgagacg

SEQ ID NO: 229787 - DNA, 20 bp, Artificial Sequence
  Description of Artificial Sequence: Synthetic oligonucleotide
  Target: LAMA2; (-) strand; PAM type: YTN; PAM sequence: TTT
tttttttttttttttgagac

SEQ ID NO: 229788 - DNA, 20 bp, Artificial Sequence
  Description of Artificial Sequence: Synthetic oligonucleotide
  Target: LAMA2; (-) strand; PAM type: YTN; PAM sequence: TTT
ttttttttttttttttgaga

SEQ ID NO: 229789 - DNA, 20 bp, Artificial Sequence
  Description of Artificial Sequence: Synthetic oligonucleotide
  Target: LAMA2; (-) strand; PAM type: YTN; PAM sequence: TTT
tttttttttttttttttgag

SEQ ID NO: 229790 - DNA, 20 bp, Artificial Sequence
  Description of Artificial Sequence: Synthetic oligonucleotide
  Target: LAMA2; (-) strand; PAM type: YTN; PAM sequence: TTA
tttttttttttttttttttt

SEQ ID NO: 229791 - DNA, 20 bp, Artificial Sequence
  Description of Artificial Sequence: Synthetic oligonucleotide
  Target: LAMA2; (-) strand; PAM type: YTN; PAM sequence: CTA
aaatatgttatttttttttt

SEQ ID NO: 229792 - DNA, 20 bp, Artificial Sequence
  Description of Artificial Sequence: Synthetic oligonucleotide
  Target: LAMA2; (-) strand; PAM type: YTN; PAM sequence: CTC
taaaatatgttatttttttt

SEQ ID NO: 229793 - DNA, 20 bp, Artificial Sequence
  Description of Artificial Sequence: Synthetic oligonucleotide
  Target: LAMA2; (-) strand; PAM type: YTN; PAM sequence: CTG
agtctctaaaatatgttatt

SEQ ID NO: 229794 - DNA, 20 bp, Artificial Sequence
  Description of Artificial Sequence: Synthetic oligonucleotide
  Target: LAMA2; (-) strand; PAM type: YTN; PAM sequence: TTA
ctgagtctctaaaatatgtt

SEQ ID NO: 229795 - DNA, 20 bp, Artificial Sequence
  Description of Artificial Sequence: Synthetic oligonucleotide
  Target: LAMA2; (-) strand; PAM type: YTN; PAM sequence: TTT
actgagtctctaaaatatgt

SEQ ID NO: 229796 - DNA, 20 bp, Artificial Sequence
  Description of Artificial Sequence: Synthetic oligonucleotide
  Target: LAMA2; (-) strand; PAM type: YTN; PAM sequence: TTT
tactgagtctctaaaatatg

SEQ ID NO: 229797 - DNA, 20 bp, Artificial Sequence
  Description of Artificial Sequence: Synthetic oligonucleotide
  Target: LAMA2; (-) strand; PAM type: YTN; PAM sequence: TTA
ttttactgagtctctaaaat

SEQ ID NO: 229798 - DNA, 20 bp, Artificial Sequence
  Description of Artificial Sequence: Synthetic oligonucleotide
  Target: LAMA2; (-) strand; PAM type: YTN; PAM sequence: TTA
aaattattttactgagtctc

SEQ ID NO: 229799 - DNA, 20 bp, Artificial Sequence
  Description of Artificial Sequence: Synthetic oligonucleotide
  Target: LAMA2; (-) strand; PAM type: YTN; PAM sequence: TTT
aaaattattttactgagtct

SEQ ID NO: 229800 - DNA, 20 bp, Artificial Sequence
  Description of Artificial Sequence: Synthetic oligonucleotide
  Target: LAMA2; (-) strand; PAM type: YTN; PAM sequence: CTT
taaaattattttactgagtc

SEQ ID NO: 229801 - DNA, 20 bp, Artificial Sequence
  Description of Artificial Sequence: Synthetic oligonucleotide
  Target: LAMA2; (-) strand; PAM type: YTN; PAM sequence: CTG
cccctttaaaattattttac

SEQ ID NO: 229802 - DNA, 20 bp, Artificial Sequence
  Description of Artificial Sequence: Synthetic oligonucleotide
  Target: LAMA2; (-) strand; PAM type: YTN; PAM sequence: TTC
tgcccctttaaaattatttt

SEQ ID NO: 229803 - DNA, 20 bp, Artificial Sequence
  Description of Artificial Sequence: Synthetic oligonucleotide
  Target: LAMA2; (-) strand; PAM type: YTN; PAM sequence: CTT
ctgcccctttaaaattattt

SEQ ID NO: 229804 - DNA, 20 bp, Artificial Sequence
  Description of Artificial Sequence: Synthetic oligonucleotide
  Target: LAMA2; (-) strand; PAM type: YTN; PAM sequence: CTG
tacttctgcccctttaaaat

SEQ ID NO: 229805 - DNA, 20 bp, Artificial Sequence
  Description of Artificial Sequence: Synthetic oligonucleotide
  Target: LAMA2; (-) strand; PAM type: YTN; PAM sequence: CTA
catctgtacttctgcccctt

SEQ ID NO: 229806 - DNA, 20 bp, Artificial Sequence
  Description of Artificial Sequence: Synthetic oligonucleotide
  Target: LAMA2; (-) strand; PAM type: YTN; PAM sequence: CTA
acagctacatctgtacttct

SEQ ID NO: 229807 - DNA, 20 bp, Artificial Sequence
  Description of Artificial Sequence: Synthetic oligonucleotide
  Target: LAMA2; (-) strand; PAM type: YTN; PAM sequence: CTC
ctaacagctacatctgtact

SEQ ID NO: 229808 - DNA, 20 bp, Artificial Sequence
  Description of Artificial Sequence: Synthetic oligonucleotide
  Target: LAMA2; (-) strand; PAM type: YTN; PAM sequence: TTC
ctcctaacagctacatctgt

SEQ ID NO: 229809 - DNA, 20 bp, Artificial Sequence
  Description of Artificial Sequence: Synthetic oligonucleotide
  Target: LAMA2; (-) strand; PAM type: YTN; PAM sequence: CTT
cctcctaacagctacatctg

SEQ ID NO: 229810 - DNA, 20 bp, Artificial Sequence
  Description of Artificial Sequence: Synthetic oligonucleotide
  Target: LAMA2; (-) strand; PAM type: YTN; PAM sequence: CTG
aaataatgcttcctcctaac

SEQ ID NO: 229811 - DNA, 20 bp, Artificial Sequence
  Description of Artificial Sequence: Synthetic oligonucleotide
  Target: LAMA2; (-) strand; PAM type: YTN; PAM sequence: CTG
tagctgaaataatgcttcct

SEQ ID NO: 229812 - DNA, 20 bp, Artificial Sequence
  Description of Artificial Sequence: Synthetic oligonucleotide
  Target: LAMA2; (-) strand; PAM type: YTN; PAM sequence: CTC
caataatgtgctgtagctga

SEQ ID NO: 229813 - DNA, 20 bp, Artificial Sequence
  Description of Artificial Sequence: Synthetic oligonucleotide
  Target: LAMA2; (-) strand; PAM type: YTN; PAM sequence: CTA
tcctccaataatgtgctgta

SEQ ID NO: 229814 - DNA, 20 bp, Artificial Sequence
  Description of Artificial Sequence: Synthetic oligonucleotide
  Target: LAMA2; (-) strand; PAM type: YTN; PAM sequence: TTC
ctatcctccaataatgtgct

SEQ ID NO: 229815 - DNA, 20 bp, Artificial Sequence
  Description of Artificial Sequence: Synthetic oligonucleotide
  Target: LAMA2; (-) strand; PAM type: YTN; PAM sequence: CTT
cctatcctccaataatgtgc

SEQ ID NO: 229816 - DNA, 20 bp, Artificial Sequence
  Description of Artificial Sequence: Synthetic oligonucleotide
  Target: LAMA2; (-) strand; PAM type: YTN; PAM sequence: CTC
ttcctatcctccaataatgt

SEQ ID NO: 229817 - DNA, 20 bp, Artificial Sequence
  Description of Artificial Sequence: Synthetic oligonucleotide
  Target: LAMA2; (-) strand; PAM type: YTN; PAM sequence: CTG
gaataccatatgctcttcct

SEQ ID NO: 229818 - DNA, 20 bp, Artificial Sequence
  Description of Artificial Sequence: Synthetic oligonucleotide
  Target: LAMA2; (-) strand; PAM type: YTN; PAM sequence: TTC
actggaataccatatgctct

SEQ ID NO: 229819 - DNA, 20 bp, Artificial Sequence
  Description of Artificial Sequence: Synthetic oligonucleotide
  Target: LAMA2; (-) strand; PAM type: YTN; PAM sequence: TTT
cactggaataccatatgctc

SEQ ID NO: 229820 - DNA, 20 bp, Artificial Sequence
  Description of Artificial Sequence: Synthetic oligonucleotide
  Target: LAMA2; (-) strand; PAM type: YTN; PAM sequence: CTT
tcactggaataccatatgct

SEQ ID NO: 229821 - DNA, 20 bp, Artificial Sequence
  Description of Artificial Sequence: Synthetic oligonucleotide
  Target: LAMA2; (-) strand; PAM type: YTN; PAM sequence: CTC
tttcactggaataccatatg

SEQ ID NO: 229822 - DNA, 20 bp, Artificial Sequence
  Description of Artificial Sequence: Synthetic oligonucleotide
  Target: LAMA2; (-) strand; PAM type: YTN; PAM sequence: TTA
agctctttcactggaatacc

SEQ ID NO: 229823 - DNA, 20 bp, Artificial Sequence
  Description of Artificial Sequence: Synthetic oligonucleotide
  Target: LAMA2; (-) strand; PAM type: YTN; PAM sequence: TTA
taattaagctctttcactgg

SEQ ID NO: 229824 - DNA, 20 bp, Artificial Sequence
  Description of Artificial Sequence: Synthetic oligonucleotide
  Target: LAMA2; (-) strand; PAM type: YTN; PAM sequence: CTA
ttataattaagctctttcac

SEQ ID NO: 229825 - DNA, 20 bp, Artificial Sequence
  Description of Artificial Sequence: Synthetic oligonucleotide
  Target: LAMA2; (-) strand; PAM type: YTN; PAM sequence: CTC
tattataattaagctctttc

SEQ ID NO: 229826 - DNA, 20 bp, Artificial Sequence
  Description of Artificial Sequence: Synthetic oligonucleotide
  Target: LAMA2; (-) strand; PAM type: YTN; PAM sequence: CTG
ctctattataattaagctct

SEQ ID NO: 229827 - DNA, 20 bp, Artificial Sequence
  Description of Artificial Sequence: Synthetic oligonucleotide
  Target: LAMA2; (-) strand; PAM type: YTN; PAM sequence: TTC
tgctctattataattaagct

SEQ ID NO: 229828 - DNA, 20 bp, Artificial Sequence
  Description of Artificial Sequence: Synthetic oligonucleotide
  Target: LAMA2; (-) strand; PAM type: YTN; PAM sequence: TTT
ctgctctattataattaagc

SEQ ID NO: 229829 - DNA, 20 bp, Artificial Sequence
  Description of Artificial Sequence: Synthetic oligonucleotide
  Target: LAMA2; (-) strand; PAM type: YTN; PAM sequence: CTT
tctgctctattataattaag

SEQ ID NO: 229830 - DNA, 20 bp, Artificial Sequence
  Description of Artificial Sequence: Synthetic oligonucleotide
  Target: LAMA2; (-) strand; PAM type: YTN; PAM sequence: CTA
atcctttctgctctattata

SEQ ID NO: 229831 - DNA, 20 bp, Artificial Sequence
  Description of Artificial Sequence: Synthetic oligonucleotide
  Target: LAMA2; (-) strand; PAM type: YTN; PAM sequence: TTC
taatcctttctgctctatta

SEQ ID NO: 229832 - DNA, 20 bp, Artificial Sequence
  Description of Artificial Sequence: Synthetic oligonucleotide
  Target: LAMA2; (-) strand; PAM type: YTN; PAM sequence: TTT
ctaatcctttctgctctatt

SEQ ID NO: 229833 - DNA, 20 bp, Artificial Sequence
  Description of Artificial Sequence: Synthetic oligonucleotide
  Target: LAMA2; (-) strand; PAM type: YTN; PAM sequence: CTG
tttctaatcctttctgctct

SEQ ID NO: 229834 - DNA, 20 bp, Artificial Sequence
  Description of Artificial Sequence: Synthetic oligonucleotide
  Target: LAMA2; (-) strand; PAM type: YTN; PAM sequence: TTC
tgtttctaatcctttctgct

SEQ ID NO: 229835 - DNA, 20 bp, Artificial Sequence
  Description of Artificial Sequence: Synthetic oligonucleotide
  Target: LAMA2; (-) strand; PAM type: YTN; PAM sequence: TTT
ctgtttctaatcctttctgc

SEQ ID NO: 229836 - DNA, 20 bp, Artificial Sequence
  Description of Artificial Sequence: Synthetic oligonucleotide
  Target: LAMA2; (-) strand; PAM type: YTN; PAM sequence: TTT
tctgtttctaatcctttctg

SEQ ID NO: 229837 - DNA, 20 bp, Artificial Sequence
  Description of Artificial Sequence: Synthetic oligonucleotide
  Target: LAMA2; (-) strand; PAM type: YTN; PAM sequence: CTT
ttctgtttctaatcctttct

SEQ ID NO: 229838 - DNA, 20 bp, Artificial Sequence
  Description of Artificial Sequence: Synthetic oligonucleotide
  Target: LAMA2; (-) strand; PAM type: YTN; PAM sequence: TTC
ttttctgtttctaatccttt

SEQ ID NO: 229839 - DNA, 20 bp, Artificial Sequence
  Description of Artificial Sequence: Synthetic oligonucleotide
  Target: LAMA2; (-) strand; PAM type: YTN; PAM sequence: CTT
cttttctgtttctaatcctt

SEQ ID NO: 229840 - DNA, 20 bp, Artificial Sequence
  Description of Artificial Sequence: Synthetic oligonucleotide
  Target: LAMA2; (-) strand; PAM type: YTN; PAM sequence: CTG
ataatccaccttcttttctg

SEQ ID NO: 229841 - DNA, 20 bp, Artificial Sequence
  Description of Artificial Sequence: Synthetic oligonucleotide
  Target: LAMA2; (-) strand; PAM type: YTN; PAM sequence: TTC
ctgataatccaccttctttt

SEQ ID NO: 229842 - DNA, 20 bp, Artificial Sequence
  Description of Artificial Sequence: Synthetic oligonucleotide
  Target: LAMA2; (-) strand; PAM type: YTN; PAM sequence: TTA
ttcctgataatccaccttct

SEQ ID NO: 229843 - DNA, 20 bp, Artificial Sequence
  Description of Artificial Sequence: Synthetic oligonucleotide
  Target: LAMA2; (-) strand; PAM type: YTN; PAM sequence: TTT
attcctgataatccaccttc

SEQ ID NO: 229844 - DNA, 20 bp, Artificial Sequence
  Description of Artificial Sequence: Synthetic oligonucleotide
  Target: LAMA2; (-) strand; PAM type: YTN; PAM sequence: CTT
tattcctgataatccacctt

SEQ ID NO: 229845 - DNA, 20 bp, Artificial Sequence
  Description of Artificial Sequence: Synthetic oligonucleotide
  Target: LAMA2; (-) strand; PAM type: YTN; PAM sequence: TTG
actttattcctgataatcca

SEQ ID NO: 229846 - DNA, 20 bp, Artificial Sequence
  Description of Artificial Sequence: Synthetic oligonucleotide
  Target: LAMA2; (-) strand; PAM type: YTN; PAM sequence: TTT
gactttattcctgataatcc

SEQ ID NO: 229847 - DNA, 20 bp, Artificial Sequence
  Description of Artificial Sequence: Synthetic oligonucleotide
  Target: LAMA2; (-) strand; PAM type: YTN; PAM sequence: CTT
tgactttattcctgataatc

SEQ ID NO: 229848 - DNA, 20 bp, Artificial Sequence
  Description of Artificial Sequence: Synthetic oligonucleotide
  Target: LAMA2; (-) strand; PAM type: YTN; PAM sequence: TTC
tttgactttattcctgataa

SEQ ID NO: 229849 - DNA, 20 bp, Artificial Sequence
  Description of Artificial Sequence: Synthetic oligonucleotide
  Target: LAMA2; (-) strand; PAM type: YTN; PAM sequence: CTT
ctttgactttattcctgata

SEQ ID NO: 229850 - DNA, 20 bp, Artificial Sequence
  Description of Artificial Sequence: Synthetic oligonucleotide
  Target: LAMA2; (-) strand; PAM type: YTN; PAM sequence: TTC
agtcccttctttgactttat

SEQ ID NO: 229851 - DNA, 20 bp, Artificial Sequence
  Description of Artificial Sequence: Synthetic oligonucleotide
  Target: LAMA2; (-) strand; PAM type: YTN; PAM sequence: CTG
atcaatattcagtcccttct

SEQ ID NO: 229852 - DNA, 20 bp, Artificial Sequence
  Description of Artificial Sequence: Synthetic oligonucleotide
  Target: LAMA2; (-) strand; PAM type: YTN; PAM sequence: CTG
aaaatctgatcaatattcag

SEQ ID NO: 229853 - DNA, 20 bp, Artificial Sequence
  Description of Artificial Sequence: Synthetic oligonucleotide
  Target: LAMA2; (-) strand; PAM type: YTN; PAM sequence: TTC
tgaaaatctgatcaatattc

SEQ ID NO: 229854 - DNA, 20 bp, Artificial Sequence
  Description of Artificial Sequence: Synthetic oligonucleotide
  Target: LAMA2; (-) strand; PAM type: YTN; PAM sequence: TTT
ctgaaaatctgatcaatatt

SEQ ID NO: 229855 - DNA, 20 bp, Artificial Sequence
  Description of Artificial Sequence: Synthetic oligonucleotide
  Target: LAMA2; (-) strand; PAM type: YTN; PAM sequence: TTT
tctgaaaatctgatcaatat

SEQ ID NO: 229856 - DNA, 20 bp, Artificial Sequence
  Description of Artificial Sequence: Synthetic oligonucleotide
  Target: LAMA2; (-) strand; PAM type: YTN; PAM sequence: TTT
ttctgaaaatctgatcaata

SEQ ID NO: 229857 - DNA, 20 bp, Artificial Sequence
  Description of Artificial Sequence: Synthetic oligonucleotide
  Target: LAMA2; (-) strand; PAM type: YTN; PAM sequence: TTG
caggtttttctgaaaatctg

SEQ ID NO: 229858 - DNA, 20 bp, Artificial Sequence
  Description of Artificial Sequence: Synthetic oligonucleotide
  Target: LAMA2; (-) strand; PAM type: YTN; PAM sequence: TTT
gcaggtttttctgaaaatct

SEQ ID NO: 229859 - DNA, 20 bp, Artificial Sequence
  Description of Artificial Sequence: Synthetic oligonucleotide
  Target: LAMA2; (-) strand; PAM type: YTN; PAM sequence: TTG
tttgcaggtttttctgaaaa

SEQ ID NO: 229860 - DNA, 20 bp, Artificial Sequence
  Description of Artificial Sequence: Synthetic oligonucleotide
  Target: LAMA2; (-) strand; PAM type: YTN; PAM sequence: TTT
gtttgcaggtttttctgaaa

SEQ ID NO: 229861 - DNA, 20 bp, Artificial Sequence
  Description of Artificial Sequence: Synthetic oligonucleotide
  Target: LAMA2; (-) strand; PAM type: YTN; PAM sequence: CTA
gtatgtggtggggtttgttt

SEQ ID NO: 229862 - DNA, 20 bp, Artificial Sequence
  Description of Artificial Sequence: Synthetic oligonucleotide
  Target: LAMA2; (-) strand; PAM type: YTN; PAM sequence: CTA
gtgctagtatgtggtggggt

SEQ ID NO: 229863 - DNA, 20 bp, Artificial Sequence
  Description of Artificial Sequence: Synthetic oligonucleotide
  Target: LAMA2; (-) strand; PAM type: YTN; PAM sequence: CTA
tgactagtgctagtatgtgg

SEQ ID NO: 229864 - DNA, 20 bp, Artificial Sequence
  Description of Artificial Sequence: Synthetic oligonucleotide
  Target: LAMA2; (-) strand; PAM type: YTN; PAM sequence: CTC
agtcctatgactagtgctag

SEQ ID NO: 229865 - DNA, 20 bp, Artificial Sequence
  Description of Artificial Sequence: Synthetic oligonucleotide
  Target: LAMA2; (-) strand; PAM type: YTN; PAM sequence: TTG
acaaatctcagtcctatgac

SEQ ID NO: 229866 - DNA, 20 bp, Artificial Sequence
  Description of Artificial Sequence: Synthetic oligonucleotide
  Target: LAMA2; (-) strand; PAM type: YTN; PAM sequence: TTT
gacaaatctcagtcctatga

SEQ ID NO: 229867 - DNA, 20 bp, Artificial Sequence
  Description of Artificial Sequence: Synthetic oligonucleotide
  Target: LAMA2; (-) strand; PAM type: YTN; PAM sequence: CTT
tgacaaatctcagtcctatg

SEQ ID NO: 229868 - DNA, 20 bp, Artificial Sequence
  Description of Artificial Sequence: Synthetic oligonucleotide
  Target: LAMA2; (-) strand; PAM type: YTN; PAM sequence: CTA
gctttgacaaatctcagtcc

SEQ ID NO: 229869 - DNA, 20 bp, Artificial Sequence
  Description of Artificial Sequence: Synthetic oligonucleotide
  Target: LAMA2; (-) strand; PAM type: YTN; PAM sequence: TTC
acagtgaaccagagtgcacc

SEQ ID NO: 229870 - DNA, 20 bp, Artificial Sequence
  Description of Artificial Sequence: Synthetic oligonucleotide
  Target: LAMA2; (-) strand; PAM type: YTN; PAM sequence: TTA
tattcacagtgaaccagagt

SEQ ID NO: 229871 - DNA, 20 bp, Artificial Sequence
  Description of Artificial Sequence: Synthetic oligonucleotide
  Target: LAMA2; (-) strand; PAM type: YTN; PAM sequence: CTT
atattcacagtgaaccagag

SEQ ID NO: 229872 - DNA, 20 bp, Artificial Sequence
  Description of Artificial Sequence: Synthetic oligonucleotide
  Target: LAMA2; (-) strand; PAM type: YTN; PAM sequence: CTA
tggcccacttatattcacag

SEQ ID NO: 229873 - DNA, 20 bp, Artificial Sequence
  Description of Artificial Sequence: Synthetic oligonucleotide
  Target: LAMA2; (-) strand; PAM type: YTN; PAM sequence: CTC
tatggcccacttatattcac

SEQ ID NO: 229874 - DNA, 20 bp, Artificial Sequence
  Description of Artificial Sequence: Synthetic oligonucleotide
  Target: LAMA2; (-) strand; PAM type: YTN; PAM sequence: CTA
gggccagagaccacaatggt

SEQ ID NO: 229875 - DNA, 20 bp, Artificial Sequence
  Description of Artificial Sequence: Synthetic oligonucleotide
  Target: LAMA2; (-) strand; PAM type: YTN; PAM sequence: CTC
catggcctagggccagagac

SEQ ID NO: 229876 - DNA, 20 bp, Artificial Sequence
  Description of Artificial Sequence: Synthetic oligonucleotide
  Target: LAMA2; (-) strand; PAM type: YTN; PAM sequence: CTC
actccatggcctagggccag

SEQ ID NO: 229877 - DNA, 20 bp, Artificial Sequence
  Description of Artificial Sequence: Synthetic oligonucleotide
  Target: LAMA2; (-) strand; PAM type: YTN; PAM sequence: TTA
tctcactccatggcctaggg

SEQ ID NO: 229878 - DNA, 20 bp, Artificial Sequence
  Description of Artificial Sequence: Synthetic oligonucleotide
  Target: LAMA2; (-) strand; PAM type: YTN; PAM sequence: CTC
aattatctcactccatggcc

SEQ ID NO: 229879 - DNA, 20 bp, Artificial Sequence
  Description of Artificial Sequence: Synthetic oligonucleotide
  Target: LAMA2; (-) strand; PAM type: YTN; PAM sequence: TTG
tctcaattatctcactccat

SEQ ID NO: 229880 - DNA, 20 bp, Artificial Sequence
  Description of Artificial Sequence: Synthetic oligonucleotide
  Target: LAMA2; (-) strand; PAM type: YTN; PAM sequence: CTT
gtctcaattatctcactcca

SEQ ID NO: 229881 - DNA, 20 bp, Artificial Sequence
  Description of Artificial Sequence: Synthetic oligonucleotide
  Target: LAMA2; (-) strand; PAM type: YTN; PAM sequence: CTC
ttgtctcaattatctcactc

SEQ ID NO: 229882 - DNA, 20 bp, Artificial Sequence
  Description of Artificial Sequence: Synthetic oligonucleotide
  Target: LAMA2; (-) strand; PAM type: YTN; PAM sequence: TTC
tcttgtctcaattatctcac

SEQ ID NO: 229883 - DNA, 20 bp, Artificial Sequence
  Description of Artificial Sequence: Synthetic oligonucleotide
  Target: LAMA2; (-) strand; PAM type: YTN; PAM sequence: CTT
ctcttgtctcaattatctca

SEQ ID NO: 229884 - DNA, 20 bp, Artificial Sequence
  Description of Artificial Sequence: Synthetic oligonucleotide
  Target: LAMA2; (-) strand; PAM type: YTN; PAM sequence: TTA
tgtggagagatgatatacag

SEQ ID NO: 229885 - DNA, 20 bp, Artificial Sequence
  Description of Artificial Sequence: Synthetic oligonucleotide
  Target: LAMA2; (-) strand; PAM type: YTN; PAM sequence: CTT
atgtggagagatgatataca

SEQ ID NO: 229886 - DNA, 20 bp, Artificial Sequence
  Description of Artificial Sequence: Synthetic oligonucleotide
  Target: LAMA2; (-) strand; PAM type: YTN; PAM sequence: TTG
cttatgtggagagatgatat

SEQ ID NO: 229887 - DNA, 20 bp, Artificial Sequence
  Description of Artificial Sequence: Synthetic oligonucleotide
  Target: LAMA2; (-) strand; PAM type: YTN; PAM sequence: CTA
ttgcttatgtggagagatga

SEQ ID NO: 229888 - DNA, 20 bp, Artificial Sequence
  Description of Artificial Sequence: Synthetic oligonucleotide
  Target: LAMA2; (-) strand; PAM type: YTN; PAM sequence: CTC
tattgcttatgtggagagat

SEQ ID NO: 229889 - DNA, 20 bp, Artificial Sequence
  Description of Artificial Sequence: Synthetic oligonucleotide
  Target: LAMA2; (-) strand; PAM type: YTN; PAM sequence: TTA
caggcagcccaatcagctct

SEQ ID NO: 229890 - DNA, 20 bp, Artificial Sequence
  Description of Artificial Sequence: Synthetic oligonucleotide
  Target: LAMA2; (-) strand; PAM type: YTN; PAM sequence: TTT
acaggcagcccaatcagctc

SEQ ID NO: 229891 - DNA, 20 bp, Artificial Sequence
  Description of Artificial Sequence: Synthetic oligonucleotide
  Target: LAMA2; (-) strand; PAM type: YTN; PAM sequence: TTG
tttacaggcagcccaatcag

SEQ ID NO: 229892 - DNA, 20 bp, Artificial Sequence
  Description of Artificial Sequence: Synthetic oligonucleotide
  Target: LAMA2; (-) strand; PAM type: YTN; PAM sequence: CTT
gtttacaggcagcccaatca

SEQ ID NO: 229893 - DNA, 20 bp, Artificial Sequence
  Description of Artificial Sequence: Synthetic oligonucleotide
  Target: LAMA2; (-) strand; PAM type: YTN; PAM sequence: CTA
aaatcttgtttacaggcagc

SEQ ID NO: 229894 - DNA, 20 bp, Artificial Sequence
  Description of Artificial Sequence: Synthetic oligonucleotide
  Target: LAMA2; (-) strand; PAM type: YTN; PAM sequence: CTC
taaaatcttgtttacaggca

SEQ ID NO: 229895 - DNA, 20 bp, Artificial Sequence
  Description of Artificial Sequence: Synthetic oligonucleotide
  Target: LAMA2; (-) strand; PAM type: YTN; PAM sequence: TTA
agaaaaagaaaagtgagtct

SEQ ID NO: 229896 - DNA, 20 bp, Artificial Sequence
  Description of Artificial Sequence: Synthetic oligonucleotide
  Target: LAMA2; (-) strand; PAM type: YTN; PAM sequence: TTT
aagaaaaagaaaagtgagtc

SEQ ID NO: 229897 - DNA, 20 bp, Artificial Sequence
  Description of Artificial Sequence: Synthetic oligonucleotide
  Target: LAMA2; (-) strand; PAM type: YTN; PAM sequence: TTT
taagaaaaagaaaagtgagt

SEQ ID NO: 229898 - DNA, 20 bp, Artificial Sequence
  Description of Artificial Sequence: Synthetic oligonucleotide
  Target: LAMA2; (-) strand; PAM type: YTN; PAM sequence: CTT
ttaagaaaaagaaaagtgag

SEQ ID NO: 229899 - DNA, 20 bp, Artificial Sequence
  Description of Artificial Sequence: Synthetic oligonucleotide
  Target: LAMA2; (-) strand; PAM type: YTN; PAM sequence: CTA
agtgtggcagtcttttaaga

SEQ ID NO: 229900 - DNA, 20 bp, Artificial Sequence
  Description of Artificial Sequence: Synthetic oligonucleotide
  Target: LAMA2; (-) strand; PAM type: YTN; PAM sequence: TTC
catatcagatggctaagtgt

SEQ ID NO: 229901 - DNA, 20 bp, Artificial Sequence
  Description of Artificial Sequence: Synthetic oligonucleotide
  Target: LAMA2; (-) strand; PAM type: YTN; PAM sequence: TTA
agaggagatgccattccata

SEQ ID NO: 229902 - DNA, 20 bp, Artificial Sequence
  Description of Artificial Sequence: Synthetic oligonucleotide
  Target: LAMA2; (-) strand; PAM type: YTN; PAM sequence: CTC
attaagaggagatgccattc

SEQ ID NO: 229903 - DNA, 20 bp, Artificial Sequence
  Description of Artificial Sequence: Synthetic oligonucleotide
  Target: LAMA2; (-) strand; PAM type: YTN; PAM sequence: TTG
ataaggtgcaaataaagaca

SEQ ID NO: 229904 - DNA, 20 bp, Artificial Sequence
  Description of Artificial Sequence: Synthetic oligonucleotide
  Target: LAMA2; (-) strand; PAM type: YTN; PAM sequence: TTT
gataaggtgcaaataaagac

SEQ ID NO: 229905 - DNA, 20 bp, Artificial Sequence
  Description of Artificial Sequence: Synthetic oligonucleotide
  Target: LAMA2; (-) strand; PAM type: YTN; PAM sequence: CTC
ccagtttgataaggtgcaaa

SEQ ID NO: 229906 - DNA, 20 bp, Artificial Sequence
  Description of Artificial Sequence: Synthetic oligonucleotide
  Target: LAMA2; (-) strand; PAM type: YTN; PAM sequence: TTC
agtatctcccagtttgataa

SEQ ID NO: 229907 - DNA, 20 bp, Artificial Sequence
  Description of Artificial Sequence: Synthetic oligonucleotide
  Target: LAMA2; (-) strand; PAM type: YTN; PAM sequence: CTT
cagtatctcccagtttgata

SEQ ID NO: 229908 - DNA, 20 bp, Artificial Sequence
  Description of Artificial Sequence: Synthetic oligonucleotide
  Target: LAMA2; (-) strand; PAM type: YTN; PAM sequence: CTG
ccatcttcagtatctcccag

SEQ ID NO: 229909 - DNA, 20 bp, Artificial Sequence
  Description of Artificial Sequence: Synthetic oligonucleotide
  Target: LAMA2; (-) strand; PAM type: YTN; PAM sequence: CTA
tcagcatcactgccatcttc

SEQ ID NO: 229910 - DNA, 20 bp, Artificial Sequence
  Description of Artificial Sequence: Synthetic oligonucleotide
  Target: LAMA2; (-) strand; PAM type: YTN; PAM sequence: CTC
accactatcagcatcactgc

SEQ ID NO: 229911 - DNA, 20 bp, Artificial Sequence
  Description of Artificial Sequence: Synthetic oligonucleotide
  Target: LAMA2; (-) strand; PAM type: YTN; PAM sequence: TTC
catgtctcaccactatcagc

SEQ ID NO: 229912 - DNA, 20 bp, Artificial Sequence
  Description of Artificial Sequence: Synthetic oligonucleotide
  Target: LAMA2; (-) strand; PAM type: YTN; PAM sequence: CTT
ccatgtctcaccactatcag

SEQ ID NO: 229913 - DNA, 20 bp, Artificial Sequence
  Description of Artificial Sequence: Synthetic oligonucleotide
  Target: LAMA2; (-) strand; PAM type: YTN; PAM sequence: CTA
catcttccatgtctcaccac

SEQ ID NO: 229914 - DNA, 20 bp, Artificial Sequence
  Description of Artificial Sequence: Synthetic oligonucleotide
  Target: LAMA2; (-) strand; PAM type: YTN; PAM sequence: CTC
tacatcttccatgtctcacc

SEQ ID NO: 229915 - DNA, 20 bp, Artificial Sequence
  Description of Artificial Sequence: Synthetic oligonucleotide
  Target: LAMA2; (-) strand; PAM type: YTN; PAM sequence: TTC
ctctacatcttccatgtctc

SEQ ID NO: 229916 - DNA, 20 bp, Artificial Sequence
  Description of Artificial Sequence: Synthetic oligonucleotide
  Target: LAMA2; (-) strand; PAM type: YTN; PAM sequence: TTT
cctctacatcttccatgtct

SEQ ID NO: 229917 - DNA, 20 bp, Artificial Sequence
  Description of Artificial Sequence: Synthetic oligonucleotide
  Target: LAMA2; (-) strand; PAM type: YTN; PAM sequence: TTG
taggtttcctctacatcttc

SEQ ID NO: 229918 - DNA, 20 bp, Artificial Sequence
  Description of Artificial Sequence: Synthetic oligonucleotide
  Target: LAMA2; (-) strand; PAM type: YTN; PAM sequence: TTT
gtaggtttcctctacatctt

SEQ ID NO: 229919 - DNA, 20 bp, Artificial Sequence
  Description of Artificial Sequence: Synthetic oligonucleotide
  Target: LAMA2; (-) strand; PAM type: YTN; PAM sequence: CTT
tgtaggtttcctctacatct

SEQ ID NO: 229920 - DNA, 20 bp, Artificial Sequence
  Description of Artificial Sequence: Synthetic oligonucleotide
  Target: LAMA2; (-) strand; PAM type: YTN; PAM sequence: TTC
tttgtaggtttcctctacat

SEQ ID NO: 229921 - DNA, 20 bp, Artificial Sequence
  Description of Artificial Sequence: Synthetic oligonucleotide
  Target: LAMA2; (-) strand; PAM type: YTN; PAM sequence: CTT
ctttgtaggtttcctctaca

SEQ ID NO: 229922 - DNA, 20 bp, Artificial Sequence
  Description of Artificial Sequence: Synthetic oligonucleotide
  Target: LAMA2; (-) strand; PAM type: YTN; PAM sequence: CTC
aggcttctttgtaggtttcc

SEQ ID NO: 229923 - DNA, 20 bp, Artificial Sequence
  Description of Artificial Sequence: Synthetic oligonucleotide
  Target: LAMA2; (-) strand; PAM type: YTN; PAM sequence: CTA
tctcaggcttctttgtaggt

SEQ ID NO: 229924 - DNA, 20 bp, Artificial Sequence
  Description of Artificial Sequence: Synthetic oligonucleotide
  Target: LAMA2; (-) strand; PAM type: YTN; PAM sequence: CTC
ctatctcaggcttctttgta

SEQ ID NO: 229925 - DNA, 20 bp, Artificial Sequence
  Description of Artificial Sequence: Synthetic oligonucleotide
  Target: LAMA2; (-) strand; PAM type: YTN; PAM sequence: CTC
tcctatctcaggcttctttg

SEQ ID NO: 229926 - DNA, 20 bp, Artificial Sequence
  Description of Artificial Sequence: Synthetic oligonucleotide
  Target: LAMA2; (-) strand; PAM type: YTN; PAM sequence: TTC
tctcctatctcaggcttctt

SEQ ID NO: 229927 - DNA, 20 bp, Artificial Sequence
  Description of Artificial Sequence: Synthetic oligonucleotide
  Target: LAMA2; (-) strand; PAM type: YTN; PAM sequence: TTT
ctctcctatctcaggcttct

SEQ ID NO: 229928 - DNA, 20 bp, Artificial Sequence
  Description of Artificial Sequence: Synthetic oligonucleotide
  Target: LAMA2; (-) strand; PAM type: YTN; PAM sequence: CTT
tctctcctatctcaggcttc

SEQ ID NO: 229929 - DNA, 20 bp, Artificial Sequence
  Description of Artificial Sequence: Synthetic oligonucleotide
  Target: LAMA2; (-) strand; PAM type: YTN; PAM sequence: TTA
ccctttctctcctatctcag

SEQ ID NO: 229930 - DNA, 20 bp, Artificial Sequence
  Description of Artificial Sequence: Synthetic oligonucleotide
  Target: LAMA2; (-) strand; PAM type: YTN; PAM sequence: CTA
aaaattaccctttctctcct

SEQ ID NO: 229931 - DNA, 20 bp, Artificial Sequence
  Description of Artificial Sequence: Synthetic oligonucleotide
  Target: LAMA2; (-) strand; PAM type: YTN; PAM sequence: TTC
taaaaattaccctttctctc

SEQ ID NO: 229932 - DNA, 20 bp, Artificial Sequence
  Description of Artificial Sequence: Synthetic oligonucleotide
  Target: LAMA2; (-) strand; PAM type: YTN; PAM sequence: CTT
ctaaaaattaccctttctct

SEQ ID NO: 229933 - DNA, 20 bp, Artificial Sequence
  Description of Artificial Sequence: Synthetic oligonucleotide
  Target: LAMA2; (-) strand; PAM type: YTN; PAM sequence: CTA
cttctaaaaattaccctttc

SEQ ID NO: 229934 - DNA, 20 bp, Artificial Sequence
  Description of Artificial Sequence: Synthetic oligonucleotide
  Target: LAMA2; (-) strand; PAM type: YTN; PAM sequence: CTC
ccaatctacttctaaaaatt

SEQ ID NO: 229935 - DNA, 20 bp, Artificial Sequence
  Description of Artificial Sequence: Synthetic oligonucleotide
  Target: LAMA2; (-) strand; PAM type: YTN; PAM sequence: TTC
tcccaatctacttctaaaaa

SEQ ID NO: 229936 - DNA, 20 bp, Artificial Sequence
  Description of Artificial Sequence: Synthetic oligonucleotide
  Target: LAMA2; (-) strand; PAM type: YTN; PAM sequence: TTG
cccagaatgcagttctccca

SEQ ID NO: 229937 - DNA, 20 bp, Artificial Sequence
  Description of Artificial Sequence: Synthetic oligonucleotide
  Target: LAMA2; (-) strand; PAM type: YTN; PAM sequence: TTA
ttgcccagaatgcagttctc

SEQ ID NO: 229938 - DNA, 20 bp, Artificial Sequence
  Description of Artificial Sequence: Synthetic oligonucleotide
  Target: LAMA2; (-) strand; PAM type: YTN; PAM sequence: TTT
attgcccagaatgcagttct

SEQ ID NO: 229939 - DNA, 20 bp, Artificial Sequence
  Description of Artificial Sequence: Synthetic oligonucleotide
  Target: LAMA2; (-) strand; PAM type: YTN; PAM sequence: CTG
taagtccagtgaatatttat

SEQ ID NO: 229940 - DNA, 20 bp, Artificial Sequence
  Description of Artificial Sequence: Synthetic oligonucleotide
  Target: LAMA2; (-) strand; PAM type: YTN; PAM sequence: TTA
aaaaaaggaatacgctgtaa

SEQ ID NO: 229941 - DNA, 20 bp, Artificial Sequence
  Description of Artificial Sequence: Synthetic oligonucleotide
  Target: LAMA2; (-) strand; PAM type: YTN; PAM sequence: CTT
aaaaaaaggaatacgctgta

SEQ ID NO: 229942 - DNA, 20 bp, Artificial Sequence
  Description of Artificial Sequence: Synthetic oligonucleotide
  Target: LAMA2; (-) strand; PAM type: YTN; PAM sequence: TTC
cttaaaaaaaggaatacgct

SEQ ID NO: 229943 - DNA, 20 bp, Artificial Sequence
  Description of Artificial Sequence: Synthetic oligonucleotide
  Target: LAMA2; (-) strand; PAM type: YTN; PAM sequence: TTG
gttccttaaaaaaaggaata

SEQ ID NO: 229944 - DNA, 20 bp, Artificial Sequence
  Description of Artificial Sequence: Synthetic oligonucleotide
  Target: LAMA2; (-) strand; PAM type: YTN; PAM sequence: CTT
ggttccttaaaaaaaggaat

SEQ ID NO: 229945 - DNA, 20 bp, Artificial Sequence
  Description of Artificial Sequence: Synthetic oligonucleotide
  Target: LAMA2; (-) strand; PAM type: YTN; PAM sequence: CTG
tgaacttggttccttaaaaa

SEQ ID NO: 229946 - DNA, 20 bp, Artificial Sequence
  Description of Artificial Sequence: Synthetic oligonucleotide
  Target: LAMA2; (-) strand; PAM type: YTN; PAM sequence: CTA
acaactgtgaacttggttcc

SEQ ID NO: 229947 - DNA, 20 bp, Artificial Sequence
  Description of Artificial Sequence: Synthetic oligonucleotide
  Target: LAMA2; (-) strand; PAM type: YTN; PAM sequence: TTC
taacaactgtgaacttggtt

SEQ ID NO: 229948 - DNA, 20 bp, Artificial Sequence
  Description of Artificial Sequence: Synthetic oligonucleotide
  Target: LAMA2; (-) strand; PAM type: YTN; PAM sequence: TTG
tagttctaacaactgtgaac

SEQ ID NO: 229949 - DNA, 20 bp, Artificial Sequence
  Description of Artificial Sequence: Synthetic oligonucleotide
  Target: LAMA2; (-) strand; PAM type: YTN; PAM sequence: CTT
gtagttctaacaactgtgaa

SEQ ID NO: 229950 - DNA, 20 bp, Artificial Sequence
  Description of Artificial Sequence: Synthetic oligonucleotide
  Target: LAMA2; (-) strand; PAM type: YTN; PAM sequence: CTC
ttgtagttctaacaactgtg

SEQ ID NO: 229951 - DNA, 20 bp, Artificial Sequence
  Description of Artificial Sequence: Synthetic oligonucleotide
  Target: LAMA2; (-) strand; PAM type: YTN; PAM sequence: TTG
tgctcttgtagttctaacaa

SEQ ID NO: 229952 - DNA, 20 bp, Artificial Sequence
  Description of Artificial Sequence: Synthetic oligonucleotide
  Target: LAMA2; (-) strand; PAM type: YTN; PAM sequence: TTA
tgtaatgttgtgctcttgta

SEQ ID NO: 229953 - DNA, 20 bp, Artificial Sequence
  Description of Artificial Sequence: Synthetic oligonucleotide
  Target: LAMA2; (-) strand; PAM type: YTN; PAM sequence: TTG
atgtcatgattatgtaatgt

SEQ ID NO: 229954 - DNA, 20 bp, Artificial Sequence
  Description of Artificial Sequence: Synthetic oligonucleotide
  Target: LAMA2; (-) strand; PAM type: YTN; PAM sequence: TTT
gatgtcatgattatgtaatg

SEQ ID NO: 229955 - DNA, 20 bp, Artificial Sequence
  Description of Artificial Sequence: Synthetic oligonucleotide
  Target: LAMA2; (-) strand; PAM type: YTN; PAM sequence: TTA
tttgatgtcatgattatgta

SEQ ID NO: 229956 - DNA, 20 bp, Artificial Sequence
  Description of Artificial Sequence: Synthetic oligonucleotide
  Target: LAMA2; (-) strand; PAM type: YTN; PAM sequence: CTT
atttgatgtcatgattatgt

SEQ ID NO: 229957 - DNA, 20 bp, Artificial Sequence
  Description of Artificial Sequence: Synthetic oligonucleotide
  Target: LAMA2; (-) strand; PAM type: YTN; PAM sequence: TTA
tgcttatttgatgtcatgat

SEQ ID NO: 229958 - DNA, 20 bp, Artificial Sequence
  Description of Artificial Sequence: Synthetic oligonucleotide
  Target: LAMA2; (-) strand; PAM type: YTN; PAM sequence: TTT
atgcttatttgatgtcatga

SEQ ID NO: 229959 - DNA, 20 bp, Artificial Sequence
  Description of Artificial Sequence: Synthetic oligonucleotide
  Target: LAMA2; (-) strand; PAM type: YTN; PAM sequence: TTT
tatgcttatttgatgtcatg

SEQ ID NO: 229960 - DNA, 20 bp, Artificial Sequence
  Description of Artificial Sequence: Synthetic oligonucleotide
  Target: LAMA2; (-) strand; PAM type: YTN; PAM sequence: TTT
ttatgcttatttgatgtcat

SEQ ID NO: 229961 - DNA, 20 bp, Artificial Sequence
  Description of Artificial Sequence: Synthetic oligonucleotide
  Target: LAMA2; (-) strand; PAM type: YTN; PAM sequence: TTA
tttttatgcttatttgatgt

SEQ ID NO: 229962 - DNA, 20 bp, Artificial Sequence
  Description of Artificial Sequence: Synthetic oligonucleotide
  Target: LAMA2; (-) strand; PAM type: YTN; PAM sequence: TTA
aaaataagcattatttttat

SEQ ID NO: 229963 - DNA, 20 bp, Artificial Sequence
  Description of Artificial Sequence: Synthetic oligonucleotide
  Target: LAMA2; (-) strand; PAM type: YTN; PAM sequence: CTG
taaaaattaaaaataagcat

SEQ ID NO: 229964 - DNA, 20 bp, Artificial Sequence
  Description of Artificial Sequence: Synthetic oligonucleotide
  Target: LAMA2; (-) strand; PAM type: YTN; PAM sequence: TTA
taaaatggcacctgtaaaaa

SEQ ID NO: 229965 - DNA, 20 bp, Artificial Sequence
  Description of Artificial Sequence: Synthetic oligonucleotide
  Target: LAMA2; (-) strand; PAM type: YTN; PAM sequence: TTT
ataaaatggcacctgtaaaa

SEQ ID NO: 229966 - DNA, 20 bp, Artificial Sequence
  Description of Artificial Sequence: Synthetic oligonucleotide
  Target: LAMA2; (-) strand; PAM type: YTN; PAM sequence: TTA
tagagatagtttataaaatg

SEQ ID NO: 229967 - DNA, 20 bp, Artificial Sequence
  Description of Artificial Sequence: Synthetic oligonucleotide
  Target: LAMA2; (-) strand; PAM type: YTN; PAM sequence: TTT
atagagatagtttataaaat

SEQ ID NO: 229968 - DNA, 20 bp, Artificial Sequence
  Description of Artificial Sequence: Synthetic oligonucleotide
  Target: LAMA2; (-) strand; PAM type: YTN; PAM sequence: CTT
tatagagatagtttataaaa

SEQ ID NO: 229969 - DNA, 20 bp, Artificial Sequence
  Description of Artificial Sequence: Synthetic oligonucleotide
  Target: LAMA2; (-) strand; PAM type: YTN; PAM sequence: CTC
tttatagagatagtttataa

SEQ ID NO: 229970 - DNA, 20 bp, Artificial Sequence
  Description of Artificial Sequence: Synthetic oligonucleotide
  Target: LAMA2; (-) strand; PAM type: YTN; PAM sequence: TTA
atctctttatagagatagtt

SEQ ID NO: 229971 - DNA, 20 bp, Artificial Sequence
  Description of Artificial Sequence: Synthetic oligonucleotide
  Target: LAMA2; (-) strand; PAM type: YTN; PAM sequence: CTA
acattaatctctttatagag

SEQ ID NO: 229972 - DNA, 20 bp, Artificial Sequence
  Description of Artificial Sequence: Synthetic oligonucleotide
  Target: LAMA2; (-) strand; PAM type: YTN; PAM sequence: TTC
caaaacaagaagctaacatt

SEQ ID NO: 229973 - DNA, 20 bp, Artificial Sequence
  Description of Artificial Sequence: Synthetic oligonucleotide
  Target: LAMA2; (-) strand; PAM type: YTN; PAM sequence: TTT
ccaaaacaagaagctaacat

SEQ ID NO: 229974 - DNA, 20 bp, Artificial Sequence
  Description of Artificial Sequence: Synthetic oligonucleotide
  Target: LAMA2; (-) strand; PAM type: YTN; PAM sequence: TTA
tttccaaaacaagaagctaa

SEQ ID NO: 229975 - DNA, 20 bp, Artificial Sequence
  Description of Artificial Sequence: Synthetic oligonucleotide
  Target: LAMA2; (-) strand; PAM type: YTN; PAM sequence: CTT
atttccaaaacaagaagcta

SEQ ID NO: 229976 - DNA, 20 bp, Artificial Sequence
  Description of Artificial Sequence: Synthetic oligonucleotide
  Target: LAMA2; (-) strand; PAM type: YTN; PAM sequence: TTA
tcttatttccaaaacaagaa

SEQ ID NO: 229977 - DNA, 20 bp, Artificial Sequence
  Description of Artificial Sequence: Synthetic oligonucleotide
  Target: LAMA2; (-) strand; PAM type: YTN; PAM sequence: CTC
ccattatcttatttccaaaa

SEQ ID NO: 229978 - DNA, 20 bp, Artificial Sequence
  Description of Artificial Sequence: Synthetic oligonucleotide
  Target: LAMA2; (-) strand; PAM type: YTN; PAM sequence: TTC
cctcccattatcttatttcc

SEQ ID NO: 229979 - DNA, 20 bp, Artificial Sequence
  Description of Artificial Sequence: Synthetic oligonucleotide
  Target: LAMA2; (-) strand; PAM type: YTN; PAM sequence: CTT
ccctcccattatcttatttc

SEQ ID NO: 229980 - DNA, 20 bp, Artificial Sequence
  Description of Artificial Sequence: Synthetic oligonucleotide
  Target: LAMA2; (-) strand; PAM type: YTN; PAM sequence: TTA
tccttccctcccattatctt

SEQ ID NO: 229981 - DNA, 20 bp, Artificial Sequence
  Description of Artificial Sequence: Synthetic oligonucleotide
  Target: LAMA2; (-) strand; PAM type: YTN; PAM sequence: TTT
atccttccctcccattatct

SEQ ID NO: 229982 - DNA, 20 bp, Artificial Sequence
  Description of Artificial Sequence: Synthetic oligonucleotide
  Target: LAMA2; (-) strand; PAM type: YTN; PAM sequence: TTC
atttatccttccctcccatt

SEQ ID NO: 229983 - DNA, 20 bp, Artificial Sequence
  Description of Artificial Sequence: Synthetic oligonucleotide
  Target: LAMA2; (-) strand; PAM type: YTN; PAM sequence: TTT
catttatccttccctcccat

SEQ ID NO: 229984 - DNA, 20 bp, Artificial Sequence
  Description of Artificial Sequence: Synthetic oligonucleotide
  Target: LAMA2; (-) strand; PAM type: YTN; PAM sequence: CTG
tttcatttatccttccctcc

SEQ ID NO: 229985 - DNA, 20 bp, Artificial Sequence
  Description of Artificial Sequence: Synthetic oligonucleotide
  Target: LAMA2; (-) strand; PAM type: YTN; PAM sequence: CTC
acaatgagagatggcaacaa

SEQ ID NO: 229986 - DNA, 20 bp, Artificial Sequence
  Description of Artificial Sequence: Synthetic oligonucleotide
  Target: LAMA2; (-) strand; PAM type: YTN; PAM sequence: CTG
gctcacaatgagagatggca

SEQ ID NO: 229987 - DNA, 20 bp, Artificial Sequence
  Description of Artificial Sequence: Synthetic oligonucleotide
  Target: LAMA2; (-) strand; PAM type: YTN; PAM sequence: CTA
aactggctcacaatgagaga

SEQ ID NO: 229988 - DNA, 20 bp, Artificial Sequence
  Description of Artificial Sequence: Synthetic oligonucleotide
  Target: LAMA2; (-) strand; PAM type: YTN; PAM sequence: TTC
taaactggctcacaatgaga

SEQ ID NO: 229989 - DNA, 20 bp, Artificial Sequence
  Description of Artificial Sequence: Synthetic oligonucleotide
  Target: LAMA2; (-) strand; PAM type: YTN; PAM sequence: TTT
ctaaactggctcacaatgag

SEQ ID NO: 229990 - DNA, 20 bp, Artificial Sequence
  Description of Artificial Sequence: Synthetic oligonucleotide
  Target: LAMA2; (-) strand; PAM type: YTN; PAM sequence: TTC
atttctaaactggctcacaa

SEQ ID NO: 229991 - DNA, 20 bp, Artificial Sequence
  Description of Artificial Sequence: Synthetic oligonucleotide
  Target: LAMA2; (-) strand; PAM type: YTN; PAM sequence: TTT
catttctaaactggctcaca

SEQ ID NO: 229992 - DNA, 20 bp, Artificial Sequence
  Description of Artificial Sequence: Synthetic oligonucleotide
  Target: LAMA2; (-) strand; PAM type: YTN; PAM sequence: TTT
tcatttctaaactggctcac

SEQ ID NO: 229993 - DNA, 20 bp, Artificial Sequence
  Description of Artificial Sequence: Synthetic oligonucleotide
  Target: LAMA2; (-) strand; PAM type: YTN; PAM sequence: TTG
ttttcatttctaaactggct

SEQ ID NO: 229994 - DNA, 20 bp, Artificial Sequence
  Description of Artificial Sequence: Synthetic oligonucleotide
  Target: LAMA2; (-) strand; PAM type: YTN; PAM sequence: TTT
gttttcatttctaaactggc

SEQ ID NO: 229995 - DNA, 20 bp, Artificial Sequence
  Description of Artificial Sequence: Synthetic oligonucleotide
  Target: LAMA2; (-) strand; PAM type: YTN; PAM sequence: TTG
tttgttttcatttctaaact

SEQ ID NO: 229996 - DNA, 20 bp, Artificial Sequence
  Description of Artificial Sequence: Synthetic oligonucleotide
  Target: LAMA2; (-) strand; PAM type: YTN; PAM sequence: TTT
gtttgttttcatttctaaac

SEQ ID NO: 229997 - DNA, 20 bp, Artificial Sequence
  Description of Artificial Sequence: Synthetic oligonucleotide
  Target: LAMA2; (-) strand; PAM type: YTN; PAM sequence: TTG
tttgtttgttttcatttcta

SEQ ID NO: 229998 - DNA, 20 bp, Artificial Sequence
  Description of Artificial Sequence: Synthetic oligonucleotide
  Target: LAMA2; (-) strand; PAM type: YTN; PAM sequence: TTT
gtttgtttgttttcatttct

SEQ ID NO: 229999 - DNA, 20 bp, Artificial Sequence
  Description of Artificial Sequence: Synthetic oligonucleotide
  Target: LAMA2; (-) strand; PAM type: YTN; PAM sequence: TTT
tgtttgtttgttttcatttc

SEQ ID NO: 230000 - DNA, 20 bp, Artificial Sequence
  Description of Artificial Sequence: Synthetic oligonucleotide
  Target: LAMA2; (-) strand; PAM type: YTN; PAM sequence: TTG
ttttgtttgtttgttttcat

SEQ ID NO: 230001 - DNA, 20 bp, Artificial Sequence
  Description of Artificial Sequence: Synthetic oligonucleotide
  Target: LAMA2; (-) strand; PAM type: YTN; PAM sequence: TTA
agagttgttttgtttgtttg

SEQ ID NO: 230002 - DNA, 20 bp, Artificial Sequence
  Description of Artificial Sequence: Synthetic oligonucleotide
  Target: LAMA2; (-) strand; PAM type: YTN; PAM sequence: CTT
aagagttgttttgtttgttt

SEQ ID NO: 230003 - DNA, 20 bp, Artificial Sequence
  Description of Artificial Sequence: Synthetic oligonucleotide
  Target: LAMA2; (-) strand; PAM type: YTN; PAM sequence: TTG
ggcttaagagttgttttgtt

SEQ ID NO: 230004 - DNA, 20 bp, Artificial Sequence
  Description of Artificial Sequence: Synthetic oligonucleotide
  Target: LAMA2; (-) strand; PAM type: YTN; PAM sequence: CTG
ttgggcttaagagttgtttt

SEQ ID NO: 230005 - DNA, 20 bp, Artificial Sequence
  Description of Artificial Sequence: Synthetic oligonucleotide
  Target: LAMA2; (-) strand; PAM type: YTN; PAM sequence: TTG
ctgttgggcttaagagttgt

SEQ ID NO: 230006 - DNA, 20 bp, Artificial Sequence
  Description of Artificial Sequence: Synthetic oligonucleotide
  Target: LAMA2; (-) strand; PAM type: YTN; PAM sequence: TTA
taatgaatgttgctgttggg

SEQ ID NO: 230007 - DNA, 20 bp, Artificial Sequence
  Description of Artificial Sequence: Synthetic oligonucleotide
  Target: LAMA2; (-) strand; PAM type: YTN; PAM sequence: TTA
ggaaaattataatgaatgtt

SEQ ID NO: 230008 - DNA, 20 bp, Artificial Sequence
  Description of Artificial Sequence: Synthetic oligonucleotide
  Target: LAMA2; (-) strand; PAM type: YTN; PAM sequence: TTA
gcaaaaagaaaagggagtgt

SEQ ID NO: 230009 - DNA, 20 bp, Artificial Sequence
  Description of Artificial Sequence: Synthetic oligonucleotide
  Target: LAMA2; (-) strand; PAM type: YTN; PAM sequence: CTT
agcaaaaagaaaagggagtg

SEQ ID NO: 230010 - DNA, 20 bp, Artificial Sequence
  Description of Artificial Sequence: Synthetic oligonucleotide
  Target: LAMA2; (-) strand; PAM type: YTN; PAM sequence: TTC
ttagcaaaaagaaaagggag

SEQ ID NO: 230011 - DNA, 20 bp, Artificial Sequence
  Description of Artificial Sequence: Synthetic oligonucleotide
  Target: LAMA2; (-) strand; PAM type: YTN; PAM sequence: TTT
cttagcaaaaagaaaaggga

SEQ ID NO: 230012 - DNA, 20 bp, Artificial Sequence
  Description of Artificial Sequence: Synthetic oligonucleotide
  Target: LAMA2; (-) strand; PAM type: YTN; PAM sequence: CTT
tcttagcaaaaagaaaaggg

SEQ ID NO: 230013 - DNA, 20 bp, Artificial Sequence
  Description of Artificial Sequence: Synthetic oligonucleotide
  Target: LAMA2; (-) strand; PAM type: YTN; PAM sequence: TTC
tttcttagcaaaaagaaaag

SEQ ID NO: 230014 - DNA, 20 bp, Artificial Sequence
  Description of Artificial Sequence: Synthetic oligonucleotide
  Target: LAMA2; (-) strand; PAM type: YTN; PAM sequence: TTA
aggacaaaaatacaaccgtt

SEQ ID NO: 230015 - DNA, 20 bp, Artificial Sequence
  Description of Artificial Sequence: Synthetic oligonucleotide
  Target: LAMA2; (-) strand; PAM type: YTN; PAM sequence: CTA
ttaaggacaaaaatacaacc

SEQ ID NO: 230016 - DNA, 20 bp, Artificial Sequence
  Description of Artificial Sequence: Synthetic oligonucleotide
  Target: LAMA2; (-) strand; PAM type: YTN; PAM sequence: TTC
tattaaggacaaaaatacaa

SEQ ID NO: 230017 - DNA, 20 bp, Artificial Sequence
  Description of Artificial Sequence: Synthetic oligonucleotide
  Target: LAMA2; (-) strand; PAM type: YTN; PAM sequence: TTT
ctattaaggacaaaaataca

SEQ ID NO: 230018 - DNA, 20 bp, Artificial Sequence
  Description of Artificial Sequence: Synthetic oligonucleotide
  Target: LAMA2; (-) strand; PAM type: YTN; PAM sequence: TTT
tctattaaggacaaaaatac

SEQ ID NO: 230019 - DNA, 20 bp, Artificial Sequence
  Description of Artificial Sequence: Synthetic oligonucleotide
  Target: LAMA2; (-) strand; PAM type: YTN; PAM sequence: CTT
ttctattaaggacaaaaata

SEQ ID NO: 230020 - DNA, 20 bp, Artificial Sequence
  Description of Artificial Sequence: Synthetic oligonucleotide
  Target: LAMA2; (-) strand; PAM type: YTN; PAM sequence: TTC
ccttttctattaaggacaaa

SEQ ID NO: 230021 - DNA, 20 bp, Artificial Sequence
  Description of Artificial Sequence: Synthetic oligonucleotide
  Target: LAMA2; (-) strand; PAM type: YTN; PAM sequence: CTG
ttcccttttctattaaggac

SEQ ID NO: 230022 - DNA, 20 bp, Artificial Sequence
  Description of Artificial Sequence: Synthetic oligonucleotide
  Target: LAMA2; (-) strand; PAM type: YTN; PAM sequence: TTA
ggcactgttcccttttctat

SEQ ID NO: 230023 - DNA, 20 bp, Artificial Sequence
  Description of Artificial Sequence: Synthetic oligonucleotide
  Target: LAMA2; (-) strand; PAM type: YTN; PAM sequence: TTT
aggcactgttcccttttcta

SEQ ID NO: 230024 - DNA, 20 bp, Artificial Sequence
  Description of Artificial Sequence: Synthetic oligonucleotide
  Target: LAMA2; (-) strand; PAM type: YTN; PAM sequence: TTG
tttaggcactgttccctttt

SEQ ID NO: 230025 - DNA, 20 bp, Artificial Sequence
  Description of Artificial Sequence: Synthetic oligonucleotide
  Target: LAMA2; (-) strand; PAM type: YTN; PAM sequence: TTA
taataggttgtttaggcact

SEQ ID NO: 230026 - DNA, 20 bp, Artificial Sequence
  Description of Artificial Sequence: Synthetic oligonucleotide
  Target: LAMA2; (-) strand; PAM type: YTN; PAM sequence: TTT
ataataggttgtttaggcac

SEQ ID NO: 230027 - DNA, 20 bp, Artificial Sequence
  Description of Artificial Sequence: Synthetic oligonucleotide
  Target: LAMA2; (-) strand; PAM type: YTN; PAM sequence: TTC
ccagaagaatttataatagg

SEQ ID NO: 230028 - DNA, 20 bp, Artificial Sequence
  Description of Artificial Sequence: Synthetic oligonucleotide
  Target: LAMA2; (-) strand; PAM type: YTN; PAM sequence: TTT
cccagaagaatttataatag

SEQ ID NO: 230029 - DNA, 20 bp, Artificial Sequence
  Description of Artificial Sequence: Synthetic oligonucleotide
  Target: LAMA2; (-) strand; PAM type: YTN; PAM sequence: CTT
tcccagaagaatttataata

SEQ ID NO: 230030 - DNA, 20 bp, Artificial Sequence
  Description of Artificial Sequence: Synthetic oligonucleotide
  Target: LAMA2; (-) strand; PAM type: YTN; PAM sequence: TTG
taatatgctttcccagaaga

SEQ ID NO: 230031 - DNA, 20 bp, Artificial Sequence
  Description of Artificial Sequence: Synthetic oligonucleotide
  Target: LAMA2; (-) strand; PAM type: YTN; PAM sequence: TTT
gtaatatgctttcccagaag

SEQ ID NO: 230032 - DNA, 20 bp, Artificial Sequence
  Description of Artificial Sequence: Synthetic oligonucleotide
  Target: LAMA2; (-) strand; PAM type: YTN; PAM sequence: TTA
tttgtaatatgctttcccag

SEQ ID NO: 230033 - DNA, 20 bp, Artificial Sequence
  Description of Artificial Sequence: Synthetic oligonucleotide
  Target: LAMA2; (-) strand; PAM type: YTN; PAM sequence: TTC
aattatttgtaatatgcttt

SEQ ID NO: 230034 - DNA, 20 bp, Artificial Sequence
  Description of Artificial Sequence: Synthetic oligonucleotide
  Target: LAMA2; (-) strand; PAM type: YTN; PAM sequence: TTT
caattatttgtaatatgctt

SEQ ID NO: 230035 - DNA, 20 bp, Artificial Sequence
  Description of Artificial Sequence: Synthetic oligonucleotide
  Target: LAMA2; (-) strand; PAM type: YTN; PAM sequence: TTT
tcaattatttgtaatatgct

SEQ ID NO: 230036 - DNA, 20 bp, Artificial Sequence
  Description of Artificial Sequence: Synthetic oligonucleotide
  Target: LAMA2; (-) strand; PAM type: YTN; PAM sequence: TTG
ttttcaattatttgtaatat

SEQ ID NO: 230037 - DNA, 20 bp, Artificial Sequence
  Description of Artificial Sequence: Synthetic oligonucleotide
  Target: LAMA2; (-) strand; PAM type: YTN; PAM sequence: TTC
acagaatcagggttgttttc

SEQ ID NO: 230038 - DNA, 20 bp, Artificial Sequence
  Description of Artificial Sequence: Synthetic oligonucleotide
  Target: LAMA2; (-) strand; PAM type: YTN; PAM sequence: CTG
ccaagttcacagaatcaggg

SEQ ID NO: 230039 - DNA, 20 bp, Artificial Sequence
  Description of Artificial Sequence: Synthetic oligonucleotide
  Target: LAMA2; (-) strand; PAM type: YTN; PAM sequence: TTG
ctgccaagttcacagaatca

SEQ ID NO: 230040 - DNA, 20 bp, Artificial Sequence
  Description of Artificial Sequence: Synthetic oligonucleotide
  Target: LAMA2; (-) strand; PAM type: YTN; PAM sequence: TTT
gctgccaagttcacagaatc

SEQ ID NO: 230041 - DNA, 20 bp, Artificial Sequence
  Description of Artificial Sequence: Synthetic oligonucleotide
  Target: LAMA2; (-) strand; PAM type: YTN; PAM sequence: TTA
tacatttgctgccaagttca

SEQ ID NO: 230042 - DNA, 20 bp, Artificial Sequence
  Description of Artificial Sequence: Synthetic oligonucleotide
  Target: LAMA2; (-) strand; PAM type: YTN; PAM sequence: TTT
atacatttgctgccaagttc

SEQ ID NO: 230043 - DNA, 20 bp, Artificial Sequence
  Description of Artificial Sequence: Synthetic oligonucleotide
  Target: LAMA2; (-) strand; PAM type: YTN; PAM sequence: TTT
tatacatttgctgccaagtt

SEQ ID NO: 230044 - DNA, 20 bp, Artificial Sequence
  Description of Artificial Sequence: Synthetic oligonucleotide
  Target: LAMA2; (-) strand; PAM type: YTN; PAM sequence: CTT
ttatacatttgctgccaagt

SEQ ID NO: 230045 - DNA, 20 bp, Artificial Sequence
  Description of Artificial Sequence: Synthetic oligonucleotide
  Target: LAMA2; (-) strand; PAM type: YTN; PAM sequence: TTC
ttttatacatttgctgccaa

SEQ ID NO: 230046 - DNA, 20 bp, Artificial Sequence
  Description of Artificial Sequence: Synthetic oligonucleotide
  Target: LAMA2; (-) strand; PAM type: YTN; PAM sequence: TTT
cttttatacatttgctgcca

SEQ ID NO: 230047 - DNA, 20 bp, Artificial Sequence
  Description of Artificial Sequence: Synthetic oligonucleotide
  Target: LAMA2; (-) strand; PAM type: YTN; PAM sequence: CTT
tcttttatacatttgctgcc

SEQ ID NO: 230048 - DNA, 20 bp, Artificial Sequence
  Description of Artificial Sequence: Synthetic oligonucleotide
  Target: LAMA2; (-) strand; PAM type: YTN; PAM sequence: TTG
ctttcttttatacatttgct

SEQ ID NO: 230049 - DNA, 20 bp, Artificial Sequence
  Description of Artificial Sequence: Synthetic oligonucleotide
  Target: LAMA2; (-) strand; PAM type: YTN; PAM sequence: CTG
aattgctttcttttatacat

SEQ ID NO: 230050 - DNA, 20 bp, Artificial Sequence
  Description of Artificial Sequence: Synthetic oligonucleotide
  Target: LAMA2; (-) strand; PAM type: YTN; PAM sequence: TTA
atcaatcatccaggggccag

SEQ ID NO: 230051 - DNA, 20 bp, Artificial Sequence
  Description of Artificial Sequence: Synthetic oligonucleotide
  Target: LAMA2; (-) strand; PAM type: YTN; PAM sequence: TTT
aatcaatcatccaggggcca

SEQ ID NO: 230052 - DNA, 20 bp, Artificial Sequence
  Description of Artificial Sequence: Synthetic oligonucleotide
  Target: LAMA2; (-) strand; PAM type: YTN; PAM sequence: TTG
acaaacacagcatgaatgaa

SEQ ID NO: 230053 - DNA, 20 bp, Artificial Sequence
  Description of Artificial Sequence: Synthetic oligonucleotide
  Target: LAMA2; (-) strand; PAM type: YTN; PAM sequence: CTT
gacaaacacagcatgaatga

SEQ ID NO: 230054 - DNA, 20 bp, Artificial Sequence
  Description of Artificial Sequence: Synthetic oligonucleotide
  Target: LAMA2; (-) strand; PAM type: YTN; PAM sequence: CTC
ttgacaaacacagcatgaat

SEQ ID NO: 230055 - DNA, 20 bp, Artificial Sequence
  Description of Artificial Sequence: Synthetic oligonucleotide
  Target: LAMA2; (-) strand; PAM type: YTN; PAM sequence: TTC
ctcttgacaaacacagcatg

SEQ ID NO: 230056 - DNA, 20 bp, Artificial Sequence
  Description of Artificial Sequence: Synthetic oligonucleotide
  Target: LAMA2; (-) strand; PAM type: YTN; PAM sequence: TTT
cctcttgacaaacacagcat

SEQ ID NO: 230057 - DNA, 20 bp, Artificial Sequence
  Description of Artificial Sequence: Synthetic oligonucleotide
  Target: LAMA2; (-) strand; PAM type: YTN; PAM sequence: CTT
tcctcttgacaaacacagca

SEQ ID NO: 230058 - DNA, 20 bp, Artificial Sequence
  Description of Artificial Sequence: Synthetic oligonucleotide
  Target: LAMA2; (-) strand; PAM type: YTN; PAM sequence: CTC
tttcctcttgacaaacacag

SEQ ID NO: 230059 - DNA, 20 bp, Artificial Sequence
  Description of Artificial Sequence: Synthetic oligonucleotide
  Target: LAMA2; (-) strand; PAM type: YTN; PAM sequence: TTC
tctttcctcttgacaaacac

SEQ ID NO: 230060 - DNA, 20 bp, Artificial Sequence
  Description of Artificial Sequence: Synthetic oligonucleotide
  Target: LAMA2; (-) strand; PAM type: YTN; PAM sequence: TTT
ctctttcctcttgacaaaca

SEQ ID NO: 230061 - DNA, 20 bp, Artificial Sequence
  Description of Artificial Sequence: Synthetic oligonucleotide
  Target: LAMA2; (-) strand; PAM type: YTN; PAM sequence: TTT
tctctttcctcttgacaaac

SEQ ID NO: 230062 - DNA, 20 bp, Artificial Sequence
  Description of Artificial Sequence: Synthetic oligonucleotide
  Target: LAMA2; (-) strand; PAM type: YTN; PAM sequence: CTT
ttctctttcctcttgacaaa

SEQ ID NO: 230063 - DNA, 20 bp, Artificial Sequence
  Description of Artificial Sequence: Synthetic oligonucleotide
  Target: LAMA2; (-) strand; PAM type: YTN; PAM sequence: TTC
cttttctctttcctcttgac

SEQ ID NO: 230064 - DNA, 20 bp, Artificial Sequence
  Description of Artificial Sequence: Synthetic oligonucleotide
  Target: LAMA2; (-) strand; PAM type: YTN; PAM sequence: TTC
acaacattccttttctcttt

SEQ ID NO: 230065 - DNA, 20 bp, Artificial Sequence
  Description of Artificial Sequence: Synthetic oligonucleotide
  Target: LAMA2; (-) strand; PAM type: YTN; PAM sequence: TTT
cacaacattccttttctctt

SEQ ID NO: 230066 - DNA, 20 bp, Artificial Sequence
  Description of Artificial Sequence: Synthetic oligonucleotide
  Target: LAMA2; (-) strand; PAM type: YTN; PAM sequence: TTC
atttcacaacattccttttc

SEQ ID NO: 230067 - DNA, 20 bp, Artificial Sequence
  Description of Artificial Sequence: Synthetic oligonucleotide
  Target: LAMA2; (-) strand; PAM type: YTN; PAM sequence: CTT
catttcacaacattcctttt

SEQ ID NO: 230068 - DNA, 20 bp, Artificial Sequence
  Description of Artificial Sequence: Synthetic oligonucleotide
  Target: LAMA2; (-) strand; PAM type: YTN; PAM sequence: CTA
aagtggacttcatttcacaa

SEQ ID NO: 230069 - DNA, 20 bp, Artificial Sequence
  Description of Artificial Sequence: Synthetic oligonucleotide
  Target: LAMA2; (-) strand; PAM type: YTN; PAM sequence: TTG
tctaaagtggacttcatttc

SEQ ID NO: 230070 - DNA, 20 bp, Artificial Sequence
  Description of Artificial Sequence: Synthetic oligonucleotide
  Target: LAMA2; (-) strand; PAM type: YTN; PAM sequence: TTT
gtctaaagtggacttcattt

SEQ ID NO: 230071 - DNA, 20 bp, Artificial Sequence
  Description of Artificial Sequence: Synthetic oligonucleotide
  Target: LAMA2; (-) strand; PAM type: YTN; PAM sequence: TTA
tttgtctaaagtggacttca

SEQ ID NO: 230072 - DNA, 20 bp, Artificial Sequence
  Description of Artificial Sequence: Synthetic oligonucleotide
  Target: LAMA2; (-) strand; PAM type: YTN; PAM sequence: TTG
taagttatttgtctaaagtg

SEQ ID NO: 230073 - DNA, 20 bp, Artificial Sequence
  Description of Artificial Sequence: Synthetic oligonucleotide
  Target: LAMA2; (-) strand; PAM type: YTN; PAM sequence: TTA
ttgtaagttatttgtctaaa

SEQ ID NO: 230074 - DNA, 20 bp, Artificial Sequence
  Description of Artificial Sequence: Synthetic oligonucleotide
  Target: LAMA2; (-) strand; PAM type: YTN; PAM sequence: CTG
atcattattgtaagttattt

SEQ ID NO: 230075 - DNA, 20 bp, Artificial Sequence
  Description of Artificial Sequence: Synthetic oligonucleotide
  Target: LAMA2; (-) strand; PAM type: YTN; PAM sequence: CTG
atgagaagtcactgatcatt

SEQ ID NO: 230076 - DNA, 20 bp, Artificial Sequence
  Description of Artificial Sequence: Synthetic oligonucleotide
  Target: LAMA2; (-) strand; PAM type: YTN; PAM sequence: CTC
aagaaaaatgaataaacagc

SEQ ID NO: 230077 - DNA, 20 bp, Artificial Sequence
  Description of Artificial Sequence: Synthetic oligonucleotide
  Target: LAMA2; (-) strand; PAM type: YTN; PAM sequence: TTA
caactcaagaaaaatgaata

SEQ ID NO: 230078 - DNA, 20 bp, Artificial Sequence
  Description of Artificial Sequence: Synthetic oligonucleotide
  Target: LAMA2; (-) strand; PAM type: YTN; PAM sequence: TTA
agaaatattacaactcaaga

SEQ ID NO: 230079 - DNA, 20 bp, Artificial Sequence
  Description of Artificial Sequence: Synthetic oligonucleotide
  Target: LAMA2; (-) strand; PAM type: YTN; PAM sequence: CTA
atattaagaaatattacaac

SEQ ID NO: 230080 - DNA, 20 bp, Artificial Sequence
  Description of Artificial Sequence: Synthetic oligonucleotide
  Target: LAMA2; (-) strand; PAM type: YTN; PAM sequence: CTG
tcgggtccatgcaggatagc

SEQ ID NO: 230081 - DNA, 20 bp, Artificial Sequence
  Description of Artificial Sequence: Synthetic oligonucleotide
  Target: LAMA2; (-) strand; PAM type: YTN; PAM sequence: TTC
tgtcgggtccatgcaggata

SEQ ID NO: 230082 - DNA, 20 bp, Artificial Sequence
  Description of Artificial Sequence: Synthetic oligonucleotide
  Target: LAMA2; (-) strand; PAM type: YTN; PAM sequence: TTT
ctgtcgggtccatgcaggat

SEQ ID NO: 230083 - DNA, 20 bp, Artificial Sequence
  Description of Artificial Sequence: Synthetic oligonucleotide
  Target: LAMA2; (-) strand; PAM type: YTN; PAM sequence: TTT
tctgtcgggtccatgcagga

SEQ ID NO: 230084 - DNA, 20 bp, Artificial Sequence
  Description of Artificial Sequence: Synthetic oligonucleotide
  Target: LAMA2; (-) strand; PAM type: YTN; PAM sequence: TTA
ttttctgtcgggtccatgca

SEQ ID NO: 230085 - DNA, 20 bp, Artificial Sequence
  Description of Artificial Sequence: Synthetic oligonucleotide
  Target: LAMA2; (-) strand; PAM type: YTN; PAM sequence: CTT
attttctgtcgggtccatgc

SEQ ID NO: 230086 - DNA, 20 bp, Artificial Sequence
  Description of Artificial Sequence: Synthetic oligonucleotide
  Target: LAMA2; (-) strand; PAM type: YTN; PAM sequence: CTC
aggaccttattttctgtcgg

SEQ ID NO: 230087 - DNA, 20 bp, Artificial Sequence
  Description of Artificial Sequence: Synthetic oligonucleotide
  Target: LAMA2; (-) strand; PAM type: YTN; PAM sequence: CTA
aaactcaggaccttattttc

SEQ ID NO: 230088 - DNA, 20 bp, Artificial Sequence
  Description of Artificial Sequence: Synthetic oligonucleotide
  Target: LAMA2; (-) strand; PAM type: YTN; PAM sequence: TTG
gggacaagctaaaactcagg

SEQ ID NO: 230089 - DNA, 20 bp, Artificial Sequence
  Description of Artificial Sequence: Synthetic oligonucleotide
  Target: LAMA2; (-) strand; PAM type: YTN; PAM sequence: CTG
gcagggagttggggacaagc

SEQ ID NO: 230090 - DNA, 20 bp, Artificial Sequence
  Description of Artificial Sequence: Synthetic oligonucleotide
  Target: LAMA2; (-) strand; PAM type: YTN; PAM sequence: TTA
gctggcagggagttggggac

SEQ ID NO: 230091 - DNA, 20 bp, Artificial Sequence
  Description of Artificial Sequence: Synthetic oligonucleotide
  Target: LAMA2; (-) strand; PAM type: YTN; PAM sequence: TTG
atggttagctggcagggagt

SEQ ID NO: 230092 - DNA, 20 bp, Artificial Sequence
  Description of Artificial Sequence: Synthetic oligonucleotide
  Target: LAMA2; (-) strand; PAM type: YTN; PAM sequence: TTG
tgttgatggttagctggcag

SEQ ID NO: 230093 - DNA, 20 bp, Artificial Sequence
  Description of Artificial Sequence: Synthetic oligonucleotide
  Target: LAMA2; (-) strand; PAM type: YTN; PAM sequence: CTT
gtgttgatggttagctggca

SEQ ID NO: 230094 - DNA, 20 bp, Artificial Sequence
  Description of Artificial Sequence: Synthetic oligonucleotide
  Target: LAMA2; (-) strand; PAM type: YTN; PAM sequence: CTC
agatacagcttgtgttgatg

SEQ ID NO: 230095 - DNA, 20 bp, Artificial Sequence
  Description of Artificial Sequence: Synthetic oligonucleotide
  Target: LAMA2; (-) strand; PAM type: YTN; PAM sequence: CTC
aaagaagctcagatacagct

SEQ ID NO: 230096 - DNA, 20 bp, Artificial Sequence
  Description of Artificial Sequence: Synthetic oligonucleotide
  Target: LAMA2; (-) strand; PAM type: YTN; PAM sequence: CTG
cagggccatgccctcaaaga

SEQ ID NO: 230097 - DNA, 20 bp, Artificial Sequence
  Description of Artificial Sequence: Synthetic oligonucleotide
  Target: LAMA2; (-) strand; PAM type: YTN; PAM sequence: CTG
accacagggagctgcagggc

SEQ ID NO: 230098 - DNA, 20 bp, Artificial Sequence
  Description of Artificial Sequence: Synthetic oligonucleotide
  Target: LAMA2; (-) strand; PAM type: YTN; PAM sequence: CTA
ataactgaccacagggagct

SEQ ID NO: 230099 - DNA, 20 bp, Artificial Sequence
  Description of Artificial Sequence: Synthetic oligonucleotide
  Target: LAMA2; (-) strand; PAM type: YTN; PAM sequence: CTC
agactaataactgaccacag

SEQ ID NO: 230100 - DNA, 20 bp, Artificial Sequence
  Description of Artificial Sequence: Synthetic oligonucleotide
  Target: LAMA2; (-) strand; PAM type: YTN; PAM sequence: CTG
gactcagactaataactgac

SEQ ID NO: 230101 - DNA, 20 bp, Artificial Sequence
  Description of Artificial Sequence: Synthetic oligonucleotide
  Target: LAMA2; (-) strand; PAM type: YTN; PAM sequence: TTG
ctggactcagactaataact

SEQ ID NO: 230102 - DNA, 20 bp, Artificial Sequence
  Description of Artificial Sequence: Synthetic oligonucleotide
  Target: LAMA2; (-) strand; PAM type: YTN; PAM sequence: TTT
gctggactcagactaataac

SEQ ID NO: 230103 - DNA, 20 bp, Artificial Sequence
  Description of Artificial Sequence: Synthetic oligonucleotide
  Target: LAMA2; (-) strand; PAM type: YTN; PAM sequence: CTT
tgctggactcagactaataa

SEQ ID NO: 230104 - DNA, 20 bp, Artificial Sequence
  Description of Artificial Sequence: Synthetic oligonucleotide
  Target: LAMA2; (-) strand; PAM type: YTN; PAM sequence: TTC
ctttgctggactcagactaa

SEQ ID NO: 230105 - DNA, 20 bp, Artificial Sequence
  Description of Artificial Sequence: Synthetic oligonucleotide
  Target: LAMA2; (-) strand; PAM type: YTN; PAM sequence: TTG
ttcctttgctggactcagac

SEQ ID NO: 230106 - DNA, 20 bp, Artificial Sequence
  Description of Artificial Sequence: Synthetic oligonucleotide
  Target: LAMA2; (-) strand; PAM type: YTN; PAM sequence: CTT
gttcctttgctggactcaga

SEQ ID NO: 230107 - DNA, 20 bp, Artificial Sequence
  Description of Artificial Sequence: Synthetic oligonucleotide
  Target: LAMA2; (-) strand; PAM type: YTN; PAM sequence: TTC
ttgttcctttgctggactca

SEQ ID NO: 230108 - DNA, 20 bp, Artificial Sequence
  Description of Artificial Sequence: Synthetic oligonucleotide
  Target: LAMA2; (-) strand; PAM type: YTN; PAM sequence: TTA
gcaagcacacagtgttcttg

SEQ ID NO: 230109 - DNA, 20 bp, Artificial Sequence
  Description of Artificial Sequence: Synthetic oligonucleotide
  Target: LAMA2; (-) strand; PAM type: YTN; PAM sequence: TTT
agcaagcacacagtgttctt

SEQ ID NO: 230110 - DNA, 20 bp, Artificial Sequence
  Description of Artificial Sequence: Synthetic oligonucleotide
  Target: LAMA2; (-) strand; PAM type: YTN; PAM sequence: CTG
tagatttagcaagcacacag

SEQ ID NO: 230111 - DNA, 20 bp, Artificial Sequence
  Description of Artificial Sequence: Synthetic oligonucleotide
  Target: LAMA2; (-) strand; PAM type: YTN; PAM sequence: TTC
tgtagatttagcaagcacac

SEQ ID NO: 230112 - DNA, 20 bp, Artificial Sequence
  Description of Artificial Sequence: Synthetic oligonucleotide
  Target: LAMA2; (-) strand; PAM type: YTN; PAM sequence: TTT
ctgtagatttagcaagcaca

SEQ ID NO: 230113 - DNA, 20 bp, Artificial Sequence
  Description of Artificial Sequence: Synthetic oligonucleotide
  Target: LAMA2; (-) strand; PAM type: YTN; PAM sequence: TTT
tctgtagatttagcaagcac

SEQ ID NO: 230114 - DNA, 20 bp, Artificial Sequence
  Description of Artificial Sequence: Synthetic oligonucleotide
  Target: LAMA2; (-) strand; PAM type: YTN; PAM sequence: CTC
ccacacaaccagaagatgaa

SEQ ID NO: 230115 - DNA, 20 bp, Artificial Sequence
  Description of Artificial Sequence: Synthetic oligonucleotide
  Target: LAMA2; (-) strand; PAM type: YTN; PAM sequence: CTC
ctcccacacaaccagaagat

SEQ ID NO: 230116 - DNA, 20 bp, Artificial Sequence
  Description of Artificial Sequence: Synthetic oligonucleotide
  Target: LAMA2; (-) strand; PAM type: YTN; PAM sequence: CTC
tcctcccacacaaccagaag

SEQ ID NO: 230117 - DNA, 20 bp, Artificial Sequence
  Description of Artificial Sequence: Synthetic oligonucleotide
  Target: LAMA2; (-) strand; PAM type: YTN; PAM sequence: TTC
aaagaaacagagtacacaaa

SEQ ID NO: 230118 - DNA, 20 bp, Artificial Sequence
  Description of Artificial Sequence: Synthetic oligonucleotide
  Target: LAMA2; (-) strand; PAM type: YTN; PAM sequence: CTT
caaagaaacagagtacacaa

SEQ ID NO: 230119 - DNA, 20 bp, Artificial Sequence
  Description of Artificial Sequence: Synthetic oligonucleotide
  Target: LAMA2; (-) strand; PAM type: YTN; PAM sequence: TTC
cttcaaagaaacagagtaca

SEQ ID NO: 230120 - DNA, 20 bp, Artificial Sequence
  Description of Artificial Sequence: Synthetic oligonucleotide
  Target: LAMA2; (-) strand; PAM type: YTN; PAM sequence: CTA
gttccttcaaagaaacagag

SEQ ID NO: 230121 - DNA, 20 bp, Artificial Sequence
  Description of Artificial Sequence: Synthetic oligonucleotide
  Target: LAMA2; (-) strand; PAM type: YTN; PAM sequence: CTG
tacagcaccaacagatccct

SEQ ID NO: 230122 - DNA, 20 bp, Artificial Sequence
  Description of Artificial Sequence: Synthetic oligonucleotide
  Target: LAMA2; (-) strand; PAM type: YTN; PAM sequence: CTC
gacatctgtacagcaccaac

SEQ ID NO: 230123 - DNA, 20 bp, Artificial Sequence
  Description of Artificial Sequence: Synthetic oligonucleotide
  Target: LAMA2; (-) strand; PAM type: YTN; PAM sequence: CTG
tgcacctcgacatctgtaca

SEQ ID NO: 230124 - DNA, 20 bp, Artificial Sequence
  Description of Artificial Sequence: Synthetic oligonucleotide
  Target: LAMA2; (-) strand; PAM type: YTN; PAM sequence: CTC
tgtgcacctcgacatctgta

SEQ ID NO: 230125 - DNA, 20 bp, Artificial Sequence
  Description of Artificial Sequence: Synthetic oligonucleotide
  Target: LAMA2; (-) strand; PAM type: YTN; PAM sequence: TTG
gctctgtgcacctcgacatc

SEQ ID NO: 230126 - DNA, 20 bp, Artificial Sequence
  Description of Artificial Sequence: Synthetic oligonucleotide
  Target: LAMA2; (-) strand; PAM type: YTN; PAM sequence: TTG
taggatgttggctctgtgca

SEQ ID NO: 230127 - DNA, 20 bp, Artificial Sequence
  Description of Artificial Sequence: Synthetic oligonucleotide
  Target: LAMA2; (-) strand; PAM type: YTN; PAM sequence: TTT
gtaggatgttggctctgtgc

SEQ ID NO: 230128 - DNA, 20 bp, Artificial Sequence
  Description of Artificial Sequence: Synthetic oligonucleotide
  Target: LAMA2; (-) strand; PAM type: YTN; PAM sequence: TTT
tgtaggatgttggctctgtg

SEQ ID NO: 230129 - DNA, 20 bp, Artificial Sequence
  Description of Artificial Sequence: Synthetic oligonucleotide
  Target: LAMA2; (-) strand; PAM type: YTN; PAM sequence: CTA
gttttgtaggatgttggctc

SEQ ID NO: 230130 - DNA, 20 bp, Artificial Sequence
  Description of Artificial Sequence: Synthetic oligonucleotide
  Target: LAMA2; (-) strand; PAM type: YTN; PAM sequence: TTA
ctagttttgtaggatgttgg

SEQ ID NO: 230131 - DNA, 20 bp, Artificial Sequence
  Description of Artificial Sequence: Synthetic oligonucleotide
  Target: LAMA2; (-) strand; PAM type: YTN; PAM sequence: TTT
actagttttgtaggatgttg

SEQ ID NO: 230132 - DNA, 20 bp, Artificial Sequence
  Description of Artificial Sequence: Synthetic oligonucleotide
  Target: LAMA2; (-) strand; PAM type: YTN; PAM sequence: CTA
tttactagttttgtaggatg

SEQ ID NO: 230133 - DNA, 20 bp, Artificial Sequence
  Description of Artificial Sequence: Synthetic oligonucleotide
  Target: LAMA2; (-) strand; PAM type: YTN; PAM sequence: CTA
atcatctatttactagtttt

SEQ ID NO: 230134 - DNA, 20 bp, Artificial Sequence
  Description of Artificial Sequence: Synthetic oligonucleotide
  Target: LAMA2; (-) strand; PAM type: YTN; PAM sequence: TTG
gatcctaatcatctatttac

SEQ ID NO: 230135 - DNA, 20 bp, Artificial Sequence
  Description of Artificial Sequence: Synthetic oligonucleotide
  Target: LAMA2; (-) strand; PAM type: YTN; PAM sequence: CTG
tacagagttggatcctaatc

SEQ ID NO: 230136 - DNA, 20 bp, Artificial Sequence
  Description of Artificial Sequence: Synthetic oligonucleotide
  Target: LAMA2; (-) strand; PAM type: YTN; PAM sequence: TTC
tgtacagagttggatcctaa

SEQ ID NO: 230137 - DNA, 20 bp, Artificial Sequence
  Description of Artificial Sequence: Synthetic oligonucleotide
  Target: LAMA2; (-) strand; PAM type: YTN; PAM sequence: TTA
ttctgtacagagttggatcc

SEQ ID NO: 230138 - DNA, 20 bp, Artificial Sequence
  Description of Artificial Sequence: Synthetic oligonucleotide
  Target: LAMA2; (-) strand; PAM type: YTN; PAM sequence: CTA
ccattattctgtacagagtt

SEQ ID NO: 230139 - DNA, 20 bp, Artificial Sequence
  Description of Artificial Sequence: Synthetic oligonucleotide
  Target: LAMA2; (-) strand; PAM type: YTN; PAM sequence: TTC
ctaccattattctgtacaga

SEQ ID NO: 230140 - DNA, 20 bp, Artificial Sequence
  Description of Artificial Sequence: Synthetic oligonucleotide
  Target: LAMA2; (-) strand; PAM type: YTN; PAM sequence: TTA
ggttcctaccattattctgt

SEQ ID NO: 230141 - DNA, 20 bp, Artificial Sequence
  Description of Artificial Sequence: Synthetic oligonucleotide
  Target: LAMA2; (-) strand; PAM type: YTN; PAM sequence: TTT
aggttcctaccattattctg

SEQ ID NO: 230142 - DNA, 20 bp, Artificial Sequence
  Description of Artificial Sequence: Synthetic oligonucleotide
  Target: LAMA2; (-) strand; PAM type: YTN; PAM sequence: TTG
atacaagtaaacagtacccc

SEQ ID NO: 230143 - DNA, 20 bp, Artificial Sequence
  Description of Artificial Sequence: Synthetic oligonucleotide
  Target: LAMA2; (-) strand; PAM type: YTN; PAM sequence: TTT
gatacaagtaaacagtaccc

SEQ ID NO: 230144 - DNA, 20 bp, Artificial Sequence
  Description of Artificial Sequence: Synthetic oligonucleotide
  Target: LAMA2; (-) strand; PAM type: YTN; PAM sequence: TTT
tgatacaagtaaacagtacc

SEQ ID NO: 230145 - DNA, 20 bp, Artificial Sequence
  Description of Artificial Sequence: Synthetic oligonucleotide
  Target: LAMA2; (-) strand; PAM type: YTN; PAM sequence: TTA
taggacaacaacaattttga

SEQ ID NO: 230146 - DNA, 20 bp, Artificial Sequence
  Description of Artificial Sequence: Synthetic oligonucleotide
  Target: LAMA2; (-) strand; PAM type: YTN; PAM sequence: CTT
ataggacaacaacaattttg

SEQ ID NO: 230147 - DNA, 20 bp, Artificial Sequence
  Description of Artificial Sequence: Synthetic oligonucleotide
  Target: LAMA2; (-) strand; PAM type: YTN; PAM sequence: TTA
catggcttataggacaacaa

SEQ ID NO: 230148 - DNA, 20 bp, Artificial Sequence
  Description of Artificial Sequence: Synthetic oligonucleotide
  Target: LAMA2; (-) strand; PAM type: YTN; PAM sequence: TTT
acatggcttataggacaaca

SEQ ID NO: 230149 - DNA, 20 bp, Artificial Sequence
  Description of Artificial Sequence: Synthetic oligonucleotide
  Target: LAMA2; (-) strand; PAM type: YTN; PAM sequence: TTT
tacatggcttataggacaac

SEQ ID NO: 230150 - DNA, 20 bp, Artificial Sequence
  Description of Artificial Sequence: Synthetic oligonucleotide
  Target: LAMA2; (-) strand; PAM type: YTN; PAM sequence: TTA
attttacatggcttatagga

SEQ ID NO: 230151 - DNA, 20 bp, Artificial Sequence
  Description of Artificial Sequence: Synthetic oligonucleotide
  Target: LAMA2; (-) strand; PAM type: YTN; PAM sequence: TTG
tagttaattttacatggctt

SEQ ID NO: 230152 - DNA, 20 bp, Artificial Sequence
  Description of Artificial Sequence: Synthetic oligonucleotide
  Target: LAMA2; (-) strand; PAM type: YTN; PAM sequence: TTT
gtagttaattttacatggct

SEQ ID NO: 230153 - DNA, 20 bp, Artificial Sequence
  Description of Artificial Sequence: Synthetic oligonucleotide
  Target: LAMA2; (-) strand; PAM type: YTN; PAM sequence: TTG
aggagatttgtagttaattt

SEQ ID NO: 230154 - DNA, 20 bp, Artificial Sequence
  Description of Artificial Sequence: Synthetic oligonucleotide
  Target: LAMA2; (-) strand; PAM type: YTN; PAM sequence: TTC
attgaggagatttgtagtta

SEQ ID NO: 230155 - DNA, 20 bp, Artificial Sequence
  Description of Artificial Sequence: Synthetic oligonucleotide
  Target: LAMA2; (-) strand; PAM type: YTN; PAM sequence: TTT
cattgaggagatttgtagtt

SEQ ID NO: 230156 - DNA, 20 bp, Artificial Sequence
  Description of Artificial Sequence: Synthetic oligonucleotide
  Target: LAMA2; (-) strand; PAM type: YTN; PAM sequence: CTA
agaaagtgtttcattgagga

SEQ ID NO: 230157 - DNA, 20 bp, Artificial Sequence
  Description of Artificial Sequence: Synthetic oligonucleotide
  Target: LAMA2; (-) strand; PAM type: YTN; PAM sequence: TTC
taagaaagtgtttcattgag

SEQ ID NO: 230158 - DNA, 20 bp, Artificial Sequence
  Description of Artificial Sequence: Synthetic oligonucleotide
  Target: LAMA2; (-) strand; PAM type: YTN; PAM sequence: TTA
aaaatatcaaagttctaaga

SEQ ID NO: 230159 - DNA, 20 bp, Artificial Sequence
  Description of Artificial Sequence: Synthetic oligonucleotide
  Target: LAMA2; (-) strand; PAM type: YTN; PAM sequence: TTT
aaaaatatcaaagttctaag

SEQ ID NO: 230160 - DNA, 20 bp, Artificial Sequence
  Description of Artificial Sequence: Synthetic oligonucleotide
  Target: LAMA2; (-) strand; PAM type: YTN; PAM sequence: TTG
tgatgtacacagatggtgag

SEQ ID NO: 230161 - DNA, 20 bp, Artificial Sequence
  Description of Artificial Sequence: Synthetic oligonucleotide
  Target: LAMA2; (-) strand; PAM type: YTN; PAM sequence: CTC
aacattgtgatgtacacaga

SEQ ID NO: 230162 - DNA, 20 bp, Artificial Sequence
  Description of Artificial Sequence: Synthetic oligonucleotide
  Target: LAMA2; (-) strand; PAM type: YTN; PAM sequence: TTG
tagctcaacattgtgatgta

SEQ ID NO: 230163 - DNA, 20 bp, Artificial Sequence
  Description of Artificial Sequence: Synthetic oligonucleotide
  Target: LAMA2; (-) strand; PAM type: YTN; PAM sequence: TTT
gtagctcaacattgtgatgt

SEQ ID NO: 230164 - DNA, 20 bp, Artificial Sequence
  Description of Artificial Sequence: Synthetic oligonucleotide
  Target: LAMA2; (-) strand; PAM type: YTN; PAM sequence: TTA
gagccaccacatttgtagct

SEQ ID NO: 230165 - DNA, 20 bp, Artificial Sequence
  Description of Artificial Sequence: Synthetic oligonucleotide
  Target: LAMA2; (-) strand; PAM type: YTN; PAM sequence: TTG
ttagagccaccacatttgta

SEQ ID NO: 230166 - DNA, 20 bp, Artificial Sequence
  Description of Artificial Sequence: Synthetic oligonucleotide
  Target: LAMA2; (-) strand; PAM type: YTN; PAM sequence: TTT
gttagagccaccacatttgt

SEQ ID NO: 230167 - DNA, 20 bp, Artificial Sequence
  Description of Artificial Sequence: Synthetic oligonucleotide
  Target: LAMA2; (-) strand; PAM type: YTN; PAM sequence: TTT
tgttagagccaccacatttg

SEQ ID NO: 230168 - DNA, 20 bp, Artificial Sequence
  Description of Artificial Sequence: Synthetic oligonucleotide
  Target: LAMA2; (-) strand; PAM type: YTN; PAM sequence: TTA
aaattttgttagagccacca

SEQ ID NO: 230169 - DNA, 20 bp, Artificial Sequence
  Description of Artificial Sequence: Synthetic oligonucleotide
  Target: LAMA2; (-) strand; PAM type: YTN; PAM sequence: CTT
aaaattttgttagagccacc

SEQ ID NO: 230170 - DNA, 20 bp, Artificial Sequence
  Description of Artificial Sequence: Synthetic oligonucleotide
  Target: LAMA2; (-) strand; PAM type: YTN; PAM sequence: TTC
atacttaaaattttgttaga

SEQ ID NO: 230171 - DNA, 20 bp, Artificial Sequence
  Description of Artificial Sequence: Synthetic oligonucleotide
  Target: LAMA2; (-) strand; PAM type: YTN; PAM sequence: CTT
catacttaaaattttgttag

SEQ ID NO: 230172 - DNA, 20 bp, Artificial Sequence
  Description of Artificial Sequence: Synthetic oligonucleotide
  Target: LAMA2; (-) strand; PAM type: YTN; PAM sequence: CTG
acttcatacttaaaattttg

SEQ ID NO: 230173 - DNA, 20 bp, Artificial Sequence
  Description of Artificial Sequence: Synthetic oligonucleotide
  Target: LAMA2; (-) strand; PAM type: YTN; PAM sequence: CTA
tacatctgacttcatactta

SEQ ID NO: 230174 - DNA, 20 bp, Artificial Sequence
  Description of Artificial Sequence: Synthetic oligonucleotide
  Target: LAMA2; (-) strand; PAM type: YTN; PAM sequence: CTC
tatacatctgacttcatact

SEQ ID NO: 230175 - DNA, 20 bp, Artificial Sequence
  Description of Artificial Sequence: Synthetic oligonucleotide
  Target: LAMA2; (-) strand; PAM type: YTN; PAM sequence: TTG
tgagaagcgggaaatgaaaa

SEQ ID NO: 230176 - DNA, 20 bp, Artificial Sequence
  Description of Artificial Sequence: Synthetic oligonucleotide
  Target: LAMA2; (-) strand; PAM type: YTN; PAM sequence: TTT
gtgagaagcgggaaatgaaa

SEQ ID NO: 230177 - DNA, 20 bp, Artificial Sequence
  Description of Artificial Sequence: Synthetic oligonucleotide
  Target: LAMA2; (-) strand; PAM type: YTN; PAM sequence: CTG
gggagtagtttgtgagaagc

SEQ ID NO: 230178 - DNA, 20 bp, Artificial Sequence
  Description of Artificial Sequence: Synthetic oligonucleotide
  Target: LAMA2; (-) strand; PAM type: YTN; PAM sequence: TTG
acatctggggagtagtttgt

SEQ ID NO: 230179 - DNA, 20 bp, Artificial Sequence
  Description of Artificial Sequence: Synthetic oligonucleotide
  Target: LAMA2; (-) strand; PAM type: YTN; PAM sequence: TTA
ttgacatctggggagtagtt

SEQ ID NO: 230180 - DNA, 20 bp, Artificial Sequence
  Description of Artificial Sequence: Synthetic oligonucleotide
  Target: LAMA2; (-) strand; PAM type: YTN; PAM sequence: TTG
tagaattattgacatctggg

SEQ ID NO: 230181 - DNA, 20 bp, Artificial Sequence
  Description of Artificial Sequence: Synthetic oligonucleotide
  Target: LAMA2; (-) strand; PAM type: YTN; PAM sequence: TTG
taggaagaggagattgtaga

SEQ ID NO: 230182 - DNA, 20 bp, Artificial Sequence
  Description of Artificial Sequence: Synthetic oligonucleotide
  Target: LAMA2; (-) strand; PAM type: YTN; PAM sequence: CTA
aggaccaacacgaaggttgt

SEQ ID NO: 230183 - DNA, 20 bp, Artificial Sequence
  Description of Artificial Sequence: Synthetic oligonucleotide
  Target: LAMA2; (-) strand; PAM type: YTN; PAM sequence: TTG
agatcagagtagacgactaa

SEQ ID NO: 230184 - DNA, 20 bp, Artificial Sequence
  Description of Artificial Sequence: Synthetic oligonucleotide
  Target: LAMA2; (-) strand; PAM type: YTN; PAM sequence: TTG
cggttgagatcagagtagac

SEQ ID NO: 230185 - DNA, 20 bp, Artificial Sequence
  Description of Artificial Sequence: Synthetic oligonucleotide
  Target: LAMA2; (-) strand; PAM type: YTN; PAM sequence: TTT
gcggttgagatcagagtaga

SEQ ID NO: 230186 - DNA, 20 bp, Artificial Sequence
  Description of Artificial Sequence: Synthetic oligonucleotide
  Target: LAMA2; (-) strand; PAM type: YTN; PAM sequence: TTT
tgcggttgagatcagagtag

SEQ ID NO: 230187 - DNA, 20 bp, Artificial Sequence
  Description of Artificial Sequence: Synthetic oligonucleotide
  Target: LAMA2; (-) strand; PAM type: YTN; PAM sequence: CTT
ttgcggttgagatcagagta

SEQ ID NO: 230188 - DNA, 20 bp, Artificial Sequence
  Description of Artificial Sequence: Synthetic oligonucleotide
  Target: LAMA2; (-) strand; PAM type: YTN; PAM sequence: CTG
acttttgcggttgagatcag

SEQ ID NO: 230189 - DNA, 20 bp, Artificial Sequence
  Description of Artificial Sequence: Synthetic oligonucleotide
  Target: LAMA2; (-) strand; PAM type: YTN; PAM sequence: CTC
atcccctgacttttgcggtt

SEQ ID NO: 230190 - DNA, 20 bp, Artificial Sequence
  Description of Artificial Sequence: Synthetic oligonucleotide
  Target: LAMA2; (-) strand; PAM type: YTN; PAM sequence: CTA
tagtctcatcccctgacttt

SEQ ID NO: 230191 - DNA, 20 bp, Artificial Sequence
  Description of Artificial Sequence: Synthetic oligonucleotide
  Target: LAMA2; (-) strand; PAM type: YTN; PAM sequence: CTG
gggatggcctatagtctcat

SEQ ID NO: 230192 - DNA, 20 bp, Artificial Sequence
  Description of Artificial Sequence: Synthetic oligonucleotide
  Target: LAMA2; (-) strand; PAM type: YTN; PAM sequence: CTC
tggggatggcctatagtctc

SEQ ID NO: 230193 - DNA, 20 bp, Artificial Sequence
  Description of Artificial Sequence: Synthetic oligonucleotide
  Target: LAMA2; (-) strand; PAM type: YTN; PAM sequence: TTG
ctctggggatggcctatagt

SEQ ID NO: 230194 - DNA, 20 bp, Artificial Sequence
  Description of Artificial Sequence: Synthetic oligonucleotide
  Target: LAMA2; (-) strand; PAM type: YTN; PAM sequence: CTG
ttgctctggggatggcctat

SEQ ID NO: 230195 - DNA, 20 bp, Artificial Sequence
  Description of Artificial Sequence: Synthetic oligonucleotide
  Target: LAMA2; (-) strand; PAM type: YTN; PAM sequence: CTG
aggctgttgctctggggatg

SEQ ID NO: 230196 - DNA, 20 bp, Artificial Sequence
  Description of Artificial Sequence: Synthetic oligonucleotide
  Target: LAMA2; (-) strand; PAM type: YTN; PAM sequence: CTG
aggtgctgaggctgttgctc

SEQ ID NO: 230197 - DNA, 20 bp, Artificial Sequence
  Description of Artificial Sequence: Synthetic oligonucleotide
  Target: LAMA2; (-) strand; PAM type: YTN; PAM sequence: CTG
tgctgaggtgctgaggctgt

SEQ ID NO: 230198 - DNA, 20 bp, Artificial Sequence
  Description of Artificial Sequence: Synthetic oligonucleotide
  Target: LAMA2; (-) strand; PAM type: YTN; PAM sequence: CTC
cagatctgtgctgaggtgct

SEQ ID NO: 230199 - DNA, 20 bp, Artificial Sequence
  Description of Artificial Sequence: Synthetic oligonucleotide
  Target: LAMA2; (-) strand; PAM type: YTN; PAM sequence: CTC
aaatcccctccagatctgtg

SEQ ID NO: 230200 - DNA, 20 bp, Artificial Sequence
  Description of Artificial Sequence: Synthetic oligonucleotide
  Target: LAMA2; (-) strand; PAM type: YTN; PAM sequence: CTA
gctcaaatcccctccagatc

SEQ ID NO: 230201 - DNA, 20 bp, Artificial Sequence
  Description of Artificial Sequence: Synthetic oligonucleotide
  Target: LAMA2; (-) strand; PAM type: YTN; PAM sequence: TTC
tagctcaaatcccctccaga

SEQ ID NO: 230202 - DNA, 20 bp, Artificial Sequence
  Description of Artificial Sequence: Synthetic oligonucleotide
  Target: LAMA2; (-) strand; PAM type: YTN; PAM sequence: TTT
ctagctcaaatcccctccag

SEQ ID NO: 230203 - DNA, 20 bp, Artificial Sequence
  Description of Artificial Sequence: Synthetic oligonucleotide
  Target: LAMA2; (-) strand; PAM type: YTN; PAM sequence: CTT
tctagctcaaatcccctcca

SEQ ID NO: 230204 - DNA, 20 bp, Artificial Sequence
  Description of Artificial Sequence: Synthetic oligonucleotide
  Target: LAMA2; (-) strand; PAM type: YTN; PAM sequence: TTC
tttctagctcaaatcccctc

SEQ ID NO: 230205 - DNA, 20 bp, Artificial Sequence
  Description of Artificial Sequence: Synthetic oligonucleotide
  Target: LAMA2; (-) strand; PAM type: YTN; PAM sequence: CTC
aaaaaaaaaaaaaaaagagt

SEQ ID NO: 230206 - DNA, 20 bp, Artificial Sequence
  Description of Artificial Sequence: Synthetic oligonucleotide
  Target: LAMA2; (-) strand; PAM type: YTN; PAM sequence: CTG
tctcaaaaaaaaaaaaaaaa

SEQ ID NO: 230207 - DNA, 20 bp, Artificial Sequence
  Description of Artificial Sequence: Synthetic oligonucleotide
  Target: LAMA2; (-) strand; PAM type: YTN; PAM sequence: CTC
tgtctcaaaaaaaaaaaaaa

SEQ ID NO: 230208 - DNA, 20 bp, Artificial Sequence
  Description of Artificial Sequence: Synthetic oligonucleotide
  Target: LAMA2; (-) strand; PAM type: YTN; PAM sequence: CTG
ggtgacagagcgagactctg

SEQ ID NO: 230209 - DNA, 20 bp, Artificial Sequence
  Description of Artificial Sequence: Synthetic oligonucleotide
  Target: LAMA2; (-) strand; PAM type: YTN; PAM sequence: CTC
cagcctgggtgacagagcga

SEQ ID NO: 230210 - DNA, 20 bp, Artificial Sequence
  Description of Artificial Sequence: Synthetic oligonucleotide
  Target: LAMA2; (-) strand; PAM type: YTN; PAM sequence: CTG
cactccagcctgggtgacag

SEQ ID NO: 230211 - DNA, 20 bp, Artificial Sequence
  Description of Artificial Sequence: Synthetic oligonucleotide
  Target: LAMA2; (-) strand; PAM type: YTN; PAM sequence: TTG
tgccactgcactccagcctg

SEQ ID NO: 230212 - DNA, 20 bp, Artificial Sequence
  Description of Artificial Sequence: Synthetic oligonucleotide
  Target: LAMA2; (-) strand; PAM type: YTN; PAM sequence: TTG
cagtgagccgagattgtgcc

SEQ ID NO: 230213 - DNA, 20 bp, Artificial Sequence
  Description of Artificial Sequence: Synthetic oligonucleotide
  Target: LAMA2; (-) strand; PAM type: YTN; PAM sequence: CTT
gcagtgagccgagattgtgc

SEQ ID NO: 230214 - DNA, 20 bp, Artificial Sequence
  Description of Artificial Sequence: Synthetic oligonucleotide
  Target: LAMA2; (-) strand; PAM type: YTN; PAM sequence: CTG
aggtgggagaatggcatgaa

SEQ ID NO: 230215 - DNA, 20 bp, Artificial Sequence
  Description of Artificial Sequence: Synthetic oligonucleotide
  Target: LAMA2; (-) strand; PAM type: YTN; PAM sequence: CTC
aggaggctgaggtgggagaa

SEQ ID NO: 230216 - DNA, 20 bp, Artificial Sequence
  Description of Artificial Sequence: Synthetic oligonucleotide
  Target: LAMA2; (-) strand; PAM type: YTN; PAM sequence: CTA
ctcaggaggctgaggtggga

SEQ ID NO: 230217 - DNA, 20 bp, Artificial Sequence
  Description of Artificial Sequence: Synthetic oligonucleotide
  Target: LAMA2; (-) strand; PAM type: YTN; PAM sequence: CTA
gctactcaggaggctgaggt

SEQ ID NO: 230218 - DNA, 20 bp, Artificial Sequence
  Description of Artificial Sequence: Synthetic oligonucleotide
  Target: LAMA2; (-) strand; PAM type: YTN; PAM sequence: CTG
tagtcctagctactcaggag

SEQ ID NO: 230219 - DNA, 20 bp, Artificial Sequence
  Description of Artificial Sequence: Synthetic oligonucleotide
  Target: LAMA2; (-) strand; PAM type: YTN; PAM sequence: TTA
gccaggcgtggtggcgggcg

SEQ ID NO: 230220 - DNA, 20 bp, Artificial Sequence
  Description of Artificial Sequence: Synthetic oligonucleotide
  Target: LAMA2; (-) strand; PAM type: YTN; PAM sequence: CTA
aaaatacaaaaaattagcca

SEQ ID NO: 230221 - DNA, 20 bp, Artificial Sequence
  Description of Artificial Sequence: Synthetic oligonucleotide
  Target: LAMA2; (-) strand; PAM type: YTN; PAM sequence: CTA
ctaaaaatacaaaaaattag

SEQ ID NO: 230222 - DNA, 20 bp, Artificial Sequence
  Description of Artificial Sequence: Synthetic oligonucleotide
  Target: LAMA2; (-) strand; PAM type: YTN; PAM sequence: CTC
tactaaaaatacaaaaaatt

SEQ ID NO: 230223 - DNA, 20 bp, Artificial Sequence
  Description of Artificial Sequence: Synthetic oligonucleotide
  Target: LAMA2; (-) strand; PAM type: YTN; PAM sequence: CTA
acacagtgaaaccccgtctc

SEQ ID NO: 230224 - DNA, 20 bp, Artificial Sequence
  Description of Artificial Sequence: Synthetic oligonucleotide
  Target: LAMA2; (-) strand; PAM type: YTN; PAM sequence: CTG
gctaacacagtgaaaccccg

SEQ ID NO: 230225 - DNA, 20 bp, Artificial Sequence
  Description of Artificial Sequence: Synthetic oligonucleotide
  Target: LAMA2; (-) strand; PAM type: YTN; PAM sequence: TTG
ggaggccgaggcgggccgat

SEQ ID NO: 230226 - DNA, 20 bp, Artificial Sequence
  Description of Artificial Sequence: Synthetic oligonucleotide
  Target: LAMA2; (-) strand; PAM type: YTN; PAM sequence: TTT
gggaggccgaggcgggccga

SEQ ID NO: 230227 - DNA, 20 bp, Artificial Sequence
  Description of Artificial Sequence: Synthetic oligonucleotide
  Target: LAMA2; (-) strand; PAM type: YTN; PAM sequence: CTT
tgggaggccgaggcgggccg

SEQ ID NO: 230228 - DNA, 20 bp, Artificial Sequence
  Description of Artificial Sequence: Synthetic oligonucleotide
  Target: LAMA2; (-) strand; PAM type: YTN; PAM sequence: CTG
taatcccagcactttgggag

SEQ ID NO: 230229 - DNA, 20 bp, Artificial Sequence
  Description of Artificial Sequence: Synthetic oligonucleotide
  Target: LAMA2; (-) strand; PAM type: YTN; PAM sequence: CTC
acgcctgtaatcccagcact

SEQ ID NO: 230230 - DNA, 20 bp, Artificial Sequence
  Description of Artificial Sequence: Synthetic oligonucleotide
  Target: LAMA2; (-) strand; PAM type: YTN; PAM sequence: CTG
gtgcggtggctcacgcctgt

SEQ ID NO: 230231 - DNA, 20 bp, Artificial Sequence
  Description of Artificial Sequence: Synthetic oligonucleotide
  Target: LAMA2; (-) strand; PAM type: YTN; PAM sequence: TTA
agagtaaggtcagaggctgg

SEQ ID NO: 230232 - DNA, 20 bp, Artificial Sequence
  Description of Artificial Sequence: Synthetic oligonucleotide
  Target: LAMA2; (-) strand; PAM type: YTN; PAM sequence: TTC
atgcaagcaattaagagtaa

SEQ ID NO: 230233 - DNA, 20 bp, Artificial Sequence
  Description of Artificial Sequence: Synthetic oligonucleotide
  Target: LAMA2; (-) strand; PAM type: YTN; PAM sequence: TTT
catgcaagcaattaagagta

SEQ ID NO: 230234 - DNA, 20 bp, Artificial Sequence
  Description of Artificial Sequence: Synthetic oligonucleotide
  Target: LAMA2; (-) strand; PAM type: YTN; PAM sequence: TTT
tcatgcaagcaattaagagt

SEQ ID NO: 230235 - DNA, 20 bp, Artificial Sequence
  Description of Artificial Sequence: Synthetic oligonucleotide
  Target: LAMA2; (-) strand; PAM type: YTN; PAM sequence: TTA
tccatatccaattttcatgc

SEQ ID NO: 230236 - DNA, 20 bp, Artificial Sequence
  Description of Artificial Sequence: Synthetic oligonucleotide
  Target: LAMA2; (-) strand; PAM type: YTN; PAM sequence: CTT
atccatatccaattttcatg

SEQ ID NO: 230237 - DNA, 20 bp, Artificial Sequence
  Description of Artificial Sequence: Synthetic oligonucleotide
  Target: LAMA2; (-) strand; PAM type: YTN; PAM sequence: TTC
ttatccatatccaattttca

SEQ ID NO: 230238 - DNA, 20 bp, Artificial Sequence
  Description of Artificial Sequence: Synthetic oligonucleotide
  Target: LAMA2; (-) strand; PAM type: YTN; PAM sequence: TTG
cattcttatccatatccaat

SEQ ID NO: 230239 - DNA, 20 bp, Artificial Sequence
  Description of Artificial Sequence: Synthetic oligonucleotide
  Target: LAMA2; (-) strand; PAM type: YTN; PAM sequence: TTT
gcattcttatccatatccaa

SEQ ID NO: 230240 - DNA, 20 bp, Artificial Sequence
  Description of Artificial Sequence: Synthetic oligonucleotide
  Target: LAMA2; (-) strand; PAM type: YTN; PAM sequence: TTG
ggtttgcattcttatccata

SEQ ID NO: 230241 - DNA, 20 bp, Artificial Sequence
  Description of Artificial Sequence: Synthetic oligonucleotide
  Target: LAMA2; (-) strand; PAM type: YTN; PAM sequence: CTT
gggtttgcattcttatccat

SEQ ID NO: 230242 - DNA, 20 bp, Artificial Sequence
  Description of Artificial Sequence: Synthetic oligonucleotide
  Target: LAMA2; (-) strand; PAM type: YTN; PAM sequence: TTC
ttgggtttgcattcttatcc

SEQ ID NO: 230243 - DNA, 20 bp, Artificial Sequence
  Description of Artificial Sequence: Synthetic oligonucleotide
  Target: LAMA2; (-) strand; PAM type: YTN; PAM sequence: CTG
aacatcaataggagaatgtg

SEQ ID NO: 230244 - DNA, 20 bp, Artificial Sequence
  Description of Artificial Sequence: Synthetic oligonucleotide
  Target: LAMA2; (-) strand; PAM type: YTN; PAM sequence: CTA
aggtcactgaacatcaatag

SEQ ID NO: 230245 - DNA, 20 bp, Artificial Sequence
  Description of Artificial Sequence: Synthetic oligonucleotide
  Target: LAMA2; (-) strand; PAM type: YTN; PAM sequence: CTG
gaaatgctaaggtcactgaa

SEQ ID NO: 230246 - DNA, 20 bp, Artificial Sequence
  Description of Artificial Sequence: Synthetic oligonucleotide
  Target: LAMA2; (-) strand; PAM type: YTN; PAM sequence: TTC
tggaaatgctaaggtcactg

SEQ ID NO: 230247 - DNA, 20 bp, Artificial Sequence
  Description of Artificial Sequence: Synthetic oligonucleotide
  Target: LAMA2; (-) strand; PAM type: YTN; PAM sequence: CTT
ctggaaatgctaaggtcact

SEQ ID NO: 230248 - DNA, 20 bp, Artificial Sequence
  Description of Artificial Sequence: Synthetic oligonucleotide
  Target: LAMA2; (-) strand; PAM type: YTN; PAM sequence: TTC
catccacaataaagaggtgc

SEQ ID NO: 230249 - DNA, 20 bp, Artificial Sequence
  Description of Artificial Sequence: Synthetic oligonucleotide
  Target: LAMA2; (-) strand; PAM type: YTN; PAM sequence: TTT
ccatccacaataaagaggtg

SEQ ID NO: 230250 - DNA, 20 bp, Artificial Sequence
  Description of Artificial Sequence: Synthetic oligonucleotide
  Target: LAMA2; (-) strand; PAM type: YTN; PAM sequence: CTG
agacaacatgaataagtaag

SEQ ID NO: 230251 - DNA, 20 bp, Artificial Sequence
  Description of Artificial Sequence: Synthetic oligonucleotide
  Target: LAMA2; (-) strand; PAM type: YTN; PAM sequence: CTG
gacagcctgagacaacatga

SEQ ID NO: 230252 - DNA, 20 bp, Artificial Sequence
  Description of Artificial Sequence: Synthetic oligonucleotide
  Target: LAMA2; (-) strand; PAM type: YTN; PAM sequence: TTA
ccaacctggacagcctgaga

SEQ ID NO: 230253 - DNA, 20 bp, Artificial Sequence
  Description of Artificial Sequence: Synthetic oligonucleotide
  Target: LAMA2; (-) strand; PAM type: YTN; PAM sequence: CTG
ttaccaacctggacagcctg

SEQ ID NO: 230254 - DNA, 20 bp, Artificial Sequence
  Description of Artificial Sequence: Synthetic oligonucleotide
  Target: LAMA2; (-) strand; PAM type: YTN; PAM sequence: TTA
cctgttaccaacctggacag

SEQ ID NO: 230255 - DNA, 20 bp, Artificial Sequence
  Description of Artificial Sequence: Synthetic oligonucleotide
  Target: LAMA2; (-) strand; PAM type: YTN; PAM sequence: TTA
tagcagttacctgttaccaa

SEQ ID NO: 230256 - DNA, 20 bp, Artificial Sequence
  Description of Artificial Sequence: Synthetic oligonucleotide
  Target: LAMA2; (-) strand; PAM type: YTN; PAM sequence: TTT
atagcagttacctgttacca

SEQ ID NO: 230257 - DNA, 20 bp, Artificial Sequence
  Description of Artificial Sequence: Synthetic oligonucleotide
  Target: LAMA2; (-) strand; PAM type: YTN; PAM sequence: CTT
tatagcagttacctgttacc

SEQ ID NO: 230258 - DNA, 20 bp, Artificial Sequence
  Description of Artificial Sequence: Synthetic oligonucleotide
  Target: LAMA2; (-) strand; PAM type: YTN; PAM sequence: CTC
caccctttatagcagttacc

SEQ ID NO: 230259 - DNA, 20 bp, Artificial Sequence
  Description of Artificial Sequence: Synthetic oligonucleotide
  Target: LAMA2; (-) strand; PAM type: YTN; PAM sequence: TTA
gcaggatgtgctccaccctt

SEQ ID NO: 230260 - DNA, 20 bp, Artificial Sequence
  Description of Artificial Sequence: Synthetic oligonucleotide
  Target: LAMA2; (-) strand; PAM type: YTN; PAM sequence: TTT
agcaggatgtgctccaccct

SEQ ID NO: 230261 - DNA, 20 bp, Artificial Sequence
  Description of Artificial Sequence: Synthetic oligonucleotide
  Target: LAMA2; (-) strand; PAM type: YTN; PAM sequence: CTC
catttagcaggatgtgctcc

SEQ ID NO: 230262 - DNA, 20 bp, Artificial Sequence
  Description of Artificial Sequence: Synthetic oligonucleotide
  Target: LAMA2; (-) strand; PAM type: YTN; PAM sequence: CTC
tccatttagcaggatgtgct

SEQ ID NO: 230263 - DNA, 20 bp, Artificial Sequence
  Description of Artificial Sequence: Synthetic oligonucleotide
  Target: LAMA2; (-) strand; PAM type: YTN; PAM sequence: CTG
gatctctccatttagcagga

SEQ ID NO: 230264 - DNA, 20 bp, Artificial Sequence
  Description of Artificial Sequence: Synthetic oligonucleotide
  Target: LAMA2; (-) strand; PAM type: YTN; PAM sequence: TTA
aaaaaaatgtaaatgacact

SEQ ID NO: 230265 - DNA, 20 bp, Artificial Sequence
  Description of Artificial Sequence: Synthetic oligonucleotide
  Target: LAMA2; (-) strand; PAM type: YTN; PAM sequence: TTG
aaagagttaaaaaaaatgta

SEQ ID NO: 230266 - DNA, 20 bp, Artificial Sequence
  Description of Artificial Sequence: Synthetic oligonucleotide
  Target: LAMA2; (-) strand; PAM type: YTN; PAM sequence: CTT
gaaagagttaaaaaaaatgt

SEQ ID NO: 230267 - DNA, 20 bp, Artificial Sequence
  Description of Artificial Sequence: Synthetic oligonucleotide
  Target: LAMA2; (-) strand; PAM type: YTN; PAM sequence: TTA
cccttgaaagagttaaaaaa

SEQ ID NO: 230268 - DNA, 20 bp, Artificial Sequence
  Description of Artificial Sequence: Synthetic oligonucleotide
  Target: LAMA2; (-) strand; PAM type: YTN; PAM sequence: TTG
ccattacccttgaaagagtt

SEQ ID NO: 230269 - DNA, 20 bp, Artificial Sequence
  Description of Artificial Sequence: Synthetic oligonucleotide
  Target: LAMA2; (-) strand; PAM type: YTN; PAM sequence: TTA
gttgccattacccttgaaag

SEQ ID NO: 230270 - DNA, 20 bp, Artificial Sequence
  Description of Artificial Sequence: Synthetic oligonucleotide
  Target: LAMA2; (-) strand; PAM type: YTN; PAM sequence: TTG
ttagttgccattacccttga

SEQ ID NO: 230271 - DNA, 20 bp, Artificial Sequence
  Description of Artificial Sequence: Synthetic oligonucleotide
  Target: LAMA2; (-) strand; PAM type: YTN; PAM sequence: CTA
ttgttagttgccattaccct

SEQ ID NO: 230272 - DNA, 20 bp, Artificial Sequence
  Description of Artificial Sequence: Synthetic oligonucleotide
  Target: LAMA2; (-) strand; PAM type: YTN; PAM sequence: CTA
gcacacaggagaaactattg

SEQ ID NO: 230273 - DNA, 20 bp, Artificial Sequence
  Description of Artificial Sequence: Synthetic oligonucleotide
  Target: LAMA2; (-) strand; PAM type: YTN; PAM sequence: TTA
gaacaatatctagcacacag

SEQ ID NO: 230274 - DNA, 20 bp, Artificial Sequence
  Description of Artificial Sequence: Synthetic oligonucleotide
  Target: LAMA2; (-) strand; PAM type: YTN; PAM sequence: TTA
tgtaaaatgattagaacaat

SEQ ID NO: 230275 - DNA, 20 bp, Artificial Sequence
  Description of Artificial Sequence: Synthetic oligonucleotide
  Target: LAMA2; (-) strand; PAM type: YTN; PAM sequence: TTT
atgtaaaatgattagaacaa

SEQ ID NO: 230276 - DNA, 20 bp, Artificial Sequence
  Description of Artificial Sequence: Synthetic oligonucleotide
  Target: LAMA2; (-) strand; PAM type: YTN; PAM sequence: TTA
aaagaaataatttatgtaaa

SEQ ID NO: 230277 - DNA, 20 bp, Artificial Sequence
  Description of Artificial Sequence: Synthetic oligonucleotide
  Target: LAMA2; (-) strand; PAM type: YTN; PAM sequence: TTG
gtggattaaaagaaataatt

SEQ ID NO: 230278 - DNA, 20 bp, Artificial Sequence
  Description of Artificial Sequence: Synthetic oligonucleotide
  Target: LAMA2; (-) strand; PAM type: YTN; PAM sequence: TTT
ggtggattaaaagaaataat

SEQ ID NO: 230279 - DNA, 20 bp, Artificial Sequence
  Description of Artificial Sequence: Synthetic oligonucleotide
  Target: LAMA2; (-) strand; PAM type: YTN; PAM sequence: CTG
tttggtggattaaaagaaat

SEQ ID NO: 230280 - DNA, 20 bp, Artificial Sequence
  Description of Artificial Sequence: Synthetic oligonucleotide
  Target: LAMA2; (-) strand; PAM type: YTN; PAM sequence: TTA
tagtgctgtttggtggatta

SEQ ID NO: 230281 - DNA, 20 bp, Artificial Sequence
  Description of Artificial Sequence: Synthetic oligonucleotide
  Target: LAMA2; (-) strand; PAM type: YTN; PAM sequence: CTT
atagtgctgtttggtggatt

SEQ ID NO: 230282 - DNA, 20 bp, Artificial Sequence
  Description of Artificial Sequence: Synthetic oligonucleotide
  Target: LAMA2; (-) strand; PAM type: YTN; PAM sequence: CTA
tcttatagtgctgtttggtg

SEQ ID NO: 230283 - DNA, 20 bp, Artificial Sequence
  Description of Artificial Sequence: Synthetic oligonucleotide
  Target: LAMA2; (-) strand; PAM type: YTN; PAM sequence: CTA
acaaaggtaaataaaaataa

SEQ ID NO: 230284 - DNA, 20 bp, Artificial Sequence
  Description of Artificial Sequence: Synthetic oligonucleotide
  Target: LAMA2; (-) strand; PAM type: YTN; PAM sequence: CTC
taacaaaggtaaataaaaat

SEQ ID NO: 230285 - DNA, 20 bp, Artificial Sequence
  Description of Artificial Sequence: Synthetic oligonucleotide
  Target: LAMA2; (-) strand; PAM type: YTN; PAM sequence: TTC
tctaacaaaggtaaataaaa

SEQ ID NO: 230286 - DNA, 20 bp, Artificial Sequence
  Description of Artificial Sequence: Synthetic oligonucleotide
  Target: LAMA2; (-) strand; PAM type: YTN; PAM sequence: TTT
ctctaacaaaggtaaataaa

SEQ ID NO: 230287 - DNA, 20 bp, Artificial Sequence
  Description of Artificial Sequence: Synthetic oligonucleotide
  Target: LAMA2; (-) strand; PAM type: YTN; PAM sequence: TTT
tctctaacaaaggtaaataa

SEQ ID NO: 230288 - DNA, 20 bp, Artificial Sequence
  Description of Artificial Sequence: Synthetic oligonucleotide
  Target: LAMA2; (-) strand; PAM type: YTN; PAM sequence: CTC
agttttctctaacaaaggta

SEQ ID NO: 230289 - DNA, 20 bp, Artificial Sequence
  Description of Artificial Sequence: Synthetic oligonucleotide
  Target: LAMA2; (-) strand; PAM type: YTN; PAM sequence: CTA
tacctcagttttctctaaca

SEQ ID NO: 230290 - DNA, 20 bp, Artificial Sequence
  Description of Artificial Sequence: Synthetic oligonucleotide
  Target: LAMA2; (-) strand; PAM type: YTN; PAM sequence: CTC
tatacctcagttttctctaa

SEQ ID NO: 230291 - DNA, 20 bp, Artificial Sequence
  Description of Artificial Sequence: Synthetic oligonucleotide
  Target: LAMA2; (-) strand; PAM type: YTN; PAM sequence: CTC
tctatacctcagttttctct

SEQ ID NO: 230292 - DNA, 20 bp, Artificial Sequence
  Description of Artificial Sequence: Synthetic oligonucleotide
  Target: LAMA2; (-) strand; PAM type: YTN; PAM sequence: TTA
atctctctatacctcagttt

SEQ ID NO: 230293 - DNA, 20 bp, Artificial Sequence
  Description of Artificial Sequence: Synthetic oligonucleotide
  Target: LAMA2; (-) strand; PAM type: YTN; PAM sequence: CTT
aatctctctatacctcagtt

SEQ ID NO: 230294 - DNA, 20 bp, Artificial Sequence
  Description of Artificial Sequence: Synthetic oligonucleotide
  Target: LAMA2; (-) strand; PAM type: YTN; PAM sequence: TTA
cttaatctctctatacctca

SEQ ID NO: 230295 - DNA, 20 bp, Artificial Sequence
  Description of Artificial Sequence: Synthetic oligonucleotide
  Target: LAMA2; (-) strand; PAM type: YTN; PAM sequence: TTT
acttaatctctctatacctc

SEQ ID NO: 230296 - DNA, 20 bp, Artificial Sequence
  Description of Artificial Sequence: Synthetic oligonucleotide
  Target: LAMA2; (-) strand; PAM type: YTN; PAM sequence: TTA
gacaatttacttaatctctc

SEQ ID NO: 230297 - DNA, 20 bp, Artificial Sequence
  Description of Artificial Sequence: Synthetic oligonucleotide
  Target: LAMA2; (-) strand; PAM type: YTN; PAM sequence: TTT
agacaatttacttaatctct

SEQ ID NO: 230298 - DNA, 20 bp, Artificial Sequence
  Description of Artificial Sequence: Synthetic oligonucleotide
  Target: LAMA2; (-) strand; PAM type: YTN; PAM sequence: CTG
tgtgaatttagacaatttac

SEQ ID NO: 230299 - DNA, 20 bp, Artificial Sequence
  Description of Artificial Sequence: Synthetic oligonucleotide
  Target: LAMA2; (-) strand; PAM type: YTN; PAM sequence: CTA
tctgtgtgaatttagacaat

SEQ ID NO: 230300 - DNA, 20 bp, Artificial Sequence
  Description of Artificial Sequence: Synthetic oligonucleotide
  Target: LAMA2; (-) strand; PAM type: YTN; PAM sequence: TTA
ctatctgtgtgaatttagac

SEQ ID NO: 230301 - DNA, 20 bp, Artificial Sequence
  Description of Artificial Sequence: Synthetic oligonucleotide
  Target: LAMA2; (-) strand; PAM type: YTN; PAM sequence: CTT
actatctgtgtgaatttaga

SEQ ID NO: 230302 - DNA, 20 bp, Artificial Sequence
  Description of Artificial Sequence: Synthetic oligonucleotide
  Target: LAMA2; (-) strand; PAM type: YTN; PAM sequence: CTC
cacttactatctgtgtgaat

SEQ ID NO: 230303 - DNA, 20 bp, Artificial Sequence
  Description of Artificial Sequence: Synthetic oligonucleotide
  Target: LAMA2; (-) strand; PAM type: YTN; PAM sequence: CTC
ctccacttactatctgtgtg

SEQ ID NO: 230304 - DNA, 20 bp, Artificial Sequence
  Description of Artificial Sequence: Synthetic oligonucleotide
  Target: LAMA2; (-) strand; PAM type: YTN; PAM sequence: CTG
gctcctccacttactatctg

SEQ ID NO: 230305 - DNA, 20 bp, Artificial Sequence
  Description of Artificial Sequence: Synthetic oligonucleotide
  Target: LAMA2; (-) strand; PAM type: YTN; PAM sequence: TTC
tggctcctccacttactatc

SEQ ID NO: 230306 - DNA, 20 bp, Artificial Sequence
  Description of Artificial Sequence: Synthetic oligonucleotide
  Target: LAMA2; (-) strand; PAM type: YTN; PAM sequence: TTC
aaattctggctcctccactt

SEQ ID NO: 230307 - DNA, 20 bp, Artificial Sequence
  Description of Artificial Sequence: Synthetic oligonucleotide
  Target: LAMA2; (-) strand; PAM type: YTN; PAM sequence: TTG
tgttcaaattctggctcctc

SEQ ID NO: 230308 - DNA, 20 bp, Artificial Sequence
  Description of Artificial Sequence: Synthetic oligonucleotide
  Target: LAMA2; (-) strand; PAM type: YTN; PAM sequence: CTT
gtgttcaaattctggctcct

SEQ ID NO: 230309 - DNA, 20 bp, Artificial Sequence
  Description of Artificial Sequence: Synthetic oligonucleotide
  Target: LAMA2; (-) strand; PAM type: YTN; PAM sequence: TTG
cttgtgttcaaattctggct

SEQ ID NO: 230310 - DNA, 20 bp, Artificial Sequence
  Description of Artificial Sequence: Synthetic oligonucleotide
  Target: LAMA2; (-) strand; PAM type: YTN; PAM sequence: TTG
gagacaaattgcttgtgttc

SEQ ID NO: 230311 - DNA, 20 bp, Artificial Sequence
  Description of Artificial Sequence: Synthetic oligonucleotide
  Target: LAMA2; (-) strand; PAM type: YTN; PAM sequence: TTG
ttggagacaaattgcttgtg

SEQ ID NO: 230312 - DNA, 20 bp, Artificial Sequence
  Description of Artificial Sequence: Synthetic oligonucleotide
  Target: LAMA2; (-) strand; PAM type: YTN; PAM sequence: TTT
gttggagacaaattgcttgt

SEQ ID NO: 230313 - DNA, 20 bp, Artificial Sequence
  Description of Artificial Sequence: Synthetic oligonucleotide
  Target: LAMA2; (-) strand; PAM type: YTN; PAM sequence: TTA
agatcaaatttgttggagac

SEQ ID NO: 230314 - DNA, 20 bp, Artificial Sequence
  Description of Artificial Sequence: Synthetic oligonucleotide
  Target: LAMA2; (-) strand; PAM type: YTN; PAM sequence: TTT
aagatcaaatttgttggaga

SEQ ID NO: 230315 - DNA, 20 bp, Artificial Sequence
  Description of Artificial Sequence: Synthetic oligonucleotide
  Target: LAMA2; (-) strand; PAM type: YTN; PAM sequence: TTA
accatagtttaagatcaaat

SEQ ID NO: 230316 - DNA, 20 bp, Artificial Sequence
  Description of Artificial Sequence: Synthetic oligonucleotide
  Target: LAMA2; (-) strand; PAM type: YTN; PAM sequence: TTC
agagagttaaccatagttta

SEQ ID NO: 230317 - DNA, 20 bp, Artificial Sequence
  Description of Artificial Sequence: Synthetic oligonucleotide
  Target: LAMA2; (-) strand; PAM type: YTN; PAM sequence: TTG
tgtgtgtgttcagagagtta

SEQ ID NO: 230318 - DNA, 20 bp, Artificial Sequence
  Description of Artificial Sequence: Synthetic oligonucleotide
  Target: LAMA2; (-) strand; PAM type: YTN; PAM sequence: TTT
gtgtgtgtgttcagagagtt

SEQ ID NO: 230319 - DNA, 20 bp, Artificial Sequence
  Description of Artificial Sequence: Synthetic oligonucleotide
  Target: LAMA2; (-) strand; PAM type: YTN; PAM sequence: TTG
catgtacgtatgtgtgtttg

SEQ ID NO: 230320 - DNA, 20 bp, Artificial Sequence
  Description of Artificial Sequence: Synthetic oligonucleotide
  Target: LAMA2; (-) strand; PAM type: YTN; PAM sequence: TTG
tgtgattgcatgtacgtatg

SEQ ID NO: 230321 - DNA, 20 bp, Artificial Sequence
  Description of Artificial Sequence: Synthetic oligonucleotide
  Target: LAMA2; (-) strand; PAM type: YTN; PAM sequence: TTT
gtgtgattgcatgtacgtat

SEQ ID NO: 230322 - DNA, 20 bp, Artificial Sequence
  Description of Artificial Sequence: Synthetic oligonucleotide
  Target: LAMA2; (-) strand; PAM type: YTN; PAM sequence: CTT
tgtgtgattgcatgtacgta

SEQ ID NO: 230323 - DNA, 20 bp, Artificial Sequence
  Description of Artificial Sequence: Synthetic oligonucleotide
  Target: LAMA2; (-) strand; PAM type: YTN; PAM sequence: CTG
atactttgtgtgattgcatg

SEQ ID NO: 230324 - DNA, 20 bp, Artificial Sequence
  Description of Artificial Sequence: Synthetic oligonucleotide
  Target: LAMA2; (-) strand; PAM type: YTN; PAM sequence: CTA
tccccatgtgcctgatactt

SEQ ID NO: 230325 - DNA, 20 bp, Artificial Sequence
  Description of Artificial Sequence: Synthetic oligonucleotide
  Target: LAMA2; (-) strand; PAM type: YTN; PAM sequence: TTG
tctatccccatgtgcctgat

SEQ ID NO: 230326 - DNA, 20 bp, Artificial Sequence
  Description of Artificial Sequence: Synthetic oligonucleotide
  Target: LAMA2; (-) strand; PAM type: YTN; PAM sequence: CTA
atattgtctatccccatgtg

SEQ ID NO: 230327 - DNA, 20 bp, Artificial Sequence
  Description of Artificial Sequence: Synthetic oligonucleotide
  Target: LAMA2; (-) strand; PAM type: YTN; PAM sequence: TTC
taatattgtctatccccatg

SEQ ID NO: 230328 - DNA, 20 bp, Artificial Sequence
  Description of Artificial Sequence: Synthetic oligonucleotide
  Target: LAMA2; (-) strand; PAM type: YTN; PAM sequence: TTT
ctaatattgtctatccccat

SEQ ID NO: 230329 - DNA, 20 bp, Artificial Sequence
  Description of Artificial Sequence: Synthetic oligonucleotide
  Target: LAMA2; (-) strand; PAM type: YTN; PAM sequence: TTT
tctaatattgtctatcccca

SEQ ID NO: 230330 - DNA, 20 bp, Artificial Sequence
  Description of Artificial Sequence: Synthetic oligonucleotide
  Target: LAMA2; (-) strand; PAM type: YTN; PAM sequence: CTT
ttctaatattgtctatcccc

SEQ ID NO: 230331 - DNA, 20 bp, Artificial Sequence
  Description of Artificial Sequence: Synthetic oligonucleotide
  Target: LAMA2; (-) strand; PAM type: YTN; PAM sequence: TTG
tatgtatatgcttttctaat

SEQ ID NO: 230332 - DNA, 20 bp, Artificial Sequence
  Description of Artificial Sequence: Synthetic oligonucleotide
  Target: LAMA2; (-) strand; PAM type: YTN; PAM sequence: TTT
gtatgtatatgcttttctaa

SEQ ID NO: 230333 - DNA, 20 bp, Artificial Sequence
  Description of Artificial Sequence: Synthetic oligonucleotide
  Target: LAMA2; (-) strand; PAM type: YTN; PAM sequence: CTG
taaggatgtttgtatgtata

SEQ ID NO: 230334 - DNA, 20 bp, Artificial Sequence
  Description of Artificial Sequence: Synthetic oligonucleotide
  Target: LAMA2; (-) strand; PAM type: YTN; PAM sequence: CTA
tgtgtacaactgtaaggatg

SEQ ID NO: 230335 - DNA, 20 bp, Artificial Sequence
  Description of Artificial Sequence: Synthetic oligonucleotide
  Target: LAMA2; (-) strand; PAM type: YTN; PAM sequence: CTG
agtctatgtgtacaactgta

SEQ ID NO: 230336 - DNA, 20 bp, Artificial Sequence
  Description of Artificial Sequence: Synthetic oligonucleotide
  Target: LAMA2; (-) strand; PAM type: YTN; PAM sequence: TTA
taaacctgagtctatgtgta

SEQ ID NO: 230337 - DNA, 20 bp, Artificial Sequence
  Description of Artificial Sequence: Synthetic oligonucleotide
  Target: LAMA2; (-) strand; PAM type: YTN; PAM sequence: TTT
ataaacctgagtctatgtgt

SEQ ID NO: 230338 - DNA, 20 bp, Artificial Sequence
  Description of Artificial Sequence: Synthetic oligonucleotide
  Target: LAMA2; (-) strand; PAM type: YTN; PAM sequence: TTC
agtgggtttataaacctgag

SEQ ID NO: 230339 - DNA, 20 bp, Artificial Sequence
  Description of Artificial Sequence: Synthetic oligonucleotide
  Target: LAMA2; (-) strand; PAM type: YTN; PAM sequence: CTT
cagtgggtttataaacctga

SEQ ID NO: 230340 - DNA, 20 bp, Artificial Sequence
  Description of Artificial Sequence: Synthetic oligonucleotide
  Target: LAMA2; (-) strand; PAM type: YTN; PAM sequence: TTC
acttcagtgggtttataaac

SEQ ID NO: 230341 - DNA, 20 bp, Artificial Sequence
  Description of Artificial Sequence: Synthetic oligonucleotide
  Target: LAMA2; (-) strand; PAM type: YTN; PAM sequence: CTT
cacttcagtgggtttataaa

SEQ ID NO: 230342 - DNA, 20 bp, Artificial Sequence
  Description of Artificial Sequence: Synthetic oligonucleotide
  Target: LAMA2; (-) strand; PAM type: YTN; PAM sequence: TTC
ataaatgatgagtcttcact

SEQ ID NO: 230343 - DNA, 20 bp, Artificial Sequence
  Description of Artificial Sequence: Synthetic oligonucleotide
  Target: LAMA2; (-) strand; PAM type: YTN; PAM sequence: TTT
cataaatgatgagtcttcac

SEQ ID NO: 230344 - DNA, 20 bp, Artificial Sequence
  Description of Artificial Sequence: Synthetic oligonucleotide
  Target: LAMA2; (-) strand; PAM type: YTN; PAM sequence: TTT
tcataaatgatgagtcttca

SEQ ID NO: 230345 - DNA, 20 bp, Artificial Sequence
  Description of Artificial Sequence: Synthetic oligonucleotide
  Target: LAMA2; (-) strand; PAM type: YTN; PAM sequence: TTG
tatattttcataaatgatga

SEQ ID NO: 230346 - DNA, 20 bp, Artificial Sequence
  Description of Artificial Sequence: Synthetic oligonucleotide
  Target: LAMA2; (-) strand; PAM type: YTN; PAM sequence: TTG
cagaacaaaattgtatattt

SEQ ID NO: 230347 - DNA, 20 bp, Artificial Sequence
  Description of Artificial Sequence: Synthetic oligonucleotide
  Target: LAMA2; (-) strand; PAM type: YTN; PAM sequence: TTT
gcagaacaaaattgtatatt

SEQ ID NO: 230348 - DNA, 20 bp, Artificial Sequence
  Description of Artificial Sequence: Synthetic oligonucleotide
  Target: LAMA2; (-) strand; PAM type: YTN; PAM sequence: TTT
tgcagaacaaaattgtatat

SEQ ID NO: 230349 - DNA, 20 bp, Artificial Sequence
  Description of Artificial Sequence: Synthetic oligonucleotide
  Target: LAMA2; (-) strand; PAM type: YTN; PAM sequence: TTA
ttttgcagaacaaaattgta

SEQ ID NO: 230350 - DNA, 20 bp, Artificial Sequence
  Description of Artificial Sequence: Synthetic oligonucleotide
  Target: LAMA2; (-) strand; PAM type: YTN; PAM sequence: TTA
aattattttgcagaacaaaa

SEQ ID NO: 230351 - DNA, 20 bp, Artificial Sequence
  Description of Artificial Sequence: Synthetic oligonucleotide
  Target: LAMA2; (-) strand; PAM type: YTN; PAM sequence: TTA
aaaaattaaattattttgca

SEQ ID NO: 230352 - DNA, 20 bp, Artificial Sequence
  Description of Artificial Sequence: Synthetic oligonucleotide
  Target: LAMA2; (-) strand; PAM type: YTN; PAM sequence: TTT
aaaaaattaaattattttgc

SEQ ID NO: 230353 - DNA, 20 bp, Artificial Sequence
  Description of Artificial Sequence: Synthetic oligonucleotide
  Target: LAMA2; (-) strand; PAM type: YTN; PAM sequence: TTT
taaaaaattaaattattttg

SEQ ID NO: 230354 - DNA, 20 bp, Artificial Sequence
  Description of Artificial Sequence: Synthetic oligonucleotide
  Target: LAMA2; (-) strand; PAM type: YTN; PAM sequence: TTG
cacaaggaattttaaaaaat

SEQ ID NO: 230355 - DNA, 20 bp, Artificial Sequence
  Description of Artificial Sequence: Synthetic oligonucleotide
  Target: LAMA2; (-) strand; PAM type: YTN; PAM sequence: CTC
attgcacaaggaattttaaa

SEQ ID NO: 230356 - DNA, 20 bp, Artificial Sequence
  Description of Artificial Sequence: Synthetic oligonucleotide
  Target: LAMA2; (-) strand; PAM type: YTN; PAM sequence: TTC
tcattgcacaaggaatttta

SEQ ID NO: 230357 - DNA, 20 bp, Artificial Sequence
  Description of Artificial Sequence: Synthetic oligonucleotide
  Target: LAMA2; (-) strand; PAM type: YTN; PAM sequence: TTT
ctcattgcacaaggaatttt

SEQ ID NO: 230358 - DNA, 20 bp, Artificial Sequence
  Description of Artificial Sequence: Synthetic oligonucleotide
  Target: LAMA2; (-) strand; PAM type: YTN; PAM sequence: TTT
tctcattgcacaaggaattt

SEQ ID NO: 230359 - DNA, 20 bp, Artificial Sequence
  Description of Artificial Sequence: Synthetic oligonucleotide
  Target: LAMA2; (-) strand; PAM type: YTN; PAM sequence: CTT
ttctcattgcacaaggaatt

SEQ ID NO: 230360 - DNA, 20 bp, Artificial Sequence
  Description of Artificial Sequence: Synthetic oligonucleotide
  Target: LAMA2; (-) strand; PAM type: YTN; PAM sequence: CTG
atcttttctcattgcacaag

SEQ ID NO: 230361 - DNA, 20 bp, Artificial Sequence
  Description of Artificial Sequence: Synthetic oligonucleotide
  Target: LAMA2; (-) strand; PAM type: YTN; PAM sequence: CTC
tgatcttttctcattgcaca

SEQ ID NO: 230362 - DNA, 20 bp, Artificial Sequence
  Description of Artificial Sequence: Synthetic oligonucleotide
  Target: LAMA2; (-) strand; PAM type: YTN; PAM sequence: CTC
tctgatcttttctcattgca

SEQ ID NO: 230363 - DNA, 20 bp, Artificial Sequence
  Description of Artificial Sequence: Synthetic oligonucleotide
  Target: LAMA2; (-) strand; PAM type: YTN; PAM sequence: CTG
taggcctctctgatcttttc

SEQ ID NO: 230364 - DNA, 20 bp, Artificial Sequence
  Description of Artificial Sequence: Synthetic oligonucleotide
  Target: LAMA2; (-) strand; PAM type: YTN; PAM sequence: CTG
taaaaggaaactgtaggcct

SEQ ID NO: 230365 - DNA, 20 bp, Artificial Sequence
  Description of Artificial Sequence: Synthetic oligonucleotide
  Target: LAMA2; (-) strand; PAM type: YTN; PAM sequence: CTC
tgtaaaaggaaactgtaggc

SEQ ID NO: 230366 - DNA, 20 bp, Artificial Sequence
  Description of Artificial Sequence: Synthetic oligonucleotide
  Target: LAMA2; (-) strand; PAM type: YTN; PAM sequence: CTA
gctctgtaaaaggaaactgt

SEQ ID NO: 230367 - DNA, 20 bp, Artificial Sequence
  Description of Artificial Sequence: Synthetic oligonucleotide
  Target: LAMA2; (-) strand; PAM type: YTN; PAM sequence: CTG
gcctagctctgtaaaaggaa

SEQ ID NO: 230368 - DNA, 20 bp, Artificial Sequence
  Description of Artificial Sequence: Synthetic oligonucleotide
  Target: LAMA2; (-) strand; PAM type: YTN; PAM sequence: CTA
aatacagcccctggcctagc

SEQ ID NO: 230369 - DNA, 20 bp, Artificial Sequence
  Description of Artificial Sequence: Synthetic oligonucleotide
  Target: LAMA2; (-) strand; PAM type: YTN; PAM sequence: CTC
taaatacagcccctggccta

SEQ ID NO: 230370 - DNA, 20 bp, Artificial Sequence
  Description of Artificial Sequence: Synthetic oligonucleotide
  Target: LAMA2; (-) strand; PAM type: YTN; PAM sequence: TTA
ctctaaatacagcccctggc

SEQ ID NO: 230371 - DNA, 20 bp, Artificial Sequence
  Description of Artificial Sequence: Synthetic oligonucleotide
  Target: LAMA2; (-) strand; PAM type: YTN; PAM sequence: TTC
aattactctaaatacagccc

SEQ ID NO: 230372 - DNA, 20 bp, Artificial Sequence
  Description of Artificial Sequence: Synthetic oligonucleotide
  Target: LAMA2; (-) strand; PAM type: YTN; PAM sequence: TTC
aagtaaaatcatgtgttcaa

SEQ ID NO: 230373 - DNA, 20 bp, Artificial Sequence
  Description of Artificial Sequence: Synthetic oligonucleotide
  Target: LAMA2; (-) strand; PAM type: YTN; PAM sequence: CTC
cgcattcaagtaaaatcatg

SEQ ID NO: 230374 - DNA, 20 bp, Artificial Sequence
  Description of Artificial Sequence: Synthetic oligonucleotide
  Target: LAMA2; (-) strand; PAM type: YTN; PAM sequence: TTC
tccgcattcaagtaaaatca

SEQ ID NO: 230375 - DNA, 20 bp, Artificial Sequence
  Description of Artificial Sequence: Synthetic oligonucleotide
  Target: LAMA2; (-) strand; PAM type: YTN; PAM sequence: TTT
ctccgcattcaagtaaaatc

SEQ ID NO: 230376 - DNA, 20 bp, Artificial Sequence
  Description of Artificial Sequence: Synthetic oligonucleotide
  Target: LAMA2; (-) strand; PAM type: YTN; PAM sequence: TTG
gtcaagtttctccgcattca

SEQ ID NO: 230377 - DNA, 20 bp, Artificial Sequence
  Description of Artificial Sequence: Synthetic oligonucleotide
  Target: LAMA2; (-) strand; PAM type: YTN; PAM sequence: TTC
acagttggtcaagtttctcc

SEQ ID NO: 230378 - DNA, 20 bp, Artificial Sequence
  Description of Artificial Sequence: Synthetic oligonucleotide
  Target: LAMA2; (-) strand; PAM type: YTN; PAM sequence: TTG
catattcacagttggtcaag

SEQ ID NO: 230379 - DNA, 20 bp, Artificial Sequence
  Description of Artificial Sequence: Synthetic oligonucleotide
  Target: LAMA2; (-) strand; PAM type: YTN; PAM sequence: CTG
tagagtgaaattgcatattc

SEQ ID NO: 230380 - DNA, 20 bp, Artificial Sequence
  Description of Artificial Sequence: Synthetic oligonucleotide
  Target: LAMA2; (-) strand; PAM type: YTN; PAM sequence: TTC
atctgtagagtgaaattgca

SEQ ID NO: 230381 - DNA, 20 bp, Artificial Sequence
  Description of Artificial Sequence: Synthetic oligonucleotide
  Target: LAMA2; (-) strand; PAM type: YTN; PAM sequence: TTT
catctgtagagtgaaattgc

SEQ ID NO: 230382 - DNA, 20 bp, Artificial Sequence
  Description of Artificial Sequence: Synthetic oligonucleotide
  Target: LAMA2; (-) strand; PAM type: YTN; PAM sequence: TTA
tttcatctgtagagtgaaat

SEQ ID NO: 230383 - DNA, 20 bp, Artificial Sequence
  Description of Artificial Sequence: Synthetic oligonucleotide
  Target: LAMA2; (-) strand; PAM type: YTN; PAM sequence: TTT
atttcatctgtagagtgaaa

SEQ ID NO: 230384 - DNA, 20 bp, Artificial Sequence
  Description of Artificial Sequence: Synthetic oligonucleotide
  Target: LAMA2; (-) strand; PAM type: YTN; PAM sequence: TTT
tatttcatctgtagagtgaa

SEQ ID NO: 230385 - DNA, 20 bp, Artificial Sequence
  Description of Artificial Sequence: Synthetic oligonucleotide
  Target: LAMA2; (-) strand; PAM type: YTN; PAM sequence: TTA
attttatttcatctgtagag

SEQ ID NO: 230386 - DNA, 20 bp, Artificial Sequence
  Description of Artificial Sequence: Synthetic oligonucleotide
  Target: LAMA2; (-) strand; PAM type: YTN; PAM sequence: TTT
aattttatttcatctgtaga

SEQ ID NO: 230387 - DNA, 20 bp, Artificial Sequence
  Description of Artificial Sequence: Synthetic oligonucleotide
  Target: LAMA2; (-) strand; PAM type: YTN; PAM sequence: TTG
ccccgtttaattttatttca

SEQ ID NO: 230388 - DNA, 20 bp, Artificial Sequence
  Description of Artificial Sequence: Synthetic oligonucleotide
  Target: LAMA2; (-) strand; PAM type: YTN; PAM sequence: TTT
gccccgtttaattttatttc

SEQ ID NO: 230389 - DNA, 20 bp, Artificial Sequence
  Description of Artificial Sequence: Synthetic oligonucleotide
  Target: LAMA2; (-) strand; PAM type: YTN; PAM sequence: TTT
tgccccgtttaattttattt

SEQ ID NO: 230390 - DNA, 20 bp, Artificial Sequence
  Description of Artificial Sequence: Synthetic oligonucleotide
  Target: LAMA2; (-) strand; PAM type: YTN; PAM sequence: CTT
ttgccccgtttaattttatt

SEQ ID NO: 230391 - DNA, 20 bp, Artificial Sequence
  Description of Artificial Sequence: Synthetic oligonucleotide
  Target: LAMA2; (-) strand; PAM type: YTN; PAM sequence: TTA
cttttgccccgtttaatttt

SEQ ID NO: 230392 - DNA, 20 bp, Artificial Sequence
  Description of Artificial Sequence: Synthetic oligonucleotide
  Target: LAMA2; (-) strand; PAM type: YTN; PAM sequence: TTT
acttttgccccgtttaattt

SEQ ID NO: 230393 - DNA, 20 bp, Artificial Sequence
  Description of Artificial Sequence: Synthetic oligonucleotide
  Target: LAMA2; (-) strand; PAM type: YTN; PAM sequence: CTT
tacttttgccccgtttaatt

SEQ ID NO: 230394 - DNA, 20 bp, Artificial Sequence
  Description of Artificial Sequence: Synthetic oligonucleotide
  Target: LAMA2; (-) strand; PAM type: YTN; PAM sequence: TTC
tttacttttgccccgtttaa

SEQ ID NO: 230395 - DNA, 20 bp, Artificial Sequence
  Description of Artificial Sequence: Synthetic oligonucleotide
  Target: LAMA2; (-) strand; PAM type: YTN; PAM sequence: CTT
ctttacttttgccccgttta

SEQ ID NO: 230396 - DNA, 20 bp, Artificial Sequence
  Description of Artificial Sequence: Synthetic oligonucleotide
  Target: LAMA2; (-) strand; PAM type: YTN; PAM sequence: TTC
ttctttacttttgccccgtt

SEQ ID NO: 230397 - DNA, 20 bp, Artificial Sequence
  Description of Artificial Sequence: Synthetic oligonucleotide
  Target: LAMA2; (-) strand; PAM type: YTN; PAM sequence: CTC
cattcttctttacttttgcc

SEQ ID NO: 230398 - DNA, 20 bp, Artificial Sequence
  Description of Artificial Sequence: Synthetic oligonucleotide
  Target: LAMA2; (-) strand; PAM type: YTN; PAM sequence: CTA
gtctccattcttctttactt

SEQ ID NO: 230399 - DNA, 20 bp, Artificial Sequence
  Description of Artificial Sequence: Synthetic oligonucleotide
  Target: LAMA2; (-) strand; PAM type: YTN; PAM sequence: TTA
cctagtctccattcttcttt

SEQ ID NO: 230400 - DNA, 20 bp, Artificial Sequence
  Description of Artificial Sequence: Synthetic oligonucleotide
  Target: LAMA2; (-) strand; PAM type: YTN; PAM sequence: TTT
acctagtctccattcttctt

SEQ ID NO: 230401 - DNA, 20 bp, Artificial Sequence
  Description of Artificial Sequence: Synthetic oligonucleotide
  Target: LAMA2; (-) strand; PAM type: YTN; PAM sequence: CTT
tacctagtctccattcttct

SEQ ID NO: 230402 - DNA, 20 bp, Artificial Sequence
  Description of Artificial Sequence: Synthetic oligonucleotide
  Target: LAMA2; (-) strand; PAM type: YTN; PAM sequence: TTC
catcactttacctagtctcc

SEQ ID NO: 230403 - DNA, 20 bp, Artificial Sequence
  Description of Artificial Sequence: Synthetic oligonucleotide
  Target: LAMA2; (-) strand; PAM type: YTN; PAM sequence: TTT
ccatcactttacctagtctc

SEQ ID NO: 230404 - DNA, 20 bp, Artificial Sequence
  Description of Artificial Sequence: Synthetic oligonucleotide
  Target: LAMA2; (-) strand; PAM type: YTN; PAM sequence: CTT
tccatcactttacctagtct

SEQ ID NO: 230405 - DNA, 20 bp, Artificial Sequence
  Description of Artificial Sequence: Synthetic oligonucleotide
  Target: LAMA2; (-) strand; PAM type: YTN; PAM sequence: CTC
tttccatcactttacctagt

SEQ ID NO: 230406 - DNA, 20 bp, Artificial Sequence
  Description of Artificial Sequence: Synthetic oligonucleotide
  Target: LAMA2; (-) strand; PAM type: YTN; PAM sequence: TTG
gtgtctctttccatcacttt

SEQ ID NO: 230407 - DNA, 20 bp, Artificial Sequence
  Description of Artificial Sequence: Synthetic oligonucleotide
  Target: LAMA2; (-) strand; PAM type: YTN; PAM sequence: TTT
ggtgtctctttccatcactt

SEQ ID NO: 230408 - DNA, 20 bp, Artificial Sequence
  Description of Artificial Sequence: Synthetic oligonucleotide
  Target: LAMA2; (-) strand; PAM type: YTN; PAM sequence: TTT
tggtgtctctttccatcact

SEQ ID NO: 230409 - DNA, 20 bp, Artificial Sequence
  Description of Artificial Sequence: Synthetic oligonucleotide
  Target: LAMA2; (-) strand; PAM type: YTN; PAM sequence: TTT
ttggtgtctctttccatcac

SEQ ID NO: 230410 - DNA, 20 bp, Artificial Sequence
  Description of Artificial Sequence: Synthetic oligonucleotide
  Target: LAMA2; (-) strand; PAM type: YTN; PAM sequence: TTT
tttggtgtctctttccatca

SEQ ID NO: 230411 - DNA, 20 bp, Artificial Sequence
  Description of Artificial Sequence: Synthetic oligonucleotide
  Target: LAMA2; (-) strand; PAM type: YTN; PAM sequence: CTA
attttttggtgtctctttcc

SEQ ID NO: 230412 - DNA, 20 bp, Artificial Sequence
  Description of Artificial Sequence: Synthetic oligonucleotide
  Target: LAMA2; (-) strand; PAM type: YTN; PAM sequence: TTC
acatgactaattttttggtg

SEQ ID NO: 230413 - DNA, 20 bp, Artificial Sequence
  Description of Artificial Sequence: Synthetic oligonucleotide
  Target: LAMA2; (-) strand; PAM type: YTN; PAM sequence: TTT
cacatgactaattttttggt

SEQ ID NO: 230414 - DNA, 20 bp, Artificial Sequence
  Description of Artificial Sequence: Synthetic oligonucleotide
  Target: LAMA2; (-) strand; PAM type: YTN; PAM sequence: CTT
tcacatgactaattttttgg

SEQ ID NO: 230415 - DNA, 20 bp, Artificial Sequence
  Description of Artificial Sequence: Synthetic oligonucleotide
  Target: LAMA2; (-) strand; PAM type: YTN; PAM sequence: TTG
ctttcacatgactaattttt

SEQ ID NO: 230416 - DNA, 20 bp, Artificial Sequence
  Description of Artificial Sequence: Synthetic oligonucleotide
  Target: LAMA2; (-) strand; PAM type: YTN; PAM sequence: TTT
gctttcacatgactaatttt

SEQ ID NO: 230417 - DNA, 20 bp, Artificial Sequence
  Description of Artificial Sequence: Synthetic oligonucleotide
  Target: LAMA2; (-) strand; PAM type: YTN; PAM sequence: TTT
tgctttcacatgactaattt

SEQ ID NO: 230418 - DNA, 20 bp, Artificial Sequence
  Description of Artificial Sequence: Synthetic oligonucleotide
  Target: LAMA2; (-) strand; PAM type: YTN; PAM sequence: TTA
gttttgctttcacatgacta

SEQ ID NO: 230419 - DNA, 20 bp, Artificial Sequence
  Description of Artificial Sequence: Synthetic oligonucleotide
  Target: LAMA2; (-) strand; PAM type: YTN; PAM sequence: CTT
agttttgctttcacatgact

SEQ ID NO: 230420 - DNA, 20 bp, Artificial Sequence
  Description of Artificial Sequence: Synthetic oligonucleotide
  Target: LAMA2; (-) strand; PAM type: YTN; PAM sequence: CTC
ttagttttgctttcacatga

SEQ ID NO: 230421 - DNA, 20 bp, Artificial Sequence
  Description of Artificial Sequence: Synthetic oligonucleotide
  Target: LAMA2; (-) strand; PAM type: YTN; PAM sequence: CTC
ctcttagttttgctttcaca

SEQ ID NO: 230422 - DNA, 20 bp, Artificial Sequence
  Description of Artificial Sequence: Synthetic oligonucleotide
  Target: LAMA2; (-) strand; PAM type: YTN; PAM sequence: CTC
tcctcttagttttgctttca

SEQ ID NO: 230423 - DNA, 20 bp, Artificial Sequence
  Description of Artificial Sequence: Synthetic oligonucleotide
  Target: LAMA2; (-) strand; PAM type: YTN; PAM sequence: TTC
cctctcctcttagttttgct

SEQ ID NO: 230424 - DNA, 20 bp, Artificial Sequence
  Description of Artificial Sequence: Synthetic oligonucleotide
  Target: LAMA2; (-) strand; PAM type: YTN; PAM sequence: TTT
ccctctcctcttagttttgc

SEQ ID NO: 230425 - DNA, 20 bp, Artificial Sequence
  Description of Artificial Sequence: Synthetic oligonucleotide
  Target: LAMA2; (-) strand; PAM type: YTN; PAM sequence: CTT
tccctctcctcttagttttg

SEQ ID NO: 230426 - DNA, 20 bp, Artificial Sequence
  Description of Artificial Sequence: Synthetic oligonucleotide
  Target: LAMA2; (-) strand; PAM type: YTN; PAM sequence: TTG
ccacctttccctctcctctt

SEQ ID NO: 230427 - DNA, 20 bp, Artificial Sequence
  Description of Artificial Sequence: Synthetic oligonucleotide
  Target: LAMA2; (-) strand; PAM type: YTN; PAM sequence: TTT
gccacctttccctctcctct

SEQ ID NO: 230428 - DNA, 20 bp, Artificial Sequence
  Description of Artificial Sequence: Synthetic oligonucleotide
  Target: LAMA2; (-) strand; PAM type: YTN; PAM sequence: TTT
tgccacctttccctctcctc

SEQ ID NO: 230429 - DNA, 20 bp, Artificial Sequence
  Description of Artificial Sequence: Synthetic oligonucleotide
  Target: LAMA2; (-) strand; PAM type: YTN; PAM sequence: CTT
ttgccacctttccctctcct

SEQ ID NO: 230430 - DNA, 20 bp, Artificial Sequence
  Description of Artificial Sequence: Synthetic oligonucleotide
  Target: LAMA2; (-) strand; PAM type: YTN; PAM sequence: TTC
ttttgccacctttccctctc

SEQ ID NO: 230431 - DNA, 20 bp, Artificial Sequence
  Description of Artificial Sequence: Synthetic oligonucleotide
  Target: LAMA2; (-) strand; PAM type: YTN; PAM sequence: CTT
cttttgccacctttccctct

SEQ ID NO: 230432 - DNA, 20 bp, Artificial Sequence
  Description of Artificial Sequence: Synthetic oligonucleotide
  Target: LAMA2; (-) strand; PAM type: YTN; PAM sequence: TTC
ccttcttttgccacctttcc

SEQ ID NO: 230433 - DNA, 20 bp, Artificial Sequence
  Description of Artificial Sequence: Synthetic oligonucleotide
  Target: LAMA2; (-) strand; PAM type: YTN; PAM sequence: CTG
aatgttcccttcttttgcca

SEQ ID NO: 230434 - DNA, 20 bp, Artificial Sequence
  Description of Artificial Sequence: Synthetic oligonucleotide
  Target: LAMA2; (-) strand; PAM type: YTN; PAM sequence: CTC
tgaatgttcccttcttttgc

SEQ ID NO: 230435 - DNA, 20 bp, Artificial Sequence
  Description of Artificial Sequence: Synthetic oligonucleotide
  Target: LAMA2; (-) strand; PAM type: YTN; PAM sequence: TTC
tctgaatgttcccttctttt

SEQ ID NO: 230436 - DNA, 20 bp, Artificial Sequence
  Description of Artificial Sequence: Synthetic oligonucleotide
  Target: LAMA2; (-) strand; PAM type: YTN; PAM sequence: CTC
aatatatcaacattctctga

SEQ ID NO: 230437 - DNA, 20 bp, Artificial Sequence
  Description of Artificial Sequence: Synthetic oligonucleotide
  Target: LAMA2; (-) strand; PAM type: YTN; PAM sequence: CTC
tcaatatatcaacattctct

SEQ ID NO: 230438 - DNA, 20 bp, Artificial Sequence
  Description of Artificial Sequence: Synthetic oligonucleotide
  Target: LAMA2; (-) strand; PAM type: YTN; PAM sequence: CTC
acctctcaatatatcaacat

SEQ ID NO: 230439 - DNA, 20 bp, Artificial Sequence
  Description of Artificial Sequence: Synthetic oligonucleotide
  Target: LAMA2; (-) strand; PAM type: YTN; PAM sequence: TTC
tcacctctcaatatatcaac

SEQ ID NO: 230440 - DNA, 20 bp, Artificial Sequence
  Description of Artificial Sequence: Synthetic oligonucleotide
  Target: LAMA2; (-) strand; PAM type: YTN; PAM sequence: CTA
ttctcacctctcaatatatc

SEQ ID NO: 230441 - DNA, 20 bp, Artificial Sequence
  Description of Artificial Sequence: Synthetic oligonucleotide
  Target: LAMA2; (-) strand; PAM type: YTN; PAM sequence: CTC
cctattctcacctctcaata

SEQ ID NO: 230442 - DNA, 20 bp, Artificial Sequence
  Description of Artificial Sequence: Synthetic oligonucleotide
  Target: LAMA2; (-) strand; PAM type: YTN; PAM sequence: CTA
ccaactccctattctcacct

SEQ ID NO: 230443 - DNA, 20 bp, Artificial Sequence
  Description of Artificial Sequence: Synthetic oligonucleotide
  Target: LAMA2; (-) strand; PAM type: YTN; PAM sequence: TTG
cctaccaactccctattctc

SEQ ID NO: 230444 - DNA, 20 bp, Artificial Sequence
  Description of Artificial Sequence: Synthetic oligonucleotide
  Target: LAMA2; (-) strand; PAM type: YTN; PAM sequence: CTT
gcctaccaactccctattct

SEQ ID NO: 230445 - DNA, 20 bp, Artificial Sequence
  Description of Artificial Sequence: Synthetic oligonucleotide
  Target: LAMA2; (-) strand; PAM type: YTN; PAM sequence: CTG
acacttgcctaccaactccc

SEQ ID NO: 230446 - DNA, 20 bp, Artificial Sequence
  Description of Artificial Sequence: Synthetic oligonucleotide
  Target: LAMA2; (-) strand; PAM type: YTN; PAM sequence: CTC
tgacacttgcctaccaactc

SEQ ID NO: 230447 - DNA, 20 bp, Artificial Sequence
  Description of Artificial Sequence: Synthetic oligonucleotide
  Target: LAMA2; (-) strand; PAM type: YTN; PAM sequence: CTC
ccacactctgacacttgcct

SEQ ID NO: 230448 - DNA, 20 bp, Artificial Sequence
  Description of Artificial Sequence: Synthetic oligonucleotide
  Target: LAMA2; (-) strand; PAM type: YTN; PAM sequence: CTG
tcaccatcctcccacactct

SEQ ID NO: 230449 - DNA, 20 bp, Artificial Sequence
  Description of Artificial Sequence: Synthetic oligonucleotide
  Target: LAMA2; (-) strand; PAM type: YTN; PAM sequence: CTA
gtgactgtcaccatcctccc

SEQ ID NO: 230450 - DNA, 20 bp, Artificial Sequence
  Description of Artificial Sequence: Synthetic oligonucleotide
  Target: LAMA2; (-) strand; PAM type: YTN; PAM sequence: TTC
ctagtgactgtcaccatcct

SEQ ID NO: 230451 - DNA, 20 bp, Artificial Sequence
  Description of Artificial Sequence: Synthetic oligonucleotide
  Target: LAMA2; (-) strand; PAM type: YTN; PAM sequence: CTG
gagttcctagtgactgtcac

SEQ ID NO: 230452 - DNA, 20 bp, Artificial Sequence
  Description of Artificial Sequence: Synthetic oligonucleotide
  Target: LAMA2; (-) strand; PAM type: YTN; PAM sequence: TTG
tgtgtatgcaaactggagtt

SEQ ID NO: 230453 - DNA, 20 bp, Artificial Sequence
  Description of Artificial Sequence: Synthetic oligonucleotide
  Target: LAMA2; (-) strand; PAM type: YTN; PAM sequence: TTA
acattgtgtgtatgcaaact

SEQ ID NO: 230454 - DNA, 20 bp, Artificial Sequence
  Description of Artificial Sequence: Synthetic oligonucleotide
  Target: LAMA2; (-) strand; PAM type: YTN; PAM sequence: CTT
aacattgtgtgtatgcaaac

SEQ ID NO: 230455 - DNA, 20 bp, Artificial Sequence
  Description of Artificial Sequence: Synthetic oligonucleotide
  Target: LAMA2; (-) strand; PAM type: YTN; PAM sequence: TTC
ttaacattgtgtgtatgcaa

SEQ ID NO: 230456 - DNA, 20 bp, Artificial Sequence
  Description of Artificial Sequence: Synthetic oligonucleotide
  Target: LAMA2; (-) strand; PAM type: YTN; PAM sequence: CTA
atgttcttaacattgtgtgt

SEQ ID NO: 230457 - DNA, 20 bp, Artificial Sequence
  Description of Artificial Sequence: Synthetic oligonucleotide
  Target: LAMA2; (-) strand; PAM type: YTN; PAM sequence: TTC
taatgttcttaacattgtgt

SEQ ID NO: 230458 - DNA, 20 bp, Artificial Sequence
  Description of Artificial Sequence: Synthetic oligonucleotide
  Target: LAMA2; (-) strand; PAM type: YTN; PAM sequence: TTT
ctaatgttcttaacattgtg

SEQ ID NO: 230459 - DNA, 20 bp, Artificial Sequence
  Description of Artificial Sequence: Synthetic oligonucleotide
  Target: LAMA2; (-) strand; PAM type: YTN; PAM sequence: CTA
atttctaatgttcttaacat

SEQ ID NO: 230460 - DNA, 20 bp, Artificial Sequence
  Description of Artificial Sequence: Synthetic oligonucleotide
  Target: LAMA2; (-) strand; PAM type: YTN; PAM sequence: CTA
gctaatttctaatgttctta

SEQ ID NO: 230461 - DNA, 20 bp, Artificial Sequence
  Description of Artificial Sequence: Synthetic oligonucleotide
  Target: LAMA2; (-) strand; PAM type: YTN; PAM sequence: TTG
gctagctaatttctaatgtt

SEQ ID NO: 230462 - DNA, 20 bp, Artificial Sequence
  Description of Artificial Sequence: Synthetic oligonucleotide
  Target: LAMA2; (-) strand; PAM type: YTN; PAM sequence: TTC
cattggctagctaatttcta

SEQ ID NO: 230463 - DNA, 20 bp, Artificial Sequence
  Description of Artificial Sequence: Synthetic oligonucleotide
  Target: LAMA2; (-) strand; PAM type: YTN; PAM sequence: CTG
agcattccattggctagcta

SEQ ID NO: 230464 - DNA, 20 bp, Artificial Sequence
  Description of Artificial Sequence: Synthetic oligonucleotide
  Target: LAMA2; (-) strand; PAM type: YTN; PAM sequence: TTC
aagactgagcattccattgg

SEQ ID NO: 230465 - DNA, 20 bp, Artificial Sequence
  Description of Artificial Sequence: Synthetic oligonucleotide
  Target: LAMA2; (-) strand; PAM type: YTN; PAM sequence: CTT
caagactgagcattccattg

SEQ ID NO: 230466 - DNA, 20 bp, Artificial Sequence
  Description of Artificial Sequence: Synthetic oligonucleotide
  Target: LAMA2; (-) strand; PAM type: YTN; PAM sequence: CTC
ttcaagactgagcattccat

SEQ ID NO: 230467 - DNA, 20 bp, Artificial Sequence
  Description of Artificial Sequence: Synthetic oligonucleotide
  Target: LAMA2; (-) strand; PAM type: YTN; PAM sequence: TTA
agcagagacacaagctcttc

SEQ ID NO: 230468 - DNA, 20 bp, Artificial Sequence
  Description of Artificial Sequence: Synthetic oligonucleotide
  Target: LAMA2; (-) strand; PAM type: YTN; PAM sequence: TTT
aagcagagacacaagctctt

SEQ ID NO: 230469 - DNA, 20 bp, Artificial Sequence
  Description of Artificial Sequence: Synthetic oligonucleotide
  Target: LAMA2; (-) strand; PAM type: YTN; PAM sequence: CTA
atgcatacaggagtttaagc

SEQ ID NO: 230470 - DNA, 20 bp, Artificial Sequence
  Description of Artificial Sequence: Synthetic oligonucleotide
  Target: LAMA2; (-) strand; PAM type: YTN; PAM sequence: TTA
tggaatcatactaatgcata

SEQ ID NO: 230471 - DNA, 20 bp, Artificial Sequence
  Description of Artificial Sequence: Synthetic oligonucleotide
  Target: LAMA2; (-) strand; PAM type: YTN; PAM sequence: TTT
atggaatcatactaatgcat

SEQ ID NO: 230472 - DNA, 20 bp, Artificial Sequence
  Description of Artificial Sequence: Synthetic oligonucleotide
  Target: LAMA2; (-) strand; PAM type: YTN; PAM sequence: TTA
aatttatggaatcatactaa

SEQ ID NO: 230473 - DNA, 20 bp, Artificial Sequence
  Description of Artificial Sequence: Synthetic oligonucleotide
  Target: LAMA2; (-) strand; PAM type: YTN; PAM sequence: TTT
aaatttatggaatcatacta

SEQ ID NO: 230474 - DNA, 20 bp, Artificial Sequence
  Description of Artificial Sequence: Synthetic oligonucleotide
  Target: LAMA2; (-) strand; PAM type: YTN; PAM sequence: CTT
taaatttatggaatcatact

SEQ ID NO: 230475 - DNA, 20 bp, Artificial Sequence
  Description of Artificial Sequence: Synthetic oligonucleotide
  Target: LAMA2; (-) strand; PAM type: YTN; PAM sequence: CTC
aagatgtcagagactttaaa

SEQ ID NO: 230476 - DNA, 20 bp, Artificial Sequence
  Description of Artificial Sequence: Synthetic oligonucleotide
  Target: LAMA2; (-) strand; PAM type: YTN; PAM sequence: TTA
aaactcaagatgtcagagac

SEQ ID NO: 230477 - DNA, 20 bp, Artificial Sequence
  Description of Artificial Sequence: Synthetic oligonucleotide
  Target: LAMA2; (-) strand; PAM type: YTN; PAM sequence: CTT
aaaactcaagatgtcagaga

SEQ ID NO: 230478 - DNA, 20 bp, Artificial Sequence
  Description of Artificial Sequence: Synthetic oligonucleotide
  Target: LAMA2; (-) strand; PAM type: YTN; PAM sequence: TTC
agaaagcttaaaactcaaga

SEQ ID NO: 230479 - DNA, 20 bp, Artificial Sequence
  Description of Artificial Sequence: Synthetic oligonucleotide
  Target: LAMA2; (-) strand; PAM type: YTN; PAM sequence: TTA
atgttcagaaagcttaaaac

SEQ ID NO: 230480 - DNA, 20 bp, Artificial Sequence
  Description of Artificial Sequence: Synthetic oligonucleotide
  Target: LAMA2; (-) strand; PAM type: YTN; PAM sequence: TTT
aatgttcagaaagcttaaaa

SEQ ID NO: 230481 - DNA, 20 bp, Artificial Sequence
  Description of Artificial Sequence: Synthetic oligonucleotide
  Target: LAMA2; (-) strand; PAM type: YTN; PAM sequence: CTG
atttaatgttcagaaagctt

SEQ ID NO: 230482 - DNA, 20 bp, Artificial Sequence
  Description of Artificial Sequence: Synthetic oligonucleotide
  Target: LAMA2; (-) strand; PAM type: YTN; PAM sequence: CTC
cactgatttaatgttcagaa

SEQ ID NO: 230483 - DNA, 20 bp, Artificial Sequence
  Description of Artificial Sequence: Synthetic oligonucleotide
  Target: LAMA2; (-) strand; PAM type: YTN; PAM sequence: CTA
gcagcctccactgatttaat

SEQ ID NO: 230484 - DNA, 20 bp, Artificial Sequence
  Description of Artificial Sequence: Synthetic oligonucleotide
  Target: LAMA2; (-) strand; PAM type: YTN; PAM sequence: CTA
ctagcagcctccactgattt

SEQ ID NO: 230485 - DNA, 20 bp, Artificial Sequence
  Description of Artificial Sequence: Synthetic oligonucleotide
  Target: LAMA2; (-) strand; PAM type: YTN; PAM sequence: TTC
aggatagctactagcagcct

SEQ ID NO: 230486 - DNA, 20 bp, Artificial Sequence
  Description of Artificial Sequence: Synthetic oligonucleotide
  Target: LAMA2; (-) strand; PAM type: YTN; PAM sequence: TTT
caggatagctactagcagcc

SEQ ID NO: 230487 - DNA, 20 bp, Artificial Sequence
  Description of Artificial Sequence: Synthetic oligonucleotide
  Target: LAMA2; (-) strand; PAM type: YTN; PAM sequence: CTC
atatgtatagaagcagcatt

SEQ ID NO: 230488 - DNA, 20 bp, Artificial Sequence
  Description of Artificial Sequence: Synthetic oligonucleotide
  Target: LAMA2; (-) strand; PAM type: YTN; PAM sequence: TTA
ctcatatgtatagaagcagc

SEQ ID NO: 230489 - DNA, 20 bp, Artificial Sequence
  Description of Artificial Sequence: Synthetic oligonucleotide
  Target: LAMA2; (-) strand; PAM type: YTN; PAM sequence: TTT
actcatatgtatagaagcag

SEQ ID NO: 230490 - DNA, 20 bp, Artificial Sequence
  Description of Artificial Sequence: Synthetic oligonucleotide
  Target: LAMA2; (-) strand; PAM type: YTN; PAM sequence: TTT
tactcatatgtatagaagca

SEQ ID NO: 230491 - DNA, 20 bp, Artificial Sequence
  Description of Artificial Sequence: Synthetic oligonucleotide
  Target: LAMA2; (-) strand; PAM type: YTN; PAM sequence: TTT
ttactcatatgtatagaagc

SEQ ID NO: 230492 - DNA, 20 bp, Artificial Sequence
  Description of Artificial Sequence: Synthetic oligonucleotide
  Target: LAMA2; (-) strand; PAM type: YTN; PAM sequence: TTG
gatttttactcatatgtata

SEQ ID NO: 230493 - DNA, 20 bp, Artificial Sequence
  Description of Artificial Sequence: Synthetic oligonucleotide
  Target: LAMA2; (-) strand; PAM type: YTN; PAM sequence: TTT
ggatttttactcatatgtat

SEQ ID NO: 230494 - DNA, 20 bp, Artificial Sequence
  Description of Artificial Sequence: Synthetic oligonucleotide
  Target: LAMA2; (-) strand; PAM type: YTN; PAM sequence: TTA
atttggatttttactcatat

SEQ ID NO: 230495 - DNA, 20 bp, Artificial Sequence
  Description of Artificial Sequence: Synthetic oligonucleotide
  Target: LAMA2; (-) strand; PAM type: YTN; PAM sequence: CTG
tataaatacattaatttgga

SEQ ID NO: 230496 - DNA, 20 bp, Artificial Sequence
  Description of Artificial Sequence: Synthetic oligonucleotide
  Target: LAMA2; (-) strand; PAM type: YTN; PAM sequence: TTA
cgagtacacaaatgaaaagc

SEQ ID NO: 230497 - DNA, 20 bp, Artificial Sequence
  Description of Artificial Sequence: Synthetic oligonucleotide
  Target: LAMA2; (-) strand; PAM type: YTN; PAM sequence: TTT
acgagtacacaaatgaaaag

SEQ ID NO: 230498 - DNA, 20 bp, Artificial Sequence
  Description of Artificial Sequence: Synthetic oligonucleotide
  Target: LAMA2; (-) strand; PAM type: YTN; PAM sequence: TTT
tacgagtacacaaatgaaaa

SEQ ID NO: 230499 - DNA, 20 bp, Artificial Sequence
  Description of Artificial Sequence: Synthetic oligonucleotide
  Target: LAMA2; (-) strand; PAM type: YTN; PAM sequence: CTG
tgtgtgtgtgtattttacga

SEQ ID NO: 230500 - DNA, 20 bp, Artificial Sequence
  Description of Artificial Sequence: Synthetic oligonucleotide
  Target: LAMA2; (-) strand; PAM type: YTN; PAM sequence: CTC
tgtgtgtgtgtgtattttac

SEQ ID NO: 230501 - DNA, 20 bp, Artificial Sequence
  Description of Artificial Sequence: Synthetic oligonucleotide
  Target: LAMA2; (-) strand; PAM type: YTN; PAM sequence: TTG
tctctgtgtgtgtgtgtatt

SEQ ID NO: 230502 - DNA, 20 bp, Artificial Sequence
  Description of Artificial Sequence: Synthetic oligonucleotide
  Target: LAMA2; (-) strand; PAM type: YTN; PAM sequence: TTG
aattgtctctgtgtgtgtgt

SEQ ID NO: 230503 - DNA, 20 bp, Artificial Sequence
  Description of Artificial Sequence: Synthetic oligonucleotide
  Target: LAMA2; (-) strand; PAM type: YTN; PAM sequence: TTG
tgtgtgcgcgtgtgtgtgtg

SEQ ID NO: 230504 - DNA, 20 bp, Artificial Sequence
  Description of Artificial Sequence: Synthetic oligonucleotide
  Target: LAMA2; (-) strand; PAM type: YTN; PAM sequence: TTG
aattgtgtgtgcgcgtgtgt

SEQ ID NO: 230505 - DNA, 20 bp, Artificial Sequence
  Description of Artificial Sequence: Synthetic oligonucleotide
  Target: LAMA2; (-) strand; PAM type: YTN; PAM sequence: TTC
agagaaaagttgaattgtgt

SEQ ID NO: 230506 - DNA, 20 bp, Artificial Sequence
  Description of Artificial Sequence: Synthetic oligonucleotide
  Target: LAMA2; (-) strand; PAM type: YTN; PAM sequence: CTT
cagagaaaagttgaattgtg

SEQ ID NO: 230507 - DNA, 20 bp, Artificial Sequence
  Description of Artificial Sequence: Synthetic oligonucleotide
  Target: LAMA2; (-) strand; PAM type: YTN; PAM sequence: TTC
ttcagagaaaagttgaattg

SEQ ID NO: 230508 - DNA, 20 bp, Artificial Sequence
  Description of Artificial Sequence: Synthetic oligonucleotide
  Target: LAMA2; (-) strand; PAM type: YTN; PAM sequence: CTC
aaaggttcttcagagaaaag

SEQ ID NO: 230509 - DNA, 20 bp, Artificial Sequence
  Description of Artificial Sequence: Synthetic oligonucleotide
  Target: LAMA2; (-) strand; PAM type: YTN; PAM sequence: CTG
actcaaaggttcttcagaga

SEQ ID NO: 230510 - DNA, 20 bp, Artificial Sequence
  Description of Artificial Sequence: Synthetic oligonucleotide
  Target: LAMA2; (-) strand; PAM type: YTN; PAM sequence: CTC
tgactcaaaggttcttcaga

SEQ ID NO: 230511 - DNA, 20 bp, Artificial Sequence
  Description of Artificial Sequence: Synthetic oligonucleotide
  Target: LAMA2; (-) strand; PAM type: YTN; PAM sequence: TTC
tctgactcaaaggttcttca

SEQ ID NO: 230512 - DNA, 20 bp, Artificial Sequence
  Description of Artificial Sequence: Synthetic oligonucleotide
  Target: LAMA2; (-) strand; PAM type: YTN; PAM sequence: CTC
attctctgactcaaaggttc

SEQ ID NO: 230513 - DNA, 20 bp, Artificial Sequence
  Description of Artificial Sequence: Synthetic oligonucleotide
  Target: LAMA2; (-) strand; PAM type: YTN; PAM sequence: TTC
tcattctctgactcaaaggt

SEQ ID NO: 230514 - DNA, 20 bp, Artificial Sequence
  Description of Artificial Sequence: Synthetic oligonucleotide
  Target: LAMA2; (-) strand; PAM type: YTN; PAM sequence: TTC
attctcattctctgactcaa

SEQ ID NO: 230515 - DNA, 20 bp, Artificial Sequence
  Description of Artificial Sequence: Synthetic oligonucleotide
  Target: LAMA2; (-) strand; PAM type: YTN; PAM sequence: CTT
cattctcattctctgactca

SEQ ID NO: 230516 - DNA, 20 bp, Artificial Sequence
  Description of Artificial Sequence: Synthetic oligonucleotide
  Target: LAMA2; (-) strand; PAM type: YTN; PAM sequence: CTC
cttcattctcattctctgac

SEQ ID NO: 230517 - DNA, 20 bp, Artificial Sequence
  Description of Artificial Sequence: Synthetic oligonucleotide
  Target: LAMA2; (-) strand; PAM type: YTN; PAM sequence: TTC
agtctccttcattctcattc

SEQ ID NO: 230518 - DNA, 20 bp, Artificial Sequence
  Description of Artificial Sequence: Synthetic oligonucleotide
  Target: LAMA2; (-) strand; PAM type: YTN; PAM sequence: TTA
aaagagaaattcagtctcct

SEQ ID NO: 230519 - DNA, 20 bp, Artificial Sequence
  Description of Artificial Sequence: Synthetic oligonucleotide
  Target: LAMA2; (-) strand; PAM type: YTN; PAM sequence: CTT
aaaagagaaattcagtctcc

SEQ ID NO: 230520 - DNA, 20 bp, Artificial Sequence
  Description of Artificial Sequence: Synthetic oligonucleotide
  Target: LAMA2; (-) strand; PAM type: YTN; PAM sequence: CTA
gacaggaacttaaaagagaa

SEQ ID NO: 230521 - DNA, 20 bp, Artificial Sequence
  Description of Artificial Sequence: Synthetic oligonucleotide
  Target: LAMA2; (-) strand; PAM type: YTN; PAM sequence: TTG
gaacaaaacctagacaggaa

SEQ ID NO: 230522 - DNA, 20 bp, Artificial Sequence
  Description of Artificial Sequence: Synthetic oligonucleotide
  Target: LAMA2; (-) strand; PAM type: YTN; PAM sequence: TTA
gattggaacaaaacctagac

SEQ ID NO: 230523 - DNA, 20 bp, Artificial Sequence
  Description of Artificial Sequence: Synthetic oligonucleotide
  Target: LAMA2; (-) strand; PAM type: YTN; PAM sequence: CTG
tgtcattagattggaacaaa

SEQ ID NO: 230524 - DNA, 20 bp, Artificial Sequence
  Description of Artificial Sequence: Synthetic oligonucleotide
  Target: LAMA2; (-) strand; PAM type: YTN; PAM sequence: CTA
aatacagtgccagatcctgt

SEQ ID NO: 230525 - DNA, 20 bp, Artificial Sequence
  Description of Artificial Sequence: Synthetic oligonucleotide
  Target: LAMA2; (-) strand; PAM type: YTN; PAM sequence: TTG
gagcaggaggtctaaataca

SEQ ID NO: 230526 - DNA, 20 bp, Artificial Sequence
  Description of Artificial Sequence: Synthetic oligonucleotide
  Target: LAMA2; (-) strand; PAM type: YTN; PAM sequence: CTT
ggagcaggaggtctaaatac

SEQ ID NO: 230527 - DNA, 20 bp, Artificial Sequence
  Description of Artificial Sequence: Synthetic oligonucleotide
  Target: LAMA2; (-) strand; PAM type: YTN; PAM sequence: TTA
aaataaaaataaaatcttgg

SEQ ID NO: 230528 - DNA, 20 bp, Artificial Sequence
  Description of Artificial Sequence: Synthetic oligonucleotide
  Target: LAMA2; (-) strand; PAM type: YTN; PAM sequence: TTT
aaaataaaaataaaatcttg

SEQ ID NO: 230529 - DNA, 20 bp, Artificial Sequence
  Description of Artificial Sequence: Synthetic oligonucleotide
  Target: LAMA2; (-) strand; PAM type: YTN; PAM sequence: TTG
tttaaaataaaaataaaatc

SEQ ID NO: 230530 - DNA, 20 bp, Artificial Sequence
  Description of Artificial Sequence: Synthetic oligonucleotide
  Target: LAMA2; (-) strand; PAM type: YTN; PAM sequence: CTT
gtttaaaataaaaataaaat

SEQ ID NO: 230531 - DNA, 20 bp, Artificial Sequence
  Description of Artificial Sequence: Synthetic oligonucleotide
  Target: LAMA2; (-) strand; PAM type: YTN; PAM sequence: TTC
agtccccgtgtgggaacact

SEQ ID NO: 230532 - DNA, 20 bp, Artificial Sequence
  Description of Artificial Sequence: Synthetic oligonucleotide
  Target: LAMA2; (-) strand; PAM type: YTN; PAM sequence: TTT
cagtccccgtgtgggaacac

SEQ ID NO: 230533 - DNA, 20 bp, Artificial Sequence
  Description of Artificial Sequence: Synthetic oligonucleotide
  Target: LAMA2; (-) strand; PAM type: YTN; PAM sequence: TTT
tcagtccccgtgtgggaaca

SEQ ID NO: 230534 - DNA, 20 bp, Artificial Sequence
  Description of Artificial Sequence: Synthetic oligonucleotide
  Target: LAMA2; (-) strand; PAM type: YTN; PAM sequence: TTG
ttttcagtccccgtgtggga

SEQ ID NO: 230535 - DNA, 20 bp, Artificial Sequence
  Description of Artificial Sequence: Synthetic oligonucleotide
  Target: LAMA2; (-) strand; PAM type: YTN; PAM sequence: TTT
gttttcagtccccgtgtggg

SEQ ID NO: 230536 - DNA, 20 bp, Artificial Sequence
  Description of Artificial Sequence: Synthetic oligonucleotide
  Target: LAMA2; (-) strand; PAM type: YTN; PAM sequence: TTT
tgttttcagtccccgtgtgg

SEQ ID NO: 230537 - DNA, 20 bp, Artificial Sequence
  Description of Artificial Sequence: Synthetic oligonucleotide
  Target: LAMA2; (-) strand; PAM type: YTN; PAM sequence: CTG
ttttgttttcagtccccgtg

SEQ ID NO: 230538 - DNA, 20 bp, Artificial Sequence
  Description of Artificial Sequence: Synthetic oligonucleotide
  Target: LAMA2; (-) strand; PAM type: YTN; PAM sequence: TTC
ctgttttgttttcagtcccc

SEQ ID NO: 230539 - DNA, 20 bp, Artificial Sequence
  Description of Artificial Sequence: Synthetic oligonucleotide
  Target: LAMA2; (-) strand; PAM type: YTN; PAM sequence: TTT
cctgttttgttttcagtccc

SEQ ID NO: 230540 - DNA, 20 bp, Artificial Sequence
  Description of Artificial Sequence: Synthetic oligonucleotide
  Target: LAMA2; (-) strand; PAM type: YTN; PAM sequence: TTT
tcctgttttgttttcagtcc

SEQ ID NO: 230541 - DNA, 20 bp, Artificial Sequence
  Description of Artificial Sequence: Synthetic oligonucleotide
  Target: LAMA2; (-) strand; PAM type: YTN; PAM sequence: TTA
agcaacattttcctgttttg

SEQ ID NO: 230542 - DNA, 20 bp, Artificial Sequence
  Description of Artificial Sequence: Synthetic oligonucleotide
  Target: LAMA2; (-) strand; PAM type: YTN; PAM sequence: CTT
aagcaacattttcctgtttt

SEQ ID NO: 230543 - DNA, 20 bp, Artificial Sequence
  Description of Artificial Sequence: Synthetic oligonucleotide
  Target: LAMA2; (-) strand; PAM type: YTN; PAM sequence: CTC
aaaggaaaacttaagcaaca

SEQ ID NO: 230544 - DNA, 20 bp, Artificial Sequence
  Description of Artificial Sequence: Synthetic oligonucleotide
  Target: LAMA2; (-) strand; PAM type: YTN; PAM sequence: TTG
aaagtcagataacagcagct

SEQ ID NO: 230545 - DNA, 20 bp, Artificial Sequence
  Description of Artificial Sequence: Synthetic oligonucleotide
  Target: LAMA2; (-) strand; PAM type: YTN; PAM sequence: CTT
gaaagtcagataacagcagc

SEQ ID NO: 230546 - DNA, 20 bp, Artificial Sequence
  Description of Artificial Sequence: Synthetic oligonucleotide
  Target: LAMA2; (-) strand; PAM type: YTN; PAM sequence: TTG
gtgagacggaacaatcagta

SEQ ID NO: 230547 - DNA, 20 bp, Artificial Sequence
  Description of Artificial Sequence: Synthetic oligonucleotide
  Target: LAMA2; (-) strand; PAM type: YTN; PAM sequence: CTA
cattggtgagacggaacaat

SEQ ID NO: 230548 - DNA, 20 bp, Artificial Sequence
  Description of Artificial Sequence: Synthetic oligonucleotide
  Target: LAMA2; (-) strand; PAM type: YTN; PAM sequence: CTG
agagtacaatgacctacatt

SEQ ID NO: 230549 - DNA, 20 bp, Artificial Sequence
  Description of Artificial Sequence: Synthetic oligonucleotide
  Target: LAMA2; (-) strand; PAM type: YTN; PAM sequence: TTC
cgatagaaaacaaagtaact

SEQ ID NO: 230550 - DNA, 20 bp, Artificial Sequence
  Description of Artificial Sequence: Synthetic oligonucleotide
  Target: LAMA2; (-) strand; PAM type: YTN; PAM sequence: CTA
gagaaagttccgatagaaaa

SEQ ID NO: 230551 - DNA, 20 bp, Artificial Sequence
  Description of Artificial Sequence: Synthetic oligonucleotide
  Target: LAMA2; (-) strand; PAM type: YTN; PAM sequence: CTG
ctagagaaagttccgataga

SEQ ID NO: 230552 - DNA, 20 bp, Artificial Sequence
  Description of Artificial Sequence: Synthetic oligonucleotide
  Target: LAMA2; (-) strand; PAM type: YTN; PAM sequence: TTA
atgtggagagctgctagaga

SEQ ID NO: 230553 - DNA, 20 bp, Artificial Sequence
  Description of Artificial Sequence: Synthetic oligonucleotide
  Target: LAMA2; (-) strand; PAM type: YTN; PAM sequence: CTT
aatgtggagagctgctagag

SEQ ID NO: 230554 - DNA, 20 bp, Artificial Sequence
  Description of Artificial Sequence: Synthetic oligonucleotide
  Target: LAMA2; (-) strand; PAM type: YTN; PAM sequence: CTC
ccttaatgtggagagctgct

SEQ ID NO: 230555 - DNA, 20 bp, Artificial Sequence
  Description of Artificial Sequence: Synthetic oligonucleotide
  Target: LAMA2; (-) strand; PAM type: YTN; PAM sequence: TTA
ataacaaaaataaatatgtg

SEQ ID NO: 230556 - DNA, 20 bp, Artificial Sequence
  Description of Artificial Sequence: Synthetic oligonucleotide
  Target: LAMA2; (-) strand; PAM type: YTN; PAM sequence: TTA
tagggagatgaagaaaatat

SEQ ID NO: 230557 - DNA, 20 bp, Artificial Sequence
  Description of Artificial Sequence: Synthetic oligonucleotide
  Target: LAMA2; (-) strand; PAM type: YTN; PAM sequence: CTC
aaattatagggagatgaaga

SEQ ID NO: 230558 - DNA, 20 bp, Artificial Sequence
  Description of Artificial Sequence: Synthetic oligonucleotide
  Target: LAMA2; (-) strand; PAM type: YTN; PAM sequence: CTA
aaacctcaaattatagggag

SEQ ID NO: 230559 - DNA, 20 bp, Artificial Sequence
  Description of Artificial Sequence: Synthetic oligonucleotide
  Target: LAMA2; (-) strand; PAM type: YTN; PAM sequence: CTA
caaagaagaaagtgctaaaa

SEQ ID NO: 230560 - DNA, 20 bp, Artificial Sequence
  Description of Artificial Sequence: Synthetic oligonucleotide
  Target: LAMA2; (-) strand; PAM type: YTN; PAM sequence: TTC
tacaaagaagaaagtgctaa

SEQ ID NO: 230561 - DNA, 20 bp, Artificial Sequence
  Description of Artificial Sequence: Synthetic oligonucleotide
  Target: LAMA2; (-) strand; PAM type: YTN; PAM sequence: TTA
tggtaaattctacaaagaag

SEQ ID NO: 230562 - DNA, 20 bp, Artificial Sequence
  Description of Artificial Sequence: Synthetic oligonucleotide
  Target: LAMA2; (-) strand; PAM type: YTN; PAM sequence: TTT
atggtaaattctacaaagaa

SEQ ID NO: 230563 - DNA, 20 bp, Artificial Sequence
  Description of Artificial Sequence: Synthetic oligonucleotide
  Target: LAMA2; (-) strand; PAM type: YTN; PAM sequence: CTT
tatggtaaattctacaaaga

SEQ ID NO: 230564 - DNA, 20 bp, Artificial Sequence
  Description of Artificial Sequence: Synthetic oligonucleotide
  Target: LAMA2; (-) strand; PAM type: YTN; PAM sequence: TTC
aaaaatacgtatgctttatg

SEQ ID NO: 230565 - DNA, 20 bp, Artificial Sequence
  Description of Artificial Sequence: Synthetic oligonucleotide
  Target: LAMA2; (-) strand; PAM type: YTN; PAM sequence: TTT
caaaaatacgtatgctttat

SEQ ID NO: 230566 - DNA, 20 bp, Artificial Sequence
  Description of Artificial Sequence: Synthetic oligonucleotide
  Target: LAMA2; (-) strand; PAM type: YTN; PAM sequence: TTT
tcaaaaatacgtatgcttta

SEQ ID NO: 230567 - DNA, 20 bp, Artificial Sequence
  Description of Artificial Sequence: Synthetic oligonucleotide
  Target: LAMA2; (-) strand; PAM type: YTN; PAM sequence: CTA
gttttcaaaaatacgtatgc

SEQ ID NO: 230568 - DNA, 20 bp, Artificial Sequence
  Description of Artificial Sequence: Synthetic oligonucleotide
  Target: LAMA2; (-) strand; PAM type: YTN; PAM sequence: TTC
cctagttttcaaaaatacgt

SEQ ID NO: 230569 - DNA, 20 bp, Artificial Sequence
  Description of Artificial Sequence: Synthetic oligonucleotide
  Target: LAMA2; (-) strand; PAM type: YTN; PAM sequence: CTA
ttccctagttttcaaaaata

SEQ ID NO: 230570 - DNA, 20 bp, Artificial Sequence
  Description of Artificial Sequence: Synthetic oligonucleotide
  Target: LAMA2; (-) strand; PAM type: YTN; PAM sequence: TTA
gtaagtaaaagctattccct

SEQ ID NO: 230571 - DNA, 20 bp, Artificial Sequence
  Description of Artificial Sequence: Synthetic oligonucleotide
  Target: LAMA2; (-) strand; PAM type: YTN; PAM sequence: TTT
agtaagtaaaagctattccc

SEQ ID NO: 230572 - DNA, 20 bp, Artificial Sequence
  Description of Artificial Sequence: Synthetic oligonucleotide
  Target: LAMA2; (-) strand; PAM type: YTN; PAM sequence: CTT
tagtaagtaaaagctattcc

SEQ ID NO: 230573 - DNA, 20 bp, Artificial Sequence
  Description of Artificial Sequence: Synthetic oligonucleotide
  Target: LAMA2; (-) strand; PAM type: YTN; PAM sequence: TTA
agtactttagtaagtaaaag

SEQ ID NO: 230574 - DNA, 20 bp, Artificial Sequence
  Description of Artificial Sequence: Synthetic oligonucleotide
  Target: LAMA2; (-) strand; PAM type: YTN; PAM sequence: CTT
aagtactttagtaagtaaaa

SEQ ID NO: 230575 - DNA, 20 bp, Artificial Sequence
  Description of Artificial Sequence: Synthetic oligonucleotide
  Target: LAMA2; (-) strand; PAM type: YTN; PAM sequence: TTA
gtacttaagtactttagtaa

SEQ ID NO: 230576 - DNA, 20 bp, Artificial Sequence
  Description of Artificial Sequence: Synthetic oligonucleotide
  Target: LAMA2; (-) strand; PAM type: YTN; PAM sequence: TTT
agtacttaagtactttagta

SEQ ID NO: 230577 - DNA, 20 bp, Artificial Sequence
  Description of Artificial Sequence: Synthetic oligonucleotide
  Target: LAMA2; (-) strand; PAM type: YTN; PAM sequence: TTA
tgataggtttagtacttaag

SEQ ID NO: 230578 - DNA, 20 bp, Artificial Sequence
  Description of Artificial Sequence: Synthetic oligonucleotide
  Target: LAMA2; (-) strand; PAM type: YTN; PAM sequence: TTG
gttatgataggtttagtact

SEQ ID NO: 230579 - DNA, 20 bp, Artificial Sequence
  Description of Artificial Sequence: Synthetic oligonucleotide
  Target: LAMA2; (-) strand; PAM type: YTN; PAM sequence: TTA
ataaatgaaattggttatga

SEQ ID NO: 230580 - DNA, 20 bp, Artificial Sequence
  Description of Artificial Sequence: Synthetic oligonucleotide
  Target: LAMA2; (-) strand; PAM type: YTN; PAM sequence: CTT
aataaatgaaattggttatg

SEQ ID NO: 230581 - DNA, 20 bp, Artificial Sequence
  Description of Artificial Sequence: Synthetic oligonucleotide
  Target: LAMA2; (-) strand; PAM type: YTN; PAM sequence: CTA
acatcttaataaatgaaatt

SEQ ID NO: 230582 - DNA, 20 bp, Artificial Sequence
  Description of Artificial Sequence: Synthetic oligonucleotide
  Target: LAMA2; (-) strand; PAM type: YTN; PAM sequence: TTA
ctaacatcttaataaatgaa

SEQ ID NO: 230583 - DNA, 20 bp, Artificial Sequence
  Description of Artificial Sequence: Synthetic oligonucleotide
  Target: LAMA2; (-) strand; PAM type: YTN; PAM sequence: CTT
actaacatcttaataaatga

SEQ ID NO: 230584 - DNA, 20 bp, Artificial Sequence
  Description of Artificial Sequence: Synthetic oligonucleotide
  Target: LAMA2; (-) strand; PAM type: YTN; PAM sequence: CTA
aagtcttactaacatcttaa

SEQ ID NO: 230585 - DNA, 20 bp, Artificial Sequence
  Description of Artificial Sequence: Synthetic oligonucleotide
  Target: LAMA2; (-) strand; PAM type: YTN; PAM sequence: CTC
ctaaagtcttactaacatct

SEQ ID NO: 230586 - DNA, 20 bp, Artificial Sequence
  Description of Artificial Sequence: Synthetic oligonucleotide
  Target: LAMA2; (-) strand; PAM type: YTN; PAM sequence: CTC
cggaaaagaaccaacaactc

SEQ ID NO: 230587 - DNA, 20 bp, Artificial Sequence
  Description of Artificial Sequence: Synthetic oligonucleotide
  Target: LAMA2; (-) strand; PAM type: YTN; PAM sequence: TTC
tccggaaaagaaccaacaac

SEQ ID NO: 230588 - DNA, 20 bp, Artificial Sequence
  Description of Artificial Sequence: Synthetic oligonucleotide
  Target: LAMA2; (-) strand; PAM type: YTN; PAM sequence: TTA
ttctccggaaaagaaccaac

SEQ ID NO: 230589 - DNA, 20 bp, Artificial Sequence
  Description of Artificial Sequence: Synthetic oligonucleotide
  Target: LAMA2; (-) strand; PAM type: YTN; PAM sequence: CTA
aagcattattctccggaaaa

SEQ ID NO: 230590 - DNA, 20 bp, Artificial Sequence
  Description of Artificial Sequence: Synthetic oligonucleotide
  Target: LAMA2; (-) strand; PAM type: YTN; PAM sequence: CTG
ggctaaagcattattctccg

SEQ ID NO: 230591 - DNA, 20 bp, Artificial Sequence
  Description of Artificial Sequence: Synthetic oligonucleotide
  Target: LAMA2; (-) strand; PAM type: YTN; PAM sequence: CTG
ctgggctaaagcattattct

SEQ ID NO: 230592 - DNA, 20 bp, Artificial Sequence
  Description of Artificial Sequence: Synthetic oligonucleotide
  Target: LAMA2; (-) strand; PAM type: YTN; PAM sequence: TTG
gggactgctgggctaaagca

SEQ ID NO: 230593 - DNA, 20 bp, Artificial Sequence
  Description of Artificial Sequence: Synthetic oligonucleotide
  Target: LAMA2; (-) strand; PAM type: YTN; PAM sequence: CTG
gtaccaaaaaggttggggac

SEQ ID NO: 230594 - DNA, 20 bp, Artificial Sequence
  Description of Artificial Sequence: Synthetic oligonucleotide
  Target: LAMA2; (-) strand; PAM type: YTN; PAM sequence: TTC
cacaaaaccaatccctggta

SEQ ID NO: 230595 - DNA, 20 bp, Artificial Sequence
  Description of Artificial Sequence: Synthetic oligonucleotide
  Target: LAMA2; (-) strand; PAM type: YTN; PAM sequence: CTT
ccacaaaaccaatccctggt

SEQ ID NO: 230596 - DNA, 20 bp, Artificial Sequence
  Description of Artificial Sequence: Synthetic oligonucleotide
  Target: LAMA2; (-) strand; PAM type: YTN; PAM sequence: CTG
tcttccacaaaaccaatccc

SEQ ID NO: 230597 - DNA, 20 bp, Artificial Sequence
  Description of Artificial Sequence: Synthetic oligonucleotide
  Target: LAMA2; (-) strand; PAM type: YTN; PAM sequence: TTC
catggaaaaactgtcttcca

SEQ ID NO: 230598 - DNA, 20 bp, Artificial Sequence
  Description of Artificial Sequence: Synthetic oligonucleotide
  Target: LAMA2; (-) strand; PAM type: YTN; PAM sequence: CTG
tcaattccatggaaaaactg

SEQ ID NO: 230599 - DNA, 20 bp, Artificial Sequence
  Description of Artificial Sequence: Synthetic oligonucleotide
  Target: LAMA2; (-) strand; PAM type: YTN; PAM sequence: CTC
cccatcccccctgtcaattc

SEQ ID NO: 230600 - DNA, 20 bp, Artificial Sequence
  Description of Artificial Sequence: Synthetic oligonucleotide
  Target: LAMA2; (-) strand; PAM type: YTN; PAM sequence: CTG
gaaacccatccccactcccc

SEQ ID NO: 230601 - DNA, 20 bp, Artificial Sequence
  Description of Artificial Sequence: Synthetic oligonucleotide
  Target: LAMA2; (-) strand; PAM type: YTN; PAM sequence: TTC
atctggaaacccatccccac

SEQ ID NO: 230602 - DNA, 20 bp, Artificial Sequence
  Description of Artificial Sequence: Synthetic oligonucleotide
  Target: LAMA2; (-) strand; PAM type: YTN; PAM sequence: TTT
catctggaaacccatcccca

SEQ ID NO: 230603 - DNA, 20 bp, Artificial Sequence
  Description of Artificial Sequence: Synthetic oligonucleotide
  Target: LAMA2; (-) strand; PAM type: YTN; PAM sequence: TTG
atgatatgaggtaaaacagt

SEQ ID NO: 230604 - DNA, 20 bp, Artificial Sequence
  Description of Artificial Sequence: Synthetic oligonucleotide
  Target: LAMA2; (-) strand; PAM type: YTN; PAM sequence: CTT
gatgatatgaggtaaaacag

SEQ ID NO: 230605 - DNA, 20 bp, Artificial Sequence
  Description of Artificial Sequence: Synthetic oligonucleotide
  Target: LAMA2; (-) strand; PAM type: YTN; PAM sequence: CTA
atgcttgatgatatgaggta

SEQ ID NO: 230606 - DNA, 20 bp, Artificial Sequence
  Description of Artificial Sequence: Synthetic oligonucleotide
  Target: LAMA2; (-) strand; PAM type: YTN; PAM sequence: CTA
actaatgcttgatgatatga

SEQ ID NO: 230607 - DNA, 20 bp, Artificial Sequence
  Description of Artificial Sequence: Synthetic oligonucleotide
  Target: LAMA2; (-) strand; PAM type: YTN; PAM sequence: CTC
taactaatgcttgatgatat

SEQ ID NO: 230608 - DNA, 20 bp, Artificial Sequence
  Description of Artificial Sequence: Synthetic oligonucleotide
  Target: LAMA2; (-) strand; PAM type: YTN; PAM sequence: TTA
tgagactctaactaatgctt

SEQ ID NO: 230609 - DNA, 20 bp, Artificial Sequence
  Description of Artificial Sequence: Synthetic oligonucleotide
  Target: LAMA2; (-) strand; PAM type: YTN; PAM sequence: CTT
atgagactctaactaatgct

SEQ ID NO: 230610 - DNA, 20 bp, Artificial Sequence
  Description of Artificial Sequence: Synthetic oligonucleotide
  Target: LAMA2; (-) strand; PAM type: YTN; PAM sequence: CTC
cttatgagactctaactaat

SEQ ID NO: 230611 - DNA, 20 bp, Artificial Sequence
  Description of Artificial Sequence: Synthetic oligonucleotide
  Target: LAMA2; (-) strand; PAM type: YTN; PAM sequence: TTG
caggctccttatgagactct

SEQ ID NO: 230612 - DNA, 20 bp, Artificial Sequence
  Description of Artificial Sequence: Synthetic oligonucleotide
  Target: LAMA2; (-) strand; PAM type: YTN; PAM sequence: CTT
gcaggctccttatgagactc

SEQ ID NO: 230613 - DNA, 20 bp, Artificial Sequence
  Description of Artificial Sequence: Synthetic oligonucleotide
  Target: LAMA2; (-) strand; PAM type: YTN; PAM sequence: CTA
gcttgcaggctccttatgag

SEQ ID NO: 230614 - DNA, 20 bp, Artificial Sequence
  Description of Artificial Sequence: Synthetic oligonucleotide
  Target: LAMA2; (-) strand; PAM type: YTN; PAM sequence: CTG
tgcatgtgagggacctagct

SEQ ID NO: 230615 - DNA, 20 bp, Artificial Sequence
  Description of Artificial Sequence: Synthetic oligonucleotide
  Target: LAMA2; (-) strand; PAM type: YTN; PAM sequence: TTG
taaactgtgcatgtgaggga

SEQ ID NO: 230616 - DNA, 20 bp, Artificial Sequence
  Description of Artificial Sequence: Synthetic oligonucleotide
  Target: LAMA2; (-) strand; PAM type: YTN; PAM sequence: CTA
ttgtaaactgtgcatgtgag

SEQ ID NO: 230617 - DNA, 20 bp, Artificial Sequence
  Description of Artificial Sequence: Synthetic oligonucleotide
  Target: LAMA2; (-) strand; PAM type: YTN; PAM sequence: CTC
aaaggagcacaagccctatt

SEQ ID NO: 230618 - DNA, 20 bp, Artificial Sequence
  Description of Artificial Sequence: Synthetic oligonucleotide
  Target: LAMA2; (-) strand; PAM type: YTN; PAM sequence: TTC
tcaaaggagcacaagcccta

SEQ ID NO: 230619 - DNA, 20 bp, Artificial Sequence
  Description of Artificial Sequence: Synthetic oligonucleotide
  Target: LAMA2; (-) strand; PAM type: YTN; PAM sequence: TTA
ggttctcaaaggagcacaag

SEQ ID NO: 230620 - DNA, 20 bp, Artificial Sequence
  Description of Artificial Sequence: Synthetic oligonucleotide
  Target: LAMA2; (-) strand; PAM type: YTN; PAM sequence: CTG
tggcattaggttctcaaagg

SEQ ID NO: 230621 - DNA, 20 bp, Artificial Sequence
  Description of Artificial Sequence: Synthetic oligonucleotide
  Target: LAMA2; (-) strand; PAM type: YTN; PAM sequence: CTG
tcagatcagcagctgtggca

SEQ ID NO: 230622 - DNA, 20 bp, Artificial Sequence
  Description of Artificial Sequence: Synthetic oligonucleotide
  Target: LAMA2; (-) strand; PAM type: YTN; PAM sequence: CTC
ctgtcagatcagcagctgtg

SEQ ID NO: 230623 - DNA, 20 bp, Artificial Sequence
  Description of Artificial Sequence: Synthetic oligonucleotide
  Target: LAMA2; (-) strand; PAM type: YTN; PAM sequence: CTC
cacctcctgtcagatcagca

SEQ ID NO: 230624 - DNA, 20 bp, Artificial Sequence
  Description of Artificial Sequence: Synthetic oligonucleotide
  Target: LAMA2; (-) strand; PAM type: YTN; PAM sequence: CTG
agctccacctcctgtcagat

SEQ ID NO: 230625 - DNA, 20 bp, Artificial Sequence
  Description of Artificial Sequence: Synthetic oligonucleotide
  Target: LAMA2; (-) strand; PAM type: YTN; PAM sequence: CTG
cacagaaggaggtgtctgag

SEQ ID NO: 230626 - DNA, 20 bp, Artificial Sequence
  Description of Artificial Sequence: Synthetic oligonucleotide
  Target: LAMA2; (-) strand; PAM type: YTN; PAM sequence: TTA
ggaaccaggctgcacagaag

SEQ ID NO: 230627 - DNA, 20 bp, Artificial Sequence
  Description of Artificial Sequence: Synthetic oligonucleotide
  Target: LAMA2; (-) strand; PAM type: YTN; PAM sequence: CTG
ttaggaaccaggctgcacag

SEQ ID NO: 230628 - DNA, 20 bp, Artificial Sequence
  Description of Artificial Sequence: Synthetic oligonucleotide
  Target: LAMA2; (-) strand; PAM type: YTN; PAM sequence: CTG
tggcctgttaggaaccaggc

SEQ ID NO: 230629 - DNA, 20 bp, Artificial Sequence
  Description of Artificial Sequence: Synthetic oligonucleotide
  Target: LAMA2; (-) strand; PAM type: YTN; PAM sequence: CTA
tctgtggcctgttaggaacc

SEQ ID NO: 230630 - DNA, 20 bp, Artificial Sequence
  Description of Artificial Sequence: Synthetic oligonucleotide
  Target: LAMA2; (-) strand; PAM type: YTN; PAM sequence: CTG
ggccatggaccagtactatc

SEQ ID NO: 230631 - DNA, 20 bp, Artificial Sequence
  Description of Artificial Sequence: Synthetic oligonucleotide
  Target: LAMA2; (-) strand; PAM type: YTN; PAM sequence: CTG
ctgggccatggaccagtact

SEQ ID NO: 230632 - DNA, 20 bp, Artificial Sequence
  Description of Artificial Sequence: Synthetic oligonucleotide
  Target: LAMA2; (-) strand; PAM type: YTN; PAM sequence: CTA
aagcaggggtccccaactgc

SEQ ID NO: 230633 - DNA, 20 bp, Artificial Sequence
  Description of Artificial Sequence: Synthetic oligonucleotide
  Target: LAMA2; (-) strand; PAM type: YTN; PAM sequence: TTG
agggctaaagcaggggtccc

SEQ ID NO: 230634 - DNA, 20 bp, Artificial Sequence
  Description of Artificial Sequence: Synthetic oligonucleotide
  Target: LAMA2; (-) strand; PAM type: YTN; PAM sequence: CTA
agagttgagggctaaagcag

SEQ ID NO: 230635 - DNA, 20 bp, Artificial Sequence
  Description of Artificial Sequence: Synthetic oligonucleotide
  Target: LAMA2; (-) strand; PAM type: YTN; PAM sequence: CTG
aaacatgcctaagagttgag

SEQ ID NO: 230636 - DNA, 20 bp, Artificial Sequence
  Description of Artificial Sequence: Synthetic oligonucleotide
  Target: LAMA2; (-) strand; PAM type: YTN; PAM sequence: CTG
accaaaatcagaactgaaac

SEQ ID NO: 230637 - DNA, 20 bp, Artificial Sequence
  Description of Artificial Sequence: Synthetic oligonucleotide
  Target: LAMA2; (-) strand; PAM type: YTN; PAM sequence: CTA
tgctgaccaaaatcagaact

SEQ ID NO: 230638 - DNA, 20 bp, Artificial Sequence
  Description of Artificial Sequence: Synthetic oligonucleotide
  Target: LAMA2; (-) strand; PAM type: YTN; PAM sequence: CTC
tatgctgaccaaaatcagaa

SEQ ID NO: 230639 - DNA, 20 bp, Artificial Sequence
  Description of Artificial Sequence: Synthetic oligonucleotide
  Target: LAMA2; (-) strand; PAM type: YTN; PAM sequence: CTG
gtaaatagaaggaaagctct

SEQ ID NO: 230640 - DNA, 20 bp, Artificial Sequence
  Description of Artificial Sequence: Synthetic oligonucleotide
  Target: LAMA2; (-) strand; PAM type: YTN; PAM sequence: CTC
ctggtaaatagaaggaaagc

SEQ ID NO: 230641 - DNA, 20 bp, Artificial Sequence
  Description of Artificial Sequence: Synthetic oligonucleotide
  Target: LAMA2; (-) strand; PAM type: YTN; PAM sequence: TTG
atccatatcagtagagaccc

SEQ ID NO: 230642 - DNA, 20 bp, Artificial Sequence
  Description of Artificial Sequence: Synthetic oligonucleotide
  Target: LAMA2; (-) strand; PAM type: YTN; PAM sequence: CTG
ccattgatccatatcagtag

SEQ ID NO: 230643 - DNA, 20 bp, Artificial Sequence
  Description of Artificial Sequence: Synthetic oligonucleotide
  Target: LAMA2; (-) strand; PAM type: YTN; PAM sequence: CTC
ctgccattgatccatatcag

SEQ ID NO: 230644 - DNA, 20 bp, Artificial Sequence
  Description of Artificial Sequence: Synthetic oligonucleotide
  Target: LAMA2; (-) strand; PAM type: YTN; PAM sequence: TTC
cagacccaatatcacctcct

SEQ ID NO: 230645 - DNA, 20 bp, Artificial Sequence
  Description of Artificial Sequence: Synthetic oligonucleotide
  Target: LAMA2; (-) strand; PAM type: YTN; PAM sequence: CTA
agccaaaggatagttccaga

SEQ ID NO: 230646 - DNA, 20 bp, Artificial Sequence
  Description of Artificial Sequence: Synthetic oligonucleotide
  Target: LAMA2; (-) strand; PAM type: YTN; PAM sequence: TTA
gagtacaaatgtcactaagc

SEQ ID NO: 230647 - DNA, 20 bp, Artificial Sequence
  Description of Artificial Sequence: Synthetic oligonucleotide
  Target: LAMA2; (-) strand; PAM type: YTN; PAM sequence: CTG
agaaggggcaggagtgaggc

SEQ ID NO: 230648 - DNA, 20 bp, Artificial Sequence
  Description of Artificial Sequence: Synthetic oligonucleotide
  Target: LAMA2; (-) strand; PAM type: YTN; PAM sequence: CTG
tcatgggatccgacggtgcc

SEQ ID NO: 230649 - DNA, 20 bp, Artificial Sequence
  Description of Artificial Sequence: Synthetic oligonucleotide
  Target: LAMA2; (-) strand; PAM type: YTN; PAM sequence: CTA
ggtcaccatgtaggacctgt

SEQ ID NO: 230650 - DNA, 20 bp, Artificial Sequence
  Description of Artificial Sequence: Synthetic oligonucleotide
  Target: LAMA2; (-) strand; PAM type: YTN; PAM sequence: TTA
ccgtgccctaggtcaccatg

SEQ ID NO: 230651 - DNA, 20 bp, Artificial Sequence
  Description of Artificial Sequence: Synthetic oligonucleotide
  Target: LAMA2; (-) strand; PAM type: YTN; PAM sequence: TTT
accgtgccctaggtcaccat

SEQ ID NO: 230652 - DNA, 20 bp, Artificial Sequence
  Description of Artificial Sequence: Synthetic oligonucleotide
  Target: LAMA2; (-) strand; PAM type: YTN; PAM sequence: TTT
taccgtgccctaggtcacca

SEQ ID NO: 230653 - DNA, 20 bp, Artificial Sequence
  Description of Artificial Sequence: Synthetic oligonucleotide
  Target: LAMA2; (-) strand; PAM type: YTN; PAM sequence: TTT
ttaccgtgccctaggtcacc

SEQ ID NO: 230654 - DNA, 20 bp, Artificial Sequence
  Description of Artificial Sequence: Synthetic oligonucleotide
  Target: LAMA2; (-) strand; PAM type: YTN; PAM sequence: CTT
tttaccgtgccctaggtcac

SEQ ID NO: 230655 - DNA, 20 bp, Artificial Sequence
  Description of Artificial Sequence: Synthetic oligonucleotide
  Target: LAMA2; (-) strand; PAM type: YTN; PAM sequence: CTG
gggtagactttttaccgtgc

SEQ ID NO: 230656 - DNA, 20 bp, Artificial Sequence
  Description of Artificial Sequence: Synthetic oligonucleotide
  Target: LAMA2; (-) strand; PAM type: YTN; PAM sequence: TTC
ctggggtagactttttaccg

SEQ ID NO: 230657 - DNA, 20 bp, Artificial Sequence
  Description of Artificial Sequence: Synthetic oligonucleotide
  Target: LAMA2; (-) strand; PAM type: YTN; PAM sequence: CTT
cctggggtagactttttacc

SEQ ID NO: 230658 - DNA, 20 bp, Artificial Sequence
  Description of Artificial Sequence: Synthetic oligonucleotide
  Target: LAMA2; (-) strand; PAM type: YTN; PAM sequence: CTA
ggcttcctggggtagacttt

SEQ ID NO: 230659 - DNA, 20 bp, Artificial Sequence
  Description of Artificial Sequence: Synthetic oligonucleotide
  Target: LAMA2; (-) strand; PAM type: YTN; PAM sequence: TTC
taggcttcctggggtagact

SEQ ID NO: 230660 - DNA, 20 bp, Artificial Sequence
  Description of Artificial Sequence: Synthetic oligonucleotide
  Target: LAMA2; (-) strand; PAM type: YTN; PAM sequence: CTA
tccattctaggcttcctggg

SEQ ID NO: 230661 - DNA, 20 bp, Artificial Sequence
  Description of Artificial Sequence: Synthetic oligonucleotide
  Target: LAMA2; (-) strand; PAM type: YTN; PAM sequence: TTC
tatccattctaggcttcctg

SEQ ID NO: 230662 - DNA, 20 bp, Artificial Sequence
  Description of Artificial Sequence: Synthetic oligonucleotide
  Target: LAMA2; (-) strand; PAM type: YTN; PAM sequence: TTG
tattctatccattctaggct

SEQ ID NO: 230663 - DNA, 20 bp, Artificial Sequence
  Description of Artificial Sequence: Synthetic oligonucleotide
  Target: LAMA2; (-) strand; PAM type: YTN; PAM sequence: TTT
gtattctatccattctaggc

SEQ ID NO: 230664 - DNA, 20 bp, Artificial Sequence
  Description of Artificial Sequence: Synthetic oligonucleotide
  Target: LAMA2; (-) strand; PAM type: YTN; PAM sequence: TTG
gatgaatttgtattctatcc

SEQ ID NO: 230665 - DNA, 20 bp, Artificial Sequence
  Description of Artificial Sequence: Synthetic oligonucleotide
  Target: LAMA2; (-) strand; PAM type: YTN; PAM sequence: TTG
tgttggatgaatttgtattc

SEQ ID NO: 230666 - DNA, 20 bp, Artificial Sequence
  Description of Artificial Sequence: Synthetic oligonucleotide
  Target: LAMA2; (-) strand; PAM type: YTN; PAM sequence: TTT
gtgttggatgaatttgtatt

SEQ ID NO: 230667 - DNA, 20 bp, Artificial Sequence
  Description of Artificial Sequence: Synthetic oligonucleotide
  Target: LAMA2; (-) strand; PAM type: YTN; PAM sequence: TTC
atgaatttgtgttggatgaa

SEQ ID NO: 230668 - DNA, 20 bp, Artificial Sequence
  Description of Artificial Sequence: Synthetic oligonucleotide
  Target: LAMA2; (-) strand; PAM type: YTN; PAM sequence: CTT
catgaatttgtgttggatga

SEQ ID NO: 230669 - DNA, 20 bp, Artificial Sequence
  Description of Artificial Sequence: Synthetic oligonucleotide
  Target: LAMA2; (-) strand; PAM type: YTN; PAM sequence: TTC
ttcatgaatttgtgttggat

SEQ ID NO: 230670 - DNA, 20 bp, Artificial Sequence
  Description of Artificial Sequence: Synthetic oligonucleotide
  Target: LAMA2; (-) strand; PAM type: YTN; PAM sequence: TTT
cttcatgaatttgtgttgga

SEQ ID NO: 230671 - DNA, 20 bp, Artificial Sequence
  Description of Artificial Sequence: Synthetic oligonucleotide
  Target: LAMA2; (-) strand; PAM type: YTN; PAM sequence: TTT
tcttcatgaatttgtgttgg

SEQ ID NO: 230672 - DNA, 20 bp, Artificial Sequence
  Description of Artificial Sequence: Synthetic oligonucleotide
  Target: LAMA2; (-) strand; PAM type: YTN; PAM sequence: CTT
ttcttcatgaatttgtgttg

SEQ ID NO: 230673 - DNA, 20 bp, Artificial Sequence
  Description of Artificial Sequence: Synthetic oligonucleotide
  Target: LAMA2; (-) strand; PAM type: YTN; PAM sequence: TTG
gcttttcttcatgaatttgt

SEQ ID NO: 230674 - DNA, 20 bp, Artificial Sequence
  Description of Artificial Sequence: Synthetic oligonucleotide
  Target: LAMA2; (-) strand; PAM type: YTN; PAM sequence: CTT
ggcttttcttcatgaatttg

SEQ ID NO: 230675 - DNA, 20 bp, Artificial Sequence
  Description of Artificial Sequence: Synthetic oligonucleotide
  Target: LAMA2; (-) strand; PAM type: YTN; PAM sequence: CTG
cagatcttggcttttcttca

SEQ ID NO: 230676 - DNA, 20 bp, Artificial Sequence
  Description of Artificial Sequence: Synthetic oligonucleotide
  Target: LAMA2; (-) strand; PAM type: YTN; PAM sequence: TTC
tgcagatcttggcttttctt

SEQ ID NO: 230677 - DNA, 20 bp, Artificial Sequence
  Description of Artificial Sequence: Synthetic oligonucleotide
  Target: LAMA2; (-) strand; PAM type: YTN; PAM sequence: TTT
ctgcagatcttggcttttct

SEQ ID NO: 230678 - DNA, 20 bp, Artificial Sequence
  Description of Artificial Sequence: Synthetic oligonucleotide
  Target: LAMA2; (-) strand; PAM type: YTN; PAM sequence: TTT
tctgcagatcttggcttttc

SEQ ID NO: 230679 - DNA, 20 bp, Artificial Sequence
  Description of Artificial Sequence: Synthetic oligonucleotide
  Target: LAMA2; (-) strand; PAM type: YTN; PAM sequence: TTG
attttctgcagatcttggct

SEQ ID NO: 230680 - DNA, 20 bp, Artificial Sequence
  Description of Artificial Sequence: Synthetic oligonucleotide
  Target: LAMA2; (-) strand; PAM type: YTN; PAM sequence: TTT
gattttctgcagatcttggc

SEQ ID NO: 230681 - DNA, 20 bp, Artificial Sequence
  Description of Artificial Sequence: Synthetic oligonucleotide
  Target: LAMA2; (-) strand; PAM type: YTN; PAM sequence: CTG
tttgattttctgcagatctt

SEQ ID NO: 230682 - DNA, 20 bp, Artificial Sequence
  Description of Artificial Sequence: Synthetic oligonucleotide
  Target: LAMA2; (-) strand; PAM type: YTN; PAM sequence: TTA
ctgtttgattttctgcagat

SEQ ID NO: 230683 - DNA, 20 bp, Artificial Sequence
  Description of Artificial Sequence: Synthetic oligonucleotide
  Target: LAMA2; (-) strand; PAM type: YTN; PAM sequence: TTT
actgtttgattttctgcaga

SEQ ID NO: 230684 - DNA, 20 bp, Artificial Sequence
  Description of Artificial Sequence: Synthetic oligonucleotide
  Target: LAMA2; (-) strand; PAM type: YTN; PAM sequence: CTT
tactgtttgattttctgcag

SEQ ID NO: 230685 - DNA, 20 bp, Artificial Sequence
  Description of Artificial Sequence: Synthetic oligonucleotide
  Target: LAMA2; (-) strand; PAM type: YTN; PAM sequence: CTG
gaatagtctttactgtttga

SEQ ID NO: 230686 - DNA, 20 bp, Artificial Sequence
  Description of Artificial Sequence: Synthetic oligonucleotide
  Target: LAMA2; (-) strand; PAM type: YTN; PAM sequence: TTC
tggaatagtctttactgttt

SEQ ID NO: 230687 - DNA, 20 bp, Artificial Sequence
  Description of Artificial Sequence: Synthetic oligonucleotide
  Target: LAMA2; (-) strand; PAM type: YTN; PAM sequence: CTT
ctggaatagtctttactgtt

SEQ ID NO: 230688 - DNA, 20 bp, Artificial Sequence
  Description of Artificial Sequence: Synthetic oligonucleotide
  Target: LAMA2; (-) strand; PAM type: YTN; PAM sequence: CTC
ttctggaatagtctttactg

SEQ ID NO: 230689 - DNA, 20 bp, Artificial Sequence
  Description of Artificial Sequence: Synthetic oligonucleotide
  Target: LAMA2; (-) strand; PAM type: YTN; PAM sequence: TTG
ctcttctggaatagtcttta

SEQ ID NO: 230690 - DNA, 20 bp, Artificial Sequence
  Description of Artificial Sequence: Synthetic oligonucleotide
  Target: LAMA2; (-) strand; PAM type: YTN; PAM sequence: CTG
ttgctcttctggaatagtct

SEQ ID NO: 230691 - DNA, 20 bp, Artificial Sequence
  Description of Artificial Sequence: Synthetic oligonucleotide
  Target: LAMA2; (-) strand; PAM type: YTN; PAM sequence: CTC
ctgttgctcttctggaatag

SEQ ID NO: 230692 - DNA, 20 bp, Artificial Sequence
  Description of Artificial Sequence: Synthetic oligonucleotide
  Target: LAMA2; (-) strand; PAM type: YTN; PAM sequence: TTA
tcgtcctcctgttgctcttc

SEQ ID NO: 230693 - DNA, 20 bp, Artificial Sequence
  Description of Artificial Sequence: Synthetic oligonucleotide
  Target: LAMA2; (-) strand; PAM type: YTN; PAM sequence: TTT
atcgtcctcctgttgctctt

SEQ ID NO: 230694 - DNA, 20 bp, Artificial Sequence
  Description of Artificial Sequence: Synthetic oligonucleotide
  Target: LAMA2; (-) strand; PAM type: YTN; PAM sequence: CTT
tatcgtcctcctgttgctct

SEQ ID NO: 230695 - DNA, 20 bp, Artificial Sequence
  Description of Artificial Sequence: Synthetic oligonucleotide
  Target: LAMA2; (-) strand; PAM type: YTN; PAM sequence: CTC
tttatcgtcctcctgttgct

SEQ ID NO: 230696 - DNA, 20 bp, Artificial Sequence
  Description of Artificial Sequence: Synthetic oligonucleotide
  Target: LAMA2; (-) strand; PAM type: YTN; PAM sequence: CTC
ctctttatcgtcctcctgtt

SEQ ID NO: 230697 - DNA, 20 bp, Artificial Sequence
  Description of Artificial Sequence: Synthetic oligonucleotide
  Target: LAMA2; (-) strand; PAM type: YTN; PAM sequence: CTC
catctcctctttatcgtcct

SEQ ID NO: 230698 - DNA, 20 bp, Artificial Sequence
  Description of Artificial Sequence: Synthetic oligonucleotide
  Target: LAMA2; (-) strand; PAM type: YTN; PAM sequence: TTA
actccatctcctctttatcg

SEQ ID NO: 230699 - DNA, 20 bp, Artificial Sequence
  Description of Artificial Sequence: Synthetic oligonucleotide
  Target: LAMA2; (-) strand; PAM type: YTN; PAM sequence: TTT
aactccatctcctctttatc

SEQ ID NO: 230700 - DNA, 20 bp, Artificial Sequence
  Description of Artificial Sequence: Synthetic oligonucleotide
  Target: LAMA2; (-) strand; PAM type: YTN; PAM sequence: TTT
taactccatctcctctttat

SEQ ID NO: 230701 - DNA, 20 bp, Artificial Sequence
  Description of Artificial Sequence: Synthetic oligonucleotide
  Target: LAMA2; (-) strand; PAM type: YTN; PAM sequence: CTA
tgacagacccagtattttaa

SEQ ID NO: 230702 - DNA, 20 bp, Artificial Sequence
  Description of Artificial Sequence: Synthetic oligonucleotide
  Target: LAMA2; (-) strand; PAM type: YTN; PAM sequence: CTG
tctatgacagacccagtatt

SEQ ID NO: 230703 - DNA, 20 bp, Artificial Sequence
  Description of Artificial Sequence: Synthetic oligonucleotide
  Target: LAMA2; (-) strand; PAM type: YTN; PAM sequence: TTC
caatcctgtctatgacagac

SEQ ID NO: 230704 - DNA, 20 bp, Artificial Sequence
  Description of Artificial Sequence: Synthetic oligonucleotide
  Target: LAMA2; (-) strand; PAM type: YTN; PAM sequence: TTC
cattccaatcctgtctatga

SEQ ID NO: 230705 - DNA, 20 bp, Artificial Sequence
  Description of Artificial Sequence: Synthetic oligonucleotide
  Target: LAMA2; (-) strand; PAM type: YTN; PAM sequence: TTG
ggattccattccaatcctgt

SEQ ID NO: 230706 - DNA, 20 bp, Artificial Sequence
  Description of Artificial Sequence: Synthetic oligonucleotide
  Target: LAMA2; (-) strand; PAM type: YTN; PAM sequence: TTT
gggattccattccaatcctg

SEQ ID NO: 230707 - DNA, 20 bp, Artificial Sequence
  Description of Artificial Sequence: Synthetic oligonucleotide
  Target: LAMA2; (-) strand; PAM type: YTN; PAM sequence: CTG
atttgggattccattccaat

SEQ ID NO: 230708 - DNA, 20 bp, Artificial Sequence
  Description of Artificial Sequence: Synthetic oligonucleotide
  Target: LAMA2; (-) strand; PAM type: YTN; PAM sequence: CTA
tcatctgatttgggattcca

SEQ ID NO: 230709 - DNA, 20 bp, Artificial Sequence
  Description of Artificial Sequence: Synthetic oligonucleotide
  Target: LAMA2; (-) strand; PAM type: YTN; PAM sequence: TTC
tatcatctgatttgggattc

SEQ ID NO: 230710 - DNA, 20 bp, Artificial Sequence
  Description of Artificial Sequence: Synthetic oligonucleotide
  Target: LAMA2; (-) strand; PAM type: YTN; PAM sequence: TTC
attctatcatctgatttggg

SEQ ID NO: 230711 - DNA, 20 bp, Artificial Sequence
  Description of Artificial Sequence: Synthetic oligonucleotide
  Target: LAMA2; (-) strand; PAM type: YTN; PAM sequence: CTT
cattctatcatctgatttgg

SEQ ID NO: 230712 - DNA, 20 bp, Artificial Sequence
  Description of Artificial Sequence: Synthetic oligonucleotide
  Target: LAMA2; (-) strand; PAM type: YTN; PAM sequence: TTC
ccttcattctatcatctgat

SEQ ID NO: 230713 - DNA, 20 bp, Artificial Sequence
  Description of Artificial Sequence: Synthetic oligonucleotide
  Target: LAMA2; (-) strand; PAM type: YTN; PAM sequence: CTT
cccttcattctatcatctga

SEQ ID NO: 230714 - DNA, 20 bp, Artificial Sequence
  Description of Artificial Sequence: Synthetic oligonucleotide
  Target: LAMA2; (-) strand; PAM type: YTN; PAM sequence: TTC
catgtaccttcccttcattc

SEQ ID NO: 230715 - DNA, 20 bp, Artificial Sequence
  Description of Artificial Sequence: Synthetic oligonucleotide
  Target: LAMA2; (-) strand; PAM type: YTN; PAM sequence: CTA
ttccatgtaccttcccttca

SEQ ID NO: 230716 - DNA, 20 bp, Artificial Sequence
  Description of Artificial Sequence: Synthetic oligonucleotide
  Target: LAMA2; (-) strand; PAM type: YTN; PAM sequence: CTA
gtgagagtctattccatgta

SEQ ID NO: 230717 - DNA, 20 bp, Artificial Sequence
  Description of Artificial Sequence: Synthetic oligonucleotide
  Target: LAMA2; (-) strand; PAM type: YTN; PAM sequence: CTC
accactagtgagagtctatt

SEQ ID NO: 230718 - DNA, 20 bp, Artificial Sequence
  Description of Artificial Sequence: Synthetic oligonucleotide
  Target: LAMA2; (-) strand; PAM type: YTN; PAM sequence: TTG
tagtgaccgaaagctcacca

SEQ ID NO: 230719 - DNA, 20 bp, Artificial Sequence
  Description of Artificial Sequence: Synthetic oligonucleotide
  Target: LAMA2; (-) strand; PAM type: YTN; PAM sequence: CTT
gtagtgaccgaaagctcacc

SEQ ID NO: 230720 - DNA, 20 bp, Artificial Sequence
  Description of Artificial Sequence: Synthetic oligonucleotide
  Target: LAMA2; (-) strand; PAM type: YTN; PAM sequence: TTG
aagacttgtagtgaccgaaa

SEQ ID NO: 230721 - DNA, 20 bp, Artificial Sequence
  Description of Artificial Sequence: Synthetic oligonucleotide
  Target: LAMA2; (-) strand; PAM type: YTN; PAM sequence: TTT
gaagacttgtagtgaccgaa

SEQ ID NO: 230722 - DNA, 20 bp, Artificial Sequence
  Description of Artificial Sequence: Synthetic oligonucleotide
  Target: LAMA2; (-) strand; PAM type: YTN; PAM sequence: TTT
tgaagacttgtagtgaccga

SEQ ID NO: 230723 - DNA, 20 bp, Artificial Sequence
  Description of Artificial Sequence: Synthetic oligonucleotide
  Target: LAMA2; (-) strand; PAM type: YTN; PAM sequence: CTT
ttgaagacttgtagtgaccg

SEQ ID NO: 230724 - DNA, 20 bp, Artificial Sequence
  Description of Artificial Sequence: Synthetic oligonucleotide
  Target: LAMA2; (-) strand; PAM type: YTN; PAM sequence: CTA
ggccccttttgaagacttgt

SEQ ID NO: 230725 - DNA, 20 bp, Artificial Sequence
  Description of Artificial Sequence: Synthetic oligonucleotide
  Target: LAMA2; (-) strand; PAM type: YTN; PAM sequence: CTG
gtcatctaggccccttttga

SEQ ID NO: 230726 - DNA, 20 bp, Artificial Sequence
  Description of Artificial Sequence: Synthetic oligonucleotide
  Target: LAMA2; (-) strand; PAM type: YTN; PAM sequence: TTG
gatgaaaaagaactggtcat

SEQ ID NO: 230727 - DNA, 20 bp, Artificial Sequence
  Description of Artificial Sequence: Synthetic oligonucleotide
  Target: LAMA2; (-) strand; PAM type: YTN; PAM sequence: TTG
ttggatgaaaaagaactggt

SEQ ID NO: 230728 - DNA, 20 bp, Artificial Sequence
  Description of Artificial Sequence: Synthetic oligonucleotide
  Target: LAMA2; (-) strand; PAM type: YTN; PAM sequence: TTT
gttggatgaaaaagaactgg

SEQ ID NO: 230729 - DNA, 20 bp, Artificial Sequence
  Description of Artificial Sequence: Synthetic oligonucleotide
  Target: LAMA2; (-) strand; PAM type: YTN; PAM sequence: TTC
aataagcatttgttggatga

SEQ ID NO: 230730 - DNA, 20 bp, Artificial Sequence
  Description of Artificial Sequence: Synthetic oligonucleotide
  Target: LAMA2; (-) strand; PAM type: YTN; PAM sequence: CTA
cccacagaggaagggttcaa

SEQ ID NO: 230731 - DNA, 20 bp, Artificial Sequence
  Description of Artificial Sequence: Synthetic oligonucleotide
  Target: LAMA2; (-) strand; PAM type: YTN; PAM sequence: CTG
aatgtgcccatcactaccca

SEQ ID NO: 230732 - DNA, 20 bp, Artificial Sequence
  Description of Artificial Sequence: Synthetic oligonucleotide
  Target: LAMA2; (-) strand; PAM type: YTN; PAM sequence: TTC
actgaatgtgcccatcacta

SEQ ID NO: 230733 - DNA, 20 bp, Artificial Sequence
  Description of Artificial Sequence: Synthetic oligonucleotide
  Target: LAMA2; (-) strand; PAM type: YTN; PAM sequence: CTG
aattcactgaatgtgcccat

SEQ ID NO: 230734 - DNA, 20 bp, Artificial Sequence
  Description of Artificial Sequence: Synthetic oligonucleotide
  Target: LAMA2; (-) strand; PAM type: YTN; PAM sequence: TTC
cagtctgaattcactgaatg

SEQ ID NO: 230735 - DNA, 20 bp, Artificial Sequence
  Description of Artificial Sequence: Synthetic oligonucleotide
  Target: LAMA2; (-) strand; PAM type: YTN; PAM sequence: TTC
gattccagtctgaattcact

SEQ ID NO: 230736 - DNA, 20 bp, Artificial Sequence
  Description of Artificial Sequence: Synthetic oligonucleotide
  Target: LAMA2; (-) strand; PAM type: YTN; PAM sequence: TTA
caatgtgttcgattccagtc

SEQ ID NO: 230737 - DNA, 20 bp, Artificial Sequence
  Description of Artificial Sequence: Synthetic oligonucleotide
  Target: LAMA2; (-) strand; PAM type: YTN; PAM sequence: TTA
atggttacaatgtgttcgat

SEQ ID NO: 230738 - DNA, 20 bp, Artificial Sequence
  Description of Artificial Sequence: Synthetic oligonucleotide
  Target: LAMA2; (-) strand; PAM type: YTN; PAM sequence: TTT
aatggttacaatgtgttcga

SEQ ID NO: 230739 - DNA, 20 bp, Artificial Sequence
  Description of Artificial Sequence: Synthetic oligonucleotide
  Target: LAMA2; (-) strand; PAM type: YTN; PAM sequence: CTC
atttaatggttacaatgtgt

SEQ ID NO: 230740 - DNA, 20 bp, Artificial Sequence
  Description of Artificial Sequence: Synthetic oligonucleotide
  Target: LAMA2; (-) strand; PAM type: YTN; PAM sequence: TTA
actcatttaatggttacaat

SEQ ID NO: 230741 - DNA, 20 bp, Artificial Sequence
  Description of Artificial Sequence: Synthetic oligonucleotide
  Target: LAMA2; (-) strand; PAM type: YTN; PAM sequence: CTC
atataagattaactcattta

SEQ ID NO: 230742 - DNA, 20 bp, Artificial Sequence
  Description of Artificial Sequence: Synthetic oligonucleotide
  Target: LAMA2; (-) strand; PAM type: YTN; PAM sequence: CTG
tatgtatgaactcatataag

SEQ ID NO: 230743 - DNA, 20 bp, Artificial Sequence
  Description of Artificial Sequence: Synthetic oligonucleotide
  Target: LAMA2; (-) strand; PAM type: YTN; PAM sequence: TTG
catgtgatctgtatgtatga

SEQ ID NO: 230744 - DNA, 20 bp, Artificial Sequence
  Description of Artificial Sequence: Synthetic oligonucleotide
  Target: LAMA2; (-) strand; PAM type: YTN; PAM sequence: CTT
gcatgtgatctgtatgtatg

SEQ ID NO: 230745 - DNA, 20 bp, Artificial Sequence
  Description of Artificial Sequence: Synthetic oligonucleotide
  Target: LAMA2; (-) strand; PAM type: YTN; PAM sequence: CTC
ttgcatgtgatctgtatgta

SEQ ID NO: 230746 - DNA, 20 bp, Artificial Sequence
  Description of Artificial Sequence: Synthetic oligonucleotide
  Target: LAMA2; (-) strand; PAM type: YTN; PAM sequence: CTG
gatatgagacactcttgcat

SEQ ID NO: 230747 - DNA, 20 bp, Artificial Sequence
  Description of Artificial Sequence: Synthetic oligonucleotide
  Target: LAMA2; (-) strand; PAM type: YTN; PAM sequence: TTA
ctggatatgagacactcttg

SEQ ID NO: 230748 - DNA, 20 bp, Artificial Sequence
  Description of Artificial Sequence: Synthetic oligonucleotide
  Target: LAMA2; (-) strand; PAM type: YTN; PAM sequence: CTT
actggatatgagacactctt

SEQ ID NO: 230749 - DNA, 20 bp, Artificial Sequence
  Description of Artificial Sequence: Synthetic oligonucleotide
  Target: LAMA2; (-) strand; PAM type: YTN; PAM sequence: TTG
caaacttactggatatgaga

SEQ ID NO: 230750 - DNA, 20 bp, Artificial Sequence
  Description of Artificial Sequence: Synthetic oligonucleotide
  Target: LAMA2; (-) strand; PAM type: YTN; PAM sequence: CTT
gcaaacttactggatatgag

SEQ ID NO: 230751 - DNA, 20 bp, Artificial Sequence
  Description of Artificial Sequence: Synthetic oligonucleotide
  Target: LAMA2; (-) strand; PAM type: YTN; PAM sequence: TTC
ttgcaaacttactggatatg

SEQ ID NO: 230752 - DNA, 20 bp, Artificial Sequence
  Description of Artificial Sequence: Synthetic oligonucleotide
  Target: LAMA2; (-) strand; PAM type: YTN; PAM sequence: TTA
ttcttgcaaacttactggat

SEQ ID NO: 230753 - DNA, 20 bp, Artificial Sequence
  Description of Artificial Sequence: Synthetic oligonucleotide
  Target: LAMA2; (-) strand; PAM type: YTN; PAM sequence: TTG
tacacaaaaacaatagtagt

SEQ ID NO: 230754 - DNA, 20 bp, Artificial Sequence
  Description of Artificial Sequence: Synthetic oligonucleotide
  Target: LAMA2; (-) strand; PAM type: YTN; PAM sequence: CTT
gtacacaaaaacaatagtag

SEQ ID NO: 230755 - DNA, 20 bp, Artificial Sequence
  Description of Artificial Sequence: Synthetic oligonucleotide
  Target: LAMA2; (-) strand; PAM type: YTN; PAM sequence: TTA
caatacacaagatcttgtac

SEQ ID NO: 230756 - DNA, 20 bp, Artificial Sequence
  Description of Artificial Sequence: Synthetic oligonucleotide
  Target: LAMA2; (-) strand; PAM type: YTN; PAM sequence: TTC
agaaattacaatacacaaga

SEQ ID NO: 230757 - DNA, 20 bp, Artificial Sequence
  Description of Artificial Sequence: Synthetic oligonucleotide
  Target: LAMA2; (-) strand; PAM type: YTN; PAM sequence: TTT
cagaaattacaatacacaag

SEQ ID NO: 230758 - DNA, 20 bp, Artificial Sequence
  Description of Artificial Sequence: Synthetic oligonucleotide
  Target: LAMA2; (-) strand; PAM type: YTN; PAM sequence: CTA
tttcagaaattacaatacac

SEQ ID NO: 230759 - DNA, 20 bp, Artificial Sequence
  Description of Artificial Sequence: Synthetic oligonucleotide
  Target: LAMA2; (-) strand; PAM type: YTN; PAM sequence: TTG
ctatttcagaaattacaata

SEQ ID NO: 230760 - DNA, 20 bp, Artificial Sequence
  Description of Artificial Sequence: Synthetic oligonucleotide
  Target: LAMA2; (-) strand; PAM type: YTN; PAM sequence: CTC
attgctatttcagaaattac

SEQ ID NO: 230761 - DNA, 20 bp, Artificial Sequence
  Description of Artificial Sequence: Synthetic oligonucleotide
  Target: LAMA2; (-) strand; PAM type: YTN; PAM sequence: TTC
caacctcattgctatttcag

SEQ ID NO: 230762 - DNA, 20 bp, Artificial Sequence
  Description of Artificial Sequence: Synthetic oligonucleotide
  Target: LAMA2; (-) strand; PAM type: YTN; PAM sequence: TTA
gtcatgtattccaacctcat

SEQ ID NO: 230763 - DNA, 20 bp, Artificial Sequence
  Description of Artificial Sequence: Synthetic oligonucleotide
  Target: LAMA2; (-) strand; PAM type: YTN; PAM sequence: TTG
ggtgtgccccaaccagagat

SEQ ID NO: 230764 - DNA, 20 bp, Artificial Sequence
  Description of Artificial Sequence: Synthetic oligonucleotide
  Target: LAMA2; (-) strand; PAM type: YTN; PAM sequence: TTT
gggtgtgccccaaccagaga

SEQ ID NO: 230765 - DNA, 20 bp, Artificial Sequence
  Description of Artificial Sequence: Synthetic oligonucleotide
  Target: LAMA2; (-) strand; PAM type: YTN; PAM sequence: TTT
tgggtgtgccccaaccagag

SEQ ID NO: 230766 - DNA, 20 bp, Artificial Sequence
  Description of Artificial Sequence: Synthetic oligonucleotide
  Target: LAMA2; (-) strand; PAM type: YTN; PAM sequence: TTG
ttttgggtgtgccccaacca

SEQ ID NO: 230767 - DNA, 20 bp, Artificial Sequence
  Description of Artificial Sequence: Synthetic oligonucleotide
  Target: LAMA2; (-) strand; PAM type: YTN; PAM sequence: TTT
gttttgggtgtgccccaacc

SEQ ID NO: 230768 - DNA, 20 bp, Artificial Sequence
  Description of Artificial Sequence: Synthetic oligonucleotide
  Target: LAMA2; (-) strand; PAM type: YTN; PAM sequence: TTT
tgttttgggtgtgccccaac

SEQ ID NO: 230769 - DNA, 20 bp, Artificial Sequence
  Description of Artificial Sequence: Synthetic oligonucleotide
  Target: LAMA2; (-) strand; PAM type: YTN; PAM sequence: CTC
caaattttgttttgggtgtg

SEQ ID NO: 230770 - DNA, 20 bp, Artificial Sequence
  Description of Artificial Sequence: Synthetic oligonucleotide
  Target: LAMA2; (-) strand; PAM type: YTN; PAM sequence: TTG
ctccaaattttgttttgggt

SEQ ID NO: 230771 - DNA, 20 bp, Artificial Sequence
  Description of Artificial Sequence: Synthetic oligonucleotide
  Target: LAMA2; (-) strand; PAM type: YTN; PAM sequence: TTG
cattgctccaaattttgttt

SEQ ID NO: 230772 - DNA, 20 bp, Artificial Sequence
  Description of Artificial Sequence: Synthetic oligonucleotide
  Target: LAMA2; (-) strand; PAM type: YTN; PAM sequence: TTT
gcattgctccaaattttgtt

SEQ ID NO: 230773 - DNA, 20 bp, Artificial Sequence
  Description of Artificial Sequence: Synthetic oligonucleotide
  Target: LAMA2; (-) strand; PAM type: YTN; PAM sequence: CTC
gaacatttgcattgctccaa

SEQ ID NO: 230774 - DNA, 20 bp, Artificial Sequence
  Description of Artificial Sequence: Synthetic oligonucleotide
  Target: LAMA2; (-) strand; PAM type: YTN; PAM sequence: CTC
ctcgaacatttgcattgctc

SEQ ID NO: 230775 - DNA, 20 bp, Artificial Sequence
  Description of Artificial Sequence: Synthetic oligonucleotide
  Target: LAMA2; (-) strand; PAM type: YTN; PAM sequence: CTC
tcctcgaacatttgcattgc

SEQ ID NO: 230776 - DNA, 20 bp, Artificial Sequence
  Description of Artificial Sequence: Synthetic oligonucleotide
  Target: LAMA2; (-) strand; PAM type: YTN; PAM sequence: CTC
actctcctcgaacatttgca

SEQ ID NO: 230777 - DNA, 20 bp, Artificial Sequence
  Description of Artificial Sequence: Synthetic oligonucleotide
  Target: LAMA2; (-) strand; PAM type: YTN; PAM sequence: CTC
tcactctcctcgaacatttg

SEQ ID NO: 230778 - DNA, 20 bp, Artificial Sequence
  Description of Artificial Sequence: Synthetic oligonucleotide
  Target: LAMA2; (-) strand; PAM type: YTN; PAM sequence: TTC
tctcactctcctcgaacatt

SEQ ID NO: 230779 - DNA, 20 bp, Artificial Sequence
  Description of Artificial Sequence: Synthetic oligonucleotide
  Target: LAMA2; (-) strand; PAM type: YTN; PAM sequence: TTA
gagaaaaacaccagaaggaa

SEQ ID NO: 230780 - DNA, 20 bp, Artificial Sequence
  Description of Artificial Sequence: Synthetic oligonucleotide
  Target: LAMA2; (-) strand; PAM type: YTN; PAM sequence: TTC
agagcaagtcattagagaaa

SEQ ID NO: 230781 - DNA, 20 bp, Artificial Sequence
  Description of Artificial Sequence: Synthetic oligonucleotide
  Target: LAMA2; (-) strand; PAM type: YTN; PAM sequence: CTT
cagagcaagtcattagagaa

SEQ ID NO: 230782 - DNA, 20 bp, Artificial Sequence
  Description of Artificial Sequence: Synthetic oligonucleotide
  Target: LAMA2; (-) strand; PAM type: YTN; PAM sequence: CTA
agaggagtagcttcagagca

SEQ ID NO: 230783 - DNA, 20 bp, Artificial Sequence
  Description of Artificial Sequence: Synthetic oligonucleotide
  Target: LAMA2; (-) strand; PAM type: YTN; PAM sequence: CTA
ggaaagaatctaagaggagt

SEQ ID NO: 230784 - DNA, 20 bp, Artificial Sequence
  Description of Artificial Sequence: Synthetic oligonucleotide
  Target: LAMA2; (-) strand; PAM type: YTN; PAM sequence: CTA
tataggaatacacagctagg

SEQ ID NO: 230785 - DNA, 20 bp, Artificial Sequence
  Description of Artificial Sequence: Synthetic oligonucleotide
  Target: LAMA2; (-) strand; PAM type: YTN; PAM sequence: CTA
agactatataggaatacaca

SEQ ID NO: 230786 - DNA, 20 bp, Artificial Sequence
  Description of Artificial Sequence: Synthetic oligonucleotide
  Target: LAMA2; (-) strand; PAM type: YTN; PAM sequence: TTA
agctaagactatataggaat

SEQ ID NO: 230787 - DNA, 20 bp, Artificial Sequence
  Description of Artificial Sequence: Synthetic oligonucleotide
  Target: LAMA2; (-) strand; PAM type: YTN; PAM sequence: CTG
ttaagctaagactatatagg

SEQ ID NO: 230788 - DNA, 20 bp, Artificial Sequence
  Description of Artificial Sequence: Synthetic oligonucleotide
  Target: LAMA2; (-) strand; PAM type: YTN; PAM sequence: TTG
tgctgttaagctaagactat

SEQ ID NO: 230789 - DNA, 20 bp, Artificial Sequence
  Description of Artificial Sequence: Synthetic oligonucleotide
  Target: LAMA2; (-) strand; PAM type: YTN; PAM sequence: TTT
gtgctgttaagctaagacta

SEQ ID NO: 230790 - DNA, 20 bp, Artificial Sequence
  Description of Artificial Sequence: Synthetic oligonucleotide
  Target: LAMA2; (-) strand; PAM type: YTN; PAM sequence: CTT
tgtgctgttaagctaagact

SEQ ID NO: 230791 - DNA, 20 bp, Artificial Sequence
  Description of Artificial Sequence: Synthetic oligonucleotide
  Target: LAMA2; (-) strand; PAM type: YTN; PAM sequence: TTA
aatctttgtgctgttaagct

SEQ ID NO: 230792 - DNA, 20 bp, Artificial Sequence
  Description of Artificial Sequence: Synthetic oligonucleotide
  Target: LAMA2; (-) strand; PAM type: YTN; PAM sequence: CTG
ttaaatctttgtgctgttaa

SEQ ID NO: 230793 - DNA, 20 bp, Artificial Sequence
  Description of Artificial Sequence: Synthetic oligonucleotide
  Target: LAMA2; (-) strand; PAM type: YTN; PAM sequence: TTA
tcaaatgcagacaccactgt

SEQ ID NO: 230794 - DNA, 20 bp, Artificial Sequence
  Description of Artificial Sequence: Synthetic oligonucleotide
  Target: LAMA2; (-) strand; PAM type: YTN; PAM sequence: TTT
atcaaatgcagacaccactg

SEQ ID NO: 230795 - DNA, 20 bp, Artificial Sequence
  Description of Artificial Sequence: Synthetic oligonucleotide
  Target: LAMA2; (-) strand; PAM type: YTN; PAM sequence: TTT
tatcaaatgcagacaccact

SEQ ID NO: 230796 - DNA, 20 bp, Artificial Sequence
  Description of Artificial Sequence: Synthetic oligonucleotide
  Target: LAMA2; (-) strand; PAM type: YTN; PAM sequence: TTA
cattttatcaaatgcagaca

SEQ ID NO: 230797 - DNA, 20 bp, Artificial Sequence
  Description of Artificial Sequence: Synthetic oligonucleotide
  Target: LAMA2; (-) strand; PAM type: YTN; PAM sequence: TTT
acattttatcaaatgcagac

SEQ ID NO: 230798 - DNA, 20 bp, Artificial Sequence
  Description of Artificial Sequence: Synthetic oligonucleotide
  Target: LAMA2; (-) strand; PAM type: YTN; PAM sequence: CTC
atttacattttatcaaatgc

SEQ ID NO: 230799 - DNA, 20 bp, Artificial Sequence
  Description of Artificial Sequence: Synthetic oligonucleotide
  Target: LAMA2; (-) strand; PAM type: YTN; PAM sequence: TTC
tcatttacattttatcaaat

SEQ ID NO: 230800 - DNA, 20 bp, Artificial Sequence
  Description of Artificial Sequence: Synthetic oligonucleotide
  Target: LAMA2; (-) strand; PAM type: YTN; PAM sequence: CTT
ctcatttacattttatcaaa

SEQ ID NO: 230801 - DNA, 20 bp, Artificial Sequence
  Description of Artificial Sequence: Synthetic oligonucleotide
  Target: LAMA2; (-) strand; PAM type: YTN; PAM sequence: TTG
ggagcttctcatttacattt

SEQ ID NO: 230802 - DNA, 20 bp, Artificial Sequence
  Description of Artificial Sequence: Synthetic oligonucleotide
  Target: LAMA2; (-) strand; PAM type: YTN; PAM sequence: TTT
gggagcttctcatttacatt

SEQ ID NO: 230803 - DNA, 20 bp, Artificial Sequence
  Description of Artificial Sequence: Synthetic oligonucleotide
  Target: LAMA2; (-) strand; PAM type: YTN; PAM sequence: TTT
tgggagcttctcatttacat

SEQ ID NO: 230804 - DNA, 20 bp, Artificial Sequence
  Description of Artificial Sequence: Synthetic oligonucleotide
  Target: LAMA2; (-) strand; PAM type: YTN; PAM sequence: CTT
ttgggagcttctcatttaca

SEQ ID NO: 230805 - DNA, 20 bp, Artificial Sequence
  Description of Artificial Sequence: Synthetic oligonucleotide
  Target: LAMA2; (-) strand; PAM type: YTN; PAM sequence: CTC
ttttgggagcttctcattta

SEQ ID NO: 230806 - DNA, 20 bp, Artificial Sequence
  Description of Artificial Sequence: Synthetic oligonucleotide
  Target: LAMA2; (-) strand; PAM type: YTN; PAM sequence: CTC
aatctcttttgggagcttct

SEQ ID NO: 230807 - DNA, 20 bp, Artificial Sequence
  Description of Artificial Sequence: Synthetic oligonucleotide
  Target: LAMA2; (-) strand; PAM type: YTN; PAM sequence: TTC
tcaatctcttttgggagctt

SEQ ID NO: 230808 - DNA, 20 bp, Artificial Sequence
  Description of Artificial Sequence: Synthetic oligonucleotide
  Target: LAMA2; (-) strand; PAM type: YTN; PAM sequence: CTT
ctcaatctcttttgggagct

SEQ ID NO: 230809 - DNA, 20 bp, Artificial Sequence
  Description of Artificial Sequence: Synthetic oligonucleotide
  Target: LAMA2; (-) strand; PAM type: YTN; PAM sequence: TTG
tcaaaatagagcttctcaat

SEQ ID NO: 230810 - DNA, 20 bp, Artificial Sequence
  Description of Artificial Sequence: Synthetic oligonucleotide
  Target: LAMA2; (-) strand; PAM type: YTN; PAM sequence: TTA
cacagataaaagaagagttg

SEQ ID NO: 230811 - DNA, 20 bp, Artificial Sequence
  Description of Artificial Sequence: Synthetic oligonucleotide
  Target: LAMA2; (-) strand; PAM type: YTN; PAM sequence: TTA
aagtatataataattacaca

SEQ ID NO: 230812 - DNA, 20 bp, Artificial Sequence
  Description of Artificial Sequence: Synthetic oligonucleotide
  Target: LAMA2; (-) strand; PAM type: YTN; PAM sequence: TTC
agttaaagtatataataatt

SEQ ID NO: 230813 - DNA, 20 bp, Artificial Sequence
  Description of Artificial Sequence: Synthetic oligonucleotide
  Target: LAMA2; (-) strand; PAM type: YTN; PAM sequence: CTT
cagttaaagtatataataat

SEQ ID NO: 230814 - DNA, 20 bp, Artificial Sequence
  Description of Artificial Sequence: Synthetic oligonucleotide
  Target: LAMA2; (-) strand; PAM type: YTN; PAM sequence: TTC
ttcagttaaagtatataata

SEQ ID NO: 230815 - DNA, 20 bp, Artificial Sequence
  Description of Artificial Sequence: Synthetic oligonucleotide
  Target: LAMA2; (-) strand; PAM type: YTN; PAM sequence: TTT
cttcagttaaagtatataat

SEQ ID NO: 230816 - DNA, 20 bp, Artificial Sequence
  Description of Artificial Sequence: Synthetic oligonucleotide
  Target: LAMA2; (-) strand; PAM type: YTN; PAM sequence: CTT
tcttcagttaaagtatataa

SEQ ID NO: 230817 - DNA, 20 bp, Artificial Sequence
  Description of Artificial Sequence: Synthetic oligonucleotide
  Target: LAMA2; (-) strand; PAM type: YTN; PAM sequence: TTC
tttcttcagttaaagtatat

SEQ ID NO: 230818 - DNA, 20 bp, Artificial Sequence
  Description of Artificial Sequence: Synthetic oligonucleotide
  Target: LAMA2; (-) strand; PAM type: YTN; PAM sequence: TTT
ctttcttcagttaaagtata

SEQ ID NO: 230819 - DNA, 20 bp, Artificial Sequence
  Description of Artificial Sequence: Synthetic oligonucleotide
  Target: LAMA2; (-) strand; PAM type: YTN; PAM sequence: TTT
tctttcttcagttaaagtat

SEQ ID NO: 230820 - DNA, 20 bp, Artificial Sequence
  Description of Artificial Sequence: Synthetic oligonucleotide
  Target: LAMA2; (-) strand; PAM type: YTN; PAM sequence: TTT
ttctttcttcagttaaagta

SEQ ID NO: 230821 - DNA, 20 bp, Artificial Sequence
  Description of Artificial Sequence: Synthetic oligonucleotide
  Target: LAMA2; (-) strand; PAM type: YTN; PAM sequence: TTG
tgtttttctttcttcagtta

SEQ ID NO: 230822 - DNA, 20 bp, Artificial Sequence
  Description of Artificial Sequence: Synthetic oligonucleotide
  Target: LAMA2; (-) strand; PAM type: YTN; PAM sequence: TTT
gtgtttttctttcttcagtt

SEQ ID NO: 230823 - DNA, 20 bp, Artificial Sequence
  Description of Artificial Sequence: Synthetic oligonucleotide
  Target: LAMA2; (-) strand; PAM type: YTN; PAM sequence: CTT
tgtgtttttctttcttcagt

SEQ ID NO: 230824 - DNA, 20 bp, Artificial Sequence
  Description of Artificial Sequence: Synthetic oligonucleotide
  Target: LAMA2; (-) strand; PAM type: YTN; PAM sequence: TTA
tctttgtgtttttctttctt

SEQ ID NO: 230825 - DNA, 20 bp, Artificial Sequence
  Description of Artificial Sequence: Synthetic oligonucleotide
  Target: LAMA2; (-) strand; PAM type: YTN; PAM sequence: TTT
atctttgtgtttttctttct

SEQ ID NO: 230826 - DNA, 20 bp, Artificial Sequence
  Description of Artificial Sequence: Synthetic oligonucleotide
  Target: LAMA2; (-) strand; PAM type: YTN; PAM sequence: TTG
tatttatctttgtgtttttc

SEQ ID NO: 230827 - DNA, 20 bp, Artificial Sequence
  Description of Artificial Sequence: Synthetic oligonucleotide
  Target: LAMA2; (-) strand; PAM type: YTN; PAM sequence: TTG
aaatattgtatttatctttg

SEQ ID NO: 230828 - DNA, 20 bp, Artificial Sequence
  Description of Artificial Sequence: Synthetic oligonucleotide
  Target: LAMA2; (-) strand; PAM type: YTN; PAM sequence: CTC
gaagttgaaatattgtattt

SEQ ID NO: 230829 - DNA, 20 bp, Artificial Sequence
  Description of Artificial Sequence: Synthetic oligonucleotide
  Target: LAMA2; (-) strand; PAM type: YTN; PAM sequence: TTA
aaaagtactcgaagttgaaa

SEQ ID NO: 230830 - DNA, 20 bp, Artificial Sequence
  Description of Artificial Sequence: Synthetic oligonucleotide
  Target: LAMA2; (-) strand; PAM type: YTN; PAM sequence: TTT
aaaaagtactcgaagttgaa

SEQ ID NO: 230831 - DNA, 20 bp, Artificial Sequence
  Description of Artificial Sequence: Synthetic oligonucleotide
  Target: LAMA2; (-) strand; PAM type: YTN; PAM sequence: TTT
taaaaagtactcgaagttga

SEQ ID NO: 230832 - DNA, 20 bp, Artificial Sequence
  Description of Artificial Sequence: Synthetic oligonucleotide
  Target: LAMA2; (-) strand; PAM type: YTN; PAM sequence: TTT
ttaaaaagtactcgaagttg

SEQ ID NO: 230833 - DNA, 20 bp, Artificial Sequence
  Description of Artificial Sequence: Synthetic oligonucleotide
  Target: LAMA2; (-) strand; PAM type: YTN; PAM sequence: TTC
aaataatttttaaaaagtac

SEQ ID NO: 230834 - DNA, 20 bp, Artificial Sequence
  Description of Artificial Sequence: Synthetic oligonucleotide
  Target: LAMA2; (-) strand; PAM type: YTN; PAM sequence: TTT
caaataatttttaaaaagta

SEQ ID NO: 230835 - DNA, 20 bp, Artificial Sequence
  Description of Artificial Sequence: Synthetic oligonucleotide
  Target: LAMA2; (-) strand; PAM type: YTN; PAM sequence: CTT
tcaaataatttttaaaaagt

SEQ ID NO: 230836 - DNA, 20 bp, Artificial Sequence
  Description of Artificial Sequence: Synthetic oligonucleotide
  Target: LAMA2; (-) strand; PAM type: YTN; PAM sequence: TTA
aatgctttcaaataattttt

SEQ ID NO: 230837 - DNA, 20 bp, Artificial Sequence
  Description of Artificial Sequence: Synthetic oligonucleotide
  Target: LAMA2; (-) strand; PAM type: YTN; PAM sequence: TTT
aaatgctttcaaataatttt

SEQ ID NO: 230838 - DNA, 20 bp, Artificial Sequence
  Description of Artificial Sequence: Synthetic oligonucleotide
  Target: LAMA2; (-) strand; PAM type: YTN; PAM sequence: TTT
taaatgctttcaaataattt

SEQ ID NO: 230839 - DNA, 20 bp, Artificial Sequence
  Description of Artificial Sequence: Synthetic oligonucleotide
  Target: LAMA2; (-) strand; PAM type: YTN; PAM sequence: TTT
ttaaatgctttcaaataatt

SEQ ID NO: 230840 - DNA, 20 bp, Artificial Sequence
  Description of Artificial Sequence: Synthetic oligonucleotide
  Target: LAMA2; (-) strand; PAM type: YTN; PAM sequence: CTA
tttttaaatgctttcaaata

SEQ ID NO: 230841 - DNA, 20 bp, Artificial Sequence
  Description of Artificial Sequence: Synthetic oligonucleotide
  Target: LAMA2; (-) strand; PAM type: YTN; PAM sequence: TTA
catctatttttaaatgcttt

SEQ ID NO: 230842 - DNA, 20 bp, Artificial Sequence
  Description of Artificial Sequence: Synthetic oligonucleotide
  Target: LAMA2; (-) strand; PAM type: YTN; PAM sequence: TTT
acatctatttttaaatgctt

SEQ ID NO: 230843 - DNA, 20 bp, Artificial Sequence
  Description of Artificial Sequence: Synthetic oligonucleotide
  Target: LAMA2; (-) strand; PAM type: YTN; PAM sequence: TTT
tacatctatttttaaatgct

SEQ ID NO: 230844 - DNA, 20 bp, Artificial Sequence
  Description of Artificial Sequence: Synthetic oligonucleotide
  Target: LAMA2; (-) strand; PAM type: YTN; PAM sequence: TTC
attttacatctatttttaaa

SEQ ID NO: 230845 - DNA, 20 bp, Artificial Sequence
  Description of Artificial Sequence: Synthetic oligonucleotide
  Target: LAMA2; (-) strand; PAM type: YTN; PAM sequence: TTG
acatacaggagttcatttta

SEQ ID NO: 230846 - DNA, 20 bp, Artificial Sequence
  Description of Artificial Sequence: Synthetic oligonucleotide
  Target: LAMA2; (-) strand; PAM type: YTN; PAM sequence: TTT
gacatacaggagttcatttt

SEQ ID NO: 230847 - DNA, 20 bp, Artificial Sequence
  Description of Artificial Sequence: Synthetic oligonucleotide
  Target: LAMA2; (-) strand; PAM type: YTN; PAM sequence: CTG
aaaggaatttgacatacagg

SEQ ID NO: 230848 - DNA, 20 bp, Artificial Sequence
  Description of Artificial Sequence: Synthetic oligonucleotide
  Target: LAMA2; (-) strand; PAM type: YTN; PAM sequence: CTC
tgaaaggaatttgacataca

SEQ ID NO: 230849 - DNA, 20 bp, Artificial Sequence
  Description of Artificial Sequence: Synthetic oligonucleotide
  Target: LAMA2; (-) strand; PAM type: YTN; PAM sequence: TTC
tctgaaaggaatttgacata

SEQ ID NO: 230850 - DNA, 20 bp, Artificial Sequence
  Description of Artificial Sequence: Synthetic oligonucleotide
  Target: LAMA2; (-) strand; PAM type: YTN; PAM sequence: TTT
ctctgaaaggaatttgacat

SEQ ID NO: 230851 - DNA, 20 bp, Artificial Sequence
  Description of Artificial Sequence: Synthetic oligonucleotide
  Target: LAMA2; (-) strand; PAM type: YTN; PAM sequence: TTT
tctctgaaaggaatttgaca

SEQ ID NO: 230852 - DNA, 20 bp, Artificial Sequence
  Description of Artificial Sequence: Synthetic oligonucleotide
  Target: LAMA2; (-) strand; PAM type: YTN; PAM sequence: TTT
ttctctgaaaggaatttgac

SEQ ID NO: 230853 - DNA, 20 bp, Artificial Sequence
  Description of Artificial Sequence: Synthetic oligonucleotide
  Target: LAMA2; (-) strand; PAM type: YTN; PAM sequence: TTT
tttctctgaaaggaatttga

SEQ ID NO: 230854 - DNA, 20 bp, Artificial Sequence
  Description of Artificial Sequence: Synthetic oligonucleotide
  Target: LAMA2; (-) strand; PAM type: YTN; PAM sequence: TTT
ttttctctgaaaggaatttg

SEQ ID NO: 230855 - DNA, 20 bp, Artificial Sequence
  Description of Artificial Sequence: Synthetic oligonucleotide
  Target: LAMA2; (-) strand; PAM type: YTN; PAM sequence: TTT
tttttctctgaaaggaattt

SEQ ID NO: 230856 - DNA, 20 bp, Artificial Sequence
  Description of Artificial Sequence: Synthetic oligonucleotide
  Target: LAMA2; (-) strand; PAM type: YTN; PAM sequence: TTT
ttttttctctgaaaggaatt

SEQ ID NO: 230857 - DNA, 20 bp, Artificial Sequence
  Description of Artificial Sequence: Synthetic oligonucleotide
  Target: LAMA2; (-) strand; PAM type: YTN; PAM sequence: TTT
tttttttctctgaaaggaat

SEQ ID NO: 230858 - DNA, 20 bp, Artificial Sequence
  Description of Artificial Sequence: Synthetic oligonucleotide
  Target: LAMA2; (-) strand; PAM type: YTN; PAM sequence: CTT
ttttttttctctgaaaggaa

SEQ ID NO: 230859 - DNA, 20 bp, Artificial Sequence
  Description of Artificial Sequence: Synthetic oligonucleotide
  Target: LAMA2; (-) strand; PAM type: YTN; PAM sequence: CTC
acttttttttttctctgaaa

SEQ ID NO: 230860 - DNA, 20 bp, Artificial Sequence
  Description of Artificial Sequence: Synthetic oligonucleotide
  Target: LAMA2; (-) strand; PAM type: YTN; PAM sequence: CTC
tcacttttttttttctctga

SEQ ID NO: 230861 - DNA, 20 bp, Artificial Sequence
  Description of Artificial Sequence: Synthetic oligonucleotide
  Target: LAMA2; (-) strand; PAM type: YTN; PAM sequence: TTC
cctctcacttttttttttct

SEQ ID NO: 230862 - DNA, 20 bp, Artificial Sequence
  Description of Artificial Sequence: Synthetic oligonucleotide
  Target: LAMA2; (-) strand; PAM type: YTN; PAM sequence: CTT
ccctctcacttttttttttc

SEQ ID NO: 230863 - DNA, 20 bp, Artificial Sequence
  Description of Artificial Sequence: Synthetic oligonucleotide
  Target: LAMA2; (-) strand; PAM type: YTN; PAM sequence: TTC
ccccttccctctcacttttt

SEQ ID NO: 230864 - DNA, 20 bp, Artificial Sequence
  Description of Artificial Sequence: Synthetic oligonucleotide
  Target: LAMA2; (-) strand; PAM type: YTN; PAM sequence: TTT
cccccttccctctcactttt

SEQ ID NO: 230865 - DNA, 20 bp, Artificial Sequence
  Description of Artificial Sequence: Synthetic oligonucleotide
  Target: LAMA2; (-) strand; PAM type: YTN; PAM sequence: CTA
aatgcaaatttcccccttcc

SEQ ID NO: 230866 - DNA, 20 bp, Artificial Sequence
  Description of Artificial Sequence: Synthetic oligonucleotide
  Target: LAMA2; (-) strand; PAM type: YTN; PAM sequence: TTA
ctaaatgcaaatttccccct

SEQ ID NO: 230867 - DNA, 20 bp, Artificial Sequence
  Description of Artificial Sequence: Synthetic oligonucleotide
  Target: LAMA2; (-) strand; PAM type: YTN; PAM sequence: TTC
aaaaaaacaaaaaaaattac

SEQ ID NO: 230868 - DNA, 20 bp, Artificial Sequence
  Description of Artificial Sequence: Synthetic oligonucleotide
  Target: LAMA2; (-) strand; PAM type: YTN; PAM sequence: TTT
caaaaaaacaaaaaaaatta

SEQ ID NO: 230869 - DNA, 20 bp, Artificial Sequence
  Description of Artificial Sequence: Synthetic oligonucleotide
  Target: LAMA2; (-) strand; PAM type: YTN; PAM sequence: TTT
tcaaaaaaacaaaaaaaatt

SEQ ID NO: 230870 - DNA, 20 bp, Artificial Sequence
  Description of Artificial Sequence: Synthetic oligonucleotide
  Target: LAMA2; (-) strand; PAM type: YTN; PAM sequence: CTG
aaattttcaaaaaaacaaaa

SEQ ID NO: 230871 - DNA, 20 bp, Artificial Sequence
  Description of Artificial Sequence: Synthetic oligonucleotide
  Target: LAMA2; (-) strand; PAM type: YTN; PAM sequence: CTA
agtgcctgaaattttcaaaa

SEQ ID NO: 230872 - DNA, 20 bp, Artificial Sequence
  Description of Artificial Sequence: Synthetic oligonucleotide
  Target: LAMA2; (-) strand; PAM type: YTN; PAM sequence: TTA
ctaagtgcctgaaattttca

SEQ ID NO: 230873 - DNA, 20 bp, Artificial Sequence
  Description of Artificial Sequence: Synthetic oligonucleotide
  Target: LAMA2; (-) strand; PAM type: YTN; PAM sequence: TTG
ggcatgacgtacaaaaggaa

SEQ ID NO: 230874 - DNA, 20 bp, Artificial Sequence
  Description of Artificial Sequence: Synthetic oligonucleotide
  Target: LAMA2; (-) strand; PAM type: YTN; PAM sequence: TTC
ccattgggcatgacgtacaa

SEQ ID NO: 230875 - DNA, 20 bp, Artificial Sequence
  Description of Artificial Sequence: Synthetic oligonucleotide
  Target: LAMA2; (-) strand; PAM type: YTN; PAM sequence: CTG
gtatcgttcccattgggcat

SEQ ID NO: 230876 - DNA, 20 bp, Artificial Sequence
  Description of Artificial Sequence: Synthetic oligonucleotide
  Target: LAMA2; (-) strand; PAM type: YTN; PAM sequence: TTG
agtgaaagatcctggtatcg

SEQ ID NO: 230877 - DNA, 20 bp, Artificial Sequence
  Description of Artificial Sequence: Synthetic oligonucleotide
  Target: LAMA2; (-) strand; PAM type: YTN; PAM sequence: CTG
taatccacagaattgagtga

SEQ ID NO: 230878 - DNA, 20 bp, Artificial Sequence
  Description of Artificial Sequence: Synthetic oligonucleotide
  Target: LAMA2; (-) strand; PAM type: YTN; PAM sequence: CTG
aaacatgcccaggtgggtga

SEQ ID NO: 230879 - DNA, 20 bp, Artificial Sequence
  Description of Artificial Sequence: Synthetic oligonucleotide
  Target: LAMA2; (-) strand; PAM type: YTN; PAM sequence: TTC
atctgaaacatgcccaggtg

SEQ ID NO: 230880 - DNA, 20 bp, Artificial Sequence
  Description of Artificial Sequence: Synthetic oligonucleotide
  Target: LAMA2; (-) strand; PAM type: YTN; PAM sequence: TTT
catctgaaacatgcccaggt

SEQ ID NO: 230881 - DNA, 20 bp, Artificial Sequence
  Description of Artificial Sequence: Synthetic oligonucleotide
  Target: LAMA2; (-) strand; PAM type: YTN; PAM sequence: TTA
gtttcatctgaaacatgccc

SEQ ID NO: 230882 - DNA, 20 bp, Artificial Sequence
  Description of Artificial Sequence: Synthetic oligonucleotide
  Target: LAMA2; (-) strand; PAM type: YTN; PAM sequence: TTA
ggttagtttcatctgaaaca

SEQ ID NO: 230883 - DNA, 20 bp, Artificial Sequence
  Description of Artificial Sequence: Synthetic oligonucleotide
  Target: LAMA2; (-) strand; PAM type: YTN; PAM sequence: CTT
aggttagtttcatctgaaac

SEQ ID NO: 230884 - DNA, 20 bp, Artificial Sequence
  Description of Artificial Sequence: Synthetic oligonucleotide
  Target: LAMA2; (-) strand; PAM type: YTN; PAM sequence: CTC
aagatgagcttaggttagtt

SEQ ID NO: 230885 - DNA, 20 bp, Artificial Sequence
  Description of Artificial Sequence: Synthetic oligonucleotide
  Target: LAMA2; (-) strand; PAM type: YTN; PAM sequence: TTA
ctcaagatgagcttaggtta

SEQ ID NO: 230886 - DNA, 20 bp, Artificial Sequence
  Description of Artificial Sequence: Synthetic oligonucleotide
  Target: LAMA2; (-) strand; PAM type: YTN; PAM sequence: CTT
actcaagatgagcttaggtt

SEQ ID NO: 230887 - DNA, 20 bp, Artificial Sequence
  Description of Artificial Sequence: Synthetic oligonucleotide
  Target: LAMA2; (-) strand; PAM type: YTN; PAM sequence: CTA
agccccttactcaagatgag

SEQ ID NO: 230888 - DNA, 20 bp, Artificial Sequence
  Description of Artificial Sequence: Synthetic oligonucleotide
  Target: LAMA2; (-) strand; PAM type: YTN; PAM sequence: TTC
taagccccttactcaagatg

SEQ ID NO: 230889 - DNA, 20 bp, Artificial Sequence
  Description of Artificial Sequence: Synthetic oligonucleotide
  Target: LAMA2; (-) strand; PAM type: YTN; PAM sequence: CTT
ctaagccccttactcaagat

SEQ ID NO: 230890 - DNA, 20 bp, Artificial Sequence
  Description of Artificial Sequence: Synthetic oligonucleotide
  Target: LAMA2; (-) strand; PAM type: YTN; PAM sequence: TTA
cttctaagccccttactcaa

SEQ ID NO: 230891 - DNA, 20 bp, Artificial Sequence
  Description of Artificial Sequence: Synthetic oligonucleotide
  Target: LAMA2; (-) strand; PAM type: YTN; PAM sequence: TTT
acttctaagccccttactca

SEQ ID NO: 230892 - DNA, 20 bp, Artificial Sequence
  Description of Artificial Sequence: Synthetic oligonucleotide
  Target: LAMA2; (-) strand; PAM type: YTN; PAM sequence: CTC
aaagcaaccaacaaagcatt

SEQ ID NO: 230893 - DNA, 20 bp, Artificial Sequence
  Description of Artificial Sequence: Synthetic oligonucleotide
  Target: LAMA2; (-) strand; PAM type: YTN; PAM sequence: TTG
tacaactcaaagcaaccaac

SEQ ID NO: 230894 - DNA, 20 bp, Artificial Sequence
  Description of Artificial Sequence: Synthetic oligonucleotide
  Target: LAMA2; (-) strand; PAM type: YTN; PAM sequence: TTT
gtacaactcaaagcaaccaa

SEQ ID NO: 230895 - DNA, 20 bp, Artificial Sequence
  Description of Artificial Sequence: Synthetic oligonucleotide
  Target: LAMA2; (-) strand; PAM type: YTN; PAM sequence: CTT
tgtacaactcaaagcaacca

SEQ ID NO: 230896 - DNA, 20 bp, Artificial Sequence
  Description of Artificial Sequence: Synthetic oligonucleotide
  Target: LAMA2; (-) strand; PAM type: YTN; PAM sequence: CTG
ctttgtacaactcaaagcaa

SEQ ID NO: 230897 - DNA, 20 bp, Artificial Sequence
  Description of Artificial Sequence: Synthetic oligonucleotide
  Target: LAMA2; (-) strand; PAM type: YTN; PAM sequence: CTG
gtggtcgtcctgctttgtac

SEQ ID NO: 230898 - DNA, 20 bp, Artificial Sequence
  Description of Artificial Sequence: Synthetic oligonucleotide
  Target: LAMA2; (-) strand; PAM type: YTN; PAM sequence: CTC
tggtggtcgtcctgctttgt

SEQ ID NO: 230899 - DNA, 20 bp, Artificial Sequence
  Description of Artificial Sequence: Synthetic oligonucleotide
  Target: LAMA2; (-) strand; PAM type: YTN; PAM sequence: TTA
gaaagcctctggtggtcgtc

SEQ ID NO: 230900 - DNA, 20 bp, Artificial Sequence
  Description of Artificial Sequence: Synthetic oligonucleotide
  Target: LAMA2; (-) strand; PAM type: YTN; PAM sequence: CTT
agaaagcctctggtggtcgt

SEQ ID NO: 230901 - DNA, 20 bp, Artificial Sequence
  Description of Artificial Sequence: Synthetic oligonucleotide
  Target: LAMA2; (-) strand; PAM type: YTN; PAM sequence: TTC
ttagaaagcctctggtggtc

SEQ ID NO: 230902 - DNA, 20 bp, Artificial Sequence
  Description of Artificial Sequence: Synthetic oligonucleotide
  Target: LAMA2; (-) strand; PAM type: YTN; PAM sequence: TTT
cttagaaagcctctggtggt

SEQ ID NO: 230903 - DNA, 20 bp, Artificial Sequence
  Description of Artificial Sequence: Synthetic oligonucleotide
  Target: LAMA2; (-) strand; PAM type: YTN; PAM sequence: TTT
tcttagaaagcctctggtgg

SEQ ID NO: 230904 - DNA, 20 bp, Artificial Sequence
  Description of Artificial Sequence: Synthetic oligonucleotide
  Target: LAMA2; (-) strand; PAM type: YTN; PAM sequence: TTT
ttcttagaaagcctctggtg

SEQ ID NO: 230905 - DNA, 20 bp, Artificial Sequence
  Description of Artificial Sequence: Synthetic oligonucleotide
  Target: LAMA2; (-) strand; PAM type: YTN; PAM sequence: CTT
tttcttagaaagcctctggt

SEQ ID NO: 230906 - DNA, 20 bp, Artificial Sequence
  Description of Artificial Sequence: Synthetic oligonucleotide
  Target: LAMA2; (-) strand; PAM type: YTN; PAM sequence: TTC
tttttcttagaaagcctctg

SEQ ID NO: 230907 - DNA, 20 bp, Artificial Sequence
  Description of Artificial Sequence: Synthetic oligonucleotide
  Target: LAMA2; (-) strand; PAM type: YTN; PAM sequence: CTA
tgattctttttcttagaaag

SEQ ID NO: 230908 - DNA, 20 bp, Artificial Sequence
  Description of Artificial Sequence: Synthetic oligonucleotide
  Target: LAMA2; (-) strand; PAM type: YTN; PAM sequence: CTC
tatgattctttttcttagaa

SEQ ID NO: 230909 - DNA, 20 bp, Artificial Sequence
  Description of Artificial Sequence: Synthetic oligonucleotide
  Target: LAMA2; (-) strand; PAM type: YTN; PAM sequence: TTA
tcaaagtctctatgattctt

SEQ ID NO: 230910 - DNA, 20 bp, Artificial Sequence
  Description of Artificial Sequence: Synthetic oligonucleotide
  Target: LAMA2; (-) strand; PAM type: YTN; PAM sequence: TTT
atcaaagtctctatgattct

SEQ ID NO: 230911 - DNA, 20 bp, Artificial Sequence
  Description of Artificial Sequence: Synthetic oligonucleotide
  Target: LAMA2; (-) strand; PAM type: YTN; PAM sequence: TTT
tatcaaagtctctatgattc

SEQ ID NO: 230912 - DNA, 20 bp, Artificial Sequence
  Description of Artificial Sequence: Synthetic oligonucleotide
  Target: LAMA2; (-) strand; PAM type: YTN; PAM sequence: TTC
caattttatcaaagtctcta

SEQ ID NO: 230913 - DNA, 20 bp, Artificial Sequence
  Description of Artificial Sequence: Synthetic oligonucleotide
  Target: LAMA2; (-) strand; PAM type: YTN; PAM sequence: TTA
ggagttccaattttatcaaa

SEQ ID NO: 230914 - DNA, 20 bp, Artificial Sequence
  Description of Artificial Sequence: Synthetic oligonucleotide
  Target: LAMA2; (-) strand; PAM type: YTN; PAM sequence: TTT
aggagttccaattttatcaa

SEQ ID NO: 230915 - DNA, 20 bp, Artificial Sequence
  Description of Artificial Sequence: Synthetic oligonucleotide
  Target: LAMA2; (-) strand; PAM type: YTN; PAM sequence: CTT
taggagttccaattttatca

SEQ ID NO: 230916 - DNA, 20 bp, Artificial Sequence
  Description of Artificial Sequence: Synthetic oligonucleotide
  Target: LAMA2; (-) strand; PAM type: YTN; PAM sequence: CTG
ctttaggagttccaatttta

SEQ ID NO: 230917 - DNA, 20 bp, Artificial Sequence
  Description of Artificial Sequence: Synthetic oligonucleotide
  Target: LAMA2; (-) strand; PAM type: YTN; PAM sequence: TTA
gctgctttaggagttccaat

SEQ ID NO: 230918 - DNA, 20 bp, Artificial Sequence
  Description of Artificial Sequence: Synthetic oligonucleotide
  Target: LAMA2; (-) strand; PAM type: YTN; PAM sequence: CTT
agctgctttaggagttccaa

SEQ ID NO: 230919 - DNA, 20 bp, Artificial Sequence
  Description of Artificial Sequence: Synthetic oligonucleotide
  Target: LAMA2; (-) strand; PAM type: YTN; PAM sequence: TTA
aaaatgatcaaaaatagaag

SEQ ID NO: 230920 - DNA, 20 bp, Artificial Sequence
  Description of Artificial Sequence: Synthetic oligonucleotide
  Target: LAMA2; (-) strand; PAM type: YTN; PAM sequence: TTT
aaaaatgatcaaaaatagaa

SEQ ID NO: 230921 - DNA, 20 bp, Artificial Sequence
  Description of Artificial Sequence: Synthetic oligonucleotide
  Target: LAMA2; (-) strand; PAM type: YTN; PAM sequence: TTT
taaaaatgatcaaaaataga

SEQ ID NO: 230922 - DNA, 20 bp, Artificial Sequence
  Description of Artificial Sequence: Synthetic oligonucleotide
  Target: LAMA2; (-) strand; PAM type: YTN; PAM sequence: TTT
ttaaaaatgatcaaaaatag

SEQ ID NO: 230923 - DNA, 20 bp, Artificial Sequence
  Description of Artificial Sequence: Synthetic oligonucleotide
  Target: LAMA2; (-) strand; PAM type: YTN; PAM sequence: CTT
tttaaaaatgatcaaaaata

SEQ ID NO: 230924 - DNA, 20 bp, Artificial Sequence
  Description of Artificial Sequence: Synthetic oligonucleotide
  Target: LAMA2; (-) strand; PAM type: YTN; PAM sequence: CTA
actttttaaaaatgatcaaa

SEQ ID NO: 230925 - DNA, 20 bp, Artificial Sequence
  Description of Artificial Sequence: Synthetic oligonucleotide
  Target: LAMA2; (-) strand; PAM type: YTN; PAM sequence: CTA
ccaaacaccagaagaactaa

SEQ ID NO: 230926 - DNA, 20 bp, Artificial Sequence
  Description of Artificial Sequence: Synthetic oligonucleotide
  Target: LAMA2; (-) strand; PAM type: YTN; PAM sequence: CTA
tggaactaccaaacaccaga

SEQ ID NO: 230927 - DNA, 20 bp, Artificial Sequence
  Description of Artificial Sequence: Synthetic oligonucleotide
  Target: LAMA2; (-) strand; PAM type: YTN; PAM sequence: CTA
ctatggaactaccaaacacc

SEQ ID NO: 230928 - DNA, 20 bp, Artificial Sequence
  Description of Artificial Sequence: Synthetic oligonucleotide
  Target: LAMA2; (-) strand; PAM type: YTN; PAM sequence: CTA
actactatggaactaccaaa

SEQ ID NO: 230929 - DNA, 20 bp, Artificial Sequence
  Description of Artificial Sequence: Synthetic oligonucleotide
  Target: LAMA2; (-) strand; PAM type: YTN; PAM sequence: TTC
taactactatggaactacca

SEQ ID NO: 230930 - DNA, 20 bp, Artificial Sequence
  Description of Artificial Sequence: Synthetic oligonucleotide
  Target: LAMA2; (-) strand; PAM type: YTN; PAM sequence: TTT
ctaactactatggaactacc

SEQ ID NO: 230931 - DNA, 20 bp, Artificial Sequence
  Description of Artificial Sequence: Synthetic oligonucleotide
  Target: LAMA2; (-) strand; PAM type: YTN; PAM sequence: CTT
tctaactactatggaactac

SEQ ID NO: 230932 - DNA, 20 bp, Artificial Sequence
  Description of Artificial Sequence: Synthetic oligonucleotide
  Target: LAMA2; (-) strand; PAM type: YTN; PAM sequence: TTC
atgtggcagtgctttctaac

SEQ ID NO: 230933 - DNA, 20 bp, Artificial Sequence
  Description of Artificial Sequence: Synthetic oligonucleotide
  Target: LAMA2; (-) strand; PAM type: YTN; PAM sequence: TTT
catgtggcagtgctttctaa

SEQ ID NO: 230934 - DNA, 20 bp, Artificial Sequence
  Description of Artificial Sequence: Synthetic oligonucleotide
  Target: LAMA2; (-) strand; PAM type: YTN; PAM sequence: CTA
ccaatagcagatttcatgtg

SEQ ID NO: 230935 - DNA, 20 bp, Artificial Sequence
  Description of Artificial Sequence: Synthetic oligonucleotide
  Target: LAMA2; (-) strand; PAM type: YTN; PAM sequence: TTC
taccaatagcagatttcatg

SEQ ID NO: 230936 - DNA, 20 bp, Artificial Sequence
  Description of Artificial Sequence: Synthetic oligonucleotide
  Target: LAMA2; (-) strand; PAM type: YTN; PAM sequence: TTT
ctaccaatagcagatttcat

SEQ ID NO: 230937 - DNA, 20 bp, Artificial Sequence
  Description of Artificial Sequence: Synthetic oligonucleotide
  Target: LAMA2; (-) strand; PAM type: YTN; PAM sequence: TTT
tctaccaatagcagatttca

SEQ ID NO: 230938 - DNA, 20 bp, Artificial Sequence
  Description of Artificial Sequence: Synthetic oligonucleotide
  Target: LAMA2; (-) strand; PAM type: YTN; PAM sequence: TTT
ttctaccaatagcagatttc

SEQ ID NO: 230939 - DNA, 20 bp, Artificial Sequence
  Description of Artificial Sequence: Synthetic oligonucleotide
  Target: LAMA2; (-) strand; PAM type: YTN; PAM sequence: CTT
tttctaccaatagcagattt

SEQ ID NO: 230940 - DNA, 20 bp, Artificial Sequence
  Description of Artificial Sequence: Synthetic oligonucleotide
  Target: LAMA2; (-) strand; PAM type: YTN; PAM sequence: TTC
tttttctaccaatagcagat

SEQ ID NO: 230941 - DNA, 20 bp, Artificial Sequence
  Description of Artificial Sequence: Synthetic oligonucleotide
  Target: LAMA2; (-) strand; PAM type: YTN; PAM sequence: TTT
ctttttctaccaatagcaga

SEQ ID NO: 230942 - DNA, 20 bp, Artificial Sequence
  Description of Artificial Sequence: Synthetic oligonucleotide
  Target: LAMA2; (-) strand; PAM type: YTN; PAM sequence: TTT
tctttttctaccaatagcag

SEQ ID NO: 230943 - DNA, 20 bp, Artificial Sequence
  Description of Artificial Sequence: Synthetic oligonucleotide
  Target: LAMA2; (-) strand; PAM type: YTN; PAM sequence: CTG
taacattttctttttctacc

SEQ ID NO: 230944 - DNA, 20 bp, Artificial Sequence
  Description of Artificial Sequence: Synthetic oligonucleotide
  Target: LAMA2; (-) strand; PAM type: YTN; PAM sequence: TTG
gctgtaacattttctttttc

SEQ ID NO: 230945 - DNA, 20 bp, Artificial Sequence
  Description of Artificial Sequence: Synthetic oligonucleotide
  Target: LAMA2; (-) strand; PAM type: YTN; PAM sequence: TTG
tatcagagttggctgtaaca

SEQ ID NO: 230946 - DNA, 20 bp, Artificial Sequence
  Description of Artificial Sequence: Synthetic oligonucleotide
  Target: LAMA2; (-) strand; PAM type: YTN; PAM sequence: CTC
atgttgtatcagagttggct

SEQ ID NO: 230947 - DNA, 20 bp, Artificial Sequence
  Description of Artificial Sequence: Synthetic oligonucleotide
  Target: LAMA2; (-) strand; PAM type: YTN; PAM sequence: CTC
tcatgttgtatcagagttgg

SEQ ID NO: 230948 - DNA, 20 bp, Artificial Sequence
  Description of Artificial Sequence: Synthetic oligonucleotide
  Target: LAMA2; (-) strand; PAM type: YTN; PAM sequence: CTC
tctcatgttgtatcagagtt

SEQ ID NO: 230949 - DNA, 20 bp, Artificial Sequence
  Description of Artificial Sequence: Synthetic oligonucleotide
  Target: LAMA2; (-) strand; PAM type: YTN; PAM sequence: CTC
tctctcatgttgtatcagag

SEQ ID NO: 230950 - DNA, 20 bp, Artificial Sequence
  Description of Artificial Sequence: Synthetic oligonucleotide
  Target: LAMA2; (-) strand; PAM type: YTN; PAM sequence: CTG
tctctctctcatgttgtatc

SEQ ID NO: 230951 - DNA, 20 bp, Artificial Sequence
  Description of Artificial Sequence: Synthetic oligonucleotide
  Target: LAMA2; (-) strand; PAM type: YTN; PAM sequence: CTC
tgtctctctctcatgttgta

SEQ ID NO: 230952 - DNA, 20 bp, Artificial Sequence
  Description of Artificial Sequence: Synthetic oligonucleotide
  Target: LAMA2; (-) strand; PAM type: YTN; PAM sequence: CTC
tctgtctctctctcatgttg

SEQ ID NO: 230953 - DNA, 20 bp, Artificial Sequence
  Description of Artificial Sequence: Synthetic oligonucleotide
  Target: LAMA2; (-) strand; PAM type: YTN; PAM sequence: CTC
tctctgtctctctctcatgt

SEQ ID NO: 230954 - DNA, 20 bp, Artificial Sequence
  Description of Artificial Sequence: Synthetic oligonucleotide
  Target: LAMA2; (-) strand; PAM type: YTN; PAM sequence: CTC
tctctctgtctctctctcat

SEQ ID NO: 230955 - DNA, 20 bp, Artificial Sequence
  Description of Artificial Sequence: Synthetic oligonucleotide
  Target: LAMA2; (-) strand; PAM type: YTN; PAM sequence: CTC
tctctctctgtctctctctc

SEQ ID NO: 230956 - DNA, 20 bp, Artificial Sequence
  Description of Artificial Sequence: Synthetic oligonucleotide
  Target: LAMA2; (-) strand; PAM type: YTN; PAM sequence: CTC
tctctctctctgtctctctc

SEQ ID NO: 230957 - DNA, 20 bp, Artificial Sequence
  Description of Artificial Sequence: Synthetic oligonucleotide
  Target: LAMA2; (-) strand; PAM type: YTN; PAM sequence: TTC
tctctctctctctgtctctc

SEQ ID NO: 230958 - DNA, 20 bp, Artificial Sequence
  Description of Artificial Sequence: Synthetic oligonucleotide
  Target: LAMA2; (-) strand; PAM type: YTN; PAM sequence: CTT
ctctctctctctctgtctct

SEQ ID NO: 230959 - DNA, 20 bp, Artificial Sequence
  Description of Artificial Sequence: Synthetic oligonucleotide
  Target: LAMA2; (-) strand; PAM type: YTN; PAM sequence: CTC
ccttctctctctctctctgt

SEQ ID NO: 230960 - DNA, 20 bp, Artificial Sequence
  Description of Artificial Sequence: Synthetic oligonucleotide
  Target: LAMA2; (-) strand; PAM type: YTN; PAM sequence: CTC
tcccttctctctctctctct

SEQ ID NO: 230961 - DNA, 20 bp, Artificial Sequence
  Description of Artificial Sequence: Synthetic oligonucleotide
  Target: LAMA2; (-) strand; PAM type: YTN; PAM sequence: TTC
tctcccttctctctctctct

SEQ ID NO: 230962 - DNA, 20 bp, Artificial Sequence
  Description of Artificial Sequence: Synthetic oligonucleotide
  Target: LAMA2; (-) strand; PAM type: YTN; PAM sequence: CTT
ctctcccttctctctctctc

SEQ ID NO: 230963 - DNA, 20 bp, Artificial Sequence
  Description of Artificial Sequence: Synthetic oligonucleotide
  Target: LAMA2; (-) strand; PAM type: YTN; PAM sequence: CTC
ttctctcccttctctctctc

SEQ ID NO: 230964 - DNA, 20 bp, Artificial Sequence
  Description of Artificial Sequence: Synthetic oligonucleotide
  Target: LAMA2; (-) strand; PAM type: YTN; PAM sequence: CTG
gtcaaagaagaacatgtctc

SEQ ID NO: 230965 - DNA, 20 bp, Artificial Sequence
  Description of Artificial Sequence: Synthetic oligonucleotide
  Target: LAMA2; (-) strand; PAM type: YTN; PAM sequence: CTG
ctggtcaaagaagaacatgt

SEQ ID NO: 230966 - DNA, 20 bp, Artificial Sequence
  Description of Artificial Sequence: Synthetic oligonucleotide
  Target: LAMA2; (-) strand; PAM type: YTN; PAM sequence: TTC
ctgctggtcaaagaagaaca

SEQ ID NO: 230967 - DNA, 20 bp, Artificial Sequence
  Description of Artificial Sequence: Synthetic oligonucleotide
  Target: LAMA2; (-) strand; PAM type: YTN; PAM sequence: TTT
cctgctggtcaaagaagaac

SEQ ID NO: 230968 - DNA, 20 bp, Artificial Sequence
  Description of Artificial Sequence: Synthetic oligonucleotide
  Target: LAMA2; (-) strand; PAM type: YTN; PAM sequence: TTT
tcctgctggtcaaagaagaa

SEQ ID NO: 230969 - DNA, 20 bp, Artificial Sequence
  Description of Artificial Sequence: Synthetic oligonucleotide
  Target: LAMA2; (-) strand; PAM type: YTN; PAM sequence: TTT
ttcctgctggtcaaagaaga

SEQ ID NO: 230970 - DNA, 20 bp, Artificial Sequence
  Description of Artificial Sequence: Synthetic oligonucleotide
  Target: LAMA2; (-) strand; PAM type: YTN; PAM sequence: TTT
tttcctgctggtcaaagaag

SEQ ID NO: 230971 - DNA, 20 bp, Artificial Sequence
  Description of Artificial Sequence: Synthetic oligonucleotide
  Target: LAMA2; (-) strand; PAM type: YTN; PAM sequence: TTT
ttttcctgctggtcaaagaa

SEQ ID NO: 230972 - DNA, 20 bp, Artificial Sequence
  Description of Artificial Sequence: Synthetic oligonucleotide
  Target: LAMA2; (-) strand; PAM type: YTN; PAM sequence: TTT
tttttcctgctggtcaaaga

SEQ ID NO: 230973 - DNA, 20 bp, Artificial Sequence
  Description of Artificial Sequence: Synthetic oligonucleotide
  Target: LAMA2; (-) strand; PAM type: YTN; PAM sequence: TTT
ttttttcctgctggtcaaag

SEQ ID NO: 230974 - DNA, 20 bp, Artificial Sequence
  Description of Artificial Sequence: Synthetic oligonucleotide
  Target: LAMA2; (-) strand; PAM type: YTN; PAM sequence: TTT
tttttttcctgctggtcaaa

SEQ ID NO: 230975 - DNA, 20 bp, Artificial Sequence
  Description of Artificial Sequence: Synthetic oligonucleotide
  Target: LAMA2; (-) strand; PAM type: YTN; PAM sequence: TTT
ttttttttcctgctggtcaa

SEQ ID NO: 230976 - DNA, 20 bp, Artificial Sequence
  Description of Artificial Sequence: Synthetic oligonucleotide
  Target: LAMA2; (-) strand; PAM type: YTN; PAM sequence: TTT
tttttttttcctgctggtca

SEQ ID NO: 230977 - DNA, 20 bp, Artificial Sequence
  Description of Artificial Sequence: Synthetic oligonucleotide
  Target: LAMA2; (-) strand; PAM type: YTN; PAM sequence: CTT
ttttttttttcctgctggtc

SEQ ID NO: 230978 - DNA, 20 bp, Artificial Sequence
  Description of Artificial Sequence: Synthetic oligonucleotide
  Target: LAMA2; (-) strand; PAM type: YTN; PAM sequence: TTG
tgcagcttttttttttttcc

SEQ ID NO: 230979 - DNA, 20 bp, Artificial Sequence
  Description of Artificial Sequence: Synthetic oligonucleotide
  Target: LAMA2; (-) strand; PAM type: YTN; PAM sequence: TTT
gtgcagcttttttttttttc

SEQ ID NO: 230980 - DNA, 20 bp, Artificial Sequence
  Description of Artificial Sequence: Synthetic oligonucleotide
  Target: LAMA2; (-) strand; PAM type: YTN; PAM sequence: TTA
aaaggtttgtgcagcttttt

SEQ ID NO: 230981 - DNA, 20 bp, Artificial Sequence
  Description of Artificial Sequence: Synthetic oligonucleotide
  Target: LAMA2; (-) strand; PAM type: YTN; PAM sequence: CTA
gttaaaaggtttgtgcagct

SEQ ID NO: 230982 - DNA, 20 bp, Artificial Sequence
  Description of Artificial Sequence: Synthetic oligonucleotide
  Target: LAMA2; (-) strand; PAM type: YTN; PAM sequence: CTA
gtgaaactagttaaaaggtt

SEQ ID NO: 230983 - DNA, 20 bp, Artificial Sequence
  Description of Artificial Sequence: Synthetic oligonucleotide
  Target: LAMA2; (-) strand; PAM type: YTN; PAM sequence: CTG
ctagtgaaactagttaaaag

SEQ ID NO: 230984 - DNA, 20 bp, Artificial Sequence
  Description of Artificial Sequence: Synthetic oligonucleotide
  Target: LAMA2; (-) strand; PAM type: YTN; PAM sequence: TTC
tgctagtgaaactagttaaa

SEQ ID NO: 230985 - DNA, 20 bp, Artificial Sequence
  Description of Artificial Sequence: Synthetic oligonucleotide
  Target: LAMA2; (-) strand; PAM type: YTN; PAM sequence: TTT
ctgctagtgaaactagttaa

SEQ ID NO: 230986 - DNA, 20 bp, Artificial Sequence
  Description of Artificial Sequence: Synthetic oligonucleotide
  Target: LAMA2; (-) strand; PAM type: YTN; PAM sequence: TTT
tctgctagtgaaactagtta

SEQ ID NO: 230987 - DNA, 20 bp, Artificial Sequence
  Description of Artificial Sequence: Synthetic oligonucleotide
  Target: LAMA2; (-) strand; PAM type: YTN; PAM sequence: CTT
ttctgctagtgaaactagtt

SEQ ID NO: 230988 - DNA, 20 bp, Artificial Sequence
  Description of Artificial Sequence: Synthetic oligonucleotide
  Target: LAMA2; (-) strand; PAM type: YTN; PAM sequence: TTC
ttttctgctagtgaaactag

SEQ ID NO: 230989 - DNA, 20 bp, Artificial Sequence
  Description of Artificial Sequence: Synthetic oligonucleotide
  Target: LAMA2; (-) strand; PAM type: YTN; PAM sequence: TTT
cttttctgctagtgaaacta

SEQ ID NO: 230990 - DNA, 20 bp, Artificial Sequence
  Description of Artificial Sequence: Synthetic oligonucleotide
  Target: LAMA2; (-) strand; PAM type: YTN; PAM sequence: TTT
tcttttctgctagtgaaact

SEQ ID NO: 230991 - DNA, 20 bp, Artificial Sequence
  Description of Artificial Sequence: Synthetic oligonucleotide
  Target: LAMA2; (-) strand; PAM type: YTN; PAM sequence: TTT
ttcttttctgctagtgaaac

SEQ ID NO: 230992 - DNA, 20 bp, Artificial Sequence
  Description of Artificial Sequence: Synthetic oligonucleotide
  Target: LAMA2; (-) strand; PAM type: YTN; PAM sequence: TTA
tttttcttttctgctagtga

SEQ ID NO: 230993 - DNA, 20 bp, Artificial Sequence
  Description of Artificial Sequence: Synthetic oligonucleotide
  Target: LAMA2; (-) strand; PAM type: YTN; PAM sequence: TTT
atttttcttttctgctagtg

SEQ ID NO: 230994 - DNA, 20 bp, Artificial Sequence
  Description of Artificial Sequence: Synthetic oligonucleotide
  Target: LAMA2; (-) strand; PAM type: YTN; PAM sequence: TTT
tatttttcttttctgctagt

SEQ ID NO: 230995 - DNA, 20 bp, Artificial Sequence
  Description of Artificial Sequence: Synthetic oligonucleotide
  Target: LAMA2; (-) strand; PAM type: YTN; PAM sequence: TTT
ttatttttcttttctgctag

SEQ ID NO: 230996 - DNA, 20 bp, Artificial Sequence
  Description of Artificial Sequence: Synthetic oligonucleotide
  Target: LAMA2; (-) strand; PAM type: YTN; PAM sequence: TTA
tatttttatttttcttttct

SEQ ID NO: 230997 - DNA, 20 bp, Artificial Sequence
  Description of Artificial Sequence: Synthetic oligonucleotide
  Target: LAMA2; (-) strand; PAM type: YTN; PAM sequence: TTT
atatttttatttttcttttc

SEQ ID NO: 230998 - DNA, 20 bp, Artificial Sequence
  Description of Artificial Sequence: Synthetic oligonucleotide
  Target: LAMA2; (-) strand; PAM type: YTN; PAM sequence: TTT
tatatttttatttttctttt

SEQ ID NO: 230999 - DNA, 20 bp, Artificial Sequence
  Description of Artificial Sequence: Synthetic oligonucleotide
  Target: LAMA2; (-) strand; PAM type: YTN; PAM sequence: CTA
ttttatatttttatttttct

SEQ ID NO: 231000 - DNA, 20 bp, Artificial Sequence
  Description of Artificial Sequence: Synthetic oligonucleotide
  Target: LAMA2; (-) strand; PAM type: YTN; PAM sequence: TTG
ctattttatatttttatttt

SEQ ID NO: 231001 - DNA, 20 bp, Artificial Sequence
  Description of Artificial Sequence: Synthetic oligonucleotide
  Target: LAMA2; (-) strand; PAM type: YTN; PAM sequence: TTT
gctattttatatttttattt

SEQ ID NO: 231002 - DNA, 20 bp, Artificial Sequence
  Description of Artificial Sequence: Synthetic oligonucleotide
  Target: LAMA2; (-) strand; PAM type: YTN; PAM sequence: TTA
tttgctattttatattttta

SEQ ID NO: 231003 - DNA, 20 bp, Artificial Sequence
  Description of Artificial Sequence: Synthetic oligonucleotide
  Target: LAMA2; (-) strand; PAM type: YTN; PAM sequence: TTA
aagattatttgctattttat

SEQ ID NO: 231004 - DNA, 20 bp, Artificial Sequence
  Description of Artificial Sequence: Synthetic oligonucleotide
  Target: LAMA2; (-) strand; PAM type: YTN; PAM sequence: TTT
aaagattatttgctatttta

SEQ ID NO: 231005 - DNA, 20 bp, Artificial Sequence
  Description of Artificial Sequence: Synthetic oligonucleotide
  Target: LAMA2; (-) strand; PAM type: YTN; PAM sequence: CTT
taaagattatttgctatttt

SEQ ID NO: 231006 - DNA, 20 bp, Artificial Sequence
  Description of Artificial Sequence: Synthetic oligonucleotide
  Target: LAMA2; (-) strand; PAM type: YTN; PAM sequence: TTC
tttaaagattatttgctatt

SEQ ID NO: 231007 - DNA, 20 bp, Artificial Sequence
  Description of Artificial Sequence: Synthetic oligonucleotide
  Target: LAMA2; (-) strand; PAM type: YTN; PAM sequence: TTT
ctttaaagattatttgctat

SEQ ID NO: 231008 - DNA, 20 bp, Artificial Sequence
  Description of Artificial Sequence: Synthetic oligonucleotide
  Target: LAMA2; (-) strand; PAM type: YTN; PAM sequence: TTT
tctttaaagattatttgcta

SEQ ID NO: 231009 - DNA, 20 bp, Artificial Sequence
  Description of Artificial Sequence: Synthetic oligonucleotide
  Target: LAMA2; (-) strand; PAM type: YTN; PAM sequence: TTC
agcataataagaaaatcagt

SEQ ID NO: 231010 - DNA, 20 bp, Artificial Sequence
  Description of Artificial Sequence: Synthetic oligonucleotide
  Target: LAMA2; (-) strand; PAM type: YTN; PAM sequence: TTT
cagcataataagaaaatcag

SEQ ID NO: 231011 - DNA, 20 bp, Artificial Sequence
  Description of Artificial Sequence: Synthetic oligonucleotide
  Target: LAMA2; (-) strand; PAM type: YTN; PAM sequence: TTA
ataaatttcagcataataag

SEQ ID NO: 231012 - DNA, 20 bp, Artificial Sequence
  Description of Artificial Sequence: Synthetic oligonucleotide
  Target: LAMA2; (-) strand; PAM type: YTN; PAM sequence: TTT
aataaatttcagcataataa

SEQ ID NO: 231013 - DNA, 20 bp, Artificial Sequence
  Description of Artificial Sequence: Synthetic oligonucleotide
  Target: LAMA2; (-) strand; PAM type: YTN; PAM sequence: CTT
taataaatttcagcataata

SEQ ID NO: 231014 - DNA, 20 bp, Artificial Sequence
  Description of Artificial Sequence: Synthetic oligonucleotide
  Target: LAMA2; (-) strand; PAM type: YTN; PAM sequence: TTC
agtcaacacaacagtcttta

SEQ ID NO: 231015 - DNA, 20 bp, Artificial Sequence
  Description of Artificial Sequence: Synthetic oligonucleotide
  Target: LAMA2; (-) strand; PAM type: YTN; PAM sequence: CTT
cagtcaacacaacagtcttt

SEQ ID NO: 231016 - DNA, 20 bp, Artificial Sequence
  Description of Artificial Sequence: Synthetic oligonucleotide
  Target: LAMA2; (-) strand; PAM type: YTN; PAM sequence: TTC
ttcagtcaacacaacagtct

SEQ ID NO: 231017 - DNA, 20 bp, Artificial Sequence
  Description of Artificial Sequence: Synthetic oligonucleotide
  Target: LAMA2; (-) strand; PAM type: YTN; PAM sequence: TTA
aacatattcttcagtcaaca

SEQ ID NO: 231018 - DNA, 20 bp, Artificial Sequence
  Description of Artificial Sequence: Synthetic oligonucleotide
  Target: LAMA2; (-) strand; PAM type: YTN; PAM sequence: TTT
aaacatattcttcagtcaac

SEQ ID NO: 231019 - DNA, 20 bp, Artificial Sequence
  Description of Artificial Sequence: Synthetic oligonucleotide
  Target: LAMA2; (-) strand; PAM type: YTN; PAM sequence: TTC
cacaaaatatttaaacatat

SEQ ID NO: 231020 - DNA, 20 bp, Artificial Sequence
  Description of Artificial Sequence: Synthetic oligonucleotide
  Target: LAMA2; (-) strand; PAM type: YTN; PAM sequence: CTT
ccacaaaatatttaaacata

SEQ ID NO: 231021 - DNA, 20 bp, Artificial Sequence
  Description of Artificial Sequence: Synthetic oligonucleotide
  Target: LAMA2; (-) strand; PAM type: YTN; PAM sequence: TTG
ccttccacaaaatatttaaa

SEQ ID NO: 231022 - DNA, 20 bp, Artificial Sequence
  Description of Artificial Sequence: Synthetic oligonucleotide
  Target: LAMA2; (-) strand; PAM type: YTN; PAM sequence: TTT
gccttccacaaaatatttaa

SEQ ID NO: 231023 - DNA, 20 bp, Artificial Sequence
  Description of Artificial Sequence: Synthetic oligonucleotide
  Target: LAMA2; (-) strand; PAM type: YTN; PAM sequence: CTT
tgccttccacaaaatattta

SEQ ID NO: 231024 - DNA, 20 bp, Artificial Sequence
  Description of Artificial Sequence: Synthetic oligonucleotide
  Target: LAMA2; (-) strand; PAM type: YTN; PAM sequence: CTG
aatgaaagctttgccttcca

SEQ ID NO: 231025 - DNA, 20 bp, Artificial Sequence
  Description of Artificial Sequence: Synthetic oligonucleotide
  Target: LAMA2; (-) strand; PAM type: YTN; PAM sequence: TTC
ctgaatgaaagctttgcctt

SEQ ID NO: 231026 - DNA, 20 bp, Artificial Sequence
  Description of Artificial Sequence: Synthetic oligonucleotide
  Target: LAMA2; (-) strand; PAM type: YTN; PAM sequence: TTG
tcattcctgaatgaaagctt

SEQ ID NO: 231027 - DNA, 20 bp, Artificial Sequence
  Description of Artificial Sequence: Synthetic oligonucleotide
  Target: LAMA2; (-) strand; PAM type: YTN; PAM sequence: CTT
gtcattcctgaatgaaagct

SEQ ID NO: 231028 - DNA, 20 bp, Artificial Sequence
  Description of Artificial Sequence: Synthetic oligonucleotide
  Target: LAMA2; (-) strand; PAM type: YTN; PAM sequence: TTG
cacttgtcattcctgaatga

SEQ ID NO: 231029 - DNA, 20 bp, Artificial Sequence
  Description of Artificial Sequence: Synthetic oligonucleotide
  Target: LAMA2; (-) strand; PAM type: YTN; PAM sequence: CTT
gcacttgtcattcctgaatg

SEQ ID NO: 231030 - DNA, 20 bp, Artificial Sequence
  Description of Artificial Sequence: Synthetic oligonucleotide
  Target: LAMA2; (-) strand; PAM type: YTN; PAM sequence: TTA
cagtccttgcacttgtcatt

SEQ ID NO: 231031 - DNA, 20 bp, Artificial Sequence
  Description of Artificial Sequence: Synthetic oligonucleotide
  Target: LAMA2; (-) strand; PAM type: YTN; PAM sequence: TTA
gaattacagtccttgcactt

SEQ ID NO: 231032 - DNA, 20 bp, Artificial Sequence
  Description of Artificial Sequence: Synthetic oligonucleotide
  Target: LAMA2; (-) strand; PAM type: YTN; PAM sequence: TTT
agaattacagtccttgcact

SEQ ID NO: 231033 - DNA, 20 bp, Artificial Sequence
  Description of Artificial Sequence: Synthetic oligonucleotide
  Target: LAMA2; (-) strand; PAM type: YTN; PAM sequence: CTT
tagaattacagtccttgcac

SEQ ID NO: 231034 - DNA, 20 bp, Artificial Sequence
  Description of Artificial Sequence: Synthetic oligonucleotide
  Target: LAMA2; (-) strand; PAM type: YTN; PAM sequence: TTC
tttagaattacagtccttgc

SEQ ID NO: 231035 - DNA, 20 bp, Artificial Sequence
  Description of Artificial Sequence: Synthetic oligonucleotide
  Target: LAMA2; (-) strand; PAM type: YTN; PAM sequence: TTT
ctttagaattacagtccttg

SEQ ID NO: 231036 - DNA, 20 bp, Artificial Sequence
  Description of Artificial Sequence: Synthetic oligonucleotide
  Target: LAMA2; (-) strand; PAM type: YTN; PAM sequence: TTA
atttctttagaattacagtc

SEQ ID NO: 231037 - DNA, 20 bp, Artificial Sequence
  Description of Artificial Sequence: Synthetic oligonucleotide
  Target: LAMA2; (-) strand; PAM type: YTN; PAM sequence: TTT
aatttctttagaattacagt

SEQ ID NO: 231038 - DNA, 20 bp, Artificial Sequence
  Description of Artificial Sequence: Synthetic oligonucleotide
  Target: LAMA2; (-) strand; PAM type: YTN; PAM sequence: CTT
taatttctttagaattacag

SEQ ID NO: 231039 - DNA, 20 bp, Artificial Sequence
  Description of Artificial Sequence: Synthetic oligonucleotide
  Target: LAMA2; (-) strand; PAM type: YTN; PAM sequence: TTC
tttaatttctttagaattac

SEQ ID NO: 231040 - DNA, 20 bp, Artificial Sequence
  Description of Artificial Sequence: Synthetic oligonucleotide
  Target: LAMA2; (-) strand; PAM type: YTN; PAM sequence: TTT
ctttaatttctttagaatta

SEQ ID NO: 231041 - DNA, 20 bp, Artificial Sequence
  Description of Artificial Sequence: Synthetic oligonucleotide
  Target: LAMA2; (-) strand; PAM type: YTN; PAM sequence: TTT
tctttaatttctttagaatt

SEQ ID NO: 231042 - DNA, 20 bp, Artificial Sequence
  Description of Artificial Sequence: Synthetic oligonucleotide
  Target: LAMA2; (-) strand; PAM type: YTN; PAM sequence: CTT
ttctttaatttctttagaat

SEQ ID NO: 231043 - DNA, 20 bp, Artificial Sequence
  Description of Artificial Sequence: Synthetic oligonucleotide
  Target: LAMA2; (-) strand; PAM type: YTN; PAM sequence: TTC
ttttctttaatttctttaga

SEQ ID NO: 231044 - DNA, 20 bp, Artificial Sequence
  Description of Artificial Sequence: Synthetic oligonucleotide
  Target: LAMA2; (-) strand; PAM type: YTN; PAM sequence: CTT
cttttctttaatttctttag

SEQ ID NO: 231045 - DNA, 20 bp, Artificial Sequence
  Description of Artificial Sequence: Synthetic oligonucleotide
  Target: LAMA2; (-) strand; PAM type: YTN; PAM sequence: TTC
ttcttttctttaatttcttt

SEQ ID NO: 231046 - DNA, 20 bp, Artificial Sequence
  Description of Artificial Sequence: Synthetic oligonucleotide
  Target: LAMA2; (-) strand; PAM type: YTN; PAM sequence: TTG
ccattcttcttttctttaat

SEQ ID NO: 231047 - DNA, 20 bp, Artificial Sequence
  Description of Artificial Sequence: Synthetic oligonucleotide
  Target: LAMA2; (-) strand; PAM type: YTN; PAM sequence: TTA
aattgccattcttcttttct

SEQ ID NO: 231048 - DNA, 20 bp, Artificial Sequence
  Description of Artificial Sequence: Synthetic oligonucleotide
  Target: LAMA2; (-) strand; PAM type: YTN; PAM sequence: CTT
aaattgccattcttcttttc

SEQ ID NO: 231049 - DNA, 20 bp, Artificial Sequence
  Description of Artificial Sequence: Synthetic oligonucleotide
  Target: LAMA2; (-) strand; PAM type: YTN; PAM sequence: CTG
aacttaaattgccattcttc

SEQ ID NO: 231050 - DNA, 20 bp, Artificial Sequence
  Description of Artificial Sequence: Synthetic oligonucleotide
  Target: LAMA2; (-) strand; PAM type: YTN; PAM sequence: TTG
tccctgaacttaaattgcca

SEQ ID NO: 231051 - DNA, 20 bp, Artificial Sequence
  Description of Artificial Sequence: Synthetic oligonucleotide
  Target: LAMA2; (-) strand; PAM type: YTN; PAM sequence: TTC
caattgtccctgaacttaaa

SEQ ID NO: 231052 - DNA, 20 bp, Artificial Sequence
  Description of Artificial Sequence: Synthetic oligonucleotide
  Target: LAMA2; (-) strand; PAM type: YTN; PAM sequence: TTG
attccaattgtccctgaact

SEQ ID NO: 231053 - DNA, 20 bp, Artificial Sequence
  Description of Artificial Sequence: Synthetic oligonucleotide
  Target: LAMA2; (-) strand; PAM type: YTN; PAM sequence: CTT
gattccaattgtccctgaac

SEQ ID NO: 231054 - DNA, 20 bp, Artificial Sequence
  Description of Artificial Sequence: Synthetic oligonucleotide
  Target: LAMA2; (-) strand; PAM type: YTN; PAM sequence: CTG
cttgattccaattgtccctg

SEQ ID NO: 231055 - DNA, 20 bp, Artificial Sequence
  Description of Artificial Sequence: Synthetic oligonucleotide
  Target: LAMA2; (-) strand; PAM type: YTN; PAM sequence: TTA
ctgcttgattccaattgtcc

SEQ ID NO: 231056 - DNA, 20 bp, Artificial Sequence
  Description of Artificial Sequence: Synthetic oligonucleotide
  Target: LAMA2; (-) strand; PAM type: YTN; PAM sequence: CTG
taaatcattactgcttgatt

SEQ ID NO: 231057 - DNA, 20 bp, Artificial Sequence
  Description of Artificial Sequence: Synthetic oligonucleotide
  Target: LAMA2; (-) strand; PAM type: YTN; PAM sequence: TTA
aaaagctgtaaatcattact

SEQ ID NO: 231058 - DNA, 20 bp, Artificial Sequence
  Description of Artificial Sequence: Synthetic oligonucleotide
  Target: LAMA2; (-) strand; PAM type: YTN; PAM sequence: TTT
aaaaagctgtaaatcattac

SEQ ID NO: 231059 - DNA, 20 bp, Artificial Sequence
  Description of Artificial Sequence: Synthetic oligonucleotide
  Target: LAMA2; (-) strand; PAM type: YTN; PAM sequence: TTT
taaaaagctgtaaatcatta

SEQ ID NO: 231060 - DNA, 20 bp, Artificial Sequence
  Description of Artificial Sequence: Synthetic oligonucleotide
  Target: LAMA2; (-) strand; PAM type: YTN; PAM sequence: CTG
aaaattttaaaaagctgtaa

SEQ ID NO: 231061 - DNA, 20 bp, Artificial Sequence
  Description of Artificial Sequence: Synthetic oligonucleotide
  Target: LAMA2; (-) strand; PAM type: YTN; PAM sequence: CTA
agtgcctgaaaattttaaaa

SEQ ID NO: 231062 - DNA, 20 bp, Artificial Sequence
  Description of Artificial Sequence: Synthetic oligonucleotide
  Target: LAMA2; (-) strand; PAM type: YTN; PAM sequence: CTG
accactaagtgcctgaaaat

SEQ ID NO: 231063 - DNA, 20 bp, Artificial Sequence
  Description of Artificial Sequence: Synthetic oligonucleotide
  Target: LAMA2; (-) strand; PAM type: YTN; PAM sequence: CTG
gtcataacgcataaaaggaa

SEQ ID NO: 231064 - DNA, 20 bp, Artificial Sequence
  Description of Artificial Sequence: Synthetic oligonucleotide
  Target: LAMA2; (-) strand; PAM type: YTN; PAM sequence: TTC
ccactggtcataacgcataa

SEQ ID NO: 231065 - DNA, 20 bp, Artificial Sequence
  Description of Artificial Sequence: Synthetic oligonucleotide
  Target: LAMA2; (-) strand; PAM type: YTN; PAM sequence: CTT
cccactggtcataacgcata

SEQ ID NO: 231066 - DNA, 20 bp, Artificial Sequence
  Description of Artificial Sequence: Synthetic oligonucleotide
  Target: LAMA2; (-) strand; PAM type: YTN; PAM sequence: CTG
gtatccttcccactggtcat

SEQ ID NO: 231067 - DNA, 20 bp, Artificial Sequence
  Description of Artificial Sequence: Synthetic oligonucleotide
  Target: LAMA2; (-) strand; PAM type: YTN; PAM sequence: CTG
aatggaagatcctggtatcc

SEQ ID NO: 231068 - DNA, 20 bp, Artificial Sequence
  Description of Artificial Sequence: Synthetic oligonucleotide
  Target: LAMA2; (-) strand; PAM type: YTN; PAM sequence: CTG
taacccataataactgaatg

SEQ ID NO: 231069 - DNA, 20 bp, Artificial Sequence
  Description of Artificial Sequence: Synthetic oligonucleotide
  Target: LAMA2; (-) strand; PAM type: YTN; PAM sequence: CTG
tgaccacaggtcacggatgg

SEQ ID NO: 231070 - DNA, 20 bp, Artificial Sequence
  Description of Artificial Sequence: Synthetic oligonucleotide
  Target: LAMA2; (-) strand; PAM type: YTN; PAM sequence: CTA
acactgtgaccacaggtcac

SEQ ID NO: 231071 - DNA, 20 bp, Artificial Sequence
  Description of Artificial Sequence: Synthetic oligonucleotide
  Target: LAMA2; (-) strand; PAM type: YTN; PAM sequence: TTC
gatacctaacactgtgacca

SEQ ID NO: 231072 - DNA, 20 bp, Artificial Sequence
  Description of Artificial Sequence: Synthetic oligonucleotide
  Target: LAMA2; (-) strand; PAM type: YTN; PAM sequence: TTT
cgatacctaacactgtgacc

SEQ ID NO: 231073 - DNA, 20 bp, Artificial Sequence
  Description of Artificial Sequence: Synthetic oligonucleotide
  Target: LAMA2; (-) strand; PAM type: YTN; PAM sequence: CTT
tcgatacctaacactgtgac

SEQ ID NO: 231074 - DNA, 20 bp, Artificial Sequence
  Description of Artificial Sequence: Synthetic oligonucleotide
  Target: LAMA2; (-) strand; PAM type: YTN; PAM sequence: TTA
tgctttcgatacctaacact

SEQ ID NO: 231075 - DNA, 20 bp, Artificial Sequence
  Description of Artificial Sequence: Synthetic oligonucleotide
  Target: LAMA2; (-) strand; PAM type: YTN; PAM sequence: TTA
gataagaaggtattatgctt

SEQ ID NO: 231076 - DNA, 20 bp, Artificial Sequence
  Description of Artificial Sequence: Synthetic oligonucleotide
  Target: LAMA2; (-) strand; PAM type: YTN; PAM sequence: CTT
agataagaaggtattatgct

SEQ ID NO: 231077 - DNA, 20 bp, Artificial Sequence
  Description of Artificial Sequence: Synthetic oligonucleotide
  Target: LAMA2; (-) strand; PAM type: YTN; PAM sequence: TTC
ttagataagaaggtattatg

SEQ ID NO: 231078 - DNA, 20 bp, Artificial Sequence
  Description of Artificial Sequence: Synthetic oligonucleotide
  Target: LAMA2; (-) strand; PAM type: YTN; PAM sequence: CTT
cttagataagaaggtattat

SEQ ID NO: 231079 - DNA, 20 bp, Artificial Sequence
  Description of Artificial Sequence: Synthetic oligonucleotide
  Target: LAMA2; (-) strand; PAM type: YTN; PAM sequence: TTC
cttcttagataagaaggtat

SEQ ID NO: 231080 - DNA, 20 bp, Artificial Sequence
  Description of Artificial Sequence: Synthetic oligonucleotide
  Target: LAMA2; (-) strand; PAM type: YTN; PAM sequence: TTT
ccttcttagataagaaggta

SEQ ID NO: 231081 - DNA, 20 bp, Artificial Sequence
  Description of Artificial Sequence: Synthetic oligonucleotide
  Target: LAMA2; (-) strand; PAM type: YTN; PAM sequence: CTT
tccttcttagataagaaggt

SEQ ID NO: 231082 - DNA, 20 bp, Artificial Sequence
  Description of Artificial Sequence: Synthetic oligonucleotide
  Target: LAMA2; (-) strand; PAM type: YTN; PAM sequence: TTA
acaggtctttccttcttaga

SEQ ID NO: 231083 - DNA, 20 bp, Artificial Sequence
  Description of Artificial Sequence: Synthetic oligonucleotide
  Target: LAMA2; (-) strand; PAM type: YTN; PAM sequence: CTT
aacaggtctttccttcttag

SEQ ID NO: 231084 - DNA, 20 bp, Artificial Sequence
  Description of Artificial Sequence: Synthetic oligonucleotide
  Target: LAMA2; (-) strand; PAM type: YTN; PAM sequence: TTA
gacttaacaggtctttcctt

SEQ ID NO: 231085 - DNA, 20 bp, Artificial Sequence
  Description of Artificial Sequence: Synthetic oligonucleotide
  Target: LAMA2; (-) strand; PAM type: YTN; PAM sequence: CTT
agacttaacaggtctttcct

SEQ ID NO: 231086 - DNA, 20 bp, Artificial Sequence
  Description of Artificial Sequence: Synthetic oligonucleotide
  Target: LAMA2; (-) strand; PAM type: YTN; PAM sequence: CTA
agcttagacttaacaggtct

SEQ ID NO: 231087 - DNA, 20 bp, Artificial Sequence
  Description of Artificial Sequence: Synthetic oligonucleotide
  Target: LAMA2; (-) strand; PAM type: YTN; PAM sequence: CTA
cccctaagcttagacttaac

SEQ ID NO: 231088 - DNA, 20 bp, Artificial Sequence
  Description of Artificial Sequence: Synthetic oligonucleotide
  Target: LAMA2; (-) strand; PAM type: YTN; PAM sequence: CTC
tacccctaagcttagactta

SEQ ID NO: 231089 - DNA, 20 bp, Artificial Sequence
  Description of Artificial Sequence: Synthetic oligonucleotide
  Target: LAMA2; (-) strand; PAM type: YTN; PAM sequence: TTG
acaactctacccctaagctt

SEQ ID NO: 231090 - DNA, 20 bp, Artificial Sequence
  Description of Artificial Sequence: Synthetic oligonucleotide
  Target: LAMA2; (-) strand; PAM type: YTN; PAM sequence: CTG
tatcgttgacaactctaccc

SEQ ID NO: 231091 - DNA, 20 bp, Artificial Sequence
  Description of Artificial Sequence: Synthetic oligonucleotide
  Target: LAMA2; (-) strand; PAM type: YTN; PAM sequence: TTC
aacaaatatgactgtatcgt

SEQ ID NO: 231092 - DNA, 20 bp, Artificial Sequence
  Description of Artificial Sequence: Synthetic oligonucleotide
  Target: LAMA2; (-) strand; PAM type: YTN; PAM sequence: CTG
ttcaacaaatatgactgtat

SEQ ID NO: 231093 - DNA, 20 bp, Artificial Sequence
  Description of Artificial Sequence: Synthetic oligonucleotide
  Target: LAMA2; (-) strand; PAM type: YTN; PAM sequence: TTG
aactgttcaacaaatatgac

SEQ ID NO: 231094 - DNA, 20 bp, Artificial Sequence
  Description of Artificial Sequence: Synthetic oligonucleotide
  Target: LAMA2; (-) strand; PAM type: YTN; PAM sequence: CTT
gaactgttcaacaaatatga

SEQ ID NO: 231095 - DNA, 20 bp, Artificial Sequence
  Description of Artificial Sequence: Synthetic oligonucleotide
  Target: LAMA2; (-) strand; PAM type: YTN; PAM sequence: TTC
caagaatacaagaaatggca

SEQ ID NO: 231096 - DNA, 20 bp, Artificial Sequence
  Description of Artificial Sequence: Synthetic oligonucleotide
  Target: LAMA2; (-) strand; PAM type: YTN; PAM sequence: CTT
ccaagaatacaagaaatggc

SEQ ID NO: 231097 - DNA, 20 bp, Artificial Sequence
  Description of Artificial Sequence: Synthetic oligonucleotide
  Target: LAMA2; (-) strand; PAM type: YTN; PAM sequence: CTC
ttccaagaatacaagaaatg

SEQ ID NO: 231098 - DNA, 20 bp, Artificial Sequence
  Description of Artificial Sequence: Synthetic oligonucleotide
  Target: LAMA2; (-) strand; PAM type: YTN; PAM sequence: TTA
cctcttccaagaatacaaga

SEQ ID NO: 231099 - DNA, 20 bp, Artificial Sequence
  Description of Artificial Sequence: Synthetic oligonucleotide
  Target: LAMA2; (-) strand; PAM type: YTN; PAM sequence: CTT
acctcttccaagaatacaag

SEQ ID NO: 231100 - DNA, 20 bp, Artificial Sequence
  Description of Artificial Sequence: Synthetic oligonucleotide
  Target: LAMA2; (-) strand; PAM type: YTN; PAM sequence: TTA
acttacctcttccaagaata

SEQ ID NO: 231101 - DNA, 20 bp, Artificial Sequence
  Description of Artificial Sequence: Synthetic oligonucleotide
  Target: LAMA2; (-) strand; PAM type: YTN; PAM sequence: TTT
aacttacctcttccaagaat

SEQ ID NO: 231102 - DNA, 20 bp, Artificial Sequence
  Description of Artificial Sequence: Synthetic oligonucleotide
  Target: LAMA2; (-) strand; PAM type: YTN; PAM sequence: CTT
taacttacctcttccaagaa

SEQ ID NO: 231103 - DNA, 20 bp, Artificial Sequence
  Description of Artificial Sequence: Synthetic oligonucleotide
  Target: LAMA2; (-) strand; PAM type: YTN; PAM sequence: TTC
tttaacttacctcttccaag

SEQ ID NO: 231104 - DNA, 20 bp, Artificial Sequence
  Description of Artificial Sequence: Synthetic oligonucleotide
  Target: LAMA2; (-) strand; PAM type: YTN; PAM sequence: CTT
ctttaacttacctcttccaa

SEQ ID NO: 231105 - DNA, 20 bp, Artificial Sequence
  Description of Artificial Sequence: Synthetic oligonucleotide
  Target: LAMA2; (-) strand; PAM type: YTN; PAM sequence: CTG
tgcacaaccttctttaactt

SEQ ID NO: 231106 - DNA, 20 bp, Artificial Sequence
  Description of Artificial Sequence: Synthetic oligonucleotide
  Target: LAMA2; (-) strand; PAM type: YTN; PAM sequence: CTG
taataataaaatgtcaagaa

SEQ ID NO: 231107 - DNA, 20 bp, Artificial Sequence
  Description of Artificial Sequence: Synthetic oligonucleotide
  Target: LAMA2; (-) strand; PAM type: YTN; PAM sequence: TTG
aaaggtagtgctgtaataat

SEQ ID NO: 231108 - DNA, 20 bp, Artificial Sequence
  Description of Artificial Sequence: Synthetic oligonucleotide
  Target: LAMA2; (-) strand; PAM type: YTN; PAM sequence: CTT
gaaaggtagtgctgtaataa

SEQ ID NO: 231109 - DNA, 20 bp, Artificial Sequence
  Description of Artificial Sequence: Synthetic oligonucleotide
  Target: LAMA2; (-) strand; PAM type: YTN; PAM sequence: CTG
agtggcttgaaaggtagtgc

SEQ ID NO: 231110 - DNA, 20 bp, Artificial Sequence
  Description of Artificial Sequence: Synthetic oligonucleotide
  Target: LAMA2; (-) strand; PAM type: YTN; PAM sequence: CTA
ctgagtggcttgaaaggtag

SEQ ID NO: 231111 - DNA, 20 bp, Artificial Sequence
  Description of Artificial Sequence: Synthetic oligonucleotide
  Target: LAMA2; (-) strand; PAM type: YTN; PAM sequence: TTA
catgtccgatgactactgag

SEQ ID NO: 231112 - DNA, 20 bp, Artificial Sequence
  Description of Artificial Sequence: Synthetic oligonucleotide
  Target: LAMA2; (-) strand; PAM type: YTN; PAM sequence: CTT
acatgtccgatgactactga

SEQ ID NO: 231113 - DNA, 20 bp, Artificial Sequence
  Description of Artificial Sequence: Synthetic oligonucleotide
  Target: LAMA2; (-) strand; PAM type: YTN; PAM sequence: CTC
ttacatgtccgatgactact

SEQ ID NO: 231114 - DNA, 20 bp, Artificial Sequence
  Description of Artificial Sequence: Synthetic oligonucleotide
  Target: LAMA2; (-) strand; PAM type: YTN; PAM sequence: TTA
cacgaccaaatagaacaacc

SEQ ID NO: 231115 - DNA, 20 bp, Artificial Sequence
  Description of Artificial Sequence: Synthetic oligonucleotide
  Target: LAMA2; (-) strand; PAM type: YTN; PAM sequence: TTT
acacgaccaaatagaacaac

SEQ ID NO: 231116 - DNA, 20 bp, Artificial Sequence
  Description of Artificial Sequence: Synthetic oligonucleotide
  Target: LAMA2; (-) strand; PAM type: YTN; PAM sequence: CTA
gaaatttacacgaccaaata

SEQ ID NO: 231117 - DNA, 20 bp, Artificial Sequence
  Description of Artificial Sequence: Synthetic oligonucleotide
  Target: LAMA2; (-) strand; PAM type: YTN; PAM sequence: CTG
tcactagaaatttacacgac

SEQ ID NO: 231118 - DNA, 20 bp, Artificial Sequence
  Description of Artificial Sequence: Synthetic oligonucleotide
  Target: LAMA2; (-) strand; PAM type: YTN; PAM sequence: CTA
ctgtcactagaaatttacac

SEQ ID NO: 231119 - DNA, 20 bp, Artificial Sequence
  Description of Artificial Sequence: Synthetic oligonucleotide
  Target: LAMA2; (-) strand; PAM type: YTN; PAM sequence: TTC
ctactgtcactagaaattta

SEQ ID NO: 231120 - DNA, 20 bp, Artificial Sequence
  Description of Artificial Sequence: Synthetic oligonucleotide
  Target: LAMA2; (-) strand; PAM type: YTN; PAM sequence: TTT
cctactgtcactagaaattt

SEQ ID NO: 231121 - DNA, 20 bp, Artificial Sequence
  Description of Artificial Sequence: Synthetic oligonucleotide
  Target: LAMA2; (-) strand; PAM type: YTN; PAM sequence: TTT
tcctactgtcactagaaatt

SEQ ID NO: 231122 - DNA, 20 bp, Artificial Sequence
  Description of Artificial Sequence: Synthetic oligonucleotide
  Target: LAMA2; (-) strand; PAM type: YTN; PAM sequence: TTT
ttcctactgtcactagaaat

SEQ ID NO: 231123 - DNA, 20 bp, Artificial Sequence
  Description of Artificial Sequence: Synthetic oligonucleotide
  Target: LAMA2; (-) strand; PAM type: YTN; PAM sequence: TTT
tttcctactgtcactagaaa

SEQ ID NO: 231124 - DNA, 20 bp, Artificial Sequence
  Description of Artificial Sequence: Synthetic oligonucleotide
  Target: LAMA2; (-) strand; PAM type: YTN; PAM sequence: TTT
ttttcctactgtcactagaa

SEQ ID NO: 231125 - DNA, 20 bp, Artificial Sequence
  Description of Artificial Sequence: Synthetic oligonucleotide
  Target: LAMA2; (-) strand; PAM type: YTN; PAM sequence: TTT
tttttcctactgtcactaga

SEQ ID NO: 231126 - DNA, 20 bp, Artificial Sequence
  Description of Artificial Sequence: Synthetic oligonucleotide
  Target: LAMA2; (-) strand; PAM type: YTN; PAM sequence: TTT
ttttttcctactgtcactag

SEQ ID NO: 231127 - DNA, 20 bp, Artificial Sequence
  Description of Artificial Sequence: Synthetic oligonucleotide
  Target: LAMA2; (-) strand; PAM type: YTN; PAM sequence: TTT
tttttttcctactgtcacta

SEQ ID NO: 231128 - DNA, 20 bp, Artificial Sequence
  Description of Artificial Sequence: Synthetic oligonucleotide
  Target: LAMA2; (-) strand; PAM type: YTN; PAM sequence: TTT
ttttttttcctactgtcact

SEQ ID NO: 231129 - DNA, 20 bp, Artificial Sequence
  Description of Artificial Sequence: Synthetic oligonucleotide
  Target: LAMA2; (-) strand; PAM type: YTN; PAM sequence: TTT
tttttttttcctactgtcac

SEQ ID NO: 231130 - DNA, 20 bp, Artificial Sequence
  Description of Artificial Sequence: Synthetic oligonucleotide
  Target: LAMA2; (-) strand; PAM type: YTN; PAM sequence: CTT
ttttttttttcctactgtca

SEQ ID NO: 231131 - DNA, 20 bp, Artificial Sequence
  Description of Artificial Sequence: Synthetic oligonucleotide
  Target: LAMA2; (-) strand; PAM type: YTN; PAM sequence: TTA
ataaaggtcttttttttttt

SEQ ID NO: 231132 - DNA, 20 bp, Artificial Sequence
  Description of Artificial Sequence: Synthetic oligonucleotide
  Target: LAMA2; (-) strand; PAM type: YTN; PAM sequence: TTT
aataaaggtctttttttttt

SEQ ID NO: 231133 - DNA, 20 bp, Artificial Sequence
  Description of Artificial Sequence: Synthetic oligonucleotide
  Target: LAMA2; (-) strand; PAM type: YTN; PAM sequence: CTT
taataaaggtcttttttttt

SEQ ID NO: 231134 - DNA, 20 bp, Artificial Sequence
  Description of Artificial Sequence: Synthetic oligonucleotide
  Target: LAMA2; (-) strand; PAM type: YTN; PAM sequence: TTG
gaaggtctttaataaaggtc

SEQ ID NO: 231135 - DNA, 20 bp, Artificial Sequence
  Description of Artificial Sequence: Synthetic oligonucleotide
  Target: LAMA2; (-) strand; PAM type: YTN; PAM sequence: TTT
ggaaggtctttaataaaggt

SEQ ID NO: 231136 - DNA, 20 bp, Artificial Sequence
  Description of Artificial Sequence: Synthetic oligonucleotide
  Target: LAMA2; (-) strand; PAM type: YTN; PAM sequence: TTA
gtttggaaggtctttaataa

SEQ ID NO: 231137 - DNA, 20 bp, Artificial Sequence
  Description of Artificial Sequence: Synthetic oligonucleotide
  Target: LAMA2; (-) strand; PAM type: YTN; PAM sequence: CTG
aattagtttggaaggtcttt

SEQ ID NO: 231138 - DNA, 20 bp, Artificial Sequence
  Description of Artificial Sequence: Synthetic oligonucleotide
  Target: LAMA2; (-) strand; PAM type: YTN; PAM sequence: TTC
atgcagcatgtagggcactg

SEQ ID NO: 231139 - DNA, 20 bp, Artificial Sequence
  Description of Artificial Sequence: Synthetic oligonucleotide
  Target: LAMA2; (-) strand; PAM type: YTN; PAM sequence: TTT
catgcagcatgtagggcact

SEQ ID NO: 231140 - DNA, 20 bp, Artificial Sequence
  Description of Artificial Sequence: Synthetic oligonucleotide
  Target: LAMA2; (-) strand; PAM type: YTN; PAM sequence: TTT
tcatgcagcatgtagggcac

SEQ ID NO: 231141 - DNA, 20 bp, Artificial Sequence
  Description of Artificial Sequence: Synthetic oligonucleotide
  Target: LAMA2; (-) strand; PAM type: YTN; PAM sequence: CTC
attttcatgcagcatgtagg

SEQ ID NO: 231142 - DNA, 20 bp, Artificial Sequence
  Description of Artificial Sequence: Synthetic oligonucleotide
  Target: LAMA2; (-) strand; PAM type: YTN; PAM sequence: CTG
gaaagtcctcattttcatgc

SEQ ID NO: 231143 - DNA, 20 bp, Artificial Sequence
  Description of Artificial Sequence: Synthetic oligonucleotide
  Target: LAMA2; (-) strand; PAM type: YTN; PAM sequence: CTC
agaactggaaagtcctcatt

SEQ ID NO: 231144 - DNA, 20 bp, Artificial Sequence
  Description of Artificial Sequence: Synthetic oligonucleotide
  Target: LAMA2; (-) strand; PAM type: YTN; PAM sequence: CTA
ctcagaactggaaagtcctc

SEQ ID NO: 231145 - DNA, 20 bp, Artificial Sequence
  Description of Artificial Sequence: Synthetic oligonucleotide
  Target: LAMA2; (-) strand; PAM type: YTN; PAM sequence: TTC
tactcagaactggaaagtcc

SEQ ID NO: 231146 - DNA, 20 bp, Artificial Sequence
  Description of Artificial Sequence: Synthetic oligonucleotide
  Target: LAMA2; (-) strand; PAM type: YTN; PAM sequence: CTT
ctactcagaactggaaagtc

SEQ ID NO: 231147 - DNA, 20 bp, Artificial Sequence
  Description of Artificial Sequence: Synthetic oligonucleotide
  Target: LAMA2; (-) strand; PAM type: YTN; PAM sequence: TTC
cttctactcagaactggaaa

SEQ ID NO: 231148 - DNA, 20 bp, Artificial Sequence
  Description of Artificial Sequence: Synthetic oligonucleotide
  Target: LAMA2; (-) strand; PAM type: YTN; PAM sequence: TTA
atattccttctactcagaac

SEQ ID NO: 231149 - DNA, 20 bp, Artificial Sequence
  Description of Artificial Sequence: Synthetic oligonucleotide
  Target: LAMA2; (-) strand; PAM type: YTN; PAM sequence: CTT
aatattccttctactcagaa

SEQ ID NO: 231150 - DNA, 20 bp, Artificial Sequence
  Description of Artificial Sequence: Synthetic oligonucleotide
  Target: LAMA2; (-) strand; PAM type: YTN; PAM sequence: TTC
aggtgccttaatattccttc

SEQ ID NO: 231151 - DNA, 20 bp, Artificial Sequence
  Description of Artificial Sequence: Synthetic oligonucleotide
  Target: LAMA2; (-) strand; PAM type: YTN; PAM sequence: CTT
caggtgccttaatattcctt

SEQ ID NO: 231152 - DNA, 20 bp, Artificial Sequence
  Description of Artificial Sequence: Synthetic oligonucleotide
  Target: LAMA2; (-) strand; PAM type: YTN; PAM sequence: TTG
tcccttcaggtgccttaata

SEQ ID NO: 231153 - DNA, 20 bp, Artificial Sequence
  Description of Artificial Sequence: Synthetic oligonucleotide
  Target: LAMA2; (-) strand; PAM type: YTN; PAM sequence: TTT
gtcccttcaggtgccttaat

SEQ ID NO: 231154 - DNA, 20 bp, Artificial Sequence
  Description of Artificial Sequence: Synthetic oligonucleotide
  Target: LAMA2; (-) strand; PAM type: YTN; PAM sequence: TTA
taaatggatttgtcccttca

SEQ ID NO: 231155 - DNA, 20 bp, Artificial Sequence
  Description of Artificial Sequence: Synthetic oligonucleotide
  Target: LAMA2; (-) strand; PAM type: YTN; PAM sequence: TTT
ataaatggatttgtcccttc

SEQ ID NO: 231156 - DNA, 20 bp, Artificial Sequence
  Description of Artificial Sequence: Synthetic oligonucleotide
  Target: LAMA2; (-) strand; PAM type: YTN; PAM sequence: TTT
tataaatggatttgtccctt

SEQ ID NO: 231157 - DNA, 20 bp, Artificial Sequence
  Description of Artificial Sequence: Synthetic oligonucleotide
  Target: LAMA2; (-) strand; PAM type: YTN; PAM sequence: TTA
tcacaaaaagaaaaataatt

SEQ ID NO: 231158 - DNA, 20 bp, Artificial Sequence
  Description of Artificial Sequence: Synthetic oligonucleotide
  Target: LAMA2; (-) strand; PAM type: YTN; PAM sequence: TTT
atcacaaaaagaaaaataat

SEQ ID NO: 231159 - DNA, 20 bp, Artificial Sequence
  Description of Artificial Sequence: Synthetic oligonucleotide
  Target: LAMA2; (-) strand; PAM type: YTN; PAM sequence: TTT
tatcacaaaaagaaaaataa

SEQ ID NO: 231160 - DNA, 20 bp, Artificial Sequence
  Description of Artificial Sequence: Synthetic oligonucleotide
  Target: LAMA2; (-) strand; PAM type: YTN; PAM sequence: TTT
ttatcacaaaaagaaaaata

SEQ ID NO: 231161 - DNA, 20 bp, Artificial Sequence
  Description of Artificial Sequence: Synthetic oligonucleotide
  Target: LAMA2; (-) strand; PAM type: YTN; PAM sequence: TTA
tatttttatcacaaaaagaa

SEQ ID NO: 231162 - DNA, 20 bp, Artificial Sequence
  Description of Artificial Sequence: Synthetic oligonucleotide
  Target: LAMA2; (-) strand; PAM type: YTN; PAM sequence: TTT
atatttttatcacaaaaaga

SEQ ID NO: 231163 - DNA, 20 bp, Artificial Sequence
  Description of Artificial Sequence: Synthetic oligonucleotide
  Target: LAMA2; (-) strand; PAM type: YTN; PAM sequence: CTA
gcagagccatttatattttt

SEQ ID NO: 231164 - DNA, 20 bp, Artificial Sequence
  Description of Artificial Sequence: Synthetic oligonucleotide
  Target: LAMA2; (-) strand; PAM type: YTN; PAM sequence: TTA
gtatactagcagagccattt

SEQ ID NO: 231165 - DNA, 20 bp, Artificial Sequence
  Description of Artificial Sequence: Synthetic oligonucleotide
  Target: LAMA2; (-) strand; PAM type: YTN; PAM sequence: TTT
agtatactagcagagccatt

SEQ ID NO: 231166 - DNA, 20 bp, Artificial Sequence
  Description of Artificial Sequence: Synthetic oligonucleotide
  Target: LAMA2; (-) strand; PAM type: YTN; PAM sequence: TTT
tagtatactagcagagccat

SEQ ID NO: 231167 - DNA, 20 bp, Artificial Sequence
  Description of Artificial Sequence: Synthetic oligonucleotide
  Target: LAMA2; (-) strand; PAM type: YTN; PAM sequence: TTT
ttagtatactagcagagcca

SEQ ID NO: 231168 - DNA, 20 bp, Artificial Sequence
  Description of Artificial Sequence: Synthetic oligonucleotide
  Target: LAMA2; (-) strand; PAM type: YTN; PAM sequence: TTT
tttagtatactagcagagcc

SEQ ID NO: 231169 - DNA, 20 bp, Artificial Sequence
  Description of Artificial Sequence: Synthetic oligonucleotide
  Target: LAMA2; (-) strand; PAM type: YTN; PAM sequence: TTA
tattttttagtatactagca

SEQ ID NO: 231170 - DNA, 20 bp, Artificial Sequence
  Description of Artificial Sequence: Synthetic oligonucleotide
  Target: LAMA2; (-) strand; PAM type: YTN; PAM sequence: TTT
atattttttagtatactagc

SEQ ID NO: 231171 - DNA, 20 bp, Artificial Sequence
  Description of Artificial Sequence: Synthetic oligonucleotide
  Target: LAMA2; (-) strand; PAM type: YTN; PAM sequence: CTA
gtagagccatttatattttt

SEQ ID NO: 231172 - DNA, 20 bp, Artificial Sequence
  Description of Artificial Sequence: Synthetic oligonucleotide
  Target: LAMA2; (-) strand; PAM type: YTN; PAM sequence: TTA
aatatactagtagagccatt

SEQ ID NO: 231173 - DNA, 20 bp, Artificial Sequence
  Description of Artificial Sequence: Synthetic oligonucleotide
  Target: LAMA2; (-) strand; PAM type: YTN; PAM sequence: TTA
ttaaatatactagtagagcc

SEQ ID NO: 231174 - DNA, 20 bp, Artificial Sequence
  Description of Artificial Sequence: Synthetic oligonucleotide
  Target: LAMA2; (-) strand; PAM type: YTN; PAM sequence: TTA
ggtaaatcaatgaaggatta

SEQ ID NO: 231175 - DNA, 20 bp, Artificial Sequence
  Description of Artificial Sequence: Synthetic oligonucleotide
  Target: LAMA2; (-) strand; PAM type: YTN; PAM sequence: TTT
aggtaaatcaatgaaggatt

SEQ ID NO: 231176 - DNA, 20 bp, Artificial Sequence
  Description of Artificial Sequence: Synthetic oligonucleotide
  Target: LAMA2; (-) strand; PAM type: YTN; PAM sequence: TTC
atacgtttaggtaaatcaat

SEQ ID NO: 231177 - DNA, 20 bp, Artificial Sequence
  Description of Artificial Sequence: Synthetic oligonucleotide
  Target: LAMA2; (-) strand; PAM type: YTN; PAM sequence: CTT
catacgtttaggtaaatcaa

SEQ ID NO: 231178 - DNA, 20 bp, Artificial Sequence
  Description of Artificial Sequence: Synthetic oligonucleotide
  Target: LAMA2; (-) strand; PAM type: YTN; PAM sequence: TTA
tatgggtatcttcatacgtt

SEQ ID NO: 231179 - DNA, 20 bp, Artificial Sequence
  Description of Artificial Sequence: Synthetic oligonucleotide
  Target: LAMA2; (-) strand; PAM type: YTN; PAM sequence: TTA
aaaatattatatgggtatct

SEQ ID NO: 231180 - DNA, 20 bp, Artificial Sequence
  Description of Artificial Sequence: Synthetic oligonucleotide
  Target: LAMA2; (-) strand; PAM type: YTN; PAM sequence: TTT
aaaaatattatatgggtatc

SEQ ID NO: 231181 - DNA, 20 bp, Artificial Sequence
  Description of Artificial Sequence: Synthetic oligonucleotide
  Target: LAMA2; (-) strand; PAM type: YTN; PAM sequence: TTT
taaaaatattatatgggtat

SEQ ID NO: 231182 - DNA, 20 bp, Artificial Sequence
  Description of Artificial Sequence: Synthetic oligonucleotide
  Target: LAMA2; (-) strand; PAM type: YTN; PAM sequence: TTT
ttaaaaatattatatgggta

SEQ ID NO: 231183 - DNA, 20 bp, Artificial Sequence
  Description of Artificial Sequence: Synthetic oligonucleotide
  Target: LAMA2; (-) strand; PAM type: YTN; PAM sequence: TTA
tttttaaaaatattatatgg

SEQ ID NO: 231184 - DNA, 20 bp, Artificial Sequence
  Description of Artificial Sequence: Synthetic oligonucleotide
  Target: LAMA2; (-) strand; PAM type: YTN; PAM sequence: CTT
atttttaaaaatattatatg

SEQ ID NO: 231185 - DNA, 20 bp, Artificial Sequence
  Description of Artificial Sequence: Synthetic oligonucleotide
  Target: LAMA2; (-) strand; PAM type: YTN; PAM sequence: CTA
caataacttatttttaaaaa

SEQ ID NO: 231186 - DNA, 20 bp, Artificial Sequence
  Description of Artificial Sequence: Synthetic oligonucleotide
  Target: LAMA2; (-) strand; PAM type: YTN; PAM sequence: TTA
gagctacaataacttatttt

SEQ ID NO: 231187 - DNA, 20 bp, Artificial Sequence
  Description of Artificial Sequence: Synthetic oligonucleotide
  Target: LAMA2; (-) strand; PAM type: YTN; PAM sequence: TTT
agagctacaataacttattt

SEQ ID NO: 231188 - DNA, 20 bp, Artificial Sequence
  Description of Artificial Sequence: Synthetic oligonucleotide
  Target: LAMA2; (-) strand; PAM type: YTN; PAM sequence: TTT
tagagctacaataacttatt

SEQ ID NO: 231189 - DNA, 20 bp, Artificial Sequence
  Description of Artificial Sequence: Synthetic oligonucleotide
  Target: LAMA2; (-) strand; PAM type: YTN; PAM sequence: TTA
ttttagagctacaataactt

SEQ ID NO: 231190 - DNA, 20 bp, Artificial Sequence
  Description of Artificial Sequence: Synthetic oligonucleotide
  Target: LAMA2; (-) strand; PAM type: YTN; PAM sequence: CTA
ataaattattttagagctac

SEQ ID NO: 231191 - DNA, 20 bp, Artificial Sequence
  Description of Artificial Sequence: Synthetic oligonucleotide
  Target: LAMA2; (-) strand; PAM type: YTN; PAM sequence: CTA
gtctaataaattattttaga

SEQ ID NO: 231192 - DNA, 20 bp, Artificial Sequence
  Description of Artificial Sequence: Synthetic oligonucleotide
  Target: LAMA2; (-) strand; PAM type: YTN; PAM sequence: TTC
tagtctaataaattatttta

SEQ ID NO: 231193 - DNA, 20 bp, Artificial Sequence
  Description of Artificial Sequence: Synthetic oligonucleotide
  Target: LAMA2; (-) strand; PAM type: YTN; PAM sequence: TTA
ttctagtctaataaattatt

SEQ ID NO: 231194 - DNA, 20 bp, Artificial Sequence
  Description of Artificial Sequence: Synthetic oligonucleotide
  Target: LAMA2; (-) strand; PAM type: YTN; PAM sequence: TTT
attctagtctaataaattat

SEQ ID NO: 231195 - DNA, 20 bp, Artificial Sequence
  Description of Artificial Sequence: Synthetic oligonucleotide
  Target: LAMA2; (-) strand; PAM type: YTN; PAM sequence: TTA
tttattctagtctaataaat

SEQ ID NO: 231196 - DNA, 20 bp, Artificial Sequence
  Description of Artificial Sequence: Synthetic oligonucleotide
  Target: LAMA2; (-) strand; PAM type: YTN; PAM sequence: TTT
atttattctagtctaataaa

SEQ ID NO: 231197 - DNA, 20 bp, Artificial Sequence
  Description of Artificial Sequence: Synthetic oligonucleotide
  Target: LAMA2; (-) strand; PAM type: YTN; PAM sequence: CTA
gtataaatttatttattcta

SEQ ID NO: 231198 - DNA, 20 bp, Artificial Sequence
  Description of Artificial Sequence: Synthetic oligonucleotide
  Target: LAMA2; (-) strand; PAM type: YTN; PAM sequence: TTC
tagtataaatttatttattc

SEQ ID NO: 231199 - DNA, 20 bp, Artificial Sequence
  Description of Artificial Sequence: Synthetic oligonucleotide
  Target: LAMA2; (-) strand; PAM type: YTN; PAM sequence: TTC
atcataaattctagtataaa

SEQ ID NO: 231200 - DNA, 20 bp, Artificial Sequence
  Description of Artificial Sequence: Synthetic oligonucleotide
  Target: LAMA2; (-) strand; PAM type: YTN; PAM sequence: CTG
ttcatcataaattctagtat

SEQ ID NO: 231201 - DNA, 20 bp, Artificial Sequence
  Description of Artificial Sequence: Synthetic oligonucleotide
  Target: LAMA2; (-) strand; PAM type: YTN; PAM sequence: TTG
actgttcatcataaattcta

SEQ ID NO: 231202 - DNA, 20 bp, Artificial Sequence
  Description of Artificial Sequence: Synthetic oligonucleotide
  Target: LAMA2; (-) strand; PAM type: YTN; PAM sequence: TTA
ttgactgttcatcataaatt

SEQ ID NO: 231203 - DNA, 20 bp, Artificial Sequence
  Description of Artificial Sequence: Synthetic oligonucleotide
  Target: LAMA2; (-) strand; PAM type: YTN; PAM sequence: TTT
attgactgttcatcataaat

SEQ ID NO: 231204 - DNA, 20 bp, Artificial Sequence
  Description of Artificial Sequence: Synthetic oligonucleotide
  Target: LAMA2; (-) strand; PAM type: YTN; PAM sequence: TTC
catttattgactgttcatca

SEQ ID NO: 231205 - DNA, 20 bp, Artificial Sequence
  Description of Artificial Sequence: Synthetic oligonucleotide
  Target: LAMA2; (-) strand; PAM type: YTN; PAM sequence: TTA
attccatttattgactgttc

SEQ ID NO: 231206 - DNA, 20 bp, Artificial Sequence
  Description of Artificial Sequence: Synthetic oligonucleotide
  Target: LAMA2; (-) strand; PAM type: YTN; PAM sequence: TTT
aattccatttattgactgtt

SEQ ID NO: 231207 - DNA, 20 bp, Artificial Sequence
  Description of Artificial Sequence: Synthetic oligonucleotide
  Target: LAMA2; (-) strand; PAM type: YTN; PAM sequence: TTT
taattccatttattgactgt

SEQ ID NO: 231208 - DNA, 20 bp, Artificial Sequence
  Description of Artificial Sequence: Synthetic oligonucleotide
  Target: LAMA2; (-) strand; PAM type: YTN; PAM sequence: TTT
ttaattccatttattgactg

SEQ ID NO: 231209 - DNA, 20 bp, Artificial Sequence
  Description of Artificial Sequence: Synthetic oligonucleotide
  Target: LAMA2; (-) strand; PAM type: YTN; PAM sequence: CTA
tatttttaattccatttatt

SEQ ID NO: 231210 - DNA, 20 bp, Artificial Sequence
  Description of Artificial Sequence: Synthetic oligonucleotide
  Target: LAMA2; (-) strand; PAM type: YTN; PAM sequence: TTA
cctatatttttaattccatt

SEQ ID NO: 231211 - DNA, 20 bp, Artificial Sequence
  Description of Artificial Sequence: Synthetic oligonucleotide
  Target: LAMA2; (-) strand; PAM type: YTN; PAM sequence: TTT
acctatatttttaattccat

SEQ ID NO: 231212 - DNA, 20 bp, Artificial Sequence
  Description of Artificial Sequence: Synthetic oligonucleotide
  Target: LAMA2; (-) strand; PAM type: YTN; PAM sequence: TTT
tacctatatttttaattcca

SEQ ID NO: 231213 - DNA, 20 bp, Artificial Sequence
  Description of Artificial Sequence: Synthetic oligonucleotide
  Target: LAMA2; (-) strand; PAM type: YTN; PAM sequence: CTG
tattttacctatatttttaa

SEQ ID NO: 231214 - DNA, 20 bp, Artificial Sequence
  Description of Artificial Sequence: Synthetic oligonucleotide
  Target: LAMA2; (-) strand; PAM type: YTN; PAM sequence: TTA
actgtattttacctatattt

SEQ ID NO: 231215 - DNA, 20 bp, Artificial Sequence
  Description of Artificial Sequence: Synthetic oligonucleotide
  Target: LAMA2; (-) strand; PAM type: YTN; PAM sequence: TTT
aactgtattttacctatatt

SEQ ID NO: 231216 - DNA, 20 bp, Artificial Sequence
  Description of Artificial Sequence: Synthetic oligonucleotide
  Target: LAMA2; (-) strand; PAM type: YTN; PAM sequence: TTT
taactgtattttacctatat

SEQ ID NO: 231217 - DNA, 20 bp, Artificial Sequence
  Description of Artificial Sequence: Synthetic oligonucleotide
  Target: LAMA2; (-) strand; PAM type: YTN; PAM sequence: TTG
tatatattttaactgtattt

SEQ ID NO: 231218 - DNA, 20 bp, Artificial Sequence
  Description of Artificial Sequence: Synthetic oligonucleotide
  Target: LAMA2; (-) strand; PAM type: YTN; PAM sequence: TTT
gtatatattttaactgtatt

SEQ ID NO: 231219 - DNA, 20 bp, Artificial Sequence
  Description of Artificial Sequence: Synthetic oligonucleotide
  Target: LAMA2; (-) strand; PAM type: YTN; PAM sequence: TTA
aaatttgtatatattttaac

SEQ ID NO: 231220 - DNA, 20 bp, Artificial Sequence
  Description of Artificial Sequence: Synthetic oligonucleotide
  Target: LAMA2; (-) strand; PAM type: YTN; PAM sequence: CTT
aaaatttgtatatattttaa

SEQ ID NO: 231221 - DNA, 20 bp, Artificial Sequence
  Description of Artificial Sequence: Synthetic oligonucleotide
  Target: LAMA2; (-) strand; PAM type: YTN; PAM sequence: TTG
catgtatcacttaaaatttg

SEQ ID NO: 231222 - DNA, 20 bp, Artificial Sequence
  Description of Artificial Sequence: Synthetic oligonucleotide
  Target: LAMA2; (-) strand; PAM type: YTN; PAM sequence: TTG
tgcattgcatgtatcactta

SEQ ID NO: 231223 - DNA, 20 bp, Artificial Sequence
  Description of Artificial Sequence: Synthetic oligonucleotide
  Target: LAMA2; (-) strand; PAM type: YTN; PAM sequence: TTT
gtgcattgcatgtatcactt

SEQ ID NO: 231224 - DNA, 20 bp, Artificial Sequence
  Description of Artificial Sequence: Synthetic oligonucleotide
  Target: LAMA2; (-) strand; PAM type: YTN; PAM sequence: TTA
caatttgtgcattgcatgta

SEQ ID NO: 231225 - DNA, 20 bp, Artificial Sequence
  Description of Artificial Sequence: Synthetic oligonucleotide
  Target: LAMA2; (-) strand; PAM type: YTN; PAM sequence: TTT
acaatttgtgcattgcatgt

SEQ ID NO: 231226 - DNA, 20 bp, Artificial Sequence
  Description of Artificial Sequence: Synthetic oligonucleotide
  Target: LAMA2; (-) strand; PAM type: YTN; PAM sequence: CTC
aatcaaacatttacaatttg

SEQ ID NO: 231227 - DNA, 20 bp, Artificial Sequence
  Description of Artificial Sequence: Synthetic oligonucleotide
  Target: LAMA2; (-) strand; PAM type: YTN; PAM sequence: TTC
ctcaatcaaacatttacaat

SEQ ID NO: 231228 - DNA, 20 bp, Artificial Sequence
  Description of Artificial Sequence: Synthetic oligonucleotide
  Target: LAMA2; (-) strand; PAM type: YTN; PAM sequence: TTT
cctcaatcaaacatttacaa

SEQ ID NO: 231229 - DNA, 20 bp, Artificial Sequence
  Description of Artificial Sequence: Synthetic oligonucleotide
  Target: LAMA2; (-) strand; PAM type: YTN; PAM sequence: CTT
tcctcaatcaaacatttaca

SEQ ID NO: 231230 - DNA, 20 bp, Artificial Sequence
  Description of Artificial Sequence: Synthetic oligonucleotide
  Target: LAMA2; (-) strand; PAM type: YTN; PAM sequence: CTC
tttcctcaatcaaacattta

SEQ ID NO: 231231 - DNA, 20 bp, Artificial Sequence
  Description of Artificial Sequence: Synthetic oligonucleotide
  Target: LAMA2; (-) strand; PAM type: YTN; PAM sequence: TTA
gctctttcctcaatcaaaca

SEQ ID NO: 231232 - DNA, 20 bp, Artificial Sequence
  Description of Artificial Sequence: Synthetic oligonucleotide
  Target: LAMA2; (-) strand; PAM type: YTN; PAM sequence: TTC
caatgaattagctctttcct

SEQ ID NO: 231233 - DNA, 20 bp, Artificial Sequence
  Description of Artificial Sequence: Synthetic oligonucleotide
  Target: LAMA2; (-) strand; PAM type: YTN; PAM sequence: CTT
ccaatgaattagctctttcc

SEQ ID NO: 231234 - DNA, 20 bp, Artificial Sequence
  Description of Artificial Sequence: Synthetic oligonucleotide
  Target: LAMA2; (-) strand; PAM type: YTN; PAM sequence: CTA
gagcttccaatgaattagct

SEQ ID NO: 231235 - DNA, 20 bp, Artificial Sequence
  Description of Artificial Sequence: Synthetic oligonucleotide
  Target: LAMA2; (-) strand; PAM type: YTN; PAM sequence: CTG
gactagagcttccaatgaat

SEQ ID NO: 231236 - DNA, 20 bp, Artificial Sequence
  Description of Artificial Sequence: Synthetic oligonucleotide
  Target: LAMA2; (-) strand; PAM type: YTN; PAM sequence: CTA
tagactggactagagcttcc

SEQ ID NO: 231237 - DNA, 20 bp, Artificial Sequence
  Description of Artificial Sequence: Synthetic oligonucleotide
  Target: LAMA2; (-) strand; PAM type: YTN; PAM sequence: TTG
aatgaacatatcaatagcag

SEQ ID NO: 231238 - DNA, 20 bp, Artificial Sequence
  Description of Artificial Sequence: Synthetic oligonucleotide
  Target: LAMA2; (-) strand; PAM type: YTN; PAM sequence: TTG
ttgaatgaacatatcaatag

SEQ ID NO: 231239 - DNA, 20 bp, Artificial Sequence
  Description of Artificial Sequence: Synthetic oligonucleotide
  Target: LAMA2; (-) strand; PAM type: YTN; PAM sequence: TTT
gttgaatgaacatatcaata

SEQ ID NO: 231240 - DNA, 20 bp, Artificial Sequence
  Description of Artificial Sequence: Synthetic oligonucleotide
  Target: LAMA2; (-) strand; PAM type: YTN; PAM sequence: TTA
tttgttgaatgaacatatca

SEQ ID NO: 231241 - DNA, 20 bp, Artificial Sequence
  Description of Artificial Sequence: Synthetic oligonucleotide
  Target: LAMA2; (-) strand; PAM type: YTN; PAM sequence: TTA
tcagtaattatttgttgaat

SEQ ID NO: 231242 - DNA, 20 bp, Artificial Sequence
  Description of Artificial Sequence: Synthetic oligonucleotide
  Target: LAMA2; (-) strand; PAM type: YTN; PAM sequence: CTA
tattatcagtaattatttgt

SEQ ID NO: 231243 - DNA, 20 bp, Artificial Sequence
  Description of Artificial Sequence: Synthetic oligonucleotide
  Target: LAMA2; (-) strand; PAM type: YTN; PAM sequence: TTC
agtacatactatattatcag

SEQ ID NO: 231244 - DNA, 20 bp, Artificial Sequence
  Description of Artificial Sequence: Synthetic oligonucleotide
  Target: LAMA2; (-) strand; PAM type: YTN; PAM sequence: TTT
cagtacatactatattatca

SEQ ID NO: 231245 - DNA, 20 bp, Artificial Sequence
  Description of Artificial Sequence: Synthetic oligonucleotide
  Target: LAMA2; (-) strand; PAM type: YTN; PAM sequence: TTA
gcataatgatttcagtacat

SEQ ID NO: 231246 - DNA, 20 bp, Artificial Sequence
  Description of Artificial Sequence: Synthetic oligonucleotide
  Target: LAMA2; (-) strand; PAM type: YTN; PAM sequence: TTT
agcataatgatttcagtaca

SEQ ID NO: 231247 - DNA, 20 bp, Artificial Sequence
  Description of Artificial Sequence: Synthetic oligonucleotide
  Target: LAMA2; (-) strand; PAM type: YTN; PAM sequence: CTC
agtgtttagcataatgattt

SEQ ID NO: 231248 - DNA, 20 bp, Artificial Sequence
  Description of Artificial Sequence: Synthetic oligonucleotide
  Target: LAMA2; (-) strand; PAM type: YTN; PAM sequence: TTG
taaaccctcagtgtttagca

SEQ ID NO: 231249 - DNA, 20 bp, Artificial Sequence
  Description of Artificial Sequence: Synthetic oligonucleotide
  Target: LAMA2; (-) strand; PAM type: YTN; PAM sequence: TTA
ttgtaaaccctcagtgttta

SEQ ID NO: 231250 - DNA, 20 bp, Artificial Sequence
  Description of Artificial Sequence: Synthetic oligonucleotide
  Target: LAMA2; (-) strand; PAM type: YTN; PAM sequence: TTT
attgtaaaccctcagtgttt

SEQ ID NO: 231251 - DNA, 20 bp, Artificial Sequence
  Description of Artificial Sequence: Synthetic oligonucleotide
  Target: LAMA2; (-) strand; PAM type: YTN; PAM sequence: TTA
tttattgtaaaccctcagtg

SEQ ID NO: 231252 - DNA, 20 bp, Artificial Sequence
  Description of Artificial Sequence: Synthetic oligonucleotide
  Target: LAMA2; (-) strand; PAM type: YTN; PAM sequence: CTT
atttattgtaaaccctcagt

SEQ ID NO: 231253 - DNA, 20 bp, Artificial Sequence
  Description of Artificial Sequence: Synthetic oligonucleotide
  Target: LAMA2; (-) strand; PAM type: YTN; PAM sequence: TTC
ttatttattgtaaaccctca

SEQ ID NO: 231254 - DNA, 20 bp, Artificial Sequence
  Description of Artificial Sequence: Synthetic oligonucleotide
  Target: LAMA2; (-) strand; PAM type: YTN; PAM sequence: TTT
cttatttattgtaaaccctc

SEQ ID NO: 231255 - DNA, 20 bp, Artificial Sequence
  Description of Artificial Sequence: Synthetic oligonucleotide
  Target: LAMA2; (-) strand; PAM type: YTN; PAM sequence: TTT
tcttatttattgtaaaccct

SEQ ID NO: 231256 - DNA, 20 bp, Artificial Sequence
  Description of Artificial Sequence: Synthetic oligonucleotide
  Target: LAMA2; (-) strand; PAM type: YTN; PAM sequence: TTA
tacattttcttatttattgt

SEQ ID NO: 231257 - DNA, 20 bp, Artificial Sequence
  Description of Artificial Sequence: Synthetic oligonucleotide
  Target: LAMA2; (-) strand; PAM type: YTN; PAM sequence: TTC
aatgaggttatacattttct

SEQ ID NO: 231258 - DNA, 20 bp, Artificial Sequence
  Description of Artificial Sequence: Synthetic oligonucleotide
  Target: LAMA2; (-) strand; PAM type: YTN; PAM sequence: TTA
agttcaatgaggttatacat

SEQ ID NO: 231259 - DNA, 20 bp, Artificial Sequence
  Description of Artificial Sequence: Synthetic oligonucleotide
  Target: LAMA2; (-) strand; PAM type: YTN; PAM sequence: TTT
aagttcaatgaggttataca

SEQ ID NO: 231260 - DNA, 20 bp, Artificial Sequence
  Description of Artificial Sequence: Synthetic oligonucleotide
  Target: LAMA2; (-) strand; PAM type: YTN; PAM sequence: CTA
gatttaagttcaatgaggtt

SEQ ID NO: 231261 - DNA, 20 bp, Artificial Sequence
  Description of Artificial Sequence: Synthetic oligonucleotide
  Target: LAMA2; (-) strand; PAM type: YTN; PAM sequence: CTA
ctagatttaagttcaatgag

SEQ ID NO: 231262 - DNA, 20 bp, Artificial Sequence
  Description of Artificial Sequence: Synthetic oligonucleotide
  Target: LAMA2; (-) strand; PAM type: YTN; PAM sequence: CTG
ctactagatttaagttcaat

SEQ ID NO: 231263 - DNA, 20 bp, Artificial Sequence
  Description of Artificial Sequence: Synthetic oligonucleotide
  Target: LAMA2; (-) strand; PAM type: YTN; PAM sequence: TTG
tgtctgctactagatttaag

SEQ ID NO: 231264 - DNA, 20 bp, Artificial Sequence
  Description of Artificial Sequence: Synthetic oligonucleotide
  Target: LAMA2; (-) strand; PAM type: YTN; PAM sequence: CTT
gtgtctgctactagatttaa

SEQ ID NO: 231265 - DNA, 20 bp, Artificial Sequence
  Description of Artificial Sequence: Synthetic oligonucleotide
  Target: LAMA2; (-) strand; PAM type: YTN; PAM sequence: TTG
cttgtgtctgctactagatt

SEQ ID NO: 231266 - DNA, 20 bp, Artificial Sequence
  Description of Artificial Sequence: Synthetic oligonucleotide
  Target: LAMA2; (-) strand; PAM type: YTN; PAM sequence: CTT
gcttgtgtctgctactagat

SEQ ID NO: 231267 - DNA, 20 bp, Artificial Sequence
  Description of Artificial Sequence: Synthetic oligonucleotide
  Target: LAMA2; (-) strand; PAM type: YTN; PAM sequence: TTA
cttgcttgtgtctgctacta

SEQ ID NO: 231268 - DNA, 20 bp, Artificial Sequence
  Description of Artificial Sequence: Synthetic oligonucleotide
  Target: LAMA2; (-) strand; PAM type: YTN; PAM sequence: TTT
acttgcttgtgtctgctact

SEQ ID NO: 231269 - DNA, 20 bp, Artificial Sequence
  Description of Artificial Sequence: Synthetic oligonucleotide
  Target: LAMA2; (-) strand; PAM type: YTN; PAM sequence: TTG
ccaatttacttgcttgtgtc

SEQ ID NO: 231270 - DNA, 20 bp, Artificial Sequence
  Description of Artificial Sequence: Synthetic oligonucleotide
  Target: LAMA2; (-) strand; PAM type: YTN; PAM sequence: TTA
ttgccaatttacttgcttgt

SEQ ID NO: 231271 - DNA, 20 bp, Artificial Sequence
  Description of Artificial Sequence: Synthetic oligonucleotide
  Target: LAMA2; (-) strand; PAM type: YTN; PAM sequence: TTT
attgccaatttacttgcttg

SEQ ID NO: 231272 - DNA, 20 bp, Artificial Sequence
  Description of Artificial Sequence: Synthetic oligonucleotide
  Target: LAMA2; (-) strand; PAM type: YTN; PAM sequence: TTT
tattgccaatttacttgctt

SEQ ID NO: 231273 - DNA, 20 bp, Artificial Sequence
  Description of Artificial Sequence: Synthetic oligonucleotide
  Target: LAMA2; (-) strand; PAM type: YTN; PAM sequence: TTT
ttattgccaatttacttgct

SEQ ID NO: 231274 - DNA, 20 bp, Artificial Sequence
  Description of Artificial Sequence: Synthetic oligonucleotide
  Target: LAMA2; (-) strand; PAM type: YTN; PAM sequence: CTA
tttttattgccaatttactt

SEQ ID NO: 231275 - DNA, 20 bp, Artificial Sequence
  Description of Artificial Sequence: Synthetic oligonucleotide
  Target: LAMA2; (-) strand; PAM type: YTN; PAM sequence: CTC
cccctatttttattgccaat

SEQ ID NO: 231276 - DNA, 20 bp, Artificial Sequence
  Description of Artificial Sequence: Synthetic oligonucleotide
  Target: LAMA2; (-) strand; PAM type: YTN; PAM sequence: TTG
actccccctatttttattgc

SEQ ID NO: 231277 - DNA, 20 bp, Artificial Sequence
  Description of Artificial Sequence: Synthetic oligonucleotide
  Target: LAMA2; (-) strand; PAM type: YTN; PAM sequence: CTT
gactccccctatttttattg

SEQ ID NO: 231278 - DNA, 20 bp, Artificial Sequence
  Description of Artificial Sequence: Synthetic oligonucleotide
  Target: LAMA2; (-) strand; PAM type: YTN; PAM sequence: CTC
ccttgactccccctattttt

SEQ ID NO: 231279 - DNA, 20 bp, Artificial Sequence
  Description of Artificial Sequence: Synthetic oligonucleotide
  Target: LAMA2; (-) strand; PAM type: YTN; PAM sequence: TTA
tccaaactcccttgactccc

SEQ ID NO: 231280 - DNA, 20 bp, Artificial Sequence
  Description of Artificial Sequence: Synthetic oligonucleotide
  Target: LAMA2; (-) strand; PAM type: YTN; PAM sequence: TTT
atccaaactcccttgactcc

SEQ ID NO: 231281 - DNA, 20 bp, Artificial Sequence
  Description of Artificial Sequence: Synthetic oligonucleotide
  Target: LAMA2; (-) strand; PAM type: YTN; PAM sequence: CTA
taatttatccaaactccctt

SEQ ID NO: 231282 - DNA, 20 bp, Artificial Sequence
  Description of Artificial Sequence: Synthetic oligonucleotide
  Target: LAMA2; (-) strand; PAM type: YTN; PAM sequence: TTC
tataatttatccaaactccc

SEQ ID NO: 231283 - DNA, 20 bp, Artificial Sequence
  Description of Artificial Sequence: Synthetic oligonucleotide
  Target: LAMA2; (-) strand; PAM type: YTN; PAM sequence: CTT
ctataatttatccaaactcc

SEQ ID NO: 231284 - DNA, 20 bp, Artificial Sequence
  Description of Artificial Sequence: Synthetic oligonucleotide
  Target: LAMA2; (-) strand; PAM type: YTN; PAM sequence: TTC
ttctataatttatccaaact

SEQ ID NO: 231285 - DNA, 20 bp, Artificial Sequence
  Description of Artificial Sequence: Synthetic oligonucleotide
  Target: LAMA2; (-) strand; PAM type: YTN; PAM sequence: CTT
cttctataatttatccaaac

SEQ ID NO: 231286 - DNA, 20 bp, Artificial Sequence
  Description of Artificial Sequence: Synthetic oligonucleotide
  Target: LAMA2; (-) strand; PAM type: YTN; PAM sequence: CTA
ggagcttcttctataattta

SEQ ID NO: 231287 - DNA, 20 bp, Artificial Sequence
  Description of Artificial Sequence: Synthetic oligonucleotide
  Target: LAMA2; (-) strand; PAM type: YTN; PAM sequence: CTG
tctaggagcttcttctataa

SEQ ID NO: 231288 - DNA, 20 bp, Artificial Sequence
  Description of Artificial Sequence: Synthetic oligonucleotide
  Target: LAMA2; (-) strand; PAM type: YTN; PAM sequence: CTC
catggactgtctaggagctt

SEQ ID NO: 231289 - DNA, 20 bp, Artificial Sequence
  Description of Artificial Sequence: Synthetic oligonucleotide
  Target: LAMA2; (-) strand; PAM type: YTN; PAM sequence: CTC
ccacaaatacctccatggac

SEQ ID NO: 231290 - DNA, 20 bp, Artificial Sequence
  Description of Artificial Sequence: Synthetic oligonucleotide
  Target: LAMA2; (-) strand; PAM type: YTN; PAM sequence: TTC
catcctcccacaaatacctc

SEQ ID NO: 231291 - DNA, 20 bp, Artificial Sequence
  Description of Artificial Sequence: Synthetic oligonucleotide
  Target: LAMA2; (-) strand; PAM type: YTN; PAM sequence: TTG
ccaattccatcctcccacaa

SEQ ID NO: 231292 - DNA, 20 bp, Artificial Sequence
  Description of Artificial Sequence: Synthetic oligonucleotide
  Target: LAMA2; (-) strand; PAM type: YTN; PAM sequence: CTG
tgttgccaattccatcctcc

SEQ ID NO: 231293 - DNA, 20 bp, Artificial Sequence
  Description of Artificial Sequence: Synthetic oligonucleotide
  Target: LAMA2; (-) strand; PAM type: YTN; PAM sequence: CTC
agctgtgttgccaattccat

SEQ ID NO: 231294 - DNA, 20 bp, Artificial Sequence
  Description of Artificial Sequence: Synthetic oligonucleotide
  Target: LAMA2; (-) strand; PAM type: YTN; PAM sequence: TTA
aaatctcagctgtgttgcca

SEQ ID NO: 231295 - DNA, 20 bp, Artificial Sequence
  Description of Artificial Sequence: Synthetic oligonucleotide
  Target: LAMA2; (-) strand; PAM type: YTN; PAM sequence: TTT
aaaatctcagctgtgttgcc

SEQ ID NO: 231296 - DNA, 20 bp, Artificial Sequence
  Description of Artificial Sequence: Synthetic oligonucleotide
  Target: LAMA2; (-) strand; PAM type: YTN; PAM sequence: CTT
taaaatctcagctgtgttgc

SEQ ID NO: 231297 - DNA, 20 bp, Artificial Sequence
  Description of Artificial Sequence: Synthetic oligonucleotide
  Target: LAMA2; (-) strand; PAM type: YTN; PAM sequence: TTA
tatatctttaaaatctcagc

SEQ ID NO: 231298 - DNA, 20 bp, Artificial Sequence
  Description of Artificial Sequence: Synthetic oligonucleotide
  Target: LAMA2; (-) strand; PAM type: YTN; PAM sequence: TTT
atatatctttaaaatctcag

SEQ ID NO: 231299 - DNA, 20 bp, Artificial Sequence
  Description of Artificial Sequence: Synthetic oligonucleotide
  Target: LAMA2; (-) strand; PAM type: YTN; PAM sequence: CTT
tatatatctttaaaatctca

SEQ ID NO: 231300 - DNA, 20 bp, Artificial Sequence
  Description of Artificial Sequence: Synthetic oligonucleotide
  Target: LAMA2; (-) strand; PAM type: YTN; PAM sequence: TTA
cacagatgtactttatatat

SEQ ID NO: 231301 - DNA, 20 bp, Artificial Sequence
  Description of Artificial Sequence: Synthetic oligonucleotide
  Target: LAMA2; (-) strand; PAM type: YTN; PAM sequence: TTT
acacagatgtactttatata

SEQ ID NO: 231302 - DNA, 20 bp, Artificial Sequence
  Description of Artificial Sequence: Synthetic oligonucleotide
  Target: LAMA2; (-) strand; PAM type: YTN; PAM sequence: TTG
ccatttacacagatgtactt

SEQ ID NO: 231303 - DNA, 20 bp, Artificial Sequence
  Description of Artificial Sequence: Synthetic oligonucleotide
  Target: LAMA2; (-) strand; PAM type: YTN; PAM sequence: CTT
gccatttacacagatgtact

SEQ ID NO: 231304 - DNA, 20 bp, Artificial Sequence
  Description of Artificial Sequence: Synthetic oligonucleotide
  Target: LAMA2; (-) strand; PAM type: YTN; PAM sequence: CTG
cttgccatttacacagatgt

SEQ ID NO: 231305 - DNA, 20 bp, Artificial Sequence
  Description of Artificial Sequence: Synthetic oligonucleotide
  Target: LAMA2; (-) strand; PAM type: YTN; PAM sequence: CTC
actgcttgccatttacacag

SEQ ID NO: 231306 - DNA, 20 bp, Artificial Sequence
  Description of Artificial Sequence: Synthetic oligonucleotide
  Target: LAMA2; (-) strand; PAM type: YTN; PAM sequence: TTC
tcactgcttgccatttacac

SEQ ID NO: 231307 - DNA, 20 bp, Artificial Sequence
  Description of Artificial Sequence: Synthetic oligonucleotide
  Target: LAMA2; (-) strand; PAM type: YTN; PAM sequence: CTG
tgttctcactgcttgccatt

SEQ ID NO: 231308 - DNA, 20 bp, Artificial Sequence
  Description of Artificial Sequence: Synthetic oligonucleotide
  Target: LAMA2; (-) strand; PAM type: YTN; PAM sequence: TTC
tgtgttctcactgcttgcca

SEQ ID NO: 231309 - DNA, 20 bp, Artificial Sequence
  Description of Artificial Sequence: Synthetic oligonucleotide
  Target: LAMA2; (-) strand; PAM type: YTN; PAM sequence: TTT
ctgtgttctcactgcttgcc

SEQ ID NO: 231310 - DNA, 20 bp, Artificial Sequence
  Description of Artificial Sequence: Synthetic oligonucleotide
  Target: LAMA2; (-) strand; PAM type: YTN; PAM sequence: TTT
tctgtgttctcactgcttgc

SEQ ID NO: 231311 - DNA, 20 bp, Artificial Sequence
  Description of Artificial Sequence: Synthetic oligonucleotide
  Target: LAMA2; (-) strand; PAM type: YTN; PAM sequence: CTT
ttctgtgttctcactgcttg

SEQ ID NO: 231312 - DNA, 20 bp, Artificial Sequence
  Description of Artificial Sequence: Synthetic oligonucleotide
  Target: LAMA2; (-) strand; PAM type: YTN; PAM sequence: CTC
aaacaccttttctgtgttct

SEQ ID NO: 231313 - DNA, 20 bp, Artificial Sequence
  Description of Artificial Sequence: Synthetic oligonucleotide
  Target: LAMA2; (-) strand; PAM type: YTN; PAM sequence: TTC
ctcaaacaccttttctgtgt

SEQ ID NO: 231314 - DNA, 20 bp, Artificial Sequence
  Description of Artificial Sequence: Synthetic oligonucleotide
  Target: LAMA2; (-) strand; PAM type: YTN; PAM sequence: TTT
cctcaaacaccttttctgtg

SEQ ID NO: 231315 - DNA, 20 bp, Artificial Sequence
  Description of Artificial Sequence: Synthetic oligonucleotide
  Target: LAMA2; (-) strand; PAM type: YTN; PAM sequence: CTT
tcctcaaacaccttttctgt

SEQ ID NO: 231316 - DNA, 20 bp, Artificial Sequence
  Description of Artificial Sequence: Synthetic oligonucleotide
  Target: LAMA2; (-) strand; PAM type: YTN; PAM sequence: TTA
ggccctttcctcaaacacct

SEQ ID NO: 231317 - DNA, 20 bp, Artificial Sequence
  Description of Artificial Sequence: Synthetic oligonucleotide
  Target: LAMA2; (-) strand; PAM type: YTN; PAM sequence: TTT
aggccctttcctcaaacacc

SEQ ID NO: 231318 - DNA, 20 bp, Artificial Sequence
  Description of Artificial Sequence: Synthetic oligonucleotide
  Target: LAMA2; (-) strand; PAM type: YTN; PAM sequence: CTT
taggccctttcctcaaacac

SEQ ID NO: 231319 - DNA, 20 bp, Artificial Sequence
  Description of Artificial Sequence: Synthetic oligonucleotide
  Target: LAMA2; (-) strand; PAM type: YTN; PAM sequence: TTA
tctttaggccctttcctcaa

SEQ ID NO: 231320 - DNA, 20 bp, Artificial Sequence
  Description of Artificial Sequence: Synthetic oligonucleotide
  Target: LAMA2; (-) strand; PAM type: YTN; PAM sequence: CTT
atctttaggccctttcctca

SEQ ID NO: 231321 - DNA, 20 bp, Artificial Sequence
  Description of Artificial Sequence: Synthetic oligonucleotide
  Target: LAMA2; (-) strand; PAM type: YTN; PAM sequence: CTA
tcttatctttaggccctttc

SEQ ID NO: 231322 - DNA, 20 bp, Artificial Sequence
  Description of Artificial Sequence: Synthetic oligonucleotide
  Target: LAMA2; (-) strand; PAM type: YTN; PAM sequence: CTG
tgtcatggtctatcttatct

SEQ ID NO: 231323 - DNA, 20 bp, Artificial Sequence
  Description of Artificial Sequence: Synthetic oligonucleotide
  Target: LAMA2; (-) strand; PAM type: YTN; PAM sequence: TTC
tgtgtcatggtctatcttat

SEQ ID NO: 231324 - DNA, 20 bp, Artificial Sequence
  Description of Artificial Sequence: Synthetic oligonucleotide
  Target: LAMA2; (-) strand; PAM type: YTN; PAM sequence: TTT
ctgtgtcatggtctatctta

SEQ ID NO: 231325 - DNA, 20 bp, Artificial Sequence
  Description of Artificial Sequence: Synthetic oligonucleotide
  Target: LAMA2; (-) strand; PAM type: YTN; PAM sequence: CTT
tctgtgtcatggtctatctt

SEQ ID NO: 231326 - DNA, 20 bp, Artificial Sequence
  Description of Artificial Sequence: Synthetic oligonucleotide
  Target: LAMA2; (-) strand; PAM type: YTN; PAM sequence: TTC
ctttctgtgtcatggtctat

SEQ ID NO: 231327 - DNA, 20 bp, Artificial Sequence
  Description of Artificial Sequence: Synthetic oligonucleotide
  Target: LAMA2; (-) strand; PAM type: YTN; PAM sequence: TTT
cctttctgtgtcatggtcta

SEQ ID NO: 231328 - DNA, 20 bp, Artificial Sequence
  Description of Artificial Sequence: Synthetic oligonucleotide
  Target: LAMA2; (-) strand; PAM type: YTN; PAM sequence: CTT
tcctttctgtgtcatggtct

SEQ ID NO: 231329 - DNA, 20 bp, Artificial Sequence
  Description of Artificial Sequence: Synthetic oligonucleotide
  Target: LAMA2; (-) strand; PAM type: YTN; PAM sequence: TTA
ctttcctttctgtgtcatgg

SEQ ID NO: 231330 - DNA, 20 bp, Artificial Sequence
  Description of Artificial Sequence: Synthetic oligonucleotide
  Target: LAMA2; (-) strand; PAM type: YTN; PAM sequence: TTT
actttcctttctgtgtcatg

SEQ ID NO: 231331 - DNA, 20 bp, Artificial Sequence
  Description of Artificial Sequence: Synthetic oligonucleotide
  Target: LAMA2; (-) strand; PAM type: YTN; PAM sequence: TTT
tactttcctttctgtgtcat

SEQ ID NO: 231332 - DNA, 20 bp, Artificial Sequence
  Description of Artificial Sequence: Synthetic oligonucleotide
  Target: LAMA2; (-) strand; PAM type: YTN; PAM sequence: TTT
ttactttcctttctgtgtca

SEQ ID NO: 231333 - DNA, 20 bp, Artificial Sequence
  Description of Artificial Sequence: Synthetic oligonucleotide
  Target: LAMA2; (-) strand; PAM type: YTN; PAM sequence: CTG
aatcatttttactttccttt

SEQ ID NO: 231334 - DNA, 20 bp, Artificial Sequence
  Description of Artificial Sequence: Synthetic oligonucleotide
  Target: LAMA2; (-) strand; PAM type: YTN; PAM sequence: CTA
gatggtcactgaatcatttt

SEQ ID NO: 231335 - DNA, 20 bp, Artificial Sequence
  Description of Artificial Sequence: Synthetic oligonucleotide
  Target: LAMA2; (-) strand; PAM type: YTN; PAM sequence: CTA
ctagatggtcactgaatcat

SEQ ID NO: 231336 - DNA, 20 bp, Artificial Sequence
  Description of Artificial Sequence: Synthetic oligonucleotide
  Target: LAMA2; (-) strand; PAM type: YTN; PAM sequence: TTG
gatatctactagatggtcac

SEQ ID NO: 231337 - DNA, 20 bp, Artificial Sequence
  Description of Artificial Sequence: Synthetic oligonucleotide
  Target: LAMA2; (-) strand; PAM type: YTN; PAM sequence: CTC
aaatatatgtattggatatc

SEQ ID NO: 231338 - DNA, 20 bp, Artificial Sequence
  Description of Artificial Sequence: Synthetic oligonucleotide
  Target: LAMA2; (-) strand; PAM type: YTN; PAM sequence: TTC
actcaaatatatgtattgga

SEQ ID NO: 231339 - DNA, 20 bp, Artificial Sequence
  Description of Artificial Sequence: Synthetic oligonucleotide
  Target: LAMA2; (-) strand; PAM type: YTN; PAM sequence: CTC
attcactcaaatatatgtat

SEQ ID NO: 231340 - DNA, 20 bp, Artificial Sequence
  Description of Artificial Sequence: Synthetic oligonucleotide
  Target: LAMA2; (-) strand; PAM type: YTN; PAM sequence: CTA
tcactcattcactcaaatat

SEQ ID NO: 231341 - DNA, 20 bp, Artificial Sequence
  Description of Artificial Sequence: Synthetic oligonucleotide
  Target: LAMA2; (-) strand; PAM type: YTN; PAM sequence: TTC
atatagtcagtctatcactc

SEQ ID NO: 231342 - DNA, 20 bp, Artificial Sequence
  Description of Artificial Sequence: Synthetic oligonucleotide
  Target: LAMA2; (-) strand; PAM type: YTN; PAM sequence: TTC
ccattcatatagtcagtcta

SEQ ID NO: 231343 - DNA, 20 bp, Artificial Sequence
  Description of Artificial Sequence: Synthetic oligonucleotide
  Target: LAMA2; (-) strand; PAM type: YTN; PAM sequence: TTT
cccattcatatagtcagtct

SEQ ID NO: 231344 - DNA, 20 bp, Artificial Sequence
  Description of Artificial Sequence: Synthetic oligonucleotide
  Target: LAMA2; (-) strand; PAM type: YTN; PAM sequence: TTC
aatatttcccattcatatag

SEQ ID NO: 231345 - DNA, 20 bp, Artificial Sequence
  Description of Artificial Sequence: Synthetic oligonucleotide
  Target: LAMA2; (-) strand; PAM type: YTN; PAM sequence: TTT
caatatttcccattcatata

SEQ ID NO: 231346 - DNA, 20 bp, Artificial Sequence
  Description of Artificial Sequence: Synthetic oligonucleotide
  Target: LAMA2; (-) strand; PAM type: YTN; PAM sequence: TTA
tatttcaatatttcccattc

SEQ ID NO: 231347 - DNA, 20 bp, Artificial Sequence
  Description of Artificial Sequence: Synthetic oligonucleotide
  Target: LAMA2; (-) strand; PAM type: YTN; PAM sequence: TTT
atatttcaatatttcccatt

SEQ ID NO: 231348 - DNA, 20 bp, Artificial Sequence
  Description of Artificial Sequence: Synthetic oligonucleotide
  Target: LAMA2; (-) strand; PAM type: YTN; PAM sequence: CTT
tatatttcaatatttcccat

SEQ ID NO: 231349 - DNA, 20 bp, Artificial Sequence
  Description of Artificial Sequence: Synthetic oligonucleotide
  Target: LAMA2; (-) strand; PAM type: YTN; PAM sequence: CTC
tttatatttcaatatttccc

SEQ ID NO: 231350 - DNA, 20 bp, Artificial Sequence
  Description of Artificial Sequence: Synthetic oligonucleotide
  Target: LAMA2; (-) strand; PAM type: YTN; PAM sequence: TTC
ctctttatatttcaatattt

SEQ ID NO: 231351 - DNA, 20 bp, Artificial Sequence
  Description of Artificial Sequence: Synthetic oligonucleotide
  Target: LAMA2; (-) strand; PAM type: YTN; PAM sequence: CTT
cctctttatatttcaatatt

SEQ ID NO: 231352 - DNA, 20 bp, Artificial Sequence
  Description of Artificial Sequence: Synthetic oligonucleotide
  Target: LAMA2; (-) strand; PAM type: YTN; PAM sequence: CTG
gccttcctctttatatttca

SEQ ID NO: 231353 - DNA, 20 bp, Artificial Sequence
  Description of Artificial Sequence: Synthetic oligonucleotide
  Target: LAMA2; (-) strand; PAM type: YTN; PAM sequence: CTC
tggccttcctctttatattt

SEQ ID NO: 231354 - DNA, 20 bp, Artificial Sequence
  Description of Artificial Sequence: Synthetic oligonucleotide
  Target: LAMA2; (-) strand; PAM type: YTN; PAM sequence: TTA
tctctggccttcctctttat

SEQ ID NO: 231355 - DNA, 20 bp, Artificial Sequence
  Description of Artificial Sequence: Synthetic oligonucleotide
  Target: LAMA2; (-) strand; PAM type: YTN; PAM sequence: TTT
atctctggccttcctcttta

SEQ ID NO: 231356 - DNA, 20 bp, Artificial Sequence
  Description of Artificial Sequence: Synthetic oligonucleotide
  Target: LAMA2; (-) strand; PAM type: YTN; PAM sequence: CTT
tatctctggccttcctcttt

SEQ ID NO: 231357 - DNA, 20 bp, Artificial Sequence
  Description of Artificial Sequence: Synthetic oligonucleotide
  Target: LAMA2; (-) strand; PAM type: YTN; PAM sequence: TTC
agagctttatctctggcctt

SEQ ID NO: 231358 - DNA, 20 bp, Artificial Sequence
  Description of Artificial Sequence: Synthetic oligonucleotide
  Target: LAMA2; (-) strand; PAM type: YTN; PAM sequence: TTT
cagagctttatctctggcct

SEQ ID NO: 231359 - DNA, 20 bp, Artificial Sequence
  Description of Artificial Sequence: Synthetic oligonucleotide
  Target: LAMA2; (-) strand; PAM type: YTN; PAM sequence: CTT
tcagagctttatctctggcc

SEQ ID NO: 231360 - DNA, 20 bp, Artificial Sequence
  Description of Artificial Sequence: Synthetic oligonucleotide
  Target: LAMA2; (-) strand; PAM type: YTN; PAM sequence: TTA
cctttcagagctttatctct

SEQ ID NO: 231361 - DNA, 20 bp, Artificial Sequence
  Description of Artificial Sequence: Synthetic oligonucleotide
  Target: LAMA2; (-) strand; PAM type: YTN; PAM sequence: CTT
acctttcagagctttatctc

SEQ ID NO: 231362 - DNA, 20 bp, Artificial Sequence
  Description of Artificial Sequence: Synthetic oligonucleotide
  Target: LAMA2; (-) strand; PAM type: YTN; PAM sequence: TTA
aaatatatgcttacctttca

SEQ ID NO: 231363 - DNA, 20 bp, Artificial Sequence
  Description of Artificial Sequence: Synthetic oligonucleotide
  Target: LAMA2; (-) strand; PAM type: YTN; PAM sequence: CTT
aaaatatatgcttacctttc

SEQ ID NO: 231364 - DNA, 20 bp, Artificial Sequence
  Description of Artificial Sequence: Synthetic oligonucleotide
  Target: LAMA2; (-) strand; PAM type: YTN; PAM sequence: CTG
aagtcttaaaatatatgctt

SEQ ID NO: 231365 - DNA, 20 bp, Artificial Sequence
  Description of Artificial Sequence: Synthetic oligonucleotide
  Target: LAMA2; (-) strand; PAM type: YTN; PAM sequence: CTC
tgaagtcttaaaatatatgc

SEQ ID NO: 231366 - DNA, 20 bp, Artificial Sequence
  Description of Artificial Sequence: Synthetic oligonucleotide
  Target: LAMA2; (-) strand; PAM type: YTN; PAM sequence: TTA
ggtactctgaagtcttaaaa

SEQ ID NO: 231367 - DNA, 20 bp, Artificial Sequence
  Description of Artificial Sequence: Synthetic oligonucleotide
  Target: LAMA2; (-) strand; PAM type: YTN; PAM sequence: TTC
agaaaattaggtactctgaa

SEQ ID NO: 231368 - DNA, 20 bp, Artificial Sequence
  Description of Artificial Sequence: Synthetic oligonucleotide
  Target: LAMA2; (-) strand; PAM type: YTN; PAM sequence: TTG
catattcagaaaattaggta

SEQ ID NO: 231369 - DNA, 20 bp, Artificial Sequence
  Description of Artificial Sequence: Synthetic oligonucleotide
  Target: LAMA2; (-) strand; PAM type: YTN; PAM sequence: TTT
gcatattcagaaaattaggt

SEQ ID NO: 231370 - DNA, 20 bp, Artificial Sequence
  Description of Artificial Sequence: Synthetic oligonucleotide
  Target: LAMA2; (-) strand; PAM type: YTN; PAM sequence: CTC
atttgcatattcagaaaatt

SEQ ID NO: 231371 - DNA, 20 bp, Artificial Sequence
  Description of Artificial Sequence: Synthetic oligonucleotide
  Target: LAMA2; (-) strand; PAM type: YTN; PAM sequence: CTG
ctcatttgcatattcagaaa

SEQ ID NO: 231372 - DNA, 20 bp, Artificial Sequence
  Description of Artificial Sequence: Synthetic oligonucleotide
  Target: LAMA2; (-) strand; PAM type: YTN; PAM sequence: CTA
atactgctcatttgcatatt

SEQ ID NO: 231373 - DNA, 20 bp, Artificial Sequence
  Description of Artificial Sequence: Synthetic oligonucleotide
  Target: LAMA2; (-) strand; PAM type: YTN; PAM sequence: TTC
taatactgctcatttgcata

SEQ ID NO: 231374 - DNA, 20 bp, Artificial Sequence
  Description of Artificial Sequence: Synthetic oligonucleotide
  Target: LAMA2; (-) strand; PAM type: YTN; PAM sequence: TTA
attctaatactgctcatttg

SEQ ID NO: 231375 - DNA, 20 bp, Artificial Sequence
  Description of Artificial Sequence: Synthetic oligonucleotide
  Target: LAMA2; (-) strand; PAM type: YTN; PAM sequence: TTA
ttaattctaatactgctcat

SEQ ID NO: 231376 - DNA, 20 bp, Artificial Sequence
  Description of Artificial Sequence: Synthetic oligonucleotide
  Target: LAMA2; (-) strand; PAM type: YTN; PAM sequence: TTT
attaattctaatactgctca

SEQ ID NO: 231377 - DNA, 20 bp, Artificial Sequence
  Description of Artificial Sequence: Synthetic oligonucleotide
  Target: LAMA2; (-) strand; PAM type: YTN; PAM sequence: TTT
tattaattctaatactgctc

SEQ ID NO: 231378 - DNA, 20 bp, Artificial Sequence
  Description of Artificial Sequence: Synthetic oligonucleotide
  Target: LAMA2; (-) strand; PAM type: YTN; PAM sequence: TTT
ttattaattctaatactgct

SEQ ID NO: 231379 - DNA, 20 bp, Artificial Sequence
  Description of Artificial Sequence: Synthetic oligonucleotide
  Target: LAMA2; (-) strand; PAM type: YTN; PAM sequence: TTA
tttttattaattctaatact

SEQ ID NO: 231380 - DNA, 20 bp, Artificial Sequence
  Description of Artificial Sequence: Synthetic oligonucleotide
  Target: LAMA2; (-) strand; PAM type: YTN; PAM sequence: TTA
gggttatttttattaattct

SEQ ID NO: 231381 - DNA, 20 bp, Artificial Sequence
  Description of Artificial Sequence: Synthetic oligonucleotide
  Target: LAMA2; (-) strand; PAM type: YTN; PAM sequence: TTT
agggttatttttattaattc

SEQ ID NO: 231382 - DNA, 20 bp, Artificial Sequence
  Description of Artificial Sequence: Synthetic oligonucleotide
  Target: LAMA2; (-) strand; PAM type: YTN; PAM sequence: TTT
tagggttatttttattaatt

SEQ ID NO: 231383 - DNA, 20 bp, Artificial Sequence
  Description of Artificial Sequence: Synthetic oligonucleotide
  Target: LAMA2; (-) strand; PAM type: YTN; PAM sequence: TTT
ttagggttatttttattaat

SEQ ID NO: 231384 - DNA, 20 bp, Artificial Sequence
  Description of Artificial Sequence: Synthetic oligonucleotide
  Target: LAMA2; (-) strand; PAM type: YTN; PAM sequence: CTC
atttttagggttatttttat

SEQ ID NO: 231385 - DNA, 20 bp, Artificial Sequence
  Description of Artificial Sequence: Synthetic oligonucleotide
  Target: LAMA2; (-) strand; PAM type: YTN; PAM sequence: TTC
tcatttttagggttattttt

SEQ ID NO: 231386 - DNA, 20 bp, Artificial Sequence
  Description of Artificial Sequence: Synthetic oligonucleotide
  Target: LAMA2; (-) strand; PAM type: YTN; PAM sequence: CTC
caaccaagagttctcatttt

SEQ ID NO: 231387 - DNA, 20 bp, Artificial Sequence
  Description of Artificial Sequence: Synthetic oligonucleotide
  Target: LAMA2; (-) strand; PAM type: YTN; PAM sequence: TTC
tccaaccaagagttctcatt

SEQ ID NO: 231388 - DNA, 20 bp, Artificial Sequence
  Description of Artificial Sequence: Synthetic oligonucleotide
  Target: LAMA2; (-) strand; PAM type: YTN; PAM sequence: TTT
ctccaaccaagagttctcat

SEQ ID NO: 231389 - DNA, 20 bp, Artificial Sequence
  Description of Artificial Sequence: Synthetic oligonucleotide
  Target: LAMA2; (-) strand; PAM type: YTN; PAM sequence: TTT
tctccaaccaagagttctca

SEQ ID NO: 231390 - DNA, 20 bp, Artificial Sequence
  Description of Artificial Sequence: Synthetic oligonucleotide
  Target: LAMA2; (-) strand; PAM type: YTN; PAM sequence: TTA
ttttctccaaccaagagttc

SEQ ID NO: 231391 - DNA, 20 bp, Artificial Sequence
  Description of Artificial Sequence: Synthetic oligonucleotide
  Target: LAMA2; (-) strand; PAM type: YTN; PAM sequence: TTG
ttattttctccaaccaagag

SEQ ID NO: 231392 - DNA, 20 bp, Artificial Sequence
  Description of Artificial Sequence: Synthetic oligonucleotide
  Target: LAMA2; (-) strand; PAM type: YTN; PAM sequence: TTT
gttattttctccaaccaaga

SEQ ID NO: 231393 - DNA, 20 bp, Artificial Sequence
  Description of Artificial Sequence: Synthetic oligonucleotide
  Target: LAMA2; (-) strand; PAM type: YTN; PAM sequence: TTT
tgttattttctccaaccaag

SEQ ID NO: 231394 - DNA, 20 bp, Artificial Sequence
  Description of Artificial Sequence: Synthetic oligonucleotide
  Target: LAMA2; (-) strand; PAM type: YTN; PAM sequence: TTC
atattttgttattttctcca

SEQ ID NO: 231395 - DNA, 20 bp, Artificial Sequence
  Description of Artificial Sequence: Synthetic oligonucleotide
  Target: LAMA2; (-) strand; PAM type: YTN; PAM sequence: CTT
catattttgttattttctcc

SEQ ID NO: 231396 - DNA, 20 bp, Artificial Sequence
  Description of Artificial Sequence: Synthetic oligonucleotide
  Target: LAMA2; (-) strand; PAM type: YTN; PAM sequence: TTA
cttcatattttgttattttc

SEQ ID NO: 231397 - DNA, 20 bp, Artificial Sequence
  Description of Artificial Sequence: Synthetic oligonucleotide
  Target: LAMA2; (-) strand; PAM type: YTN; PAM sequence: TTT
acttcatattttgttatttt

SEQ ID NO: 231398 - DNA, 20 bp, Artificial Sequence
  Description of Artificial Sequence: Synthetic oligonucleotide
  Target: LAMA2; (-) strand; PAM type: YTN; PAM sequence: CTT
tacttcatattttgttattt

SEQ ID NO: 231399 - DNA, 20 bp, Artificial Sequence
  Description of Artificial Sequence: Synthetic oligonucleotide
  Target: LAMA2; (-) strand; PAM type: YTN; PAM sequence: TTC
ctttacttcatattttgtta

SEQ ID NO: 231400 - DNA, 20 bp, Artificial Sequence
  Description of Artificial Sequence: Synthetic oligonucleotide
  Target: LAMA2; (-) strand; PAM type: YTN; PAM sequence: TTT
cctttacttcatattttgtt

SEQ ID NO: 231401 - DNA, 20 bp, Artificial Sequence
  Description of Artificial Sequence: Synthetic oligonucleotide
  Target: LAMA2; (-) strand; PAM type: YTN; PAM sequence: TTT
tcctttacttcatattttgt

SEQ ID NO: 231402 - DNA, 20 bp, Artificial Sequence
  Description of Artificial Sequence: Synthetic oligonucleotide
  Target: LAMA2; (-) strand; PAM type: YTN; PAM sequence: CTG
tcaattttcctttacttcat

SEQ ID NO: 231403 - DNA, 20 bp, Artificial Sequence
  Description of Artificial Sequence: Synthetic oligonucleotide
  Target: LAMA2; (-) strand; PAM type: YTN; PAM sequence: TTC
tgtcaattttcctttacttc

SEQ ID NO: 231404 - DNA, 20 bp, Artificial Sequence
  Description of Artificial Sequence: Synthetic oligonucleotide
  Target: LAMA2; (-) strand; PAM type: YTN; PAM sequence: TTG
aagtattctgtcaattttcc

SEQ ID NO: 231405 - DNA, 20 bp, Artificial Sequence
  Description of Artificial Sequence: Synthetic oligonucleotide
  Target: LAMA2; (-) strand; PAM type: YTN; PAM sequence: TTT
gaagtattctgtcaattttc

SEQ ID NO: 231406 - DNA, 20 bp, Artificial Sequence
  Description of Artificial Sequence: Synthetic oligonucleotide
  Target: LAMA2; (-) strand; PAM type: YTN; PAM sequence: TTT
tgaagtattctgtcaatttt

SEQ ID NO: 231407 - DNA, 20 bp, Artificial Sequence
  Description of Artificial Sequence: Synthetic oligonucleotide
  Target: LAMA2; (-) strand; PAM type: YTN; PAM sequence: TTT
ttgaagtattctgtcaattt

SEQ ID NO: 231408 - DNA, 20 bp, Artificial Sequence
  Description of Artificial Sequence: Synthetic oligonucleotide
  Target: LAMA2; (-) strand; PAM type: YTN; PAM sequence: TTA
tatcaggcacagtttttgaa

SEQ ID NO: 231409 - DNA, 20 bp, Artificial Sequence
  Description of Artificial Sequence: Synthetic oligonucleotide
  Target: LAMA2; (-) strand; PAM type: YTN; PAM sequence: TTC
caattatatcaggcacagtt

SEQ ID NO: 231410 - DNA, 20 bp, Artificial Sequence
  Description of Artificial Sequence: Synthetic oligonucleotide
  Target: LAMA2; (-) strand; PAM type: YTN; PAM sequence: TTT
ccaattatatcaggcacagt

SEQ ID NO: 231411 - DNA, 20 bp, Artificial Sequence
  Description of Artificial Sequence: Synthetic oligonucleotide
  Target: LAMA2; (-) strand; PAM type: YTN; PAM sequence: TTA
tttccaattatatcaggcac

SEQ ID NO: 231412 - DNA, 20 bp, Artificial Sequence
  Description of Artificial Sequence: Synthetic oligonucleotide
  Target: LAMA2; (-) strand; PAM type: YTN; PAM sequence: TTC
caggcattatttccaattat

SEQ ID NO: 231413 - DNA, 20 bp, Artificial Sequence
  Description of Artificial Sequence: Synthetic oligonucleotide
  Target: LAMA2; (-) strand; PAM type: YTN; PAM sequence: TTT
ccaggcattatttccaatta

SEQ ID NO: 231414 - DNA, 20 bp, Artificial Sequence
  Description of Artificial Sequence: Synthetic oligonucleotide
  Target: LAMA2; (-) strand; PAM type: YTN; PAM sequence: CTG
tttccaggcattatttccaa

SEQ ID NO: 231415 - DNA, 20 bp, Artificial Sequence
  Description of Artificial Sequence: Synthetic oligonucleotide
  Target: LAMA2; (-) strand; PAM type: YTN; PAM sequence: CTC
aatctgtttccaggcattat

SEQ ID NO: 231416 - DNA, 20 bp, Artificial Sequence
  Description of Artificial Sequence: Synthetic oligonucleotide
  Target: LAMA2; (-) strand; PAM type: YTN; PAM sequence: TTA
tggactcaatctgtttccag

SEQ ID NO: 231417 - DNA, 20 bp, Artificial Sequence
  Description of Artificial Sequence: Synthetic oligonucleotide
  Target: LAMA2; (-) strand; PAM type: YTN; PAM sequence: TTA
atgaacacatacaggattat

SEQ ID NO: 231418 - DNA, 20 bp, Artificial Sequence
  Description of Artificial Sequence: Synthetic oligonucleotide
  Target: LAMA2; (-) strand; PAM type: YTN; PAM sequence: CTT
aatgaacacatacaggatta

SEQ ID NO: 231419 - DNA, 20 bp, Artificial Sequence
  Description of Artificial Sequence: Synthetic oligonucleotide
  Target: LAMA2; (-) strand; PAM type: YTN; PAM sequence: CTG
gccttaatgaacacatacag

SEQ ID NO: 231420 - DNA, 20 bp, Artificial Sequence
  Description of Artificial Sequence: Synthetic oligonucleotide
  Target: LAMA2; (-) strand; PAM type: YTN; PAM sequence: TTC
ctggccttaatgaacacata

SEQ ID NO: 231421 - DNA, 20 bp, Artificial Sequence
  Description of Artificial Sequence: Synthetic oligonucleotide
  Target: LAMA2; (-) strand; PAM type: YTN; PAM sequence: CTT
cctggccttaatgaacacat

SEQ ID NO: 231422 - DNA, 20 bp, Artificial Sequence
  Description of Artificial Sequence: Synthetic oligonucleotide
  Target: LAMA2; (-) strand; PAM type: YTN; PAM sequence: TTA
ccaagaatcttcctggcctt

SEQ ID NO: 231423 - DNA, 20 bp, Artificial Sequence
  Description of Artificial Sequence: Synthetic oligonucleotide
  Target: LAMA2; (-) strand; PAM type: YTN; PAM sequence: CTT
accaagaatcttcctggcct

SEQ ID NO: 231424 - DNA, 20 bp, Artificial Sequence
  Description of Artificial Sequence: Synthetic oligonucleotide
  Target: LAMA2; (-) strand; PAM type: YTN; PAM sequence: TTC
cttaccaagaatcttcctgg

SEQ ID NO: 231425 - DNA, 20 bp, Artificial Sequence
  Description of Artificial Sequence: Synthetic oligonucleotide
  Target: LAMA2; (-) strand; PAM type: YTN; PAM sequence: TTT
ccttaccaagaatcttcctg

SEQ ID NO: 231426 - DNA, 20 bp, Artificial Sequence
  Description of Artificial Sequence: Synthetic oligonucleotide
  Target: LAMA2; (-) strand; PAM type: YTN; PAM sequence: CTA
gacatttccttaccaagaat

SEQ ID NO: 231427 - DNA, 20 bp, Artificial Sequence
  Description of Artificial Sequence: Synthetic oligonucleotide
  Target: LAMA2; (-) strand; PAM type: YTN; PAM sequence: TTC
agactagacatttccttacc

SEQ ID NO: 231428 - DNA, 20 bp, Artificial Sequence
  Description of Artificial Sequence: Synthetic oligonucleotide
  Target: LAMA2; (-) strand; PAM type: YTN; PAM sequence: TTT
cagactagacatttccttac

SEQ ID NO: 231429 - DNA, 20 bp, Artificial Sequence
  Description of Artificial Sequence: Synthetic oligonucleotide
  Target: LAMA2; (-) strand; PAM type: YTN; PAM sequence: CTT
tcagactagacatttcctta

SEQ ID NO: 231430 - DNA, 20 bp, Artificial Sequence
  Description of Artificial Sequence: Synthetic oligonucleotide
  Target: LAMA2; (-) strand; PAM type: YTN; PAM sequence: TTA
gacctttcagactagacatt

SEQ ID NO: 231431 - DNA, 20 bp, Artificial Sequence
  Description of Artificial Sequence: Synthetic oligonucleotide
  Target: LAMA2; (-) strand; PAM type: YTN; PAM sequence: TTT
agacctttcagactagacat

SEQ ID NO: 231432 - DNA, 20 bp, Artificial Sequence
  Description of Artificial Sequence: Synthetic oligonucleotide
  Target: LAMA2; (-) strand; PAM type: YTN; PAM sequence: CTT
tagacctttcagactagaca

SEQ ID NO: 231433 - DNA, 20 bp, Artificial Sequence
  Description of Artificial Sequence: Synthetic oligonucleotide
  Target: LAMA2; (-) strand; PAM type: YTN; PAM sequence: TTA
ataaaatctttagacctttc

SEQ ID NO: 231434 - DNA, 20 bp, Artificial Sequence
  Description of Artificial Sequence: Synthetic oligonucleotide
  Target: LAMA2; (-) strand; PAM type: YTN; PAM sequence: TTA
tacagattaataaaatcttt

SEQ ID NO: 231435 - DNA, 20 bp, Artificial Sequence
  Description of Artificial Sequence: Synthetic oligonucleotide
  Target: LAMA2; (-) strand; PAM type: YTN; PAM sequence: TTA
ttatacagattaataaaatc

SEQ ID NO: 231436 - DNA, 20 bp, Artificial Sequence
  Description of Artificial Sequence: Synthetic oligonucleotide
  Target: LAMA2; (-) strand; PAM type: YTN; PAM sequence: TTT
attatacagattaataaaat

SEQ ID NO: 231437 - DNA, 20 bp, Artificial Sequence
  Description of Artificial Sequence: Synthetic oligonucleotide
  Target: LAMA2; (-) strand; PAM type: YTN; PAM sequence: TTC
ataagatataatttattata

SEQ ID NO: 231438 - DNA, 20 bp, Artificial Sequence
  Description of Artificial Sequence: Synthetic oligonucleotide
  Target: LAMA2; (-) strand; PAM type: YTN; PAM sequence: TTT
cataagatataatttattat

SEQ ID NO: 231439 - DNA, 20 bp, Artificial Sequence
  Description of Artificial Sequence: Synthetic oligonucleotide
  Target: LAMA2; (-) strand; PAM type: YTN; PAM sequence: CTG
gataaatgacaagagtttca

SEQ ID NO: 231440 - DNA, 20 bp, Artificial Sequence
  Description of Artificial Sequence: Synthetic oligonucleotide
  Target: LAMA2; (-) strand; PAM type: YTN; PAM sequence: TTC
aaatatactggataaatgac

SEQ ID NO: 231441 - DNA, 20 bp, Artificial Sequence
  Description of Artificial Sequence: Synthetic oligonucleotide
  Target: LAMA2; (-) strand; PAM type: YTN; PAM sequence: TTA
taaaatatgaaagtaccatg

SEQ ID NO: 231442 - DNA, 20 bp, Artificial Sequence
  Description of Artificial Sequence: Synthetic oligonucleotide
  Target: LAMA2; (-) strand; PAM type: YTN; PAM sequence: TTA
aatgttataaaatatgaaag

SEQ ID NO: 231443 - DNA, 20 bp, Artificial Sequence
  Description of Artificial Sequence: Synthetic oligonucleotide
  Target: LAMA2; (-) strand; PAM type: YTN; PAM sequence: TTT
aaatgttataaaatatgaaa

SEQ ID NO: 231444 - DNA, 20 bp, Artificial Sequence
  Description of Artificial Sequence: Synthetic oligonucleotide
  Target: LAMA2; (-) strand; PAM type: YTN; PAM sequence: TTT
taaatgttataaaatatgaa

SEQ ID NO: 231445 - DNA, 20 bp, Artificial Sequence
  Description of Artificial Sequence: Synthetic oligonucleotide
  Target: LAMA2; (-) strand; PAM type: YTN; PAM sequence: TTT
ttaaatgttataaaatatga

SEQ ID NO: 231446 - DNA, 20 bp, Artificial Sequence
  Description of Artificial Sequence: Synthetic oligonucleotide
  Target: LAMA2; (-) strand; PAM type: YTN; PAM sequence: TTG
aaatatttttaaatgttata

SEQ ID NO: 231447 - DNA, 20 bp, Artificial Sequence
  Description of Artificial Sequence: Synthetic oligonucleotide
  Target: LAMA2; (-) strand; PAM type: YTN; PAM sequence: TTC
aaatcaatggaatattgaaa

SEQ ID NO: 231448 - DNA, 20 bp, Artificial Sequence
  Description of Artificial Sequence: Synthetic oligonucleotide
  Target: LAMA2; (-) strand; PAM type: YTN; PAM sequence: TTA
ttcaaatcaatggaatattg

SEQ ID NO: 231449 - DNA, 20 bp, Artificial Sequence
  Description of Artificial Sequence: Synthetic oligonucleotide
  Target: LAMA2; (-) strand; PAM type: YTN; PAM sequence: CTT
attcaaatcaatggaatatt

SEQ ID NO: 231450 - DNA, 20 bp, Artificial Sequence
  Description of Artificial Sequence: Synthetic oligonucleotide
  Target: LAMA2; (-) strand; PAM type: YTN; PAM sequence: TTA
aagaatcttattcaaatcaa

SEQ ID NO: 231451 - DNA, 20 bp, Artificial Sequence
  Description of Artificial Sequence: Synthetic oligonucleotide
  Target: LAMA2; (-) strand; PAM type: YTN; PAM sequence: TTT
aaagaatcttattcaaatca

SEQ ID NO: 231452 - DNA, 20 bp, Artificial Sequence
  Description of Artificial Sequence: Synthetic oligonucleotide
  Target: LAMA2; (-) strand; PAM type: YTN; PAM sequence: CTG
taatttaaagaatcttattc

SEQ ID NO: 231453 - DNA, 20 bp, Artificial Sequence
  Description of Artificial Sequence: Synthetic oligonucleotide
  Target: LAMA2; (-) strand; PAM type: YTN; PAM sequence: TTC
actgtaatttaaagaatctt

SEQ ID NO: 231454 - DNA, 20 bp, Artificial Sequence
  Description of Artificial Sequence: Synthetic oligonucleotide
  Target: LAMA2; (-) strand; PAM type: YTN; PAM sequence: TTT
cactgtaatttaaagaatct

SEQ ID NO: 231455 - DNA, 20 bp, Artificial Sequence
  Description of Artificial Sequence: Synthetic oligonucleotide
  Target: LAMA2; (-) strand; PAM type: YTN; PAM sequence: CTT
tcactgtaatttaaagaatc

SEQ ID NO: 231456 - DNA, 20 bp, Artificial Sequence
  Description of Artificial Sequence: Synthetic oligonucleotide
  Target: LAMA2; (-) strand; PAM type: YTN; PAM sequence: TTA
tcagaaagctttcactgtaa

SEQ ID NO: 231457 - DNA, 20 bp, Artificial Sequence
  Description of Artificial Sequence: Synthetic oligonucleotide
  Target: LAMA2; (-) strand; PAM type: YTN; PAM sequence: CTT
atcagaaagctttcactgta

SEQ ID NO: 231458 - DNA, 20 bp, Artificial Sequence
  Description of Artificial Sequence: Synthetic oligonucleotide
  Target: LAMA2; (-) strand; PAM type: YTN; PAM sequence: TTA
ccataccttatcagaaagct

SEQ ID NO: 231459 - DNA, 20 bp, Artificial Sequence
  Description of Artificial Sequence: Synthetic oligonucleotide
  Target: LAMA2; (-) strand; PAM type: YTN; PAM sequence: CTT
accataccttatcagaaagc

SEQ ID NO: 231460 - DNA, 20 bp, Artificial Sequence
  Description of Artificial Sequence: Synthetic oligonucleotide
  Target: LAMA2; (-) strand; PAM type: YTN; PAM sequence: CTG
aaaaataatcttaccatacc

SEQ ID NO: 231461 - DNA, 20 bp, Artificial Sequence
  Description of Artificial Sequence: Synthetic oligonucleotide
  Target: LAMA2; (-) strand; PAM type: YTN; PAM sequence: TTA
ctgaaaaataatcttaccat

SEQ ID NO: 231462 - DNA, 20 bp, Artificial Sequence
  Description of Artificial Sequence: Synthetic oligonucleotide
  Target: LAMA2; (-) strand; PAM type: YTN; PAM sequence: TTA
tatgtatcagcataattact

SEQ ID NO: 231463 - DNA, 20 bp, Artificial Sequence
  Description of Artificial Sequence: Synthetic oligonucleotide
  Target: LAMA2; (-) strand; PAM type: YTN; PAM sequence: TTA
ttatatgtatcagcataatt

SEQ ID NO: 231464 - DNA, 20 bp, Artificial Sequence
  Description of Artificial Sequence: Synthetic oligonucleotide
  Target: LAMA2; (-) strand; PAM type: YTN; PAM sequence: TTT
attatatgtatcagcataat

SEQ ID NO: 231465 - DNA, 20 bp, Artificial Sequence
  Description of Artificial Sequence: Synthetic oligonucleotide
  Target: LAMA2; (-) strand; PAM type: YTN; PAM sequence: CTT
tattatatgtatcagcataa

SEQ ID NO: 231466 - DNA, 20 bp, Artificial Sequence
  Description of Artificial Sequence: Synthetic oligonucleotide
  Target: LAMA2; (-) strand; PAM type: YTN; PAM sequence: TTG
tcagtagctttattatatgt

SEQ ID NO: 231467 - DNA, 20 bp, Artificial Sequence
  Description of Artificial Sequence: Synthetic oligonucleotide
  Target: LAMA2; (-) strand; PAM type: YTN; PAM sequence: TTA
tgaattgtcagtagctttat

SEQ ID NO: 231468 - DNA, 20 bp, Artificial Sequence
  Description of Artificial Sequence: Synthetic oligonucleotide
  Target: LAMA2; (-) strand; PAM type: YTN; PAM sequence: TTT
atgaattgtcagtagcttta

SEQ ID NO: 231469 - DNA, 20 bp, Artificial Sequence
  Description of Artificial Sequence: Synthetic oligonucleotide
  Target: LAMA2; (-) strand; PAM type: YTN; PAM sequence: CTT
tatgaattgtcagtagcttt

SEQ ID NO: 231470 - DNA, 20 bp, Artificial Sequence
  Description of Artificial Sequence: Synthetic oligonucleotide
  Target: LAMA2; (-) strand; PAM type: YTN; PAM sequence: TTA
tcatctttatgaattgtcag

SEQ ID NO: 231471 - DNA, 20 bp, Artificial Sequence
  Description of Artificial Sequence: Synthetic oligonucleotide
  Target: LAMA2; (-) strand; PAM type: YTN; PAM sequence: CTA
agtgtattatcatctttatg

SEQ ID NO: 231472 - DNA, 20 bp, Artificial Sequence
  Description of Artificial Sequence: Synthetic oligonucleotide
  Target: LAMA2; (-) strand; PAM type: YTN; PAM sequence: TTG
tactaagtgtattatcatct

SEQ ID NO: 231473 - DNA, 20 bp, Artificial Sequence
  Description of Artificial Sequence: Synthetic oligonucleotide
  Target: LAMA2; (-) strand; PAM type: YTN; PAM sequence: TTT
gtactaagtgtattatcatc

SEQ ID NO: 231474 - DNA, 20 bp, Artificial Sequence
  Description of Artificial Sequence: Synthetic oligonucleotide
  Target: LAMA2; (-) strand; PAM type: YTN; PAM sequence: CTC
agtttgtactaagtgtatta

SEQ ID NO: 231475 - DNA, 20 bp, Artificial Sequence
  Description of Artificial Sequence: Synthetic oligonucleotide
  Target: LAMA2; (-) strand; PAM type: YTN; PAM sequence: TTG
aagctcagtttgtactaagt

SEQ ID NO: 231476 - DNA, 20 bp, Artificial Sequence
  Description of Artificial Sequence: Synthetic oligonucleotide
  Target: LAMA2; (-) strand; PAM type: YTN; PAM sequence: TTA
gtaatcccattgaagctcag

SEQ ID NO: 231477 - DNA, 20 bp, Artificial Sequence
  Description of Artificial Sequence: Synthetic oligonucleotide
  Target: LAMA2; (-) strand; PAM type: YTN; PAM sequence: TTT
agtaatcccattgaagctca

SEQ ID NO: 231478 - DNA, 20 bp, Artificial Sequence
  Description of Artificial Sequence: Synthetic oligonucleotide
  Target: LAMA2; (-) strand; PAM type: YTN; PAM sequence: CTC
atttagtaatcccattgaag

SEQ ID NO: 231479 - DNA, 20 bp, Artificial Sequence
  Description of Artificial Sequence: Synthetic oligonucleotide
  Target: LAMA2; (-) strand; PAM type: YTN; PAM sequence: CTC
acatactcatttagtaatcc

SEQ ID NO: 231480 - DNA, 20 bp, Artificial Sequence
  Description of Artificial Sequence: Synthetic oligonucleotide
  Target: LAMA2; (-) strand; PAM type: YTN; PAM sequence: CTG
tcctcacatactcatttagt

SEQ ID NO: 231481 - DNA, 20 bp, Artificial Sequence
  Description of Artificial Sequence: Synthetic oligonucleotide
  Target: LAMA2; (-) strand; PAM type: YTN; PAM sequence: CTC
tgtcctcacatactcattta

SEQ ID NO: 231482 - DNA, 20 bp, Artificial Sequence
  Description of Artificial Sequence: Synthetic oligonucleotide
  Target: LAMA2; (-) strand; PAM type: YTN; PAM sequence: CTG
ctctgtcctcacatactcat

SEQ ID NO: 231483 - DNA, 20 bp, Artificial Sequence
  Description of Artificial Sequence: Synthetic oligonucleotide
  Target: LAMA2; (-) strand; PAM type: YTN; PAM sequence: CTC
tgctctgtcctcacatactc

SEQ ID NO: 231484 - DNA, 20 bp, Artificial Sequence
  Description of Artificial Sequence: Synthetic oligonucleotide
  Target: LAMA2; (-) strand; PAM type: YTN; PAM sequence: TTC
ctctgctctgtcctcacata

SEQ ID NO: 231485 - DNA, 20 bp, Artificial Sequence
  Description of Artificial Sequence: Synthetic oligonucleotide
  Target: LAMA2; (-) strand; PAM type: YTN; PAM sequence: TTT
cctctgctctgtcctcacat

SEQ ID NO: 231486 - DNA, 20 bp, Artificial Sequence
  Description of Artificial Sequence: Synthetic oligonucleotide
  Target: LAMA2; (-) strand; PAM type: YTN; PAM sequence: TTT
tcctctgctctgtcctcaca

SEQ ID NO: 231487 - DNA, 20 bp, Artificial Sequence
  Description of Artificial Sequence: Synthetic oligonucleotide
  Target: LAMA2; (-) strand; PAM type: YTN; PAM sequence: CTT
ttcctctgctctgtcctcac

SEQ ID NO: 231488 - DNA, 20 bp, Artificial Sequence
  Description of Artificial Sequence: Synthetic oligonucleotide
  Target: LAMA2; (-) strand; PAM type: YTN; PAM sequence: TTG
gccttttcctctgctctgtc

SEQ ID NO: 231489 - DNA, 20 bp, Artificial Sequence
  Description of Artificial Sequence: Synthetic oligonucleotide
  Target: LAMA2; (-) strand; PAM type: YTN; PAM sequence: CTT
ggccttttcctctgctctgt

SEQ ID NO: 231490 - DNA, 20 bp, Artificial Sequence
  Description of Artificial Sequence: Synthetic oligonucleotide
  Target: LAMA2; (-) strand; PAM type: YTN; PAM sequence: CTC
aacccttggccttttcctct

SEQ ID NO: 231491 - DNA, 20 bp, Artificial Sequence
  Description of Artificial Sequence: Synthetic oligonucleotide
  Target: LAMA2; (-) strand; PAM type: YTN; PAM sequence: CTC
ataatagagcaccacagtgc

SEQ ID NO: 231492 - DNA, 20 bp, Artificial Sequence
  Description of Artificial Sequence: Synthetic oligonucleotide
  Target: LAMA2; (-) strand; PAM type: YTN; PAM sequence: TTC
tcataatagagcaccacagt

SEQ ID NO: 231493 - DNA, 20 bp, Artificial Sequence
  Description of Artificial Sequence: Synthetic oligonucleotide
  Target: LAMA2; (-) strand; PAM type: YTN; PAM sequence: TTT
ctcataatagagcaccacag

SEQ ID NO: 231494 - DNA, 20 bp, Artificial Sequence
  Description of Artificial Sequence: Synthetic oligonucleotide
  Target: LAMA2; (-) strand; PAM type: YTN; PAM sequence: CTT
tctcataatagagcaccaca

SEQ ID NO: 231495 - DNA, 20 bp, Artificial Sequence
  Description of Artificial Sequence: Synthetic oligonucleotide
  Target: LAMA2; (-) strand; PAM type: YTN; PAM sequence: CTA
actttctcataatagagcac

SEQ ID NO: 231496 - DNA, 20 bp, Artificial Sequence
  Description of Artificial Sequence: Synthetic oligonucleotide
  Target: LAMA2; (-) strand; PAM type: YTN; PAM sequence: TTC
ctaactttctcataatagag

SEQ ID NO: 231497 - DNA, 20 bp, Artificial Sequence
  Description of Artificial Sequence: Synthetic oligonucleotide
  Target: LAMA2; (-) strand; PAM type: YTN; PAM sequence: CTT
cctaactttctcataataga

SEQ ID NO: 231498 - DNA, 20 bp, Artificial Sequence
  Description of Artificial Sequence: Synthetic oligonucleotide
  Target: LAMA2; (-) strand; PAM type: YTN; PAM sequence: TTA
atccttcctaactttctcat

SEQ ID NO: 231499 - DNA, 20 bp, Artificial Sequence
  Description of Artificial Sequence: Synthetic oligonucleotide
  Target: LAMA2; (-) strand; PAM type: YTN; PAM sequence: TTT
aatccttcctaactttctca

SEQ ID NO: 231500 - DNA, 20 bp, Artificial Sequence
  Description of Artificial Sequence: Synthetic oligonucleotide
  Target: LAMA2; (-) strand; PAM type: YTN; PAM sequence: CTT
taatccttcctaactttctc

SEQ ID NO: 231501 - DNA, 20 bp, Artificial Sequence
  Description of Artificial Sequence: Synthetic oligonucleotide
  Target: LAMA2; (-) strand; PAM type: YTN; PAM sequence: TTC
agtgccaactttaatccttc

SEQ ID NO: 231502 - DNA, 20 bp, Artificial Sequence
  Description of Artificial Sequence: Synthetic oligonucleotide
  Target: LAMA2; (-) strand; PAM type: YTN; PAM sequence: CTT
cagtgccaactttaatcctt

SEQ ID NO: 231503 - DNA, 20 bp, Artificial Sequence
  Description of Artificial Sequence: Synthetic oligonucleotide
  Target: LAMA2; (-) strand; PAM type: YTN; PAM sequence: CTC
aatccccttcagtgccaact

SEQ ID NO: 231504 - DNA, 20 bp, Artificial Sequence
  Description of Artificial Sequence: Synthetic oligonucleotide
  Target: LAMA2; (-) strand; PAM type: YTN; PAM sequence: TTC
tcaatccccttcagtgccaa

SEQ ID NO: 231505 - DNA, 20 bp, Artificial Sequence
  Description of Artificial Sequence: Synthetic oligonucleotide
  Target: LAMA2; (-) strand; PAM type: YTN; PAM sequence: CTT
ctcaatccccttcagtgcca

SEQ ID NO: 231506 - DNA, 20 bp, Artificial Sequence
  Description of Artificial Sequence: Synthetic oligonucleotide
  Target: LAMA2; (-) strand; PAM type: YTN; PAM sequence: CTC
cttctcaatccccttcagtg

SEQ ID NO: 231507 - DNA, 20 bp, Artificial Sequence
  Description of Artificial Sequence: Synthetic oligonucleotide
  Target: LAMA2; (-) strand; PAM type: YTN; PAM sequence: CTA
ctccttctcaatccccttca

SEQ ID NO: 231508 - DNA, 20 bp, Artificial Sequence
  Description of Artificial Sequence: Synthetic oligonucleotide
  Target: LAMA2; (-) strand; PAM type: YTN; PAM sequence: TTC
agctactccttctcaatccc

SEQ ID NO: 231509 - DNA, 20 bp, Artificial Sequence
  Description of Artificial Sequence: Synthetic oligonucleotide
  Target: LAMA2; (-) strand; PAM type: YTN; PAM sequence: CTT
cagctactccttctcaatcc

SEQ ID NO: 231510 - DNA, 20 bp, Artificial Sequence
  Description of Artificial Sequence: Synthetic oligonucleotide
  Target: LAMA2; (-) strand; PAM type: YTN; PAM sequence: CTA
ccgcttcagctactccttct

SEQ ID NO: 231511 - DNA, 20 bp, Artificial Sequence
  Description of Artificial Sequence: Synthetic oligonucleotide
  Target: LAMA2; (-) strand; PAM type: YTN; PAM sequence: TTC
taccgcttcagctactcctt

SEQ ID NO: 231512 - DNA, 20 bp, Artificial Sequence
  Description of Artificial Sequence: Synthetic oligonucleotide
  Target: LAMA2; (-) strand; PAM type: YTN; PAM sequence: CTT
ctaccgcttcagctactcct

SEQ ID NO: 231513 - DNA, 20 bp, Artificial Sequence
  Description of Artificial Sequence: Synthetic oligonucleotide
  Target: LAMA2; (-) strand; PAM type: YTN; PAM sequence: TTC
cttctaccgcttcagctact

SEQ ID NO: 231514 - DNA, 20 bp, Artificial Sequence
  Description of Artificial Sequence: Synthetic oligonucleotide
  Target: LAMA2; (-) strand; PAM type: YTN; PAM sequence: TTT
ccttctaccgcttcagctac

SEQ ID NO: 231515 - DNA, 20 bp, Artificial Sequence
  Description of Artificial Sequence: Synthetic oligonucleotide
  Target: LAMA2; (-) strand; PAM type: YTN; PAM sequence: TTT
tccttctaccgcttcagcta

SEQ ID NO: 231516 - DNA, 20 bp, Artificial Sequence
  Description of Artificial Sequence: Synthetic oligonucleotide
  Target: LAMA2; (-) strand; PAM type: YTN; PAM sequence: TTG
ttttccttctaccgcttcag

SEQ ID NO: 231517 - DNA, 20 bp, Artificial Sequence
  Description of Artificial Sequence: Synthetic oligonucleotide
  Target: LAMA2; (-) strand; PAM type: YTN; PAM sequence: CTT
gttttccttctaccgcttca

SEQ ID NO: 231518 - DNA, 20 bp, Artificial Sequence
  Description of Artificial Sequence: Synthetic oligonucleotide
  Target: LAMA2; (-) strand; PAM type: YTN; PAM sequence: TTC
ttgttttccttctaccgctt

SEQ ID NO: 231519 - DNA, 20 bp, Artificial Sequence
  Description of Artificial Sequence: Synthetic oligonucleotide
  Target: LAMA2; (-) strand; PAM type: YTN; PAM sequence: CTG
ttcttgttttccttctaccg

SEQ ID NO: 231520 - DNA, 20 bp, Artificial Sequence
  Description of Artificial Sequence: Synthetic oligonucleotide
  Target: LAMA2; (-) strand; PAM type: YTN; PAM sequence: TTC
caggacacactgttcttgtt

SEQ ID NO: 231521 - DNA, 20 bp, Artificial Sequence
  Description of Artificial Sequence: Synthetic oligonucleotide
  Target: LAMA2; (-) strand; PAM type: YTN; PAM sequence: CTT
ccaggacacactgttcttgt

SEQ ID NO: 231522 - DNA, 20 bp, Artificial Sequence
  Description of Artificial Sequence: Synthetic oligonucleotide
  Target: LAMA2; (-) strand; PAM type: YTN; PAM sequence: CTG
acttccaggacacactgttc

SEQ ID NO: 231523 - DNA, 20 bp, Artificial Sequence
  Description of Artificial Sequence: Synthetic oligonucleotide
  Target: LAMA2; (-) strand; PAM type: YTN; PAM sequence: CTC
cactgacttccaggacacac

SEQ ID NO: 231524 - DNA, 20 bp, Artificial Sequence
  Description of Artificial Sequence: Synthetic oligonucleotide
  Target: LAMA2; (-) strand; PAM type: YTN; PAM sequence: TTA
ctccactgacttccaggaca

SEQ ID NO: 231525 - DNA, 20 bp, Artificial Sequence
  Description of Artificial Sequence: Synthetic oligonucleotide
  Target: LAMA2; (-) strand; PAM type: YTN; PAM sequence: TTG
agacaagtgattactccact

SEQ ID NO: 231526 - DNA, 20 bp, Artificial Sequence
  Description of Artificial Sequence: Synthetic oligonucleotide
  Target: LAMA2; (-) strand; PAM type: YTN; PAM sequence: TTT
gagacaagtgattactccac

SEQ ID NO: 231527 - DNA, 20 bp, Artificial Sequence
  Description of Artificial Sequence: Synthetic oligonucleotide
  Target: LAMA2; (-) strand; PAM type: YTN; PAM sequence: TTA
gcagcatttgagacaagtga

SEQ ID NO: 231528 - DNA, 20 bp, Artificial Sequence
  Description of Artificial Sequence: Synthetic oligonucleotide
  Target: LAMA2; (-) strand; PAM type: YTN; PAM sequence: CTA
ttagcagcatttgagacaag

SEQ ID NO: 231529 - DNA, 20 bp, Artificial Sequence
  Description of Artificial Sequence: Synthetic oligonucleotide
  Target: LAMA2; (-) strand; PAM type: YTN; PAM sequence: TTG
acctattagcagcatttgag

SEQ ID NO: 231530 - DNA, 20 bp, Artificial Sequence
  Description of Artificial Sequence: Synthetic oligonucleotide
  Target: LAMA2; (-) strand; PAM type: YTN; PAM sequence: TTT
gacctattagcagcatttga

SEQ ID NO: 231531 - DNA, 20 bp, Artificial Sequence
  Description of Artificial Sequence: Synthetic oligonucleotide
  Target: LAMA2; (-) strand; PAM type: YTN; PAM sequence: CTC
accatatttgacctattagc

SEQ ID NO: 231532 - DNA, 20 bp, Artificial Sequence
  Description of Artificial Sequence: Synthetic oligonucleotide
  Target: LAMA2; (-) strand; PAM type: YTN; PAM sequence: TTC
tcaccatatttgacctatta

SEQ ID NO: 231533 - DNA, 20 bp, Artificial Sequence
  Description of Artificial Sequence: Synthetic oligonucleotide
  Target: LAMA2; (-) strand; PAM type: YTN; PAM sequence: CTC
agttctcaccatatttgacc

SEQ ID NO: 231534 - DNA, 20 bp, Artificial Sequence
  Description of Artificial Sequence: Synthetic oligonucleotide
  Target: LAMA2; (-) strand; PAM type: YTN; PAM sequence: TTC
tcagttctcaccatatttga

SEQ ID NO: 231535 - DNA, 20 bp, Artificial Sequence
  Description of Artificial Sequence: Synthetic oligonucleotide
  Target: LAMA2; (-) strand; PAM type: YTN; PAM sequence: CTA
aatgaaatgtccagttctca

SEQ ID NO: 231536 - DNA, 20 bp, Artificial Sequence
  Description of Artificial Sequence: Synthetic oligonucleotide
  Target: LAMA2; (-) strand; PAM type: YTN; PAM sequence: TTA
ctaaatgaaatgtccagttc

SEQ ID NO: 231537 - DNA, 20 bp, Artificial Sequence
  Description of Artificial Sequence: Synthetic oligonucleotide
  Target: LAMA2; (-) strand; PAM type: YTN; PAM sequence: TTC
acattactaaatgaaatgtc

SEQ ID NO: 231538 - DNA, 20 bp, Artificial Sequence
  Description of Artificial Sequence: Synthetic oligonucleotide
  Target: LAMA2; (-) strand; PAM type: YTN; PAM sequence: CTT
cacattactaaatgaaatgt

SEQ ID NO: 231539 - DNA, 20 bp, Artificial Sequence
  Description of Artificial Sequence: Synthetic oligonucleotide
  Target: LAMA2; (-) strand; PAM type: YTN; PAM sequence: TTG
ggaaagtcaccaacgtcctt

SEQ ID NO: 231540 - DNA, 20 bp, Artificial Sequence
  Description of Artificial Sequence: Synthetic oligonucleotide
  Target: LAMA2; (-) strand; PAM type: YTN; PAM sequence: CTT
gggaaagtcaccaacgtcct

SEQ ID NO: 231541 - DNA, 20 bp, Artificial Sequence
  Description of Artificial Sequence: Synthetic oligonucleotide
  Target: LAMA2; (-) strand; PAM type: YTN; PAM sequence: CTC
ttgggaaagtcaccaacgtc

SEQ ID NO: 231542 - DNA, 20 bp, Artificial Sequence
  Description of Artificial Sequence: Synthetic oligonucleotide
  Target: LAMA2; (-) strand; PAM type: YTN; PAM sequence: CTG
ctcttgggaaagtcaccaac

SEQ ID NO: 231543 - DNA, 20 bp, Artificial Sequence
  Description of Artificial Sequence: Synthetic oligonucleotide
  Target: LAMA2; (-) strand; PAM type: YTN; PAM sequence: CTG
aaactgctcttgggaaagtc

SEQ ID NO: 231544 - DNA, 20 bp, Artificial Sequence
  Description of Artificial Sequence: Synthetic oligonucleotide
  Target: LAMA2; (-) strand; PAM type: YTN; PAM sequence: TTC
cactgaaactgctcttggga

SEQ ID NO: 231545 - DNA, 20 bp, Artificial Sequence
  Description of Artificial Sequence: Synthetic oligonucleotide
  Target: LAMA2; (-) strand; PAM type: YTN; PAM sequence: CTC
cattccactgaaactgctct

SEQ ID NO: 231546 - DNA, 20 bp, Artificial Sequence
  Description of Artificial Sequence: Synthetic oligonucleotide
  Target: LAMA2; (-) strand; PAM type: YTN; PAM sequence: TTC
ctccattccactgaaactgc

SEQ ID NO: 231547 - DNA, 20 bp, Artificial Sequence
  Description of Artificial Sequence: Synthetic oligonucleotide
  Target: LAMA2; (-) strand; PAM type: YTN; PAM sequence: CTT
cctccattccactgaaactg

SEQ ID NO: 231548 - DNA, 20 bp, Artificial Sequence
  Description of Artificial Sequence: Synthetic oligonucleotide
  Target: LAMA2; (-) strand; PAM type: YTN; PAM sequence: TTG
gtcttcctccattccactga

SEQ ID NO: 231549 - DNA, 20 bp, Artificial Sequence
  Description of Artificial Sequence: Synthetic oligonucleotide
  Target: LAMA2; (-) strand; PAM type: YTN; PAM sequence: TTC
cattggtcttcctccattcc

SEQ ID NO: 231550 - DNA, 20 bp, Artificial Sequence
  Description of Artificial Sequence: Synthetic oligonucleotide
  Target: LAMA2; (-) strand; PAM type: YTN; PAM sequence: TTA
ttccattggtcttcctccat

SEQ ID NO: 231551 - DNA, 20 bp, Artificial Sequence
  Description of Artificial Sequence: Synthetic oligonucleotide
  Target: LAMA2; (-) strand; PAM type: YTN; PAM sequence: CTA
ttattccattggtcttcctc

SEQ ID NO: 231552 - DNA, 20 bp, Artificial Sequence
  Description of Artificial Sequence: Synthetic oligonucleotide
  Target: LAMA2; (-) strand; PAM type: YTN; PAM sequence: CTC
ctattattccattggtcttc

SEQ ID NO: 231553 - DNA, 20 bp, Artificial Sequence
  Description of Artificial Sequence: Synthetic oligonucleotide
  Target: LAMA2; (-) strand; PAM type: YTN; PAM sequence: CTC
cacaatgctcctattattcc

SEQ ID NO: 231554 - DNA, 20 bp, Artificial Sequence
  Description of Artificial Sequence: Synthetic oligonucleotide
  Target: LAMA2; (-) strand; PAM type: YTN; PAM sequence: TTC
ctccacaatgctcctattat

SEQ ID NO: 231555 - DNA, 20 bp, Artificial Sequence
  Description of Artificial Sequence: Synthetic oligonucleotide
  Target: LAMA2; (-) strand; PAM type: YTN; PAM sequence: TTA
ttcctccacaatgctcctat

SEQ ID NO: 231556 - DNA, 20 bp, Artificial Sequence
  Description of Artificial Sequence: Synthetic oligonucleotide
  Target: LAMA2; (-) strand; PAM type: YTN; PAM sequence: TTT
attcctccacaatgctccta

SEQ ID NO: 231557 - DNA, 20 bp, Artificial Sequence
  Description of Artificial Sequence: Synthetic oligonucleotide
  Target: LAMA2; (-) strand; PAM type: YTN; PAM sequence: TTG
gtttattcctccacaatgct

SEQ ID NO: 231558 - DNA, 20 bp, Artificial Sequence
  Description of Artificial Sequence: Synthetic oligonucleotide
  Target: LAMA2; (-) strand; PAM type: YTN; PAM sequence: TTT
ggtttattcctccacaatgc

SEQ ID NO: 231559 - DNA, 20 bp, Artificial Sequence
  Description of Artificial Sequence: Synthetic oligonucleotide
  Target: LAMA2; (-) strand; PAM type: YTN; PAM sequence: TTT
tggtttattcctccacaatg

SEQ ID NO: 231560 - DNA, 20 bp, Artificial Sequence
  Description of Artificial Sequence: Synthetic oligonucleotide
  Target: LAMA2; (-) strand; PAM type: YTN; PAM sequence: CTG
gatggtaaataggtacattt

SEQ ID NO: 231561 - DNA, 20 bp, Artificial Sequence
  Description of Artificial Sequence: Synthetic oligonucleotide
  Target: LAMA2; (-) strand; PAM type: YTN; PAM sequence: CTC
tggatggtaaataggtacat

SEQ ID NO: 231562 - DNA, 20 bp, Artificial Sequence
  Description of Artificial Sequence: Synthetic oligonucleotide
  Target: LAMA2; (-) strand; PAM type: YTN; PAM sequence: CTG
gctctggatggtaaataggt

SEQ ID NO: 231563 - DNA, 20 bp, Artificial Sequence
  Description of Artificial Sequence: Synthetic oligonucleotide
  Target: LAMA2; (-) strand; PAM type: YTN; PAM sequence: CTG
agtctggctctggatggtaa

SEQ ID NO: 231564 - DNA, 20 bp, Artificial Sequence
  Description of Artificial Sequence: Synthetic oligonucleotide
  Target: LAMA2; (-) strand; PAM type: YTN; PAM sequence: CTC
tgagtctggctctggatggt

SEQ ID NO: 231565 - DNA, 20 bp, Artificial Sequence
  Description of Artificial Sequence: Synthetic oligonucleotide
  Target: LAMA2; (-) strand; PAM type: YTN; PAM sequence: CTA
gcacagagtaaaggctctga

SEQ ID NO: 231566 - DNA, 20 bp, Artificial Sequence
  Description of Artificial Sequence: Synthetic oligonucleotide
  Target: LAMA2; (-) strand; PAM type: YTN; PAM sequence: TTC
tagcacagagtaaaggctct

SEQ ID NO: 231567 - DNA, 20 bp, Artificial Sequence
  Description of Artificial Sequence: Synthetic oligonucleotide
  Target: LAMA2; (-) strand; PAM type: YTN; PAM sequence: TTT
ctagcacagagtaaaggctc

SEQ ID NO: 231568 - DNA, 20 bp, Artificial Sequence
  Description of Artificial Sequence: Synthetic oligonucleotide
  Target: LAMA2; (-) strand; PAM type: YTN; PAM sequence: TTG
tgtttctagcacagagtaaa

SEQ ID NO: 231569 - DNA, 20 bp, Artificial Sequence
  Description of Artificial Sequence: Synthetic oligonucleotide
  Target: LAMA2; (-) strand; PAM type: YTN; PAM sequence: TTG
gtcattgtgtttctagcaca

SEQ ID NO: 231570 - DNA, 20 bp, Artificial Sequence
  Description of Artificial Sequence: Synthetic oligonucleotide
  Target: LAMA2; (-) strand; PAM type: YTN; PAM sequence: CTC
aaggaaagggaacaatgcaa

SEQ ID NO: 231571 - DNA, 20 bp, Artificial Sequence
  Description of Artificial Sequence: Synthetic oligonucleotide
  Target: LAMA2; (-) strand; PAM type: YTN; PAM sequence: CTG
tagaaagctcaaggaaaggg

SEQ ID NO: 231572 - DNA, 20 bp, Artificial Sequence
  Description of Artificial Sequence: Synthetic oligonucleotide
  Target: LAMA2; (-) strand; PAM type: YTN; PAM sequence: TTG
aagaagcgaggtgagctgta

SEQ ID NO: 231573 - DNA, 20 bp, Artificial Sequence
  Description of Artificial Sequence: Synthetic oligonucleotide
  Target: LAMA2; (-) strand; PAM type: YTN; PAM sequence: TTT
gaagaagcgaggtgagctgt

SEQ ID NO: 231574 - DNA, 20 bp, Artificial Sequence
  Description of Artificial Sequence: Synthetic oligonucleotide
  Target: LAMA2; (-) strand; PAM type: YTN; PAM sequence: TTG
tacatgtttgaagaagcgag

SEQ ID NO: 231575 - DNA, 20 bp, Artificial Sequence
  Description of Artificial Sequence: Synthetic oligonucleotide
  Target: LAMA2; (-) strand; PAM type: YTN; PAM sequence: CTG
attgtacatgtttgaagaag

SEQ ID NO: 231576 - DNA, 20 bp, Artificial Sequence
  Description of Artificial Sequence: Synthetic oligonucleotide
  Target: LAMA2; (-) strand; PAM type: YTN; PAM sequence: TTC
agaggtctgattgtacatgt

SEQ ID NO: 231577 - DNA, 20 bp, Artificial Sequence
  Description of Artificial Sequence: Synthetic oligonucleotide
  Target: LAMA2; (-) strand; PAM type: YTN; PAM sequence: TTG
aatccatggatgtggaatcc

SEQ ID NO: 231578 - DNA, 20 bp, Artificial Sequence
  Description of Artificial Sequence: Synthetic oligonucleotide
  Target: LAMA2; (-) strand; PAM type: YTN; PAM sequence: CTG
cagtcagttgaatccatgga

SEQ ID NO: 231579 - DNA, 20 bp, Artificial Sequence
  Description of Artificial Sequence: Synthetic oligonucleotide
  Target: LAMA2; (-) strand; PAM type: YTN; PAM sequence: TTC
tgcagtcagttgaatccatg

SEQ ID NO: 231580 - DNA, 20 bp, Artificial Sequence
  Description of Artificial Sequence: Synthetic oligonucleotide
  Target: LAMA2; (-) strand; PAM type: YTN; PAM sequence: CTT
ctgcagtcagttgaatccat

SEQ ID NO: 231581 - DNA, 20 bp, Artificial Sequence
  Description of Artificial Sequence: Synthetic oligonucleotide
  Target: LAMA2; (-) strand; PAM type: YTN; PAM sequence: TTC
ttctgcagtcagttgaatcc

SEQ ID NO: 231582 - DNA, 20 bp, Artificial Sequence
  Description of Artificial Sequence: Synthetic oligonucleotide
  Target: LAMA2; (-) strand; PAM type: YTN; PAM sequence: TTT
cttctgcagtcagttgaatc

SEQ ID NO: 231583 - DNA, 20 bp, Artificial Sequence
  Description of Artificial Sequence: Synthetic oligonucleotide
  Target: LAMA2; (-) strand; PAM type: YTN; PAM sequence: TTT
tcttctgcagtcagttgaat

SEQ ID NO: 231584 - DNA, 20 bp, Artificial Sequence
  Description of Artificial Sequence: Synthetic oligonucleotide
  Target: LAMA2; (-) strand; PAM type: YTN; PAM sequence: TTT
ttcttctgcagtcagttgaa

SEQ ID NO: 231585 - DNA, 20 bp, Artificial Sequence
  Description of Artificial Sequence: Synthetic oligonucleotide
  Target: LAMA2; (-) strand; PAM type: YTN; PAM sequence: CTA
acatttttcttctgcagtca

SEQ ID NO: 231586 - DNA, 20 bp, Artificial Sequence
  Description of Artificial Sequence: Synthetic oligonucleotide
  Target: LAMA2; (-) strand; PAM type: YTN; PAM sequence: TTC
taacatttttcttctgcagt

SEQ ID NO: 231587 - DNA, 20 bp, Artificial Sequence
  Description of Artificial Sequence: Synthetic oligonucleotide
  Target: LAMA2; (-) strand; PAM type: YTN; PAM sequence: TTT
ctaacatttttcttctgcag

SEQ ID NO: 231588 - DNA, 20 bp, Artificial Sequence
  Description of Artificial Sequence: Synthetic oligonucleotide
  Target: LAMA2; (-) strand; PAM type: YTN; PAM sequence: TTT
tctaacatttttcttctgca

SEQ ID NO: 231589 - DNA, 20 bp, Artificial Sequence
  Description of Artificial Sequence: Synthetic oligonucleotide
  Target: LAMA2; (-) strand; PAM type: YTN; PAM sequence: TTT
ttctaacatttttcttctgc

SEQ ID NO: 231590 - DNA, 20 bp, Artificial Sequence
  Description of Artificial Sequence: Synthetic oligonucleotide
  Target: LAMA2; (-) strand; PAM type: YTN; PAM sequence: TTT
tttctaacatttttcttctg

SEQ ID NO: 231591 - DNA, 20 bp, Artificial Sequence
  Description of Artificial Sequence: Synthetic oligonucleotide
  Target: LAMA2; (-) strand; PAM type: YTN; PAM sequence: TTT
ttttctaacatttttcttct

SEQ ID NO: 231592 - DNA, 20 bp, Artificial Sequence
  Description of Artificial Sequence: Synthetic oligonucleotide
  Target: LAMA2; (-) strand; PAM type: YTN; PAM sequence: TTC
ggtacagatgcagatttttt

SEQ ID NO: 231593 - DNA, 20 bp, Artificial Sequence
  Description of Artificial Sequence: Synthetic oligonucleotide
  Target: LAMA2; (-) strand; PAM type: YTN; PAM sequence: CTG
cacatgttcggtacagatgc

SEQ ID NO: 231594 - DNA, 20 bp, Artificial Sequence
  Description of Artificial Sequence: Synthetic oligonucleotide
  Target: LAMA2; (-) strand; PAM type: YTN; PAM sequence: TTA
gggaataatgacaagaaaaa

SEQ ID NO: 231595 - DNA, 20 bp, Artificial Sequence
  Description of Artificial Sequence: Synthetic oligonucleotide
  Target: LAMA2; (-) strand; PAM type: YTN; PAM sequence: TTT
agggaataatgacaagaaaa

SEQ ID NO: 231596 - DNA, 20 bp, Artificial Sequence
  Description of Artificial Sequence: Synthetic oligonucleotide
  Target: LAMA2; (-) strand; PAM type: YTN; PAM sequence: TTA
tttagggaataatgacaaga

SEQ ID NO: 231597 - DNA, 20 bp, Artificial Sequence
  Description of Artificial Sequence: Synthetic oligonucleotide
  Target: LAMA2; (-) strand; PAM type: YTN; PAM sequence: TTA
taccatattatttagggaat

SEQ ID NO: 231598 - DNA, 20 bp, Artificial Sequence
  Description of Artificial Sequence: Synthetic oligonucleotide
  Target: LAMA2; (-) strand; PAM type: YTN; PAM sequence: TTG
ttataccatattatttaggg

SEQ ID NO: 231599 - DNA, 20 bp, Artificial Sequence
  Description of Artificial Sequence: Synthetic oligonucleotide
  Target: LAMA2; (-) strand; PAM type: YTN; PAM sequence: CTA
tgtaaatagttgttatacca

SEQ ID NO: 231600 - DNA, 20 bp, Artificial Sequence
  Description of Artificial Sequence: Synthetic oligonucleotide
  Target: LAMA2; (-) strand; PAM type: YTN; PAM sequence: TTA
aatacccaatacaatgtaaa

SEQ ID NO: 231601 - DNA, 20 bp, Artificial Sequence
  Description of Artificial Sequence: Synthetic oligonucleotide
  Target: LAMA2; (-) strand; PAM type: YTN; PAM sequence: TTT
aaatacccaatacaatgtaa

SEQ ID NO: 231602 - DNA, 20 bp, Artificial Sequence
  Description of Artificial Sequence: Synthetic oligonucleotide
  Target: LAMA2; (-) strand; PAM type: YTN; PAM sequence: CTT
taaatacccaatacaatgta

SEQ ID NO: 231603 - DNA, 20 bp, Artificial Sequence
  Description of Artificial Sequence: Synthetic oligonucleotide
  Target: LAMA2; (-) strand; PAM type: YTN; PAM sequence: TTA
ctttaaatacccaatacaat

SEQ ID NO: 231604 - DNA, 20 bp, Artificial Sequence
  Description of Artificial Sequence: Synthetic oligonucleotide
  Target: LAMA2; (-) strand; PAM type: YTN; PAM sequence: CTA
cattactttaaatacccaat

SEQ ID NO: 231605 - DNA, 20 bp, Artificial Sequence
  Description of Artificial Sequence: Synthetic oligonucleotide
  Target: LAMA2; (-) strand; PAM type: YTN; PAM sequence: TTA
aatcacatctacattacttt

SEQ ID NO: 231606 - DNA, 20 bp, Artificial Sequence
  Description of Artificial Sequence: Synthetic oligonucleotide
  Target: LAMA2; (-) strand; PAM type: YTN; PAM sequence: TTT
aaatcacatctacattactt

SEQ ID NO: 231607 - DNA, 20 bp, Artificial Sequence
  Description of Artificial Sequence: Synthetic oligonucleotide
  Target: LAMA2; (-) strand; PAM type: YTN; PAM sequence: TTA
tttaaatcacatctacatta

SEQ ID NO: 231608 - DNA, 20 bp, Artificial Sequence
  Description of Artificial Sequence: Synthetic oligonucleotide
  Target: LAMA2; (-) strand; PAM type: YTN; PAM sequence: TTC
aaaattatttaaatcacatc

SEQ ID NO: 231609 - DNA, 20 bp, Artificial Sequence
  Description of Artificial Sequence: Synthetic oligonucleotide
  Target: LAMA2; (-) strand; PAM type: YTN; PAM sequence: TTT
caaaattatttaaatcacat

SEQ ID NO: 231610 - DNA, 20 bp, Artificial Sequence
  Description of Artificial Sequence: Synthetic oligonucleotide
  Target: LAMA2; (-) strand; PAM type: YTN; PAM sequence: CTA
tacacatatttcaaaattat

SEQ ID NO: 231611 - DNA, 20 bp, Artificial Sequence
  Description of Artificial Sequence: Synthetic oligonucleotide
  Target: LAMA2; (-) strand; PAM type: YTN; PAM sequence: TTG
aaatgaaatggcatagtatg

SEQ ID NO: 231612 - DNA, 20 bp, Artificial Sequence
  Description of Artificial Sequence: Synthetic oligonucleotide
  Target: LAMA2; (-) strand; PAM type: YTN; PAM sequence: CTT
gaaatgaaatggcatagtat

SEQ ID NO: 231613 - DNA, 20 bp, Artificial Sequence
  Description of Artificial Sequence: Synthetic oligonucleotide
  Target: LAMA2; (-) strand; PAM type: YTN; PAM sequence: CTC
aagtccttgaaatgaaatgg

SEQ ID NO: 231614 - DNA, 20 bp, Artificial Sequence
  Description of Artificial Sequence: Synthetic oligonucleotide
  Target: LAMA2; (-) strand; PAM type: YTN; PAM sequence: CTG
aggatgctcaagtccttgaa

SEQ ID NO: 231615 - DNA, 20 bp, Artificial Sequence
  Description of Artificial Sequence: Synthetic oligonucleotide
  Target: LAMA2; (-) strand; PAM type: YTN; PAM sequence: CTG
tggatatcaaaatctgagga

SEQ ID NO: 231616 - DNA, 20 bp, Artificial Sequence
  Description of Artificial Sequence: Synthetic oligonucleotide
  Target: LAMA2; (-) strand; PAM type: YTN; PAM sequence: CTC
ctgtggatatcaaaatctga

SEQ ID NO: 231617 - DNA, 20 bp, Artificial Sequence
  Description of Artificial Sequence: Synthetic oligonucleotide
  Target: LAMA2; (-) strand; PAM type: YTN; PAM sequence: TTC
caggacctcctgtggatatc

SEQ ID NO: 231618 - DNA, 20 bp, Artificial Sequence
  Description of Artificial Sequence: Synthetic oligonucleotide
  Target: LAMA2; (-) strand; PAM type: YTN; PAM sequence: TTG
gttccaggacctcctgtgga

SEQ ID NO: 231619 - DNA, 20 bp, Artificial Sequence
  Description of Artificial Sequence: Synthetic oligonucleotide
  Target: LAMA2; (-) strand; PAM type: YTN; PAM sequence: TTG
tggggattggttccaggacc

SEQ ID NO: 231620 - DNA, 20 bp, Artificial Sequence
  Description of Artificial Sequence: Synthetic oligonucleotide
  Target: LAMA2; (-) strand; PAM type: YTN; PAM sequence: TTT
gtggggattggttccaggac

SEQ ID NO: 231621 - DNA, 20 bp, Artificial Sequence
  Description of Artificial Sequence: Synthetic oligonucleotide
  Target: LAMA2; (-) strand; PAM type: YTN; PAM sequence: TTC
aggggatttgtggggattgg

SEQ ID NO: 231622 - DNA, 20 bp, Artificial Sequence
  Description of Artificial Sequence: Synthetic oligonucleotide
  Target: LAMA2; (-) strand; PAM type: YTN; PAM sequence: TTT
caggggatttgtggggattg

SEQ ID NO: 231623 - DNA, 20 bp, Artificial Sequence
  Description of Artificial Sequence: Synthetic oligonucleotide
  Target: LAMA2; (-) strand; PAM type: YTN; PAM sequence: TTA
tagtttcaggggatttgtgg

SEQ ID NO: 231624 - DNA, 20 bp, Artificial Sequence
  Description of Artificial Sequence: Synthetic oligonucleotide
  Target: LAMA2; (-) strand; PAM type: YTN; PAM sequence: CTC
atcagttatagtttcagggg

SEQ ID NO: 231625 - DNA, 20 bp, Artificial Sequence
  Description of Artificial Sequence: Synthetic oligonucleotide
  Target: LAMA2; (-) strand; PAM type: YTN; PAM sequence: CTG
tgtaaaaaaagaagtaccat

SEQ ID NO: 231626 - DNA, 20 bp, Artificial Sequence
  Description of Artificial Sequence: Synthetic oligonucleotide
  Target: LAMA2; (-) strand; PAM type: YTN; PAM sequence: TTG
actgtgtaaaaaaagaagta

SEQ ID NO: 231627 - DNA, 20 bp, Artificial Sequence
  Description of Artificial Sequence: Synthetic oligonucleotide
  Target: LAMA2; (-) strand; PAM type: YTN; PAM sequence: TTT
gactgtgtaaaaaaagaagt

SEQ ID NO: 231628 - DNA, 20 bp, Artificial Sequence
  Description of Artificial Sequence: Synthetic oligonucleotide
  Target: LAMA2; (-) strand; PAM type: YTN; PAM sequence: TTT
tgactgtgtaaaaaaagaag

SEQ ID NO: 231629 - DNA, 20 bp, Artificial Sequence
  Description of Artificial Sequence: Synthetic oligonucleotide
  Target: LAMA2; (-) strand; PAM type: YTN; PAM sequence: TTA
ttttgactgtgtaaaaaaag

SEQ ID NO: 231630 - DNA, 20 bp, Artificial Sequence
  Description of Artificial Sequence: Synthetic oligonucleotide
  Target: LAMA2; (-) strand; PAM type: YTN; PAM sequence: TTT
attttgactgtgtaaaaaaa

SEQ ID NO: 231631 - DNA, 20 bp, Artificial Sequence
  Description of Artificial Sequence: Synthetic oligonucleotide
  Target: LAMA2; (-) strand; PAM type: YTN; PAM sequence: TTT
tattttgactgtgtaaaaaa

SEQ ID NO: 231632 - DNA, 20 bp, Artificial Sequence
  Description of Artificial Sequence: Synthetic oligonucleotide
  Target: LAMA2; (-) strand; PAM type: YTN; PAM sequence: CTT
ttattttgactgtgtaaaaa

SEQ ID NO: 231633 - DNA, 20 bp, Artificial Sequence
  Description of Artificial Sequence: Synthetic oligonucleotide
  Target: LAMA2; (-) strand; PAM type: YTN; PAM sequence: CTC
ttttattttgactgtgtaaa

SEQ ID NO: 231634 - DNA, 20 bp, Artificial Sequence
  Description of Artificial Sequence: Synthetic oligonucleotide
  Target: LAMA2; (-) strand; PAM type: YTN; PAM sequence: CTA
atctcttttattttgactgt

SEQ ID NO: 231635 - DNA, 20 bp, Artificial Sequence
  Description of Artificial Sequence: Synthetic oligonucleotide
  Target: LAMA2; (-) strand; PAM type: YTN; PAM sequence: TTG
gggagaaataacaaaaacaa

SEQ ID NO: 231636 - DNA, 20 bp, Artificial Sequence
  Description of Artificial Sequence: Synthetic oligonucleotide
  Target: LAMA2; (-) strand; PAM type: YTN; PAM sequence: TTT
ggggagaaataacaaaaaca

SEQ ID NO: 231637 - DNA, 20 bp, Artificial Sequence
  Description of Artificial Sequence: Synthetic oligonucleotide
  Target: LAMA2; (-) strand; PAM type: YTN; PAM sequence: TTA
tttggggagaaataacaaaa

SEQ ID NO: 231638 - DNA, 20 bp, Artificial Sequence
  Description of Artificial Sequence: Synthetic oligonucleotide
  Target: LAMA2; (-) strand; PAM type: YTN; PAM sequence: CTC
aatatggcattatttgggga

SEQ ID NO: 231639 - DNA, 20 bp, Artificial Sequence
  Description of Artificial Sequence: Synthetic oligonucleotide
  Target: LAMA2; (-) strand; PAM type: YTN; PAM sequence: TTA
aatccagtcatgctcaatat

SEQ ID NO: 231640 - DNA, 20 bp, Artificial Sequence
  Description of Artificial Sequence: Synthetic oligonucleotide
  Target: LAMA2; (-) strand; PAM type: YTN; PAM sequence: CTT
aaatccagtcatgctcaata

SEQ ID NO: 231641 - DNA, 20 bp, Artificial Sequence
  Description of Artificial Sequence: Synthetic oligonucleotide
  Target: LAMA2; (-) strand; PAM type: YTN; PAM sequence: CTC
ttaaatccagtcatgctcaa

SEQ ID NO: 231642 - DNA, 20 bp, Artificial Sequence
  Description of Artificial Sequence: Synthetic oligonucleotide
  Target: LAMA2; (-) strand; PAM type: YTN; PAM sequence: CTG
gggacctcttaaatccagtc

SEQ ID NO: 231643 - DNA, 20 bp, Artificial Sequence
  Description of Artificial Sequence: Synthetic oligonucleotide
  Target: LAMA2; (-) strand; PAM type: YTN; PAM sequence: CTG
agacatctggggacctctta

SEQ ID NO: 231644 - DNA, 20 bp, Artificial Sequence
  Description of Artificial Sequence: Synthetic oligonucleotide
  Target: LAMA2; (-) strand; PAM type: YTN; PAM sequence: TTA
tgtaaatgagtggctgagac

SEQ ID NO: 231645 - DNA, 20 bp, Artificial Sequence
  Description of Artificial Sequence: Synthetic oligonucleotide
  Target: LAMA2; (-) strand; PAM type: YTN; PAM sequence: TTT
atgtaaatgagtggctgaga

SEQ ID NO: 231646 - DNA, 20 bp, Artificial Sequence
  Description of Artificial Sequence: Synthetic oligonucleotide
  Target: LAMA2; (-) strand; PAM type: YTN; PAM sequence: TTT
tatgtaaatgagtggctgag

SEQ ID NO: 231647 - DNA, 20 bp, Artificial Sequence
  Description of Artificial Sequence: Synthetic oligonucleotide
  Target: LAMA2; (-) strand; PAM type: YTN; PAM sequence: TTT
ttatgtaaatgagtggctga

SEQ ID NO: 231648 - DNA, 20 bp, Artificial Sequence
  Description of Artificial Sequence: Synthetic oligonucleotide
  Target: LAMA2; (-) strand; PAM type: YTN; PAM sequence: TTA
aggatgtacagatatggaca

SEQ ID NO: 231649 - DNA, 20 bp, Artificial Sequence
  Description of Artificial Sequence: Synthetic oligonucleotide
  Target: LAMA2; (-) strand; PAM type: YTN; PAM sequence: TTG
agattaaggatgtacagata

SEQ ID NO: 231650 - DNA, 20 bp, Artificial Sequence
  Description of Artificial Sequence: Synthetic oligonucleotide
  Target: LAMA2; (-) strand; PAM type: YTN; PAM sequence: CTT
gagattaaggatgtacagat

SEQ ID NO: 231651 - DNA, 20 bp, Artificial Sequence
  Description of Artificial Sequence: Synthetic oligonucleotide
  Target: LAMA2; (-) strand; PAM type: YTN; PAM sequence: CTG
acaccaggagacagaacagt

SEQ ID NO: 231652 - DNA, 20 bp, Artificial Sequence
  Description of Artificial Sequence: Synthetic oligonucleotide
  Target: LAMA2; (-) strand; PAM type: YTN; PAM sequence: TTG
aaagtaagctgacaccagga

SEQ ID NO: 231653 - DNA, 20 bp, Artificial Sequence
  Description of Artificial Sequence: Synthetic oligonucleotide
  Target: LAMA2; (-) strand; PAM type: YTN; PAM sequence: CTA
caagtgtgccaatgaaacag

SEQ ID NO: 231654 - DNA, 20 bp, Artificial Sequence
  Description of Artificial Sequence: Synthetic oligonucleotide
  Target: LAMA2; (-) strand; PAM type: YTN; PAM sequence: CTC
tacaagtgtgccaatgaaac

SEQ ID NO: 231655 - DNA, 20 bp, Artificial Sequence
  Description of Artificial Sequence: Synthetic oligonucleotide
  Target: LAMA2; (-) strand; PAM type: YTN; PAM sequence: TTA
tcaatctctacaagtgtgcc

SEQ ID NO: 231656 - DNA, 20 bp, Artificial Sequence
  Description of Artificial Sequence: Synthetic oligonucleotide
  Target: LAMA2; (-) strand; PAM type: YTN; PAM sequence: TTG
tattatcaatctctacaagt

SEQ ID NO: 231657 - DNA, 20 bp, Artificial Sequence
  Description of Artificial Sequence: Synthetic oligonucleotide
  Target: LAMA2; (-) strand; PAM type: YTN; PAM sequence: TTT
gtattatcaatctctacaag

SEQ ID NO: 231658 - DNA, 20 bp, Artificial Sequence
  Description of Artificial Sequence: Synthetic oligonucleotide
  Target: LAMA2; (-) strand; PAM type: YTN; PAM sequence: TTT
tgtattatcaatctctacaa

SEQ ID NO: 231659 - DNA, 20 bp, Artificial Sequence
  Description of Artificial Sequence: Synthetic oligonucleotide
  Target: LAMA2; (-) strand; PAM type: YTN; PAM sequence: TTT
ttgtattatcaatctctaca

SEQ ID NO: 231660 - DNA, 20 bp, Artificial Sequence
  Description of Artificial Sequence: Synthetic oligonucleotide
  Target: LAMA2; (-) strand; PAM type: YTN; PAM sequence: CTA
aaacatttttgtattatcaa

SEQ ID NO: 231661 - DNA, 20 bp, Artificial Sequence
  Description of Artificial Sequence: Synthetic oligonucleotide
  Target: LAMA2; (-) strand; PAM type: YTN; PAM sequence: CTC
ctaaaacatttttgtattat

SEQ ID NO: 231662 - DNA, 20 bp, Artificial Sequence
  Description of Artificial Sequence: Synthetic oligonucleotide
  Target: LAMA2; (-) strand; PAM type: YTN; PAM sequence: CTC
tcctaaaacatttttgtatt

SEQ ID NO: 231663 - DNA, 20 bp, Artificial Sequence
  Description of Artificial Sequence: Synthetic oligonucleotide
  Target: LAMA2; (-) strand; PAM type: YTN; PAM sequence: CTC
tctcctaaaacatttttgta

SEQ ID NO: 231664 - DNA, 20 bp, Artificial Sequence
  Description of Artificial Sequence: Synthetic oligonucleotide
  Target: LAMA2; (-) strand; PAM type: YTN; PAM sequence: TTG
atgtgtggtatgctctctcc

SEQ ID NO: 231665 - DNA, 20 bp, Artificial Sequence
  Description of Artificial Sequence: Synthetic oligonucleotide
  Target: LAMA2; (-) strand; PAM type: YTN; PAM sequence: CTT
gatgtgtggtatgctctctc

SEQ ID NO: 231666 - DNA, 20 bp, Artificial Sequence
  Description of Artificial Sequence: Synthetic oligonucleotide
  Target: LAMA2; (-) strand; PAM type: YTN; PAM sequence: TTG
acaacttgatgtgtggtatg

SEQ ID NO: 231667 - DNA, 20 bp, Artificial Sequence
  Description of Artificial Sequence: Synthetic oligonucleotide
  Target: LAMA2; (-) strand; PAM type: YTN; PAM sequence: TTG
aaataagtagcagaagtgga

SEQ ID NO: 231668 - DNA, 20 bp, Artificial Sequence
  Description of Artificial Sequence: Synthetic oligonucleotide
  Target: LAMA2; (-) strand; PAM type: YTN; PAM sequence: TTT
gaaataagtagcagaagtgg

SEQ ID NO: 231669 - DNA, 20 bp, Artificial Sequence
  Description of Artificial Sequence: Synthetic oligonucleotide
  Target: LAMA2; (-) strand; PAM type: YTN; PAM sequence: CTT
tgaaataagtagcagaagtg

SEQ ID NO: 231670 - DNA, 20 bp, Artificial Sequence
  Description of Artificial Sequence: Synthetic oligonucleotide
  Target: LAMA2; (-) strand; PAM type: YTN; PAM sequence: CTG
aaagatcatgaataagtatc

SEQ ID NO: 231671 - DNA, 20 bp, Artificial Sequence
  Description of Artificial Sequence: Synthetic oligonucleotide
  Target: LAMA2; (-) strand; PAM type: YTN; PAM sequence: CTA
ctgaaagatcatgaataagt

SEQ ID NO: 231672 - DNA, 20 bp, Artificial Sequence
  Description of Artificial Sequence: Synthetic oligonucleotide
  Target: LAMA2; (-) strand; PAM type: YTN; PAM sequence: TTG
agtgaatggatggatgggag

SEQ ID NO: 231673 - DNA, 20 bp, Artificial Sequence
  Description of Artificial Sequence: Synthetic oligonucleotide
  Target: LAMA2; (-) strand; PAM type: YTN; PAM sequence: CTT
gagtgaatggatggatggga

SEQ ID NO: 231674 - DNA, 20 bp, Artificial Sequence
  Description of Artificial Sequence: Synthetic oligonucleotide
  Target: LAMA2; (-) strand; PAM type: YTN; PAM sequence: TTC
ttgagtgaatggatggatgg

SEQ ID NO: 231675 - DNA, 20 bp, Artificial Sequence
  Description of Artificial Sequence: Synthetic oligonucleotide
  Target: LAMA2; (-) strand; PAM type: YTN; PAM sequence: TTT
cttgagtgaatggatggatg

SEQ ID NO: 231676 - DNA, 20 bp, Artificial Sequence
  Description of Artificial Sequence: Synthetic oligonucleotide
  Target: LAMA2; (-) strand; PAM type: YTN; PAM sequence: CTA
acaatacaagtttcttgagt

SEQ ID NO: 231677 - DNA, 20 bp, Artificial Sequence
  Description of Artificial Sequence: Synthetic oligonucleotide
  Target: LAMA2; (-) strand; PAM type: YTN; PAM sequence: TTC
cctaacaatacaagtttctt

SEQ ID NO: 231678 - DNA, 20 bp, Artificial Sequence
  Description of Artificial Sequence: Synthetic oligonucleotide
  Target: LAMA2; (-) strand; PAM type: YTN; PAM sequence: CTA
atacattccctaacaataca

SEQ ID NO: 231679 - DNA, 20 bp, Artificial Sequence
  Description of Artificial Sequence: Synthetic oligonucleotide
  Target: LAMA2; (-) strand; PAM type: YTN; PAM sequence: TTC
taatacattccctaacaata

SEQ ID NO: 231680 - DNA, 20 bp, Artificial Sequence
  Description of Artificial Sequence: Synthetic oligonucleotide
  Target: LAMA2; (-) strand; PAM type: YTN; PAM sequence: CTA
taattctaatacattcccta

SEQ ID NO: 231681 - DNA, 20 bp, Artificial Sequence
  Description of Artificial Sequence: Synthetic oligonucleotide
  Target: LAMA2; (-) strand; PAM type: YTN; PAM sequence: TTG
aagagctataattctaatac

SEQ ID NO: 231682 - DNA, 20 bp, Artificial Sequence
  Description of Artificial Sequence: Synthetic oligonucleotide
  Target: LAMA2; (-) strand; PAM type: YTN; PAM sequence: CTT
gaagagctataattctaata

SEQ ID NO: 231683 - DNA, 20 bp, Artificial Sequence
  Description of Artificial Sequence: Synthetic oligonucleotide
  Target: LAMA2; (-) strand; PAM type: YTN; PAM sequence: TTG
gaaagcttgaagagctataa

SEQ ID NO: 231684 - DNA, 20 bp, Artificial Sequence
  Description of Artificial Sequence: Synthetic oligonucleotide
  Target: LAMA2; (-) strand; PAM type: YTN; PAM sequence: TTT
ggaaagcttgaagagctata

SEQ ID NO: 231685 - DNA, 20 bp, Artificial Sequence
  Description of Artificial Sequence: Synthetic oligonucleotide
  Target: LAMA2; (-) strand; PAM type: YTN; PAM sequence: TTT
tggaaagcttgaagagctat

SEQ ID NO: 231686 - DNA, 20 bp, Artificial Sequence
  Description of Artificial Sequence: Synthetic oligonucleotide
  Target: LAMA2; (-) strand; PAM type: YTN; PAM sequence: TTG
ttttggaaagcttgaagagc

SEQ ID NO: 231687 - DNA, 20 bp, Artificial Sequence
  Description of Artificial Sequence: Synthetic oligonucleotide
  Target: LAMA2; (-) strand; PAM type: YTN; PAM sequence: TTT
gttttggaaagcttgaagag

SEQ ID NO: 231688 - DNA, 20 bp, Artificial Sequence
  Description of Artificial Sequence: Synthetic oligonucleotide
  Target: LAMA2; (-) strand; PAM type: YTN; PAM sequence: CTA
catttgttttggaaagcttg

SEQ ID NO: 231689 - DNA, 20 bp, Artificial Sequence
  Description of Artificial Sequence: Synthetic oligonucleotide
  Target: LAMA2; (-) strand; PAM type: YTN; PAM sequence: TTG
ctacatttgttttggaaagc

SEQ ID NO: 231690 - DNA, 20 bp, Artificial Sequence
  Description of Artificial Sequence: Synthetic oligonucleotide
  Target: LAMA2; (-) strand; PAM type: YTN; PAM sequence: TTA
tgttgctacatttgttttgg

SEQ ID NO: 231691 - DNA, 20 bp, Artificial Sequence
  Description of Artificial Sequence: Synthetic oligonucleotide
  Target: LAMA2; (-) strand; PAM type: YTN; PAM sequence: TTT
atgttgctacatttgttttg

SEQ ID NO: 231692 - DNA, 20 bp, Artificial Sequence
  Description of Artificial Sequence: Synthetic oligonucleotide
  Target: LAMA2; (-) strand; PAM type: YTN; PAM sequence: CTA
tttatgttgctacatttgtt

SEQ ID NO: 231693 - DNA, 20 bp, Artificial Sequence
  Description of Artificial Sequence: Synthetic oligonucleotide
  Target: LAMA2; (-) strand; PAM type: YTN; PAM sequence: TTG
tctatttatgttgctacatt

SEQ ID NO: 231694 - DNA, 20 bp, Artificial Sequence
  Description of Artificial Sequence: Synthetic oligonucleotide
  Target: LAMA2; (-) strand; PAM type: YTN; PAM sequence: CTT
gtctatttatgttgctacat

SEQ ID NO: 231695 - DNA, 20 bp, Artificial Sequence
  Description of Artificial Sequence: Synthetic oligonucleotide
  Target: LAMA2; (-) strand; PAM type: YTN; PAM sequence: TTA
tgcttgtctatttatgttgc

SEQ ID NO: 231696 - DNA, 20 bp, Artificial Sequence
  Description of Artificial Sequence: Synthetic oligonucleotide
  Target: LAMA2; (-) strand; PAM type: YTN; PAM sequence: TTA
ttatgcttgtctatttatgt

SEQ ID NO: 231697 - DNA, 20 bp, Artificial Sequence
  Description of Artificial Sequence: Synthetic oligonucleotide
  Target: LAMA2; (-) strand; PAM type: YTN; PAM sequence: TTC
cattattatgcttgtctatt

SEQ ID NO: 231698 - DNA, 20 bp, Artificial Sequence
  Description of Artificial Sequence: Synthetic oligonucleotide
  Target: LAMA2; (-) strand; PAM type: YTN; PAM sequence: TTT
ccattattatgcttgtctat

SEQ ID NO: 231699 - DNA, 20 bp, Artificial Sequence
  Description of Artificial Sequence: Synthetic oligonucleotide
  Target: LAMA2; (-) strand; PAM type: YTN; PAM sequence: TTT
tccattattatgcttgtcta

SEQ ID NO: 231700 - DNA, 20 bp, Artificial Sequence
  Description of Artificial Sequence: Synthetic oligonucleotide
  Target: LAMA2; (-) strand; PAM type: YTN; PAM sequence: CTC
gtatagacgattttccatta

SEQ ID NO: 231701 - DNA, 20 bp, Artificial Sequence
  Description of Artificial Sequence: Synthetic oligonucleotide
  Target: LAMA2; (-) strand; PAM type: YTN; PAM sequence: TTC
tcgtatagacgattttccat

SEQ ID NO: 231702 - DNA, 20 bp, Artificial Sequence
  Description of Artificial Sequence: Synthetic oligonucleotide
  Target: LAMA2; (-) strand; PAM type: YTN; PAM sequence: TTT
ctcgtatagacgattttcca

SEQ ID NO: 231703 - DNA, 20 bp, Artificial Sequence
  Description of Artificial Sequence: Synthetic oligonucleotide
  Target: LAMA2; (-) strand; PAM type: YTN; PAM sequence: TTA
gatttctcgtatagacgatt

SEQ ID NO: 231704 - DNA, 20 bp, Artificial Sequence
  Description of Artificial Sequence: Synthetic oligonucleotide
  Target: LAMA2; (-) strand; PAM type: YTN; PAM sequence: CTA
aaataattagatttctcgta

SEQ ID NO: 231705 - DNA, 20 bp, Artificial Sequence
  Description of Artificial Sequence: Synthetic oligonucleotide
  Target: LAMA2; (-) strand; PAM type: YTN; PAM sequence: TTG
tgcctaaaataattagattt

SEQ ID NO: 231706 - DNA, 20 bp, Artificial Sequence
  Description of Artificial Sequence: Synthetic oligonucleotide
  Target: LAMA2; (-) strand; PAM type: YTN; PAM sequence: TTT
gtgcctaaaataattagatt

SEQ ID NO: 231707 - DNA, 20 bp, Artificial Sequence
  Description of Artificial Sequence: Synthetic oligonucleotide
  Target: LAMA2; (-) strand; PAM type: YTN; PAM sequence: TTA
aaaaatgatttgtgcctaaa

SEQ ID NO: 231708 - DNA, 20 bp, Artificial Sequence
  Description of Artificial Sequence: Synthetic oligonucleotide
  Target: LAMA2; (-) strand; PAM type: YTN; PAM sequence: TTT
aaaaaatgatttgtgcctaa

SEQ ID NO: 231709 - DNA, 20 bp, Artificial Sequence
  Description of Artificial Sequence: Synthetic oligonucleotide
  Target: LAMA2; (-) strand; PAM type: YTN; PAM sequence: TTT
taaaaaatgatttgtgccta

SEQ ID NO: 231710 - DNA, 20 bp, Artificial Sequence
  Description of Artificial Sequence: Synthetic oligonucleotide
  Target: LAMA2; (-) strand; PAM type: YTN; PAM sequence: TTA
gaatacattttaaaaaatga

SEQ ID NO: 231711 - DNA, 20 bp, Artificial Sequence
  Description of Artificial Sequence: Synthetic oligonucleotide
  Target: LAMA2; (-) strand; PAM type: YTN; PAM sequence: TTT
agaatacattttaaaaaatg

SEQ ID NO: 231712 - DNA, 20 bp, Artificial Sequence
  Description of Artificial Sequence: Synthetic oligonucleotide
  Target: LAMA2; (-) strand; PAM type: YTN; PAM sequence: TTT
tagaatacattttaaaaaat

SEQ ID NO: 231713 - DNA, 20 bp, Artificial Sequence
  Description of Artificial Sequence: Synthetic oligonucleotide
  Target: LAMA2; (-) strand; PAM type: YTN; PAM sequence: TTA
ttttagaatacattttaaaa

SEQ ID NO: 231714 - DNA, 20 bp, Artificial Sequence
  Description of Artificial Sequence: Synthetic oligonucleotide
  Target: LAMA2; (-) strand; PAM type: YTN; PAM sequence: TTT
attttagaatacattttaaa

SEQ ID NO: 231715 - DNA, 20 bp, Artificial Sequence
  Description of Artificial Sequence: Synthetic oligonucleotide
  Target: LAMA2; (-) strand; PAM type: YTN; PAM sequence: TTT
tattttagaatacattttaa

SEQ ID NO: 231716 - DNA, 20 bp, Artificial Sequence
  Description of Artificial Sequence: Synthetic oligonucleotide
  Target: LAMA2; (-) strand; PAM type: YTN; PAM sequence: TTT
ttattttagaatacatttta

SEQ ID NO: 231717 - DNA, 20 bp, Artificial Sequence
  Description of Artificial Sequence: Synthetic oligonucleotide
  Target: LAMA2; (-) strand; PAM type: YTN; PAM sequence: CTC
aatggcatttttattttaga

SEQ ID NO: 231718 - DNA, 20 bp, Artificial Sequence
  Description of Artificial Sequence: Synthetic oligonucleotide
  Target: LAMA2; (-) strand; PAM type: YTN; PAM sequence: CTG
tgcctcaatggcatttttat

SEQ ID NO: 231719 - DNA, 20 bp, Artificial Sequence
  Description of Artificial Sequence: Synthetic oligonucleotide
  Target: LAMA2; (-) strand; PAM type: YTN; PAM sequence: CTC
tgtgcctcaatggcattttt

SEQ ID NO: 231720 - DNA, 20 bp, Artificial Sequence
  Description of Artificial Sequence: Synthetic oligonucleotide
  Target: LAMA2; (-) strand; PAM type: YTN; PAM sequence: TTA
gtaagacctctgtgcctcaa

SEQ ID NO: 231721 - DNA, 20 bp, Artificial Sequence
  Description of Artificial Sequence: Synthetic oligonucleotide
  Target: LAMA2; (-) strand; PAM type: YTN; PAM sequence: TTA
cagattagtaagacctctgt

SEQ ID NO: 231722 - DNA, 20 bp, Artificial Sequence
  Description of Artificial Sequence: Synthetic oligonucleotide
  Target: LAMA2; (-) strand; PAM type: YTN; PAM sequence: TTT
acagattagtaagacctctg

SEQ ID NO: 231723 - DNA, 20 bp, Artificial Sequence
  Description of Artificial Sequence: Synthetic oligonucleotide
  Target: LAMA2; (-) strand; PAM type: YTN; PAM sequence: CTT
tacagattagtaagacctct

SEQ ID NO: 231724 - DNA, 20 bp, Artificial Sequence
  Description of Artificial Sequence: Synthetic oligonucleotide
  Target: LAMA2; (-) strand; PAM type: YTN; PAM sequence: TTG
ctttacagattagtaagacc

SEQ ID NO: 231725 - DNA, 20 bp, Artificial Sequence
  Description of Artificial Sequence: Synthetic oligonucleotide
  Target: LAMA2; (-) strand; PAM type: YTN; PAM sequence: TTT
gctttacagattagtaagac

SEQ ID NO: 231726 - DNA, 20 bp, Artificial Sequence
  Description of Artificial Sequence: Synthetic oligonucleotide
  Target: LAMA2; (-) strand; PAM type: YTN; PAM sequence: CTA
tataaatcatgtttgcttta

SEQ ID NO: 231727 - DNA, 20 bp, Artificial Sequence
  Description of Artificial Sequence: Synthetic oligonucleotide
  Target: LAMA2; (-) strand; PAM type: YTN; PAM sequence: CTA
atgtaagcatactatataaa

SEQ ID NO: 231728 - DNA, 20 bp, Artificial Sequence
  Description of Artificial Sequence: Synthetic oligonucleotide
  Target: LAMA2; (-) strand; PAM type: YTN; PAM sequence: TTA
ctaatgtaagcatactatat

SEQ ID NO: 231729 - DNA, 20 bp, Artificial Sequence
  Description of Artificial Sequence: Synthetic oligonucleotide
  Target: LAMA2; (-) strand; PAM type: YTN; PAM sequence: TTT
actaatgtaagcatactata

SEQ ID NO: 231730 - DNA, 20 bp, Artificial Sequence
  Description of Artificial Sequence: Synthetic oligonucleotide
  Target: LAMA2; (-) strand; PAM type: YTN; PAM sequence: CTG
atttactaatgtaagcatac

SEQ ID NO: 231731 - DNA, 20 bp, Artificial Sequence
  Description of Artificial Sequence: Synthetic oligonucleotide
  Target: LAMA2; (-) strand; PAM type: YTN; PAM sequence: TTC
acccaaataatcctgattta

SEQ ID NO: 231732 - DNA, 20 bp, Artificial Sequence
  Description of Artificial Sequence: Synthetic oligonucleotide
  Target: LAMA2; (-) strand; PAM type: YTN; PAM sequence: CTG
ttcacccaaataatcctgat

SEQ ID NO: 231733 - DNA, 20 bp, Artificial Sequence
  Description of Artificial Sequence: Synthetic oligonucleotide
  Target: LAMA2; (-) strand; PAM type: YTN; PAM sequence: CTC
tgttcacccaaataatcctg

SEQ ID NO: 231734 - DNA, 20 bp, Artificial Sequence
  Description of Artificial Sequence: Synthetic oligonucleotide
  Target: LAMA2; (-) strand; PAM type: YTN; PAM sequence: TTA
tactctgttcacccaaataa

SEQ ID NO: 231735 - DNA, 20 bp, Artificial Sequence
  Description of Artificial Sequence: Synthetic oligonucleotide
  Target: LAMA2; (-) strand; PAM type: YTN; PAM sequence: CTA
tatcaatattatactctgtt

SEQ ID NO: 231736 - DNA, 20 bp, Artificial Sequence
  Description of Artificial Sequence: Synthetic oligonucleotide
  Target: LAMA2; (-) strand; PAM type: YTN; PAM sequence: TTA
taaccaaataactatatcaa

SEQ ID NO: 231737 - DNA, 20 bp, Artificial Sequence
  Description of Artificial Sequence: Synthetic oligonucleotide
  Target: LAMA2; (-) strand; PAM type: YTN; PAM sequence: TTT
ataaccaaataactatatca

SEQ ID NO: 231738 - DNA, 20 bp, Artificial Sequence
  Description of Artificial Sequence: Synthetic oligonucleotide
  Target: LAMA2; (-) strand; PAM type: YTN; PAM sequence: TTT
tataaccaaataactatatc

SEQ ID NO: 231739 - DNA, 20 bp, Artificial Sequence
  Description of Artificial Sequence: Synthetic oligonucleotide
  Target: LAMA2; (-) strand; PAM type: YTN; PAM sequence: TTT
ttataaccaaataactatat

SEQ ID NO: 231740 - DNA, 20 bp, Artificial Sequence
  Description of Artificial Sequence: Synthetic oligonucleotide
  Target: LAMA2; (-) strand; PAM type: YTN; PAM sequence: CTT
tttataaccaaataactata

SEQ ID NO: 231741 - DNA, 20 bp, Artificial Sequence
  Description of Artificial Sequence: Synthetic oligonucleotide
  Target: LAMA2; (-) strand; PAM type: YTN; PAM sequence: CTC
tttttataaccaaataacta

SEQ ID NO: 231742 - DNA, 20 bp, Artificial Sequence
  Description of Artificial Sequence: Synthetic oligonucleotide
  Target: LAMA2; (-) strand; PAM type: YTN; PAM sequence: TTA
tcagaaacatctctttttat

SEQ ID NO: 231743 - DNA, 20 bp, Artificial Sequence
  Description of Artificial Sequence: Synthetic oligonucleotide
  Target: LAMA2; (-) strand; PAM type: YTN; PAM sequence: CTT
atcagaaacatctcttttta

SEQ ID NO: 231744 - DNA, 20 bp, Artificial Sequence
  Description of Artificial Sequence: Synthetic oligonucleotide
  Target: LAMA2; (-) strand; PAM type: YTN; PAM sequence: TTC
caaggcaaataaaggggggg

SEQ ID NO: 231745 - DNA, 20 bp, Artificial Sequence
  Description of Artificial Sequence: Synthetic oligonucleotide
  Target: LAMA2; (-) strand; PAM type: YTN; PAM sequence: TTT
ccaaggcaaataaagggggg

SEQ ID NO: 231746 - DNA, 20 bp, Artificial Sequence
  Description of Artificial Sequence: Synthetic oligonucleotide
  Target: LAMA2; (-) strand; PAM type: YTN; PAM sequence: TTT
tccaaggcaaataaaggggg

SEQ ID NO: 231747 - DNA, 20 bp, Artificial Sequence
  Description of Artificial Sequence: Synthetic oligonucleotide
  Target: LAMA2; (-) strand; PAM type: YTN; PAM sequence: TTG
ttttccaaggcaaataaagg

SEQ ID NO: 231748 - DNA, 20 bp, Artificial Sequence
  Description of Artificial Sequence: Synthetic oligonucleotide
  Target: LAMA2; (-) strand; PAM type: YTN; PAM sequence: TTT
gttttccaaggcaaataaag

SEQ ID NO: 231749 - DNA, 20 bp, Artificial Sequence
  Description of Artificial Sequence: Synthetic oligonucleotide
  Target: LAMA2; (-) strand; PAM type: YTN; PAM sequence: TTG
aaatttgttttccaaggcaa

SEQ ID NO: 231750 - DNA, 20 bp, Artificial Sequence
  Description of Artificial Sequence: Synthetic oligonucleotide
  Target: LAMA2; (-) strand; PAM type: YTN; PAM sequence: TTT
gaaatttgttttccaaggca

SEQ ID NO: 231751 - DNA, 20 bp, Artificial Sequence
  Description of Artificial Sequence: Synthetic oligonucleotide
  Target: LAMA2; (-) strand; PAM type: YTN; PAM sequence: CTT
tgaaatttgttttccaaggc

SEQ ID NO: 231752 - DNA, 20 bp, Artificial Sequence
  Description of Artificial Sequence: Synthetic oligonucleotide
  Target: LAMA2; (-) strand; PAM type: YTN; PAM sequence: TTC
tttgaaatttgttttccaag

SEQ ID NO: 231753 - DNA, 20 bp, Artificial Sequence
  Description of Artificial Sequence: Synthetic oligonucleotide
  Target: LAMA2; (-) strand; PAM type: YTN; PAM sequence: CTT
ctttgaaatttgttttccaa

SEQ ID NO: 231754 - DNA, 20 bp, Artificial Sequence
  Description of Artificial Sequence: Synthetic oligonucleotide
  Target: LAMA2; (-) strand; PAM type: YTN; PAM sequence: CTC
ttctttgaaatttgttttcc

SEQ ID NO: 231755 - DNA, 20 bp, Artificial Sequence
  Description of Artificial Sequence: Synthetic oligonucleotide
  Target: LAMA2; (-) strand; PAM type: YTN; PAM sequence: TTA
aaatgacactcttctttgaa

SEQ ID NO: 231756 - DNA, 20 bp, Artificial Sequence
  Description of Artificial Sequence: Synthetic oligonucleotide
  Target: LAMA2; (-) strand; PAM type: YTN; PAM sequence: TTT
aaaatgacactcttctttga

SEQ ID NO: 231757 - DNA, 20 bp, Artificial Sequence
  Description of Artificial Sequence: Synthetic oligonucleotide
  Target: LAMA2; (-) strand; PAM type: YTN; PAM sequence: TTA
gagtttaaaatgacactctt

SEQ ID NO: 231758 - DNA, 20 bp, Artificial Sequence
  Description of Artificial Sequence: Synthetic oligonucleotide
  Target: LAMA2; (-) strand; PAM type: YTN; PAM sequence: TTT
agagtttaaaatgacactct

SEQ ID NO: 231759 - DNA, 20 bp, Artificial Sequence
  Description of Artificial Sequence: Synthetic oligonucleotide
  Target: LAMA2; (-) strand; PAM type: YTN; PAM sequence: TTT
tagagtttaaaatgacactc

SEQ ID NO: 231760 - DNA, 20 bp, Artificial Sequence
  Description of Artificial Sequence: Synthetic oligonucleotide
  Target: LAMA2; (-) strand; PAM type: YTN; PAM sequence: TTT
ttagagtttaaaatgacact

SEQ ID NO: 231761 - DNA, 20 bp, Artificial Sequence
  Description of Artificial Sequence: Synthetic oligonucleotide
  Target: LAMA2; (-) strand; PAM type: YTN; PAM sequence: TTT
tttagagtttaaaatgacac

SEQ ID NO: 231762 - DNA, 20 bp, Artificial Sequence
  Description of Artificial Sequence: Synthetic oligonucleotide
  Target: LAMA2; (-) strand; PAM type: YTN; PAM sequence: CTG
gttttttagagtttaaaatg

SEQ ID NO: 231763 - DNA, 20 bp, Artificial Sequence
  Description of Artificial Sequence: Synthetic oligonucleotide
  Target: LAMA2; (-) strand; PAM type: YTN; PAM sequence: TTA
tcaactggttttttagagtt

SEQ ID NO: 231764 - DNA, 20 bp, Artificial Sequence
  Description of Artificial Sequence: Synthetic oligonucleotide
  Target: LAMA2; (-) strand; PAM type: YTN; PAM sequence: CTA
tggttatcaactggtttttt

SEQ ID NO: 231765 - DNA, 20 bp, Artificial Sequence
  Description of Artificial Sequence: Synthetic oligonucleotide
  Target: LAMA2; (-) strand; PAM type: YTN; PAM sequence: CTG
caaatatcagactatggtta

SEQ ID NO: 231766 - DNA, 20 bp, Artificial Sequence
  Description of Artificial Sequence: Synthetic oligonucleotide
  Target: LAMA2; (-) strand; PAM type: YTN; PAM sequence: TTC
caactgcaaatatcagacta

SEQ ID NO: 231767 - DNA, 20 bp, Artificial Sequence
  Description of Artificial Sequence: Synthetic oligonucleotide
  Target: LAMA2; (-) strand; PAM type: YTN; PAM sequence: TTC
attccaactgcaaatatcag

SEQ ID NO: 231768 - DNA, 20 bp, Artificial Sequence
  Description of Artificial Sequence: Synthetic oligonucleotide
  Target: LAMA2; (-) strand; PAM type: YTN; PAM sequence: CTG
tcacaggaattcattccaac

SEQ ID NO: 231769 - DNA, 20 bp, Artificial Sequence
  Description of Artificial Sequence: Synthetic oligonucleotide
  Target: LAMA2; (-) strand; PAM type: YTN; PAM sequence: TTC
atgctgtcacaggaattcat

SEQ ID NO: 231770 - DNA, 20 bp, Artificial Sequence
  Description of Artificial Sequence: Synthetic oligonucleotide
  Target: LAMA2; (-) strand; PAM type: YTN; PAM sequence: TTG
gtgggtgtatgttcatgctg

SEQ ID NO: 231771 - DNA, 20 bp, Artificial Sequence
  Description of Artificial Sequence: Synthetic oligonucleotide
  Target: LAMA2; (-) strand; PAM type: YTN; PAM sequence: TTA
cagacatgttggtgggtgta

SEQ ID NO: 231772 - DNA, 20 bp, Artificial Sequence
  Description of Artificial Sequence: Synthetic oligonucleotide
  Target: LAMA2; (-) strand; PAM type: YTN; PAM sequence: CTA
ttacagacatgttggtgggt

SEQ ID NO: 231773 - DNA, 20 bp, Artificial Sequence
  Description of Artificial Sequence: Synthetic oligonucleotide
  Target: LAMA2; (-) strand; PAM type: YTN; PAM sequence: TTC
tattacagacatgttggtgg

SEQ ID NO: 231774 - DNA, 20 bp, Artificial Sequence
  Description of Artificial Sequence: Synthetic oligonucleotide
  Target: LAMA2; (-) strand; PAM type: YTN; PAM sequence: TTT
ctattacagacatgttggtg

SEQ ID NO: 231775 - DNA, 20 bp, Artificial Sequence
  Description of Artificial Sequence: Synthetic oligonucleotide
  Target: LAMA2; (-) strand; PAM type: YTN; PAM sequence: TTC
caaagtggtttctattacag

SEQ ID NO: 231776 - DNA, 20 bp, Artificial Sequence
  Description of Artificial Sequence: Synthetic oligonucleotide
  Target: LAMA2; (-) strand; PAM type: YTN; PAM sequence: CTT
ccaaagtggtttctattaca

SEQ ID NO: 231777 - DNA, 20 bp, Artificial Sequence
  Description of Artificial Sequence: Synthetic oligonucleotide
  Target: LAMA2; (-) strand; PAM type: YTN; PAM sequence: CTA
gtgtcttccaaagtggtttc

SEQ ID NO: 231778 - DNA, 20 bp, Artificial Sequence
  Description of Artificial Sequence: Synthetic oligonucleotide
  Target: LAMA2; (-) strand; PAM type: YTN; PAM sequence: CTC
tagtgtcttccaaagtggtt

SEQ ID NO: 231779 - DNA, 20 bp, Artificial Sequence
  Description of Artificial Sequence: Synthetic oligonucleotide
  Target: LAMA2; (-) strand; PAM type: YTN; PAM sequence: CTG
tggcagcctctagtgtcttc

SEQ ID NO: 231780 - DNA, 20 bp, Artificial Sequence
  Description of Artificial Sequence: Synthetic oligonucleotide
  Target: LAMA2; (-) strand; PAM type: YTN; PAM sequence: CTG
agaaatctgtggcagcctct

SEQ ID NO: 231781 - DNA, 20 bp, Artificial Sequence
  Description of Artificial Sequence: Synthetic oligonucleotide
  Target: LAMA2; (-) strand; PAM type: YTN; PAM sequence: CTG
tgaggacctgagaaatctgt

SEQ ID NO: 231782 - DNA, 20 bp, Artificial Sequence
  Description of Artificial Sequence: Synthetic oligonucleotide
  Target: LAMA2; (-) strand; PAM type: YTN; PAM sequence: TTG
ctgtgaggacctgagaaatc

SEQ ID NO: 231783 - DNA, 20 bp, Artificial Sequence
  Description of Artificial Sequence: Synthetic oligonucleotide
  Target: LAMA2; (-) strand; PAM type: YTN; PAM sequence: CTT
gctgtgaggacctgagaaat

SEQ ID NO: 231784 - DNA, 20 bp, Artificial Sequence
  Description of Artificial Sequence: Synthetic oligonucleotide
  Target: LAMA2; (-) strand; PAM type: YTN; PAM sequence: CTG
tcttgctgtgaggacctgag

SEQ ID NO: 231785 - DNA, 20 bp, Artificial Sequence
  Description of Artificial Sequence: Synthetic oligonucleotide
  Target: LAMA2; (-) strand; PAM type: YTN; PAM sequence: TTC
aaggaagatgaaatgtatcc

SEQ ID NO: 231786 - DNA, 20 bp, Artificial Sequence
  Description of Artificial Sequence: Synthetic oligonucleotide
  Target: LAMA2; (-) strand; PAM type: YTN; PAM sequence: CTT
caaggaagatgaaatgtatc

SEQ ID NO: 231787 - DNA, 20 bp, Artificial Sequence
  Description of Artificial Sequence: Synthetic oligonucleotide
  Target: LAMA2; (-) strand; PAM type: YTN; PAM sequence: CTG
tcttcaaggaagatgaaatg

SEQ ID NO: 231788 - DNA, 20 bp, Artificial Sequence
  Description of Artificial Sequence: Synthetic oligonucleotide
  Target: LAMA2; (-) strand; PAM type: YTN; PAM sequence: CTA
tggggtgacagccagagggt

SEQ ID NO: 231789 - DNA, 20 bp, Artificial Sequence
  Description of Artificial Sequence: Synthetic oligonucleotide
  Target: LAMA2; (-) strand; PAM type: YTN; PAM sequence: TTC
ctatggggtgacagccagag

SEQ ID NO: 231790 - DNA, 20 bp, Artificial Sequence
  Description of Artificial Sequence: Synthetic oligonucleotide
  Target: LAMA2; (-) strand; PAM type: YTN; PAM sequence: TTT
cctatggggtgacagccaga

SEQ ID NO: 231791 - DNA, 20 bp, Artificial Sequence
  Description of Artificial Sequence: Synthetic oligonucleotide
  Target: LAMA2; (-) strand; PAM type: YTN; PAM sequence: CTG
atttcctatggggtgacagc

SEQ ID NO: 231792 - DNA, 20 bp, Artificial Sequence
  Description of Artificial Sequence: Synthetic oligonucleotide
  Target: LAMA2; (-) strand; PAM type: YTN; PAM sequence: TTC
ctgatttcctatggggtgac

SEQ ID NO: 231793 - DNA, 20 bp, Artificial Sequence
  Description of Artificial Sequence: Synthetic oligonucleotide
  Target: LAMA2; (-) strand; PAM type: YTN; PAM sequence: CTT
cctgatttcctatggggtga

SEQ ID NO: 231794 - DNA, 20 bp, Artificial Sequence
  Description of Artificial Sequence: Synthetic oligonucleotide
  Target: LAMA2; (-) strand; PAM type: YTN; PAM sequence: TTA
gcatacttcctgatttccta

SEQ ID NO: 231795 - DNA, 20 bp, Artificial Sequence
  Description of Artificial Sequence: Synthetic oligonucleotide
  Target: LAMA2; (-) strand; PAM type: YTN; PAM sequence: CTT
agcatacttcctgatttcct

SEQ ID NO: 231796 - DNA, 20 bp, Artificial Sequence
  Description of Artificial Sequence: Synthetic oligonucleotide
  Target: LAMA2; (-) strand; PAM type: YTN; PAM sequence: CTG
gatagcttagcatacttcct

SEQ ID NO: 231797 - DNA, 20 bp, Artificial Sequence
  Description of Artificial Sequence: Synthetic oligonucleotide
  Target: LAMA2; (-) strand; PAM type: YTN; PAM sequence: TTC
caagtccactggatagctta

SEQ ID NO: 231798 - DNA, 20 bp, Artificial Sequence
  Description of Artificial Sequence: Synthetic oligonucleotide
  Target: LAMA2; (-) strand; PAM type: YTN; PAM sequence: CTA
gcacagcacagtgtaattcc

SEQ ID NO: 231799 - DNA, 20 bp, Artificial Sequence
  Description of Artificial Sequence: Synthetic oligonucleotide
  Target: LAMA2; (-) strand; PAM type: YTN; PAM sequence: TTC
cactagcacagcacagtgta

SEQ ID NO: 231800 - DNA, 20 bp, Artificial Sequence
  Description of Artificial Sequence: Synthetic oligonucleotide
  Target: LAMA2; (-) strand; PAM type: YTN; PAM sequence: TTT
ccactagcacagcacagtgt

SEQ ID NO: 231801 - DNA, 20 bp, Artificial Sequence
  Description of Artificial Sequence: Synthetic oligonucleotide
  Target: LAMA2; (-) strand; PAM type: YTN; PAM sequence: TTG
gataggatatttccactagc

SEQ ID NO: 231802 - DNA, 20 bp, Artificial Sequence
  Description of Artificial Sequence: Synthetic oligonucleotide
  Target: LAMA2; (-) strand; PAM type: YTN; PAM sequence: TTC
aaaataaatcataatgttgg

SEQ ID NO: 231803 - DNA, 20 bp, Artificial Sequence
  Description of Artificial Sequence: Synthetic oligonucleotide
  Target: LAMA2; (-) strand; PAM type: YTN; PAM sequence: CTT
caaaataaatcataatgttg

SEQ ID NO: 231804 - DNA, 20 bp, Artificial Sequence
  Description of Artificial Sequence: Synthetic oligonucleotide
  Target: LAMA2; (-) strand; PAM type: YTN; PAM sequence: CTC
cttcaaaataaatcataatg

SEQ ID NO: 231805 - DNA, 20 bp, Artificial Sequence
  Description of Artificial Sequence: Synthetic oligonucleotide
  Target: LAMA2; (-) strand; PAM type: YTN; PAM sequence: TTC
tccttcaaaataaatcataa

SEQ ID NO: 231806 - DNA, 20 bp, Artificial Sequence
  Description of Artificial Sequence: Synthetic oligonucleotide
  Target: LAMA2; (-) strand; PAM type: YTN; PAM sequence: TTT
ctccttcaaaataaatcata

SEQ ID NO: 231807 - DNA, 20 bp, Artificial Sequence
  Description of Artificial Sequence: Synthetic oligonucleotide
  Target: LAMA2; (-) strand; PAM type: YTN; PAM sequence: CTT
tctccttcaaaataaatcat

SEQ ID NO: 231808 - DNA, 20 bp, Artificial Sequence
  Description of Artificial Sequence: Synthetic oligonucleotide
  Target: LAMA2; (-) strand; PAM type: YTN; PAM sequence: TTC
ctttctccttcaaaataaat

SEQ ID NO: 231809 - DNA, 20 bp, Artificial Sequence
  Description of Artificial Sequence: Synthetic oligonucleotide
  Target: LAMA2; (-) strand; PAM type: YTN; PAM sequence: TTT
cctttctccttcaaaataaa

SEQ ID NO: 231810 - DNA, 20 bp, Artificial Sequence
  Description of Artificial Sequence: Synthetic oligonucleotide
  Target: LAMA2; (-) strand; PAM type: YTN; PAM sequence: TTT
tcctttctccttcaaaataa

SEQ ID NO: 231811 - DNA, 20 bp, Artificial Sequence
  Description of Artificial Sequence: Synthetic oligonucleotide
  Target: LAMA2; (-) strand; PAM type: YTN; PAM sequence: TTT
ttcctttctccttcaaaata

SEQ ID NO: 231812 - DNA, 20 bp, Artificial Sequence
  Description of Artificial Sequence: Synthetic oligonucleotide
  Target: LAMA2; (-) strand; PAM type: YTN; PAM sequence: TTT
tttcctttctccttcaaaat

SEQ ID NO: 231813 - DNA, 20 bp, Artificial Sequence
  Description of Artificial Sequence: Synthetic oligonucleotide
  Target: LAMA2; (-) strand; PAM type: YTN; PAM sequence: TTT
ttttcctttctccttcaaaa

SEQ ID NO: 231814 - DNA, 20 bp, Artificial Sequence
  Description of Artificial Sequence: Synthetic oligonucleotide
  Target: LAMA2; (-) strand; PAM type: YTN; PAM sequence: TTT
tttttcctttctccttcaaa

SEQ ID NO: 231815 - DNA, 20 bp, Artificial Sequence
  Description of Artificial Sequence: Synthetic oligonucleotide
  Target: LAMA2; (-) strand; PAM type: YTN; PAM sequence: TTT
ttttttcctttctccttcaa

SEQ ID NO: 231816 - DNA, 20 bp, Artificial Sequence
  Description of Artificial Sequence: Synthetic oligonucleotide
  Target: LAMA2; (-) strand; PAM type: YTN; PAM sequence: TTG
tgtgtatttttttttccttt

SEQ ID NO: 231817 - DNA, 20 bp, Artificial Sequence
  Description of Artificial Sequence: Synthetic oligonucleotide
  Target: LAMA2; (-) strand; PAM type: YTN; PAM sequence: TTT
gtgtgtatttttttttcctt

SEQ ID NO: 231818 - DNA, 20 bp, Artificial Sequence
  Description of Artificial Sequence: Synthetic oligonucleotide
  Target: LAMA2; (-) strand; PAM type: YTN; PAM sequence: TTT
tgtgtgtatttttttttcct

SEQ ID NO: 231819 - DNA, 20 bp, Artificial Sequence
  Description of Artificial Sequence: Synthetic oligonucleotide
  Target: LAMA2; (-) strand; PAM type: YTN; PAM sequence: TTC
caccgttttgtgtgtatttt

SEQ ID NO: 231820 - DNA, 20 bp, Artificial Sequence
  Description of Artificial Sequence: Synthetic oligonucleotide
  Target: LAMA2; (-) strand; PAM type: YTN; PAM sequence: CTT
ccaccgttttgtgtgtattt

SEQ ID NO: 231821 - DNA, 20 bp, Artificial Sequence
  Description of Artificial Sequence: Synthetic oligonucleotide
  Target: LAMA2; (-) strand; PAM type: YTN; PAM sequence: TTC
cttccaccgttttgtgtgta

SEQ ID NO: 231822 - DNA, 20 bp, Artificial Sequence
  Description of Artificial Sequence: Synthetic oligonucleotide
  Target: LAMA2; (-) strand; PAM type: YTN; PAM sequence: CTT
ccttccaccgttttgtgtgt

SEQ ID NO: 231823 - DNA, 20 bp, Artificial Sequence
  Description of Artificial Sequence: Synthetic oligonucleotide
  Target: LAMA2; (-) strand; PAM type: YTN; PAM sequence: TTG
tgtgcagcttccttccaccg

SEQ ID NO: 231824 - DNA, 20 bp, Artificial Sequence
  Description of Artificial Sequence: Synthetic oligonucleotide
  Target: LAMA2; (-) strand; PAM type: YTN; PAM sequence: TTG
gcgatgttgtgtgcagcttc

SEQ ID NO: 231825 - DNA, 20 bp, Artificial Sequence
  Description of Artificial Sequence: Synthetic oligonucleotide
  Target: LAMA2; (-) strand; PAM type: YTN; PAM sequence: TTT
ggcgatgttgtgtgcagctt

SEQ ID NO: 231826 - DNA, 20 bp, Artificial Sequence
  Description of Artificial Sequence: Synthetic oligonucleotide
  Target: LAMA2; (-) strand; PAM type: YTN; PAM sequence: CTG
tttggcgatgttgtgtgcag

SEQ ID NO: 231827 - DNA, 20 bp, Artificial Sequence
  Description of Artificial Sequence: Synthetic oligonucleotide
  Target: LAMA2; (-) strand; PAM type: YTN; PAM sequence: CTG
ggatataaaacaagccagct

SEQ ID NO: 231828 - DNA, 20 bp, Artificial Sequence
  Description of Artificial Sequence: Synthetic oligonucleotide
  Target: LAMA2; (-) strand; PAM type: YTN; PAM sequence: TTC
tgggatataaaacaagccag

SEQ ID NO: 231829 - DNA, 20 bp, Artificial Sequence
  Description of Artificial Sequence: Synthetic oligonucleotide
  Target: LAMA2; (-) strand; PAM type: YTN; PAM sequence: TTT
ctgggatataaaacaagcca

SEQ ID NO: 231830 - DNA, 20 bp, Artificial Sequence
  Description of Artificial Sequence: Synthetic oligonucleotide
  Target: LAMA2; (-) strand; PAM type: YTN; PAM sequence: CTG
tttctgggatataaaacaag

SEQ ID NO: 231831 - DNA, 20 bp, Artificial Sequence
  Description of Artificial Sequence: Synthetic oligonucleotide
  Target: LAMA2; (-) strand; PAM type: YTN; PAM sequence: TTA
gtcccaagctgtttctggga

SEQ ID NO: 231832 - DNA, 20 bp, Artificial Sequence
  Description of Artificial Sequence: Synthetic oligonucleotide
  Target: LAMA2; (-) strand; PAM type: YTN; PAM sequence: TTG
tgaatatagttagtcccaag

SEQ ID NO: 231833 - DNA, 20 bp, Artificial Sequence
  Description of Artificial Sequence: Synthetic oligonucleotide
  Target: LAMA2; (-) strand; PAM type: YTN; PAM sequence: CTT
gtgaatatagttagtcccaa

SEQ ID NO: 231834 - DNA, 20 bp, Artificial Sequence
  Description of Artificial Sequence: Synthetic oligonucleotide
  Target: LAMA2; (-) strand; PAM type: YTN; PAM sequence: CTG
ccaagagatcttgtgaatat

SEQ ID NO: 231835 - DNA, 20 bp, Artificial Sequence
  Description of Artificial Sequence: Synthetic oligonucleotide
  Target: LAMA2; (-) strand; PAM type: YTN; PAM sequence: CTC
tgccaagagatcttgtgaat

SEQ ID NO: 231836 - DNA, 20 bp, Artificial Sequence
  Description of Artificial Sequence: Synthetic oligonucleotide
  Target: LAMA2; (-) strand; PAM type: YTN; PAM sequence: CTA
ctctgccaagagatcttgtg

SEQ ID NO: 231837 - DNA, 20 bp, Artificial Sequence
  Description of Artificial Sequence: Synthetic oligonucleotide
  Target: LAMA2; (-) strand; PAM type: YTN; PAM sequence: TTC
atcaagctactctgccaaga

SEQ ID NO: 231838 - DNA, 20 bp, Artificial Sequence
  Description of Artificial Sequence: Synthetic oligonucleotide
  Target: LAMA2; (-) strand; PAM type: YTN; PAM sequence: TTT
catcaagctactctgccaag

SEQ ID NO: 231839 - DNA, 20 bp, Artificial Sequence
  Description of Artificial Sequence: Synthetic oligonucleotide
  Target: LAMA2; (-) strand; PAM type: YTN; PAM sequence: TTT
tcatcaagctactctgccaa

SEQ ID NO: 231840 - DNA, 20 bp, Artificial Sequence
  Description of Artificial Sequence: Synthetic oligonucleotide
  Target: LAMA2; (-) strand; PAM type: YTN; PAM sequence: TTG
gtattttcatcaagctactc

SEQ ID NO: 231841 - DNA, 20 bp, Artificial Sequence
  Description of Artificial Sequence: Synthetic oligonucleotide
  Target: LAMA2; (-) strand; PAM type: YTN; PAM sequence: TTT
ggtattttcatcaagctact

SEQ ID NO: 231842 - DNA, 20 bp, Artificial Sequence
  Description of Artificial Sequence: Synthetic oligonucleotide
  Target: LAMA2; (-) strand; PAM type: YTN; PAM sequence: CTT
tggtattttcatcaagctac

SEQ ID NO: 231843 - DNA, 20 bp, Artificial Sequence
  Description of Artificial Sequence: Synthetic oligonucleotide
  Target: LAMA2; (-) strand; PAM type: YTN; PAM sequence: CTC
acagctttggtattttcatc

SEQ ID NO: 231844 - DNA, 20 bp, Artificial Sequence
  Description of Artificial Sequence: Synthetic oligonucleotide
  Target: LAMA2; (-) strand; PAM type: YTN; PAM sequence: TTC
tcacagctttggtattttca

SEQ ID NO: 231845 - DNA, 20 bp, Artificial Sequence
  Description of Artificial Sequence: Synthetic oligonucleotide
  Target: LAMA2; (-) strand; PAM type: YTN; PAM sequence: CTT
ctcacagctttggtattttc

SEQ ID NO: 231846 - DNA, 20 bp, Artificial Sequence
  Description of Artificial Sequence: Synthetic oligonucleotide
  Target: LAMA2; (-) strand; PAM type: YTN; PAM sequence: TTC
agcaaaagaacacttctcac

SEQ ID NO: 231847 - DNA, 20 bp, Artificial Sequence
  Description of Artificial Sequence: Synthetic oligonucleotide
  Target: LAMA2; (-) strand; PAM type: YTN; PAM sequence: CTA
catgaaggattcagcaaaag

SEQ ID NO: 231848 - DNA, 20 bp, Artificial Sequence
  Description of Artificial Sequence: Synthetic oligonucleotide
  Target: LAMA2; (-) strand; PAM type: YTN; PAM sequence: TTA
ataaaccgtgtgatagctac

SEQ ID NO: 231849 - DNA, 20 bp, Artificial Sequence
  Description of Artificial Sequence: Synthetic oligonucleotide
  Target: LAMA2; (-) strand; PAM type: YTN; PAM sequence: TTA
ggttaataaaccgtgtgata

SEQ ID NO: 231850 - DNA, 20 bp, Artificial Sequence
  Description of Artificial Sequence: Synthetic oligonucleotide
  Target: LAMA2; (-) strand; PAM type: YTN; PAM sequence: TTT
aggttaataaaccgtgtgat

SEQ ID NO: 231851 - DNA, 20 bp, Artificial Sequence
  Description of Artificial Sequence: Synthetic oligonucleotide
  Target: LAMA2; (-) strand; PAM type: YTN; PAM sequence: CTC
atttaggttaataaaccgtg

SEQ ID NO: 231852 - DNA, 20 bp, Artificial Sequence
  Description of Artificial Sequence: Synthetic oligonucleotide
  Target: LAMA2; (-) strand; PAM type: YTN; PAM sequence: TTC
tcatttaggttaataaaccg

SEQ ID NO: 231853 - DNA, 20 bp, Artificial Sequence
  Description of Artificial Sequence: Synthetic oligonucleotide
  Target: LAMA2; (-) strand; PAM type: YTN; PAM sequence: TTG
gaaaaaaggtgtacatattc

SEQ ID NO: 231854 - DNA, 20 bp, Artificial Sequence
  Description of Artificial Sequence: Synthetic oligonucleotide
  Target: LAMA2; (-) strand; PAM type: YTN; PAM sequence: TTT
ggaaaaaaggtgtacatatt

SEQ ID NO: 231855 - DNA, 20 bp, Artificial Sequence
  Description of Artificial Sequence: Synthetic oligonucleotide
  Target: LAMA2; (-) strand; PAM type: YTN; PAM sequence: TTT
tggaaaaaaggtgtacatat

SEQ ID NO: 231856 - DNA, 20 bp, Artificial Sequence
  Description of Artificial Sequence: Synthetic oligonucleotide
  Target: LAMA2; (-) strand; PAM type: YTN; PAM sequence: TTT
ttggaaaaaaggtgtacata

SEQ ID NO: 231857 - DNA, 20 bp, Artificial Sequence
  Description of Artificial Sequence: Synthetic oligonucleotide
  Target: LAMA2; (-) strand; PAM type: YTN; PAM sequence: CTT
tttggaaaaaaggtgtacat

SEQ ID NO: 231858 - DNA, 20 bp, Artificial Sequence
  Description of Artificial Sequence: Synthetic oligonucleotide
  Target: LAMA2; (-) strand; PAM type: YTN; PAM sequence: TTA
aacatacaaaggaccttttt

SEQ ID NO: 231859 - DNA, 20 bp, Artificial Sequence
  Description of Artificial Sequence: Synthetic oligonucleotide
  Target: LAMA2; (-) strand; PAM type: YTN; PAM sequence: CTT
aaacatacaaaggacctttt

SEQ ID NO: 231860 - DNA, 20 bp, Artificial Sequence
  Description of Artificial Sequence: Synthetic oligonucleotide
  Target: LAMA2; (-) strand; PAM type: YTN; PAM sequence: CTC
acttaaacatacaaaggacc

SEQ ID NO: 231861 - DNA, 20 bp, Artificial Sequence
  Description of Artificial Sequence: Synthetic oligonucleotide
  Target: LAMA2; (-) strand; PAM type: YTN; PAM sequence: TTC
tcacttaaacatacaaagga

SEQ ID NO: 231862 - DNA, 20 bp, Artificial Sequence
  Description of Artificial Sequence: Synthetic oligonucleotide
  Target: LAMA2; (-) strand; PAM type: YTN; PAM sequence: TTT
ctcacttaaacatacaaagg

SEQ ID NO: 231863 - DNA, 20 bp, Artificial Sequence
  Description of Artificial Sequence: Synthetic oligonucleotide
  Target: LAMA2; (-) strand; PAM type: YTN; PAM sequence: TTG
tgccgtatgaagaatcagta

SEQ ID NO: 231864 - DNA, 20 bp, Artificial Sequence
  Description of Artificial Sequence: Synthetic oligonucleotide
  Target: LAMA2; (-) strand; PAM type: YTN; PAM sequence: TTT
gtgccgtatgaagaatcagt

SEQ ID NO: 231865 - DNA, 20 bp, Artificial Sequence
  Description of Artificial Sequence: Synthetic oligonucleotide
  Target: LAMA2; (-) strand; PAM type: YTN; PAM sequence: CTG
tggtgaatcatgtttgtgcc

SEQ ID NO: 231866 - DNA, 20 bp, Artificial Sequence
  Description of Artificial Sequence: Synthetic oligonucleotide
  Target: LAMA2; (-) strand; PAM type: YTN; PAM sequence: TTG
gtgtgaatgctgtggtgaat

SEQ ID NO: 231867 - DNA, 20 bp, Artificial Sequence
  Description of Artificial Sequence: Synthetic oligonucleotide
  Target: LAMA2; (-) strand; PAM type: YTN; PAM sequence: TTT
ggtgtgaatgctgtggtgaa

SEQ ID NO: 231868 - DNA, 20 bp, Artificial Sequence
  Description of Artificial Sequence: Synthetic oligonucleotide
  Target: LAMA2; (-) strand; PAM type: YTN; PAM sequence: TTA
tttggtgtgaatgctgtggt

SEQ ID NO: 231869 - DNA, 20 bp, Artificial Sequence
  Description of Artificial Sequence: Synthetic oligonucleotide
  Target: LAMA2; (-) strand; PAM type: YTN; PAM sequence: TTT
atttggtgtgaatgctgtgg

SEQ ID NO: 231870 - DNA, 20 bp, Artificial Sequence
  Description of Artificial Sequence: Synthetic oligonucleotide
  Target: LAMA2; (-) strand; PAM type: YTN; PAM sequence: TTA
gagtttatttggtgtgaatg

SEQ ID NO: 231871 - DNA, 20 bp, Artificial Sequence
  Description of Artificial Sequence: Synthetic oligonucleotide
  Target: LAMA2; (-) strand; PAM type: YTN; PAM sequence: TTA
ttagagtttatttggtgtga

SEQ ID NO: 231872 - DNA, 20 bp, Artificial Sequence
  Description of Artificial Sequence: Synthetic oligonucleotide
  Target: LAMA2; (-) strand; PAM type: YTN; PAM sequence: CTG
aacattattagagtttattt

SEQ ID NO: 231873 - DNA, 20 bp, Artificial Sequence
  Description of Artificial Sequence: Synthetic oligonucleotide
  Target: LAMA2; (-) strand; PAM type: YTN; PAM sequence: TTC
tgaacattattagagtttat

SEQ ID NO: 231874 - DNA, 20 bp, Artificial Sequence
  Description of Artificial Sequence: Synthetic oligonucleotide
  Target: LAMA2; (-) strand; PAM type: YTN; PAM sequence: TTT
ctgaacattattagagttta

SEQ ID NO: 231875 - DNA, 20 bp, Artificial Sequence
  Description of Artificial Sequence: Synthetic oligonucleotide
  Target: LAMA2; (-) strand; PAM type: YTN; PAM sequence: TTA
tagtttctgaacattattag

SEQ ID NO: 231876 - DNA, 20 bp, Artificial Sequence
  Description of Artificial Sequence: Synthetic oligonucleotide
  Target: LAMA2; (-) strand; PAM type: YTN; PAM sequence: CTA
ggattatagtttctgaacat

SEQ ID NO: 231877 - DNA, 20 bp, Artificial Sequence
  Description of Artificial Sequence: Synthetic oligonucleotide
  Target: LAMA2; (-) strand; PAM type: YTN; PAM sequence: CTA
catgtctaggattatagttt

SEQ ID NO: 231878 - DNA, 20 bp, Artificial Sequence
  Description of Artificial Sequence: Synthetic oligonucleotide
  Target: LAMA2; (-) strand; PAM type: YTN; PAM sequence: TTG
aaagaaaggaggaaatcgct

SEQ ID NO: 231879 - DNA, 20 bp, Artificial Sequence
  Description of Artificial Sequence: Synthetic oligonucleotide
  Target: LAMA2; (-) strand; PAM type: YTN; PAM sequence: CTT
gaaagaaaggaggaaatcgc

SEQ ID NO: 231880 - DNA, 20 bp, Artificial Sequence
  Description of Artificial Sequence: Synthetic oligonucleotide
  Target: LAMA2; (-) strand; PAM type: YTN; PAM sequence: CTA
cttgaaagaaaggaggaaat

SEQ ID NO: 231881 - DNA, 20 bp, Artificial Sequence
  Description of Artificial Sequence: Synthetic oligonucleotide
  Target: LAMA2; (-) strand; PAM type: YTN; PAM sequence: CTG
tccccaaaaatactacttga

SEQ ID NO: 231882 - DNA, 20 bp, Artificial Sequence
  Description of Artificial Sequence: Synthetic oligonucleotide
  Target: LAMA2; (-) strand; PAM type: YTN; PAM sequence: TTG
actgtccccaaaaatactac

SEQ ID NO: 231883 - DNA, 20 bp, Artificial Sequence
  Description of Artificial Sequence: Synthetic oligonucleotide
  Target: LAMA2; (-) strand; PAM type: YTN; PAM sequence: CTT
gactgtccccaaaaatacta

SEQ ID NO: 231884 - DNA, 20 bp, Artificial Sequence
  Description of Artificial Sequence: Synthetic oligonucleotide
  Target: LAMA2; (-) strand; PAM type: YTN; PAM sequence: CTC
ttgactgtccccaaaaatac

SEQ ID NO: 231885 - DNA, 20 bp, Artificial Sequence
  Description of Artificial Sequence: Synthetic oligonucleotide
  Target: LAMA2; (-) strand; PAM type: YTN; PAM sequence: CTC
tcttgactgtccccaaaaat

SEQ ID NO: 231886 - DNA, 20 bp, Artificial Sequence
  Description of Artificial Sequence: Synthetic oligonucleotide
  Target: LAMA2; (-) strand; PAM type: YTN; PAM sequence: TTC
tctcttgactgtccccaaaa

SEQ ID NO: 231887 - DNA, 20 bp, Artificial Sequence
  Description of Artificial Sequence: Synthetic oligonucleotide
  Target: LAMA2; (-) strand; PAM type: YTN; PAM sequence: CTA
tcaaattctctcttgactgt

SEQ ID NO: 231888 - DNA, 20 bp, Artificial Sequence
  Description of Artificial Sequence: Synthetic oligonucleotide
  Target: LAMA2; (-) strand; PAM type: YTN; PAM sequence: TTC
tatcaaattctctcttgact

SEQ ID NO: 231889 - DNA, 20 bp, Artificial Sequence
  Description of Artificial Sequence: Synthetic oligonucleotide
  Target: LAMA2; (-) strand; PAM type: YTN; PAM sequence: TTT
ctatcaaattctctcttgac

SEQ ID NO: 231890 - DNA, 20 bp, Artificial Sequence
  Description of Artificial Sequence: Synthetic oligonucleotide
  Target: LAMA2; (-) strand; PAM type: YTN; PAM sequence: TTA
catttctatcaaattctctc

SEQ ID NO: 231891 - DNA, 20 bp, Artificial Sequence
  Description of Artificial Sequence: Synthetic oligonucleotide
  Target: LAMA2; (-) strand; PAM type: YTN; PAM sequence: CTT
acatttctatcaaattctct

SEQ ID NO: 231892 - DNA, 20 bp, Artificial Sequence
  Description of Artificial Sequence: Synthetic oligonucleotide
  Target: LAMA2; (-) strand; PAM type: YTN; PAM sequence: CTC
aggcttacatttctatcaaa

SEQ ID NO: 231893 - DNA, 20 bp, Artificial Sequence
  Description of Artificial Sequence: Synthetic oligonucleotide
  Target: LAMA2; (-) strand; PAM type: YTN; PAM sequence: TTG
aactcaggcttacatttcta

SEQ ID NO: 231894 - DNA, 20 bp, Artificial Sequence
  Description of Artificial Sequence: Synthetic oligonucleotide
  Target: LAMA2; (-) strand; PAM type: YTN; PAM sequence: CTA
aaaaagtcaccagtgccatt

SEQ ID NO: 231895 - DNA, 20 bp, Artificial Sequence
  Description of Artificial Sequence: Synthetic oligonucleotide
  Target: LAMA2; (-) strand; PAM type: YTN; PAM sequence: TTG
gcacctaaaaaagtcaccag

SEQ ID NO: 231896 - DNA, 20 bp, Artificial Sequence
  Description of Artificial Sequence: Synthetic oligonucleotide
  Target: LAMA2; (-) strand; PAM type: YTN; PAM sequence: CTT
ggcacctaaaaaagtcacca

SEQ ID NO: 231897 - DNA, 20 bp, Artificial Sequence
  Description of Artificial Sequence: Synthetic oligonucleotide
  Target: LAMA2; (-) strand; PAM type: YTN; PAM sequence: TTA
accttggcacctaaaaaagt

SEQ ID NO: 231898 - DNA, 20 bp, Artificial Sequence
  Description of Artificial Sequence: Synthetic oligonucleotide
  Target: LAMA2; (-) strand; PAM type: YTN; PAM sequence: CTG
agattaaccttggcacctaa

SEQ ID NO: 231899 - DNA, 20 bp, Artificial Sequence
  Description of Artificial Sequence: Synthetic oligonucleotide
  Target: LAMA2; (-) strand; PAM type: YTN; PAM sequence: CTC
tgagattaaccttggcacct

SEQ ID NO: 231900 - DNA, 20 bp, Artificial Sequence
  Description of Artificial Sequence: Synthetic oligonucleotide
  Target: LAMA2; (-) strand; PAM type: YTN; PAM sequence: TTC
cctctgagattaaccttggc

SEQ ID NO: 231901 - DNA, 20 bp, Artificial Sequence
  Description of Artificial Sequence: Synthetic oligonucleotide
  Target: LAMA2; (-) strand; PAM type: YTN; PAM sequence: TTT
ccctctgagattaaccttgg

SEQ ID NO: 231902 - DNA, 20 bp, Artificial Sequence
  Description of Artificial Sequence: Synthetic oligonucleotide
  Target: LAMA2; (-) strand; PAM type: YTN; PAM sequence: CTA
atttccctctgagattaacc

SEQ ID NO: 231903 - DNA, 20 bp, Artificial Sequence
  Description of Artificial Sequence: Synthetic oligonucleotide
  Target: LAMA2; (-) strand; PAM type: YTN; PAM sequence: TTA
aaactaatttccctctgaga

SEQ ID NO: 231904 - DNA, 20 bp, Artificial Sequence
  Description of Artificial Sequence: Synthetic oligonucleotide
  Target: LAMA2; (-) strand; PAM type: YTN; PAM sequence: TTA
aaagaatggataaatatatg

SEQ ID NO: 231905 - DNA, 20 bp, Artificial Sequence
  Description of Artificial Sequence: Synthetic oligonucleotide
  Target: LAMA2; (-) strand; PAM type: YTN; PAM sequence: TTA
aatgttaaaagaatggataa

SEQ ID NO: 231906 - DNA, 20 bp, Artificial Sequence
  Description of Artificial Sequence: Synthetic oligonucleotide
  Target: LAMA2; (-) strand; PAM type: YTN; PAM sequence: TTA
gagttaaatgttaaaagaat

SEQ ID NO: 231907 - DNA, 20 bp, Artificial Sequence
  Description of Artificial Sequence: Synthetic oligonucleotide
  Target: LAMA2; (-) strand; PAM type: YTN; PAM sequence: TTA
aggaggttagagttaaatgt

SEQ ID NO: 231908 - DNA, 20 bp, Artificial Sequence
  Description of Artificial Sequence: Synthetic oligonucleotide
  Target: LAMA2; (-) strand; PAM type: YTN; PAM sequence: CTT
aaggaggttagagttaaatg

SEQ ID NO: 231909 - DNA, 20 bp, Artificial Sequence
  Description of Artificial Sequence: Synthetic oligonucleotide
  Target: LAMA2; (-) strand; PAM type: YTN; PAM sequence: TTG
gcttaaggaggttagagtta

SEQ ID NO: 231910 - DNA, 20 bp, Artificial Sequence
  Description of Artificial Sequence: Synthetic oligonucleotide
  Target: LAMA2; (-) strand; PAM type: YTN; PAM sequence: TTT
ggcttaaggaggttagagtt

SEQ ID NO: 231911 - DNA, 20 bp, Artificial Sequence
  Description of Artificial Sequence: Synthetic oligonucleotide
  Target: LAMA2; (-) strand; PAM type: YTN; PAM sequence: TTT
tggcttaaggaggttagagt

SEQ ID NO: 231912 - DNA, 20 bp, Artificial Sequence
  Description of Artificial Sequence: Synthetic oligonucleotide
  Target: LAMA2; (-) strand; PAM type: YTN; PAM sequence: TTT
ttggcttaaggaggttagag

SEQ ID NO: 231913 - DNA, 20 bp, Artificial Sequence
  Description of Artificial Sequence: Synthetic oligonucleotide
  Target: LAMA2; (-) strand; PAM type: YTN; PAM sequence: TTA
tatttttggcttaaggaggt

SEQ ID NO: 231914 - DNA, 20 bp, Artificial Sequence
  Description of Artificial Sequence: Synthetic oligonucleotide
  Target: LAMA2; (-) strand; PAM type: YTN; PAM sequence: TTG
agttatatttttggcttaag

SEQ ID NO: 231915 - DNA, 20 bp, Artificial Sequence
  Description of Artificial Sequence: Synthetic oligonucleotide
  Target: LAMA2; (-) strand; PAM type: YTN; PAM sequence: TTA
gaattgagttatatttttgg

SEQ ID NO: 231916 - DNA, 20 bp, Artificial Sequence
  Description of Artificial Sequence: Synthetic oligonucleotide
  Target: LAMA2; (-) strand; PAM type: YTN; PAM sequence: TTT
agaattgagttatatttttg

SEQ ID NO: 231917 - DNA, 20 bp, Artificial Sequence
  Description of Artificial Sequence: Synthetic oligonucleotide
  Target: LAMA2; (-) strand; PAM type: YTN; PAM sequence: CTA
gcaggtgagccagaaatgtg

SEQ ID NO: 231918 - DNA, 20 bp, Artificial Sequence
  Description of Artificial Sequence: Synthetic oligonucleotide
  Target: LAMA2; (-) strand; PAM type: YTN; PAM sequence: CTG
gcacctagcaggtgagccag

SEQ ID NO: 231919 - DNA, 20 bp, Artificial Sequence
  Description of Artificial Sequence: Synthetic oligonucleotide
  Target: LAMA2; (-) strand; PAM type: YTN; PAM sequence: TTC
tggcacctagcaggtgagcc

SEQ ID NO: 231920 - DNA, 20 bp, Artificial Sequence
  Description of Artificial Sequence: Synthetic oligonucleotide
  Target: LAMA2; (-) strand; PAM type: YTN; PAM sequence: TTT
ctggcacctagcaggtgagc

SEQ ID NO: 231921 - DNA, 20 bp, Artificial Sequence
  Description of Artificial Sequence: Synthetic oligonucleotide
  Target: LAMA2; (-) strand; PAM type: YTN; PAM sequence: CTC
aagatccgcatttctggcac

SEQ ID NO: 231922 - DNA, 20 bp, Artificial Sequence
  Description of Artificial Sequence: Synthetic oligonucleotide
  Target: LAMA2; (-) strand; PAM type: YTN; PAM sequence: TTC
ctcaagatccgcatttctgg

SEQ ID NO: 231923 - DNA, 20 bp, Artificial Sequence
  Description of Artificial Sequence: Synthetic oligonucleotide
  Target: LAMA2; (-) strand; PAM type: YTN; PAM sequence: TTG
tatattcctcaagatccgca

SEQ ID NO: 231924 - DNA, 20 bp, Artificial Sequence
  Description of Artificial Sequence: Synthetic oligonucleotide
  Target: LAMA2; (-) strand; PAM type: YTN; PAM sequence: CTT
gtatattcctcaagatccgc

SEQ ID NO: 231925 - DNA, 20 bp, Artificial Sequence
  Description of Artificial Sequence: Synthetic oligonucleotide
  Target: LAMA2; (-) strand; PAM type: YTN; PAM sequence: CTA
aaagagtgaagcagatcttg

SEQ ID NO: 231926 - DNA, 20 bp, Artificial Sequence
  Description of Artificial Sequence: Synthetic oligonucleotide
  Target: LAMA2; (-) strand; PAM type: YTN; PAM sequence: TTC
taaaagagtgaagcagatct

SEQ ID NO: 231927 - DNA, 20 bp, Artificial Sequence
  Description of Artificial Sequence: Synthetic oligonucleotide
  Target: LAMA2; (-) strand; PAM type: YTN; PAM sequence: CTA
atgcagggattctaaaagag

SEQ ID NO: 231928 - DNA, 20 bp, Artificial Sequence
  Description of Artificial Sequence: Synthetic oligonucleotide
  Target: LAMA2; (-) strand; PAM type: YTN; PAM sequence: CTC
taatgcagggattctaaaag

SEQ ID NO: 231929 - DNA, 20 bp, Artificial Sequence
  Description of Artificial Sequence: Synthetic oligonucleotide
  Target: LAMA2; (-) strand; PAM type: YTN; PAM sequence: CTC
tctaatgcagggattctaaa

SEQ ID NO: 231930 - DNA, 20 bp, Artificial Sequence
  Description of Artificial Sequence: Synthetic oligonucleotide
  Target: LAMA2; (-) strand; PAM type: YTN; PAM sequence: CTG
aatcctctctaatgcaggga

SEQ ID NO: 231931 - DNA, 20 bp, Artificial Sequence
  Description of Artificial Sequence: Synthetic oligonucleotide
  Target: LAMA2; (-) strand; PAM type: YTN; PAM sequence: CTG
aaaatactgaatcctctcta

SEQ ID NO: 231932 - DNA, 20 bp, Artificial Sequence
  Description of Artificial Sequence: Synthetic oligonucleotide
  Target: LAMA2; (-) strand; PAM type: YTN; PAM sequence: CTA
aaatatgaatctgaaaatac

SEQ ID NO: 231933 - DNA, 20 bp, Artificial Sequence
  Description of Artificial Sequence: Synthetic oligonucleotide
  Target: LAMA2; (-) strand; PAM type: YTN; PAM sequence: TTC
taaaatatgaatctgaaaat

SEQ ID NO: 231934 - DNA, 20 bp, Artificial Sequence
  Description of Artificial Sequence: Synthetic oligonucleotide
  Target: LAMA2; (-) strand; PAM type: YTN; PAM sequence: CTT
ctaaaatatgaatctgaaaa

SEQ ID NO: 231935 - DNA, 20 bp, Artificial Sequence
  Description of Artificial Sequence: Synthetic oligonucleotide
  Target: LAMA2; (-) strand; PAM type: YTN; PAM sequence: TTA
gtaaggaatagaatgcaatg

SEQ ID NO: 231936 - DNA, 20 bp, Artificial Sequence
  Description of Artificial Sequence: Synthetic oligonucleotide
  Target: LAMA2; (-) strand; PAM type: YTN; PAM sequence: CTT
agtaaggaatagaatgcaat

SEQ ID NO: 231937 - DNA, 20 bp, Artificial Sequence
  Description of Artificial Sequence: Synthetic oligonucleotide
  Target: LAMA2; (-) strand; PAM type: YTN; PAM sequence: CTG
ggatgcttagtaaggaatag

SEQ ID NO: 231938 - DNA, 20 bp, Artificial Sequence
  Description of Artificial Sequence: Synthetic oligonucleotide
  Target: LAMA2; (-) strand; PAM type: YTN; PAM sequence: CTA
cctgggatgcttagtaagga

SEQ ID NO: 231939 - DNA, 20 bp, Artificial Sequence
  Description of Artificial Sequence: Synthetic oligonucleotide
  Target: LAMA2; (-) strand; PAM type: YTN; PAM sequence: TTG
aatctacctgggatgcttag

SEQ ID NO: 231940 - DNA, 20 bp, Artificial Sequence
  Description of Artificial Sequence: Synthetic oligonucleotide
  Target: LAMA2; (-) strand; PAM type: YTN; PAM sequence: CTA
attgaatctacctgggatgc

SEQ ID NO: 231941 - DNA, 20 bp, Artificial Sequence
  Description of Artificial Sequence: Synthetic oligonucleotide
  Target: LAMA2; (-) strand; PAM type: YTN; PAM sequence: TTC
cacctaattgaatctacctg

SEQ ID NO: 231942 - DNA, 20 bp, Artificial Sequence
  Description of Artificial Sequence: Synthetic oligonucleotide
  Target: LAMA2; (-) strand; PAM type: YTN; PAM sequence: CTC
atgataaaaatatgaatatg

SEQ ID NO: 231943 - DNA, 20 bp, Artificial Sequence
  Description of Artificial Sequence: Synthetic oligonucleotide
  Target: LAMA2; (-) strand; PAM type: YTN; PAM sequence: CTC
aaaatgcctcatgataaaaa

SEQ ID NO: 231944 - DNA, 20 bp, Artificial Sequence
  Description of Artificial Sequence: Synthetic oligonucleotide
  Target: LAMA2; (-) strand; PAM type: YTN; PAM sequence: CTG
gtgtcacaaagaatagactc

SEQ ID NO: 231945 - DNA, 20 bp, Artificial Sequence
  Description of Artificial Sequence: Synthetic oligonucleotide
  Target: LAMA2; (-) strand; PAM type: YTN; PAM sequence: TTC
tggtgtcacaaagaatagac

SEQ ID NO: 231946 - DNA, 20 bp, Artificial Sequence
  Description of Artificial Sequence: Synthetic oligonucleotide
  Target: LAMA2; (-) strand; PAM type: YTN; PAM sequence: CTA
attctggtgtcacaaagaat

SEQ ID NO: 231947 - DNA, 20 bp, Artificial Sequence
  Description of Artificial Sequence: Synthetic oligonucleotide
  Target: LAMA2; (-) strand; PAM type: YTN; PAM sequence: CTG
agatgagaaactaattctgg

SEQ ID NO: 231948 - DNA, 20 bp, Artificial Sequence
  Description of Artificial Sequence: Synthetic oligonucleotide
  Target: LAMA2; (-) strand; PAM type: YTN; PAM sequence: CTC
tgagatgagaaactaattct

SEQ ID NO: 231949 - DNA, 20 bp, Artificial Sequence
  Description of Artificial Sequence: Synthetic oligonucleotide
  Target: LAMA2; (-) strand; PAM type: YTN; PAM sequence: TTG
agtcaccagagaaatacagc

SEQ ID NO: 231950 - DNA, 20 bp, Artificial Sequence
  Description of Artificial Sequence: Synthetic oligonucleotide
  Target: LAMA2; (-) strand; PAM type: YTN; PAM sequence: CTT
gagtcaccagagaaatacag

SEQ ID NO: 231951 - DNA, 20 bp, Artificial Sequence
  Description of Artificial Sequence: Synthetic oligonucleotide
  Target: LAMA2; (-) strand; PAM type: YTN; PAM sequence: CTA
cttgagtcaccagagaaata

SEQ ID NO: 231952 - DNA, 20 bp, Artificial Sequence
  Description of Artificial Sequence: Synthetic oligonucleotide
  Target: LAMA2; (-) strand; PAM type: YTN; PAM sequence: CTG
ccaataaactacttgagtca

SEQ ID NO: 231953 - DNA, 20 bp, Artificial Sequence
  Description of Artificial Sequence: Synthetic oligonucleotide
  Target: LAMA2; (-) strand; PAM type: YTN; PAM sequence: CTG
actgccaataaactacttga

SEQ ID NO: 231954 - DNA, 20 bp, Artificial Sequence
  Description of Artificial Sequence: Synthetic oligonucleotide
  Target: LAMA2; (-) strand; PAM type: YTN; PAM sequence: TTA
caaactgactgccaataaac

SEQ ID NO: 231955 - DNA, 20 bp, Artificial Sequence
  Description of Artificial Sequence: Synthetic oligonucleotide
  Target: LAMA2; (-) strand; PAM type: YTN; PAM sequence: TTT
acaaactgactgccaataaa

SEQ ID NO: 231956 - DNA, 20 bp, Artificial Sequence
  Description of Artificial Sequence: Synthetic oligonucleotide
  Target: LAMA2; (-) strand; PAM type: YTN; PAM sequence: TTT
tacaaactgactgccaataa

SEQ ID NO: 231957 - DNA, 20 bp, Artificial Sequence
  Description of Artificial Sequence: Synthetic oligonucleotide
  Target: LAMA2; (-) strand; PAM type: YTN; PAM sequence: CTT
ttacaaactgactgccaata

SEQ ID NO: 231958 - DNA, 20 bp, Artificial Sequence
  Description of Artificial Sequence: Synthetic oligonucleotide
  Target: LAMA2; (-) strand; PAM type: YTN; PAM sequence: TTA
gataatcccagggagccttt

SEQ ID NO: 231959 - DNA, 20 bp, Artificial Sequence
  Description of Artificial Sequence: Synthetic oligonucleotide
  Target: LAMA2; (-) strand; PAM type: YTN; PAM sequence: TTT
agataatcccagggagcctt

SEQ ID NO: 231960 - DNA, 20 bp, Artificial Sequence
  Description of Artificial Sequence: Synthetic oligonucleotide
  Target: LAMA2; (-) strand; PAM type: YTN; PAM sequence: CTG
catttagataatcccaggga

SEQ ID NO: 231961 - DNA, 20 bp, Artificial Sequence
  Description of Artificial Sequence: Synthetic oligonucleotide
  Target: LAMA2; (-) strand; PAM type: YTN; PAM sequence: CTA
acgtcctgcatttagataat

SEQ ID NO: 231962 - DNA, 20 bp, Artificial Sequence
  Description of Artificial Sequence: Synthetic oligonucleotide
  Target: LAMA2; (-) strand; PAM type: YTN; PAM sequence: TTC
ctaacgtcctgcatttagat

SEQ ID NO: 231963 - DNA, 20 bp, Artificial Sequence
  Description of Artificial Sequence: Synthetic oligonucleotide
  Target: LAMA2; (-) strand; PAM type: YTN; PAM sequence: TTC
cattcctaacgtcctgcatt

SEQ ID NO: 231964 - DNA, 20 bp, Artificial Sequence
  Description of Artificial Sequence: Synthetic oligonucleotide
  Target: LAMA2; (-) strand; PAM type: YTN; PAM sequence: TTT
ccattcctaacgtcctgcat

SEQ ID NO: 231965 - DNA, 20 bp, Artificial Sequence
  Description of Artificial Sequence: Synthetic oligonucleotide
  Target: LAMA2; (-) strand; PAM type: YTN; PAM sequence: TTG
acaggagaggcaatgataca

SEQ ID NO: 231966 - DNA, 20 bp, Artificial Sequence
  Description of Artificial Sequence: Synthetic oligonucleotide
  Target: LAMA2; (-) strand; PAM type: YTN; PAM sequence: TTT
gacaggagaggcaatgatac

SEQ ID NO: 231967 - DNA, 20 bp, Artificial Sequence
  Description of Artificial Sequence: Synthetic oligonucleotide
  Target: LAMA2; (-) strand; PAM type: YTN; PAM sequence: TTT
tgacaggagaggcaatgata

SEQ ID NO: 231968 - DNA, 20 bp, Artificial Sequence
  Description of Artificial Sequence: Synthetic oligonucleotide
  Target: LAMA2; (-) strand; PAM type: YTN; PAM sequence: TTT
ttgacaggagaggcaatgat

SEQ ID NO: 231969 - DNA, 20 bp, Artificial Sequence
  Description of Artificial Sequence: Synthetic oligonucleotide
  Target: LAMA2; (-) strand; PAM type: YTN; PAM sequence: TTT
tttgacaggagaggcaatga

SEQ ID NO: 231970 - DNA, 20 bp, Artificial Sequence
  Description of Artificial Sequence: Synthetic oligonucleotide
  Target: LAMA2; (-) strand; PAM type: YTN; PAM sequence: TTA
cattttttgacaggagaggc

SEQ ID NO: 231971 - DNA, 20 bp, Artificial Sequence
  Description of Artificial Sequence: Synthetic oligonucleotide
  Target: LAMA2; (-) strand; PAM type: YTN; PAM sequence: TTA
attacattttttgacaggag

SEQ ID NO: 231972 - DNA, 20 bp, Artificial Sequence
  Description of Artificial Sequence: Synthetic oligonucleotide
  Target: LAMA2; (-) strand; PAM type: YTN; PAM sequence: TTG
taagatgatatatcatgtgt

SEQ ID NO: 231973 - DNA, 20 bp, Artificial Sequence
  Description of Artificial Sequence: Synthetic oligonucleotide
  Target: LAMA2; (-) strand; PAM type: YTN; PAM sequence: TTT
gtaagatgatatatcatgtg

SEQ ID NO: 231974 - DNA, 20 bp, Artificial Sequence
  Description of Artificial Sequence: Synthetic oligonucleotide
  Target: LAMA2; (-) strand; PAM type: YTN; PAM sequence: CTT
tgtaagatgatatatcatgt

SEQ ID NO: 231975 - DNA, 20 bp, Artificial Sequence
  Description of Artificial Sequence: Synthetic oligonucleotide
  Target: LAMA2; (-) strand; PAM type: YTN; PAM sequence: TTC
atccactttgtaagatgata

SEQ ID NO: 231976 - DNA, 20 bp, Artificial Sequence
  Description of Artificial Sequence: Synthetic oligonucleotide
  Target: LAMA2; (-) strand; PAM type: YTN; PAM sequence: TTT
catccactttgtaagatgat

SEQ ID NO: 231977 - DNA, 20 bp, Artificial Sequence
  Description of Artificial Sequence: Synthetic oligonucleotide
  Target: LAMA2; (-) strand; PAM type: YTN; PAM sequence: TTT
tcatccactttgtaagatga

SEQ ID NO: 231978 - DNA, 20 bp, Artificial Sequence
  Description of Artificial Sequence: Synthetic oligonucleotide
  Target: LAMA2; (-) strand; PAM type: YTN; PAM sequence: CTG
gaattttcatccactttgta

SEQ ID NO: 231979 - DNA, 20 bp, Artificial Sequence
  Description of Artificial Sequence: Synthetic oligonucleotide
  Target: LAMA2; (-) strand; PAM type: YTN; PAM sequence: CTC
aaggtcacccactggaattt

SEQ ID NO: 231980 - DNA, 20 bp, Artificial Sequence
  Description of Artificial Sequence: Synthetic oligonucleotide
  Target: LAMA2; (-) strand; PAM type: YTN; PAM sequence: CTG
tgactcaaggtcacccactg

SEQ ID NO: 231981 - DNA, 20 bp, Artificial Sequence
  Description of Artificial Sequence: Synthetic oligonucleotide
  Target: LAMA2; (-) strand; PAM type: YTN; PAM sequence: CTG
aggagctgtgactcaaggtc

SEQ ID NO: 231982 - DNA, 20 bp, Artificial Sequence
  Description of Artificial Sequence: Synthetic oligonucleotide
  Target: LAMA2; (-) strand; PAM type: YTN; PAM sequence: TTG
ggtacaggacagtgtgtgca

SEQ ID NO: 231983 - DNA, 20 bp, Artificial Sequence
  Description of Artificial Sequence: Synthetic oligonucleotide
  Target: LAMA2; (-) strand; PAM type: YTN; PAM sequence: CTT
gggtacaggacagtgtgtgc

SEQ ID NO: 231984 - DNA, 20 bp, Artificial Sequence
  Description of Artificial Sequence: Synthetic oligonucleotide
  Target: LAMA2; (-) strand; PAM type: YTN; PAM sequence: CTG
ggagatgcttgggtacagga

SEQ ID NO: 231985 - DNA, 20 bp, Artificial Sequence
  Description of Artificial Sequence: Synthetic oligonucleotide
  Target: LAMA2; (-) strand; PAM type: YTN; PAM sequence: CTA
tctgggagatgcttgggtac

SEQ ID NO: 231986 - DNA, 20 bp, Artificial Sequence
  Description of Artificial Sequence: Synthetic oligonucleotide
  Target: LAMA2; (-) strand; PAM type: YTN; PAM sequence: CTG
tgctatctgggagatgcttg

SEQ ID NO: 231987 - DNA, 20 bp, Artificial Sequence
  Description of Artificial Sequence: Synthetic oligonucleotide
  Target: LAMA2; (-) strand; PAM type: YTN; PAM sequence: TTC
tgtgctatctgggagatgct

SEQ ID NO: 231988 - DNA, 20 bp, Artificial Sequence
  Description of Artificial Sequence: Synthetic oligonucleotide
  Target: LAMA2; (-) strand; PAM type: YTN; PAM sequence: CTA
aaggtacagggatgcaggaa

SEQ ID NO: 231989 - DNA, 20 bp, Artificial Sequence
  Description of Artificial Sequence: Synthetic oligonucleotide
  Target: LAMA2; (-) strand; PAM type: YTN; PAM sequence: CTC
acacacacatacacacacaa

SEQ ID NO: 231990 - DNA, 20 bp, Artificial Sequence
  Description of Artificial Sequence: Synthetic oligonucleotide
  Target: LAMA2; (-) strand; PAM type: YTN; PAM sequence: CTC
acactcacacacacatacac

SEQ ID NO: 231991 - DNA, 20 bp, Artificial Sequence
  Description of Artificial Sequence: Synthetic oligonucleotide
  Target: LAMA2; (-) strand; PAM type: YTN; PAM sequence: CTG
aaaatacacatacacactca

SEQ ID NO: 231992 - DNA, 20 bp, Artificial Sequence
  Description of Artificial Sequence: Synthetic oligonucleotide
  Target: LAMA2; (-) strand; PAM type: YTN; PAM sequence: TTG
aactgaaaatacacatacac

SEQ ID NO: 231993 - DNA, 20 bp, Artificial Sequence
  Description of Artificial Sequence: Synthetic oligonucleotide
  Target: LAMA2; (-) strand; PAM type: YTN; PAM sequence: TTT
gaactgaaaatacacataca

SEQ ID NO: 231994 - DNA, 20 bp, Artificial Sequence
  Description of Artificial Sequence: Synthetic oligonucleotide
  Target: LAMA2; (-) strand; PAM type: YTN; PAM sequence: TTT
tgaactgaaaatacacatac

SEQ ID NO: 231995 - DNA, 20 bp, Artificial Sequence
  Description of Artificial Sequence: Synthetic oligonucleotide
  Target: LAMA2; (-) strand; PAM type: YTN; PAM sequence: TTG
agtggtagattttgaactga

SEQ ID NO: 231996 - DNA, 20 bp, Artificial Sequence
  Description of Artificial Sequence: Synthetic oligonucleotide
  Target: LAMA2; (-) strand; PAM type: YTN; PAM sequence: TTA
aagaaagtgaaattgagtgg

SEQ ID NO: 231997 - DNA, 20 bp, Artificial Sequence
  Description of Artificial Sequence: Synthetic oligonucleotide
  Target: LAMA2; (-) strand; PAM type: YTN; PAM sequence: TTG
ttaaagaaagtgaaattgag

SEQ ID NO: 231998 - DNA, 20 bp, Artificial Sequence
  Description of Artificial Sequence: Synthetic oligonucleotide
  Target: LAMA2; (-) strand; PAM type: YTN; PAM sequence: TTG
aaccaaaccaaaattgttaa

SEQ ID NO: 231999 - DNA, 20 bp, Artificial Sequence
  Description of Artificial Sequence: Synthetic oligonucleotide
  Target: LAMA2; (-) strand; PAM type: YTN; PAM sequence: CTA
tgcaacaaattgaaccaaac

SEQ ID NO: 232000 - DNA, 20 bp, Artificial Sequence
  Description of Artificial Sequence: Synthetic oligonucleotide
  Target: LAMA2; (-) strand; PAM type: YTN; PAM sequence: TTA
cctatgcaacaaattgaacc

SEQ ID NO: 232001 - DNA, 20 bp, Artificial Sequence
  Description of Artificial Sequence: Synthetic oligonucleotide
  Target: LAMA2; (-) strand; PAM type: YTN; PAM sequence: TTA
ttacctatgcaacaaattga

SEQ ID NO: 232002 - DNA, 20 bp, Artificial Sequence
  Description of Artificial Sequence: Synthetic oligonucleotide
  Target: LAMA2; (-) strand; PAM type: YTN; PAM sequence: TTA
ttattacctatgcaacaaat

SEQ ID NO: 232003 - DNA, 20 bp, Artificial Sequence
  Description of Artificial Sequence: Synthetic oligonucleotide
  Target: LAMA2; (-) strand; PAM type: YTN; PAM sequence: CTG
taaatggattattattacct

SEQ ID NO: 232004 - DNA, 20 bp, Artificial Sequence
  Description of Artificial Sequence: Synthetic oligonucleotide
  Target: LAMA2; (-) strand; PAM type: YTN; PAM sequence: TTC
tgtaaatggattattattac

SEQ ID NO: 232005 - DNA, 20 bp, Artificial Sequence
  Description of Artificial Sequence: Synthetic oligonucleotide
  Target: LAMA2; (-) strand; PAM type: YTN; PAM sequence: TTG
tattctgtaaatggattatt

SEQ ID NO: 232006 - DNA, 20 bp, Artificial Sequence
  Description of Artificial Sequence: Synthetic oligonucleotide
  Target: LAMA2; (-) strand; PAM type: YTN; PAM sequence: TTT
gtattctgtaaatggattat

SEQ ID NO: 232007 - DNA, 20 bp, Artificial Sequence
  Description of Artificial Sequence: Synthetic oligonucleotide
  Target: LAMA2; (-) strand; PAM type: YTN; PAM sequence: TTT
tgtattctgtaaatggatta

SEQ ID NO: 232008 - DNA, 20 bp, Artificial Sequence
  Description of Artificial Sequence: Synthetic oligonucleotide
  Target: LAMA2; (-) strand; PAM type: YTN; PAM sequence: TTT
ttgtattctgtaaatggatt

SEQ ID NO: 232009 - DNA, 20 bp, Artificial Sequence
  Description of Artificial Sequence: Synthetic oligonucleotide
  Target: LAMA2; (-) strand; PAM type: YTN; PAM sequence: CTA
tttttgtattctgtaaatgg

SEQ ID NO: 232010 - DNA, 20 bp, Artificial Sequence
  Description of Artificial Sequence: Synthetic oligonucleotide
  Target: LAMA2; (-) strand; PAM type: YTN; PAM sequence: TTA
cactatttttgtattctgta

SEQ ID NO: 232011 - DNA, 20 bp, Artificial Sequence
  Description of Artificial Sequence: Synthetic oligonucleotide
  Target: LAMA2; (-) strand; PAM type: YTN; PAM sequence: CTT
acactatttttgtattctgt

SEQ ID NO: 232012 - DNA, 20 bp, Artificial Sequence
  Description of Artificial Sequence: Synthetic oligonucleotide
  Target: LAMA2; (-) strand; PAM type: YTN; PAM sequence: CTC
aacatacagataggaagaag

SEQ ID NO: 232013 - DNA, 20 bp, Artificial Sequence
  Description of Artificial Sequence: Synthetic oligonucleotide
  Target: LAMA2; (-) strand; PAM type: YTN; PAM sequence: CTC
tcaacatacagataggaaga

SEQ ID NO: 232014 - DNA, 20 bp, Artificial Sequence
  Description of Artificial Sequence: Synthetic oligonucleotide
  Target: LAMA2; (-) strand; PAM type: YTN; PAM sequence: CTG
caaccataaaaaagaatgag

SEQ ID NO: 232015 - DNA, 20 bp, Artificial Sequence
  Description of Artificial Sequence: Synthetic oligonucleotide
  Target: LAMA2; (-) strand; PAM type: YTN; PAM sequence: TTA
tctgcaaccataaaaaagaa

SEQ ID NO: 232016 - DNA, 20 bp, Artificial Sequence
  Description of Artificial Sequence: Synthetic oligonucleotide
  Target: LAMA2; (-) strand; PAM type: YTN; PAM sequence: CTG
cataatgaattatctgcaac

SEQ ID NO: 232017 - DNA, 20 bp, Artificial Sequence
  Description of Artificial Sequence: Synthetic oligonucleotide
  Target: LAMA2; (-) strand; PAM type: YTN; PAM sequence: TTG
tatatctgcataatgaatta

SEQ ID NO: 232018 - DNA, 20 bp, Artificial Sequence
  Description of Artificial Sequence: Synthetic oligonucleotide
  Target: LAMA2; (-) strand; PAM type: YTN; PAM sequence: TTA
aataaattgtatatctgcat

SEQ ID NO: 232019 - DNA, 20 bp, Artificial Sequence
  Description of Artificial Sequence: Synthetic oligonucleotide
  Target: LAMA2; (-) strand; PAM type: YTN; PAM sequence: CTG
gttaaataaattgtatatct

SEQ ID NO: 232020 - DNA, 20 bp, Artificial Sequence
  Description of Artificial Sequence: Synthetic oligonucleotide
  Target: LAMA2; (-) strand; PAM type: YTN; PAM sequence: CTA
atatccatcaatatgggact

SEQ ID NO: 232021 - DNA, 20 bp, Artificial Sequence
  Description of Artificial Sequence: Synthetic oligonucleotide
  Target: LAMA2; (-) strand; PAM type: YTN; PAM sequence: CTG
gaaataacctaatatccatc

SEQ ID NO: 232022 - DNA, 20 bp, Artificial Sequence
  Description of Artificial Sequence: Synthetic oligonucleotide
  Target: LAMA2; (-) strand; PAM type: YTN; PAM sequence: TTG
gtcacatcaaaggactggaa

SEQ ID NO: 232023 - DNA, 20 bp, Artificial Sequence
  Description of Artificial Sequence: Synthetic oligonucleotide
  Target: LAMA2; (-) strand; PAM type: YTN; PAM sequence: TTT
ggtcacatcaaaggactgga

SEQ ID NO: 232024 - DNA, 20 bp, Artificial Sequence
  Description of Artificial Sequence: Synthetic oligonucleotide
  Target: LAMA2; (-) strand; PAM type: YTN; PAM sequence: TTT
tggtcacatcaaaggactgg

SEQ ID NO: 232025 - DNA, 20 bp, Artificial Sequence
  Description of Artificial Sequence: Synthetic oligonucleotide
  Target: LAMA2; (-) strand; PAM type: YTN; PAM sequence: TTT
ttggtcacatcaaaggactg

SEQ ID NO: 232026 - DNA, 20 bp, Artificial Sequence
  Description of Artificial Sequence: Synthetic oligonucleotide
  Target: LAMA2; (-) strand; PAM type: YTN; PAM sequence: TTT
tttggtcacatcaaaggact

SEQ ID NO: 232027 - DNA, 20 bp, Artificial Sequence
  Description of Artificial Sequence: Synthetic oligonucleotide
  Target: LAMA2; (-) strand; PAM type: YTN; PAM sequence: CTT
ttttggtcacatcaaaggac

SEQ ID NO: 232028 - DNA, 20 bp, Artificial Sequence
  Description of Artificial Sequence: Synthetic oligonucleotide
  Target: LAMA2; (-) strand; PAM type: YTN; PAM sequence: TTA
taatcttttttggtcacatc

SEQ ID NO: 232029 - DNA, 20 bp, Artificial Sequence
  Description of Artificial Sequence: Synthetic oligonucleotide
  Target: LAMA2; (-) strand; PAM type: YTN; PAM sequence: TTA
ttataatcttttttggtcac

SEQ ID NO: 232030 - DNA, 20 bp, Artificial Sequence
  Description of Artificial Sequence: Synthetic oligonucleotide
  Target: LAMA2; (-) strand; PAM type: YTN; PAM sequence: TTT
attataatcttttttggtca

SEQ ID NO: 232031 - DNA, 20 bp, Artificial Sequence
  Description of Artificial Sequence: Synthetic oligonucleotide
  Target: LAMA2; (-) strand; PAM type: YTN; PAM sequence: TTT
tattataatcttttttggtc

SEQ ID NO: 232032 - DNA, 20 bp, Artificial Sequence
  Description of Artificial Sequence: Synthetic oligonucleotide
  Target: LAMA2; (-) strand; PAM type: YTN; PAM sequence: TTT
ttattataatcttttttggt

SEQ ID NO: 232033 - DNA, 20 bp, Artificial Sequence
  Description of Artificial Sequence: Synthetic oligonucleotide
  Target: LAMA2; (-) strand; PAM type: YTN; PAM sequence: TTT
tttattataatcttttttgg

SEQ ID NO: 232034 - DNA, 20 bp, Artificial Sequence
  Description of Artificial Sequence: Synthetic oligonucleotide
  Target: LAMA2; (-) strand; PAM type: YTN; PAM sequence: TTC
agcattttttattataatct

SEQ ID NO: 232035 - DNA, 20 bp, Artificial Sequence
  Description of Artificial Sequence: Synthetic oligonucleotide
  Target: LAMA2; (-) strand; PAM type: YTN; PAM sequence: TTT
cagcattttttattataatc

SEQ ID NO: 232036 - DNA, 20 bp, Artificial Sequence
  Description of Artificial Sequence: Synthetic oligonucleotide
  Target: LAMA2; (-) strand; PAM type: YTN; PAM sequence: CTT
tcagcattttttattataat

SEQ ID NO: 232037 - DNA, 20 bp, Artificial Sequence
  Description of Artificial Sequence: Synthetic oligonucleotide
  Target: LAMA2; (-) strand; PAM type: YTN; PAM sequence: TTC
tttcagcattttttattata

SEQ ID NO: 232038 - DNA, 20 bp, Artificial Sequence
  Description of Artificial Sequence: Synthetic oligonucleotide
  Target: LAMA2; (-) strand; PAM type: YTN; PAM sequence: TTA
ttctttcagcattttttatt

SEQ ID NO: 232039 - DNA, 20 bp, Artificial Sequence
  Description of Artificial Sequence: Synthetic oligonucleotide
  Target: LAMA2; (-) strand; PAM type: YTN; PAM sequence: CTG
acaaagacaatattattctt

SEQ ID NO: 232040 - DNA, 20 bp, Artificial Sequence
  Description of Artificial Sequence: Synthetic oligonucleotide
  Target: LAMA2; (-) strand; PAM type: YTN; PAM sequence: TTA
tggccgcccaaactgacaaa

SEQ ID NO: 232041 - DNA, 20 bp, Artificial Sequence
  Description of Artificial Sequence: Synthetic oligonucleotide
  Target: LAMA2; (-) strand; PAM type: YTN; PAM sequence: CTT
atggccgcccaaactgacaa

SEQ ID NO: 232042 - DNA, 20 bp, Artificial Sequence
  Description of Artificial Sequence: Synthetic oligonucleotide
  Target: LAMA2; (-) strand; PAM type: YTN; PAM sequence: TTC
ttatggccgcccaaactgac

SEQ ID NO: 232043 - DNA, 20 bp, Artificial Sequence
  Description of Artificial Sequence: Synthetic oligonucleotide
  Target: LAMA2; (-) strand; PAM type: YTN; PAM sequence: TTT
cttatggccgcccaaactga

SEQ ID NO: 232044 - DNA, 20 bp, Artificial Sequence
  Description of Artificial Sequence: Synthetic oligonucleotide
  Target: LAMA2; (-) strand; PAM type: YTN; PAM sequence: CTT
tcttatggccgcccaaactg

SEQ ID NO: 232045 - DNA, 20 bp, Artificial Sequence
  Description of Artificial Sequence: Synthetic oligonucleotide
  Target: LAMA2; (-) strand; PAM type: YTN; PAM sequence: CTA
tggaactttcttatggccgc

SEQ ID NO: 232046 - DNA, 20 bp, Artificial Sequence
  Description of Artificial Sequence: Synthetic oligonucleotide
  Target: LAMA2; (-) strand; PAM type: YTN; PAM sequence: CTA
gtctatggaactttcttatg

SEQ ID NO: 232047 - DNA, 20 bp, Artificial Sequence
  Description of Artificial Sequence: Synthetic oligonucleotide
  Target: LAMA2; (-) strand; PAM type: YTN; PAM sequence: TTA
caacccacctagtctatgga

SEQ ID NO: 232048 - DNA, 20 bp, Artificial Sequence
  Description of Artificial Sequence: Synthetic oligonucleotide
  Target: LAMA2; (-) strand; PAM type: YTN; PAM sequence: TTT
acaacccacctagtctatgg

SEQ ID NO: 232049 - DNA, 20 bp, Artificial Sequence
  Description of Artificial Sequence: Synthetic oligonucleotide
  Target: LAMA2; (-) strand; PAM type: YTN; PAM sequence: TTG
tttacaacccacctagtcta

SEQ ID NO: 232050 - DNA, 20 bp, Artificial Sequence
  Description of Artificial Sequence: Synthetic oligonucleotide
  Target: LAMA2; (-) strand; PAM type: YTN; PAM sequence: CTT
gtttacaacccacctagtct

SEQ ID NO: 232051 - DNA, 20 bp, Artificial Sequence
  Description of Artificial Sequence: Synthetic oligonucleotide
  Target: LAMA2; (-) strand; PAM type: YTN; PAM sequence: CTC
ttgtttacaacccacctagt

SEQ ID NO: 232052 - DNA, 20 bp, Artificial Sequence
  Description of Artificial Sequence: Synthetic oligonucleotide
  Target: LAMA2; (-) strand; PAM type: YTN; PAM sequence: TTC
tcttgtttacaacccaccta

SEQ ID NO: 232053 - DNA, 20 bp, Artificial Sequence
  Description of Artificial Sequence: Synthetic oligonucleotide
  Target: LAMA2; (-) strand; PAM type: YTN; PAM sequence: TTT
ctcttgtttacaacccacct

SEQ ID NO: 232054 - DNA, 20 bp, Artificial Sequence
  Description of Artificial Sequence: Synthetic oligonucleotide
  Target: LAMA2; (-) strand; PAM type: YTN; PAM sequence: CTG
tggggaaataaatttctctt

SEQ ID NO: 232055 - DNA, 20 bp, Artificial Sequence
  Description of Artificial Sequence: Synthetic oligonucleotide
  Target: LAMA2; (-) strand; PAM type: YTN; PAM sequence: CTC
cagtactgtggggaaataaa

SEQ ID NO: 232056 - DNA, 20 bp, Artificial Sequence
  Description of Artificial Sequence: Synthetic oligonucleotide
  Target: LAMA2; (-) strand; PAM type: YTN; PAM sequence: TTC
agcctccagtactgtgggga

SEQ ID NO: 232057 - DNA, 20 bp, Artificial Sequence
  Description of Artificial Sequence: Synthetic oligonucleotide
  Target: LAMA2; (-) strand; PAM type: YTN; PAM sequence: TTT
cagcctccagtactgtgggg

SEQ ID NO: 232058 - DNA, 20 bp, Artificial Sequence
  Description of Artificial Sequence: Synthetic oligonucleotide
  Target: LAMA2; (-) strand; PAM type: YTN; PAM sequence: TTT
tcagcctccagtactgtggg

SEQ ID NO: 232059 - DNA, 20 bp, Artificial Sequence
  Description of Artificial Sequence: Synthetic oligonucleotide
  Target: LAMA2; (-) strand; PAM type: YTN; PAM sequence: CTC
agattttcagcctccagtac

SEQ ID NO: 232060 - DNA, 20 bp, Artificial Sequence
  Description of Artificial Sequence: Synthetic oligonucleotide
  Target: LAMA2; (-) strand; PAM type: YTN; PAM sequence: CTG
atctcagattttcagcctcc

SEQ ID NO: 232061 - DNA, 20 bp, Artificial Sequence
  Description of Artificial Sequence: Synthetic oligonucleotide
  Target: LAMA2; (-) strand; PAM type: YTN; PAM sequence: CTC
accaaagcataaccatgcgg

SEQ ID NO: 232062 - DNA, 20 bp, Artificial Sequence
  Description of Artificial Sequence: Synthetic oligonucleotide
  Target: LAMA2; (-) strand; PAM type: YTN; PAM sequence: CTG
caagccccgaaacagtcctc

SEQ ID NO: 232063 - DNA, 20 bp, Artificial Sequence
  Description of Artificial Sequence: Synthetic oligonucleotide
  Target: LAMA2; (-) strand; PAM type: YTN; PAM sequence: CTA
caagaagtcagcagtctgca

SEQ ID NO: 232064 - DNA, 20 bp, Artificial Sequence
  Description of Artificial Sequence: Synthetic oligonucleotide
  Target: LAMA2; (-) strand; PAM type: YTN; PAM sequence: TTC
aaccatgtgaggctacaaga

SEQ ID NO: 232065 - DNA, 20 bp, Artificial Sequence
  Description of Artificial Sequence: Synthetic oligonucleotide
  Target: LAMA2; (-) strand; PAM type: YTN; PAM sequence: TTT
caaccatgtgaggctacaag

SEQ ID NO: 232066 - DNA, 20 bp, Artificial Sequence
  Description of Artificial Sequence: Synthetic oligonucleotide
  Target: LAMA2; (-) strand; PAM type: YTN; PAM sequence: CTT
tcaaccatgtgaggctacaa

SEQ ID NO: 232067 - DNA, 20 bp, Artificial Sequence
  Description of Artificial Sequence: Synthetic oligonucleotide
  Target: LAMA2; (-) strand; PAM type: YTN; PAM sequence: CTC
tttcaaccatgtgaggctac

SEQ ID NO: 232068 - DNA, 20 bp, Artificial Sequence
  Description of Artificial Sequence: Synthetic oligonucleotide
  Target: LAMA2; (-) strand; PAM type: YTN; PAM sequence: CTC
tctttcaaccatgtgaggct

SEQ ID NO: 232069 - DNA, 20 bp, Artificial Sequence
  Description of Artificial Sequence: Synthetic oligonucleotide
  Target: LAMA2; (-) strand; PAM type: YTN; PAM sequence: CTA
gctctctttcaaccatgtga

SEQ ID NO: 232070 - DNA, 20 bp, Artificial Sequence
  Description of Artificial Sequence: Synthetic oligonucleotide
  Target: LAMA2; (-) strand; PAM type: YTN; PAM sequence: CTA
gctagctctctttcaaccat

SEQ ID NO: 232071 - DNA, 20 bp, Artificial Sequence
  Description of Artificial Sequence: Synthetic oligonucleotide
  Target: LAMA2; (-) strand; PAM type: YTN; PAM sequence: CTA
ataaaaagaggccagagagc

SEQ ID NO: 232072 - DNA, 20 bp, Artificial Sequence
  Description of Artificial Sequence: Synthetic oligonucleotide
  Target: LAMA2; (-) strand; PAM type: YTN; PAM sequence: TTA
gtgacctaataaaaagaggc

SEQ ID NO: 232073 - DNA, 20 bp, Artificial Sequence
  Description of Artificial Sequence: Synthetic oligonucleotide
  Target: LAMA2; (-) strand; PAM type: YTN; PAM sequence: CTG
aatgagattagtgacctaat

SEQ ID NO: 232074 - DNA, 20 bp, Artificial Sequence
  Description of Artificial Sequence: Synthetic oligonucleotide
  Target: LAMA2; (-) strand; PAM type: YTN; PAM sequence: CTC
ctgaatgagattagtgacct

SEQ ID NO: 232075 - DNA, 20 bp, Artificial Sequence
  Description of Artificial Sequence: Synthetic oligonucleotide
  Target: LAMA2; (-) strand; PAM type: YTN; PAM sequence: CTG
agggtggagccctcctgaat

SEQ ID NO: 232076 - DNA, 20 bp, Artificial Sequence
  Description of Artificial Sequence: Synthetic oligonucleotide
  Target: LAMA2; (-) strand; PAM type: YTN; PAM sequence: TTA
gatcctgagggtggagccct

SEQ ID NO: 232077 - DNA, 20 bp, Artificial Sequence
  Description of Artificial Sequence: Synthetic oligonucleotide
  Target: LAMA2; (-) strand; PAM type: YTN; PAM sequence: TTG
gtaggtaattagatcctgag

SEQ ID NO: 232078 - DNA, 20 bp, Artificial Sequence
  Description of Artificial Sequence: Synthetic oligonucleotide
  Target: LAMA2; (-) strand; PAM type: YTN; PAM sequence: TTT
ggtaggtaattagatcctga

SEQ ID NO: 232079 - DNA, 20 bp, Artificial Sequence
  Description of Artificial Sequence: Synthetic oligonucleotide
  Target: LAMA2; (-) strand; PAM type: YTN; PAM sequence: TTG
ggggcaaggcgtttggtagg

SEQ ID NO: 232080 - DNA, 20 bp, Artificial Sequence
  Description of Artificial Sequence: Synthetic oligonucleotide
  Target: LAMA2; (-) strand; PAM type: YTN; PAM sequence: TTT
gggggcaaggcgtttggtag

SEQ ID NO: 232081 - DNA, 20 bp, Artificial Sequence
  Description of Artificial Sequence: Synthetic oligonucleotide
  Target: LAMA2; (-) strand; PAM type: YTN; PAM sequence: CTA
atcccaaatgtgatgatatt

SEQ ID NO: 232082 - DNA, 20 bp, Artificial Sequence
  Description of Artificial Sequence: Synthetic oligonucleotide
  Target: LAMA2; (-) strand; PAM type: YTN; PAM sequence: TTG
aaaccctaatcccaaatgtg

SEQ ID NO: 232083 - DNA, 20 bp, Artificial Sequence
  Description of Artificial Sequence: Synthetic oligonucleotide
  Target: LAMA2; (-) strand; PAM type: YTN; PAM sequence: TTC
atatgttgaaaccctaatcc

SEQ ID NO: 232084 - DNA, 20 bp, Artificial Sequence
  Description of Artificial Sequence: Synthetic oligonucleotide
  Target: LAMA2; (-) strand; PAM type: YTN; PAM sequence: CTA
aaattcatatgttgaaaccc

SEQ ID NO: 232085 - DNA, 20 bp, Artificial Sequence
  Description of Artificial Sequence: Synthetic oligonucleotide
  Target: LAMA2; (-) strand; PAM type: YTN; PAM sequence: CTA
ctaaaattcatatgttgaaa

SEQ ID NO: 232086 - DNA, 20 bp, Artificial Sequence
  Description of Artificial Sequence: Synthetic oligonucleotide
  Target: LAMA2; (-) strand; PAM type: YTN; PAM sequence: CTC
ccccctactaaaattcatat

SEQ ID NO: 232087 - DNA, 20 bp, Artificial Sequence
  Description of Artificial Sequence: Synthetic oligonucleotide
  Target: LAMA2; (-) strand; PAM type: YTN; PAM sequence: TTG
cctcccccctactaaaattc

SEQ ID NO: 232088 - DNA, 20 bp, Artificial Sequence
  Description of Artificial Sequence: Synthetic oligonucleotide
  Target: LAMA2; (-) strand; PAM type: YTN; PAM sequence: TTT
gcctcccccctactaaaatt

SEQ ID NO: 232089 - DNA, 20 bp, Artificial Sequence
  Description of Artificial Sequence: Synthetic oligonucleotide
  Target: LAMA2; (-) strand; PAM type: YTN; PAM sequence: CTG
aatgtttgcctcccccctac

SEQ ID NO: 232090 - DNA, 20 bp, Artificial Sequence
  Description of Artificial Sequence: Synthetic oligonucleotide
  Target: LAMA2; (-) strand; PAM type: YTN; PAM sequence: CTA
atggactgaatgtttgcctc

SEQ ID NO: 232091 - DNA, 20 bp, Artificial Sequence
  Description of Artificial Sequence: Synthetic oligonucleotide
  Target: LAMA2; (-) strand; PAM type: YTN; PAM sequence: CTG
aatatggctaatggactgaa

SEQ ID NO: 232092 - DNA, 20 bp, Artificial Sequence
  Description of Artificial Sequence: Synthetic oligonucleotide
  Target: LAMA2; (-) strand; PAM type: YTN; PAM sequence: TTA
caggtgaactgaatatggct

SEQ ID NO: 232093 - DNA, 20 bp, Artificial Sequence
  Description of Artificial Sequence: Synthetic oligonucleotide
  Target: LAMA2; (-) strand; PAM type: YTN; PAM sequence: CTA
tattacaggtgaactgaata

SEQ ID NO: 232094 - DNA, 20 bp, Artificial Sequence
  Description of Artificial Sequence: Synthetic oligonucleotide
  Target: LAMA2; (-) strand; PAM type: YTN; PAM sequence: CTA
cagacataaaataatacaga

SEQ ID NO: 232095 - DNA, 20 bp, Artificial Sequence
  Description of Artificial Sequence: Synthetic oligonucleotide
  Target: LAMA2; (-) strand; PAM type: YTN; PAM sequence: TTC
tacagacataaaataataca

SEQ ID NO: 232096 - DNA, 20 bp, Artificial Sequence
  Description of Artificial Sequence: Synthetic oligonucleotide
  Target: LAMA2; (-) strand; PAM type: YTN; PAM sequence: TTA
ttctacagacataaaataat

SEQ ID NO: 232097 - DNA, 20 bp, Artificial Sequence
  Description of Artificial Sequence: Synthetic oligonucleotide
  Target: LAMA2; (-) strand; PAM type: YTN; PAM sequence: CTA
ggaattattctacagacata

SEQ ID NO: 232098 - DNA, 20 bp, Artificial Sequence
  Description of Artificial Sequence: Synthetic oligonucleotide
  Target: LAMA2; (-) strand; PAM type: YTN; PAM sequence: TTC
taggaattattctacagaca

SEQ ID NO: 232099 - DNA, 20 bp, Artificial Sequence
  Description of Artificial Sequence: Synthetic oligonucleotide
  Target: LAMA2; (-) strand; PAM type: YTN; PAM sequence: CTT
ctaggaattattctacagac

SEQ ID NO: 232100 - DNA, 20 bp, Artificial Sequence
  Description of Artificial Sequence: Synthetic oligonucleotide
  Target: LAMA2; (-) strand; PAM type: YTN; PAM sequence: TTC
cacttctaggaattattcta

SEQ ID NO: 232101 - DNA, 20 bp, Artificial Sequence
  Description of Artificial Sequence: Synthetic oligonucleotide
  Target: LAMA2; (-) strand; PAM type: YTN; PAM sequence: CTA
gcaattccacttctaggaat

SEQ ID NO: 232102 - DNA, 20 bp, Artificial Sequence
  Description of Artificial Sequence: Synthetic oligonucleotide
  Target: LAMA2; (-) strand; PAM type: YTN; PAM sequence: CTG
agctagcaattccacttcta

SEQ ID NO: 232103 - DNA, 20 bp, Artificial Sequence
  Description of Artificial Sequence: Synthetic oligonucleotide
  Target: LAMA2; (-) strand; PAM type: YTN; PAM sequence: TTC
tgagctagcaattccacttc

SEQ ID NO: 232104 - DNA, 20 bp, Artificial Sequence
  Description of Artificial Sequence: Synthetic oligonucleotide
  Target: LAMA2; (-) strand; PAM type: YTN; PAM sequence: TTA
gaaacacacagtaattctga

SEQ ID NO: 232105 - DNA, 20 bp, Artificial Sequence
  Description of Artificial Sequence: Synthetic oligonucleotide
  Target: LAMA2; (-) strand; PAM type: YTN; PAM sequence: CTA
tcaaaattagaaacacacag

SEQ ID NO: 232106 - DNA, 20 bp, Artificial Sequence
  Description of Artificial Sequence: Synthetic oligonucleotide
  Target: LAMA2; (-) strand; PAM type: YTN; PAM sequence: TTG
agcagtaactatcaaaatta

SEQ ID NO: 232107 - DNA, 20 bp, Artificial Sequence
  Description of Artificial Sequence: Synthetic oligonucleotide
  Target: LAMA2; (-) strand; PAM type: YTN; PAM sequence: TTC
aagaaagtcaattgagcagt

SEQ ID NO: 232108 - DNA, 20 bp, Artificial Sequence
  Description of Artificial Sequence: Synthetic oligonucleotide
  Target: LAMA2; (-) strand; PAM type: YTN; PAM sequence: TTT
caagaaagtcaattgagcag

SEQ ID NO: 232109 - DNA, 20 bp, Artificial Sequence
  Description of Artificial Sequence: Synthetic oligonucleotide
  Target: LAMA2; (-) strand; PAM type: YTN; PAM sequence: CTG
taaaatgatacaaatttcaa

SEQ ID NO: 232110 - DNA, 20 bp, Artificial Sequence
  Description of Artificial Sequence: Synthetic oligonucleotide
  Target: LAMA2; (-) strand; PAM type: YTN; PAM sequence: TTA
caggtataactgtaaaatga

SEQ ID NO: 232111 - DNA, 20 bp, Artificial Sequence
  Description of Artificial Sequence: Synthetic oligonucleotide
  Target: LAMA2; (-) strand; PAM type: YTN; PAM sequence: TTT
acaggtataactgtaaaatg

SEQ ID NO: 232112 - DNA, 20 bp, Artificial Sequence
  Description of Artificial Sequence: Synthetic oligonucleotide
  Target: LAMA2; (-) strand; PAM type: YTN; PAM sequence: TTA
catttacaggtataactgta

SEQ ID NO: 232113 - DNA, 20 bp, Artificial Sequence
  Description of Artificial Sequence: Synthetic oligonucleotide
  Target: LAMA2; (-) strand; PAM type: YTN; PAM sequence: CTT
acatttacaggtataactgt

SEQ ID NO: 232114 - DNA, 20 bp, Artificial Sequence
  Description of Artificial Sequence: Synthetic oligonucleotide
  Target: LAMA2; (-) strand; PAM type: YTN; PAM sequence: CTC
ttacatttacaggtataact

SEQ ID NO: 232115 - DNA, 20 bp, Artificial Sequence
  Description of Artificial Sequence: Synthetic oligonucleotide
  Target: LAMA2; (-) strand; PAM type: YTN; PAM sequence: CTA
agagagtagatacatacctc

SEQ ID NO: 232116 - DNA, 20 bp, Artificial Sequence
  Description of Artificial Sequence: Synthetic oligonucleotide
  Target: LAMA2; (-) strand; PAM type: YTN; PAM sequence: TTA
gactaagagagtagatacat

SEQ ID NO: 232117 - DNA, 20 bp, Artificial Sequence
  Description of Artificial Sequence: Synthetic oligonucleotide
  Target: LAMA2; (-) strand; PAM type: YTN; PAM sequence: CTG
atggttagactaagagagta

SEQ ID NO: 232118 - DNA, 20 bp, Artificial Sequence
  Description of Artificial Sequence: Synthetic oligonucleotide
  Target: LAMA2; (-) strand; PAM type: YTN; PAM sequence: CTC
tgatggttagactaagagag

SEQ ID NO: 232119 - DNA, 20 bp, Artificial Sequence
  Description of Artificial Sequence: Synthetic oligonucleotide
  Target: LAMA2; (-) strand; PAM type: YTN; PAM sequence: CTC
tctgatggttagactaagag

SEQ ID NO: 232120 - DNA, 20 bp, Artificial Sequence
  Description of Artificial Sequence: Synthetic oligonucleotide
  Target: LAMA2; (-) strand; PAM type: YTN; PAM sequence: TTG
gtaatactctctgatggtta

SEQ ID NO: 232121 - DNA, 20 bp, Artificial Sequence
  Description of Artificial Sequence: Synthetic oligonucleotide
  Target: LAMA2; (-) strand; PAM type: YTN; PAM sequence: TTG
gcaaaccccacaaatattgg

SEQ ID NO: 232122 - DNA, 20 bp, Artificial Sequence
  Description of Artificial Sequence: Synthetic oligonucleotide
  Target: LAMA2; (-) strand; PAM type: YTN; PAM sequence: TTC
aggttggcaaaccccacaaa

SEQ ID NO: 232123 - DNA, 20 bp, Artificial Sequence
  Description of Artificial Sequence: Synthetic oligonucleotide
  Target: LAMA2; (-) strand; PAM type: YTN; PAM sequence: TTT
caggttggcaaaccccacaa

SEQ ID NO: 232124 - DNA, 20 bp, Artificial Sequence
  Description of Artificial Sequence: Synthetic oligonucleotide
  Target: LAMA2; (-) strand; PAM type: YTN; PAM sequence: TTT
tcaggttggcaaaccccaca

SEQ ID NO: 232125 - DNA, 20 bp, Artificial Sequence
  Description of Artificial Sequence: Synthetic oligonucleotide
  Target: LAMA2; (-) strand; PAM type: YTN; PAM sequence: TTT
ttcaggttggcaaaccccac

SEQ ID NO: 232126 - DNA, 20 bp, Artificial Sequence
  Description of Artificial Sequence: Synthetic oligonucleotide
  Target: LAMA2; (-) strand; PAM type: YTN; PAM sequence: TTT
tttcaggttggcaaacccca

SEQ ID NO: 232127 - DNA, 20 bp, Artificial Sequence
  Description of Artificial Sequence: Synthetic oligonucleotide
  Target: LAMA2; (-) strand; PAM type: YTN; PAM sequence: TTC
ccattttttcaggttggcaa

SEQ ID NO: 232128 - DNA, 20 bp, Artificial Sequence
  Description of Artificial Sequence: Synthetic oligonucleotide
  Target: LAMA2; (-) strand; PAM type: YTN; PAM sequence: CTT
cccattttttcaggttggca

SEQ ID NO: 232129 - DNA, 20 bp, Artificial Sequence
  Description of Artificial Sequence: Synthetic oligonucleotide
  Target: LAMA2; (-) strand; PAM type: YTN; PAM sequence: CTG
ataaacttcccattttttca

SEQ ID NO: 232130 - DNA, 20 bp, Artificial Sequence
  Description of Artificial Sequence: Synthetic oligonucleotide
  Target: LAMA2; (-) strand; PAM type: YTN; PAM sequence: TTA
aaaacacactgataaacttc

SEQ ID NO: 232131 - DNA, 20 bp, Artificial Sequence
  Description of Artificial Sequence: Synthetic oligonucleotide
  Target: LAMA2; (-) strand; PAM type: YTN; PAM sequence: TTA
attaaaaacacactgataaa

SEQ ID NO: 232132 - DNA, 20 bp, Artificial Sequence
  Description of Artificial Sequence: Synthetic oligonucleotide
  Target: LAMA2; (-) strand; PAM type: YTN; PAM sequence: CTC
ataataggataaatgttaat

SEQ ID NO: 232133 - DNA, 20 bp, Artificial Sequence
  Description of Artificial Sequence: Synthetic oligonucleotide
  Target: LAMA2; (-) strand; PAM type: YTN; PAM sequence: CTC
cctcataataggataaatgt

SEQ ID NO: 232134 - DNA, 20 bp, Artificial Sequence
  Description of Artificial Sequence: Synthetic oligonucleotide
  Target: LAMA2; (-) strand; PAM type: YTN; PAM sequence: CTG
atcctccctcataataggat

SEQ ID NO: 232135 - DNA, 20 bp, Artificial Sequence
  Description of Artificial Sequence: Synthetic oligonucleotide
  Target: LAMA2; (-) strand; PAM type: YTN; PAM sequence: TTA
taagatactgatcctccctc

SEQ ID NO: 232136 - DNA, 20 bp, Artificial Sequence
  Description of Artificial Sequence: Synthetic oligonucleotide
  Target: LAMA2; (-) strand; PAM type: YTN; PAM sequence: TTT
ataagatactgatcctccct

SEQ ID NO: 232137 - DNA, 20 bp, Artificial Sequence
  Description of Artificial Sequence: Synthetic oligonucleotide
  Target: LAMA2; (-) strand; PAM type: YTN; PAM sequence: TTA
aaagtttataagatactgat

SEQ ID NO: 232138 - DNA, 20 bp, Artificial Sequence
  Description of Artificial Sequence: Synthetic oligonucleotide
  Target: LAMA2; (-) strand; PAM type: YTN; PAM sequence: CTG
ttaaaagtttataagatact

SEQ ID NO: 232139 - DNA, 20 bp, Artificial Sequence
  Description of Artificial Sequence: Synthetic oligonucleotide
  Target: LAMA2; (-) strand; PAM type: YTN; PAM sequence: TTA
aaatgactgttaaaagttta

SEQ ID NO: 232140 - DNA, 20 bp, Artificial Sequence
  Description of Artificial Sequence: Synthetic oligonucleotide
  Target: LAMA2; (-) strand; PAM type: YTN; PAM sequence: TTC
aaagaaaagaaaattaaaat

SEQ ID NO: 232141 - DNA, 20 bp, Artificial Sequence
  Description of Artificial Sequence: Synthetic oligonucleotide
  Target: LAMA2; (-) strand; PAM type: YTN; PAM sequence: CTA
ttcaaagaaaagaaaattaa

SEQ ID NO: 232142 - DNA, 20 bp, Artificial Sequence
  Description of Artificial Sequence: Synthetic oligonucleotide
  Target: LAMA2; (-) strand; PAM type: YTN; PAM sequence: TTG
taaatcaataaagaaatgca

SEQ ID NO: 232143 - DNA, 20 bp, Artificial Sequence
  Description of Artificial Sequence: Synthetic oligonucleotide
  Target: LAMA2; (-) strand; PAM type: YTN; PAM sequence: CTT
gtaaatcaataaagaaatgc

SEQ ID NO: 232144 - DNA, 20 bp, Artificial Sequence
  Description of Artificial Sequence: Synthetic oligonucleotide
  Target: LAMA2; (-) strand; PAM type: YTN; PAM sequence: CTC
ttgtaaatcaataaagaaat

SEQ ID NO: 232145 - DNA, 20 bp, Artificial Sequence
  Description of Artificial Sequence: Synthetic oligonucleotide
  Target: LAMA2; (-) strand; PAM type: YTN; PAM sequence: CTC
aaagaactcttgtaaatcaa

SEQ ID NO: 232146 - DNA, 20 bp, Artificial Sequence
  Description of Artificial Sequence: Synthetic oligonucleotide
  Target: LAMA2; (-) strand; PAM type: YTN; PAM sequence: CTA
atactcaaagaactcttgta

SEQ ID NO: 232147 - DNA, 20 bp, Artificial Sequence
  Description of Artificial Sequence: Synthetic oligonucleotide
  Target: LAMA2; (-) strand; PAM type: YTN; PAM sequence: TTC
ctaatactcaaagaactctt

SEQ ID NO: 232148 - DNA, 20 bp, Artificial Sequence
  Description of Artificial Sequence: Synthetic oligonucleotide
  Target: LAMA2; (-) strand; PAM type: YTN; PAM sequence: TTG
gcacggataaaggaaggatg

SEQ ID NO: 232149 - DNA, 20 bp, Artificial Sequence
  Description of Artificial Sequence: Synthetic oligonucleotide
  Target: LAMA2; (-) strand; PAM type: YTN; PAM sequence: CTG
ttggcacggataaaggaagg

SEQ ID NO: 232150 - DNA, 20 bp, Artificial Sequence
  Description of Artificial Sequence: Synthetic oligonucleotide
  Target: LAMA2; (-) strand; PAM type: YTN; PAM sequence: CTG
tgtgacaaaataaaaggtac

SEQ ID NO: 232151 - DNA, 20 bp, Artificial Sequence
  Description of Artificial Sequence: Synthetic oligonucleotide
  Target: LAMA2; (-) strand; PAM type: YTN; PAM sequence: CTG
atgaagaataaactgtgtga

SEQ ID NO: 232152 - DNA, 20 bp, Artificial Sequence
  Description of Artificial Sequence: Synthetic oligonucleotide
  Target: LAMA2; (-) strand; PAM type: YTN; PAM sequence: TTC
tgatgaagaataaactgtgt

SEQ ID NO: 232153 - DNA, 20 bp, Artificial Sequence
  Description of Artificial Sequence: Synthetic oligonucleotide
  Target: LAMA2; (-) strand; PAM type: YTN; PAM sequence: CTC
aagagcaaagaattctgatg

SEQ ID NO: 232154 - DNA, 20 bp, Artificial Sequence
  Description of Artificial Sequence: Synthetic oligonucleotide
  Target: LAMA2; (-) strand; PAM type: YTN; PAM sequence: TTC
tcaagagcaaagaattctga

SEQ ID NO: 232155 - DNA, 20 bp, Artificial Sequence
  Description of Artificial Sequence: Synthetic oligonucleotide
  Target: LAMA2; (-) strand; PAM type: YTN; PAM sequence: CTT
ctcaagagcaaagaattctg

SEQ ID NO: 232156 - DNA, 20 bp, Artificial Sequence
  Description of Artificial Sequence: Synthetic oligonucleotide
  Target: LAMA2; (-) strand; PAM type: YTN; PAM sequence: CTC
acagggacttctcaagagca

SEQ ID NO: 232157 - DNA, 20 bp, Artificial Sequence
  Description of Artificial Sequence: Synthetic oligonucleotide
  Target: LAMA2; (-) strand; PAM type: YTN; PAM sequence: CTC
tcacagggacttctcaagag

SEQ ID NO: 232158 - DNA, 20 bp, Artificial Sequence
  Description of Artificial Sequence: Synthetic oligonucleotide
  Target: LAMA2; (-) strand; PAM type: YTN; PAM sequence: CTG
gcaggctctcacagggactt

SEQ ID NO: 232159 - DNA, 20 bp, Artificial Sequence
  Description of Artificial Sequence: Synthetic oligonucleotide
  Target: LAMA2; (-) strand; PAM type: YTN; PAM sequence: CTC
caaaggtgtagaaggctggc

SEQ ID NO: 232160 - DNA, 20 bp, Artificial Sequence
  Description of Artificial Sequence: Synthetic oligonucleotide
  Target: LAMA2; (-) strand; PAM type: YTN; PAM sequence: CTG
ccctccaaaggtgtagaagg

SEQ ID NO: 232161 - DNA, 20 bp, Artificial Sequence
  Description of Artificial Sequence: Synthetic oligonucleotide
  Target: LAMA2; (-) strand; PAM type: YTN; PAM sequence: TTG
ccaacaaactgccctccaaa

SEQ ID NO: 232162 - DNA, 20 bp, Artificial Sequence
  Description of Artificial Sequence: Synthetic oligonucleotide
  Target: LAMA2; (-) strand; PAM type: YTN; PAM sequence: TTG
agaaattgccaacaaactgc

SEQ ID NO: 232163 - DNA, 20 bp, Artificial Sequence
  Description of Artificial Sequence: Synthetic oligonucleotide
  Target: LAMA2; (-) strand; PAM type: YTN; PAM sequence: CTA
tgtgaaagaaaaattgagaa

SEQ ID NO: 232164 - DNA, 20 bp, Artificial Sequence
  Description of Artificial Sequence: Synthetic oligonucleotide
  Target: LAMA2; (-) strand; PAM type: YTN; PAM sequence: TTC
tatgtgaaagaaaaattgag

SEQ ID NO: 232165 - DNA, 20 bp, Artificial Sequence
  Description of Artificial Sequence: Synthetic oligonucleotide
  Target: LAMA2; (-) strand; PAM type: YTN; PAM sequence: TTT
ctatgtgaaagaaaaattga

SEQ ID NO: 232166 - DNA, 20 bp, Artificial Sequence
  Description of Artificial Sequence: Synthetic oligonucleotide
  Target: LAMA2; (-) strand; PAM type: YTN; PAM sequence: TTT
tctatgtgaaagaaaaattg

SEQ ID NO: 232167 - DNA, 20 bp, Artificial Sequence
  Description of Artificial Sequence: Synthetic oligonucleotide
  Target: LAMA2; (-) strand; PAM type: YTN; PAM sequence: TTC
agtcagatcattttctatgt

SEQ ID NO: 232168 - DNA, 20 bp, Artificial Sequence
  Description of Artificial Sequence: Synthetic oligonucleotide
  Target: LAMA2; (-) strand; PAM type: YTN; PAM sequence: TTG
acatcaagagaaataaaatt

SEQ ID NO: 232169 - DNA, 20 bp, Artificial Sequence
  Description of Artificial Sequence: Synthetic oligonucleotide
  Target: LAMA2; (-) strand; PAM type: YTN; PAM sequence: TTC
agcacagttgacatcaagag

SEQ ID NO: 232170 - DNA, 20 bp, Artificial Sequence
  Description of Artificial Sequence: Synthetic oligonucleotide
  Target: LAMA2; (-) strand; PAM type: YTN; PAM sequence: TTA
agacaataattcagcacagt

SEQ ID NO: 232171 - DNA, 20 bp, Artificial Sequence
  Description of Artificial Sequence: Synthetic oligonucleotide
  Target: LAMA2; (-) strand; PAM type: YTN; PAM sequence: TTT
aagacaataattcagcacag

SEQ ID NO: 232172 - DNA, 20 bp, Artificial Sequence
  Description of Artificial Sequence: Synthetic oligonucleotide
  Target: LAMA2; (-) strand; PAM type: YTN; PAM sequence: TTT
taagacaataattcagcaca

SEQ ID NO: 232173 - DNA, 20 bp, Artificial Sequence
  Description of Artificial Sequence: Synthetic oligonucleotide
  Target: LAMA2; (-) strand; PAM type: YTN; PAM sequence: TTT
ttaagacaataattcagcac

SEQ ID NO: 232174 - DNA, 20 bp, Artificial Sequence
  Description of Artificial Sequence: Synthetic oligonucleotide
  Target: LAMA2; (-) strand; PAM type: YTN; PAM sequence: TTT
tttaagacaataattcagca

SEQ ID NO: 232175 - DNA, 20 bp, Artificial Sequence
  Description of Artificial Sequence: Synthetic oligonucleotide
  Target: LAMA2; (-) strand; PAM type: YTN; PAM sequence: CTG
aatggaatggtgaatttttt

SEQ ID NO: 232176 - DNA, 20 bp, Artificial Sequence
  Description of Artificial Sequence: Synthetic oligonucleotide
  Target: LAMA2; (-) strand; PAM type: YTN; PAM sequence: TTA
aacctgaatggaatggtgaa

SEQ ID NO: 232177 - DNA, 20 bp, Artificial Sequence
  Description of Artificial Sequence: Synthetic oligonucleotide
  Target: LAMA2; (-) strand; PAM type: YTN; PAM sequence: CTA
aaaaatatgttaaacctgaa

SEQ ID NO: 232178 - DNA, 20 bp, Artificial Sequence
  Description of Artificial Sequence: Synthetic oligonucleotide
  Target: LAMA2; (-) strand; PAM type: YTN; PAM sequence: CTC
taaaaaatatgttaaacctg

SEQ ID NO: 232179 - DNA, 20 bp, Artificial Sequence
  Description of Artificial Sequence: Synthetic oligonucleotide
  Target: LAMA2; (-) strand; PAM type: YTN; PAM sequence: CTA
tgaaaatcacactctaaaaa

SEQ ID NO: 232180 - DNA, 20 bp, Artificial Sequence
  Description of Artificial Sequence: Synthetic oligonucleotide
  Target: LAMA2; (-) strand; PAM type: YTN; PAM sequence: TTC
atcaagaatgtaacataccc

SEQ ID NO: 232181 - DNA, 20 bp, Artificial Sequence
  Description of Artificial Sequence: Synthetic oligonucleotide
  Target: LAMA2; (-) strand; PAM type: YTN; PAM sequence: TTA
ataggtcaagaagataaaaa

SEQ ID NO: 232182 - DNA, 20 bp, Artificial Sequence
  Description of Artificial Sequence: Synthetic oligonucleotide
  Target: LAMA2; (-) strand; PAM type: YTN; PAM sequence: TTA
gtaattaataggtcaagaag

SEQ ID NO: 232183 - DNA, 20 bp, Artificial Sequence
  Description of Artificial Sequence: Synthetic oligonucleotide
  Target: LAMA2; (-) strand; PAM type: YTN; PAM sequence: TTT
agtaattaataggtcaagaa

SEQ ID NO: 232184 - DNA, 20 bp, Artificial Sequence
  Description of Artificial Sequence: Synthetic oligonucleotide
  Target: LAMA2; (-) strand; PAM type: YTN; PAM sequence: TTT
tagtaattaataggtcaaga

SEQ ID NO: 232185 - DNA, 20 bp, Artificial Sequence
  Description of Artificial Sequence: Synthetic oligonucleotide
  Target: LAMA2; (-) strand; PAM type: YTN; PAM sequence: TTT
ttagtaattaataggtcaag

SEQ ID NO: 232186 - DNA, 20 bp, Artificial Sequence
  Description of Artificial Sequence: Synthetic oligonucleotide
  Target: LAMA2; (-) strand; PAM type: YTN; PAM sequence: TTT
tttagtaattaataggtcaa

SEQ ID NO: 232187 - DNA, 20 bp, Artificial Sequence
  Description of Artificial Sequence: Synthetic oligonucleotide
  Target: LAMA2; (-) strand; PAM type: YTN; PAM sequence: TTT
ttttagtaattaataggtca

SEQ ID NO: 232188 - DNA, 20 bp, Artificial Sequence
  Description of Artificial Sequence: Synthetic oligonucleotide
  Target: LAMA2; (-) strand; PAM type: YTN; PAM sequence: TTT
tttttagtaattaataggtc

SEQ ID NO: 232189 - DNA, 20 bp, Artificial Sequence
  Description of Artificial Sequence: Synthetic oligonucleotide
  Target: LAMA2; (-) strand; PAM type: YTN; PAM sequence: TTT
ttttttagtaattaataggt

SEQ ID NO: 232190 - DNA, 20 bp, Artificial Sequence
  Description of Artificial Sequence: Synthetic oligonucleotide
  Target: LAMA2; (-) strand; PAM type: YTN; PAM sequence: TTT
tttttttagtaattaatagg

SEQ ID NO: 232191 - DNA, 20 bp, Artificial Sequence
  Description of Artificial Sequence: Synthetic oligonucleotide
  Target: LAMA2; (-) strand; PAM type: YTN; PAM sequence: TTT
ttttttttagtaattaatag

SEQ ID NO: 232192 - DNA, 20 bp, Artificial Sequence
  Description of Artificial Sequence: Synthetic oligonucleotide
  Target: LAMA2; (-) strand; PAM type: YTN; PAM sequence: CTG
tatttttttttttagtaatt

SEQ ID NO: 232193 - DNA, 20 bp, Artificial Sequence
  Description of Artificial Sequence: Synthetic oligonucleotide
  Target: LAMA2; (-) strand; PAM type: YTN; PAM sequence: TTA
tctgtatttttttttttagt

SEQ ID NO: 232194 - DNA, 20 bp, Artificial Sequence
  Description of Artificial Sequence: Synthetic oligonucleotide
  Target: LAMA2; (-) strand; PAM type: YTN; PAM sequence: TTG
tcgttatctgtatttttttt

SEQ ID NO: 232195 - DNA, 20 bp, Artificial Sequence
  Description of Artificial Sequence: Synthetic oligonucleotide
  Target: LAMA2; (-) strand; PAM type: YTN; PAM sequence: TTA
ggttgtcgttatctgtattt

SEQ ID NO: 232196 - DNA, 20 bp, Artificial Sequence
  Description of Artificial Sequence: Synthetic oligonucleotide
  Target: LAMA2; (-) strand; PAM type: YTN; PAM sequence: TTT
aggttgtcgttatctgtatt

SEQ ID NO: 232197 - DNA, 20 bp, Artificial Sequence
  Description of Artificial Sequence: Synthetic oligonucleotide
  Target: LAMA2; (-) strand; PAM type: YTN; PAM sequence: TTT
taggttgtcgttatctgtat

SEQ ID NO: 232198 - DNA, 20 bp, Artificial Sequence
  Description of Artificial Sequence: Synthetic oligonucleotide
  Target: LAMA2; (-) strand; PAM type: YTN; PAM sequence: TTG
ttttaggttgtcgttatctg

SEQ ID NO: 232199 - DNA, 20 bp, Artificial Sequence
  Description of Artificial Sequence: Synthetic oligonucleotide
  Target: LAMA2; (-) strand; PAM type: YTN; PAM sequence: TTC
aataggttgttttaggttgt

SEQ ID NO: 232200 - DNA, 20 bp, Artificial Sequence
  Description of Artificial Sequence: Synthetic oligonucleotide
  Target: LAMA2; (-) strand; PAM type: YTN; PAM sequence: TTT
caataggttgttttaggttg

SEQ ID NO: 232201 - DNA, 20 bp, Artificial Sequence
  Description of Artificial Sequence: Synthetic oligonucleotide
  Target: LAMA2; (-) strand; PAM type: YTN; PAM sequence: CTA
tcatcacagtgagatatttc

SEQ ID NO: 232202 - DNA, 20 bp, Artificial Sequence
  Description of Artificial Sequence: Synthetic oligonucleotide
  Target: LAMA2; (-) strand; PAM type: YTN; PAM sequence: CTA
gacaaatctatcatcacagt

SEQ ID NO: 232203 - DNA, 20 bp, Artificial Sequence
  Description of Artificial Sequence: Synthetic oligonucleotide
  Target: LAMA2; (-) strand; PAM type: YTN; PAM sequence: TTA
caaggaaaactagacaaatc

SEQ ID NO: 232204 - DNA, 20 bp, Artificial Sequence
  Description of Artificial Sequence: Synthetic oligonucleotide
  Target: LAMA2; (-) strand; PAM type: YTN; PAM sequence: TTA
aaatatggagaacaaaaatt

SEQ ID NO: 232205 - DNA, 20 bp, Artificial Sequence
  Description of Artificial Sequence: Synthetic oligonucleotide
  Target: LAMA2; (-) strand; PAM type: YTN; PAM sequence: CTT
aaaatatggagaacaaaaat

SEQ ID NO: 232206 - DNA, 20 bp, Artificial Sequence
  Description of Artificial Sequence: Synthetic oligonucleotide
  Target: LAMA2; (-) strand; PAM type: YTN; PAM sequence: TTA
tatagccttaaaatatggag

SEQ ID NO: 232207 - DNA, 20 bp, Artificial Sequence
  Description of Artificial Sequence: Synthetic oligonucleotide
  Target: LAMA2; (-) strand; PAM type: YTN; PAM sequence: TTG
aaaacatcacattatatagc

SEQ ID NO: 232208 - DNA, 20 bp, Artificial Sequence
  Description of Artificial Sequence: Synthetic oligonucleotide
  Target: LAMA2; (-) strand; PAM type: YTN; PAM sequence: CTT
gaaaacatcacattatatag

SEQ ID NO: 232209 - DNA, 20 bp, Artificial Sequence
  Description of Artificial Sequence: Synthetic oligonucleotide
  Target: LAMA2; (-) strand; PAM type: YTN; PAM sequence: CTG
tacttgaaaacatcacatta

SEQ ID NO: 232210 - DNA, 20 bp, Artificial Sequence
  Description of Artificial Sequence: Synthetic oligonucleotide
  Target: LAMA2; (-) strand; PAM type: YTN; PAM sequence: TTC
tgtacttgaaaacatcacat

SEQ ID NO: 232211 - DNA, 20 bp, Artificial Sequence
  Description of Artificial Sequence: Synthetic oligonucleotide
  Target: LAMA2; (-) strand; PAM type: YTN; PAM sequence: TTA
aaataattctgtacttgaaa

SEQ ID NO: 232212 - DNA, 20 bp, Artificial Sequence
  Description of Artificial Sequence: Synthetic oligonucleotide
  Target: LAMA2; (-) strand; PAM type: YTN; PAM sequence: CTT
aaaataattctgtacttgaa

SEQ ID NO: 232213 - DNA, 20 bp, Artificial Sequence
  Description of Artificial Sequence: Synthetic oligonucleotide
  Target: LAMA2; (-) strand; PAM type: YTN; PAM sequence: TTA
ggaacttaaaataattctgt

SEQ ID NO: 232214 - DNA, 20 bp, Artificial Sequence
  Description of Artificial Sequence: Synthetic oligonucleotide
  Target: LAMA2; (-) strand; PAM type: YTN; PAM sequence: TTA
aaaaaggaacccattaggaa

SEQ ID NO: 232215 - DNA, 20 bp, Artificial Sequence
  Description of Artificial Sequence: Synthetic oligonucleotide
  Target: LAMA2; (-) strand; PAM type: YTN; PAM sequence: TTA
taaaatatcagattaaaaaa

SEQ ID NO: 232216 - DNA, 20 bp, Artificial Sequence
  Description of Artificial Sequence: Synthetic oligonucleotide
  Target: LAMA2; (-) strand; PAM type: YTN; PAM sequence: TTG
gggaaaaagttataaaatat

SEQ ID NO: 232217 - DNA, 20 bp, Artificial Sequence
  Description of Artificial Sequence: Synthetic oligonucleotide
  Target: LAMA2; (-) strand; PAM type: YTN; PAM sequence: CTT
ggggaaaaagttataaaata

SEQ ID NO: 232218 - DNA, 20 bp, Artificial Sequence
  Description of Artificial Sequence: Synthetic oligonucleotide
  Target: LAMA2; (-) strand; PAM type: YTN; PAM sequence: CTG
gggtatggtgggaaaccaga

SEQ ID NO: 232219 - DNA, 20 bp, Artificial Sequence
  Description of Artificial Sequence: Synthetic oligonucleotide
  Target: LAMA2; (-) strand; PAM type: YTN; PAM sequence: TTA
agaatctggggtatggtggg

SEQ ID NO: 232220 - DNA, 20 bp, Artificial Sequence
  Description of Artificial Sequence: Synthetic oligonucleotide
  Target: LAMA2; (-) strand; PAM type: YTN; PAM sequence: CTT
aagaatctggggtatggtgg

SEQ ID NO: 232221 - DNA, 20 bp, Artificial Sequence
  Description of Artificial Sequence: Synthetic oligonucleotide
  Target: LAMA2; (-) strand; PAM type: YTN; PAM sequence: TTA
cttaagaatctggggtatgg

SEQ ID NO: 232222 - DNA, 20 bp, Artificial Sequence
  Description of Artificial Sequence: Synthetic oligonucleotide
  Target: LAMA2; (-) strand; PAM type: YTN; PAM sequence: CTA
aattacttaagaatctgggg

SEQ ID NO: 232223 - DNA, 20 bp, Artificial Sequence
  Description of Artificial Sequence: Synthetic oligonucleotide
  Target: LAMA2; (-) strand; PAM type: YTN; PAM sequence: TTG
tgccctaaattacttaagaa

SEQ ID NO: 232224 - DNA, 20 bp, Artificial Sequence
  Description of Artificial Sequence: Synthetic oligonucleotide
  Target: LAMA2; (-) strand; PAM type: YTN; PAM sequence: TTA
ttgtgccctaaattacttaa

SEQ ID NO: 232225 - DNA, 20 bp, Artificial Sequence
  Description of Artificial Sequence: Synthetic oligonucleotide
  Target: LAMA2; (-) strand; PAM type: YTN; PAM sequence: CTG
aaaattattgtgccctaaat

SEQ ID NO: 232226 - DNA, 20 bp, Artificial Sequence
  Description of Artificial Sequence: Synthetic oligonucleotide
  Target: LAMA2; (-) strand; PAM type: YTN; PAM sequence: CTC
tgaaaattattgtgccctaa

SEQ ID NO: 232227 - DNA, 20 bp, Artificial Sequence
  Description of Artificial Sequence: Synthetic oligonucleotide
  Target: LAMA2; (-) strand; PAM type: YTN; PAM sequence: TTC
tctgaaaattattgtgccct

SEQ ID NO: 232228 - DNA, 20 bp, Artificial Sequence
  Description of Artificial Sequence: Synthetic oligonucleotide
  Target: LAMA2; (-) strand; PAM type: YTN; PAM sequence: TTT
ctctgaaaattattgtgccc

SEQ ID NO: 232229 - DNA, 20 bp, Artificial Sequence
  Description of Artificial Sequence: Synthetic oligonucleotide
  Target: LAMA2; (-) strand; PAM type: YTN; PAM sequence: CTT
tctctgaaaattattgtgcc

SEQ ID NO: 232230 - DNA, 20 bp, Artificial Sequence
  Description of Artificial Sequence: Synthetic oligonucleotide
  Target: LAMA2; (-) strand; PAM type: YTN; PAM sequence: TTC
tttctctgaaaattattgtg

SEQ ID NO: 232231 - DNA, 20 bp, Artificial Sequence
  Description of Artificial Sequence: Synthetic oligonucleotide
  Target: LAMA2; (-) strand; PAM type: YTN; PAM sequence: TTA
atcattctttctctgaaaat

SEQ ID NO: 232232 - DNA, 20 bp, Artificial Sequence
  Description of Artificial Sequence: Synthetic oligonucleotide
  Target: LAMA2; (-) strand; PAM type: YTN; PAM sequence: CTT
aatcattctttctctgaaaa

SEQ ID NO: 232233 - DNA, 20 bp, Artificial Sequence
  Description of Artificial Sequence: Synthetic oligonucleotide
  Target: LAMA2; (-) strand; PAM type: YTN; PAM sequence: TTC
ttaatcattctttctctgaa

SEQ ID NO: 232234 - DNA, 20 bp, Artificial Sequence
  Description of Artificial Sequence: Synthetic oligonucleotide
  Target: LAMA2; (-) strand; PAM type: YTN; PAM sequence: TTC
cataaattcttaatcattct

SEQ ID NO: 232235 - DNA, 20 bp, Artificial Sequence
  Description of Artificial Sequence: Synthetic oligonucleotide
  Target: LAMA2; (-) strand; PAM type: YTN; PAM sequence: TTT
ccataaattcttaatcattc

SEQ ID NO: 232236 - DNA, 20 bp, Artificial Sequence
  Description of Artificial Sequence: Synthetic oligonucleotide
  Target: LAMA2; (-) strand; PAM type: YTN; PAM sequence: CTA
agatttccataaattcttaa

SEQ ID NO: 232237 - DNA, 20 bp, Artificial Sequence
  Description of Artificial Sequence: Synthetic oligonucleotide
  Target: LAMA2; (-) strand; PAM type: YTN; PAM sequence: TTC
ctaagatttccataaattct

SEQ ID NO: 232238 - DNA, 20 bp, Artificial Sequence
  Description of Artificial Sequence: Synthetic oligonucleotide
  Target: LAMA2; (-) strand; PAM type: YTN; PAM sequence: CTT
cctaagatttccataaattc

SEQ ID NO: 232239 - DNA, 20 bp, Artificial Sequence
  Description of Artificial Sequence: Synthetic oligonucleotide
  Target: LAMA2; (-) strand; PAM type: YTN; PAM sequence: TTC
gaccttcctaagatttccat

SEQ ID NO: 232240 - DNA, 20 bp, Artificial Sequence
  Description of Artificial Sequence: Synthetic oligonucleotide
  Target: LAMA2; (-) strand; PAM type: YTN; PAM sequence: CTG
cgtcaattcgaccttcctaa

SEQ ID NO: 232241 - DNA, 20 bp, Artificial Sequence
  Description of Artificial Sequence: Synthetic oligonucleotide
  Target: LAMA2; (-) strand; PAM type: YTN; PAM sequence: TTC
caaggcactgcgtcaattcg

SEQ ID NO: 232242 - DNA, 20 bp, Artificial Sequence
  Description of Artificial Sequence: Synthetic oligonucleotide
  Target: LAMA2; (-) strand; PAM type: YTN; PAM sequence: CTT
ccaaggcactgcgtcaattc

SEQ ID NO: 232243 - DNA, 20 bp, Artificial Sequence
  Description of Artificial Sequence: Synthetic oligonucleotide
  Target: LAMA2; (-) strand; PAM type: YTN; PAM sequence: CTC
ttccaaggcactgcgtcaat

SEQ ID NO: 232244 - DNA, 20 bp, Artificial Sequence
  Description of Artificial Sequence: Synthetic oligonucleotide
  Target: LAMA2; (-) strand; PAM type: YTN; PAM sequence: CTC
tcttccaaggcactgcgtca

SEQ ID NO: 232245 - DNA, 20 bp, Artificial Sequence
  Description of Artificial Sequence: Synthetic oligonucleotide
  Target: LAMA2; (-) strand; PAM type: YTN; PAM sequence: TTC
tctcttccaaggcactgcgt

SEQ ID NO: 232246 - DNA, 20 bp, Artificial Sequence
  Description of Artificial Sequence: Synthetic oligonucleotide
  Target: LAMA2; (-) strand; PAM type: YTN; PAM sequence: TTT
ctctcttccaaggcactgcg

SEQ ID NO: 232247 - DNA, 20 bp, Artificial Sequence
  Description of Artificial Sequence: Synthetic oligonucleotide
  Target: LAMA2; (-) strand; PAM type: YTN; PAM sequence: CTA
tatttctctcttccaaggca

SEQ ID NO: 232248 - DNA, 20 bp, Artificial Sequence
  Description of Artificial Sequence: Synthetic oligonucleotide
  Target: LAMA2; (-) strand; PAM type: YTN; PAM sequence: CTA
cctatatttctctcttccaa

SEQ ID NO: 232249 - DNA, 20 bp, Artificial Sequence
  Description of Artificial Sequence: Synthetic oligonucleotide
  Target: LAMA2; (-) strand; PAM type: YTN; PAM sequence: TTC
aactacctatatttctctct

SEQ ID NO: 232250 - DNA, 20 bp, Artificial Sequence
  Description of Artificial Sequence: Synthetic oligonucleotide
  Target: LAMA2; (-) strand; PAM type: YTN; PAM sequence: CTT
caactacctatatttctctc

SEQ ID NO: 232251 - DNA, 20 bp, Artificial Sequence
  Description of Artificial Sequence: Synthetic oligonucleotide
  Target: LAMA2; (-) strand; PAM type: YTN; PAM sequence: TTA
tacttcaactacctatattt

SEQ ID NO: 232252 - DNA, 20 bp, Artificial Sequence
  Description of Artificial Sequence: Synthetic oligonucleotide
  Target: LAMA2; (-) strand; PAM type: YTN; PAM sequence: CTT
atacttcaactacctatatt

SEQ ID NO: 232253 - DNA, 20 bp, Artificial Sequence
  Description of Artificial Sequence: Synthetic oligonucleotide
  Target: LAMA2; (-) strand; PAM type: YTN; PAM sequence: CTC
cttatacttcaactacctat

SEQ ID NO: 232254 - DNA, 20 bp, Artificial Sequence
  Description of Artificial Sequence: Synthetic oligonucleotide
  Target: LAMA2; (-) strand; PAM type: YTN; PAM sequence: TTC
tccttatacttcaactacct

SEQ ID NO: 232255 - DNA, 20 bp, Artificial Sequence
  Description of Artificial Sequence: Synthetic oligonucleotide
  Target: LAMA2; (-) strand; PAM type: YTN; PAM sequence: TTT
ctccttatacttcaactacc

SEQ ID NO: 232256 - DNA, 20 bp, Artificial Sequence
  Description of Artificial Sequence: Synthetic oligonucleotide
  Target: LAMA2; (-) strand; PAM type: YTN; PAM sequence: TTA
tatcataggcatttctcctt

SEQ ID NO: 232257 - DNA, 20 bp, Artificial Sequence
  Description of Artificial Sequence: Synthetic oligonucleotide
  Target: LAMA2; (-) strand; PAM type: YTN; PAM sequence: TTT
atatcataggcatttctcct

SEQ ID NO: 232258 - DNA, 20 bp, Artificial Sequence
  Description of Artificial Sequence: Synthetic oligonucleotide
  Target: LAMA2; (-) strand; PAM type: YTN; PAM sequence: TTG
tttatatcataggcatttct

SEQ ID NO: 232259 - DNA, 20 bp, Artificial Sequence
  Description of Artificial Sequence: Synthetic oligonucleotide
  Target: LAMA2; (-) strand; PAM type: YTN; PAM sequence: TTT
gtttatatcataggcatttc

SEQ ID NO: 232260 - DNA, 20 bp, Artificial Sequence
  Description of Artificial Sequence: Synthetic oligonucleotide
  Target: LAMA2; (-) strand; PAM type: YTN; PAM sequence: TTG
tttgtttatatcataggcat

SEQ ID NO: 232261 - DNA, 20 bp, Artificial Sequence
  Description of Artificial Sequence: Synthetic oligonucleotide
  Target: LAMA2; (-) strand; PAM type: YTN; PAM sequence: TTT
gtttgtttatatcataggca

SEQ ID NO: 232262 - DNA, 20 bp, Artificial Sequence
  Description of Artificial Sequence: Synthetic oligonucleotide
  Target: LAMA2; (-) strand; PAM type: YTN; PAM sequence: TTA
atacatgtacatgcaatttg

SEQ ID NO: 232263 - DNA, 20 bp, Artificial Sequence
  Description of Artificial Sequence: Synthetic oligonucleotide
  Target: LAMA2; (-) strand; PAM type: YTN; PAM sequence: CTT
aatacatgtacatgcaattt

SEQ ID NO: 232264 - DNA, 20 bp, Artificial Sequence
  Description of Artificial Sequence: Synthetic oligonucleotide
  Target: LAMA2; (-) strand; PAM type: YTN; PAM sequence: TTC
ttaatacatgtacatgcaat

SEQ ID NO: 232265 - DNA, 20 bp, Artificial Sequence
  Description of Artificial Sequence: Synthetic oligonucleotide
  Target: LAMA2; (-) strand; PAM type: YTN; PAM sequence: CTT
cttaatacatgtacatgcaa

SEQ ID NO: 232266 - DNA, 20 bp, Artificial Sequence
  Description of Artificial Sequence: Synthetic oligonucleotide
  Target: LAMA2; (-) strand; PAM type: YTN; PAM sequence: TTA
tagtcttcttaatacatgta

SEQ ID NO: 232267 - DNA, 20 bp, Artificial Sequence
  Description of Artificial Sequence: Synthetic oligonucleotide
  Target: LAMA2; (-) strand; PAM type: YTN; PAM sequence: CTG
atatatgttatagtcttctt

SEQ ID NO: 232268 - DNA, 20 bp, Artificial Sequence
  Description of Artificial Sequence: Synthetic oligonucleotide
  Target: LAMA2; (-) strand; PAM type: YTN; PAM sequence: CTA
gtgaagtaactgatatatgt

SEQ ID NO: 232269 - DNA, 20 bp, Artificial Sequence
  Description of Artificial Sequence: Synthetic oligonucleotide
  Target: LAMA2; (-) strand; PAM type: YTN; PAM sequence: CTG
gcatctagtgaagtaactga

SEQ ID NO: 232270 - DNA, 20 bp, Artificial Sequence
  Description of Artificial Sequence: Synthetic oligonucleotide
  Target: LAMA2; (-) strand; PAM type: YTN; PAM sequence: CTA
tgcactggcatctagtgaag

SEQ ID NO: 232271 - DNA, 20 bp, Artificial Sequence
  Description of Artificial Sequence: Synthetic oligonucleotide
  Target: LAMA2; (-) strand; PAM type: YTN; PAM sequence: TTC
aggtacatgcctatgcactg

SEQ ID NO: 232272 - DNA, 20 bp, Artificial Sequence
  Description of Artificial Sequence: Synthetic oligonucleotide
  Target: LAMA2; (-) strand; PAM type: YTN; PAM sequence: TTA
cgcagattcaggtacatgcc

SEQ ID NO: 232273 - DNA, 20 bp, Artificial Sequence
  Description of Artificial Sequence: Synthetic oligonucleotide
  Target: LAMA2; (-) strand; PAM type: YTN; PAM sequence: TTA
gttacgcagattcaggtaca

SEQ ID NO: 232274 - DNA, 20 bp, Artificial Sequence
  Description of Artificial Sequence: Synthetic oligonucleotide
  Target: LAMA2; (-) strand; PAM type: YTN; PAM sequence: CTC
ccaattagttacgcagattc

SEQ ID NO: 232275 - DNA, 20 bp, Artificial Sequence
  Description of Artificial Sequence: Synthetic oligonucleotide
  Target: LAMA2; (-) strand; PAM type: YTN; PAM sequence: TTC
tcccaattagttacgcagat

SEQ ID NO: 232276 - DNA, 20 bp, Artificial Sequence
  Description of Artificial Sequence: Synthetic oligonucleotide
  Target: LAMA2; (-) strand; PAM type: YTN; PAM sequence: TTC
ccattctcccaattagttac

SEQ ID NO: 232277 - DNA, 20 bp, Artificial Sequence
  Description of Artificial Sequence: Synthetic oligonucleotide
  Target: LAMA2; (-) strand; PAM type: YTN; PAM sequence: CTT
cccattctcccaattagtta

SEQ ID NO: 232278 - DNA, 20 bp, Artificial Sequence
  Description of Artificial Sequence: Synthetic oligonucleotide
  Target: LAMA2; (-) strand; PAM type: YTN; PAM sequence: TTA
acttcccattctcccaatta

SEQ ID NO: 232279 - DNA, 20 bp, Artificial Sequence
  Description of Artificial Sequence: Synthetic oligonucleotide
  Target: LAMA2; (-) strand; PAM type: YTN; PAM sequence: TTG
gaaaaataaagttaacttcc

SEQ ID NO: 232280 - DNA, 20 bp, Artificial Sequence
  Description of Artificial Sequence: Synthetic oligonucleotide
  Target: LAMA2; (-) strand; PAM type: YTN; PAM sequence: CTT
ggaaaaataaagttaacttc

SEQ ID NO: 232281 - DNA, 20 bp, Artificial Sequence
  Description of Artificial Sequence: Synthetic oligonucleotide
  Target: LAMA2; (-) strand; PAM type: YTN; PAM sequence: TTC
ttggaaaaataaagttaact

SEQ ID NO: 232282 - DNA, 20 bp, Artificial Sequence
  Description of Artificial Sequence: Synthetic oligonucleotide
  Target: LAMA2; (-) strand; PAM type: YTN; PAM sequence: TTT
cttggaaaaataaagttaac

SEQ ID NO: 232283 - DNA, 20 bp, Artificial Sequence
  Description of Artificial Sequence: Synthetic oligonucleotide
  Target: LAMA2; (-) strand; PAM type: YTN; PAM sequence: TTT
tcttggaaaaataaagttaa

SEQ ID NO: 232284 - DNA, 20 bp, Artificial Sequence
  Description of Artificial Sequence: Synthetic oligonucleotide
  Target: LAMA2; (-) strand; PAM type: YTN; PAM sequence: TTT
ttcttggaaaaataaagtta

SEQ ID NO: 232285 - DNA, 20 bp, Artificial Sequence
  Description of Artificial Sequence: Synthetic oligonucleotide
  Target: LAMA2; (-) strand; PAM type: YTN; PAM sequence: CTT
tttcttggaaaaataaagtt

SEQ ID NO: 232286 - DNA, 20 bp, Artificial Sequence
  Description of Artificial Sequence: Synthetic oligonucleotide
  Target: LAMA2; (-) strand; PAM type: YTN; PAM sequence: TTC
tttttcttggaaaaataaag

SEQ ID NO: 232287 - DNA, 20 bp, Artificial Sequence
  Description of Artificial Sequence: Synthetic oligonucleotide
  Target: LAMA2; (-) strand; PAM type: YTN; PAM sequence: TTT
ctttttcttggaaaaataaa

SEQ ID NO: 232288 - DNA, 20 bp, Artificial Sequence
  Description of Artificial Sequence: Synthetic oligonucleotide
  Target: LAMA2; (-) strand; PAM type: YTN; PAM sequence: TTG
tttctttttcttggaaaaat

SEQ ID NO: 232289 - DNA, 20 bp, Artificial Sequence
  Description of Artificial Sequence: Synthetic oligonucleotide
  Target: LAMA2; (-) strand; PAM type: YTN; PAM sequence: TTT
gtttctttttcttggaaaaa

SEQ ID NO: 232290 - DNA, 20 bp, Artificial Sequence
  Description of Artificial Sequence: Synthetic oligonucleotide
  Target: LAMA2; (-) strand; PAM type: YTN; PAM sequence: TTT
tgtttctttttcttggaaaa

SEQ ID NO: 232291 - DNA, 20 bp, Artificial Sequence
  Description of Artificial Sequence: Synthetic oligonucleotide
  Target: LAMA2; (-) strand; PAM type: YTN; PAM sequence: TTG
attttgtttctttttcttgg

SEQ ID NO: 232292 - DNA, 20 bp, Artificial Sequence
  Description of Artificial Sequence: Synthetic oligonucleotide
  Target: LAMA2; (-) strand; PAM type: YTN; PAM sequence: TTA
aatattgattttgtttcttt

SEQ ID NO: 232293 - DNA, 20 bp, Artificial Sequence
  Description of Artificial Sequence: Synthetic oligonucleotide
  Target: LAMA2; (-) strand; PAM type: YTN; PAM sequence: TTT
aaatattgattttgtttctt

SEQ ID NO: 232294 - DNA, 20 bp, Artificial Sequence
  Description of Artificial Sequence: Synthetic oligonucleotide
  Target: LAMA2; (-) strand; PAM type: YTN; PAM sequence: TTC
caaaatttaaatattgattt

SEQ ID NO: 232295 - DNA, 20 bp, Artificial Sequence
  Description of Artificial Sequence: Synthetic oligonucleotide
  Target: LAMA2; (-) strand; PAM type: YTN; PAM sequence: TTT
ccaaaatttaaatattgatt

SEQ ID NO: 232296 - DNA, 20 bp, Artificial Sequence
  Description of Artificial Sequence: Synthetic oligonucleotide
  Target: LAMA2; (-) strand; PAM type: YTN; PAM sequence: TTT
tccaaaatttaaatattgat

SEQ ID NO: 232297 - DNA, 20 bp, Artificial Sequence
  Description of Artificial Sequence: Synthetic oligonucleotide
  Target: LAMA2; (-) strand; PAM type: YTN; PAM sequence: TTA
tgttttccaaaatttaaata

SEQ ID NO: 232298 - DNA, 20 bp, Artificial Sequence
  Description of Artificial Sequence: Synthetic oligonucleotide
  Target: LAMA2; (-) strand; PAM type: YTN; PAM sequence: TTA
acaattatgttttccaaaat

SEQ ID NO: 232299 - DNA, 20 bp, Artificial Sequence
  Description of Artificial Sequence: Synthetic oligonucleotide
  Target: LAMA2; (-) strand; PAM type: YTN; PAM sequence: TTT
aacaattatgttttccaaaa

SEQ ID NO: 232300 - DNA, 20 bp, Artificial Sequence
  Description of Artificial Sequence: Synthetic oligonucleotide
  Target: LAMA2; (-) strand; PAM type: YTN; PAM sequence: CTA
cacaatatgaaaaataattt

SEQ ID NO: 232301 - DNA, 20 bp, Artificial Sequence
  Description of Artificial Sequence: Synthetic oligonucleotide
  Target: LAMA2; (-) strand; PAM type: YTN; PAM sequence: TTA
aagagatgtgaatctacaca

SEQ ID NO: 232302 - DNA, 20 bp, Artificial Sequence
  Description of Artificial Sequence: Synthetic oligonucleotide
  Target: LAMA2; (-) strand; PAM type: YTN; PAM sequence: TTG
attaaagagatgtgaatcta

SEQ ID NO: 232303 - DNA, 20 bp, Artificial Sequence
  Description of Artificial Sequence: Synthetic oligonucleotide
  Target: LAMA2; (-) strand; PAM type: YTN; PAM sequence: CTC
ccattgattaaagagatgtg

SEQ ID NO: 232304 - DNA, 20 bp, Artificial Sequence
  Description of Artificial Sequence: Synthetic oligonucleotide
  Target: LAMA2; (-) strand; PAM type: YTN; PAM sequence: TTG
gtctcccattgattaaagag

SEQ ID NO: 232305 - DNA, 20 bp, Artificial Sequence
  Description of Artificial Sequence: Synthetic oligonucleotide
  Target: LAMA2; (-) strand; PAM type: YTN; PAM sequence: CTT
ggtctcccattgattaaaga

SEQ ID NO: 232306 - DNA, 20 bp, Artificial Sequence
  Description of Artificial Sequence: Synthetic oligonucleotide
  Target: LAMA2; (-) strand; PAM type: YTN; PAM sequence: CTG
gagaaggatcatcggcactt

SEQ ID NO: 232307 - DNA, 20 bp, Artificial Sequence
  Description of Artificial Sequence: Synthetic oligonucleotide
  Target: LAMA2; (-) strand; PAM type: YTN; PAM sequence: TTC
tggagaaggatcatcggcac

SEQ ID NO: 232308 - DNA, 20 bp, Artificial Sequence
  Description of Artificial Sequence: Synthetic oligonucleotide
  Target: LAMA2; (-) strand; PAM type: YTN; PAM sequence: CTA
gcagttctggagaaggatca

SEQ ID NO: 232309 - DNA, 20 bp, Artificial Sequence
  Description of Artificial Sequence: Synthetic oligonucleotide
  Target: LAMA2; (-) strand; PAM type: YTN; PAM sequence: TTC
tagcagttctggagaaggat

SEQ ID NO: 232310 - DNA, 20 bp, Artificial Sequence
  Description of Artificial Sequence: Synthetic oligonucleotide
  Target: LAMA2; (-) strand; PAM type: YTN; PAM sequence: CTC
aggcgaatatagcgagcgga

SEQ ID NO: 232311 - DNA, 20 bp, Artificial Sequence
  Description of Artificial Sequence: Synthetic oligonucleotide
  Target: LAMA2; (-) strand; PAM type: YTN; PAM sequence: CTG
aaatctcaggcgaatatagc

SEQ ID NO: 232312 - DNA, 20 bp, Artificial Sequence
  Description of Artificial Sequence: Synthetic oligonucleotide
  Target: LAMA2; (-) strand; PAM type: YTN; PAM sequence: CTC
tgaaatctcaggcgaatata

SEQ ID NO: 232313 - DNA, 20 bp, Artificial Sequence
  Description of Artificial Sequence: Synthetic oligonucleotide
  Target: LAMA2; (-) strand; PAM type: YTN; PAM sequence: TTC
agtgtgcggatcctctgaaa

SEQ ID NO: 232314 - DNA, 20 bp, Artificial Sequence
  Description of Artificial Sequence: Synthetic oligonucleotide
  Target: LAMA2; (-) strand; PAM type: YTN; PAM sequence: TTG
tgagcaaacatcatcaagtc

SEQ ID NO: 232315 - DNA, 20 bp, Artificial Sequence
  Description of Artificial Sequence: Synthetic oligonucleotide
  Target: LAMA2; (-) strand; PAM type: YTN; PAM sequence: TTT
gtgagcaaacatcatcaagt

SEQ ID NO: 232316 - DNA, 20 bp, Artificial Sequence
  Description of Artificial Sequence: Synthetic oligonucleotide
  Target: LAMA2; (-) strand; PAM type: YTN; PAM sequence: CTT
tgtgagcaaacatcatcaag

SEQ ID NO: 232317 - DNA, 20 bp, Artificial Sequence
  Description of Artificial Sequence: Synthetic oligonucleotide
  Target: LAMA2; (-) strand; PAM type: YTN; PAM sequence: TTG
ggtctttgtgagcaaacatc

SEQ ID NO: 232318 - DNA, 20 bp, Artificial Sequence
  Description of Artificial Sequence: Synthetic oligonucleotide
  Target: LAMA2; (-) strand; PAM type: YTN; PAM sequence: CTT
gggtctttgtgagcaaacat

SEQ ID NO: 232319 - DNA, 20 bp, Artificial Sequence
  Description of Artificial Sequence: Synthetic oligonucleotide
  Target: LAMA2; (-) strand; PAM type: YTN; PAM sequence: CTC
ttgggtctttgtgagcaaac

SEQ ID NO: 232320 - DNA, 20 bp, Artificial Sequence
  Description of Artificial Sequence: Synthetic oligonucleotide
  Target: LAMA2; (-) strand; PAM type: YTN; PAM sequence: TTC
tcttgggtctttgtgagcaa

SEQ ID NO: 232321 - DNA, 20 bp, Artificial Sequence
  Description of Artificial Sequence: Synthetic oligonucleotide
  Target: LAMA2; (-) strand; PAM type: YTN; PAM sequence: TTT
ctcttgggtctttgtgagca

SEQ ID NO: 232322 - DNA, 20 bp, Artificial Sequence
  Description of Artificial Sequence: Synthetic oligonucleotide
  Target: LAMA2; (-) strand; PAM type: YTN; PAM sequence: CTG
gtgacaatggggtcaatttc

SEQ ID NO: 232323 - DNA, 20 bp, Artificial Sequence
  Description of Artificial Sequence: Synthetic oligonucleotide
  Target: LAMA2; (-) strand; PAM type: YTN; PAM sequence: TTC
tggtgacaatggggtcaatt

SEQ ID NO: 232324 - DNA, 20 bp, Artificial Sequence
  Description of Artificial Sequence: Synthetic oligonucleotide
  Target: LAMA2; (-) strand; PAM type: YTN; PAM sequence: CTT
ctggtgacaatggggtcaat

SEQ ID NO: 232325 - DNA, 20 bp, Artificial Sequence
  Description of Artificial Sequence: Synthetic oligonucleotide
  Target: LAMA2; (-) strand; PAM type: YTN; PAM sequence: CTC
ttctggtgacaatggggtca

SEQ ID NO: 232326 - DNA, 20 bp, Artificial Sequence
  Description of Artificial Sequence: Synthetic oligonucleotide
  Target: LAMA2; (-) strand; PAM type: YTN; PAM sequence: TTA
ctcttctggtgacaatgggg

SEQ ID NO: 232327 - DNA, 20 bp, Artificial Sequence
  Description of Artificial Sequence: Synthetic oligonucleotide
  Target: LAMA2; (-) strand; PAM type: YTN; PAM sequence: CTT
actcttctggtgacaatggg

SEQ ID NO: 232328 - DNA, 20 bp, Artificial Sequence
  Description of Artificial Sequence: Synthetic oligonucleotide
  Target: LAMA2; (-) strand; PAM type: YTN; PAM sequence: TTC
atcataacttactcttctgg

SEQ ID NO: 232329 - DNA, 20 bp, Artificial Sequence
  Description of Artificial Sequence: Synthetic oligonucleotide
  Target: LAMA2; (-) strand; PAM type: YTN; PAM sequence: CTA
atatgattcatcataactta

SEQ ID NO: 232330 - DNA, 20 bp, Artificial Sequence
  Description of Artificial Sequence: Synthetic oligonucleotide
  Target: LAMA2; (-) strand; PAM type: YTN; PAM sequence: CTC
taatatgattcatcataact

SEQ ID NO: 232331 - DNA, 20 bp, Artificial Sequence
  Description of Artificial Sequence: Synthetic oligonucleotide
  Target: LAMA2; (-) strand; PAM type: YTN; PAM sequence: TTG
taggctctaatatgattcat

SEQ ID NO: 232332 - DNA, 20 bp, Artificial Sequence
  Description of Artificial Sequence: Synthetic oligonucleotide
  Target: LAMA2; (-) strand; PAM type: YTN; PAM sequence: TTT
gtaggctctaatatgattca

SEQ ID NO: 232333 - DNA, 20 bp, Artificial Sequence
  Description of Artificial Sequence: Synthetic oligonucleotide
  Target: LAMA2; (-) strand; PAM type: YTN; PAM sequence: TTA
acagacaaaaagataagtgg

SEQ ID NO: 232334 - DNA, 20 bp, Artificial Sequence
  Description of Artificial Sequence: Synthetic oligonucleotide
  Target: LAMA2; (-) strand; PAM type: YTN; PAM sequence: TTT
aacagacaaaaagataagtg

SEQ ID NO: 232335 - DNA, 20 bp, Artificial Sequence
  Description of Artificial Sequence: Synthetic oligonucleotide
  Target: LAMA2; (-) strand; PAM type: YTN; PAM sequence: TTA
aagtatttaacagacaaaaa

SEQ ID NO: 232336 - DNA, 20 bp, Artificial Sequence
  Description of Artificial Sequence: Synthetic oligonucleotide
  Target: LAMA2; (-) strand; PAM type: YTN; PAM sequence: TTT
aaagtatttaacagacaaaa

SEQ ID NO: 232337 - DNA, 20 bp, Artificial Sequence
  Description of Artificial Sequence: Synthetic oligonucleotide
  Target: LAMA2; (-) strand; PAM type: YTN; PAM sequence: TTT
taaagtatttaacagacaaa

SEQ ID NO: 232338 - DNA, 20 bp, Artificial Sequence
  Description of Artificial Sequence: Synthetic oligonucleotide
  Target: LAMA2; (-) strand; PAM type: YTN; PAM sequence: TTT
ttaaagtatttaacagacaa

SEQ ID NO: 232339 - DNA, 20 bp, Artificial Sequence
  Description of Artificial Sequence: Synthetic oligonucleotide
  Target: LAMA2; (-) strand; PAM type: YTN; PAM sequence: CTG
aaaacatttttaaagtattt

SEQ ID NO: 232340 - DNA, 20 bp, Artificial Sequence
  Description of Artificial Sequence: Synthetic oligonucleotide
  Target: LAMA2; (-) strand; PAM type: YTN; PAM sequence: CTA
caaatcactgaaaacatttt

SEQ ID NO: 232341 - DNA, 20 bp, Artificial Sequence
  Description of Artificial Sequence: Synthetic oligonucleotide
  Target: LAMA2; (-) strand; PAM type: YTN; PAM sequence: CTC
ctacaaatcactgaaaacat

SEQ ID NO: 232342 - DNA, 20 bp, Artificial Sequence
  Description of Artificial Sequence: Synthetic oligonucleotide
  Target: LAMA2; (-) strand; PAM type: YTN; PAM sequence: TTG
ataataaccactcctacaaa

SEQ ID NO: 232343 - DNA, 20 bp, Artificial Sequence
  Description of Artificial Sequence: Synthetic oligonucleotide
  Target: LAMA2; (-) strand; PAM type: YTN; PAM sequence: TTT
gataataaccactcctacaa

SEQ ID NO: 232344 - DNA, 20 bp, Artificial Sequence
  Description of Artificial Sequence: Synthetic oligonucleotide
  Target: LAMA2; (-) strand; PAM type: YTN; PAM sequence: CTA
aaataaaaatttgataataa

SEQ ID NO: 232345 - DNA, 20 bp, Artificial Sequence
  Description of Artificial Sequence: Synthetic oligonucleotide
  Target: LAMA2; (-) strand; PAM type: YTN; PAM sequence: TTC
taaaataaaaatttgataat

SEQ ID NO: 232346 - DNA, 20 bp, Artificial Sequence
  Description of Artificial Sequence: Synthetic oligonucleotide
  Target: LAMA2; (-) strand; PAM type: YTN; PAM sequence: CTA
caattctaaaataaaaattt

SEQ ID NO: 232347 - DNA, 20 bp, Artificial Sequence
  Description of Artificial Sequence: Synthetic oligonucleotide
  Target: LAMA2; (-) strand; PAM type: YTN; PAM sequence: TTC
aaataataataataataata

SEQ ID NO: 232348 - DNA, 20 bp, Artificial Sequence
  Description of Artificial Sequence: Synthetic oligonucleotide
  Target: LAMA2; (-) strand; PAM type: YTN; PAM sequence: TTT
caaataataataataataat

SEQ ID NO: 232349 - DNA, 20 bp, Artificial Sequence
  Description of Artificial Sequence: Synthetic oligonucleotide
  Target: LAMA2; (-) strand; PAM type: YTN; PAM sequence: CTG
tcaaatttcaaataataata

SEQ ID NO: 232350 - DNA, 20 bp, Artificial Sequence
  Description of Artificial Sequence: Synthetic oligonucleotide
  Target: LAMA2; (-) strand; PAM type: YTN; PAM sequence: CTG
aacaaaggaaagtctgtcaa

SEQ ID NO: 232351 - DNA, 20 bp, Artificial Sequence
  Description of Artificial Sequence: Synthetic oligonucleotide
  Target: LAMA2; (-) strand; PAM type: YTN; PAM sequence: TTG
gatctgaacaaaggaaagtc

SEQ ID NO: 232352 - DNA, 20 bp, Artificial Sequence
  Description of Artificial Sequence: Synthetic oligonucleotide
  Target: LAMA2; (-) strand; PAM type: YTN; PAM sequence: CTT
ggatctgaacaaaggaaagt

SEQ ID NO: 232353 - DNA, 20 bp, Artificial Sequence
  Description of Artificial Sequence: Synthetic oligonucleotide
  Target: LAMA2; (-) strand; PAM type: YTN; PAM sequence: TTA
cacatgtaataagcggcaca

SEQ ID NO: 232354 - DNA, 20 bp, Artificial Sequence
  Description of Artificial Sequence: Synthetic oligonucleotide
  Target: LAMA2; (-) strand; PAM type: YTN; PAM sequence: TTG
ataaatgttacacatgtaat

SEQ ID NO: 232355 - DNA, 20 bp, Artificial Sequence
  Description of Artificial Sequence: Synthetic oligonucleotide
  Target: LAMA2; (-) strand; PAM type: YTN; PAM sequence: TTT
gataaatgttacacatgtaa

SEQ ID NO: 232356 - DNA, 20 bp, Artificial Sequence
  Description of Artificial Sequence: Synthetic oligonucleotide
  Target: LAMA2; (-) strand; PAM type: YTN; PAM sequence: CTA
aaatgtttgataaatgttac

SEQ ID NO: 232357 - DNA, 20 bp, Artificial Sequence
  Description of Artificial Sequence: Synthetic oligonucleotide
  Target: LAMA2; (-) strand; PAM type: YTN; PAM sequence: TTG
agaaggctaaaatgtttgat

SEQ ID NO: 232358 - DNA, 20 bp, Artificial Sequence
  Description of Artificial Sequence: Synthetic oligonucleotide
  Target: LAMA2; (-) strand; PAM type: YTN; PAM sequence: TTT
gagaaggctaaaatgtttga

SEQ ID NO: 232359 - DNA, 20 bp, Artificial Sequence
  Description of Artificial Sequence: Synthetic oligonucleotide
  Target: LAMA2; (-) strand; PAM type: YTN; PAM sequence: TTA
aagtttgagaaggctaaaat

SEQ ID NO: 232360 - DNA, 20 bp, Artificial Sequence
  Description of Artificial Sequence: Synthetic oligonucleotide
  Target: LAMA2; (-) strand; PAM type: YTN; PAM sequence: TTA
caaaagaagaaattaaagtt

SEQ ID NO: 232361 - DNA, 20 bp, Artificial Sequence
  Description of Artificial Sequence: Synthetic oligonucleotide
  Target: LAMA2; (-) strand; PAM type: YTN; PAM sequence: TTT
acaaaagaagaaattaaagt

SEQ ID NO: 232362 - DNA, 20 bp, Artificial Sequence
  Description of Artificial Sequence: Synthetic oligonucleotide
  Target: LAMA2; (-) strand; PAM type: YTN; PAM sequence: TTT
tacaaaagaagaaattaaag

SEQ ID NO: 232363 - DNA, 20 bp, Artificial Sequence
  Description of Artificial Sequence: Synthetic oligonucleotide
  Target: LAMA2; (-) strand; PAM type: YTN; PAM sequence: CTC
attttacaaaagaagaaatt

SEQ ID NO: 232364 - DNA, 20 bp, Artificial Sequence
  Description of Artificial Sequence: Synthetic oligonucleotide
  Target: LAMA2; (-) strand; PAM type: YTN; PAM sequence: TTC
tcattttacaaaagaagaaa

SEQ ID NO: 232365 - DNA, 20 bp, Artificial Sequence
  Description of Artificial Sequence: Synthetic oligonucleotide
  Target: LAMA2; (-) strand; PAM type: YTN; PAM sequence: TTG
tgattctcattttacaaaag

SEQ ID NO: 232366 - DNA, 20 bp, Artificial Sequence
  Description of Artificial Sequence: Synthetic oligonucleotide
  Target: LAMA2; (-) strand; PAM type: YTN; PAM sequence: TTA
agtagacattgtgattctca

SEQ ID NO: 232367 - DNA, 20 bp, Artificial Sequence
  Description of Artificial Sequence: Synthetic oligonucleotide
  Target: LAMA2; (-) strand; PAM type: YTN; PAM sequence: TTA
ttaagtagacattgtgattc

SEQ ID NO: 232368 - DNA, 20 bp, Artificial Sequence
  Description of Artificial Sequence: Synthetic oligonucleotide
  Target: LAMA2; (-) strand; PAM type: YTN; PAM sequence: CTG
aaaaataagattattaagta

SEQ ID NO: 232369 - DNA, 20 bp, Artificial Sequence
  Description of Artificial Sequence: Synthetic oligonucleotide
  Target: LAMA2; (-) strand; PAM type: YTN; PAM sequence: TTC
tgaaaaataagattattaag

SEQ ID NO: 232370 - DNA, 20 bp, Artificial Sequence
  Description of Artificial Sequence: Synthetic oligonucleotide
  Target: LAMA2; (-) strand; PAM type: YTN; PAM sequence: TTA
ttctgaaaaataagattatt

SEQ ID NO: 232371 - DNA, 20 bp, Artificial Sequence
  Description of Artificial Sequence: Synthetic oligonucleotide
  Target: LAMA2; (-) strand; PAM type: YTN; PAM sequence: TTT
attctgaaaaataagattat

SEQ ID NO: 232372 - DNA, 20 bp, Artificial Sequence
  Description of Artificial Sequence: Synthetic oligonucleotide
  Target: LAMA2; (-) strand; PAM type: YTN; PAM sequence: TTT
tattctgaaaaataagatta

SEQ ID NO: 232373 - DNA, 20 bp, Artificial Sequence
  Description of Artificial Sequence: Synthetic oligonucleotide
  Target: LAMA2; (-) strand; PAM type: YTN; PAM sequence: CTA
attttattctgaaaaataag

SEQ ID NO: 232374 - DNA, 20 bp, Artificial Sequence
  Description of Artificial Sequence: Synthetic oligonucleotide
  Target: LAMA2; (-) strand; PAM type: YTN; PAM sequence: CTA
aggtgacaaaggctaatttt

SEQ ID NO: 232375 - DNA, 20 bp, Artificial Sequence
  Description of Artificial Sequence: Synthetic oligonucleotide
  Target: LAMA2; (-) strand; PAM type: YTN; PAM sequence: TTA
taatagtagtatagatcccc

SEQ ID NO: 232376 - DNA, 20 bp, Artificial Sequence
  Description of Artificial Sequence: Synthetic oligonucleotide
  Target: LAMA2; (-) strand; PAM type: YTN; PAM sequence: CTC
gccaaagccaattataatag

SEQ ID NO: 232377 - DNA, 20 bp, Artificial Sequence
  Description of Artificial Sequence: Synthetic oligonucleotide
  Target: LAMA2; (-) strand; PAM type: YTN; PAM sequence: TTC
cagtagtaactcgccaaagc

SEQ ID NO: 232378 - DNA, 20 bp, Artificial Sequence
  Description of Artificial Sequence: Synthetic oligonucleotide
  Target: LAMA2; (-) strand; PAM type: YTN; PAM sequence: CTT
ccagtagtaactcgccaaag

SEQ ID NO: 232379 - DNA, 20 bp, Artificial Sequence
  Description of Artificial Sequence: Synthetic oligonucleotide
  Target: LAMA2; (-) strand; PAM type: YTN; PAM sequence: CTG
cacttccagtagtaactcgc

SEQ ID NO: 232380 - DNA, 20 bp, Artificial Sequence
  Description of Artificial Sequence: Synthetic oligonucleotide
  Target: LAMA2; (-) strand; PAM type: YTN; PAM sequence: TTC
aaagcccctgcacttccagt

SEQ ID NO: 232381 - DNA, 20 bp, Artificial Sequence
  Description of Artificial Sequence: Synthetic oligonucleotide
  Target: LAMA2; (-) strand; PAM type: YTN; PAM sequence: TTT
caaagcccctgcacttccag

SEQ ID NO: 232382 - DNA, 20 bp, Artificial Sequence
  Description of Artificial Sequence: Synthetic oligonucleotide
  Target: LAMA2; (-) strand; PAM type: YTN; PAM sequence: CTC
agtggtggcaaaaaaatgtt

SEQ ID NO: 232383 - DNA, 20 bp, Artificial Sequence
  Description of Artificial Sequence: Synthetic oligonucleotide
  Target: LAMA2; (-) strand; PAM type: YTN; PAM sequence: CTG
gctcagtggtggcaaaaaaa

SEQ ID NO: 232384 - DNA, 20 bp, Artificial Sequence
  Description of Artificial Sequence: Synthetic oligonucleotide
  Target: LAMA2; (-) strand; PAM type: YTN; PAM sequence: CTG
tatgtgtgcatgtgtgtata

SEQ ID NO: 232385 - DNA, 20 bp, Artificial Sequence
  Description of Artificial Sequence: Synthetic oligonucleotide
  Target: LAMA2; (-) strand; PAM type: YTN; PAM sequence: CTC
tgtatgtgtgcatgtgtgta

SEQ ID NO: 232386 - DNA, 20 bp, Artificial Sequence
  Description of Artificial Sequence: Synthetic oligonucleotide
  Target: LAMA2; (-) strand; PAM type: YTN; PAM sequence: CTC
tctgtatgtgtgcatgtgtg

SEQ ID NO: 232387 - DNA, 20 bp, Artificial Sequence
  Description of Artificial Sequence: Synthetic oligonucleotide
  Target: LAMA2; (-) strand; PAM type: YTN; PAM sequence: CTG
ctctctgtatgtgtgcatgt

SEQ ID NO: 232388 - DNA, 20 bp, Artificial Sequence
  Description of Artificial Sequence: Synthetic oligonucleotide
  Target: LAMA2; (-) strand; PAM type: YTN; PAM sequence: TTA
agacatactgctctctgtat

SEQ ID NO: 232389 - DNA, 20 bp, Artificial Sequence
  Description of Artificial Sequence: Synthetic oligonucleotide
  Target: LAMA2; (-) strand; PAM type: YTN; PAM sequence: TTT
aagacatactgctctctgta

SEQ ID NO: 232390 - DNA, 20 bp, Artificial Sequence
  Description of Artificial Sequence: Synthetic oligonucleotide
  Target: LAMA2; (-) strand; PAM type: YTN; PAM sequence: TTA
aggtttaagacatactgctc

SEQ ID NO: 232391 - DNA, 20 bp, Artificial Sequence
  Description of Artificial Sequence: Synthetic oligonucleotide
  Target: LAMA2; (-) strand; PAM type: YTN; PAM sequence: CTA
atcccatacacattaaggtt

SEQ ID NO: 232392 - DNA, 20 bp, Artificial Sequence
  Description of Artificial Sequence: Synthetic oligonucleotide
  Target: LAMA2; (-) strand; PAM type: YTN; PAM sequence: CTG
gctaatcccatacacattaa

SEQ ID NO: 232393 - DNA, 20 bp, Artificial Sequence
  Description of Artificial Sequence: Synthetic oligonucleotide
  Target: LAMA2; (-) strand; PAM type: YTN; PAM sequence: TTC
cacaagatcactggctaatc

SEQ ID NO: 232394 - DNA, 20 bp, Artificial Sequence
  Description of Artificial Sequence: Synthetic oligonucleotide
  Target: LAMA2; (-) strand; PAM type: YTN; PAM sequence: TTT
ccacaagatcactggctaat

SEQ ID NO: 232395 - DNA, 20 bp, Artificial Sequence
  Description of Artificial Sequence: Synthetic oligonucleotide
  Target: LAMA2; (-) strand; PAM type: YTN; PAM sequence: CTA
tatttccacaagatcactgg

SEQ ID NO: 232396 - DNA, 20 bp, Artificial Sequence
  Description of Artificial Sequence: Synthetic oligonucleotide
  Target: LAMA2; (-) strand; PAM type: YTN; PAM sequence: CTG
aatcataacctatatttcca

SEQ ID NO: 232397 - DNA, 20 bp, Artificial Sequence
  Description of Artificial Sequence: Synthetic oligonucleotide
  Target: LAMA2; (-) strand; PAM type: YTN; PAM sequence: CTA
ctgaatcataacctatattt

SEQ ID NO: 232398 - DNA, 20 bp, Artificial Sequence
  Description of Artificial Sequence: Synthetic oligonucleotide
  Target: LAMA2; (-) strand; PAM type: YTN; PAM sequence: CTG
ccctactgaatcataaccta

SEQ ID NO: 232399 - DNA, 20 bp, Artificial Sequence
  Description of Artificial Sequence: Synthetic oligonucleotide
  Target: LAMA2; (-) strand; PAM type: YTN; PAM sequence: CTC
tgccctactgaatcataacc

SEQ ID NO: 232400 - DNA, 20 bp, Artificial Sequence
  Description of Artificial Sequence: Synthetic oligonucleotide
  Target: LAMA2; (-) strand; PAM type: YTN; PAM sequence: CTC
agctctgccctactgaatca

SEQ ID NO: 232401 - DNA, 20 bp, Artificial Sequence
  Description of Artificial Sequence: Synthetic oligonucleotide
  Target: LAMA2; (-) strand; PAM type: YTN; PAM sequence: TTG
aagtgcagcgtctcagctct

SEQ ID NO: 232402 - DNA, 20 bp, Artificial Sequence
  Description of Artificial Sequence: Synthetic oligonucleotide
  Target: LAMA2; (-) strand; PAM type: YTN; PAM sequence: TTT
gaagtgcagcgtctcagctc

SEQ ID NO: 232403 - DNA, 20 bp, Artificial Sequence
  Description of Artificial Sequence: Synthetic oligonucleotide
  Target: LAMA2; (-) strand; PAM type: YTN; PAM sequence: TTT
tgaagtgcagcgtctcagct

SEQ ID NO: 232404 - DNA, 20 bp, Artificial Sequence
  Description of Artificial Sequence: Synthetic oligonucleotide
  Target: LAMA2; (-) strand; PAM type: YTN; PAM sequence: TTT
ttgaagtgcagcgtctcagc

SEQ ID NO: 232405 - DNA, 20 bp, Artificial Sequence
  Description of Artificial Sequence: Synthetic oligonucleotide
  Target: LAMA2; (-) strand; PAM type: YTN; PAM sequence: CTG
gaaagtttttgaagtgcagc

SEQ ID NO: 232406 - DNA, 20 bp, Artificial Sequence
  Description of Artificial Sequence: Synthetic oligonucleotide
  Target: LAMA2; (-) strand; PAM type: YTN; PAM sequence: TTG
atggcccacaaaccggcaac

SEQ ID NO: 232407 - DNA, 20 bp, Artificial Sequence
  Description of Artificial Sequence: Synthetic oligonucleotide
  Target: LAMA2; (-) strand; PAM type: YTN; PAM sequence: TTT
gatggcccacaaaccggcaa

SEQ ID NO: 232408 - DNA, 20 bp, Artificial Sequence
  Description of Artificial Sequence: Synthetic oligonucleotide
  Target: LAMA2; (-) strand; PAM type: YTN; PAM sequence: TTA
tttgatggcccacaaaccgg

SEQ ID NO: 232409 - DNA, 20 bp, Artificial Sequence
  Description of Artificial Sequence: Synthetic oligonucleotide
  Target: LAMA2; (-) strand; PAM type: YTN; PAM sequence: TTA
atcaagcataaaaccaaatt

SEQ ID NO: 232410 - DNA, 20 bp, Artificial Sequence
  Description of Artificial Sequence: Synthetic oligonucleotide
  Target: LAMA2; (-) strand; PAM type: YTN; PAM sequence: TTC
attaatcaagcataaaacca

SEQ ID NO: 232411 - DNA, 20 bp, Artificial Sequence
  Description of Artificial Sequence: Synthetic oligonucleotide
  Target: LAMA2; (-) strand; PAM type: YTN; PAM sequence: TTG
tgattcattaatcaagcata

SEQ ID NO: 232412 - DNA, 20 bp, Artificial Sequence
  Description of Artificial Sequence: Synthetic oligonucleotide
  Target: LAMA2; (-) strand; PAM type: YTN; PAM sequence: CTT
gtgattcattaatcaagcat

SEQ ID NO: 232413 - DNA, 20 bp, Artificial Sequence
  Description of Artificial Sequence: Synthetic oligonucleotide
  Target: LAMA2; (-) strand; PAM type: YTN; PAM sequence: CTA
tggcttgtgattcattaatc

SEQ ID NO: 232414 - DNA, 20 bp, Artificial Sequence
  Description of Artificial Sequence: Synthetic oligonucleotide
  Target: LAMA2; (-) strand; PAM type: YTN; PAM sequence: TTA
aaactatggcttgtgattca

SEQ ID NO: 232415 - DNA, 20 bp, Artificial Sequence
  Description of Artificial Sequence: Synthetic oligonucleotide
  Target: LAMA2; (-) strand; PAM type: YTN; PAM sequence: TTT
aaaactatggcttgtgattc

SEQ ID NO: 232416 - DNA, 20 bp, Artificial Sequence
  Description of Artificial Sequence: Synthetic oligonucleotide
  Target: LAMA2; (-) strand; PAM type: YTN; PAM sequence: TTT
taaaactatggcttgtgatt

SEQ ID NO: 232417 - DNA, 20 bp, Artificial Sequence
  Description of Artificial Sequence: Synthetic oligonucleotide
  Target: LAMA2; (-) strand; PAM type: YTN; PAM sequence: TTT
ttaaaactatggcttgtgat

SEQ ID NO: 232418 - DNA, 20 bp, Artificial Sequence
  Description of Artificial Sequence: Synthetic oligonucleotide
  Target: LAMA2; (-) strand; PAM type: YTN; PAM sequence: CTG
catttttaaaactatggctt

SEQ ID NO: 232419 - DNA, 20 bp, Artificial Sequence
  Description of Artificial Sequence: Synthetic oligonucleotide
  Target: LAMA2; (-) strand; PAM type: YTN; PAM sequence: CTA
tagcactgcatttttaaaac

SEQ ID NO: 232420 - DNA, 20 bp, Artificial Sequence
  Description of Artificial Sequence: Synthetic oligonucleotide
  Target: LAMA2; (-) strand; PAM type: YTN; PAM sequence: CTC
ctatagcactgcatttttaa

SEQ ID NO: 232421 - DNA, 20 bp, Artificial Sequence
  Description of Artificial Sequence: Synthetic oligonucleotide
  Target: LAMA2; (-) strand; PAM type: YTN; PAM sequence: TTC
tcctatagcactgcattttt

SEQ ID NO: 232422 - DNA, 20 bp, Artificial Sequence
  Description of Artificial Sequence: Synthetic oligonucleotide
  Target: LAMA2; (-) strand; PAM type: YTN; PAM sequence: TTT
ctcctatagcactgcatttt

SEQ ID NO: 232423 - DNA, 20 bp, Artificial Sequence
  Description of Artificial Sequence: Synthetic oligonucleotide
  Target: LAMA2; (-) strand; PAM type: YTN; PAM sequence: TTT
tctcctatagcactgcattt

SEQ ID NO: 232424 - DNA, 20 bp, Artificial Sequence
  Description of Artificial Sequence: Synthetic oligonucleotide
  Target: LAMA2; (-) strand; PAM type: YTN; PAM sequence: TTG
taaaggaaaataaaacagta

SEQ ID NO: 232425 - DNA, 20 bp, Artificial Sequence
  Description of Artificial Sequence: Synthetic oligonucleotide
  Target: LAMA2; (-) strand; PAM type: YTN; PAM sequence: TTT
gtaaaggaaaataaaacagt

SEQ ID NO: 232426 - DNA, 20 bp, Artificial Sequence
  Description of Artificial Sequence: Synthetic oligonucleotide
  Target: LAMA2; (-) strand; PAM type: YTN; PAM sequence: TTA
tttgtaaaggaaaataaaac

SEQ ID NO: 232427 - DNA, 20 bp, Artificial Sequence
  Description of Artificial Sequence: Synthetic oligonucleotide
  Target: LAMA2; (-) strand; PAM type: YTN; PAM sequence: TTT
atttgtaaaggaaaataaaa

SEQ ID NO: 232428 - DNA, 20 bp, Artificial Sequence
  Description of Artificial Sequence: Synthetic oligonucleotide
  Target: LAMA2; (-) strand; PAM type: YTN; PAM sequence: TTT
tatttgtaaaggaaaataaa

SEQ ID NO: 232429 - DNA, 20 bp, Artificial Sequence
  Description of Artificial Sequence: Synthetic oligonucleotide
  Target: LAMA2; (-) strand; PAM type: YTN; PAM sequence: CTA
atattttatttgtaaaggaa

SEQ ID NO: 232430 - DNA, 20 bp, Artificial Sequence
  Description of Artificial Sequence: Synthetic oligonucleotide
  Target: LAMA2; (-) strand; PAM type: YTN; PAM sequence: TTC
ccctaatattttatttgtaa

SEQ ID NO: 232431 - DNA, 20 bp, Artificial Sequence
  Description of Artificial Sequence: Synthetic oligonucleotide
  Target: LAMA2; (-) strand; PAM type: YTN; PAM sequence: TTT
cccctaatattttatttgta

SEQ ID NO: 232432 - DNA, 20 bp, Artificial Sequence
  Description of Artificial Sequence: Synthetic oligonucleotide
  Target: LAMA2; (-) strand; PAM type: YTN; PAM sequence: TTT
tcccctaatattttatttgt

SEQ ID NO: 232433 - DNA, 20 bp, Artificial Sequence
  Description of Artificial Sequence: Synthetic oligonucleotide
  Target: LAMA2; (-) strand; PAM type: YTN; PAM sequence: TTT
ttcccctaatattttatttg

SEQ ID NO: 232434 - DNA, 20 bp, Artificial Sequence
  Description of Artificial Sequence: Synthetic oligonucleotide
  Target: LAMA2; (-) strand; PAM type: YTN; PAM sequence: CTT
tttcccctaatattttattt

SEQ ID NO: 232435 - DNA, 20 bp, Artificial Sequence
  Description of Artificial Sequence: Synthetic oligonucleotide
  Target: LAMA2; (-) strand; PAM type: YTN; PAM sequence: TTA
aactttttcccctaatattt

SEQ ID NO: 232436 - DNA, 20 bp, Artificial Sequence
  Description of Artificial Sequence: Synthetic oligonucleotide
  Target: LAMA2; (-) strand; PAM type: YTN; PAM sequence: TTT
aaactttttcccctaatatt

SEQ ID NO: 232437 - DNA, 20 bp, Artificial Sequence
  Description of Artificial Sequence: Synthetic oligonucleotide
  Target: LAMA2; (-) strand; PAM type: YTN; PAM sequence: CTT
taaactttttcccctaatat

SEQ ID NO: 232438 - DNA, 20 bp, Artificial Sequence
  Description of Artificial Sequence: Synthetic oligonucleotide
  Target: LAMA2; (-) strand; PAM type: YTN; PAM sequence: TTG
aaaagatgctttaaactttt

SEQ ID NO: 232439 - DNA, 20 bp, Artificial Sequence
  Description of Artificial Sequence: Synthetic oligonucleotide
  Target: LAMA2; (-) strand; PAM type: YTN; PAM sequence: TTT
gaaaagatgctttaaacttt

SEQ ID NO: 232440 - DNA, 20 bp, Artificial Sequence
  Description of Artificial Sequence: Synthetic oligonucleotide
  Target: LAMA2; (-) strand; PAM type: YTN; PAM sequence: TTT
tgaaaagatgctttaaactt

SEQ ID NO: 232441 - DNA, 20 bp, Artificial Sequence
  Description of Artificial Sequence: Synthetic oligonucleotide
  Target: LAMA2; (-) strand; PAM type: YTN; PAM sequence: CTT
ttgaaaagatgctttaaact

SEQ ID NO: 232442 - DNA, 20 bp, Artificial Sequence
  Description of Artificial Sequence: Synthetic oligonucleotide
  Target: LAMA2; (-) strand; PAM type: YTN; PAM sequence: TTC
aaaaagcttttgaaaagatg

SEQ ID NO: 232443 - DNA, 20 bp, Artificial Sequence
  Description of Artificial Sequence: Synthetic oligonucleotide
  Target: LAMA2; (-) strand; PAM type: YTN; PAM sequence: TTG
tgttcaaaaagcttttgaaa

SEQ ID NO: 232444 - DNA, 20 bp, Artificial Sequence
  Description of Artificial Sequence: Synthetic oligonucleotide
  Target: LAMA2; (-) strand; PAM type: YTN; PAM sequence: CTT
gtgttcaaaaagcttttgaa

SEQ ID NO: 232445 - DNA, 20 bp, Artificial Sequence
  Description of Artificial Sequence: Synthetic oligonucleotide
  Target: LAMA2; (-) strand; PAM type: YTN; PAM sequence: CTC
ttgtgttcaaaaagcttttg

SEQ ID NO: 232446 - DNA, 20 bp, Artificial Sequence
  Description of Artificial Sequence: Synthetic oligonucleotide
  Target: LAMA2; (-) strand; PAM type: YTN; PAM sequence: TTA
gctcttgtgttcaaaaagct

SEQ ID NO: 232447 - DNA, 20 bp, Artificial Sequence
  Description of Artificial Sequence: Synthetic oligonucleotide
  Target: LAMA2; (-) strand; PAM type: YTN; PAM sequence: CTG
ttagctcttgtgttcaaaaa

SEQ ID NO: 232448 - DNA, 20 bp, Artificial Sequence
  Description of Artificial Sequence: Synthetic oligonucleotide
  Target: LAMA2; (-) strand; PAM type: YTN; PAM sequence: TTC
tgttagctcttgtgttcaaa

SEQ ID NO: 232449 - DNA, 20 bp, Artificial Sequence
  Description of Artificial Sequence: Synthetic oligonucleotide
  Target: LAMA2; (-) strand; PAM type: YTN; PAM sequence: CTT
ctgttagctcttgtgttcaa

SEQ ID NO: 232450 - DNA, 20 bp, Artificial Sequence
  Description of Artificial Sequence: Synthetic oligonucleotide
  Target: LAMA2; (-) strand; PAM type: YTN; PAM sequence: CTG
gaagacagcacttctgttag

SEQ ID NO: 232451 - DNA, 20 bp, Artificial Sequence
  Description of Artificial Sequence: Synthetic oligonucleotide
  Target: LAMA2; (-) strand; PAM type: YTN; PAM sequence: TTA
acactggaagacagcacttc

SEQ ID NO: 232452 - DNA, 20 bp, Artificial Sequence
  Description of Artificial Sequence: Synthetic oligonucleotide
  Target: LAMA2; (-) strand; PAM type: YTN; PAM sequence: TTT
aacactggaagacagcactt

SEQ ID NO: 232453 - DNA, 20 bp, Artificial Sequence
  Description of Artificial Sequence: Synthetic oligonucleotide
  Target: LAMA2; (-) strand; PAM type: YTN; PAM sequence: CTG
tttaacactggaagacagca

SEQ ID NO: 232454 - DNA, 20 bp, Artificial Sequence
  Description of Artificial Sequence: Synthetic oligonucleotide
  Target: LAMA2; (-) strand; PAM type: YTN; PAM sequence: TTC
ctgtttaacactggaagaca

SEQ ID NO: 232455 - DNA, 20 bp, Artificial Sequence
  Description of Artificial Sequence: Synthetic oligonucleotide
  Target: LAMA2; (-) strand; PAM type: YTN; PAM sequence: TTG
taatcccacaaattcctgtt

SEQ ID NO: 232456 - DNA, 20 bp, Artificial Sequence
  Description of Artificial Sequence: Synthetic oligonucleotide
  Target: LAMA2; (-) strand; PAM type: YTN; PAM sequence: CTT
gtaatcccacaaattcctgt

SEQ ID NO: 232457 - DNA, 20 bp, Artificial Sequence
  Description of Artificial Sequence: Synthetic oligonucleotide
  Target: LAMA2; (-) strand; PAM type: YTN; PAM sequence: CTA
tcttgtaatcccacaaattc

SEQ ID NO: 232458 - DNA, 20 bp, Artificial Sequence
  Description of Artificial Sequence: Synthetic oligonucleotide
  Target: LAMA2; (-) strand; PAM type: YTN; PAM sequence: TTG
atcatctatcttgtaatccc

SEQ ID NO: 232459 - DNA, 20 bp, Artificial Sequence
  Description of Artificial Sequence: Synthetic oligonucleotide
  Target: LAMA2; (-) strand; PAM type: YTN; PAM sequence: CTG
ggttgatcatctatcttgta

SEQ ID NO: 232460 - DNA, 20 bp, Artificial Sequence
  Description of Artificial Sequence: Synthetic oligonucleotide
  Target: LAMA2; (-) strand; PAM type: YTN; PAM sequence: CTC
atagcaatctgggttgatca

SEQ ID NO: 232461 - DNA, 20 bp, Artificial Sequence
  Description of Artificial Sequence: Synthetic oligonucleotide
  Target: LAMA2; (-) strand; PAM type: YTN; PAM sequence: TTA
tcactcatagcaatctgggt

SEQ ID NO: 232462 - DNA, 20 bp, Artificial Sequence
  Description of Artificial Sequence: Synthetic oligonucleotide
  Target: LAMA2; (-) strand; PAM type: YTN; PAM sequence: TTG
tgtagcagcatatgtgggag

SEQ ID NO: 232463 - DNA, 20 bp, Artificial Sequence
  Description of Artificial Sequence: Synthetic oligonucleotide
  Target: LAMA2; (-) strand; PAM type: YTN; PAM sequence: TTG
gttgtgtagcagcatatgtg

SEQ ID NO: 232464 - DNA, 20 bp, Artificial Sequence
  Description of Artificial Sequence: Synthetic oligonucleotide
  Target: LAMA2; (-) strand; PAM type: YTN; PAM sequence: CTT
ggttgtgtagcagcatatgt

SEQ ID NO: 232465 - DNA, 20 bp, Artificial Sequence
  Description of Artificial Sequence: Synthetic oligonucleotide
  Target: LAMA2; (-) strand; PAM type: YTN; PAM sequence: CTG
gtaataatgccttggttgtg

SEQ ID NO: 232466 - DNA, 20 bp, Artificial Sequence
  Description of Artificial Sequence: Synthetic oligonucleotide
  Target: LAMA2; (-) strand; PAM type: YTN; PAM sequence: TTC
cctggtaataatgccttggt

SEQ ID NO: 232467 - DNA, 20 bp, Artificial Sequence
  Description of Artificial Sequence: Synthetic oligonucleotide
  Target: LAMA2; (-) strand; PAM type: YTN; PAM sequence: CTT
ccctggtaataatgccttgg

SEQ ID NO: 232468 - DNA, 20 bp, Artificial Sequence
  Description of Artificial Sequence: Synthetic oligonucleotide
  Target: LAMA2; (-) strand; PAM type: YTN; PAM sequence: TTG
acttccctggtaataatgcc

SEQ ID NO: 232469 - DNA, 20 bp, Artificial Sequence
  Description of Artificial Sequence: Synthetic oligonucleotide
  Target: LAMA2; (-) strand; PAM type: YTN; PAM sequence: CTG
aattgacttccctggtaata

SEQ ID NO: 232470 - DNA, 20 bp, Artificial Sequence
  Description of Artificial Sequence: Synthetic oligonucleotide
  Target: LAMA2; (-) strand; PAM type: YTN; PAM sequence: TTA
tggctgaattgacttccctg

SEQ ID NO: 232471 - DNA, 20 bp, Artificial Sequence
  Description of Artificial Sequence: Synthetic oligonucleotide
  Target: LAMA2; (-) strand; PAM type: YTN; PAM sequence: TTA
tagagttatggctgaattga

SEQ ID NO: 232472 - DNA, 20 bp, Artificial Sequence
  Description of Artificial Sequence: Synthetic oligonucleotide
  Target: LAMA2; (-) strand; PAM type: YTN; PAM sequence: TTT
atagagttatggctgaattg

SEQ ID NO: 232473 - DNA, 20 bp, Artificial Sequence
  Description of Artificial Sequence: Synthetic oligonucleotide
  Target: LAMA2; (-) strand; PAM type: YTN; PAM sequence: CTT
tatagagttatggctgaatt

SEQ ID NO: 232474 - DNA, 20 bp, Artificial Sequence
  Description of Artificial Sequence: Synthetic oligonucleotide
  Target: LAMA2; (-) strand; PAM type: YTN; PAM sequence: TTA
ctttatagagttatggctga

SEQ ID NO: 232475 - DNA, 20 bp, Artificial Sequence
  Description of Artificial Sequence: Synthetic oligonucleotide
  Target: LAMA2; (-) strand; PAM type: YTN; PAM sequence: TTT
actttatagagttatggctg

SEQ ID NO: 232476 - DNA, 20 bp, Artificial Sequence
  Description of Artificial Sequence: Synthetic oligonucleotide
  Target: LAMA2; (-) strand; PAM type: YTN; PAM sequence: TTC
acaggagtttactttataga

SEQ ID NO: 232477 - DNA, 20 bp, Artificial Sequence
  Description of Artificial Sequence: Synthetic oligonucleotide
  Target: LAMA2; (-) strand; PAM type: YTN; PAM sequence: CTA
ttcacaggagtttactttat

SEQ ID NO: 232478 - DNA, 20 bp, Artificial Sequence
  Description of Artificial Sequence: Synthetic oligonucleotide
  Target: LAMA2; (-) strand; PAM type: YTN; PAM sequence: CTC
tattcacaggagtttacttt

SEQ ID NO: 232479 - DNA, 20 bp, Artificial Sequence
  Description of Artificial Sequence: Synthetic oligonucleotide
  Target: LAMA2; (-) strand; PAM type: YTN; PAM sequence: CTA
gtcatacagtagatactcta

SEQ ID NO: 232480 - DNA, 20 bp, Artificial Sequence
  Description of Artificial Sequence: Synthetic oligonucleotide
  Target: LAMA2; (-) strand; PAM type: YTN; PAM sequence: CTC
tagtcatacagtagatactc

SEQ ID NO: 232481 - DNA, 20 bp, Artificial Sequence
  Description of Artificial Sequence: Synthetic oligonucleotide
  Target: LAMA2; (-) strand; PAM type: YTN; PAM sequence: CTA
tacctctagtcatacagtag

SEQ ID NO: 232482 - DNA, 20 bp, Artificial Sequence
  Description of Artificial Sequence: Synthetic oligonucleotide
  Target: LAMA2; (-) strand; PAM type: YTN; PAM sequence: TTA
gctatacctctagtcataca

SEQ ID NO: 232483 - DNA, 20 bp, Artificial Sequence
  Description of Artificial Sequence: Synthetic oligonucleotide
  Target: LAMA2; (-) strand; PAM type: YTN; PAM sequence: CTT
agctatacctctagtcatac

SEQ ID NO: 232484 - DNA, 20 bp, Artificial Sequence
  Description of Artificial Sequence: Synthetic oligonucleotide
  Target: LAMA2; (-) strand; PAM type: YTN; PAM sequence: TTC
ttagctatacctctagtcat

SEQ ID NO: 232485 - DNA, 20 bp, Artificial Sequence
  Description of Artificial Sequence: Synthetic oligonucleotide
  Target: LAMA2; (-) strand; PAM type: YTN; PAM sequence: TTT
cttagctatacctctagtca

SEQ ID NO: 232486 - DNA, 20 bp, Artificial Sequence
  Description of Artificial Sequence: Synthetic oligonucleotide
  Target: LAMA2; (-) strand; PAM type: YTN; PAM sequence: TTT
tcttagctatacctctagtc

SEQ ID NO: 232487 - DNA, 20 bp, Artificial Sequence
  Description of Artificial Sequence: Synthetic oligonucleotide
  Target: LAMA2; (-) strand; PAM type: YTN; PAM sequence: TTT
ttcttagctatacctctagt

SEQ ID NO: 232488 - DNA, 20 bp, Artificial Sequence
  Description of Artificial Sequence: Synthetic oligonucleotide
  Target: LAMA2; (-) strand; PAM type: YTN; PAM sequence: TTT
tttcttagctatacctctag

SEQ ID NO: 232489 - DNA, 20 bp, Artificial Sequence
  Description of Artificial Sequence: Synthetic oligonucleotide
  Target: LAMA2; (-) strand; PAM type: YTN; PAM sequence: CTT
ttttcttagctatacctcta

SEQ ID NO: 232490 - DNA, 20 bp, Artificial Sequence
  Description of Artificial Sequence: Synthetic oligonucleotide
  Target: LAMA2; (-) strand; PAM type: YTN; PAM sequence: CTA
tagtcttttttcttagctat

SEQ ID NO: 232491 - DNA, 20 bp, Artificial Sequence
  Description of Artificial Sequence: Synthetic oligonucleotide
  Target: LAMA2; (-) strand; PAM type: YTN; PAM sequence: CTC
cctatagtcttttttcttag

SEQ ID NO: 232492 - DNA, 20 bp, Artificial Sequence
  Description of Artificial Sequence: Synthetic oligonucleotide
  Target: LAMA2; (-) strand; PAM type: YTN; PAM sequence: TTC
tccctatagtcttttttctt

SEQ ID NO: 232493 - DNA, 20 bp, Artificial Sequence
  Description of Artificial Sequence: Synthetic oligonucleotide
  Target: LAMA2; (-) strand; PAM type: YTN; PAM sequence: TTT
ctccctatagtcttttttct

SEQ ID NO: 232494 - DNA, 20 bp, Artificial Sequence
  Description of Artificial Sequence: Synthetic oligonucleotide
  Target: LAMA2; (-) strand; PAM type: YTN; PAM sequence: TTA
atttctccctatagtctttt

SEQ ID NO: 232495 - DNA, 20 bp, Artificial Sequence
  Description of Artificial Sequence: Synthetic oligonucleotide
  Target: LAMA2; (-) strand; PAM type: YTN; PAM sequence: CTA
caatattaatttctccctat

SEQ ID NO: 232496 - DNA, 20 bp, Artificial Sequence
  Description of Artificial Sequence: Synthetic oligonucleotide
  Target: LAMA2; (-) strand; PAM type: YTN; PAM sequence: TTG
tcctacaatattaatttctc

SEQ ID NO: 232497 - DNA, 20 bp, Artificial Sequence
  Description of Artificial Sequence: Synthetic oligonucleotide
  Target: LAMA2; (-) strand; PAM type: YTN; PAM sequence: TTT
gtcctacaatattaatttct

SEQ ID NO: 232498 - DNA, 20 bp, Artificial Sequence
  Description of Artificial Sequence: Synthetic oligonucleotide
  Target: LAMA2; (-) strand; PAM type: YTN; PAM sequence: CTT
tgtcctacaatattaatttc

SEQ ID NO: 232499 - DNA, 20 bp, Artificial Sequence
  Description of Artificial Sequence: Synthetic oligonucleotide
  Target: LAMA2; (-) strand; PAM type: YTN; PAM sequence: TTA
aatgctttgtcctacaatat

SEQ ID NO: 232500 - DNA, 20 bp, Artificial Sequence
  Description of Artificial Sequence: Synthetic oligonucleotide
  Target: LAMA2; (-) strand; PAM type: YTN; PAM sequence: CTA
gaattaaatgctttgtccta

SEQ ID NO: 232501 - DNA, 20 bp, Artificial Sequence
  Description of Artificial Sequence: Synthetic oligonucleotide
  Target: LAMA2; (-) strand; PAM type: YTN; PAM sequence: TTC
tagaattaaatgctttgtcc

SEQ ID NO: 232502 - DNA, 20 bp, Artificial Sequence
  Description of Artificial Sequence: Synthetic oligonucleotide
  Target: LAMA2; (-) strand; PAM type: YTN; PAM sequence: TTA
gtgggatcattctagaatta

SEQ ID NO: 232503 - DNA, 20 bp, Artificial Sequence
  Description of Artificial Sequence: Synthetic oligonucleotide
  Target: LAMA2; (-) strand; PAM type: YTN; PAM sequence: CTT
agtgggatcattctagaatt

SEQ ID NO: 232504 - DNA, 20 bp, Artificial Sequence
  Description of Artificial Sequence: Synthetic oligonucleotide
  Target: LAMA2; (-) strand; PAM type: YTN; PAM sequence: TTA
ccttagtgggatcattctag

SEQ ID NO: 232505 - DNA, 20 bp, Artificial Sequence
  Description of Artificial Sequence: Synthetic oligonucleotide
  Target: LAMA2; (-) strand; PAM type: YTN; PAM sequence: CTT
accttagtgggatcattcta

SEQ ID NO: 232506 - DNA, 20 bp, Artificial Sequence
  Description of Artificial Sequence: Synthetic oligonucleotide
  Target: LAMA2; (-) strand; PAM type: YTN; PAM sequence: TTG
caaccgatgacggtggtctt

SEQ ID NO: 232507 - DNA, 20 bp, Artificial Sequence
  Description of Artificial Sequence: Synthetic oligonucleotide
  Target: LAMA2; (-) strand; PAM type: YTN; PAM sequence: TTT
gcaaccgatgacggtggtct

SEQ ID NO: 232508 - DNA, 20 bp, Artificial Sequence
  Description of Artificial Sequence: Synthetic oligonucleotide
  Target: LAMA2; (-) strand; PAM type: YTN; PAM sequence: TTT
tgcaaccgatgacggtggtc

SEQ ID NO: 232509 - DNA, 20 bp, Artificial Sequence
  Description of Artificial Sequence: Synthetic oligonucleotide
  Target: LAMA2; (-) strand; PAM type: YTN; PAM sequence: TTC
agcaattttgcaaccgatga

SEQ ID NO: 232510 - DNA, 20 bp, Artificial Sequence
  Description of Artificial Sequence: Synthetic oligonucleotide
  Target: LAMA2; (-) strand; PAM type: YTN; PAM sequence: CTA
gtgattcagcaattttgcaa

SEQ ID NO: 232511 - DNA, 20 bp, Artificial Sequence
  Description of Artificial Sequence: Synthetic oligonucleotide
  Target: LAMA2; (-) strand; PAM type: YTN; PAM sequence: TTA
accctagtgattcagcaatt

SEQ ID NO: 232512 - DNA, 20 bp, Artificial Sequence
  Description of Artificial Sequence: Synthetic oligonucleotide
  Target: LAMA2; (-) strand; PAM type: YTN; PAM sequence: CTA
ttaaccctagtgattcagca

SEQ ID NO: 232513 - DNA, 20 bp, Artificial Sequence
  Description of Artificial Sequence: Synthetic oligonucleotide
  Target: LAMA2; (-) strand; PAM type: YTN; PAM sequence: CTG
taactattaaccctagtgat

SEQ ID NO: 232514 - DNA, 20 bp, Artificial Sequence
  Description of Artificial Sequence: Synthetic oligonucleotide
  Target: LAMA2; (-) strand; PAM type: YTN; PAM sequence: TTA
ggatctgtaactattaaccc

SEQ ID NO: 232515 - DNA, 20 bp, Artificial Sequence
  Description of Artificial Sequence: Synthetic oligonucleotide
  Target: LAMA2; (-) strand; PAM type: YTN; PAM sequence: TTT
aggatctgtaactattaacc

SEQ ID NO: 232516 - DNA, 20 bp, Artificial Sequence
  Description of Artificial Sequence: Synthetic oligonucleotide
  Target: LAMA2; (-) strand; PAM type: YTN; PAM sequence: TTA
agtaacgaggaaagaaaaca

SEQ ID NO: 232517 - DNA, 20 bp, Artificial Sequence
  Description of Artificial Sequence: Synthetic oligonucleotide
  Target: LAMA2; (-) strand; PAM type: YTN; PAM sequence: TTG
ggtgtgggaagttaagtaac

SEQ ID NO: 232518 - DNA, 20 bp, Artificial Sequence
  Description of Artificial Sequence: Synthetic oligonucleotide
  Target: LAMA2; (-) strand; PAM type: YTN; PAM sequence: TTG
tgatgatggagaggttgggt

SEQ ID NO: 232519 - DNA, 20 bp, Artificial Sequence
  Description of Artificial Sequence: Synthetic oligonucleotide
  Target: LAMA2; (-) strand; PAM type: YTN; PAM sequence: CTT
gtgatgatggagaggttggg

SEQ ID NO: 232520 - DNA, 20 bp, Artificial Sequence
  Description of Artificial Sequence: Synthetic oligonucleotide
  Target: LAMA2; (-) strand; PAM type: YTN; PAM sequence: TTA
tcttgtgatgatggagaggt

SEQ ID NO: 232521 - DNA, 20 bp, Artificial Sequence
  Description of Artificial Sequence: Synthetic oligonucleotide
  Target: LAMA2; (-) strand; PAM type: YTN; PAM sequence: TTA
aaagttatcttgtgatgatg

SEQ ID NO: 232522 - DNA, 20 bp, Artificial Sequence
  Description of Artificial Sequence: Synthetic oligonucleotide
  Target: LAMA2; (-) strand; PAM type: YTN; PAM sequence: CTT
aaaagttatcttgtgatgat

SEQ ID NO: 232523 - DNA, 20 bp, Artificial Sequence
  Description of Artificial Sequence: Synthetic oligonucleotide
  Target: LAMA2; (-) strand; PAM type: YTN; PAM sequence: CTA
aagccttaaaagttatcttg

SEQ ID NO: 232524 - DNA, 20 bp, Artificial Sequence
  Description of Artificial Sequence: Synthetic oligonucleotide
  Target: LAMA2; (-) strand; PAM type: YTN; PAM sequence: CTA
actaaagccttaaaagttat

SEQ ID NO: 232525 - DNA, 20 bp, Artificial Sequence
  Description of Artificial Sequence: Synthetic oligonucleotide
  Target: LAMA2; (-) strand; PAM type: YTN; PAM sequence: TTG
catgggactaactaaagcct

SEQ ID NO: 232526 - DNA, 20 bp, Artificial Sequence
  Description of Artificial Sequence: Synthetic oligonucleotide
  Target: LAMA2; (-) strand; PAM type: YTN; PAM sequence: CTG
acatatgttgcatgggacta

SEQ ID NO: 232527 - DNA, 20 bp, Artificial Sequence
  Description of Artificial Sequence: Synthetic oligonucleotide
  Target: LAMA2; (-) strand; PAM type: YTN; PAM sequence: CTA
aaacatctgacatatgttgc

SEQ ID NO: 232528 - DNA, 20 bp, Artificial Sequence
  Description of Artificial Sequence: Synthetic oligonucleotide
  Target: LAMA2; (-) strand; PAM type: YTN; PAM sequence: TTG
gaaaatacagggcactaaaa

SEQ ID NO: 232529 - DNA, 20 bp, Artificial Sequence
  Description of Artificial Sequence: Synthetic oligonucleotide
  Target: LAMA2; (-) strand; PAM type: YTN; PAM sequence: TTT
ggaaaatacagggcactaaa

SEQ ID NO: 232530 - DNA, 20 bp, Artificial Sequence
  Description of Artificial Sequence: Synthetic oligonucleotide
  Target: LAMA2; (-) strand; PAM type: YTN; PAM sequence: TTC
aagtttggaaaatacagggc

SEQ ID NO: 232531 - DNA, 20 bp, Artificial Sequence
  Description of Artificial Sequence: Synthetic oligonucleotide
  Target: LAMA2; (-) strand; PAM type: YTN; PAM sequence: TTT
caagtttggaaaatacaggg

SEQ ID NO: 232532 - DNA, 20 bp, Artificial Sequence
  Description of Artificial Sequence: Synthetic oligonucleotide
  Target: LAMA2; (-) strand; PAM type: YTN; PAM sequence: TTA
tttcaagtttggaaaataca

SEQ ID NO: 232533 - DNA, 20 bp, Artificial Sequence
  Description of Artificial Sequence: Synthetic oligonucleotide
  Target: LAMA2; (-) strand; PAM type: YTN; PAM sequence: TTG
aggtataatacaaggggaaa

SEQ ID NO: 232534 - DNA, 20 bp, Artificial Sequence
  Description of Artificial Sequence: Synthetic oligonucleotide
  Target: LAMA2; (-) strand; PAM type: YTN; PAM sequence: TTA
caatatgttgaggtataata

SEQ ID NO: 232535 - DNA, 20 bp, Artificial Sequence
  Description of Artificial Sequence: Synthetic oligonucleotide
  Target: LAMA2; (-) strand; PAM type: YTN; PAM sequence: TTT
acaatatgttgaggtataat

SEQ ID NO: 232536 - DNA, 20 bp, Artificial Sequence
  Description of Artificial Sequence: Synthetic oligonucleotide
  Target: LAMA2; (-) strand; PAM type: YTN; PAM sequence: TTG
catgagacaatttacaatat

SEQ ID NO: 232537 - DNA, 20 bp, Artificial Sequence
  Description of Artificial Sequence: Synthetic oligonucleotide
  Target: LAMA2; (-) strand; PAM type: YTN; PAM sequence: TTT
gcatgagacaatttacaata

SEQ ID NO: 232538 - DNA, 20 bp, Artificial Sequence
  Description of Artificial Sequence: Synthetic oligonucleotide
  Target: LAMA2; (-) strand; PAM type: YTN; PAM sequence: TTT
tgcatgagacaatttacaat

SEQ ID NO: 232539 - DNA, 20 bp, Artificial Sequence
  Description of Artificial Sequence: Synthetic oligonucleotide
  Target: LAMA2; (-) strand; PAM type: YTN; PAM sequence: TTA
gttttgcatgagacaattta

SEQ ID NO: 232540 - DNA, 20 bp, Artificial Sequence
  Description of Artificial Sequence: Synthetic oligonucleotide
  Target: LAMA2; (-) strand; PAM type: YTN; PAM sequence: CTA
taaaataatgattagttttg

SEQ ID NO: 232541 - DNA, 20 bp, Artificial Sequence
  Description of Artificial Sequence: Synthetic oligonucleotide
  Target: LAMA2; (-) strand; PAM type: YTN; PAM sequence: TTG
ctataaaataatgattagtt

SEQ ID NO: 232542 - DNA, 20 bp, Artificial Sequence
  Description of Artificial Sequence: Synthetic oligonucleotide
  Target: LAMA2; (-) strand; PAM type: YTN; PAM sequence: TTA
aacaagtgaaaaatccaaac

SEQ ID NO: 232543 - DNA, 20 bp, Artificial Sequence
  Description of Artificial Sequence: Synthetic oligonucleotide
  Target: LAMA2; (-) strand; PAM type: YTN; PAM sequence: CTT
aaacaagtgaaaaatccaaa

SEQ ID NO: 232544 - DNA, 20 bp, Artificial Sequence
  Description of Artificial Sequence: Synthetic oligonucleotide
  Target: LAMA2; (-) strand; PAM type: YTN; PAM sequence: TTC
ttaaacaagtgaaaaatcca

SEQ ID NO: 232545 - DNA, 20 bp, Artificial Sequence
  Description of Artificial Sequence: Synthetic oligonucleotide
  Target: LAMA2; (-) strand; PAM type: YTN; PAM sequence: TTT
cttaaacaagtgaaaaatcc

SEQ ID NO: 232546 - DNA, 20 bp, Artificial Sequence
  Description of Artificial Sequence: Synthetic oligonucleotide
  Target: LAMA2; (-) strand; PAM type: YTN; PAM sequence: TTT
tcttaaacaagtgaaaaatc

SEQ ID NO: 232547 - DNA, 20 bp, Artificial Sequence
  Description of Artificial Sequence: Synthetic oligonucleotide
  Target: LAMA2; (-) strand; PAM type: YTN; PAM sequence: TTG
aaaatgttttcttaaacaag

SEQ ID NO: 232548 - DNA, 20 bp, Artificial Sequence
  Description of Artificial Sequence: Synthetic oligonucleotide
  Target: LAMA2; (-) strand; PAM type: YTN; PAM sequence: TTA
gaattgaaaatgttttctta

SEQ ID NO: 232549 - DNA, 20 bp, Artificial Sequence
  Description of Artificial Sequence: Synthetic oligonucleotide
  Target: LAMA2; (-) strand; PAM type: YTN; PAM sequence: TTA
agtcccgccaaaattagaat

SEQ ID NO: 232550 - DNA, 20 bp, Artificial Sequence
  Description of Artificial Sequence: Synthetic oligonucleotide
  Target: LAMA2; (-) strand; PAM type: YTN; PAM sequence: TTT
aagtcccgccaaaattagaa

SEQ ID NO: 232551 - DNA, 20 bp, Artificial Sequence
  Description of Artificial Sequence: Synthetic oligonucleotide
  Target: LAMA2; (-) strand; PAM type: YTN; PAM sequence: TTT
taagtcccgccaaaattaga

SEQ ID NO: 232552 - DNA, 20 bp, Artificial Sequence
  Description of Artificial Sequence: Synthetic oligonucleotide
  Target: LAMA2; (-) strand; PAM type: YTN; PAM sequence: TTT
ttaagtcccgccaaaattag

SEQ ID NO: 232553 - DNA, 20 bp, Artificial Sequence
  Description of Artificial Sequence: Synthetic oligonucleotide
  Target: LAMA2; (-) strand; PAM type: YTN; PAM sequence: TTG
gtgtatatttttaagtcccg

SEQ ID NO: 232554 - DNA, 20 bp, Artificial Sequence
  Description of Artificial Sequence: Synthetic oligonucleotide
  Target: LAMA2; (-) strand; PAM type: YTN; PAM sequence: CTT
ggtgtatatttttaagtccc

SEQ ID NO: 232555 - DNA, 20 bp, Artificial Sequence
  Description of Artificial Sequence: Synthetic oligonucleotide
  Target: LAMA2; (-) strand; PAM type: YTN; PAM sequence: TTC
cttggtgtatatttttaagt

SEQ ID NO: 232556 - DNA, 20 bp, Artificial Sequence
  Description of Artificial Sequence: Synthetic oligonucleotide
  Target: LAMA2; (-) strand; PAM type: YTN; PAM sequence: CTT
ccttggtgtatatttttaag

SEQ ID NO: 232557 - DNA, 20 bp, Artificial Sequence
  Description of Artificial Sequence: Synthetic oligonucleotide
  Target: LAMA2; (-) strand; PAM type: YTN; PAM sequence: TTC
acaccagtcttccttggtgt

SEQ ID NO: 232558 - DNA, 20 bp, Artificial Sequence
  Description of Artificial Sequence: Synthetic oligonucleotide
  Target: LAMA2; (-) strand; PAM type: YTN; PAM sequence: TTT
cacaccagtcttccttggtg

SEQ ID NO: 232559 - DNA, 20 bp, Artificial Sequence
  Description of Artificial Sequence: Synthetic oligonucleotide
  Target: LAMA2; (-) strand; PAM type: YTN; PAM sequence: CTC
caatttcacaccagtcttcc

SEQ ID NO: 232560 - DNA, 20 bp, Artificial Sequence
  Description of Artificial Sequence: Synthetic oligonucleotide
  Target: LAMA2; (-) strand; PAM type: YTN; PAM sequence: TTC
actccaatttcacaccagtc

SEQ ID NO: 232561 - DNA, 20 bp, Artificial Sequence
  Description of Artificial Sequence: Synthetic oligonucleotide
  Target: LAMA2; (-) strand; PAM type: YTN; PAM sequence: TTT
cactccaatttcacaccagt

SEQ ID NO: 232562 - DNA, 20 bp, Artificial Sequence
  Description of Artificial Sequence: Synthetic oligonucleotide
  Target: LAMA2; (-) strand; PAM type: YTN; PAM sequence: TTA
aatttcactccaatttcaca

SEQ ID NO: 232563 - DNA, 20 bp, Artificial Sequence
  Description of Artificial Sequence: Synthetic oligonucleotide
  Target: LAMA2; (-) strand; PAM type: YTN; PAM sequence: CTG
tcaagaaagattaaatttca

SEQ ID NO: 232564 - DNA, 20 bp, Artificial Sequence
  Description of Artificial Sequence: Synthetic oligonucleotide
  Target: LAMA2; (-) strand; PAM type: YTN; PAM sequence: CTG
atagacatactgtcaagaaa

SEQ ID NO: 232565 - DNA, 20 bp, Artificial Sequence
  Description of Artificial Sequence: Synthetic oligonucleotide
  Target: LAMA2; (-) strand; PAM type: YTN; PAM sequence: CTC
tgatagacatactgtcaaga

SEQ ID NO: 232566 - DNA, 20 bp, Artificial Sequence
  Description of Artificial Sequence: Synthetic oligonucleotide
  Target: LAMA2; (-) strand; PAM type: YTN; PAM sequence: TTC
tctgatagacatactgtcaa

SEQ ID NO: 232567 - DNA, 20 bp, Artificial Sequence
  Description of Artificial Sequence: Synthetic oligonucleotide
  Target: LAMA2; (-) strand; PAM type: YTN; PAM sequence: TTT
ctctgatagacatactgtca

SEQ ID NO: 232568 - DNA, 20 bp, Artificial Sequence
  Description of Artificial Sequence: Synthetic oligonucleotide
  Target: LAMA2; (-) strand; PAM type: YTN; PAM sequence: TTT
tctctgatagacatactgtc

SEQ ID NO: 232569 - DNA, 20 bp, Artificial Sequence
  Description of Artificial Sequence: Synthetic oligonucleotide
  Target: LAMA2; (-) strand; PAM type: YTN; PAM sequence: TTT
ttctctgatagacatactgt

SEQ ID NO: 232570 - DNA, 20 bp, Artificial Sequence
  Description of Artificial Sequence: Synthetic oligonucleotide
  Target: LAMA2; (-) strand; PAM type: YTN; PAM sequence: TTT
tttctctgatagacatactg

SEQ ID NO: 232571 - DNA, 20 bp, Artificial Sequence
  Description of Artificial Sequence: Synthetic oligonucleotide
  Target: LAMA2; (-) strand; PAM type: YTN; PAM sequence: TTT
ttttctctgatagacatact

SEQ ID NO: 232572 - DNA, 20 bp, Artificial Sequence
  Description of Artificial Sequence: Synthetic oligonucleotide
  Target: LAMA2; (-) strand; PAM type: YTN; PAM sequence: TTT
tttttctctgatagacatac

SEQ ID NO: 232573 - DNA, 20 bp, Artificial Sequence
  Description of Artificial Sequence: Synthetic oligonucleotide
  Target: LAMA2; (-) strand; PAM type: YTN; PAM sequence: TTG
attttttttctctgatagac

SEQ ID NO: 232574 - DNA, 20 bp, Artificial Sequence
  Description of Artificial Sequence: Synthetic oligonucleotide
  Target: LAMA2; (-) strand; PAM type: YTN; PAM sequence: TTC
attgattttttttctctgat

SEQ ID NO: 232575 - DNA, 20 bp, Artificial Sequence
  Description of Artificial Sequence: Synthetic oligonucleotide
  Target: LAMA2; (-) strand; PAM type: YTN; PAM sequence: TTT
cattgattttttttctctga

SEQ ID NO: 232576 - DNA, 20 bp, Artificial Sequence
  Description of Artificial Sequence: Synthetic oligonucleotide
  Target: LAMA2; (-) strand; PAM type: YTN; PAM sequence: TTT
tcattgattttttttctctg

SEQ ID NO: 232577 - DNA, 20 bp, Artificial Sequence
  Description of Artificial Sequence: Synthetic oligonucleotide
  Target: LAMA2; (-) strand; PAM type: YTN; PAM sequence: TTA
ttttcattgattttttttct

SEQ ID NO: 232578 - DNA, 20 bp, Artificial Sequence
  Description of Artificial Sequence: Synthetic oligonucleotide
  Target: LAMA2; (-) strand; PAM type: YTN; PAM sequence: TTT
attttcattgattttttttc

SEQ ID NO: 232579 - DNA, 20 bp, Artificial Sequence
  Description of Artificial Sequence: Synthetic oligonucleotide
  Target: LAMA2; (-) strand; PAM type: YTN; PAM sequence: CTA
atttattttcattgattttt

SEQ ID NO: 232580 - DNA, 20 bp, Artificial Sequence
  Description of Artificial Sequence: Synthetic oligonucleotide
  Target: LAMA2; (-) strand; PAM type: YTN; PAM sequence: CTG
caagagatgatagaaagaac

SEQ ID NO: 232581 - DNA, 20 bp, Artificial Sequence
  Description of Artificial Sequence: Synthetic oligonucleotide
  Target: LAMA2; (-) strand; PAM type: YTN; PAM sequence: CTC
ctgcaagagatgatagaaag

SEQ ID NO: 232582 - DNA, 20 bp, Artificial Sequence
  Description of Artificial Sequence: Synthetic oligonucleotide
  Target: LAMA2; (-) strand; PAM type: YTN; PAM sequence: CTA
cctcctgcaagagatgatag

SEQ ID NO: 232583 - DNA, 20 bp, Artificial Sequence
  Description of Artificial Sequence: Synthetic oligonucleotide
  Target: LAMA2; (-) strand; PAM type: YTN; PAM sequence: CTC
tacctcctgcaagagatgat

SEQ ID NO: 232584 - DNA, 20 bp, Artificial Sequence
  Description of Artificial Sequence: Synthetic oligonucleotide
  Target: LAMA2; (-) strand; PAM type: YTN; PAM sequence: TTA
taaataatagatgtgtaccc

SEQ ID NO: 232585 - DNA, 20 bp, Artificial Sequence
  Description of Artificial Sequence: Synthetic oligonucleotide
  Target: LAMA2; (-) strand; PAM type: YTN; PAM sequence: CTC
atgtacgataaagttataaa

SEQ ID NO: 232586 - DNA, 20 bp, Artificial Sequence
  Description of Artificial Sequence: Synthetic oligonucleotide
  Target: LAMA2; (-) strand; PAM type: YTN; PAM sequence: TTA
aagactcatgtacgataaag

SEQ ID NO: 232587 - DNA, 20 bp, Artificial Sequence
  Description of Artificial Sequence: Synthetic oligonucleotide
  Target: LAMA2; (-) strand; PAM type: YTN; PAM sequence: TTT
aaagactcatgtacgataaa

SEQ ID NO: 232588 - DNA, 20 bp, Artificial Sequence
  Description of Artificial Sequence: Synthetic oligonucleotide
  Target: LAMA2; (-) strand; PAM type: YTN; PAM sequence: TTT
taaagactcatgtacgataa

SEQ ID NO: 232589 - DNA, 20 bp, Artificial Sequence
  Description of Artificial Sequence: Synthetic oligonucleotide
  Target: LAMA2; (-) strand; PAM type: YTN; PAM sequence: TTA
ttttaaagactcatgtacga

SEQ ID NO: 232590 - DNA, 20 bp, Artificial Sequence
  Description of Artificial Sequence: Synthetic oligonucleotide
  Target: LAMA2; (-) strand; PAM type: YTN; PAM sequence: CTG
cattattttaaagactcatg

SEQ ID NO: 232591 - DNA, 20 bp, Artificial Sequence
  Description of Artificial Sequence: Synthetic oligonucleotide
  Target: LAMA2; (-) strand; PAM type: YTN; PAM sequence: TTA
tactgcattattttaaagac

SEQ ID NO: 232592 - DNA, 20 bp, Artificial Sequence
  Description of Artificial Sequence: Synthetic oligonucleotide
  Target: LAMA2; (-) strand; PAM type: YTN; PAM sequence: CTT
atactgcattattttaaaga

SEQ ID NO: 232593 - DNA, 20 bp, Artificial Sequence
  Description of Artificial Sequence: Synthetic oligonucleotide
  Target: LAMA2; (-) strand; PAM type: YTN; PAM sequence: TTG
acttatactgcattatttta

SEQ ID NO: 232594 - DNA, 20 bp, Artificial Sequence
  Description of Artificial Sequence: Synthetic oligonucleotide
  Target: LAMA2; (-) strand; PAM type: YTN; PAM sequence: TTA
tatgttgacttatactgcat

SEQ ID NO: 232595 - DNA, 20 bp, Artificial Sequence
  Description of Artificial Sequence: Synthetic oligonucleotide
  Target: LAMA2; (-) strand; PAM type: YTN; PAM sequence: TTT
atatgttgacttatactgca

SEQ ID NO: 232596 - DNA, 20 bp, Artificial Sequence
  Description of Artificial Sequence: Synthetic oligonucleotide
  Target: LAMA2; (-) strand; PAM type: YTN; PAM sequence: TTC
aaaaaacatatttatatgtt

SEQ ID NO: 232597 - DNA, 20 bp, Artificial Sequence
  Description of Artificial Sequence: Synthetic oligonucleotide
  Target: LAMA2; (-) strand; PAM type: YTN; PAM sequence: TTT
caaaaaacatatttatatgt

SEQ ID NO: 232598 - DNA, 20 bp, Artificial Sequence
  Description of Artificial Sequence: Synthetic oligonucleotide
  Target: LAMA2; (-) strand; PAM type: YTN; PAM sequence: CTT
tcaaaaaacatatttatatg

SEQ ID NO: 232599 - DNA, 20 bp, Artificial Sequence
  Description of Artificial Sequence: Synthetic oligonucleotide
  Target: LAMA2; (-) strand; PAM type: YTN; PAM sequence: TTG
agtactttcaaaaaacatat

SEQ ID NO: 232600 - DNA, 20 bp, Artificial Sequence
  Description of Artificial Sequence: Synthetic oligonucleotide
  Target: LAMA2; (-) strand; PAM type: YTN; PAM sequence: CTT
gagtactttcaaaaaacata

SEQ ID NO: 232601 - DNA, 20 bp, Artificial Sequence
  Description of Artificial Sequence: Synthetic oligonucleotide
  Target: LAMA2; (-) strand; PAM type: YTN; PAM sequence: TTG
aacttgagtactttcaaaaa

SEQ ID NO: 232602 - DNA, 20 bp, Artificial Sequence
  Description of Artificial Sequence: Synthetic oligonucleotide
  Target: LAMA2; (-) strand; PAM type: YTN; PAM sequence: TTA
ttgaacttgagtactttcaa

SEQ ID NO: 232603 - DNA, 20 bp, Artificial Sequence
  Description of Artificial Sequence: Synthetic oligonucleotide
  Target: LAMA2; (-) strand; PAM type: YTN; PAM sequence: TTT
attgaacttgagtactttca

SEQ ID NO: 232604 - DNA, 20 bp, Artificial Sequence
  Description of Artificial Sequence: Synthetic oligonucleotide
  Target: LAMA2; (-) strand; PAM type: YTN; PAM sequence: TTA
aatgagtgtttattgaactt

SEQ ID NO: 232605 - DNA, 20 bp, Artificial Sequence
  Description of Artificial Sequence: Synthetic oligonucleotide
  Target: LAMA2; (-) strand; PAM type: YTN; PAM sequence: TTT
aaatgagtgtttattgaact

SEQ ID NO: 232606 - DNA, 20 bp, Artificial Sequence
  Description of Artificial Sequence: Synthetic oligonucleotide
  Target: LAMA2; (-) strand; PAM type: YTN; PAM sequence: TTA
tatatttaaatgagtgttta

SEQ ID NO: 232607 - DNA, 20 bp, Artificial Sequence
  Description of Artificial Sequence: Synthetic oligonucleotide
  Target: LAMA2; (-) strand; PAM type: YTN; PAM sequence: TTT
atatatttaaatgagtgttt

SEQ ID NO: 232608 - DNA, 20 bp, Artificial Sequence
  Description of Artificial Sequence: Synthetic oligonucleotide
  Target: LAMA2; (-) strand; PAM type: YTN; PAM sequence: TTT
tatatatttaaatgagtgtt

SEQ ID NO: 232609 - DNA, 20 bp, Artificial Sequence
  Description of Artificial Sequence: Synthetic oligonucleotide
  Target: LAMA2; (-) strand; PAM type: YTN; PAM sequence: TTT
ttatatatttaaatgagtgt

SEQ ID NO: 232610 - DNA, 20 bp, Artificial Sequence
  Description of Artificial Sequence: Synthetic oligonucleotide
  Target: LAMA2; (-) strand; PAM type: YTN; PAM sequence: TTA
tttttatatatttaaatgag

SEQ ID NO: 232611 - DNA, 20 bp, Artificial Sequence
  Description of Artificial Sequence: Synthetic oligonucleotide
  Target: LAMA2; (-) strand; PAM type: YTN; PAM sequence: CTT
atttttatatatttaaatga

SEQ ID NO: 232612 - DNA, 20 bp, Artificial Sequence
  Description of Artificial Sequence: Synthetic oligonucleotide
  Target: LAMA2; (-) strand; PAM type: YTN; PAM sequence: CTA
tcttatttttatatatttaa

SEQ ID NO: 232613 - DNA, 20 bp, Artificial Sequence
  Description of Artificial Sequence: Synthetic oligonucleotide
  Target: LAMA2; (-) strand; PAM type: YTN; PAM sequence: TTG
ctatcttatttttatatatt

SEQ ID NO: 232614 - DNA, 20 bp, Artificial Sequence
  Description of Artificial Sequence: Synthetic oligonucleotide
  Target: LAMA2; (-) strand; PAM type: YTN; PAM sequence: TTT
gctatcttatttttatatat

SEQ ID NO: 232615 - DNA, 20 bp, Artificial Sequence
  Description of Artificial Sequence: Synthetic oligonucleotide
  Target: LAMA2; (-) strand; PAM type: YTN; PAM sequence: CTG
aaatttgctatcttattttt

SEQ ID NO: 232616 - DNA, 20 bp, Artificial Sequence
  Description of Artificial Sequence: Synthetic oligonucleotide
  Target: LAMA2; (-) strand; PAM type: YTN; PAM sequence: TTG
agtcatgaagaagagctgaa

SEQ ID NO: 232617 - DNA, 20 bp, Artificial Sequence
  Description of Artificial Sequence: Synthetic oligonucleotide
  Target: LAMA2; (-) strand; PAM type: YTN; PAM sequence: TTT
gagtcatgaagaagagctga

SEQ ID NO: 232618 - DNA, 20 bp, Artificial Sequence
  Description of Artificial Sequence: Synthetic oligonucleotide
  Target: LAMA2; (-) strand; PAM type: YTN; PAM sequence: TTT
tgagtcatgaagaagagctg

SEQ ID NO: 232619 - DNA, 20 bp, Artificial Sequence
  Description of Artificial Sequence: Synthetic oligonucleotide
  Target: LAMA2; (-) strand; PAM type: YTN; PAM sequence: CTT
ttgagtcatgaagaagagct

SEQ ID NO: 232620 - DNA, 20 bp, Artificial Sequence
  Description of Artificial Sequence: Synthetic oligonucleotide
  Target: LAMA2; (-) strand; PAM type: YTN; PAM sequence: TTG
cttttgagtcatgaagaaga

SEQ ID NO: 232621 - DNA, 20 bp, Artificial Sequence
  Description of Artificial Sequence: Synthetic oligonucleotide
  Target: LAMA2; (-) strand; PAM type: YTN; PAM sequence: TTT
gcttttgagtcatgaagaag

SEQ ID NO: 232622 - DNA, 20 bp, Artificial Sequence
  Description of Artificial Sequence: Synthetic oligonucleotide
  Target: LAMA2; (-) strand; PAM type: YTN; PAM sequence: CTT
tgcttttgagtcatgaagaa

SEQ ID NO: 232623 - DNA, 20 bp, Artificial Sequence
  Description of Artificial Sequence: Synthetic oligonucleotide
  Target: LAMA2; (-) strand; PAM type: YTN; PAM sequence: TTA
aatataaatgtataatgctt

SEQ ID NO: 232624 - DNA, 20 bp, Artificial Sequence
  Description of Artificial Sequence: Synthetic oligonucleotide
  Target: LAMA2; (-) strand; PAM type: YTN; PAM sequence: TTT
aaatataaatgtataatgct

SEQ ID NO: 232625 - DNA, 20 bp, Artificial Sequence
  Description of Artificial Sequence: Synthetic oligonucleotide
  Target: LAMA2; (-) strand; PAM type: YTN; PAM sequence: TTT
taaatataaatgtataatgc

SEQ ID NO: 232626 - DNA, 20 bp, Artificial Sequence
  Description of Artificial Sequence: Synthetic oligonucleotide
  Target: LAMA2; (-) strand; PAM type: YTN; PAM sequence: CTA
ttttaaatataaatgtataa

SEQ ID NO: 232627 - DNA, 20 bp, Artificial Sequence
  Description of Artificial Sequence: Synthetic oligonucleotide
  Target: LAMA2; (-) strand; PAM type: YTN; PAM sequence: CTG
ggaaatctattttaaatata

SEQ ID NO: 232628 - DNA, 20 bp, Artificial Sequence
  Description of Artificial Sequence: Synthetic oligonucleotide
  Target: LAMA2; (-) strand; PAM type: YTN; PAM sequence: TTA
aaactgggaaatctatttta

SEQ ID NO: 232629 - DNA, 20 bp, Artificial Sequence
  Description of Artificial Sequence: Synthetic oligonucleotide
  Target: LAMA2; (-) strand; PAM type: YTN; PAM sequence: TTT
aaaactgggaaatctatttt

SEQ ID NO: 232630 - DNA, 20 bp, Artificial Sequence
  Description of Artificial Sequence: Synthetic oligonucleotide
  Target: LAMA2; (-) strand; PAM type: YTN; PAM sequence: TTT
taaaactgggaaatctattt

SEQ ID NO: 232631 - DNA, 20 bp, Artificial Sequence
  Description of Artificial Sequence: Synthetic oligonucleotide
  Target: LAMA2; (-) strand; PAM type: YTN; PAM sequence: CTT
ttaaaactgggaaatctatt

SEQ ID NO: 232632 - DNA, 20 bp, Artificial Sequence
  Description of Artificial Sequence: Synthetic oligonucleotide
  Target: LAMA2; (-) strand; PAM type: YTN; PAM sequence: TTG
taaatgcttttaaaactggg

SEQ ID NO: 232633 - DNA, 20 bp, Artificial Sequence
  Description of Artificial Sequence: Synthetic oligonucleotide
  Target: LAMA2; (-) strand; PAM type: YTN; PAM sequence: TTT
gtaaatgcttttaaaactgg

SEQ ID NO: 232634 - DNA, 20 bp, Artificial Sequence
  Description of Artificial Sequence: Synthetic oligonucleotide
  Target: LAMA2; (-) strand; PAM type: YTN; PAM sequence: CTG
atacagtagtatttgtaaat

SEQ ID NO: 232635 - DNA, 20 bp, Artificial Sequence
  Description of Artificial Sequence: Synthetic oligonucleotide
  Target: LAMA2; (-) strand; PAM type: YTN; PAM sequence: TTA
aaaagctgatacagtagtat

SEQ ID NO: 232636 - DNA, 20 bp, Artificial Sequence
  Description of Artificial Sequence: Synthetic oligonucleotide
  Target: LAMA2; (-) strand; PAM type: YTN; PAM sequence: CTT
aaaaagctgatacagtagta

SEQ ID NO: 232637 - DNA, 20 bp, Artificial Sequence
  Description of Artificial Sequence: Synthetic oligonucleotide
  Target: LAMA2; (-) strand; PAM type: YTN; PAM sequence: TTG
cttaaaaagctgatacagta

SEQ ID NO: 232638 - DNA, 20 bp, Artificial Sequence
  Description of Artificial Sequence: Synthetic oligonucleotide
  Target: LAMA2; (-) strand; PAM type: YTN; PAM sequence: TTT
gcttaaaaagctgatacagt

SEQ ID NO: 232639 - DNA, 20 bp, Artificial Sequence
  Description of Artificial Sequence: Synthetic oligonucleotide
  Target: LAMA2; (-) strand; PAM type: YTN; PAM sequence: TTA
ataatatagacacaaataga

SEQ ID NO: 232640 - DNA, 20 bp, Artificial Sequence
  Description of Artificial Sequence: Synthetic oligonucleotide
  Target: LAMA2; (-) strand; PAM type: YTN; PAM sequence: CTT
aataatatagacacaaatag

SEQ ID NO: 232641 - DNA, 20 bp, Artificial Sequence
  Description of Artificial Sequence: Synthetic oligonucleotide
  Target: LAMA2; (-) strand; PAM type: YTN; PAM sequence: CTC
atcacttaataatatagaca

SEQ ID NO: 232642 - DNA, 20 bp, Artificial Sequence
  Description of Artificial Sequence: Synthetic oligonucleotide
  Target: LAMA2; (-) strand; PAM type: YTN; PAM sequence: TTA
acctcatcacttaataatat

SEQ ID NO: 232643 - DNA, 20 bp, Artificial Sequence
  Description of Artificial Sequence: Synthetic oligonucleotide
  Target: LAMA2; (-) strand; PAM type: YTN; PAM sequence: TTT
aacctcatcacttaataata

SEQ ID NO: 232644 - DNA, 20 bp, Artificial Sequence
  Description of Artificial Sequence: Synthetic oligonucleotide
  Target: LAMA2; (-) strand; PAM type: YTN; PAM sequence: TTC
catttaacctcatcacttaa

SEQ ID NO: 232645 - DNA, 20 bp, Artificial Sequence
  Description of Artificial Sequence: Synthetic oligonucleotide
  Target: LAMA2; (-) strand; PAM type: YTN; PAM sequence: TTT
ccatttaacctcatcactta

SEQ ID NO: 232646 - DNA, 20 bp, Artificial Sequence
  Description of Artificial Sequence: Synthetic oligonucleotide
  Target: LAMA2; (-) strand; PAM type: YTN; PAM sequence: TTT
tccatttaacctcatcactt

SEQ ID NO: 232647 - DNA, 20 bp, Artificial Sequence
  Description of Artificial Sequence: Synthetic oligonucleotide
  Target: LAMA2; (-) strand; PAM type: YTN; PAM sequence: TTT
ttccatttaacctcatcact

SEQ ID NO: 232648 - DNA, 20 bp, Artificial Sequence
  Description of Artificial Sequence: Synthetic oligonucleotide
  Target: LAMA2; (-) strand; PAM type: YTN; PAM sequence: TTT
tttccatttaacctcatcac

SEQ ID NO: 232649 - DNA, 20 bp, Artificial Sequence
  Description of Artificial Sequence: Synthetic oligonucleotide
  Target: LAMA2; (-) strand; PAM type: YTN; PAM sequence: TTG
gatagtataaaaatattttt

SEQ ID NO: 232650 - DNA, 20 bp, Artificial Sequence
  Description of Artificial Sequence: Synthetic oligonucleotide
  Target: LAMA2; (-) strand; PAM type: YTN; PAM sequence: TTT
ggatagtataaaaatatttt

SEQ ID NO: 232651 - DNA, 20 bp, Artificial Sequence
  Description of Artificial Sequence: Synthetic oligonucleotide
  Target: LAMA2; (-) strand; PAM type: YTN; PAM sequence: CTA
gggagtttggatagtataaa

SEQ ID NO: 232652 - DNA, 20 bp, Artificial Sequence
  Description of Artificial Sequence: Synthetic oligonucleotide
  Target: LAMA2; (-) strand; PAM type: YTN; PAM sequence: CTG
gctagggagtttggatagta

SEQ ID NO: 232653 - DNA, 20 bp, Artificial Sequence
  Description of Artificial Sequence: Synthetic oligonucleotide
  Target: LAMA2; (-) strand; PAM type: YTN; PAM sequence: CTA
atggaactggctagggagtt

SEQ ID NO: 232654 - DNA, 20 bp, Artificial Sequence
  Description of Artificial Sequence: Synthetic oligonucleotide
  Target: LAMA2; (-) strand; PAM type: YTN; PAM sequence: TTG
aactaatggaactggctagg

SEQ ID NO: 232655 - DNA, 20 bp, Artificial Sequence
  Description of Artificial Sequence: Synthetic oligonucleotide
  Target: LAMA2; (-) strand; PAM type: YTN; PAM sequence: CTT
gaactaatggaactggctag

SEQ ID NO: 232656 - DNA, 20 bp, Artificial Sequence
  Description of Artificial Sequence: Synthetic oligonucleotide
  Target: LAMA2; (-) strand; PAM type: YTN; PAM sequence: CTA
gaccttgaactaatggaact

SEQ ID NO: 232657 - DNA, 20 bp, Artificial Sequence
  Description of Artificial Sequence: Synthetic oligonucleotide
  Target: LAMA2; (-) strand; PAM type: YTN; PAM sequence: TTG
atatacctagaccttgaact

SEQ ID NO: 232658 - DNA, 20 bp, Artificial Sequence
  Description of Artificial Sequence: Synthetic oligonucleotide
  Target: LAMA2; (-) strand; PAM type: YTN; PAM sequence: TTT
gatatacctagaccttgaac

SEQ ID NO: 232659 - DNA, 20 bp, Artificial Sequence
  Description of Artificial Sequence: Synthetic oligonucleotide
  Target: LAMA2; (-) strand; PAM type: YTN; PAM sequence: TTA
tttgatatacctagaccttg

SEQ ID NO: 232660 - DNA, 20 bp, Artificial Sequence
  Description of Artificial Sequence: Synthetic oligonucleotide
  Target: LAMA2; (-) strand; PAM type: YTN; PAM sequence: CTT
atttgatatacctagacctt

SEQ ID NO: 232661 - DNA, 20 bp, Artificial Sequence
  Description of Artificial Sequence: Synthetic oligonucleotide
  Target: LAMA2; (-) strand; PAM type: YTN; PAM sequence: TTA
tcttatttgatatacctaga

SEQ ID NO: 232662 - DNA, 20 bp, Artificial Sequence
  Description of Artificial Sequence: Synthetic oligonucleotide
  Target: LAMA2; (-) strand; PAM type: YTN; PAM sequence: TTA
tgttatcttatttgatatac

SEQ ID NO: 232663 - DNA, 20 bp, Artificial Sequence
  Description of Artificial Sequence: Synthetic oligonucleotide
  Target: LAMA2; (-) strand; PAM type: YTN; PAM sequence: TTG
ttatgttatcttatttgata

SEQ ID NO: 232664 - DNA, 20 bp, Artificial Sequence
  Description of Artificial Sequence: Synthetic oligonucleotide
  Target: LAMA2; (-) strand; PAM type: YTN; PAM sequence: TTT
gttatgttatcttatttgat

SEQ ID NO: 232665 - DNA, 20 bp, Artificial Sequence
  Description of Artificial Sequence: Synthetic oligonucleotide
  Target: LAMA2; (-) strand; PAM type: YTN; PAM sequence: TTT
tgttatgttatcttatttga

SEQ ID NO: 232666 - DNA, 20 bp, Artificial Sequence
  Description of Artificial Sequence: Synthetic oligonucleotide
  Target: LAMA2; (-) strand; PAM type: YTN; PAM sequence: TTT
ttgttatgttatcttatttg

SEQ ID NO: 232667 - DNA, 20 bp, Artificial Sequence
  Description of Artificial Sequence: Synthetic oligonucleotide
  Target: LAMA2; (-) strand; PAM type: YTN; PAM sequence: TTG
aaaatatttttgttatgtta

SEQ ID NO: 232668 - DNA, 20 bp, Artificial Sequence
  Description of Artificial Sequence: Synthetic oligonucleotide
  Target: LAMA2; (-) strand; PAM type: YTN; PAM sequence: TTT
gaaaatatttttgttatgtt

SEQ ID NO: 232669 - DNA, 20 bp, Artificial Sequence
  Description of Artificial Sequence: Synthetic oligonucleotide
  Target: LAMA2; (-) strand; PAM type: YTN; PAM sequence: CTT
tgaaaatatttttgttatgt

SEQ ID NO: 232670 - DNA, 20 bp, Artificial Sequence
  Description of Artificial Sequence: Synthetic oligonucleotide
  Target: LAMA2; (-) strand; PAM type: YTN; PAM sequence: TTA
catacatatagtgtctttga

SEQ ID NO: 232671 - DNA, 20 bp, Artificial Sequence
  Description of Artificial Sequence: Synthetic oligonucleotide
  Target: LAMA2; (-) strand; PAM type: YTN; PAM sequence: TTG
ttacatacatatagtgtctt

SEQ ID NO: 232672 - DNA, 20 bp, Artificial Sequence
  Description of Artificial Sequence: Synthetic oligonucleotide
  Target: LAMA2; (-) strand; PAM type: YTN; PAM sequence: TTT
gttacatacatatagtgtct

SEQ ID NO: 232673 - DNA, 20 bp, Artificial Sequence
  Description of Artificial Sequence: Synthetic oligonucleotide
  Target: LAMA2; (-) strand; PAM type: YTN; PAM sequence: TTT
tgttacatacatatagtgtc

SEQ ID NO: 232674 - DNA, 20 bp, Artificial Sequence
  Description of Artificial Sequence: Synthetic oligonucleotide
  Target: LAMA2; (-) strand; PAM type: YTN; PAM sequence: TTT
ttgttacatacatatagtgt

SEQ ID NO: 232675 - DNA, 20 bp, Artificial Sequence
  Description of Artificial Sequence: Synthetic oligonucleotide
  Target: LAMA2; (-) strand; PAM type: YTN; PAM sequence: TTG
tttttgttacatacatatag

SEQ ID NO: 232676 - DNA, 20 bp, Artificial Sequence
  Description of Artificial Sequence: Synthetic oligonucleotide
  Target: LAMA2; (-) strand; PAM type: YTN; PAM sequence: TTT
gtttttgttacatacatata

SEQ ID NO: 232677 - DNA, 20 bp, Artificial Sequence
  Description of Artificial Sequence: Synthetic oligonucleotide
  Target: LAMA2; (-) strand; PAM type: YTN; PAM sequence: CTA
tttgtttttgttacatacat

SEQ ID NO: 232678 - DNA, 20 bp, Artificial Sequence
  Description of Artificial Sequence: Synthetic oligonucleotide
  Target: LAMA2; (-) strand; PAM type: YTN; PAM sequence: TTC
tatttgtttttgttacatac

SEQ ID NO: 232679 - DNA, 20 bp, Artificial Sequence
  Description of Artificial Sequence: Synthetic oligonucleotide
  Target: LAMA2; (-) strand; PAM type: YTN; PAM sequence: CTT
ctatttgtttttgttacata

SEQ ID NO: 232680 - DNA, 20 bp, Artificial Sequence
  Description of Artificial Sequence: Synthetic oligonucleotide
  Target: LAMA2; (-) strand; PAM type: YTN; PAM sequence: TTC
cttctatttgtttttgttac

SEQ ID NO: 232681 - DNA, 20 bp, Artificial Sequence
  Description of Artificial Sequence: Synthetic oligonucleotide
  Target: LAMA2; (-) strand; PAM type: YTN; PAM sequence: TTT
ccttctatttgtttttgtta

SEQ ID NO: 232682 - DNA, 20 bp, Artificial Sequence
  Description of Artificial Sequence: Synthetic oligonucleotide
  Target: LAMA2; (-) strand; PAM type: YTN; PAM sequence: TTT
tccttctatttgtttttgtt

SEQ ID NO: 232683 - DNA, 20 bp, Artificial Sequence
  Description of Artificial Sequence: Synthetic oligonucleotide
  Target: LAMA2; (-) strand; PAM type: YTN; PAM sequence: TTT
ttccttctatttgtttttgt

SEQ ID NO: 232684 - DNA, 20 bp, Artificial Sequence
  Description of Artificial Sequence: Synthetic oligonucleotide
  Target: LAMA2; (-) strand; PAM type: YTN; PAM sequence: CTT
tttccttctatttgtttttg

SEQ ID NO: 232685 - DNA, 20 bp, Artificial Sequence
  Description of Artificial Sequence: Synthetic oligonucleotide
  Target: LAMA2; (-) strand; PAM type: YTN; PAM sequence: TTC
tttttccttctatttgtttt

SEQ ID NO: 232686 - DNA, 20 bp, Artificial Sequence
  Description of Artificial Sequence: Synthetic oligonucleotide
  Target: LAMA2; (-) strand; PAM type: YTN; PAM sequence: TTT
ctttttccttctatttgttt

SEQ ID NO: 232687 - DNA, 20 bp, Artificial Sequence
  Description of Artificial Sequence: Synthetic oligonucleotide
  Target: LAMA2; (-) strand; PAM type: YTN; PAM sequence: TTG
tttctttttccttctatttg

SEQ ID NO: 232688 - DNA, 20 bp, Artificial Sequence
  Description of Artificial Sequence: Synthetic oligonucleotide
  Target: LAMA2; (-) strand; PAM type: YTN; PAM sequence: TTT
gtttctttttccttctattt

SEQ ID NO: 232689 - DNA, 20 bp, Artificial Sequence
  Description of Artificial Sequence: Synthetic oligonucleotide
  Target: LAMA2; (-) strand; PAM type: YTN; PAM sequence: CTT
tgtttctttttccttctatt

SEQ ID NO: 232690 - DNA, 20 bp, Artificial Sequence
  Description of Artificial Sequence: Synthetic oligonucleotide
  Target: LAMA2; (-) strand; PAM type: YTN; PAM sequence: TTC
tttgtttctttttccttcta

SEQ ID NO: 232691 - DNA, 20 bp, Artificial Sequence
  Description of Artificial Sequence: Synthetic oligonucleotide
  Target: LAMA2; (-) strand; PAM type: YTN; PAM sequence: CTT
ctttgtttctttttccttct

SEQ ID NO: 232692 - DNA, 20 bp, Artificial Sequence
  Description of Artificial Sequence: Synthetic oligonucleotide
  Target: LAMA2; (-) strand; PAM type: YTN; PAM sequence: TTA
cttctttgtttctttttcct

SEQ ID NO: 232693 - DNA, 20 bp, Artificial Sequence
  Description of Artificial Sequence: Synthetic oligonucleotide
  Target: LAMA2; (-) strand; PAM type: YTN; PAM sequence: TTT
acttctttgtttctttttcc

SEQ ID NO: 232694 - DNA, 20 bp, Artificial Sequence
  Description of Artificial Sequence: Synthetic oligonucleotide
  Target: LAMA2; (-) strand; PAM type: YTN; PAM sequence: TTC
caatttacttctttgtttct

SEQ ID NO: 232695 - DNA, 20 bp, Artificial Sequence
  Description of Artificial Sequence: Synthetic oligonucleotide
  Target: LAMA2; (-) strand; PAM type: YTN; PAM sequence: TTT
ccaatttacttctttgtttc

SEQ ID NO: 232696 - DNA, 20 bp, Artificial Sequence
  Description of Artificial Sequence: Synthetic oligonucleotide
  Target: LAMA2; (-) strand; PAM type: YTN; PAM sequence: TTT
tccaatttacttctttgttt

SEQ ID NO: 232697 - DNA, 20 bp, Artificial Sequence
  Description of Artificial Sequence: Synthetic oligonucleotide
  Target: LAMA2; (-) strand; PAM type: YTN; PAM sequence: TTT
ttccaatttacttctttgtt

SEQ ID NO: 232698 - DNA, 20 bp, Artificial Sequence
  Description of Artificial Sequence: Synthetic oligonucleotide
  Target: LAMA2; (-) strand; PAM type: YTN; PAM sequence: CTT
tttccaatttacttctttgt

SEQ ID NO: 232699 - DNA, 20 bp, Artificial Sequence
  Description of Artificial Sequence: Synthetic oligonucleotide
  Target: LAMA2; (-) strand; PAM type: YTN; PAM sequence: CTA
agaatcccctttttccaatt

SEQ ID NO: 232700 - DNA, 20 bp, Artificial Sequence
  Description of Artificial Sequence: Synthetic oligonucleotide
  Target: LAMA2; (-) strand; PAM type: YTN; PAM sequence: TTG
actaagaatcccctttttcc

SEQ ID NO: 232701 - DNA, 20 bp, Artificial Sequence
  Description of Artificial Sequence: Synthetic oligonucleotide
  Target: LAMA2; (-) strand; PAM type: YTN; PAM sequence: CTT
gactaagaatcccctttttc

SEQ ID NO: 232702 - DNA, 20 bp, Artificial Sequence
  Description of Artificial Sequence: Synthetic oligonucleotide
  Target: LAMA2; (-) strand; PAM type: YTN; PAM sequence: TTC
cttgactaagaatccccttt

SEQ ID NO: 232703 - DNA, 20 bp, Artificial Sequence
  Description of Artificial Sequence: Synthetic oligonucleotide
  Target: LAMA2; (-) strand; PAM type: YTN; PAM sequence: CTG
agttccttgactaagaatcc

SEQ ID NO: 232704 - DNA, 20 bp, Artificial Sequence
  Description of Artificial Sequence: Synthetic oligonucleotide
  Target: LAMA2; (-) strand; PAM type: YTN; PAM sequence: CTA
gaatatgtaggtggacacat

SEQ ID NO: 232705 - DNA, 20 bp, Artificial Sequence
  Description of Artificial Sequence: Synthetic oligonucleotide
  Target: LAMA2; (-) strand; PAM type: YTN; PAM sequence: TTA
gctagaatatgtaggtggac

SEQ ID NO: 232706 - DNA, 20 bp, Artificial Sequence
  Description of Artificial Sequence: Synthetic oligonucleotide
  Target: LAMA2; (-) strand; PAM type: YTN; PAM sequence: TTT
agctagaatatgtaggtgga

SEQ ID NO: 232707 - DNA, 20 bp, Artificial Sequence
  Description of Artificial Sequence: Synthetic oligonucleotide
  Target: LAMA2; (-) strand; PAM type: YTN; PAM sequence: TTA
tacacacacacaaaaaaaac

SEQ ID NO: 232708 - DNA, 20 bp, Artificial Sequence
  Description of Artificial Sequence: Synthetic oligonucleotide
  Target: LAMA2; (-) strand; PAM type: YTN; PAM sequence: TTC
caattatacacacacacaaa

SEQ ID NO: 232709 - DNA, 20 bp, Artificial Sequence
  Description of Artificial Sequence: Synthetic oligonucleotide
  Target: LAMA2; (-) strand; PAM type: YTN; PAM sequence: TTA
ttccaattatacacacacac

SEQ ID NO: 232710 - DNA, 20 bp, Artificial Sequence
  Description of Artificial Sequence: Synthetic oligonucleotide
  Target: LAMA2; (-) strand; PAM type: YTN; PAM sequence: CTA
ttattccaattatacacaca

SEQ ID NO: 232711 - DNA, 20 bp, Artificial Sequence
  Description of Artificial Sequence: Synthetic oligonucleotide
  Target: LAMA2; (-) strand; PAM type: YTN; PAM sequence: TTC
tattattccaattatacaca

SEQ ID NO: 232712 - DNA, 20 bp, Artificial Sequence
  Description of Artificial Sequence: Synthetic oligonucleotide
  Target: LAMA2; (-) strand; PAM type: YTN; PAM sequence: TTA
gatagttctattattccaat

SEQ ID NO: 232713 - DNA, 20 bp, Artificial Sequence
  Description of Artificial Sequence: Synthetic oligonucleotide
  Target: LAMA2; (-) strand; PAM type: YTN; PAM sequence: TTA
gcgttagatagttctattat

SEQ ID NO: 232714 - DNA, 20 bp, Artificial Sequence
  Description of Artificial Sequence: Synthetic oligonucleotide
  Target: LAMA2; (-) strand; PAM type: YTN; PAM sequence: CTT
agcgttagatagttctatta

SEQ ID NO: 232715 - DNA, 20 bp, Artificial Sequence
  Description of Artificial Sequence: Synthetic oligonucleotide
  Target: LAMA2; (-) strand; PAM type: YTN; PAM sequence: TTC
aaataatcatcttagcgtta

SEQ ID NO: 232716 - DNA, 20 bp, Artificial Sequence
  Description of Artificial Sequence: Synthetic oligonucleotide
  Target: LAMA2; (-) strand; PAM type: YTN; PAM sequence: TTA
tcatattcaaataatcatct

SEQ ID NO: 232717 - DNA, 20 bp, Artificial Sequence
  Description of Artificial Sequence: Synthetic oligonucleotide
  Target: LAMA2; (-) strand; PAM type: YTN; PAM sequence: TTA
cattatcatattcaaataat

SEQ ID NO: 232718 - DNA, 20 bp, Artificial Sequence
  Description of Artificial Sequence: Synthetic oligonucleotide
  Target: LAMA2; (-) strand; PAM type: YTN; PAM sequence: TTT
acattatcatattcaaataa

SEQ ID NO: 232719 - DNA, 20 bp, Artificial Sequence
  Description of Artificial Sequence: Synthetic oligonucleotide
  Target: LAMA2; (-) strand; PAM type: YTN; PAM sequence: CTT
tacattatcatattcaaata

SEQ ID NO: 232720 - DNA, 20 bp, Artificial Sequence
  Description of Artificial Sequence: Synthetic oligonucleotide
  Target: LAMA2; (-) strand; PAM type: YTN; PAM sequence: TTG
tcagagcactttacattatc

SEQ ID NO: 232721 - DNA, 20 bp, Artificial Sequence
  Description of Artificial Sequence: Synthetic oligonucleotide
  Target: LAMA2; (-) strand; PAM type: YTN; PAM sequence: TTA
taattgtcagagcactttac

SEQ ID NO: 232722 - DNA, 20 bp, Artificial Sequence
  Description of Artificial Sequence: Synthetic oligonucleotide
  Target: LAMA2; (-) strand; PAM type: YTN; PAM sequence: TTT
ataattgtcagagcacttta

SEQ ID NO: 232723 - DNA, 20 bp, Artificial Sequence
  Description of Artificial Sequence: Synthetic oligonucleotide
  Target: LAMA2; (-) strand; PAM type: YTN; PAM sequence: TTT
tataattgtcagagcacttt

SEQ ID NO: 232724 - DNA, 20 bp, Artificial Sequence
  Description of Artificial Sequence: Synthetic oligonucleotide
  Target: LAMA2; (-) strand; PAM type: YTN; PAM sequence: TTA
atgtgtatataacattttat

SEQ ID NO: 232725 - DNA, 20 bp, Artificial Sequence
  Description of Artificial Sequence: Synthetic oligonucleotide
  Target: LAMA2; (-) strand; PAM type: YTN; PAM sequence: TTA
attaatgtgtatataacatt

SEQ ID NO: 232726 - DNA, 20 bp, Artificial Sequence
  Description of Artificial Sequence: Synthetic oligonucleotide
  Target: LAMA2; (-) strand; PAM type: YTN; PAM sequence: TTT
aattaatgtgtatataacat

SEQ ID NO: 232727 - DNA, 20 bp, Artificial Sequence
  Description of Artificial Sequence: Synthetic oligonucleotide
  Target: LAMA2; (-) strand; PAM type: YTN; PAM sequence: TTT
taattaatgtgtatataaca

SEQ ID NO: 232728 - DNA, 20 bp, Artificial Sequence
  Description of Artificial Sequence: Synthetic oligonucleotide
  Target: LAMA2; (-) strand; PAM type: YTN; PAM sequence: TTA
aaattttaattaatgtgtat

SEQ ID NO: 232729 - DNA, 20 bp, Artificial Sequence
  Description of Artificial Sequence: Synthetic oligonucleotide
  Target: LAMA2; (-) strand; PAM type: YTN; PAM sequence: TTT
aaaattttaattaatgtgta

SEQ ID NO: 232730 - DNA, 20 bp, Artificial Sequence
  Description of Artificial Sequence: Synthetic oligonucleotide
  Target: LAMA2; (-) strand; PAM type: YTN; PAM sequence: TTT
taaaattttaattaatgtgt

SEQ ID NO: 232731 - DNA, 20 bp, Artificial Sequence
  Description of Artificial Sequence: Synthetic oligonucleotide
  Target: LAMA2; (-) strand; PAM type: YTN; PAM sequence: TTT
ttaaaattttaattaatgtg

SEQ ID NO: 232732 - DNA, 20 bp, Artificial Sequence
  Description of Artificial Sequence: Synthetic oligonucleotide
  Target: LAMA2; (-) strand; PAM type: YTN; PAM sequence: CTA
tttttaaaattttaattaat

SEQ ID NO: 232733 - DNA, 20 bp, Artificial Sequence
  Description of Artificial Sequence: Synthetic oligonucleotide
  Target: LAMA2; (-) strand; PAM type: YTN; PAM sequence: CTA
gactatttttaaaattttaa

SEQ ID NO: 232734 - DNA, 20 bp, Artificial Sequence
  Description of Artificial Sequence: Synthetic oligonucleotide
  Target: LAMA2; (-) strand; PAM type: YTN; PAM sequence: TTA
tggaggctagactattttta

SEQ ID NO: 232735 - DNA, 20 bp, Artificial Sequence
  Description of Artificial Sequence: Synthetic oligonucleotide
  Target: LAMA2; (-) strand; PAM type: YTN; PAM sequence: TTA
aggataattatggaggctag

SEQ ID NO: 232736 - DNA, 20 bp, Artificial Sequence
  Description of Artificial Sequence: Synthetic oligonucleotide
  Target: LAMA2; (-) strand; PAM type: YTN; PAM sequence: TTT
aaggataattatggaggcta

SEQ ID NO: 232737 - DNA, 20 bp, Artificial Sequence
  Description of Artificial Sequence: Synthetic oligonucleotide
  Target: LAMA2; (-) strand; PAM type: YTN; PAM sequence: TTT
taaggataattatggaggct

SEQ ID NO: 232738 - DNA, 20 bp, Artificial Sequence
  Description of Artificial Sequence: Synthetic oligonucleotide
  Target: LAMA2; (-) strand; PAM type: YTN; PAM sequence: TTT
ttaaggataattatggaggc

SEQ ID NO: 232739 - DNA, 20 bp, Artificial Sequence
  Description of Artificial Sequence: Synthetic oligonucleotide
  Target: LAMA2; (-) strand; PAM type: YTN; PAM sequence: TTT
tttaaggataattatggagg

SEQ ID NO: 232740 - DNA, 20 bp, Artificial Sequence
  Description of Artificial Sequence: Synthetic oligonucleotide
  Target: LAMA2; (-) strand; PAM type: YTN; PAM sequence: CTA
ttttttaaggataattatgg

SEQ ID NO: 232741 - DNA, 20 bp, Artificial Sequence
  Description of Artificial Sequence: Synthetic oligonucleotide
  Target: LAMA2; (-) strand; PAM type: YTN; PAM sequence: CTA
cccagctattttttaaggat

SEQ ID NO: 232742 - DNA, 20 bp, Artificial Sequence
  Description of Artificial Sequence: Synthetic oligonucleotide
  Target: LAMA2; (-) strand; PAM type: YTN; PAM sequence: TTA
atctacccagctatttttta

SEQ ID NO: 232743 - DNA, 20 bp, Artificial Sequence
  Description of Artificial Sequence: Synthetic oligonucleotide
  Target: LAMA2; (-) strand; PAM type: YTN; PAM sequence: TTT
aatctacccagctatttttt

SEQ ID NO: 232744 - DNA, 20 bp, Artificial Sequence
  Description of Artificial Sequence: Synthetic oligonucleotide
  Target: LAMA2; (-) strand; PAM type: YTN; PAM sequence: TTT
taatctacccagctattttt

SEQ ID NO: 232745 - DNA, 20 bp, Artificial Sequence
  Description of Artificial Sequence: Synthetic oligonucleotide
  Target: LAMA2; (-) strand; PAM type: YTN; PAM sequence: TTA
ttttaatctacccagctatt

SEQ ID NO: 232746 - DNA, 20 bp, Artificial Sequence
  Description of Artificial Sequence: Synthetic oligonucleotide
  Target: LAMA2; (-) strand; PAM type: YTN; PAM sequence: CTA
attattttaatctacccagc

SEQ ID NO: 232747 - DNA, 20 bp, Artificial Sequence
  Description of Artificial Sequence: Synthetic oligonucleotide
  Target: LAMA2; (-) strand; PAM type: YTN; PAM sequence: TTA
ctaattattttaatctaccc

SEQ ID NO: 232748 - DNA, 20 bp, Artificial Sequence
  Description of Artificial Sequence: Synthetic oligonucleotide
  Target: LAMA2; (-) strand; PAM type: YTN; PAM sequence: CTA
tgttactaattattttaatc

SEQ ID NO: 232749 - DNA, 20 bp, Artificial Sequence
  Description of Artificial Sequence: Synthetic oligonucleotide
  Target: LAMA2; (-) strand; PAM type: YTN; PAM sequence: TTA
acatagagctatgttactaa

SEQ ID NO: 232750 - DNA, 20 bp, Artificial Sequence
  Description of Artificial Sequence: Synthetic oligonucleotide
  Target: LAMA2; (-) strand; PAM type: YTN; PAM sequence: TTG
tatatgaagttaacatagag

SEQ ID NO: 232751 - DNA, 20 bp, Artificial Sequence
  Description of Artificial Sequence: Synthetic oligonucleotide
  Target: LAMA2; (-) strand; PAM type: YTN; PAM sequence: TTT
gtatatgaagttaacataga

SEQ ID NO: 232752 - DNA, 20 bp, Artificial Sequence
  Description of Artificial Sequence: Synthetic oligonucleotide
  Target: LAMA2; (-) strand; PAM type: YTN; PAM sequence: CTT
tgtatatgaagttaacatag

SEQ ID NO: 232753 - DNA, 20 bp, Artificial Sequence
  Description of Artificial Sequence: Synthetic oligonucleotide
  Target: LAMA2; (-) strand; PAM type: YTN; PAM sequence: TTA
cctttgtatatgaagttaac

SEQ ID NO: 232754 - DNA, 20 bp, Artificial Sequence
  Description of Artificial Sequence: Synthetic oligonucleotide
  Target: LAMA2; (-) strand; PAM type: YTN; PAM sequence: CTA
tgtaatatagtccatacaat

SEQ ID NO: 232755 - DNA, 20 bp, Artificial Sequence
  Description of Artificial Sequence: Synthetic oligonucleotide
  Target: LAMA2; (-) strand; PAM type: YTN; PAM sequence: TTA
ctatgtaatatagtccatac

SEQ ID NO: 232756 - DNA, 20 bp, Artificial Sequence
  Description of Artificial Sequence: Synthetic oligonucleotide
  Target: LAMA2; (-) strand; PAM type: YTN; PAM sequence: TTA
tattactatgtaatatagtc

SEQ ID NO: 232757 - DNA, 20 bp, Artificial Sequence
  Description of Artificial Sequence: Synthetic oligonucleotide
  Target: LAMA2; (-) strand; PAM type: YTN; PAM sequence: TTT
atattactatgtaatatagt

SEQ ID NO: 232758 - DNA, 20 bp, Artificial Sequence
  Description of Artificial Sequence: Synthetic oligonucleotide
  Target: LAMA2; (-) strand; PAM type: YTN; PAM sequence: TTT
tatattactatgtaatatag

SEQ ID NO: 232759 - DNA, 20 bp, Artificial Sequence
  Description of Artificial Sequence: Synthetic oligonucleotide
  Target: LAMA2; (-) strand; PAM type: YTN; PAM sequence: TTT
ttatattactatgtaatata

SEQ ID NO: 232760 - DNA, 20 bp, Artificial Sequence
  Description of Artificial Sequence: Synthetic oligonucleotide
  Target: LAMA2; (-) strand; PAM type: YTN; PAM sequence: TTG
catttttatattactatgta

SEQ ID NO: 232761 - DNA, 20 bp, Artificial Sequence
  Description of Artificial Sequence: Synthetic oligonucleotide
  Target: LAMA2; (-) strand; PAM type: YTN; PAM sequence: TTT
gcatttttatattactatgt

SEQ ID NO: 232762 - DNA, 20 bp, Artificial Sequence
  Description of Artificial Sequence: Synthetic oligonucleotide
  Target: LAMA2; (-) strand; PAM type: YTN; PAM sequence: TTG
tgcagaacatttgcattttt

SEQ ID NO: 232763 - DNA, 20 bp, Artificial Sequence
  Description of Artificial Sequence: Synthetic oligonucleotide
  Target: LAMA2; (-) strand; PAM type: YTN; PAM sequence: TTA
ttgtgcagaacatttgcatt

SEQ ID NO: 232764 - DNA, 20 bp, Artificial Sequence
  Description of Artificial Sequence: Synthetic oligonucleotide
  Target: LAMA2; (-) strand; PAM type: YTN; PAM sequence: TTT
attgtgcagaacatttgcat

SEQ ID NO: 232765 - DNA, 20 bp, Artificial Sequence
  Description of Artificial Sequence: Synthetic oligonucleotide
  Target: LAMA2; (-) strand; PAM type: YTN; PAM sequence: CTG
taagtttattgtgcagaaca

SEQ ID NO: 232766 - DNA, 20 bp, Artificial Sequence
  Description of Artificial Sequence: Synthetic oligonucleotide
  Target: LAMA2; (-) strand; PAM type: YTN; PAM sequence: TTA
actgtaagtttattgtgcag

SEQ ID NO: 232767 - DNA, 20 bp, Artificial Sequence
  Description of Artificial Sequence: Synthetic oligonucleotide
  Target: LAMA2; (-) strand; PAM type: YTN; PAM sequence: TTA
aaaagtcattaactgtaagt

SEQ ID NO: 232768 - DNA, 20 bp, Artificial Sequence
  Description of Artificial Sequence: Synthetic oligonucleotide
  Target: LAMA2; (-) strand; PAM type: YTN; PAM sequence: TTA
agaagaaaattaaaaagtca

SEQ ID NO: 232769 - DNA, 20 bp, Artificial Sequence
  Description of Artificial Sequence: Synthetic oligonucleotide
  Target: LAMA2; (-) strand; PAM type: YTN; PAM sequence: TTA
accatattaagaagaaaatt

SEQ ID NO: 232770 - DNA, 20 bp, Artificial Sequence
  Description of Artificial Sequence: Synthetic oligonucleotide
  Target: LAMA2; (-) strand; PAM type: YTN; PAM sequence: CTT
aaccatattaagaagaaaat

SEQ ID NO: 232771 - DNA, 20 bp, Artificial Sequence
  Description of Artificial Sequence: Synthetic oligonucleotide
  Target: LAMA2; (-) strand; PAM type: YTN; PAM sequence: TTC
cttaaccatattaagaagaa

SEQ ID NO: 232772 - DNA, 20 bp, Artificial Sequence
  Description of Artificial Sequence: Synthetic oligonucleotide
  Target: LAMA2; (-) strand; PAM type: YTN; PAM sequence: CTC
ataacaatatattccttaac

SEQ ID NO: 232773 - DNA, 20 bp, Artificial Sequence
  Description of Artificial Sequence: Synthetic oligonucleotide
  Target: LAMA2; (-) strand; PAM type: YTN; PAM sequence: TTG
tgctcataacaatatattcc

SEQ ID NO: 232774 - DNA, 20 bp, Artificial Sequence
  Description of Artificial Sequence: Synthetic oligonucleotide
  Target: LAMA2; (-) strand; PAM type: YTN; PAM sequence: CTG
ggtagaaattgtgctcataa

SEQ ID NO: 232775 - DNA, 20 bp, Artificial Sequence
  Description of Artificial Sequence: Synthetic oligonucleotide
  Target: LAMA2; (-) strand; PAM type: YTN; PAM sequence: TTG
aaaagaaccaacaaaatctg

SEQ ID NO: 232776 - DNA, 20 bp, Artificial Sequence
  Description of Artificial Sequence: Synthetic oligonucleotide
  Target: LAMA2; (-) strand; PAM type: YTN; PAM sequence: TTT
gaaaagaaccaacaaaatct

SEQ ID NO: 232777 - DNA, 20 bp, Artificial Sequence
  Description of Artificial Sequence: Synthetic oligonucleotide
  Target: LAMA2; (-) strand; PAM type: YTN; PAM sequence: TTG
atggatttgaaaagaaccaa

SEQ ID NO: 232778 - DNA, 20 bp, Artificial Sequence
  Description of Artificial Sequence: Synthetic oligonucleotide
  Target: LAMA2; (-) strand; PAM type: YTN; PAM sequence: CTT
gatggatttgaaaagaacca

SEQ ID NO: 232779 - DNA, 20 bp, Artificial Sequence
  Description of Artificial Sequence: Synthetic oligonucleotide
  Target: LAMA2; (-) strand; PAM type: YTN; PAM sequence: TTA
cttgatggatttgaaaagaa

SEQ ID NO: 232780 - DNA, 20 bp, Artificial Sequence
  Description of Artificial Sequence: Synthetic oligonucleotide
  Target: LAMA2; (-) strand; PAM type: YTN; PAM sequence: TTT
acttgatggatttgaaaaga

SEQ ID NO: 232781 - DNA, 20 bp, Artificial Sequence
  Description of Artificial Sequence: Synthetic oligonucleotide
  Target: LAMA2; (-) strand; PAM type: YTN; PAM sequence: TTT
tacttgatggatttgaaaag

SEQ ID NO: 232782 - DNA, 20 bp, Artificial Sequence
  Description of Artificial Sequence: Synthetic oligonucleotide
  Target: LAMA2; (-) strand; PAM type: YTN; PAM sequence: CTG
ttttacttgatggatttgaa

SEQ ID NO: 232783 - DNA, 20 bp, Artificial Sequence
  Description of Artificial Sequence: Synthetic oligonucleotide
  Target: LAMA2; (-) strand; PAM type: YTN; PAM sequence: TTC
acaaatcatacgcacactgt

SEQ ID NO: 232784 - DNA, 20 bp, Artificial Sequence
  Description of Artificial Sequence: Synthetic oligonucleotide
  Target: LAMA2; (-) strand; PAM type: YTN; PAM sequence: CTG
cagtattcacaaatcatacg

SEQ ID NO: 232785 - DNA, 20 bp, Artificial Sequence
  Description of Artificial Sequence: Synthetic oligonucleotide
  Target: LAMA2; (-) strand; PAM type: YTN; PAM sequence: TTA
tagcaactgcagtattcaca

SEQ ID NO: 232786 - DNA, 20 bp, Artificial Sequence
  Description of Artificial Sequence: Synthetic oligonucleotide
  Target: LAMA2; (-) strand; PAM type: YTN; PAM sequence: TTG
tgattatagcaactgcagta

SEQ ID NO: 232787 - DNA, 20 bp, Artificial Sequence
  Description of Artificial Sequence: Synthetic oligonucleotide
  Target: LAMA2; (-) strand; PAM type: YTN; PAM sequence: TTA
ttgtgattatagcaactgca

SEQ ID NO: 232788 - DNA, 20 bp, Artificial Sequence
  Description of Artificial Sequence: Synthetic oligonucleotide
  Target: LAMA2; (-) strand; PAM type: YTN; PAM sequence: TTT
attgtgattatagcaactgc

SEQ ID NO: 232789 - DNA, 20 bp, Artificial Sequence
  Description of Artificial Sequence: Synthetic oligonucleotide
  Target: LAMA2; (-) strand; PAM type: YTN; PAM sequence: TTT
tattgtgattatagcaactg

SEQ ID NO: 232790 - DNA, 20 bp, Artificial Sequence
  Description of Artificial Sequence: Synthetic oligonucleotide
  Target: LAMA2; (-) strand; PAM type: YTN; PAM sequence: CTT
ttattgtgattatagcaact

SEQ ID NO: 232791 - DNA, 20 bp, Artificial Sequence
  Description of Artificial Sequence: Synthetic oligonucleotide
  Target: LAMA2; (-) strand; PAM type: YTN; PAM sequence: CTC
ttttattgtgattatagcaa

SEQ ID NO: 232792 - DNA, 20 bp, Artificial Sequence
  Description of Artificial Sequence: Synthetic oligonucleotide
  Target: LAMA2; (-) strand; PAM type: YTN; PAM sequence: TTG
caagaaaccctcttttattg

SEQ ID NO: 232793 - DNA, 20 bp, Artificial Sequence
  Description of Artificial Sequence: Synthetic oligonucleotide
  Target: LAMA2; (-) strand; PAM type: YTN; PAM sequence: CTT
gcaagaaaccctcttttatt

SEQ ID NO: 232794 - DNA, 20 bp, Artificial Sequence
  Description of Artificial Sequence: Synthetic oligonucleotide
  Target: LAMA2; (-) strand; PAM type: YTN; PAM sequence: TTC
ttgcaagaaaccctctttta

SEQ ID NO: 232795 - DNA, 20 bp, Artificial Sequence
  Description of Artificial Sequence: Synthetic oligonucleotide
  Target: LAMA2; (-) strand; PAM type: YTN; PAM sequence: TTT
cttgcaagaaaccctctttt

SEQ ID NO: 232796 - DNA, 20 bp, Artificial Sequence
  Description of Artificial Sequence: Synthetic oligonucleotide
  Target: LAMA2; (-) strand; PAM type: YTN; PAM sequence: TTA
catagtttcttgcaagaaac

SEQ ID NO: 232797 - DNA, 20 bp, Artificial Sequence
  Description of Artificial Sequence: Synthetic oligonucleotide
  Target: LAMA2; (-) strand; PAM type: YTN; PAM sequence: TTT
acatagtttcttgcaagaaa

SEQ ID NO: 232798 - DNA, 20 bp, Artificial Sequence
  Description of Artificial Sequence: Synthetic oligonucleotide
  Target: LAMA2; (-) strand; PAM type: YTN; PAM sequence: TTT
tacatagtttcttgcaagaa

SEQ ID NO: 232799 - DNA, 20 bp, Artificial Sequence
  Description of Artificial Sequence: Synthetic oligonucleotide
  Target: LAMA2; (-) strand; PAM type: YTN; PAM sequence: TTG
ttttacatagtttcttgcaa

SEQ ID NO: 232800 - DNA, 20 bp, Artificial Sequence
  Description of Artificial Sequence: Synthetic oligonucleotide
  Target: LAMA2; (-) strand; PAM type: YTN; PAM sequence: TTC
ataaaagttgttttacatag

SEQ ID NO: 232801 - DNA, 20 bp, Artificial Sequence
  Description of Artificial Sequence: Synthetic oligonucleotide
  Target: LAMA2; (-) strand; PAM type: YTN; PAM sequence: CTT
cataaaagttgttttacata

SEQ ID NO: 232802 - DNA, 20 bp, Artificial Sequence
  Description of Artificial Sequence: Synthetic oligonucleotide
  Target: LAMA2; (-) strand; PAM type: YTN; PAM sequence: TTC
ttcataaaagttgttttaca

SEQ ID NO: 232803 - DNA, 20 bp, Artificial Sequence
  Description of Artificial Sequence: Synthetic oligonucleotide
  Target: LAMA2; (-) strand; PAM type: YTN; PAM sequence: CTA
ttcttcataaaagttgtttt

SEQ ID NO: 232804 - DNA, 20 bp, Artificial Sequence
  Description of Artificial Sequence: Synthetic oligonucleotide
  Target: LAMA2; (-) strand; PAM type: YTN; PAM sequence: CTA
aggacagctattcttcataa

SEQ ID NO: 232805 - DNA, 20 bp, Artificial Sequence
  Description of Artificial Sequence: Synthetic oligonucleotide
  Target: LAMA2; (-) strand; PAM type: YTN; PAM sequence: CTG
gggctaaggacagctattct

SEQ ID NO: 232806 - DNA, 20 bp, Artificial Sequence
  Description of Artificial Sequence: Synthetic oligonucleotide
  Target: LAMA2; (-) strand; PAM type: YTN; PAM sequence: TTA
tctggggctaaggacagcta

SEQ ID NO: 232807 - DNA, 20 bp, Artificial Sequence
  Description of Artificial Sequence: Synthetic oligonucleotide
  Target: LAMA2; (-) strand; PAM type: YTN; PAM sequence: TTT
atctggggctaaggacagct

SEQ ID NO: 232808 - DNA, 20 bp, Artificial Sequence
  Description of Artificial Sequence: Synthetic oligonucleotide
  Target: LAMA2; (-) strand; PAM type: YTN; PAM sequence: TTT
tatctggggctaaggacagc

SEQ ID NO: 232809 - DNA, 20 bp, Artificial Sequence
  Description of Artificial Sequence: Synthetic oligonucleotide
  Target: LAMA2; (-) strand; PAM type: YTN; PAM sequence: TTT
ttatctggggctaaggacag

SEQ ID NO: 232810 - DNA, 20 bp, Artificial Sequence
  Description of Artificial Sequence: Synthetic oligonucleotide
  Target: LAMA2; (-) strand; PAM type: YTN; PAM sequence: CTG
acagtagtttttatctgggg

SEQ ID NO: 232811 - DNA, 20 bp, Artificial Sequence
  Description of Artificial Sequence: Synthetic oligonucleotide
  Target: LAMA2; (-) strand; PAM type: YTN; PAM sequence: CTG
tggctgacagtagtttttat

SEQ ID NO: 232812 - DNA, 20 bp, Artificial Sequence
  Description of Artificial Sequence: Synthetic oligonucleotide
  Target: LAMA2; (-) strand; PAM type: YTN; PAM sequence: CTA
gagtacctgtggctgacagt

SEQ ID NO: 232813 - DNA, 20 bp, Artificial Sequence
  Description of Artificial Sequence: Synthetic oligonucleotide
  Target: LAMA2; (-) strand; PAM type: YTN; PAM sequence: TTC
ccagtcagcaccaagtccat

SEQ ID NO: 232814 - DNA, 20 bp, Artificial Sequence
  Description of Artificial Sequence: Synthetic oligonucleotide
  Target: LAMA2; (-) strand; PAM type: YTN; PAM sequence: TTT
cccagtcagcaccaagtcca

SEQ ID NO: 232815 - DNA, 20 bp, Artificial Sequence
  Description of Artificial Sequence: Synthetic oligonucleotide
  Target: LAMA2; (-) strand; PAM type: YTN; PAM sequence: TTT
tcccagtcagcaccaagtcc

SEQ ID NO: 232816 - DNA, 20 bp, Artificial Sequence
  Description of Artificial Sequence: Synthetic oligonucleotide
  Target: LAMA2; (-) strand; PAM type: YTN; PAM sequence: TTT
ttcccagtcagcaccaagtc

SEQ ID NO: 232817 - DNA, 20 bp, Artificial Sequence
  Description of Artificial Sequence: Synthetic oligonucleotide
  Target: LAMA2; (-) strand; PAM type: YTN; PAM sequence: CTT
tttcccagtcagcaccaagt

SEQ ID NO: 232818 - DNA, 20 bp, Artificial Sequence
  Description of Artificial Sequence: Synthetic oligonucleotide
  Target: LAMA2; (-) strand; PAM type: YTN; PAM sequence: TTA
gaaatatctttttcccagtc

SEQ ID NO: 232819 - DNA, 20 bp, Artificial Sequence
  Description of Artificial Sequence: Synthetic oligonucleotide
  Target: LAMA2; (-) strand; PAM type: YTN; PAM sequence: TTT
agaaatatctttttcccagt

SEQ ID NO: 232820 - DNA, 20 bp, Artificial Sequence
  Description of Artificial Sequence: Synthetic oligonucleotide
  Target: LAMA2; (-) strand; PAM type: YTN; PAM sequence: TTT
tagaaatatctttttcccag

SEQ ID NO: 232821 - DNA, 20 bp, Artificial Sequence
  Description of Artificial Sequence: Synthetic oligonucleotide
  Target: LAMA2; (-) strand; PAM type: YTN; PAM sequence: TTG
ggcattttagaaatatcttt

SEQ ID NO: 232822 - DNA, 20 bp, Artificial Sequence
  Description of Artificial Sequence: Synthetic oligonucleotide
  Target: LAMA2; (-) strand; PAM type: YTN; PAM sequence: CTA
gttgggcattttagaaatat

SEQ ID NO: 232823 - DNA, 20 bp, Artificial Sequence
  Description of Artificial Sequence: Synthetic oligonucleotide
  Target: LAMA2; (-) strand; PAM type: YTN; PAM sequence: TTA
agctagttgggcattttaga

SEQ ID NO: 232824 - DNA, 20 bp, Artificial Sequence
  Description of Artificial Sequence: Synthetic oligonucleotide
  Target: LAMA2; (-) strand; PAM type: YTN; PAM sequence: TTT
aagctagttgggcattttag

SEQ ID NO: 232825 - DNA, 20 bp, Artificial Sequence
  Description of Artificial Sequence: Synthetic oligonucleotide
  Target: LAMA2; (-) strand; PAM type: YTN; PAM sequence: TTA
atttaagctagttgggcatt

SEQ ID NO: 232826 - DNA, 20 bp, Artificial Sequence
  Description of Artificial Sequence: Synthetic oligonucleotide
  Target: LAMA2; (-) strand; PAM type: YTN; PAM sequence: TTT
aatttaagctagttgggcat

SEQ ID NO: 232827 - DNA, 20 bp, Artificial Sequence
  Description of Artificial Sequence: Synthetic oligonucleotide
  Target: LAMA2; (-) strand; PAM type: YTN; PAM sequence: CTT
taatttaagctagttgggca

SEQ ID NO: 232828 - DNA, 20 bp, Artificial Sequence
  Description of Artificial Sequence: Synthetic oligonucleotide
  Target: LAMA2; (-) strand; PAM type: YTN; PAM sequence: TTA
gcccaaaggaagagtggcct

SEQ ID NO: 232829 - DNA, 20 bp, Artificial Sequence
  Description of Artificial Sequence: Synthetic oligonucleotide
  Target: LAMA2; (-) strand; PAM type: YTN; PAM sequence: CTT
agcccaaaggaagagtggcc

SEQ ID NO: 232830 - DNA, 20 bp, Artificial Sequence
  Description of Artificial Sequence: Synthetic oligonucleotide
  Target: LAMA2; (-) strand; PAM type: YTN; PAM sequence: CTG
tgatcttagcccaaaggaag

SEQ ID NO: 232831 - DNA, 20 bp, Artificial Sequence
  Description of Artificial Sequence: Synthetic oligonucleotide
  Target: LAMA2; (-) strand; PAM type: YTN; PAM sequence: TTA
gcactgtgatcttagcccaa

SEQ ID NO: 232832 - DNA, 20 bp, Artificial Sequence
  Description of Artificial Sequence: Synthetic oligonucleotide
  Target: LAMA2; (-) strand; PAM type: YTN; PAM sequence: CTT
agcactgtgatcttagccca

SEQ ID NO: 232833 - DNA, 20 bp, Artificial Sequence
  Description of Artificial Sequence: Synthetic oligonucleotide
  Target: LAMA2; (-) strand; PAM type: YTN; PAM sequence: CTC
ttagcactgtgatcttagcc

SEQ ID NO: 232834 - DNA, 20 bp, Artificial Sequence
  Description of Artificial Sequence: Synthetic oligonucleotide
  Target: LAMA2; (-) strand; PAM type: YTN; PAM sequence: CTG
acaaagtaactcttagcact

SEQ ID NO: 232835 - DNA, 20 bp, Artificial Sequence
  Description of Artificial Sequence: Synthetic oligonucleotide
  Target: LAMA2; (-) strand; PAM type: YTN; PAM sequence: CTC
acaaaactgacaaagtaact

SEQ ID NO: 232836 - DNA, 20 bp, Artificial Sequence
  Description of Artificial Sequence: Synthetic oligonucleotide
  Target: LAMA2; (-) strand; PAM type: YTN; PAM sequence: TTG
aggacaagtgaggactcaca

SEQ ID NO: 232837 - DNA, 20 bp, Artificial Sequence
  Description of Artificial Sequence: Synthetic oligonucleotide
  Target: LAMA2; (-) strand; PAM type: YTN; PAM sequence: CTT
gaggacaagtgaggactcac

SEQ ID NO: 232838 - DNA, 20 bp, Artificial Sequence
  Description of Artificial Sequence: Synthetic oligonucleotide
  Target: LAMA2; (-) strand; PAM type: YTN; PAM sequence: TTC
ttgaggacaagtgaggactc

SEQ ID NO: 232839 - DNA, 20 bp, Artificial Sequence
  Description of Artificial Sequence: Synthetic oligonucleotide
  Target: LAMA2; (-) strand; PAM type: YTN; PAM sequence: TTT
cttgaggacaagtgaggact

SEQ ID NO: 232840 - DNA, 20 bp, Artificial Sequence
  Description of Artificial Sequence: Synthetic oligonucleotide
  Target: LAMA2; (-) strand; PAM type: YTN; PAM sequence: TTG
tgtttcttgaggacaagtga

SEQ ID NO: 232841 - DNA, 20 bp, Artificial Sequence
  Description of Artificial Sequence: Synthetic oligonucleotide
  Target: LAMA2; (-) strand; PAM type: YTN; PAM sequence: TTT
gtgtttcttgaggacaagtg

SEQ ID NO: 232842 - DNA, 20 bp, Artificial Sequence
  Description of Artificial Sequence: Synthetic oligonucleotide
  Target: LAMA2; (-) strand; PAM type: YTN; PAM sequence: TTG
aaggacatttgtgtttcttg

SEQ ID NO: 232843 - DNA, 20 bp, Artificial Sequence
  Description of Artificial Sequence: Synthetic oligonucleotide
  Target: LAMA2; (-) strand; PAM type: YTN; PAM sequence: TTT
gaaggacatttgtgtttctt

SEQ ID NO: 232844 - DNA, 20 bp, Artificial Sequence
  Description of Artificial Sequence: Synthetic oligonucleotide
  Target: LAMA2; (-) strand; PAM type: YTN; PAM sequence: TTA
gtttgaaggacatttgtgtt

SEQ ID NO: 232845 - DNA, 20 bp, Artificial Sequence
  Description of Artificial Sequence: Synthetic oligonucleotide
  Target: LAMA2; (-) strand; PAM type: YTN; PAM sequence: CTT
agtttgaaggacatttgtgt

SEQ ID NO: 232846 - DNA, 20 bp, Artificial Sequence
  Description of Artificial Sequence: Synthetic oligonucleotide
  Target: LAMA2; (-) strand; PAM type: YTN; PAM sequence: TTA
tccttagtttgaaggacatt

SEQ ID NO: 232847 - DNA, 20 bp, Artificial Sequence
  Description of Artificial Sequence: Synthetic oligonucleotide
  Target: LAMA2; (-) strand; PAM type: YTN; PAM sequence: TTT
atccttagtttgaaggacat

SEQ ID NO: 232848 - DNA, 20 bp, Artificial Sequence
  Description of Artificial Sequence: Synthetic oligonucleotide
  Target: LAMA2; (-) strand; PAM type: YTN; PAM sequence: TTT
tatccttagtttgaaggaca

SEQ ID NO: 232849 - DNA, 20 bp, Artificial Sequence
  Description of Artificial Sequence: Synthetic oligonucleotide
  Target: LAMA2; (-) strand; PAM type: YTN; PAM sequence: CTT
ttatccttagtttgaaggac

SEQ ID NO: 232850 - DNA, 20 bp, Artificial Sequence
  Description of Artificial Sequence: Synthetic oligonucleotide
  Target: LAMA2; (-) strand; PAM type: YTN; PAM sequence: CTG
cttttatccttagtttgaag

SEQ ID NO: 232851 - DNA, 20 bp, Artificial Sequence
  Description of Artificial Sequence: Synthetic oligonucleotide
  Target: LAMA2; (-) strand; PAM type: YTN; PAM sequence: TTC
tgcttttatccttagtttga

SEQ ID NO: 232852 - DNA, 20 bp, Artificial Sequence
  Description of Artificial Sequence: Synthetic oligonucleotide
  Target: LAMA2; (-) strand; PAM type: YTN; PAM sequence: TTT
ctgcttttatccttagtttg

SEQ ID NO: 232853 - DNA, 20 bp, Artificial Sequence
  Description of Artificial Sequence: Synthetic oligonucleotide
  Target: LAMA2; (-) strand; PAM type: YTN; PAM sequence: TTT
tctgcttttatccttagttt

SEQ ID NO: 232854 - DNA, 20 bp, Artificial Sequence
  Description of Artificial Sequence: Synthetic oligonucleotide
  Target: LAMA2; (-) strand; PAM type: YTN; PAM sequence: TTA
ttttctgcttttatccttag

SEQ ID NO: 232855 - DNA, 20 bp, Artificial Sequence
  Description of Artificial Sequence: Synthetic oligonucleotide
  Target: LAMA2; (-) strand; PAM type: YTN; PAM sequence: TTT
attttctgcttttatcctta

SEQ ID NO: 232856 - DNA, 20 bp, Artificial Sequence
  Description of Artificial Sequence: Synthetic oligonucleotide
  Target: LAMA2; (-) strand; PAM type: YTN; PAM sequence: CTT
tattttctgcttttatcctt

SEQ ID NO: 232857 - DNA, 20 bp, Artificial Sequence
  Description of Artificial Sequence: Synthetic oligonucleotide
  Target: LAMA2; (-) strand; PAM type: YTN; PAM sequence: TTC
agtaaaaactttattttctg

SEQ ID NO: 232858 - DNA, 20 bp, Artificial Sequence
  Description of Artificial Sequence: Synthetic oligonucleotide
  Target: LAMA2; (-) strand; PAM type: YTN; PAM sequence: CTG
caaggtcaaagtaacaaaag

SEQ ID NO: 232859 - DNA, 20 bp, Artificial Sequence
  Description of Artificial Sequence: Synthetic oligonucleotide
  Target: LAMA2; (-) strand; PAM type: YTN; PAM sequence: TTA
agatgactgcaaggtcaaag

SEQ ID NO: 232860 - DNA, 20 bp, Artificial Sequence
  Description of Artificial Sequence: Synthetic oligonucleotide
  Target: LAMA2; (-) strand; PAM type: YTN; PAM sequence: CTG
ttaagatgactgcaaggtca

SEQ ID NO: 232861 - DNA, 20 bp, Artificial Sequence
  Description of Artificial Sequence: Synthetic oligonucleotide
  Target: LAMA2; (-) strand; PAM type: YTN; PAM sequence: CTG
caaaaagcaatccagagaga

SEQ ID NO: 232862 - DNA, 20 bp, Artificial Sequence
  Description of Artificial Sequence: Synthetic oligonucleotide
  Target: LAMA2; (-) strand; PAM type: YTN; PAM sequence: TTG
accgagtagtaatactgcaa

SEQ ID NO: 232863 - DNA, 20 bp, Artificial Sequence
  Description of Artificial Sequence: Synthetic oligonucleotide
  Target: LAMA2; (-) strand; PAM type: YTN; PAM sequence: CTT
gaccgagtagtaatactgca

SEQ ID NO: 232864 - DNA, 20 bp, Artificial Sequence
  Description of Artificial Sequence: Synthetic oligonucleotide
  Target: LAMA2; (-) strand; PAM type: YTN; PAM sequence: CTG
aaatatccttgaccgagtag

SEQ ID NO: 232865 - DNA, 20 bp, Artificial Sequence
  Description of Artificial Sequence: Synthetic oligonucleotide
  Target: LAMA2; (-) strand; PAM type: YTN; PAM sequence: CTC
caactgaaatatccttgacc

SEQ ID NO: 232866 - DNA, 20 bp, Artificial Sequence
  Description of Artificial Sequence: Synthetic oligonucleotide
  Target: LAMA2; (-) strand; PAM type: YTN; PAM sequence: CTG
gcatgaccatagcagatgca

SEQ ID NO: 232867 - DNA, 20 bp, Artificial Sequence
  Description of Artificial Sequence: Synthetic oligonucleotide
  Target: LAMA2; (-) strand; PAM type: YTN; PAM sequence: CTG
gatcaagtggacaagccctg

SEQ ID NO: 232868 - DNA, 20 bp, Artificial Sequence
  Description of Artificial Sequence: Synthetic oligonucleotide
  Target: LAMA2; (-) strand; PAM type: YTN; PAM sequence: TTG
tcgctggatcaagtggacaa

SEQ ID NO: 232869 - DNA, 20 bp, Artificial Sequence
  Description of Artificial Sequence: Synthetic oligonucleotide
  Target: LAMA2; (-) strand; PAM type: YTN; PAM sequence: TTT
gtcgctggatcaagtggaca

SEQ ID NO: 232870 - DNA, 20 bp, Artificial Sequence
  Description of Artificial Sequence: Synthetic oligonucleotide
  Target: LAMA2; (-) strand; PAM type: YTN; PAM sequence: CTA
taaatatacatacatttgtc

SEQ ID NO: 232871 - DNA, 20 bp, Artificial Sequence
  Description of Artificial Sequence: Synthetic oligonucleotide
  Target: LAMA2; (-) strand; PAM type: YTN; PAM sequence: CTA
agcatcctataaatatacat

SEQ ID NO: 232872 - DNA, 20 bp, Artificial Sequence
  Description of Artificial Sequence: Synthetic oligonucleotide
  Target: LAMA2; (-) strand; PAM type: YTN; PAM sequence: TTG
cctaagcatcctataaatat

SEQ ID NO: 232873 - DNA, 20 bp, Artificial Sequence
  Description of Artificial Sequence: Synthetic oligonucleotide
  Target: LAMA2; (-) strand; PAM type: YTN; PAM sequence: TTT
gcctaagcatcctataaata

SEQ ID NO: 232874 - DNA, 20 bp, Artificial Sequence
  Description of Artificial Sequence: Synthetic oligonucleotide
  Target: LAMA2; (-) strand; PAM type: YTN; PAM sequence: TTT
tgcctaagcatcctataaat

SEQ ID NO: 232875 - DNA, 20 bp, Artificial Sequence
  Description of Artificial Sequence: Synthetic oligonucleotide
  Target: LAMA2; (-) strand; PAM type: YTN; PAM sequence: TTC
attttgcctaagcatcctat

SEQ ID NO: 232876 - DNA, 20 bp, Artificial Sequence
  Description of Artificial Sequence: Synthetic oligonucleotide
  Target: LAMA2; (-) strand; PAM type: YTN; PAM sequence: CTT
cattttgcctaagcatccta

SEQ ID NO: 232877 - DNA, 20 bp, Artificial Sequence
  Description of Artificial Sequence: Synthetic oligonucleotide
  Target: LAMA2; (-) strand; PAM type: YTN; PAM sequence: CTC
agggcttcattttgcctaag

SEQ ID NO: 232878 - DNA, 20 bp, Artificial Sequence
  Description of Artificial Sequence: Synthetic oligonucleotide
  Target: LAMA2; (-) strand; PAM type: YTN; PAM sequence: TTA
cagctcagggcttcattttg

SEQ ID NO: 232879 - DNA, 20 bp, Artificial Sequence
  Description of Artificial Sequence: Synthetic oligonucleotide
  Target: LAMA2; (-) strand; PAM type: YTN; PAM sequence: TTT
acagctcagggcttcatttt

SEQ ID NO: 232880 - DNA, 20 bp, Artificial Sequence
  Description of Artificial Sequence: Synthetic oligonucleotide
  Target: LAMA2; (-) strand; PAM type: YTN; PAM sequence: TTT
tacagctcagggcttcattt

SEQ ID NO: 232881 - DNA, 20 bp, Artificial Sequence
  Description of Artificial Sequence: Synthetic oligonucleotide
  Target: LAMA2; (-) strand; PAM type: YTN; PAM sequence: CTG
tcatgaaacattttacagct

SEQ ID NO: 232882 - DNA, 20 bp, Artificial Sequence
  Description of Artificial Sequence: Synthetic oligonucleotide
  Target: LAMA2; (-) strand; PAM type: YTN; PAM sequence: CTG
tcagcaaagactgtcatgaa

SEQ ID NO: 232883 - DNA, 20 bp, Artificial Sequence
  Description of Artificial Sequence: Synthetic oligonucleotide
  Target: LAMA2; (-) strand; PAM type: YTN; PAM sequence: CTC
tgtcagcaaagactgtcatg

SEQ ID NO: 232884 - DNA, 20 bp, Artificial Sequence
  Description of Artificial Sequence: Synthetic oligonucleotide
  Target: LAMA2; (-) strand; PAM type: YTN; PAM sequence: TTC
tctgtcagcaaagactgtca

SEQ ID NO: 232885 - DNA, 20 bp, Artificial Sequence
  Description of Artificial Sequence: Synthetic oligonucleotide
  Target: LAMA2; (-) strand; PAM type: YTN; PAM sequence: TTA
cagcgttctctgtcagcaaa

SEQ ID NO: 232886 - DNA, 20 bp, Artificial Sequence
  Description of Artificial Sequence: Synthetic oligonucleotide
  Target: LAMA2; (-) strand; PAM type: YTN; PAM sequence: TTT
acagcgttctctgtcagcaa

SEQ ID NO: 232887 - DNA, 20 bp, Artificial Sequence
  Description of Artificial Sequence: Synthetic oligonucleotide
  Target: LAMA2; (-) strand; PAM type: YTN; PAM sequence: CTC
ccatttacagcgttctctgt

SEQ ID NO: 232888 - DNA, 20 bp, Artificial Sequence
  Description of Artificial Sequence: Synthetic oligonucleotide
  Target: LAMA2; (-) strand; PAM type: YTN; PAM sequence: CTG
actcccatttacagcgttct

SEQ ID NO: 232889 - DNA, 20 bp, Artificial Sequence
  Description of Artificial Sequence: Synthetic oligonucleotide
  Target: LAMA2; (-) strand; PAM type: YTN; PAM sequence: CTA
agtggggacctgactcccat

SEQ ID NO: 232890 - DNA, 20 bp, Artificial Sequence
  Description of Artificial Sequence: Synthetic oligonucleotide
  Target: LAMA2; (-) strand; PAM type: YTN; PAM sequence: CTG
tctaagtggggacctgactc

SEQ ID NO: 232891 - DNA, 20 bp, Artificial Sequence
  Description of Artificial Sequence: Synthetic oligonucleotide
  Target: LAMA2; (-) strand; PAM type: YTN; PAM sequence: TTA
cactgtctaagtggggacct

SEQ ID NO: 232892 - DNA, 20 bp, Artificial Sequence
  Description of Artificial Sequence: Synthetic oligonucleotide
  Target: LAMA2; (-) strand; PAM type: YTN; PAM sequence: CTG
ttacactgtctaagtgggga

SEQ ID NO: 232893 - DNA, 20 bp, Artificial Sequence
  Description of Artificial Sequence: Synthetic oligonucleotide
  Target: LAMA2; (-) strand; PAM type: YTN; PAM sequence: TTC
tgttacactgtctaagtggg

SEQ ID NO: 232894 - DNA, 20 bp, Artificial Sequence
  Description of Artificial Sequence: Synthetic oligonucleotide
  Target: LAMA2; (-) strand; PAM type: YTN; PAM sequence: TTT
ctgttacactgtctaagtgg

SEQ ID NO: 232895 - DNA, 20 bp, Artificial Sequence
  Description of Artificial Sequence: Synthetic oligonucleotide
  Target: LAMA2; (-) strand; PAM type: YTN; PAM sequence: CTG
gcatggatttctgttacact

SEQ ID NO: 232896 - DNA, 20 bp, Artificial Sequence
  Description of Artificial Sequence: Synthetic oligonucleotide
  Target: LAMA2; (-) strand; PAM type: YTN; PAM sequence: TTC
accctggcatggatttctgt

SEQ ID NO: 232897 - DNA, 20 bp, Artificial Sequence
  Description of Artificial Sequence: Synthetic oligonucleotide
  Target: LAMA2; (-) strand; PAM type: YTN; PAM sequence: TTT
caccctggcatggatttctg

SEQ ID NO: 232898 - DNA, 20 bp, Artificial Sequence
  Description of Artificial Sequence: Synthetic oligonucleotide
  Target: LAMA2; (-) strand; PAM type: YTN; PAM sequence: TTA
tttcaccctggcatggattt

SEQ ID NO: 232899 - DNA, 20 bp, Artificial Sequence
  Description of Artificial Sequence: Synthetic oligonucleotide
  Target: LAMA2; (-) strand; PAM type: YTN; PAM sequence: CTT
atttcaccctggcatggatt

SEQ ID NO: 232900 - DNA, 20 bp, Artificial Sequence
  Description of Artificial Sequence: Synthetic oligonucleotide
  Target: LAMA2; (-) strand; PAM type: YTN; PAM sequence: CTC
ttatttcaccctggcatgga

SEQ ID NO: 232901 - DNA, 20 bp, Artificial Sequence
  Description of Artificial Sequence: Synthetic oligonucleotide
  Target: LAMA2; (-) strand; PAM type: YTN; PAM sequence: CTG
ccagctcttatttcaccctg

SEQ ID NO: 232902 - DNA, 20 bp, Artificial Sequence
  Description of Artificial Sequence: Synthetic oligonucleotide
  Target: LAMA2; (-) strand; PAM type: YTN; PAM sequence: CTA
actgccagctcttatttcac

SEQ ID NO: 232903 - DNA, 20 bp, Artificial Sequence
  Description of Artificial Sequence: Synthetic oligonucleotide
  Target: LAMA2; (-) strand; PAM type: YTN; PAM sequence: CTA
tcatcctaactgccagctct

SEQ ID NO: 232904 - DNA, 20 bp, Artificial Sequence
  Description of Artificial Sequence: Synthetic oligonucleotide
  Target: LAMA2; (-) strand; PAM type: YTN; PAM sequence: TTC
aaagtctatcatcctaactg

SEQ ID NO: 232905 - DNA, 20 bp, Artificial Sequence
  Description of Artificial Sequence: Synthetic oligonucleotide
  Target: LAMA2; (-) strand; PAM type: YTN; PAM sequence: TTT
caaagtctatcatcctaact

SEQ ID NO: 232906 - DNA, 20 bp, Artificial Sequence
  Description of Artificial Sequence: Synthetic oligonucleotide
  Target: LAMA2; (-) strand; PAM type: YTN; PAM sequence: CTG
atttcaaagtctatcatcct

SEQ ID NO: 232907 - DNA, 20 bp, Artificial Sequence
  Description of Artificial Sequence: Synthetic oligonucleotide
  Target: LAMA2; (-) strand; PAM type: YTN; PAM sequence: CTG
tgatggctgatttcaaagtc

SEQ ID NO: 232908 - DNA, 20 bp, Artificial Sequence
  Description of Artificial Sequence: Synthetic oligonucleotide
  Target: LAMA2; (-) strand; PAM type: YTN; PAM sequence: TTA
tactgtgatggctgatttca

SEQ ID NO: 232909 - DNA, 20 bp, Artificial Sequence
  Description of Artificial Sequence: Synthetic oligonucleotide
  Target: LAMA2; (-) strand; PAM type: YTN; PAM sequence: CTT
atactgtgatggctgatttc

SEQ ID NO: 232910 - DNA, 20 bp, Artificial Sequence
  Description of Artificial Sequence: Synthetic oligonucleotide
  Target: LAMA2; (-) strand; PAM type: YTN; PAM sequence: TTC
ttatactgtgatggctgatt

SEQ ID NO: 232911 - DNA, 20 bp, Artificial Sequence
  Description of Artificial Sequence: Synthetic oligonucleotide
  Target: LAMA2; (-) strand; PAM type: YTN; PAM sequence: TTT
cttatactgtgatggctgat

SEQ ID NO: 232912 - DNA, 20 bp, Artificial Sequence
  Description of Artificial Sequence: Synthetic oligonucleotide
  Target: LAMA2; (-) strand; PAM type: YTN; PAM sequence: TTT
tcttatactgtgatggctga

SEQ ID NO: 232913 - DNA, 20 bp, Artificial Sequence
  Description of Artificial Sequence: Synthetic oligonucleotide
  Target: LAMA2; (-) strand; PAM type: YTN; PAM sequence: CTG
ttttcttatactgtgatggc

SEQ ID NO: 232914 - DNA, 20 bp, Artificial Sequence
  Description of Artificial Sequence: Synthetic oligonucleotide
  Target: LAMA2; (-) strand; PAM type: YTN; PAM sequence: CTA
atctgttttcttatactgtg

SEQ ID NO: 232915 - DNA, 20 bp, Artificial Sequence
  Description of Artificial Sequence: Synthetic oligonucleotide
  Target: LAMA2; (-) strand; PAM type: YTN; PAM sequence: TTG
aaaaaaaaaaaaaaaaagga

SEQ ID NO: 232916 - DNA, 20 bp, Artificial Sequence
  Description of Artificial Sequence: Synthetic oligonucleotide
  Target: LAMA2; (-) strand; PAM type: YTN; PAM sequence: TTT
gaaaaaaaaaaaaaaaaagg

SEQ ID NO: 232917 - DNA, 20 bp, Artificial Sequence
  Description of Artificial Sequence: Synthetic oligonucleotide
  Target: LAMA2; (-) strand; PAM type: YTN; PAM sequence: TTT
tgaaaaaaaaaaaaaaaaag

SEQ ID NO: 232918 - DNA, 20 bp, Artificial Sequence
  Description of Artificial Sequence: Synthetic oligonucleotide
  Target: LAMA2; (-) strand; PAM type: YTN; PAM sequence: TTT
ttgaaaaaaaaaaaaaaaaa

SEQ ID NO: 232919 - DNA, 20 bp, Artificial Sequence
  Description of Artificial Sequence: Synthetic oligonucleotide
  Target: LAMA2; (-) strand; PAM type: YTN; PAM sequence: CTT
tttgaaaaaaaaaaaaaaaa

SEQ ID NO: 232920 - DNA, 20 bp, Artificial Sequence
  Description of Artificial Sequence: Synthetic oligonucleotide
  Target: LAMA2; (-) strand; PAM type: YTN; PAM sequence: TTG
gagcctttttgaaaaaaaaa

SEQ ID NO: 232921 - DNA, 20 bp, Artificial Sequence
  Description of Artificial Sequence: Synthetic oligonucleotide
  Target: LAMA2; (-) strand; PAM type: YTN; PAM sequence: TTT
ggagcctttttgaaaaaaaa

SEQ ID NO: 232922 - DNA, 20 bp, Artificial Sequence
  Description of Artificial Sequence: Synthetic oligonucleotide
  Target: LAMA2; (-) strand; PAM type: YTN; PAM sequence: TTC
aaaatagaccagtttggagc

SEQ ID NO: 232923 - DNA, 20 bp, Artificial Sequence
  Description of Artificial Sequence: Synthetic oligonucleotide
  Target: LAMA2; (-) strand; PAM type: YTN; PAM sequence: TTT
caaaatagaccagtttggag

SEQ ID NO: 232924 - DNA, 20 bp, Artificial Sequence
  Description of Artificial Sequence: Synthetic oligonucleotide
  Target: LAMA2; (-) strand; PAM type: YTN; PAM sequence: CTA
gagagatttcaaaatagacc

SEQ ID NO: 232925 - DNA, 20 bp, Artificial Sequence
  Description of Artificial Sequence: Synthetic oligonucleotide
  Target: LAMA2; (-) strand; PAM type: YTN; PAM sequence: CTG
tcatagctagagagatttca

SEQ ID NO: 232926 - DNA, 20 bp, Artificial Sequence
  Description of Artificial Sequence: Synthetic oligonucleotide
  Target: LAMA2; (-) strand; PAM type: YTN; PAM sequence: CTA
tatcatgaggcaggctgtca

SEQ ID NO: 232927 - DNA, 20 bp, Artificial Sequence
  Description of Artificial Sequence: Synthetic oligonucleotide
  Target: LAMA2; (-) strand; PAM type: YTN; PAM sequence: CTA
aagctatatcatgaggcagg

SEQ ID NO: 232928 - DNA, 20 bp, Artificial Sequence
  Description of Artificial Sequence: Synthetic oligonucleotide
  Target: LAMA2; (-) strand; PAM type: YTN; PAM sequence: CTC
taaagctatatcatgaggca

SEQ ID NO: 232929 - DNA, 20 bp, Artificial Sequence
  Description of Artificial Sequence: Synthetic oligonucleotide
  Target: LAMA2; (-) strand; PAM type: YTN; PAM sequence: TTC
tctaaagctatatcatgagg

SEQ ID NO: 232930 - DNA, 20 bp, Artificial Sequence
  Description of Artificial Sequence: Synthetic oligonucleotide
  Target: LAMA2; (-) strand; PAM type: YTN; PAM sequence: TTG
atggcaggcgttctctaaag

SEQ ID NO: 232931 - DNA, 20 bp, Artificial Sequence
  Description of Artificial Sequence: Synthetic oligonucleotide
  Target: LAMA2; (-) strand; PAM type: YTN; PAM sequence: TTG
attgatggcaggcgttctct

SEQ ID NO: 232932 - DNA, 20 bp, Artificial Sequence
  Description of Artificial Sequence: Synthetic oligonucleotide
  Target: LAMA2; (-) strand; PAM type: YTN; PAM sequence: TTA
aaagaaatggtcaggttgat

SEQ ID NO: 232933 - DNA, 20 bp, Artificial Sequence
  Description of Artificial Sequence: Synthetic oligonucleotide
  Target: LAMA2; (-) strand; PAM type: YTN; PAM sequence: TTT
aaaagaaatggtcaggttga

SEQ ID NO: 232934 - DNA, 20 bp, Artificial Sequence
  Description of Artificial Sequence: Synthetic oligonucleotide
  Target: LAMA2; (-) strand; PAM type: YTN; PAM sequence: CTT
taaaagaaatggtcaggttg

SEQ ID NO: 232935 - DNA, 20 bp, Artificial Sequence
  Description of Artificial Sequence: Synthetic oligonucleotide
  Target: LAMA2; (-) strand; PAM type: YTN; PAM sequence: TTA
gaaactttaaaagaaatggt

SEQ ID NO: 232936 - DNA, 20 bp, Artificial Sequence
  Description of Artificial Sequence: Synthetic oligonucleotide
  Target: LAMA2; (-) strand; PAM type: YTN; PAM sequence: TTG
attagaaactttaaaagaaa

SEQ ID NO: 232937 - DNA, 20 bp, Artificial Sequence
  Description of Artificial Sequence: Synthetic oligonucleotide
  Target: LAMA2; (-) strand; PAM type: YTN; PAM sequence: TTT
gattagaaactttaaaagaa

SEQ ID NO: 232938 - DNA, 20 bp, Artificial Sequence
  Description of Artificial Sequence: Synthetic oligonucleotide
  Target: LAMA2; (-) strand; PAM type: YTN; PAM sequence: TTT
tgattagaaactttaaaaga

SEQ ID NO: 232939 - DNA, 20 bp, Artificial Sequence
  Description of Artificial Sequence: Synthetic oligonucleotide
  Target: LAMA2; (-) strand; PAM type: YTN; PAM sequence: TTT
ttgattagaaactttaaaag

SEQ ID NO: 232940 - DNA, 20 bp, Artificial Sequence
  Description of Artificial Sequence: Synthetic oligonucleotide
  Target: LAMA2; (-) strand; PAM type: YTN; PAM sequence: TTT
tttgattagaaactttaaaa

SEQ ID NO: 232941 - DNA, 20 bp, Artificial Sequence
  Description of Artificial Sequence: Synthetic oligonucleotide
  Target: LAMA2; (-) strand; PAM type: YTN; PAM sequence: TTA
attttttgattagaaacttt

SEQ ID NO: 232942 - DNA, 20 bp, Artificial Sequence
  Description of Artificial Sequence: Synthetic oligonucleotide
  Target: LAMA2; (-) strand; PAM type: YTN; PAM sequence: TTG
cattaattttttgattagaa

SEQ ID NO: 232943 - DNA, 20 bp, Artificial Sequence
  Description of Artificial Sequence: Synthetic oligonucleotide
  Target: LAMA2; (-) strand; PAM type: YTN; PAM sequence: TTT
gcattaattttttgattaga

SEQ ID NO: 232944 - DNA, 20 bp, Artificial Sequence
  Description of Artificial Sequence: Synthetic oligonucleotide
  Target: LAMA2; (-) strand; PAM type: YTN; PAM sequence: CTC
atttgcattaattttttgat

SEQ ID NO: 232945 - DNA, 20 bp, Artificial Sequence
  Description of Artificial Sequence: Synthetic oligonucleotide
  Target: LAMA2; (-) strand; PAM type: YTN; PAM sequence: TTA
ctcatttgcattaatttttt

SEQ ID NO: 232946 - DNA, 20 bp, Artificial Sequence
  Description of Artificial Sequence: Synthetic oligonucleotide
  Target: LAMA2; (-) strand; PAM type: YTN; PAM sequence: TTT
actcatttgcattaattttt

SEQ ID NO: 232947 - DNA, 20 bp, Artificial Sequence
  Description of Artificial Sequence: Synthetic oligonucleotide
  Target: LAMA2; (-) strand; PAM type: YTN; PAM sequence: TTT
tactcatttgcattaatttt

SEQ ID NO: 232948 - DNA, 20 bp, Artificial Sequence
  Description of Artificial Sequence: Synthetic oligonucleotide
  Target: LAMA2; (-) strand; PAM type: YTN; PAM sequence: TTT
ttactcatttgcattaattt

SEQ ID NO: 232949 - DNA, 20 bp, Artificial Sequence
  Description of Artificial Sequence: Synthetic oligonucleotide
  Target: LAMA2; (-) strand; PAM type: YTN; PAM sequence: TTT
tttactcatttgcattaatt

SEQ ID NO: 232950 - DNA, 20 bp, Artificial Sequence
  Description of Artificial Sequence: Synthetic oligonucleotide
  Target: LAMA2; (-) strand; PAM type: YTN; PAM sequence: TTT
ttttactcatttgcattaat

SEQ ID NO: 232951 - DNA, 20 bp, Artificial Sequence
  Description of Artificial Sequence: Synthetic oligonucleotide
  Target: LAMA2; (-) strand; PAM type: YTN; PAM sequence: CTG
cacatttttttactcatttg

SEQ ID NO: 232952 - DNA, 20 bp, Artificial Sequence
  Description of Artificial Sequence: Synthetic oligonucleotide
  Target: LAMA2; (-) strand; PAM type: YTN; PAM sequence: TTC
cctgcacatttttttactca

SEQ ID NO: 232953 - DNA, 20 bp, Artificial Sequence
  Description of Artificial Sequence: Synthetic oligonucleotide
  Target: LAMA2; (-) strand; PAM type: YTN; PAM sequence: CTT
ccctgcacatttttttactc

SEQ ID NO: 232954 - DNA, 20 bp, Artificial Sequence
  Description of Artificial Sequence: Synthetic oligonucleotide
  Target: LAMA2; (-) strand; PAM type: YTN; PAM sequence: TTA
cttccctgcacattttttta

SEQ ID NO: 232955 - DNA, 20 bp, Artificial Sequence
  Description of Artificial Sequence: Synthetic oligonucleotide
  Target: LAMA2; (-) strand; PAM type: YTN; PAM sequence: TTT
acttccctgcacattttttt

SEQ ID NO: 232956 - DNA, 20 bp, Artificial Sequence
  Description of Artificial Sequence: Synthetic oligonucleotide
  Target: LAMA2; (-) strand; PAM type: YTN; PAM sequence: TTA
tatatttacttccctgcaca

SEQ ID NO: 232957 - DNA, 20 bp, Artificial Sequence
  Description of Artificial Sequence: Synthetic oligonucleotide
  Target: LAMA2; (-) strand; PAM type: YTN; PAM sequence: CTT
atatatttacttccctgcac

SEQ ID NO: 232958 - DNA, 20 bp, Artificial Sequence
  Description of Artificial Sequence: Synthetic oligonucleotide
  Target: LAMA2; (-) strand; PAM type: YTN; PAM sequence: TTG
tcacttatatatttacttcc

SEQ ID NO: 232959 - DNA, 20 bp, Artificial Sequence
  Description of Artificial Sequence: Synthetic oligonucleotide
  Target: LAMA2; (-) strand; PAM type: YTN; PAM sequence: TTC
cattgtcacttatatattta

SEQ ID NO: 232960 - DNA, 20 bp, Artificial Sequence
  Description of Artificial Sequence: Synthetic oligonucleotide
  Target: LAMA2; (-) strand; PAM type: YTN; PAM sequence: CTG
ttccattgtcacttatatat

SEQ ID NO: 232961 - DNA, 20 bp, Artificial Sequence
  Description of Artificial Sequence: Synthetic oligonucleotide
  Target: LAMA2; (-) strand; PAM type: YTN; PAM sequence: CTC
ctgttccattgtcacttata

SEQ ID NO: 232962 - DNA, 20 bp, Artificial Sequence
  Description of Artificial Sequence: Synthetic oligonucleotide
  Target: LAMA2; (-) strand; PAM type: YTN; PAM sequence: TTA
tcctcctgttccattgtcac

SEQ ID NO: 232963 - DNA, 20 bp, Artificial Sequence
  Description of Artificial Sequence: Synthetic oligonucleotide
  Target: LAMA2; (-) strand; PAM type: YTN; PAM sequence: TTT
atcctcctgttccattgtca

SEQ ID NO: 232964 - DNA, 20 bp, Artificial Sequence
  Description of Artificial Sequence: Synthetic oligonucleotide
  Target: LAMA2; (-) strand; PAM type: YTN; PAM sequence: TTT
tatcctcctgttccattgtc

SEQ ID NO: 232965 - DNA, 20 bp, Artificial Sequence
  Description of Artificial Sequence: Synthetic oligonucleotide
  Target: LAMA2; (-) strand; PAM type: YTN; PAM sequence: CTA
ttttatcctcctgttccatt

SEQ ID NO: 232966 - DNA, 20 bp, Artificial Sequence
  Description of Artificial Sequence: Synthetic oligonucleotide
  Target: LAMA2; (-) strand; PAM type: YTN; PAM sequence: CTG
ccctattttatcctcctgtt

SEQ ID NO: 232967 - DNA, 20 bp, Artificial Sequence
  Description of Artificial Sequence: Synthetic oligonucleotide
  Target: LAMA2; (-) strand; PAM type: YTN; PAM sequence: TTG
cccctgccctattttatcct

SEQ ID NO: 232968 - DNA, 20 bp, Artificial Sequence
  Description of Artificial Sequence: Synthetic oligonucleotide
  Target: LAMA2; (-) strand; PAM type: YTN; PAM sequence: TTA
ttgcccctgccctattttat

SEQ ID NO: 232969 - DNA, 20 bp, Artificial Sequence
  Description of Artificial Sequence: Synthetic oligonucleotide
  Target: LAMA2; (-) strand; PAM type: YTN; PAM sequence: CTT
attgcccctgccctatttta

SEQ ID NO: 232970 - DNA, 20 bp, Artificial Sequence
  Description of Artificial Sequence: Synthetic oligonucleotide
  Target: LAMA2; (-) strand; PAM type: YTN; PAM sequence: CTC
cacccccttattgcccctgc

SEQ ID NO: 232971 - DNA, 20 bp, Artificial Sequence
  Description of Artificial Sequence: Synthetic oligonucleotide
  Target: LAMA2; (-) strand; PAM type: YTN; PAM sequence: CTC
caccccctccacccccttat

SEQ ID NO: 232972 - DNA, 20 bp, Artificial Sequence
  Description of Artificial Sequence: Synthetic oligonucleotide
  Target: LAMA2; (-) strand; PAM type: YTN; PAM sequence: CTC
acccactccaccccctccac

SEQ ID NO: 232973 - DNA, 20 bp, Artificial Sequence
  Description of Artificial Sequence: Synthetic oligonucleotide
  Target: LAMA2; (-) strand; PAM type: YTN; PAM sequence: CTC
tcacccactccaccccctcc

SEQ ID NO: 232974 - DNA, 20 bp, Artificial Sequence
  Description of Artificial Sequence: Synthetic oligonucleotide
  Target: LAMA2; (-) strand; PAM type: YTN; PAM sequence: CTC
tctcacccactccaccccct

SEQ ID NO: 232975 - DNA, 20 bp, Artificial Sequence
  Description of Artificial Sequence: Synthetic oligonucleotide
  Target: LAMA2; (-) strand; PAM type: YTN; PAM sequence: TTG
actctctcacccactccacc

SEQ ID NO: 232976 - DNA, 20 bp, Artificial Sequence
  Description of Artificial Sequence: Synthetic oligonucleotide
  Target: LAMA2; (-) strand; PAM type: YTN; PAM sequence: CTT
gactctctcacccactccac

SEQ ID NO: 232977 - DNA, 20 bp, Artificial Sequence
  Description of Artificial Sequence: Synthetic oligonucleotide
  Target: LAMA2; (-) strand; PAM type: YTN; PAM sequence: CTC
ttgactctctcacccactcc

SEQ ID NO: 232978 - DNA, 20 bp, Artificial Sequence
  Description of Artificial Sequence: Synthetic oligonucleotide
  Target: LAMA2; (-) strand; PAM type: YTN; PAM sequence: CTC
tcttgactctctcacccact

SEQ ID NO: 232979 - DNA, 20 bp, Artificial Sequence
  Description of Artificial Sequence: Synthetic oligonucleotide
  Target: LAMA2; (-) strand; PAM type: YTN; PAM sequence: CTA
tcagtactctcttgactctc

SEQ ID NO: 232980 - DNA, 20 bp, Artificial Sequence
  Description of Artificial Sequence: Synthetic oligonucleotide
  Target: LAMA2; (-) strand; PAM type: YTN; PAM sequence: TTG
ccactatcagtactctcttg

SEQ ID NO: 232981 - DNA, 20 bp, Artificial Sequence
  Description of Artificial Sequence: Synthetic oligonucleotide
  Target: LAMA2; (-) strand; PAM type: YTN; PAM sequence: CTT
gccactatcagtactctctt

SEQ ID NO: 232982 - DNA, 20 bp, Artificial Sequence
  Description of Artificial Sequence: Synthetic oligonucleotide
  Target: LAMA2; (-) strand; PAM type: YTN; PAM sequence: TTC
cggcttgccactatcagtac

SEQ ID NO: 232983 - DNA, 20 bp, Artificial Sequence
  Description of Artificial Sequence: Synthetic oligonucleotide
  Target: LAMA2; (-) strand; PAM type: YTN; PAM sequence: TTT
ccggcttgccactatcagta

SEQ ID NO: 232984 - DNA, 20 bp, Artificial Sequence
  Description of Artificial Sequence: Synthetic oligonucleotide
  Target: LAMA2; (-) strand; PAM type: YTN; PAM sequence: TTT
tccggcttgccactatcagt

SEQ ID NO: 232985 - DNA, 20 bp, Artificial Sequence
  Description of Artificial Sequence: Synthetic oligonucleotide
  Target: LAMA2; (-) strand; PAM type: YTN; PAM sequence: CTG
gcattttccggcttgccact

SEQ ID NO: 232986 - DNA, 20 bp, Artificial Sequence
  Description of Artificial Sequence: Synthetic oligonucleotide
  Target: LAMA2; (-) strand; PAM type: YTN; PAM sequence: TTC
tggcattttccggcttgcca

SEQ ID NO: 232987 - DNA, 20 bp, Artificial Sequence
  Description of Artificial Sequence: Synthetic oligonucleotide
  Target: LAMA2; (-) strand; PAM type: YTN; PAM sequence: CTA
tcaaaaagcattctggcatt

SEQ ID NO: 232988 - DNA, 20 bp, Artificial Sequence
  Description of Artificial Sequence: Synthetic oligonucleotide
  Target: LAMA2; (-) strand; PAM type: YTN; PAM sequence: TTC
tatcaaaaagcattctggca

SEQ ID NO: 232989 - DNA, 20 bp, Artificial Sequence
  Description of Artificial Sequence: Synthetic oligonucleotide
  Target: LAMA2; (-) strand; PAM type: YTN; PAM sequence: TTA
atgaaaaaattctatcaaaa

SEQ ID NO: 232990 - DNA, 20 bp, Artificial Sequence
  Description of Artificial Sequence: Synthetic oligonucleotide
  Target: LAMA2; (-) strand; PAM type: YTN; PAM sequence: TTG
tcattaatgaaaaaattcta

SEQ ID NO: 232991 - DNA, 20 bp, Artificial Sequence
  Description of Artificial Sequence: Synthetic oligonucleotide
  Target: LAMA2; (-) strand; PAM type: YTN; PAM sequence: TTC
attgtcattaatgaaaaaat

SEQ ID NO: 232992 - DNA, 20 bp, Artificial Sequence
  Description of Artificial Sequence: Synthetic oligonucleotide
  Target: LAMA2; (-) strand; PAM type: YTN; PAM sequence: TTA
attcattgtcattaatgaaa

SEQ ID NO: 232993 - DNA, 20 bp, Artificial Sequence
  Description of Artificial Sequence: Synthetic oligonucleotide
  Target: LAMA2; (-) strand; PAM type: YTN; PAM sequence: CTT
aattcattgtcattaatgaa

SEQ ID NO: 232994 - DNA, 20 bp, Artificial Sequence
  Description of Artificial Sequence: Synthetic oligonucleotide
  Target: LAMA2; (-) strand; PAM type: YTN; PAM sequence: TTC
acttaattcattgtcattaa

SEQ ID NO: 232995 - DNA, 20 bp, Artificial Sequence
  Description of Artificial Sequence: Synthetic oligonucleotide
  Target: LAMA2; (-) strand; PAM type: YTN; PAM sequence: TTA
tgttcacttaattcattgtc

SEQ ID NO: 232996 - DNA, 20 bp, Artificial Sequence
  Description of Artificial Sequence: Synthetic oligonucleotide
  Target: LAMA2; (-) strand; PAM type: YTN; PAM sequence: TTA
ggttatgttcacttaattca

SEQ ID NO: 232997 - DNA, 20 bp, Artificial Sequence
  Description of Artificial Sequence: Synthetic oligonucleotide
  Target: LAMA2; (-) strand; PAM type: YTN; PAM sequence: TTT
aggttatgttcacttaattc

SEQ ID NO: 232998 - DNA, 20 bp, Artificial Sequence
  Description of Artificial Sequence: Synthetic oligonucleotide
  Target: LAMA2; (-) strand; PAM type: YTN; PAM sequence: CTT
taggttatgttcacttaatt

SEQ ID NO: 232999 - DNA, 20 bp, Artificial Sequence
  Description of Artificial Sequence: Synthetic oligonucleotide
  Target: LAMA2; (-) strand; PAM type: YTN; PAM sequence: CTC
ctttaggttatgttcactta

SEQ ID NO: 233000 - DNA, 20 bp, Artificial Sequence
  Description of Artificial Sequence: Synthetic oligonucleotide
  Target: LAMA2; (-) strand; PAM type: YTN; PAM sequence: TTC
tcctttaggttatgttcact

SEQ ID NO: 233001 - DNA, 20 bp, Artificial Sequence
  Description of Artificial Sequence: Synthetic oligonucleotide
  Target: LAMA2; (-) strand; PAM type: YTN; PAM sequence: CTT
ctcctttaggttatgttcac

SEQ ID NO: 233002 - DNA, 20 bp, Artificial Sequence
  Description of Artificial Sequence: Synthetic oligonucleotide
  Target: LAMA2; (-) strand; PAM type: YTN; PAM sequence: TTC
atcttctcctttaggttatg

SEQ ID NO: 233003 - DNA, 20 bp, Artificial Sequence
  Description of Artificial Sequence: Synthetic oligonucleotide
  Target: LAMA2; (-) strand; PAM type: YTN; PAM sequence: CTC
attcatcttctcctttaggt

SEQ ID NO: 233004 - DNA, 20 bp, Artificial Sequence
  Description of Artificial Sequence: Synthetic oligonucleotide
  Target: LAMA2; (-) strand; PAM type: YTN; PAM sequence: CTA
tgacaggaaaaatagatgct

SEQ ID NO: 233005 - DNA, 20 bp, Artificial Sequence
  Description of Artificial Sequence: Synthetic oligonucleotide
  Target: LAMA2; (-) strand; PAM type: YTN; PAM sequence: TTG
tctatgacaggaaaaataga

SEQ ID NO: 233006 - DNA, 20 bp, Artificial Sequence
  Description of Artificial Sequence: Synthetic oligonucleotide
  Target: LAMA2; (-) strand; PAM type: YTN; PAM sequence: TTT
gtctatgacaggaaaaatag

SEQ ID NO: 233007 - DNA, 20 bp, Artificial Sequence
  Description of Artificial Sequence: Synthetic oligonucleotide
  Target: LAMA2; (-) strand; PAM type: YTN; PAM sequence: TTC
accagtttgtctatgacagg

SEQ ID NO: 233008 - DNA, 20 bp, Artificial Sequence
  Description of Artificial Sequence: Synthetic oligonucleotide
  Target: LAMA2; (-) strand; PAM type: YTN; PAM sequence: TTT
caccagtttgtctatgacag

SEQ ID NO: 233009 - DNA, 20 bp, Artificial Sequence
  Description of Artificial Sequence: Synthetic oligonucleotide
  Target: LAMA2; (-) strand; PAM type: YTN; PAM sequence: TTG
aatttcaccagtttgtctat

SEQ ID NO: 233010 - DNA, 20 bp, Artificial Sequence
  Description of Artificial Sequence: Synthetic oligonucleotide
  Target: LAMA2; (-) strand; PAM type: YTN; PAM sequence: TTT
gaatttcaccagtttgtcta

SEQ ID NO: 233011 - DNA, 20 bp, Artificial Sequence
  Description of Artificial Sequence: Synthetic oligonucleotide
  Target: LAMA2; (-) strand; PAM type: YTN; PAM sequence: CTA
tacaggagatgagtttgaat

SEQ ID NO: 233012 - DNA, 20 bp, Artificial Sequence
  Description of Artificial Sequence: Synthetic oligonucleotide
  Target: LAMA2; (-) strand; PAM type: YTN; PAM sequence: TTC
catatactatacaggagatg

SEQ ID NO: 233013 - DNA, 20 bp, Artificial Sequence
  Description of Artificial Sequence: Synthetic oligonucleotide
  Target: LAMA2; (-) strand; PAM type: YTN; PAM sequence: TTT
ccatatactatacaggagat

SEQ ID NO: 233014 - DNA, 20 bp, Artificial Sequence
  Description of Artificial Sequence: Synthetic oligonucleotide
  Target: LAMA2; (-) strand; PAM type: YTN; PAM sequence: TTT
tccatatactatacaggaga

SEQ ID NO: 233015 - DNA, 20 bp, Artificial Sequence
  Description of Artificial Sequence: Synthetic oligonucleotide
  Target: LAMA2; (-) strand; PAM type: YTN; PAM sequence: TTT
ttccatatactatacaggag

SEQ ID NO: 233016 - DNA, 20 bp, Artificial Sequence
  Description of Artificial Sequence: Synthetic oligonucleotide
  Target: LAMA2; (-) strand; PAM type: YTN; PAM sequence: TTC
aatgtatttttccatatact

SEQ ID NO: 233017 - DNA, 20 bp, Artificial Sequence
  Description of Artificial Sequence: Synthetic oligonucleotide
  Target: LAMA2; (-) strand; PAM type: YTN; PAM sequence: CTA
ttcaatgtatttttccatat

SEQ ID NO: 233018 - DNA, 20 bp, Artificial Sequence
  Description of Artificial Sequence: Synthetic oligonucleotide
  Target: LAMA2; (-) strand; PAM type: YTN; PAM sequence: TTA
ctattcaatgtatttttcca

SEQ ID NO: 233019 - DNA, 20 bp, Artificial Sequence
  Description of Artificial Sequence: Synthetic oligonucleotide
  Target: LAMA2; (-) strand; PAM type: YTN; PAM sequence: CTT
actattcaatgtatttttcc

SEQ ID NO: 233020 - DNA, 20 bp, Artificial Sequence
  Description of Artificial Sequence: Synthetic oligonucleotide
  Target: LAMA2; (-) strand; PAM type: YTN; PAM sequence: CTG
atcttactattcaatgtatt

SEQ ID NO: 233021 - DNA, 20 bp, Artificial Sequence
  Description of Artificial Sequence: Synthetic oligonucleotide
  Target: LAMA2; (-) strand; PAM type: YTN; PAM sequence: TTC
actgatcttactattcaatg

SEQ ID NO: 233022 - DNA, 20 bp, Artificial Sequence
  Description of Artificial Sequence: Synthetic oligonucleotide
  Target: LAMA2; (-) strand; PAM type: YTN; PAM sequence: TTA
cattcactgatcttactatt

SEQ ID NO: 233023 - DNA, 20 bp, Artificial Sequence
  Description of Artificial Sequence: Synthetic oligonucleotide
  Target: LAMA2; (-) strand; PAM type: YTN; PAM sequence: TTT
acattcactgatcttactat

SEQ ID NO: 233024 - DNA, 20 bp, Artificial Sequence
  Description of Artificial Sequence: Synthetic oligonucleotide
  Target: LAMA2; (-) strand; PAM type: YTN; PAM sequence: CTG
tggcccgatttacattcact

SEQ ID NO: 233025 - DNA, 20 bp, Artificial Sequence
  Description of Artificial Sequence: Synthetic oligonucleotide
  Target: LAMA2; (-) strand; PAM type: YTN; PAM sequence: TTG
agaaaaaaaatctgtggccc

SEQ ID NO: 233026 - DNA, 20 bp, Artificial Sequence
  Description of Artificial Sequence: Synthetic oligonucleotide
  Target: LAMA2; (-) strand; PAM type: YTN; PAM sequence: TTT
gagaaaaaaaatctgtggcc

SEQ ID NO: 233027 - DNA, 20 bp, Artificial Sequence
  Description of Artificial Sequence: Synthetic oligonucleotide
  Target: LAMA2; (-) strand; PAM type: YTN; PAM sequence: TTA
caatatttgagaaaaaaaat

SEQ ID NO: 233028 - DNA, 20 bp, Artificial Sequence
  Description of Artificial Sequence: Synthetic oligonucleotide
  Target: LAMA2; (-) strand; PAM type: YTN; PAM sequence: TTG
cattacaatatttgagaaaa

SEQ ID NO: 233029 - DNA, 20 bp, Artificial Sequence
  Description of Artificial Sequence: Synthetic oligonucleotide
  Target: LAMA2; (-) strand; PAM type: YTN; PAM sequence: TTT
gcattacaatatttgagaaa

SEQ ID NO: 233030 - DNA, 20 bp, Artificial Sequence
  Description of Artificial Sequence: Synthetic oligonucleotide
  Target: LAMA2; (-) strand; PAM type: YTN; PAM sequence: TTG
agtataatgtcatttgcatt

SEQ ID NO: 233031 - DNA, 20 bp, Artificial Sequence
  Description of Artificial Sequence: Synthetic oligonucleotide
  Target: LAMA2; (-) strand; PAM type: YTN; PAM sequence: TTT
gagtataatgtcatttgcat

SEQ ID NO: 233032 - DNA, 20 bp, Artificial Sequence
  Description of Artificial Sequence: Synthetic oligonucleotide
  Target: LAMA2; (-) strand; PAM type: YTN; PAM sequence: CTT
tgagtataatgtcatttgca

SEQ ID NO: 233033 - DNA, 20 bp, Artificial Sequence
  Description of Artificial Sequence: Synthetic oligonucleotide
  Target: LAMA2; (-) strand; PAM type: YTN; PAM sequence: CTA
gctttgagtataatgtcatt

SEQ ID NO: 233034 - DNA, 20 bp, Artificial Sequence
  Description of Artificial Sequence: Synthetic oligonucleotide
  Target: LAMA2; (-) strand; PAM type: YTN; PAM sequence: TTA
taatccaatcatcagaaaac

SEQ ID NO: 233035 - DNA, 20 bp, Artificial Sequence
  Description of Artificial Sequence: Synthetic oligonucleotide
  Target: LAMA2; (-) strand; PAM type: YTN; PAM sequence: CTA
ggagataacattataatcca

SEQ ID NO: 233036 - DNA, 20 bp, Artificial Sequence
  Description of Artificial Sequence: Synthetic oligonucleotide
  Target: LAMA2; (-) strand; PAM type: YTN; PAM sequence: TTC
ctaggagataacattataat

SEQ ID NO: 233037 - DNA, 20 bp, Artificial Sequence
  Description of Artificial Sequence: Synthetic oligonucleotide
  Target: LAMA2; (-) strand; PAM type: YTN; PAM sequence: CTT
cctaggagataacattataa

SEQ ID NO: 233038 - DNA, 20 bp, Artificial Sequence
  Description of Artificial Sequence: Synthetic oligonucleotide
  Target: LAMA2; (-) strand; PAM type: YTN; PAM sequence: TTA
atcttcctaggagataacat

SEQ ID NO: 233039 - DNA, 20 bp, Artificial Sequence
  Description of Artificial Sequence: Synthetic oligonucleotide
  Target: LAMA2; (-) strand; PAM type: YTN; PAM sequence: TTT
aatcttcctaggagataaca

SEQ ID NO: 233040 - DNA, 20 bp, Artificial Sequence
  Description of Artificial Sequence: Synthetic oligonucleotide
  Target: LAMA2; (-) strand; PAM type: YTN; PAM sequence: CTT
taatcttcctaggagataac

SEQ ID NO: 233041 - DNA, 20 bp, Artificial Sequence
  Description of Artificial Sequence: Synthetic oligonucleotide
  Target: LAMA2; (-) strand; PAM type: YTN; PAM sequence: TTA
gtgtactttaatcttcctag

SEQ ID NO: 233042 - DNA, 20 bp, Artificial Sequence
  Description of Artificial Sequence: Synthetic oligonucleotide
  Target: LAMA2; (-) strand; PAM type: YTN; PAM sequence: TTG
cccataaaaatatgttagtg

SEQ ID NO: 233043 - DNA, 20 bp, Artificial Sequence
  Description of Artificial Sequence: Synthetic oligonucleotide
  Target: LAMA2; (-) strand; PAM type: YTN; PAM sequence: TTT
gcccataaaaatatgttagt

SEQ ID NO: 233044 - DNA, 20 bp, Artificial Sequence
  Description of Artificial Sequence: Synthetic oligonucleotide
  Target: LAMA2; (-) strand; PAM type: YTN; PAM sequence: CTT
tgcccataaaaatatgttag

SEQ ID NO: 233045 - DNA, 20 bp, Artificial Sequence
  Description of Artificial Sequence: Synthetic oligonucleotide
  Target: LAMA2; (-) strand; PAM type: YTN; PAM sequence: CTG
cagctttgcccataaaaata

SEQ ID NO: 233046 - DNA, 20 bp, Artificial Sequence
  Description of Artificial Sequence: Synthetic oligonucleotide
  Target: LAMA2; (-) strand; PAM type: YTN; PAM sequence: TTA
aaaaatggaaaacaaaaaaa

SEQ ID NO: 233047 - DNA, 20 bp, Artificial Sequence
  Description of Artificial Sequence: Synthetic oligonucleotide
  Target: LAMA2; (-) strand; PAM type: YTN; PAM sequence: TTT
aaaaaatggaaaacaaaaaa

SEQ ID NO: 233048 - DNA, 20 bp, Artificial Sequence
  Description of Artificial Sequence: Synthetic oligonucleotide
  Target: LAMA2; (-) strand; PAM type: YTN; PAM sequence: TTT
taaaaaatggaaaacaaaaa

SEQ ID NO: 233049 - DNA, 20 bp, Artificial Sequence
  Description of Artificial Sequence: Synthetic oligonucleotide
  Target: LAMA2; (-) strand; PAM type: YTN; PAM sequence: TTA
aagtaaaattttaaaaaatg

SEQ ID NO: 233050 - DNA, 20 bp, Artificial Sequence
  Description of Artificial Sequence: Synthetic oligonucleotide
  Target: LAMA2; (-) strand; PAM type: YTN; PAM sequence: TTT
aaagtaaaattttaaaaaat

SEQ ID NO: 233051 - DNA, 20 bp, Artificial Sequence
  Description of Artificial Sequence: Synthetic oligonucleotide
  Target: LAMA2; (-) strand; PAM type: YTN; PAM sequence: TTG
tgcacgagtatccaggattt

SEQ ID NO: 233052 - DNA, 20 bp, Artificial Sequence
  Description of Artificial Sequence: Synthetic oligonucleotide
  Target: LAMA2; (-) strand; PAM type: YTN; PAM sequence: CTG
catgttgtgcacgagtatcc

SEQ ID NO: 233053 - DNA, 20 bp, Artificial Sequence
  Description of Artificial Sequence: Synthetic oligonucleotide
  Target: LAMA2; (-) strand; PAM type: YTN; PAM sequence: CTA
tgtaacaaacctgcatgttg

SEQ ID NO: 233054 - DNA, 20 bp, Artificial Sequence
  Description of Artificial Sequence: Synthetic oligonucleotide
  Target: LAMA2; (-) strand; PAM type: YTN; PAM sequence: TTA
cctatgtaacaaacctgcat

SEQ ID NO: 233055 - DNA, 20 bp, Artificial Sequence
  Description of Artificial Sequence: Synthetic oligonucleotide
  Target: LAMA2; (-) strand; PAM type: YTN; PAM sequence: TTT
acctatgtaacaaacctgca

SEQ ID NO: 233056 - DNA, 20 bp, Artificial Sequence
  Description of Artificial Sequence: Synthetic oligonucleotide
  Target: LAMA2; (-) strand; PAM type: YTN; PAM sequence: TTG
ataggggcagcaaatgacca

SEQ ID NO: 233057 - DNA, 20 bp, Artificial Sequence
  Description of Artificial Sequence: Synthetic oligonucleotide
  Target: LAMA2; (-) strand; PAM type: YTN; PAM sequence: CTA
ggtgatgggttgataggggc

SEQ ID NO: 233058 - DNA, 20 bp, Artificial Sequence
  Description of Artificial Sequence: Synthetic oligonucleotide
  Target: LAMA2; (-) strand; PAM type: YTN; PAM sequence: TTA
tgcctaggtgatgggttgat

SEQ ID NO: 233059 - DNA, 20 bp, Artificial Sequence
  Description of Artificial Sequence: Synthetic oligonucleotide
  Target: LAMA2; (-) strand; PAM type: YTN; PAM sequence: CTG
tggaaaattatgcctaggtg

SEQ ID NO: 233060 - DNA, 20 bp, Artificial Sequence
  Description of Artificial Sequence: Synthetic oligonucleotide
  Target: LAMA2; (-) strand; PAM type: YTN; PAM sequence: CTG
taaagcctgtggaaaattat

SEQ ID NO: 233061 - DNA, 20 bp, Artificial Sequence
  Description of Artificial Sequence: Synthetic oligonucleotide
  Target: LAMA2; (-) strand; PAM type: YTN; PAM sequence: CTC
tgtaaagcctgtggaaaatt

SEQ ID NO: 233062 - DNA, 20 bp, Artificial Sequence
  Description of Artificial Sequence: Synthetic oligonucleotide
  Target: LAMA2; (-) strand; PAM type: YTN; PAM sequence: TTA
aaatgcagaaagccagtgag

SEQ ID NO: 233063 - DNA, 20 bp, Artificial Sequence
  Description of Artificial Sequence: Synthetic oligonucleotide
  Target: LAMA2; (-) strand; PAM type: YTN; PAM sequence: TTT
aaaatgcagaaagccagtga

SEQ ID NO: 233064 - DNA, 20 bp, Artificial Sequence
  Description of Artificial Sequence: Synthetic oligonucleotide
  Target: LAMA2; (-) strand; PAM type: YTN; PAM sequence: TTT
taaaatgcagaaagccagtg

SEQ ID NO: 233065 - DNA, 20 bp, Artificial Sequence
  Description of Artificial Sequence: Synthetic oligonucleotide
  Target: LAMA2; (-) strand; PAM type: YTN; PAM sequence: TTT
ttaaaatgcagaaagccagt

SEQ ID NO: 233066 - DNA, 20 bp, Artificial Sequence
  Description of Artificial Sequence: Synthetic oligonucleotide
  Target: LAMA2; (-) strand; PAM type: YTN; PAM sequence: CTC
caaataaaataacagtaaag

SEQ ID NO: 233067 - DNA, 20 bp, Artificial Sequence
  Description of Artificial Sequence: Synthetic oligonucleotide
  Target: LAMA2; (-) strand; PAM type: YTN; PAM sequence: TTC
ctccaaataaaataacagta

SEQ ID NO: 233068 - DNA, 20 bp, Artificial Sequence
  Description of Artificial Sequence: Synthetic oligonucleotide
  Target: LAMA2; (-) strand; PAM type: YTN; PAM sequence: CTT
cctccaaataaaataacagt

SEQ ID NO: 233069 - DNA, 20 bp, Artificial Sequence
  Description of Artificial Sequence: Synthetic oligonucleotide
  Target: LAMA2; (-) strand; PAM type: YTN; PAM sequence: TTC
acttcctccaaataaaataa

SEQ ID NO: 233070 - DNA, 20 bp, Artificial Sequence
  Description of Artificial Sequence: Synthetic oligonucleotide
  Target: LAMA2; (-) strand; PAM type: YTN; PAM sequence: TTT
cacttcctccaaataaaata

SEQ ID NO: 233071 - DNA, 20 bp, Artificial Sequence
  Description of Artificial Sequence: Synthetic oligonucleotide
  Target: LAMA2; (-) strand; PAM type: YTN; PAM sequence: TTT
tcacttcctccaaataaaat

SEQ ID NO: 233072 - DNA, 20 bp, Artificial Sequence
  Description of Artificial Sequence: Synthetic oligonucleotide
  Target: LAMA2; (-) strand; PAM type: YTN; PAM sequence: TTT
ttcacttcctccaaataaaa

SEQ ID NO: 233073 - DNA, 20 bp, Artificial Sequence
  Description of Artificial Sequence: Synthetic oligonucleotide
  Target: LAMA2; (-) strand; PAM type: YTN; PAM sequence: TTT
tttcacttcctccaaataaa

SEQ ID NO: 233074 - DNA, 20 bp, Artificial Sequence
  Description of Artificial Sequence: Synthetic oligonucleotide
  Target: LAMA2; (-) strand; PAM type: YTN; PAM sequence: CTA
tggtggcatatgcatttttt

SEQ ID NO: 233075 - DNA, 20 bp, Artificial Sequence
  Description of Artificial Sequence: Synthetic oligonucleotide
  Target: LAMA2; (-) strand; PAM type: YTN; PAM sequence: TTC
tatggtggcatatgcatttt

SEQ ID NO: 233076 - DNA, 20 bp, Artificial Sequence
  Description of Artificial Sequence: Synthetic oligonucleotide
  Target: LAMA2; (-) strand; PAM type: YTN; PAM sequence: TTA
tggcagcgtagtattctatg

SEQ ID NO: 233077 - DNA, 20 bp, Artificial Sequence
  Description of Artificial Sequence: Synthetic oligonucleotide
  Target: LAMA2; (-) strand; PAM type: YTN; PAM sequence: TTT
atggcagcgtagtattctat

SEQ ID NO: 233078 - DNA, 20 bp, Artificial Sequence
  Description of Artificial Sequence: Synthetic oligonucleotide
  Target: LAMA2; (-) strand; PAM type: YTN; PAM sequence: TTT
tatggcagcgtagtattcta

SEQ ID NO: 233079 - DNA, 20 bp, Artificial Sequence
  Description of Artificial Sequence: Synthetic oligonucleotide
  Target: LAMA2; (-) strand; PAM type: YTN; PAM sequence: TTT
ttatggcagcgtagtattct

SEQ ID NO: 233080 - DNA, 20 bp, Artificial Sequence
  Description of Artificial Sequence: Synthetic oligonucleotide
  Target: LAMA2; (-) strand; PAM type: YTN; PAM sequence: CTT
tttatggcagcgtagtattc

SEQ ID NO: 233081 - DNA, 20 bp, Artificial Sequence
  Description of Artificial Sequence: Synthetic oligonucleotide
  Target: LAMA2; (-) strand; PAM type: YTN; PAM sequence: TTC
ctttttatggcagcgtagta

SEQ ID NO: 233082 - DNA, 20 bp, Artificial Sequence
  Description of Artificial Sequence: Synthetic oligonucleotide
  Target: LAMA2; (-) strand; PAM type: YTN; PAM sequence: CTC
attcctttttatggcagcgt

SEQ ID NO: 233083 - DNA, 20 bp, Artificial Sequence
  Description of Artificial Sequence: Synthetic oligonucleotide
  Target: LAMA2; (-) strand; PAM type: YTN; PAM sequence: CTG
caaaggacatgatctcattc

SEQ ID NO: 233084 - DNA, 20 bp, Artificial Sequence
  Description of Artificial Sequence: Synthetic oligonucleotide
  Target: LAMA2; (-) strand; PAM type: YTN; PAM sequence: TTC
atccatgtccctgcaaagga

SEQ ID NO: 233085 - DNA, 20 bp, Artificial Sequence
  Description of Artificial Sequence: Synthetic oligonucleotide
  Target: LAMA2; (-) strand; PAM type: YTN; PAM sequence: CTT
catccatgtccctgcaaagg

SEQ ID NO: 233086 - DNA, 20 bp, Artificial Sequence
  Description of Artificial Sequence: Synthetic oligonucleotide
  Target: LAMA2; (-) strand; PAM type: YTN; PAM sequence: TTC
cagcttcatccatgtccctg

SEQ ID NO: 233087 - DNA, 20 bp, Artificial Sequence
  Description of Artificial Sequence: Synthetic oligonucleotide
  Target: LAMA2; (-) strand; PAM type: YTN; PAM sequence: TTT
ccagcttcatccatgtccct

SEQ ID NO: 233088 - DNA, 20 bp, Artificial Sequence
  Description of Artificial Sequence: Synthetic oligonucleotide
  Target: LAMA2; (-) strand; PAM type: YTN; PAM sequence: CTG
aggaccatggtttccagctt

SEQ ID NO: 233089 - DNA, 20 bp, Artificial Sequence
  Description of Artificial Sequence: Synthetic oligonucleotide
  Target: LAMA2; (-) strand; PAM type: YTN; PAM sequence: TTC
ctgaggaccatggtttccag

SEQ ID NO: 233090 - DNA, 20 bp, Artificial Sequence
  Description of Artificial Sequence: Synthetic oligonucleotide
  Target: LAMA2; (-) strand; PAM type: YTN; PAM sequence: TTT
cctgaggaccatggtttcca

SEQ ID NO: 233091 - DNA, 20 bp, Artificial Sequence
  Description of Artificial Sequence: Synthetic oligonucleotide
  Target: LAMA2; (-) strand; PAM type: YTN; PAM sequence: TTA
gtttcctgaggaccatggtt

SEQ ID NO: 233092 - DNA, 20 bp, Artificial Sequence
  Description of Artificial Sequence: Synthetic oligonucleotide
  Target: LAMA2; (-) strand; PAM type: YTN; PAM sequence: CTG
tgttagtttcctgaggacca

SEQ ID NO: 233093 - DNA, 20 bp, Artificial Sequence
  Description of Artificial Sequence: Synthetic oligonucleotide
  Target: LAMA2; (-) strand; PAM type: YTN; PAM sequence: TTC
ctgtgttagtttcctgagga

SEQ ID NO: 233094 - DNA, 20 bp, Artificial Sequence
  Description of Artificial Sequence: Synthetic oligonucleotide
  Target: LAMA2; (-) strand; PAM type: YTN; PAM sequence: CTG
ttcctgtgttagtttcctga

SEQ ID NO: 233095 - DNA, 20 bp, Artificial Sequence
  Description of Artificial Sequence: Synthetic oligonucleotide
  Target: LAMA2; (-) strand; PAM type: YTN; PAM sequence: TTC
tgttcctgtgttagtttcct

SEQ ID NO: 233096 - DNA, 20 bp, Artificial Sequence
  Description of Artificial Sequence: Synthetic oligonucleotide
  Target: LAMA2; (-) strand; PAM type: YTN; PAM sequence: TTT
ctgttcctgtgttagtttcc

SEQ ID NO: 233097 - DNA, 20 bp, Artificial Sequence
  Description of Artificial Sequence: Synthetic oligonucleotide
  Target: LAMA2; (-) strand; PAM type: YTN; PAM sequence: TTT
tctgttcctgtgttagtttc

SEQ ID NO: 233098 - DNA, 20 bp, Artificial Sequence
  Description of Artificial Sequence: Synthetic oligonucleotide
  Target: LAMA2; (-) strand; PAM type: YTN; PAM sequence: TTG
gttttctgttcctgtgttag

SEQ ID NO: 233099 - DNA, 20 bp, Artificial Sequence
  Description of Artificial Sequence: Synthetic oligonucleotide
  Target: LAMA2; (-) strand; PAM type: YTN; PAM sequence: TTT
ggttttctgttcctgtgtta

SEQ ID NO: 233100 - DNA, 20 bp, Artificial Sequence
  Description of Artificial Sequence: Synthetic oligonucleotide
  Target: LAMA2; (-) strand; PAM type: YTN; PAM sequence: TTA
tgagtgagaacatatagtgt

SEQ ID NO: 233101 - DNA, 20 bp, Artificial Sequence
  Description of Artificial Sequence: Synthetic oligonucleotide
  Target: LAMA2; (-) strand; PAM type: YTN; PAM sequence: TTT
atgagtgagaacatatagtg

SEQ ID NO: 233102 - DNA, 20 bp, Artificial Sequence
  Description of Artificial Sequence: Synthetic oligonucleotide
  Target: LAMA2; (-) strand; PAM type: YTN; PAM sequence: CTC
atttatgagtgagaacatat

SEQ ID NO: 233103 - DNA, 20 bp, Artificial Sequence
  Description of Artificial Sequence: Synthetic oligonucleotide
  Target: LAMA2; (-) strand; PAM type: YTN; PAM sequence: CTC
tcatttatgagtgagaacat

SEQ ID NO: 233104 - DNA, 20 bp, Artificial Sequence
  Description of Artificial Sequence: Synthetic oligonucleotide
  Target: LAMA2; (-) strand; PAM type: YTN; PAM sequence: TTA
gctctcatttatgagtgaga

SEQ ID NO: 233105 - DNA, 20 bp, Artificial Sequence
  Description of Artificial Sequence: Synthetic oligonucleotide
  Target: LAMA2; (-) strand; PAM type: YTN; PAM sequence: TTT
agctctcatttatgagtgag

SEQ ID NO: 233106 - DNA, 20 bp, Artificial Sequence
  Description of Artificial Sequence: Synthetic oligonucleotide
  Target: LAMA2; (-) strand; PAM type: YTN; PAM sequence: TTG
tttagctctcatttatgagt

SEQ ID NO: 233107 - DNA, 20 bp, Artificial Sequence
  Description of Artificial Sequence: Synthetic oligonucleotide
  Target: LAMA2; (-) strand; PAM type: YTN; PAM sequence: CTC
attgtttagctctcatttat

SEQ ID NO: 233108 - DNA, 20 bp, Artificial Sequence
  Description of Artificial Sequence: Synthetic oligonucleotide
  Target: LAMA2; (-) strand; PAM type: YTN; PAM sequence: TTC
tcattgtttagctctcattt

SEQ ID NO: 233109 - DNA, 20 bp, Artificial Sequence
  Description of Artificial Sequence: Synthetic oligonucleotide
  Target: LAMA2; (-) strand; PAM type: YTN; PAM sequence: TTG
agtccatgtgttctcattgt

SEQ ID NO: 233110 - DNA, 20 bp, Artificial Sequence
  Description of Artificial Sequence: Synthetic oligonucleotide
  Target: LAMA2; (-) strand; PAM type: YTN; PAM sequence: CTT
gagtccatgtgttctcattg

SEQ ID NO: 233111 - DNA, 20 bp, Artificial Sequence
  Description of Artificial Sequence: Synthetic oligonucleotide
  Target: LAMA2; (-) strand; PAM type: YTN; PAM sequence: CTC
cttgagtccatgtgttctca

SEQ ID NO: 233112 - DNA, 20 bp, Artificial Sequence
  Description of Artificial Sequence: Synthetic oligonucleotide
  Target: LAMA2; (-) strand; PAM type: YTN; PAM sequence: TTC
ccctccttgagtccatgtgt

SEQ ID NO: 233113 - DNA, 20 bp, Artificial Sequence
  Description of Artificial Sequence: Synthetic oligonucleotide
  Target: LAMA2; (-) strand; PAM type: YTN; PAM sequence: TTG
ttcccctccttgagtccatg

SEQ ID NO: 233114 - DNA, 20 bp, Artificial Sequence
  Description of Artificial Sequence: Synthetic oligonucleotide
  Target: LAMA2; (-) strand; PAM type: YTN; PAM sequence: CTG
gtgtgtgttgttcccctcct

SEQ ID NO: 233115 - DNA, 20 bp, Artificial Sequence
  Description of Artificial Sequence: Synthetic oligonucleotide
  Target: LAMA2; (-) strand; PAM type: YTN; PAM sequence: CTG
ataggccctggtgtgtgttg

SEQ ID NO: 233116 - DNA, 20 bp, Artificial Sequence
  Description of Artificial Sequence: Synthetic oligonucleotide
  Target: LAMA2; (-) strand; PAM type: YTN; PAM sequence: CTC
catctgataggccctggtgt

SEQ ID NO: 233117 - DNA, 20 bp, Artificial Sequence
  Description of Artificial Sequence: Synthetic oligonucleotide
  Target: LAMA2; (-) strand; PAM type: YTN; PAM sequence: CTC
cctccatctgataggccctg

SEQ ID NO: 233118 - DNA, 20 bp, Artificial Sequence
  Description of Artificial Sequence: Synthetic oligonucleotide
  Target: LAMA2; (-) strand; PAM type: YTN; PAM sequence: TTG
cctccctccatctgataggc

SEQ ID NO: 233119 - DNA, 20 bp, Artificial Sequence
  Description of Artificial Sequence: Synthetic oligonucleotide
  Target: LAMA2; (-) strand; PAM type: YTN; PAM sequence: TTT
gcctccctccatctgatagg

SEQ ID NO: 233120 - DNA, 20 bp, Artificial Sequence
  Description of Artificial Sequence: Synthetic oligonucleotide
  Target: LAMA2; (-) strand; PAM type: YTN; PAM sequence: CTT
tgcctccctccatctgatag

SEQ ID NO: 233121 - DNA, 20 bp, Artificial Sequence
  Description of Artificial Sequence: Synthetic oligonucleotide
  Target: LAMA2; (-) strand; PAM type: YTN; PAM sequence: CTC
cctttgcctccctccatctg

SEQ ID NO: 233122 - DNA, 20 bp, Artificial Sequence
  Description of Artificial Sequence: Synthetic oligonucleotide
  Target: LAMA2; (-) strand; PAM type: YTN; PAM sequence: CTC
cctccctttgcctccctcca

SEQ ID NO: 233123 - DNA, 20 bp, Artificial Sequence
  Description of Artificial Sequence: Synthetic oligonucleotide
  Target: LAMA2; (-) strand; PAM type: YTN; PAM sequence: TTC
tccctccctttgcctccctc

SEQ ID NO: 233124 - DNA, 20 bp, Artificial Sequence
  Description of Artificial Sequence: Synthetic oligonucleotide
  Target: LAMA2; (-) strand; PAM type: YTN; PAM sequence: CTG
atgttctccctccctttgcc

SEQ ID NO: 233125 - DNA, 20 bp, Artificial Sequence
  Description of Artificial Sequence: Synthetic oligonucleotide
  Target: LAMA2; (-) strand; PAM type: YTN; PAM sequence: CTG
tcctgatgttctccctccct

SEQ ID NO: 233126 - DNA, 20 bp, Artificial Sequence
  Description of Artificial Sequence: Synthetic oligonucleotide
  Target: LAMA2; (-) strand; PAM type: YTN; PAM sequence: CTG
tctgtcctgatgttctccct

SEQ ID NO: 233127 - DNA, 20 bp, Artificial Sequence
  Description of Artificial Sequence: Synthetic oligonucleotide
  Target: LAMA2; (-) strand; PAM type: YTN; PAM sequence: TTA
gctgtctgtcctgatgttct

SEQ ID NO: 233128 - DNA, 20 bp, Artificial Sequence
  Description of Artificial Sequence: Synthetic oligonucleotide
  Target: LAMA2; (-) strand; PAM type: YTN; PAM sequence: CTG
catgcattagctgtctgtcc

SEQ ID NO: 233129 - DNA, 20 bp, Artificial Sequence
  Description of Artificial Sequence: Synthetic oligonucleotide
  Target: LAMA2; (-) strand; PAM type: YTN; PAM sequence: CTG
atagaaagcaccctgcatgc

SEQ ID NO: 233130 - DNA, 20 bp, Artificial Sequence
  Description of Artificial Sequence: Synthetic oligonucleotide
  Target: LAMA2; (-) strand; PAM type: YTN; PAM sequence: CTG
tacacctgatagaaagcacc

SEQ ID NO: 233131 - DNA, 20 bp, Artificial Sequence
  Description of Artificial Sequence: Synthetic oligonucleotide
  Target: LAMA2; (-) strand; PAM type: YTN; PAM sequence: CTG
atcatctgtacacctgatag

SEQ ID NO: 233132 - DNA, 20 bp, Artificial Sequence
  Description of Artificial Sequence: Synthetic oligonucleotide
  Target: LAMA2; (-) strand; PAM type: YTN; PAM sequence: CTG
ggaaacactgatcatctgta

SEQ ID NO: 233133 - DNA, 20 bp, Artificial Sequence
  Description of Artificial Sequence: Synthetic oligonucleotide
  Target: LAMA2; (-) strand; PAM type: YTN; PAM sequence: TTA
aagcctgggaaacactgatc

SEQ ID NO: 233134 - DNA, 20 bp, Artificial Sequence
  Description of Artificial Sequence: Synthetic oligonucleotide
  Target: LAMA2; (-) strand; PAM type: YTN; PAM sequence: TTT
aaagcctgggaaacactgat

SEQ ID NO: 233135 - DNA, 20 bp, Artificial Sequence
  Description of Artificial Sequence: Synthetic oligonucleotide
  Target: LAMA2; (-) strand; PAM type: YTN; PAM sequence: TTT
taaagcctgggaaacactga

SEQ ID NO: 233136 - DNA, 20 bp, Artificial Sequence
  Description of Artificial Sequence: Synthetic oligonucleotide
  Target: LAMA2; (-) strand; PAM type: YTN; PAM sequence: CTT
ttaaagcctgggaaacactg

SEQ ID NO: 233137 - DNA, 20 bp, Artificial Sequence
  Description of Artificial Sequence: Synthetic oligonucleotide
  Target: LAMA2; (-) strand; PAM type: YTN; PAM sequence: TTG
tggacttttaaagcctggga

SEQ ID NO: 233138 - DNA, 20 bp, Artificial Sequence
  Description of Artificial Sequence: Synthetic oligonucleotide
  Target: LAMA2; (-) strand; PAM type: YTN; PAM sequence: CTT
gtggacttttaaagcctggg

SEQ ID NO: 233139 - DNA, 20 bp, Artificial Sequence
  Description of Artificial Sequence: Synthetic oligonucleotide
  Target: LAMA2; (-) strand; PAM type: YTN; PAM sequence: CTG
tcttgtggacttttaaagcc

SEQ ID NO: 233140 - DNA, 20 bp, Artificial Sequence
  Description of Artificial Sequence: Synthetic oligonucleotide
  Target: LAMA2; (-) strand; PAM type: YTN; PAM sequence: TTC
caagcctgtcttgtggactt

SEQ ID NO: 233141 - DNA, 20 bp, Artificial Sequence
  Description of Artificial Sequence: Synthetic oligonucleotide
  Target: LAMA2; (-) strand; PAM type: YTN; PAM sequence: CTT
ccaagcctgtcttgtggact

SEQ ID NO: 233142 - DNA, 20 bp, Artificial Sequence
  Description of Artificial Sequence: Synthetic oligonucleotide
  Target: LAMA2; (-) strand; PAM type: YTN; PAM sequence: TTG
gccttccaagcctgtcttgt

SEQ ID NO: 233143 - DNA, 20 bp, Artificial Sequence
  Description of Artificial Sequence: Synthetic oligonucleotide
  Target: LAMA2; (-) strand; PAM type: YTN; PAM sequence: CTG
gaattggccttccaagcctg

SEQ ID NO: 233144 - DNA, 20 bp, Artificial Sequence
  Description of Artificial Sequence: Synthetic oligonucleotide
  Target: LAMA2; (-) strand; PAM type: YTN; PAM sequence: TTA
ccacctggaattggccttcc

SEQ ID NO: 233145 - DNA, 20 bp, Artificial Sequence
  Description of Artificial Sequence: Synthetic oligonucleotide
  Target: LAMA2; (-) strand; PAM type: YTN; PAM sequence: TTT
accacctggaattggccttc

SEQ ID NO: 233146 - DNA, 20 bp, Artificial Sequence
  Description of Artificial Sequence: Synthetic oligonucleotide
  Target: LAMA2; (-) strand; PAM type: YTN; PAM sequence: CTC
aatttaccacctggaattgg

SEQ ID NO: 233147 - DNA, 20 bp, Artificial Sequence
  Description of Artificial Sequence: Synthetic oligonucleotide
  Target: LAMA2; (-) strand; PAM type: YTN; PAM sequence: CTG
aatacagtctcaatttacca

SEQ ID NO: 233148 - DNA, 20 bp, Artificial Sequence
  Description of Artificial Sequence: Synthetic oligonucleotide
  Target: LAMA2; (-) strand; PAM type: YTN; PAM sequence: CTC
tgaatacagtctcaatttac

SEQ ID NO: 233149 - DNA, 20 bp, Artificial Sequence
  Description of Artificial Sequence: Synthetic oligonucleotide
  Target: LAMA2; (-) strand; PAM type: YTN; PAM sequence: CTG
tgcatgctctgaatacagtc

SEQ ID NO: 233150 - DNA, 20 bp, Artificial Sequence
  Description of Artificial Sequence: Synthetic oligonucleotide
  Target: LAMA2; (-) strand; PAM type: YTN; PAM sequence: CTG
tctgtgcatgctctgaatac

SEQ ID NO: 233151 - DNA, 20 bp, Artificial Sequence
  Description of Artificial Sequence: Synthetic oligonucleotide
  Target: LAMA2; (-) strand; PAM type: YTN; PAM sequence: CTC
ctgtctgtgcatgctctgaa

SEQ ID NO: 233152 - DNA, 20 bp, Artificial Sequence
  Description of Artificial Sequence: Synthetic oligonucleotide
  Target: LAMA2; (-) strand; PAM type: YTN; PAM sequence: CTA
aatctcctgtctgtgcatgc

SEQ ID NO: 233153 - DNA, 20 bp, Artificial Sequence
  Description of Artificial Sequence: Synthetic oligonucleotide
  Target: LAMA2; (-) strand; PAM type: YTN; PAM sequence: CTA
ggactaaatctcctgtctgt

SEQ ID NO: 233154 - DNA, 20 bp, Artificial Sequence
  Description of Artificial Sequence: Synthetic oligonucleotide
  Target: LAMA2; (-) strand; PAM type: YTN; PAM sequence: CTC
taggactaaatctcctgtct

SEQ ID NO: 233155 - DNA, 20 bp, Artificial Sequence
  Description of Artificial Sequence: Synthetic oligonucleotide
  Target: LAMA2; (-) strand; PAM type: YTN; PAM sequence: CTA
atgtctctaggactaaatct

SEQ ID NO: 233156 - DNA, 20 bp, Artificial Sequence
  Description of Artificial Sequence: Synthetic oligonucleotide
  Target: LAMA2; (-) strand; PAM type: YTN; PAM sequence: CTA
ggggtgcaggtaaaccagaa

SEQ ID NO: 233157 - DNA, 20 bp, Artificial Sequence
  Description of Artificial Sequence: Synthetic oligonucleotide
  Target: LAMA2; (-) strand; PAM type: YTN; PAM sequence: CTC
taggggtgcaggtaaaccag

SEQ ID NO: 233158 - DNA, 20 bp, Artificial Sequence
  Description of Artificial Sequence: Synthetic oligonucleotide
  Target: LAMA2; (-) strand; PAM type: YTN; PAM sequence: CTA
ggcctctaggggtgcaggta

SEQ ID NO: 233159 - DNA, 20 bp, Artificial Sequence
  Description of Artificial Sequence: Synthetic oligonucleotide
  Target: LAMA2; (-) strand; PAM type: YTN; PAM sequence: TTC
ctaggcctctaggggtgcag

SEQ ID NO: 233160 - DNA, 20 bp, Artificial Sequence
  Description of Artificial Sequence: Synthetic oligonucleotide
  Target: LAMA2; (-) strand; PAM type: YTN; PAM sequence: TTG
attcctaggcctctaggggt

SEQ ID NO: 233161 - DNA, 20 bp, Artificial Sequence
  Description of Artificial Sequence: Synthetic oligonucleotide
  Target: LAMA2; (-) strand; PAM type: YTN; PAM sequence: TTG
gatatggcaagaaggaggga

SEQ ID NO: 233162 - DNA, 20 bp, Artificial Sequence
  Description of Artificial Sequence: Synthetic oligonucleotide
  Target: LAMA2; (-) strand; PAM type: YTN; PAM sequence: TTT
ggatatggcaagaaggaggg

SEQ ID NO: 233163 - DNA, 20 bp, Artificial Sequence
  Description of Artificial Sequence: Synthetic oligonucleotide
  Target: LAMA2; (-) strand; PAM type: YTN; PAM sequence: TTT
tggatatggcaagaaggagg

SEQ ID NO: 233164 - DNA, 20 bp, Artificial Sequence
  Description of Artificial Sequence: Synthetic oligonucleotide
  Target: LAMA2; (-) strand; PAM type: YTN; PAM sequence: TTT
ttggatatggcaagaaggag

SEQ ID NO: 233165 - DNA, 20 bp, Artificial Sequence
  Description of Artificial Sequence: Synthetic oligonucleotide
  Target: LAMA2; (-) strand; PAM type: YTN; PAM sequence: TTA
atatttttggatatggcaag

SEQ ID NO: 233166 - DNA, 20 bp, Artificial Sequence
  Description of Artificial Sequence: Synthetic oligonucleotide
  Target: LAMA2; (-) strand; PAM type: YTN; PAM sequence: TTG
ttaatatttttggatatggc

SEQ ID NO: 233167 - DNA, 20 bp, Artificial Sequence
  Description of Artificial Sequence: Synthetic oligonucleotide
  Target: LAMA2; (-) strand; PAM type: YTN; PAM sequence: CTC
aaaatgttgttaatattttt

SEQ ID NO: 233168 - DNA, 20 bp, Artificial Sequence
  Description of Artificial Sequence: Synthetic oligonucleotide
  Target: LAMA2; (-) strand; PAM type: YTN; PAM sequence: CTC
ccctcaaaatgttgttaata

SEQ ID NO: 233169 - DNA, 20 bp, Artificial Sequence
  Description of Artificial Sequence: Synthetic oligonucleotide
  Target: LAMA2; (-) strand; PAM type: YTN; PAM sequence: TTA
aggctcccctcaaaatgttg

SEQ ID NO: 233170 - DNA, 20 bp, Artificial Sequence
  Description of Artificial Sequence: Synthetic oligonucleotide
  Target: LAMA2; (-) strand; PAM type: YTN; PAM sequence: TTT
aaggctcccctcaaaatgtt

SEQ ID NO: 233171 - DNA, 20 bp, Artificial Sequence
  Description of Artificial Sequence: Synthetic oligonucleotide
  Target: LAMA2; (-) strand; PAM type: YTN; PAM sequence: TTT
taaggctcccctcaaaatgt

SEQ ID NO: 233172 - DNA, 20 bp, Artificial Sequence
  Description of Artificial Sequence: Synthetic oligonucleotide
  Target: LAMA2; (-) strand; PAM type: YTN; PAM sequence: TTG
ttttaaggctcccctcaaaa

SEQ ID NO: 233173 - DNA, 20 bp, Artificial Sequence
  Description of Artificial Sequence: Synthetic oligonucleotide
  Target: LAMA2; (-) strand; PAM type: YTN; PAM sequence: CTT
gttttaaggctcccctcaaa

SEQ ID NO: 233174 - DNA, 20 bp, Artificial Sequence
  Description of Artificial Sequence: Synthetic oligonucleotide
  Target: LAMA2; (-) strand; PAM type: YTN; PAM sequence: TTA
gcttgttttaaggctcccct

SEQ ID NO: 233175 - DNA, 20 bp, Artificial Sequence
  Description of Artificial Sequence: Synthetic oligonucleotide
  Target: LAMA2; (-) strand; PAM type: YTN; PAM sequence: TTG
ggggtcgattagcttgtttt

SEQ ID NO: 233176 - DNA, 20 bp, Artificial Sequence
  Description of Artificial Sequence: Synthetic oligonucleotide
  Target: LAMA2; (-) strand; PAM type: YTN; PAM sequence: TTT
gggggtcgattagcttgttt

SEQ ID NO: 233177 - DNA, 20 bp, Artificial Sequence
  Description of Artificial Sequence: Synthetic oligonucleotide
  Target: LAMA2; (-) strand; PAM type: YTN; PAM sequence: TTT
tgggggtcgattagcttgtt

SEQ ID NO: 233178 - DNA, 20 bp, Artificial Sequence
  Description of Artificial Sequence: Synthetic oligonucleotide
  Target: LAMA2; (-) strand; PAM type: YTN; PAM sequence: TTT
ttgggggtcgattagcttgt

SEQ ID NO: 233179 - DNA, 20 bp, Artificial Sequence
  Description of Artificial Sequence: Synthetic oligonucleotide
  Target: LAMA2; (-) strand; PAM type: YTN; PAM sequence: TTT
tttgggggtcgattagcttg

SEQ ID NO: 233180 - DNA, 20 bp, Artificial Sequence
  Description of Artificial Sequence: Synthetic oligonucleotide
  Target: LAMA2; (-) strand; PAM type: YTN; PAM sequence: CTA
tgtgttttttgggggtcgat

SEQ ID NO: 233181 - DNA, 20 bp, Artificial Sequence
  Description of Artificial Sequence: Synthetic oligonucleotide
  Target: LAMA2; (-) strand; PAM type: YTN; PAM sequence: CTG
ggatctatgtgttttttggg

SEQ ID NO: 233182 - DNA, 20 bp, Artificial Sequence
  Description of Artificial Sequence: Synthetic oligonucleotide
  Target: LAMA2; (-) strand; PAM type: YTN; PAM sequence: CTG
atgcctgggatctatgtgtt

SEQ ID NO: 233183 - DNA, 20 bp, Artificial Sequence
  Description of Artificial Sequence: Synthetic oligonucleotide
  Target: LAMA2; (-) strand; PAM type: YTN; PAM sequence: CTC
tgatgcctgggatctatgtg

SEQ ID NO: 233184 - DNA, 20 bp, Artificial Sequence
  Description of Artificial Sequence: Synthetic oligonucleotide
  Target: LAMA2; (-) strand; PAM type: YTN; PAM sequence: TTC
tctgatgcctgggatctatg

SEQ ID NO: 233185 - DNA, 20 bp, Artificial Sequence
  Description of Artificial Sequence: Synthetic oligonucleotide
  Target: LAMA2; (-) strand; PAM type: YTN; PAM sequence: CTT
ctctgatgcctgggatctat

SEQ ID NO: 233186 - DNA, 20 bp, Artificial Sequence
  Description of Artificial Sequence: Synthetic oligonucleotide
  Target: LAMA2; (-) strand; PAM type: YTN; PAM sequence: CTC
cttctctgatgcctgggatc

SEQ ID NO: 233187 - DNA, 20 bp, Artificial Sequence
  Description of Artificial Sequence: Synthetic oligonucleotide
  Target: LAMA2; (-) strand; PAM type: YTN; PAM sequence: TTC
tccttctctgatgcctggga

SEQ ID NO: 233188 - DNA, 20 bp, Artificial Sequence
  Description of Artificial Sequence: Synthetic oligonucleotide
  Target: LAMA2; (-) strand; PAM type: YTN; PAM sequence: CTG
aattctccttctctgatgcc

SEQ ID NO: 233189 - DNA, 20 bp, Artificial Sequence
  Description of Artificial Sequence: Synthetic oligonucleotide
  Target: LAMA2; (-) strand; PAM type: YTN; PAM sequence: TTG
aagactgaattctccttctc

SEQ ID NO: 233190 - DNA, 20 bp, Artificial Sequence
  Description of Artificial Sequence: Synthetic oligonucleotide
  Target: LAMA2; (-) strand; PAM type: YTN; PAM sequence: CTT
gaagactgaattctccttct

SEQ ID NO: 233191 - DNA, 20 bp, Artificial Sequence
  Description of Artificial Sequence: Synthetic oligonucleotide
  Target: LAMA2; (-) strand; PAM type: YTN; PAM sequence: CTG
ggagtggtcttgaagactga

SEQ ID NO: 233192 - DNA, 20 bp, Artificial Sequence
  Description of Artificial Sequence: Synthetic oligonucleotide
  Target: LAMA2; (-) strand; PAM type: YTN; PAM sequence: CTC
agaagaaagcaggaaggccc

SEQ ID NO: 233193 - DNA, 20 bp, Artificial Sequence
  Description of Artificial Sequence: Synthetic oligonucleotide
  Target: LAMA2; (-) strand; PAM type: YTN; PAM sequence: TTA
ggctcagaagaaagcaggaa

SEQ ID NO: 233194 - DNA, 20 bp, Artificial Sequence
  Description of Artificial Sequence: Synthetic oligonucleotide
  Target: LAMA2; (-) strand; PAM type: YTN; PAM sequence: TTT
aggctcagaagaaagcagga

SEQ ID NO: 233195 - DNA, 20 bp, Artificial Sequence
  Description of Artificial Sequence: Synthetic oligonucleotide
  Target: LAMA2; (-) strand; PAM type: YTN; PAM sequence: CTG
ggtttaggctcagaagaaag

SEQ ID NO: 233196 - DNA, 20 bp, Artificial Sequence
  Description of Artificial Sequence: Synthetic oligonucleotide
  Target: LAMA2; (-) strand; PAM type: YTN; PAM sequence: TTA
atcactgggtttaggctcag

SEQ ID NO: 233197 - DNA, 20 bp, Artificial Sequence
  Description of Artificial Sequence: Synthetic oligonucleotide
  Target: LAMA2; (-) strand; PAM type: YTN; PAM sequence: TTT
aatcactgggtttaggctca

SEQ ID NO: 233198 - DNA, 20 bp, Artificial Sequence
  Description of Artificial Sequence: Synthetic oligonucleotide
  Target: LAMA2; (-) strand; PAM type: YTN; PAM sequence: CTT
taatcactgggtttaggctc

SEQ ID NO: 233199 - DNA, 20 bp, Artificial Sequence
  Description of Artificial Sequence: Synthetic oligonucleotide
  Target: LAMA2; (-) strand; PAM type: YTN; PAM sequence: TTC
tttaatcactgggtttaggc

SEQ ID NO: 233200 - DNA, 20 bp, Artificial Sequence
  Description of Artificial Sequence: Synthetic oligonucleotide
  Target: LAMA2; (-) strand; PAM type: YTN; PAM sequence: CTG
gttctttaatcactgggttt

SEQ ID NO: 233201 - DNA, 20 bp, Artificial Sequence
  Description of Artificial Sequence: Synthetic oligonucleotide
  Target: LAMA2; (-) strand; PAM type: YTN; PAM sequence: TTA
aggaagtccaggctggttct

SEQ ID NO: 233202 - DNA, 20 bp, Artificial Sequence
  Description of Artificial Sequence: Synthetic oligonucleotide
  Target: LAMA2; (-) strand; PAM type: YTN; PAM sequence: CTT
aaggaagtccaggctggttc

SEQ ID NO: 233203 - DNA, 20 bp, Artificial Sequence
  Description of Artificial Sequence: Synthetic oligonucleotide
  Target: LAMA2; (-) strand; PAM type: YTN; PAM sequence: TTG
atcaacatcaccttaaggaa

SEQ ID NO: 233204 - DNA, 20 bp, Artificial Sequence
  Description of Artificial Sequence: Synthetic oligonucleotide
  Target: LAMA2; (-) strand; PAM type: YTN; PAM sequence: TTT
gatcaacatcaccttaagga

SEQ ID NO: 233205 - DNA, 20 bp, Artificial Sequence
  Description of Artificial Sequence: Synthetic oligonucleotide
  Target: LAMA2; (-) strand; PAM type: YTN; PAM sequence: TTG
aagtgggtatatttgatcaa

SEQ ID NO: 233206 - DNA, 20 bp, Artificial Sequence
  Description of Artificial Sequence: Synthetic oligonucleotide
  Target: LAMA2; (-) strand; PAM type: YTN; PAM sequence: CTT
gaagtgggtatatttgatca

SEQ ID NO: 233207 - DNA, 20 bp, Artificial Sequence
  Description of Artificial Sequence: Synthetic oligonucleotide
  Target: LAMA2; (-) strand; PAM type: YTN; PAM sequence: CTG
ggaagaaagtggtgccaggc

SEQ ID NO: 233208 - DNA, 20 bp, Artificial Sequence
  Description of Artificial Sequence: Synthetic oligonucleotide
  Target: LAMA2; (-) strand; PAM type: YTN; PAM sequence: CTA
gccagcctgggaagaaagtg

SEQ ID NO: 233209 - DNA, 20 bp, Artificial Sequence
  Description of Artificial Sequence: Synthetic oligonucleotide
  Target: LAMA2; (-) strand; PAM type: YTN; PAM sequence: CTA
aaatgtaaaactagccagcc

SEQ ID NO: 233210 - DNA, 20 bp, Artificial Sequence
  Description of Artificial Sequence: Synthetic oligonucleotide
  Target: LAMA2; (-) strand; PAM type: YTN; PAM sequence: CTG
tgtactaaaatgtaaaacta

SEQ ID NO: 233211 - DNA, 20 bp, Artificial Sequence
  Description of Artificial Sequence: Synthetic oligonucleotide
  Target: LAMA2; (-) strand; PAM type: YTN; PAM sequence: CTG
gactgtgtactaaaatgtaa

SEQ ID NO: 233212 - DNA, 20 bp, Artificial Sequence
  Description of Artificial Sequence: Synthetic oligonucleotide
  Target: LAMA2; (-) strand; PAM type: YTN; PAM sequence: CTA
tgaagaaaagagaaaacatc

SEQ ID NO: 233213 - DNA, 20 bp, Artificial Sequence
  Description of Artificial Sequence: Synthetic oligonucleotide
  Target: LAMA2; (-) strand; PAM type: YTN; PAM sequence: CTA
aaggtactatgaagaaaaga

SEQ ID NO: 233214 - DNA, 20 bp, Artificial Sequence
  Description of Artificial Sequence: Synthetic oligonucleotide
  Target: LAMA2; (-) strand; PAM type: YTN; PAM sequence: CTC
taaaggtactatgaagaaaa

SEQ ID NO: 233215 - DNA, 20 bp, Artificial Sequence
  Description of Artificial Sequence: Synthetic oligonucleotide
  Target: LAMA2; (-) strand; PAM type: YTN; PAM sequence: CTC
tctaaaggtactatgaagaa

SEQ ID NO: 233216 - DNA, 20 bp, Artificial Sequence
  Description of Artificial Sequence: Synthetic oligonucleotide
  Target: LAMA2; (-) strand; PAM type: YTN; PAM sequence: CTC
tctctaaaggtactatgaag

SEQ ID NO: 233217 - DNA, 20 bp, Artificial Sequence
  Description of Artificial Sequence: Synthetic oligonucleotide
  Target: LAMA2; (-) strand; PAM type: YTN; PAM sequence: TTA
gaaccataaaggaagcctct

SEQ ID NO: 233218 - DNA, 20 bp, Artificial Sequence
  Description of Artificial Sequence: Synthetic oligonucleotide
  Target: LAMA2; (-) strand; PAM type: YTN; PAM sequence: TTT
agaaccataaaggaagcctc

SEQ ID NO: 233219 - DNA, 20 bp, Artificial Sequence
  Description of Artificial Sequence: Synthetic oligonucleotide
  Target: LAMA2; (-) strand; PAM type: YTN; PAM sequence: CTC
atttagaaccataaaggaag

SEQ ID NO: 233220 - DNA, 20 bp, Artificial Sequence
  Description of Artificial Sequence: Synthetic oligonucleotide
  Target: LAMA2; (-) strand; PAM type: YTN; PAM sequence: TTA
gcctcatttagaaccataaa

SEQ ID NO: 233221 - DNA, 20 bp, Artificial Sequence
  Description of Artificial Sequence: Synthetic oligonucleotide
  Target: LAMA2; (-) strand; PAM type: YTN; PAM sequence: TTT
agcctcatttagaaccataa

SEQ ID NO: 233222 - DNA, 20 bp, Artificial Sequence
  Description of Artificial Sequence: Synthetic oligonucleotide
  Target: LAMA2; (-) strand; PAM type: YTN; PAM sequence: TTT
tagcctcatttagaaccata

SEQ ID NO: 233223 - DNA, 20 bp, Artificial Sequence
  Description of Artificial Sequence: Synthetic oligonucleotide
  Target: LAMA2; (-) strand; PAM type: YTN; PAM sequence: CTA
gtcaaaaagagggaggaagc

SEQ ID NO: 233224 - DNA, 20 bp, Artificial Sequence
  Description of Artificial Sequence: Synthetic oligonucleotide
  Target: LAMA2; (-) strand; PAM type: YTN; PAM sequence: TTC
tagtcaaaaagagggaggaa

SEQ ID NO: 233225 - DNA, 20 bp, Artificial Sequence
  Description of Artificial Sequence: Synthetic oligonucleotide
  Target: LAMA2; (-) strand; PAM type: YTN; PAM sequence: TTT
ctagtcaaaaagagggagga

SEQ ID NO: 233226 - DNA, 20 bp, Artificial Sequence
  Description of Artificial Sequence: Synthetic oligonucleotide
  Target: LAMA2; (-) strand; PAM type: YTN; PAM sequence: CTC
acagcgagatttctagtcaa

SEQ ID NO: 233227 - DNA, 20 bp, Artificial Sequence
  Description of Artificial Sequence: Synthetic oligonucleotide
  Target: LAMA2; (-) strand; PAM type: YTN; PAM sequence: CTC
acactcacagcgagatttct

SEQ ID NO: 233228 - DNA, 20 bp, Artificial Sequence
  Description of Artificial Sequence: Synthetic oligonucleotide
  Target: LAMA2; (-) strand; PAM type: YTN; PAM sequence: TTA
tgctcacactcacagcgaga

SEQ ID NO: 233229 - DNA, 20 bp, Artificial Sequence
  Description of Artificial Sequence: Synthetic oligonucleotide
  Target: LAMA2; (-) strand; PAM type: YTN; PAM sequence: CTA
tcgccacatgtgttatgctc

SEQ ID NO: 233230 - DNA, 20 bp, Artificial Sequence
  Description of Artificial Sequence: Synthetic oligonucleotide
  Target: LAMA2; (-) strand; PAM type: YTN; PAM sequence: CTG
atcacagctatcgccacatg

SEQ ID NO: 233231 - DNA, 20 bp, Artificial Sequence
  Description of Artificial Sequence: Synthetic oligonucleotide
  Target: LAMA2; (-) strand; PAM type: YTN; PAM sequence: CTG
gacagcactgatcacagcta

SEQ ID NO: 233232 - DNA, 20 bp, Artificial Sequence
  Description of Artificial Sequence: Synthetic oligonucleotide
  Target: LAMA2; (-) strand; PAM type: YTN; PAM sequence: CTG
atggaatcctggacagcact

SEQ ID NO: 233233 - DNA, 20 bp, Artificial Sequence
  Description of Artificial Sequence: Synthetic oligonucleotide
  Target: LAMA2; (-) strand; PAM type: YTN; PAM sequence: TTC
tgatggaatcctggacagca

SEQ ID NO: 233234 - DNA, 20 bp, Artificial Sequence
  Description of Artificial Sequence: Synthetic oligonucleotide
  Target: LAMA2; (-) strand; PAM type: YTN; PAM sequence: TTT
ctgatggaatcctggacagc

SEQ ID NO: 233235 - DNA, 20 bp, Artificial Sequence
  Description of Artificial Sequence: Synthetic oligonucleotide
  Target: LAMA2; (-) strand; PAM type: YTN; PAM sequence: CTC
cagggtttctgatggaatcc

SEQ ID NO: 233236 - DNA, 20 bp, Artificial Sequence
  Description of Artificial Sequence: Synthetic oligonucleotide
  Target: LAMA2; (-) strand; PAM type: YTN; PAM sequence: CTC
tccagggtttctgatggaat

SEQ ID NO: 233237 - DNA, 20 bp, Artificial Sequence
  Description of Artificial Sequence: Synthetic oligonucleotide
  Target: LAMA2; (-) strand; PAM type: YTN; PAM sequence: TTC
cagctctccagggtttctga

SEQ ID NO: 233238 - DNA, 20 bp, Artificial Sequence
  Description of Artificial Sequence: Synthetic oligonucleotide
  Target: LAMA2; (-) strand; PAM type: YTN; PAM sequence: TTA
gaaaagttccagctctccag

SEQ ID NO: 233239 - DNA, 20 bp, Artificial Sequence
  Description of Artificial Sequence: Synthetic oligonucleotide
  Target: LAMA2; (-) strand; PAM type: YTN; PAM sequence: TTA
gttagaaaagttccagctct

SEQ ID NO: 233240 - DNA, 20 bp, Artificial Sequence
  Description of Artificial Sequence: Synthetic oligonucleotide
  Target: LAMA2; (-) strand; PAM type: YTN; PAM sequence: TTT
agttagaaaagttccagctc

SEQ ID NO: 233241 - DNA, 20 bp, Artificial Sequence
  Description of Artificial Sequence: Synthetic oligonucleotide
  Target: LAMA2; (-) strand; PAM type: YTN; PAM sequence: TTT
tagttagaaaagttccagct

SEQ ID NO: 233242 - DNA, 20 bp, Artificial Sequence
  Description of Artificial Sequence: Synthetic oligonucleotide
  Target: LAMA2; (-) strand; PAM type: YTN; PAM sequence: TTC
agttttagttagaaaagttc

SEQ ID NO: 233243 - DNA, 20 bp, Artificial Sequence
  Description of Artificial Sequence: Synthetic oligonucleotide
  Target: LAMA2; (-) strand; PAM type: YTN; PAM sequence: TTC
acattcagttttagttagaa

SEQ ID NO: 233244 - DNA, 20 bp, Artificial Sequence
  Description of Artificial Sequence: Synthetic oligonucleotide
  Target: LAMA2; (-) strand; PAM type: YTN; PAM sequence: CTT
cacattcagttttagttaga

SEQ ID NO: 233245 - DNA, 20 bp, Artificial Sequence
  Description of Artificial Sequence: Synthetic oligonucleotide
  Target: LAMA2; (-) strand; PAM type: YTN; PAM sequence: CTA
aagaacataccttcacattc

SEQ ID NO: 233246 - DNA, 20 bp, Artificial Sequence
  Description of Artificial Sequence: Synthetic oligonucleotide
  Target: LAMA2; (-) strand; PAM type: YTN; PAM sequence: TTC
taaagaacataccttcacat

SEQ ID NO: 233247 - DNA, 20 bp, Artificial Sequence
  Description of Artificial Sequence: Synthetic oligonucleotide
  Target: LAMA2; (-) strand; PAM type: YTN; PAM sequence: CTT
ctaaagaacataccttcaca

SEQ ID NO: 233248 - DNA, 20 bp, Artificial Sequence
  Description of Artificial Sequence: Synthetic oligonucleotide
  Target: LAMA2; (-) strand; PAM type: YTN; PAM sequence: TTG
gcttctaaagaacatacctt

SEQ ID NO: 233249 - DNA, 20 bp, Artificial Sequence
  Description of Artificial Sequence: Synthetic oligonucleotide
  Target: LAMA2; (-) strand; PAM type: YTN; PAM sequence: TTG
ttggcttctaaagaacatac

SEQ ID NO: 233250 - DNA, 20 bp, Artificial Sequence
  Description of Artificial Sequence: Synthetic oligonucleotide
  Target: LAMA2; (-) strand; PAM type: YTN; PAM sequence: TTT
gttggcttctaaagaacata

SEQ ID NO: 233251 - DNA, 20 bp, Artificial Sequence
  Description of Artificial Sequence: Synthetic oligonucleotide
  Target: LAMA2; (-) strand; PAM type: YTN; PAM sequence: TTT
tgttggcttctaaagaacat

SEQ ID NO: 233252 - DNA, 20 bp, Artificial Sequence
  Description of Artificial Sequence: Synthetic oligonucleotide
  Target: LAMA2; (-) strand; PAM type: YTN; PAM sequence: TTG
gaaaggaagaatgacatatt

SEQ ID NO: 233253 - DNA, 20 bp, Artificial Sequence
  Description of Artificial Sequence: Synthetic oligonucleotide
  Target: LAMA2; (-) strand; PAM type: YTN; PAM sequence: CTT
ggaaaggaagaatgacatat

SEQ ID NO: 233254 - DNA, 20 bp, Artificial Sequence
  Description of Artificial Sequence: Synthetic oligonucleotide
  Target: LAMA2; (-) strand; PAM type: YTN; PAM sequence: TTC
ttggaaaggaagaatgacat

SEQ ID NO: 233255 - DNA, 20 bp, Artificial Sequence
  Description of Artificial Sequence: Synthetic oligonucleotide
  Target: LAMA2; (-) strand; PAM type: YTN; PAM sequence: TTT
cttggaaaggaagaatgaca

SEQ ID NO: 233256 - DNA, 20 bp, Artificial Sequence
  Description of Artificial Sequence: Synthetic oligonucleotide
  Target: LAMA2; (-) strand; PAM type: YTN; PAM sequence: TTT
tcttggaaaggaagaatgac

SEQ ID NO: 233257 - DNA, 20 bp, Artificial Sequence
  Description of Artificial Sequence: Synthetic oligonucleotide
  Target: LAMA2; (-) strand; PAM type: YTN; PAM sequence: TTT
ttcttggaaaggaagaatga

SEQ ID NO: 233258 - DNA, 20 bp, Artificial Sequence
  Description of Artificial Sequence: Synthetic oligonucleotide
  Target: LAMA2; (-) strand; PAM type: YTN; PAM sequence: TTT
tttcttggaaaggaagaatg

SEQ ID NO: 233259 - DNA, 20 bp, Artificial Sequence
  Description of Artificial Sequence: Synthetic oligonucleotide
  Target: LAMA2; (-) strand; PAM type: YTN; PAM sequence: TTT
ttttcttggaaaggaagaat

SEQ ID NO: 233260 - DNA, 20 bp, Artificial Sequence
  Description of Artificial Sequence: Synthetic oligonucleotide
  Target: LAMA2; (-) strand; PAM type: YTN; PAM sequence: CTT
tttttcttggaaaggaagaa

SEQ ID NO: 233261 - DNA, 20 bp, Artificial Sequence
  Description of Artificial Sequence: Synthetic oligonucleotide
  Target: LAMA2; (-) strand; PAM type: YTN; PAM sequence: CTG
gctttttttcttggaaagga

SEQ ID NO: 233262 - DNA, 20 bp, Artificial Sequence
  Description of Artificial Sequence: Synthetic oligonucleotide
  Target: LAMA2; (-) strand; PAM type: YTN; PAM sequence: TTA
ctggctttttttcttggaaa

SEQ ID NO: 233263 - DNA, 20 bp, Artificial Sequence
  Description of Artificial Sequence: Synthetic oligonucleotide
  Target: LAMA2; (-) strand; PAM type: YTN; PAM sequence: TTC
attactggctttttttcttg

SEQ ID NO: 233264 - DNA, 20 bp, Artificial Sequence
  Description of Artificial Sequence: Synthetic oligonucleotide
  Target: LAMA2; (-) strand; PAM type: YTN; PAM sequence: TTT
cattactggctttttttctt

SEQ ID NO: 233265 - DNA, 20 bp, Artificial Sequence
  Description of Artificial Sequence: Synthetic oligonucleotide
  Target: LAMA2; (-) strand; PAM type: YTN; PAM sequence: TTT
tcattactggctttttttct

SEQ ID NO: 233266 - DNA, 20 bp, Artificial Sequence
  Description of Artificial Sequence: Synthetic oligonucleotide
  Target: LAMA2; (-) strand; PAM type: YTN; PAM sequence: TTT
ttcattactggctttttttc

SEQ ID NO: 233267 - DNA, 20 bp, Artificial Sequence
  Description of Artificial Sequence: Synthetic oligonucleotide
  Target: LAMA2; (-) strand; PAM type: YTN; PAM sequence: CTA
tttttcattactggcttttt

SEQ ID NO: 233268 - DNA, 20 bp, Artificial Sequence
  Description of Artificial Sequence: Synthetic oligonucleotide
  Target: LAMA2; (-) strand; PAM type: YTN; PAM sequence: TTC
actatttttcattactggct

SEQ ID NO: 233269 - DNA, 20 bp, Artificial Sequence
  Description of Artificial Sequence: Synthetic oligonucleotide
  Target: LAMA2; (-) strand; PAM type: YTN; PAM sequence: TTT
cactatttttcattactggc

SEQ ID NO: 233270 - DNA, 20 bp, Artificial Sequence
  Description of Artificial Sequence: Synthetic oligonucleotide
  Target: LAMA2; (-) strand; PAM type: YTN; PAM sequence: TTG
cataaccagccatttcacta

SEQ ID NO: 233271 - DNA, 20 bp, Artificial Sequence
  Description of Artificial Sequence: Synthetic oligonucleotide
  Target: LAMA2; (-) strand; PAM type: YTN; PAM sequence: TTT
gcataaccagccatttcact

SEQ ID NO: 233272 - DNA, 20 bp, Artificial Sequence
  Description of Artificial Sequence: Synthetic oligonucleotide
  Target: LAMA2; (-) strand; PAM type: YTN; PAM sequence: TTG
acacatttgcataaccagcc

SEQ ID NO: 233273 - DNA, 20 bp, Artificial Sequence
  Description of Artificial Sequence: Synthetic oligonucleotide
  Target: LAMA2; (-) strand; PAM type: YTN; PAM sequence: TTG
ttgacacatttgcataacca

SEQ ID NO: 233274 - DNA, 20 bp, Artificial Sequence
  Description of Artificial Sequence: Synthetic oligonucleotide
  Target: LAMA2; (-) strand; PAM type: YTN; PAM sequence: TTT
gttgacacatttgcataacc

SEQ ID NO: 233275 - DNA, 20 bp, Artificial Sequence
  Description of Artificial Sequence: Synthetic oligonucleotide
  Target: LAMA2; (-) strand; PAM type: YTN; PAM sequence: TTC
gaagtgataatataaatgag

SEQ ID NO: 233276 - DNA, 20 bp, Artificial Sequence
  Description of Artificial Sequence: Synthetic oligonucleotide
  Target: LAMA2; (-) strand; PAM type: YTN; PAM sequence: CTT
cgaagtgataatataaatga

SEQ ID NO: 233277 - DNA, 20 bp, Artificial Sequence
  Description of Artificial Sequence: Synthetic oligonucleotide
  Target: LAMA2; (-) strand; PAM type: YTN; PAM sequence: TTG
tcttcgaagtgataatataa

SEQ ID NO: 233278 - DNA, 20 bp, Artificial Sequence
  Description of Artificial Sequence: Synthetic oligonucleotide
  Target: LAMA2; (-) strand; PAM type: YTN; PAM sequence: CTA
gacatatgggttgtcttcga

SEQ ID NO: 233279 - DNA, 20 bp, Artificial Sequence
  Description of Artificial Sequence: Synthetic oligonucleotide
  Target: LAMA2; (-) strand; PAM type: YTN; PAM sequence: TTA
ggaaaagctagacatatggg

SEQ ID NO: 233280 - DNA, 20 bp, Artificial Sequence
  Description of Artificial Sequence: Synthetic oligonucleotide
  Target: LAMA2; (-) strand; PAM type: YTN; PAM sequence: TTT
aggaaaagctagacatatgg

SEQ ID NO: 233281 - DNA, 20 bp, Artificial Sequence
  Description of Artificial Sequence: Synthetic oligonucleotide
  Target: LAMA2; (-) strand; PAM type: YTN; PAM sequence: CTT
taggaaaagctagacatatg

SEQ ID NO: 233282 - DNA, 20 bp, Artificial Sequence
  Description of Artificial Sequence: Synthetic oligonucleotide
  Target: LAMA2; (-) strand; PAM type: YTN; PAM sequence: TTC
cctttaggaaaagctagaca

SEQ ID NO: 233283 - DNA, 20 bp, Artificial Sequence
  Description of Artificial Sequence: Synthetic oligonucleotide
  Target: LAMA2; (-) strand; PAM type: YTN; PAM sequence: TTT
ccctttaggaaaagctagac

SEQ ID NO: 233284 - DNA, 20 bp, Artificial Sequence
  Description of Artificial Sequence: Synthetic oligonucleotide
  Target: LAMA2; (-) strand; PAM type: YTN; PAM sequence: TTA
gatatttccctttaggaaaa

SEQ ID NO: 233285 - DNA, 20 bp, Artificial Sequence
  Description of Artificial Sequence: Synthetic oligonucleotide
  Target: LAMA2; (-) strand; PAM type: YTN; PAM sequence: CTT
agatatttccctttaggaaa

SEQ ID NO: 233286 - DNA, 20 bp, Artificial Sequence
  Description of Artificial Sequence: Synthetic oligonucleotide
  Target: LAMA2; (-) strand; PAM type: YTN; PAM sequence: TTC
ttagatatttccctttagga

SEQ ID NO: 233287 - DNA, 20 bp, Artificial Sequence
  Description of Artificial Sequence: Synthetic oligonucleotide
  Target: LAMA2; (-) strand; PAM type: YTN; PAM sequence: TTT
cttagatatttccctttagg

SEQ ID NO: 233288 - DNA, 20 bp, Artificial Sequence
  Description of Artificial Sequence: Synthetic oligonucleotide
  Target: LAMA2; (-) strand; PAM type: YTN; PAM sequence: CTA
catttcttagatatttccct

SEQ ID NO: 233289 - DNA, 20 bp, Artificial Sequence
  Description of Artificial Sequence: Synthetic oligonucleotide
  Target: LAMA2; (-) strand; PAM type: YTN; PAM sequence: CTG
ctacatttcttagatatttc

SEQ ID NO: 233290 - DNA, 20 bp, Artificial Sequence
  Description of Artificial Sequence: Synthetic oligonucleotide
  Target: LAMA2; (-) strand; PAM type: YTN; PAM sequence: CTA
taaagtcatctgctacattt

SEQ ID NO: 233291 - DNA, 20 bp, Artificial Sequence
  Description of Artificial Sequence: Synthetic oligonucleotide
  Target: LAMA2; (-) strand; PAM type: YTN; PAM sequence: TTA
ggctataaagtcatctgcta

SEQ ID NO: 233292 - DNA, 20 bp, Artificial Sequence
  Description of Artificial Sequence: Synthetic oligonucleotide
  Target: LAMA2; (-) strand; PAM type: YTN; PAM sequence: CTA
ttaggctataaagtcatctg

SEQ ID NO: 233293 - DNA, 20 bp, Artificial Sequence
  Description of Artificial Sequence: Synthetic oligonucleotide
  Target: LAMA2; (-) strand; PAM type: YTN; PAM sequence: TTG
tcactattaggctataaagt

SEQ ID NO: 233294 - DNA, 20 bp, Artificial Sequence
  Description of Artificial Sequence: Synthetic oligonucleotide
  Target: LAMA2; (-) strand; PAM type: YTN; PAM sequence: CTA
aaaagaccagttgtcactat

SEQ ID NO: 233295 - DNA, 20 bp, Artificial Sequence
  Description of Artificial Sequence: Synthetic oligonucleotide
  Target: LAMA2; (-) strand; PAM type: YTN; PAM sequence: CTG
tcacctaaaaagaccagttg

SEQ ID NO: 233296 - DNA, 20 bp, Artificial Sequence
  Description of Artificial Sequence: Synthetic oligonucleotide
  Target: LAMA2; (-) strand; PAM type: YTN; PAM sequence: CTC
catgatacctgtcacctaaa

SEQ ID NO: 233297 - DNA, 20 bp, Artificial Sequence
  Description of Artificial Sequence: Synthetic oligonucleotide
  Target: LAMA2; (-) strand; PAM type: YTN; PAM sequence: TTC
tccatgatacctgtcaccta

SEQ ID NO: 233298 - DNA, 20 bp, Artificial Sequence
  Description of Artificial Sequence: Synthetic oligonucleotide
  Target: LAMA2; (-) strand; PAM type: YTN; PAM sequence: TTT
ctccatgatacctgtcacct

SEQ ID NO: 233299 - DNA, 20 bp, Artificial Sequence
  Description of Artificial Sequence: Synthetic oligonucleotide
  Target: LAMA2; (-) strand; PAM type: YTN; PAM sequence: CTC
cagaaacacaggtttctcca

SEQ ID NO: 233300 - DNA, 20 bp, Artificial Sequence
  Description of Artificial Sequence: Synthetic oligonucleotide
  Target: LAMA2; (-) strand; PAM type: YTN; PAM sequence: TTG
agaaaatctccagaaacaca

SEQ ID NO: 233301 - DNA, 20 bp, Artificial Sequence
  Description of Artificial Sequence: Synthetic oligonucleotide
  Target: LAMA2; (-) strand; PAM type: YTN; PAM sequence: TTG
ggttgagaaaatctccagaa

SEQ ID NO: 233302 - DNA, 20 bp, Artificial Sequence
  Description of Artificial Sequence: Synthetic oligonucleotide
  Target: LAMA2; (-) strand; PAM type: YTN; PAM sequence: CTT
gggttgagaaaatctccaga

SEQ ID NO: 233303 - DNA, 20 bp, Artificial Sequence
  Description of Artificial Sequence: Synthetic oligonucleotide
  Target: LAMA2; (-) strand; PAM type: YTN; PAM sequence: TTC
ttgggttgagaaaatctcca

SEQ ID NO: 233304 - DNA, 20 bp, Artificial Sequence
  Description of Artificial Sequence: Synthetic oligonucleotide
  Target: LAMA2; (-) strand; PAM type: YTN; PAM sequence: TTT
cttgggttgagaaaatctcc

SEQ ID NO: 233305 - DNA, 20 bp, Artificial Sequence
  Description of Artificial Sequence: Synthetic oligonucleotide
  Target: LAMA2; (-) strand; PAM type: YTN; PAM sequence: TTT
tcttgggttgagaaaatctc

SEQ ID NO: 233306 - DNA, 20 bp, Artificial Sequence
  Description of Artificial Sequence: Synthetic oligonucleotide
  Target: LAMA2; (-) strand; PAM type: YTN; PAM sequence: CTT
ttcttgggttgagaaaatct

SEQ ID NO: 233307 - DNA, 20 bp, Artificial Sequence
  Description of Artificial Sequence: Synthetic oligonucleotide
  Target: LAMA2; (-) strand; PAM type: YTN; PAM sequence: TTA
ggtcttttcttgggttgaga

SEQ ID NO: 233308 - DNA, 20 bp, Artificial Sequence
  Description of Artificial Sequence: Synthetic oligonucleotide
  Target: LAMA2; (-) strand; PAM type: YTN; PAM sequence: TTT
aggtcttttcttgggttgag

SEQ ID NO: 233309 - DNA, 20 bp, Artificial Sequence
  Description of Artificial Sequence: Synthetic oligonucleotide
  Target: LAMA2; (-) strand; PAM type: YTN; PAM sequence: TTT
taggtcttttcttgggttga

SEQ ID NO: 233310 - DNA, 20 bp, Artificial Sequence
  Description of Artificial Sequence: Synthetic oligonucleotide
  Target: LAMA2; (-) strand; PAM type: YTN; PAM sequence: TTT
ttaggtcttttcttgggttg

SEQ ID NO: 233311 - DNA, 20 bp, Artificial Sequence
  Description of Artificial Sequence: Synthetic oligonucleotide
  Target: LAMA2; (-) strand; PAM type: YTN; PAM sequence: CTA
tttttaggtcttttcttggg

SEQ ID NO: 233312 - DNA, 20 bp, Artificial Sequence
  Description of Artificial Sequence: Synthetic oligonucleotide
  Target: LAMA2; (-) strand; PAM type: YTN; PAM sequence: TTC
agcccaagactatttttagg

SEQ ID NO: 233313 - DNA, 20 bp, Artificial Sequence
  Description of Artificial Sequence: Synthetic oligonucleotide
  Target: LAMA2; (-) strand; PAM type: YTN; PAM sequence: TTG
cagttcagcccaagactatt

SEQ ID NO: 233314 - DNA, 20 bp, Artificial Sequence
  Description of Artificial Sequence: Synthetic oligonucleotide
  Target: LAMA2; (-) strand; PAM type: YTN; PAM sequence: TTT
gcagttcagcccaagactat

SEQ ID NO: 233315 - DNA, 20 bp, Artificial Sequence
  Description of Artificial Sequence: Synthetic oligonucleotide
  Target: LAMA2; (-) strand; PAM type: YTN; PAM sequence: TTA
ggtttgcagttcagcccaag

SEQ ID NO: 233316 - DNA, 20 bp, Artificial Sequence
  Description of Artificial Sequence: Synthetic oligonucleotide
  Target: LAMA2; (-) strand; PAM type: YTN; PAM sequence: TTT
aggtttgcagttcagcccaa

SEQ ID NO: 233317 - DNA, 20 bp, Artificial Sequence
  Description of Artificial Sequence: Synthetic oligonucleotide
  Target: LAMA2; (-) strand; PAM type: YTN; PAM sequence: CTA
gtttaggtttgcagttcagc

SEQ ID NO: 233318 - DNA, 20 bp, Artificial Sequence
  Description of Artificial Sequence: Synthetic oligonucleotide
  Target: LAMA2; (-) strand; PAM type: YTN; PAM sequence: TTC
atactagtttaggtttgcag

SEQ ID NO: 233319 - DNA, 20 bp, Artificial Sequence
  Description of Artificial Sequence: Synthetic oligonucleotide
  Target: LAMA2; (-) strand; PAM type: YTN; PAM sequence: CTT
catactagtttaggtttgca

SEQ ID NO: 233320 - DNA, 20 bp, Artificial Sequence
  Description of Artificial Sequence: Synthetic oligonucleotide
  Target: LAMA2; (-) strand; PAM type: YTN; PAM sequence: TTG
gacttcatactagtttaggt

SEQ ID NO: 233321 - DNA, 20 bp, Artificial Sequence
  Description of Artificial Sequence: Synthetic oligonucleotide
  Target: LAMA2; (-) strand; PAM type: YTN; PAM sequence: TTG
aattggacttcatactagtt

SEQ ID NO: 233322 - DNA, 20 bp, Artificial Sequence
  Description of Artificial Sequence: Synthetic oligonucleotide
  Target: LAMA2; (-) strand; PAM type: YTN; PAM sequence: TTC
agttgaattggacttcatac

SEQ ID NO: 233323 - DNA, 20 bp, Artificial Sequence
  Description of Artificial Sequence: Synthetic oligonucleotide
  Target: LAMA2; (-) strand; PAM type: YTN; PAM sequence: TTG
cattcagttgaattggactt

SEQ ID NO: 233324 - DNA, 20 bp, Artificial Sequence
  Description of Artificial Sequence: Synthetic oligonucleotide
  Target: LAMA2; (-) strand; PAM type: YTN; PAM sequence: TTT
gcattcagttgaattggact

SEQ ID NO: 233325 - DNA, 20 bp, Artificial Sequence
  Description of Artificial Sequence: Synthetic oligonucleotide
  Target: LAMA2; (-) strand; PAM type: YTN; PAM sequence: TTA
atatttgcattcagttgaat

SEQ ID NO: 233326 - DNA, 20 bp, Artificial Sequence
  Description of Artificial Sequence: Synthetic oligonucleotide
  Target: LAMA2; (-) strand; PAM type: YTN; PAM sequence: CTG
taatattaatatttgcattc

SEQ ID NO: 233327 - DNA, 20 bp, Artificial Sequence
  Description of Artificial Sequence: Synthetic oligonucleotide
  Target: LAMA2; (-) strand; PAM type: YTN; PAM sequence: TTA
ctgtaatattaatatttgca

SEQ ID NO: 233328 - DNA, 20 bp, Artificial Sequence
  Description of Artificial Sequence: Synthetic oligonucleotide
  Target: LAMA2; (-) strand; PAM type: YTN; PAM sequence: TTT
actgtaatattaatatttgc

SEQ ID NO: 233329 - DNA, 20 bp, Artificial Sequence
  Description of Artificial Sequence: Synthetic oligonucleotide
  Target: LAMA2; (-) strand; PAM type: YTN; PAM sequence: CTG
atttactgtaatattaatat

SEQ ID NO: 233330 - DNA, 20 bp, Artificial Sequence
  Description of Artificial Sequence: Synthetic oligonucleotide
  Target: LAMA2; (-) strand; PAM type: YTN; PAM sequence: TTA
gggctgatttactgtaatat

SEQ ID NO: 233331 - DNA, 20 bp, Artificial Sequence
  Description of Artificial Sequence: Synthetic oligonucleotide
  Target: LAMA2; (-) strand; PAM type: YTN; PAM sequence: CTG
aaaaaaatgtggttagggct

SEQ ID NO: 233332 - DNA, 20 bp, Artificial Sequence
  Description of Artificial Sequence: Synthetic oligonucleotide
  Target: LAMA2; (-) strand; PAM type: YTN; PAM sequence: TTA
gtgagctgaaaaaaatgtgg

SEQ ID NO: 233333 - DNA, 20 bp, Artificial Sequence
  Description of Artificial Sequence: Synthetic oligonucleotide
  Target: LAMA2; (-) strand; PAM type: YTN; PAM sequence: CTT
agtgagctgaaaaaaatgtg

SEQ ID NO: 233334 - DNA, 20 bp, Artificial Sequence
  Description of Artificial Sequence: Synthetic oligonucleotide
  Target: LAMA2; (-) strand; PAM type: YTN; PAM sequence: TTG
aaggccatatatacttagtg

SEQ ID NO: 233335 - DNA, 20 bp, Artificial Sequence
  Description of Artificial Sequence: Synthetic oligonucleotide
  Target: LAMA2; (-) strand; PAM type: YTN; PAM sequence: TTT
gaaggccatatatacttagt

SEQ ID NO: 233336 - DNA, 20 bp, Artificial Sequence
  Description of Artificial Sequence: Synthetic oligonucleotide
  Target: LAMA2; (-) strand; PAM type: YTN; PAM sequence: TTT
tgaaggccatatatacttag

SEQ ID NO: 233337 - DNA, 20 bp, Artificial Sequence
  Description of Artificial Sequence: Synthetic oligonucleotide
  Target: LAMA2; (-) strand; PAM type: YTN; PAM sequence: TTT
ttgaaggccatatatactta

SEQ ID NO: 233338 - DNA, 20 bp, Artificial Sequence
  Description of Artificial Sequence: Synthetic oligonucleotide
  Target: LAMA2; (-) strand; PAM type: YTN; PAM sequence: CTG
tttttgaaggccatatatac

SEQ ID NO: 233339 - DNA, 20 bp, Artificial Sequence
  Description of Artificial Sequence: Synthetic oligonucleotide
  Target: LAMA2; (-) strand; PAM type: YTN; PAM sequence: CTA
tcaagctgtttttgaaggcc

SEQ ID NO: 233340 - DNA, 20 bp, Artificial Sequence
  Description of Artificial Sequence: Synthetic oligonucleotide
  Target: LAMA2; (-) strand; PAM type: YTN; PAM sequence: TTA
aaatgtctatcaagctgttt

SEQ ID NO: 233341 - DNA, 20 bp, Artificial Sequence
  Description of Artificial Sequence: Synthetic oligonucleotide
  Target: LAMA2; (-) strand; PAM type: YTN; PAM sequence: TTT
aaaatgtctatcaagctgtt

SEQ ID NO: 233342 - DNA, 20 bp, Artificial Sequence
  Description of Artificial Sequence: Synthetic oligonucleotide
  Target: LAMA2; (-) strand; PAM type: YTN; PAM sequence: TTA
atttaaaatgtctatcaagc

SEQ ID NO: 233343 - DNA, 20 bp, Artificial Sequence
  Description of Artificial Sequence: Synthetic oligonucleotide
  Target: LAMA2; (-) strand; PAM type: YTN; PAM sequence: TTG
gtattaatttaaaatgtcta

SEQ ID NO: 233344 - DNA, 20 bp, Artificial Sequence
  Description of Artificial Sequence: Synthetic oligonucleotide
  Target: LAMA2; (-) strand; PAM type: YTN; PAM sequence: TTC
aaaggatatatagtgttggt

SEQ ID NO: 233345 - DNA, 20 bp, Artificial Sequence
  Description of Artificial Sequence: Synthetic oligonucleotide
  Target: LAMA2; (-) strand; PAM type: YTN; PAM sequence: TTA
ttcaaaggatatatagtgtt

SEQ ID NO: 233346 - DNA, 20 bp, Artificial Sequence
  Description of Artificial Sequence: Synthetic oligonucleotide
  Target: LAMA2; (-) strand; PAM type: YTN; PAM sequence: TTG
ttattcaaaggatatatagt

SEQ ID NO: 233347 - DNA, 20 bp, Artificial Sequence
  Description of Artificial Sequence: Synthetic oligonucleotide
  Target: LAMA2; (-) strand; PAM type: YTN; PAM sequence: TTT
gttattcaaaggatatatag

SEQ ID NO: 233348 - DNA, 20 bp, Artificial Sequence
  Description of Artificial Sequence: Synthetic oligonucleotide
  Target: LAMA2; (-) strand; PAM type: YTN; PAM sequence: TTA
atttgttattcaaaggatat

SEQ ID NO: 233349 - DNA, 20 bp, Artificial Sequence
  Description of Artificial Sequence: Synthetic oligonucleotide
  Target: LAMA2; (-) strand; PAM type: YTN; PAM sequence: TTG
agttaatttgttattcaaag

SEQ ID NO: 233350 - DNA, 20 bp, Artificial Sequence
  Description of Artificial Sequence: Synthetic oligonucleotide
  Target: LAMA2; (-) strand; PAM type: YTN; PAM sequence: TTG
tacatgataaatgtgagttg

SEQ ID NO: 233351 - DNA, 20 bp, Artificial Sequence
  Description of Artificial Sequence: Synthetic oligonucleotide
  Target: LAMA2; (-) strand; PAM type: YTN; PAM sequence: CTG
acacattgtacatgataaat

SEQ ID NO: 233352 - DNA, 20 bp, Artificial Sequence
  Description of Artificial Sequence: Synthetic oligonucleotide
  Target: LAMA2; (-) strand; PAM type: YTN; PAM sequence: CTG
tcatgtctgacacattgtac

SEQ ID NO: 233353 - DNA, 20 bp, Artificial Sequence
  Description of Artificial Sequence: Synthetic oligonucleotide
  Target: LAMA2; (-) strand; PAM type: YTN; PAM sequence: TTA
aagacctgtcatgtctgaca

SEQ ID NO: 233354 - DNA, 20 bp, Artificial Sequence
  Description of Artificial Sequence: Synthetic oligonucleotide
  Target: LAMA2; (-) strand; PAM type: YTN; PAM sequence: TTT
aaagacctgtcatgtctgac

SEQ ID NO: 233355 - DNA, 20 bp, Artificial Sequence
  Description of Artificial Sequence: Synthetic oligonucleotide
  Target: LAMA2; (-) strand; PAM type: YTN; PAM sequence: TTT
taaagacctgtcatgtctga

SEQ ID NO: 233356 - DNA, 20 bp, Artificial Sequence
  Description of Artificial Sequence: Synthetic oligonucleotide
  Target: LAMA2; (-) strand; PAM type: YTN; PAM sequence: TTC
aatagttttaaagacctgtc

SEQ ID NO: 233357 - DNA, 20 bp, Artificial Sequence
  Description of Artificial Sequence: Synthetic oligonucleotide
  Target: LAMA2; (-) strand; PAM type: YTN; PAM sequence: TTA
tgattcaatagttttaaaga

SEQ ID NO: 233358 - DNA, 20 bp, Artificial Sequence
  Description of Artificial Sequence: Synthetic oligonucleotide
  Target: LAMA2; (-) strand; PAM type: YTN; PAM sequence: TTA
aggtgtgttatgattcaata

SEQ ID NO: 233359 - DNA, 20 bp, Artificial Sequence
  Description of Artificial Sequence: Synthetic oligonucleotide
  Target: LAMA2; (-) strand; PAM type: YTN; PAM sequence: TTG
tgattaaggtgtgttatgat

SEQ ID NO: 233360 - DNA, 20 bp, Artificial Sequence
  Description of Artificial Sequence: Synthetic oligonucleotide
  Target: LAMA2; (-) strand; PAM type: YTN; PAM sequence: TTT
gtgattaaggtgtgttatga

SEQ ID NO: 233361 - DNA, 20 bp, Artificial Sequence
  Description of Artificial Sequence: Synthetic oligonucleotide
  Target: LAMA2; (-) strand; PAM type: YTN; PAM sequence: TTT
tgtgattaaggtgtgttatg

SEQ ID NO: 233362 - DNA, 20 bp, Artificial Sequence
  Description of Artificial Sequence: Synthetic oligonucleotide
  Target: LAMA2; (-) strand; PAM type: YTN; PAM sequence: TTA
taggtggggaacattttgtg

SEQ ID NO: 233363 - DNA, 20 bp, Artificial Sequence
  Description of Artificial Sequence: Synthetic oligonucleotide
  Target: LAMA2; (-) strand; PAM type: YTN; PAM sequence: CTT
ataggtggggaacattttgt

SEQ ID NO: 233364 - DNA, 20 bp, Artificial Sequence
  Description of Artificial Sequence: Synthetic oligonucleotide
  Target: LAMA2; (-) strand; PAM type: YTN; PAM sequence: TTA
tatcttataggtggggaaca

SEQ ID NO: 233365 - DNA, 20 bp, Artificial Sequence
  Description of Artificial Sequence: Synthetic oligonucleotide
  Target: LAMA2; (-) strand; PAM type: YTN; PAM sequence: TTT
atatcttataggtggggaac

SEQ ID NO: 233366 - DNA, 20 bp, Artificial Sequence
  Description of Artificial Sequence: Synthetic oligonucleotide
  Target: LAMA2; (-) strand; PAM type: YTN; PAM sequence: CTT
tatatcttataggtggggaa

SEQ ID NO: 233367 - DNA, 20 bp, Artificial Sequence
  Description of Artificial Sequence: Synthetic oligonucleotide
  Target: LAMA2; (-) strand; PAM type: YTN; PAM sequence: TTA
gacccatggatggagaaacc

SEQ ID NO: 233368 - DNA, 20 bp, Artificial Sequence
  Description of Artificial Sequence: Synthetic oligonucleotide
  Target: LAMA2; (-) strand; PAM type: YTN; PAM sequence: TTG
gttagacccatggatggaga

SEQ ID NO: 233369 - DNA, 20 bp, Artificial Sequence
  Description of Artificial Sequence: Synthetic oligonucleotide
  Target: LAMA2; (-) strand; PAM type: YTN; PAM sequence: CTG
cagttggttagacccatgga

SEQ ID NO: 233370 - DNA, 20 bp, Artificial Sequence
  Description of Artificial Sequence: Synthetic oligonucleotide
  Target: LAMA2; (-) strand; PAM type: YTN; PAM sequence: TTG
atctgcagttggttagaccc

SEQ ID NO: 233371 - DNA, 20 bp, Artificial Sequence
  Description of Artificial Sequence: Synthetic oligonucleotide
  Target: LAMA2; (-) strand; PAM type: YTN; PAM sequence: TTT
gatctgcagttggttagacc

SEQ ID NO: 233372 - DNA, 20 bp, Artificial Sequence
  Description of Artificial Sequence: Synthetic oligonucleotide
  Target: LAMA2; (-) strand; PAM type: YTN; PAM sequence: TTT
tgatctgcagttggttagac

SEQ ID NO: 233373 - DNA, 20 bp, Artificial Sequence
  Description of Artificial Sequence: Synthetic oligonucleotide
  Target: LAMA2; (-) strand; PAM type: YTN; PAM sequence: TTT
ttgatctgcagttggttaga

SEQ ID NO: 233374 - DNA, 20 bp, Artificial Sequence
  Description of Artificial Sequence: Synthetic oligonucleotide
  Target: LAMA2; (-) strand; PAM type: YTN; PAM sequence: TTC
aaacatttttgatctgcagt

SEQ ID NO: 233375 - DNA, 20 bp, Artificial Sequence
  Description of Artificial Sequence: Synthetic oligonucleotide
  Target: LAMA2; (-) strand; PAM type: YTN; PAM sequence: TTT
caaacatttttgatctgcag

SEQ ID NO: 233376 - DNA, 20 bp, Artificial Sequence
  Description of Artificial Sequence: Synthetic oligonucleotide
  Target: LAMA2; (-) strand; PAM type: YTN; PAM sequence: TTT
tcaaacatttttgatctgca

SEQ ID NO: 233377 - DNA, 20 bp, Artificial Sequence
  Description of Artificial Sequence: Synthetic oligonucleotide
  Target: LAMA2; (-) strand; PAM type: YTN; PAM sequence: TTT
ttcaaacatttttgatctgc

SEQ ID NO: 233378 - DNA, 20 bp, Artificial Sequence
  Description of Artificial Sequence: Synthetic oligonucleotide
  Target: LAMA2; (-) strand; PAM type: YTN; PAM sequence: TTT
tttcaaacatttttgatctg

SEQ ID NO: 233379 - DNA, 20 bp, Artificial Sequence
  Description of Artificial Sequence: Synthetic oligonucleotide
  Target: LAMA2; (-) strand; PAM type: YTN; PAM sequence: TTT
ttttcaaacatttttgatct

SEQ ID NO: 233380 - DNA, 20 bp, Artificial Sequence
  Description of Artificial Sequence: Synthetic oligonucleotide
  Target: LAMA2; (-) strand; PAM type: YTN; PAM sequence: CTT
tttttcaaacatttttgatc

SEQ ID NO: 233381 - DNA, 20 bp, Artificial Sequence
  Description of Artificial Sequence: Synthetic oligonucleotide
  Target: LAMA2; (-) strand; PAM type: YTN; PAM sequence: TTC
agtacagatgcaactttttt

SEQ ID NO: 233382 - DNA, 20 bp, Artificial Sequence
  Description of Artificial Sequence: Synthetic oligonucleotide
  Target: LAMA2; (-) strand; PAM type: YTN; PAM sequence: TTA
caagttcagtacagatgcaa

SEQ ID NO: 233383 - DNA, 20 bp, Artificial Sequence
  Description of Artificial Sequence: Synthetic oligonucleotide
  Target: LAMA2; (-) strand; PAM type: YTN; PAM sequence: TTT
acaagttcagtacagatgca

SEQ ID NO: 233384 - DNA, 20 bp, Artificial Sequence
  Description of Artificial Sequence: Synthetic oligonucleotide
  Target: LAMA2; (-) strand; PAM type: YTN; PAM sequence: CTT
tacaagttcagtacagatgc

SEQ ID NO: 233385 - DNA, 20 bp, Artificial Sequence
  Description of Artificial Sequence: Synthetic oligonucleotide
  Target: LAMA2; (-) strand; PAM type: YTN; PAM sequence: TTA
ggaaataataataagaaaaa

SEQ ID NO: 233386 - DNA, 20 bp, Artificial Sequence
  Description of Artificial Sequence: Synthetic oligonucleotide
  Target: LAMA2; (-) strand; PAM type: YTN; PAM sequence: CTT
aggaaataataataagaaaa

SEQ ID NO: 233387 - DNA, 20 bp, Artificial Sequence
  Description of Artificial Sequence: Synthetic oligonucleotide
  Target: LAMA2; (-) strand; PAM type: YTN; PAM sequence: TTG
cttaggaaataataataaga

SEQ ID NO: 233388 - DNA, 20 bp, Artificial Sequence
  Description of Artificial Sequence: Synthetic oligonucleotide
  Target: LAMA2; (-) strand; PAM type: YTN; PAM sequence: TTA
tattgcttaggaaataataa

SEQ ID NO: 233389 - DNA, 20 bp, Artificial Sequence
  Description of Artificial Sequence: Synthetic oligonucleotide
  Target: LAMA2; (-) strand; PAM type: YTN; PAM sequence: TTG
ttatattgcttaggaaataa

SEQ ID NO: 233390 - DNA, 20 bp, Artificial Sequence
  Description of Artificial Sequence: Synthetic oligonucleotide
  Target: LAMA2; (-) strand; PAM type: YTN; PAM sequence: CTA
tataaatagttgttatattg

SEQ ID NO: 233391 - DNA, 20 bp, Artificial Sequence
  Description of Artificial Sequence: Synthetic oligonucleotide
  Target: LAMA2; (-) strand; PAM type: YTN; PAM sequence: CTA
acaaaatgtaaatgctatat

SEQ ID NO: 233392 - DNA, 20 bp, Artificial Sequence
  Description of Artificial Sequence: Synthetic oligonucleotide
  Target: LAMA2; (-) strand; PAM type: YTN; PAM sequence: TTA
taatacctaacaaaatgtaa

SEQ ID NO: 233393 - DNA, 20 bp, Artificial Sequence
  Description of Artificial Sequence: Synthetic oligonucleotide
  Target: LAMA2; (-) strand; PAM type: YTN; PAM sequence: CTT
ataatacctaacaaaatgta

SEQ ID NO: 233394 - DNA, 20 bp, Artificial Sequence
  Description of Artificial Sequence: Synthetic oligonucleotide
  Target: LAMA2; (-) strand; PAM type: YTN; PAM sequence: TTA
cttataatacctaacaaaat

SEQ ID NO: 233395 - DNA, 20 bp, Artificial Sequence
  Description of Artificial Sequence: Synthetic oligonucleotide
  Target: LAMA2; (-) strand; PAM type: YTN; PAM sequence: CTA
gattacttataatacctaac

SEQ ID NO: 233396 - DNA, 20 bp, Artificial Sequence
  Description of Artificial Sequence: Synthetic oligonucleotide
  Target: LAMA2; (-) strand; PAM type: YTN; PAM sequence: CTC
tagattacttataataccta

SEQ ID NO: 233397 - DNA, 20 bp, Artificial Sequence
  Description of Artificial Sequence: Synthetic oligonucleotide
  Target: LAMA2; (-) strand; PAM type: YTN; PAM sequence: TTA
gatcatctctagattactta

SEQ ID NO: 233398 - DNA, 20 bp, Artificial Sequence
  Description of Artificial Sequence: Synthetic oligonucleotide
  Target: LAMA2; (-) strand; PAM type: YTN; PAM sequence: TTT
agatcatctctagattactt

SEQ ID NO: 233399 - DNA, 20 bp, Artificial Sequence
  Description of Artificial Sequence: Synthetic oligonucleotide
  Target: LAMA2; (-) strand; PAM type: YTN; PAM sequence: CTT
tagatcatctctagattact

SEQ ID NO: 233400 - DNA, 20 bp, Artificial Sequence
  Description of Artificial Sequence: Synthetic oligonucleotide
  Target: LAMA2; (-) strand; PAM type: YTN; PAM sequence: CTG
tacactttagatcatctcta

SEQ ID NO: 233401 - DNA, 20 bp, Artificial Sequence
  Description of Artificial Sequence: Synthetic oligonucleotide
  Target: LAMA2; (-) strand; PAM type: YTN; PAM sequence: CTC
ctgtacactttagatcatct

SEQ ID NO: 233402 - DNA, 20 bp, Artificial Sequence
  Description of Artificial Sequence: Synthetic oligonucleotide
  Target: LAMA2; (-) strand; PAM type: YTN; PAM sequence: CTA
tgcacatcctcctgtacact

SEQ ID NO: 233403 - DNA, 20 bp, Artificial Sequence
  Description of Artificial Sequence: Synthetic oligonucleotide
  Target: LAMA2; (-) strand; PAM type: YTN; PAM sequence: TTG
catacagcctatgcacatcc

SEQ ID NO: 233404 - DNA, 20 bp, Artificial Sequence
  Description of Artificial Sequence: Synthetic oligonucleotide
  Target: LAMA2; (-) strand; PAM type: YTN; PAM sequence: CTT
gcatacagcctatgcacatc

SEQ ID NO: 233405 - DNA, 20 bp, Artificial Sequence
  Description of Artificial Sequence: Synthetic oligonucleotide
  Target: LAMA2; (-) strand; PAM type: YTN; PAM sequence: TTA
tacagtggcatagtacttgc

SEQ ID NO: 233406 - DNA, 20 bp, Artificial Sequence
  Description of Artificial Sequence: Synthetic oligonucleotide
  Target: LAMA2; (-) strand; PAM type: YTN; PAM sequence: CTG
ttatacagtggcatagtact

SEQ ID NO: 233407 - DNA, 20 bp, Artificial Sequence
  Description of Artificial Sequence: Synthetic oligonucleotide
  Target: LAMA2; (-) strand; PAM type: YTN; PAM sequence: TTC
ctgttatacagtggcatagt

SEQ ID NO: 233408 - DNA, 20 bp, Artificial Sequence
  Description of Artificial Sequence: Synthetic oligonucleotide
  Target: LAMA2; (-) strand; PAM type: YTN; PAM sequence: CTC
aagttcctgttatacagtgg

SEQ ID NO: 233409 - DNA, 20 bp, Artificial Sequence
  Description of Artificial Sequence: Synthetic oligonucleotide
  Target: LAMA2; (-) strand; PAM type: YTN; PAM sequence: TTC
aaggatactcaagttcctgt

SEQ ID NO: 233410 - DNA, 20 bp, Artificial Sequence
  Description of Artificial Sequence: Synthetic oligonucleotide
  Target: LAMA2; (-) strand; PAM type: YTN; PAM sequence: CTC
aaacaccaagattcaaggat

SEQ ID NO: 233411 - DNA, 20 bp, Artificial Sequence
  Description of Artificial Sequence: Synthetic oligonucleotide
  Target: LAMA2; (-) strand; PAM type: YTN; PAM sequence: CTC
cctcaaacaccaagattcaa

SEQ ID NO: 233412 - DNA, 20 bp, Artificial Sequence
  Description of Artificial Sequence: Synthetic oligonucleotide
  Target: LAMA2; (-) strand; PAM type: YTN; PAM sequence: TTC
caggacctccctcaaacacc

SEQ ID NO: 233413 - DNA, 20 bp, Artificial Sequence
  Description of Artificial Sequence: Synthetic oligonucleotide
  Target: LAMA2; (-) strand; PAM type: YTN; PAM sequence: CTC
aatatccatgggaatggttc

SEQ ID NO: 233414 - DNA, 20 bp, Artificial Sequence
  Description of Artificial Sequence: Synthetic oligonucleotide
  Target: LAMA2; (-) strand; PAM type: YTN; PAM sequence: CTA
aaaagaaaatacagccatcc

SEQ ID NO: 233415 - DNA, 20 bp, Artificial Sequence
  Description of Artificial Sequence: Synthetic oligonucleotide
  Target: LAMA2; (-) strand; PAM type: YTN; PAM sequence: CTC
aaactaaaaagaaaatacag

SEQ ID NO: 233416 - DNA, 20 bp, Artificial Sequence
  Description of Artificial Sequence: Synthetic oligonucleotide
  Target: LAMA2; (-) strand; PAM type: YTN; PAM sequence: CTA
atagcatatatgcagaatct

SEQ ID NO: 233417 - DNA, 20 bp, Artificial Sequence
  Description of Artificial Sequence: Synthetic oligonucleotide
  Target: LAMA2; (-) strand; PAM type: YTN; PAM sequence: TTA
taaacaggcagacacaaatc

SEQ ID NO: 233418 - DNA, 20 bp, Artificial Sequence
  Description of Artificial Sequence: Synthetic oligonucleotide
  Target: LAMA2; (-) strand; PAM type: YTN; PAM sequence: TTT
ataaacaggcagacacaaat

SEQ ID NO: 233419 - DNA, 20 bp, Artificial Sequence
  Description of Artificial Sequence: Synthetic oligonucleotide
  Target: LAMA2; (-) strand; PAM type: YTN; PAM sequence: CTT
tataaacaggcagacacaaa

SEQ ID NO: 233420 - DNA, 20 bp, Artificial Sequence
  Description of Artificial Sequence: Synthetic oligonucleotide
  Target: LAMA2; (-) strand; PAM type: YTN; PAM sequence: CTA
atccataatatctttataaa

SEQ ID NO: 233421 - DNA, 20 bp, Artificial Sequence
  Description of Artificial Sequence: Synthetic oligonucleotide
  Target: LAMA2; (-) strand; PAM type: YTN; PAM sequence: TTC
taatccataatatctttata

SEQ ID NO: 233422 - DNA, 20 bp, Artificial Sequence
  Description of Artificial Sequence: Synthetic oligonucleotide
  Target: LAMA2; (-) strand; PAM type: YTN; PAM sequence: TTT
ctaatccataatatctttat

SEQ ID NO: 233423 - DNA, 20 bp, Artificial Sequence
  Description of Artificial Sequence: Synthetic oligonucleotide
  Target: LAMA2; (-) strand; PAM type: YTN; PAM sequence: TTG
taataatgggagatttctaa

SEQ ID NO: 233424 - DNA, 20 bp, Artificial Sequence
  Description of Artificial Sequence: Synthetic oligonucleotide
  Target: LAMA2; (-) strand; PAM type: YTN; PAM sequence: TTT
gtaataatgggagatttcta

SEQ ID NO: 233425 - DNA, 20 bp, Artificial Sequence
  Description of Artificial Sequence: Synthetic oligonucleotide
  Target: LAMA2; (-) strand; PAM type: YTN; PAM sequence: TTT
tgtaataatgggagatttct

SEQ ID NO: 233426 - DNA, 20 bp, Artificial Sequence
  Description of Artificial Sequence: Synthetic oligonucleotide
  Target: LAMA2; (-) strand; PAM type: YTN; PAM sequence: CTT
ttgtaataatgggagatttc

SEQ ID NO: 233427 - DNA, 20 bp, Artificial Sequence
  Description of Artificial Sequence: Synthetic oligonucleotide
  Target: LAMA2; (-) strand; PAM type: YTN; PAM sequence: CTC
cagatatgcttttgtaataa

SEQ ID NO: 233428 - DNA, 20 bp, Artificial Sequence
  Description of Artificial Sequence: Synthetic oligonucleotide
  Target: LAMA2; (-) strand; PAM type: YTN; PAM sequence: CTC
atgcctccagatatgctttt

SEQ ID NO: 233429 - DNA, 20 bp, Artificial Sequence
  Description of Artificial Sequence: Synthetic oligonucleotide
  Target: LAMA2; (-) strand; PAM type: YTN; PAM sequence: CTA
ccatgcatggtgagtgatga

SEQ ID NO: 233430 - DNA, 20 bp, Artificial Sequence
  Description of Artificial Sequence: Synthetic oligonucleotide
  Target: LAMA2; (-) strand; PAM type: YTN; PAM sequence: TTC
caatggtcccctaccatgca

SEQ ID NO: 233431 - DNA, 20 bp, Artificial Sequence
  Description of Artificial Sequence: Synthetic oligonucleotide
  Target: LAMA2; (-) strand; PAM type: YTN; PAM sequence: CTT
ccaatggtcccctaccatgc

SEQ ID NO: 233432 - DNA, 20 bp, Artificial Sequence
  Description of Artificial Sequence: Synthetic oligonucleotide
  Target: LAMA2; (-) strand; PAM type: YTN; PAM sequence: CTG
ggcttccaatggtcccctac

SEQ ID NO: 233433 - DNA, 20 bp, Artificial Sequence
  Description of Artificial Sequence: Synthetic oligonucleotide
  Target: LAMA2; (-) strand; PAM type: YTN; PAM sequence: TTG
aaggaaacaaaaggctgggc

SEQ ID NO: 233434 - DNA, 20 bp, Artificial Sequence
  Description of Artificial Sequence: Synthetic oligonucleotide
  Target: LAMA2; (-) strand; PAM type: YTN; PAM sequence: CTG
gaagtagttgaaggaaacaa

SEQ ID NO: 233435 - DNA, 20 bp, Artificial Sequence
  Description of Artificial Sequence: Synthetic oligonucleotide
  Target: LAMA2; (-) strand; PAM type: YTN; PAM sequence: TTA
gccagaacatggctggaagt

SEQ ID NO: 233436 - DNA, 20 bp, Artificial Sequence
  Description of Artificial Sequence: Synthetic oligonucleotide
  Target: LAMA2; (-) strand; PAM type: YTN; PAM sequence: CTA
agggattagccagaacatgg

SEQ ID NO: 233437 - DNA, 20 bp, Artificial Sequence
  Description of Artificial Sequence: Synthetic oligonucleotide
  Target: LAMA2; (-) strand; PAM type: YTN; PAM sequence: CTG
tggagaactaagggattagc

SEQ ID NO: 233438 - DNA, 20 bp, Artificial Sequence
  Description of Artificial Sequence: Synthetic oligonucleotide
  Target: LAMA2; (-) strand; PAM type: YTN; PAM sequence: CTA
tggagaagctgtggagaact

SEQ ID NO: 233439 - DNA, 20 bp, Artificial Sequence
  Description of Artificial Sequence: Synthetic oligonucleotide
  Target: LAMA2; (-) strand; PAM type: YTN; PAM sequence: CTC
tatggagaagctgtggagaa

SEQ ID NO: 233440 - DNA, 20 bp, Artificial Sequence
  Description of Artificial Sequence: Synthetic oligonucleotide
  Target: LAMA2; (-) strand; PAM type: YTN; PAM sequence: TTC
tctatggagaagctgtggag

SEQ ID NO: 233441 - DNA, 20 bp, Artificial Sequence
  Description of Artificial Sequence: Synthetic oligonucleotide
  Target: LAMA2; (-) strand; PAM type: YTN; PAM sequence: CTG
ttctctatggagaagctgtg

SEQ ID NO: 233442 - DNA, 20 bp, Artificial Sequence
  Description of Artificial Sequence: Synthetic oligonucleotide
  Target: LAMA2; (-) strand; PAM type: YTN; PAM sequence: TTA
agaacaaatgtctgttctct

SEQ ID NO: 233443 - DNA, 20 bp, Artificial Sequence
  Description of Artificial Sequence: Synthetic oligonucleotide
  Target: LAMA2; (-) strand; PAM type: YTN; PAM sequence: CTA
ttaagaacaaatgtctgttc

SEQ ID NO: 233444 - DNA, 20 bp, Artificial Sequence
  Description of Artificial Sequence: Synthetic oligonucleotide
  Target: LAMA2; (-) strand; PAM type: YTN; PAM sequence: TTA
aagtcactattaagaacaaa

SEQ ID NO: 233445 - DNA, 20 bp, Artificial Sequence
  Description of Artificial Sequence: Synthetic oligonucleotide
  Target: LAMA2; (-) strand; PAM type: YTN; PAM sequence: TTT
aaagtcactattaagaacaa

SEQ ID NO: 233446 - DNA, 20 bp, Artificial Sequence
  Description of Artificial Sequence: Synthetic oligonucleotide
  Target: LAMA2; (-) strand; PAM type: YTN; PAM sequence: TTA
catttaaagtcactattaag

SEQ ID NO: 233447 - DNA, 20 bp, Artificial Sequence
  Description of Artificial Sequence: Synthetic oligonucleotide
  Target: LAMA2; (-) strand; PAM type: YTN; PAM sequence: CTG
ggtggcattacatttaaagt

SEQ ID NO: 233448 - DNA, 20 bp, Artificial Sequence
  Description of Artificial Sequence: Synthetic oligonucleotide
  Target: LAMA2; (-) strand; PAM type: YTN; PAM sequence: CTC
gagagcaaacatccctgggt

SEQ ID NO: 233449 - DNA, 20 bp, Artificial Sequence
  Description of Artificial Sequence: Synthetic oligonucleotide
  Target: LAMA2; (-) strand; PAM type: YTN; PAM sequence: TTA
aaggagctcgagagcaaaca

SEQ ID NO: 233450 - DNA, 20 bp, Artificial Sequence
  Description of Artificial Sequence: Synthetic oligonucleotide
  Target: LAMA2; (-) strand; PAM type: YTN; PAM sequence: TTT
aaaggagctcgagagcaaac

SEQ ID NO: 233451 - DNA, 20 bp, Artificial Sequence
  Description of Artificial Sequence: Synthetic oligonucleotide
  Target: LAMA2; (-) strand; PAM type: YTN; PAM sequence: TTA
aaatttaaaggagctcgaga

SEQ ID NO: 233452 - DNA, 20 bp, Artificial Sequence
  Description of Artificial Sequence: Synthetic oligonucleotide
  Target: LAMA2; (-) strand; PAM type: YTN; PAM sequence: TTA
attaaaatttaaaggagctc

SEQ ID NO: 233453 - DNA, 20 bp, Artificial Sequence
  Description of Artificial Sequence: Synthetic oligonucleotide
  Target: LAMA2; (-) strand; PAM type: YTN; PAM sequence: TTT
aattaaaatttaaaggagct

SEQ ID NO: 233454 - DNA, 20 bp, Artificial Sequence
  Description of Artificial Sequence: Synthetic oligonucleotide
  Target: LAMA2; (-) strand; PAM type: YTN; PAM sequence: CTA
caaacagaagagaaatttaa

SEQ ID NO: 233455 - DNA, 20 bp, Artificial Sequence
  Description of Artificial Sequence: Synthetic oligonucleotide
  Target: LAMA2; (-) strand; PAM type: YTN; PAM sequence: TTC
tacaaacagaagagaaattt

SEQ ID NO: 233456 - DNA, 20 bp, Artificial Sequence
  Description of Artificial Sequence: Synthetic oligonucleotide
  Target: LAMA2; (-) strand; PAM type: YTN; PAM sequence: CTG
atattctacaaacagaagag

SEQ ID NO: 233457 - DNA, 20 bp, Artificial Sequence
  Description of Artificial Sequence: Synthetic oligonucleotide
  Target: LAMA2; (-) strand; PAM type: YTN; PAM sequence: TTA
ctgatattctacaaacagaa

SEQ ID NO: 233458 - DNA, 20 bp, Artificial Sequence
  Description of Artificial Sequence: Synthetic oligonucleotide
  Target: LAMA2; (-) strand; PAM type: YTN; PAM sequence: TTA
tgattactgatattctacaa

SEQ ID NO: 233459 - DNA, 20 bp, Artificial Sequence
  Description of Artificial Sequence: Synthetic oligonucleotide
  Target: LAMA2; (-) strand; PAM type: YTN; PAM sequence: CTT
atgattactgatattctaca

SEQ ID NO: 233460 - DNA, 20 bp, Artificial Sequence
  Description of Artificial Sequence: Synthetic oligonucleotide
  Target: LAMA2; (-) strand; PAM type: YTN; PAM sequence: CTC
ccacttatgattactgatat

SEQ ID NO: 233461 - DNA, 20 bp, Artificial Sequence
  Description of Artificial Sequence: Synthetic oligonucleotide
  Target: LAMA2; (-) strand; PAM type: YTN; PAM sequence: CTG
ctcccacttatgattactga

SEQ ID NO: 233462 - DNA, 20 bp, Artificial Sequence
  Description of Artificial Sequence: Synthetic oligonucleotide
  Target: LAMA2; (-) strand; PAM type: YTN; PAM sequence: TTC
aagtgctgctcccacttatg

SEQ ID NO: 233463 - DNA, 20 bp, Artificial Sequence
  Description of Artificial Sequence: Synthetic oligonucleotide
  Target: LAMA2; (-) strand; PAM type: YTN; PAM sequence: CTT
caagtgctgctcccacttat

SEQ ID NO: 233464 - DNA, 20 bp, Artificial Sequence
  Description of Artificial Sequence: Synthetic oligonucleotide
  Target: LAMA2; (-) strand; PAM type: YTN; PAM sequence: CTA
ccttcaagtgctgctcccac

SEQ ID NO: 233465 - DNA, 20 bp, Artificial Sequence
  Description of Artificial Sequence: Synthetic oligonucleotide
  Target: LAMA2; (-) strand; PAM type: YTN; PAM sequence: CTG
tgtgaaggcatgtcagtggc

SEQ ID NO: 233466 - DNA, 20 bp, Artificial Sequence
  Description of Artificial Sequence: Synthetic oligonucleotide
  Target: LAMA2; (-) strand; PAM type: YTN; PAM sequence: TTA
tcactgtgtgaaggcatgtc

SEQ ID NO: 233467 - DNA, 20 bp, Artificial Sequence
  Description of Artificial Sequence: Synthetic oligonucleotide
  Target: LAMA2; (-) strand; PAM type: YTN; PAM sequence: TTA
cacaattatcactgtgtgaa

SEQ ID NO: 233468 - DNA, 20 bp, Artificial Sequence
  Description of Artificial Sequence: Synthetic oligonucleotide
  Target: LAMA2; (-) strand; PAM type: YTN; PAM sequence: TTA
acattacacaattatcactg

SEQ ID NO: 233469 - DNA, 20 bp, Artificial Sequence
  Description of Artificial Sequence: Synthetic oligonucleotide
  Target: LAMA2; (-) strand; PAM type: YTN; PAM sequence: CTT
aacattacacaattatcact

SEQ ID NO: 233470 - DNA, 20 bp, Artificial Sequence
  Description of Artificial Sequence: Synthetic oligonucleotide
  Target: LAMA2; (-) strand; PAM type: YTN; PAM sequence: TTG
cagagccacttaacattaca

SEQ ID NO: 233471 - DNA, 20 bp, Artificial Sequence
  Description of Artificial Sequence: Synthetic oligonucleotide
  Target: LAMA2; (-) strand; PAM type: YTN; PAM sequence: TTT
gcagagccacttaacattac

SEQ ID NO: 233472 - DNA, 20 bp, Artificial Sequence
  Description of Artificial Sequence: Synthetic oligonucleotide
  Target: LAMA2; (-) strand; PAM type: YTN; PAM sequence: TTT
tgcagagccacttaacatta

SEQ ID NO: 233473 - DNA, 20 bp, Artificial Sequence
  Description of Artificial Sequence: Synthetic oligonucleotide
  Target: LAMA2; (-) strand; PAM type: YTN; PAM sequence: TTA
aacgtagaaacacaagtaaa

SEQ ID NO: 233474 - DNA, 20 bp, Artificial Sequence
  Description of Artificial Sequence: Synthetic oligonucleotide
  Target: LAMA2; (-) strand; PAM type: YTN; PAM sequence: TTT
aaacgtagaaacacaagtaa

SEQ ID NO: 233475 - DNA, 20 bp, Artificial Sequence
  Description of Artificial Sequence: Synthetic oligonucleotide
  Target: LAMA2; (-) strand; PAM type: YTN; PAM sequence: TTG
tatttaaacgtagaaacaca

SEQ ID NO: 233476 - DNA, 20 bp, Artificial Sequence
  Description of Artificial Sequence: Synthetic oligonucleotide
  Target: LAMA2; (-) strand; PAM type: YTN; PAM sequence: TTT
gtatttaaacgtagaaacac

SEQ ID NO: 233477 - DNA, 20 bp, Artificial Sequence
  Description of Artificial Sequence: Synthetic oligonucleotide
  Target: LAMA2; (-) strand; PAM type: YTN; PAM sequence: TTT
tgtatttaaacgtagaaaca

SEQ ID NO: 233478 - DNA, 20 bp, Artificial Sequence
  Description of Artificial Sequence: Synthetic oligonucleotide
  Target: LAMA2; (-) strand; PAM type: YTN; PAM sequence: TTG
ttttgtatttaaacgtagaa

SEQ ID NO: 233479 - DNA, 20 bp, Artificial Sequence
  Description of Artificial Sequence: Synthetic oligonucleotide
  Target: LAMA2; (-) strand; PAM type: YTN; PAM sequence: TTT
gttttgtatttaaacgtaga

SEQ ID NO: 233480 - DNA, 20 bp, Artificial Sequence
  Description of Artificial Sequence: Synthetic oligonucleotide
  Target: LAMA2; (-) strand; PAM type: YTN; PAM sequence: TTT
tgttttgtatttaaacgtag

SEQ ID NO: 233481 - DNA, 20 bp, Artificial Sequence
  Description of Artificial Sequence: Synthetic oligonucleotide
  Target: LAMA2; (-) strand; PAM type: YTN; PAM sequence: TTT
ttgttttgtatttaaacgta

SEQ ID NO: 233482 - DNA, 20 bp, Artificial Sequence
  Description of Artificial Sequence: Synthetic oligonucleotide
  Target: LAMA2; (-) strand; PAM type: YTN; PAM sequence: TTG
tttttgttttgtatttaaac

SEQ ID NO: 233483 - DNA, 20 bp, Artificial Sequence
  Description of Artificial Sequence: Synthetic oligonucleotide
  Target: LAMA2; (-) strand; PAM type: YTN; PAM sequence: CTC
gattgtttttgttttgtatt

SEQ ID NO: 233484 - DNA, 20 bp, Artificial Sequence
  Description of Artificial Sequence: Synthetic oligonucleotide
  Target: LAMA2; (-) strand; PAM type: YTN; PAM sequence: TTG
ctcgattgtttttgttttgt

SEQ ID NO: 233485 - DNA, 20 bp, Artificial Sequence
  Description of Artificial Sequence: Synthetic oligonucleotide
  Target: LAMA2; (-) strand; PAM type: YTN; PAM sequence: CTA
acaagttgctcgattgtttt

SEQ ID NO: 233486 - DNA, 20 bp, Artificial Sequence
  Description of Artificial Sequence: Synthetic oligonucleotide
  Target: LAMA2; (-) strand; PAM type: YTN; PAM sequence: TTG
ctaacaagttgctcgattgt

SEQ ID NO: 233487 - DNA, 20 bp, Artificial Sequence
  Description of Artificial Sequence: Synthetic oligonucleotide
  Target: LAMA2; (-) strand; PAM type: YTN; PAM sequence: CTA
ttgctaacaagttgctcgat

SEQ ID NO: 233488 - DNA, 20 bp, Artificial Sequence
  Description of Artificial Sequence: Synthetic oligonucleotide
  Target: LAMA2; (-) strand; PAM type: YTN; PAM sequence: CTC
tattgctaacaagttgctcg

SEQ ID NO: 233489 - DNA, 20 bp, Artificial Sequence
  Description of Artificial Sequence: Synthetic oligonucleotide
  Target: LAMA2; (-) strand; PAM type: YTN; PAM sequence: CTA
cctctattgctaacaagttg

SEQ ID NO: 233490 - DNA, 20 bp, Artificial Sequence
  Description of Artificial Sequence: Synthetic oligonucleotide
  Target: LAMA2; (-) strand; PAM type: YTN; PAM sequence: TTA
gtctacctctattgctaaca

SEQ ID NO: 233491 - DNA, 20 bp, Artificial Sequence
  Description of Artificial Sequence: Synthetic oligonucleotide
  Target: LAMA2; (-) strand; PAM type: YTN; PAM sequence: CTT
agtctacctctattgctaac

SEQ ID NO: 233492 - DNA, 20 bp, Artificial Sequence
  Description of Artificial Sequence: Synthetic oligonucleotide
  Target: LAMA2; (-) strand; PAM type: YTN; PAM sequence: TTG
cttagtctacctctattgct

SEQ ID NO: 233493 - DNA, 20 bp, Artificial Sequence
  Description of Artificial Sequence: Synthetic oligonucleotide
  Target: LAMA2; (-) strand; PAM type: YTN; PAM sequence: CTT
gcttagtctacctctattgc

SEQ ID NO: 233494 - DNA, 20 bp, Artificial Sequence
  Description of Artificial Sequence: Synthetic oligonucleotide
  Target: LAMA2; (-) strand; PAM type: YTN; PAM sequence: TTG
ccttgcttagtctacctcta

SEQ ID NO: 233495 - DNA, 20 bp, Artificial Sequence
  Description of Artificial Sequence: Synthetic oligonucleotide
  Target: LAMA2; (-) strand; PAM type: YTN; PAM sequence: CTT
gccttgcttagtctacctct

SEQ ID NO: 233496 - DNA, 20 bp, Artificial Sequence
  Description of Artificial Sequence: Synthetic oligonucleotide
  Target: LAMA2; (-) strand; PAM type: YTN; PAM sequence: TTG
aaatgtcttgccttgcttag

SEQ ID NO: 233497 - DNA, 20 bp, Artificial Sequence
  Description of Artificial Sequence: Synthetic oligonucleotide
  Target: LAMA2; (-) strand; PAM type: YTN; PAM sequence: TTT
gaaatgtcttgccttgctta

SEQ ID NO: 233498 - DNA, 20 bp, Artificial Sequence
  Description of Artificial Sequence: Synthetic oligonucleotide
  Target: LAMA2; (-) strand; PAM type: YTN; PAM sequence: TTA
aaaatgtgtacagtagcagt

SEQ ID NO: 233499 - DNA, 20 bp, Artificial Sequence
  Description of Artificial Sequence: Synthetic oligonucleotide
  Target: LAMA2; (-) strand; PAM type: YTN; PAM sequence: TTT
aaaaatgtgtacagtagcag

SEQ ID NO: 233500 - DNA, 20 bp, Artificial Sequence
  Description of Artificial Sequence: Synthetic oligonucleotide
  Target: LAMA2; (-) strand; PAM type: YTN; PAM sequence: TTT
taaaaatgtgtacagtagca

SEQ ID NO: 233501 - DNA, 20 bp, Artificial Sequence
  Description of Artificial Sequence: Synthetic oligonucleotide
  Target: LAMA2; (-) strand; PAM type: YTN; PAM sequence: CTA
ttttaaaaatgtgtacagta

SEQ ID NO: 233502 - DNA, 20 bp, Artificial Sequence
  Description of Artificial Sequence: Synthetic oligonucleotide
  Target: LAMA2; (-) strand; PAM type: YTN; PAM sequence: TTC
cactattttaaaaatgtgta

SEQ ID NO: 233503 - DNA, 20 bp, Artificial Sequence
  Description of Artificial Sequence: Synthetic oligonucleotide
  Target: LAMA2; (-) strand; PAM type: YTN; PAM sequence: TTC
acaattccactattttaaaa

SEQ ID NO: 233504 - DNA, 20 bp, Artificial Sequence
  Description of Artificial Sequence: Synthetic oligonucleotide
  Target: LAMA2; (-) strand; PAM type: YTN; PAM sequence: TTT
cacaattccactattttaaa

SEQ ID NO: 233505 - DNA, 20 bp, Artificial Sequence
  Description of Artificial Sequence: Synthetic oligonucleotide
  Target: LAMA2; (-) strand; PAM type: YTN; PAM sequence: CTA
cagggaaagaaaaaaagtgt

SEQ ID NO: 233506 - DNA, 20 bp, Artificial Sequence
  Description of Artificial Sequence: Synthetic oligonucleotide
  Target: LAMA2; (-) strand; PAM type: YTN; PAM sequence: TTC
cctacagggaaagaaaaaaa

SEQ ID NO: 233507 - DNA, 20 bp, Artificial Sequence
  Description of Artificial Sequence: Synthetic oligonucleotide
  Target: LAMA2; (-) strand; PAM type: YTN; PAM sequence: CTT
ccctacagggaaagaaaaaa

SEQ ID NO: 233508 - DNA, 20 bp, Artificial Sequence
  Description of Artificial Sequence: Synthetic oligonucleotide
  Target: LAMA2; (-) strand; PAM type: YTN; PAM sequence: CTC
ttccctacagggaaagaaaa

SEQ ID NO: 233509 - DNA, 20 bp, Artificial Sequence
  Description of Artificial Sequence: Synthetic oligonucleotide
  Target: LAMA2; (-) strand; PAM type: YTN; PAM sequence: CTC
ccctcttccctacagggaaa

SEQ ID NO: 233510 - DNA, 20 bp, Artificial Sequence
  Description of Artificial Sequence: Synthetic oligonucleotide
  Target: LAMA2; (-) strand; PAM type: YTN; PAM sequence: TTG
gaaatacgacctcccctctt

SEQ ID NO: 233511 - DNA, 20 bp, Artificial Sequence
  Description of Artificial Sequence: Synthetic oligonucleotide
  Target: LAMA2; (-) strand; PAM type: YTN; PAM sequence: TTT
ggaaatacgacctcccctct

SEQ ID NO: 233512 - DNA, 20 bp, Artificial Sequence
  Description of Artificial Sequence: Synthetic oligonucleotide
  Target: LAMA2; (-) strand; PAM type: YTN; PAM sequence: TTC
agtttggaaatacgacctcc

SEQ ID NO: 233513 - DNA, 20 bp, Artificial Sequence
  Description of Artificial Sequence: Synthetic oligonucleotide
  Target: LAMA2; (-) strand; PAM type: YTN; PAM sequence: TTT
cagtttggaaatacgacctc

SEQ ID NO: 233514 - DNA, 20 bp, Artificial Sequence
  Description of Artificial Sequence: Synthetic oligonucleotide
  Target: LAMA2; (-) strand; PAM type: YTN; PAM sequence: TTT
tcagtttggaaatacgacct

SEQ ID NO: 233515 - DNA, 20 bp, Artificial Sequence
  Description of Artificial Sequence: Synthetic oligonucleotide
  Target: LAMA2; (-) strand; PAM type: YTN; PAM sequence: TTT
ttcagtttggaaatacgacc

SEQ ID NO: 233516 - DNA, 20 bp, Artificial Sequence
  Description of Artificial Sequence: Synthetic oligonucleotide
  Target: LAMA2; (-) strand; PAM type: YTN; PAM sequence: TTG
tttttcagtttggaaatacg

SEQ ID NO: 233517 - DNA, 20 bp, Artificial Sequence
  Description of Artificial Sequence: Synthetic oligonucleotide
  Target: LAMA2; (-) strand; PAM type: YTN; PAM sequence: TTT
gtttttcagtttggaaatac

SEQ ID NO: 233518 - DNA, 20 bp, Artificial Sequence
  Description of Artificial Sequence: Synthetic oligonucleotide
  Target: LAMA2; (-) strand; PAM type: YTN; PAM sequence: TTA
aaatgtttgtttttcagttt

SEQ ID NO: 233519 - DNA, 20 bp, Artificial Sequence
  Description of Artificial Sequence: Synthetic oligonucleotide
  Target: LAMA2; (-) strand; PAM type: YTN; PAM sequence: TTT
aaaatgtttgtttttcagtt

SEQ ID NO: 233520 - DNA, 20 bp, Artificial Sequence
  Description of Artificial Sequence: Synthetic oligonucleotide
  Target: LAMA2; (-) strand; PAM type: YTN; PAM sequence: TTT
taaaatgtttgtttttcagt

SEQ ID NO: 233521 - DNA, 20 bp, Artificial Sequence
  Description of Artificial Sequence: Synthetic oligonucleotide
  Target: LAMA2; (-) strand; PAM type: YTN; PAM sequence: TTT
ttaaaatgtttgtttttcag

SEQ ID NO: 233522 - DNA, 20 bp, Artificial Sequence
  Description of Artificial Sequence: Synthetic oligonucleotide
  Target: LAMA2; (-) strand; PAM type: YTN; PAM sequence: CTG
cgtttttaaaatgtttgttt

SEQ ID NO: 233523 - DNA, 20 bp, Artificial Sequence
  Description of Artificial Sequence: Synthetic oligonucleotide
  Target: LAMA2; (-) strand; PAM type: YTN; PAM sequence: TTC
tgcgtttttaaaatgtttgt

SEQ ID NO: 233524 - DNA, 20 bp, Artificial Sequence
  Description of Artificial Sequence: Synthetic oligonucleotide
  Target: LAMA2; (-) strand; PAM type: YTN; PAM sequence: TTT
ctgcgtttttaaaatgtttg

SEQ ID NO: 233525 - DNA, 20 bp, Artificial Sequence
  Description of Artificial Sequence: Synthetic oligonucleotide
  Target: LAMA2; (-) strand; PAM type: YTN; PAM sequence: TTG
aatttctgcgtttttaaaat

SEQ ID NO: 233526 - DNA, 20 bp, Artificial Sequence
  Description of Artificial Sequence: Synthetic oligonucleotide
  Target: LAMA2; (-) strand; PAM type: YTN; PAM sequence: CTT
gaatttctgcgtttttaaaa

SEQ ID NO: 233527 - DNA, 20 bp, Artificial Sequence
  Description of Artificial Sequence: Synthetic oligonucleotide
  Target: LAMA2; (-) strand; PAM type: YTN; PAM sequence: CTA
agatccccatcttgaatttc

SEQ ID NO: 233528 - DNA, 20 bp, Artificial Sequence
  Description of Artificial Sequence: Synthetic oligonucleotide
  Target: LAMA2; (-) strand; PAM type: YTN; PAM sequence: TTA
tggctaagatccccatcttg

SEQ ID NO: 233529 - DNA, 20 bp, Artificial Sequence
  Description of Artificial Sequence: Synthetic oligonucleotide
  Target: LAMA2; (-) strand; PAM type: YTN; PAM sequence: TTT
atggctaagatccccatctt

SEQ ID NO: 233530 - DNA, 20 bp, Artificial Sequence
  Description of Artificial Sequence: Synthetic oligonucleotide
  Target: LAMA2; (-) strand; PAM type: YTN; PAM sequence: CTT
tatggctaagatccccatct

SEQ ID NO: 233531 - DNA, 20 bp, Artificial Sequence
  Description of Artificial Sequence: Synthetic oligonucleotide
  Target: LAMA2; (-) strand; PAM type: YTN; PAM sequence: TTA
tgtatggctttatggctaag

SEQ ID NO: 233532 - DNA, 20 bp, Artificial Sequence
  Description of Artificial Sequence: Synthetic oligonucleotide
  Target: LAMA2; (-) strand; PAM type: YTN; PAM sequence: TTT
atgtatggctttatggctaa

SEQ ID NO: 233533 - DNA, 20 bp, Artificial Sequence
  Description of Artificial Sequence: Synthetic oligonucleotide
  Target: LAMA2; (-) strand; PAM type: YTN; PAM sequence: TTT
tatgtatggctttatggcta

SEQ ID NO: 233534 - DNA, 20 bp, Artificial Sequence
  Description of Artificial Sequence: Synthetic oligonucleotide
  Target: LAMA2; (-) strand; PAM type: YTN; PAM sequence: TTT
ttatgtatggctttatggct

SEQ ID NO: 233535 - DNA, 20 bp, Artificial Sequence
  Description of Artificial Sequence: Synthetic oligonucleotide
  Target: LAMA2; (-) strand; PAM type: YTN; PAM sequence: CTG
aaagtgtgatttttatgtat

SEQ ID NO: 233536 - DNA, 20 bp, Artificial Sequence
  Description of Artificial Sequence: Synthetic oligonucleotide
  Target: LAMA2; (-) strand; PAM type: YTN; PAM sequence: TTG
ctgaaagtgtgatttttatg

SEQ ID NO: 233537 - DNA, 20 bp, Artificial Sequence
  Description of Artificial Sequence: Synthetic oligonucleotide
  Target: LAMA2; (-) strand; PAM type: YTN; PAM sequence: CTC
attgctgaaagtgtgatttt

SEQ ID NO: 233538 - DNA, 20 bp, Artificial Sequence
  Description of Artificial Sequence: Synthetic oligonucleotide
  Target: LAMA2; (-) strand; PAM type: YTN; PAM sequence: TTC
aggaatgtactcattgctga

SEQ ID NO: 233539 - DNA, 20 bp, Artificial Sequence
  Description of Artificial Sequence: Synthetic oligonucleotide
  Target: LAMA2; (-) strand; PAM type: YTN; PAM sequence: TTT
caggaatgtactcattgctg

SEQ ID NO: 233540 - DNA, 20 bp, Artificial Sequence
  Description of Artificial Sequence: Synthetic oligonucleotide
  Target: LAMA2; (-) strand; PAM type: YTN; PAM sequence: CTT
tcaggaatgtactcattgct

SEQ ID NO: 233541 - DNA, 20 bp, Artificial Sequence
  Description of Artificial Sequence: Synthetic oligonucleotide
  Target: LAMA2; (-) strand; PAM type: YTN; PAM sequence: TTA
agctttcaggaatgtactca

SEQ ID NO: 233542 - DNA, 20 bp, Artificial Sequence
  Description of Artificial Sequence: Synthetic oligonucleotide
  Target: LAMA2; (-) strand; PAM type: YTN; PAM sequence: CTT
aagctttcaggaatgtactc

SEQ ID NO: 233543 - DNA, 20 bp, Artificial Sequence
  Description of Artificial Sequence: Synthetic oligonucleotide
  Target: LAMA2; (-) strand; PAM type: YTN; PAM sequence: TTA
cttaagctttcaggaatgta

SEQ ID NO: 233544 - DNA, 20 bp, Artificial Sequence
  Description of Artificial Sequence: Synthetic oligonucleotide
  Target: LAMA2; (-) strand; PAM type: YTN; PAM sequence: TTT
acttaagctttcaggaatgt

SEQ ID NO: 233545 - DNA, 20 bp, Artificial Sequence
  Description of Artificial Sequence: Synthetic oligonucleotide
  Target: LAMA2; (-) strand; PAM type: YTN; PAM sequence: TTT
tacttaagctttcaggaatg

SEQ ID NO: 233546 - DNA, 20 bp, Artificial Sequence
  Description of Artificial Sequence: Synthetic oligonucleotide
  Target: LAMA2; (-) strand; PAM type: YTN; PAM sequence: TTT
ttacttaagctttcaggaat

SEQ ID NO: 233547 - DNA, 20 bp, Artificial Sequence
  Description of Artificial Sequence: Synthetic oligonucleotide
  Target: LAMA2; (-) strand; PAM type: YTN; PAM sequence: TTG
gaaaagaaaatttttactta

SEQ ID NO: 233548 - DNA, 20 bp, Artificial Sequence
  Description of Artificial Sequence: Synthetic oligonucleotide
  Target: LAMA2; (-) strand; PAM type: YTN; PAM sequence: CTT
ggaaaagaaaatttttactt

SEQ ID NO: 233549 - DNA, 20 bp, Artificial Sequence
  Description of Artificial Sequence: Synthetic oligonucleotide
  Target: LAMA2; (-) strand; PAM type: YTN; PAM sequence: TTC
aacttggaaaagaaaatttt

SEQ ID NO: 233550 - DNA, 20 bp, Artificial Sequence
  Description of Artificial Sequence: Synthetic oligonucleotide
  Target: LAMA2; (-) strand; PAM type: YTN; PAM sequence: TTG
gaatatgattcaacttggaa

SEQ ID NO: 233551 - DNA, 20 bp, Artificial Sequence
  Description of Artificial Sequence: Synthetic oligonucleotide
  Target: LAMA2; (-) strand; PAM type: YTN; PAM sequence: TTA
aggtgattggaatatgattc

SEQ ID NO: 233552 - DNA, 20 bp, Artificial Sequence
  Description of Artificial Sequence: Synthetic oligonucleotide
  Target: LAMA2; (-) strand; PAM type: YTN; PAM sequence: CTA
aatattaaggtgattggaat

SEQ ID NO: 233553 - DNA, 20 bp, Artificial Sequence
  Description of Artificial Sequence: Synthetic oligonucleotide
  Target: LAMA2; (-) strand; PAM type: YTN; PAM sequence: TTC
taaatattaaggtgattgga

SEQ ID NO: 233554 - DNA, 20 bp, Artificial Sequence
  Description of Artificial Sequence: Synthetic oligonucleotide
  Target: LAMA2; (-) strand; PAM type: YTN; PAM sequence: TTT
ctaaatattaaggtgattgg

SEQ ID NO: 233555 - DNA, 20 bp, Artificial Sequence
  Description of Artificial Sequence: Synthetic oligonucleotide
  Target: LAMA2; (-) strand; PAM type: YTN; PAM sequence: TTT
tctaaatattaaggtgattg

SEQ ID NO: 233556 - DNA, 20 bp, Artificial Sequence
  Description of Artificial Sequence: Synthetic oligonucleotide
  Target: LAMA2; (-) strand; PAM type: YTN; PAM sequence: TTT
ttctaaatattaaggtgatt

SEQ ID NO: 233557 - DNA, 20 bp, Artificial Sequence
  Description of Artificial Sequence: Synthetic oligonucleotide
  Target: LAMA2; (-) strand; PAM type: YTN; PAM sequence: TTG
tcatgtcatggaaggatttt

SEQ ID NO: 233558 - DNA, 20 bp, Artificial Sequence
  Description of Artificial Sequence: Synthetic oligonucleotide
  Target: LAMA2; (-) strand; PAM type: YTN; PAM sequence: TTT
gtcatgtcatggaaggattt

SEQ ID NO: 233559 - DNA, 20 bp, Artificial Sequence
  Description of Artificial Sequence: Synthetic oligonucleotide
  Target: LAMA2; (-) strand; PAM type: YTN; PAM sequence: TTA
tggagggatttgtcatgtca

SEQ ID NO: 233560 - DNA, 20 bp, Artificial Sequence
  Description of Artificial Sequence: Synthetic oligonucleotide
  Target: LAMA2; (-) strand; PAM type: YTN; PAM sequence: TTT
atggagggatttgtcatgtc

SEQ ID NO: 233561 - DNA, 20 bp, Artificial Sequence
  Description of Artificial Sequence: Synthetic oligonucleotide
  Target: LAMA2; (-) strand; PAM type: YTN; PAM sequence: TTT
tatggagggatttgtcatgt

SEQ ID NO: 233562 - DNA, 20 bp, Artificial Sequence
  Description of Artificial Sequence: Synthetic oligonucleotide
  Target: LAMA2; (-) strand; PAM type: YTN; PAM sequence: TTC
attttatggagggatttgtc

SEQ ID NO: 233563 - DNA, 20 bp, Artificial Sequence
  Description of Artificial Sequence: Synthetic oligonucleotide
  Target: LAMA2; (-) strand; PAM type: YTN; PAM sequence: TTA
ttcattttatggagggattt

SEQ ID NO: 233564 - DNA, 20 bp, Artificial Sequence
  Description of Artificial Sequence: Synthetic oligonucleotide
  Target: LAMA2; (-) strand; PAM type: YTN; PAM sequence: TTA
gaatgtgattattcatttta

SEQ ID NO: 233565 - DNA, 20 bp, Artificial Sequence
  Description of Artificial Sequence: Synthetic oligonucleotide
  Target: LAMA2; (-) strand; PAM type: YTN; PAM sequence: CTC
aaatgaattagaatgtgatt

SEQ ID NO: 233566 - DNA, 20 bp, Artificial Sequence
  Description of Artificial Sequence: Synthetic oligonucleotide
  Target: LAMA2; (-) strand; PAM type: YTN; PAM sequence: TTA
aactcaaatgaattagaatg

SEQ ID NO: 233567 - DNA, 20 bp, Artificial Sequence
  Description of Artificial Sequence: Synthetic oligonucleotide
  Target: LAMA2; (-) strand; PAM type: YTN; PAM sequence: TTG
atgaaaatccaaattaaact

SEQ ID NO: 233568 - DNA, 20 bp, Artificial Sequence
  Description of Artificial Sequence: Synthetic oligonucleotide
  Target: LAMA2; (-) strand; PAM type: YTN; PAM sequence: CTA
gattgatgaaaatccaaatt

SEQ ID NO: 233569 - DNA, 20 bp, Artificial Sequence
  Description of Artificial Sequence: Synthetic oligonucleotide
  Target: LAMA2; (-) strand; PAM type: YTN; PAM sequence: TTA
tgtaagctagattgatgaaa

SEQ ID NO: 233570 - DNA, 20 bp, Artificial Sequence
  Description of Artificial Sequence: Synthetic oligonucleotide
  Target: LAMA2; (-) strand; PAM type: YTN; PAM sequence: CTT
atgtaagctagattgatgaa

SEQ ID NO: 233571 - DNA, 20 bp, Artificial Sequence
  Description of Artificial Sequence: Synthetic oligonucleotide
  Target: LAMA2; (-) strand; PAM type: YTN; PAM sequence: TTG
ccttatgtaagctagattga

SEQ ID NO: 233572 - DNA, 20 bp, Artificial Sequence
  Description of Artificial Sequence: Synthetic oligonucleotide
  Target: LAMA2; (-) strand; PAM type: YTN; PAM sequence: CTT
gccttatgtaagctagattg

SEQ ID NO: 233573 - DNA, 20 bp, Artificial Sequence
  Description of Artificial Sequence: Synthetic oligonucleotide
  Target: LAMA2; (-) strand; PAM type: YTN; PAM sequence: TTA
tcttgccttatgtaagctag

SEQ ID NO: 233574 - DNA, 20 bp, Artificial Sequence
  Description of Artificial Sequence: Synthetic oligonucleotide
  Target: LAMA2; (-) strand; PAM type: YTN; PAM sequence: TTA
gagatattatcttgccttat

SEQ ID NO: 233575 - DNA, 20 bp, Artificial Sequence
  Description of Artificial Sequence: Synthetic oligonucleotide
  Target: LAMA2; (-) strand; PAM type: YTN; PAM sequence: TTT
agagatattatcttgcctta

SEQ ID NO: 233576 - DNA, 20 bp, Artificial Sequence
  Description of Artificial Sequence: Synthetic oligonucleotide
  Target: LAMA2; (-) strand; PAM type: YTN; PAM sequence: TTT
tagagatattatcttgcctt

SEQ ID NO: 233577 - DNA, 20 bp, Artificial Sequence
  Description of Artificial Sequence: Synthetic oligonucleotide
  Target: LAMA2; (-) strand; PAM type: YTN; PAM sequence: TTT
ttagagatattatcttgcct

SEQ ID NO: 233578 - DNA, 20 bp, Artificial Sequence
  Description of Artificial Sequence: Synthetic oligonucleotide
  Target: LAMA2; (-) strand; PAM type: YTN; PAM sequence: CTT
tttagagatattatcttgcc

SEQ ID NO: 233579 - DNA, 20 bp, Artificial Sequence
  Description of Artificial Sequence: Synthetic oligonucleotide
  Target: LAMA2; (-) strand; PAM type: YTN; PAM sequence: CTA
tgctttttagagatattatc

SEQ ID NO: 233580 - DNA, 20 bp, Artificial Sequence
  Description of Artificial Sequence: Synthetic oligonucleotide
  Target: LAMA2; (-) strand; PAM type: YTN; PAM sequence: TTC
tatgctttttagagatatta

SEQ ID NO: 233581 - DNA, 20 bp, Artificial Sequence
  Description of Artificial Sequence: Synthetic oligonucleotide
  Target: LAMA2; (-) strand; PAM type: YTN; PAM sequence: CTG
aatgaatattctatgctttt

SEQ ID NO: 233582 - DNA, 20 bp, Artificial Sequence
  Description of Artificial Sequence: Synthetic oligonucleotide
  Target: LAMA2; (-) strand; PAM type: YTN; PAM sequence: CTC
agcaactgaatgaatattct

SEQ ID NO: 233583 - DNA, 20 bp, Artificial Sequence
  Description of Artificial Sequence: Synthetic oligonucleotide
  Target: LAMA2; (-) strand; PAM type: YTN; PAM sequence: TTA
gtaaaggctcagcaactgaa

SEQ ID NO: 233584 - DNA, 20 bp, Artificial Sequence
  Description of Artificial Sequence: Synthetic oligonucleotide
  Target: LAMA2; (-) strand; PAM type: YTN; PAM sequence: TTT
agtaaaggctcagcaactga

SEQ ID NO: 233585 - DNA, 20 bp, Artificial Sequence
  Description of Artificial Sequence: Synthetic oligonucleotide
  Target: LAMA2; (-) strand; PAM type: YTN; PAM sequence: TTG
tttagtaaaggctcagcaac

SEQ ID NO: 233586 - DNA, 20 bp, Artificial Sequence
  Description of Artificial Sequence: Synthetic oligonucleotide
  Target: LAMA2; (-) strand; PAM type: YTN; PAM sequence: CTG
ttgtttagtaaaggctcagc

SEQ ID NO: 233587 - DNA, 20 bp, Artificial Sequence
  Description of Artificial Sequence: Synthetic oligonucleotide
  Target: LAMA2; (-) strand; PAM type: YTN; PAM sequence: TTC
acagaatgtccaagatatat

SEQ ID NO: 233588 - DNA, 20 bp, Artificial Sequence
  Description of Artificial Sequence: Synthetic oligonucleotide
  Target: LAMA2; (-) strand; PAM type: YTN; PAM sequence: TTT
cacagaatgtccaagatata

SEQ ID NO: 233589 - DNA, 20 bp, Artificial Sequence
  Description of Artificial Sequence: Synthetic oligonucleotide
  Target: LAMA2; (-) strand; PAM type: YTN; PAM sequence: CTA
tttcacagaatgtccaagat

SEQ ID NO: 233590 - DNA, 20 bp, Artificial Sequence
  Description of Artificial Sequence: Synthetic oligonucleotide
  Target: LAMA2; (-) strand; PAM type: YTN; PAM sequence: TTA
ctatttcacagaatgtccaa

SEQ ID NO: 233591 - DNA, 20 bp, Artificial Sequence
  Description of Artificial Sequence: Synthetic oligonucleotide
  Target: LAMA2; (-) strand; PAM type: YTN; PAM sequence: CTT
actatttcacagaatgtcca

SEQ ID NO: 233592 - DNA, 20 bp, Artificial Sequence
  Description of Artificial Sequence: Synthetic oligonucleotide
  Target: LAMA2; (-) strand; PAM type: YTN; PAM sequence: CTA
tcatcagcaacttactattt

SEQ ID NO: 233593 - DNA, 20 bp, Artificial Sequence
  Description of Artificial Sequence: Synthetic oligonucleotide
  Target: LAMA2; (-) strand; PAM type: YTN; PAM sequence: CTC
tatcatcagcaacttactat

SEQ ID NO: 233594 - DNA, 20 bp, Artificial Sequence
  Description of Artificial Sequence: Synthetic oligonucleotide
  Target: LAMA2; (-) strand; PAM type: YTN; PAM sequence: TTC
tctatcatcagcaacttact

SEQ ID NO: 233595 - DNA, 20 bp, Artificial Sequence
  Description of Artificial Sequence: Synthetic oligonucleotide
  Target: LAMA2; (-) strand; PAM type: YTN; PAM sequence: TTT
ctctatcatcagcaacttac

SEQ ID NO: 233596 - DNA, 20 bp, Artificial Sequence
  Description of Artificial Sequence: Synthetic oligonucleotide
  Target: LAMA2; (-) strand; PAM type: YTN; PAM sequence: TTT
tctctatcatcagcaactta

SEQ ID NO: 233597 - DNA, 20 bp, Artificial Sequence
  Description of Artificial Sequence: Synthetic oligonucleotide
  Target: LAMA2; (-) strand; PAM type: YTN; PAM sequence: TTT
ttctctatcatcagcaactt

SEQ ID NO: 233598 - DNA, 20 bp, Artificial Sequence
  Description of Artificial Sequence: Synthetic oligonucleotide
  Target: LAMA2; (-) strand; PAM type: YTN; PAM sequence: TTT
tttctctatcatcagcaact

SEQ ID NO: 233599 - DNA, 20 bp, Artificial Sequence
  Description of Artificial Sequence: Synthetic oligonucleotide
  Target: LAMA2; (-) strand; PAM type: YTN; PAM sequence: CTG
atcacaaagccatgtttttt

SEQ ID NO: 233600 - DNA, 20 bp, Artificial Sequence
  Description of Artificial Sequence: Synthetic oligonucleotide
  Target: LAMA2; (-) strand; PAM type: YTN; PAM sequence: CTA
gtaactgatcacaaagccat

SEQ ID NO: 233601 - DNA, 20 bp, Artificial Sequence
  Description of Artificial Sequence: Synthetic oligonucleotide
  Target: LAMA2; (-) strand; PAM type: YTN; PAM sequence: TTC
aagaatatggctagtaactg

SEQ ID NO: 233602 - DNA, 20 bp, Artificial Sequence
  Description of Artificial Sequence: Synthetic oligonucleotide
  Target: LAMA2; (-) strand; PAM type: YTN; PAM sequence: CTT
caagaatatggctagtaact

SEQ ID NO: 233603 - DNA, 20 bp, Artificial Sequence
  Description of Artificial Sequence: Synthetic oligonucleotide
  Target: LAMA2; (-) strand; PAM type: YTN; PAM sequence: CTG
taaccttcaagaatatggct

SEQ ID NO: 233604 - DNA, 20 bp, Artificial Sequence
  Description of Artificial Sequence: Synthetic oligonucleotide
  Target: LAMA2; (-) strand; PAM type: YTN; PAM sequence: CTG
tctgtaaccttcaagaatat

SEQ ID NO: 233605 - DNA, 20 bp, Artificial Sequence
  Description of Artificial Sequence: Synthetic oligonucleotide
  Target: LAMA2; (-) strand; PAM type: YTN; PAM sequence: CTC
tgtctgtaaccttcaagaat

SEQ ID NO: 233606 - DNA, 20 bp, Artificial Sequence
  Description of Artificial Sequence: Synthetic oligonucleotide
  Target: LAMA2; (-) strand; PAM type: YTN; PAM sequence: CTA
ccccgctctgtctgtaacct

SEQ ID NO: 233607 - DNA, 20 bp, Artificial Sequence
  Description of Artificial Sequence: Synthetic oligonucleotide
  Target: LAMA2; (-) strand; PAM type: YTN; PAM sequence: CTG
cagcctaccccgctctgtct

SEQ ID NO: 233608 - DNA, 20 bp, Artificial Sequence
  Description of Artificial Sequence: Synthetic oligonucleotide
  Target: LAMA2; (-) strand; PAM type: YTN; PAM sequence: CTG
taggctgcagcctaccccgc

SEQ ID NO: 233609 - DNA, 20 bp, Artificial Sequence
  Description of Artificial Sequence: Synthetic oligonucleotide
  Target: LAMA2; (-) strand; PAM type: YTN; PAM sequence: CTG
tctgtaggctgcagcctacc

SEQ ID NO: 233610 - DNA, 20 bp, Artificial Sequence
  Description of Artificial Sequence: Synthetic oligonucleotide
  Target: LAMA2; (-) strand; PAM type: YTN; PAM sequence: TTC
tgtctgtaggctgcagccta

SEQ ID NO: 233611 - DNA, 20 bp, Artificial Sequence
  Description of Artificial Sequence: Synthetic oligonucleotide
  Target: LAMA2; (-) strand; PAM type: YTN; PAM sequence: TTT
ctgtctgtaggctgcagcct

SEQ ID NO: 233612 - DNA, 20 bp, Artificial Sequence
  Description of Artificial Sequence: Synthetic oligonucleotide
  Target: LAMA2; (-) strand; PAM type: YTN; PAM sequence: CTT
tctgtctgtaggctgcagcc

SEQ ID NO: 233613 - DNA, 20 bp, Artificial Sequence
  Description of Artificial Sequence: Synthetic oligonucleotide
  Target: LAMA2; (-) strand; PAM type: YTN; PAM sequence: CTA
cagccccactttctgtctgt

SEQ ID NO: 233614 - DNA, 20 bp, Artificial Sequence
  Description of Artificial Sequence: Synthetic oligonucleotide
  Target: LAMA2; (-) strand; PAM type: YTN; PAM sequence: CTA
cacctacagccccactttct

SEQ ID NO: 233615 - DNA, 20 bp, Artificial Sequence
  Description of Artificial Sequence: Synthetic oligonucleotide
  Target: LAMA2; (-) strand; PAM type: YTN; PAM sequence: CTG
tgcagccaggaccctacacc

SEQ ID NO: 233616 - DNA, 20 bp, Artificial Sequence
  Description of Artificial Sequence: Synthetic oligonucleotide
  Target: LAMA2; (-) strand; PAM type: YTN; PAM sequence: CTC
tgtgcagccaggaccctaca

SEQ ID NO: 233617 - DNA, 20 bp, Artificial Sequence
  Description of Artificial Sequence: Synthetic oligonucleotide
  Target: LAMA2; (-) strand; PAM type: YTN; PAM sequence: CTG
atgccaaataaacggtccat

SEQ ID NO: 233618 - DNA, 20 bp, Artificial Sequence
  Description of Artificial Sequence: Synthetic oligonucleotide
  Target: LAMA2; (-) strand; PAM type: YTN; PAM sequence: CTA
tatgtaaaaccctgatgcca

SEQ ID NO: 233619 - DNA, 20 bp, Artificial Sequence
  Description of Artificial Sequence: Synthetic oligonucleotide
  Target: LAMA2; (-) strand; PAM type: YTN; PAM sequence: CTA
ctatatgtaaaaccctgatg

SEQ ID NO: 233620 - DNA, 20 bp, Artificial Sequence
  Description of Artificial Sequence: Synthetic oligonucleotide
  Target: LAMA2; (-) strand; PAM type: YTN; PAM sequence: CTA
tgagctactatatgtaaaac

SEQ ID NO: 233621 - DNA, 20 bp, Artificial Sequence
  Description of Artificial Sequence: Synthetic oligonucleotide
  Target: LAMA2; (-) strand; PAM type: YTN; PAM sequence: TTA
gaactatgagctactatatg

SEQ ID NO: 233622 - DNA, 20 bp, Artificial Sequence
  Description of Artificial Sequence: Synthetic oligonucleotide
  Target: LAMA2; (-) strand; PAM type: YTN; PAM sequence: TTT
agaactatgagctactatat

SEQ ID NO: 233623 - DNA, 20 bp, Artificial Sequence
  Description of Artificial Sequence: Synthetic oligonucleotide
  Target: LAMA2; (-) strand; PAM type: YTN; PAM sequence: TTG
tcaagagtgtttagaactat

SEQ ID NO: 233624 - DNA, 20 bp, Artificial Sequence
  Description of Artificial Sequence: Synthetic oligonucleotide
  Target: LAMA2; (-) strand; PAM type: YTN; PAM sequence: TTC
gtgttgtcaagagtgtttag

SEQ ID NO: 233625 - DNA, 20 bp, Artificial Sequence
  Description of Artificial Sequence: Synthetic oligonucleotide
  Target: LAMA2; (-) strand; PAM type: YTN; PAM sequence: TTA
gaattcgtgttgtcaagagt

SEQ ID NO: 233626 - DNA, 20 bp, Artificial Sequence
  Description of Artificial Sequence: Synthetic oligonucleotide
  Target: LAMA2; (-) strand; PAM type: YTN; PAM sequence: TTT
agaattcgtgttgtcaagag

SEQ ID NO: 233627 - DNA, 20 bp, Artificial Sequence
  Description of Artificial Sequence: Synthetic oligonucleotide
  Target: LAMA2; (-) strand; PAM type: YTN; PAM sequence: CTA
tttagaattcgtgttgtcaa

SEQ ID NO: 233628 - DNA, 20 bp, Artificial Sequence
  Description of Artificial Sequence: Synthetic oligonucleotide
  Target: LAMA2; (-) strand; PAM type: YTN; PAM sequence: CTC
acactatttagaattcgtgt

SEQ ID NO: 233629 - DNA, 20 bp, Artificial Sequence
  Description of Artificial Sequence: Synthetic oligonucleotide
  Target: LAMA2; (-) strand; PAM type: YTN; PAM sequence: TTC
tcacactatttagaattcgt

SEQ ID NO: 233630 - DNA, 20 bp, Artificial Sequence
  Description of Artificial Sequence: Synthetic oligonucleotide
  Target: LAMA2; (-) strand; PAM type: YTN; PAM sequence: TTA
ttctcacactatttagaatt

SEQ ID NO: 233631 - DNA, 20 bp, Artificial Sequence
  Description of Artificial Sequence: Synthetic oligonucleotide
  Target: LAMA2; (-) strand; PAM type: YTN; PAM sequence: CTT
attctcacactatttagaat

SEQ ID NO: 233632 - DNA, 20 bp, Artificial Sequence
  Description of Artificial Sequence: Synthetic oligonucleotide
  Target: LAMA2; (-) strand; PAM type: YTN; PAM sequence: CTG
ccagtataagcagaggaaaa

SEQ ID NO: 233633 - DNA, 20 bp, Artificial Sequence
  Description of Artificial Sequence: Synthetic oligonucleotide
  Target: LAMA2; (-) strand; PAM type: YTN; PAM sequence: CTG
ctgccagtataagcagagga

SEQ ID NO: 233634 - DNA, 20 bp, Artificial Sequence
  Description of Artificial Sequence: Synthetic oligonucleotide
  Target: LAMA2; (-) strand; PAM type: YTN; PAM sequence: TTC
tgctgccagtataagcagag

SEQ ID NO: 233635 - DNA, 20 bp, Artificial Sequence
  Description of Artificial Sequence: Synthetic oligonucleotide
  Target: LAMA2; (-) strand; PAM type: YTN; PAM sequence: CTT
ctgctgccagtataagcaga

SEQ ID NO: 233636 - DNA, 20 bp, Artificial Sequence
  Description of Artificial Sequence: Synthetic oligonucleotide
  Target: LAMA2; (-) strand; PAM type: YTN; PAM sequence: TTC
aaaaaacagtcaaaacttct

SEQ ID NO: 233637 - DNA, 20 bp, Artificial Sequence
  Description of Artificial Sequence: Synthetic oligonucleotide
  Target: LAMA2; (-) strand; PAM type: YTN; PAM sequence: TTT
caaaaaacagtcaaaacttc

SEQ ID NO: 233638 - DNA, 20 bp, Artificial Sequence
  Description of Artificial Sequence: Synthetic oligonucleotide
  Target: LAMA2; (-) strand; PAM type: YTN; PAM sequence: TTG
taatagtgtatttcaaaaaa

SEQ ID NO: 233639 - DNA, 20 bp, Artificial Sequence
  Description of Artificial Sequence: Synthetic oligonucleotide
  Target: LAMA2; (-) strand; PAM type: YTN; PAM sequence: TTG
ttgtaatagtgtatttcaaa

SEQ ID NO: 233640 - DNA, 20 bp, Artificial Sequence
  Description of Artificial Sequence: Synthetic oligonucleotide
  Target: LAMA2; (-) strand; PAM type: YTN; PAM sequence: TTT
gttgtaatagtgtatttcaa

SEQ ID NO: 233641 - DNA, 20 bp, Artificial Sequence
  Description of Artificial Sequence: Synthetic oligonucleotide
  Target: LAMA2; (-) strand; PAM type: YTN; PAM sequence: CTT
tgttgtaatagtgtatttca

SEQ ID NO: 233642 - DNA, 20 bp, Artificial Sequence
  Description of Artificial Sequence: Synthetic oligonucleotide
  Target: LAMA2; (-) strand; PAM type: YTN; PAM sequence: TTA
aaagctttgttgtaatagtg

SEQ ID NO: 233643 - DNA, 20 bp, Artificial Sequence
  Description of Artificial Sequence: Synthetic oligonucleotide
  Target: LAMA2; (-) strand; PAM type: YTN; PAM sequence: CTT
aaaagctttgttgtaatagt

SEQ ID NO: 233644 - DNA, 20 bp, Artificial Sequence
  Description of Artificial Sequence: Synthetic oligonucleotide
  Target: LAMA2; (-) strand; PAM type: YTN; PAM sequence: TTC
ttaaaagctttgttgtaata

SEQ ID NO: 233645 - DNA, 20 bp, Artificial Sequence
  Description of Artificial Sequence: Synthetic oligonucleotide
  Target: LAMA2; (-) strand; PAM type: YTN; PAM sequence: CTA
tgaattcttaaaagctttgt

SEQ ID NO: 233646 - DNA, 20 bp, Artificial Sequence
  Description of Artificial Sequence: Synthetic oligonucleotide
  Target: LAMA2; (-) strand; PAM type: YTN; PAM sequence: CTG
gctatgaattcttaaaagct

SEQ ID NO: 233647 - DNA, 20 bp, Artificial Sequence
  Description of Artificial Sequence: Synthetic oligonucleotide
  Target: LAMA2; (-) strand; PAM type: YTN; PAM sequence: CTG
gacctggctatgaattctta

SEQ ID NO: 233648 - DNA, 20 bp, Artificial Sequence
  Description of Artificial Sequence: Synthetic oligonucleotide
  Target: LAMA2; (-) strand; PAM type: YTN; PAM sequence: TTA
taggagcatgccactggacc

SEQ ID NO: 233649 - DNA, 20 bp, Artificial Sequence
  Description of Artificial Sequence: Synthetic oligonucleotide
  Target: LAMA2; (-) strand; PAM type: YTN; PAM sequence: CTG
ggattataggagcatgccac

SEQ ID NO: 233650 - DNA, 20 bp, Artificial Sequence
  Description of Artificial Sequence: Synthetic oligonucleotide
  Target: LAMA2; (-) strand; PAM type: YTN; PAM sequence: TTC
cagtagctgggattatagga

SEQ ID NO: 233651 - DNA, 20 bp, Artificial Sequence
  Description of Artificial Sequence: Synthetic oligonucleotide
  Target: LAMA2; (-) strand; PAM type: YTN; PAM sequence: TTT
ccagtagctgggattatagg

SEQ ID NO: 233652 - DNA, 20 bp, Artificial Sequence
  Description of Artificial Sequence: Synthetic oligonucleotide
  Target: LAMA2; (-) strand; PAM type: YTN; PAM sequence: CTT
tccagtagctgggattatag

SEQ ID NO: 233653 - DNA, 20 bp, Artificial Sequence
  Description of Artificial Sequence: Synthetic oligonucleotide
  Target: LAMA2; (-) strand; PAM type: YTN; PAM sequence: TTC
tttccagtagctgggattat

SEQ ID NO: 233654 - DNA, 20 bp, Artificial Sequence
  Description of Artificial Sequence: Synthetic oligonucleotide
  Target: LAMA2; (-) strand; PAM type: YTN; PAM sequence: CTT
ctttccagtagctgggatta

SEQ ID NO: 233655 - DNA, 20 bp, Artificial Sequence
  Description of Artificial Sequence: Synthetic oligonucleotide
  Target: LAMA2; (-) strand; PAM type: YTN; PAM sequence: CTC
ccaccatagcttctttccag

SEQ ID NO: 233656 - DNA, 20 bp, Artificial Sequence
  Description of Artificial Sequence: Synthetic oligonucleotide
  Target: LAMA2; (-) strand; PAM type: YTN; PAM sequence: CTC
aagagatcctcccaccatag

SEQ ID NO: 233657 - DNA, 20 bp, Artificial Sequence
  Description of Artificial Sequence: Synthetic oligonucleotide
  Target: LAMA2; (-) strand; PAM type: YTN; PAM sequence: CTG
ggctcaagagatcctcccac

SEQ ID NO: 233658 - DNA, 20 bp, Artificial Sequence
  Description of Artificial Sequence: Synthetic oligonucleotide
  Target: LAMA2; (-) strand; PAM type: YTN; PAM sequence: CTC
ctgggctcaagagatcctcc

SEQ ID NO: 233659 - DNA, 20 bp, Artificial Sequence
  Description of Artificial Sequence: Synthetic oligonucleotide
  Target: LAMA2; (-) strand; PAM type: YTN; PAM sequence: CTC
aaactcctgggctcaagaga

SEQ ID NO: 233660 - DNA, 20 bp, Artificial Sequence
  Description of Artificial Sequence: Synthetic oligonucleotide
  Target: LAMA2; (-) strand; PAM type: YTN; PAM sequence: CTG
gcctcaaactcctgggctca

SEQ ID NO: 233661 - DNA, 20 bp, Artificial Sequence
  Description of Artificial Sequence: Synthetic oligonucleotide
  Target: LAMA2; (-) strand; PAM type: YTN; PAM sequence: CTA
tgtggcccaggctggcctca

SEQ ID NO: 233662 - DNA, 20 bp, Artificial Sequence
  Description of Artificial Sequence: Synthetic oligonucleotide
  Target: LAMA2; (-) strand; PAM type: YTN; PAM sequence: CTC
actatgtggcccaggctggc

SEQ ID NO: 233663 - DNA, 20 bp, Artificial Sequence
  Description of Artificial Sequence: Synthetic oligonucleotide
  Target: LAMA2; (-) strand; PAM type: YTN; PAM sequence: TTA
cagcagtgtgaaaacggagt

SEQ ID NO: 233664 - DNA, 20 bp, Artificial Sequence
  Description of Artificial Sequence: Synthetic oligonucleotide
  Target: LAMA2; (-) strand; PAM type: YTN; PAM sequence: TTT
acagcagtgtgaaaacggag

SEQ ID NO: 233665 - DNA, 20 bp, Artificial Sequence
  Description of Artificial Sequence: Synthetic oligonucleotide
  Target: LAMA2; (-) strand; PAM type: YTN; PAM sequence: CTT
tacagcagtgtgaaaacgga

SEQ ID NO: 233666 - DNA, 20 bp, Artificial Sequence
  Description of Artificial Sequence: Synthetic oligonucleotide
  Target: LAMA2; (-) strand; PAM type: YTN; PAM sequence: CTC
gggtagtatctttacagcag

SEQ ID NO: 233667 - DNA, 20 bp, Artificial Sequence
  Description of Artificial Sequence: Synthetic oligonucleotide
  Target: LAMA2; (-) strand; PAM type: YTN; PAM sequence: TTA
cccagtctcgggtagtatct

SEQ ID NO: 233668 - DNA, 20 bp, Artificial Sequence
  Description of Artificial Sequence: Synthetic oligonucleotide
  Target: LAMA2; (-) strand; PAM type: YTN; PAM sequence: TTA
taaattacccagtctcgggt

SEQ ID NO: 233669 - DNA, 20 bp, Artificial Sequence
  Description of Artificial Sequence: Synthetic oligonucleotide
  Target: LAMA2; (-) strand; PAM type: YTN; PAM sequence: TTT
ataaattacccagtctcggg

SEQ ID NO: 233670 - DNA, 20 bp, Artificial Sequence
  Description of Artificial Sequence: Synthetic oligonucleotide
  Target: LAMA2; (-) strand; PAM type: YTN; PAM sequence: CTT
tataaattacccagtctcgg

SEQ ID NO: 233671 - DNA, 20 bp, Artificial Sequence
  Description of Artificial Sequence: Synthetic oligonucleotide
  Target: LAMA2; (-) strand; PAM type: YTN; PAM sequence: TTC
ctttataaattacccagtct

SEQ ID NO: 233672 - DNA, 20 bp, Artificial Sequence
  Description of Artificial Sequence: Synthetic oligonucleotide
  Target: LAMA2; (-) strand; PAM type: YTN; PAM sequence: TTT
cctttataaattacccagtc

SEQ ID NO: 233673 - DNA, 20 bp, Artificial Sequence
  Description of Artificial Sequence: Synthetic oligonucleotide
  Target: LAMA2; (-) strand; PAM type: YTN; PAM sequence: CTT
tcctttataaattacccagt

SEQ ID NO: 233674 - DNA, 20 bp, Artificial Sequence
  Description of Artificial Sequence: Synthetic oligonucleotide
  Target: LAMA2; (-) strand; PAM type: YTN; PAM sequence: CTC
tttcctttataaattaccca

SEQ ID NO: 233675 - DNA, 20 bp, Artificial Sequence
  Description of Artificial Sequence: Synthetic oligonucleotide
  Target: LAMA2; (-) strand; PAM type: YTN; PAM sequence: CTA
aacctctttcctttataaat

SEQ ID NO: 233676 - DNA, 20 bp, Artificial Sequence
  Description of Artificial Sequence: Synthetic oligonucleotide
  Target: LAMA2; (-) strand; PAM type: YTN; PAM sequence: CTA
gccatgcagaagggtgagtc

SEQ ID NO: 233677 - DNA, 20 bp, Artificial Sequence
  Description of Artificial Sequence: Synthetic oligonucleotide
  Target: LAMA2; (-) strand; PAM type: YTN; PAM sequence: CTC
ctagccatgcagaagggtga

SEQ ID NO: 233678 - DNA, 20 bp, Artificial Sequence
  Description of Artificial Sequence: Synthetic oligonucleotide
  Target: LAMA2; (-) strand; PAM type: YTN; PAM sequence: CTG
aggcctcctagccatgcaga

SEQ ID NO: 233679 - DNA, 20 bp, Artificial Sequence
  Description of Artificial Sequence: Synthetic oligonucleotide
  Target: LAMA2; (-) strand; PAM type: YTN; PAM sequence: TTC
ctgaggcctcctagccatgc

SEQ ID NO: 233680 - DNA, 20 bp, Artificial Sequence
  Description of Artificial Sequence: Synthetic oligonucleotide
  Target: LAMA2; (-) strand; PAM type: YTN; PAM sequence: TTT
cctgaggcctcctagccatg

SEQ ID NO: 233681 - DNA, 20 bp, Artificial Sequence
  Description of Artificial Sequence: Synthetic oligonucleotide
  Target: LAMA2; (-) strand; PAM type: YTN; PAM sequence: TTG
atcataagtttcctgaggcc

SEQ ID NO: 233682 - DNA, 20 bp, Artificial Sequence
  Description of Artificial Sequence: Synthetic oligonucleotide
  Target: LAMA2; (-) strand; PAM type: YTN; PAM sequence: TTT
gatcataagtttcctgaggc

SEQ ID NO: 233683 - DNA, 20 bp, Artificial Sequence
  Description of Artificial Sequence: Synthetic oligonucleotide
  Target: LAMA2; (-) strand; PAM type: YTN; PAM sequence: CTT
tgatcataagtttcctgagg

SEQ ID NO: 233684 - DNA, 20 bp, Artificial Sequence
  Description of Artificial Sequence: Synthetic oligonucleotide
  Target: LAMA2; (-) strand; PAM type: YTN; PAM sequence: TTC
ccctttgatcataagtttcc

SEQ ID NO: 233685 - DNA, 20 bp, Artificial Sequence
  Description of Artificial Sequence: Synthetic oligonucleotide
  Target: LAMA2; (-) strand; PAM type: YTN; PAM sequence: CTT
cccctttgatcataagtttc

SEQ ID NO: 233686 - DNA, 20 bp, Artificial Sequence
  Description of Artificial Sequence: Synthetic oligonucleotide
  Target: LAMA2; (-) strand; PAM type: YTN; PAM sequence: CTC
ttcccctttgatcataagtt

SEQ ID NO: 233687 - DNA, 20 bp, Artificial Sequence
  Description of Artificial Sequence: Synthetic oligonucleotide
  Target: LAMA2; (-) strand; PAM type: YTN; PAM sequence: CTC
cctcttcccctttgatcata

SEQ ID NO: 233688 - DNA, 20 bp, Artificial Sequence
  Description of Artificial Sequence: Synthetic oligonucleotide
  Target: LAMA2; (-) strand; PAM type: YTN; PAM sequence: CTG
ctccctcttcccctttgatc

SEQ ID NO: 233689 - DNA, 20 bp, Artificial Sequence
  Description of Artificial Sequence: Synthetic oligonucleotide
  Target: LAMA2; (-) strand; PAM type: YTN; PAM sequence: CTG
taccatgtaagatgtgcctg

SEQ ID NO: 233690 - DNA, 20 bp, Artificial Sequence
  Description of Artificial Sequence: Synthetic oligonucleotide
  Target: LAMA2; (-) strand; PAM type: YTN; PAM sequence: CTC
ctgtaccatgtaagatgtgc

SEQ ID NO: 233691 - DNA, 20 bp, Artificial Sequence
  Description of Artificial Sequence: Synthetic oligonucleotide
  Target: LAMA2; (-) strand; PAM type: YTN; PAM sequence: CTC
tcctgtaccatgtaagatgt

SEQ ID NO: 233692 - DNA, 20 bp, Artificial Sequence
  Description of Artificial Sequence: Synthetic oligonucleotide
  Target: LAMA2; (-) strand; PAM type: YTN; PAM sequence: CTC
tctcctgtaccatgtaagat

SEQ ID NO: 233693 - DNA, 20 bp, Artificial Sequence
  Description of Artificial Sequence: Synthetic oligonucleotide
  Target: LAMA2; (-) strand; PAM type: YTN; PAM sequence: CTC
tctctcctgtaccatgtaag

SEQ ID NO: 233694 - DNA, 20 bp, Artificial Sequence
  Description of Artificial Sequence: Synthetic oligonucleotide
  Target: LAMA2; (-) strand; PAM type: YTN; PAM sequence: CTC
ctctctctcctgtaccatgt

SEQ ID NO: 233695 - DNA, 20 bp, Artificial Sequence
  Description of Artificial Sequence: Synthetic oligonucleotide
  Target: LAMA2; (-) strand; PAM type: YTN; PAM sequence: TTC
tcctctctctcctgtaccat

SEQ ID NO: 233696 - DNA, 20 bp, Artificial Sequence
  Description of Artificial Sequence: Synthetic oligonucleotide
  Target: LAMA2; (-) strand; PAM type: YTN; PAM sequence: TTT
ctcctctctctcctgtacca

SEQ ID NO: 233697 - DNA, 20 bp, Artificial Sequence
  Description of Artificial Sequence: Synthetic oligonucleotide
  Target: LAMA2; (-) strand; PAM type: YTN; PAM sequence: CTT
tctcctctctctcctgtacc

SEQ ID NO: 233698 - DNA, 20 bp, Artificial Sequence
  Description of Artificial Sequence: Synthetic oligonucleotide
  Target: LAMA2; (-) strand; PAM type: YTN; PAM sequence: TTC
actttctcctctctctcctg

SEQ ID NO: 233699 - DNA, 20 bp, Artificial Sequence
  Description of Artificial Sequence: Synthetic oligonucleotide
  Target: LAMA2; (-) strand; PAM type: YTN; PAM sequence: TTC
cccattcactttctcctctc

SEQ ID NO: 233700 - DNA, 20 bp, Artificial Sequence
  Description of Artificial Sequence: Synthetic oligonucleotide
  Target: LAMA2; (-) strand; PAM type: YTN; PAM sequence: CTT
ccccattcactttctcctct

SEQ ID NO: 233701 - DNA, 20 bp, Artificial Sequence
  Description of Artificial Sequence: Synthetic oligonucleotide
  Target: LAMA2; (-) strand; PAM type: YTN; PAM sequence: CTC
ttccccattcactttctcct

SEQ ID NO: 233702 - DNA, 20 bp, Artificial Sequence
  Description of Artificial Sequence: Synthetic oligonucleotide
  Target: LAMA2; (-) strand; PAM type: YTN; PAM sequence: TTA
taaggggctcttccccattc

SEQ ID NO: 233703 - DNA, 20 bp, Artificial Sequence
  Description of Artificial Sequence: Synthetic oligonucleotide
  Target: LAMA2; (-) strand; PAM type: YTN; PAM sequence: TTT
ataaggggctcttccccatt

SEQ ID NO: 233704 - DNA, 20 bp, Artificial Sequence
  Description of Artificial Sequence: Synthetic oligonucleotide
  Target: LAMA2; (-) strand; PAM type: YTN; PAM sequence: TTT
tataaggggctcttccccat

SEQ ID NO: 233705 - DNA, 20 bp, Artificial Sequence
  Description of Artificial Sequence: Synthetic oligonucleotide
  Target: LAMA2; (-) strand; PAM type: YTN; PAM sequence: CTG
atggttttataaggggctct

SEQ ID NO: 233706 - DNA, 20 bp, Artificial Sequence
  Description of Artificial Sequence: Synthetic oligonucleotide
  Target: LAMA2; (-) strand; PAM type: YTN; PAM sequence: TTC
gtacaagatctgatggtttt

SEQ ID NO: 233707 - DNA, 20 bp, Artificial Sequence
  Description of Artificial Sequence: Synthetic oligonucleotide
  Target: LAMA2; (-) strand; PAM type: YTN; PAM sequence: CTC
atgatagtgagtgagttcgt

SEQ ID NO: 233708 - DNA, 20 bp, Artificial Sequence
  Description of Artificial Sequence: Synthetic oligonucleotide
  Target: LAMA2; (-) strand; PAM type: YTN; PAM sequence: CTG
tcctcatgatagtgagtgag

SEQ ID NO: 233709 - DNA, 20 bp, Artificial Sequence
  Description of Artificial Sequence: Synthetic oligonucleotide
  Target: LAMA2; (-) strand; PAM type: YTN; PAM sequence: CTC
ccccatgctgtcctcatgat

SEQ ID NO: 233710 - DNA, 20 bp, Artificial Sequence
  Description of Artificial Sequence: Synthetic oligonucleotide
  Target: LAMA2; (-) strand; PAM type: YTN; PAM sequence: CTG
gatcaagggggcagctcccc

SEQ ID NO: 233711 - DNA, 20 bp, Artificial Sequence
  Description of Artificial Sequence: Synthetic oligonucleotide
  Target: LAMA2; (-) strand; PAM type: YTN; PAM sequence: CTC
cacgtatggagggagggagg

SEQ ID NO: 233712 - DNA, 20 bp, Artificial Sequence
  Description of Artificial Sequence: Synthetic oligonucleotide
  Target: LAMA2; (-) strand; PAM type: YTN; PAM sequence: TTG
taatctccacgtatggaggg

SEQ ID NO: 233713 - DNA, 20 bp, Artificial Sequence
  Description of Artificial Sequence: Synthetic oligonucleotide
  Target: LAMA2; (-) strand; PAM type: YTN; PAM sequence: TTG
aaattgtaatctccacgtat

SEQ ID NO: 233714 - DNA, 20 bp, Artificial Sequence
  Description of Artificial Sequence: Synthetic oligonucleotide
  Target: LAMA2; (-) strand; PAM type: YTN; PAM sequence: TTT
gaaattgtaatctccacgta

SEQ ID NO: 233715 - DNA, 20 bp, Artificial Sequence
  Description of Artificial Sequence: Synthetic oligonucleotide
  Target: LAMA2; (-) strand; PAM type: YTN; PAM sequence: CTC
atttgaaattgtaatctcca

SEQ ID NO: 233716 - DNA, 20 bp, Artificial Sequence
  Description of Artificial Sequence: Synthetic oligonucleotide
  Target: LAMA2; (-) strand; PAM type: YTN; PAM sequence: CTG
tgtccccacccaaatctcat

SEQ ID NO: 233717 - DNA, 20 bp, Artificial Sequence
  Description of Artificial Sequence: Synthetic oligonucleotide
  Target: LAMA2; (-) strand; PAM type: YTN; PAM sequence: CTC
tgtgtccccacccaaatctc

SEQ ID NO: 233718 - DNA, 20 bp, Artificial Sequence
  Description of Artificial Sequence: Synthetic oligonucleotide
  Target: LAMA2; (-) strand; PAM type: YTN; PAM sequence: TTG
gctctgtgtccccacccaaa

SEQ ID NO: 233719 - DNA, 20 bp, Artificial Sequence
  Description of Artificial Sequence: Synthetic oligonucleotide
  Target: LAMA2; (-) strand; PAM type: YTN; PAM sequence: TTT
ggctctgtgtccccacccaa

SEQ ID NO: 233720 - DNA, 20 bp, Artificial Sequence
  Description of Artificial Sequence: Synthetic oligonucleotide
  Target: LAMA2; (-) strand; PAM type: YTN; PAM sequence: TTC
agaaagacagtgatatggtt

SEQ ID NO: 233721 - DNA, 20 bp, Artificial Sequence
  Description of Artificial Sequence: Synthetic oligonucleotide
  Target: LAMA2; (-) strand; PAM type: YTN; PAM sequence: CTT
cagaaagacagtgatatggt

SEQ ID NO: 233722 - DNA, 20 bp, Artificial Sequence
  Description of Artificial Sequence: Synthetic oligonucleotide
  Target: LAMA2; (-) strand; PAM type: YTN; PAM sequence: TTC
ttcagaaagacagtgatatg

SEQ ID NO: 233723 - DNA, 20 bp, Artificial Sequence
  Description of Artificial Sequence: Synthetic oligonucleotide
  Target: LAMA2; (-) strand; PAM type: YTN; PAM sequence: TTT
cttcagaaagacagtgatat

SEQ ID NO: 233724 - DNA, 20 bp, Artificial Sequence
  Description of Artificial Sequence: Synthetic oligonucleotide
  Target: LAMA2; (-) strand; PAM type: YTN; PAM sequence: TTT
tcttcagaaagacagtgata

SEQ ID NO: 233725 - DNA, 20 bp, Artificial Sequence
  Description of Artificial Sequence: Synthetic oligonucleotide
  Target: LAMA2; (-) strand; PAM type: YTN; PAM sequence: TTT
ttcttcagaaagacagtgat

SEQ ID NO: 233726 - DNA, 20 bp, Artificial Sequence
  Description of Artificial Sequence: Synthetic oligonucleotide
  Target: LAMA2; (-) strand; PAM type: YTN; PAM sequence: TTT
tttcttcagaaagacagtga

SEQ ID NO: 233727 - DNA, 20 bp, Artificial Sequence
  Description of Artificial Sequence: Synthetic oligonucleotide
  Target: LAMA2; (-) strand; PAM type: YTN; PAM sequence: TTT
ttttcttcagaaagacagtg

SEQ ID NO: 233728 - DNA, 20 bp, Artificial Sequence
  Description of Artificial Sequence: Synthetic oligonucleotide
  Target: LAMA2; (-) strand; PAM type: YTN; PAM sequence: TTT
tttttcttcagaaagacagt

SEQ ID NO: 233729 - DNA, 20 bp, Artificial Sequence
  Description of Artificial Sequence: Synthetic oligonucleotide
  Target: LAMA2; (-) strand; PAM type: YTN; PAM sequence: CTT
ttttttcttcagaaagacag

SEQ ID NO: 233730 - DNA, 20 bp, Artificial Sequence
  Description of Artificial Sequence: Synthetic oligonucleotide
  Target: LAMA2; (-) strand; PAM type: YTN; PAM sequence: TTC
cttttttttcttcagaaaga

SEQ ID NO: 233731 - DNA, 20 bp, Artificial Sequence
  Description of Artificial Sequence: Synthetic oligonucleotide
  Target: LAMA2; (-) strand; PAM type: YTN; PAM sequence: TTA
gggcaacatacaagaattcc

SEQ ID NO: 233732 - DNA, 20 bp, Artificial Sequence
  Description of Artificial Sequence: Synthetic oligonucleotide
  Target: LAMA2; (-) strand; PAM type: YTN; PAM sequence: TTT
agggcaacatacaagaattc

SEQ ID NO: 233733 - DNA, 20 bp, Artificial Sequence
  Description of Artificial Sequence: Synthetic oligonucleotide
  Target: LAMA2; (-) strand; PAM type: YTN; PAM sequence: CTT
tagggcaacatacaagaatt

SEQ ID NO: 233734 - DNA, 20 bp, Artificial Sequence
  Description of Artificial Sequence: Synthetic oligonucleotide
  Target: LAMA2; (-) strand; PAM type: YTN; PAM sequence: TTA
tatctttagggcaacataca

SEQ ID NO: 233735 - DNA, 20 bp, Artificial Sequence
  Description of Artificial Sequence: Synthetic oligonucleotide
  Target: LAMA2; (-) strand; PAM type: YTN; PAM sequence: TTT
atatctttagggcaacatac

SEQ ID NO: 233736 - DNA, 20 bp, Artificial Sequence
  Description of Artificial Sequence: Synthetic oligonucleotide
  Target: LAMA2; (-) strand; PAM type: YTN; PAM sequence: TTT
tatatctttagggcaacata

SEQ ID NO: 233737 - DNA, 20 bp, Artificial Sequence
  Description of Artificial Sequence: Synthetic oligonucleotide
  Target: LAMA2; (-) strand; PAM type: YTN; PAM sequence: TTG
taagcagttttatatcttta

SEQ ID NO: 233738 - DNA, 20 bp, Artificial Sequence
  Description of Artificial Sequence: Synthetic oligonucleotide
  Target: LAMA2; (-) strand; PAM type: YTN; PAM sequence: CTA
ggcattgtaagcagttttat

SEQ ID NO: 233739 - DNA, 20 bp, Artificial Sequence
  Description of Artificial Sequence: Synthetic oligonucleotide
  Target: LAMA2; (-) strand; PAM type: YTN; PAM sequence: TTA
gggaacacatagtaatcaat

SEQ ID NO: 233740 - DNA, 20 bp, Artificial Sequence
  Description of Artificial Sequence: Synthetic oligonucleotide
  Target: LAMA2; (-) strand; PAM type: YTN; PAM sequence: TTT
agggaacacatagtaatcaa

SEQ ID NO: 233741 - DNA, 20 bp, Artificial Sequence
  Description of Artificial Sequence: Synthetic oligonucleotide
  Target: LAMA2; (-) strand; PAM type: YTN; PAM sequence: CTT
tagggaacacatagtaatca

SEQ ID NO: 233742 - DNA, 20 bp, Artificial Sequence
  Description of Artificial Sequence: Synthetic oligonucleotide
  Target: LAMA2; (-) strand; PAM type: YTN; PAM sequence: TTC
aaactttagggaacacatag

SEQ ID NO: 233743 - DNA, 20 bp, Artificial Sequence
  Description of Artificial Sequence: Synthetic oligonucleotide
  Target: LAMA2; (-) strand; PAM type: YTN; PAM sequence: TTT
caaactttagggaacacata

SEQ ID NO: 233744 - DNA, 20 bp, Artificial Sequence
  Description of Artificial Sequence: Synthetic oligonucleotide
  Target: LAMA2; (-) strand; PAM type: YTN; PAM sequence: TTA
atggagagtttcaaacttta

SEQ ID NO: 233745 - DNA, 20 bp, Artificial Sequence
  Description of Artificial Sequence: Synthetic oligonucleotide
  Target: LAMA2; (-) strand; PAM type: YTN; PAM sequence: CTA
tgttaatggagagtttcaaa

SEQ ID NO: 233746 - DNA, 20 bp, Artificial Sequence
  Description of Artificial Sequence: Synthetic oligonucleotide
  Target: LAMA2; (-) strand; PAM type: YTN; PAM sequence: TTG
ctatgttaatggagagtttc

SEQ ID NO: 233747 - DNA, 20 bp, Artificial Sequence
  Description of Artificial Sequence: Synthetic oligonucleotide
  Target: LAMA2; (-) strand; PAM type: YTN; PAM sequence: TTT
gctatgttaatggagagttt

SEQ ID NO: 233748 - DNA, 20 bp, Artificial Sequence
  Description of Artificial Sequence: Synthetic oligonucleotide
  Target: LAMA2; (-) strand; PAM type: YTN; PAM sequence: TTT
tgctatgttaatggagagtt

SEQ ID NO: 233749 - DNA, 20 bp, Artificial Sequence
  Description of Artificial Sequence: Synthetic oligonucleotide
  Target: LAMA2; (-) strand; PAM type: YTN; PAM sequence: TTA
gaatatagtagttttgctat

SEQ ID NO: 233750 - DNA, 20 bp, Artificial Sequence
  Description of Artificial Sequence: Synthetic oligonucleotide
  Target: LAMA2; (-) strand; PAM type: YTN; PAM sequence: TTT
agaatatagtagttttgcta

SEQ ID NO: 233751 - DNA, 20 bp, Artificial Sequence
  Description of Artificial Sequence: Synthetic oligonucleotide
  Target: LAMA2; (-) strand; PAM type: YTN; PAM sequence: TTG
atttagaatatagtagtttt

SEQ ID NO: 233752 - DNA, 20 bp, Artificial Sequence
  Description of Artificial Sequence: Synthetic oligonucleotide
  Target: LAMA2; (-) strand; PAM type: YTN; PAM sequence: TTT
gatttagaatatagtagttt

SEQ ID NO: 233753 - DNA, 20 bp, Artificial Sequence
  Description of Artificial Sequence: Synthetic oligonucleotide
  Target: LAMA2; (-) strand; PAM type: YTN; PAM sequence: CTG
acatttgatttagaatatag

SEQ ID NO: 233754 - DNA, 20 bp, Artificial Sequence
  Description of Artificial Sequence: Synthetic oligonucleotide
  Target: LAMA2; (-) strand; PAM type: YTN; PAM sequence: CTG
ctgacatttgatttagaata

SEQ ID NO: 233755 - DNA, 20 bp, Artificial Sequence
  Description of Artificial Sequence: Synthetic oligonucleotide
  Target: LAMA2; (-) strand; PAM type: YTN; PAM sequence: TTC
ccaacctgctgacatttgat

SEQ ID NO: 233756 - DNA, 20 bp, Artificial Sequence
  Description of Artificial Sequence: Synthetic oligonucleotide
  Target: LAMA2; (-) strand; PAM type: YTN; PAM sequence: TTT
cccaacctgctgacatttga

SEQ ID NO: 233757 - DNA, 20 bp, Artificial Sequence
  Description of Artificial Sequence: Synthetic oligonucleotide
  Target: LAMA2; (-) strand; PAM type: YTN; PAM sequence: CTT
tcccaacctgctgacatttg

SEQ ID NO: 233758 - DNA, 20 bp, Artificial Sequence
  Description of Artificial Sequence: Synthetic oligonucleotide
  Target: LAMA2; (-) strand; PAM type: YTN; PAM sequence: TTG
taaatacctttcccaacctg

SEQ ID NO: 233759 - DNA, 20 bp, Artificial Sequence
  Description of Artificial Sequence: Synthetic oligonucleotide
  Target: LAMA2; (-) strand; PAM type: YTN; PAM sequence: TTG
ttgtaaatacctttcccaac

SEQ ID NO: 233760 - DNA, 20 bp, Artificial Sequence
  Description of Artificial Sequence: Synthetic oligonucleotide
  Target: LAMA2; (-) strand; PAM type: YTN; PAM sequence: TTT
gttgtaaatacctttcccaa

SEQ ID NO: 233761 - DNA, 20 bp, Artificial Sequence
  Description of Artificial Sequence: Synthetic oligonucleotide
  Target: LAMA2; (-) strand; PAM type: YTN; PAM sequence: TTG
tcatgtttgttgtaaatacc

SEQ ID NO: 233762 - DNA, 20 bp, Artificial Sequence
  Description of Artificial Sequence: Synthetic oligonucleotide
  Target: LAMA2; (-) strand; PAM type: YTN; PAM sequence: CTT
gtcatgtttgttgtaaatac

SEQ ID NO: 233763 - DNA, 20 bp, Artificial Sequence
  Description of Artificial Sequence: Synthetic oligonucleotide
  Target: LAMA2; (-) strand; PAM type: YTN; PAM sequence: TTA
tccccttgtcatgtttgttg

SEQ ID NO: 233764 - DNA, 20 bp, Artificial Sequence
  Description of Artificial Sequence: Synthetic oligonucleotide
  Target: LAMA2; (-) strand; PAM type: YTN; PAM sequence: TTA
ttatccccttgtcatgtttg

SEQ ID NO: 233765 - DNA, 20 bp, Artificial Sequence
  Description of Artificial Sequence: Synthetic oligonucleotide
  Target: LAMA2; (-) strand; PAM type: YTN; PAM sequence: TTA
atatagaaaggttattatcc

SEQ ID NO: 233766 - DNA, 20 bp, Artificial Sequence
  Description of Artificial Sequence: Synthetic oligonucleotide
  Target: LAMA2; (-) strand; PAM type: YTN; PAM sequence: CTT
aatatagaaaggttattatc

SEQ ID NO: 233767 - DNA, 20 bp, Artificial Sequence
  Description of Artificial Sequence: Synthetic oligonucleotide
  Target: LAMA2; (-) strand; PAM type: YTN; PAM sequence: CTC
ttaatatagaaaggttatta

SEQ ID NO: 233768 - DNA, 20 bp, Artificial Sequence
  Description of Artificial Sequence: Synthetic oligonucleotide
  Target: LAMA2; (-) strand; PAM type: YTN; PAM sequence: TTG
atatgtaagatctcttaata

SEQ ID NO: 233769 - DNA, 20 bp, Artificial Sequence
  Description of Artificial Sequence: Synthetic oligonucleotide
  Target: LAMA2; (-) strand; PAM type: YTN; PAM sequence: TTA
ttgatatgtaagatctctta

SEQ ID NO: 233770 - DNA, 20 bp, Artificial Sequence
  Description of Artificial Sequence: Synthetic oligonucleotide
  Target: LAMA2; (-) strand; PAM type: YTN; PAM sequence: CTT
attgatatgtaagatctctt

SEQ ID NO: 233771 - DNA, 20 bp, Artificial Sequence
  Description of Artificial Sequence: Synthetic oligonucleotide
  Target: LAMA2; (-) strand; PAM type: YTN; PAM sequence: TTC
ttattgatatgtaagatctc

SEQ ID NO: 233772 - DNA, 20 bp, Artificial Sequence
  Description of Artificial Sequence: Synthetic oligonucleotide
  Target: LAMA2; (-) strand; PAM type: YTN; PAM sequence: TTT
cttattgatatgtaagatct

SEQ ID NO: 233773 - DNA, 20 bp, Artificial Sequence
  Description of Artificial Sequence: Synthetic oligonucleotide
  Target: LAMA2; (-) strand; PAM type: YTN; PAM sequence: TTT
tcttattgatatgtaagatc

SEQ ID NO: 233774 - DNA, 20 bp, Artificial Sequence
  Description of Artificial Sequence: Synthetic oligonucleotide
  Target: LAMA2; (-) strand; PAM type: YTN; PAM sequence: TTT
ttcttattgatatgtaagat

SEQ ID NO: 233775 - DNA, 20 bp, Artificial Sequence
  Description of Artificial Sequence: Synthetic oligonucleotide
  Target: LAMA2; (-) strand; PAM type: YTN; PAM sequence: TTT
tttcttattgatatgtaaga

SEQ ID NO: 233776 - DNA, 20 bp, Artificial Sequence
  Description of Artificial Sequence: Synthetic oligonucleotide
  Target: LAMA2; (-) strand; PAM type: YTN; PAM sequence: CTT
ttttcttattgatatgtaag

SEQ ID NO: 233777 - DNA, 20 bp, Artificial Sequence
  Description of Artificial Sequence: Synthetic oligonucleotide
  Target: LAMA2; (-) strand; PAM type: YTN; PAM sequence: TTA
acttttttcttattgatatg

SEQ ID NO: 233778 - DNA, 20 bp, Artificial Sequence
  Description of Artificial Sequence: Synthetic oligonucleotide
  Target: LAMA2; (-) strand; PAM type: YTN; PAM sequence: CTA
acaggttaacttttttctta

SEQ ID NO: 233779 - DNA, 20 bp, Artificial Sequence
  Description of Artificial Sequence: Synthetic oligonucleotide
  Target: LAMA2; (-) strand; PAM type: YTN; PAM sequence: TTC
taacaggttaacttttttct

SEQ ID NO: 233780 - DNA, 20 bp, Artificial Sequence
  Description of Artificial Sequence: Synthetic oligonucleotide
  Target: LAMA2; (-) strand; PAM type: YTN; PAM sequence: TTT
ctaacaggttaacttttttc

SEQ ID NO: 233781 - DNA, 20 bp, Artificial Sequence
  Description of Artificial Sequence: Synthetic oligonucleotide
  Target: LAMA2; (-) strand; PAM type: YTN; PAM sequence: CTT
tctaacaggttaactttttt

SEQ ID NO: 233782 - DNA, 20 bp, Artificial Sequence
  Description of Artificial Sequence: Synthetic oligonucleotide
  Target: LAMA2; (-) strand; PAM type: YTN; PAM sequence: TTG
atctttctaacaggttaact

SEQ ID NO: 233783 - DNA, 20 bp, Artificial Sequence
  Description of Artificial Sequence: Synthetic oligonucleotide
  Target: LAMA2; (-) strand; PAM type: YTN; PAM sequence: TTT
gatctttctaacaggttaac

SEQ ID NO: 233784 - DNA, 20 bp, Artificial Sequence
  Description of Artificial Sequence: Synthetic oligonucleotide
  Target: LAMA2; (-) strand; PAM type: YTN; PAM sequence: TTT
tgatctttctaacaggttaa

SEQ ID NO: 233785 - DNA, 20 bp, Artificial Sequence
  Description of Artificial Sequence: Synthetic oligonucleotide
  Target: LAMA2; (-) strand; PAM type: YTN; PAM sequence: CTG
ttttgatctttctaacaggt

SEQ ID NO: 233786 - DNA, 20 bp, Artificial Sequence
  Description of Artificial Sequence: Synthetic oligonucleotide
  Target: LAMA2; (-) strand; PAM type: YTN; PAM sequence: CTG
aggaatacctgttttgatct

SEQ ID NO: 233787 - DNA, 20 bp, Artificial Sequence
  Description of Artificial Sequence: Synthetic oligonucleotide
  Target: LAMA2; (-) strand; PAM type: YTN; PAM sequence: TTC
tgaggaatacctgttttgat

SEQ ID NO: 233788 - DNA, 20 bp, Artificial Sequence
  Description of Artificial Sequence: Synthetic oligonucleotide
  Target: LAMA2; (-) strand; PAM type: YTN; PAM sequence: TTT
ctgaggaatacctgttttga

SEQ ID NO: 233789 - DNA, 20 bp, Artificial Sequence
  Description of Artificial Sequence: Synthetic oligonucleotide
  Target: LAMA2; (-) strand; PAM type: YTN; PAM sequence: TTA
tatgtcatttctgaggaata

SEQ ID NO: 233790 - DNA, 20 bp, Artificial Sequence
  Description of Artificial Sequence: Synthetic oligonucleotide
  Target: LAMA2; (-) strand; PAM type: YTN; PAM sequence: TTA
caaagttatatgtcatttct

SEQ ID NO: 233791 - DNA, 20 bp, Artificial Sequence
  Description of Artificial Sequence: Synthetic oligonucleotide
  Target: LAMA2; (-) strand; PAM type: YTN; PAM sequence: TTT
acaaagttatatgtcatttc

SEQ ID NO: 233792 - DNA, 20 bp, Artificial Sequence
  Description of Artificial Sequence: Synthetic oligonucleotide
  Target: LAMA2; (-) strand; PAM type: YTN; PAM sequence: TTT
tacaaagttatatgtcattt

SEQ ID NO: 233793 - DNA, 20 bp, Artificial Sequence
  Description of Artificial Sequence: Synthetic oligonucleotide
  Target: LAMA2; (-) strand; PAM type: YTN; PAM sequence: TTT
ttacaaagttatatgtcatt

SEQ ID NO: 233794 - DNA, 20 bp, Artificial Sequence
  Description of Artificial Sequence: Synthetic oligonucleotide
  Target: LAMA2; (-) strand; PAM type: YTN; PAM sequence: CTT
tttacaaagttatatgtcat

SEQ ID NO: 233795 - DNA, 20 bp, Artificial Sequence
  Description of Artificial Sequence: Synthetic oligonucleotide
  Target: LAMA2; (-) strand; PAM type: YTN; PAM sequence: TTA
tctttttacaaagttatatg

SEQ ID NO: 233796 - DNA, 20 bp, Artificial Sequence
  Description of Artificial Sequence: Synthetic oligonucleotide
  Target: LAMA2; (-) strand; PAM type: YTN; PAM sequence: TTA
tgagtgtcattatcttttta

SEQ ID NO: 233797 - DNA, 20 bp, Artificial Sequence
  Description of Artificial Sequence: Synthetic oligonucleotide
  Target: LAMA2; (-) strand; PAM type: YTN; PAM sequence: TTC
attatgagtgtcattatctt

SEQ ID NO: 233798 - DNA, 20 bp, Artificial Sequence
  Description of Artificial Sequence: Synthetic oligonucleotide
  Target: LAMA2; (-) strand; PAM type: YTN; PAM sequence: CTT
cattatgagtgtcattatct

SEQ ID NO: 233799 - DNA, 20 bp, Artificial Sequence
  Description of Artificial Sequence: Synthetic oligonucleotide
  Target: LAMA2; (-) strand; PAM type: YTN; PAM sequence: TTC
cttcattatgagtgtcatta

SEQ ID NO: 233800 - DNA, 20 bp, Artificial Sequence
  Description of Artificial Sequence: Synthetic oligonucleotide
  Target: LAMA2; (-) strand; PAM type: YTN; PAM sequence: CTT
ccttcattatgagtgtcatt

SEQ ID NO: 233801 - DNA, 20 bp, Artificial Sequence
  Description of Artificial Sequence: Synthetic oligonucleotide
  Target: LAMA2; (-) strand; PAM type: YTN; PAM sequence: TTG
atacttccttcattatgagt

SEQ ID NO: 233802 - DNA, 20 bp, Artificial Sequence
  Description of Artificial Sequence: Synthetic oligonucleotide
  Target: LAMA2; (-) strand; PAM type: YTN; PAM sequence: TTA
attgatacttccttcattat

SEQ ID NO: 233803 - DNA, 20 bp, Artificial Sequence
  Description of Artificial Sequence: Synthetic oligonucleotide
  Target: LAMA2; (-) strand; PAM type: YTN; PAM sequence: TTT
aattgatacttccttcatta

SEQ ID NO: 233804 - DNA, 20 bp, Artificial Sequence
  Description of Artificial Sequence: Synthetic oligonucleotide
  Target: LAMA2; (-) strand; PAM type: YTN; PAM sequence: TTT
taattgatacttccttcatt

SEQ ID NO: 233805 - DNA, 20 bp, Artificial Sequence
  Description of Artificial Sequence: Synthetic oligonucleotide
  Target: LAMA2; (-) strand; PAM type: YTN; PAM sequence: TTG
ttttaattgatacttccttc

SEQ ID NO: 233806 - DNA, 20 bp, Artificial Sequence
  Description of Artificial Sequence: Synthetic oligonucleotide
  Target: LAMA2; (-) strand; PAM type: YTN; PAM sequence: TTG
ataggtgaaaaataatatgt

SEQ ID NO: 233807 - DNA, 20 bp, Artificial Sequence
  Description of Artificial Sequence: Synthetic oligonucleotide
  Target: LAMA2; (-) strand; PAM type: YTN; PAM sequence: TTT
gataggtgaaaaataatatg

SEQ ID NO: 233808 - DNA, 20 bp, Artificial Sequence
  Description of Artificial Sequence: Synthetic oligonucleotide
  Target: LAMA2; (-) strand; PAM type: YTN; PAM sequence: CTT
tgataggtgaaaaataatat

SEQ ID NO: 233809 - DNA, 20 bp, Artificial Sequence
  Description of Artificial Sequence: Synthetic oligonucleotide
  Target: LAMA2; (-) strand; PAM type: YTN; PAM sequence: TTG
agtagaagaataaacacttt

SEQ ID NO: 233810 - DNA, 20 bp, Artificial Sequence
  Description of Artificial Sequence: Synthetic oligonucleotide
  Target: LAMA2; (-) strand; PAM type: YTN; PAM sequence: TTG
ttgagtagaagaataaacac

SEQ ID NO: 233811 - DNA, 20 bp, Artificial Sequence
  Description of Artificial Sequence: Synthetic oligonucleotide
  Target: LAMA2; (-) strand; PAM type: YTN; PAM sequence: TTT
gttgagtagaagaataaaca

SEQ ID NO: 233812 - DNA, 20 bp, Artificial Sequence
  Description of Artificial Sequence: Synthetic oligonucleotide
  Target: LAMA2; (-) strand; PAM type: YTN; PAM sequence: TTC
aaatatttgttgagtagaag

SEQ ID NO: 233813 - DNA, 20 bp, Artificial Sequence
  Description of Artificial Sequence: Synthetic oligonucleotide
  Target: LAMA2; (-) strand; PAM type: YTN; PAM sequence: CTG
gacataataagcattcaaat

SEQ ID NO: 233814 - DNA, 20 bp, Artificial Sequence
  Description of Artificial Sequence: Synthetic oligonucleotide
  Target: LAMA2; (-) strand; PAM type: YTN; PAM sequence: TTC
ctggacataataagcattca

SEQ ID NO: 233815 - DNA, 20 bp, Artificial Sequence
  Description of Artificial Sequence: Synthetic oligonucleotide
  Target: LAMA2; (-) strand; PAM type: YTN; PAM sequence: TTG
aatacaattcctggacataa

SEQ ID NO: 233816 - DNA, 20 bp, Artificial Sequence
  Description of Artificial Sequence: Synthetic oligonucleotide
  Target: LAMA2; (-) strand; PAM type: YTN; PAM sequence: CTT
gaatacaattcctggacata

SEQ ID NO: 233817 - DNA, 20 bp, Artificial Sequence
  Description of Artificial Sequence: Synthetic oligonucleotide
  Target: LAMA2; (-) strand; PAM type: YTN; PAM sequence: TTA
tcaacccttgaatacaattc

SEQ ID NO: 233818 - DNA, 20 bp, Artificial Sequence
  Description of Artificial Sequence: Synthetic oligonucleotide
  Target: LAMA2; (-) strand; PAM type: YTN; PAM sequence: TTG
tgtgttatcaacccttgaat

SEQ ID NO: 233819 - DNA, 20 bp, Artificial Sequence
  Description of Artificial Sequence: Synthetic oligonucleotide
  Target: LAMA2; (-) strand; PAM type: YTN; PAM sequence: CTT
gtgtgttatcaacccttgaa

SEQ ID NO: 233820 - DNA, 20 bp, Artificial Sequence
  Description of Artificial Sequence: Synthetic oligonucleotide
  Target: LAMA2; (-) strand; PAM type: YTN; PAM sequence: CTC
catagccaccaaccttgtgt

SEQ ID NO: 233821 - DNA, 20 bp, Artificial Sequence
  Description of Artificial Sequence: Synthetic oligonucleotide
  Target: LAMA2; (-) strand; PAM type: YTN; PAM sequence: TTC
tccatagccaccaaccttgt

SEQ ID NO: 233822 - DNA, 20 bp, Artificial Sequence
  Description of Artificial Sequence: Synthetic oligonucleotide
  Target: LAMA2; (-) strand; PAM type: YTN; PAM sequence: TTT
ctccatagccaccaaccttg

SEQ ID NO: 233823 - DNA, 20 bp, Artificial Sequence
  Description of Artificial Sequence: Synthetic oligonucleotide
  Target: LAMA2; (-) strand; PAM type: YTN; PAM sequence: CTT
tctccatagccaccaacctt

SEQ ID NO: 233824 - DNA, 20 bp, Artificial Sequence
  Description of Artificial Sequence: Synthetic oligonucleotide
  Target: LAMA2; (-) strand; PAM type: YTN; PAM sequence: CTA
gtagatatgataaaacactt

SEQ ID NO: 233825 - DNA, 20 bp, Artificial Sequence
  Description of Artificial Sequence: Synthetic oligonucleotide
  Target: LAMA2; (-) strand; PAM type: YTN; PAM sequence: CTC
tagtagatatgataaaacac

SEQ ID NO: 233826 - DNA, 20 bp, Artificial Sequence
  Description of Artificial Sequence: Synthetic oligonucleotide
  Target: LAMA2; (-) strand; PAM type: YTN; PAM sequence: TTC
ctctagtagatatgataaaa

SEQ ID NO: 233827 - DNA, 20 bp, Artificial Sequence
  Description of Artificial Sequence: Synthetic oligonucleotide
  Target: LAMA2; (-) strand; PAM type: YTN; PAM sequence: TTT
cctctagtagatatgataaa

SEQ ID NO: 233828 - DNA, 20 bp, Artificial Sequence
  Description of Artificial Sequence: Synthetic oligonucleotide
  Target: LAMA2; (-) strand; PAM type: YTN; PAM sequence: TTT
tcctctagtagatatgataa

SEQ ID NO: 233829 - DNA, 20 bp, Artificial Sequence
  Description of Artificial Sequence: Synthetic oligonucleotide
  Target: LAMA2; (-) strand; PAM type: YTN; PAM sequence: CTT
ttcctctagtagatatgata

SEQ ID NO: 233830 - DNA, 20 bp, Artificial Sequence
  Description of Artificial Sequence: Synthetic oligonucleotide
  Target: LAMA2; (-) strand; PAM type: YTN; PAM sequence: CTA
tgacaaatgacttttcctct

SEQ ID NO: 233831 - DNA, 20 bp, Artificial Sequence
  Description of Artificial Sequence: Synthetic oligonucleotide
  Target: LAMA2; (-) strand; PAM type: YTN; PAM sequence: CTC
caggaacgctatgacaaatg

SEQ ID NO: 233832 - DNA, 20 bp, Artificial Sequence
  Description of Artificial Sequence: Synthetic oligonucleotide
  Target: LAMA2; (-) strand; PAM type: YTN; PAM sequence: TTC
ccctccaggaacgctatgac

SEQ ID NO: 233833 - DNA, 20 bp, Artificial Sequence
  Description of Artificial Sequence: Synthetic oligonucleotide
  Target: LAMA2; (-) strand; PAM type: YTN; PAM sequence: TTA
aaaaattcccctccaggaac

SEQ ID NO: 233834 - DNA, 20 bp, Artificial Sequence
  Description of Artificial Sequence: Synthetic oligonucleotide
  Target: LAMA2; (-) strand; PAM type: YTN; PAM sequence: CTT
aaaaaattcccctccaggaa

SEQ ID NO: 233835 - DNA, 20 bp, Artificial Sequence
  Description of Artificial Sequence: Synthetic oligonucleotide
  Target: LAMA2; (-) strand; PAM type: YTN; PAM sequence: TTA
atcgcttaaaaaattcccct

SEQ ID NO: 233836 - DNA, 20 bp, Artificial Sequence
  Description of Artificial Sequence: Synthetic oligonucleotide
  Target: LAMA2; (-) strand; PAM type: YTN; PAM sequence: TTT
aatcgcttaaaaaattcccc

SEQ ID NO: 233837 - DNA, 20 bp, Artificial Sequence
  Description of Artificial Sequence: Synthetic oligonucleotide
  Target: LAMA2; (-) strand; PAM type: YTN; PAM sequence: TTT
taatcgcttaaaaaattccc

SEQ ID NO: 233838 - DNA, 20 bp, Artificial Sequence
  Description of Artificial Sequence: Synthetic oligonucleotide
  Target: LAMA2; (-) strand; PAM type: YTN; PAM sequence: TTA
aattttaatcgcttaaaaaa

SEQ ID NO: 233839 - DNA, 20 bp, Artificial Sequence
  Description of Artificial Sequence: Synthetic oligonucleotide
  Target: LAMA2; (-) strand; PAM type: YTN; PAM sequence: TTT
aaattttaatcgcttaaaaa

SEQ ID NO: 233840 - DNA, 20 bp, Artificial Sequence
  Description of Artificial Sequence: Synthetic oligonucleotide
  Target: LAMA2; (-) strand; PAM type: YTN; PAM sequence: CTA
gtcaaaggatatgtaaaatt

SEQ ID NO: 233841 - DNA, 20 bp, Artificial Sequence
  Description of Artificial Sequence: Synthetic oligonucleotide
  Target: LAMA2; (-) strand; PAM type: YTN; PAM sequence: TTC
tagtcaaaggatatgtaaaa

SEQ ID NO: 233842 - DNA, 20 bp, Artificial Sequence
  Description of Artificial Sequence: Synthetic oligonucleotide
  Target: LAMA2; (-) strand; PAM type: YTN; PAM sequence: TTT
ctagtcaaaggatatgtaaa

SEQ ID NO: 233843 - DNA, 20 bp, Artificial Sequence
  Description of Artificial Sequence: Synthetic oligonucleotide
  Target: LAMA2; (-) strand; PAM type: YTN; PAM sequence: CTG
gaagcataatttctagtcaa

SEQ ID NO: 233844 - DNA, 20 bp, Artificial Sequence
  Description of Artificial Sequence: Synthetic oligonucleotide
  Target: LAMA2; (-) strand; PAM type: YTN; PAM sequence: TTC
ctggaagcataatttctagt

SEQ ID NO: 233845 - DNA, 20 bp, Artificial Sequence
  Description of Artificial Sequence: Synthetic oligonucleotide
  Target: LAMA2; (-) strand; PAM type: YTN; PAM sequence: CTA
tagggtaaattcctggaagc

SEQ ID NO: 233846 - DNA, 20 bp, Artificial Sequence
  Description of Artificial Sequence: Synthetic oligonucleotide
  Target: LAMA2; (-) strand; PAM type: YTN; PAM sequence: CTA
tatgaatatatctatagggt

SEQ ID NO: 233847 - DNA, 20 bp, Artificial Sequence
  Description of Artificial Sequence: Synthetic oligonucleotide
  Target: LAMA2; (-) strand; PAM type: YTN; PAM sequence: CTG
tacatctatatgaatatatc

SEQ ID NO: 233848 - DNA, 20 bp, Artificial Sequence
  Description of Artificial Sequence: Synthetic oligonucleotide
  Target: LAMA2; (-) strand; PAM type: YTN; PAM sequence: TTG
tataataatgacgaggatca

SEQ ID NO: 233849 - DNA, 20 bp, Artificial Sequence
  Description of Artificial Sequence: Synthetic oligonucleotide
  Target: LAMA2; (-) strand; PAM type: YTN; PAM sequence: CTT
gtataataatgacgaggatc

SEQ ID NO: 233850 - DNA, 20 bp, Artificial Sequence
  Description of Artificial Sequence: Synthetic oligonucleotide
  Target: LAMA2; (-) strand; PAM type: YTN; PAM sequence: TTA
gtagcagtagtggtagcact

SEQ ID NO: 233851 - DNA, 20 bp, Artificial Sequence
  Description of Artificial Sequence: Synthetic oligonucleotide
  Target: LAMA2; (-) strand; PAM type: YTN; PAM sequence: CTC
aataaatgttagtagcagta

SEQ ID NO: 233852 - DNA, 20 bp, Artificial Sequence
  Description of Artificial Sequence: Synthetic oligonucleotide
  Target: LAMA2; (-) strand; PAM type: YTN; PAM sequence: CTG
agctcaataaatgttagtag

SEQ ID NO: 233853 - DNA, 20 bp, Artificial Sequence
  Description of Artificial Sequence: Synthetic oligonucleotide
  Target: LAMA2; (-) strand; PAM type: YTN; PAM sequence: CTA
aatactgagctcaataaatg

SEQ ID NO: 233854 - DNA, 20 bp, Artificial Sequence
  Description of Artificial Sequence: Synthetic oligonucleotide
  Target: LAMA2; (-) strand; PAM type: YTN; PAM sequence: CTG
aaacatactaaatactgagc

SEQ ID NO: 233855 - DNA, 20 bp, Artificial Sequence
  Description of Artificial Sequence: Synthetic oligonucleotide
  Target: LAMA2; (-) strand; PAM type: YTN; PAM sequence: TTA
gcagaatgcctgaaacatac

SEQ ID NO: 233856 - DNA, 20 bp, Artificial Sequence
  Description of Artificial Sequence: Synthetic oligonucleotide
  Target: LAMA2; (-) strand; PAM type: YTN; PAM sequence: CTT
agcagaatgcctgaaacata

SEQ ID NO: 233857 - DNA, 20 bp, Artificial Sequence
  Description of Artificial Sequence: Synthetic oligonucleotide
  Target: LAMA2; (-) strand; PAM type: YTN; PAM sequence: TTG
agaatgcttagcagaatgcc

SEQ ID NO: 233858 - DNA, 20 bp, Artificial Sequence
  Description of Artificial Sequence: Synthetic oligonucleotide
  Target: LAMA2; (-) strand; PAM type: YTN; PAM sequence: TTT
gagaatgcttagcagaatgc

SEQ ID NO: 233859 - DNA, 20 bp, Artificial Sequence
  Description of Artificial Sequence: Synthetic oligonucleotide
  Target: LAMA2; (-) strand; PAM type: YTN; PAM sequence: TTT
tgagaatgcttagcagaatg

SEQ ID NO: 233860 - DNA, 20 bp, Artificial Sequence
  Description of Artificial Sequence: Synthetic oligonucleotide
  Target: LAMA2; (-) strand; PAM type: YTN; PAM sequence: CTC
atacatgttttgagaatgct

SEQ ID NO: 233861 - DNA, 20 bp, Artificial Sequence
  Description of Artificial Sequence: Synthetic oligonucleotide
  Target: LAMA2; (-) strand; PAM type: YTN; PAM sequence: TTG
tctcatacatgttttgagaa

SEQ ID NO: 233862 - DNA, 20 bp, Artificial Sequence
  Description of Artificial Sequence: Synthetic oligonucleotide
  Target: LAMA2; (-) strand; PAM type: YTN; PAM sequence: CTT
gtctcatacatgttttgaga

SEQ ID NO: 233863 - DNA, 20 bp, Artificial Sequence
  Description of Artificial Sequence: Synthetic oligonucleotide
  Target: LAMA2; (-) strand; PAM type: YTN; PAM sequence: TTA
gtacttgtctcatacatgtt

SEQ ID NO: 233864 - DNA, 20 bp, Artificial Sequence
  Description of Artificial Sequence: Synthetic oligonucleotide
  Target: LAMA2; (-) strand; PAM type: YTN; PAM sequence: TTT
agtacttgtctcatacatgt

SEQ ID NO: 233865 - DNA, 20 bp, Artificial Sequence
  Description of Artificial Sequence: Synthetic oligonucleotide
  Target: LAMA2; (-) strand; PAM type: YTN; PAM sequence: CTT
tagtacttgtctcatacatg

SEQ ID NO: 233866 - DNA, 20 bp, Artificial Sequence
  Description of Artificial Sequence: Synthetic oligonucleotide
  Target: LAMA2; (-) strand; PAM type: YTN; PAM sequence: CTA
gcatcactttagtacttgtc

SEQ ID NO: 233867 - DNA, 20 bp, Artificial Sequence
  Description of Artificial Sequence: Synthetic oligonucleotide
  Target: LAMA2; (-) strand; PAM type: YTN; PAM sequence: CTC
gagtcctagcatcactttag

SEQ ID NO: 233868 - DNA, 20 bp, Artificial Sequence
  Description of Artificial Sequence: Synthetic oligonucleotide
  Target: LAMA2; (-) strand; PAM type: YTN; PAM sequence: TTG
aggcaaaaactcgagtccta

SEQ ID NO: 233869 - DNA, 20 bp, Artificial Sequence
  Description of Artificial Sequence: Synthetic oligonucleotide
  Target: LAMA2; (-) strand; PAM type: YTN; PAM sequence: TTT
gaggcaaaaactcgagtcct

SEQ ID NO: 233870 - DNA, 20 bp, Artificial Sequence
  Description of Artificial Sequence: Synthetic oligonucleotide
  Target: LAMA2; (-) strand; PAM type: YTN; PAM sequence: CTT
tgaggcaaaaactcgagtcc

SEQ ID NO: 233871 - DNA, 20 bp, Artificial Sequence
  Description of Artificial Sequence: Synthetic oligonucleotide
  Target: LAMA2; (-) strand; PAM type: YTN; PAM sequence: TTG
agtgactttgaggcaaaaac

SEQ ID NO: 233872 - DNA, 20 bp, Artificial Sequence
  Description of Artificial Sequence: Synthetic oligonucleotide
  Target: LAMA2; (-) strand; PAM type: YTN; PAM sequence: TTG
ccagttgagtgactttgagg

SEQ ID NO: 233873 - DNA, 20 bp, Artificial Sequence
  Description of Artificial Sequence: Synthetic oligonucleotide
  Target: LAMA2; (-) strand; PAM type: YTN; PAM sequence: TTT
gccagttgagtgactttgag

SEQ ID NO: 233874 - DNA, 20 bp, Artificial Sequence
  Description of Artificial Sequence: Synthetic oligonucleotide
  Target: LAMA2; (-) strand; PAM type: YTN; PAM sequence: CTA
tttgccagttgagtgacttt

SEQ ID NO: 233875 - DNA, 20 bp, Artificial Sequence
  Description of Artificial Sequence: Synthetic oligonucleotide
  Target: LAMA2; (-) strand; PAM type: YTN; PAM sequence: TTC
ctatttgccagttgagtgac

SEQ ID NO: 233876 - DNA, 20 bp, Artificial Sequence
  Description of Artificial Sequence: Synthetic oligonucleotide
  Target: LAMA2; (-) strand; PAM type: YTN; PAM sequence: TTT
cctatttgccagttgagtga

SEQ ID NO: 233877 - DNA, 20 bp, Artificial Sequence
  Description of Artificial Sequence: Synthetic oligonucleotide
  Target: LAMA2; (-) strand; PAM type: YTN; PAM sequence: TTA
gaaaagtttcctatttgcca

SEQ ID NO: 233878 - DNA, 20 bp, Artificial Sequence
  Description of Artificial Sequence: Synthetic oligonucleotide
  Target: LAMA2; (-) strand; PAM type: YTN; PAM sequence: CTA
atgttagaaaagtttcctat

SEQ ID NO: 233879 - DNA, 20 bp, Artificial Sequence
  Description of Artificial Sequence: Synthetic oligonucleotide
  Target: LAMA2; (-) strand; PAM type: YTN; PAM sequence: CTC
taatgttagaaaagtttcct

SEQ ID NO: 233880 - DNA, 20 bp, Artificial Sequence
  Description of Artificial Sequence: Synthetic oligonucleotide
  Target: LAMA2; (-) strand; PAM type: YTN; PAM sequence: CTG
ggaggacaaggatgccgggt

SEQ ID NO: 233881 - DNA, 20 bp, Artificial Sequence
  Description of Artificial Sequence: Synthetic oligonucleotide
  Target: LAMA2; (-) strand; PAM type: YTN; PAM sequence: TTA
caaataacaccacacacata

SEQ ID NO: 233882 - DNA, 20 bp, Artificial Sequence
  Description of Artificial Sequence: Synthetic oligonucleotide
  Target: LAMA2; (-) strand; PAM type: YTN; PAM sequence: TTT
acaaataacaccacacacat

SEQ ID NO: 233883 - DNA, 20 bp, Artificial Sequence
  Description of Artificial Sequence: Synthetic oligonucleotide
  Target: LAMA2; (-) strand; PAM type: YTN; PAM sequence: CTT
tacaaataacaccacacaca

SEQ ID NO: 233884 - DNA, 20 bp, Artificial Sequence
  Description of Artificial Sequence: Synthetic oligonucleotide
  Target: LAMA2; (-) strand; PAM type: YTN; PAM sequence: CTC
cctttacaaataacaccaca

SEQ ID NO: 233885 - DNA, 20 bp, Artificial Sequence
  Description of Artificial Sequence: Synthetic oligonucleotide
  Target: LAMA2; (-) strand; PAM type: YTN; PAM sequence: TTC
tccctttacaaataacacca

SEQ ID NO: 233886 - DNA, 20 bp, Artificial Sequence
  Description of Artificial Sequence: Synthetic oligonucleotide
  Target: LAMA2; (-) strand; PAM type: YTN; PAM sequence: TTT
ctccctttacaaataacacc

SEQ ID NO: 233887 - DNA, 20 bp, Artificial Sequence
  Description of Artificial Sequence: Synthetic oligonucleotide
  Target: LAMA2; (-) strand; PAM type: YTN; PAM sequence: TTC
catgtttctccctttacaaa

SEQ ID NO: 233888 - DNA, 20 bp, Artificial Sequence
  Description of Artificial Sequence: Synthetic oligonucleotide
  Target: LAMA2; (-) strand; PAM type: YTN; PAM sequence: TTT
ccatgtttctccctttacaa

SEQ ID NO: 233889 - DNA, 20 bp, Artificial Sequence
  Description of Artificial Sequence: Synthetic oligonucleotide
  Target: LAMA2; (-) strand; PAM type: YTN; PAM sequence: TTA
cacagtttccatgtttctcc

SEQ ID NO: 233890 - DNA, 20 bp, Artificial Sequence
  Description of Artificial Sequence: Synthetic oligonucleotide
  Target: LAMA2; (-) strand; PAM type: YTN; PAM sequence: TTA
atgaacagttacacagtttc

SEQ ID NO: 233891 - DNA, 20 bp, Artificial Sequence
  Description of Artificial Sequence: Synthetic oligonucleotide
  Target: LAMA2; (-) strand; PAM type: YTN; PAM sequence: CTA
ttaatgaacagttacacagt

SEQ ID NO: 233892 - DNA, 20 bp, Artificial Sequence
  Description of Artificial Sequence: Synthetic oligonucleotide
  Target: LAMA2; (-) strand; PAM type: YTN; PAM sequence: TTA
tcaggtccctattaatgaac

SEQ ID NO: 233893 - DNA, 20 bp, Artificial Sequence
  Description of Artificial Sequence: Synthetic oligonucleotide
  Target: LAMA2; (-) strand; PAM type: YTN; PAM sequence: TTT
atcaggtccctattaatgaa

SEQ ID NO: 233894 - DNA, 20 bp, Artificial Sequence
  Description of Artificial Sequence: Synthetic oligonucleotide
  Target: LAMA2; (-) strand; PAM type: YTN; PAM sequence: TTG
aatgaaggtatttatcaggt

SEQ ID NO: 233895 - DNA, 20 bp, Artificial Sequence
  Description of Artificial Sequence: Synthetic oligonucleotide
  Target: LAMA2; (-) strand; PAM type: YTN; PAM sequence: CTT
gaatgaaggtatttatcagg

SEQ ID NO: 233896 - DNA, 20 bp, Artificial Sequence
  Description of Artificial Sequence: Synthetic oligonucleotide
  Target: LAMA2; (-) strand; PAM type: YTN; PAM sequence: CTA
cttgaatgaaggtatttatc

SEQ ID NO: 233897 - DNA, 20 bp, Artificial Sequence
  Description of Artificial Sequence: Synthetic oligonucleotide
  Target: LAMA2; (-) strand; PAM type: YTN; PAM sequence: CTA
agggtacacagggtactact

SEQ ID NO: 233898 - DNA, 20 bp, Artificial Sequence
  Description of Artificial Sequence: Synthetic oligonucleotide
  Target: LAMA2; (-) strand; PAM type: YTN; PAM sequence: TTA
gcatgtgtatcccctaaggg

SEQ ID NO: 233899 - DNA, 20 bp, Artificial Sequence
  Description of Artificial Sequence: Synthetic oligonucleotide
  Target: LAMA2; (-) strand; PAM type: YTN; PAM sequence: TTC
catattagcatgtgtatccc

SEQ ID NO: 233900 - DNA, 20 bp, Artificial Sequence
  Description of Artificial Sequence: Synthetic oligonucleotide
  Target: LAMA2; (-) strand; PAM type: YTN; PAM sequence: TTT
ccatattagcatgtgtatcc

SEQ ID NO: 233901 - DNA, 20 bp, Artificial Sequence
  Description of Artificial Sequence: Synthetic oligonucleotide
  Target: LAMA2; (-) strand; PAM type: YTN; PAM sequence: CTT
tccatattagcatgtgtatc

SEQ ID NO: 233902 - DNA, 20 bp, Artificial Sequence
  Description of Artificial Sequence: Synthetic oligonucleotide
  Target: LAMA2; (-) strand; PAM type: YTN; PAM sequence: CTA
acagtaaatcatggagccct

SEQ ID NO: 233903 - DNA, 20 bp, Artificial Sequence
  Description of Artificial Sequence: Synthetic oligonucleotide
  Target: LAMA2; (-) strand; PAM type: YTN; PAM sequence: TTA
ctaacagtaaatcatggagc

SEQ ID NO: 233904 - DNA, 20 bp, Artificial Sequence
  Description of Artificial Sequence: Synthetic oligonucleotide
  Target: LAMA2; (-) strand; PAM type: YTN; PAM sequence: TTT
actaacagtaaatcatggag

SEQ ID NO: 233905 - DNA, 20 bp, Artificial Sequence
  Description of Artificial Sequence: Synthetic oligonucleotide
  Target: LAMA2; (-) strand; PAM type: YTN; PAM sequence: TTT
tactaacagtaaatcatgga

SEQ ID NO: 233906 - DNA, 20 bp, Artificial Sequence
  Description of Artificial Sequence: Synthetic oligonucleotide
  Target: LAMA2; (-) strand; PAM type: YTN; PAM sequence: TTT
ttactaacagtaaatcatgg

SEQ ID NO: 233907 - DNA, 20 bp, Artificial Sequence
  Description of Artificial Sequence: Synthetic oligonucleotide
  Target: LAMA2; (-) strand; PAM type: YTN; PAM sequence: CTT
tttactaacagtaaatcatg

SEQ ID NO: 233908 - DNA, 20 bp, Artificial Sequence
  Description of Artificial Sequence: Synthetic oligonucleotide
  Target: LAMA2; (-) strand; PAM type: YTN; PAM sequence: TTC
tttttactaacagtaaatca

SEQ ID NO: 233909 - DNA, 20 bp, Artificial Sequence
  Description of Artificial Sequence: Synthetic oligonucleotide
  Target: LAMA2; (-) strand; PAM type: YTN; PAM sequence: TTA
gaaccggttctttttactaa

SEQ ID NO: 233910 - DNA, 20 bp, Artificial Sequence
  Description of Artificial Sequence: Synthetic oligonucleotide
  Target: LAMA2; (-) strand; PAM type: YTN; PAM sequence: TTT
agaaccggttctttttacta

SEQ ID NO: 233911 - DNA, 20 bp, Artificial Sequence
  Description of Artificial Sequence: Synthetic oligonucleotide
  Target: LAMA2; (-) strand; PAM type: YTN; PAM sequence: CTG
tttagaaccggttcttttta

SEQ ID NO: 233912 - DNA, 20 bp, Artificial Sequence
  Description of Artificial Sequence: Synthetic oligonucleotide
  Target: LAMA2; (-) strand; PAM type: YTN; PAM sequence: TTG
tatactgtttagaaccggtt

SEQ ID NO: 233913 - DNA, 20 bp, Artificial Sequence
  Description of Artificial Sequence: Synthetic oligonucleotide
  Target: LAMA2; (-) strand; PAM type: YTN; PAM sequence: TTT
gtatactgtttagaaccggt

SEQ ID NO: 233914 - DNA, 20 bp, Artificial Sequence
  Description of Artificial Sequence: Synthetic oligonucleotide
  Target: LAMA2; (-) strand; PAM type: YTN; PAM sequence: CTA
caaaagggaaggggcatttg

SEQ ID NO: 233915 - DNA, 20 bp, Artificial Sequence
  Description of Artificial Sequence: Synthetic oligonucleotide
  Target: LAMA2; (-) strand; PAM type: YTN; PAM sequence: TTC
tacaaaagggaaggggcatt

SEQ ID NO: 233916 - DNA, 20 bp, Artificial Sequence
  Description of Artificial Sequence: Synthetic oligonucleotide
  Target: LAMA2; (-) strand; PAM type: YTN; PAM sequence: TTA
ttctacaaaagggaaggggc

SEQ ID NO: 233917 - DNA, 20 bp, Artificial Sequence
  Description of Artificial Sequence: Synthetic oligonucleotide
  Target: LAMA2; (-) strand; PAM type: YTN; PAM sequence: TTT
attctacaaaagggaagggg

SEQ ID NO: 233918 - DNA, 20 bp, Artificial Sequence
  Description of Artificial Sequence: Synthetic oligonucleotide
  Target: LAMA2; (-) strand; PAM type: YTN; PAM sequence: TTA
tttattctacaaaagggaag

SEQ ID NO: 233919 - DNA, 20 bp, Artificial Sequence
  Description of Artificial Sequence: Synthetic oligonucleotide
  Target: LAMA2; (-) strand; PAM type: YTN; PAM sequence: TTT
atttattctacaaaagggaa

SEQ ID NO: 233920 - DNA, 20 bp, Artificial Sequence
  Description of Artificial Sequence: Synthetic oligonucleotide
  Target: LAMA2; (-) strand; PAM type: YTN; PAM sequence: TTT
tatttattctacaaaaggga

SEQ ID NO: 233921 - DNA, 20 bp, Artificial Sequence
  Description of Artificial Sequence: Synthetic oligonucleotide
  Target: LAMA2; (-) strand; PAM type: YTN; PAM sequence: TTT
ttatttattctacaaaaggg

SEQ ID NO: 233922 - DNA, 20 bp, Artificial Sequence
  Description of Artificial Sequence: Synthetic oligonucleotide
  Target: LAMA2; (-) strand; PAM type: YTN; PAM sequence: CTT
tttatttattctacaaaagg

SEQ ID NO: 233923 - DNA, 20 bp, Artificial Sequence
  Description of Artificial Sequence: Synthetic oligonucleotide
  Target: LAMA2; (-) strand; PAM type: YTN; PAM sequence: CTC
aatctttttatttattctac

SEQ ID NO: 233924 - DNA, 20 bp, Artificial Sequence
  Description of Artificial Sequence: Synthetic oligonucleotide
  Target: LAMA2; (-) strand; PAM type: YTN; PAM sequence: TTG
tatgcatacagctcaatctt

SEQ ID NO: 233925 - DNA, 20 bp, Artificial Sequence
  Description of Artificial Sequence: Synthetic oligonucleotide
  Target: LAMA2; (-) strand; PAM type: YTN; PAM sequence: CTT
gtatgcatacagctcaatct

SEQ ID NO: 233926 - DNA, 20 bp, Artificial Sequence
  Description of Artificial Sequence: Synthetic oligonucleotide
  Target: LAMA2; (-) strand; PAM type: YTN; PAM sequence: TTC
cacgtgtgtgtgtgtgtgtg

SEQ ID NO: 233927 - DNA, 20 bp, Artificial Sequence
  Description of Artificial Sequence: Synthetic oligonucleotide
  Target: LAMA2; (-) strand; PAM type: YTN; PAM sequence: TTT
ccacgtgtgtgtgtgtgtgt

SEQ ID NO: 233928 - DNA, 20 bp, Artificial Sequence
  Description of Artificial Sequence: Synthetic oligonucleotide
  Target: LAMA2; (-) strand; PAM type: YTN; PAM sequence: TTA
tttccacgtgtgtgtgtgtg

SEQ ID NO: 233929 - DNA, 20 bp, Artificial Sequence
  Description of Artificial Sequence: Synthetic oligonucleotide
  Target: LAMA2; (-) strand; PAM type: YTN; PAM sequence: TTT
atttccacgtgtgtgtgtgt

SEQ ID NO: 233930 - DNA, 20 bp, Artificial Sequence
  Description of Artificial Sequence: Synthetic oligonucleotide
  Target: LAMA2; (-) strand; PAM type: YTN; PAM sequence: TTA
catttatttccacgtgtgtg

SEQ ID NO: 233931 - DNA, 20 bp, Artificial Sequence
  Description of Artificial Sequence: Synthetic oligonucleotide
  Target: LAMA2; (-) strand; PAM type: YTN; PAM sequence: CTT
acatttatttccacgtgtgt

SEQ ID NO: 233932 - DNA, 20 bp, Artificial Sequence
  Description of Artificial Sequence: Synthetic oligonucleotide
  Target: LAMA2; (-) strand; PAM type: YTN; PAM sequence: TTA
ggagtacttacatttatttc

SEQ ID NO: 233933 - DNA, 20 bp, Artificial Sequence
  Description of Artificial Sequence: Synthetic oligonucleotide
  Target: LAMA2; (-) strand; PAM type: YTN; PAM sequence: CTT
aggagtacttacatttattt

SEQ ID NO: 233934 - DNA, 20 bp, Artificial Sequence
  Description of Artificial Sequence: Synthetic oligonucleotide
  Target: LAMA2; (-) strand; PAM type: YTN; PAM sequence: TTC
ttaggagtacttacatttat

SEQ ID NO: 233935 - DNA, 20 bp, Artificial Sequence
  Description of Artificial Sequence: Synthetic oligonucleotide
  Target: LAMA2; (-) strand; PAM type: YTN; PAM sequence: TTT
cttaggagtacttacattta

SEQ ID NO: 233936 - DNA, 20 bp, Artificial Sequence
  Description of Artificial Sequence: Synthetic oligonucleotide
  Target: LAMA2; (-) strand; PAM type: YTN; PAM sequence: TTG
agtttcttaggagtacttac

SEQ ID NO: 233937 - DNA, 20 bp, Artificial Sequence
  Description of Artificial Sequence: Synthetic oligonucleotide
  Target: LAMA2; (-) strand; PAM type: YTN; PAM sequence: CTG
acatgttgagtttcttagga

SEQ ID NO: 233938 - DNA, 20 bp, Artificial Sequence
  Description of Artificial Sequence: Synthetic oligonucleotide
  Target: LAMA2; (-) strand; PAM type: YTN; PAM sequence: CTA
cctgacatgttgagtttctt

SEQ ID NO: 233939 - DNA, 20 bp, Artificial Sequence
  Description of Artificial Sequence: Synthetic oligonucleotide
  Target: LAMA2; (-) strand; PAM type: YTN; PAM sequence: TTC
ctacctgacatgttgagttt

SEQ ID NO: 233940 - DNA, 20 bp, Artificial Sequence
  Description of Artificial Sequence: Synthetic oligonucleotide
  Target: LAMA2; (-) strand; PAM type: YTN; PAM sequence: CTT
cctacctgacatgttgagtt

SEQ ID NO: 233941 - DNA, 20 bp, Artificial Sequence
  Description of Artificial Sequence: Synthetic oligonucleotide
  Target: LAMA2; (-) strand; PAM type: YTN; PAM sequence: CTC
cttcctacctgacatgttga

SEQ ID NO: 233942 - DNA, 20 bp, Artificial Sequence
  Description of Artificial Sequence: Synthetic oligonucleotide
  Target: LAMA2; (-) strand; PAM type: YTN; PAM sequence: TTA
ggatagaaccagggaaatat

SEQ ID NO: 233943 - DNA, 20 bp, Artificial Sequence
  Description of Artificial Sequence: Synthetic oligonucleotide
  Target: LAMA2; (-) strand; PAM type: YTN; PAM sequence: TTA
tattaggatagaaccaggga

SEQ ID NO: 233944 - DNA, 20 bp, Artificial Sequence
  Description of Artificial Sequence: Synthetic oligonucleotide
  Target: LAMA2; (-) strand; PAM type: YTN; PAM sequence: TTT
atattaggatagaaccaggg

SEQ ID NO: 233945 - DNA, 20 bp, Artificial Sequence
  Description of Artificial Sequence: Synthetic oligonucleotide
  Target: LAMA2; (-) strand; PAM type: YTN; PAM sequence: CTA
aatatgaagaatttatatta

SEQ ID NO: 233946 - DNA, 20 bp, Artificial Sequence
  Description of Artificial Sequence: Synthetic oligonucleotide
  Target: LAMA2; (-) strand; PAM type: YTN; PAM sequence: TTC
taaatatgaagaatttatat

SEQ ID NO: 233947 - DNA, 20 bp, Artificial Sequence
  Description of Artificial Sequence: Synthetic oligonucleotide
  Target: LAMA2; (-) strand; PAM type: YTN; PAM sequence: CTT
ctaaatatgaagaatttata

SEQ ID NO: 233948 - DNA, 20 bp, Artificial Sequence
  Description of Artificial Sequence: Synthetic oligonucleotide
  Target: LAMA2; (-) strand; PAM type: YTN; PAM sequence: CTC
ttctaaatatgaagaattta

SEQ ID NO: 233949 - DNA, 20 bp, Artificial Sequence
  Description of Artificial Sequence: Synthetic oligonucleotide
  Target: LAMA2; (-) strand; PAM type: YTN; PAM sequence: TTG
ggtaagactcttctaaatat

SEQ ID NO: 233950 - DNA, 20 bp, Artificial Sequence
  Description of Artificial Sequence: Synthetic oligonucleotide
  Target: LAMA2; (-) strand; PAM type: YTN; PAM sequence: CTC
cagaaaggattgggtaagac

SEQ ID NO: 233951 - DNA, 20 bp, Artificial Sequence
  Description of Artificial Sequence: Synthetic oligonucleotide
  Target: LAMA2; (-) strand; PAM type: YTN; PAM sequence: TTC
tccagaaaggattgggtaag

SEQ ID NO: 233952 - DNA, 20 bp, Artificial Sequence
  Description of Artificial Sequence: Synthetic oligonucleotide
  Target: LAMA2; (-) strand; PAM type: YTN; PAM sequence: TTT
ctccagaaaggattgggtaa

SEQ ID NO: 233953 - DNA, 20 bp, Artificial Sequence
  Description of Artificial Sequence: Synthetic oligonucleotide
  Target: LAMA2; (-) strand; PAM type: YTN; PAM sequence: CTT
tctccagaaaggattgggta

SEQ ID NO: 233954 - DNA, 20 bp, Artificial Sequence
  Description of Artificial Sequence: Synthetic oligonucleotide
  Target: LAMA2; (-) strand; PAM type: YTN; PAM sequence: TTC
caagaagtgaaaaatcactt

SEQ ID NO: 233955 - DNA, 20 bp, Artificial Sequence
  Description of Artificial Sequence: Synthetic oligonucleotide
  Target: LAMA2; (-) strand; PAM type: YTN; PAM sequence: TTA
gaagaattccaagaagtgaa

SEQ ID NO: 233956 - DNA, 20 bp, Artificial Sequence
  Description of Artificial Sequence: Synthetic oligonucleotide
  Target: LAMA2; (-) strand; PAM type: YTN; PAM sequence: TTA
cattagaagaattccaagaa

SEQ ID NO: 233957 - DNA, 20 bp, Artificial Sequence
  Description of Artificial Sequence: Synthetic oligonucleotide
  Target: LAMA2; (-) strand; PAM type: YTN; PAM sequence: TTC
atgttacattagaagaattc

SEQ ID NO: 233958 - DNA, 20 bp, Artificial Sequence
  Description of Artificial Sequence: Synthetic oligonucleotide
  Target: LAMA2; (-) strand; PAM type: YTN; PAM sequence: TTT
catgttacattagaagaatt

SEQ ID NO: 233959 - DNA, 20 bp, Artificial Sequence
  Description of Artificial Sequence: Synthetic oligonucleotide
  Target: LAMA2; (-) strand; PAM type: YTN; PAM sequence: TTT
tcatgttacattagaagaat

SEQ ID NO: 233960 - DNA, 20 bp, Artificial Sequence
  Description of Artificial Sequence: Synthetic oligonucleotide
  Target: LAMA2; (-) strand; PAM type: YTN; PAM sequence: TTT
ttcatgttacattagaagaa

SEQ ID NO: 233961 - DNA, 20 bp, Artificial Sequence
  Description of Artificial Sequence: Synthetic oligonucleotide
  Target: LAMA2; (-) strand; PAM type: YTN; PAM sequence: CTT
tttcatgttacattagaaga

SEQ ID NO: 233962 - DNA, 20 bp, Artificial Sequence
  Description of Artificial Sequence: Synthetic oligonucleotide
  Target: LAMA2; (-) strand; PAM type: YTN; PAM sequence: TTG
tctttttcatgttacattag

SEQ ID NO: 233963 - DNA, 20 bp, Artificial Sequence
  Description of Artificial Sequence: Synthetic oligonucleotide
  Target: LAMA2; (-) strand; PAM type: YTN; PAM sequence: CTT
gtctttttcatgttacatta

SEQ ID NO: 233964 - DNA, 20 bp, Artificial Sequence
  Description of Artificial Sequence: Synthetic oligonucleotide
  Target: LAMA2; (-) strand; PAM type: YTN; PAM sequence: CTC
cttgtctttttcatgttaca

SEQ ID NO: 233965 - DNA, 20 bp, Artificial Sequence
  Description of Artificial Sequence: Synthetic oligonucleotide
  Target: LAMA2; (-) strand; PAM type: YTN; PAM sequence: TTC
ctccttgtctttttcatgtt

SEQ ID NO: 233966 - DNA, 20 bp, Artificial Sequence
  Description of Artificial Sequence: Synthetic oligonucleotide
  Target: LAMA2; (-) strand; PAM type: YTN; PAM sequence: CTT
cctccttgtctttttcatgt

SEQ ID NO: 233967 - DNA, 20 bp, Artificial Sequence
  Description of Artificial Sequence: Synthetic oligonucleotide
  Target: LAMA2; (-) strand; PAM type: YTN; PAM sequence: TTC
ttcctccttgtctttttcat

SEQ ID NO: 233968 - DNA, 20 bp, Artificial Sequence
  Description of Artificial Sequence: Synthetic oligonucleotide
  Target: LAMA2; (-) strand; PAM type: YTN; PAM sequence: TTT
cttcctccttgtctttttca

SEQ ID NO: 233969 - DNA, 20 bp, Artificial Sequence
  Description of Artificial Sequence: Synthetic oligonucleotide
  Target: LAMA2; (-) strand; PAM type: YTN; PAM sequence: TTT
tcttcctccttgtctttttc

SEQ ID NO: 233970 - DNA, 20 bp, Artificial Sequence
  Description of Artificial Sequence: Synthetic oligonucleotide
  Target: LAMA2; (-) strand; PAM type: YTN; PAM sequence: CTT
ttcttcctccttgtcttttt

SEQ ID NO: 233971 - DNA, 20 bp, Artificial Sequence
  Description of Artificial Sequence: Synthetic oligonucleotide
  Target: LAMA2; (-) strand; PAM type: YTN; PAM sequence: TTC
ttttcttcctccttgtcttt

SEQ ID NO: 233972 - DNA, 20 bp, Artificial Sequence
  Description of Artificial Sequence: Synthetic oligonucleotide
  Target: LAMA2; (-) strand; PAM type: YTN; PAM sequence: CTT
cttttcttcctccttgtctt

SEQ ID NO: 233973 - DNA, 20 bp, Artificial Sequence
  Description of Artificial Sequence: Synthetic oligonucleotide
  Target: LAMA2; (-) strand; PAM type: YTN; PAM sequence: TTC
ttcttttcttcctccttgtc

SEQ ID NO: 233974 - DNA, 20 bp, Artificial Sequence
  Description of Artificial Sequence: Synthetic oligonucleotide
  Target: LAMA2; (-) strand; PAM type: YTN; PAM sequence: TTT
cttcttttcttcctccttgt

SEQ ID NO: 233975 - DNA, 20 bp, Artificial Sequence
  Description of Artificial Sequence: Synthetic oligonucleotide
  Target: LAMA2; (-) strand; PAM type: YTN; PAM sequence: TTT
tcttcttttcttcctccttg

SEQ ID NO: 233976 - DNA, 20 bp, Artificial Sequence
  Description of Artificial Sequence: Synthetic oligonucleotide
  Target: LAMA2; (-) strand; PAM type: YTN; PAM sequence: TTT
ttcttcttttcttcctcctt

SEQ ID NO: 233977 - DNA, 20 bp, Artificial Sequence
  Description of Artificial Sequence: Synthetic oligonucleotide
  Target: LAMA2; (-) strand; PAM type: YTN; PAM sequence: TTG
atttttcttcttttcttcct

SEQ ID NO: 233978 - DNA, 20 bp, Artificial Sequence
  Description of Artificial Sequence: Synthetic oligonucleotide
  Target: LAMA2; (-) strand; PAM type: YTN; PAM sequence: TTA
gcaattgatttttcttcttt

SEQ ID NO: 233979 - DNA, 20 bp, Artificial Sequence
  Description of Artificial Sequence: Synthetic oligonucleotide
  Target: LAMA2; (-) strand; PAM type: YTN; PAM sequence: TTA
taaagaagttagcaattgat

SEQ ID NO: 233980 - DNA, 20 bp, Artificial Sequence
  Description of Artificial Sequence: Synthetic oligonucleotide
  Target: LAMA2; (-) strand; PAM type: YTN; PAM sequence: CTT
ataaagaagttagcaattga

SEQ ID NO: 233981 - DNA, 20 bp, Artificial Sequence
  Description of Artificial Sequence: Synthetic oligonucleotide
  Target: LAMA2; (-) strand; PAM type: YTN; PAM sequence: TTA
gcgtaatgtcttataaagaa

SEQ ID NO: 233982 - DNA, 20 bp, Artificial Sequence
  Description of Artificial Sequence: Synthetic oligonucleotide
  Target: LAMA2; (-) strand; PAM type: YTN; PAM sequence: TTA
aaagcacaagtgagataatg

SEQ ID NO: 233983 - DNA, 20 bp, Artificial Sequence
  Description of Artificial Sequence: Synthetic oligonucleotide
  Target: LAMA2; (-) strand; PAM type: YTN; PAM sequence: TTT
aaaagcacaagtgagataat

SEQ ID NO: 233984 - DNA, 20 bp, Artificial Sequence
  Description of Artificial Sequence: Synthetic oligonucleotide
  Target: LAMA2; (-) strand; PAM type: YTN; PAM sequence: TTG
ggatatttaaaagcacaagt

SEQ ID NO: 233985 - DNA, 20 bp, Artificial Sequence
  Description of Artificial Sequence: Synthetic oligonucleotide
  Target: LAMA2; (-) strand; PAM type: YTN; PAM sequence: CTA
gattgggatatttaaaagca

SEQ ID NO: 233986 - DNA, 20 bp, Artificial Sequence
  Description of Artificial Sequence: Synthetic oligonucleotide
  Target: LAMA2; (-) strand; PAM type: YTN; PAM sequence: TTA
ctagattgggatatttaaaa

SEQ ID NO: 233987 - DNA, 20 bp, Artificial Sequence
  Description of Artificial Sequence: Synthetic oligonucleotide
  Target: LAMA2; (-) strand; PAM type: YTN; PAM sequence: TTC
catataatacatggagtggt

SEQ ID NO: 233988 - DNA, 20 bp, Artificial Sequence
  Description of Artificial Sequence: Synthetic oligonucleotide
  Target: LAMA2; (-) strand; PAM type: YTN; PAM sequence: TTT
ccatataatacatggagtgg

SEQ ID NO: 233989 - DNA, 20 bp, Artificial Sequence
  Description of Artificial Sequence: Synthetic oligonucleotide
  Target: LAMA2; (-) strand; PAM type: YTN; PAM sequence: CTC
agtttccatataatacatgg

SEQ ID NO: 233990 - DNA, 20 bp, Artificial Sequence
  Description of Artificial Sequence: Synthetic oligonucleotide
  Target: LAMA2; (-) strand; PAM type: YTN; PAM sequence: TTC
acgaaggctcagtttccata

SEQ ID NO: 233991 - DNA, 20 bp, Artificial Sequence
  Description of Artificial Sequence: Synthetic oligonucleotide
  Target: LAMA2; (-) strand; PAM type: YTN; PAM sequence: TTT
cacgaaggctcagtttccat

SEQ ID NO: 233992 - DNA, 20 bp, Artificial Sequence
  Description of Artificial Sequence: Synthetic oligonucleotide
  Target: LAMA2; (-) strand; PAM type: YTN; PAM sequence: TTA
atttcacgaaggctcagttt

SEQ ID NO: 233993 - DNA, 20 bp, Artificial Sequence
  Description of Artificial Sequence: Synthetic oligonucleotide
  Target: LAMA2; (-) strand; PAM type: YTN; PAM sequence: CTT
aatttcacgaaggctcagtt

SEQ ID NO: 233994 - DNA, 20 bp, Artificial Sequence
  Description of Artificial Sequence: Synthetic oligonucleotide
  Target: LAMA2; (-) strand; PAM type: YTN; PAM sequence: TTC
ttaatttcacgaaggctcag

SEQ ID NO: 233995 - DNA, 20 bp, Artificial Sequence
  Description of Artificial Sequence: Synthetic oligonucleotide
  Target: LAMA2; (-) strand; PAM type: YTN; PAM sequence: CTT
cttaatttcacgaaggctca

SEQ ID NO: 233996 - DNA, 20 bp, Artificial Sequence
  Description of Artificial Sequence: Synthetic oligonucleotide
  Target: LAMA2; (-) strand; PAM type: YTN; PAM sequence: TTG
gaaacttcttaatttcacga

SEQ ID NO: 233997 - DNA, 20 bp, Artificial Sequence
  Description of Artificial Sequence: Synthetic oligonucleotide
  Target: LAMA2; (-) strand; PAM type: YTN; PAM sequence: TTA
gcagtcatatgacattggaa

SEQ ID NO: 233998 - DNA, 20 bp, Artificial Sequence
  Description of Artificial Sequence: Synthetic oligonucleotide
  Target: LAMA2; (-) strand; PAM type: YTN; PAM sequence: CTT
agcagtcatatgacattgga

SEQ ID NO: 233999 - DNA, 20 bp, Artificial Sequence
  Description of Artificial Sequence: Synthetic oligonucleotide
  Target: LAMA2; (-) strand; PAM type: YTN; PAM sequence: CTA
cttagcagtcatatgacatt

SEQ ID NO: 234000 - DNA, 20 bp, Artificial Sequence
  Description of Artificial Sequence: Synthetic oligonucleotide
  Target: LAMA2; (-) strand; PAM type: YTN; PAM sequence: CTC
tacttagcagtcatatgaca

SEQ ID NO: 234001 - DNA, 20 bp, Artificial Sequence
  Description of Artificial Sequence: Synthetic oligonucleotide
  Target: LAMA2; (-) strand; PAM type: YTN; PAM sequence: CTC
ctctacttagcagtcatatg

SEQ ID NO: 234002 - DNA, 20 bp, Artificial Sequence
  Description of Artificial Sequence: Synthetic oligonucleotide
  Target: LAMA2; (-) strand; PAM type: YTN; PAM sequence: CTC
tcctctacttagcagtcata

SEQ ID NO: 234003 - DNA, 20 bp, Artificial Sequence
  Description of Artificial Sequence: Synthetic oligonucleotide
  Target: LAMA2; (-) strand; PAM type: YTN; PAM sequence: TTG
gatgtgggtgtgctctcctc

SEQ ID NO: 234004 - DNA, 20 bp, Artificial Sequence
  Description of Artificial Sequence: Synthetic oligonucleotide
  Target: LAMA2; (-) strand; PAM type: YTN; PAM sequence: CTT
ggatgtgggtgtgctctcct

SEQ ID NO: 234005 - DNA, 20 bp, Artificial Sequence
  Description of Artificial Sequence: Synthetic oligonucleotide
  Target: LAMA2; (-) strand; PAM type: YTN; PAM sequence: CTG
tcttggatgtgggtgtgctc

SEQ ID NO: 234006 - DNA, 20 bp, Artificial Sequence
  Description of Artificial Sequence: Synthetic oligonucleotide
  Target: LAMA2; (-) strand; PAM type: YTN; PAM sequence: TTG
caaccaactgtcttggatgt

SEQ ID NO: 234007 - DNA, 20 bp, Artificial Sequence
  Description of Artificial Sequence: Synthetic oligonucleotide
  Target: LAMA2; (-) strand; PAM type: YTN; PAM sequence: TTT
gcaaccaactgtcttggatg

SEQ ID NO: 234008 - DNA, 20 bp, Artificial Sequence
  Description of Artificial Sequence: Synthetic oligonucleotide
  Target: LAMA2; (-) strand; PAM type: YTN; PAM sequence: TTT
tgcaaccaactgtcttggat

SEQ ID NO: 234009 - DNA, 20 bp, Artificial Sequence
  Description of Artificial Sequence: Synthetic oligonucleotide
  Target: LAMA2; (-) strand; PAM type: YTN; PAM sequence: CTA
ttttgcaaccaactgtcttg

SEQ ID NO: 234010 - DNA, 20 bp, Artificial Sequence
  Description of Artificial Sequence: Synthetic oligonucleotide
  Target: LAMA2; (-) strand; PAM type: YTN; PAM sequence: CTA
agatcatgctattttgcaac

SEQ ID NO: 234011 - DNA, 20 bp, Artificial Sequence
  Description of Artificial Sequence: Synthetic oligonucleotide
  Target: LAMA2; (-) strand; PAM type: YTN; PAM sequence: CTG
gtggctaagatcatgctatt

SEQ ID NO: 234012 - DNA, 20 bp, Artificial Sequence
  Description of Artificial Sequence: Synthetic oligonucleotide
  Target: LAMA2; (-) strand; PAM type: YTN; PAM sequence: TTA
ctggtggctaagatcatgct

SEQ ID NO: 234013 - DNA, 20 bp, Artificial Sequence
  Description of Artificial Sequence: Synthetic oligonucleotide
  Target: LAMA2; (-) strand; PAM type: YTN; PAM sequence: TTT
actggtggctaagatcatgc

SEQ ID NO: 234014 - DNA, 20 bp, Artificial Sequence
  Description of Artificial Sequence: Synthetic oligonucleotide
  Target: LAMA2; (-) strand; PAM type: YTN; PAM sequence: CTA
gtttactggtggctaagatc

SEQ ID NO: 234015 - DNA, 20 bp, Artificial Sequence
  Description of Artificial Sequence: Synthetic oligonucleotide
  Target: LAMA2; (-) strand; PAM type: YTN; PAM sequence: TTA
agacaaaccgagagctagtt

SEQ ID NO: 234016 - DNA, 20 bp, Artificial Sequence
  Description of Artificial Sequence: Synthetic oligonucleotide
  Target: LAMA2; (-) strand; PAM type: YTN; PAM sequence: CTA
cccggtgaatgaaataagat

SEQ ID NO: 234017 - DNA, 20 bp, Artificial Sequence
  Description of Artificial Sequence: Synthetic oligonucleotide
  Target: LAMA2; (-) strand; PAM type: YTN; PAM sequence: TTC
acatcctacccggtgaatga

SEQ ID NO: 234018 - DNA, 20 bp, Artificial Sequence
  Description of Artificial Sequence: Synthetic oligonucleotide
  Target: LAMA2; (-) strand; PAM type: YTN; PAM sequence: CTT
cacatcctacccggtgaatg

SEQ ID NO: 234019 - DNA, 20 bp, Artificial Sequence
  Description of Artificial Sequence: Synthetic oligonucleotide
  Target: LAMA2; (-) strand; PAM type: YTN; PAM sequence: CTC
ttcacatcctacccggtgaa

SEQ ID NO: 234020 - DNA, 20 bp, Artificial Sequence
  Description of Artificial Sequence: Synthetic oligonucleotide
  Target: LAMA2; (-) strand; PAM type: YTN; PAM sequence: CTG
ccagaatctcttcacatcct

SEQ ID NO: 234021 - DNA, 20 bp, Artificial Sequence
  Description of Artificial Sequence: Synthetic oligonucleotide
  Target: LAMA2; (-) strand; PAM type: YTN; PAM sequence: CTA
aagactgccagaatctcttc

SEQ ID NO: 234022 - DNA, 20 bp, Artificial Sequence
  Description of Artificial Sequence: Synthetic oligonucleotide
  Target: LAMA2; (-) strand; PAM type: YTN; PAM sequence: CTG
ctaaagactgccagaatctc

SEQ ID NO: 234023 - DNA, 20 bp, Artificial Sequence
  Description of Artificial Sequence: Synthetic oligonucleotide
  Target: LAMA2; (-) strand; PAM type: YTN; PAM sequence: CTG
cactgctaaagactgccaga

SEQ ID NO: 234024 - DNA, 20 bp, Artificial Sequence
  Description of Artificial Sequence: Synthetic oligonucleotide
  Target: LAMA2; (-) strand; PAM type: YTN; PAM sequence: CTC
cagagtctgcactgctaaag

SEQ ID NO: 234025 - DNA, 20 bp, Artificial Sequence
  Description of Artificial Sequence: Synthetic oligonucleotide
  Target: LAMA2; (-) strand; PAM type: YTN; PAM sequence: CTG
aagccagactccagagtctg

SEQ ID NO: 234026 - DNA, 20 bp, Artificial Sequence
  Description of Artificial Sequence: Synthetic oligonucleotide
  Target: LAMA2; (-) strand; PAM type: YTN; PAM sequence: CTC
tgaagccagactccagagtc

SEQ ID NO: 234027 - DNA, 20 bp, Artificial Sequence
  Description of Artificial Sequence: Synthetic oligonucleotide
  Target: LAMA2; (-) strand; PAM type: YTN; PAM sequence: TTG
gaaaccaacctctgaagcca

SEQ ID NO: 234028 - DNA, 20 bp, Artificial Sequence
  Description of Artificial Sequence: Synthetic oligonucleotide
  Target: LAMA2; (-) strand; PAM type: YTN; PAM sequence: CTA
atcagtattggaaaccaacc

SEQ ID NO: 234029 - DNA, 20 bp, Artificial Sequence
  Description of Artificial Sequence: Synthetic oligonucleotide
  Target: LAMA2; (-) strand; PAM type: YTN; PAM sequence: TTC
taatcagtattggaaaccaa

SEQ ID NO: 234030 - DNA, 20 bp, Artificial Sequence
  Description of Artificial Sequence: Synthetic oligonucleotide
  Target: LAMA2; (-) strand; PAM type: YTN; PAM sequence: CTG
agtccagagaagtgaaataa

SEQ ID NO: 234031 - DNA, 20 bp, Artificial Sequence
  Description of Artificial Sequence: Synthetic oligonucleotide
  Target: LAMA2; (-) strand; PAM type: YTN; PAM sequence: CTA
gaaacctgagtccagagaag

SEQ ID NO: 234032 - DNA, 20 bp, Artificial Sequence
  Description of Artificial Sequence: Synthetic oligonucleotide
  Target: LAMA2; (-) strand; PAM type: YTN; PAM sequence: TTG
tatactagaaacctgagtcc

SEQ ID NO: 234033 - DNA, 20 bp, Artificial Sequence
  Description of Artificial Sequence: Synthetic oligonucleotide
  Target: LAMA2; (-) strand; PAM type: YTN; PAM sequence: TTT
gtatactagaaacctgagtc

SEQ ID NO: 234034 - DNA, 20 bp, Artificial Sequence
  Description of Artificial Sequence: Synthetic oligonucleotide
  Target: LAMA2; (-) strand; PAM type: YTN; PAM sequence: TTT
tgtatactagaaacctgagt

SEQ ID NO: 234035 - DNA, 20 bp, Artificial Sequence
  Description of Artificial Sequence: Synthetic oligonucleotide
  Target: LAMA2; (-) strand; PAM type: YTN; PAM sequence: TTT
ttgtatactagaaacctgag

SEQ ID NO: 234036 - DNA, 20 bp, Artificial Sequence
  Description of Artificial Sequence: Synthetic oligonucleotide
  Target: LAMA2; (-) strand; PAM type: YTN; PAM sequence: CTA
tttttgtatactagaaacct

SEQ ID NO: 234037 - DNA, 20 bp, Artificial Sequence
  Description of Artificial Sequence: Synthetic oligonucleotide
  Target: LAMA2; (-) strand; PAM type: YTN; PAM sequence: TTA
acctatttttgtatactaga

SEQ ID NO: 234038 - DNA, 20 bp, Artificial Sequence
  Description of Artificial Sequence: Synthetic oligonucleotide
  Target: LAMA2; (-) strand; PAM type: YTN; PAM sequence: TTA
ttaacctatttttgtatact

SEQ ID NO: 234039 - DNA, 20 bp, Artificial Sequence
  Description of Artificial Sequence: Synthetic oligonucleotide
  Target: LAMA2; (-) strand; PAM type: YTN; PAM sequence: TTA
ttattaacctatttttgtat

SEQ ID NO: 234040 - DNA, 20 bp, Artificial Sequence
  Description of Artificial Sequence: Synthetic oligonucleotide
  Target: LAMA2; (-) strand; PAM type: YTN; PAM sequence: TTA
ttattattaacctatttttg

SEQ ID NO: 234041 - DNA, 20 bp, Artificial Sequence
  Description of Artificial Sequence: Synthetic oligonucleotide
  Target: LAMA2; (-) strand; PAM type: YTN; PAM sequence: TTA
ggtattattattattaacct

SEQ ID NO: 234042 - DNA, 20 bp, Artificial Sequence
  Description of Artificial Sequence: Synthetic oligonucleotide
  Target: LAMA2; (-) strand; PAM type: YTN; PAM sequence: TTA
ggaattaggtattattatta

SEQ ID NO: 234043 - DNA, 20 bp, Artificial Sequence
  Description of Artificial Sequence: Synthetic oligonucleotide
  Target: LAMA2; (-) strand; PAM type: YTN; PAM sequence: TTT
aggaattaggtattattatt

SEQ ID NO: 234044 - DNA, 20 bp, Artificial Sequence
  Description of Artificial Sequence: Synthetic oligonucleotide
  Target: LAMA2; (-) strand; PAM type: YTN; PAM sequence: TTT
taggaattaggtattattat

SEQ ID NO: 234045 - DNA, 20 bp, Artificial Sequence
  Description of Artificial Sequence: Synthetic oligonucleotide
  Target: LAMA2; (-) strand; PAM type: YTN; PAM sequence: CTT
ttaggaattaggtattatta

SEQ ID NO: 234046 - DNA, 20 bp, Artificial Sequence
  Description of Artificial Sequence: Synthetic oligonucleotide
  Target: LAMA2; (-) strand; PAM type: YTN; PAM sequence: CTC
aaaaatgcttttaggaatta

SEQ ID NO: 234047 - DNA, 20 bp, Artificial Sequence
  Description of Artificial Sequence: Synthetic oligonucleotide
  Target: LAMA2; (-) strand; PAM type: YTN; PAM sequence: TTA
atcctcaaaaatgcttttag

SEQ ID NO: 234048 - DNA, 20 bp, Artificial Sequence
  Description of Artificial Sequence: Synthetic oligonucleotide
  Target: LAMA2; (-) strand; PAM type: YTN; PAM sequence: TTT
aatcctcaaaaatgctttta

SEQ ID NO: 234049 - DNA, 20 bp, Artificial Sequence
  Description of Artificial Sequence: Synthetic oligonucleotide
  Target: LAMA2; (-) strand; PAM type: YTN; PAM sequence: TTT
taatcctcaaaaatgctttt

SEQ ID NO: 234050 - DNA, 20 bp, Artificial Sequence
  Description of Artificial Sequence: Synthetic oligonucleotide
  Target: LAMA2; (-) strand; PAM type: YTN; PAM sequence: CTG
attttaatcctcaaaaatgc

SEQ ID NO: 234051 - DNA, 20 bp, Artificial Sequence
  Description of Artificial Sequence: Synthetic oligonucleotide
  Target: LAMA2; (-) strand; PAM type: YTN; PAM sequence: CTA
ctgattttaatcctcaaaaa

SEQ ID NO: 234052 - DNA, 20 bp, Artificial Sequence
  Description of Artificial Sequence: Synthetic oligonucleotide
  Target: LAMA2; (-) strand; PAM type: YTN; PAM sequence: TTG
ctactgattttaatcctcaa

SEQ ID NO: 234053 - DNA, 20 bp, Artificial Sequence
  Description of Artificial Sequence: Synthetic oligonucleotide
  Target: LAMA2; (-) strand; PAM type: YTN; PAM sequence: TTG
ttgctactgattttaatcct

SEQ ID NO: 234054 - DNA, 20 bp, Artificial Sequence
  Description of Artificial Sequence: Synthetic oligonucleotide
  Target: LAMA2; (-) strand; PAM type: YTN; PAM sequence: TTT
gttgctactgattttaatcc

SEQ ID NO: 234055 - DNA, 20 bp, Artificial Sequence
  Description of Artificial Sequence: Synthetic oligonucleotide
  Target: LAMA2; (-) strand; PAM type: YTN; PAM sequence: CTC
catatttgttgctactgatt

SEQ ID NO: 234056 - DNA, 20 bp, Artificial Sequence
  Description of Artificial Sequence: Synthetic oligonucleotide
  Target: LAMA2; (-) strand; PAM type: YTN; PAM sequence: CTA
aatgctccatatttgttgct

SEQ ID NO: 234057 - DNA, 20 bp, Artificial Sequence
  Description of Artificial Sequence: Synthetic oligonucleotide
  Target: LAMA2; (-) strand; PAM type: YTN; PAM sequence: TTC
taaatgctccatatttgttg

SEQ ID NO: 234058 - DNA, 20 bp, Artificial Sequence
  Description of Artificial Sequence: Synthetic oligonucleotide
  Target: LAMA2; (-) strand; PAM type: YTN; PAM sequence: CTG
ttctaaatgctccatatttg

SEQ ID NO: 234059 - DNA, 20 bp, Artificial Sequence
  Description of Artificial Sequence: Synthetic oligonucleotide
  Target: LAMA2; (-) strand; PAM type: YTN; PAM sequence: CTC
aatgccagacactgttctaa

SEQ ID NO: 234060 - DNA, 20 bp, Artificial Sequence
  Description of Artificial Sequence: Synthetic oligonucleotide
  Target: LAMA2; (-) strand; PAM type: YTN; PAM sequence: TTC
tcaatgccagacactgttct

SEQ ID NO: 234061 - DNA, 20 bp, Artificial Sequence
  Description of Artificial Sequence: Synthetic oligonucleotide
  Target: LAMA2; (-) strand; PAM type: YTN; PAM sequence: TTT
ctcaatgccagacactgttc

SEQ ID NO: 234062 - DNA, 20 bp, Artificial Sequence
  Description of Artificial Sequence: Synthetic oligonucleotide
  Target: LAMA2; (-) strand; PAM type: YTN; PAM sequence: TTT
tctcaatgccagacactgtt

SEQ ID NO: 234063 - DNA, 20 bp, Artificial Sequence
  Description of Artificial Sequence: Synthetic oligonucleotide
  Target: LAMA2; (-) strand; PAM type: YTN; PAM sequence: CTA
aaacataggttttctcaatg

SEQ ID NO: 234064 - DNA, 20 bp, Artificial Sequence
  Description of Artificial Sequence: Synthetic oligonucleotide
  Target: LAMA2; (-) strand; PAM type: YTN; PAM sequence: CTA
ataacaactaaaacataggt

SEQ ID NO: 234065 - DNA, 20 bp, Artificial Sequence
  Description of Artificial Sequence: Synthetic oligonucleotide
  Target: LAMA2; (-) strand; PAM type: YTN; PAM sequence: TTA
atactaataacaactaaaac

SEQ ID NO: 234066 - DNA, 20 bp, Artificial Sequence
  Description of Artificial Sequence: Synthetic oligonucleotide
  Target: LAMA2; (-) strand; PAM type: YTN; PAM sequence: TTT
aatactaataacaactaaaa

SEQ ID NO: 234067 - DNA, 20 bp, Artificial Sequence
  Description of Artificial Sequence: Synthetic oligonucleotide
  Target: LAMA2; (-) strand; PAM type: YTN; PAM sequence: TTT
taatactaataacaactaaa

SEQ ID NO: 234068 - DNA, 20 bp, Artificial Sequence
  Description of Artificial Sequence: Synthetic oligonucleotide
  Target: LAMA2; (-) strand; PAM type: YTN; PAM sequence: CTT
ttaatactaataacaactaa

SEQ ID NO: 234069 - DNA, 20 bp, Artificial Sequence
  Description of Artificial Sequence: Synthetic oligonucleotide
  Target: LAMA2; (-) strand; PAM type: YTN; PAM sequence: TTC
ttttaatactaataacaact

SEQ ID NO: 234070 - DNA, 20 bp, Artificial Sequence
  Description of Artificial Sequence: Synthetic oligonucleotide
  Target: LAMA2; (-) strand; PAM type: YTN; PAM sequence: TTT
cttttaatactaataacaac

SEQ ID NO: 234071 - DNA, 20 bp, Artificial Sequence
  Description of Artificial Sequence: Synthetic oligonucleotide
  Target: LAMA2; (-) strand; PAM type: YTN; PAM sequence: CTT
tcttttaatactaataacaa

SEQ ID NO: 234072 - DNA, 20 bp, Artificial Sequence
  Description of Artificial Sequence: Synthetic oligonucleotide
  Target: LAMA2; (-) strand; PAM type: YTN; PAM sequence: TTC
ctttcttttaatactaataa

SEQ ID NO: 234073 - DNA, 20 bp, Artificial Sequence
  Description of Artificial Sequence: Synthetic oligonucleotide
  Target: LAMA2; (-) strand; PAM type: YTN; PAM sequence: CTG
tgggtaaagaaaagtatgta

SEQ ID NO: 234074 - DNA, 20 bp, Artificial Sequence
  Description of Artificial Sequence: Synthetic oligonucleotide
  Target: LAMA2; (-) strand; PAM type: YTN; PAM sequence: TTA
gagcctgtgggtaaagaaaa

SEQ ID NO: 234075 - DNA, 20 bp, Artificial Sequence
  Description of Artificial Sequence: Synthetic oligonucleotide
  Target: LAMA2; (-) strand; PAM type: YTN; PAM sequence: CTG
tattagagcctgtgggtaaa

SEQ ID NO: 234076 - DNA, 20 bp, Artificial Sequence
  Description of Artificial Sequence: Synthetic oligonucleotide
  Target: LAMA2; (-) strand; PAM type: YTN; PAM sequence: TTC
tgtattagagcctgtgggta

SEQ ID NO: 234077 - DNA, 20 bp, Artificial Sequence
  Description of Artificial Sequence: Synthetic oligonucleotide
  Target: LAMA2; (-) strand; PAM type: YTN; PAM sequence: TTT
ctgtattagagcctgtgggt

SEQ ID NO: 234078 - DNA, 20 bp, Artificial Sequence
  Description of Artificial Sequence: Synthetic oligonucleotide
  Target: LAMA2; (-) strand; PAM type: YTN; PAM sequence: CTA
ccatatggaaatttctgtat

SEQ ID NO: 234079 - DNA, 20 bp, Artificial Sequence
  Description of Artificial Sequence: Synthetic oligonucleotide
  Target: LAMA2; (-) strand; PAM type: YTN; PAM sequence: TTA
ctaccatatggaaatttctg

SEQ ID NO: 234080 - DNA, 20 bp, Artificial Sequence
  Description of Artificial Sequence: Synthetic oligonucleotide
  Target: LAMA2; (-) strand; PAM type: YTN; PAM sequence: CTG
taatgaattactaccatatg

SEQ ID NO: 234081 - DNA, 20 bp, Artificial Sequence
  Description of Artificial Sequence: Synthetic oligonucleotide
  Target: LAMA2; (-) strand; PAM type: YTN; PAM sequence: CTA
ggtaatctgtaatgaattac

SEQ ID NO: 234082 - DNA, 20 bp, Artificial Sequence
  Description of Artificial Sequence: Synthetic oligonucleotide
  Target: LAMA2; (-) strand; PAM type: YTN; PAM sequence: TTA
acagctaggtaatctgtaat

SEQ ID NO: 234083 - DNA, 20 bp, Artificial Sequence
  Description of Artificial Sequence: Synthetic oligonucleotide
  Target: LAMA2; (-) strand; PAM type: YTN; PAM sequence: CTG
aatgattaacagctaggtaa

SEQ ID NO: 234084 - DNA, 20 bp, Artificial Sequence
  Description of Artificial Sequence: Synthetic oligonucleotide
  Target: LAMA2; (-) strand; PAM type: YTN; PAM sequence: TTC
aatgatggcactgaatgatt

SEQ ID NO: 234085 - DNA, 20 bp, Artificial Sequence
  Description of Artificial Sequence: Synthetic oligonucleotide
  Target: LAMA2; (-) strand; PAM type: YTN; PAM sequence: TTA
ttcaatgatggcactgaatg

SEQ ID NO: 234086 - DNA, 20 bp, Artificial Sequence
  Description of Artificial Sequence: Synthetic oligonucleotide
  Target: LAMA2; (-) strand; PAM type: YTN; PAM sequence: TTA
taacaaataataaattattc

SEQ ID NO: 234087 - DNA, 20 bp, Artificial Sequence
  Description of Artificial Sequence: Synthetic oligonucleotide
  Target: LAMA2; (-) strand; PAM type: YTN; PAM sequence: CTA
ttataacaaataataaatta

SEQ ID NO: 234088 - DNA, 20 bp, Artificial Sequence
  Description of Artificial Sequence: Synthetic oligonucleotide
  Target: LAMA2; (-) strand; PAM type: YTN; PAM sequence: TTC
ctattataacaaataataaa

SEQ ID NO: 234089 - DNA, 20 bp, Artificial Sequence
  Description of Artificial Sequence: Synthetic oligonucleotide
  Target: LAMA2; (-) strand; PAM type: YTN; PAM sequence: TTT
cctattataacaaataataa

SEQ ID NO: 234090 - DNA, 20 bp, Artificial Sequence
  Description of Artificial Sequence: Synthetic oligonucleotide
  Target: LAMA2; (-) strand; PAM type: YTN; PAM sequence: TTA
caatttcctattataacaaa

SEQ ID NO: 234091 - DNA, 20 bp, Artificial Sequence
  Description of Artificial Sequence: Synthetic oligonucleotide
  Target: LAMA2; (-) strand; PAM type: YTN; PAM sequence: CTT
acaatttcctattataacaa

SEQ ID NO: 234092 - DNA, 20 bp, Artificial Sequence
  Description of Artificial Sequence: Synthetic oligonucleotide
  Target: LAMA2; (-) strand; PAM type: YTN; PAM sequence: TTC
aacttacaatttcctattat

SEQ ID NO: 234093 - DNA, 20 bp, Artificial Sequence
  Description of Artificial Sequence: Synthetic oligonucleotide
  Target: LAMA2; (-) strand; PAM type: YTN; PAM sequence: TTA
tatggttcaacttacaattt

SEQ ID NO: 234094 - DNA, 20 bp, Artificial Sequence
  Description of Artificial Sequence: Synthetic oligonucleotide
  Target: LAMA2; (-) strand; PAM type: YTN; PAM sequence: TTT
atatggttcaacttacaatt

SEQ ID NO: 234095 - DNA, 20 bp, Artificial Sequence
  Description of Artificial Sequence: Synthetic oligonucleotide
  Target: LAMA2; (-) strand; PAM type: YTN; PAM sequence: TTT
tatatggttcaacttacaat

SEQ ID NO: 234096 - DNA, 20 bp, Artificial Sequence
  Description of Artificial Sequence: Synthetic oligonucleotide
  Target: LAMA2; (-) strand; PAM type: YTN; PAM sequence: CTA
acgtgcaattttatatggtt

SEQ ID NO: 234097 - DNA, 20 bp, Artificial Sequence
  Description of Artificial Sequence: Synthetic oligonucleotide
  Target: LAMA2; (-) strand; PAM type: YTN; PAM sequence: TTG
actaacgtgcaattttatat

SEQ ID NO: 234098 - DNA, 20 bp, Artificial Sequence
  Description of Artificial Sequence: Synthetic oligonucleotide
  Target: LAMA2; (-) strand; PAM type: YTN; PAM sequence: TTT
gactaacgtgcaattttata

SEQ ID NO: 234099 - DNA, 20 bp, Artificial Sequence
  Description of Artificial Sequence: Synthetic oligonucleotide
  Target: LAMA2; (-) strand; PAM type: YTN; PAM sequence: TTT
tgactaacgtgcaattttat

SEQ ID NO: 234100 - DNA, 20 bp, Artificial Sequence
  Description of Artificial Sequence: Synthetic oligonucleotide
  Target: LAMA2; (-) strand; PAM type: YTN; PAM sequence: TTG
gttttgactaacgtgcaatt

SEQ ID NO: 234101 - DNA, 20 bp, Artificial Sequence
  Description of Artificial Sequence: Synthetic oligonucleotide
  Target: LAMA2; (-) strand; PAM type: YTN; PAM sequence: TTT
ggttttgactaacgtgcaat

SEQ ID NO: 234102 - DNA, 20 bp, Artificial Sequence
  Description of Artificial Sequence: Synthetic oligonucleotide
  Target: LAMA2; (-) strand; PAM type: YTN; PAM sequence: TTG
ccaatatttggttttgacta

SEQ ID NO: 234103 - DNA, 20 bp, Artificial Sequence
  Description of Artificial Sequence: Synthetic oligonucleotide
  Target: LAMA2; (-) strand; PAM type: YTN; PAM sequence: CTC
aatcatatgcaattgccaat

SEQ ID NO: 234104 - DNA, 20 bp, Artificial Sequence
  Description of Artificial Sequence: Synthetic oligonucleotide
  Target: LAMA2; (-) strand; PAM type: YTN; PAM sequence: TTA
agctcaatcatatgcaattg

SEQ ID NO: 234105 - DNA, 20 bp, Artificial Sequence
  Description of Artificial Sequence: Synthetic oligonucleotide
  Target: LAMA2; (-) strand; PAM type: YTN; PAM sequence: TTA
aaacatataaattaagctca

SEQ ID NO: 234106 - DNA, 20 bp, Artificial Sequence
  Description of Artificial Sequence: Synthetic oligonucleotide
  Target: LAMA2; (-) strand; PAM type: YTN; PAM sequence: TTG
aaatgattaaaacatataaa

SEQ ID NO: 234107 - DNA, 20 bp, Artificial Sequence
  Description of Artificial Sequence: Synthetic oligonucleotide
  Target: LAMA2; (-) strand; PAM type: YTN; PAM sequence: TTT
gaaatgattaaaacatataa

SEQ ID NO: 234108 - DNA, 20 bp, Artificial Sequence
  Description of Artificial Sequence: Synthetic oligonucleotide
  Target: LAMA2; (-) strand; PAM type: YTN; PAM sequence: TTA
atagaatttgaaatgattaa

SEQ ID NO: 234109 - DNA, 20 bp, Artificial Sequence
  Description of Artificial Sequence: Synthetic oligonucleotide
  Target: LAMA2; (-) strand; PAM type: YTN; PAM sequence: TTT
aatagaatttgaaatgatta

SEQ ID NO: 234110 - DNA, 20 bp, Artificial Sequence
  Description of Artificial Sequence: Synthetic oligonucleotide
  Target: LAMA2; (-) strand; PAM type: YTN; PAM sequence: TTT
taatagaatttgaaatgatt

SEQ ID NO: 234111 - DNA, 20 bp, Artificial Sequence
  Description of Artificial Sequence: Synthetic oligonucleotide
  Target: LAMA2; (-) strand; PAM type: YTN; PAM sequence: TTC
acacattttaatagaatttg

SEQ ID NO: 234112 - DNA, 20 bp, Artificial Sequence
  Description of Artificial Sequence: Synthetic oligonucleotide
  Target: LAMA2; (-) strand; PAM type: YTN; PAM sequence: TTA
ataaattcacacattttaat

SEQ ID NO: 234113 - DNA, 20 bp, Artificial Sequence
  Description of Artificial Sequence: Synthetic oligonucleotide
  Target: LAMA2; (-) strand; PAM type: YTN; PAM sequence: TTG
gaggtattaataaattcaca

SEQ ID NO: 234114 - DNA, 20 bp, Artificial Sequence
  Description of Artificial Sequence: Synthetic oligonucleotide
  Target: LAMA2; (-) strand; PAM type: YTN; PAM sequence: CTG
gatgtattggaggtattaat

SEQ ID NO: 234115 - DNA, 20 bp, Artificial Sequence
  Description of Artificial Sequence: Synthetic oligonucleotide
  Target: LAMA2; (-) strand; PAM type: YTN; PAM sequence: TTA
gcgtacacacacacaaacat

SEQ ID NO: 234116 - DNA, 20 bp, Artificial Sequence
  Description of Artificial Sequence: Synthetic oligonucleotide
  Target: LAMA2; (-) strand; PAM type: YTN; PAM sequence: TTT
agcgtacacacacacaaaca

SEQ ID NO: 234117 - DNA, 20 bp, Artificial Sequence
  Description of Artificial Sequence: Synthetic oligonucleotide
  Target: LAMA2; (-) strand; PAM type: YTN; PAM sequence: TTA
catttagcgtacacacacac

SEQ ID NO: 234118 - DNA, 20 bp, Artificial Sequence
  Description of Artificial Sequence: Synthetic oligonucleotide
  Target: LAMA2; (-) strand; PAM type: YTN; PAM sequence: TTA
taccatacgggaaattacat

SEQ ID NO: 234119 - DNA, 20 bp, Artificial Sequence
  Description of Artificial Sequence: Synthetic oligonucleotide
  Target: LAMA2; (-) strand; PAM type: YTN; PAM sequence: TTT
ataccatacgggaaattaca

SEQ ID NO: 234120 - DNA, 20 bp, Artificial Sequence
  Description of Artificial Sequence: Synthetic oligonucleotide
  Target: LAMA2; (-) strand; PAM type: YTN; PAM sequence: TTT
tataccatacgggaaattac

SEQ ID NO: 234121 - DNA, 20 bp, Artificial Sequence
  Description of Artificial Sequence: Synthetic oligonucleotide
  Target: LAMA2; (-) strand; PAM type: YTN; PAM sequence: CTT
ttataccatacgggaaatta

SEQ ID NO: 234122 - DNA, 20 bp, Artificial Sequence
  Description of Artificial Sequence: Synthetic oligonucleotide
  Target: LAMA2; (-) strand; PAM type: YTN; PAM sequence: CTA
gacttttataccatacggga

SEQ ID NO: 234123 - DNA, 20 bp, Artificial Sequence
  Description of Artificial Sequence: Synthetic oligonucleotide
  Target: LAMA2; (-) strand; PAM type: YTN; PAM sequence: CTG
cccccggcctagacttttat

SEQ ID NO: 234124 - DNA, 20 bp, Artificial Sequence
  Description of Artificial Sequence: Synthetic oligonucleotide
  Target: LAMA2; (-) strand; PAM type: YTN; PAM sequence: TTA
caggcgtgagccactgcccc

SEQ ID NO: 234125 - DNA, 20 bp, Artificial Sequence
  Description of Artificial Sequence: Synthetic oligonucleotide
  Target: LAMA2; (-) strand; PAM type: YTN; PAM sequence: CTG
gaattacaggcgtgagccac

SEQ ID NO: 234126 - DNA, 20 bp, Artificial Sequence
  Description of Artificial Sequence: Synthetic oligonucleotide
  Target: LAMA2; (-) strand; PAM type: YTN; PAM sequence: CTC
aaagtgctggaattacaggc

SEQ ID NO: 234127 - DNA, 20 bp, Artificial Sequence
  Description of Artificial Sequence: Synthetic oligonucleotide
  Target: LAMA2; (-) strand; PAM type: YTN; PAM sequence: CTC
tcaaagtgctggaattacag

SEQ ID NO: 234128 - DNA, 20 bp, Artificial Sequence
  Description of Artificial Sequence: Synthetic oligonucleotide
  Target: LAMA2; (-) strand; PAM type: YTN; PAM sequence: CTC
agcctctcaaagtgctggaa

SEQ ID NO: 234129 - DNA, 20 bp, Artificial Sequence
  Description of Artificial Sequence: Synthetic oligonucleotide
  Target: LAMA2; (-) strand; PAM type: YTN; PAM sequence: TTG
acccatgatccacccgcctc

SEQ ID NO: 234130 - DNA, 20 bp, Artificial Sequence
  Description of Artificial Sequence: Synthetic oligonucleotide
  Target: LAMA2; (-) strand; PAM type: YTN; PAM sequence: CTT
gacccatgatccacccgcct

SEQ ID NO: 234131 - DNA, 20 bp, Artificial Sequence
  Description of Artificial Sequence: Synthetic oligonucleotide
  Target: LAMA2; (-) strand; PAM type: YTN; PAM sequence: CTC
ttgacccatgatccacccgc

SEQ ID NO: 234132 - DNA, 20 bp, Artificial Sequence
  Description of Artificial Sequence: Synthetic oligonucleotide
  Target: LAMA2; (-) strand; PAM type: YTN; PAM sequence: TTG
aactcttgacccatgatcca

SEQ ID NO: 234133 - DNA, 20 bp, Artificial Sequence
  Description of Artificial Sequence: Synthetic oligonucleotide
  Target: LAMA2; (-) strand; PAM type: YTN; PAM sequence: CTT
gaactcttgacccatgatcc

SEQ ID NO: 234134 - DNA, 20 bp, Artificial Sequence
  Description of Artificial Sequence: Synthetic oligonucleotide
  Target: LAMA2; (-) strand; PAM type: YTN; PAM sequence: CTG
gtcttgaactcttgacccat

SEQ ID NO: 234135 - DNA, 20 bp, Artificial Sequence
  Description of Artificial Sequence: Synthetic oligonucleotide
  Target: LAMA2; (-) strand; PAM type: YTN; PAM sequence: TTG
gccaggctggtcttgaactc

SEQ ID NO: 234136 - DNA, 20 bp, Artificial Sequence
  Description of Artificial Sequence: Synthetic oligonucleotide
  Target: LAMA2; (-) strand; PAM type: YTN; PAM sequence: TTC
accatgttggccaggctggt

SEQ ID NO: 234137 - DNA, 20 bp, Artificial Sequence
  Description of Artificial Sequence: Synthetic oligonucleotide
  Target: LAMA2; (-) strand; PAM type: YTN; PAM sequence: CTT
caccatgttggccaggctgg

SEQ ID NO: 234138 - DNA, 20 bp, Artificial Sequence
  Description of Artificial Sequence: Synthetic oligonucleotide
  Target: LAMA2; (-) strand; PAM type: YTN; PAM sequence: TTA
gtagagatggggcttcacca

SEQ ID NO: 234139 - DNA, 20 bp, Artificial Sequence
  Description of Artificial Sequence: Synthetic oligonucleotide
  Target: LAMA2; (-) strand; PAM type: YTN; PAM sequence: TTT
agtagagatggggcttcacc

SEQ ID NO: 234140 - DNA, 20 bp, Artificial Sequence
  Description of Artificial Sequence: Synthetic oligonucleotide
  Target: LAMA2; (-) strand; PAM type: YTN; PAM sequence: TTT
tagtagagatggggcttcac

SEQ ID NO: 234141 - DNA, 20 bp, Artificial Sequence
  Description of Artificial Sequence: Synthetic oligonucleotide
  Target: LAMA2; (-) strand; PAM type: YTN; PAM sequence: TTT
ttagtagagatggggcttca

SEQ ID NO: 234142 - DNA, 20 bp, Artificial Sequence
  Description of Artificial Sequence: Synthetic oligonucleotide
  Target: LAMA2; (-) strand; PAM type: YTN; PAM sequence: CTG
tatttttagtagagatgggg

SEQ ID NO: 234143 - DNA, 20 bp, Artificial Sequence
  Description of Artificial Sequence: Synthetic oligonucleotide
  Target: LAMA2; (-) strand; PAM type: YTN; PAM sequence: TTC
tgtatttttagtagagatgg

SEQ ID NO: 234144 - DNA, 20 bp, Artificial Sequence
  Description of Artificial Sequence: Synthetic oligonucleotide
  Target: LAMA2; (-) strand; PAM type: YTN; PAM sequence: TTT
ctgtatttttagtagagatg

SEQ ID NO: 234145 - DNA, 20 bp, Artificial Sequence
  Description of Artificial Sequence: Synthetic oligonucleotide
  Target: LAMA2; (-) strand; PAM type: YTN; PAM sequence: CTA
atttctgtatttttagtaga

SEQ ID NO: 234146 - DNA, 20 bp, Artificial Sequence
  Description of Artificial Sequence: Synthetic oligonucleotide
  Target: LAMA2; (-) strand; PAM type: YTN; PAM sequence: CTG
gggacaacaggcatgcacca

SEQ ID NO: 234147 - DNA, 20 bp, Artificial Sequence
  Description of Artificial Sequence: Synthetic oligonucleotide
  Target: LAMA2; (-) strand; PAM type: YTN; PAM sequence: CTC
ccgagtagctggggacaaca

SEQ ID NO: 234148 - DNA, 20 bp, Artificial Sequence
  Description of Artificial Sequence: Synthetic oligonucleotide
  Target: LAMA2; (-) strand; PAM type: YTN; PAM sequence: CTC
agcctcccgagtagctgggg

SEQ ID NO: 234149 - DNA, 20 bp, Artificial Sequence
  Description of Artificial Sequence: Synthetic oligonucleotide
  Target: LAMA2; (-) strand; PAM type: YTN; PAM sequence: CTG
tctcagcctcccgagtagct

SEQ ID NO: 234150 - DNA, 20 bp, Artificial Sequence
  Description of Artificial Sequence: Synthetic oligonucleotide
  Target: LAMA2; (-) strand; PAM type: YTN; PAM sequence: CTC
ctgtctcagcctcccgagta

SEQ ID NO: 234151 - DNA, 20 bp, Artificial Sequence
  Description of Artificial Sequence: Synthetic oligonucleotide
  Target: LAMA2; (-) strand; PAM type: YTN; PAM sequence: TTC
aagcaatcctcctgtctcag

SEQ ID NO: 234152 - DNA, 20 bp, Artificial Sequence
  Description of Artificial Sequence: Synthetic oligonucleotide
  Target: LAMA2; (-) strand; PAM type: YTN; PAM sequence: TTC
caggttcaagcaatcctcct

SEQ ID NO: 234153 - DNA, 20 bp, Artificial Sequence
  Description of Artificial Sequence: Synthetic oligonucleotide
  Target: LAMA2; (-) strand; PAM type: YTN; PAM sequence: CTT
ccaggttcaagcaatcctcc

SEQ ID NO: 234154 - DNA, 20 bp, Artificial Sequence
  Description of Artificial Sequence: Synthetic oligonucleotide
  Target: LAMA2; (-) strand; PAM type: YTN; PAM sequence: CTG
ccttccaggttcaagcaatc

SEQ ID NO: 234155 - DNA, 20 bp, Artificial Sequence
  Description of Artificial Sequence: Synthetic oligonucleotide
  Target: LAMA2; (-) strand; PAM type: YTN; PAM sequence: CTC
tgccttccaggttcaagcaa

SEQ ID NO: 234156 - DNA, 20 bp, Artificial Sequence
  Description of Artificial Sequence: Synthetic oligonucleotide
  Target: LAMA2; (-) strand; PAM type: YTN; PAM sequence: CTG
caacctctgccttccaggtt

SEQ ID NO: 234157 - DNA, 20 bp, Artificial Sequence
  Description of Artificial Sequence: Synthetic oligonucleotide
  Target: LAMA2; (-) strand; PAM type: YTN; PAM sequence: CTC
actgcaacctctgccttcca

SEQ ID NO: 234158 - DNA, 20 bp, Artificial Sequence
  Description of Artificial Sequence: Synthetic oligonucleotide
  Target: LAMA2; (-) strand; PAM type: YTN; PAM sequence: CTC
ggctcactgcaacctctgcc

SEQ ID NO: 234159 - DNA, 20 bp, Artificial Sequence
  Description of Artificial Sequence: Synthetic oligonucleotide
  Target: LAMA2; (-) strand; PAM type: YTN; PAM sequence: CTG
gagtgcagagtggcacgatc

SEQ ID NO: 234160 - DNA, 20 bp, Artificial Sequence
  Description of Artificial Sequence: Synthetic oligonucleotide
  Target: LAMA2; (-) strand; PAM type: YTN; PAM sequence: CTG
tcgcccaggctggagtgcag

SEQ ID NO: 234161 - DNA, 20 bp, Artificial Sequence
  Description of Artificial Sequence: Synthetic oligonucleotide
  Target: LAMA2; (-) strand; PAM type: YTN; PAM sequence: CTC
tgtcgcccaggctggagtgc

SEQ ID NO: 234162 - DNA, 20 bp, Artificial Sequence
  Description of Artificial Sequence: Synthetic oligonucleotide
  Target: LAMA2; (-) strand; PAM type: YTN; PAM sequence: CTC
actctgtcgcccaggctgga

SEQ ID NO: 234163 - DNA, 20 bp, Artificial Sequence
  Description of Artificial Sequence: Synthetic oligonucleotide
  Target: LAMA2; (-) strand; PAM type: YTN; PAM sequence: TTG
agacagagtctcactctgtc

SEQ ID NO: 234164 - DNA, 20 bp, Artificial Sequence
  Description of Artificial Sequence: Synthetic oligonucleotide
  Target: LAMA2; (-) strand; PAM type: YTN; PAM sequence: TTT
gagacagagtctcactctgt

SEQ ID NO: 234165 - DNA, 20 bp, Artificial Sequence
  Description of Artificial Sequence: Synthetic oligonucleotide
  Target: LAMA2; (-) strand; PAM type: YTN; PAM sequence: TTT
tgagacagagtctcactctg

SEQ ID NO: 234166 - DNA, 20 bp, Artificial Sequence
  Description of Artificial Sequence: Synthetic oligonucleotide
  Target: LAMA2; (-) strand; PAM type: YTN; PAM sequence: TTT
ttgagacagagtctcactct

SEQ ID NO: 234167 - DNA, 20 bp, Artificial Sequence
  Description of Artificial Sequence: Synthetic oligonucleotide
  Target: LAMA2; (-) strand; PAM type: YTN; PAM sequence: TTT
tttgagacagagtctcactc

SEQ ID NO: 234168 - DNA, 20 bp, Artificial Sequence
  Description of Artificial Sequence: Synthetic oligonucleotide
  Target: LAMA2; (-) strand; PAM type: YTN; PAM sequence: TTT
ttttgagacagagtctcact

SEQ ID NO: 234169 - DNA, 20 bp, Artificial Sequence
  Description of Artificial Sequence: Synthetic oligonucleotide
  Target: LAMA2; (-) strand; PAM type: YTN; PAM sequence: TTT
tttttgagacagagtctcac

SEQ ID NO: 234170 - DNA, 20 bp, Artificial Sequence
  Description of Artificial Sequence: Synthetic oligonucleotide
  Target: LAMA2; (-) strand; PAM type: YTN; PAM sequence: TTT
ttttttgagacagagtctca

SEQ ID NO: 234171 - DNA, 20 bp, Artificial Sequence
  Description of Artificial Sequence: Synthetic oligonucleotide
  Target: LAMA2; (-) strand; PAM type: YTN; PAM sequence: TTT
tttttttgagacagagtctc

SEQ ID NO: 234172 - DNA, 20 bp, Artificial Sequence
  Description of Artificial Sequence: Synthetic oligonucleotide
  Target: LAMA2; (-) strand; PAM type: YTN; PAM sequence: TTA
tacataatagattttttttt

SEQ ID NO: 234173 - DNA, 20 bp, Artificial Sequence
  Description of Artificial Sequence: Synthetic oligonucleotide
  Target: LAMA2; (-) strand; PAM type: YTN; PAM sequence: CTG
ttatacataatagatttttt

SEQ ID NO: 234174 - DNA, 20 bp, Artificial Sequence
  Description of Artificial Sequence: Synthetic oligonucleotide
  Target: LAMA2; (-) strand; PAM type: YTN; PAM sequence: TTC
tgttatacataatagatttt

SEQ ID NO: 234175 - DNA, 20 bp, Artificial Sequence
  Description of Artificial Sequence: Synthetic oligonucleotide
  Target: LAMA2; (-) strand; PAM type: YTN; PAM sequence: TTT
ctgttatacataatagattt

SEQ ID NO: 234176 - DNA, 20 bp, Artificial Sequence
  Description of Artificial Sequence: Synthetic oligonucleotide
  Target: LAMA2; (-) strand; PAM type: YTN; PAM sequence: TTA
aaaatcatttctgttataca

SEQ ID NO: 234177 - DNA, 20 bp, Artificial Sequence
  Description of Artificial Sequence: Synthetic oligonucleotide
  Target: LAMA2; (-) strand; PAM type: YTN; PAM sequence: TTT
aaaaatcatttctgttatac

SEQ ID NO: 234178 - DNA, 20 bp, Artificial Sequence
  Description of Artificial Sequence: Synthetic oligonucleotide
  Target: LAMA2; (-) strand; PAM type: YTN; PAM sequence: TTC
agatacatttaaaaatcatt

SEQ ID NO: 234179 - DNA, 20 bp, Artificial Sequence
  Description of Artificial Sequence: Synthetic oligonucleotide
  Target: LAMA2; (-) strand; PAM type: YTN; PAM sequence: TTT
cagatacatttaaaaatcat

SEQ ID NO: 234180 - DNA, 20 bp, Artificial Sequence
  Description of Artificial Sequence: Synthetic oligonucleotide
  Target: LAMA2; (-) strand; PAM type: YTN; PAM sequence: TTG
atttcagatacatttaaaaa

SEQ ID NO: 234181 - DNA, 20 bp, Artificial Sequence
  Description of Artificial Sequence: Synthetic oligonucleotide
  Target: LAMA2; (-) strand; PAM type: YTN; PAM sequence: TTT
gatttcagatacatttaaaa

SEQ ID NO: 234182 - DNA, 20 bp, Artificial Sequence
  Description of Artificial Sequence: Synthetic oligonucleotide
  Target: LAMA2; (-) strand; PAM type: YTN; PAM sequence: TTA
ataaacatcaatttgatttc

SEQ ID NO: 234183 - DNA, 20 bp, Artificial Sequence
  Description of Artificial Sequence: Synthetic oligonucleotide
  Target: LAMA2; (-) strand; PAM type: YTN; PAM sequence: TTA
aggaaaaataaattaataaa

SEQ ID NO: 234184 - DNA, 20 bp, Artificial Sequence
  Description of Artificial Sequence: Synthetic oligonucleotide
  Target: LAMA2; (-) strand; PAM type: YTN; PAM sequence: CTG
cattaaggaaaaataaatta

SEQ ID NO: 234185 - DNA, 20 bp, Artificial Sequence
  Description of Artificial Sequence: Synthetic oligonucleotide
  Target: LAMA2; (-) strand; PAM type: YTN; PAM sequence: TTG
catgctgcattaaggaaaaa

SEQ ID NO: 234186 - DNA, 20 bp, Artificial Sequence
  Description of Artificial Sequence: Synthetic oligonucleotide
  Target: LAMA2; (-) strand; PAM type: YTN; PAM sequence: TTC
catgacaattgcatgctgca

SEQ ID NO: 234187 - DNA, 20 bp, Artificial Sequence
  Description of Artificial Sequence: Synthetic oligonucleotide
  Target: LAMA2; (-) strand; PAM type: YTN; PAM sequence: TTT
ccatgacaattgcatgctgc

SEQ ID NO: 234188 - DNA, 20 bp, Artificial Sequence
  Description of Artificial Sequence: Synthetic oligonucleotide
  Target: LAMA2; (-) strand; PAM type: YTN; PAM sequence: TTT
tccatgacaattgcatgctg

SEQ ID NO: 234189 - DNA, 20 bp, Artificial Sequence
  Description of Artificial Sequence: Synthetic oligonucleotide
  Target: LAMA2; (-) strand; PAM type: YTN; PAM sequence: CTT
ttccatgacaattgcatgct

SEQ ID NO: 234190 - DNA, 20 bp, Artificial Sequence
  Description of Artificial Sequence: Synthetic oligonucleotide
  Target: LAMA2; (-) strand; PAM type: YTN; PAM sequence: TTC
agcttttccatgacaattgc

SEQ ID NO: 234191 - DNA, 20 bp, Artificial Sequence
  Description of Artificial Sequence: Synthetic oligonucleotide
  Target: LAMA2; (-) strand; PAM type: YTN; PAM sequence: CTT
cagcttttccatgacaattg

SEQ ID NO: 234192 - DNA, 20 bp, Artificial Sequence
  Description of Artificial Sequence: Synthetic oligonucleotide
  Target: LAMA2; (-) strand; PAM type: YTN; PAM sequence: TTC
ttcagcttttccatgacaat

SEQ ID NO: 234193 - DNA, 20 bp, Artificial Sequence
  Description of Artificial Sequence: Synthetic oligonucleotide
  Target: LAMA2; (-) strand; PAM type: YTN; PAM sequence: TTC
atcataatagcattcttcag

SEQ ID NO: 234194 - DNA, 20 bp, Artificial Sequence
  Description of Artificial Sequence: Synthetic oligonucleotide
  Target: LAMA2; (-) strand; PAM type: YTN; PAM sequence: TTT
catcataatagcattcttca

SEQ ID NO: 234195 - DNA, 20 bp, Artificial Sequence
  Description of Artificial Sequence: Synthetic oligonucleotide
  Target: LAMA2; (-) strand; PAM type: YTN; PAM sequence: TTT
tcatcataatagcattcttc

SEQ ID NO: 234196 - DNA, 20 bp, Artificial Sequence
  Description of Artificial Sequence: Synthetic oligonucleotide
  Target: LAMA2; (-) strand; PAM type: YTN; PAM sequence: CTG
gcaacattttcatcataata

SEQ ID NO: 234197 - DNA, 20 bp, Artificial Sequence
  Description of Artificial Sequence: Synthetic oligonucleotide
  Target: LAMA2; (-) strand; PAM type: YTN; PAM sequence: TTC
tggcaacattttcatcataa

SEQ ID NO: 234198 - DNA, 20 bp, Artificial Sequence
  Description of Artificial Sequence: Synthetic oligonucleotide
  Target: LAMA2; (-) strand; PAM type: YTN; PAM sequence: CTT
ctggcaacattttcatcata

SEQ ID NO: 234199 - DNA, 20 bp, Artificial Sequence
  Description of Artificial Sequence: Synthetic oligonucleotide
  Target: LAMA2; (-) strand; PAM type: YTN; PAM sequence: TTC
ttctggcaacattttcatca

SEQ ID NO: 234200 - DNA, 20 bp, Artificial Sequence
  Description of Artificial Sequence: Synthetic oligonucleotide
  Target: LAMA2; (-) strand; PAM type: YTN; PAM sequence: TTT
cttctggcaacattttcatc

SEQ ID NO: 234201 - DNA, 20 bp, Artificial Sequence
  Description of Artificial Sequence: Synthetic oligonucleotide
  Target: LAMA2; (-) strand; PAM type: YTN; PAM sequence: CTC
agatttcttctggcaacatt

SEQ ID NO: 234202 - DNA, 20 bp, Artificial Sequence
  Description of Artificial Sequence: Synthetic oligonucleotide
  Target: LAMA2; (-) strand; PAM type: YTN; PAM sequence: TTC
aaactcagatttcttctggc

SEQ ID NO: 234203 - DNA, 20 bp, Artificial Sequence
  Description of Artificial Sequence: Synthetic oligonucleotide
  Target: LAMA2; (-) strand; PAM type: YTN; PAM sequence: TTC
cacgtatattcaaactcaga

SEQ ID NO: 234204 - DNA, 20 bp, Artificial Sequence
  Description of Artificial Sequence: Synthetic oligonucleotide
  Target: LAMA2; (-) strand; PAM type: YTN; PAM sequence: TTT
ccacgtatattcaaactcag

SEQ ID NO: 234205 - DNA, 20 bp, Artificial Sequence
  Description of Artificial Sequence: Synthetic oligonucleotide
  Target: LAMA2; (-) strand; PAM type: YTN; PAM sequence: CTT
tccacgtatattcaaactca

SEQ ID NO: 234206 - DNA, 20 bp, Artificial Sequence
  Description of Artificial Sequence: Synthetic oligonucleotide
  Target: LAMA2; (-) strand; PAM type: YTN; PAM sequence: CTC
caatgtactttccacgtata

SEQ ID NO: 234207 - DNA, 20 bp, Artificial Sequence
  Description of Artificial Sequence: Synthetic oligonucleotide
  Target: LAMA2; (-) strand; PAM type: YTN; PAM sequence: TTA
atgcagacaccccctccaat

SEQ ID NO: 234208 - DNA, 20 bp, Artificial Sequence
  Description of Artificial Sequence: Synthetic oligonucleotide
  Target: LAMA2; (-) strand; PAM type: YTN; PAM sequence: TTG
ggtacaattaatgcagacac

SEQ ID NO: 234209 - DNA, 20 bp, Artificial Sequence
  Description of Artificial Sequence: Synthetic oligonucleotide
  Target: LAMA2; (-) strand; PAM type: YTN; PAM sequence: TTT
gggtacaattaatgcagaca

SEQ ID NO: 234210 - DNA, 20 bp, Artificial Sequence
  Description of Artificial Sequence: Synthetic oligonucleotide
  Target: LAMA2; (-) strand; PAM type: YTN; PAM sequence: TTT
tgggtacaattaatgcagac

SEQ ID NO: 234211 - DNA, 20 bp, Artificial Sequence
  Description of Artificial Sequence: Synthetic oligonucleotide
  Target: LAMA2; (-) strand; PAM type: YTN; PAM sequence: TTA
taccagcagtgttttgggta

SEQ ID NO: 234212 - DNA, 20 bp, Artificial Sequence
  Description of Artificial Sequence: Synthetic oligonucleotide
  Target: LAMA2; (-) strand; PAM type: YTN; PAM sequence: TTT
ataccagcagtgttttgggt

SEQ ID NO: 234213 - DNA, 20 bp, Artificial Sequence
  Description of Artificial Sequence: Synthetic oligonucleotide
  Target: LAMA2; (-) strand; PAM type: YTN; PAM sequence: CTC
gcagtttataccagcagtgt

SEQ ID NO: 234214 - DNA, 20 bp, Artificial Sequence
  Description of Artificial Sequence: Synthetic oligonucleotide
  Target: LAMA2; (-) strand; PAM type: YTN; PAM sequence: CTG
aagaagccatcagtacatgt

SEQ ID NO: 234215 - DNA, 20 bp, Artificial Sequence
  Description of Artificial Sequence: Synthetic oligonucleotide
  Target: LAMA2; (-) strand; PAM type: YTN; PAM sequence: TTG
ggtctgaagaagccatcagt

SEQ ID NO: 234216 - DNA, 20 bp, Artificial Sequence
  Description of Artificial Sequence: Synthetic oligonucleotide
  Target: LAMA2; (-) strand; PAM type: YTN; PAM sequence: TTT
gggtctgaagaagccatcag

SEQ ID NO: 234217 - DNA, 20 bp, Artificial Sequence
  Description of Artificial Sequence: Synthetic oligonucleotide
  Target: LAMA2; (-) strand; PAM type: YTN; PAM sequence: CTT
tgggtctgaagaagccatca

SEQ ID NO: 234218 - DNA, 20 bp, Artificial Sequence
  Description of Artificial Sequence: Synthetic oligonucleotide
  Target: LAMA2; (-) strand; PAM type: YTN; PAM sequence: TTA
cccctttgggtctgaagaag

SEQ ID NO: 234219 - DNA, 20 bp, Artificial Sequence
  Description of Artificial Sequence: Synthetic oligonucleotide
  Target: LAMA2; (-) strand; PAM type: YTN; PAM sequence: TTT
acccctttgggtctgaagaa

SEQ ID NO: 234220 - DNA, 20 bp, Artificial Sequence
  Description of Artificial Sequence: Synthetic oligonucleotide
  Target: LAMA2; (-) strand; PAM type: YTN; PAM sequence: CTT
tacccctttgggtctgaaga

SEQ ID NO: 234221 - DNA, 20 bp, Artificial Sequence
  Description of Artificial Sequence: Synthetic oligonucleotide
  Target: LAMA2; (-) strand; PAM type: YTN; PAM sequence: TTA
tgaaagaaaaagcatacttt

SEQ ID NO: 234222 - DNA, 20 bp, Artificial Sequence
  Description of Artificial Sequence: Synthetic oligonucleotide
  Target: LAMA2; (-) strand; PAM type: YTN; PAM sequence: TTT
atgaaagaaaaagcatactt

SEQ ID NO: 234223 - DNA, 20 bp, Artificial Sequence
  Description of Artificial Sequence: Synthetic oligonucleotide
  Target: LAMA2; (-) strand; PAM type: YTN; PAM sequence: CTT
tatgaaagaaaaagcatact

SEQ ID NO: 234224 - DNA, 20 bp, Artificial Sequence
  Description of Artificial Sequence: Synthetic oligonucleotide
  Target: LAMA2; (-) strand; PAM type: YTN; PAM sequence: CTC
tttatgaaagaaaaagcata

SEQ ID NO: 234225 - DNA, 20 bp, Artificial Sequence
  Description of Artificial Sequence: Synthetic oligonucleotide
  Target: LAMA2; (-) strand; PAM type: YTN; PAM sequence: TTG
tatgaaaaagcaaaaaaata

SEQ ID NO: 234226 - DNA, 20 bp, Artificial Sequence
  Description of Artificial Sequence: Synthetic oligonucleotide
  Target: LAMA2; (-) strand; PAM type: YTN; PAM sequence: TTT
gtatgaaaaagcaaaaaaat

SEQ ID NO: 234227 - DNA, 20 bp, Artificial Sequence
  Description of Artificial Sequence: Synthetic oligonucleotide
  Target: LAMA2; (-) strand; PAM type: YTN; PAM sequence: TTT
tgtatgaaaaagcaaaaaaa

SEQ ID NO: 234228 - DNA, 20 bp, Artificial Sequence
  Description of Artificial Sequence: Synthetic oligonucleotide
  Target: LAMA2; (-) strand; PAM type: YTN; PAM sequence: TTT
ttgtatgaaaaagcaaaaaa

SEQ ID NO: 234229 - DNA, 20 bp, Artificial Sequence
  Description of Artificial Sequence: Synthetic oligonucleotide
  Target: LAMA2; (-) strand; PAM type: YTN; PAM sequence: TTG
tataaaacatttttgtatga

SEQ ID NO: 234230 - DNA, 20 bp, Artificial Sequence
  Description of Artificial Sequence: Synthetic oligonucleotide
  Target: LAMA2; (-) strand; PAM type: YTN; PAM sequence: TTT
gtataaaacatttttgtatg

SEQ ID NO: 234231 - DNA, 20 bp, Artificial Sequence
  Description of Artificial Sequence: Synthetic oligonucleotide
  Target: LAMA2; (-) strand; PAM type: YTN; PAM sequence: TTT
tgtataaaacatttttgtat

SEQ ID NO: 234232 - DNA, 20 bp, Artificial Sequence
  Description of Artificial Sequence: Synthetic oligonucleotide
  Target: LAMA2; (-) strand; PAM type: YTN; PAM sequence: TTT
ttgtataaaacatttttgta

SEQ ID NO: 234233 - DNA, 20 bp, Artificial Sequence
  Description of Artificial Sequence: Synthetic oligonucleotide
  Target: LAMA2; (-) strand; PAM type: YTN; PAM sequence: TTT
tttgtataaaacatttttgt

SEQ ID NO: 234234 - DNA, 20 bp, Artificial Sequence
  Description of Artificial Sequence: Synthetic oligonucleotide
  Target: LAMA2; (-) strand; PAM type: YTN; PAM sequence: TTT
ttttgtataaaacatttttg

SEQ ID NO: 234235 - DNA, 20 bp, Artificial Sequence
  Description of Artificial Sequence: Synthetic oligonucleotide
  Target: LAMA2; (-) strand; PAM type: YTN; PAM sequence: TTA
tttttttgtataaaacattt

SEQ ID NO: 234236 - DNA, 20 bp, Artificial Sequence
  Description of Artificial Sequence: Synthetic oligonucleotide
  Target: LAMA2; (-) strand; PAM type: YTN; PAM sequence: TTA
ttatttttttgtataaaaca

SEQ ID NO: 234237 - DNA, 20 bp, Artificial Sequence
  Description of Artificial Sequence: Synthetic oligonucleotide
  Target: LAMA2; (-) strand; PAM type: YTN; PAM sequence: TTC
aaaattattatttttttgta

SEQ ID NO: 234238 - DNA, 20 bp, Artificial Sequence
  Description of Artificial Sequence: Synthetic oligonucleotide
  Target: LAMA2; (-) strand; PAM type: YTN; PAM sequence: TTT
caaaattattatttttttgt

SEQ ID NO: 234239 - DNA, 20 bp, Artificial Sequence
  Description of Artificial Sequence: Synthetic oligonucleotide
  Target: LAMA2; (-) strand; PAM type: YTN; PAM sequence: CTT
tcaaaattattatttttttg

SEQ ID NO: 234240 - DNA, 20 bp, Artificial Sequence
  Description of Artificial Sequence: Synthetic oligonucleotide
  Target: LAMA2; (-) strand; PAM type: YTN; PAM sequence: TTA
cagaagctttcaaaattatt

SEQ ID NO: 234241 - DNA, 20 bp, Artificial Sequence
  Description of Artificial Sequence: Synthetic oligonucleotide
  Target: LAMA2; (-) strand; PAM type: YTN; PAM sequence: TTT
acagaagctttcaaaattat

SEQ ID NO: 234242 - DNA, 20 bp, Artificial Sequence
  Description of Artificial Sequence: Synthetic oligonucleotide
  Target: LAMA2; (-) strand; PAM type: YTN; PAM sequence: CTG
tttacagaagctttcaaaat

SEQ ID NO: 234243 - DNA, 20 bp, Artificial Sequence
  Description of Artificial Sequence: Synthetic oligonucleotide
  Target: LAMA2; (-) strand; PAM type: YTN; PAM sequence: TTC
aactgtttacagaagctttc

SEQ ID NO: 234244 - DNA, 20 bp, Artificial Sequence
  Description of Artificial Sequence: Synthetic oligonucleotide
  Target: LAMA2; (-) strand; PAM type: YTN; PAM sequence: TTG
aagttcaactgtttacagaa

SEQ ID NO: 234245 - DNA, 20 bp, Artificial Sequence
  Description of Artificial Sequence: Synthetic oligonucleotide
  Target: LAMA2; (-) strand; PAM type: YTN; PAM sequence: TTT
gaagttcaactgtttacaga

SEQ ID NO: 234246 - DNA, 20 bp, Artificial Sequence
  Description of Artificial Sequence: Synthetic oligonucleotide
  Target: LAMA2; (-) strand; PAM type: YTN; PAM sequence: TTA
atttgaagttcaactgttta

SEQ ID NO: 234247 - DNA, 20 bp, Artificial Sequence
  Description of Artificial Sequence: Synthetic oligonucleotide
  Target: LAMA2; (-) strand; PAM type: YTN; PAM sequence: TTT
aatttgaagttcaactgttt

SEQ ID NO: 234248 - DNA, 20 bp, Artificial Sequence
  Description of Artificial Sequence: Synthetic oligonucleotide
  Target: LAMA2; (-) strand; PAM type: YTN; PAM sequence: TTT
taatttgaagttcaactgtt

SEQ ID NO: 234249 - DNA, 20 bp, Artificial Sequence
  Description of Artificial Sequence: Synthetic oligonucleotide
  Target: LAMA2; (-) strand; PAM type: YTN; PAM sequence: CTT
ttaatttgaagttcaactgt

SEQ ID NO: 234250 - DNA, 20 bp, Artificial Sequence
  Description of Artificial Sequence: Synthetic oligonucleotide
  Target: LAMA2; (-) strand; PAM type: YTN; PAM sequence: TTA
ccttttaatttgaagttcaa

SEQ ID NO: 234251 - DNA, 20 bp, Artificial Sequence
  Description of Artificial Sequence: Synthetic oligonucleotide
  Target: LAMA2; (-) strand; PAM type: YTN; PAM sequence: CTT
accttttaatttgaagttca

SEQ ID NO: 234252 - DNA, 20 bp, Artificial Sequence
  Description of Artificial Sequence: Synthetic oligonucleotide
  Target: LAMA2; (-) strand; PAM type: YTN; PAM sequence: CTA
cttaccttttaatttgaagt

SEQ ID NO: 234253 - DNA, 20 bp, Artificial Sequence
  Description of Artificial Sequence: Synthetic oligonucleotide
  Target: LAMA2; (-) strand; PAM type: YTN; PAM sequence: TTC
ctacttaccttttaatttga

SEQ ID NO: 234254 - DNA, 20 bp, Artificial Sequence
  Description of Artificial Sequence: Synthetic oligonucleotide
  Target: LAMA2; (-) strand; PAM type: YTN; PAM sequence: CTA
cgaaatgttcctacttacct

SEQ ID NO: 234255 - DNA, 20 bp, Artificial Sequence
  Description of Artificial Sequence: Synthetic oligonucleotide
  Target: LAMA2; (-) strand; PAM type: YTN; PAM sequence: TTC
aactacgaaatgttcctact

SEQ ID NO: 234256 - DNA, 20 bp, Artificial Sequence
  Description of Artificial Sequence: Synthetic oligonucleotide
  Target: LAMA2; (-) strand; PAM type: YTN; PAM sequence: TTT
caactacgaaatgttcctac

SEQ ID NO: 234257 - DNA, 20 bp, Artificial Sequence
  Description of Artificial Sequence: Synthetic oligonucleotide
  Target: LAMA2; (-) strand; PAM type: YTN; PAM sequence: TTA
ggtcagtttcaactacgaaa

SEQ ID NO: 234258 - DNA, 20 bp, Artificial Sequence
  Description of Artificial Sequence: Synthetic oligonucleotide
  Target: LAMA2; (-) strand; PAM type: YTN; PAM sequence: TTT
aggtcagtttcaactacgaa

SEQ ID NO: 234259 - DNA, 20 bp, Artificial Sequence
  Description of Artificial Sequence: Synthetic oligonucleotide
  Target: LAMA2; (-) strand; PAM type: YTN; PAM sequence: CTC
aaagatttaggtcagtttca

SEQ ID NO: 234260 - DNA, 20 bp, Artificial Sequence
  Description of Artificial Sequence: Synthetic oligonucleotide
  Target: LAMA2; (-) strand; PAM type: YTN; PAM sequence: TTA
catcctcaaagatttaggtc

SEQ ID NO: 234261 - DNA, 20 bp, Artificial Sequence
  Description of Artificial Sequence: Synthetic oligonucleotide
  Target: LAMA2; (-) strand; PAM type: YTN; PAM sequence: CTT
acatcctcaaagatttaggt

SEQ ID NO: 234262 - DNA, 20 bp, Artificial Sequence
  Description of Artificial Sequence: Synthetic oligonucleotide
  Target: LAMA2; (-) strand; PAM type: YTN; PAM sequence: TTA
tcttacatcctcaaagattt

SEQ ID NO: 234263 - DNA, 20 bp, Artificial Sequence
  Description of Artificial Sequence: Synthetic oligonucleotide
  Target: LAMA2; (-) strand; PAM type: YTN; PAM sequence: TTT
atcttacatcctcaaagatt

SEQ ID NO: 234264 - DNA, 20 bp, Artificial Sequence
  Description of Artificial Sequence: Synthetic oligonucleotide
  Target: LAMA2; (-) strand; PAM type: YTN; PAM sequence: TTT
tatcttacatcctcaaagat

SEQ ID NO: 234265 - DNA, 20 bp, Artificial Sequence
  Description of Artificial Sequence: Synthetic oligonucleotide
  Target: LAMA2; (-) strand; PAM type: YTN; PAM sequence: CTG
gagtgatggaaaagttttat

SEQ ID NO: 234266 - DNA, 20 bp, Artificial Sequence
  Description of Artificial Sequence: Synthetic oligonucleotide
  Target: LAMA2; (-) strand; PAM type: YTN; PAM sequence: TTC
tggagtgatggaaaagtttt

SEQ ID NO: 234267 - DNA, 20 bp, Artificial Sequence
  Description of Artificial Sequence: Synthetic oligonucleotide
  Target: LAMA2; (-) strand; PAM type: YTN; PAM sequence: TTT
ctggagtgatggaaaagttt

SEQ ID NO: 234268 - DNA, 20 bp, Artificial Sequence
  Description of Artificial Sequence: Synthetic oligonucleotide
  Target: LAMA2; (-) strand; PAM type: YTN; PAM sequence: CTT
tctggagtgatggaaaagtt

SEQ ID NO: 234269 - DNA, 20 bp, Artificial Sequence
  Description of Artificial Sequence: Synthetic oligonucleotide
  Target: LAMA2; (-) strand; PAM type: YTN; PAM sequence: CTG
gaaggagccatgataaaact

SEQ ID NO: 234270 - DNA, 20 bp, Artificial Sequence
  Description of Artificial Sequence: Synthetic oligonucleotide
  Target: LAMA2; (-) strand; PAM type: YTN; PAM sequence: TTG
actggaaggagccatgataa

SEQ ID NO: 234271 - DNA, 20 bp, Artificial Sequence
  Description of Artificial Sequence: Synthetic oligonucleotide
  Target: LAMA2; (-) strand; PAM type: YTN; PAM sequence: CTT
gactggaaggagccatgata

SEQ ID NO: 234272 - DNA, 20 bp, Artificial Sequence
  Description of Artificial Sequence: Synthetic oligonucleotide
  Target: LAMA2; (-) strand; PAM type: YTN; PAM sequence: CTC
cttgactggaaggagccatg

SEQ ID NO: 234273 - DNA, 20 bp, Artificial Sequence
  Description of Artificial Sequence: Synthetic oligonucleotide
  Target: LAMA2; (-) strand; PAM type: YTN; PAM sequence: CTA
ggggtccactccttgactgg

SEQ ID NO: 234274 - DNA, 20 bp, Artificial Sequence
  Description of Artificial Sequence: Synthetic oligonucleotide
  Target: LAMA2; (-) strand; PAM type: YTN; PAM sequence: TTG
cctaggggtccactccttga

SEQ ID NO: 234275 - DNA, 20 bp, Artificial Sequence
  Description of Artificial Sequence: Synthetic oligonucleotide
  Target: LAMA2; (-) strand; PAM type: YTN; PAM sequence: TTT
gcctaggggtccactccttg

SEQ ID NO: 234276 - DNA, 20 bp, Artificial Sequence
  Description of Artificial Sequence: Synthetic oligonucleotide
  Target: LAMA2; (-) strand; PAM type: YTN; PAM sequence: CTA
aaaatcagaacagagtttgc

SEQ ID NO: 234277 - DNA, 20 bp, Artificial Sequence
  Description of Artificial Sequence: Synthetic oligonucleotide
  Target: LAMA2; (-) strand; PAM type: YTN; PAM sequence: TTC
taaaaatcagaacagagttt

SEQ ID NO: 234278 - DNA, 20 bp, Artificial Sequence
  Description of Artificial Sequence: Synthetic oligonucleotide
  Target: LAMA2; (-) strand; PAM type: YTN; PAM sequence: TTA
cgttctaaaaatcagaacag

SEQ ID NO: 234279 - DNA, 20 bp, Artificial Sequence
  Description of Artificial Sequence: Synthetic oligonucleotide
  Target: LAMA2; (-) strand; PAM type: YTN; PAM sequence: TTT
acgttctaaaaatcagaaca

SEQ ID NO: 234280 - DNA, 20 bp, Artificial Sequence
  Description of Artificial Sequence: Synthetic oligonucleotide
  Target: LAMA2; (-) strand; PAM type: YTN; PAM sequence: CTA
atttacgttctaaaaatcag

SEQ ID NO: 234281 - DNA, 20 bp, Artificial Sequence
  Description of Artificial Sequence: Synthetic oligonucleotide
  Target: LAMA2; (-) strand; PAM type: YTN; PAM sequence: CTA
agaggcacaactaatttacg

SEQ ID NO: 234282 - DNA, 20 bp, Artificial Sequence
  Description of Artificial Sequence: Synthetic oligonucleotide
  Target: LAMA2; (-) strand; PAM type: YTN; PAM sequence: CTC
taagaggcacaactaattta

SEQ ID NO: 234283 - DNA, 20 bp, Artificial Sequence
  Description of Artificial Sequence: Synthetic oligonucleotide
  Target: LAMA2; (-) strand; PAM type: YTN; PAM sequence: TTC
tctaagaggcacaactaatt

SEQ ID NO: 234284 - DNA, 20 bp, Artificial Sequence
  Description of Artificial Sequence: Synthetic oligonucleotide
  Target: LAMA2; (-) strand; PAM type: YTN; PAM sequence: TTA
tgaaattctctaagaggcac

SEQ ID NO: 234285 - DNA, 20 bp, Artificial Sequence
  Description of Artificial Sequence: Synthetic oligonucleotide
  Target: LAMA2; (-) strand; PAM type: YTN; PAM sequence: TTT
atgaaattctctaagaggca

SEQ ID NO: 234286 - DNA, 20 bp, Artificial Sequence
  Description of Artificial Sequence: Synthetic oligonucleotide
  Target: LAMA2; (-) strand; PAM type: YTN; PAM sequence: TTT
tatgaaattctctaagaggc

SEQ ID NO: 234287 - DNA, 20 bp, Artificial Sequence
  Description of Artificial Sequence: Synthetic oligonucleotide
  Target: LAMA2; (-) strand; PAM type: YTN; PAM sequence: TTT
ttatgaaattctctaagagg

SEQ ID NO: 234288 - DNA, 20 bp, Artificial Sequence
  Description of Artificial Sequence: Synthetic oligonucleotide
  Target: LAMA2; (-) strand; PAM type: YTN; PAM sequence: TTC
atttttatgaaattctctaa

SEQ ID NO: 234289 - DNA, 20 bp, Artificial Sequence
  Description of Artificial Sequence: Synthetic oligonucleotide
  Target: LAMA2; (-) strand; PAM type: YTN; PAM sequence: TTT
catttttatgaaattctcta

SEQ ID NO: 234290 - DNA, 20 bp, Artificial Sequence
  Description of Artificial Sequence: Synthetic oligonucleotide
  Target: LAMA2; (-) strand; PAM type: YTN; PAM sequence: CTG
tatgatttcatttttatgaa

SEQ ID NO: 234291 - DNA, 20 bp, Artificial Sequence
  Description of Artificial Sequence: Synthetic oligonucleotide
  Target: LAMA2; (-) strand; PAM type: YTN; PAM sequence: CTA
gtatgtactgtatgatttca

SEQ ID NO: 234292 - DNA, 20 bp, Artificial Sequence
  Description of Artificial Sequence: Synthetic oligonucleotide
  Target: LAMA2; (-) strand; PAM type: YTN; PAM sequence: CTC
actagtatgtactgtatgat

SEQ ID NO: 234293 - DNA, 20 bp, Artificial Sequence
  Description of Artificial Sequence: Synthetic oligonucleotide
  Target: LAMA2; (-) strand; PAM type: YTN; PAM sequence: TTA
tgtcgagtgaaaaaagactc

SEQ ID NO: 234294 - DNA, 20 bp, Artificial Sequence
  Description of Artificial Sequence: Synthetic oligonucleotide
  Target: LAMA2; (-) strand; PAM type: YTN; PAM sequence: TTA
acatattatgtcgagtgaaa

SEQ ID NO: 234295 - DNA, 20 bp, Artificial Sequence
  Description of Artificial Sequence: Synthetic oligonucleotide
  Target: LAMA2; (-) strand; PAM type: YTN; PAM sequence: CTT
aacatattatgtcgagtgaa

SEQ ID NO: 234296 - DNA, 20 bp, Artificial Sequence
  Description of Artificial Sequence: Synthetic oligonucleotide
  Target: LAMA2; (-) strand; PAM type: YTN; PAM sequence: CTG
atgcacaaacaacatggata

SEQ ID NO: 234297 - DNA, 20 bp, Artificial Sequence
  Description of Artificial Sequence: Synthetic oligonucleotide
  Target: LAMA2; (-) strand; PAM type: YTN; PAM sequence: CTA
ctgatgcacaaacaacatgg

SEQ ID NO: 234298 - DNA, 20 bp, Artificial Sequence
  Description of Artificial Sequence: Synthetic oligonucleotide
  Target: LAMA2; (-) strand; PAM type: YTN; PAM sequence: TTC
aaaagaaaaagaactactga

SEQ ID NO: 234299 - DNA, 20 bp, Artificial Sequence
  Description of Artificial Sequence: Synthetic oligonucleotide
  Target: LAMA2; (-) strand; PAM type: YTN; PAM sequence: TTT
caaaagaaaaagaactactg

SEQ ID NO: 234300 - DNA, 20 bp, Artificial Sequence
  Description of Artificial Sequence: Synthetic oligonucleotide
  Target: LAMA2; (-) strand; PAM type: YTN; PAM sequence: CTT
tcaaaagaaaaagaactact

SEQ ID NO: 234301 - DNA, 20 bp, Artificial Sequence
  Description of Artificial Sequence: Synthetic oligonucleotide
  Target: LAMA2; (-) strand; PAM type: YTN; PAM sequence: TTC
tttcaaaagaaaaagaacta

SEQ ID NO: 234302 - DNA, 20 bp, Artificial Sequence
  Description of Artificial Sequence: Synthetic oligonucleotide
  Target: LAMA2; (-) strand; PAM type: YTN; PAM sequence: TTT
ctttcaaaagaaaaagaact

SEQ ID NO: 234303 - DNA, 20 bp, Artificial Sequence
  Description of Artificial Sequence: Synthetic oligonucleotide
  Target: LAMA2; (-) strand; PAM type: YTN; PAM sequence: CTC
agcaatttctttcaaaagaa

SEQ ID NO: 234304 - DNA, 20 bp, Artificial Sequence
  Description of Artificial Sequence: Synthetic oligonucleotide
  Target: LAMA2; (-) strand; PAM type: YTN; PAM sequence: CTA
ctcagcaatttctttcaaaa

SEQ ID NO: 234305 - DNA, 20 bp, Artificial Sequence
  Description of Artificial Sequence: Synthetic oligonucleotide
  Target: LAMA2; (-) strand; PAM type: YTN; PAM sequence: TTC
gtgcagagaaatactactca

SEQ ID NO: 234306 - DNA, 20 bp, Artificial Sequence
  Description of Artificial Sequence: Synthetic oligonucleotide
  Target: LAMA2; (-) strand; PAM type: YTN; PAM sequence: TTG
atatgttcgtgcagagaaat

SEQ ID NO: 234307 - DNA, 20 bp, Artificial Sequence
  Description of Artificial Sequence: Synthetic oligonucleotide
  Target: LAMA2; (-) strand; PAM type: YTN; PAM sequence: TTT
gatatgttcgtgcagagaaa

SEQ ID NO: 234308 - DNA, 20 bp, Artificial Sequence
  Description of Artificial Sequence: Synthetic oligonucleotide
  Target: LAMA2; (-) strand; PAM type: YTN; PAM sequence: TTT
tgatatgttcgtgcagagaa

SEQ ID NO: 234309 - DNA, 20 bp, Artificial Sequence
  Description of Artificial Sequence: Synthetic oligonucleotide
  Target: LAMA2; (-) strand; PAM type: YTN; PAM sequence: TTA
aaattttgatatgttcgtgc

SEQ ID NO: 234310 - DNA, 20 bp, Artificial Sequence
  Description of Artificial Sequence: Synthetic oligonucleotide
  Target: LAMA2; (-) strand; PAM type: YTN; PAM sequence: TTT
aaaattttgatatgttcgtg

SEQ ID NO: 234311 - DNA, 20 bp, Artificial Sequence
  Description of Artificial Sequence: Synthetic oligonucleotide
  Target: LAMA2; (-) strand; PAM type: YTN; PAM sequence: CTA
tcaacaggagaatggattta

SEQ ID NO: 234312 - DNA, 20 bp, Artificial Sequence
  Description of Artificial Sequence: Synthetic oligonucleotide
  Target: LAMA2; (-) strand; PAM type: YTN; PAM sequence: TTC
tatcaacaggagaatggatt

SEQ ID NO: 234313 - DNA, 20 bp, Artificial Sequence
  Description of Artificial Sequence: Synthetic oligonucleotide
  Target: LAMA2; (-) strand; PAM type: YTN; PAM sequence: TTT
ctatcaacaggagaatggat

SEQ ID NO: 234314 - DNA, 20 bp, Artificial Sequence
  Description of Artificial Sequence: Synthetic oligonucleotide
  Target: LAMA2; (-) strand; PAM type: YTN; PAM sequence: CTA
atttctatcaacaggagaat

SEQ ID NO: 234315 - DNA, 20 bp, Artificial Sequence
  Description of Artificial Sequence: Synthetic oligonucleotide
  Target: LAMA2; (-) strand; PAM type: YTN; PAM sequence: CTG
gaaatgatcctaatttctat

SEQ ID NO: 234316 - DNA, 20 bp, Artificial Sequence
  Description of Artificial Sequence: Synthetic oligonucleotide
  Target: LAMA2; (-) strand; PAM type: YTN; PAM sequence: CTA
aaactggaaatgatcctaat

SEQ ID NO: 234317 - DNA, 20 bp, Artificial Sequence
  Description of Artificial Sequence: Synthetic oligonucleotide
  Target: LAMA2; (-) strand; PAM type: YTN; PAM sequence: CTA
agctaaaactggaaatgatc

SEQ ID NO: 234318 - DNA, 20 bp, Artificial Sequence
  Description of Artificial Sequence: Synthetic oligonucleotide
  Target: LAMA2; (-) strand; PAM type: YTN; PAM sequence: TTG
taggagctaagctaaaactg

SEQ ID NO: 234319 - DNA, 20 bp, Artificial Sequence
  Description of Artificial Sequence: Synthetic oligonucleotide
  Target: LAMA2; (-) strand; PAM type: YTN; PAM sequence: TTT
gtaggagctaagctaaaact

SEQ ID NO: 234320 - DNA, 20 bp, Artificial Sequence
  Description of Artificial Sequence: Synthetic oligonucleotide
  Target: LAMA2; (-) strand; PAM type: YTN; PAM sequence: TTA
tttgtaggagctaagctaaa

SEQ ID NO: 234321 - DNA, 20 bp, Artificial Sequence
  Description of Artificial Sequence: Synthetic oligonucleotide
  Target: LAMA2; (-) strand; PAM type: YTN; PAM sequence: CTA
gtataaaattatttgtagga

SEQ ID NO: 234322 - DNA, 20 bp, Artificial Sequence
  Description of Artificial Sequence: Synthetic oligonucleotide
  Target: LAMA2; (-) strand; PAM type: YTN; PAM sequence: CTA
taaaataactagtataaaat

SEQ ID NO: 234323 - DNA, 20 bp, Artificial Sequence
  Description of Artificial Sequence: Synthetic oligonucleotide
  Target: LAMA2; (-) strand; PAM type: YTN; PAM sequence: TTA
cacaaggtaaataaaaatat

SEQ ID NO: 234324 - DNA, 20 bp, Artificial Sequence
  Description of Artificial Sequence: Synthetic oligonucleotide
  Target: LAMA2; (-) strand; PAM type: YTN; PAM sequence: TTT
acacaaggtaaataaaaata

SEQ ID NO: 234325 - DNA, 20 bp, Artificial Sequence
  Description of Artificial Sequence: Synthetic oligonucleotide
  Target: LAMA2; (-) strand; PAM type: YTN; PAM sequence: CTA
agtatttacacaaggtaaat

SEQ ID NO: 234326 - DNA, 20 bp, Artificial Sequence
  Description of Artificial Sequence: Synthetic oligonucleotide
  Target: LAMA2; (-) strand; PAM type: YTN; PAM sequence: TTC
ctaagtatttacacaaggta

SEQ ID NO: 234327 - DNA, 20 bp, Artificial Sequence
  Description of Artificial Sequence: Synthetic oligonucleotide
  Target: LAMA2; (-) strand; PAM type: YTN; PAM sequence: CTA
ttcctaagtatttacacaag

SEQ ID NO: 234328 - DNA, 20 bp, Artificial Sequence
  Description of Artificial Sequence: Synthetic oligonucleotide
  Target: LAMA2; (-) strand; PAM type: YTN; PAM sequence: TTC
tattcctaagtatttacaca

SEQ ID NO: 234329 - DNA, 20 bp, Artificial Sequence
  Description of Artificial Sequence: Synthetic oligonucleotide
  Target: LAMA2; (-) strand; PAM type: YTN; PAM sequence: TTT
ctattcctaagtatttacac

SEQ ID NO: 234330 - DNA, 20 bp, Artificial Sequence
  Description of Artificial Sequence: Synthetic oligonucleotide
  Target: LAMA2; (-) strand; PAM type: YTN; PAM sequence: CTT
tctattcctaagtatttaca

SEQ ID NO: 234331 - DNA, 20 bp, Artificial Sequence
  Description of Artificial Sequence: Synthetic oligonucleotide
  Target: LAMA2; (-) strand; PAM type: YTN; PAM sequence: CTA
tgaaaaaagctttctattcc

SEQ ID NO: 234332 - DNA, 20 bp, Artificial Sequence
  Description of Artificial Sequence: Synthetic oligonucleotide
  Target: LAMA2; (-) strand; PAM type: YTN; PAM sequence: CTA
tcctatgaaaaaagctttct

SEQ ID NO: 234333 - DNA, 20 bp, Artificial Sequence
  Description of Artificial Sequence: Synthetic oligonucleotide
  Target: LAMA2; (-) strand; PAM type: YTN; PAM sequence: CTA
cctatcctatgaaaaaagct

SEQ ID NO: 234334 - DNA, 20 bp, Artificial Sequence
  Description of Artificial Sequence: Synthetic oligonucleotide
  Target: LAMA2; (-) strand; PAM type: YTN; PAM sequence: TTA
agcatctacctatcctatga

SEQ ID NO: 234335 - DNA, 20 bp, Artificial Sequence
  Description of Artificial Sequence: Synthetic oligonucleotide
  Target: LAMA2; (-) strand; PAM type: YTN; PAM sequence: TTA
taaagttaagcatctaccta

SEQ ID NO: 234336 - DNA, 20 bp, Artificial Sequence
  Description of Artificial Sequence: Synthetic oligonucleotide
  Target: LAMA2; (-) strand; PAM type: YTN; PAM sequence: CTT
ataaagttaagcatctacct

SEQ ID NO: 234337 - DNA, 20 bp, Artificial Sequence
  Description of Artificial Sequence: Synthetic oligonucleotide
  Target: LAMA2; (-) strand; PAM type: YTN; PAM sequence: TTC
ttataaagttaagcatctac

SEQ ID NO: 234338 - DNA, 20 bp, Artificial Sequence
  Description of Artificial Sequence: Synthetic oligonucleotide
  Target: LAMA2; (-) strand; PAM type: YTN; PAM sequence: TTT
cttataaagttaagcatcta

SEQ ID NO: 234339 - DNA, 20 bp, Artificial Sequence
  Description of Artificial Sequence: Synthetic oligonucleotide
  Target: LAMA2; (-) strand; PAM type: YTN; PAM sequence: TTG
acggtttcttataaagttaa

SEQ ID NO: 234340 - DNA, 20 bp, Artificial Sequence
  Description of Artificial Sequence: Synthetic oligonucleotide
  Target: LAMA2; (-) strand; PAM type: YTN; PAM sequence: TTG
gcaaaatgttgacggtttct

SEQ ID NO: 234341 - DNA, 20 bp, Artificial Sequence
  Description of Artificial Sequence: Synthetic oligonucleotide
  Target: LAMA2; (-) strand; PAM type: YTN; PAM sequence: TTT
ggcaaaatgttgacggtttc

SEQ ID NO: 234342 - DNA, 20 bp, Artificial Sequence
  Description of Artificial Sequence: Synthetic oligonucleotide
  Target: LAMA2; (-) strand; PAM type: YTN; PAM sequence: CTA
atttggcaaaatgttgacgg

SEQ ID NO: 234343 - DNA, 20 bp, Artificial Sequence
  Description of Artificial Sequence: Synthetic oligonucleotide
  Target: LAMA2; (-) strand; PAM type: YTN; PAM sequence: TTA
ctaatttggcaaaatgttga

SEQ ID NO: 234344 - DNA, 20 bp, Artificial Sequence
  Description of Artificial Sequence: Synthetic oligonucleotide
  Target: LAMA2; (-) strand; PAM type: YTN; PAM sequence: TTA
ttactaatttggcaaaatgt

SEQ ID NO: 234345 - DNA, 20 bp, Artificial Sequence
  Description of Artificial Sequence: Synthetic oligonucleotide
  Target: LAMA2; (-) strand; PAM type: YTN; PAM sequence: TTA
tacattattactaatttggc

SEQ ID NO: 234346 - DNA, 20 bp, Artificial Sequence
  Description of Artificial Sequence: Synthetic oligonucleotide
  Target: LAMA2; (-) strand; PAM type: YTN; PAM sequence: TTT
atacattattactaatttgg

SEQ ID NO: 234347 - DNA, 20 bp, Artificial Sequence
  Description of Artificial Sequence: Synthetic oligonucleotide
  Target: LAMA2; (-) strand; PAM type: YTN; PAM sequence: TTT
tatacattattactaatttg

SEQ ID NO: 234348 - DNA, 20 bp, Artificial Sequence
  Description of Artificial Sequence: Synthetic oligonucleotide
  Target: LAMA2; (-) strand; PAM type: YTN; PAM sequence: TTG
gtgaacattttatacattat

SEQ ID NO: 234349 - DNA, 20 bp, Artificial Sequence
  Description of Artificial Sequence: Synthetic oligonucleotide
  Target: LAMA2; (-) strand; PAM type: YTN; PAM sequence: TTT
ggtgaacattttatacatta

SEQ ID NO: 234350 - DNA, 20 bp, Artificial Sequence
  Description of Artificial Sequence: Synthetic oligonucleotide
  Target: LAMA2; (-) strand; PAM type: YTN; PAM sequence: TTT
tggtgaacattttatacatt

SEQ ID NO: 234351 - DNA, 20 bp, Artificial Sequence
  Description of Artificial Sequence: Synthetic oligonucleotide
  Target: LAMA2; (-) strand; PAM type: YTN; PAM sequence: TTT
ttggtgaacattttatacat

SEQ ID NO: 234352 - DNA, 20 bp, Artificial Sequence
  Description of Artificial Sequence: Synthetic oligonucleotide
  Target: LAMA2; (-) strand; PAM type: YTN; PAM sequence: CTT
tttggtgaacattttataca

SEQ ID NO: 234353 - DNA, 20 bp, Artificial Sequence
  Description of Artificial Sequence: Synthetic oligonucleotide
  Target: LAMA2; (-) strand; PAM type: YTN; PAM sequence: CTC
atataactttttggtgaaca

SEQ ID NO: 234354 - DNA, 20 bp, Artificial Sequence
  Description of Artificial Sequence: Synthetic oligonucleotide
  Target: LAMA2; (-) strand; PAM type: YTN; PAM sequence: CTG
aaactcatataactttttgg

SEQ ID NO: 234355 - DNA, 20 bp, Artificial Sequence
  Description of Artificial Sequence: Synthetic oligonucleotide
  Target: LAMA2; (-) strand; PAM type: YTN; PAM sequence: TTA
gagatgatatagaatgactg

SEQ ID NO: 234356 - DNA, 20 bp, Artificial Sequence
  Description of Artificial Sequence: Synthetic oligonucleotide
  Target: LAMA2; (-) strand; PAM type: YTN; PAM sequence: CTA
aaatccaaaaagatagtcaa

SEQ ID NO: 234357 - DNA, 20 bp, Artificial Sequence
  Description of Artificial Sequence: Synthetic oligonucleotide
  Target: LAMA2; (-) strand; PAM type: YTN; PAM sequence: CTA
gatgactaaaatccaaaaag

SEQ ID NO: 234358 - DNA, 20 bp, Artificial Sequence
  Description of Artificial Sequence: Synthetic oligonucleotide
  Target: LAMA2; (-) strand; PAM type: YTN; PAM sequence: TTC
acacccactagatgactaaa

SEQ ID NO: 234359 - DNA, 20 bp, Artificial Sequence
  Description of Artificial Sequence: Synthetic oligonucleotide
  Target: LAMA2; (-) strand; PAM type: YTN; PAM sequence: TTT
cacacccactagatgactaa

SEQ ID NO: 234360 - DNA, 20 bp, Artificial Sequence
  Description of Artificial Sequence: Synthetic oligonucleotide
  Target: LAMA2; (-) strand; PAM type: YTN; PAM sequence: TTA
aatccataatcagatgccat

SEQ ID NO: 234361 - DNA, 20 bp, Artificial Sequence
  Description of Artificial Sequence: Synthetic oligonucleotide
  Target: LAMA2; (-) strand; PAM type: YTN; PAM sequence: TTA
aaattaaatccataatcaga

SEQ ID NO: 234362 - DNA, 20 bp, Artificial Sequence
  Description of Artificial Sequence: Synthetic oligonucleotide
  Target: LAMA2; (-) strand; PAM type: YTN; PAM sequence: TTA
cgattaaaattaaatccata

SEQ ID NO: 234363 - DNA, 20 bp, Artificial Sequence
  Description of Artificial Sequence: Synthetic oligonucleotide
  Target: LAMA2; (-) strand; PAM type: YTN; PAM sequence: CTT
acgattaaaattaaatccat

SEQ ID NO: 234364 - DNA, 20 bp, Artificial Sequence
  Description of Artificial Sequence: Synthetic oligonucleotide
  Target: LAMA2; (-) strand; PAM type: YTN; PAM sequence: TTC
ataagagaagatacaggaat

SEQ ID NO: 234365 - DNA, 20 bp, Artificial Sequence
  Description of Artificial Sequence: Synthetic oligonucleotide
  Target: LAMA2; (-) strand; PAM type: YTN; PAM sequence: CTT
cataagagaagatacaggaa

SEQ ID NO: 234366 - DNA, 20 bp, Artificial Sequence
  Description of Artificial Sequence: Synthetic oligonucleotide
  Target: LAMA2; (-) strand; PAM type: YTN; PAM sequence: CTA
cttcataagagaagatacag

SEQ ID NO: 234367 - DNA, 20 bp, Artificial Sequence
  Description of Artificial Sequence: Synthetic oligonucleotide
  Target: LAMA2; (-) strand; PAM type: YTN; PAM sequence: TTG
aacatctacttcataagaga

SEQ ID NO: 234368 - DNA, 20 bp, Artificial Sequence
  Description of Artificial Sequence: Synthetic oligonucleotide
  Target: LAMA2; (-) strand; PAM type: YTN; PAM sequence: TTT
gaacatctacttcataagag

SEQ ID NO: 234369 - DNA, 20 bp, Artificial Sequence
  Description of Artificial Sequence: Synthetic oligonucleotide
  Target: LAMA2; (-) strand; PAM type: YTN; PAM sequence: CTT
tgaacatctacttcataaga

SEQ ID NO: 234370 - DNA, 20 bp, Artificial Sequence
  Description of Artificial Sequence: Synthetic oligonucleotide
  Target: LAMA2; (-) strand; PAM type: YTN; PAM sequence: TTA
gactttgaacatctacttca

SEQ ID NO: 234371 - DNA, 20 bp, Artificial Sequence
  Description of Artificial Sequence: Synthetic oligonucleotide
  Target: LAMA2; (-) strand; PAM type: YTN; PAM sequence: TTT
agactttgaacatctacttc

SEQ ID NO: 234372 - DNA, 20 bp, Artificial Sequence
  Description of Artificial Sequence: Synthetic oligonucleotide
  Target: LAMA2; (-) strand; PAM type: YTN; PAM sequence: TTA
ggataaaaaaatatttagac

SEQ ID NO: 234373 - DNA, 20 bp, Artificial Sequence
  Description of Artificial Sequence: Synthetic oligonucleotide
  Target: LAMA2; (-) strand; PAM type: YTN; PAM sequence: TTT
aggataaaaaaatatttaga

SEQ ID NO: 234374 - DNA, 20 bp, Artificial Sequence
  Description of Artificial Sequence: Synthetic oligonucleotide
  Target: LAMA2; (-) strand; PAM type: YTN; PAM sequence: TTT
taggataaaaaaatatttag

SEQ ID NO: 234375 - DNA, 20 bp, Artificial Sequence
  Description of Artificial Sequence: Synthetic oligonucleotide
  Target: LAMA2; (-) strand; PAM type: YTN; PAM sequence: TTT
ttaggataaaaaaatattta

SEQ ID NO: 234376 - DNA, 20 bp, Artificial Sequence
  Description of Artificial Sequence: Synthetic oligonucleotide
  Target: LAMA2; (-) strand; PAM type: YTN; PAM sequence: TTG
gtttttaggataaaaaaata

SEQ ID NO: 234377 - DNA, 20 bp, Artificial Sequence
  Description of Artificial Sequence: Synthetic oligonucleotide
  Target: LAMA2; (-) strand; PAM type: YTN; PAM sequence: TTT
ggtttttaggataaaaaaat

SEQ ID NO: 234378 - DNA, 20 bp, Artificial Sequence
  Description of Artificial Sequence: Synthetic oligonucleotide
  Target: LAMA2; (-) strand; PAM type: YTN; PAM sequence: TTT
tggtttttaggataaaaaaa

SEQ ID NO: 234379 - DNA, 20 bp, Artificial Sequence
  Description of Artificial Sequence: Synthetic oligonucleotide
  Target: LAMA2; (-) strand; PAM type: YTN; PAM sequence: TTA
aaattttggtttttaggata

SEQ ID NO: 234380 - DNA, 20 bp, Artificial Sequence
  Description of Artificial Sequence: Synthetic oligonucleotide
  Target: LAMA2; (-) strand; PAM type: YTN; PAM sequence: CTA
taagttaaaattttggtttt

SEQ ID NO: 234381 - DNA, 20 bp, Artificial Sequence
  Description of Artificial Sequence: Synthetic oligonucleotide
  Target: LAMA2; (-) strand; PAM type: YTN; PAM sequence: CTC
tataagttaaaattttggtt

SEQ ID NO: 234382 - DNA, 20 bp, Artificial Sequence
  Description of Artificial Sequence: Synthetic oligonucleotide
  Target: LAMA2; (-) strand; PAM type: YTN; PAM sequence: TTG
atatgggtaatagctctata

SEQ ID NO: 234383 - DNA, 20 bp, Artificial Sequence
  Description of Artificial Sequence: Synthetic oligonucleotide
  Target: LAMA2; (-) strand; PAM type: YTN; PAM sequence: CTT
gatatgggtaatagctctat

SEQ ID NO: 234384 - DNA, 20 bp, Artificial Sequence
  Description of Artificial Sequence: Synthetic oligonucleotide
  Target: LAMA2; (-) strand; PAM type: YTN; PAM sequence: TTA
cttgatatgggtaatagctc

SEQ ID NO: 234385 - DNA, 20 bp, Artificial Sequence
  Description of Artificial Sequence: Synthetic oligonucleotide
  Target: LAMA2; (-) strand; PAM type: YTN; PAM sequence: TTT
acttgatatgggtaatagct

SEQ ID NO: 234386 - DNA, 20 bp, Artificial Sequence
  Description of Artificial Sequence: Synthetic oligonucleotide
  Target: LAMA2; (-) strand; PAM type: YTN; PAM sequence: TTC
acaccacacacaaacattta

SEQ ID NO: 234387 - DNA, 20 bp, Artificial Sequence
  Description of Artificial Sequence: Synthetic oligonucleotide
  Target: LAMA2; (-) strand; PAM type: YTN; PAM sequence: TTA
ttcacaccacacacaaacat

SEQ ID NO: 234388 - DNA, 20 bp, Artificial Sequence
  Description of Artificial Sequence: Synthetic oligonucleotide
  Target: LAMA2; (-) strand; PAM type: YTN; PAM sequence: CTT
attcacaccacacacaaaca

SEQ ID NO: 234389 - DNA, 20 bp, Artificial Sequence
  Description of Artificial Sequence: Synthetic oligonucleotide
  Target: LAMA2; (-) strand; PAM type: YTN; PAM sequence: TTA
cttattcacaccacacacaa

SEQ ID NO: 234390 - DNA, 20 bp, Artificial Sequence
  Description of Artificial Sequence: Synthetic oligonucleotide
  Target: LAMA2; (-) strand; PAM type: YTN; PAM sequence: CTG
gttacttattcacaccacac

SEQ ID NO: 234391 - DNA, 20 bp, Artificial Sequence
  Description of Artificial Sequence: Synthetic oligonucleotide
  Target: LAMA2; (-) strand; PAM type: YTN; PAM sequence: TTA
accatataaatctggttact

SEQ ID NO: 234392 - DNA, 20 bp, Artificial Sequence
  Description of Artificial Sequence: Synthetic oligonucleotide
  Target: LAMA2; (-) strand; PAM type: YTN; PAM sequence: TTC
aggttaaccatataaatctg

SEQ ID NO: 234393 - DNA, 20 bp, Artificial Sequence
  Description of Artificial Sequence: Synthetic oligonucleotide
  Target: LAMA2; (-) strand; PAM type: YTN; PAM sequence: CTT
caggttaaccatataaatct

SEQ ID NO: 234394 - DNA, 20 bp, Artificial Sequence
  Description of Artificial Sequence: Synthetic oligonucleotide
  Target: LAMA2; (-) strand; PAM type: YTN; PAM sequence: CTA
gaacttcaggttaaccatat

SEQ ID NO: 234395 - DNA, 20 bp, Artificial Sequence
  Description of Artificial Sequence: Synthetic oligonucleotide
  Target: LAMA2; (-) strand; PAM type: YTN; PAM sequence: TTC
aacaaatggtgctagaactt

SEQ ID NO: 234396 - DNA, 20 bp, Artificial Sequence
  Description of Artificial Sequence: Synthetic oligonucleotide
  Target: LAMA2; (-) strand; PAM type: YTN; PAM sequence: TTT
caacaaatggtgctagaact

SEQ ID NO: 234397 - DNA, 20 bp, Artificial Sequence
  Description of Artificial Sequence: Synthetic oligonucleotide
  Target: LAMA2; (-) strand; PAM type: YTN; PAM sequence: TTT
tcaacaaatggtgctagaac

SEQ ID NO: 234398 - DNA, 20 bp, Artificial Sequence
  Description of Artificial Sequence: Synthetic oligonucleotide
  Target: LAMA2; (-) strand; PAM type: YTN; PAM sequence: TTT
ttcaacaaatggtgctagaa

SEQ ID NO: 234399 - DNA, 20 bp, Artificial Sequence
  Description of Artificial Sequence: Synthetic oligonucleotide
  Target: LAMA2; (-) strand; PAM type: YTN; PAM sequence: TTG
atttttcaacaaatggtgct

SEQ ID NO: 234400 - DNA, 20 bp, Artificial Sequence
  Description of Artificial Sequence: Synthetic oligonucleotide
  Target: LAMA2; (-) strand; PAM type: YTN; PAM sequence: TTG
atccatgtaatatgatcaat

SEQ ID NO: 234401 - DNA, 20 bp, Artificial Sequence
  Description of Artificial Sequence: Synthetic oligonucleotide
  Target: LAMA2; (-) strand; PAM type: YTN; PAM sequence: CTA
gaaattgatccatgtaatat

SEQ ID NO: 234402 - DNA, 20 bp, Artificial Sequence
  Description of Artificial Sequence: Synthetic oligonucleotide
  Target: LAMA2; (-) strand; PAM type: YTN; PAM sequence: TTC
tagaaattgatccatgtaat

SEQ ID NO: 234403 - DNA, 20 bp, Artificial Sequence
  Description of Artificial Sequence: Synthetic oligonucleotide
  Target: LAMA2; (-) strand; PAM type: YTN; PAM sequence: CTG
aggttctagaaattgatcca

SEQ ID NO: 234404 - DNA, 20 bp, Artificial Sequence
  Description of Artificial Sequence: Synthetic oligonucleotide
  Target: LAMA2; (-) strand; PAM type: YTN; PAM sequence: CTA
ggaaaaatagataactgagg

SEQ ID NO: 234405 - DNA, 20 bp, Artificial Sequence
  Description of Artificial Sequence: Synthetic oligonucleotide
  Target: LAMA2; (-) strand; PAM type: YTN; PAM sequence: TTA
gcacgcagagggaaaaatag

SEQ ID NO: 234406 - DNA, 20 bp, Artificial Sequence
  Description of Artificial Sequence: Synthetic oligonucleotide
  Target: LAMA2; (-) strand; PAM type: YTN; PAM sequence: CTA
aagcaatgaagatagtatgg

SEQ ID NO: 234407 - DNA, 20 bp, Artificial Sequence
  Description of Artificial Sequence: Synthetic oligonucleotide
  Target: LAMA2; (-) strand; PAM type: YTN; PAM sequence: TTA
ctaaagcaatgaagatagta

SEQ ID NO: 234408 - DNA, 20 bp, Artificial Sequence
  Description of Artificial Sequence: Synthetic oligonucleotide
  Target: LAMA2; (-) strand; PAM type: YTN; PAM sequence: CTT
actaaagcaatgaagatagt

SEQ ID NO: 234409 - DNA, 20 bp, Artificial Sequence
  Description of Artificial Sequence: Synthetic oligonucleotide
  Target: LAMA2; (-) strand; PAM type: YTN; PAM sequence: CTA
gacttactaaagcaatgaag

SEQ ID NO: 234410 - DNA, 20 bp, Artificial Sequence
  Description of Artificial Sequence: Synthetic oligonucleotide
  Target: LAMA2; (-) strand; PAM type: YTN; PAM sequence: TTC
tagacttactaaagcaatga

SEQ ID NO: 234411 - DNA, 20 bp, Artificial Sequence
  Description of Artificial Sequence: Synthetic oligonucleotide
  Target: LAMA2; (-) strand; PAM type: YTN; PAM sequence: CTA
aattctagacttactaaagc

SEQ ID NO: 234412 - DNA, 20 bp, Artificial Sequence
  Description of Artificial Sequence: Synthetic oligonucleotide
  Target: LAMA2; (-) strand; PAM type: YTN; PAM sequence: TTA
cctaaattctagacttacta

SEQ ID NO: 234413 - DNA, 20 bp, Artificial Sequence
  Description of Artificial Sequence: Synthetic oligonucleotide
  Target: LAMA2; (-) strand; PAM type: YTN; PAM sequence: TTA
tattacctaaattctagact

SEQ ID NO: 234414 - DNA, 20 bp, Artificial Sequence
  Description of Artificial Sequence: Synthetic oligonucleotide
  Target: LAMA2; (-) strand; PAM type: YTN; PAM sequence: TTG
gtacattatattacctaaat

SEQ ID NO: 234415 - DNA, 20 bp, Artificial Sequence
  Description of Artificial Sequence: Synthetic oligonucleotide
  Target: LAMA2; (-) strand; PAM type: YTN; PAM sequence: TTG
aaaataaaaaataaagttgg

SEQ ID NO: 234416 - DNA, 20 bp, Artificial Sequence
  Description of Artificial Sequence: Synthetic oligonucleotide
  Target: LAMA2; (-) strand; PAM type: YTN; PAM sequence: CTT
gaaaataaaaaataaagttg

SEQ ID NO: 234417 - DNA, 20 bp, Artificial Sequence
  Description of Artificial Sequence: Synthetic oligonucleotide
  Target: LAMA2; (-) strand; PAM type: YTN; PAM sequence: CTA
tagacaatcttgaaaataaa

SEQ ID NO: 234418 - DNA, 20 bp, Artificial Sequence
  Description of Artificial Sequence: Synthetic oligonucleotide
  Target: LAMA2; (-) strand; PAM type: YTN; PAM sequence: CTA
ctatagacaatcttgaaaat

SEQ ID NO: 234419 - DNA, 20 bp, Artificial Sequence
  Description of Artificial Sequence: Synthetic oligonucleotide
  Target: LAMA2; (-) strand; PAM type: YTN; PAM sequence: TTG
tatagaaacacacacaaaaa

SEQ ID NO: 234420 - DNA, 20 bp, Artificial Sequence
  Description of Artificial Sequence: Synthetic oligonucleotide
  Target: LAMA2; (-) strand; PAM type: YTN; PAM sequence: CTA
aaattgtatagaaacacaca

SEQ ID NO: 234421 - DNA, 20 bp, Artificial Sequence
  Description of Artificial Sequence: Synthetic oligonucleotide
  Target: LAMA2; (-) strand; PAM type: YTN; PAM sequence: TTC
taaaattgtatagaaacaca

SEQ ID NO: 234422 - DNA, 20 bp, Artificial Sequence
  Description of Artificial Sequence: Synthetic oligonucleotide
  Target: LAMA2; (-) strand; PAM type: YTN; PAM sequence: TTG
attctaaaattgtatagaaa

SEQ ID NO: 234423 - DNA, 20 bp, Artificial Sequence
  Description of Artificial Sequence: Synthetic oligonucleotide
  Target: LAMA2; (-) strand; PAM type: YTN; PAM sequence: TTG
acaagttgattctaaaattg

SEQ ID NO: 234424 - DNA, 20 bp, Artificial Sequence
  Description of Artificial Sequence: Synthetic oligonucleotide
  Target: LAMA2; (-) strand; PAM type: YTN; PAM sequence: CTG
taattgacaagttgattcta

SEQ ID NO: 234425 - DNA, 20 bp, Artificial Sequence
  Description of Artificial Sequence: Synthetic oligonucleotide
  Target: LAMA2; (-) strand; PAM type: YTN; PAM sequence: TTC
tgtaattgacaagttgattc

SEQ ID NO: 234426 - DNA, 20 bp, Artificial Sequence
  Description of Artificial Sequence: Synthetic oligonucleotide
  Target: LAMA2; (-) strand; PAM type: YTN; PAM sequence: TTT
ctgtaattgacaagttgatt

SEQ ID NO: 234427 - DNA, 20 bp, Artificial Sequence
  Description of Artificial Sequence: Synthetic oligonucleotide
  Target: LAMA2; (-) strand; PAM type: YTN; PAM sequence: TTT
tctgtaattgacaagttgat

SEQ ID NO: 234428 - DNA, 20 bp, Artificial Sequence
  Description of Artificial Sequence: Synthetic oligonucleotide
  Target: LAMA2; (-) strand; PAM type: YTN; PAM sequence: CTA
atattttctgtaattgacaa

SEQ ID NO: 234429 - DNA, 20 bp, Artificial Sequence
  Description of Artificial Sequence: Synthetic oligonucleotide
  Target: LAMA2; (-) strand; PAM type: YTN; PAM sequence: CTA
agcaataatcctaatatttt

SEQ ID NO: 234430 - DNA, 20 bp, Artificial Sequence
  Description of Artificial Sequence: Synthetic oligonucleotide
  Target: LAMA2; (-) strand; PAM type: YTN; PAM sequence: TTG
tatatagagtctaagcaata

SEQ ID NO: 234431 - DNA, 20 bp, Artificial Sequence
  Description of Artificial Sequence: Synthetic oligonucleotide
  Target: LAMA2; (-) strand; PAM type: YTN; PAM sequence: TTT
gtatatagagtctaagcaat

SEQ ID NO: 234432 - DNA, 20 bp, Artificial Sequence
  Description of Artificial Sequence: Synthetic oligonucleotide
  Target: LAMA2; (-) strand; PAM type: YTN; PAM sequence: TTC
catatttgtatatagagtct

SEQ ID NO: 234433 - DNA, 20 bp, Artificial Sequence
  Description of Artificial Sequence: Synthetic oligonucleotide
  Target: LAMA2; (-) strand; PAM type: YTN; PAM sequence: TTT
ccatatttgtatatagagtc

SEQ ID NO: 234434 - DNA, 20 bp, Artificial Sequence
  Description of Artificial Sequence: Synthetic oligonucleotide
  Target: LAMA2; (-) strand; PAM type: YTN; PAM sequence: TTT
tccatatttgtatatagagt

SEQ ID NO: 234435 - DNA, 20 bp, Artificial Sequence
  Description of Artificial Sequence: Synthetic oligonucleotide
  Target: LAMA2; (-) strand; PAM type: YTN; PAM sequence: CTC
cattttccatatttgtatat

SEQ ID NO: 234436 - DNA, 20 bp, Artificial Sequence
  Description of Artificial Sequence: Synthetic oligonucleotide
  Target: LAMA2; (-) strand; PAM type: YTN; PAM sequence: CTC
aagctccattttccatattt

SEQ ID NO: 234437 - DNA, 20 bp, Artificial Sequence
  Description of Artificial Sequence: Synthetic oligonucleotide
  Target: LAMA2; (-) strand; PAM type: YTN; PAM sequence: CTC
ctcaagctccattttccata

SEQ ID NO: 234438 - DNA, 20 bp, Artificial Sequence
  Description of Artificial Sequence: Synthetic oligonucleotide
  Target: LAMA2; (-) strand; PAM type: YTN; PAM sequence: TTG
accaacatctcctcaagctc

SEQ ID NO: 234439 - DNA, 20 bp, Artificial Sequence
  Description of Artificial Sequence: Synthetic oligonucleotide
  Target: LAMA2; (-) strand; PAM type: YTN; PAM sequence: TTT
gaccaacatctcctcaagct

SEQ ID NO: 234440 - DNA, 20 bp, Artificial Sequence
  Description of Artificial Sequence: Synthetic oligonucleotide
  Target: LAMA2; (-) strand; PAM type: YTN; PAM sequence: CTT
tgaccaacatctcctcaagc

SEQ ID NO: 234441 - DNA, 20 bp, Artificial Sequence
  Description of Artificial Sequence: Synthetic oligonucleotide
  Target: LAMA2; (-) strand; PAM type: YTN; PAM sequence: TTC
tttgaccaacatctcctcaa

SEQ ID NO: 234442 - DNA, 20 bp, Artificial Sequence
  Description of Artificial Sequence: Synthetic oligonucleotide
  Target: LAMA2; (-) strand; PAM type: YTN; PAM sequence: TTA
tattctttgaccaacatctc

SEQ ID NO: 234443 - DNA, 20 bp, Artificial Sequence
  Description of Artificial Sequence: Synthetic oligonucleotide
  Target: LAMA2; (-) strand; PAM type: YTN; PAM sequence: TTT
atattctttgaccaacatct

SEQ ID NO: 234444 - DNA, 20 bp, Artificial Sequence
  Description of Artificial Sequence: Synthetic oligonucleotide
  Target: LAMA2; (-) strand; PAM type: YTN; PAM sequence: TTT
tatattctttgaccaacatc

SEQ ID NO: 234445 - DNA, 20 bp, Artificial Sequence
  Description of Artificial Sequence: Synthetic oligonucleotide
  Target: LAMA2; (-) strand; PAM type: YTN; PAM sequence: CTG
aaattttatattctttgacc

SEQ ID NO: 234446 - DNA, 20 bp, Artificial Sequence
  Description of Artificial Sequence: Synthetic oligonucleotide
  Target: LAMA2; (-) strand; PAM type: YTN; PAM sequence: CTA
actgaaattttatattcttt

SEQ ID NO: 234447 - DNA, 20 bp, Artificial Sequence
  Description of Artificial Sequence: Synthetic oligonucleotide
  Target: LAMA2; (-) strand; PAM type: YTN; PAM sequence: CTA
tctaactgaaattttatatt

SEQ ID NO: 234448 - DNA, 20 bp, Artificial Sequence
  Description of Artificial Sequence: Synthetic oligonucleotide
  Target: LAMA2; (-) strand; PAM type: YTN; PAM sequence: CTA
ctatctaactgaaattttat

SEQ ID NO: 234449 - DNA, 20 bp, Artificial Sequence
  Description of Artificial Sequence: Synthetic oligonucleotide
  Target: LAMA2; (-) strand; PAM type: YTN; PAM sequence: TTC
ctactatctaactgaaattt

SEQ ID NO: 234450 - DNA, 20 bp, Artificial Sequence
  Description of Artificial Sequence: Synthetic oligonucleotide
  Target: LAMA2; (-) strand; PAM type: YTN; PAM sequence: TTC
aatgtattcctactatctaa

SEQ ID NO: 234451 - DNA, 20 bp, Artificial Sequence
  Description of Artificial Sequence: Synthetic oligonucleotide
  Target: LAMA2; (-) strand; PAM type: YTN; PAM sequence: CTT
caatgtattcctactatcta

SEQ ID NO: 234452 - DNA, 20 bp, Artificial Sequence
  Description of Artificial Sequence: Synthetic oligonucleotide
  Target: LAMA2; (-) strand; PAM type: YTN; PAM sequence: CTG
tacaataaatatcttcaatg

SEQ ID NO: 234453 - DNA, 20 bp, Artificial Sequence
  Description of Artificial Sequence: Synthetic oligonucleotide
  Target: LAMA2; (-) strand; PAM type: YTN; PAM sequence: CTA
cagtcaccatgctgtacaat

SEQ ID NO: 234454 - DNA, 20 bp, Artificial Sequence
  Description of Artificial Sequence: Synthetic oligonucleotide
  Target: LAMA2; (-) strand; PAM type: YTN; PAM sequence: TTA
actacagtcaccatgctgta

SEQ ID NO: 234455 - DNA, 20 bp, Artificial Sequence
  Description of Artificial Sequence: Synthetic oligonucleotide
  Target: LAMA2; (-) strand; PAM type: YTN; PAM sequence: TTA
ttaactacagtcaccatgct

SEQ ID NO: 234456 - DNA, 20 bp, Artificial Sequence
  Description of Artificial Sequence: Synthetic oligonucleotide
  Target: LAMA2; (-) strand; PAM type: YTN; PAM sequence: TTG
ttattaactacagtcaccat

SEQ ID NO: 234457 - DNA, 20 bp, Artificial Sequence
  Description of Artificial Sequence: Synthetic oligonucleotide
  Target: LAMA2; (-) strand; PAM type: YTN; PAM sequence: TTA
agagtaaatacattgttatt

SEQ ID NO: 234458 - DNA, 20 bp, Artificial Sequence
  Description of Artificial Sequence: Synthetic oligonucleotide
  Target: LAMA2; (-) strand; PAM type: YTN; PAM sequence: TTT
aagagtaaatacattgttat

SEQ ID NO: 234459 - DNA, 20 bp, Artificial Sequence
  Description of Artificial Sequence: Synthetic oligonucleotide
  Target: LAMA2; (-) strand; PAM type: YTN; PAM sequence: TTT
taagagtaaatacattgtta

SEQ ID NO: 234460 - DNA, 20 bp, Artificial Sequence
  Description of Artificial Sequence: Synthetic oligonucleotide
  Target: LAMA2; (-) strand; PAM type: YTN; PAM sequence: TTT
ttaagagtaaatacattgtt

SEQ ID NO: 234461 - DNA, 20 bp, Artificial Sequence
  Description of Artificial Sequence: Synthetic oligonucleotide
  Target: LAMA2; (-) strand; PAM type: YTN; PAM sequence: TTT
tttaagagtaaatacattgt

SEQ ID NO: 234462 - DNA, 20 bp, Artificial Sequence
  Description of Artificial Sequence: Synthetic oligonucleotide
  Target: LAMA2; (-) strand; PAM type: YTN; PAM sequence: CTC
agcattttttaagagtaaat

SEQ ID NO: 234463 - DNA, 20 bp, Artificial Sequence
  Description of Artificial Sequence: Synthetic oligonucleotide
  Target: LAMA2; (-) strand; PAM type: YTN; PAM sequence: CTC
tcagcattttttaagagtaa

SEQ ID NO: 234464 - DNA, 20 bp, Artificial Sequence
  Description of Artificial Sequence: Synthetic oligonucleotide
  Target: LAMA2; (-) strand; PAM type: YTN; PAM sequence: CTA
ctctcagcattttttaagag

SEQ ID NO: 234465 - DNA, 20 bp, Artificial Sequence
  Description of Artificial Sequence: Synthetic oligonucleotide
  Target: LAMA2; (-) strand; PAM type: YTN; PAM sequence: TTA
aaatctactctcagcatttt

SEQ ID NO: 234466 - DNA, 20 bp, Artificial Sequence
  Description of Artificial Sequence: Synthetic oligonucleotide
  Target: LAMA2; (-) strand; PAM type: YTN; PAM sequence: CTT
aaaatctactctcagcattt

SEQ ID NO: 234467 - DNA, 20 bp, Artificial Sequence
  Description of Artificial Sequence: Synthetic oligonucleotide
  Target: LAMA2; (-) strand; PAM type: YTN; PAM sequence: TTG
gtgagaacacttaaaatcta

SEQ ID NO: 234468 - DNA, 20 bp, Artificial Sequence
  Description of Artificial Sequence: Synthetic oligonucleotide
  Target: LAMA2; (-) strand; PAM type: YTN; PAM sequence: TTT
ggtgagaacacttaaaatct

SEQ ID NO: 234469 - DNA, 20 bp, Artificial Sequence
  Description of Artificial Sequence: Synthetic oligonucleotide
  Target: LAMA2; (-) strand; PAM type: YTN; PAM sequence: TTT
tggtgagaacacttaaaatc

SEQ ID NO: 234470 - DNA, 20 bp, Artificial Sequence
  Description of Artificial Sequence: Synthetic oligonucleotide
  Target: LAMA2; (-) strand; PAM type: YTN; PAM sequence: TTT
ttggtgagaacacttaaaat

SEQ ID NO: 234471 - DNA, 20 bp, Artificial Sequence
  Description of Artificial Sequence: Synthetic oligonucleotide
  Target: LAMA2; (-) strand; PAM type: YTN; PAM sequence: TTT
tttggtgagaacacttaaaa

SEQ ID NO: 234472 - DNA, 20 bp, Artificial Sequence
  Description of Artificial Sequence: Synthetic oligonucleotide
  Target: LAMA2; (-) strand; PAM type: YTN; PAM sequence: TTT
ttttggtgagaacacttaaa

SEQ ID NO: 234473 - DNA, 20 bp, Artificial Sequence
  Description of Artificial Sequence: Synthetic oligonucleotide
  Target: LAMA2; (-) strand; PAM type: YTN; PAM sequence: TTA
tcaatttttttggtgagaac

SEQ ID NO: 234474 - DNA, 20 bp, Artificial Sequence
  Description of Artificial Sequence: Synthetic oligonucleotide
  Target: LAMA2; (-) strand; PAM type: YTN; PAM sequence: CTA
acataattatcaattttttt

SEQ ID NO: 234475 - DNA, 20 bp, Artificial Sequence
  Description of Artificial Sequence: Synthetic oligonucleotide
  Target: LAMA2; (-) strand; PAM type: YTN; PAM sequence: TTA
cctaacataattatcaattt

SEQ ID NO: 234476 - DNA, 20 bp, Artificial Sequence
  Description of Artificial Sequence: Synthetic oligonucleotide
  Target: LAMA2; (-) strand; PAM type: YTN; PAM sequence: TTA
acatattacctaacataatt

SEQ ID NO: 234477 - DNA, 20 bp, Artificial Sequence
  Description of Artificial Sequence: Synthetic oligonucleotide
  Target: LAMA2; (-) strand; PAM type: YTN; PAM sequence: CTA
attaacatattacctaacat

SEQ ID NO: 234478 - DNA, 20 bp, Artificial Sequence
  Description of Artificial Sequence: Synthetic oligonucleotide
  Target: LAMA2; (-) strand; PAM type: YTN; PAM sequence: TTA
tatcaagctaattaacatat

SEQ ID NO: 234479 - DNA, 20 bp, Artificial Sequence
  Description of Artificial Sequence: Synthetic oligonucleotide
  Target: LAMA2; (-) strand; PAM type: YTN; PAM sequence: TTG
tgaaatggttatatcaagct

SEQ ID NO: 234480 - DNA, 20 bp, Artificial Sequence
  Description of Artificial Sequence: Synthetic oligonucleotide
  Target: LAMA2; (-) strand; PAM type: YTN; PAM sequence: TTA
tatatatacaaattgtgaaa

SEQ ID NO: 234481 - DNA, 20 bp, Artificial Sequence
  Description of Artificial Sequence: Synthetic oligonucleotide
  Target: LAMA2; (-) strand; PAM type: YTN; PAM sequence: TTG
tatatatatattatatatat

SEQ ID NO: 234482 - DNA, 20 bp, Artificial Sequence
  Description of Artificial Sequence: Synthetic oligonucleotide
  Target: LAMA2; (-) strand; PAM type: YTN; PAM sequence: TTG
aatatcattgtatatatata

SEQ ID NO: 234483 - DNA, 20 bp, Artificial Sequence
  Description of Artificial Sequence: Synthetic oligonucleotide
  Target: LAMA2; (-) strand; PAM type: YTN; PAM sequence: TTT
gaatatcattgtatatatat

SEQ ID NO: 234484 - DNA, 20 bp, Artificial Sequence
  Description of Artificial Sequence: Synthetic oligonucleotide
  Target: LAMA2; (-) strand; PAM type: YTN; PAM sequence: TTT
tgaatatcattgtatatata

SEQ ID NO: 234485 - DNA, 20 bp, Artificial Sequence
  Description of Artificial Sequence: Synthetic oligonucleotide
  Target: LAMA2; (-) strand; PAM type: YTN; PAM sequence: TTA
tcatgtgtgacatgatattt

SEQ ID NO: 234486 - DNA, 20 bp, Artificial Sequence
  Description of Artificial Sequence: Synthetic oligonucleotide
  Target: LAMA2; (-) strand; PAM type: YTN; PAM sequence: TTT
atcatgtgtgacatgatatt

SEQ ID NO: 234487 - DNA, 20 bp, Artificial Sequence
  Description of Artificial Sequence: Synthetic oligonucleotide
  Target: LAMA2; (-) strand; PAM type: YTN; PAM sequence: TTG
tatatatttatcatgtgtga

SEQ ID NO: 234488 - DNA, 20 bp, Artificial Sequence
  Description of Artificial Sequence: Synthetic oligonucleotide
  Target: LAMA2; (-) strand; PAM type: YTN; PAM sequence: TTG
acaaaattgtatatatttat

SEQ ID NO: 234489 - DNA, 20 bp, Artificial Sequence
  Description of Artificial Sequence: Synthetic oligonucleotide
  Target: LAMA2; (-) strand; PAM type: YTN; PAM sequence: TTT
gacaaaattgtatatattta

SEQ ID NO: 234490 - DNA, 20 bp, Artificial Sequence
  Description of Artificial Sequence: Synthetic oligonucleotide
  Target: LAMA2; (-) strand; PAM type: YTN; PAM sequence: TTT
tgacaaaattgtatatattt

SEQ ID NO: 234491 - DNA, 20 bp, Artificial Sequence
  Description of Artificial Sequence: Synthetic oligonucleotide
  Target: LAMA2; (-) strand; PAM type: YTN; PAM sequence: TTT
ttgacaaaattgtatatatt

SEQ ID NO: 234492 - DNA, 20 bp, Artificial Sequence
  Description of Artificial Sequence: Synthetic oligonucleotide
  Target: LAMA2; (-) strand; PAM type: YTN; PAM sequence: CTT
tttgacaaaattgtatatat

SEQ ID NO: 234493 - DNA, 20 bp, Artificial Sequence
  Description of Artificial Sequence: Synthetic oligonucleotide
  Target: LAMA2; (-) strand; PAM type: YTN; PAM sequence: TTC
ctttttgacaaaattgtata

SEQ ID NO: 234494 - DNA, 20 bp, Artificial Sequence
  Description of Artificial Sequence: Synthetic oligonucleotide
  Target: LAMA2; (-) strand; PAM type: YTN; PAM sequence: TTT
cctttttgacaaaattgtat

SEQ ID NO: 234495 - DNA, 20 bp, Artificial Sequence
  Description of Artificial Sequence: Synthetic oligonucleotide
  Target: LAMA2; (-) strand; PAM type: YTN; PAM sequence: TTA
atttcctttttgacaaaatt

SEQ ID NO: 234496 - DNA, 20 bp, Artificial Sequence
  Description of Artificial Sequence: Synthetic oligonucleotide
  Target: LAMA2; (-) strand; PAM type: YTN; PAM sequence: TTT
aatttcctttttgacaaaat

SEQ ID NO: 234497 - DNA, 20 bp, Artificial Sequence
  Description of Artificial Sequence: Synthetic oligonucleotide
  Target: LAMA2; (-) strand; PAM type: YTN; PAM sequence: TTA
aagtttaatttcctttttga

SEQ ID NO: 234498 - DNA, 20 bp, Artificial Sequence
  Description of Artificial Sequence: Synthetic oligonucleotide
  Target: LAMA2; (-) strand; PAM type: YTN; PAM sequence: TTT
aaagtttaatttcctttttg

SEQ ID NO: 234499 - DNA, 20 bp, Artificial Sequence
  Description of Artificial Sequence: Synthetic oligonucleotide
  Target: LAMA2; (-) strand; PAM type: YTN; PAM sequence: TTT
taaagtttaatttccttttt

SEQ ID NO: 234500 - DNA, 20 bp, Artificial Sequence
  Description of Artificial Sequence: Synthetic oligonucleotide
  Target: LAMA2; (-) strand; PAM type: YTN; PAM sequence: CTT
ttaaagtttaatttcctttt

SEQ ID NO: 234501 - DNA, 20 bp, Artificial Sequence
  Description of Artificial Sequence: Synthetic oligonucleotide
  Target: LAMA2; (-) strand; PAM type: YTN; PAM sequence: TTG
cttttaaagtttaatttcct

SEQ ID NO: 234502 - DNA, 20 bp, Artificial Sequence
  Description of Artificial Sequence: Synthetic oligonucleotide
  Target: LAMA2; (-) strand; PAM type: YTN; PAM sequence: TTT
gcttttaaagtttaatttcc

SEQ ID NO: 234503 - DNA, 20 bp, Artificial Sequence
  Description of Artificial Sequence: Synthetic oligonucleotide
  Target: LAMA2; (-) strand; PAM type: YTN; PAM sequence: TTG
tttgcttttaaagtttaatt

SEQ ID NO: 234504 - DNA, 20 bp, Artificial Sequence
  Description of Artificial Sequence: Synthetic oligonucleotide
  Target: LAMA2; (-) strand; PAM type: YTN; PAM sequence: CTT
gtttgcttttaaagtttaat

SEQ ID NO: 234505 - DNA, 20 bp, Artificial Sequence
  Description of Artificial Sequence: Synthetic oligonucleotide
  Target: LAMA2; (-) strand; PAM type: YTN; PAM sequence: CTC
aatacttgtttgcttttaaa

SEQ ID NO: 234506 - DNA, 20 bp, Artificial Sequence
  Description of Artificial Sequence: Synthetic oligonucleotide
  Target: LAMA2; (-) strand; PAM type: YTN; PAM sequence: TTC
ctcaatacttgtttgctttt

SEQ ID NO: 234507 - DNA, 20 bp, Artificial Sequence
  Description of Artificial Sequence: Synthetic oligonucleotide
  Target: LAMA2; (-) strand; PAM type: YTN; PAM sequence: TTT
cctcaatacttgtttgcttt

SEQ ID NO: 234508 - DNA, 20 bp, Artificial Sequence
  Description of Artificial Sequence: Synthetic oligonucleotide
  Target: LAMA2; (-) strand; PAM type: YTN; PAM sequence: TTT
tcctcaatacttgtttgctt

SEQ ID NO: 234509 - DNA, 20 bp, Artificial Sequence
  Description of Artificial Sequence: Synthetic oligonucleotide
  Target: LAMA2; (-) strand; PAM type: YTN; PAM sequence: TTA
ttttcctcaatacttgtttg

SEQ ID NO: 234510 - DNA, 20 bp, Artificial Sequence
  Description of Artificial Sequence: Synthetic oligonucleotide
  Target: LAMA2; (-) strand; PAM type: YTN; PAM sequence: TTA
tgatgttattttcctcaata

SEQ ID NO: 234511 - DNA, 20 bp, Artificial Sequence
  Description of Artificial Sequence: Synthetic oligonucleotide
  Target: LAMA2; (-) strand; PAM type: YTN; PAM sequence: TTA
ttatgatgttattttcctca

SEQ ID NO: 234512 - DNA, 20 bp, Artificial Sequence
  Description of Artificial Sequence: Synthetic oligonucleotide
  Target: LAMA2; (-) strand; PAM type: YTN; PAM sequence: TTC
aatattattatgatgttatt

SEQ ID NO: 234513 - DNA, 20 bp, Artificial Sequence
  Description of Artificial Sequence: Synthetic oligonucleotide
  Target: LAMA2; (-) strand; PAM type: YTN; PAM sequence: TTA
aatgattcaatattattatg

SEQ ID NO: 234514 - DNA, 20 bp, Artificial Sequence
  Description of Artificial Sequence: Synthetic oligonucleotide
  Target: LAMA2; (-) strand; PAM type: YTN; PAM sequence: TTG
gttaaatgattcaatattat

SEQ ID NO: 234515 - DNA, 20 bp, Artificial Sequence
  Description of Artificial Sequence: Synthetic oligonucleotide
  Target: LAMA2; (-) strand; PAM type: YTN; PAM sequence: TTC
attggttaaatgattcaata

SEQ ID NO: 234516 - DNA, 20 bp, Artificial Sequence
  Description of Artificial Sequence: Synthetic oligonucleotide
  Target: LAMA2; (-) strand; PAM type: YTN; PAM sequence: CTA
tgttcattggttaaatgatt

SEQ ID NO: 234517 - DNA, 20 bp, Artificial Sequence
  Description of Artificial Sequence: Synthetic oligonucleotide
  Target: LAMA2; (-) strand; PAM type: YTN; PAM sequence: CTG
acatgaataaagaagataga

SEQ ID NO: 234518 - DNA, 20 bp, Artificial Sequence
  Description of Artificial Sequence: Synthetic oligonucleotide
  Target: LAMA2; (-) strand; PAM type: YTN; PAM sequence: CTG
gaacactgacatgaataaag

SEQ ID NO: 234519 - DNA, 20 bp, Artificial Sequence
  Description of Artificial Sequence: Synthetic oligonucleotide
  Target: LAMA2; (-) strand; PAM type: YTN; PAM sequence: CTG
tactggaacactgacatgaa

SEQ ID NO: 234520 - DNA, 20 bp, Artificial Sequence
  Description of Artificial Sequence: Synthetic oligonucleotide
  Target: LAMA2; (-) strand; PAM type: YTN; PAM sequence: CTC
tgtactggaacactgacatg

SEQ ID NO: 234521 - DNA, 20 bp, Artificial Sequence
  Description of Artificial Sequence: Synthetic oligonucleotide
  Target: LAMA2; (-) strand; PAM type: YTN; PAM sequence: TTA
acaaaagacatgcaagatct

SEQ ID NO: 234522 - DNA, 20 bp, Artificial Sequence
  Description of Artificial Sequence: Synthetic oligonucleotide
  Target: LAMA2; (-) strand; PAM type: YTN; PAM sequence: TTT
aacaaaagacatgcaagatc

SEQ ID NO: 234523 - DNA, 20 bp, Artificial Sequence
  Description of Artificial Sequence: Synthetic oligonucleotide
  Target: LAMA2; (-) strand; PAM type: YTN; PAM sequence: TTA
atttaacaaaagacatgcaa

SEQ ID NO: 234524 - DNA, 20 bp, Artificial Sequence
  Description of Artificial Sequence: Synthetic oligonucleotide
  Target: LAMA2; (-) strand; PAM type: YTN; PAM sequence: CTA
aagattaatttaacaaaaga

SEQ ID NO: 234525 - DNA, 20 bp, Artificial Sequence
  Description of Artificial Sequence: Synthetic oligonucleotide
  Target: LAMA2; (-) strand; PAM type: YTN; PAM sequence: TTC
taaagattaatttaacaaaa

SEQ ID NO: 234526 - DNA, 20 bp, Artificial Sequence
  Description of Artificial Sequence: Synthetic oligonucleotide
  Target: LAMA2; (-) strand; PAM type: YTN; PAM sequence: TTA
cagtcatgcaaagcaaaatt

SEQ ID NO: 234527 - DNA, 20 bp, Artificial Sequence
  Description of Artificial Sequence: Synthetic oligonucleotide
  Target: LAMA2; (-) strand; PAM type: YTN; PAM sequence: TTT
acagtcatgcaaagcaaaat

SEQ ID NO: 234528 - DNA, 20 bp, Artificial Sequence
  Description of Artificial Sequence: Synthetic oligonucleotide
  Target: LAMA2; (-) strand; PAM type: YTN; PAM sequence: TTT
tacagtcatgcaaagcaaaa

SEQ ID NO: 234529 - DNA, 20 bp, Artificial Sequence
  Description of Artificial Sequence: Synthetic oligonucleotide
  Target: LAMA2; (-) strand; PAM type: YTN; PAM sequence: TTT
ttacagtcatgcaaagcaaa

SEQ ID NO: 234530 - DNA, 20 bp, Artificial Sequence
  Description of Artificial Sequence: Synthetic oligonucleotide
  Target: LAMA2; (-) strand; PAM type: YTN; PAM sequence: TTT
tttacagtcatgcaaagcaa

SEQ ID NO: 234531 - DNA, 20 bp, Artificial Sequence
  Description of Artificial Sequence: Synthetic oligonucleotide
  Target: LAMA2; (-) strand; PAM type: YTN; PAM sequence: TTT
ttttacagtcatgcaaagca

SEQ ID NO: 234532 - DNA, 20 bp, Artificial Sequence
  Description of Artificial Sequence: Synthetic oligonucleotide
  Target: LAMA2; (-) strand; PAM type: YTN; PAM sequence: TTT
tttttacagtcatgcaaagc

SEQ ID NO: 234533 - DNA, 20 bp, Artificial Sequence
  Description of Artificial Sequence: Synthetic oligonucleotide
  Target: LAMA2; (-) strand; PAM type: YTN; PAM sequence: TTA
aaaattttttttacagtcat

SEQ ID NO: 234534 - DNA, 20 bp, Artificial Sequence
  Description of Artificial Sequence: Synthetic oligonucleotide
  Target: LAMA2; (-) strand; PAM type: YTN; PAM sequence: TTT
aaaaattttttttacagtca

SEQ ID NO: 234535 - DNA, 20 bp, Artificial Sequence
  Description of Artificial Sequence: Synthetic oligonucleotide
  Target: LAMA2; (-) strand; PAM type: YTN; PAM sequence: TTA
tttaaaaattttttttacag

SEQ ID NO: 234536 - DNA, 20 bp, Artificial Sequence
  Description of Artificial Sequence: Synthetic oligonucleotide
  Target: LAMA2; (-) strand; PAM type: YTN; PAM sequence: TTG
gaaaattatttaaaaatttt

SEQ ID NO: 234537 - DNA, 20 bp, Artificial Sequence
  Description of Artificial Sequence: Synthetic oligonucleotide
  Target: LAMA2; (-) strand; PAM type: YTN; PAM sequence: TTA
aataattggaaaattattta

SEQ ID NO: 234538 - DNA, 20 bp, Artificial Sequence
  Description of Artificial Sequence: Synthetic oligonucleotide
  Target: LAMA2; (-) strand; PAM type: YTN; PAM sequence: TTA
cattaaataattggaaaatt

SEQ ID NO: 234539 - DNA, 20 bp, Artificial Sequence
  Description of Artificial Sequence: Synthetic oligonucleotide
  Target: LAMA2; (-) strand; PAM type: YTN; PAM sequence: TTA
acaattacattaaataattg

SEQ ID NO: 234540 - DNA, 20 bp, Artificial Sequence
  Description of Artificial Sequence: Synthetic oligonucleotide
  Target: LAMA2; (-) strand; PAM type: YTN; PAM sequence: TTT
aacaattacattaaataatt

SEQ ID NO: 234541 - DNA, 20 bp, Artificial Sequence
  Description of Artificial Sequence: Synthetic oligonucleotide
  Target: LAMA2; (-) strand; PAM type: YTN; PAM sequence: CTT
taacaattacattaaataat

SEQ ID NO: 234542 - DNA, 20 bp, Artificial Sequence
  Description of Artificial Sequence: Synthetic oligonucleotide
  Target: LAMA2; (-) strand; PAM type: YTN; PAM sequence: TTC
tttaacaattacattaaata

SEQ ID NO: 234543 - DNA, 20 bp, Artificial Sequence
  Description of Artificial Sequence: Synthetic oligonucleotide
  Target: LAMA2; (-) strand; PAM type: YTN; PAM sequence: TTC
aaaattctttaacaattaca

SEQ ID NO: 234544 - DNA, 20 bp, Artificial Sequence
  Description of Artificial Sequence: Synthetic oligonucleotide
  Target: LAMA2; (-) strand; PAM type: YTN; PAM sequence: CTA
tagggcataaagtcaatatt

SEQ ID NO: 234545 - DNA, 20 bp, Artificial Sequence
  Description of Artificial Sequence: Synthetic oligonucleotide
  Target: LAMA2; (-) strand; PAM type: YTN; PAM sequence: TTA
aggatggctatagggcataa

SEQ ID NO: 234546 - DNA, 20 bp, Artificial Sequence
  Description of Artificial Sequence: Synthetic oligonucleotide
  Target: LAMA2; (-) strand; PAM type: YTN; PAM sequence: TTA
aaaaaaaaaaaagaaattaa

SEQ ID NO: 234547 - DNA, 20 bp, Artificial Sequence
  Description of Artificial Sequence: Synthetic oligonucleotide
  Target: LAMA2; (-) strand; PAM type: YTN; PAM sequence: TTT
aaaaaaaaaaaaagaaatta

SEQ ID NO: 234548 - DNA, 20 bp, Artificial Sequence
  Description of Artificial Sequence: Synthetic oligonucleotide
  Target: LAMA2; (-) strand; PAM type: YTN; PAM sequence: TTA
tttaaaaaaaaaaaaagaaa

SEQ ID NO: 234549 - DNA, 20 bp, Artificial Sequence
  Description of Artificial Sequence: Synthetic oligonucleotide
  Target: LAMA2; (-) strand; PAM type: YTN; PAM sequence: TTA
aaagggaagttatttaaaaa

SEQ ID NO: 234550 - DNA, 20 bp, Artificial Sequence
  Description of Artificial Sequence: Synthetic oligonucleotide
  Target: LAMA2; (-) strand; PAM type: YTN; PAM sequence: TTT
aaaagggaagttatttaaaa

SEQ ID NO: 234551 - DNA, 20 bp, Artificial Sequence
  Description of Artificial Sequence: Synthetic oligonucleotide
  Target: LAMA2; (-) strand; PAM type: YTN; PAM sequence: TTT
taaaagggaagttatttaaa

SEQ ID NO: 234552 - DNA, 20 bp, Artificial Sequence
  Description of Artificial Sequence: Synthetic oligonucleotide
  Target: LAMA2; (-) strand; PAM type: YTN; PAM sequence: CTT
ttaaaagggaagttatttaa

SEQ ID NO: 234553 - DNA, 20 bp, Artificial Sequence
  Description of Artificial Sequence: Synthetic oligonucleotide
  Target: LAMA2; (-) strand; PAM type: YTN; PAM sequence: CTC
agtaacttttaaaagggaag

SEQ ID NO: 234554 - DNA, 20 bp, Artificial Sequence
  Description of Artificial Sequence: Synthetic oligonucleotide
  Target: LAMA2; (-) strand; PAM type: YTN; PAM sequence: TTC
tcagtaacttttaaaaggga

SEQ ID NO: 234555 - DNA, 20 bp, Artificial Sequence
  Description of Artificial Sequence: Synthetic oligonucleotide
  Target: LAMA2; (-) strand; PAM type: YTN; PAM sequence: TTA
ttctcagtaacttttaaaag

SEQ ID NO: 234556 - DNA, 20 bp, Artificial Sequence
  Description of Artificial Sequence: Synthetic oligonucleotide
  Target: LAMA2; (-) strand; PAM type: YTN; PAM sequence: TTT
attctcagtaacttttaaaa

SEQ ID NO: 234557 - DNA, 20 bp, Artificial Sequence
  Description of Artificial Sequence: Synthetic oligonucleotide
  Target: LAMA2; (-) strand; PAM type: YTN; PAM sequence: CTT
tattctcagtaacttttaaa

SEQ ID NO: 234558 - DNA, 20 bp, Artificial Sequence
  Description of Artificial Sequence: Synthetic oligonucleotide
  Target: LAMA2; (-) strand; PAM type: YTN; PAM sequence: TTC
tttattctcagtaactttta

SEQ ID NO: 234559 - DNA, 20 bp, Artificial Sequence
  Description of Artificial Sequence: Synthetic oligonucleotide
  Target: LAMA2; (-) strand; PAM type: YTN; PAM sequence: CTG
tattctttattctcagtaac

SEQ ID NO: 234560 - DNA, 20 bp, Artificial Sequence
  Description of Artificial Sequence: Synthetic oligonucleotide
  Target: LAMA2; (-) strand; PAM type: YTN; PAM sequence: TTC
tgtattctttattctcagta

SEQ ID NO: 234561 - DNA, 20 bp, Artificial Sequence
  Description of Artificial Sequence: Synthetic oligonucleotide
  Target: LAMA2; (-) strand; PAM type: YTN; PAM sequence: CTA
taaccatgttctgtattctt

SEQ ID NO: 234562 - DNA, 20 bp, Artificial Sequence
  Description of Artificial Sequence: Synthetic oligonucleotide
  Target: LAMA2; (-) strand; PAM type: YTN; PAM sequence: TTG
atagcaatgtaagtgcctat

SEQ ID NO: 234563 - DNA, 20 bp, Artificial Sequence
  Description of Artificial Sequence: Synthetic oligonucleotide
  Target: LAMA2; (-) strand; PAM type: YTN; PAM sequence: TTT
gatagcaatgtaagtgccta

SEQ ID NO: 234564 - DNA, 20 bp, Artificial Sequence
  Description of Artificial Sequence: Synthetic oligonucleotide
  Target: LAMA2; (-) strand; PAM type: YTN; PAM sequence: CTG
catttgatagcaatgtaagt

SEQ ID NO: 234565 - DNA, 20 bp, Artificial Sequence
  Description of Artificial Sequence: Synthetic oligonucleotide
  Target: LAMA2; (-) strand; PAM type: YTN; PAM sequence: TTC
ctgcatttgatagcaatgta

SEQ ID NO: 234566 - DNA, 20 bp, Artificial Sequence
  Description of Artificial Sequence: Synthetic oligonucleotide
  Target: LAMA2; (-) strand; PAM type: YTN; PAM sequence: TTG
aagtgaattcctgcatttga

SEQ ID NO: 234567 - DNA, 20 bp, Artificial Sequence
  Description of Artificial Sequence: Synthetic oligonucleotide
  Target: LAMA2; (-) strand; PAM type: YTN; PAM sequence: TTA
ttgaagtgaattcctgcatt

SEQ ID NO: 234568 - DNA, 20 bp, Artificial Sequence
  Description of Artificial Sequence: Synthetic oligonucleotide
  Target: LAMA2; (-) strand; PAM type: YTN; PAM sequence: CTT
attgaagtgaattcctgcat

SEQ ID NO: 234569 - DNA, 20 bp, Artificial Sequence
  Description of Artificial Sequence: Synthetic oligonucleotide
  Target: LAMA2; (-) strand; PAM type: YTN; PAM sequence: TTC
ttattgaagtgaattcctgc

SEQ ID NO: 234570 - DNA, 20 bp, Artificial Sequence
  Description of Artificial Sequence: Synthetic oligonucleotide
  Target: LAMA2; (-) strand; PAM type: YTN; PAM sequence: CTT
cttattgaagtgaattcctg

SEQ ID NO: 234571 - DNA, 20 bp, Artificial Sequence
  Description of Artificial Sequence: Synthetic oligonucleotide
  Target: LAMA2; (-) strand; PAM type: YTN; PAM sequence: TTA
cagagaaagcacttcttatt

SEQ ID NO: 234572 - DNA, 20 bp, Artificial Sequence
  Description of Artificial Sequence: Synthetic oligonucleotide
  Target: LAMA2; (-) strand; PAM type: YTN; PAM sequence: CTT
acagagaaagcacttcttat

SEQ ID NO: 234573 - DNA, 20 bp, Artificial Sequence
  Description of Artificial Sequence: Synthetic oligonucleotide
  Target: LAMA2; (-) strand; PAM type: YTN; PAM sequence: TTG
ccatgaaccatgcttacaga

SEQ ID NO: 234574 - DNA, 20 bp, Artificial Sequence
  Description of Artificial Sequence: Synthetic oligonucleotide
  Target: LAMA2; (-) strand; PAM type: YTN; PAM sequence: CTA
ttgccatgaaccatgcttac

SEQ ID NO: 234575 - DNA, 20 bp, Artificial Sequence
  Description of Artificial Sequence: Synthetic oligonucleotide
  Target: LAMA2; (-) strand; PAM type: YTN; PAM sequence: TTC
tattgccatgaaccatgctt

SEQ ID NO: 234576 - DNA, 20 bp, Artificial Sequence
  Description of Artificial Sequence: Synthetic oligonucleotide
  Target: LAMA2; (-) strand; PAM type: YTN; PAM sequence: CTT
ctattgccatgaaccatgct

SEQ ID NO: 234577 - DNA, 20 bp, Artificial Sequence
  Description of Artificial Sequence: Synthetic oligonucleotide
  Target: LAMA2; (-) strand; PAM type: YTN; PAM sequence: TTG
gagcttctattgccatgaac

SEQ ID NO: 234578 - DNA, 20 bp, Artificial Sequence
  Description of Artificial Sequence: Synthetic oligonucleotide
  Target: LAMA2; (-) strand; PAM type: YTN; PAM sequence: CTA
agttggagcttctattgcca

SEQ ID NO: 234579 - DNA, 20 bp, Artificial Sequence
  Description of Artificial Sequence: Synthetic oligonucleotide
  Target: LAMA2; (-) strand; PAM type: YTN; PAM sequence: CTC
ctaagttggagcttctattg

SEQ ID NO: 234580 - DNA, 20 bp, Artificial Sequence
  Description of Artificial Sequence: Synthetic oligonucleotide
  Target: LAMA2; (-) strand; PAM type: YTN; PAM sequence: CTC
tcctaagttggagcttctat

SEQ ID NO: 234581 - DNA, 20 bp, Artificial Sequence
  Description of Artificial Sequence: Synthetic oligonucleotide
  Target: LAMA2; (-) strand; PAM type: YTN; PAM sequence: TTG
tcacggaaaacatcctctcc

SEQ ID NO: 234582 - DNA, 20 bp, Artificial Sequence
  Description of Artificial Sequence: Synthetic oligonucleotide
  Target: LAMA2; (-) strand; PAM type: YTN; PAM sequence: TTT
gtcacggaaaacatcctctc

SEQ ID NO: 234583 - DNA, 20 bp, Artificial Sequence
  Description of Artificial Sequence: Synthetic oligonucleotide
  Target: LAMA2; (-) strand; PAM type: YTN; PAM sequence: TTT
tgtcacggaaaacatcctct

SEQ ID NO: 234584 - DNA, 20 bp, Artificial Sequence
  Description of Artificial Sequence: Synthetic oligonucleotide
  Target: LAMA2; (-) strand; PAM type: YTN; PAM sequence: TTT
ttgtcacggaaaacatcctc

SEQ ID NO: 234585 - DNA, 20 bp, Artificial Sequence
  Description of Artificial Sequence: Synthetic oligonucleotide
  Target: LAMA2; (-) strand; PAM type: YTN; PAM sequence: TTA
tttttgtcacggaaaacatc

SEQ ID NO: 234586 - DNA, 20 bp, Artificial Sequence
  Description of Artificial Sequence: Synthetic oligonucleotide
  Target: LAMA2; (-) strand; PAM type: YTN; PAM sequence: TTA
ttatttttgtcacggaaaac

SEQ ID NO: 234587 - DNA, 20 bp, Artificial Sequence
  Description of Artificial Sequence: Synthetic oligonucleotide
  Target: LAMA2; (-) strand; PAM type: YTN; PAM sequence: TTG
ttattatttttgtcacggaa

SEQ ID NO: 234588 - DNA, 20 bp, Artificial Sequence
  Description of Artificial Sequence: Synthetic oligonucleotide
  Target: LAMA2; (-) strand; PAM type: YTN; PAM sequence: TTG
ttgttattatttttgtcacg

SEQ ID NO: 234589 - DNA, 20 bp, Artificial Sequence
  Description of Artificial Sequence: Synthetic oligonucleotide
  Target: LAMA2; (-) strand; PAM type: YTN; PAM sequence: TTT
gttgttattatttttgtcac

SEQ ID NO: 234590 - DNA, 20 bp, Artificial Sequence
  Description of Artificial Sequence: Synthetic oligonucleotide
  Target: LAMA2; (-) strand; PAM type: YTN; PAM sequence: TTT
tgttgttattatttttgtca

SEQ ID NO: 234591 - DNA, 20 bp, Artificial Sequence
  Description of Artificial Sequence: Synthetic oligonucleotide
  Target: LAMA2; (-) strand; PAM type: YTN; PAM sequence: TTT
ttgttgttattatttttgtc

SEQ ID NO: 234592 - DNA, 20 bp, Artificial Sequence
  Description of Artificial Sequence: Synthetic oligonucleotide
  Target: LAMA2; (-) strand; PAM type: YTN; PAM sequence: TTT
tttgttgttattatttttgt

SEQ ID NO: 234593 - DNA, 20 bp, Artificial Sequence
  Description of Artificial Sequence: Synthetic oligonucleotide
  Target: LAMA2; (-) strand; PAM type: YTN; PAM sequence: TTT
ttttgttgttattatttttg

SEQ ID NO: 234594 - DNA, 20 bp, Artificial Sequence
  Description of Artificial Sequence: Synthetic oligonucleotide
  Target: LAMA2; (-) strand; PAM type: YTN; PAM sequence: TTT
tttttgttgttattattttt

SEQ ID NO: 234595 - DNA, 20 bp, Artificial Sequence
  Description of Artificial Sequence: Synthetic oligonucleotide
  Target: LAMA2; (-) strand; PAM type: YTN; PAM sequence: TTC
aaccaccattttttttgttg

SEQ ID NO: 234596 - DNA, 20 bp, Artificial Sequence
  Description of Artificial Sequence: Synthetic oligonucleotide
  Target: LAMA2; (-) strand; PAM type: YTN; PAM sequence: CTT
caaccaccattttttttgtt

SEQ ID NO: 234597 - DNA, 20 bp, Artificial Sequence
  Description of Artificial Sequence: Synthetic oligonucleotide
  Target: LAMA2; (-) strand; PAM type: YTN; PAM sequence: TTC
cttcaaccaccatttttttt

SEQ ID NO: 234598 - DNA, 20 bp, Artificial Sequence
  Description of Artificial Sequence: Synthetic oligonucleotide
  Target: LAMA2; (-) strand; PAM type: YTN; PAM sequence: TTT
ccttcaaccaccattttttt

SEQ ID NO: 234599 - DNA, 20 bp, Artificial Sequence
  Description of Artificial Sequence: Synthetic oligonucleotide
  Target: LAMA2; (-) strand; PAM type: YTN; PAM sequence: TTT
tccttcaaccaccatttttt

SEQ ID NO: 234600 - DNA, 20 bp, Artificial Sequence
  Description of Artificial Sequence: Synthetic oligonucleotide
  Target: LAMA2; (-) strand; PAM type: YTN; PAM sequence: CTG
ttttccttcaaccaccattt

SEQ ID NO: 234601 - DNA, 20 bp, Artificial Sequence
  Description of Artificial Sequence: Synthetic oligonucleotide
  Target: LAMA2; (-) strand; PAM type: YTN; PAM sequence: TTG
gactgttttccttcaaccac

SEQ ID NO: 234602 - DNA, 20 bp, Artificial Sequence
  Description of Artificial Sequence: Synthetic oligonucleotide
  Target: LAMA2; (-) strand; PAM type: YTN; PAM sequence: TTT
ggactgttttccttcaacca

SEQ ID NO: 234603 - DNA, 20 bp, Artificial Sequence
  Description of Artificial Sequence: Synthetic oligonucleotide
  Target: LAMA2; (-) strand; PAM type: YTN; PAM sequence: CTG
taaatttggactgttttcct

SEQ ID NO: 234604 - DNA, 20 bp, Artificial Sequence
  Description of Artificial Sequence: Synthetic oligonucleotide
  Target: LAMA2; (-) strand; PAM type: YTN; PAM sequence: TTA
aagcatctgtaaatttggac

SEQ ID NO: 234605 - DNA, 20 bp, Artificial Sequence
  Description of Artificial Sequence: Synthetic oligonucleotide
  Target: LAMA2; (-) strand; PAM type: YTN; PAM sequence: TTT
aaagcatctgtaaatttgga

SEQ ID NO: 234606 - DNA, 20 bp, Artificial Sequence
  Description of Artificial Sequence: Synthetic oligonucleotide
  Target: LAMA2; (-) strand; PAM type: YTN; PAM sequence: CTG
atgccaaggccaaaagaagt

SEQ ID NO: 234607 - DNA, 20 bp, Artificial Sequence
  Description of Artificial Sequence: Synthetic oligonucleotide
  Target: LAMA2; (-) strand; PAM type: YTN; PAM sequence: TTA
acatgaaagctgatgccaag

SEQ ID NO: 234608 - DNA, 20 bp, Artificial Sequence
  Description of Artificial Sequence: Synthetic oligonucleotide
  Target: LAMA2; (-) strand; PAM type: YTN; PAM sequence: TTT
aacatgaaagctgatgccaa

SEQ ID NO: 234609 - DNA, 20 bp, Artificial Sequence
  Description of Artificial Sequence: Synthetic oligonucleotide
  Target: LAMA2; (-) strand; PAM type: YTN; PAM sequence: TTT
taacatgaaagctgatgcca

SEQ ID NO: 234610 - DNA, 20 bp, Artificial Sequence
  Description of Artificial Sequence: Synthetic oligonucleotide
  Target: LAMA2; (-) strand; PAM type: YTN; PAM sequence: TTT
ttaacatgaaagctgatgcc

SEQ ID NO: 234611 - DNA, 20 bp, Artificial Sequence
  Description of Artificial Sequence: Synthetic oligonucleotide
  Target: LAMA2; (-) strand; PAM type: YTN; PAM sequence: TTT
tttaacatgaaagctgatgc

SEQ ID NO: 234612 - DNA, 20 bp, Artificial Sequence
  Description of Artificial Sequence: Synthetic oligonucleotide
  Target: LAMA2; (-) strand; PAM type: YTN; PAM sequence: TTA
ttttttaacatgaaagctga

SEQ ID NO: 234613 - DNA, 20 bp, Artificial Sequence
  Description of Artificial Sequence: Synthetic oligonucleotide
  Target: LAMA2; (-) strand; PAM type: YTN; PAM sequence: TTT
attttttaacatgaaagctg

SEQ ID NO: 234614 - DNA, 20 bp, Artificial Sequence
  Description of Artificial Sequence: Synthetic oligonucleotide
  Target: LAMA2; (-) strand; PAM type: YTN; PAM sequence: CTT
tattttttaacatgaaagct

SEQ ID NO: 234615 - DNA, 20 bp, Artificial Sequence
  Description of Artificial Sequence: Synthetic oligonucleotide
  Target: LAMA2; (-) strand; PAM type: YTN; PAM sequence: TTC
cccaccagctttatttttta

SEQ ID NO: 234616 - DNA, 20 bp, Artificial Sequence
  Description of Artificial Sequence: Synthetic oligonucleotide
  Target: LAMA2; (-) strand; PAM type: YTN; PAM sequence: CTT
ccccaccagctttatttttt

SEQ ID NO: 234617 - DNA, 20 bp, Artificial Sequence
  Description of Artificial Sequence: Synthetic oligonucleotide
  Target: LAMA2; (-) strand; PAM type: YTN; PAM sequence: TTG
caagtgagatagcttcccca

SEQ ID NO: 234618 - DNA, 20 bp, Artificial Sequence
  Description of Artificial Sequence: Synthetic oligonucleotide
  Target: LAMA2; (-) strand; PAM type: YTN; PAM sequence: TTT
gcaagtgagatagcttcccc

SEQ ID NO: 234619 - DNA, 20 bp, Artificial Sequence
  Description of Artificial Sequence: Synthetic oligonucleotide
  Target: LAMA2; (-) strand; PAM type: YTN; PAM sequence: CTT
tgcaagtgagatagcttccc

SEQ ID NO: 234620 - DNA, 20 bp, Artificial Sequence
  Description of Artificial Sequence: Synthetic oligonucleotide
  Target: LAMA2; (-) strand; PAM type: YTN; PAM sequence: TTA
ctttgcaagtgagatagctt

SEQ ID NO: 234621 - DNA, 20 bp, Artificial Sequence
  Description of Artificial Sequence: Synthetic oligonucleotide
  Target: LAMA2; (-) strand; PAM type: YTN; PAM sequence: TTT
actttgcaagtgagatagct

SEQ ID NO: 234622 - DNA, 20 bp, Artificial Sequence
  Description of Artificial Sequence: Synthetic oligonucleotide
  Target: LAMA2; (-) strand; PAM type: YTN; PAM sequence: CTC
atacaagccatttactttgc

SEQ ID NO: 234623 - DNA, 20 bp, Artificial Sequence
  Description of Artificial Sequence: Synthetic oligonucleotide
  Target: LAMA2; (-) strand; PAM type: YTN; PAM sequence: TTC
gccaatctcatacaagccat

SEQ ID NO: 234624 - DNA, 20 bp, Artificial Sequence
  Description of Artificial Sequence: Synthetic oligonucleotide
  Target: LAMA2; (-) strand; PAM type: YTN; PAM sequence: CTG
accaagattcgccaatctca

SEQ ID NO: 234625 - DNA, 20 bp, Artificial Sequence
  Description of Artificial Sequence: Synthetic oligonucleotide
  Target: LAMA2; (-) strand; PAM type: YTN; PAM sequence: TTA
aaaatgcaatatctgaccaa

SEQ ID NO: 234626 - DNA, 20 bp, Artificial Sequence
  Description of Artificial Sequence: Synthetic oligonucleotide
  Target: LAMA2; (-) strand; PAM type: YTN; PAM sequence: TTT
aaaaatgcaatatctgacca

SEQ ID NO: 234627 - DNA, 20 bp, Artificial Sequence
  Description of Artificial Sequence: Synthetic oligonucleotide
  Target: LAMA2; (-) strand; PAM type: YTN; PAM sequence: CTT
taaaaatgcaatatctgacc

SEQ ID NO: 234628 - DNA, 20 bp, Artificial Sequence
  Description of Artificial Sequence: Synthetic oligonucleotide
  Target: LAMA2; (-) strand; PAM type: YTN; PAM sequence: TTG
tgctttaaaaatgcaatatc

SEQ ID NO: 234629 - DNA, 20 bp, Artificial Sequence
  Description of Artificial Sequence: Synthetic oligonucleotide
  Target: LAMA2; (-) strand; PAM type: YTN; PAM sequence: TTT
gtgctttaaaaatgcaatat

SEQ ID NO: 234630 - DNA, 20 bp, Artificial Sequence
  Description of Artificial Sequence: Synthetic oligonucleotide
  Target: LAMA2; (-) strand; PAM type: YTN; PAM sequence: TTT
tgtgctttaaaaatgcaata

SEQ ID NO: 234631 - DNA, 20 bp, Artificial Sequence
  Description of Artificial Sequence: Synthetic oligonucleotide
  Target: LAMA2; (-) strand; PAM type: YTN; PAM sequence: TTG
gtggccggtggttttgtgct

SEQ ID NO: 234632 - DNA, 20 bp, Artificial Sequence
  Description of Artificial Sequence: Synthetic oligonucleotide
  Target: LAMA2; (-) strand; PAM type: YTN; PAM sequence: TTA
tatgcatgcacaggaagata

SEQ ID NO: 234633 - DNA, 20 bp, Artificial Sequence
  Description of Artificial Sequence: Synthetic oligonucleotide
  Target: LAMA2; (-) strand; PAM type: YTN; PAM sequence: TTT
atatgcatgcacaggaagat

SEQ ID NO: 234634 - DNA, 20 bp, Artificial Sequence
  Description of Artificial Sequence: Synthetic oligonucleotide
  Target: LAMA2; (-) strand; PAM type: YTN; PAM sequence: TTA
gaagaaaataatttatatgc

SEQ ID NO: 234635 - DNA, 20 bp, Artificial Sequence
  Description of Artificial Sequence: Synthetic oligonucleotide
  Target: LAMA2; (-) strand; PAM type: YTN; PAM sequence: TTG
aattagaagaaaataattta

SEQ ID NO: 234636 - DNA, 20 bp, Artificial Sequence
  Description of Artificial Sequence: Synthetic oligonucleotide
  Target: LAMA2; (-) strand; PAM type: YTN; PAM sequence: TTT
gaattagaagaaaataattt

SEQ ID NO: 234637 - DNA, 20 bp, Artificial Sequence
  Description of Artificial Sequence: Synthetic oligonucleotide
  Target: LAMA2; (-) strand; PAM type: YTN; PAM sequence: TTG
ccatttgaattagaagaaaa

SEQ ID NO: 234638 - DNA, 20 bp, Artificial Sequence
  Description of Artificial Sequence: Synthetic oligonucleotide
  Target: LAMA2; (-) strand; PAM type: YTN; PAM sequence: CTG
ttgccatttgaattagaaga

SEQ ID NO: 234639 - DNA, 20 bp, Artificial Sequence
  Description of Artificial Sequence: Synthetic oligonucleotide
  Target: LAMA2; (-) strand; PAM type: YTN; PAM sequence: CTC
tgttgccatttgaattagaa

SEQ ID NO: 234640 - DNA, 20 bp, Artificial Sequence
  Description of Artificial Sequence: Synthetic oligonucleotide
  Target: LAMA2; (-) strand; PAM type: YTN; PAM sequence: TTC
ctctgttgccatttgaatta

SEQ ID NO: 234641 - DNA, 20 bp, Artificial Sequence
  Description of Artificial Sequence: Synthetic oligonucleotide
  Target: LAMA2; (-) strand; PAM type: YTN; PAM sequence: CTC
catgcacatgcacgccagga

SEQ ID NO: 234642 - DNA, 20 bp, Artificial Sequence
  Description of Artificial Sequence: Synthetic oligonucleotide
  Target: LAMA2; (-) strand; PAM type: YTN; PAM sequence: TTA
gtgatgtgtgtgtgtctcca

SEQ ID NO: 234643 - DNA, 20 bp, Artificial Sequence
  Description of Artificial Sequence: Synthetic oligonucleotide
  Target: LAMA2; (-) strand; PAM type: YTN; PAM sequence: CTT
agtgatgtgtgtgtgtctcc

SEQ ID NO: 234644 - DNA, 20 bp, Artificial Sequence
  Description of Artificial Sequence: Synthetic oligonucleotide
  Target: LAMA2; (-) strand; PAM type: YTN; PAM sequence: CTC
cttagtgatgtgtgtgtgtc

SEQ ID NO: 234645 - DNA, 20 bp, Artificial Sequence
  Description of Artificial Sequence: Synthetic oligonucleotide
  Target: LAMA2; (-) strand; PAM type: YTN; PAM sequence: CTG
tctccttagtgatgtgtgtg

SEQ ID NO: 234646 - DNA, 20 bp, Artificial Sequence
  Description of Artificial Sequence: Synthetic oligonucleotide
  Target: LAMA2; (-) strand; PAM type: YTN; PAM sequence: TTG
tcctgtctccttagtgatgt

SEQ ID NO: 234647 - DNA, 20 bp, Artificial Sequence
  Description of Artificial Sequence: Synthetic oligonucleotide
  Target: LAMA2; (-) strand; PAM type: YTN; PAM sequence: TTT
gtcctgtctccttagtgatg

SEQ ID NO: 234648 - DNA, 20 bp, Artificial Sequence
  Description of Artificial Sequence: Synthetic oligonucleotide
  Target: LAMA2; (-) strand; PAM type: YTN; PAM sequence: TTA
tgatagtttgtcctgtctcc

SEQ ID NO: 234649 - DNA, 20 bp, Artificial Sequence
  Description of Artificial Sequence: Synthetic oligonucleotide
  Target: LAMA2; (-) strand; PAM type: YTN; PAM sequence: TTT
atgatagtttgtcctgtctc

SEQ ID NO: 234650 - DNA, 20 bp, Artificial Sequence
  Description of Artificial Sequence: Synthetic oligonucleotide
  Target: LAMA2; (-) strand; PAM type: YTN; PAM sequence: TTA
gtttatgatagtttgtcctg

SEQ ID NO: 234651 - DNA, 20 bp, Artificial Sequence
  Description of Artificial Sequence: Synthetic oligonucleotide
  Target: LAMA2; (-) strand; PAM type: YTN; PAM sequence: CTT
agtttatgatagtttgtcct

SEQ ID NO: 234652 - DNA, 20 bp, Artificial Sequence
  Description of Artificial Sequence: Synthetic oligonucleotide
  Target: LAMA2; (-) strand; PAM type: YTN; PAM sequence: CTG
cttagtttatgatagtttgt

SEQ ID NO: 234653 - DNA, 20 bp, Artificial Sequence
  Description of Artificial Sequence: Synthetic oligonucleotide
  Target: LAMA2; (-) strand; PAM type: YTN; PAM sequence: TTG
ggatactgcttagtttatga

SEQ ID NO: 234654 - DNA, 20 bp, Artificial Sequence
  Description of Artificial Sequence: Synthetic oligonucleotide
  Target: LAMA2; (-) strand; PAM type: YTN; PAM sequence: TTT
gggatactgcttagtttatg

SEQ ID NO: 234655 - DNA, 20 bp, Artificial Sequence
  Description of Artificial Sequence: Synthetic oligonucleotide
  Target: LAMA2; (-) strand; PAM type: YTN; PAM sequence: CTA
tagatgatgatgtgtttggg

SEQ ID NO: 234656 - DNA, 20 bp, Artificial Sequence
  Description of Artificial Sequence: Synthetic oligonucleotide
  Target: LAMA2; (-) strand; PAM type: YTN; PAM sequence: TTG
taaaacagcctatagatgat

SEQ ID NO: 234657 - DNA, 20 bp, Artificial Sequence
  Description of Artificial Sequence: Synthetic oligonucleotide
  Target: LAMA2; (-) strand; PAM type: YTN; PAM sequence: TTT
gtaaaacagcctatagatga

SEQ ID NO: 234658 - DNA, 20 bp, Artificial Sequence
  Description of Artificial Sequence: Synthetic oligonucleotide
  Target: LAMA2; (-) strand; PAM type: YTN; PAM sequence: CTT
tgtaaaacagcctatagatg

SEQ ID NO: 234659 - DNA, 20 bp, Artificial Sequence
  Description of Artificial Sequence: Synthetic oligonucleotide
  Target: LAMA2; (-) strand; PAM type: YTN; PAM sequence: TTC
cacctttgtaaaacagccta

SEQ ID NO: 234660 - DNA, 20 bp, Artificial Sequence
  Description of Artificial Sequence: Synthetic oligonucleotide
  Target: LAMA2; (-) strand; PAM type: YTN; PAM sequence: TTG
tattccacctttgtaaaaca

SEQ ID NO: 234661 - DNA, 20 bp, Artificial Sequence
  Description of Artificial Sequence: Synthetic oligonucleotide
  Target: LAMA2; (-) strand; PAM type: YTN; PAM sequence: TTT
gtattccacctttgtaaaac

SEQ ID NO: 234662 - DNA, 20 bp, Artificial Sequence
  Description of Artificial Sequence: Synthetic oligonucleotide
  Target: LAMA2; (-) strand; PAM type: YTN; PAM sequence: TTC
gtttgtattccacctttgta

SEQ ID NO: 234663 - DNA, 20 bp, Artificial Sequence
  Description of Artificial Sequence: Synthetic oligonucleotide
  Target: LAMA2; (-) strand; PAM type: YTN; PAM sequence: TTC
agttcgtttgtattccacct

SEQ ID NO: 234664 - DNA, 20 bp, Artificial Sequence
  Description of Artificial Sequence: Synthetic oligonucleotide
  Target: LAMA2; (-) strand; PAM type: YTN; PAM sequence: CTG
agacattcagttcgtttgta

SEQ ID NO: 234665 - DNA, 20 bp, Artificial Sequence
  Description of Artificial Sequence: Synthetic oligonucleotide
  Target: LAMA2; (-) strand; PAM type: YTN; PAM sequence: TTA
cctgagacattcagttcgtt

SEQ ID NO: 234666 - DNA, 20 bp, Artificial Sequence
  Description of Artificial Sequence: Synthetic oligonucleotide
  Target: LAMA2; (-) strand; PAM type: YTN; PAM sequence: TTT
acctgagacattcagttcgt

SEQ ID NO: 234667 - DNA, 20 bp, Artificial Sequence
  Description of Artificial Sequence: Synthetic oligonucleotide
  Target: LAMA2; (-) strand; PAM type: YTN; PAM sequence: TTT
tacctgagacattcagttcg

SEQ ID NO: 234668 - DNA, 20 bp, Artificial Sequence
  Description of Artificial Sequence: Synthetic oligonucleotide
  Target: LAMA2; (-) strand; PAM type: YTN; PAM sequence: CTT
ttacctgagacattcagttc

SEQ ID NO: 234669 - DNA, 20 bp, Artificial Sequence
  Description of Artificial Sequence: Synthetic oligonucleotide
  Target: LAMA2; (-) strand; PAM type: YTN; PAM sequence: TTG
ccttttacctgagacattca

SEQ ID NO: 234670 - DNA, 20 bp, Artificial Sequence
  Description of Artificial Sequence: Synthetic oligonucleotide
  Target: LAMA2; (-) strand; PAM type: YTN; PAM sequence: TTT
gccttttacctgagacattc

SEQ ID NO: 234671 - DNA, 20 bp, Artificial Sequence
  Description of Artificial Sequence: Synthetic oligonucleotide
  Target: LAMA2; (-) strand; PAM type: YTN; PAM sequence: CTT
tgccttttacctgagacatt

SEQ ID NO: 234672 - DNA, 20 bp, Artificial Sequence
  Description of Artificial Sequence: Synthetic oligonucleotide
  Target: LAMA2; (-) strand; PAM type: YTN; PAM sequence: TTG
gagaaatagactttgccttt

SEQ ID NO: 234673 - DNA, 20 bp, Artificial Sequence
  Description of Artificial Sequence: Synthetic oligonucleotide
  Target: LAMA2; (-) strand; PAM type: YTN; PAM sequence: TTA
agaagataaatgagtgcagc

SEQ ID NO: 234674 - DNA, 20 bp, Artificial Sequence
  Description of Artificial Sequence: Synthetic oligonucleotide
  Target: LAMA2; (-) strand; PAM type: YTN; PAM sequence: CTT
aagaagataaatgagtgcag

SEQ ID NO: 234675 - DNA, 20 bp, Artificial Sequence
  Description of Artificial Sequence: Synthetic oligonucleotide
  Target: LAMA2; (-) strand; PAM type: YTN; PAM sequence: CTG
tgaaagccttaagaagataa

SEQ ID NO: 234676 - DNA, 20 bp, Artificial Sequence
  Description of Artificial Sequence: Synthetic oligonucleotide
  Target: LAMA2; (-) strand; PAM type: YTN; PAM sequence: TTC
tgtgaaagccttaagaagat

SEQ ID NO: 234677 - DNA, 20 bp, Artificial Sequence
  Description of Artificial Sequence: Synthetic oligonucleotide
  Target: LAMA2; (-) strand; PAM type: YTN; PAM sequence: TTT
ctgtgaaagccttaagaaga

SEQ ID NO: 234678 - DNA, 20 bp, Artificial Sequence
  Description of Artificial Sequence: Synthetic oligonucleotide
  Target: LAMA2; (-) strand; PAM type: YTN; PAM sequence: CTT
tctgtgaaagccttaagaag

SEQ ID NO: 234679 - DNA, 20 bp, Artificial Sequence
  Description of Artificial Sequence: Synthetic oligonucleotide
  Target: LAMA2; (-) strand; PAM type: YTN; PAM sequence: TTC
ataaaacggtgctttctgtg

SEQ ID NO: 234680 - DNA, 20 bp, Artificial Sequence
  Description of Artificial Sequence: Synthetic oligonucleotide
  Target: LAMA2; (-) strand; PAM type: YTN; PAM sequence: CTG
ttcataaaacggtgctttct

SEQ ID NO: 234681 - DNA, 20 bp, Artificial Sequence
  Description of Artificial Sequence: Synthetic oligonucleotide
  Target: LAMA2; (-) strand; PAM type: YTN; PAM sequence: TTG
cctgttcataaaacggtgct

SEQ ID NO: 234682 - DNA, 20 bp, Artificial Sequence
  Description of Artificial Sequence: Synthetic oligonucleotide
  Target: LAMA2; (-) strand; PAM type: YTN; PAM sequence: CTG
aattgcctgttcataaaacg

SEQ ID NO: 234683 - DNA, 20 bp, Artificial Sequence
  Description of Artificial Sequence: Synthetic oligonucleotide
  Target: LAMA2; (-) strand; PAM type: YTN; PAM sequence: CTG
ggtactgaattgcctgttca

SEQ ID NO: 234684 - DNA, 20 bp, Artificial Sequence
  Description of Artificial Sequence: Synthetic oligonucleotide
  Target: LAMA2; (-) strand; PAM type: YTN; PAM sequence: CTC
tgggtactgaattgcctgtt

SEQ ID NO: 234685 - DNA, 20 bp, Artificial Sequence
  Description of Artificial Sequence: Synthetic oligonucleotide
  Target: LAMA2; (-) strand; PAM type: YTN; PAM sequence: CTC
cagtcaagctctgggtactg

SEQ ID NO: 234686 - DNA, 20 bp, Artificial Sequence
  Description of Artificial Sequence: Synthetic oligonucleotide
  Target: LAMA2; (-) strand; PAM type: YTN; PAM sequence: TTA
gtgtctccagtcaagctctg

SEQ ID NO: 234687 - DNA, 20 bp, Artificial Sequence
  Description of Artificial Sequence: Synthetic oligonucleotide
  Target: LAMA2; (-) strand; PAM type: YTN; PAM sequence: CTG
attagtgtctccagtcaagc

SEQ ID NO: 234688 - DNA, 20 bp, Artificial Sequence
  Description of Artificial Sequence: Synthetic oligonucleotide
  Target: LAMA2; (-) strand; PAM type: YTN; PAM sequence: TTC
aatcctgattagtgtctcca

SEQ ID NO: 234689 - DNA, 20 bp, Artificial Sequence
  Description of Artificial Sequence: Synthetic oligonucleotide
  Target: LAMA2; (-) strand; PAM type: YTN; PAM sequence: CTT
caatcctgattagtgtctcc

SEQ ID NO: 234690 - DNA, 20 bp, Artificial Sequence
  Description of Artificial Sequence: Synthetic oligonucleotide
  Target: LAMA2; (-) strand; PAM type: YTN; PAM sequence: CTG
catcaagacttcaatcctga

SEQ ID NO: 234691 - DNA, 20 bp, Artificial Sequence
  Description of Artificial Sequence: Synthetic oligonucleotide
  Target: LAMA2; (-) strand; PAM type: YTN; PAM sequence: TTA
tgaactgcatcaagacttca

SEQ ID NO: 234692 - DNA, 20 bp, Artificial Sequence
  Description of Artificial Sequence: Synthetic oligonucleotide
  Target: LAMA2; (-) strand; PAM type: YTN; PAM sequence: TTT
atgaactgcatcaagacttc

SEQ ID NO: 234693 - DNA, 20 bp, Artificial Sequence
  Description of Artificial Sequence: Synthetic oligonucleotide
  Target: LAMA2; (-) strand; PAM type: YTN; PAM sequence: TTT
tatgaactgcatcaagactt

SEQ ID NO: 234694 - DNA, 20 bp, Artificial Sequence
  Description of Artificial Sequence: Synthetic oligonucleotide
  Target: LAMA2; (-) strand; PAM type: YTN; PAM sequence: TTT
ttatgaactgcatcaagact

SEQ ID NO: 234695 - DNA, 20 bp, Artificial Sequence
  Description of Artificial Sequence: Synthetic oligonucleotide
  Target: LAMA2; (-) strand; PAM type: YTN; PAM sequence: TTA
aatgggtttttatgaactgc

SEQ ID NO: 234696 - DNA, 20 bp, Artificial Sequence
  Description of Artificial Sequence: Synthetic oligonucleotide
  Target: LAMA2; (-) strand; PAM type: YTN; PAM sequence: TTT
aaatgggtttttatgaactg

SEQ ID NO: 234697 - DNA, 20 bp, Artificial Sequence
  Description of Artificial Sequence: Synthetic oligonucleotide
  Target: LAMA2; (-) strand; PAM type: YTN; PAM sequence: TTT
taaatgggtttttatgaact

SEQ ID NO: 234698 - DNA, 20 bp, Artificial Sequence
  Description of Artificial Sequence: Synthetic oligonucleotide
  Target: LAMA2; (-) strand; PAM type: YTN; PAM sequence: TTT
ttaaatgggtttttatgaac

SEQ ID NO: 234699 - DNA, 20 bp, Artificial Sequence
  Description of Artificial Sequence: Synthetic oligonucleotide
  Target: LAMA2; (-) strand; PAM type: YTN; PAM sequence: TTT
tttaaatgggtttttatgaa

SEQ ID NO: 234700 - DNA, 20 bp, Artificial Sequence
  Description of Artificial Sequence: Synthetic oligonucleotide
  Target: LAMA2; (-) strand; PAM type: YTN; PAM sequence: TTT
ttttaaatgggtttttatga

SEQ ID NO: 234701 - DNA, 20 bp, Artificial Sequence
  Description of Artificial Sequence: Synthetic oligonucleotide
  Target: LAMA2; (-) strand; PAM type: YTN; PAM sequence: CTT
tttttaaatgggtttttatg

SEQ ID NO: 234702 - DNA, 20 bp, Artificial Sequence
  Description of Artificial Sequence: Synthetic oligonucleotide
  Target: LAMA2; (-) strand; PAM type: YTN; PAM sequence: TTG
atgcctttttttaaatgggt

SEQ ID NO: 234703 - DNA, 20 bp, Artificial Sequence
  Description of Artificial Sequence: Synthetic oligonucleotide
  Target: LAMA2; (-) strand; PAM type: YTN; PAM sequence: TTT
gatgcctttttttaaatggg

SEQ ID NO: 234704 - DNA, 20 bp, Artificial Sequence
  Description of Artificial Sequence: Synthetic oligonucleotide
  Target: LAMA2; (-) strand; PAM type: YTN; PAM sequence: TTT
tgatgcctttttttaaatgg

SEQ ID NO: 234705 - DNA, 20 bp, Artificial Sequence
  Description of Artificial Sequence: Synthetic oligonucleotide
  Target: LAMA2; (-) strand; PAM type: YTN; PAM sequence: TTT
ttgatgcctttttttaaatg

SEQ ID NO: 234706 - DNA, 20 bp, Artificial Sequence
  Description of Artificial Sequence: Synthetic oligonucleotide
  Target: LAMA2; (-) strand; PAM type: YTN; PAM sequence: TTA
aatgtggtttttgatgcctt

SEQ ID NO: 234707 - DNA, 20 bp, Artificial Sequence
  Description of Artificial Sequence: Synthetic oligonucleotide
  Target: LAMA2; (-) strand; PAM type: YTN; PAM sequence: TTT
aaatgtggtttttgatgcct

SEQ ID NO: 234708 - DNA, 20 bp, Artificial Sequence
  Description of Artificial Sequence: Synthetic oligonucleotide
  Target: LAMA2; (-) strand; PAM type: YTN; PAM sequence: TTT
taaatgtggtttttgatgcc

SEQ ID NO: 234709 - DNA, 20 bp, Artificial Sequence
  Description of Artificial Sequence: Synthetic oligonucleotide
  Target: LAMA2; (-) strand; PAM type: YTN; PAM sequence: TTA
ttttaaatgtggtttttgat

SEQ ID NO: 234710 - DNA, 20 bp, Artificial Sequence
  Description of Artificial Sequence: Synthetic oligonucleotide
  Target: LAMA2; (-) strand; PAM type: YTN; PAM sequence: TTT
attttaaatgtggtttttga

SEQ ID NO: 234711 - DNA, 20 bp, Artificial Sequence
  Description of Artificial Sequence: Synthetic oligonucleotide
  Target: LAMA2; (-) strand; PAM type: YTN; PAM sequence: CTT
tattttaaatgtggtttttg

SEQ ID NO: 234712 - DNA, 20 bp, Artificial Sequence
  Description of Artificial Sequence: Synthetic oligonucleotide
  Target: LAMA2; (-) strand; PAM type: YTN; PAM sequence: TTA
tatatggacaactttatttt

SEQ ID NO: 234713 - DNA, 20 bp, Artificial Sequence
  Description of Artificial Sequence: Synthetic oligonucleotide
  Target: LAMA2; (-) strand; PAM type: YTN; PAM sequence: TTT
atatatggacaactttattt

SEQ ID NO: 234714 - DNA, 20 bp, Artificial Sequence
  Description of Artificial Sequence: Synthetic oligonucleotide
  Target: LAMA2; (-) strand; PAM type: YTN; PAM sequence: CTT
tatatatggacaactttatt

SEQ ID NO: 234715 - DNA, 20 bp, Artificial Sequence
  Description of Artificial Sequence: Synthetic oligonucleotide
  Target: LAMA2; (-) strand; PAM type: YTN; PAM sequence: TTC
tttatatatggacaacttta

SEQ ID NO: 234716 - DNA, 20 bp, Artificial Sequence
  Description of Artificial Sequence: Synthetic oligonucleotide
  Target: LAMA2; (-) strand; PAM type: YTN; PAM sequence: TTC
attctttatatatggacaac

SEQ ID NO: 234717 - DNA, 20 bp, Artificial Sequence
  Description of Artificial Sequence: Synthetic oligonucleotide
  Target: LAMA2; (-) strand; PAM type: YTN; PAM sequence: CTT
cattctttatatatggacaa

SEQ ID NO: 234718 - DNA, 20 bp, Artificial Sequence
  Description of Artificial Sequence: Synthetic oligonucleotide
  Target: LAMA2; (-) strand; PAM type: YTN; PAM sequence: CTA
aacacttcattctttatata

SEQ ID NO: 234719 - DNA, 20 bp, Artificial Sequence
  Description of Artificial Sequence: Synthetic oligonucleotide
  Target: LAMA2; (-) strand; PAM type: YTN; PAM sequence: TTC
taaacacttcattctttata

SEQ ID NO: 234720 - DNA, 20 bp, Artificial Sequence
  Description of Artificial Sequence: Synthetic oligonucleotide
  Target: LAMA2; (-) strand; PAM type: YTN; PAM sequence: CTT
ctaaacacttcattctttat

SEQ ID NO: 234721 - DNA, 20 bp, Artificial Sequence
  Description of Artificial Sequence: Synthetic oligonucleotide
  Target: LAMA2; (-) strand; PAM type: YTN; PAM sequence: CTG
ggaacttctaaacacttcat

SEQ ID NO: 234722 - DNA, 20 bp, Artificial Sequence
  Description of Artificial Sequence: Synthetic oligonucleotide
  Target: LAMA2; (-) strand; PAM type: YTN; PAM sequence: TTA
ggatacaagctgggaacttc

SEQ ID NO: 234723 - DNA, 20 bp, Artificial Sequence
  Description of Artificial Sequence: Synthetic oligonucleotide
  Target: LAMA2; (-) strand; PAM type: YTN; PAM sequence: TTA
ttaggatacaagctgggaac

SEQ ID NO: 234724 - DNA, 20 bp, Artificial Sequence
  Description of Artificial Sequence: Synthetic oligonucleotide
  Target: LAMA2; (-) strand; PAM type: YTN; PAM sequence: CTT
attaggatacaagctgggaa

SEQ ID NO: 234725 - DNA, 20 bp, Artificial Sequence
  Description of Artificial Sequence: Synthetic oligonucleotide
  Target: LAMA2; (-) strand; PAM type: YTN; PAM sequence: CTC
ttattaggatacaagctggg

SEQ ID NO: 234726 - DNA, 20 bp, Artificial Sequence
  Description of Artificial Sequence: Synthetic oligonucleotide
  Target: LAMA2; (-) strand; PAM type: YTN; PAM sequence: TTC
agtactcttattaggataca

SEQ ID NO: 234727 - DNA, 20 bp, Artificial Sequence
  Description of Artificial Sequence: Synthetic oligonucleotide
  Target: LAMA2; (-) strand; PAM type: YTN; PAM sequence: TTT
cagtactcttattaggatac

SEQ ID NO: 234728 - DNA, 20 bp, Artificial Sequence
  Description of Artificial Sequence: Synthetic oligonucleotide
  Target: LAMA2; (-) strand; PAM type: YTN; PAM sequence: CTT
tcagtactcttattaggata

SEQ ID NO: 234729 - DNA, 20 bp, Artificial Sequence
  Description of Artificial Sequence: Synthetic oligonucleotide
  Target: LAMA2; (-) strand; PAM type: YTN; PAM sequence: TTA
aacctttcagtactcttatt

SEQ ID NO: 234730 - DNA, 20 bp, Artificial Sequence
  Description of Artificial Sequence: Synthetic oligonucleotide
  Target: LAMA2; (-) strand; PAM type: YTN; PAM sequence: CTA
atattaaacctttcagtact

SEQ ID NO: 234731 - DNA, 20 bp, Artificial Sequence
  Description of Artificial Sequence: Synthetic oligonucleotide
  Target: LAMA2; (-) strand; PAM type: YTN; PAM sequence: CTG
ctaatattaaacctttcagt

SEQ ID NO: 234732 - DNA, 20 bp, Artificial Sequence
  Description of Artificial Sequence: Synthetic oligonucleotide
  Target: LAMA2; (-) strand; PAM type: YTN; PAM sequence: TTC
acaggctgctaatattaaac

SEQ ID NO: 234733 - DNA, 20 bp, Artificial Sequence
  Description of Artificial Sequence: Synthetic oligonucleotide
  Target: LAMA2; (-) strand; PAM type: YTN; PAM sequence: CTA
cgtgttcacaggctgctaat

SEQ ID NO: 234734 - DNA, 20 bp, Artificial Sequence
  Description of Artificial Sequence: Synthetic oligonucleotide
  Target: LAMA2; (-) strand; PAM type: YTN; PAM sequence: TTC
actacgtgttcacaggctgc

SEQ ID NO: 234735 - DNA, 20 bp, Artificial Sequence
  Description of Artificial Sequence: Synthetic oligonucleotide
  Target: LAMA2; (-) strand; PAM type: YTN; PAM sequence: CTT
cactacgtgttcacaggctg

SEQ ID NO: 234736 - DNA, 20 bp, Artificial Sequence
  Description of Artificial Sequence: Synthetic oligonucleotide
  Target: LAMA2; (-) strand; PAM type: YTN; PAM sequence: TTC
ttcactacgtgttcacaggc

SEQ ID NO: 234737 - DNA, 20 bp, Artificial Sequence
  Description of Artificial Sequence: Synthetic oligonucleotide
  Target: LAMA2; (-) strand; PAM type: YTN; PAM sequence: TTT
cttcactacgtgttcacagg

SEQ ID NO: 234738 - DNA, 20 bp, Artificial Sequence
  Description of Artificial Sequence: Synthetic oligonucleotide
  Target: LAMA2; (-) strand; PAM type: YTN; PAM sequence: CTT
tcttcactacgtgttcacag

SEQ ID NO: 234739 - DNA, 20 bp, Artificial Sequence
  Description of Artificial Sequence: Synthetic oligonucleotide
  Target: LAMA2; (-) strand; PAM type: YTN; PAM sequence: CTC
tttcttcactacgtgttcac

SEQ ID NO: 234740 - DNA, 20 bp, Artificial Sequence
  Description of Artificial Sequence: Synthetic oligonucleotide
  Target: LAMA2; (-) strand; PAM type: YTN; PAM sequence: CTC
agactctttcttcactacgt

SEQ ID NO: 234741 - DNA, 20 bp, Artificial Sequence
  Description of Artificial Sequence: Synthetic oligonucleotide
  Target: LAMA2; (-) strand; PAM type: YTN; PAM sequence: TTC
tcagactctttcttcactac

SEQ ID NO: 234742 - DNA, 20 bp, Artificial Sequence
  Description of Artificial Sequence: Synthetic oligonucleotide
  Target: LAMA2; (-) strand; PAM type: YTN; PAM sequence: TTG
gttctcagactctttcttca

SEQ ID NO: 234743 - DNA, 20 bp, Artificial Sequence
  Description of Artificial Sequence: Synthetic oligonucleotide
  Target: LAMA2; (-) strand; PAM type: YTN; PAM sequence: CTT
ggttctcagactctttcttc

SEQ ID NO: 234744 - DNA, 20 bp, Artificial Sequence
  Description of Artificial Sequence: Synthetic oligonucleotide
  Target: LAMA2; (-) strand; PAM type: YTN; PAM sequence: TTA
acttggttctcagactcttt

SEQ ID NO: 234745 - DNA, 20 bp, Artificial Sequence
  Description of Artificial Sequence: Synthetic oligonucleotide
  Target: LAMA2; (-) strand; PAM type: YTN; PAM sequence: TTA
gagtggaataaggatgttaa

SEQ ID NO: 234746 - DNA, 20 bp, Artificial Sequence
  Description of Artificial Sequence: Synthetic oligonucleotide
  Target: LAMA2; (-) strand; PAM type: YTN; PAM sequence: TTA
cccatggcatgggtggaatt

SEQ ID NO: 234747 - DNA, 20 bp, Artificial Sequence
  Description of Artificial Sequence: Synthetic oligonucleotide
  Target: LAMA2; (-) strand; PAM type: YTN; PAM sequence: TTT
acccatggcatgggtggaat

SEQ ID NO: 234748 - DNA, 20 bp, Artificial Sequence
  Description of Artificial Sequence: Synthetic oligonucleotide
  Target: LAMA2; (-) strand; PAM type: YTN; PAM sequence: TTT
tacccatggcatgggtggaa

SEQ ID NO: 234749 - DNA, 20 bp, Artificial Sequence
  Description of Artificial Sequence: Synthetic oligonucleotide
  Target: LAMA2; (-) strand; PAM type: YTN; PAM sequence: TTT
ttacccatggcatgggtgga

SEQ ID NO: 234750 - DNA, 20 bp, Artificial Sequence
  Description of Artificial Sequence: Synthetic oligonucleotide
  Target: LAMA2; (-) strand; PAM type: YTN; PAM sequence: CTG
tttttacccatggcatgggt

SEQ ID NO: 234751 - DNA, 20 bp, Artificial Sequence
  Description of Artificial Sequence: Synthetic oligonucleotide
  Target: LAMA2; (-) strand; PAM type: YTN; PAM sequence: CTG
caagaactgtttttacccat

SEQ ID NO: 234752 - DNA, 20 bp, Artificial Sequence
  Description of Artificial Sequence: Synthetic oligonucleotide
  Target: LAMA2; (-) strand; PAM type: YTN; PAM sequence: CTA
gactgcaagaactgttttta

SEQ ID NO: 234753 - DNA, 20 bp, Artificial Sequence
  Description of Artificial Sequence: Synthetic oligonucleotide
  Target: LAMA2; (-) strand; PAM type: YTN; PAM sequence: CTC
tagactgcaagaactgtttt

SEQ ID NO: 234754 - DNA, 20 bp, Artificial Sequence
  Description of Artificial Sequence: Synthetic oligonucleotide
  Target: LAMA2; (-) strand; PAM type: YTN; PAM sequence: TTA
aaccatcggaggagaaactc

SEQ ID NO: 234755 - DNA, 20 bp, Artificial Sequence
  Description of Artificial Sequence: Synthetic oligonucleotide
  Target: LAMA2; (-) strand; PAM type: YTN; PAM sequence: CTG
acggttaaaccatcggagga

SEQ ID NO: 234756 - DNA, 20 bp, Artificial Sequence
  Description of Artificial Sequence: Synthetic oligonucleotide
  Target: LAMA2; (-) strand; PAM type: YTN; PAM sequence: TTG
aatcccaagatgtaaaaatc

SEQ ID NO: 234757 - DNA, 20 bp, Artificial Sequence
  Description of Artificial Sequence: Synthetic oligonucleotide
  Target: LAMA2; (-) strand; PAM type: YTN; PAM sequence: TTG
ccaagatggttgaatcccaa

SEQ ID NO: 234758 - DNA, 20 bp, Artificial Sequence
  Description of Artificial Sequence: Synthetic oligonucleotide
  Target: LAMA2; (-) strand; PAM type: YTN; PAM sequence: CTT
gccaagatggttgaatccca

SEQ ID NO: 234759 - DNA, 20 bp, Artificial Sequence
  Description of Artificial Sequence: Synthetic oligonucleotide
  Target: LAMA2; (-) strand; PAM type: YTN; PAM sequence: TTA
agaagacgcttgccaagatg

SEQ ID NO: 234760 - DNA, 20 bp, Artificial Sequence
  Description of Artificial Sequence: Synthetic oligonucleotide
  Target: LAMA2; (-) strand; PAM type: YTN; PAM sequence: TTG
agaattaagaagacgcttgc

SEQ ID NO: 234761 - DNA, 20 bp, Artificial Sequence
  Description of Artificial Sequence: Synthetic oligonucleotide
  Target: LAMA2; (-) strand; PAM type: YTN; PAM sequence: CTC
acagcgttgagaattaagaa

SEQ ID NO: 234762 - DNA, 20 bp, Artificial Sequence
  Description of Artificial Sequence: Synthetic oligonucleotide
  Target: LAMA2; (-) strand; PAM type: YTN; PAM sequence: CTG
ggcccacaatccagccccca

SEQ ID NO: 234763 - DNA, 20 bp, Artificial Sequence
  Description of Artificial Sequence: Synthetic oligonucleotide
  Target: LAMA2; (-) strand; PAM type: YTN; PAM sequence: CTA
atgtcagaatgctgggccca

SEQ ID NO: 234764 - DNA, 20 bp, Artificial Sequence
  Description of Artificial Sequence: Synthetic oligonucleotide
  Target: LAMA2; (-) strand; PAM type: YTN; PAM sequence: TTG
aagctaatgtcagaatgctg

SEQ ID NO: 234765 - DNA, 20 bp, Artificial Sequence
  Description of Artificial Sequence: Synthetic oligonucleotide
  Target: LAMA2; (-) strand; PAM type: YTN; PAM sequence: TTT
gaagctaatgtcagaatgct

SEQ ID NO: 234766 - DNA, 20 bp, Artificial Sequence
  Description of Artificial Sequence: Synthetic oligonucleotide
  Target: LAMA2; (-) strand; PAM type: YTN; PAM sequence: TTT
tgaagctaatgtcagaatgc

SEQ ID NO: 234767 - DNA, 20 bp, Artificial Sequence
  Description of Artificial Sequence: Synthetic oligonucleotide
  Target: LAMA2; (-) strand; PAM type: YTN; PAM sequence: CTA
cgagcagttttgaagctaat

SEQ ID NO: 234768 - DNA, 20 bp, Artificial Sequence
  Description of Artificial Sequence: Synthetic oligonucleotide
  Target: LAMA2; (-) strand; PAM type: YTN; PAM sequence: CTA
atcggtggaacagtgatgaa

SEQ ID NO: 234769 - DNA, 20 bp, Artificial Sequence
  Description of Artificial Sequence: Synthetic oligonucleotide
  Target: LAMA2; (-) strand; PAM type: YTN; PAM sequence: TTG
tgtctaatcggtggaacagt

SEQ ID NO: 234770 - DNA, 20 bp, Artificial Sequence
  Description of Artificial Sequence: Synthetic oligonucleotide
  Target: LAMA2; (-) strand; PAM type: YTN; PAM sequence: TTG
cggccaattgtgtctaatcg

SEQ ID NO: 234771 - DNA, 20 bp, Artificial Sequence
  Description of Artificial Sequence: Synthetic oligonucleotide
  Target: LAMA2; (-) strand; PAM type: YTN; PAM sequence: TTT
gcggccaattgtgtctaatc

SEQ ID NO: 234772 - DNA, 20 bp, Artificial Sequence
  Description of Artificial Sequence: Synthetic oligonucleotide
  Target: LAMA2; (-) strand; PAM type: YTN; PAM sequence: TTG
tgtgtgtcaaacgtttgcgg

SEQ ID NO: 234773 - DNA, 20 bp, Artificial Sequence
  Description of Artificial Sequence: Synthetic oligonucleotide
  Target: LAMA2; (-) strand; PAM type: YTN; PAM sequence: TTA
taacatggtaccgagtgatc

SEQ ID NO: 234774 - DNA, 20 bp, Artificial Sequence
  Description of Artificial Sequence: Synthetic oligonucleotide
  Target: LAMA2; (-) strand; PAM type: YTN; PAM sequence: TTG
ccatattataacatggtacc

SEQ ID NO: 234775 - DNA, 20 bp, Artificial Sequence
  Description of Artificial Sequence: Synthetic oligonucleotide
  Target: LAMA2; (-) strand; PAM type: YTN; PAM sequence: CTA
ccaattgccatattataaca

SEQ ID NO: 234776 - DNA, 20 bp, Artificial Sequence
  Description of Artificial Sequence: Synthetic oligonucleotide
  Target: LAMA2; (-) strand; PAM type: YTN; PAM sequence: TTG
tatcacaggagggatcgtgg

SEQ ID NO: 234777 - DNA, 20 bp, Artificial Sequence
  Description of Artificial Sequence: Synthetic oligonucleotide
  Target: LAMA2; (-) strand; PAM type: YTN; PAM sequence: CTC
gtcgttgtatcacaggaggg

SEQ ID NO: 234778 - DNA, 20 bp, Artificial Sequence
  Description of Artificial Sequence: Synthetic oligonucleotide
  Target: LAMA2; (-) strand; PAM type: YTN; PAM sequence: TTG
ggagatggctcgtcgttgta

SEQ ID NO: 234779 - DNA, 20 bp, Artificial Sequence
  Description of Artificial Sequence: Synthetic oligonucleotide
  Target: LAMA2; (-) strand; PAM type: YTN; PAM sequence: TTT
gggagatggctcgtcgttgt

SEQ ID NO: 234780 - DNA, 20 bp, Artificial Sequence
  Description of Artificial Sequence: Synthetic oligonucleotide
  Target: LAMA2; (-) strand; PAM type: YTN; PAM sequence: CTA
atcatttgggagatggctcg

SEQ ID NO: 234781 - DNA, 20 bp, Artificial Sequence
  Description of Artificial Sequence: Synthetic oligonucleotide
  Target: LAMA2; (-) strand; PAM type: YTN; PAM sequence: TTC
ggcctaatcatttgggagat

SEQ ID NO: 234782 - DNA, 20 bp, Artificial Sequence
  Description of Artificial Sequence: Synthetic oligonucleotide
  Target: LAMA2; (-) strand; PAM type: YTN; PAM sequence: CTT
cggcctaatcatttgggaga

SEQ ID NO: 234783 - DNA, 20 bp, Artificial Sequence
  Description of Artificial Sequence: Synthetic oligonucleotide
  Target: LAMA2; (-) strand; PAM type: YTN; PAM sequence: CTA
cagcttcggcctaatcattt

SEQ ID NO: 234784 - DNA, 20 bp, Artificial Sequence
  Description of Artificial Sequence: Synthetic oligonucleotide
  Target: LAMA2; (-) strand; PAM type: YTN; PAM sequence: CTG
atatctacagcttcggccta

SEQ ID NO: 234785 - DNA, 20 bp, Artificial Sequence
  Description of Artificial Sequence: Synthetic oligonucleotide
  Target: LAMA2; (-) strand; PAM type: YTN; PAM sequence: CTA
catcatggctgatatctaca

SEQ ID NO: 234786 - DNA, 20 bp, Artificial Sequence
  Description of Artificial Sequence: Synthetic oligonucleotide
  Target: LAMA2; (-) strand; PAM type: YTN; PAM sequence: TTC
cagccctacatcatggctga

SEQ ID NO: 234787 - DNA, 20 bp, Artificial Sequence
  Description of Artificial Sequence: Synthetic oligonucleotide
  Target: LAMA2; (-) strand; PAM type: YTN; PAM sequence: CTT
ccagccctacatcatggctg

SEQ ID NO: 234788 - DNA, 20 bp, Artificial Sequence
  Description of Artificial Sequence: Synthetic oligonucleotide
  Target: LAMA2; (-) strand; PAM type: YTN; PAM sequence: CTG
aacaaaaaccacttccagcc

SEQ ID NO: 234789 - DNA, 20 bp, Artificial Sequence
  Description of Artificial Sequence: Synthetic oligonucleotide
  Target: LAMA2; (-) strand; PAM type: YTN; PAM sequence: CTG
gacgaaagcctgaacaaaaa

SEQ ID NO: 234790 - DNA, 20 bp, Artificial Sequence
  Description of Artificial Sequence: Synthetic oligonucleotide
  Target: LAMA2; (-) strand; PAM type: YTN; PAM sequence: CTC
cagaagtgctggacgaaagc

SEQ ID NO: 234791 - DNA, 20 bp, Artificial Sequence
  Description of Artificial Sequence: Synthetic oligonucleotide
  Target: LAMA2; (-) strand; PAM type: YTN; PAM sequence: CTG
gctccagaagtgctggacga

SEQ ID NO: 234792 - DNA, 20 bp, Artificial Sequence
  Description of Artificial Sequence: Synthetic oligonucleotide
  Target: LAMA2; (-) strand; PAM type: YTN; PAM sequence: CTA
cctggctccagaagtgctgg

SEQ ID NO: 234793 - DNA, 20 bp, Artificial Sequence
  Description of Artificial Sequence: Synthetic oligonucleotide
  Target: LAMA2; (-) strand; PAM type: YTN; PAM sequence: TTG
aataccagggtgggcaccaa

SEQ ID NO: 234794 - DNA, 20 bp, Artificial Sequence
  Description of Artificial Sequence: Synthetic oligonucleotide
  Target: LAMA2; (-) strand; PAM type: YTN; PAM sequence: CTT
gaataccagggtgggcacca

SEQ ID NO: 234795 - DNA, 20 bp, Artificial Sequence
  Description of Artificial Sequence: Synthetic oligonucleotide
  Target: LAMA2; (-) strand; PAM type: YTN; PAM sequence: TTG
atgtgcccttgaataccagg

SEQ ID NO: 234796 - DNA, 20 bp, Artificial Sequence
  Description of Artificial Sequence: Synthetic oligonucleotide
  Target: LAMA2; (-) strand; PAM type: YTN; PAM sequence: TTC
aacagtgacacaaatgaagt

SEQ ID NO: 234797 - DNA, 20 bp, Artificial Sequence
  Description of Artificial Sequence: Synthetic oligonucleotide
  Target: LAMA2; (-) strand; PAM type: YTN; PAM sequence: TTA
aattcaacagtgacacaaat

SEQ ID NO: 234798 - DNA, 20 bp, Artificial Sequence
  Description of Artificial Sequence: Synthetic oligonucleotide
  Target: LAMA2; (-) strand; PAM type: YTN; PAM sequence: CTG
ttaaattcaacagtgacaca

SEQ ID NO: 234799 - DNA, 20 bp, Artificial Sequence
  Description of Artificial Sequence: Synthetic oligonucleotide
  Target: LAMA2; (-) strand; PAM type: YTN; PAM sequence: TTG
ctgttaaattcaacagtgac

SEQ ID NO: 234800 - DNA, 20 bp, Artificial Sequence
  Description of Artificial Sequence: Synthetic oligonucleotide
  Target: LAMA2; (-) strand; PAM type: YTN; PAM sequence: CTT
gctgttaaattcaacagtga

SEQ ID NO: 234801 - DNA, 20 bp, Artificial Sequence
  Description of Artificial Sequence: Synthetic oligonucleotide
  Target: LAMA2; (-) strand; PAM type: YTN; PAM sequence: CTG
ggccttgctgttaaattcaa

SEQ ID NO: 234802 - DNA, 20 bp, Artificial Sequence
  Description of Artificial Sequence: Synthetic oligonucleotide
  Target: LAMA2; (-) strand; PAM type: YTN; PAM sequence: CTG
acctgggccttgctgttaaa

SEQ ID NO: 234803 - DNA, 20 bp, Artificial Sequence
  Description of Artificial Sequence: Synthetic oligonucleotide
  Target: LAMA2; (-) strand; PAM type: YTN; PAM sequence: TTG
ctgacctgggccttgctgtt

SEQ ID NO: 234804 - DNA, 20 bp, Artificial Sequence
  Description of Artificial Sequence: Synthetic oligonucleotide
  Target: LAMA2; (-) strand; PAM type: YTN; PAM sequence: CTG
cattgctgacctgggccttg

SEQ ID NO: 234805 - DNA, 20 bp, Artificial Sequence
  Description of Artificial Sequence: Synthetic oligonucleotide
  Target: LAMA2; (-) strand; PAM type: YTN; PAM sequence: TTG
ctgcattgctgacctgggcc

SEQ ID NO: 234806 - DNA, 20 bp, Artificial Sequence
  Description of Artificial Sequence: Synthetic oligonucleotide
  Target: LAMA2; (-) strand; PAM type: YTN; PAM sequence: CTC
atcaagaaaaatgggagttg

SEQ ID NO: 234807 - DNA, 20 bp, Artificial Sequence
  Description of Artificial Sequence: Synthetic oligonucleotide
  Target: LAMA2; (-) strand; PAM type: YTN; PAM sequence: CTA
aagagcaaaaacatcctcat

SEQ ID NO: 234808 - DNA, 20 bp, Artificial Sequence
  Description of Artificial Sequence: Synthetic oligonucleotide
  Target: LAMA2; (-) strand; PAM type: YTN; PAM sequence: CTC
atcgagacctaaagagcaaa

SEQ ID NO: 234809 - DNA, 20 bp, Artificial Sequence
  Description of Artificial Sequence: Synthetic oligonucleotide
  Target: LAMA2; (-) strand; PAM type: YTN; PAM sequence: TTG
ctcatcgagacctaaagagc

SEQ ID NO: 234810 - DNA, 20 bp, Artificial Sequence
  Description of Artificial Sequence: Synthetic oligonucleotide
  Target: LAMA2; (-) strand; PAM type: YTN; PAM sequence: CTG
cacacagaaacgtatggcac

SEQ ID NO: 234811 - DNA, 20 bp, Artificial Sequence
  Description of Artificial Sequence: Synthetic oligonucleotide
  Target: LAMA2; (-) strand; PAM type: YTN; PAM sequence: CTG
tgccacctgcacacagaaac

SEQ ID NO: 234812 - DNA, 20 bp, Artificial Sequence
  Description of Artificial Sequence: Synthetic oligonucleotide
  Target: LAMA2; (-) strand; PAM type: YTN; PAM sequence: CTG
tggtctgtgccacctgcaca

SEQ ID NO: 234813 - DNA, 20 bp, Artificial Sequence
  Description of Artificial Sequence: Synthetic oligonucleotide
  Target: LAMA2; (-) strand; PAM type: YTN; PAM sequence: CTG
cctgtggtctgtgccacctg

SEQ ID NO: 234814 - DNA, 20 bp, Artificial Sequence
  Description of Artificial Sequence: Synthetic oligonucleotide
  Target: LAMA2; (-) strand; PAM type: YTN; PAM sequence: TTC
agctgcctgtggtctgtgcc

SEQ ID NO: 234815 - DNA, 20 bp, Artificial Sequence
  Description of Artificial Sequence: Synthetic oligonucleotide
  Target: LAMA2; (-) strand; PAM type: YTN; PAM sequence: TTA
ttcagctgcctgtggtctgt

SEQ ID NO: 234816 - DNA, 20 bp, Artificial Sequence
  Description of Artificial Sequence: Synthetic oligonucleotide
  Target: LAMA2; (-) strand; PAM type: YTN; PAM sequence: CTT
attcagctgcctgtggtctg

SEQ ID NO: 234817 - DNA, 20 bp, Artificial Sequence
  Description of Artificial Sequence: Synthetic oligonucleotide
  Target: LAMA2; (-) strand; PAM type: YTN; PAM sequence: TTG
gcttattcagctgcctgtgg

SEQ ID NO: 234818 - DNA, 20 bp, Artificial Sequence
  Description of Artificial Sequence: Synthetic oligonucleotide
  Target: LAMA2; (-) strand; PAM type: YTN; PAM sequence: TTA
aattggcttattcagctgcc

SEQ ID NO: 234819 - DNA, 20 bp, Artificial Sequence
  Description of Artificial Sequence: Synthetic oligonucleotide
  Target: LAMA2; (-) strand; PAM type: YTN; PAM sequence: CTT
aaattggcttattcagctgc

SEQ ID NO: 234820 - DNA, 20 bp, Artificial Sequence
  Description of Artificial Sequence: Synthetic oligonucleotide
  Target: LAMA2; (-) strand; PAM type: YTN; PAM sequence: CTG
cttaaattggcttattcagc

SEQ ID NO: 234821 - DNA, 20 bp, Artificial Sequence
  Description of Artificial Sequence: Synthetic oligonucleotide
  Target: LAMA2; (-) strand; PAM type: YTN; PAM sequence: CTG
gacaccagagccctgcttaa

SEQ ID NO: 234822 - DNA, 20 bp, Artificial Sequence
  Description of Artificial Sequence: Synthetic oligonucleotide
  Target: LAMA2; (-) strand; PAM type: YTN; PAM sequence: CTA
cgctggacaccagagccctg

SEQ ID NO: 234823 - DNA, 20 bp, Artificial Sequence
  Description of Artificial Sequence: Synthetic oligonucleotide
  Target: LAMA2; (-) strand; PAM type: YTN; PAM sequence: CTG
aaatgtgctacgctggacac

SEQ ID NO: 234824 - DNA, 20 bp, Artificial Sequence
  Description of Artificial Sequence: Synthetic oligonucleotide
  Target: LAMA2; (-) strand; PAM type: YTN; PAM sequence: TTC
ctgaaatgtgctacgctgga

SEQ ID NO: 234825 - DNA, 20 bp, Artificial Sequence
  Description of Artificial Sequence: Synthetic oligonucleotide
  Target: LAMA2; (-) strand; PAM type: YTN; PAM sequence: CTT
cctgaaatgtgctacgctgg

SEQ ID NO: 234826 - DNA, 20 bp, Artificial Sequence
  Description of Artificial Sequence: Synthetic oligonucleotide
  Target: LAMA2; (-) strand; PAM type: YTN; PAM sequence: CTA
tgacttcctgaaatgtgcta

SEQ ID NO: 234827 - DNA, 20 bp, Artificial Sequence
  Description of Artificial Sequence: Synthetic oligonucleotide
  Target: LAMA2; (-) strand; PAM type: YTN; PAM sequence: CTC
tatgacttcctgaaatgtgc

SEQ ID NO: 234828 - DNA, 20 bp, Artificial Sequence
  Description of Artificial Sequence: Synthetic oligonucleotide
  Target: LAMA2; (-) strand; PAM type: YTN; PAM sequence: CTC
tctatgacttcctgaaatgt

SEQ ID NO: 234829 - DNA, 20 bp, Artificial Sequence
  Description of Artificial Sequence: Synthetic oligonucleotide
  Target: LAMA2; (-) strand; PAM type: YTN; PAM sequence: TTA
ccatgaaaatggatctctct

SEQ ID NO: 234830 - DNA, 20 bp, Artificial Sequence
  Description of Artificial Sequence: Synthetic oligonucleotide
  Target: LAMA2; (-) strand; PAM type: YTN; PAM sequence: CTG
attaccatgaaaatggatct

SEQ ID NO: 234831 - DNA, 20 bp, Artificial Sequence
  Description of Artificial Sequence: Synthetic oligonucleotide
  Target: LAMA2; (-) strand; PAM type: YTN; PAM sequence: TTA
ctgattaccatgaaaatgga

SEQ ID NO: 234832 - DNA, 20 bp, Artificial Sequence
  Description of Artificial Sequence: Synthetic oligonucleotide
  Target: LAMA2; (-) strand; PAM type: YTN; PAM sequence: TTG
attactgattaccatgaaaa

SEQ ID NO: 234833 - DNA, 20 bp, Artificial Sequence
  Description of Artificial Sequence: Synthetic oligonucleotide
  Target: LAMA2; (-) strand; PAM type: YTN; PAM sequence: TTT
gattactgattaccatgaaa

SEQ ID NO: 234834 - DNA, 20 bp, Artificial Sequence
  Description of Artificial Sequence: Synthetic oligonucleotide
  Target: LAMA2; (-) strand; PAM type: YTN; PAM sequence: CTA
tttgattactgattaccatg

SEQ ID NO: 234835 - DNA, 20 bp, Artificial Sequence
  Description of Artificial Sequence: Synthetic oligonucleotide
  Target: LAMA2; (-) strand; PAM type: YTN; PAM sequence: CTC
tatttgattactgattacca

SEQ ID NO: 234836 - DNA, 20 bp, Artificial Sequence
  Description of Artificial Sequence: Synthetic oligonucleotide
  Target: LAMA2; (-) strand; PAM type: YTN; PAM sequence: CTC
agctctatttgattactgat

SEQ ID NO: 234837 - DNA, 20 bp, Artificial Sequence
  Description of Artificial Sequence: Synthetic oligonucleotide
  Target: LAMA2; (-) strand; PAM type: YTN; PAM sequence: CTG
gactcagctctatttgatta

SEQ ID NO: 234838 - DNA, 20 bp, Artificial Sequence
  Description of Artificial Sequence: Synthetic oligonucleotide
  Target: LAMA2; (-) strand; PAM type: YTN; PAM sequence: TTC
ctggactcagctctatttga

SEQ ID NO: 234839 - DNA, 20 bp, Artificial Sequence
  Description of Artificial Sequence: Synthetic oligonucleotide
  Target: LAMA2; (-) strand; PAM type: YTN; PAM sequence: TTA
aaggtacaggttcctggact

SEQ ID NO: 234840 - DNA, 20 bp, Artificial Sequence
  Description of Artificial Sequence: Synthetic oligonucleotide
  Target: LAMA2; (-) strand; PAM type: YTN; PAM sequence: TTC
atagcggcagatattaaagg

SEQ ID NO: 234841 - DNA, 20 bp, Artificial Sequence
  Description of Artificial Sequence: Synthetic oligonucleotide
  Target: LAMA2; (-) strand; PAM type: YTN; PAM sequence: TTT
catagcggcagatattaaag

SEQ ID NO: 234842 - DNA, 20 bp, Artificial Sequence
  Description of Artificial Sequence: Synthetic oligonucleotide
  Target: LAMA2; (-) strand; PAM type: YTN; PAM sequence: TTG
gtttcatagcggcagatatt

SEQ ID NO: 234843 - DNA, 20 bp, Artificial Sequence
  Description of Artificial Sequence: Synthetic oligonucleotide
  Target: LAMA2; (-) strand; PAM type: YTN; PAM sequence: CTT
ggtttcatagcggcagatat

SEQ ID NO: 234844 - DNA, 20 bp, Artificial Sequence
  Description of Artificial Sequence: Synthetic oligonucleotide
  Target: LAMA2; (-) strand; PAM type: YTN; PAM sequence: CTA
atgcgccatgaaaacatact

SEQ ID NO: 234845 - DNA, 20 bp, Artificial Sequence
  Description of Artificial Sequence: Synthetic oligonucleotide
  Target: LAMA2; (-) strand; PAM type: YTN; PAM sequence: CTG
tgctaatgcgccatgaaaac

SEQ ID NO: 234846 - DNA, 20 bp, Artificial Sequence
  Description of Artificial Sequence: Synthetic oligonucleotide
  Target: LAMA2; (-) strand; PAM type: YTN; PAM sequence: CTA
ccaaactgtgctaatgcgcc

SEQ ID NO: 234847 - DNA, 20 bp, Artificial Sequence
  Description of Artificial Sequence: Synthetic oligonucleotide
  Target: LAMA2; (-) strand; PAM type: YTN; PAM sequence: TTC
gagaaacagaaatctaccaa

SEQ ID NO: 234848 - DNA, 20 bp, Artificial Sequence
  Description of Artificial Sequence: Synthetic oligonucleotide
  Target: LAMA2; (-) strand; PAM type: YTN; PAM sequence: TTT
cgagaaacagaaatctacca

SEQ ID NO: 234849 - DNA, 20 bp, Artificial Sequence
  Description of Artificial Sequence: Synthetic oligonucleotide
  Target: LAMA2; (-) strand; PAM type: YTN; PAM sequence: CTG
gtttcgagaaacagaaatct

SEQ ID NO: 234850 - DNA, 20 bp, Artificial Sequence
  Description of Artificial Sequence: Synthetic oligonucleotide
  Target: LAMA2; (-) strand; PAM type: YTN; PAM sequence: CTG
aagaagccagctggtttcga

SEQ ID NO: 234851 - DNA, 20 bp, Artificial Sequence
  Description of Artificial Sequence: Synthetic oligonucleotide
  Target: LAMA2; (-) strand; PAM type: YTN; PAM sequence: TTA
ccactgaagaagccagctgg

SEQ ID NO: 234852 - DNA, 20 bp, Artificial Sequence
  Description of Artificial Sequence: Synthetic oligonucleotide
  Target: LAMA2; (-) strand; PAM type: YTN; PAM sequence: TTT
accactgaagaagccagctg

SEQ ID NO: 234853 - DNA, 20 bp, Artificial Sequence
  Description of Artificial Sequence: Synthetic oligonucleotide
  Target: LAMA2; (-) strand; PAM type: YTN; PAM sequence: CTT
taccactgaagaagccagct

SEQ ID NO: 234854 - DNA, 20 bp, Artificial Sequence
  Description of Artificial Sequence: Synthetic oligonucleotide
  Target: LAMA2; (-) strand; PAM type: YTN; PAM sequence: TTC
tttaccactgaagaagccag

SEQ ID NO: 234855 - DNA, 20 bp, Artificial Sequence
  Description of Artificial Sequence: Synthetic oligonucleotide
  Target: LAMA2; (-) strand; PAM type: YTN; PAM sequence: TTG
gtaaaggccgatatggagaa

SEQ ID NO: 234856 - DNA, 20 bp, Artificial Sequence
  Description of Artificial Sequence: Synthetic oligonucleotide
  Target: LAMA2; (-) strand; PAM type: YTN; PAM sequence: TTC
agatggtccggcaagttggt

SEQ ID NO: 234857 - DNA, 20 bp, Artificial Sequence
  Description of Artificial Sequence: Synthetic oligonucleotide
  Target: LAMA2; (-) strand; PAM type: YTN; PAM sequence: TTG
ccaaacagattcagatggtc

SEQ ID NO: 234858 - DNA, 20 bp, Artificial Sequence
  Description of Artificial Sequence: Synthetic oligonucleotide
  Target: LAMA2; (-) strand; PAM type: YTN; PAM sequence: CTA
ttgccaaacagattcagatg

SEQ ID NO: 234859 - DNA, 20 bp, Artificial Sequence
  Description of Artificial Sequence: Synthetic oligonucleotide
  Target: LAMA2; (-) strand; PAM type: YTN; PAM sequence: TTC
agcgaactattgccaaacag

SEQ ID NO: 234860 - DNA, 20 bp, Artificial Sequence
  Description of Artificial Sequence: Synthetic oligonucleotide
  Target: LAMA2; (-) strand; PAM type: YTN; PAM sequence: TTG
gttcagcgaactattgccaa

SEQ ID NO: 234861 - DNA, 20 bp, Artificial Sequence
  Description of Artificial Sequence: Synthetic oligonucleotide
  Target: LAMA2; (-) strand; PAM type: YTN; PAM sequence: TTA
ttggttcagcgaactattgc

SEQ ID NO: 234862 - DNA, 20 bp, Artificial Sequence
  Description of Artificial Sequence: Synthetic oligonucleotide
  Target: LAMA2; (-) strand; PAM type: YTN; PAM sequence: TTT
attggttcagcgaactattg

SEQ ID NO: 234863 - DNA, 20 bp, Artificial Sequence
  Description of Artificial Sequence: Synthetic oligonucleotide
  Target: LAMA2; (-) strand; PAM type: YTN; PAM sequence: CTT
tattggttcagcgaactatt

SEQ ID NO: 234864 - DNA, 20 bp, Artificial Sequence
  Description of Artificial Sequence: Synthetic oligonucleotide
  Target: LAMA2; (-) strand; PAM type: YTN; PAM sequence: CTA
cctttattggttcagcgaac

SEQ ID NO: 234865 - DNA, 20 bp, Artificial Sequence
  Description of Artificial Sequence: Synthetic oligonucleotide
  Target: LAMA2; (-) strand; PAM type: YTN; PAM sequence: CTG
gactacctttattggttcag

SEQ ID NO: 234866 - DNA, 20 bp, Artificial Sequence
  Description of Artificial Sequence: Synthetic oligonucleotide
  Target: LAMA2; (-) strand; PAM type: YTN; PAM sequence: CTG
gtagtgggtctggactacct

SEQ ID NO: 234867 - DNA, 20 bp, Artificial Sequence
  Description of Artificial Sequence: Synthetic oligonucleotide
  Target: LAMA2; (-) strand; PAM type: YTN; PAM sequence: TTC
tggtagtgggtctggactac

SEQ ID NO: 234868 - DNA, 20 bp, Artificial Sequence
  Description of Artificial Sequence: Synthetic oligonucleotide
  Target: LAMA2; (-) strand; PAM type: YTN; PAM sequence: TTG
accagtcacaaagttctggt

SEQ ID NO: 234869 - DNA, 20 bp, Artificial Sequence
  Description of Artificial Sequence: Synthetic oligonucleotide
  Target: LAMA2; (-) strand; PAM type: YTN; PAM sequence: TTA
ttgaccagtcacaaagttct

SEQ ID NO: 234870 - DNA, 20 bp, Artificial Sequence
  Description of Artificial Sequence: Synthetic oligonucleotide
  Target: LAMA2; (-) strand; PAM type: YTN; PAM sequence: CTT
attgaccagtcacaaagttc

SEQ ID NO: 234871 - DNA, 20 bp, Artificial Sequence
  Description of Artificial Sequence: Synthetic oligonucleotide
  Target: LAMA2; (-) strand; PAM type: YTN; PAM sequence: CTA
aaagaccttattgaccagtc

SEQ ID NO: 234872 - DNA, 20 bp, Artificial Sequence
  Description of Artificial Sequence: Synthetic oligonucleotide
  Target: LAMA2; (-) strand; PAM type: YTN; PAM sequence: TTG
gaaaatcactaaaagacctt

SEQ ID NO: 234873 - DNA, 20 bp, Artificial Sequence
  Description of Artificial Sequence: Synthetic oligonucleotide
  Target: LAMA2; (-) strand; PAM type: YTN; PAM sequence: TTC
cagttggaaaatcactaaaa

SEQ ID NO: 234874 - DNA, 20 bp, Artificial Sequence
  Description of Artificial Sequence: Synthetic oligonucleotide
  Target: LAMA2; (-) strand; PAM type: YTN; PAM sequence: TTA
ttccagttggaaaatcacta

SEQ ID NO: 234875 - DNA, 20 bp, Artificial Sequence
  Description of Artificial Sequence: Synthetic oligonucleotide
  Target: LAMA2; (-) strand; PAM type: YTN; PAM sequence: TTT
attccagttggaaaatcact

SEQ ID NO: 234876 - DNA, 20 bp, Artificial Sequence
  Description of Artificial Sequence: Synthetic oligonucleotide
  Target: LAMA2; (-) strand; PAM type: YTN; PAM sequence: TTG
gaacaggatgaagcatttat

SEQ ID NO: 234877 - DNA, 20 bp, Artificial Sequence
  Description of Artificial Sequence: Synthetic oligonucleotide
  Target: LAMA2; (-) strand; PAM type: YTN; PAM sequence: TTT
ggaacaggatgaagcattta

SEQ ID NO: 234878 - DNA, 20 bp, Artificial Sequence
  Description of Artificial Sequence: Synthetic oligonucleotide
  Target: LAMA2; (-) strand; PAM type: YTN; PAM sequence: TTA
caatcgtgatttggaacagg

SEQ ID NO: 234879 - DNA, 20 bp, Artificial Sequence
  Description of Artificial Sequence: Synthetic oligonucleotide
  Target: LAMA2; (-) strand; PAM type: YTN; PAM sequence: CTC
aagcagacgtcgttacaatc

SEQ ID NO: 234880 - DNA, 20 bp, Artificial Sequence
  Description of Artificial Sequence: Synthetic oligonucleotide
  Target: LAMA2; (-) strand; PAM type: YTN; PAM sequence: TTG
caagagcatctcaagcagac

SEQ ID NO: 234881 - DNA, 20 bp, Artificial Sequence
  Description of Artificial Sequence: Synthetic oligonucleotide
  Target: LAMA2; (-) strand; PAM type: YTN; PAM sequence: TTA
ttgcaagagcatctcaagca

SEQ ID NO: 234882 - DNA, 20 bp, Artificial Sequence
  Description of Artificial Sequence: Synthetic oligonucleotide
  Target: LAMA2; (-) strand; PAM type: YTN; PAM sequence: TTA
caaacattattgcaagagca

SEQ ID NO: 234883 - DNA, 20 bp, Artificial Sequence
  Description of Artificial Sequence: Synthetic oligonucleotide
  Target: LAMA2; (-) strand; PAM type: YTN; PAM sequence: TTG
ttacaaacattattgcaaga

SEQ ID NO: 234884 - DNA, 20 bp, Artificial Sequence
  Description of Artificial Sequence: Synthetic oligonucleotide
  Target: LAMA2; (-) strand; PAM type: YTN; PAM sequence: TTT
gttacaaacattattgcaag

SEQ ID NO: 234885 - DNA, 20 bp, Artificial Sequence
  Description of Artificial Sequence: Synthetic oligonucleotide
  Target: LAMA2; (-) strand; PAM type: YTN; PAM sequence: TTT
tgttacaaacattattgcaa

SEQ ID NO: 234886 - DNA, 20 bp, Artificial Sequence
  Description of Artificial Sequence: Synthetic oligonucleotide
  Target: LAMA2; (-) strand; PAM type: YTN; PAM sequence: CTT
ttgttacaaacattattgca

SEQ ID NO: 234887 - DNA, 20 bp, Artificial Sequence
  Description of Artificial Sequence: Synthetic oligonucleotide
  Target: LAMA2; (-) strand; PAM type: YTN; PAM sequence: CTG
cttttgttacaaacattatt

SEQ ID NO: 234888 - DNA, 20 bp, Artificial Sequence
  Description of Artificial Sequence: Synthetic oligonucleotide
  Target: LAMA2; (-) strand; PAM type: YTN; PAM sequence: CTC
cagctgcttttgttacaaac

SEQ ID NO: 234889 - DNA, 20 bp, Artificial Sequence
  Description of Artificial Sequence: Synthetic oligonucleotide
  Target: LAMA2; (-) strand; PAM type: YTN; PAM sequence: TTC
tccagctgcttttgttacaa

SEQ ID NO: 234890 - DNA, 20 bp, Artificial Sequence
  Description of Artificial Sequence: Synthetic oligonucleotide
  Target: LAMA2; (-) strand; PAM type: YTN; PAM sequence: CTT
ctccagctgcttttgttaca

SEQ ID NO: 234891 - DNA, 20 bp, Artificial Sequence
  Description of Artificial Sequence: Synthetic oligonucleotide
  Target: LAMA2; (-) strand; PAM type: YTN; PAM sequence: CTA
tgatcatcttctccagctgc

SEQ ID NO: 234892 - DNA, 20 bp, Artificial Sequence
  Description of Artificial Sequence: Synthetic oligonucleotide
  Target: LAMA2; (-) strand; PAM type: YTN; PAM sequence: TTG
ctatgatcatcttctccagc

SEQ ID NO: 234893 - DNA, 20 bp, Artificial Sequence
  Description of Artificial Sequence: Synthetic oligonucleotide
  Target: LAMA2; (-) strand; PAM type: YTN; PAM sequence: CTG
cataattgctatgatcatct

SEQ ID NO: 234894 - DNA, 20 bp, Artificial Sequence
  Description of Artificial Sequence: Synthetic oligonucleotide
  Target: LAMA2; (-) strand; PAM type: YTN; PAM sequence: CTG
tctgcataattgctatgatc

SEQ ID NO: 234895 - DNA, 20 bp, Artificial Sequence
  Description of Artificial Sequence: Synthetic oligonucleotide
  Target: LAMA2; (-) strand; PAM type: YTN; PAM sequence: CTA
tggctgtctgcataattgct

SEQ ID NO: 234896 - DNA, 20 bp, Artificial Sequence
  Description of Artificial Sequence: Synthetic oligonucleotide
  Target: LAMA2; (-) strand; PAM type: YTN; PAM sequence: TTC
tatggctgtctgcataattg

SEQ ID NO: 234897 - DNA, 20 bp, Artificial Sequence
  Description of Artificial Sequence: Synthetic oligonucleotide
  Target: LAMA2; (-) strand; PAM type: YTN; PAM sequence: TTT
ctatggctgtctgcataatt

SEQ ID NO: 234898 - DNA, 20 bp, Artificial Sequence
  Description of Artificial Sequence: Synthetic oligonucleotide
  Target: LAMA2; (-) strand; PAM type: YTN; PAM sequence: CTC
atttctatggctgtctgcat

SEQ ID NO: 234899 - DNA, 20 bp, Artificial Sequence
  Description of Artificial Sequence: Synthetic oligonucleotide
  Target: LAMA2; (-) strand; PAM type: YTN; PAM sequence: TTG
ctcatttctatggctgtctg

SEQ ID NO: 234900 - DNA, 20 bp, Artificial Sequence
  Description of Artificial Sequence: Synthetic oligonucleotide
  Target: LAMA2; (-) strand; PAM type: YTN; PAM sequence: TTT
gctcatttctatggctgtct

SEQ ID NO: 234901 - DNA, 20 bp, Artificial Sequence
  Description of Artificial Sequence: Synthetic oligonucleotide
  Target: LAMA2; (-) strand; PAM type: YTN; PAM sequence: TTT
tgctcatttctatggctgtc

SEQ ID NO: 234902 - DNA, 20 bp, Artificial Sequence
  Description of Artificial Sequence: Synthetic oligonucleotide
  Target: LAMA2; (-) strand; PAM type: YTN; PAM sequence: CTG
gttttgctcatttctatggc

SEQ ID NO: 234903 - DNA, 20 bp, Artificial Sequence
  Description of Artificial Sequence: Synthetic oligonucleotide
  Target: LAMA2; (-) strand; PAM type: YTN; PAM sequence: TTC
gatggctggttttgctcatt

SEQ ID NO: 234904 - DNA, 20 bp, Artificial Sequence
  Description of Artificial Sequence: Synthetic oligonucleotide
  Target: LAMA2; (-) strand; PAM type: YTN; PAM sequence: TTG
atggcagcattcgatggctg

SEQ ID NO: 234905 - DNA, 20 bp, Artificial Sequence
  Description of Artificial Sequence: Synthetic oligonucleotide
  Target: LAMA2; (-) strand; PAM type: YTN; PAM sequence: TTT
gatggcagcattcgatggct

SEQ ID NO: 234906 - DNA, 20 bp, Artificial Sequence
  Description of Artificial Sequence: Synthetic oligonucleotide
  Target: LAMA2; (-) strand; PAM type: YTN; PAM sequence: TTT
tgatggcagcattcgatggc

SEQ ID NO: 234907 - DNA, 20 bp, Artificial Sequence
  Description of Artificial Sequence: Synthetic oligonucleotide
  Target: LAMA2; (-) strand; PAM type: YTN; PAM sequence: TTT
ttgatggcagcattcgatgg

SEQ ID NO: 234908 - DNA, 20 bp, Artificial Sequence
  Description of Artificial Sequence: Synthetic oligonucleotide
  Target: LAMA2; (-) strand; PAM type: YTN; PAM sequence: TTT
tttgatggcagcattcgatg

SEQ ID NO: 234909 - DNA, 20 bp, Artificial Sequence
  Description of Artificial Sequence: Synthetic oligonucleotide
  Target: LAMA2; (-) strand; PAM type: YTN; PAM sequence: TTG
tcataggtccgttttttgat

SEQ ID NO: 234910 - DNA, 20 bp, Artificial Sequence
  Description of Artificial Sequence: Synthetic oligonucleotide
  Target: LAMA2; (-) strand; PAM type: YTN; PAM sequence: CTG
ttgtcataggtccgtttttt

SEQ ID NO: 234911 - DNA, 20 bp, Artificial Sequence
  Description of Artificial Sequence: Synthetic oligonucleotide
  Target: LAMA2; (-) strand; PAM type: YTN; PAM sequence: TTG
caacccacatgccccctgtt

SEQ ID NO: 234912 - DNA, 20 bp, Artificial Sequence
  Description of Artificial Sequence: Synthetic oligonucleotide
  Target: LAMA2; (-) strand; PAM type: YTN; PAM sequence: TTT
gcaacccacatgccccctgt

SEQ ID NO: 234913 - DNA, 20 bp, Artificial Sequence
  Description of Artificial Sequence: Synthetic oligonucleotide
  Target: LAMA2; (-) strand; PAM type: YTN; PAM sequence: TTA
tgtaaccagtatttgcaacc

SEQ ID NO: 234914 - DNA, 20 bp, Artificial Sequence
  Description of Artificial Sequence: Synthetic oligonucleotide
  Target: LAMA2; (-) strand; PAM type: YTN; PAM sequence: TTT
atgtaaccagtatttgcaac

SEQ ID NO: 234915 - DNA, 20 bp, Artificial Sequence
  Description of Artificial Sequence: Synthetic oligonucleotide
  Target: LAMA2; (-) strand; PAM type: YTN; PAM sequence: TTG
tcggaccaatttatgtaacc

SEQ ID NO: 234916 - DNA, 20 bp, Artificial Sequence
  Description of Artificial Sequence: Synthetic oligonucleotide
  Target: LAMA2; (-) strand; PAM type: YTN; PAM sequence: CTA
cgccggacaatagaatgttg

SEQ ID NO: 234917 - DNA, 20 bp, Artificial Sequence
  Description of Artificial Sequence: Synthetic oligonucleotide
  Target: LAMA2; (-) strand; PAM type: YTN; PAM sequence: CTC
caaaagcccagctacgccgg

SEQ ID NO: 234918 - DNA, 20 bp, Artificial Sequence
  Description of Artificial Sequence: Synthetic oligonucleotide
  Target: LAMA2; (-) strand; PAM type: YTN; PAM sequence: TTC
tccaaaagcccagctacgcc

SEQ ID NO: 234919 - DNA, 20 bp, Artificial Sequence
  Description of Artificial Sequence: Synthetic oligonucleotide
  Target: LAMA2; (-) strand; PAM type: YTN; PAM sequence: TTC
agtgcaaagattctccaaaa

SEQ ID NO: 234920 - DNA, 20 bp, Artificial Sequence
  Description of Artificial Sequence: Synthetic oligonucleotide
  Target: LAMA2; (-) strand; PAM type: YTN; PAM sequence: TTT
cagtgcaaagattctccaaa

SEQ ID NO: 234921 - DNA, 20 bp, Artificial Sequence
  Description of Artificial Sequence: Synthetic oligonucleotide
  Target: LAMA2; (-) strand; PAM type: YTN; PAM sequence: TTT
tcagtgcaaagattctccaa

SEQ ID NO: 234922 - DNA, 20 bp, Artificial Sequence
  Description of Artificial Sequence: Synthetic oligonucleotide
  Target: LAMA2; (-) strand; PAM type: YTN; PAM sequence: CTG
attttcagtgcaaagattct

SEQ ID NO: 234923 - DNA, 20 bp, Artificial Sequence
  Description of Artificial Sequence: Synthetic oligonucleotide
  Target: LAMA2; (-) strand; PAM type: YTN; PAM sequence: TTC
agggtgtatgaaatatgaag

SEQ ID NO: 234924 - DNA, 20 bp, Artificial Sequence
  Description of Artificial Sequence: Synthetic oligonucleotide
  Target: LAMA2; (-) strand; PAM type: YTN; PAM sequence: CTT
cagggtgtatgaaatatgaa

SEQ ID NO: 234925 - DNA, 20 bp, Artificial Sequence
  Description of Artificial Sequence: Synthetic oligonucleotide
  Target: LAMA2; (-) strand; PAM type: YTN; PAM sequence: TTA
gcttcagggtgtatgaaata

SEQ ID NO: 234926 - DNA, 20 bp, Artificial Sequence
  Description of Artificial Sequence: Synthetic oligonucleotide
  Target: LAMA2; (-) strand; PAM type: YTN; PAM sequence: TTG
ccatcatagaagaagatgac

SEQ ID NO: 234927 - DNA, 20 bp, Artificial Sequence
  Description of Artificial Sequence: Synthetic oligonucleotide
  Target: LAMA2; (-) strand; PAM type: YTN; PAM sequence: TTT
gccatcatagaagaagatga

SEQ ID NO: 234928 - DNA, 20 bp, Artificial Sequence
  Description of Artificial Sequence: Synthetic oligonucleotide
  Target: LAMA2; (-) strand; PAM type: YTN; PAM sequence: CTT
tgccatcatagaagaagatg

SEQ ID NO: 234929 - DNA, 20 bp, Artificial Sequence
  Description of Artificial Sequence: Synthetic oligonucleotide
  Target: LAMA2; (-) strand; PAM type: YTN; PAM sequence: TTG
ctttgccatcatagaagaag

SEQ ID NO: 234930 - DNA, 20 bp, Artificial Sequence
  Description of Artificial Sequence: Synthetic oligonucleotide
  Target: LAMA2; (-) strand; PAM type: YTN; PAM sequence: CTA
atggacgttgctttgccatc

SEQ ID NO: 234931 - DNA, 20 bp, Artificial Sequence
  Description of Artificial Sequence: Synthetic oligonucleotide
  Target: LAMA2; (-) strand; PAM type: YTN; PAM sequence: TTA
ataacacatgcataactaat

SEQ ID NO: 234932 - DNA, 20 bp, Artificial Sequence
  Description of Artificial Sequence: Synthetic oligonucleotide
  Target: LAMA2; (-) strand; PAM type: YTN; PAM sequence: CTA
ttaataacacatgcataact

SEQ ID NO: 234933 - DNA, 20 bp, Artificial Sequence
  Description of Artificial Sequence: Synthetic oligonucleotide
  Target: LAMA2; (-) strand; PAM type: YTN; PAM sequence: CTG
cccagatgatgctattaata

SEQ ID NO: 234934 - DNA, 20 bp, Artificial Sequence
  Description of Artificial Sequence: Synthetic oligonucleotide
  Target: LAMA2; (-) strand; PAM type: YTN; PAM sequence: CTG
agggcactgcccagatgatg

SEQ ID NO: 234935 - DNA, 20 bp, Artificial Sequence
  Description of Artificial Sequence: Synthetic oligonucleotide
  Target: LAMA2; (-) strand; PAM type: YTN; PAM sequence: TTG
ctgagggcactgcccagatg

SEQ ID NO: 234936 - DNA, 20 bp, Artificial Sequence
  Description of Artificial Sequence: Synthetic oligonucleotide
  Target: LAMA2; (-) strand; PAM type: YTN; PAM sequence: CTA
ttgctgagggcactgcccag

SEQ ID NO: 234937 - DNA, 20 bp, Artificial Sequence
  Description of Artificial Sequence: Synthetic oligonucleotide
  Target: LAMA2; (-) strand; PAM type: YTN; PAM sequence: TTC
aagtgctattgctgagggca

SEQ ID NO: 234938 - DNA, 20 bp, Artificial Sequence
  Description of Artificial Sequence: Synthetic oligonucleotide
  Target: LAMA2; (-) strand; PAM type: YTN; PAM sequence: TTT
caagtgctattgctgagggc

SEQ ID NO: 234939 - DNA, 20 bp, Artificial Sequence
  Description of Artificial Sequence: Synthetic oligonucleotide
  Target: LAMA2; (-) strand; PAM type: YTN; PAM sequence: TTT
tcaagtgctattgctgaggg

SEQ ID NO: 234940 - DNA, 20 bp, Artificial Sequence
  Description of Artificial Sequence: Synthetic oligonucleotide
  Target: LAMA2; (-) strand; PAM type: YTN; PAM sequence: TTT
ttcaagtgctattgctgagg

SEQ ID NO: 234941 - DNA, 20 bp, Artificial Sequence
  Description of Artificial Sequence: Synthetic oligonucleotide
  Target: LAMA2; (-) strand; PAM type: YTN; PAM sequence: TTT
tttcaagtgctattgctgag

SEQ ID NO: 234942 - DNA, 20 bp, Artificial Sequence
  Description of Artificial Sequence: Synthetic oligonucleotide
  Target: LAMA2; (-) strand; PAM type: YTN; PAM sequence: CTT
ttttcaagtgctattgctga

SEQ ID NO: 234943 - DNA, 20 bp, Artificial Sequence
  Description of Artificial Sequence: Synthetic oligonucleotide
  Target: LAMA2; (-) strand; PAM type: YTN; PAM sequence: TTG
ccttttttcaagtgctattg

SEQ ID NO: 234944 - DNA, 20 bp, Artificial Sequence
  Description of Artificial Sequence: Synthetic oligonucleotide
  Target: LAMA2; (-) strand; PAM type: YTN; PAM sequence: CTT
gccttttttcaagtgctatt

SEQ ID NO: 234945 - DNA, 20 bp, Artificial Sequence
  Description of Artificial Sequence: Synthetic oligonucleotide
  Target: LAMA2; (-) strand; PAM type: YTN; PAM sequence: TTA
gcaccagaggataccttgcc

SEQ ID NO: 234946 - DNA, 20 bp, Artificial Sequence
  Description of Artificial Sequence: Synthetic oligonucleotide
  Target: LAMA2; (-) strand; PAM type: YTN; PAM sequence: CTT
agcaccagaggataccttgc

SEQ ID NO: 234947 - DNA, 20 bp, Artificial Sequence
  Description of Artificial Sequence: Synthetic oligonucleotide
  Target: LAMA2; (-) strand; PAM type: YTN; PAM sequence: CTC
cgaccagaaaaagtcagaaa

SEQ ID NO: 234948 - DNA, 20 bp, Artificial Sequence
  Description of Artificial Sequence: Synthetic oligonucleotide
  Target: LAMA2; (-) strand; PAM type: YTN; PAM sequence: CTG
ggatgaaatcagactccgac

SEQ ID NO: 234949 - DNA, 20 bp, Artificial Sequence
  Description of Artificial Sequence: Synthetic oligonucleotide
  Target: LAMA2; (-) strand; PAM type: YTN; PAM sequence: CTC
cacggcactgggatgaaatc

SEQ ID NO: 234950 - DNA, 20 bp, Artificial Sequence
  Description of Artificial Sequence: Synthetic oligonucleotide
  Target: LAMA2; (-) strand; PAM type: YTN; PAM sequence: CTG
gatagtatgctccacggcac

SEQ ID NO: 234951 - DNA, 20 bp, Artificial Sequence
  Description of Artificial Sequence: Synthetic oligonucleotide
  Target: LAMA2; (-) strand; PAM type: YTN; PAM sequence: TTC
aaggacagaatctggatagt

SEQ ID NO: 234952 - DNA, 20 bp, Artificial Sequence
  Description of Artificial Sequence: Synthetic oligonucleotide
  Target: LAMA2; (-) strand; PAM type: YTN; PAM sequence: CTC
gtgttcaaggacagaatctg

SEQ ID NO: 234953 - DNA, 20 bp, Artificial Sequence
  Description of Artificial Sequence: Synthetic oligonucleotide
  Target: LAMA2; (-) strand; PAM type: YTN; PAM sequence: TTC
tcgtgttcaaggacagaatc

SEQ ID NO: 234954 - DNA, 20 bp, Artificial Sequence
  Description of Artificial Sequence: Synthetic oligonucleotide
  Target: LAMA2; (-) strand; PAM type: YTN; PAM sequence: TTT
ctcgtgttcaaggacagaat

SEQ ID NO: 234955 - DNA, 20 bp, Artificial Sequence
  Description of Artificial Sequence: Synthetic oligonucleotide
  Target: LAMA2; (-) strand; PAM type: YTN; PAM sequence: TTC
atcatttctcgtgttcaagg

SEQ ID NO: 234956 - DNA, 20 bp, Artificial Sequence
  Description of Artificial Sequence: Synthetic oligonucleotide
  Target: LAMA2; (-) strand; PAM type: YTN; PAM sequence: TTG
ttcatcatttctcgtgttca

SEQ ID NO: 234957 - DNA, 20 bp, Artificial Sequence
  Description of Artificial Sequence: Synthetic oligonucleotide
  Target: LAMA2; (-) strand; PAM type: YTN; PAM sequence: TTT
gttcatcatttctcgtgttc

SEQ ID NO: 234958 - DNA, 20 bp, Artificial Sequence
  Description of Artificial Sequence: Synthetic oligonucleotide
  Target: LAMA2; (-) strand; PAM type: YTN; PAM sequence: CTA
tttgttcatcatttctcgtg

SEQ ID NO: 234959 - DNA, 20 bp, Artificial Sequence
  Description of Artificial Sequence: Synthetic oligonucleotide
  Target: LAMA2; (-) strand; PAM type: YTN; PAM sequence: TTG
ggagcctatttgttcatcat

SEQ ID NO: 234960 - DNA, 20 bp, Artificial Sequence
  Description of Artificial Sequence: Synthetic oligonucleotide
  Target: LAMA2; (-) strand; PAM type: YTN; PAM sequence: TTA
ttgggagcctatttgttcat

SEQ ID NO: 234961 - DNA, 20 bp, Artificial Sequence
  Description of Artificial Sequence: Synthetic oligonucleotide
  Target: LAMA2; (-) strand; PAM type: YTN; PAM sequence: TTA
catcagattattgggagcct

SEQ ID NO: 234962 - DNA, 20 bp, Artificial Sequence
  Description of Artificial Sequence: Synthetic oligonucleotide
  Target: LAMA2; (-) strand; PAM type: YTN; PAM sequence: TTT
acatcagattattgggagcc

SEQ ID NO: 234963 - DNA, 20 bp, Artificial Sequence
  Description of Artificial Sequence: Synthetic oligonucleotide
  Target: LAMA2; (-) strand; PAM type: YTN; PAM sequence: CTA
tacatttacatcagattatt

SEQ ID NO: 234964 - DNA, 20 bp, Artificial Sequence
  Description of Artificial Sequence: Synthetic oligonucleotide
  Target: LAMA2; (-) strand; PAM type: YTN; PAM sequence: CTC
agctatacatttacatcaga

SEQ ID NO: 234965 - DNA, 20 bp, Artificial Sequence
  Description of Artificial Sequence: Synthetic oligonucleotide
  Target: LAMA2; (-) strand; PAM type: YTN; PAM sequence: TTG
aacaatgactcagctataca

SEQ ID NO: 234966 - DNA, 20 bp, Artificial Sequence
  Description of Artificial Sequence: Synthetic oligonucleotide
  Target: LAMA2; (-) strand; PAM type: YTN; PAM sequence: TTA
caattgaacaatgactcagc

SEQ ID NO: 234967 - DNA, 20 bp, Artificial Sequence
  Description of Artificial Sequence: Synthetic oligonucleotide
  Target: LAMA2; (-) strand; PAM type: YTN; PAM sequence: CTA
aaggtgacagtacacaggaa

SEQ ID NO: 234968 - DNA, 20 bp, Artificial Sequence
  Description of Artificial Sequence: Synthetic oligonucleotide
  Target: LAMA2; (-) strand; PAM type: YTN; PAM sequence: TTA
ctaaaggtgacagtacacag

SEQ ID NO: 234969 - DNA, 20 bp, Artificial Sequence
  Description of Artificial Sequence: Synthetic oligonucleotide
  Target: LAMA2; (-) strand; PAM type: YTN; PAM sequence: TTG
gtgaagtagcaagaccaatt

SEQ ID NO: 234970 - DNA, 20 bp, Artificial Sequence
  Description of Artificial Sequence: Synthetic oligonucleotide
  Target: LAMA2; (-) strand; PAM type: YTN; PAM sequence: TTA
aattggtgaagtagcaagac

SEQ ID NO: 234971 - DNA, 20 bp, Artificial Sequence
  Description of Artificial Sequence: Synthetic oligonucleotide
  Target: LAMA2; (-) strand; PAM type: YTN; PAM sequence: TTT
aaattggtgaagtagcaaga

SEQ ID NO: 234972 - DNA, 20 bp, Artificial Sequence
  Description of Artificial Sequence: Synthetic oligonucleotide
  Target: LAMA2; (-) strand; PAM type: YTN; PAM sequence: CTG
aatgacagtcatttaaattg

SEQ ID NO: 234973 - DNA, 20 bp, Artificial Sequence
  Description of Artificial Sequence: Synthetic oligonucleotide
  Target: LAMA2; (-) strand; PAM type: YTN; PAM sequence: CTC
actgaatgacagtcatttaa

SEQ ID NO: 234974 - DNA, 20 bp, Artificial Sequence
  Description of Artificial Sequence: Synthetic oligonucleotide
  Target: LAMA2; (-) strand; PAM type: YTN; PAM sequence: TTA
caagaaaatctcactgaatg

SEQ ID NO: 234975 - DNA, 20 bp, Artificial Sequence
  Description of Artificial Sequence: Synthetic oligonucleotide
  Target: LAMA2; (-) strand; PAM type: YTN; PAM sequence: TTT
acaagaaaatctcactgaat

SEQ ID NO: 234976 - DNA, 20 bp, Artificial Sequence
  Description of Artificial Sequence: Synthetic oligonucleotide
  Target: LAMA2; (-) strand; PAM type: YTN; PAM sequence: TTT
tacaagaaaatctcactgaa

SEQ ID NO: 234977 - DNA, 20 bp, Artificial Sequence
  Description of Artificial Sequence: Synthetic oligonucleotide
  Target: LAMA2; (-) strand; PAM type: YTN; PAM sequence: CTT
ttacaagaaaatctcactga

SEQ ID NO: 234978 - DNA, 20 bp, Artificial Sequence
  Description of Artificial Sequence: Synthetic oligonucleotide
  Target: LAMA2; (-) strand; PAM type: YTN; PAM sequence: TTG
cgatcttttacaagaaaatc

SEQ ID NO: 234979 - DNA, 20 bp, Artificial Sequence
  Description of Artificial Sequence: Synthetic oligonucleotide
  Target: LAMA2; (-) strand; PAM type: YTN; PAM sequence: CTT
gcgatcttttacaagaaaat

SEQ ID NO: 234980 - DNA, 20 bp, Artificial Sequence
  Description of Artificial Sequence: Synthetic oligonucleotide
  Target: LAMA2; (-) strand; PAM type: YTN; PAM sequence: TTG
tcaagtgcttgcgatctttt

SEQ ID NO: 234981 - DNA, 20 bp, Artificial Sequence
  Description of Artificial Sequence: Synthetic oligonucleotide
  Target: LAMA2; (-) strand; PAM type: YTN; PAM sequence: TTG
aagtcattgtcaagtgcttg

SEQ ID NO: 234982 - DNA, 20 bp, Artificial Sequence
  Description of Artificial Sequence: Synthetic oligonucleotide
  Target: LAMA2; (-) strand; PAM type: YTN; PAM sequence: TTG
gaggagtcgtaagaaagcag

SEQ ID NO: 234983 - DNA, 20 bp, Artificial Sequence
  Description of Artificial Sequence: Synthetic oligonucleotide
  Target: LAMA2; (-) strand; PAM type: YTN; PAM sequence: CTT
ggaggagtcgtaagaaagca

SEQ ID NO: 234984 - DNA, 20 bp, Artificial Sequence
  Description of Artificial Sequence: Synthetic oligonucleotide
  Target: LAMA2; (-) strand; PAM type: YTN; PAM sequence: CTA
gccacatcttggaggagtcg

SEQ ID NO: 234985 - DNA, 20 bp, Artificial Sequence
  Description of Artificial Sequence: Synthetic oligonucleotide
  Target: LAMA2; (-) strand; PAM type: YTN; PAM sequence: TTA
tctagccacatcttggagga

SEQ ID NO: 234986 - DNA, 20 bp, Artificial Sequence
  Description of Artificial Sequence: Synthetic oligonucleotide
  Target: LAMA2; (-) strand; PAM type: YTN; PAM sequence: TTT
atctagccacatcttggagg

SEQ ID NO: 234987 - DNA, 20 bp, Artificial Sequence
  Description of Artificial Sequence: Synthetic oligonucleotide
  Target: LAMA2; (-) strand; PAM type: YTN; PAM sequence: TTT
tatctagccacatcttggag

SEQ ID NO: 234988 - DNA, 20 bp, Artificial Sequence
  Description of Artificial Sequence: Synthetic oligonucleotide
  Target: LAMA2; (-) strand; PAM type: YTN; PAM sequence: TTG
gagaaaatcggaagtacagt

SEQ ID NO: 234989 - DNA, 20 bp, Artificial Sequence
  Description of Artificial Sequence: Synthetic oligonucleotide
  Target: LAMA2; (-) strand; PAM type: YTN; PAM sequence: TTT
ggagaaaatcggaagtacag

SEQ ID NO: 234990 - DNA, 20 bp, Artificial Sequence
  Description of Artificial Sequence: Synthetic oligonucleotide
  Target: LAMA2; (-) strand; PAM type: YTN; PAM sequence: CTG
tttggagaaaatcggaagta

SEQ ID NO: 234991 - DNA, 20 bp, Artificial Sequence
  Description of Artificial Sequence: Synthetic oligonucleotide
  Target: LAMA2; (-) strand; PAM type: YTN; PAM sequence: TTC
atgagatggaagcataggtc

SEQ ID NO: 234992 - DNA, 20 bp, Artificial Sequence
  Description of Artificial Sequence: Synthetic oligonucleotide
  Target: LAMA2; (-) strand; PAM type: YTN; PAM sequence: TTG
gaattcatgagatggaagca

SEQ ID NO: 234993 - DNA, 20 bp, Artificial Sequence
  Description of Artificial Sequence: Synthetic oligonucleotide
  Target: LAMA2; (-) strand; PAM type: YTN; PAM sequence: CTT
ggaattcatgagatggaagc

SEQ ID NO: 234994 - DNA, 20 bp, Artificial Sequence
  Description of Artificial Sequence: Synthetic oligonucleotide
  Target: LAMA2; (-) strand; PAM type: YTN; PAM sequence: CTG
tcttggaattcatgagatgg

SEQ ID NO: 234995 - DNA, 20 bp, Artificial Sequence
  Description of Artificial Sequence: Synthetic oligonucleotide
  Target: LAMA2; (-) strand; PAM type: YTN; PAM sequence: TTA
atactgtcttggaattcatg

SEQ ID NO: 234996 - DNA, 20 bp, Artificial Sequence
  Description of Artificial Sequence: Synthetic oligonucleotide
  Target: LAMA2; (-) strand; PAM type: YTN; PAM sequence: TTT
aatactgtcttggaattcat

SEQ ID NO: 234997 - DNA, 20 bp, Artificial Sequence
  Description of Artificial Sequence: Synthetic oligonucleotide
  Target: LAMA2; (-) strand; PAM type: YTN; PAM sequence: TTA
tgaaaatatgcatcagttta

SEQ ID NO: 234998 - DNA, 20 bp, Artificial Sequence
  Description of Artificial Sequence: Synthetic oligonucleotide
  Target: LAMA2; (-) strand; PAM type: YTN; PAM sequence: CTT
atgaaaatatgcatcagttt

SEQ ID NO: 234999 - DNA, 20 bp, Artificial Sequence
  Description of Artificial Sequence: Synthetic oligonucleotide
  Target: LAMA2; (-) strand; PAM type: YTN; PAM sequence: CTG
gcaaggagcccgggaagaga

SEQ ID NO: 235000 - DNA, 20 bp, Artificial Sequence
  Description of Artificial Sequence: Synthetic oligonucleotide
  Target: LAMA2; (-) strand; PAM type: YTN; PAM sequence: CTC
ggcacgctggcaaggagccc

SEQ ID NO: 235001 - DNA, 20 bp, Artificial Sequence
  Description of Artificial Sequence: Synthetic oligonucleotide
  Target: LAMA2; (-) strand; PAM type: YTN; PAM sequence: CTG
cgcctcggcacgctggcaag

SEQ ID NO: 235002 - DNA, 20 bp, Artificial Sequence
  Description of Artificial Sequence: Synthetic oligonucleotide
  Target: LAMA2; (-) strand; PAM type: YTN; PAM sequence: CTG
cctgcgcctcggcacgctgg

SEQ ID NO: 235003 - DNA, 20 bp, Artificial Sequence
  Description of Artificial Sequence: Synthetic oligonucleotide
  Target: LAMA2; (-) strand; PAM type: YTN; PAM sequence: CTC
catcaccctgcctgcgcctc

SEQ ID NO: 235004 - DNA, 20 bp, Artificial Sequence
  Description of Artificial Sequence: Synthetic oligonucleotide
  Target: LAMA2; (-) strand; PAM type: YTN; PAM sequence: CTC
ccggccggggcgcctccatc

SEQ ID NO: 235005 - DNA, 20 bp, Artificial Sequence
  Description of Artificial Sequence: Synthetic oligonucleotide
  Target: LAMA2; (-) strand; PAM type: YTN; PAM sequence: CTC
cccggcagatcctcccggcc

SEQ ID NO: 235006 - DNA, 20 bp, Artificial Sequence
  Description of Artificial Sequence: Synthetic oligonucleotide
  Target: LAMA2; (-) strand; PAM type: YTN; PAM sequence: CTC
tccccggcagatcctcccgg

SEQ ID NO: 235007 - DNA, 20 bp, Artificial Sequence
  Description of Artificial Sequence: Synthetic oligonucleotide
  Target: LAMA2; (-) strand; PAM type: YTN; PAM sequence: CTC
ccgaatcgatgaggaaagcc

SEQ ID NO: 235008 - DNA, 20 bp, Artificial Sequence
  Description of Artificial Sequence: Synthetic oligonucleotide
  Target: LAMA2; (-) strand; PAM type: YTN; PAM sequence: TTA
agcatggtgggtgctcccga

SEQ ID NO: 235009 - DNA, 20 bp, Artificial Sequence
  Description of Artificial Sequence: Synthetic oligonucleotide
  Target: LAMA2; (-) strand; PAM type: YTN; PAM sequence: TTA
ataaagaaattaagcatggt

SEQ ID NO: 235010 - DNA, 20 bp, Artificial Sequence
  Description of Artificial Sequence: Synthetic oligonucleotide
  Target: LAMA2; (-) strand; PAM type: YTN; PAM sequence: CTA
gaattaataaagaaattaag

SEQ ID NO: 235011 - DNA, 20 bp, Artificial Sequence
  Description of Artificial Sequence: Synthetic oligonucleotide
  Target: LAMA2; (-) strand; PAM type: YTN; PAM sequence: CTA
ctagaattaataaagaaatt

SEQ ID NO: 235012 - DNA, 20 bp, Artificial Sequence
  Description of Artificial Sequence: Synthetic oligonucleotide
  Target: LAMA2; (-) strand; PAM type: YTN; PAM sequence: TTA
aaactactagaattaataaa

SEQ ID NO: 235013 - DNA, 20 bp, Artificial Sequence
  Description of Artificial Sequence: Synthetic oligonucleotide
  Target: LAMA2; (-) strand; PAM type: YTN; PAM sequence: TTT
aaaactactagaattaataa

SEQ ID NO: 235014 - DNA, 20 bp, Artificial Sequence
  Description of Artificial Sequence: Synthetic oligonucleotide
  Target: LAMA2; (-) strand; PAM type: YTN; PAM sequence: CTA
aagcatgtagtttaaaacta

SEQ ID NO: 235015 - DNA, 20 bp, Artificial Sequence
  Description of Artificial Sequence: Synthetic oligonucleotide
  Target: LAMA2; (-) strand; PAM type: YTN; PAM sequence: TTC
taaagcatgtagtttaaaac

SEQ ID NO: 235016 - DNA, 20 bp, Artificial Sequence
  Description of Artificial Sequence: Synthetic oligonucleotide
  Target: LAMA2; (-) strand; PAM type: YTN; PAM sequence: TTT
ctaaagcatgtagtttaaaa

SEQ ID NO: 235017 - DNA, 20 bp, Artificial Sequence
  Description of Artificial Sequence: Synthetic oligonucleotide
  Target: LAMA2; (-) strand; PAM type: YTN; PAM sequence: TTA
tgtgtacgtttctaaagcat

SEQ ID NO: 235018 - DNA, 20 bp, Artificial Sequence
  Description of Artificial Sequence: Synthetic oligonucleotide
  Target: LAMA2; (-) strand; PAM type: YTN; PAM sequence: TTT
atgtgtacgtttctaaagca

SEQ ID NO: 235019 - DNA, 20 bp, Artificial Sequence
  Description of Artificial Sequence: Synthetic oligonucleotide
  Target: LAMA2; (-) strand; PAM type: YTN; PAM sequence: TTG
tttatgtgtacgtttctaaa

SEQ ID NO: 235020 - DNA, 20 bp, Artificial Sequence
  Description of Artificial Sequence: Synthetic oligonucleotide
  Target: LAMA2; (-) strand; PAM type: YTN; PAM sequence: TTG
caggtaaaatgattgtttat

SEQ ID NO: 235021 - DNA, 20 bp, Artificial Sequence
  Description of Artificial Sequence: Synthetic oligonucleotide
  Target: LAMA2; (-) strand; PAM type: YTN; PAM sequence: CTT
gcaggtaaaatgattgttta

SEQ ID NO: 235022 - DNA, 20 bp, Artificial Sequence
  Description of Artificial Sequence: Synthetic oligonucleotide
  Target: LAMA2; (-) strand; PAM type: YTN; PAM sequence: CTG
aatgtacttgcaggtaaaat

SEQ ID NO: 235023 - DNA, 20 bp, Artificial Sequence
  Description of Artificial Sequence: Synthetic oligonucleotide
  Target: LAMA2; (-) strand; PAM type: YTN; PAM sequence: TTG
caaaggaagaagtaagcctg

SEQ ID NO: 235024 - DNA, 20 bp, Artificial Sequence
  Description of Artificial Sequence: Synthetic oligonucleotide
  Target: LAMA2; (-) strand; PAM type: YTN; PAM sequence: TTG
gcataaagattgcaaaggaa

SEQ ID NO: 235025 - DNA, 20 bp, Artificial Sequence
  Description of Artificial Sequence: Synthetic oligonucleotide
  Target: LAMA2; (-) strand; PAM type: YTN; PAM sequence: CTT
ggcataaagattgcaaagga

SEQ ID NO: 235026 - DNA, 20 bp, Artificial Sequence
  Description of Artificial Sequence: Synthetic oligonucleotide
  Target: LAMA2; (-) strand; PAM type: YTN; PAM sequence: TTA
accttggcataaagattgca

SEQ ID NO: 235027 - DNA, 20 bp, Artificial Sequence
  Description of Artificial Sequence: Synthetic oligonucleotide
  Target: LAMA2; (-) strand; PAM type: YTN; PAM sequence: TTA
gttaaccttggcataaagat

SEQ ID NO: 235028 - DNA, 20 bp, Artificial Sequence
  Description of Artificial Sequence: Synthetic oligonucleotide
  Target: LAMA2; (-) strand; PAM type: YTN; PAM sequence: TTT
agttaaccttggcataaaga

SEQ ID NO: 235029 - DNA, 20 bp, Artificial Sequence
  Description of Artificial Sequence: Synthetic oligonucleotide
  Target: LAMA2; (-) strand; PAM type: YTN; PAM sequence: TTT
tagttaaccttggcataaag

SEQ ID NO: 235030 - DNA, 20 bp, Artificial Sequence
  Description of Artificial Sequence: Synthetic oligonucleotide
  Target: LAMA2; (-) strand; PAM type: YTN; PAM sequence: TTT
ttagttaaccttggcataaa

SEQ ID NO: 235031 - DNA, 20 bp, Artificial Sequence
  Description of Artificial Sequence: Synthetic oligonucleotide
  Target: LAMA2; (-) strand; PAM type: YTN; PAM sequence: CTC
gccatttttagttaaccttg

SEQ ID NO: 235032 - DNA, 20 bp, Artificial Sequence
  Description of Artificial Sequence: Synthetic oligonucleotide
  Target: LAMA2; (-) strand; PAM type: YTN; PAM sequence: CTC
tcgccatttttagttaacct

SEQ ID NO: 235033 - DNA, 20 bp, Artificial Sequence
  Description of Artificial Sequence: Synthetic oligonucleotide
  Target: LAMA2; (-) strand; PAM type: YTN; PAM sequence: TTC
agaacaaagtgaagatgtca

SEQ ID NO: 235034 - DNA, 20 bp, Artificial Sequence
  Description of Artificial Sequence: Synthetic oligonucleotide
  Target: LAMA2; (-) strand; PAM type: YTN; PAM sequence: TTA
aaattcagaacaaagtgaag

SEQ ID NO: 235035 - DNA, 20 bp, Artificial Sequence
  Description of Artificial Sequence: Synthetic oligonucleotide
  Target: LAMA2; (-) strand; PAM type: YTN; PAM sequence: TTT
aaaattcagaacaaagtgaa

SEQ ID NO: 235036 - DNA, 20 bp, Artificial Sequence
  Description of Artificial Sequence: Synthetic oligonucleotide
  Target: LAMA2; (-) strand; PAM type: YTN; PAM sequence: CTT
taaaattcagaacaaagtga

SEQ ID NO: 235037 - DNA, 20 bp, Artificial Sequence
  Description of Artificial Sequence: Synthetic oligonucleotide
  Target: LAMA2; (-) strand; PAM type: YTN; PAM sequence: TTC
cctttaaaattcagaacaaa

SEQ ID NO: 235038 - DNA, 20 bp, Artificial Sequence
  Description of Artificial Sequence: Synthetic oligonucleotide
  Target: LAMA2; (-) strand; PAM type: YTN; PAM sequence: TTT
ccctttaaaattcagaacaa

SEQ ID NO: 235039 - DNA, 20 bp, Artificial Sequence
  Description of Artificial Sequence: Synthetic oligonucleotide
  Target: LAMA2; (-) strand; PAM type: YTN; PAM sequence: TTA
ggtttccctttaaaattcag

SEQ ID NO: 235040 - DNA, 20 bp, Artificial Sequence
  Description of Artificial Sequence: Synthetic oligonucleotide
  Target: LAMA2; (-) strand; PAM type: YTN; PAM sequence: CTC
catagtgaaatattaggttt

SEQ ID NO: 235041 - DNA, 20 bp, Artificial Sequence
  Description of Artificial Sequence: Synthetic oligonucleotide
  Target: LAMA2; (-) strand; PAM type: YTN; PAM sequence: TTC
acatcatactccatagtgaa

SEQ ID NO: 235042 - DNA, 20 bp, Artificial Sequence
  Description of Artificial Sequence: Synthetic oligonucleotide
  Target: LAMA2; (-) strand; PAM type: YTN; PAM sequence: CTG
ataaagggtgtccataaaaa

SEQ ID NO: 235043 - DNA, 20 bp, Artificial Sequence
  Description of Artificial Sequence: Synthetic oligonucleotide
  Target: LAMA2; (-) strand; PAM type: YTN; PAM sequence: CTG
aatctgataaagggtgtcca

SEQ ID NO: 235044 - DNA, 20 bp, Artificial Sequence
  Description of Artificial Sequence: Synthetic oligonucleotide
  Target: LAMA2; (-) strand; PAM type: YTN; PAM sequence: CTA
ctgaatctgataaagggtgt

SEQ ID NO: 235045 - DNA, 20 bp, Artificial Sequence
  Description of Artificial Sequence: Synthetic oligonucleotide
  Target: LAMA2; (-) strand; PAM type: YTN; PAM sequence: TTA
ggaatagtaggggacctact

SEQ ID NO: 235046 - DNA, 20 bp, Artificial Sequence
  Description of Artificial Sequence: Synthetic oligonucleotide
  Target: LAMA2; (-) strand; PAM type: YTN; PAM sequence: CTT
aggaatagtaggggacctac

SEQ ID NO: 235047 - DNA, 20 bp, Artificial Sequence
  Description of Artificial Sequence: Synthetic oligonucleotide
  Target: LAMA2; (-) strand; PAM type: YTN; PAM sequence: CTG
caacttaggaatagtagggg

SEQ ID NO: 235048 - DNA, 20 bp, Artificial Sequence
  Description of Artificial Sequence: Synthetic oligonucleotide
  Target: LAMA2; (-) strand; PAM type: YTN; PAM sequence: CTC
tgcaacttaggaatagtagg

SEQ ID NO: 235049 - DNA, 20 bp, Artificial Sequence
  Description of Artificial Sequence: Synthetic oligonucleotide
  Target: LAMA2; (-) strand; PAM type: YTN; PAM sequence: CTC
tctgcaacttaggaatagta

SEQ ID NO: 235050 - DNA, 20 bp, Artificial Sequence
  Description of Artificial Sequence: Synthetic oligonucleotide
  Target: LAMA2; (-) strand; PAM type: YTN; PAM sequence: TTA
taaaaactctctgcaactta

SEQ ID NO: 235051 - DNA, 20 bp, Artificial Sequence
  Description of Artificial Sequence: Synthetic oligonucleotide
  Target: LAMA2; (-) strand; PAM type: YTN; PAM sequence: TTG
ttataaaaactctctgcaac

SEQ ID NO: 235052 - DNA, 20 bp, Artificial Sequence
  Description of Artificial Sequence: Synthetic oligonucleotide
  Target: LAMA2; (-) strand; PAM type: YTN; PAM sequence: TTT
gttataaaaactctctgcaa

SEQ ID NO: 235053 - DNA, 20 bp, Artificial Sequence
  Description of Artificial Sequence: Synthetic oligonucleotide
  Target: LAMA2; (-) strand; PAM type: YTN; PAM sequence: TTT
tgttataaaaactctctgca

SEQ ID NO: 235054 - DNA, 20 bp, Artificial Sequence
  Description of Artificial Sequence: Synthetic oligonucleotide
  Target: LAMA2; (-) strand; PAM type: YTN; PAM sequence: TTC
gaaaagcatatgacaaaatg

SEQ ID NO: 235055 - DNA, 20 bp, Artificial Sequence
  Description of Artificial Sequence: Synthetic oligonucleotide
  Target: LAMA2; (-) strand; PAM type: YTN; PAM sequence: TTT
cgaaaagcatatgacaaaat

SEQ ID NO: 235056 - DNA, 20 bp, Artificial Sequence
  Description of Artificial Sequence: Synthetic oligonucleotide
  Target: LAMA2; (-) strand; PAM type: YTN; PAM sequence: TTC
agtaggtttcgaaaagcata

SEQ ID NO: 235057 - DNA, 20 bp, Artificial Sequence
  Description of Artificial Sequence: Synthetic oligonucleotide
  Target: LAMA2; (-) strand; PAM type: YTN; PAM sequence: TTT
cagtaggtttcgaaaagcat

SEQ ID NO: 235058 - DNA, 20 bp, Artificial Sequence
  Description of Artificial Sequence: Synthetic oligonucleotide
  Target: LAMA2; (-) strand; PAM type: YTN; PAM sequence: TTC
atttcagtaggtttcgaaaa

SEQ ID NO: 235059 - DNA, 20 bp, Artificial Sequence
  Description of Artificial Sequence: Synthetic oligonucleotide
  Target: LAMA2; (-) strand; PAM type: YTN; PAM sequence: TTA
tgttcatttcagtaggtttc

SEQ ID NO: 235060 - DNA, 20 bp, Artificial Sequence
  Description of Artificial Sequence: Synthetic oligonucleotide
  Target: LAMA2; (-) strand; PAM type: YTN; PAM sequence: CTT
atgttcatttcagtaggttt

SEQ ID NO: 235061 - DNA, 20 bp, Artificial Sequence
  Description of Artificial Sequence: Synthetic oligonucleotide
  Target: LAMA2; (-) strand; PAM type: YTN; PAM sequence: TTA
acagaataaaggagaaaatc

SEQ ID NO: 235062 - DNA, 20 bp, Artificial Sequence
  Description of Artificial Sequence: Synthetic oligonucleotide
  Target: LAMA2; (-) strand; PAM type: YTN; PAM sequence: TTG
tccccgttaacagaataaag

SEQ ID NO: 235063 - DNA, 20 bp, Artificial Sequence
  Description of Artificial Sequence: Synthetic oligonucleotide
  Target: LAMA2; (-) strand; PAM type: YTN; PAM sequence: TTG
cataaattgtccccgttaac

SEQ ID NO: 235064 - DNA, 20 bp, Artificial Sequence
  Description of Artificial Sequence: Synthetic oligonucleotide
  Target: LAMA2; (-) strand; PAM type: YTN; PAM sequence: TTT
gcataaattgtccccgttaa

SEQ ID NO: 235065 - DNA, 20 bp, Artificial Sequence
  Description of Artificial Sequence: Synthetic oligonucleotide
  Target: LAMA2; (-) strand; PAM type: YTN; PAM sequence: TTC
aatttgcataaattgtcccc

SEQ ID NO: 235066 - DNA, 20 bp, Artificial Sequence
  Description of Artificial Sequence: Synthetic oligonucleotide
  Target: LAMA2; (-) strand; PAM type: YTN; PAM sequence: TTA
aaattcaatttgcataaatt

SEQ ID NO: 235067 - DNA, 20 bp, Artificial Sequence
  Description of Artificial Sequence: Synthetic oligonucleotide
  Target: LAMA2; (-) strand; PAM type: YTN; PAM sequence: TTT
aaaattcaatttgcataaat

SEQ ID NO: 235068 - DNA, 20 bp, Artificial Sequence
  Description of Artificial Sequence: Synthetic oligonucleotide
  Target: LAMA2; (-) strand; PAM type: YTN; PAM sequence: TTT
taaaattcaatttgcataaa

SEQ ID NO: 235069 - DNA, 20 bp, Artificial Sequence
  Description of Artificial Sequence: Synthetic oligonucleotide
  Target: LAMA2; (-) strand; PAM type: YTN; PAM sequence: TTC
atattttaaaattcaatttg

SEQ ID NO: 235070 - DNA, 20 bp, Artificial Sequence
  Description of Artificial Sequence: Synthetic oligonucleotide
  Target: LAMA2; (-) strand; PAM type: YTN; PAM sequence: CTT
catattttaaaattcaattt

SEQ ID NO: 235071 - DNA, 20 bp, Artificial Sequence
  Description of Artificial Sequence: Synthetic oligonucleotide
  Target: LAMA2; (-) strand; PAM type: YTN; PAM sequence: CTG
ccttcatattttaaaattca

SEQ ID NO: 235072 - DNA, 20 bp, Artificial Sequence
  Description of Artificial Sequence: Synthetic oligonucleotide
  Target: LAMA2; (-) strand; PAM type: YTN; PAM sequence: TTC
acaaatgcaaagctgccttc

SEQ ID NO: 235073 - DNA, 20 bp, Artificial Sequence
  Description of Artificial Sequence: Synthetic oligonucleotide
  Target: LAMA2; (-) strand; PAM type: YTN; PAM sequence: TTA
attcacaaatgcaaagctgc

SEQ ID NO: 235074 - DNA, 20 bp, Artificial Sequence
  Description of Artificial Sequence: Synthetic oligonucleotide
  Target: LAMA2; (-) strand; PAM type: YTN; PAM sequence: TTG
aatcatccaatatataaaaa

SEQ ID NO: 235075 - DNA, 20 bp, Artificial Sequence
  Description of Artificial Sequence: Synthetic oligonucleotide
  Target: LAMA2; (-) strand; PAM type: YTN; PAM sequence: TTA
gtcaattgaatcatccaata

SEQ ID NO: 235076 - DNA, 20 bp, Artificial Sequence
  Description of Artificial Sequence: Synthetic oligonucleotide
  Target: LAMA2; (-) strand; PAM type: YTN; PAM sequence: TTA
accaaacattagtcaattga

SEQ ID NO: 235077 - DNA, 20 bp, Artificial Sequence
  Description of Artificial Sequence: Synthetic oligonucleotide
  Target: LAMA2; (-) strand; PAM type: YTN; PAM sequence: CTT
aaccaaacattagtcaattg

SEQ ID NO: 235078 - DNA, 20 bp, Artificial Sequence
  Description of Artificial Sequence: Synthetic oligonucleotide
  Target: LAMA2; (-) strand; PAM type: YTN; PAM sequence: TTC
ttaaccaaacattagtcaat

SEQ ID NO: 235079 - DNA, 20 bp, Artificial Sequence
  Description of Artificial Sequence: Synthetic oligonucleotide
  Target: LAMA2; (-) strand; PAM type: YTN; PAM sequence: TTA
tgagaggatgtcaaaattct

SEQ ID NO: 235080 - DNA, 20 bp, Artificial Sequence
  Description of Artificial Sequence: Synthetic oligonucleotide
  Target: LAMA2; (-) strand; PAM type: YTN; PAM sequence: TTT
atgagaggatgtcaaaattc

SEQ ID NO: 235081 - DNA, 20 bp, Artificial Sequence
  Description of Artificial Sequence: Synthetic oligonucleotide
  Target: LAMA2; (-) strand; PAM type: YTN; PAM sequence: TTT
tatgagaggatgtcaaaatt

SEQ ID NO: 235082 - DNA, 20 bp, Artificial Sequence
  Description of Artificial Sequence: Synthetic oligonucleotide
  Target: LAMA2; (-) strand; PAM type: YTN; PAM sequence: TTA
tagaccaatatattttatga

SEQ ID NO: 235083 - DNA, 20 bp, Artificial Sequence
  Description of Artificial Sequence: Synthetic oligonucleotide
  Target: LAMA2; (-) strand; PAM type: YTN; PAM sequence: TTA
taagaaaataaaattataga

SEQ ID NO: 235084 - DNA, 20 bp, Artificial Sequence
  Description of Artificial Sequence: Synthetic oligonucleotide
  Target: LAMA2; (-) strand; PAM type: YTN; PAM sequence: CTG
acaaaaacattataagaaaa

SEQ ID NO: 235085 - DNA, 20 bp, Artificial Sequence
  Description of Artificial Sequence: Synthetic oligonucleotide
  Target: LAMA2; (-) strand; PAM type: YTN; PAM sequence: TTG
atgccagtataccccaataa

SEQ ID NO: 235086 - DNA, 20 bp, Artificial Sequence
  Description of Artificial Sequence: Synthetic oligonucleotide
  Target: LAMA2; (-) strand; PAM type: YTN; PAM sequence: TTG
ttgatgccagtataccccaa

SEQ ID NO: 235087 - DNA, 20 bp, Artificial Sequence
  Description of Artificial Sequence: Synthetic oligonucleotide
  Target: LAMA2; (-) strand; PAM type: YTN; PAM sequence: TTT
gttgatgccagtatacccca

SEQ ID NO: 235088 - DNA, 20 bp, Artificial Sequence
  Description of Artificial Sequence: Synthetic oligonucleotide
  Target: LAMA2; (-) strand; PAM type: YTN; PAM sequence: TTC
cccgatcatttgttgatgcc

SEQ ID NO: 235089 - DNA, 20 bp, Artificial Sequence
  Description of Artificial Sequence: Synthetic oligonucleotide
  Target: LAMA2; (-) strand; PAM type: YTN; PAM sequence: TTT
ccccgatcatttgttgatgc

SEQ ID NO: 235090 - DNA, 20 bp, Artificial Sequence
  Description of Artificial Sequence: Synthetic oligonucleotide
  Target: LAMA2; (-) strand; PAM type: YTN; PAM sequence: TTA
gaaaacagaagaggaagtgc

SEQ ID NO: 235091 - DNA, 20 bp, Artificial Sequence
  Description of Artificial Sequence: Synthetic oligonucleotide
  Target: LAMA2; (-) strand; PAM type: YTN; PAM sequence: TTT
agaaaacagaagaggaagtg

SEQ ID NO: 235092 - DNA, 20 bp, Artificial Sequence
  Description of Artificial Sequence: Synthetic oligonucleotide
  Target: LAMA2; (-) strand; PAM type: YTN; PAM sequence: CTT
tagaaaacagaagaggaagt

SEQ ID NO: 235093 - DNA, 20 bp, Artificial Sequence
  Description of Artificial Sequence: Synthetic oligonucleotide
  Target: LAMA2; (-) strand; PAM type: YTN; PAM sequence: TTA
ctttagaaaacagaagagga

SEQ ID NO: 235094 - DNA, 20 bp, Artificial Sequence
  Description of Artificial Sequence: Synthetic oligonucleotide
  Target: LAMA2; (-) strand; PAM type: YTN; PAM sequence: CTG
aagttactttagaaaacaga

SEQ ID NO: 235095 - DNA, 20 bp, Artificial Sequence
  Description of Artificial Sequence: Synthetic oligonucleotide
  Target: LAMA2; (-) strand; PAM type: YTN; PAM sequence: TTA
atctgaagttactttagaaa

SEQ ID NO: 235096 - DNA, 20 bp, Artificial Sequence
  Description of Artificial Sequence: Synthetic oligonucleotide
  Target: LAMA2; (-) strand; PAM type: YTN; PAM sequence: TTT
aatctgaagttactttagaa

SEQ ID NO: 235097 - DNA, 20 bp, Artificial Sequence
  Description of Artificial Sequence: Synthetic oligonucleotide
  Target: LAMA2; (-) strand; PAM type: YTN; PAM sequence: TTT
taatctgaagttactttaga

SEQ ID NO: 235098 - DNA, 20 bp, Artificial Sequence
  Description of Artificial Sequence: Synthetic oligonucleotide
  Target: LAMA2; (-) strand; PAM type: YTN; PAM sequence: TTA
attttaatctgaagttactt

SEQ ID NO: 235099 - DNA, 20 bp, Artificial Sequence
  Description of Artificial Sequence: Synthetic oligonucleotide
  Target: LAMA2; (-) strand; PAM type: YTN; PAM sequence: TTA
aagagaattaattttaatct

SEQ ID NO: 235100 - DNA, 20 bp, Artificial Sequence
  Description of Artificial Sequence: Synthetic oligonucleotide
  Target: LAMA2; (-) strand; PAM type: YTN; PAM sequence: TTT
aaagagaattaattttaatc

SEQ ID NO: 235101 - DNA, 20 bp, Artificial Sequence
  Description of Artificial Sequence: Synthetic oligonucleotide
  Target: LAMA2; (-) strand; PAM type: YTN; PAM sequence: TTT
taaagagaattaattttaat

SEQ ID NO: 235102 - DNA, 20 bp, Artificial Sequence
  Description of Artificial Sequence: Synthetic oligonucleotide
  Target: LAMA2; (-) strand; PAM type: YTN; PAM sequence: TTA
tcaagcattttaaagagaat

SEQ ID NO: 235103 - DNA, 20 bp, Artificial Sequence
  Description of Artificial Sequence: Synthetic oligonucleotide
  Target: LAMA2; (-) strand; PAM type: YTN; PAM sequence: TTT
atcaagcattttaaagagaa

SEQ ID NO: 235104 - DNA, 20 bp, Artificial Sequence
  Description of Artificial Sequence: Synthetic oligonucleotide
  Target: LAMA2; (-) strand; PAM type: YTN; PAM sequence: TTT
tatcaagcattttaaagaga

SEQ ID NO: 235105 - DNA, 20 bp, Artificial Sequence
  Description of Artificial Sequence: Synthetic oligonucleotide
  Target: LAMA2; (-) strand; PAM type: YTN; PAM sequence: CTA
ggaaattttatcaagcattt

SEQ ID NO: 235106 - DNA, 20 bp, Artificial Sequence
  Description of Artificial Sequence: Synthetic oligonucleotide
  Target: LAMA2; (-) strand; PAM type: YTN; PAM sequence: TTC
actaggaaattttatcaagc

SEQ ID NO: 235107 - DNA, 20 bp, Artificial Sequence
  Description of Artificial Sequence: Synthetic oligonucleotide
  Target: LAMA2; (-) strand; PAM type: YTN; PAM sequence: TTT
cactaggaaattttatcaag

SEQ ID NO: 235108 - DNA, 20 bp, Artificial Sequence
  Description of Artificial Sequence: Synthetic oligonucleotide
  Target: LAMA2; (-) strand; PAM type: YTN; PAM sequence: CTC
agatagtttcactaggaaat

SEQ ID NO: 235109 - DNA, 20 bp, Artificial Sequence
  Description of Artificial Sequence: Synthetic oligonucleotide
  Target: LAMA2; (-) strand; PAM type: YTN; PAM sequence: CTA
gagactcagatagtttcact

SEQ ID NO: 235110 - DNA, 20 bp, Artificial Sequence
  Description of Artificial Sequence: Synthetic oligonucleotide
  Target: LAMA2; (-) strand; PAM type: YTN; PAM sequence: CTA
ataaaaaatagccaatacaa

SEQ ID NO: 235111 - DNA, 20 bp, Artificial Sequence
  Description of Artificial Sequence: Synthetic oligonucleotide
  Target: LAMA2; (-) strand; PAM type: YTN; PAM sequence: CTA
tgtctaataaaaaatagcca

SEQ ID NO: 235112 - DNA, 20 bp, Artificial Sequence
  Description of Artificial Sequence: Synthetic oligonucleotide
  Target: LAMA2; (-) strand; PAM type: YTN; PAM sequence: CTA
accctatgtctaataaaaaa

SEQ ID NO: 235113 - DNA, 20 bp, Artificial Sequence
  Description of Artificial Sequence: Synthetic oligonucleotide
  Target: LAMA2; (-) strand; PAM type: YTN; PAM sequence: CTA
tctaaccctatgtctaataa

SEQ ID NO: 235114 - DNA, 20 bp, Artificial Sequence
  Description of Artificial Sequence: Synthetic oligonucleotide
  Target: LAMA2; (-) strand; PAM type: YTN; PAM sequence: TTA
atacaaaacctatctaaccc

SEQ ID NO: 235115 - DNA, 20 bp, Artificial Sequence
  Description of Artificial Sequence: Synthetic oligonucleotide
  Target: LAMA2; (-) strand; PAM type: YTN; PAM sequence: CTA
aagatattaatacaaaacct

SEQ ID NO: 235116 - DNA, 20 bp, Artificial Sequence
  Description of Artificial Sequence: Synthetic oligonucleotide
  Target: LAMA2; (-) strand; PAM type: YTN; PAM sequence: CTC
cctaaagatattaatacaaa

SEQ ID NO: 235117 - DNA, 20 bp, Artificial Sequence
  Description of Artificial Sequence: Synthetic oligonucleotide
  Target: LAMA2; (-) strand; PAM type: YTN; PAM sequence: TTG
accctccctaaagatattaa

SEQ ID NO: 235118 - DNA, 20 bp, Artificial Sequence
  Description of Artificial Sequence: Synthetic oligonucleotide
  Target: LAMA2; (-) strand; PAM type: YTN; PAM sequence: TTG
aaaaatacaatatatcaaaa

SEQ ID NO: 235119 - DNA, 20 bp, Artificial Sequence
  Description of Artificial Sequence: Synthetic oligonucleotide
  Target: LAMA2; (-) strand; PAM type: YTN; PAM sequence: CTT
gaaaaatacaatatatcaaa

SEQ ID NO: 235120 - DNA, 20 bp, Artificial Sequence
  Description of Artificial Sequence: Synthetic oligonucleotide
  Target: LAMA2; (-) strand; PAM type: YTN; PAM sequence: TTA
cttgaaaaatacaatatatc

SEQ ID NO: 235121 - DNA, 20 bp, Artificial Sequence
  Description of Artificial Sequence: Synthetic oligonucleotide
  Target: LAMA2; (-) strand; PAM type: YTN; PAM sequence: TTG
aacaaattacttgaaaaata

SEQ ID NO: 235122 - DNA, 20 bp, Artificial Sequence
  Description of Artificial Sequence: Synthetic oligonucleotide
  Target: LAMA2; (-) strand; PAM type: YTN; PAM sequence: TTA
gatgaattgaacaaattact

SEQ ID NO: 235123 - DNA, 20 bp, Artificial Sequence
  Description of Artificial Sequence: Synthetic oligonucleotide
  Target: LAMA2; (-) strand; PAM type: YTN; PAM sequence: TTT
agatgaattgaacaaattac

SEQ ID NO: 235124 - DNA, 20 bp, Artificial Sequence
  Description of Artificial Sequence: Synthetic oligonucleotide
  Target: LAMA2; (-) strand; PAM type: YTN; PAM sequence: TTG
acaatttagatgaattgaac

SEQ ID NO: 235125 - DNA, 20 bp, Artificial Sequence
  Description of Artificial Sequence: Synthetic oligonucleotide
  Target: LAMA2; (-) strand; PAM type: YTN; PAM sequence: TTT
gacaatttagatgaattgaa

SEQ ID NO: 235126 - DNA, 20 bp, Artificial Sequence
  Description of Artificial Sequence: Synthetic oligonucleotide
  Target: LAMA2; (-) strand; PAM type: YTN; PAM sequence: TTG
ccaatgatttgacaatttag

SEQ ID NO: 235127 - DNA, 20 bp, Artificial Sequence
  Description of Artificial Sequence: Synthetic oligonucleotide
  Target: LAMA2; (-) strand; PAM type: YTN; PAM sequence: CTG
ccaattgccaatgatttgac

SEQ ID NO: 235128 - DNA, 20 bp, Artificial Sequence
  Description of Artificial Sequence: Synthetic oligonucleotide
  Target: LAMA2; (-) strand; PAM type: YTN; PAM sequence: TTA
aaactgccaattgccaatga

SEQ ID NO: 235129 - DNA, 20 bp, Artificial Sequence
  Description of Artificial Sequence: Synthetic oligonucleotide
  Target: LAMA2; (-) strand; PAM type: YTN; PAM sequence: TTT
aaaactgccaattgccaatg

SEQ ID NO: 235130 - DNA, 20 bp, Artificial Sequence
  Description of Artificial Sequence: Synthetic oligonucleotide
  Target: LAMA2; (-) strand; PAM type: YTN; PAM sequence: TTT
taaaactgccaattgccaat

SEQ ID NO: 235131 - DNA, 20 bp, Artificial Sequence
  Description of Artificial Sequence: Synthetic oligonucleotide
  Target: LAMA2; (-) strand; PAM type: YTN; PAM sequence: TTT
ttaaaactgccaattgccaa

SEQ ID NO: 235132 - DNA, 20 bp, Artificial Sequence
  Description of Artificial Sequence: Synthetic oligonucleotide
  Target: LAMA2; (-) strand; PAM type: YTN; PAM sequence: TTC
aagaagataataaggcaatt

SEQ ID NO: 235133 - DNA, 20 bp, Artificial Sequence
  Description of Artificial Sequence: Synthetic oligonucleotide
  Target: LAMA2; (-) strand; PAM type: YTN; PAM sequence: CTT
caagaagataataaggcaat

SEQ ID NO: 235134 - DNA, 20 bp, Artificial Sequence
  Description of Artificial Sequence: Synthetic oligonucleotide
  Target: LAMA2; (-) strand; PAM type: YTN; PAM sequence: CTA
tagacttcaagaagataata

SEQ ID NO: 235135 - DNA, 20 bp, Artificial Sequence
  Description of Artificial Sequence: Synthetic oligonucleotide
  Target: LAMA2; (-) strand; PAM type: YTN; PAM sequence: CTA
tatagatgctatagacttca

SEQ ID NO: 235136 - DNA, 20 bp, Artificial Sequence
  Description of Artificial Sequence: Synthetic oligonucleotide
  Target: LAMA2; (-) strand; PAM type: YTN; PAM sequence: TTA
cacaggggatatctatatag

SEQ ID NO: 235137 - DNA, 20 bp, Artificial Sequence
  Description of Artificial Sequence: Synthetic oligonucleotide
  Target: LAMA2; (-) strand; PAM type: YTN; PAM sequence: TTA
aaaattacacaggggatatc

SEQ ID NO: 235138 - DNA, 20 bp, Artificial Sequence
  Description of Artificial Sequence: Synthetic oligonucleotide
  Target: LAMA2; (-) strand; PAM type: YTN; PAM sequence: TTT
aaaaattacacaggggatat

SEQ ID NO: 235139 - DNA, 20 bp, Artificial Sequence
  Description of Artificial Sequence: Synthetic oligonucleotide
  Target: LAMA2; (-) strand; PAM type: YTN; PAM sequence: TTT
taaaaattacacaggggata

SEQ ID NO: 235140 - DNA, 20 bp, Artificial Sequence
  Description of Artificial Sequence: Synthetic oligonucleotide
  Target: LAMA2; (-) strand; PAM type: YTN; PAM sequence: TTA
atcattttaaaaattacaca

SEQ ID NO: 235141 - DNA, 20 bp, Artificial Sequence
  Description of Artificial Sequence: Synthetic oligonucleotide
  Target: LAMA2; (-) strand; PAM type: YTN; PAM sequence: CTT
aatcattttaaaaattacac

SEQ ID NO: 235142 - DNA, 20 bp, Artificial Sequence
  Description of Artificial Sequence: Synthetic oligonucleotide
  Target: LAMA2; (-) strand; PAM type: YTN; PAM sequence: CTA
acataagtgatcaataaaag

SEQ ID NO: 235143 - DNA, 20 bp, Artificial Sequence
  Description of Artificial Sequence: Synthetic oligonucleotide
  Target: LAMA2; (-) strand; PAM type: YTN; PAM sequence: TTG
ataaacccctaacataagtg

SEQ ID NO: 235144 - DNA, 20 bp, Artificial Sequence
  Description of Artificial Sequence: Synthetic oligonucleotide
  Target: LAMA2; (-) strand; PAM type: YTN; PAM sequence: TTA
ggaaaattgataaaccccta

SEQ ID NO: 235145 - DNA, 20 bp, Artificial Sequence
  Description of Artificial Sequence: Synthetic oligonucleotide
  Target: LAMA2; (-) strand; PAM type: YTN; PAM sequence: TTG
gaaaagattaggaaaattga

SEQ ID NO: 235146 - DNA, 20 bp, Artificial Sequence
  Description of Artificial Sequence: Synthetic oligonucleotide
  Target: LAMA2; (-) strand; PAM type: YTN; PAM sequence: TTT
ggaaaagattaggaaaattg

SEQ ID NO: 235147 - DNA, 20 bp, Artificial Sequence
  Description of Artificial Sequence: Synthetic oligonucleotide
  Target: LAMA2; (-) strand; PAM type: YTN; PAM sequence: TTT
tggaaaagattaggaaaatt

SEQ ID NO: 235148 - DNA, 20 bp, Artificial Sequence
  Description of Artificial Sequence: Synthetic oligonucleotide
  Target: LAMA2; (-) strand; PAM type: YTN; PAM sequence: TTT
ttggaaaagattaggaaaat

SEQ ID NO: 235149 - DNA, 20 bp, Artificial Sequence
  Description of Artificial Sequence: Synthetic oligonucleotide
  Target: LAMA2; (-) strand; PAM type: YTN; PAM sequence: TTT
tttggaaaagattaggaaaa

SEQ ID NO: 235150 - DNA, 20 bp, Artificial Sequence
  Description of Artificial Sequence: Synthetic oligonucleotide
  Target: LAMA2; (-) strand; PAM type: YTN; PAM sequence: TTT
ttttggaaaagattaggaaa

SEQ ID NO: 235151 - DNA, 20 bp, Artificial Sequence
  Description of Artificial Sequence: Synthetic oligonucleotide
  Target: LAMA2; (-) strand; PAM type: YTN; PAM sequence: TTA
aaaccaaaacaggtcaaatg

SEQ ID NO: 235152 - DNA, 20 bp, Artificial Sequence
  Description of Artificial Sequence: Synthetic oligonucleotide
  Target: LAMA2; (-) strand; PAM type: YTN; PAM sequence: TTT
aaaaccaaaacaggtcaaat

SEQ ID NO: 235153 - DNA, 20 bp, Artificial Sequence
  Description of Artificial Sequence: Synthetic oligonucleotide
  Target: LAMA2; (-) strand; PAM type: YTN; PAM sequence: TTG
ataggtagaaaaagaaaatg

SEQ ID NO: 235154 - DNA, 20 bp, Artificial Sequence
  Description of Artificial Sequence: Synthetic oligonucleotide
  Target: LAMA2; (-) strand; PAM type: YTN; PAM sequence: TTC
caaattgataggtagaaaaa

SEQ ID NO: 235155 - DNA, 20 bp, Artificial Sequence
  Description of Artificial Sequence: Synthetic oligonucleotide
  Target: LAMA2; (-) strand; PAM type: YTN; PAM sequence: TTT
ccaaattgataggtagaaaa

SEQ ID NO: 235156 - DNA, 20 bp, Artificial Sequence
  Description of Artificial Sequence: Synthetic oligonucleotide
  Target: LAMA2; (-) strand; PAM type: YTN; PAM sequence: CTT
tccaaattgataggtagaaa

SEQ ID NO: 235157 - DNA, 20 bp, Artificial Sequence
  Description of Artificial Sequence: Synthetic oligonucleotide
  Target: LAMA2; (-) strand; PAM type: YTN; PAM sequence: TTA
actttccaaattgataggta

SEQ ID NO: 235158 - DNA, 20 bp, Artificial Sequence
  Description of Artificial Sequence: Synthetic oligonucleotide
  Target: LAMA2; (-) strand; PAM type: YTN; PAM sequence: TTT
aactttccaaattgataggt

SEQ ID NO: 235159 - DNA, 20 bp, Artificial Sequence
  Description of Artificial Sequence: Synthetic oligonucleotide
  Target: LAMA2; (-) strand; PAM type: YTN; PAM sequence: TTA
tatgataaaagaagaaaggt

SEQ ID NO: 235160 - DNA, 20 bp, Artificial Sequence
  Description of Artificial Sequence: Synthetic oligonucleotide
  Target: LAMA2; (-) strand; PAM type: YTN; PAM sequence: TTT
atatgataaaagaagaaagg

SEQ ID NO: 235161 - DNA, 20 bp, Artificial Sequence
  Description of Artificial Sequence: Synthetic oligonucleotide
  Target: LAMA2; (-) strand; PAM type: YTN; PAM sequence: TTA
aaagtttatatgataaaaga

SEQ ID NO: 235162 - DNA, 20 bp, Artificial Sequence
  Description of Artificial Sequence: Synthetic oligonucleotide
  Target: LAMA2; (-) strand; PAM type: YTN; PAM sequence: TTT
aaaagtttatatgataaaag

SEQ ID NO: 235163 - DNA, 20 bp, Artificial Sequence
  Description of Artificial Sequence: Synthetic oligonucleotide
  Target: LAMA2; (-) strand; PAM type: YTN; PAM sequence: CTA
tatttaaaagtttatatgat

SEQ ID NO: 235164 - DNA, 20 bp, Artificial Sequence
  Description of Artificial Sequence: Synthetic oligonucleotide
  Target: LAMA2; (-) strand; PAM type: YTN; PAM sequence: CTA
gaaggaaatctatatttaaa

SEQ ID NO: 235165 - DNA, 20 bp, Artificial Sequence
  Description of Artificial Sequence: Synthetic oligonucleotide
  Target: LAMA2; (-) strand; PAM type: YTN; PAM sequence: CTG
ctagaaggaaatctatattt

SEQ ID NO: 235166 - DNA, 20 bp, Artificial Sequence
  Description of Artificial Sequence: Synthetic oligonucleotide
  Target: LAMA2; (-) strand; PAM type: YTN; PAM sequence: CTA
aagaactgctagaaggaaat

SEQ ID NO: 235167 - DNA, 20 bp, Artificial Sequence
  Description of Artificial Sequence: Synthetic oligonucleotide
  Target: LAMA2; (-) strand; PAM type: YTN; PAM sequence: TTC
atgagaaacagctaaagaac

SEQ ID NO: 235168 - DNA, 20 bp, Artificial Sequence
  Description of Artificial Sequence: Synthetic oligonucleotide
  Target: LAMA2; (-) strand; PAM type: YTN; PAM sequence: CTG
aattcatgagaaacagctaa

SEQ ID NO: 235169 - DNA, 20 bp, Artificial Sequence
  Description of Artificial Sequence: Synthetic oligonucleotide
  Target: LAMA2; (-) strand; PAM type: YTN; PAM sequence: TTC
ctgaattcatgagaaacagc

SEQ ID NO: 235170 - DNA, 20 bp, Artificial Sequence
  Description of Artificial Sequence: Synthetic oligonucleotide
  Target: LAMA2; (-) strand; PAM type: YTN; PAM sequence: TTA
aataaatgacaatgaacata

SEQ ID NO: 235171 - DNA, 20 bp, Artificial Sequence
  Description of Artificial Sequence: Synthetic oligonucleotide
  Target: LAMA2; (-) strand; PAM type: YTN; PAM sequence: TTA
tgttaaataaatgacaatga

SEQ ID NO: 235172 - DNA, 20 bp, Artificial Sequence
  Description of Artificial Sequence: Synthetic oligonucleotide
  Target: LAMA2; (-) strand; PAM type: YTN; PAM sequence: TTA
gaagttatgttaaataaatg

SEQ ID NO: 235173 - DNA, 20 bp, Artificial Sequence
  Description of Artificial Sequence: Synthetic oligonucleotide
  Target: LAMA2; (-) strand; PAM type: YTN; PAM sequence: TTA
acaaaaaataaatcacaaga

SEQ ID NO: 235174 - DNA, 20 bp, Artificial Sequence
  Description of Artificial Sequence: Synthetic oligonucleotide
  Target: LAMA2; (-) strand; PAM type: YTN; PAM sequence: TTG
gaaattaacaaaaaataaat

SEQ ID NO: 235175 - DNA, 20 bp, Artificial Sequence
  Description of Artificial Sequence: Synthetic oligonucleotide
  Target: LAMA2; (-) strand; PAM type: YTN; PAM sequence: TTT
ggaaattaacaaaaaataaa

SEQ ID NO: 235176 - DNA, 20 bp, Artificial Sequence
  Description of Artificial Sequence: Synthetic oligonucleotide
  Target: LAMA2; (-) strand; PAM type: YTN; PAM sequence: CTC
aaatatttggaaattaacaa

SEQ ID NO: 235177 - DNA, 20 bp, Artificial Sequence
  Description of Artificial Sequence: Synthetic oligonucleotide
  Target: LAMA2; (-) strand; PAM type: YTN; PAM sequence: TTA
ataaagctcaaatatttgga

SEQ ID NO: 235178 - DNA, 20 bp, Artificial Sequence
  Description of Artificial Sequence: Synthetic oligonucleotide
  Target: LAMA2; (-) strand; PAM type: YTN; PAM sequence: TTT
aataaagctcaaatatttgg

SEQ ID NO: 235179 - DNA, 20 bp, Artificial Sequence
  Description of Artificial Sequence: Synthetic oligonucleotide
  Target: LAMA2; (-) strand; PAM type: YTN; PAM sequence: CTC
agatcataaacatccagtgt

SEQ ID NO: 235180 - DNA, 20 bp, Artificial Sequence
  Description of Artificial Sequence: Synthetic oligonucleotide
  Target: LAMA2; (-) strand; PAM type: YTN; PAM sequence: TTC
tcagatcataaacatccagt

SEQ ID NO: 235181 - DNA, 20 bp, Artificial Sequence
  Description of Artificial Sequence: Synthetic oligonucleotide
  Target: LAMA2; (-) strand; PAM type: YTN; PAM sequence: TTA
gagagtatgttctcagatca

SEQ ID NO: 235182 - DNA, 20 bp, Artificial Sequence
  Description of Artificial Sequence: Synthetic oligonucleotide
  Target: LAMA2; (-) strand; PAM type: YTN; PAM sequence: CTT
agagagtatgttctcagatc

SEQ ID NO: 235183 - DNA, 20 bp, Artificial Sequence
  Description of Artificial Sequence: Synthetic oligonucleotide
  Target: LAMA2; (-) strand; PAM type: YTN; PAM sequence: TTG
acatcttagagagtatgttc

SEQ ID NO: 235184 - DNA, 20 bp, Artificial Sequence
  Description of Artificial Sequence: Synthetic oligonucleotide
  Target: LAMA2; (-) strand; PAM type: YTN; PAM sequence: TTT
gacatcttagagagtatgtt

SEQ ID NO: 235185 - DNA, 20 bp, Artificial Sequence
  Description of Artificial Sequence: Synthetic oligonucleotide
  Target: LAMA2; (-) strand; PAM type: YTN; PAM sequence: CTA
aagtttgacatcttagagag

SEQ ID NO: 235186 - DNA, 20 bp, Artificial Sequence
  Description of Artificial Sequence: Synthetic oligonucleotide
  Target: LAMA2; (-) strand; PAM type: YTN; PAM sequence: TTC
taaagtttgacatcttagag

SEQ ID NO: 235187 - DNA, 20 bp, Artificial Sequence
  Description of Artificial Sequence: Synthetic oligonucleotide
  Target: LAMA2; (-) strand; PAM type: YTN; PAM sequence: CTT
ctaaagtttgacatcttaga

SEQ ID NO: 235188 - DNA, 20 bp, Artificial Sequence
  Description of Artificial Sequence: Synthetic oligonucleotide
  Target: LAMA2; (-) strand; PAM type: YTN; PAM sequence: TTC
aataaacttctaaagtttga

SEQ ID NO: 235189 - DNA, 20 bp, Artificial Sequence
  Description of Artificial Sequence: Synthetic oligonucleotide
  Target: LAMA2; (-) strand; PAM type: YTN; PAM sequence: TTT
caataaacttctaaagtttg

SEQ ID NO: 235190 - DNA, 20 bp, Artificial Sequence
  Description of Artificial Sequence: Synthetic oligonucleotide
  Target: LAMA2; (-) strand; PAM type: YTN; PAM sequence: TTA
aatttcaataaacttctaaa

SEQ ID NO: 235191 - DNA, 20 bp, Artificial Sequence
  Description of Artificial Sequence: Synthetic oligonucleotide
  Target: LAMA2; (-) strand; PAM type: YTN; PAM sequence: CTG
agccataagttaaatttcaa

SEQ ID NO: 235192 - DNA, 20 bp, Artificial Sequence
  Description of Artificial Sequence: Synthetic oligonucleotide
  Target: LAMA2; (-) strand; PAM type: YTN; PAM sequence: TTG
ccaagagagaccatgcactg

SEQ ID NO: 235193 - DNA, 20 bp, Artificial Sequence
  Description of Artificial Sequence: Synthetic oligonucleotide
  Target: LAMA2; (-) strand; PAM type: YTN; PAM sequence: TTT
gccaagagagaccatgcact

SEQ ID NO: 235194 - DNA, 20 bp, Artificial Sequence
  Description of Artificial Sequence: Synthetic oligonucleotide
  Target: LAMA2; (-) strand; PAM type: YTN; PAM sequence: TTG
tttgccaagagagaccatgc

SEQ ID NO: 235195 - DNA, 20 bp, Artificial Sequence
  Description of Artificial Sequence: Synthetic oligonucleotide
  Target: LAMA2; (-) strand; PAM type: YTN; PAM sequence: TTT
gtttgccaagagagaccatg

SEQ ID NO: 235196 - DNA, 20 bp, Artificial Sequence
  Description of Artificial Sequence: Synthetic oligonucleotide
  Target: LAMA2; (-) strand; PAM type: YTN; PAM sequence: TTA
tttgtttgccaagagagacc

SEQ ID NO: 235197 - DNA, 20 bp, Artificial Sequence
  Description of Artificial Sequence: Synthetic oligonucleotide
  Target: LAMA2; (-) strand; PAM type: YTN; PAM sequence: TTT
atttgtttgccaagagagac

SEQ ID NO: 235198 - DNA, 20 bp, Artificial Sequence
  Description of Artificial Sequence: Synthetic oligonucleotide
  Target: LAMA2; (-) strand; PAM type: YTN; PAM sequence: TTG
gaaaaatccacatttatttg

SEQ ID NO: 235199 - DNA, 20 bp, Artificial Sequence
  Description of Artificial Sequence: Synthetic oligonucleotide
  Target: LAMA2; (-) strand; PAM type: YTN; PAM sequence: CTG
aaaaaaatgaaagaaaggta

SEQ ID NO: 235200 - DNA, 20 bp, Artificial Sequence
  Description of Artificial Sequence: Synthetic oligonucleotide
  Target: LAMA2; (-) strand; PAM type: YTN; PAM sequence: TTC
aaagaacaggaagaaatact

SEQ ID NO: 235201 - DNA, 20 bp, Artificial Sequence
  Description of Artificial Sequence: Synthetic oligonucleotide
  Target: LAMA2; (-) strand; PAM type: YTN; PAM sequence: CTT
caaagaacaggaagaaatac

SEQ ID NO: 235202 - DNA, 20 bp, Artificial Sequence
  Description of Artificial Sequence: Synthetic oligonucleotide
  Target: LAMA2; (-) strand; PAM type: YTN; PAM sequence: CTC
ataacagtgcttcaaagaac

SEQ ID NO: 235203 - DNA, 20 bp, Artificial Sequence
  Description of Artificial Sequence: Synthetic oligonucleotide
  Target: LAMA2; (-) strand; PAM type: YTN; PAM sequence: CTA
aatatgtatgtgcctcataa

SEQ ID NO: 235204 - DNA, 20 bp, Artificial Sequence
  Description of Artificial Sequence: Synthetic oligonucleotide
  Target: LAMA2; (-) strand; PAM type: YTN; PAM sequence: TTC
taaatatgtatgtgcctcat

SEQ ID NO: 235205 - DNA, 20 bp, Artificial Sequence
  Description of Artificial Sequence: Synthetic oligonucleotide
  Target: LAMA2; (-) strand; PAM type: YTN; PAM sequence: TTC
aaaatattctaaatatgtat

SEQ ID NO: 235206 - DNA, 20 bp, Artificial Sequence
  Description of Artificial Sequence: Synthetic oligonucleotide
  Target: LAMA2; (-) strand; PAM type: YTN; PAM sequence: CTA
aagattcaaaatattctaaa

SEQ ID NO: 235207 - DNA, 20 bp, Artificial Sequence
  Description of Artificial Sequence: Synthetic oligonucleotide
  Target: LAMA2; (-) strand; PAM type: YTN; PAM sequence: TTA
taagatataaaaatctaaag

SEQ ID NO: 235208 - DNA, 20 bp, Artificial Sequence
  Description of Artificial Sequence: Synthetic oligonucleotide
  Target: LAMA2; (-) strand; PAM type: YTN; PAM sequence: TTT
ataagatataaaaatctaaa

SEQ ID NO: 235209 - DNA, 20 bp, Artificial Sequence
  Description of Artificial Sequence: Synthetic oligonucleotide
  Target: LAMA2; (-) strand; PAM type: YTN; PAM sequence: TTA
atttataagatataaaaatc

SEQ ID NO: 235210 - DNA, 20 bp, Artificial Sequence
  Description of Artificial Sequence: Synthetic oligonucleotide
  Target: LAMA2; (-) strand; PAM type: YTN; PAM sequence: TTA
tcaaaatattaatttataag

SEQ ID NO: 235211 - DNA, 20 bp, Artificial Sequence
  Description of Artificial Sequence: Synthetic oligonucleotide
  Target: LAMA2; (-) strand; PAM type: YTN; PAM sequence: TTC
acagttatcaaaatattaat

SEQ ID NO: 235212 - DNA, 20 bp, Artificial Sequence
  Description of Artificial Sequence: Synthetic oligonucleotide
  Target: LAMA2; (-) strand; PAM type: YTN; PAM sequence: CTT
cacagttatcaaaatattaa

SEQ ID NO: 235213 - DNA, 20 bp, Artificial Sequence
  Description of Artificial Sequence: Synthetic oligonucleotide
  Target: LAMA2; (-) strand; PAM type: YTN; PAM sequence: TTA
agtggagatcttcacagtta

SEQ ID NO: 235214 - DNA, 20 bp, Artificial Sequence
  Description of Artificial Sequence: Synthetic oligonucleotide
  Target: LAMA2; (-) strand; PAM type: YTN; PAM sequence: CTG
agattaagtggagatcttca

SEQ ID NO: 235215 - DNA, 20 bp, Artificial Sequence
  Description of Artificial Sequence: Synthetic oligonucleotide
  Target: LAMA2; (-) strand; PAM type: YTN; PAM sequence: TTA
ggacaaaaagtgatatctga

SEQ ID NO: 235216 - DNA, 20 bp, Artificial Sequence
  Description of Artificial Sequence: Synthetic oligonucleotide
  Target: LAMA2; (-) strand; PAM type: YTN; PAM sequence: TTT
aggacaaaaagtgatatctg

SEQ ID NO: 235217 - DNA, 20 bp, Artificial Sequence
  Description of Artificial Sequence: Synthetic oligonucleotide
  Target: LAMA2; (-) strand; PAM type: YTN; PAM sequence: CTT
taggacaaaaagtgatatct

SEQ ID NO: 235218 - DNA, 20 bp, Artificial Sequence
  Description of Artificial Sequence: Synthetic oligonucleotide
  Target: LAMA2; (-) strand; PAM type: YTN; PAM sequence: TTA
ataaaaaataaagtagactt

SEQ ID NO: 235219 - DNA, 20 bp, Artificial Sequence
  Description of Artificial Sequence: Synthetic oligonucleotide
  Target: LAMA2; (-) strand; PAM type: YTN; PAM sequence: CTG
tggcaatgttaataaaaaat

SEQ ID NO: 235220 - DNA, 20 bp, Artificial Sequence
  Description of Artificial Sequence: Synthetic oligonucleotide
  Target: LAMA2; (-) strand; PAM type: YTN; PAM sequence: CTG
ctgtggcaatgttaataaaa

SEQ ID NO: 235221 - DNA, 20 bp, Artificial Sequence
  Description of Artificial Sequence: Synthetic oligonucleotide
  Target: LAMA2; (-) strand; PAM type: YTN; PAM sequence: TTA
aacaaaatcagaaaaaacat

SEQ ID NO: 235222 - DNA, 20 bp, Artificial Sequence
  Description of Artificial Sequence: Synthetic oligonucleotide
  Target: LAMA2; (-) strand; PAM type: YTN; PAM sequence: TTG
aaagttaaacaaaatcagaa

SEQ ID NO: 235223 - DNA, 20 bp, Artificial Sequence
  Description of Artificial Sequence: Synthetic oligonucleotide
  Target: LAMA2; (-) strand; PAM type: YTN; PAM sequence: TTA
aatgaaaataaagataggtt

SEQ ID NO: 235224 - DNA, 20 bp, Artificial Sequence
  Description of Artificial Sequence: Synthetic oligonucleotide
  Target: LAMA2; (-) strand; PAM type: YTN; PAM sequence: TTT
aaatgaaaataaagataggt

SEQ ID NO: 235225 - DNA, 20 bp, Artificial Sequence
  Description of Artificial Sequence: Synthetic oligonucleotide
  Target: LAMA2; (-) strand; PAM type: YTN; PAM sequence: TTT
taaatgaaaataaagatagg

SEQ ID NO: 235226 - DNA, 20 bp, Artificial Sequence
  Description of Artificial Sequence: Synthetic oligonucleotide
  Target: LAMA2; (-) strand; PAM type: YTN; PAM sequence: CTT
ttaaatgaaaataaagatag

SEQ ID NO: 235227 - DNA, 20 bp, Artificial Sequence
  Description of Artificial Sequence: Synthetic oligonucleotide
  Target: LAMA2; (-) strand; PAM type: YTN; PAM sequence: TTA
taagaaatcttttaaatgaa

SEQ ID NO: 235228 - DNA, 20 bp, Artificial Sequence
  Description of Artificial Sequence: Synthetic oligonucleotide
  Target: LAMA2; (-) strand; PAM type: YTN; PAM sequence: TTT
ataagaaatcttttaaatga

SEQ ID NO: 235229 - DNA, 20 bp, Artificial Sequence
  Description of Artificial Sequence: Synthetic oligonucleotide
  Target: LAMA2; (-) strand; PAM type: YTN; PAM sequence: CTT
tataagaaatcttttaaatg

SEQ ID NO: 235230 - DNA, 20 bp, Artificial Sequence
  Description of Artificial Sequence: Synthetic oligonucleotide
  Target: LAMA2; (-) strand; PAM type: YTN; PAM sequence: CTC
tttataagaaatcttttaaa

SEQ ID NO: 235231 - DNA, 20 bp, Artificial Sequence
  Description of Artificial Sequence: Synthetic oligonucleotide
  Target: LAMA2; (-) strand; PAM type: YTN; PAM sequence: TTA
ctctttataagaaatctttt

SEQ ID NO: 235232 - DNA, 20 bp, Artificial Sequence
  Description of Artificial Sequence: Synthetic oligonucleotide
  Target: LAMA2; (-) strand; PAM type: YTN; PAM sequence: TTT
actctttataagaaatcttt

SEQ ID NO: 235233 - DNA, 20 bp, Artificial Sequence
  Description of Artificial Sequence: Synthetic oligonucleotide
  Target: LAMA2; (-) strand; PAM type: YTN; PAM sequence: TTT
tactctttataagaaatctt

SEQ ID NO: 235234 - DNA, 20 bp, Artificial Sequence
  Description of Artificial Sequence: Synthetic oligonucleotide
  Target: LAMA2; (-) strand; PAM type: YTN; PAM sequence: CTA
ttttactctttataagaaat

SEQ ID NO: 235235 - DNA, 20 bp, Artificial Sequence
  Description of Artificial Sequence: Synthetic oligonucleotide
  Target: LAMA2; (-) strand; PAM type: YTN; PAM sequence: TTG
tcaggataaaaaatccatct

SEQ ID NO: 235236 - DNA, 20 bp, Artificial Sequence
  Description of Artificial Sequence: Synthetic oligonucleotide
  Target: LAMA2; (-) strand; PAM type: YTN; PAM sequence: CTA
aacacacagtaattgtcagg

SEQ ID NO: 235237 - DNA, 20 bp, Artificial Sequence
  Description of Artificial Sequence: Synthetic oligonucleotide
  Target: LAMA2; (-) strand; PAM type: YTN; PAM sequence: TTA
gggactaaacacacagtaat

SEQ ID NO: 235238 - DNA, 20 bp, Artificial Sequence
  Description of Artificial Sequence: Synthetic oligonucleotide
  Target: LAMA2; (-) strand; PAM type: YTN; PAM sequence: TTT
agggactaaacacacagtaa

SEQ ID NO: 235239 - DNA, 20 bp, Artificial Sequence
  Description of Artificial Sequence: Synthetic oligonucleotide
  Target: LAMA2; (-) strand; PAM type: YTN; PAM sequence: TTA
aatttagggactaaacacac

SEQ ID NO: 235240 - DNA, 20 bp, Artificial Sequence
  Description of Artificial Sequence: Synthetic oligonucleotide
  Target: LAMA2; (-) strand; PAM type: YTN; PAM sequence: CTA
tattaaatttagggactaaa

SEQ ID NO: 235241 - DNA, 20 bp, Artificial Sequence
  Description of Artificial Sequence: Synthetic oligonucleotide
  Target: LAMA2; (-) strand; PAM type: YTN; PAM sequence: TTA
actatattaaatttagggac

SEQ ID NO: 235242 - DNA, 20 bp, Artificial Sequence
  Description of Artificial Sequence: Synthetic oligonucleotide
  Target: LAMA2; (-) strand; PAM type: YTN; PAM sequence: TTA
ttaactatattaaatttagg

SEQ ID NO: 235243 - DNA, 20 bp, Artificial Sequence
  Description of Artificial Sequence: Synthetic oligonucleotide
  Target: LAMA2; (-) strand; PAM type: YTN; PAM sequence: TTG
tgacacaaatgggaaacaaa

SEQ ID NO: 235244 - DNA, 20 bp, Artificial Sequence
  Description of Artificial Sequence: Synthetic oligonucleotide
  Target: LAMA2; (-) strand; PAM type: YTN; PAM sequence: TTT
gtgacacaaatgggaaacaa

SEQ ID NO: 235245 - DNA, 20 bp, Artificial Sequence
  Description of Artificial Sequence: Synthetic oligonucleotide
  Target: LAMA2; (-) strand; PAM type: YTN; PAM sequence: TTT
tgtgacacaaatgggaaaca

SEQ ID NO: 235246 - DNA, 20 bp, Artificial Sequence
  Description of Artificial Sequence: Synthetic oligonucleotide
  Target: LAMA2; (-) strand; PAM type: YTN; PAM sequence: TTA
acataaaagtagacagaaaa

SEQ ID NO: 235247 - DNA, 20 bp, Artificial Sequence
  Description of Artificial Sequence: Synthetic oligonucleotide
  Target: LAMA2; (-) strand; PAM type: YTN; PAM sequence: TTT
aacataaaagtagacagaaa

SEQ ID NO: 235248 - DNA, 20 bp, Artificial Sequence
  Description of Artificial Sequence: Synthetic oligonucleotide
  Target: LAMA2; (-) strand; PAM type: YTN; PAM sequence: TTG
tttaacataaaagtagacag

SEQ ID NO: 235249 - DNA, 20 bp, Artificial Sequence
  Description of Artificial Sequence: Synthetic oligonucleotide
  Target: LAMA2; (-) strand; PAM type: YTN; PAM sequence: TTT
gtttaacataaaagtagaca

SEQ ID NO: 235250 - DNA, 20 bp, Artificial Sequence
  Description of Artificial Sequence: Synthetic oligonucleotide
  Target: LAMA2; (-) strand; PAM type: YTN; PAM sequence: CTG
aaaaatatttgtttaacata

SEQ ID NO: 235251 - DNA, 20 bp, Artificial Sequence
  Description of Artificial Sequence: Synthetic oligonucleotide
  Target: LAMA2; (-) strand; PAM type: YTN; PAM sequence: CTA
aaaagataataaaggaaata

SEQ ID NO: 235252 - DNA, 20 bp, Artificial Sequence
  Description of Artificial Sequence: Synthetic oligonucleotide
  Target: LAMA2; (-) strand; PAM type: YTN; PAM sequence: CTG
ctaaaaagataataaaggaa

SEQ ID NO: 235253 - DNA, 20 bp, Artificial Sequence
  Description of Artificial Sequence: Synthetic oligonucleotide
  Target: LAMA2; (-) strand; PAM type: YTN; PAM sequence: TTA
tacaaagaggtactgctaaa

SEQ ID NO: 235254 - DNA, 20 bp, Artificial Sequence
  Description of Artificial Sequence: Synthetic oligonucleotide
  Target: LAMA2; (-) strand; PAM type: YTN; PAM sequence: TTG
gaatggaaaattatacaaag

SEQ ID NO: 235255 - DNA, 20 bp, Artificial Sequence
  Description of Artificial Sequence: Synthetic oligonucleotide
  Target: LAMA2; (-) strand; PAM type: YTN; PAM sequence: CTA
aaataaaagttggaatggaa

SEQ ID NO: 235256 - DNA, 20 bp, Artificial Sequence
  Description of Artificial Sequence: Synthetic oligonucleotide
  Target: LAMA2; (-) strand; PAM type: YTN; PAM sequence: CTG
aacctaaaataaaagttgga

SEQ ID NO: 235257 - DNA, 20 bp, Artificial Sequence
  Description of Artificial Sequence: Synthetic oligonucleotide
  Target: LAMA2; (-) strand; PAM type: YTN; PAM sequence: CTA
cctgaacctaaaataaaagt

SEQ ID NO: 235258 - DNA, 20 bp, Artificial Sequence
  Description of Artificial Sequence: Synthetic oligonucleotide
  Target: LAMA2; (-) strand; PAM type: YTN; PAM sequence: TTA
cccatgtactacctgaacct

SEQ ID NO: 235259 - DNA, 20 bp, Artificial Sequence
  Description of Artificial Sequence: Synthetic oligonucleotide
  Target: LAMA2; (-) strand; PAM type: YTN; PAM sequence: TTT
acccatgtactacctgaacc

SEQ ID NO: 235260 - DNA, 20 bp, Artificial Sequence
  Description of Artificial Sequence: Synthetic oligonucleotide
  Target: LAMA2; (-) strand; PAM type: YTN; PAM sequence: CTG
tacaccaaatcccatgacac

SEQ ID NO: 235261 - DNA, 20 bp, Artificial Sequence
  Description of Artificial Sequence: Synthetic oligonucleotide
  Target: LAMA2; (-) strand; PAM type: YTN; PAM sequence: CTG
ggtgacaaaataatctgtac

SEQ ID NO: 235262 - DNA, 20 bp, Artificial Sequence
  Description of Artificial Sequence: Synthetic oligonucleotide
  Target: LAMA2; (-) strand; PAM type: YTN; PAM sequence: TTA
tctgggtgacaaaataatct

SEQ ID NO: 235263 - DNA, 20 bp, Artificial Sequence
  Description of Artificial Sequence: Synthetic oligonucleotide
  Target: LAMA2; (-) strand; PAM type: YTN; PAM sequence: TTA
ttatctgggtgacaaaataa

SEQ ID NO: 235264 - DNA, 20 bp, Artificial Sequence
  Description of Artificial Sequence: Synthetic oligonucleotide
  Target: LAMA2; (-) strand; PAM type: YTN; PAM sequence: CTT
attatctgggtgacaaaata

SEQ ID NO: 235265 - DNA, 20 bp, Artificial Sequence
  Description of Artificial Sequence: Synthetic oligonucleotide
  Target: LAMA2; (-) strand; PAM type: YTN; PAM sequence: TTA
tgcttattatctgggtgaca

SEQ ID NO: 235266 - DNA, 20 bp, Artificial Sequence
  Description of Artificial Sequence: Synthetic oligonucleotide
  Target: LAMA2; (-) strand; PAM type: YTN; PAM sequence: TTA
ttatgcttattatctgggtg

SEQ ID NO: 235267 - DNA, 20 bp, Artificial Sequence
  Description of Artificial Sequence: Synthetic oligonucleotide
  Target: LAMA2; (-) strand; PAM type: YTN; PAM sequence: TTT
attatgcttattatctgggt

SEQ ID NO: 235268 - DNA, 20 bp, Artificial Sequence
  Description of Artificial Sequence: Synthetic oligonucleotide
  Target: LAMA2; (-) strand; PAM type: YTN; PAM sequence: TTT
tattatgcttattatctggg

SEQ ID NO: 235269 - DNA, 20 bp, Artificial Sequence
  Description of Artificial Sequence: Synthetic oligonucleotide
  Target: LAMA2; (-) strand; PAM type: YTN; PAM sequence: TTG
aaaattttattatgcttatt

SEQ ID NO: 235270 - DNA, 20 bp, Artificial Sequence
  Description of Artificial Sequence: Synthetic oligonucleotide
  Target: LAMA2; (-) strand; PAM type: YTN; PAM sequence: TTG
aaaagggtgggaggggggtg

SEQ ID NO: 235271 - DNA, 20 bp, Artificial Sequence
  Description of Artificial Sequence: Synthetic oligonucleotide
  Target: LAMA2; (-) strand; PAM type: YTN; PAM sequence: CTT
gaaaagggtgggaggggggt

SEQ ID NO: 235272 - DNA, 20 bp, Artificial Sequence
  Description of Artificial Sequence: Synthetic oligonucleotide
  Target: LAMA2; (-) strand; PAM type: YTN; PAM sequence: CTG
cttgaaaagggtgggagggg

SEQ ID NO: 235273 - DNA, 20 bp, Artificial Sequence
  Description of Artificial Sequence: Synthetic oligonucleotide
  Target: LAMA2; (-) strand; PAM type: YTN; PAM sequence: TTG
agtacacatggacacaaaga

SEQ ID NO: 235274 - DNA, 20 bp, Artificial Sequence
  Description of Artificial Sequence: Synthetic oligonucleotide
  Target: LAMA2; (-) strand; PAM type: YTN; PAM sequence: CTA
aacattgagtacacatggac

SEQ ID NO: 235275 - DNA, 20 bp, Artificial Sequence
  Description of Artificial Sequence: Synthetic oligonucleotide
  Target: LAMA2; (-) strand; PAM type: YTN; PAM sequence: TTA
tgagtggagctaaacattga

SEQ ID NO: 235276 - DNA, 20 bp, Artificial Sequence
  Description of Artificial Sequence: Synthetic oligonucleotide
  Target: LAMA2; (-) strand; PAM type: YTN; PAM sequence: CTT
atgagtggagctaaacattg

SEQ ID NO: 235277 - DNA, 20 bp, Artificial Sequence
  Description of Artificial Sequence: Synthetic oligonucleotide
  Target: LAMA2; (-) strand; PAM type: YTN; PAM sequence: CTC
ttatgagtggagctaaacat

SEQ ID NO: 235278 - DNA, 20 bp, Artificial Sequence
  Description of Artificial Sequence: Synthetic oligonucleotide
  Target: LAMA2; (-) strand; PAM type: YTN; PAM sequence: CTC
tcttatgagtggagctaaac

SEQ ID NO: 235279 - DNA, 20 bp, Artificial Sequence
  Description of Artificial Sequence: Synthetic oligonucleotide
  Target: LAMA2; (-) strand; PAM type: YTN; PAM sequence: TTC
tctcttatgagtggagctaa

SEQ ID NO: 235280 - DNA, 20 bp, Artificial Sequence
  Description of Artificial Sequence: Synthetic oligonucleotide
  Target: LAMA2; (-) strand; PAM type: YTN; PAM sequence: CTG
catgttctctcttatgagtg

SEQ ID NO: 235281 - DNA, 20 bp, Artificial Sequence
  Description of Artificial Sequence: Synthetic oligonucleotide
  Target: LAMA2; (-) strand; PAM type: YTN; PAM sequence: TTA
atgcaagaatagaaaaccag

SEQ ID NO: 235282 - DNA, 20 bp, Artificial Sequence
  Description of Artificial Sequence: Synthetic oligonucleotide
  Target: LAMA2; (-) strand; PAM type: YTN; PAM sequence: CTA
agtgaattaatgcaagaata

SEQ ID NO: 235283 - DNA, 20 bp, Artificial Sequence
  Description of Artificial Sequence: Synthetic oligonucleotide
  Target: LAMA2; (-) strand; PAM type: YTN; PAM sequence: TTA
tcctaagtgaattaatgcaa

SEQ ID NO: 235284 - DNA, 20 bp, Artificial Sequence
  Description of Artificial Sequence: Synthetic oligonucleotide
  Target: LAMA2; (-) strand; PAM type: YTN; PAM sequence: TTG
aagcaacatggatggagcag

SEQ ID NO: 235285 - DNA, 20 bp, Artificial Sequence
  Description of Artificial Sequence: Synthetic oligonucleotide
  Target: LAMA2; (-) strand; PAM type: YTN; PAM sequence: TTT
gaagcaacatggatggagca

SEQ ID NO: 235286 - DNA, 20 bp, Artificial Sequence
  Description of Artificial Sequence: Synthetic oligonucleotide
  Target: LAMA2; (-) strand; PAM type: YTN; PAM sequence: CTT
tgaagcaacatggatggagc

SEQ ID NO: 235287 - DNA, 20 bp, Artificial Sequence
  Description of Artificial Sequence: Synthetic oligonucleotide
  Target: LAMA2; (-) strand; PAM type: YTN; PAM sequence: CTA
cacagccataaaaaagaata

SEQ ID NO: 235288 - DNA, 20 bp, Artificial Sequence
  Description of Artificial Sequence: Synthetic oligonucleotide
  Target: LAMA2; (-) strand; PAM type: YTN; PAM sequence: CTG
aataaagaaaatgtagtaca

SEQ ID NO: 235289 - DNA, 20 bp, Artificial Sequence
  Description of Artificial Sequence: Synthetic oligonucleotide
  Target: LAMA2; (-) strand; PAM type: YTN; PAM sequence: TTG
gtggactgaataaagaaaat

SEQ ID NO: 235290 - DNA, 20 bp, Artificial Sequence
  Description of Artificial Sequence: Synthetic oligonucleotide
  Target: LAMA2; (-) strand; PAM type: YTN; PAM sequence: CTA
ggtaccatcattggtggact

SEQ ID NO: 235291 - DNA, 20 bp, Artificial Sequence
  Description of Artificial Sequence: Synthetic oligonucleotide
  Target: LAMA2; (-) strand; PAM type: YTN; PAM sequence: TTC
acaataacaaagacatggaa

SEQ ID NO: 235292 - DNA, 20 bp, Artificial Sequence
  Description of Artificial Sequence: Synthetic oligonucleotide
  Target: LAMA2; (-) strand; PAM type: YTN; PAM sequence: CTA
ttcacaataacaaagacatg

SEQ ID NO: 235293 - DNA, 20 bp, Artificial Sequence
  Description of Artificial Sequence: Synthetic oligonucleotide
  Target: LAMA2; (-) strand; PAM type: YTN; PAM sequence: TTG
cagccctattcacaataaca

SEQ ID NO: 235294 - DNA, 20 bp, Artificial Sequence
  Description of Artificial Sequence: Synthetic oligonucleotide
  Target: LAMA2; (-) strand; PAM type: YTN; PAM sequence: TTC
attgcagccctattcacaat

SEQ ID NO: 235295 - DNA, 20 bp, Artificial Sequence
  Description of Artificial Sequence: Synthetic oligonucleotide
  Target: LAMA2; (-) strand; PAM type: YTN; PAM sequence: CTA
tgttcattgcagccctattc

SEQ ID NO: 235296 - DNA, 20 bp, Artificial Sequence
  Description of Artificial Sequence: Synthetic oligonucleotide
  Target: LAMA2; (-) strand; PAM type: YTN; PAM sequence: CTA
tcataaagccacatgcatgc

SEQ ID NO: 235297 - DNA, 20 bp, Artificial Sequence
  Description of Artificial Sequence: Synthetic oligonucleotide
  Target: LAMA2; (-) strand; PAM type: YTN; PAM sequence: TTC
tatcataaagccacatgcat

SEQ ID NO: 235298 - DNA, 20 bp, Artificial Sequence
  Description of Artificial Sequence: Synthetic oligonucleotide
  Target: LAMA2; (-) strand; PAM type: YTN; PAM sequence: CTG
cgtatatgcccaaaggaata

SEQ ID NO: 235299 - DNA, 20 bp, Artificial Sequence
  Description of Artificial Sequence: Synthetic oligonucleotide
  Target: LAMA2; (-) strand; PAM type: YTN; PAM sequence: TTA
ctgcgtatatgcccaaagga

SEQ ID NO: 235300 - DNA, 20 bp, Artificial Sequence
  Description of Artificial Sequence: Synthetic oligonucleotide
  Target: LAMA2; (-) strand; PAM type: YTN; PAM sequence: CTC
agcaatcccattactgcgta

SEQ ID NO: 235301 - DNA, 20 bp, Artificial Sequence
  Description of Artificial Sequence: Synthetic oligonucleotide
  Target: LAMA2; (-) strand; PAM type: YTN; PAM sequence: CTC
aactcagcaatcccattact

SEQ ID NO: 235302 - DNA, 20 bp, Artificial Sequence
  Description of Artificial Sequence: Synthetic oligonucleotide
  Target: LAMA2; (-) strand; PAM type: YTN; PAM sequence: CTA
gcactcaactcagcaatccc

SEQ ID NO: 235303 - DNA, 20 bp, Artificial Sequence
  Description of Artificial Sequence: Synthetic oligonucleotide
  Target: LAMA2; (-) strand; PAM type: YTN; PAM sequence: TTA
aaacagaactagcactcaac

SEQ ID NO: 235304 - DNA, 20 bp, Artificial Sequence
  Description of Artificial Sequence: Synthetic oligonucleotide
  Target: LAMA2; (-) strand; PAM type: YTN; PAM sequence: CTT
aaaacagaactagcactcaa

SEQ ID NO: 235305 - DNA, 20 bp, Artificial Sequence
  Description of Artificial Sequence: Synthetic oligonucleotide
  Target: LAMA2; (-) strand; PAM type: YTN; PAM sequence: CTC
aaaaaacttaaaacagaact

SEQ ID NO: 235306 - DNA, 20 bp, Artificial Sequence
  Description of Artificial Sequence: Synthetic oligonucleotide
  Target: LAMA2; (-) strand; PAM type: YTN; PAM sequence: TTC
tcaaaaaacttaaaacagaa

SEQ ID NO: 235307 - DNA, 20 bp, Artificial Sequence
  Description of Artificial Sequence: Synthetic oligonucleotide
  Target: LAMA2; (-) strand; PAM type: YTN; PAM sequence: TTT
ctcaaaaaacttaaaacaga

SEQ ID NO: 235308 - DNA, 20 bp, Artificial Sequence
  Description of Artificial Sequence: Synthetic oligonucleotide
  Target: LAMA2; (-) strand; PAM type: YTN; PAM sequence: TTG
ggagatttctcaaaaaactt

SEQ ID NO: 235309 - DNA, 20 bp, Artificial Sequence
  Description of Artificial Sequence: Synthetic oligonucleotide
  Target: LAMA2; (-) strand; PAM type: YTN; PAM sequence: CTG
tgggaagccgttgggagatt

SEQ ID NO: 235310 - DNA, 20 bp, Artificial Sequence
  Description of Artificial Sequence: Synthetic oligonucleotide
  Target: LAMA2; (-) strand; PAM type: YTN; PAM sequence: TTC
agacactgtgggaagccgtt

SEQ ID NO: 235311 - DNA, 20 bp, Artificial Sequence
  Description of Artificial Sequence: Synthetic oligonucleotide
  Target: LAMA2; (-) strand; PAM type: YTN; PAM sequence: TTA
gttcagacactgtgggaagc

SEQ ID NO: 235312 - DNA, 20 bp, Artificial Sequence
  Description of Artificial Sequence: Synthetic oligonucleotide
  Target: LAMA2; (-) strand; PAM type: YTN; PAM sequence: CTG
gtgggaaagtaaattagttc

SEQ ID NO: 235313 - DNA, 20 bp, Artificial Sequence
  Description of Artificial Sequence: Synthetic oligonucleotide
  Target: LAMA2; (-) strand; PAM type: YTN; PAM sequence: CTG
ctggtgggaaagtaaattag

SEQ ID NO: 235314 - DNA, 20 bp, Artificial Sequence
  Description of Artificial Sequence: Synthetic oligonucleotide
  Target: LAMA2; (-) strand; PAM type: YTN; PAM sequence: TTA
tacactgctggtgggaaagt

SEQ ID NO: 235315 - DNA, 20 bp, Artificial Sequence
  Description of Artificial Sequence: Synthetic oligonucleotide
  Target: LAMA2; (-) strand; PAM type: YTN; PAM sequence: CTT
atacactgctggtgggaaag

SEQ ID NO: 235316 - DNA, 20 bp, Artificial Sequence
  Description of Artificial Sequence: Synthetic oligonucleotide
  Target: LAMA2; (-) strand; PAM type: YTN; PAM sequence: TTG
cagagaaagggaacacttat

SEQ ID NO: 235317 - DNA, 20 bp, Artificial Sequence
  Description of Artificial Sequence: Synthetic oligonucleotide
  Target: LAMA2; (-) strand; PAM type: YTN; PAM sequence: CTG
gtgaggttgcagagaaaggg

SEQ ID NO: 235318 - DNA, 20 bp, Artificial Sequence
  Description of Artificial Sequence: Synthetic oligonucleotide
  Target: LAMA2; (-) strand; PAM type: YTN; PAM sequence: CTG
aaagtcaaaaataacagata

SEQ ID NO: 235319 - DNA, 20 bp, Artificial Sequence
  Description of Artificial Sequence: Synthetic oligonucleotide
  Target: LAMA2; (-) strand; PAM type: YTN; PAM sequence: TTA
ctgaaagtcaaaaataacag

SEQ ID NO: 235320 - DNA, 20 bp, Artificial Sequence
  Description of Artificial Sequence: Synthetic oligonucleotide
  Target: LAMA2; (-) strand; PAM type: YTN; PAM sequence: CTA
ttactgaaagtcaaaaataa

SEQ ID NO: 235321 - DNA, 20 bp, Artificial Sequence
  Description of Artificial Sequence: Synthetic oligonucleotide
  Target: LAMA2; (-) strand; PAM type: YTN; PAM sequence: CTG
gtcagaacggctattactga

SEQ ID NO: 235322 - DNA, 20 bp, Artificial Sequence
  Description of Artificial Sequence: Synthetic oligonucleotide
  Target: LAMA2; (-) strand; PAM type: YTN; PAM sequence: CTC
acactggtcagaacggctat

SEQ ID NO: 235323 - DNA, 20 bp, Artificial Sequence
  Description of Artificial Sequence: Synthetic oligonucleotide
  Target: LAMA2; (-) strand; PAM type: YTN; PAM sequence: CTA
ccatctcacactggtcagaa

SEQ ID NO: 235324 - DNA, 20 bp, Artificial Sequence
  Description of Artificial Sequence: Synthetic oligonucleotide
  Target: LAMA2; (-) strand; PAM type: YTN; PAM sequence: TTA
aaatactaccatctcacact

SEQ ID NO: 235325 - DNA, 20 bp, Artificial Sequence
  Description of Artificial Sequence: Synthetic oligonucleotide
  Target: LAMA2; (-) strand; PAM type: YTN; PAM sequence: CTT
aaaatactaccatctcacac

SEQ ID NO: 235326 - DNA, 20 bp, Artificial Sequence
  Description of Artificial Sequence: Synthetic oligonucleotide
  Target: LAMA2; (-) strand; PAM type: YTN; PAM sequence: CTA
tatcatgagcttaaaatact

SEQ ID NO: 235327 - DNA, 20 bp, Artificial Sequence
  Description of Artificial Sequence: Synthetic oligonucleotide
  Target: LAMA2; (-) strand; PAM type: YTN; PAM sequence: CTA
tatcactatatcatgagctt

SEQ ID NO: 235328 - DNA, 20 bp, Artificial Sequence
  Description of Artificial Sequence: Synthetic oligonucleotide
  Target: LAMA2; (-) strand; PAM type: YTN; PAM sequence: TTA
tgtgcaatatatgaaaacaa

SEQ ID NO: 235329 - DNA, 20 bp, Artificial Sequence
  Description of Artificial Sequence: Synthetic oligonucleotide
  Target: LAMA2; (-) strand; PAM type: YTN; PAM sequence: TTA
caaattatgtgcaatatatg

SEQ ID NO: 235330 - DNA, 20 bp, Artificial Sequence
  Description of Artificial Sequence: Synthetic oligonucleotide
  Target: LAMA2; (-) strand; PAM type: YTN; PAM sequence: CTT
acaaattatgtgcaatatat

SEQ ID NO: 235331 - DNA, 20 bp, Artificial Sequence
  Description of Artificial Sequence: Synthetic oligonucleotide
  Target: LAMA2; (-) strand; PAM type: YTN; PAM sequence: CTG
gcttacaaattatgtgcaat

SEQ ID NO: 235332 - DNA, 20 bp, Artificial Sequence
  Description of Artificial Sequence: Synthetic oligonucleotide
  Target: LAMA2; (-) strand; PAM type: YTN; PAM sequence: TTG
ctggcttacaaattatgtgc

SEQ ID NO: 235333 - DNA, 20 bp, Artificial Sequence
  Description of Artificial Sequence: Synthetic oligonucleotide
  Target: LAMA2; (-) strand; PAM type: YTN; PAM sequence: TTG
tattgctggcttacaaatta

SEQ ID NO: 235334 - DNA, 20 bp, Artificial Sequence
  Description of Artificial Sequence: Synthetic oligonucleotide
  Target: LAMA2; (-) strand; PAM type: YTN; PAM sequence: TTC
aaacaaaaatgacaacattg

SEQ ID NO: 235335 - DNA, 20 bp, Artificial Sequence
  Description of Artificial Sequence: Synthetic oligonucleotide
  Target: LAMA2; (-) strand; PAM type: YTN; PAM sequence: CTT
caaacaaaaatgacaacatt

SEQ ID NO: 235336 - DNA, 20 bp, Artificial Sequence
  Description of Artificial Sequence: Synthetic oligonucleotide
  Target: LAMA2; (-) strand; PAM type: YTN; PAM sequence: TTG
tgacttcaaacaaaaatgac

SEQ ID NO: 235337 - DNA, 20 bp, Artificial Sequence
  Description of Artificial Sequence: Synthetic oligonucleotide
  Target: LAMA2; (-) strand; PAM type: YTN; PAM sequence: TTT
gtgacttcaaacaaaaatga

SEQ ID NO: 235338 - DNA, 20 bp, Artificial Sequence
  Description of Artificial Sequence: Synthetic oligonucleotide
  Target: LAMA2; (-) strand; PAM type: YTN; PAM sequence: TTT
tgtgacttcaaacaaaaatg

SEQ ID NO: 235339 - DNA, 20 bp, Artificial Sequence
  Description of Artificial Sequence: Synthetic oligonucleotide
  Target: LAMA2; (-) strand; PAM type: YTN; PAM sequence: TTC
atagttttgtgacttcaaac

SEQ ID NO: 235340 - DNA, 20 bp, Artificial Sequence
  Description of Artificial Sequence: Synthetic oligonucleotide
  Target: LAMA2; (-) strand; PAM type: YTN; PAM sequence: TTT
catagttttgtgacttcaaa

SEQ ID NO: 235341 - DNA, 20 bp, Artificial Sequence
  Description of Artificial Sequence: Synthetic oligonucleotide
  Target: LAMA2; (-) strand; PAM type: YTN; PAM sequence: TTT
tcatagttttgtgacttcaa

SEQ ID NO: 235342 - DNA, 20 bp, Artificial Sequence
  Description of Artificial Sequence: Synthetic oligonucleotide
  Target: LAMA2; (-) strand; PAM type: YTN; PAM sequence: TTG
ttttcatagttttgtgactt

SEQ ID NO: 235343 - DNA, 20 bp, Artificial Sequence
  Description of Artificial Sequence: Synthetic oligonucleotide
  Target: LAMA2; (-) strand; PAM type: YTN; PAM sequence: TTA
agattgttttcatagttttg

SEQ ID NO: 235344 - DNA, 20 bp, Artificial Sequence
  Description of Artificial Sequence: Synthetic oligonucleotide
  Target: LAMA2; (-) strand; PAM type: YTN; PAM sequence: TTT
aagattgttttcatagtttt

SEQ ID NO: 235345 - DNA, 20 bp, Artificial Sequence
  Description of Artificial Sequence: Synthetic oligonucleotide
  Target: LAMA2; (-) strand; PAM type: YTN; PAM sequence: CTT
taagattgttttcatagttt

SEQ ID NO: 235346 - DNA, 20 bp, Artificial Sequence
  Description of Artificial Sequence: Synthetic oligonucleotide
  Target: LAMA2; (-) strand; PAM type: YTN; PAM sequence: TTC
tttaagattgttttcatagt

SEQ ID NO: 235347 - DNA, 20 bp, Artificial Sequence
  Description of Artificial Sequence: Synthetic oligonucleotide
  Target: LAMA2; (-) strand; PAM type: YTN; PAM sequence: TTT
ctttaagattgttttcatag

SEQ ID NO: 235348 - DNA, 20 bp, Artificial Sequence
  Description of Artificial Sequence: Synthetic oligonucleotide
  Target: LAMA2; (-) strand; PAM type: YTN; PAM sequence: TTC
atttctttaagattgttttc

SEQ ID NO: 235349 - DNA, 20 bp, Artificial Sequence
  Description of Artificial Sequence: Synthetic oligonucleotide
  Target: LAMA2; (-) strand; PAM type: YTN; PAM sequence: TTT
catttctttaagattgtttt

SEQ ID NO: 235350 - DNA, 20 bp, Artificial Sequence
  Description of Artificial Sequence: Synthetic oligonucleotide
  Target: LAMA2; (-) strand; PAM type: YTN; PAM sequence: TTT
tcatttctttaagattgttt

SEQ ID NO: 235351 - DNA, 20 bp, Artificial Sequence
  Description of Artificial Sequence: Synthetic oligonucleotide
  Target: LAMA2; (-) strand; PAM type: YTN; PAM sequence: CTT
ttcatttctttaagattgtt

SEQ ID NO: 235352 - DNA, 20 bp, Artificial Sequence
  Description of Artificial Sequence: Synthetic oligonucleotide
  Target: LAMA2; (-) strand; PAM type: YTN; PAM sequence: TTC
ttttcatttctttaagattg

SEQ ID NO: 235353 - DNA, 20 bp, Artificial Sequence
  Description of Artificial Sequence: Synthetic oligonucleotide
  Target: LAMA2; (-) strand; PAM type: YTN; PAM sequence: CTT
cttttcatttctttaagatt

SEQ ID NO: 235354 - DNA, 20 bp, Artificial Sequence
  Description of Artificial Sequence: Synthetic oligonucleotide
  Target: LAMA2; (-) strand; PAM type: YTN; PAM sequence: TTC
cttcttttcatttctttaag

SEQ ID NO: 235355 - DNA, 20 bp, Artificial Sequence
  Description of Artificial Sequence: Synthetic oligonucleotide
  Target: LAMA2; (-) strand; PAM type: YTN; PAM sequence: TTT
ccttcttttcatttctttaa

SEQ ID NO: 235356 - DNA, 20 bp, Artificial Sequence
  Description of Artificial Sequence: Synthetic oligonucleotide
  Target: LAMA2; (-) strand; PAM type: YTN; PAM sequence: TTT
tccttcttttcatttcttta

SEQ ID NO: 235357 - DNA, 20 bp, Artificial Sequence
  Description of Artificial Sequence: Synthetic oligonucleotide
  Target: LAMA2; (-) strand; PAM type: YTN; PAM sequence: TTT
ttccttcttttcatttcttt

SEQ ID NO: 235358 - DNA, 20 bp, Artificial Sequence
  Description of Artificial Sequence: Synthetic oligonucleotide
  Target: LAMA2; (-) strand; PAM type: YTN; PAM sequence: TTT
tttccttcttttcatttctt

SEQ ID NO: 235359 - DNA, 20 bp, Artificial Sequence
  Description of Artificial Sequence: Synthetic oligonucleotide
  Target: LAMA2; (-) strand; PAM type: YTN; PAM sequence: TTT
ttttccttcttttcatttct

SEQ ID NO: 235360 - DNA, 20 bp, Artificial Sequence
  Description of Artificial Sequence: Synthetic oligonucleotide
  Target: LAMA2; (-) strand; PAM type: YTN; PAM sequence: TTA
atgtaaatttttttccttct

SEQ ID NO: 235361 - DNA, 20 bp, Artificial Sequence
  Description of Artificial Sequence: Synthetic oligonucleotide
  Target: LAMA2; (-) strand; PAM type: YTN; PAM sequence: CTA
gaaccacagagtatggaaaa

SEQ ID NO: 235362 - DNA, 20 bp, Artificial Sequence
  Description of Artificial Sequence: Synthetic oligonucleotide
  Target: LAMA2; (-) strand; PAM type: YTN; PAM sequence: TTC
aagcaggagggcaatatata

SEQ ID NO: 235363 - DNA, 20 bp, Artificial Sequence
  Description of Artificial Sequence: Synthetic oligonucleotide
  Target: LAMA2; (-) strand; PAM type: YTN; PAM sequence: TTT
caagcaggagggcaatatat

SEQ ID NO: 235364 - DNA, 20 bp, Artificial Sequence
  Description of Artificial Sequence: Synthetic oligonucleotide
  Target: LAMA2; (-) strand; PAM type: YTN; PAM sequence: TTT
tcaagcaggagggcaatata

SEQ ID NO: 235365 - DNA, 20 bp, Artificial Sequence
  Description of Artificial Sequence: Synthetic oligonucleotide
  Target: LAMA2; (-) strand; PAM type: YTN; PAM sequence: TTT
ttcaagcaggagggcaatat

SEQ ID NO: 235366 - DNA, 20 bp, Artificial Sequence
  Description of Artificial Sequence: Synthetic oligonucleotide
  Target: LAMA2; (-) strand; PAM type: YTN; PAM sequence: TTA
aaggaaatttttcaagcagg

SEQ ID NO: 235367 - DNA, 20 bp, Artificial Sequence
  Description of Artificial Sequence: Synthetic oligonucleotide
  Target: LAMA2; (-) strand; PAM type: YTN; PAM sequence: CTA
ccaaaaaaaaaatgttaaag

SEQ ID NO: 235368 - DNA, 20 bp, Artificial Sequence
  Description of Artificial Sequence: Synthetic oligonucleotide
  Target: LAMA2; (-) strand; PAM type: YTN; PAM sequence: CTG
cactaccaaaaaaaaaatgt

SEQ ID NO: 235369 - DNA, 20 bp, Artificial Sequence
  Description of Artificial Sequence: Synthetic oligonucleotide
  Target: LAMA2; (-) strand; PAM type: YTN; PAM sequence: CTC
tgcactaccaaaaaaaaaat

SEQ ID NO: 235370 - DNA, 20 bp, Artificial Sequence
  Description of Artificial Sequence: Synthetic oligonucleotide
  Target: LAMA2; (-) strand; PAM type: YTN; PAM sequence: TTG
tcaccagcagctctgcacta

SEQ ID NO: 235371 - DNA, 20 bp, Artificial Sequence
  Description of Artificial Sequence: Synthetic oligonucleotide
  Target: LAMA2; (-) strand; PAM type: YTN; PAM sequence: TTT
gtcaccagcagctctgcact

SEQ ID NO: 235372 - DNA, 20 bp, Artificial Sequence
  Description of Artificial Sequence: Synthetic oligonucleotide
  Target: LAMA2; (-) strand; PAM type: YTN; PAM sequence: TTG
agaaaatttgtcaccagcag

SEQ ID NO: 235373 - DNA, 20 bp, Artificial Sequence
  Description of Artificial Sequence: Synthetic oligonucleotide
  Target: LAMA2; (-) strand; PAM type: YTN; PAM sequence: TTC
agataaagggaagttgagaa

SEQ ID NO: 235374 - DNA, 20 bp, Artificial Sequence
  Description of Artificial Sequence: Synthetic oligonucleotide
  Target: LAMA2; (-) strand; PAM type: YTN; PAM sequence: TTT
cagataaagggaagttgaga

SEQ ID NO: 235375 - DNA, 20 bp, Artificial Sequence
  Description of Artificial Sequence: Synthetic oligonucleotide
  Target: LAMA2; (-) strand; PAM type: YTN; PAM sequence: TTT
tcagataaagggaagttgag

SEQ ID NO: 235376 - DNA, 20 bp, Artificial Sequence
  Description of Artificial Sequence: Synthetic oligonucleotide
  Target: LAMA2; (-) strand; PAM type: YTN; PAM sequence: TTA
aagacattttcagataaagg

SEQ ID NO: 235377 - DNA, 20 bp, Artificial Sequence
  Description of Artificial Sequence: Synthetic oligonucleotide
  Target: LAMA2; (-) strand; PAM type: YTN; PAM sequence: TTC
aataatgaaagtagattaaa

SEQ ID NO: 235378 - DNA, 20 bp, Artificial Sequence
  Description of Artificial Sequence: Synthetic oligonucleotide
  Target: LAMA2; (-) strand; PAM type: YTN; PAM sequence: CTT
caataatgaaagtagattaa

SEQ ID NO: 235379 - DNA, 20 bp, Artificial Sequence
  Description of Artificial Sequence: Synthetic oligonucleotide
  Target: LAMA2; (-) strand; PAM type: YTN; PAM sequence: CTA
tgtggaaaatatccttcaat

SEQ ID NO: 235380 - DNA, 20 bp, Artificial Sequence
  Description of Artificial Sequence: Synthetic oligonucleotide
  Target: LAMA2; (-) strand; PAM type: YTN; PAM sequence: CTG
taactatgtggaaaatatcc

SEQ ID NO: 235381 - DNA, 20 bp, Artificial Sequence
  Description of Artificial Sequence: Synthetic oligonucleotide
  Target: LAMA2; (-) strand; PAM type: YTN; PAM sequence: CTC
tgtaactatgtggaaaatat

SEQ ID NO: 235382 - DNA, 20 bp, Artificial Sequence
  Description of Artificial Sequence: Synthetic oligonucleotide
  Target: LAMA2; (-) strand; PAM type: YTN; PAM sequence: CTA
aacaaagaagaaaacacaca

SEQ ID NO: 235383 - DNA, 20 bp, Artificial Sequence
  Description of Artificial Sequence: Synthetic oligonucleotide
  Target: LAMA2; (-) strand; PAM type: YTN; PAM sequence: TTA
aagtgctaaacaaagaagaa

SEQ ID NO: 235384 - DNA, 20 bp, Artificial Sequence
  Description of Artificial Sequence: Synthetic oligonucleotide
  Target: LAMA2; (-) strand; PAM type: YTN; PAM sequence: TTT
aaagtgctaaacaaagaaga

SEQ ID NO: 235385 - DNA, 20 bp, Artificial Sequence
  Description of Artificial Sequence: Synthetic oligonucleotide
  Target: LAMA2; (-) strand; PAM type: YTN; PAM sequence: CTT
taaagtgctaaacaaagaag

SEQ ID NO: 235386 - DNA, 20 bp, Artificial Sequence
  Description of Artificial Sequence: Synthetic oligonucleotide
  Target: LAMA2; (-) strand; PAM type: YTN; PAM sequence: TTG
tcataaggatgaatgaaatc

SEQ ID NO: 235387 - DNA, 20 bp, Artificial Sequence
  Description of Artificial Sequence: Synthetic oligonucleotide
  Target: LAMA2; (-) strand; PAM type: YTN; PAM sequence: CTA
tgttgtcataaggatgaatg

SEQ ID NO: 235388 - DNA, 20 bp, Artificial Sequence
  Description of Artificial Sequence: Synthetic oligonucleotide
  Target: LAMA2; (-) strand; PAM type: YTN; PAM sequence: TTA
aagatatatatatatagaac

SEQ ID NO: 235389 - DNA, 20 bp, Artificial Sequence
  Description of Artificial Sequence: Synthetic oligonucleotide
  Target: LAMA2; (-) strand; PAM type: YTN; PAM sequence: CTA
gtgaattaaagatatatata

SEQ ID NO: 235390 - DNA, 20 bp, Artificial Sequence
  Description of Artificial Sequence: Synthetic oligonucleotide
  Target: LAMA2; (-) strand; PAM type: YTN; PAM sequence: TTG
aaatcatctagtgaattaaa

SEQ ID NO: 235391 - DNA, 20 bp, Artificial Sequence
  Description of Artificial Sequence: Synthetic oligonucleotide
  Target: LAMA2; (-) strand; PAM type: YTN; PAM sequence: TTT
gaaatcatctagtgaattaa

SEQ ID NO: 235392 - DNA, 20 bp, Artificial Sequence
  Description of Artificial Sequence: Synthetic oligonucleotide
  Target: LAMA2; (-) strand; PAM type: YTN; PAM sequence: TTT
tgaaatcatctagtgaatta

SEQ ID NO: 235393 - DNA, 20 bp, Artificial Sequence
  Description of Artificial Sequence: Synthetic oligonucleotide
  Target: LAMA2; (-) strand; PAM type: YTN; PAM sequence: TTT
ttgaaatcatctagtgaatt

SEQ ID NO: 235394 - DNA, 20 bp, Artificial Sequence
  Description of Artificial Sequence: Synthetic oligonucleotide
  Target: LAMA2; (-) strand; PAM type: YTN; PAM sequence: TTA
tcatacatggtataagtgtc

SEQ ID NO: 235395 - DNA, 20 bp, Artificial Sequence
  Description of Artificial Sequence: Synthetic oligonucleotide
  Target: LAMA2; (-) strand; PAM type: YTN; PAM sequence: TTT
atcatacatggtataagtgt

SEQ ID NO: 235396 - DNA, 20 bp, Artificial Sequence
  Description of Artificial Sequence: Synthetic oligonucleotide
  Target: LAMA2; (-) strand; PAM type: YTN; PAM sequence: TTT
tatcatacatggtataagtg

SEQ ID NO: 235397 - DNA, 20 bp, Artificial Sequence
  Description of Artificial Sequence: Synthetic oligonucleotide
  Target: LAMA2; (-) strand; PAM type: YTN; PAM sequence: CTA
cgggccaaagttttatcata

SEQ ID NO: 235398 - DNA, 20 bp, Artificial Sequence
  Description of Artificial Sequence: Synthetic oligonucleotide
  Target: LAMA2; (-) strand; PAM type: YTN; PAM sequence: TTG
gtctacgggccaaagtttta

SEQ ID NO: 235399 - DNA, 20 bp, Artificial Sequence
  Description of Artificial Sequence: Synthetic oligonucleotide
  Target: LAMA2; (-) strand; PAM type: YTN; PAM sequence: TTT
ggtctacgggccaaagtttt

SEQ ID NO: 235400 - DNA, 20 bp, Artificial Sequence
  Description of Artificial Sequence: Synthetic oligonucleotide
  Target: LAMA2; (-) strand; PAM type: YTN; PAM sequence: TTA
cagatcatacaaatataggc

SEQ ID NO: 235401 - DNA, 20 bp, Artificial Sequence
  Description of Artificial Sequence: Synthetic oligonucleotide
  Target: LAMA2; (-) strand; PAM type: YTN; PAM sequence: CTT
acagatcatacaaatatagg

SEQ ID NO: 235402 - DNA, 20 bp, Artificial Sequence
  Description of Artificial Sequence: Synthetic oligonucleotide
  Target: LAMA2; (-) strand; PAM type: YTN; PAM sequence: TTG
cttacagatcatacaaatat

SEQ ID NO: 235403 - DNA, 20 bp, Artificial Sequence
  Description of Artificial Sequence: Synthetic oligonucleotide
  Target: LAMA2; (-) strand; PAM type: YTN; PAM sequence: TTT
gcttacagatcatacaaata

SEQ ID NO: 235404 - DNA, 20 bp, Artificial Sequence
  Description of Artificial Sequence: Synthetic oligonucleotide
  Target: LAMA2; (-) strand; PAM type: YTN; PAM sequence: CTT
tgcttacagatcatacaaat

SEQ ID NO: 235405 - DNA, 20 bp, Artificial Sequence
  Description of Artificial Sequence: Synthetic oligonucleotide
  Target: LAMA2; (-) strand; PAM type: YTN; PAM sequence: TTA
caaatgtaaaaacatccttt

SEQ ID NO: 235406 - DNA, 20 bp, Artificial Sequence
  Description of Artificial Sequence: Synthetic oligonucleotide
  Target: LAMA2; (-) strand; PAM type: YTN; PAM sequence: TTT
acaaatgtaaaaacatcctt

SEQ ID NO: 235407 - DNA, 20 bp, Artificial Sequence
  Description of Artificial Sequence: Synthetic oligonucleotide
  Target: LAMA2; (-) strand; PAM type: YTN; PAM sequence: CTT
tacaaatgtaaaaacatcct

SEQ ID NO: 235408 - DNA, 20 bp, Artificial Sequence
  Description of Artificial Sequence: Synthetic oligonucleotide
  Target: LAMA2; (-) strand; PAM type: YTN; PAM sequence: TTA
acaaacctttacaaatgtaa

SEQ ID NO: 235409 - DNA, 20 bp, Artificial Sequence
  Description of Artificial Sequence: Synthetic oligonucleotide
  Target: LAMA2; (-) strand; PAM type: YTN; PAM sequence: TTT
aacaaacctttacaaatgta

SEQ ID NO: 235410 - DNA, 20 bp, Artificial Sequence
  Description of Artificial Sequence: Synthetic oligonucleotide
  Target: LAMA2; (-) strand; PAM type: YTN; PAM sequence: TTT
taacaaacctttacaaatgt

SEQ ID NO: 235411 - DNA, 20 bp, Artificial Sequence
  Description of Artificial Sequence: Synthetic oligonucleotide
  Target: LAMA2; (-) strand; PAM type: YTN; PAM sequence: CTT
ttaacaaacctttacaaatg

SEQ ID NO: 235412 - DNA, 20 bp, Artificial Sequence
  Description of Artificial Sequence: Synthetic oligonucleotide
  Target: LAMA2; (-) strand; PAM type: YTN; PAM sequence: CTC
cttttaacaaacctttacaa

SEQ ID NO: 235413 - DNA, 20 bp, Artificial Sequence
  Description of Artificial Sequence: Synthetic oligonucleotide
  Target: LAMA2; (-) strand; PAM type: YTN; PAM sequence: TTC
tccttttaacaaacctttac

SEQ ID NO: 235414 - DNA, 20 bp, Artificial Sequence
  Description of Artificial Sequence: Synthetic oligonucleotide
  Target: LAMA2; (-) strand; PAM type: YTN; PAM sequence: CTT
ctccttttaacaaaccttta

SEQ ID NO: 235415 - DNA, 20 bp, Artificial Sequence
  Description of Artificial Sequence: Synthetic oligonucleotide
  Target: LAMA2; (-) strand; PAM type: YTN; PAM sequence: CTA
cttctccttttaacaaacct

SEQ ID NO: 235416 - DNA, 20 bp, Artificial Sequence
  Description of Artificial Sequence: Synthetic oligonucleotide
  Target: LAMA2; (-) strand; PAM type: YTN; PAM sequence: TTC
tacttctccttttaacaaac

SEQ ID NO: 235417 - DNA, 20 bp, Artificial Sequence
  Description of Artificial Sequence: Synthetic oligonucleotide
  Target: LAMA2; (-) strand; PAM type: YTN; PAM sequence: CTT
ctacttctccttttaacaaa

SEQ ID NO: 235418 - DNA, 20 bp, Artificial Sequence
  Description of Artificial Sequence: Synthetic oligonucleotide
  Target: LAMA2; (-) strand; PAM type: YTN; PAM sequence: TTC
ttctacttctccttttaaca

SEQ ID NO: 235419 - DNA, 20 bp, Artificial Sequence
  Description of Artificial Sequence: Synthetic oligonucleotide
  Target: LAMA2; (-) strand; PAM type: YTN; PAM sequence: CTT
cttctacttctccttttaac

SEQ ID NO: 235420 - DNA, 20 bp, Artificial Sequence
  Description of Artificial Sequence: Synthetic oligonucleotide
  Target: LAMA2; (-) strand; PAM type: YTN; PAM sequence: CTC
cccttcttctacttctcctt

SEQ ID NO: 235421 - DNA, 20 bp, Artificial Sequence
  Description of Artificial Sequence: Synthetic oligonucleotide
  Target: LAMA2; (-) strand; PAM type: YTN; PAM sequence: TTC
tccccttcttctacttctcc

SEQ ID NO: 235422 - DNA, 20 bp, Artificial Sequence
  Description of Artificial Sequence: Synthetic oligonucleotide
  Target: LAMA2; (-) strand; PAM type: YTN; PAM sequence: TTC
attctccccttcttctactt

SEQ ID NO: 235423 - DNA, 20 bp, Artificial Sequence
  Description of Artificial Sequence: Synthetic oligonucleotide
  Target: LAMA2; (-) strand; PAM type: YTN; PAM sequence: CTT
cattctccccttcttctact

SEQ ID NO: 235424 - DNA, 20 bp, Artificial Sequence
  Description of Artificial Sequence: Synthetic oligonucleotide
  Target: LAMA2; (-) strand; PAM type: YTN; PAM sequence: CTC
ttcattctccccttcttcta

SEQ ID NO: 235425 - DNA, 20 bp, Artificial Sequence
  Description of Artificial Sequence: Synthetic oligonucleotide
  Target: LAMA2; (-) strand; PAM type: YTN; PAM sequence: TTC
tcttcattctccccttcttc

SEQ ID NO: 235426 - DNA, 20 bp, Artificial Sequence
  Description of Artificial Sequence: Synthetic oligonucleotide
  Target: LAMA2; (-) strand; PAM type: YTN; PAM sequence: CTA
gttctcttcattctcccctt

SEQ ID NO: 235427 - DNA, 20 bp, Artificial Sequence
  Description of Artificial Sequence: Synthetic oligonucleotide
  Target: LAMA2; (-) strand; PAM type: YTN; PAM sequence: CTC
ctagttctcttcattctccc

SEQ ID NO: 235428 - DNA, 20 bp, Artificial Sequence
  Description of Artificial Sequence: Synthetic oligonucleotide
  Target: LAMA2; (-) strand; PAM type: YTN; PAM sequence: TTC
ccccccctcctagttctctt

SEQ ID NO: 235429 - DNA, 20 bp, Artificial Sequence
  Description of Artificial Sequence: Synthetic oligonucleotide
  Target: LAMA2; (-) strand; PAM type: YTN; PAM sequence: CTT
cccccccctcctagttctct

SEQ ID NO: 235430 - DNA, 20 bp, Artificial Sequence
  Description of Artificial Sequence: Synthetic oligonucleotide
  Target: LAMA2; (-) strand; PAM type: YTN; PAM sequence: TTC
ttcccccccctcctagttct

SEQ ID NO: 235431 - DNA, 20 bp, Artificial Sequence
  Description of Artificial Sequence: Synthetic oligonucleotide
  Target: LAMA2; (-) strand; PAM type: YTN; PAM sequence: CTT
cttcccccccctcctagttc

SEQ ID NO: 235432 - DNA, 20 bp, Artificial Sequence
  Description of Artificial Sequence: Synthetic oligonucleotide
  Target: LAMA2; (-) strand; PAM type: YTN; PAM sequence: CTC
ttcttcccccccctcctagt

SEQ ID NO: 235433 - DNA, 20 bp, Artificial Sequence
  Description of Artificial Sequence: Synthetic oligonucleotide
  Target: LAMA2; (-) strand; PAM type: YTN; PAM sequence: CTC
ctcttcttcccccccctcct

SEQ ID NO: 235434 - DNA, 20 bp, Artificial Sequence
  Description of Artificial Sequence: Synthetic oligonucleotide
  Target: LAMA2; (-) strand; PAM type: YTN; PAM sequence: TTC
ctcctcttcttcccccccct

SEQ ID NO: 235435 - DNA, 20 bp, Artificial Sequence
  Description of Artificial Sequence: Synthetic oligonucleotide
  Target: LAMA2; (-) strand; PAM type: YTN; PAM sequence: CTT
cctcctcttcttcccccccc

SEQ ID NO: 235436 - DNA, 20 bp, Artificial Sequence
  Description of Artificial Sequence: Synthetic oligonucleotide
  Target: LAMA2; (-) strand; PAM type: YTN; PAM sequence: TTC
ttcctcctcttcttcccccc

SEQ ID NO: 235437 - DNA, 20 bp, Artificial Sequence
  Description of Artificial Sequence: Synthetic oligonucleotide
  Target: LAMA2; (-) strand; PAM type: YTN; PAM sequence: TTC
attcttcctcctcttcttcc

SEQ ID NO: 235438 - DNA, 20 bp, Artificial Sequence
  Description of Artificial Sequence: Synthetic oligonucleotide
  Target: LAMA2; (-) strand; PAM type: YTN; PAM sequence: CTT
cattcttcctcctcttcttc

SEQ ID NO: 235439 - DNA, 20 bp, Artificial Sequence
  Description of Artificial Sequence: Synthetic oligonucleotide
  Target: LAMA2; (-) strand; PAM type: YTN; PAM sequence: CTC
ttcattcttcctcctcttct

SEQ ID NO: 235440 - DNA, 20 bp, Artificial Sequence
  Description of Artificial Sequence: Synthetic oligonucleotide
  Target: LAMA2; (-) strand; PAM type: YTN; PAM sequence: CTC
tcttcattcttcctcctctt

SEQ ID NO: 235441 - DNA, 20 bp, Artificial Sequence
  Description of Artificial Sequence: Synthetic oligonucleotide
  Target: LAMA2; (-) strand; PAM type: YTN; PAM sequence: CTG
taaagggccagatagtaaaa

SEQ ID NO: 235442 - DNA, 20 bp, Artificial Sequence
  Description of Artificial Sequence: Synthetic oligonucleotide
  Target: LAMA2; (-) strand; PAM type: YTN; PAM sequence: TTC
tgtaaagggccagatagtaa

SEQ ID NO: 235443 - DNA, 20 bp, Artificial Sequence
  Description of Artificial Sequence: Synthetic oligonucleotide
  Target: LAMA2; (-) strand; PAM type: YTN; PAM sequence: TTT
ctgtaaagggccagatagta

SEQ ID NO: 235444 - DNA, 20 bp, Artificial Sequence
  Description of Artificial Sequence: Synthetic oligonucleotide
  Target: LAMA2; (-) strand; PAM type: YTN; PAM sequence: TTT
tctgtaaagggccagatagt

SEQ ID NO: 235445 - DNA, 20 bp, Artificial Sequence
  Description of Artificial Sequence: Synthetic oligonucleotide
  Target: LAMA2; (-) strand; PAM type: YTN; PAM sequence: CTT
ttctgtaaagggccagatag

SEQ ID NO: 235446 - DNA, 20 bp, Artificial Sequence
  Description of Artificial Sequence: Synthetic oligonucleotide
  Target: LAMA2; (-) strand; PAM type: YTN; PAM sequence: TTG
gaaaacttttctgtaaaggg

SEQ ID NO: 235447 - DNA, 20 bp, Artificial Sequence
  Description of Artificial Sequence: Synthetic oligonucleotide
  Target: LAMA2; (-) strand; PAM type: YTN; PAM sequence: CTG
aggttggaaaacttttctgt

SEQ ID NO: 235448 - DNA, 20 bp, Artificial Sequence
  Description of Artificial Sequence: Synthetic oligonucleotide
  Target: LAMA2; (-) strand; PAM type: YTN; PAM sequence: CTC
tgaggttggaaaacttttct

SEQ ID NO: 235449 - DNA, 20 bp, Artificial Sequence
  Description of Artificial Sequence: Synthetic oligonucleotide
  Target: LAMA2; (-) strand; PAM type: YTN; PAM sequence: TTA
actctgaggttggaaaactt

SEQ ID NO: 235450 - DNA, 20 bp, Artificial Sequence
  Description of Artificial Sequence: Synthetic oligonucleotide
  Target: LAMA2; (-) strand; PAM type: YTN; PAM sequence: TTT
aactctgaggttggaaaact

SEQ ID NO: 235451 - DNA, 20 bp, Artificial Sequence
  Description of Artificial Sequence: Synthetic oligonucleotide
  Target: LAMA2; (-) strand; PAM type: YTN; PAM sequence: TTA
tttaactctgaggttggaaa

SEQ ID NO: 235452 - DNA, 20 bp, Artificial Sequence
  Description of Artificial Sequence: Synthetic oligonucleotide
  Target: LAMA2; (-) strand; PAM type: YTN; PAM sequence: TTT
atttaactctgaggttggaa

SEQ ID NO: 235453 - DNA, 20 bp, Artificial Sequence
  Description of Artificial Sequence: Synthetic oligonucleotide
  Target: LAMA2; (-) strand; PAM type: YTN; PAM sequence: TTG
aaagccaaacatagacacat

SEQ ID NO: 235454 - DNA, 20 bp, Artificial Sequence
  Description of Artificial Sequence: Synthetic oligonucleotide
  Target: LAMA2; (-) strand; PAM type: YTN; PAM sequence: CTT
gaaagccaaacatagacaca

SEQ ID NO: 235455 - DNA, 20 bp, Artificial Sequence
  Description of Artificial Sequence: Synthetic oligonucleotide
  Target: LAMA2; (-) strand; PAM type: YTN; PAM sequence: TTG
tgaatcaagcaaggtaagct

SEQ ID NO: 235456 - DNA, 20 bp, Artificial Sequence
  Description of Artificial Sequence: Synthetic oligonucleotide
  Target: LAMA2; (-) strand; PAM type: YTN; PAM sequence: TTT
gtgaatcaagcaaggtaagc

SEQ ID NO: 235457 - DNA, 20 bp, Artificial Sequence
  Description of Artificial Sequence: Synthetic oligonucleotide
  Target: LAMA2; (-) strand; PAM type: YTN; PAM sequence: CTT
tgtgaatcaagcaaggtaag

SEQ ID NO: 235458 - DNA, 20 bp, Artificial Sequence
  Description of Artificial Sequence: Synthetic oligonucleotide
  Target: LAMA2; (-) strand; PAM type: YTN; PAM sequence: CTA
gaagctttgtgaatcaagca

SEQ ID NO: 235459 - DNA, 20 bp, Artificial Sequence
  Description of Artificial Sequence: Synthetic oligonucleotide
  Target: LAMA2; (-) strand; PAM type: YTN; PAM sequence: TTC
ctagaagctttgtgaatcaa

SEQ ID NO: 235460 - DNA, 20 bp, Artificial Sequence
  Description of Artificial Sequence: Synthetic oligonucleotide
  Target: LAMA2; (-) strand; PAM type: YTN; PAM sequence: TTA
tagttcctagaagctttgtg

SEQ ID NO: 235461 - DNA, 20 bp, Artificial Sequence
  Description of Artificial Sequence: Synthetic oligonucleotide
  Target: LAMA2; (-) strand; PAM type: YTN; PAM sequence: TTT
atagttcctagaagctttgt

SEQ ID NO: 235462 - DNA, 20 bp, Artificial Sequence
  Description of Artificial Sequence: Synthetic oligonucleotide
  Target: LAMA2; (-) strand; PAM type: YTN; PAM sequence: CTC
aatttatagttcctagaagc

SEQ ID NO: 235463 - DNA, 20 bp, Artificial Sequence
  Description of Artificial Sequence: Synthetic oligonucleotide
  Target: LAMA2; (-) strand; PAM type: YTN; PAM sequence: CTA
aatgtggaataaaatctcaa

SEQ ID NO: 235464 - DNA, 20 bp, Artificial Sequence
  Description of Artificial Sequence: Synthetic oligonucleotide
  Target: LAMA2; (-) strand; PAM type: YTN; PAM sequence: TTC
ctaaatgtggaataaaatct

SEQ ID NO: 235465 - DNA, 20 bp, Artificial Sequence
  Description of Artificial Sequence: Synthetic oligonucleotide
  Target: LAMA2; (-) strand; PAM type: YTN; PAM sequence: TTT
cctaaatgtggaataaaatc

SEQ ID NO: 235466 - DNA, 20 bp, Artificial Sequence
  Description of Artificial Sequence: Synthetic oligonucleotide
  Target: LAMA2; (-) strand; PAM type: YTN; PAM sequence: CTA
aaatttcctaaatgtggaat

SEQ ID NO: 235467 - DNA, 20 bp, Artificial Sequence
  Description of Artificial Sequence: Synthetic oligonucleotide
  Target: LAMA2; (-) strand; PAM type: YTN; PAM sequence: CTA
aaaaaaataagtaaaaataa

SEQ ID NO: 235468 - DNA, 20 bp, Artificial Sequence
  Description of Artificial Sequence: Synthetic oligonucleotide
  Target: LAMA2; (-) strand; PAM type: YTN; PAM sequence: TTA
aacaaaagcctaaaaaaaat

SEQ ID NO: 235469 - DNA, 20 bp, Artificial Sequence
  Description of Artificial Sequence: Synthetic oligonucleotide
  Target: LAMA2; (-) strand; PAM type: YTN; PAM sequence: TTT
aaacaaaagcctaaaaaaaa

SEQ ID NO: 235470 - DNA, 20 bp, Artificial Sequence
  Description of Artificial Sequence: Synthetic oligonucleotide
  Target: LAMA2; (-) strand; PAM type: YTN; PAM sequence: TTT
taaacaaaagcctaaaaaaa

SEQ ID NO: 235471 - DNA, 20 bp, Artificial Sequence
  Description of Artificial Sequence: Synthetic oligonucleotide
  Target: LAMA2; (-) strand; PAM type: YTN; PAM sequence: CTG
gtcaaaaaacaggttttaaa

SEQ ID NO: 235472 - DNA, 20 bp, Artificial Sequence
  Description of Artificial Sequence: Synthetic oligonucleotide
  Target: LAMA2; (-) strand; PAM type: YTN; PAM sequence: CTA
gaaagagaaggaaaaacact

SEQ ID NO: 235473 - DNA, 20 bp, Artificial Sequence
  Description of Artificial Sequence: Synthetic oligonucleotide
  Target: LAMA2; (-) strand; PAM type: YTN; PAM sequence: CTG
gagtcctagaaagagaagga

SEQ ID NO: 235474 - DNA, 20 bp, Artificial Sequence
  Description of Artificial Sequence: Synthetic oligonucleotide
  Target: LAMA2; (-) strand; PAM type: YTN; PAM sequence: CTA
gcacacatgcagctggagtc

SEQ ID NO: 235475 - DNA, 20 bp, Artificial Sequence
  Description of Artificial Sequence: Synthetic oligonucleotide
  Target: LAMA2; (-) strand; PAM type: YTN; PAM sequence: CTC
agatacaatgaacgccctag

SEQ ID NO: 235476 - DNA, 20 bp, Artificial Sequence
  Description of Artificial Sequence: Synthetic oligonucleotide
  Target: LAMA2; (-) strand; PAM type: YTN; PAM sequence: CTG
cctcagatacaatgaacgcc

SEQ ID NO: 235477 - DNA, 20 bp, Artificial Sequence
  Description of Artificial Sequence: Synthetic oligonucleotide
  Target: LAMA2; (-) strand; PAM type: YTN; PAM sequence: TTA
gcactgcctcagatacaatg

SEQ ID NO: 235478 - DNA, 20 bp, Artificial Sequence
  Description of Artificial Sequence: Synthetic oligonucleotide
  Target: LAMA2; (-) strand; PAM type: YTN; PAM sequence: CTT
agcactgcctcagatacaat

SEQ ID NO: 235479 - DNA, 20 bp, Artificial Sequence
  Description of Artificial Sequence: Synthetic oligonucleotide
  Target: LAMA2; (-) strand; PAM type: YTN; PAM sequence: TTA
cttagcactgcctcagatac

SEQ ID NO: 235480 - DNA, 20 bp, Artificial Sequence
  Description of Artificial Sequence: Synthetic oligonucleotide
  Target: LAMA2; (-) strand; PAM type: YTN; PAM sequence: CTA
aagaacggagaaagaaaaaa

SEQ ID NO: 235481 - DNA, 20 bp, Artificial Sequence
  Description of Artificial Sequence: Synthetic oligonucleotide
  Target: LAMA2; (-) strand; PAM type: YTN; PAM sequence: TTA
tatgtagaccaaagtataat

SEQ ID NO: 235482 - DNA, 20 bp, Artificial Sequence
  Description of Artificial Sequence: Synthetic oligonucleotide
  Target: LAMA2; (-) strand; PAM type: YTN; PAM sequence: TTA
aagatacattatatgtagac

SEQ ID NO: 235483 - DNA, 20 bp, Artificial Sequence
  Description of Artificial Sequence: Synthetic oligonucleotide
  Target: LAMA2; (-) strand; PAM type: YTN; PAM sequence: CTA
gtaaattaaagatacattat

SEQ ID NO: 235484 - DNA, 20 bp, Artificial Sequence
  Description of Artificial Sequence: Synthetic oligonucleotide
  Target: LAMA2; (-) strand; PAM type: YTN; PAM sequence: TTA
aaatcagctagtaaattaaa

SEQ ID NO: 235485 - DNA, 20 bp, Artificial Sequence
  Description of Artificial Sequence: Synthetic oligonucleotide
  Target: LAMA2; (-) strand; PAM type: YTN; PAM sequence: TTT
aaaatcagctagtaaattaa

SEQ ID NO: 235486 - DNA, 20 bp, Artificial Sequence
  Description of Artificial Sequence: Synthetic oligonucleotide
  Target: LAMA2; (-) strand; PAM type: YTN; PAM sequence: TTT
taaaatcagctagtaaatta

SEQ ID NO: 235487 - DNA, 20 bp, Artificial Sequence
  Description of Artificial Sequence: Synthetic oligonucleotide
  Target: LAMA2; (-) strand; PAM type: YTN; PAM sequence: CTA
atgagaatattttaaaatca

SEQ ID NO: 235488 - DNA, 20 bp, Artificial Sequence
  Description of Artificial Sequence: Synthetic oligonucleotide
  Target: LAMA2; (-) strand; PAM type: YTN; PAM sequence: CTG
tgcccggcctaatgagaata

SEQ ID NO: 235489 - DNA, 20 bp, Artificial Sequence
  Description of Artificial Sequence: Synthetic oligonucleotide
  Target: LAMA2; (-) strand; PAM type: YTN; PAM sequence: CTG
gggtgaaccactgtgcccgg

SEQ ID NO: 235490 - DNA, 20 bp, Artificial Sequence
  Description of Artificial Sequence: Synthetic oligonucleotide
  Target: LAMA2; (-) strand; PAM type: YTN; PAM sequence: TTC
ctggggtgaaccactgtgcc

SEQ ID NO: 235491 - DNA, 20 bp, Artificial Sequence
  Description of Artificial Sequence: Synthetic oligonucleotide
  Target: LAMA2; (-) strand; PAM type: YTN; PAM sequence: CTG
ggattcctggggtgaaccac

SEQ ID NO: 235492 - DNA, 20 bp, Artificial Sequence
  Description of Artificial Sequence: Synthetic oligonucleotide
  Target: LAMA2; (-) strand; PAM type: YTN; PAM sequence: TTC
caaagtactgggattcctgg

SEQ ID NO: 235493 - DNA, 20 bp, Artificial Sequence
  Description of Artificial Sequence: Synthetic oligonucleotide
  Target: LAMA2; (-) strand; PAM type: YTN; PAM sequence: CTT
ccaaagtactgggattcctg

SEQ ID NO: 235494 - DNA, 20 bp, Artificial Sequence
  Description of Artificial Sequence: Synthetic oligonucleotide
  Target: LAMA2; (-) strand; PAM type: YTN; PAM sequence: TTC
ggccttccaaagtactggga

SEQ ID NO: 235495 - DNA, 20 bp, Artificial Sequence
  Description of Artificial Sequence: Synthetic oligonucleotide
  Target: LAMA2; (-) strand; PAM type: YTN; PAM sequence: CTT
cggccttccaaagtactggg

SEQ ID NO: 235496 - DNA, 20 bp, Artificial Sequence
  Description of Artificial Sequence: Synthetic oligonucleotide
  Target: LAMA2; (-) strand; PAM type: YTN; PAM sequence: CTG
cttcggccttccaaagtact

SEQ ID NO: 235497 - DNA, 20 bp, Artificial Sequence
  Description of Artificial Sequence: Synthetic oligonucleotide
  Target: LAMA2; (-) strand; PAM type: YTN; PAM sequence: TTG
cctgcttcggccttccaaag

SEQ ID NO: 235498 - DNA, 20 bp, Artificial Sequence
  Description of Artificial Sequence: Synthetic oligonucleotide
  Target: LAMA2; (-) strand; PAM type: YTN; PAM sequence: CTT
gcctgcttcggccttccaaa

SEQ ID NO: 235499 - DNA, 20 bp, Artificial Sequence
  Description of Artificial Sequence: Synthetic oligonucleotide
  Target: LAMA2; (-) strand; PAM type: YTN; PAM sequence: CTG
accgcaagcgacttgcctgc

SEQ ID NO: 235500 - DNA, 20 bp, Artificial Sequence
  Description of Artificial Sequence: Synthetic oligonucleotide
  Target: LAMA2; (-) strand; PAM type: YTN; PAM sequence: CTC
ctgaccgcaagcgacttgcc

SEQ ID NO: 235501 - DNA, 20 bp, Artificial Sequence
  Description of Artificial Sequence: Synthetic oligonucleotide
  Target: LAMA2; (-) strand; PAM type: YTN; PAM sequence: TTA
aactcctgaccgcaagcgac

SEQ ID NO: 235502 - DNA, 20 bp, Artificial Sequence
  Description of Artificial Sequence: Synthetic oligonucleotide
  Target: LAMA2; (-) strand; PAM type: YTN; PAM sequence: CTT
aaactcctgaccgcaagcga

SEQ ID NO: 235503 - DNA, 20 bp, Artificial Sequence
  Description of Artificial Sequence: Synthetic oligonucleotide
  Target: LAMA2; (-) strand; PAM type: YTN; PAM sequence: TTG
gtcttaaactcctgaccgca

SEQ ID NO: 235504 - DNA, 20 bp, Artificial Sequence
  Description of Artificial Sequence: Synthetic oligonucleotide
  Target: LAMA2; (-) strand; PAM type: YTN; PAM sequence: TTG
gccaggttggtcttaaactc

SEQ ID NO: 235505 - DNA, 20 bp, Artificial Sequence
  Description of Artificial Sequence: Synthetic oligonucleotide
  Target: LAMA2; (-) strand; PAM type: YTN; PAM sequence: TTC
accatgttggccaggttggt

SEQ ID NO: 235506 - DNA, 20 bp, Artificial Sequence
  Description of Artificial Sequence: Synthetic oligonucleotide
  Target: LAMA2; (-) strand; PAM type: YTN; PAM sequence: TTT
caccatgttggccaggttgg

SEQ ID NO: 235507 - DNA, 20 bp, Artificial Sequence
  Description of Artificial Sequence: Synthetic oligonucleotide
  Target: LAMA2; (-) strand; PAM type: YTN; PAM sequence: TTA
atagagacagggtttcacca

SEQ ID NO: 235508 - DNA, 20 bp, Artificial Sequence
  Description of Artificial Sequence: Synthetic oligonucleotide
  Target: LAMA2; (-) strand; PAM type: YTN; PAM sequence: TTT
aatagagacagggtttcacc

SEQ ID NO: 235509 - DNA, 20 bp, Artificial Sequence
  Description of Artificial Sequence: Synthetic oligonucleotide
  Target: LAMA2; (-) strand; PAM type: YTN; PAM sequence: TTT
taatagagacagggtttcac

SEQ ID NO: 235510 - DNA, 20 bp, Artificial Sequence
  Description of Artificial Sequence: Synthetic oligonucleotide
  Target: LAMA2; (-) strand; PAM type: YTN; PAM sequence: TTT
ttaatagagacagggtttca

SEQ ID NO: 235511 - DNA, 20 bp, Artificial Sequence
  Description of Artificial Sequence: Synthetic oligonucleotide
  Target: LAMA2; (-) strand; PAM type: YTN; PAM sequence: TTG
tatttttaatagagacaggg

SEQ ID NO: 235512 - DNA, 20 bp, Artificial Sequence
  Description of Artificial Sequence: Synthetic oligonucleotide
  Target: LAMA2; (-) strand; PAM type: YTN; PAM sequence: TTT
gtatttttaatagagacagg

SEQ ID NO: 235513 - DNA, 20 bp, Artificial Sequence
  Description of Artificial Sequence: Synthetic oligonucleotide
  Target: LAMA2; (-) strand; PAM type: YTN; PAM sequence: TTT
tgtatttttaatagagacag

SEQ ID NO: 235514 - DNA, 20 bp, Artificial Sequence
  Description of Artificial Sequence: Synthetic oligonucleotide
  Target: LAMA2; (-) strand; PAM type: YTN; PAM sequence: CTA
aattttgtatttttaataga

SEQ ID NO: 235515 - DNA, 20 bp, Artificial Sequence
  Description of Artificial Sequence: Synthetic oligonucleotide
  Target: LAMA2; (-) strand; PAM type: YTN; PAM sequence: CTG
gctaaattttgtatttttaa

SEQ ID NO: 235516 - DNA, 20 bp, Artificial Sequence
  Description of Artificial Sequence: Synthetic oligonucleotide
  Target: LAMA2; (-) strand; PAM type: YTN; PAM sequence: CTG
ccaccatgcctggctaaatt

SEQ ID NO: 235517 - DNA, 20 bp, Artificial Sequence
  Description of Artificial Sequence: Synthetic oligonucleotide
  Target: LAMA2; (-) strand; PAM type: YTN; PAM sequence: TTA
caggtgcctgccaccatgcc

SEQ ID NO: 235518 - DNA, 20 bp, Artificial Sequence
  Description of Artificial Sequence: Synthetic oligonucleotide
  Target: LAMA2; (-) strand; PAM type: YTN; PAM sequence: CTG
agtaggtgatattacaggtg

SEQ ID NO: 235519 - DNA, 20 bp, Artificial Sequence
  Description of Artificial Sequence: Synthetic oligonucleotide
  Target: LAMA2; (-) strand; PAM type: YTN; PAM sequence: CTC
ctgagtaggtgatattacag

SEQ ID NO: 235520 - DNA, 20 bp, Artificial Sequence
  Description of Artificial Sequence: Synthetic oligonucleotide
  Target: LAMA2; (-) strand; PAM type: YTN; PAM sequence: CTC
agtctcctgagtaggtgata

SEQ ID NO: 235521 - DNA, 20 bp, Artificial Sequence
  Description of Artificial Sequence: Synthetic oligonucleotide
  Target: LAMA2; (-) strand; PAM type: YTN; PAM sequence: CTG
cctcagtctcctgagtaggt

SEQ ID NO: 235522 - DNA, 20 bp, Artificial Sequence
  Description of Artificial Sequence: Synthetic oligonucleotide
  Target: LAMA2; (-) strand; PAM type: YTN; PAM sequence: CTC
ctgcctcagtctcctgagta

SEQ ID NO: 235523 - DNA, 20 bp, Artificial Sequence
  Description of Artificial Sequence: Synthetic oligonucleotide
  Target: LAMA2; (-) strand; PAM type: YTN; PAM sequence: TTC
tcctgcctcagtctcctgag

SEQ ID NO: 235524 - DNA, 20 bp, Artificial Sequence
  Description of Artificial Sequence: Synthetic oligonucleotide
  Target: LAMA2; (-) strand; PAM type: YTN; PAM sequence: CTA
ttctcctgcctcagtctcct

SEQ ID NO: 235525 - DNA, 20 bp, Artificial Sequence
  Description of Artificial Sequence: Synthetic oligonucleotide
  Target: LAMA2; (-) strand; PAM type: YTN; PAM sequence: TTC
aagctattctcctgcctcag

SEQ ID NO: 235526 - DNA, 20 bp, Artificial Sequence
  Description of Artificial Sequence: Synthetic oligonucleotide
  Target: LAMA2; (-) strand; PAM type: YTN; PAM sequence: CTG
ggttcaagctattctcctgc

SEQ ID NO: 235527 - DNA, 20 bp, Artificial Sequence
  Description of Artificial Sequence: Synthetic oligonucleotide
  Target: LAMA2; (-) strand; PAM type: YTN; PAM sequence: TTC
ctgggttcaagctattctcc

SEQ ID NO: 235528 - DNA, 20 bp, Artificial Sequence
  Description of Artificial Sequence: Synthetic oligonucleotide
  Target: LAMA2; (-) strand; PAM type: YTN; PAM sequence: CTT
cctgggttcaagctattctc

SEQ ID NO: 235529 - DNA, 20 bp, Artificial Sequence
  Description of Artificial Sequence: Synthetic oligonucleotide
  Target: LAMA2; (-) strand; PAM type: YTN; PAM sequence: CTC
acttcctgggttcaagctat

SEQ ID NO: 235530 - DNA, 20 bp, Artificial Sequence
  Description of Artificial Sequence: Synthetic oligonucleotide
  Target: LAMA2; (-) strand; PAM type: YTN; PAM sequence: CTG
caacctcacttcctgggttc

SEQ ID NO: 235531 - DNA, 20 bp, Artificial Sequence
  Description of Artificial Sequence: Synthetic oligonucleotide
  Target: LAMA2; (-) strand; PAM type: YTN; PAM sequence: TTG
acccactgcaacctcacttc

SEQ ID NO: 235532 - DNA, 20 bp, Artificial Sequence
  Description of Artificial Sequence: Synthetic oligonucleotide
  Target: LAMA2; (-) strand; PAM type: YTN; PAM sequence: CTT
gacccactgcaacctcactt

SEQ ID NO: 235533 - DNA, 20 bp, Artificial Sequence
  Description of Artificial Sequence: Synthetic oligonucleotide
  Target: LAMA2; (-) strand; PAM type: YTN; PAM sequence: CTG
gtgcaagcttgacccactgc

SEQ ID NO: 235534 - DNA, 20 bp, Artificial Sequence
  Description of Artificial Sequence: Synthetic oligonucleotide
  Target: LAMA2; (-) strand; PAM type: YTN; PAM sequence: CTG
aagtgcactggtgcaagctt

SEQ ID NO: 235535 - DNA, 20 bp, Artificial Sequence
  Description of Artificial Sequence: Synthetic oligonucleotide
  Target: LAMA2; (-) strand; PAM type: YTN; PAM sequence: TTG
cccaggctgaagtgcactgg

SEQ ID NO: 235536 - DNA, 20 bp, Artificial Sequence
  Description of Artificial Sequence: Synthetic oligonucleotide
  Target: LAMA2; (-) strand; PAM type: YTN; PAM sequence: CTT
gcccaggctgaagtgcactg

SEQ ID NO: 235537 - DNA, 20 bp, Artificial Sequence
  Description of Artificial Sequence: Synthetic oligonucleotide
  Target: LAMA2; (-) strand; PAM type: YTN; PAM sequence: CTC
ttgcccaggctgaagtgcac

SEQ ID NO: 235538 - DNA, 20 bp, Artificial Sequence
  Description of Artificial Sequence: Synthetic oligonucleotide
  Target: LAMA2; (-) strand; PAM type: YTN; PAM sequence: CTC
tcttgcccaggctgaagtgc

SEQ ID NO: 235539 - DNA, 20 bp, Artificial Sequence
  Description of Artificial Sequence: Synthetic oligonucleotide
  Target: LAMA2; (-) strand; PAM type: YTN; PAM sequence: CTC
gctctcttgcccaggctgaa

SEQ ID NO: 235540 - DNA, 20 bp, Artificial Sequence
  Description of Artificial Sequence: Synthetic oligonucleotide
  Target: LAMA2; (-) strand; PAM type: YTN; PAM sequence: TTG
agatagggtctcgctctctt

SEQ ID NO: 235541 - DNA, 20 bp, Artificial Sequence
  Description of Artificial Sequence: Synthetic oligonucleotide
  Target: LAMA2; (-) strand; PAM type: YTN; PAM sequence: TTT
gagatagggtctcgctctct

SEQ ID NO: 235542 - DNA, 20 bp, Artificial Sequence
  Description of Artificial Sequence: Synthetic oligonucleotide
  Target: LAMA2; (-) strand; PAM type: YTN; PAM sequence: TTT
tgagatagggtctcgctctc

SEQ ID NO: 235543 - DNA, 20 bp, Artificial Sequence
  Description of Artificial Sequence: Synthetic oligonucleotide
  Target: LAMA2; (-) strand; PAM type: YTN; PAM sequence: TTT
ttgagatagggtctcgctct

SEQ ID NO: 235544 - DNA, 20 bp, Artificial Sequence
  Description of Artificial Sequence: Synthetic oligonucleotide
  Target: LAMA2; (-) strand; PAM type: YTN; PAM sequence: TTA
tttttgagatagggtctcgc

SEQ ID NO: 235545 - DNA, 20 bp, Artificial Sequence
  Description of Artificial Sequence: Synthetic oligonucleotide
  Target: LAMA2; (-) strand; PAM type: YTN; PAM sequence: TTT
atttttgagatagggtctcg

SEQ ID NO: 235546 - DNA, 20 bp, Artificial Sequence
  Description of Artificial Sequence: Synthetic oligonucleotide
  Target: LAMA2; (-) strand; PAM type: YTN; PAM sequence: TTG
tatttatttttgagataggg

SEQ ID NO: 235547 - DNA, 20 bp, Artificial Sequence
  Description of Artificial Sequence: Synthetic oligonucleotide
  Target: LAMA2; (-) strand; PAM type: YTN; PAM sequence: TTT
gtatttatttttgagatagg

SEQ ID NO: 235548 - DNA, 20 bp, Artificial Sequence
  Description of Artificial Sequence: Synthetic oligonucleotide
  Target: LAMA2; (-) strand; PAM type: YTN; PAM sequence: TTA
tttgtatttatttttgagat

SEQ ID NO: 235549 - DNA, 20 bp, Artificial Sequence
  Description of Artificial Sequence: Synthetic oligonucleotide
  Target: LAMA2; (-) strand; PAM type: YTN; PAM sequence: TTT
atttgtatttatttttgaga

SEQ ID NO: 235550 - DNA, 20 bp, Artificial Sequence
  Description of Artificial Sequence: Synthetic oligonucleotide
  Target: LAMA2; (-) strand; PAM type: YTN; PAM sequence: TTA
tttatttgtatttatttttg

SEQ ID NO: 235551 - DNA, 20 bp, Artificial Sequence
  Description of Artificial Sequence: Synthetic oligonucleotide
  Target: LAMA2; (-) strand; PAM type: YTN; PAM sequence: TTT
atttatttgtatttattttt

SEQ ID NO: 235552 - DNA, 20 bp, Artificial Sequence
  Description of Artificial Sequence: Synthetic oligonucleotide
  Target: LAMA2; (-) strand; PAM type: YTN; PAM sequence: TTA
tttatttatttgtatttatt

SEQ ID NO: 235553 - DNA, 20 bp, Artificial Sequence
  Description of Artificial Sequence: Synthetic oligonucleotide
  Target: LAMA2; (-) strand; PAM type: YTN; PAM sequence: TTT
atttatttatttgtatttat

SEQ ID NO: 235554 - DNA, 20 bp, Artificial Sequence
  Description of Artificial Sequence: Synthetic oligonucleotide
  Target: LAMA2; (-) strand; PAM type: YTN; PAM sequence: TTA
tttatttatttatttgtatt

SEQ ID NO: 235555 - DNA, 20 bp, Artificial Sequence
  Description of Artificial Sequence: Synthetic oligonucleotide
  Target: LAMA2; (-) strand; PAM type: YTN; PAM sequence: TTT
atttatttatttatttgtat

SEQ ID NO: 235556 - DNA, 20 bp, Artificial Sequence
  Description of Artificial Sequence: Synthetic oligonucleotide
  Target: LAMA2; (-) strand; PAM type: YTN; PAM sequence: TTA
aaagtaaatataatgagaat

SEQ ID NO: 235557 - DNA, 20 bp, Artificial Sequence
  Description of Artificial Sequence: Synthetic oligonucleotide
  Target: LAMA2; (-) strand; PAM type: YTN; PAM sequence: TTG
ttaaaagtaaatataatgag

SEQ ID NO: 235558 - DNA, 20 bp, Artificial Sequence
  Description of Artificial Sequence: Synthetic oligonucleotide
  Target: LAMA2; (-) strand; PAM type: YTN; PAM sequence: CTA
ttgttaaaagtaaatataat

SEQ ID NO: 235559 - DNA, 20 bp, Artificial Sequence
  Description of Artificial Sequence: Synthetic oligonucleotide
  Target: LAMA2; (-) strand; PAM type: YTN; PAM sequence: CTC
aaacatgatactattgttaa

SEQ ID NO: 235560 - DNA, 20 bp, Artificial Sequence
  Description of Artificial Sequence: Synthetic oligonucleotide
  Target: LAMA2; (-) strand; PAM type: YTN; PAM sequence: TTC
tcaaacatgatactattgtt

SEQ ID NO: 235561 - DNA, 20 bp, Artificial Sequence
  Description of Artificial Sequence: Synthetic oligonucleotide
  Target: LAMA2; (-) strand; PAM type: YTN; PAM sequence: TTT
ctcaaacatgatactattgt

SEQ ID NO: 235562 - DNA, 20 bp, Artificial Sequence
  Description of Artificial Sequence: Synthetic oligonucleotide
  Target: LAMA2; (-) strand; PAM type: YTN; PAM sequence: TTT
tctcaaacatgatactattg

SEQ ID NO: 235563 - DNA, 20 bp, Artificial Sequence
  Description of Artificial Sequence: Synthetic oligonucleotide
  Target: LAMA2; (-) strand; PAM type: YTN; PAM sequence: CTA
caggccaaagttttctcaaa

SEQ ID NO: 235564 - DNA, 20 bp, Artificial Sequence
  Description of Artificial Sequence: Synthetic oligonucleotide
  Target: LAMA2; (-) strand; PAM type: YTN; PAM sequence: TTG
gtctacaggccaaagttttc

SEQ ID NO: 235565 - DNA, 20 bp, Artificial Sequence
  Description of Artificial Sequence: Synthetic oligonucleotide
  Target: LAMA2; (-) strand; PAM type: YTN; PAM sequence: TTT
ggtctacaggccaaagtttt

SEQ ID NO: 235566 - DNA, 20 bp, Artificial Sequence
  Description of Artificial Sequence: Synthetic oligonucleotide
  Target: LAMA2; (-) strand; PAM type: YTN; PAM sequence: CTG
gccataggccaggatttggt

SEQ ID NO: 235567 - DNA, 20 bp, Artificial Sequence
  Description of Artificial Sequence: Synthetic oligonucleotide
  Target: LAMA2; (-) strand; PAM type: YTN; PAM sequence: TTG
tagtcatctggccataggcc

SEQ ID NO: 235568 - DNA, 20 bp, Artificial Sequence
  Description of Artificial Sequence: Synthetic oligonucleotide
  Target: LAMA2; (-) strand; PAM type: YTN; PAM sequence: TTT
gtagtcatctggccataggc

SEQ ID NO: 235569 - DNA, 20 bp, Artificial Sequence
  Description of Artificial Sequence: Synthetic oligonucleotide
  Target: LAMA2; (-) strand; PAM type: YTN; PAM sequence: TTT
tgtagtcatctggccatagg

SEQ ID NO: 235570 - DNA, 20 bp, Artificial Sequence
  Description of Artificial Sequence: Synthetic oligonucleotide
  Target: LAMA2; (-) strand; PAM type: YTN; PAM sequence: CTT
ttgtagtcatctggccatag

SEQ ID NO: 235571 - DNA, 20 bp, Artificial Sequence
  Description of Artificial Sequence: Synthetic oligonucleotide
  Target: LAMA2; (-) strand; PAM type: YTN; PAM sequence: CTA
cttttgtagtcatctggcca

SEQ ID NO: 235572 - DNA, 20 bp, Artificial Sequence
  Description of Artificial Sequence: Synthetic oligonucleotide
  Target: LAMA2; (-) strand; PAM type: YTN; PAM sequence: CTA
atgactacttttgtagtcat

SEQ ID NO: 235573 - DNA, 20 bp, Artificial Sequence
  Description of Artificial Sequence: Synthetic oligonucleotide
  Target: LAMA2; (-) strand; PAM type: YTN; PAM sequence: TTA
acatcaggtagagatgatag

SEQ ID NO: 235574 - DNA, 20 bp, Artificial Sequence
  Description of Artificial Sequence: Synthetic oligonucleotide
  Target: LAMA2; (-) strand; PAM type: YTN; PAM sequence: CTT
aacatcaggtagagatgata

SEQ ID NO: 235575 - DNA, 20 bp, Artificial Sequence
  Description of Artificial Sequence: Synthetic oligonucleotide
  Target: LAMA2; (-) strand; PAM type: YTN; PAM sequence: CTG
gatatgcttaacatcaggta

SEQ ID NO: 235576 - DNA, 20 bp, Artificial Sequence
  Description of Artificial Sequence: Synthetic oligonucleotide
  Target: LAMA2; (-) strand; PAM type: YTN; PAM sequence: TTC
actggatatgcttaacatca

SEQ ID NO: 235577 - DNA, 20 bp, Artificial Sequence
  Description of Artificial Sequence: Synthetic oligonucleotide
  Target: LAMA2; (-) strand; PAM type: YTN; PAM sequence: TTA
ataattcactggatatgctt

SEQ ID NO: 235578 - DNA, 20 bp, Artificial Sequence
  Description of Artificial Sequence: Synthetic oligonucleotide
  Target: LAMA2; (-) strand; PAM type: YTN; PAM sequence: TTT
aataattcactggatatgct

SEQ ID NO: 235579 - DNA, 20 bp, Artificial Sequence
  Description of Artificial Sequence: Synthetic oligonucleotide
  Target: LAMA2; (-) strand; PAM type: YTN; PAM sequence: CTC
aatttaataattcactggat

SEQ ID NO: 235580 - DNA, 20 bp, Artificial Sequence
  Description of Artificial Sequence: Synthetic oligonucleotide
  Target: LAMA2; (-) strand; PAM type: YTN; PAM sequence: CTG
aaaagtaaaatacctcaatt

SEQ ID NO: 235581 - DNA, 20 bp, Artificial Sequence
  Description of Artificial Sequence: Synthetic oligonucleotide
  Target: LAMA2; (-) strand; PAM type: YTN; PAM sequence: CTC
cagaaagctgaaaagtaaaa

SEQ ID NO: 235582 - DNA, 20 bp, Artificial Sequence
  Description of Artificial Sequence: Synthetic oligonucleotide
  Target: LAMA2; (-) strand; PAM type: YTN; PAM sequence: CTG
taaggaacataagaactcca

SEQ ID NO: 235583 - DNA, 20 bp, Artificial Sequence
  Description of Artificial Sequence: Synthetic oligonucleotide
  Target: LAMA2; (-) strand; PAM type: YTN; PAM sequence: TTC
agagaaatggaagctgtaag

SEQ ID NO: 235584 - DNA, 20 bp, Artificial Sequence
  Description of Artificial Sequence: Synthetic oligonucleotide
  Target: LAMA2; (-) strand; PAM type: YTN; PAM sequence: TTT
cagagaaatggaagctgtaa

SEQ ID NO: 235585 - DNA, 20 bp, Artificial Sequence
  Description of Artificial Sequence: Synthetic oligonucleotide
  Target: LAMA2; (-) strand; PAM type: YTN; PAM sequence: TTA
taatgagtgaaggtatggag

SEQ ID NO: 235586 - DNA, 20 bp, Artificial Sequence
  Description of Artificial Sequence: Synthetic oligonucleotide
  Target: LAMA2; (-) strand; PAM type: YTN; PAM sequence: TTT
ataatgagtgaaggtatgga

SEQ ID NO: 235587 - DNA, 20 bp, Artificial Sequence
  Description of Artificial Sequence: Synthetic oligonucleotide
  Target: LAMA2; (-) strand; PAM type: YTN; PAM sequence: CTG
taaatatgtccgagaatata

SEQ ID NO: 235588 - DNA, 20 bp, Artificial Sequence
  Description of Artificial Sequence: Synthetic oligonucleotide
  Target: LAMA2; (-) strand; PAM type: YTN; PAM sequence: TTC
tgtaaatatgtccgagaata

SEQ ID NO: 235589 - DNA, 20 bp, Artificial Sequence
  Description of Artificial Sequence: Synthetic oligonucleotide
  Target: LAMA2; (-) strand; PAM type: YTN; PAM sequence: TTA
gcatacaaggaagtcaacgt

SEQ ID NO: 235590 - DNA, 20 bp, Artificial Sequence
  Description of Artificial Sequence: Synthetic oligonucleotide
  Target: LAMA2; (-) strand; PAM type: YTN; PAM sequence: TTG
aaattagcatacaaggaagt

SEQ ID NO: 235591 - DNA, 20 bp, Artificial Sequence
  Description of Artificial Sequence: Synthetic oligonucleotide
  Target: LAMA2; (-) strand; PAM type: YTN; PAM sequence: CTG
aggtgacccagatattgaaa

SEQ ID NO: 235592 - DNA, 20 bp, Artificial Sequence
  Description of Artificial Sequence: Synthetic oligonucleotide
  Target: LAMA2; (-) strand; PAM type: YTN; PAM sequence: TTG
ataaaagcagatcctgaggt

SEQ ID NO: 235593 - DNA, 20 bp, Artificial Sequence
  Description of Artificial Sequence: Synthetic oligonucleotide
  Target: LAMA2; (-) strand; PAM type: YTN; PAM sequence: TTA
aaaaaagaagttgataaaag

SEQ ID NO: 235594 - DNA, 20 bp, Artificial Sequence
  Description of Artificial Sequence: Synthetic oligonucleotide
  Target: LAMA2; (-) strand; PAM type: YTN; PAM sequence: TTA
ttaaaaaaagaagttgataa

SEQ ID NO: 235595 - DNA, 20 bp, Artificial Sequence
  Description of Artificial Sequence: Synthetic oligonucleotide
  Target: LAMA2; (-) strand; PAM type: YTN; PAM sequence: CTT
attaaaaaaagaagttgata

SEQ ID NO: 235596 - DNA, 20 bp, Artificial Sequence
  Description of Artificial Sequence: Synthetic oligonucleotide
  Target: LAMA2; (-) strand; PAM type: YTN; PAM sequence: TTG
accttattaaaaaaagaagt

SEQ ID NO: 235597 - DNA, 20 bp, Artificial Sequence
  Description of Artificial Sequence: Synthetic oligonucleotide
  Target: LAMA2; (-) strand; PAM type: YTN; PAM sequence: TTA
gatatacaggaaagaaacag

SEQ ID NO: 235598 - DNA, 20 bp, Artificial Sequence
  Description of Artificial Sequence: Synthetic oligonucleotide
  Target: LAMA2; (-) strand; PAM type: YTN; PAM sequence: CTG
tattagatatacaggaaaga

SEQ ID NO: 235599 - DNA, 20 bp, Artificial Sequence
  Description of Artificial Sequence: Synthetic oligonucleotide
  Target: LAMA2; (-) strand; PAM type: YTN; PAM sequence: CTA
ctgtattagatatacaggaa

SEQ ID NO: 235600 - DNA, 20 bp, Artificial Sequence
  Description of Artificial Sequence: Synthetic oligonucleotide
  Target: LAMA2; (-) strand; PAM type: YTN; PAM sequence: CTG
tgaataaaggaggactactg

SEQ ID NO: 235601 - DNA, 20 bp, Artificial Sequence
  Description of Artificial Sequence: Synthetic oligonucleotide
  Target: LAMA2; (-) strand; PAM type: YTN; PAM sequence: CTC
tgtgaataaaggaggactac

SEQ ID NO: 235602 - DNA, 20 bp, Artificial Sequence
  Description of Artificial Sequence: Synthetic oligonucleotide
  Target: LAMA2; (-) strand; PAM type: YTN; PAM sequence: CTG
gaacatatcctctgtgaata

SEQ ID NO: 235603 - DNA, 20 bp, Artificial Sequence
  Description of Artificial Sequence: Synthetic oligonucleotide
  Target: LAMA2; (-) strand; PAM type: YTN; PAM sequence: TTC
ctggaacatatcctctgtga

SEQ ID NO: 235604 - DNA, 20 bp, Artificial Sequence
  Description of Artificial Sequence: Synthetic oligonucleotide
  Target: LAMA2; (-) strand; PAM type: YTN; PAM sequence: CTG
gggttcctggaacatatcct

SEQ ID NO: 235605 - DNA, 20 bp, Artificial Sequence
  Description of Artificial Sequence: Synthetic oligonucleotide
  Target: LAMA2; (-) strand; PAM type: YTN; PAM sequence: TTC
aggtatcaactggggttcct

SEQ ID NO: 235606 - DNA, 20 bp, Artificial Sequence
  Description of Artificial Sequence: Synthetic oligonucleotide
  Target: LAMA2; (-) strand; PAM type: YTN; PAM sequence: TTT
caggtatcaactggggttcc

SEQ ID NO: 235607 - DNA, 20 bp, Artificial Sequence
  Description of Artificial Sequence: Synthetic oligonucleotide
  Target: LAMA2; (-) strand; PAM type: YTN; PAM sequence: CTG
tgatttcaggtatcaactgg

SEQ ID NO: 235608 - DNA, 20 bp, Artificial Sequence
  Description of Artificial Sequence: Synthetic oligonucleotide
  Target: LAMA2; (-) strand; PAM type: YTN; PAM sequence: CTA
tctgtgatttcaggtatcaa

SEQ ID NO: 235609 - DNA, 20 bp, Artificial Sequence
  Description of Artificial Sequence: Synthetic oligonucleotide
  Target: LAMA2; (-) strand; PAM type: YTN; PAM sequence: TTG
gtactatctgtgatttcagg

SEQ ID NO: 235610 - DNA, 20 bp, Artificial Sequence
  Description of Artificial Sequence: Synthetic oligonucleotide
  Target: LAMA2; (-) strand; PAM type: YTN; PAM sequence: TTT
ggtactatctgtgatttcag

SEQ ID NO: 235611 - DNA, 20 bp, Artificial Sequence
  Description of Artificial Sequence: Synthetic oligonucleotide
  Target: LAMA2; (-) strand; PAM type: YTN; PAM sequence: TTA
gtcccatcacaggtatcaga

SEQ ID NO: 235612 - DNA, 20 bp, Artificial Sequence
  Description of Artificial Sequence: Synthetic oligonucleotide
  Target: LAMA2; (-) strand; PAM type: YTN; PAM sequence: CTT
agtcccatcacaggtatcag

SEQ ID NO: 235613 - DNA, 20 bp, Artificial Sequence
  Description of Artificial Sequence: Synthetic oligonucleotide
  Target: LAMA2; (-) strand; PAM type: YTN; PAM sequence: TTA
gtcacttagtcccatcacag

SEQ ID NO: 235614 - DNA, 20 bp, Artificial Sequence
  Description of Artificial Sequence: Synthetic oligonucleotide
  Target: LAMA2; (-) strand; PAM type: YTN; PAM sequence: CTG
ttagtcacttagtcccatca

SEQ ID NO: 235615 - DNA, 20 bp, Artificial Sequence
  Description of Artificial Sequence: Synthetic oligonucleotide
  Target: LAMA2; (-) strand; PAM type: YTN; PAM sequence: CTC
ctgttagtcacttagtccca

SEQ ID NO: 235616 - DNA, 20 bp, Artificial Sequence
  Description of Artificial Sequence: Synthetic oligonucleotide
  Target: LAMA2; (-) strand; PAM type: YTN; PAM sequence: CTA
ccctcctgttagtcacttag

SEQ ID NO: 235617 - DNA, 20 bp, Artificial Sequence
  Description of Artificial Sequence: Synthetic oligonucleotide
  Target: LAMA2; (-) strand; PAM type: YTN; PAM sequence: CTG
tatagacactaccctcctgt

SEQ ID NO: 235618 - DNA, 20 bp, Artificial Sequence
  Description of Artificial Sequence: Synthetic oligonucleotide
  Target: LAMA2; (-) strand; PAM type: YTN; PAM sequence: CTA
tgctgtatagacactaccct

SEQ ID NO: 235619 - DNA, 20 bp, Artificial Sequence
  Description of Artificial Sequence: Synthetic oligonucleotide
  Target: LAMA2; (-) strand; PAM type: YTN; PAM sequence: TTG
tccagcatatctatgctgta

SEQ ID NO: 235620 - DNA, 20 bp, Artificial Sequence
  Description of Artificial Sequence: Synthetic oligonucleotide
  Target: LAMA2; (-) strand; PAM type: YTN; PAM sequence: CTT
gtccagcatatctatgctgt

SEQ ID NO: 235621 - DNA, 20 bp, Artificial Sequence
  Description of Artificial Sequence: Synthetic oligonucleotide
  Target: LAMA2; (-) strand; PAM type: YTN; PAM sequence: CTG
tcgcaccagggatatgaatc

SEQ ID NO: 235622 - DNA, 20 bp, Artificial Sequence
  Description of Artificial Sequence: Synthetic oligonucleotide
  Target: LAMA2; (-) strand; PAM type: YTN; PAM sequence: CTC
tgtcgcaccagggatatgaa

SEQ ID NO: 235623 - DNA, 20 bp, Artificial Sequence
  Description of Artificial Sequence: Synthetic oligonucleotide
  Target: LAMA2; (-) strand; PAM type: YTN; PAM sequence: TTG
ctctgtcgcaccagggatat

SEQ ID NO: 235624 - DNA, 20 bp, Artificial Sequence
  Description of Artificial Sequence: Synthetic oligonucleotide
  Target: LAMA2; (-) strand; PAM type: YTN; PAM sequence: CTT
gctctgtcgcaccagggata

SEQ ID NO: 235625 - DNA, 20 bp, Artificial Sequence
  Description of Artificial Sequence: Synthetic oligonucleotide
  Target: LAMA2; (-) strand; PAM type: YTN; PAM sequence: CTC
gggccatcttgctctgtcgc

SEQ ID NO: 235626 - DNA, 20 bp, Artificial Sequence
  Description of Artificial Sequence: Synthetic oligonucleotide
  Target: LAMA2; (-) strand; PAM type: YTN; PAM sequence: TTG
aatagtgtggtgaaatctcg

SEQ ID NO: 235627 - DNA, 20 bp, Artificial Sequence
  Description of Artificial Sequence: Synthetic oligonucleotide
  Target: LAMA2; (-) strand; PAM type: YTN; PAM sequence: TTT
gaatagtgtggtgaaatctc

SEQ ID NO: 235628 - DNA, 20 bp, Artificial Sequence
  Description of Artificial Sequence: Synthetic oligonucleotide
  Target: LAMA2; (-) strand; PAM type: YTN; PAM sequence: TTT
tgaatagtgtggtgaaatct

SEQ ID NO: 235629 - DNA, 20 bp, Artificial Sequence
  Description of Artificial Sequence: Synthetic oligonucleotide
  Target: LAMA2; (-) strand; PAM type: YTN; PAM sequence: TTG
catgtcattttgaatagtgt

SEQ ID NO: 235630 - DNA, 20 bp, Artificial Sequence
  Description of Artificial Sequence: Synthetic oligonucleotide
  Target: LAMA2; (-) strand; PAM type: YTN; PAM sequence: TTT
gcatgtcattttgaatagtg

SEQ ID NO: 235631 - DNA, 20 bp, Artificial Sequence
  Description of Artificial Sequence: Synthetic oligonucleotide
  Target: LAMA2; (-) strand; PAM type: YTN; PAM sequence: TTA
atttgcatgtcattttgaat

SEQ ID NO: 235632 - DNA, 20 bp, Artificial Sequence
  Description of Artificial Sequence: Synthetic oligonucleotide
  Target: LAMA2; (-) strand; PAM type: YTN; PAM sequence: TTT
aatttgcatgtcattttgaa

SEQ ID NO: 235633 - DNA, 20 bp, Artificial Sequence
  Description of Artificial Sequence: Synthetic oligonucleotide
  Target: LAMA2; (-) strand; PAM type: YTN; PAM sequence: TTT
taatttgcatgtcattttga

SEQ ID NO: 235634 - DNA, 20 bp, Artificial Sequence
  Description of Artificial Sequence: Synthetic oligonucleotide
  Target: LAMA2; (-) strand; PAM type: YTN; PAM sequence: TTG
aaaagttttaatttgcatgt

SEQ ID NO: 235635 - DNA, 20 bp, Artificial Sequence
  Description of Artificial Sequence: Synthetic oligonucleotide
  Target: LAMA2; (-) strand; PAM type: YTN; PAM sequence: CTC
cagaaataaataattgaaaa

SEQ ID NO: 235636 - DNA, 20 bp, Artificial Sequence
  Description of Artificial Sequence: Synthetic oligonucleotide
  Target: LAMA2; (-) strand; PAM type: YTN; PAM sequence: TTA
aatggaaaactccagaaata

SEQ ID NO: 235637 - DNA, 20 bp, Artificial Sequence
  Description of Artificial Sequence: Synthetic oligonucleotide
  Target: LAMA2; (-) strand; PAM type: YTN; PAM sequence: TTC
gaaaatattaaatggaaaac

SEQ ID NO: 235638 - DNA, 20 bp, Artificial Sequence
  Description of Artificial Sequence: Synthetic oligonucleotide
  Target: LAMA2; (-) strand; PAM type: YTN; PAM sequence: TTA
accacagttcgaaaatatta

SEQ ID NO: 235639 - DNA, 20 bp, Artificial Sequence
  Description of Artificial Sequence: Synthetic oligonucleotide
  Target: LAMA2; (-) strand; PAM type: YTN; PAM sequence: TTA
tcatggttaaccacagttcg

SEQ ID NO: 235640 - DNA, 20 bp, Artificial Sequence
  Description of Artificial Sequence: Synthetic oligonucleotide
  Target: LAMA2; (-) strand; PAM type: YTN; PAM sequence: TTC
agttatcatggttaaccaca

SEQ ID NO: 235641 - DNA, 20 bp, Artificial Sequence
  Description of Artificial Sequence: Synthetic oligonucleotide
  Target: LAMA2; (-) strand; PAM type: YTN; PAM sequence: TTT
cagttatcatggttaaccac

SEQ ID NO: 235642 - DNA, 20 bp, Artificial Sequence
  Description of Artificial Sequence: Synthetic oligonucleotide
  Target: LAMA2; (-) strand; PAM type: YTN; PAM sequence: CTG
aggtttcagttatcatggtt

SEQ ID NO: 235643 - DNA, 20 bp, Artificial Sequence
  Description of Artificial Sequence: Synthetic oligonucleotide
  Target: LAMA2; (-) strand; PAM type: YTN; PAM sequence: CTG
tctgaggtttcagttatcat

SEQ ID NO: 235644 - DNA, 20 bp, Artificial Sequence
  Description of Artificial Sequence: Synthetic oligonucleotide
  Target: LAMA2; (-) strand; PAM type: YTN; PAM sequence: TTG
ctgtctgaggtttcagttat

SEQ ID NO: 235645 - DNA, 20 bp, Artificial Sequence
  Description of Artificial Sequence: Synthetic oligonucleotide
  Target: LAMA2; (-) strand; PAM type: YTN; PAM sequence: TTT
gctgtctgaggtttcagtta

SEQ ID NO: 235646 - DNA, 20 bp, Artificial Sequence
  Description of Artificial Sequence: Synthetic oligonucleotide
  Target: LAMA2; (-) strand; PAM type: YTN; PAM sequence: TTT
tgctgtctgaggtttcagtt

SEQ ID NO: 235647 - DNA, 20 bp, Artificial Sequence
  Description of Artificial Sequence: Synthetic oligonucleotide
  Target: LAMA2; (-) strand; PAM type: YTN; PAM sequence: CTG
tagttttgctgtctgaggtt

SEQ ID NO: 235648 - DNA, 20 bp, Artificial Sequence
  Description of Artificial Sequence: Synthetic oligonucleotide
  Target: LAMA2; (-) strand; PAM type: YTN; PAM sequence: CTC
atctgtagttttgctgtctg

SEQ ID NO: 235649 - DNA, 20 bp, Artificial Sequence
  Description of Artificial Sequence: Synthetic oligonucleotide
  Target: LAMA2; (-) strand; PAM type: YTN; PAM sequence: CTC
acctcatctgtagttttgct

SEQ ID NO: 235650 - DNA, 20 bp, Artificial Sequence
  Description of Artificial Sequence: Synthetic oligonucleotide
  Target: LAMA2; (-) strand; PAM type: YTN; PAM sequence: TTA
cagtagtcctcacctcatct

SEQ ID NO: 235651 - DNA, 20 bp, Artificial Sequence
  Description of Artificial Sequence: Synthetic oligonucleotide
  Target: LAMA2; (-) strand; PAM type: YTN; PAM sequence: CTG
tagagatgataaattacagt

SEQ ID NO: 235652 - DNA, 20 bp, Artificial Sequence
  Description of Artificial Sequence: Synthetic oligonucleotide
  Target: LAMA2; (-) strand; PAM type: YTN; PAM sequence: CTC
cgaaatgtcctgtagagatg

SEQ ID NO: 235653 - DNA, 20 bp, Artificial Sequence
  Description of Artificial Sequence: Synthetic oligonucleotide
  Target: LAMA2; (-) strand; PAM type: YTN; PAM sequence: TTC
tccgaaatgtcctgtagaga

SEQ ID NO: 235654 - DNA, 20 bp, Artificial Sequence
  Description of Artificial Sequence: Synthetic oligonucleotide
  Target: LAMA2; (-) strand; PAM type: YTN; PAM sequence: TTG
tattctccgaaatgtcctgt

SEQ ID NO: 235655 - DNA, 20 bp, Artificial Sequence
  Description of Artificial Sequence: Synthetic oligonucleotide
  Target: LAMA2; (-) strand; PAM type: YTN; PAM sequence: CTG
cattgtattctccgaaatgt

SEQ ID NO: 235656 - DNA, 20 bp, Artificial Sequence
  Description of Artificial Sequence: Synthetic oligonucleotide
  Target: LAMA2; (-) strand; PAM type: YTN; PAM sequence: TTC
agaggaacataacagaaacc

SEQ ID NO: 235657 - DNA, 20 bp, Artificial Sequence
  Description of Artificial Sequence: Synthetic oligonucleotide
  Target: LAMA2; (-) strand; PAM type: YTN; PAM sequence: CTT
cagaggaacataacagaaac

SEQ ID NO: 235658 - DNA, 20 bp, Artificial Sequence
  Description of Artificial Sequence: Synthetic oligonucleotide
  Target: LAMA2; (-) strand; PAM type: YTN; PAM sequence: CTC
ttcagaggaacataacagaa

SEQ ID NO: 235659 - DNA, 20 bp, Artificial Sequence
  Description of Artificial Sequence: Synthetic oligonucleotide
  Target: LAMA2; (-) strand; PAM type: YTN; PAM sequence: TTC
aaactcttcagaggaacata

SEQ ID NO: 235660 - DNA, 20 bp, Artificial Sequence
  Description of Artificial Sequence: Synthetic oligonucleotide
  Target: LAMA2; (-) strand; PAM type: YTN; PAM sequence: TTA
gaaccaattcaaactcttca

SEQ ID NO: 235661 - DNA, 20 bp, Artificial Sequence
  Description of Artificial Sequence: Synthetic oligonucleotide
  Target: LAMA2; (-) strand; PAM type: YTN; PAM sequence: CTA
attagaaccaattcaaactc

SEQ ID NO: 235662 - DNA, 20 bp, Artificial Sequence
  Description of Artificial Sequence: Synthetic oligonucleotide
  Target: LAMA2; (-) strand; PAM type: YTN; PAM sequence: TTA
ctaattagaaccaattcaaa

SEQ ID NO: 235663 - DNA, 20 bp, Artificial Sequence
  Description of Artificial Sequence: Synthetic oligonucleotide
  Target: LAMA2; (-) strand; PAM type: YTN; PAM sequence: TTA
ttactaattagaaccaattc

SEQ ID NO: 235664 - DNA, 20 bp, Artificial Sequence
  Description of Artificial Sequence: Synthetic oligonucleotide
  Target: LAMA2; (-) strand; PAM type: YTN; PAM sequence: TTT
attactaattagaaccaatt

SEQ ID NO: 235665 - DNA, 20 bp, Artificial Sequence
  Description of Artificial Sequence: Synthetic oligonucleotide
  Target: LAMA2; (-) strand; PAM type: YTN; PAM sequence: CTC
agcaagtttattactaatta

SEQ ID NO: 235666 - DNA, 20 bp, Artificial Sequence
  Description of Artificial Sequence: Synthetic oligonucleotide
  Target: LAMA2; (-) strand; PAM type: YTN; PAM sequence: TTC
atggtgatcactcagcaagt

SEQ ID NO: 235667 - DNA, 20 bp, Artificial Sequence
  Description of Artificial Sequence: Synthetic oligonucleotide
  Target: LAMA2; (-) strand; PAM type: YTN; PAM sequence: CTT
catggtgatcactcagcaag

SEQ ID NO: 235668 - DNA, 20 bp, Artificial Sequence
  Description of Artificial Sequence: Synthetic oligonucleotide
  Target: LAMA2; (-) strand; PAM type: YTN; PAM sequence: TTC
atgacttcatggtgatcact

SEQ ID NO: 235669 - DNA, 20 bp, Artificial Sequence
  Description of Artificial Sequence: Synthetic oligonucleotide
  Target: LAMA2; (-) strand; PAM type: YTN; PAM sequence: TTT
catgacttcatggtgatcac

SEQ ID NO: 235670 - DNA, 20 bp, Artificial Sequence
  Description of Artificial Sequence: Synthetic oligonucleotide
  Target: LAMA2; (-) strand; PAM type: YTN; PAM sequence: CTT
tcatgacttcatggtgatca

SEQ ID NO: 235671 - DNA, 20 bp, Artificial Sequence
  Description of Artificial Sequence: Synthetic oligonucleotide
  Target: LAMA2; (-) strand; PAM type: YTN; PAM sequence: CTA
acaaagtatgaaagtaaact

SEQ ID NO: 235672 - DNA, 20 bp, Artificial Sequence
  Description of Artificial Sequence: Synthetic oligonucleotide
  Target: LAMA2; (-) strand; PAM type: YTN; PAM sequence: CTG
tcctaacaaagtatgaaagt

SEQ ID NO: 235673 - DNA, 20 bp, Artificial Sequence
  Description of Artificial Sequence: Synthetic oligonucleotide
  Target: LAMA2; (-) strand; PAM type: YTN; PAM sequence: CTA
atctgtcctaacaaagtatg

SEQ ID NO: 235674 - DNA, 20 bp, Artificial Sequence
  Description of Artificial Sequence: Synthetic oligonucleotide
  Target: LAMA2; (-) strand; PAM type: YTN; PAM sequence: TTC
cactaatctgtcctaacaaa

SEQ ID NO: 235675 - DNA, 20 bp, Artificial Sequence
  Description of Artificial Sequence: Synthetic oligonucleotide
  Target: LAMA2; (-) strand; PAM type: YTN; PAM sequence: TTT
ccactaatctgtcctaacaa

SEQ ID NO: 235676 - DNA, 20 bp, Artificial Sequence
  Description of Artificial Sequence: Synthetic oligonucleotide
  Target: LAMA2; (-) strand; PAM type: YTN; PAM sequence: TTT
tccactaatctgtcctaaca

SEQ ID NO: 235677 - DNA, 20 bp, Artificial Sequence
  Description of Artificial Sequence: Synthetic oligonucleotide
  Target: LAMA2; (-) strand; PAM type: YTN; PAM sequence: CTG
gagttttccactaatctgtc

SEQ ID NO: 235678 - DNA, 20 bp, Artificial Sequence
  Description of Artificial Sequence: Synthetic oligonucleotide
  Target: LAMA2; (-) strand; PAM type: YTN; PAM sequence: TTG
atgaatacctggagttttcc

SEQ ID NO: 235679 - DNA, 20 bp, Artificial Sequence
  Description of Artificial Sequence: Synthetic oligonucleotide
  Target: LAMA2; (-) strand; PAM type: YTN; PAM sequence: TTT
gatgaatacctggagttttc

SEQ ID NO: 235680 - DNA, 20 bp, Artificial Sequence
  Description of Artificial Sequence: Synthetic oligonucleotide
  Target: LAMA2; (-) strand; PAM type: YTN; PAM sequence: TTA
gaaatgtttgatgaatacct

SEQ ID NO: 235681 - DNA, 20 bp, Artificial Sequence
  Description of Artificial Sequence: Synthetic oligonucleotide
  Target: LAMA2; (-) strand; PAM type: YTN; PAM sequence: CTA
cattagaaatgtttgatgaa

SEQ ID NO: 235682 - DNA, 20 bp, Artificial Sequence
  Description of Artificial Sequence: Synthetic oligonucleotide
  Target: LAMA2; (-) strand; PAM type: YTN; PAM sequence: TTA
actacattagaaatgtttga

SEQ ID NO: 235683 - DNA, 20 bp, Artificial Sequence
  Description of Artificial Sequence: Synthetic oligonucleotide
  Target: LAMA2; (-) strand; PAM type: YTN; PAM sequence: TTA
agttaactacattagaaatg

SEQ ID NO: 235684 - DNA, 20 bp, Artificial Sequence
  Description of Artificial Sequence: Synthetic oligonucleotide
  Target: LAMA2; (-) strand; PAM type: YTN; PAM sequence: TTT
aagttaactacattagaaat

SEQ ID NO: 235685 - DNA, 20 bp, Artificial Sequence
  Description of Artificial Sequence: Synthetic oligonucleotide
  Target: LAMA2; (-) strand; PAM type: YTN; PAM sequence: CTT
taagttaactacattagaaa

SEQ ID NO: 235686 - DNA, 20 bp, Artificial Sequence
  Description of Artificial Sequence: Synthetic oligonucleotide
  Target: LAMA2; (-) strand; PAM type: YTN; PAM sequence: TTC
agactttaagttaactacat

SEQ ID NO: 235687 - DNA, 20 bp, Artificial Sequence
  Description of Artificial Sequence: Synthetic oligonucleotide
  Target: LAMA2; (-) strand; PAM type: YTN; PAM sequence: CTA
ccaaccataaagtaaagaga

SEQ ID NO: 235688 - DNA, 20 bp, Artificial Sequence
  Description of Artificial Sequence: Synthetic oligonucleotide
  Target: LAMA2; (-) strand; PAM type: YTN; PAM sequence: TTC
aggtgctaccaaccataaag

SEQ ID NO: 235689 - DNA, 20 bp, Artificial Sequence
  Description of Artificial Sequence: Synthetic oligonucleotide
  Target: LAMA2; (-) strand; PAM type: YTN; PAM sequence: TTT
caggtgctaccaaccataaa

SEQ ID NO: 235690 - DNA, 20 bp, Artificial Sequence
  Description of Artificial Sequence: Synthetic oligonucleotide
  Target: LAMA2; (-) strand; PAM type: YTN; PAM sequence: TTT
tcaggtgctaccaaccataa

SEQ ID NO: 235691 - DNA, 20 bp, Artificial Sequence
  Description of Artificial Sequence: Synthetic oligonucleotide
  Target: LAMA2; (-) strand; PAM type: YTN; PAM sequence: CTG
aacaaggtgagaagagtttt

SEQ ID NO: 235692 - DNA, 20 bp, Artificial Sequence
  Description of Artificial Sequence: Synthetic oligonucleotide
  Target: LAMA2; (-) strand; PAM type: YTN; PAM sequence: CTG
gaaactgaacaaggtgagaa

SEQ ID NO: 235693 - DNA, 20 bp, Artificial Sequence
  Description of Artificial Sequence: Synthetic oligonucleotide
  Target: LAMA2; (-) strand; PAM type: YTN; PAM sequence: TTC
agtggaaagcaaccgctgga

SEQ ID NO: 235694 - DNA, 20 bp, Artificial Sequence
  Description of Artificial Sequence: Synthetic oligonucleotide
  Target: LAMA2; (-) strand; PAM type: YTN; PAM sequence: CTA
ggaaattcagtggaaagcaa

SEQ ID NO: 235695 - DNA, 20 bp, Artificial Sequence
  Description of Artificial Sequence: Synthetic oligonucleotide
  Target: LAMA2; (-) strand; PAM type: YTN; PAM sequence: TTC
taggaaattcagtggaaagc

SEQ ID NO: 235696 - DNA, 20 bp, Artificial Sequence
  Description of Artificial Sequence: Synthetic oligonucleotide
  Target: LAMA2; (-) strand; PAM type: YTN; PAM sequence: CTC
aggagattctaggaaattca

SEQ ID NO: 235697 - DNA, 20 bp, Artificial Sequence
  Description of Artificial Sequence: Synthetic oligonucleotide
  Target: LAMA2; (-) strand; PAM type: YTN; PAM sequence: TTC
actcaggagattctaggaaa

SEQ ID NO: 235698 - DNA, 20 bp, Artificial Sequence
  Description of Artificial Sequence: Synthetic oligonucleotide
  Target: LAMA2; (-) strand; PAM type: YTN; PAM sequence: TTG
tatattcactcaggagattc

SEQ ID NO: 235699 - DNA, 20 bp, Artificial Sequence
  Description of Artificial Sequence: Synthetic oligonucleotide
  Target: LAMA2; (-) strand; PAM type: YTN; PAM sequence: TTA
ttgtatattcactcaggaga

SEQ ID NO: 235700 - DNA, 20 bp, Artificial Sequence
  Description of Artificial Sequence: Synthetic oligonucleotide
  Target: LAMA2; (-) strand; PAM type: YTN; PAM sequence: TTT
attgtatattcactcaggag

SEQ ID NO: 235701 - DNA, 20 bp, Artificial Sequence
  Description of Artificial Sequence: Synthetic oligonucleotide
  Target: LAMA2; (-) strand; PAM type: YTN; PAM sequence: CTT
tattgtatattcactcagga

SEQ ID NO: 235702 - DNA, 20 bp, Artificial Sequence
  Description of Artificial Sequence: Synthetic oligonucleotide
  Target: LAMA2; (-) strand; PAM type: YTN; PAM sequence: CTG
atccctttattgtatattca

SEQ ID NO: 235703 - DNA, 20 bp, Artificial Sequence
  Description of Artificial Sequence: Synthetic oligonucleotide
  Target: LAMA2; (-) strand; PAM type: YTN; PAM sequence: TTA
actgatccctttattgtata

SEQ ID NO: 235704 - DNA, 20 bp, Artificial Sequence
  Description of Artificial Sequence: Synthetic oligonucleotide
  Target: LAMA2; (-) strand; PAM type: YTN; PAM sequence: CTT
aactgatccctttattgtat

SEQ ID NO: 235705 - DNA, 20 bp, Artificial Sequence
  Description of Artificial Sequence: Synthetic oligonucleotide
  Target: LAMA2; (-) strand; PAM type: YTN; PAM sequence: TTC
ccagccttaactgatccctt

SEQ ID NO: 235706 - DNA, 20 bp, Artificial Sequence
  Description of Artificial Sequence: Synthetic oligonucleotide
  Target: LAMA2; (-) strand; PAM type: YTN; PAM sequence: CTT
cccagccttaactgatccct

SEQ ID NO: 235707 - DNA, 20 bp, Artificial Sequence
  Description of Artificial Sequence: Synthetic oligonucleotide
  Target: LAMA2; (-) strand; PAM type: YTN; PAM sequence: TTG
cataacaatacccttcccag

SEQ ID NO: 235708 - DNA, 20 bp, Artificial Sequence
  Description of Artificial Sequence: Synthetic oligonucleotide
  Target: LAMA2; (-) strand; PAM type: YTN; PAM sequence: TTT
gcataacaatacccttccca

SEQ ID NO: 235709 - DNA, 20 bp, Artificial Sequence
  Description of Artificial Sequence: Synthetic oligonucleotide
  Target: LAMA2; (-) strand; PAM type: YTN; PAM sequence: TTC
acaaaatttgcataacaata

SEQ ID NO: 235710 - DNA, 20 bp, Artificial Sequence
  Description of Artificial Sequence: Synthetic oligonucleotide
  Target: LAMA2; (-) strand; PAM type: YTN; PAM sequence: CTG
caattcacaaaatttgcata

SEQ ID NO: 235711 - DNA, 20 bp, Artificial Sequence
  Description of Artificial Sequence: Synthetic oligonucleotide
  Target: LAMA2; (-) strand; PAM type: YTN; PAM sequence: TTA
aactgcaattcacaaaattt

SEQ ID NO: 235712 - DNA, 20 bp, Artificial Sequence
  Description of Artificial Sequence: Synthetic oligonucleotide
  Target: LAMA2; (-) strand; PAM type: YTN; PAM sequence: CTG
ttaaactgcaattcacaaaa

SEQ ID NO: 235713 - DNA, 20 bp, Artificial Sequence
  Description of Artificial Sequence: Synthetic oligonucleotide
  Target: LAMA2; (-) strand; PAM type: YTN; PAM sequence: TTA
gctgttaaactgcaattcac

SEQ ID NO: 235714 - DNA, 20 bp, Artificial Sequence
  Description of Artificial Sequence: Synthetic oligonucleotide
  Target: LAMA2; (-) strand; PAM type: YTN; PAM sequence: TTT
agctgttaaactgcaattca

SEQ ID NO: 235715 - DNA, 20 bp, Artificial Sequence
  Description of Artificial Sequence: Synthetic oligonucleotide
  Target: LAMA2; (-) strand; PAM type: YTN; PAM sequence: CTT
tagctgttaaactgcaattc

SEQ ID NO: 235716 - DNA, 20 bp, Artificial Sequence
  Description of Artificial Sequence: Synthetic oligonucleotide
  Target: LAMA2; (-) strand; PAM type: YTN; PAM sequence: TTC
tttagctgttaaactgcaat

SEQ ID NO: 235717 - DNA, 20 bp, Artificial Sequence
  Description of Artificial Sequence: Synthetic oligonucleotide
  Target: LAMA2; (-) strand; PAM type: YTN; PAM sequence: TTA
tgaacatcatagagataaat

SEQ ID NO: 235718 - DNA, 20 bp, Artificial Sequence
  Description of Artificial Sequence: Synthetic oligonucleotide
  Target: LAMA2; (-) strand; PAM type: YTN; PAM sequence: TTT
atgaacatcatagagataaa

SEQ ID NO: 235719 - DNA, 20 bp, Artificial Sequence
  Description of Artificial Sequence: Synthetic oligonucleotide
  Target: LAMA2; (-) strand; PAM type: YTN; PAM sequence: TTT
tatgaacatcatagagataa

SEQ ID NO: 235720 - DNA, 20 bp, Artificial Sequence
  Description of Artificial Sequence: Synthetic oligonucleotide
  Target: LAMA2; (-) strand; PAM type: YTN; PAM sequence: TTA
agacaataattttatgaaca

SEQ ID NO: 235721 - DNA, 20 bp, Artificial Sequence
  Description of Artificial Sequence: Synthetic oligonucleotide
  Target: LAMA2; (-) strand; PAM type: YTN; PAM sequence: TTT
aagacaataattttatgaac

SEQ ID NO: 235722 - DNA, 20 bp, Artificial Sequence
  Description of Artificial Sequence: Synthetic oligonucleotide
  Target: LAMA2; (-) strand; PAM type: YTN; PAM sequence: TTT
taagacaataattttatgaa

SEQ ID NO: 235723 - DNA, 20 bp, Artificial Sequence
  Description of Artificial Sequence: Synthetic oligonucleotide
  Target: LAMA2; (-) strand; PAM type: YTN; PAM sequence: CTA
aaatcaaattttaagacaat

SEQ ID NO: 235724 - DNA, 20 bp, Artificial Sequence
  Description of Artificial Sequence: Synthetic oligonucleotide
  Target: LAMA2; (-) strand; PAM type: YTN; PAM sequence: TTA
agtggaaaaatctaaaatca

SEQ ID NO: 235725 - DNA, 20 bp, Artificial Sequence
  Description of Artificial Sequence: Synthetic oligonucleotide
  Target: LAMA2; (-) strand; PAM type: YTN; PAM sequence: TTA
aatgtcattaagtggaaaaa

SEQ ID NO: 235726 - DNA, 20 bp, Artificial Sequence
  Description of Artificial Sequence: Synthetic oligonucleotide
  Target: LAMA2; (-) strand; PAM type: YTN; PAM sequence: TTA
tatacacatataaattaaat

SEQ ID NO: 235727 - DNA, 20 bp, Artificial Sequence
  Description of Artificial Sequence: Synthetic oligonucleotide
  Target: LAMA2; (-) strand; PAM type: YTN; PAM sequence: TTT
atatacacatataaattaaa

SEQ ID NO: 235728 - DNA, 20 bp, Artificial Sequence
  Description of Artificial Sequence: Synthetic oligonucleotide
  Target: LAMA2; (-) strand; PAM type: YTN; PAM sequence: TTT
tatatacacatataaattaa

SEQ ID NO: 235729 - DNA, 20 bp, Artificial Sequence
  Description of Artificial Sequence: Synthetic oligonucleotide
  Target: LAMA2; (-) strand; PAM type: YTN; PAM sequence: CTG
tgcacagaataggtaaggca

SEQ ID NO: 235730 - DNA, 20 bp, Artificial Sequence
  Description of Artificial Sequence: Synthetic oligonucleotide
  Target: LAMA2; (-) strand; PAM type: YTN; PAM sequence: TTG
ggactgtgcacagaataggt

SEQ ID NO: 235731 - DNA, 20 bp, Artificial Sequence
  Description of Artificial Sequence: Synthetic oligonucleotide
  Target: LAMA2; (-) strand; PAM type: YTN; PAM sequence: TTA
tgaagttgggactgtgcaca

SEQ ID NO: 235732 - DNA, 20 bp, Artificial Sequence
  Description of Artificial Sequence: Synthetic oligonucleotide
  Target: LAMA2; (-) strand; PAM type: YTN; PAM sequence: TTC
ccccattatgaagttgggac

SEQ ID NO: 235733 - DNA, 20 bp, Artificial Sequence
  Description of Artificial Sequence: Synthetic oligonucleotide
  Target: LAMA2; (-) strand; PAM type: YTN; PAM sequence: TTC
attcccccattatgaagttg

SEQ ID NO: 235734 - DNA, 20 bp, Artificial Sequence
  Description of Artificial Sequence: Synthetic oligonucleotide
  Target: LAMA2; (-) strand; PAM type: YTN; PAM sequence: TTC
attcattcccccattatgaa

SEQ ID NO: 235735 - DNA, 20 bp, Artificial Sequence
  Description of Artificial Sequence: Synthetic oligonucleotide
  Target: LAMA2; (-) strand; PAM type: YTN; PAM sequence: TTA
agatacattcattcattccc

SEQ ID NO: 235736 - DNA, 20 bp, Artificial Sequence
  Description of Artificial Sequence: Synthetic oligonucleotide
  Target: LAMA2; (-) strand; PAM type: YTN; PAM sequence: TTT
aagatacattcattcattcc

SEQ ID NO: 235737 - DNA, 20 bp, Artificial Sequence
  Description of Artificial Sequence: Synthetic oligonucleotide
  Target: LAMA2; (-) strand; PAM type: YTN; PAM sequence: TTG
tttaagatacattcattcat

SEQ ID NO: 235738 - DNA, 20 bp, Artificial Sequence
  Description of Artificial Sequence: Synthetic oligonucleotide
  Target: LAMA2; (-) strand; PAM type: YTN; PAM sequence: TTT
gtttaagatacattcattca

SEQ ID NO: 235739 - DNA, 20 bp, Artificial Sequence
  Description of Artificial Sequence: Synthetic oligonucleotide
  Target: LAMA2; (-) strand; PAM type: YTN; PAM sequence: TTC
aaaatcatcatttgtttaag

SEQ ID NO: 235740 - DNA, 20 bp, Artificial Sequence
  Description of Artificial Sequence: Synthetic oligonucleotide
  Target: LAMA2; (-) strand; PAM type: YTN; PAM sequence: TTT
caaaatcatcatttgtttaa

SEQ ID NO: 235741 - DNA, 20 bp, Artificial Sequence
  Description of Artificial Sequence: Synthetic oligonucleotide
  Target: LAMA2; (-) strand; PAM type: YTN; PAM sequence: TTC
acaggtcagtttcaaaatca

SEQ ID NO: 235742 - DNA, 20 bp, Artificial Sequence
  Description of Artificial Sequence: Synthetic oligonucleotide
  Target: LAMA2; (-) strand; PAM type: YTN; PAM sequence: CTA
agttcacaggtcagtttcaa

SEQ ID NO: 235743 - DNA, 20 bp, Artificial Sequence
  Description of Artificial Sequence: Synthetic oligonucleotide
  Target: LAMA2; (-) strand; PAM type: YTN; PAM sequence: TTA
actaagttcacaggtcagtt

SEQ ID NO: 235744 - DNA, 20 bp, Artificial Sequence
  Description of Artificial Sequence: Synthetic oligonucleotide
  Target: LAMA2; (-) strand; PAM type: YTN; PAM sequence: CTC
aattaactaagttcacaggt

SEQ ID NO: 235745 - DNA, 20 bp, Artificial Sequence
  Description of Artificial Sequence: Synthetic oligonucleotide
  Target: LAMA2; (-) strand; PAM type: YTN; PAM sequence: CTG
aatctcaattaactaagttc

SEQ ID NO: 235746 - DNA, 20 bp, Artificial Sequence
  Description of Artificial Sequence: Synthetic oligonucleotide
  Target: LAMA2; (-) strand; PAM type: YTN; PAM sequence: CTC
actgaatctcaattaactaa

SEQ ID NO: 235747 - DNA, 20 bp, Artificial Sequence
  Description of Artificial Sequence: Synthetic oligonucleotide
  Target: LAMA2; (-) strand; PAM type: YTN; PAM sequence: TTA
tatacctcactgaatctcaa

SEQ ID NO: 235748 - DNA, 20 bp, Artificial Sequence
  Description of Artificial Sequence: Synthetic oligonucleotide
  Target: LAMA2; (-) strand; PAM type: YTN; PAM sequence: TTT
atatacctcactgaatctca

SEQ ID NO: 235749 - DNA, 20 bp, Artificial Sequence
  Description of Artificial Sequence: Synthetic oligonucleotide
  Target: LAMA2; (-) strand; PAM type: YTN; PAM sequence: TTA
tttatatacctcactgaatc

SEQ ID NO: 235750 - DNA, 20 bp, Artificial Sequence
  Description of Artificial Sequence: Synthetic oligonucleotide
  Target: LAMA2; (-) strand; PAM type: YTN; PAM sequence: CTT
atttatatacctcactgaat

SEQ ID NO: 235751 - DNA, 20 bp, Artificial Sequence
  Description of Artificial Sequence: Synthetic oligonucleotide
  Target: LAMA2; (-) strand; PAM type: YTN; PAM sequence: TTA
gacttatttatatacctcac

SEQ ID NO: 235752 - DNA, 20 bp, Artificial Sequence
  Description of Artificial Sequence: Synthetic oligonucleotide
  Target: LAMA2; (-) strand; PAM type: YTN; PAM sequence: TTA
aaattagacttatttatata

SEQ ID NO: 235753 - DNA, 20 bp, Artificial Sequence
  Description of Artificial Sequence: Synthetic oligonucleotide
  Target: LAMA2; (-) strand; PAM type: YTN; PAM sequence: CTA
taaatcagagtgttaaaatt

SEQ ID NO: 235754 - DNA, 20 bp, Artificial Sequence
  Description of Artificial Sequence: Synthetic oligonucleotide
  Target: LAMA2; (-) strand; PAM type: YTN; PAM sequence: CTA
ctataaatcagagtgttaaa

SEQ ID NO: 235755 - DNA, 20 bp, Artificial Sequence
  Description of Artificial Sequence: Synthetic oligonucleotide
  Target: LAMA2; (-) strand; PAM type: YTN; PAM sequence: TTG
ctactataaatcagagtgtt

SEQ ID NO: 235756 - DNA, 20 bp, Artificial Sequence
  Description of Artificial Sequence: Synthetic oligonucleotide
  Target: LAMA2; (-) strand; PAM type: YTN; PAM sequence: TTT
gctactataaatcagagtgt

SEQ ID NO: 235757 - DNA, 20 bp, Artificial Sequence
  Description of Artificial Sequence: Synthetic oligonucleotide
  Target: LAMA2; (-) strand; PAM type: YTN; PAM sequence: TTG
tttgctactataaatcagag

SEQ ID NO: 235758 - DNA, 20 bp, Artificial Sequence
  Description of Artificial Sequence: Synthetic oligonucleotide
  Target: LAMA2; (-) strand; PAM type: YTN; PAM sequence: CTT
gtttgctactataaatcaga

SEQ ID NO: 235759 - DNA, 20 bp, Artificial Sequence
  Description of Artificial Sequence: Synthetic oligonucleotide
  Target: LAMA2; (-) strand; PAM type: YTN; PAM sequence: TTA
caaatgaaaacttgtttgct

SEQ ID NO: 235760 - DNA, 20 bp, Artificial Sequence
  Description of Artificial Sequence: Synthetic oligonucleotide
  Target: LAMA2; (-) strand; PAM type: YTN; PAM sequence: TTT
acaaatgaaaacttgtttgc

SEQ ID NO: 235761 - DNA, 20 bp, Artificial Sequence
  Description of Artificial Sequence: Synthetic oligonucleotide
  Target: LAMA2; (-) strand; PAM type: YTN; PAM sequence: TTA
atttacaaatgaaaacttgt

SEQ ID NO: 235762 - DNA, 20 bp, Artificial Sequence
  Description of Artificial Sequence: Synthetic oligonucleotide
  Target: LAMA2; (-) strand; PAM type: YTN; PAM sequence: CTT
aatttacaaatgaaaacttg

SEQ ID NO: 235763 - DNA, 20 bp, Artificial Sequence
  Description of Artificial Sequence: Synthetic oligonucleotide
  Target: LAMA2; (-) strand; PAM type: YTN; PAM sequence: CTA
ggcttaatttacaaatgaaa

SEQ ID NO: 235764 - DNA, 20 bp, Artificial Sequence
  Description of Artificial Sequence: Synthetic oligonucleotide
  Target: LAMA2; (-) strand; PAM type: YTN; PAM sequence: TTC
atatgtatatatatctaggc

SEQ ID NO: 235765 - DNA, 20 bp, Artificial Sequence
  Description of Artificial Sequence: Synthetic oligonucleotide
  Target: LAMA2; (-) strand; PAM type: YTN; PAM sequence: TTC
aatatagttcatatgtatat

SEQ ID NO: 235766 - DNA, 20 bp, Artificial Sequence
  Description of Artificial Sequence: Synthetic oligonucleotide
  Target: LAMA2; (-) strand; PAM type: YTN; PAM sequence: CTA
ttcaatatagttcatatgta

SEQ ID NO: 235767 - DNA, 20 bp, Artificial Sequence
  Description of Artificial Sequence: Synthetic oligonucleotide
  Target: LAMA2; (-) strand; PAM type: YTN; PAM sequence: TTG
cccaagaaatgcccacctat

SEQ ID NO: 235768 - DNA, 20 bp, Artificial Sequence
  Description of Artificial Sequence: Synthetic oligonucleotide
  Target: LAMA2; (-) strand; PAM type: YTN; PAM sequence: TTT
gcccaagaaatgcccaccta

SEQ ID NO: 235769 - DNA, 20 bp, Artificial Sequence
  Description of Artificial Sequence: Synthetic oligonucleotide
  Target: LAMA2; (-) strand; PAM type: YTN; PAM sequence: TTA
tttgcccaagaaatgcccac

SEQ ID NO: 235770 - DNA, 20 bp, Artificial Sequence
  Description of Artificial Sequence: Synthetic oligonucleotide
  Target: LAMA2; (-) strand; PAM type: YTN; PAM sequence: CTA
aattatttgcccaagaaatg

SEQ ID NO: 235771 - DNA, 20 bp, Artificial Sequence
  Description of Artificial Sequence: Synthetic oligonucleotide
  Target: LAMA2; (-) strand; PAM type: YTN; PAM sequence: TTC
cagatgtaataggaaaaaaa

SEQ ID NO: 235772 - DNA, 20 bp, Artificial Sequence
  Description of Artificial Sequence: Synthetic oligonucleotide
  Target: LAMA2; (-) strand; PAM type: YTN; PAM sequence: TTT
ccagatgtaataggaaaaaa

SEQ ID NO: 235773 - DNA, 20 bp, Artificial Sequence
  Description of Artificial Sequence: Synthetic oligonucleotide
  Target: LAMA2; (-) strand; PAM type: YTN; PAM sequence: TTT
tccagatgtaataggaaaaa

SEQ ID NO: 235774 - DNA, 20 bp, Artificial Sequence
  Description of Artificial Sequence: Synthetic oligonucleotide
  Target: LAMA2; (-) strand; PAM type: YTN; PAM sequence: TTA
ttttccagatgtaataggaa

SEQ ID NO: 235775 - DNA, 20 bp, Artificial Sequence
  Description of Artificial Sequence: Synthetic oligonucleotide
  Target: LAMA2; (-) strand; PAM type: YTN; PAM sequence: TTT
attttccagatgtaatagga

SEQ ID NO: 235776 - DNA, 20 bp, Artificial Sequence
  Description of Artificial Sequence: Synthetic oligonucleotide
  Target: LAMA2; (-) strand; PAM type: YTN; PAM sequence: CTG
tatatacaagatttattttc

SEQ ID NO: 235777 - DNA, 20 bp, Artificial Sequence
  Description of Artificial Sequence: Synthetic oligonucleotide
  Target: LAMA2; (-) strand; PAM type: YTN; PAM sequence: TTC
atatactgtatatacaagat

SEQ ID NO: 235778 - DNA, 20 bp, Artificial Sequence
  Description of Artificial Sequence: Synthetic oligonucleotide
  Target: LAMA2; (-) strand; PAM type: YTN; PAM sequence: CTG
tgttcatatactgtatatac

SEQ ID NO: 235779 - DNA, 20 bp, Artificial Sequence
  Description of Artificial Sequence: Synthetic oligonucleotide
  Target: LAMA2; (-) strand; PAM type: YTN; PAM sequence: CTA
cactgtgttcatatactgta

SEQ ID NO: 235780 - DNA, 20 bp, Artificial Sequence
  Description of Artificial Sequence: Synthetic oligonucleotide
  Target: LAMA2; (-) strand; PAM type: YTN; PAM sequence: TTA
aacaaaactacactgtgttc

SEQ ID NO: 235781 - DNA, 20 bp, Artificial Sequence
  Description of Artificial Sequence: Synthetic oligonucleotide
  Target: LAMA2; (-) strand; PAM type: YTN; PAM sequence: CTT
aaacaaaactacactgtgtt

SEQ ID NO: 235782 - DNA, 20 bp, Artificial Sequence
  Description of Artificial Sequence: Synthetic oligonucleotide
  Target: LAMA2; (-) strand; PAM type: YTN; PAM sequence: TTA
cttaaacaaaactacactgt

SEQ ID NO: 235783 - DNA, 20 bp, Artificial Sequence
  Description of Artificial Sequence: Synthetic oligonucleotide
  Target: LAMA2; (-) strand; PAM type: YTN; PAM sequence: TTT
acttaaacaaaactacactg

SEQ ID NO: 235784 - DNA, 20 bp, Artificial Sequence
  Description of Artificial Sequence: Synthetic oligonucleotide
  Target: LAMA2; (-) strand; PAM type: YTN; PAM sequence: CTA
gtttacttaaacaaaactac

SEQ ID NO: 235785 - DNA, 20 bp, Artificial Sequence
  Description of Artificial Sequence: Synthetic oligonucleotide
  Target: LAMA2; (-) strand; PAM type: YTN; PAM sequence: TTG
tatacatagtatatcaacaa

SEQ ID NO: 235786 - DNA, 20 bp, Artificial Sequence
  Description of Artificial Sequence: Synthetic oligonucleotide
  Target: LAMA2; (-) strand; PAM type: YTN; PAM sequence: CTT
gtatacatagtatatcaaca

SEQ ID NO: 235787 - DNA, 20 bp, Artificial Sequence
  Description of Artificial Sequence: Synthetic oligonucleotide
  Target: LAMA2; (-) strand; PAM type: YTN; PAM sequence: TTA
tcttgtatacatagtatatc

SEQ ID NO: 235788 - DNA, 20 bp, Artificial Sequence
  Description of Artificial Sequence: Synthetic oligonucleotide
  Target: LAMA2; (-) strand; PAM type: YTN; PAM sequence: TTT
atcttgtatacatagtatat

SEQ ID NO: 235789 - DNA, 20 bp, Artificial Sequence
  Description of Artificial Sequence: Synthetic oligonucleotide
  Target: LAMA2; (-) strand; PAM type: YTN; PAM sequence: TTT
tatcttgtatacatagtata

SEQ ID NO: 235790 - DNA, 20 bp, Artificial Sequence
  Description of Artificial Sequence: Synthetic oligonucleotide
  Target: LAMA2; (-) strand; PAM type: YTN; PAM sequence: TTT
ttatcttgtatacatagtat

SEQ ID NO: 235791 - DNA, 20 bp, Artificial Sequence
  Description of Artificial Sequence: Synthetic oligonucleotide
  Target: LAMA2; (-) strand; PAM type: YTN; PAM sequence: CTT
tttatcttgtatacatagta

SEQ ID NO: 235792 - DNA, 20 bp, Artificial Sequence
  Description of Artificial Sequence: Synthetic oligonucleotide
  Target: LAMA2; (-) strand; PAM type: YTN; PAM sequence: TTC
ctttttatcttgtatacata

SEQ ID NO: 235793 - DNA, 20 bp, Artificial Sequence
  Description of Artificial Sequence: Synthetic oligonucleotide
  Target: LAMA2; (-) strand; PAM type: YTN; PAM sequence: TTA
ttcctttttatcttgtatac

SEQ ID NO: 235794 - DNA, 20 bp, Artificial Sequence
  Description of Artificial Sequence: Synthetic oligonucleotide
  Target: LAMA2; (-) strand; PAM type: YTN; PAM sequence: TTT
attcctttttatcttgtata

SEQ ID NO: 235795 - DNA, 20 bp, Artificial Sequence
  Description of Artificial Sequence: Synthetic oligonucleotide
  Target: LAMA2; (-) strand; PAM type: YTN; PAM sequence: TTT
tattcctttttatcttgtat

SEQ ID NO: 235796 - DNA, 20 bp, Artificial Sequence
  Description of Artificial Sequence: Synthetic oligonucleotide
  Target: LAMA2; (-) strand; PAM type: YTN; PAM sequence: TTC
atgttttattcctttttatc

SEQ ID NO: 235797 - DNA, 20 bp, Artificial Sequence
  Description of Artificial Sequence: Synthetic oligonucleotide
  Target: LAMA2; (-) strand; PAM type: YTN; PAM sequence: TTT
catgttttattcctttttat

SEQ ID NO: 235798 - DNA, 20 bp, Artificial Sequence
  Description of Artificial Sequence: Synthetic oligonucleotide
  Target: LAMA2; (-) strand; PAM type: YTN; PAM sequence: TTT
tcatgttttattccttttta

SEQ ID NO: 235799 - DNA, 20 bp, Artificial Sequence
  Description of Artificial Sequence: Synthetic oligonucleotide
  Target: LAMA2; (-) strand; PAM type: YTN; PAM sequence: TTG
atattttcatgttttattcc

SEQ ID NO: 235800 - DNA, 20 bp, Artificial Sequence
  Description of Artificial Sequence: Synthetic oligonucleotide
  Target: LAMA2; (-) strand; PAM type: YTN; PAM sequence: TTA
ttgatattttcatgttttat

SEQ ID NO: 235801 - DNA, 20 bp, Artificial Sequence
  Description of Artificial Sequence: Synthetic oligonucleotide
  Target: LAMA2; (-) strand; PAM type: YTN; PAM sequence: CTT
attgatattttcatgtttta

SEQ ID NO: 235802 - DNA, 20 bp, Artificial Sequence
  Description of Artificial Sequence: Synthetic oligonucleotide
  Target: LAMA2; (-) strand; PAM type: YTN; PAM sequence: TTC
aatacttattgatattttca

SEQ ID NO: 235803 - DNA, 20 bp, Artificial Sequence
  Description of Artificial Sequence: Synthetic oligonucleotide
  Target: LAMA2; (-) strand; PAM type: YTN; PAM sequence: TTA
gattcaatacttattgatat

SEQ ID NO: 235804 - DNA, 20 bp, Artificial Sequence
  Description of Artificial Sequence: Synthetic oligonucleotide
  Target: LAMA2; (-) strand; PAM type: YTN; PAM sequence: CTT
agattcaatacttattgata

SEQ ID NO: 235805 - DNA, 20 bp, Artificial Sequence
  Description of Artificial Sequence: Synthetic oligonucleotide
  Target: LAMA2; (-) strand; PAM type: YTN; PAM sequence: TTA
cttagattcaatacttattg

SEQ ID NO: 235806 - DNA, 20 bp, Artificial Sequence
  Description of Artificial Sequence: Synthetic oligonucleotide
  Target: LAMA2; (-) strand; PAM type: YTN; PAM sequence: TTG
ttacttagattcaatactta

SEQ ID NO: 235807 - DNA, 20 bp, Artificial Sequence
  Description of Artificial Sequence: Synthetic oligonucleotide
  Target: LAMA2; (-) strand; PAM type: YTN; PAM sequence: TTT
gttacttagattcaatactt

SEQ ID NO: 235808 - DNA, 20 bp, Artificial Sequence
  Description of Artificial Sequence: Synthetic oligonucleotide
  Target: LAMA2; (-) strand; PAM type: YTN; PAM sequence: CTA
tatatttgttacttagattc

SEQ ID NO: 235809 - DNA, 20 bp, Artificial Sequence
  Description of Artificial Sequence: Synthetic oligonucleotide
  Target: LAMA2; (-) strand; PAM type: YTN; PAM sequence: TTC
ctatatatttgttacttaga

SEQ ID NO: 235810 - DNA, 20 bp, Artificial Sequence
  Description of Artificial Sequence: Synthetic oligonucleotide
  Target: LAMA2; (-) strand; PAM type: YTN; PAM sequence: TTA
cacaaaagtaaagataatag

SEQ ID NO: 235811 - DNA, 20 bp, Artificial Sequence
  Description of Artificial Sequence: Synthetic oligonucleotide
  Target: LAMA2; (-) strand; PAM type: YTN; PAM sequence: CTT
acacaaaagtaaagataata

SEQ ID NO: 235812 - DNA, 20 bp, Artificial Sequence
  Description of Artificial Sequence: Synthetic oligonucleotide
  Target: LAMA2; (-) strand; PAM type: YTN; PAM sequence: TTA
catgcttacacaaaagtaaa

SEQ ID NO: 235813 - DNA, 20 bp, Artificial Sequence
  Description of Artificial Sequence: Synthetic oligonucleotide
  Target: LAMA2; (-) strand; PAM type: YTN; PAM sequence: TTT
acatgcttacacaaaagtaa

SEQ ID NO: 235814 - DNA, 20 bp, Artificial Sequence
  Description of Artificial Sequence: Synthetic oligonucleotide
  Target: LAMA2; (-) strand; PAM type: YTN; PAM sequence: TTT
tacatgcttacacaaaagta

SEQ ID NO: 235815 - DNA, 20 bp, Artificial Sequence
  Description of Artificial Sequence: Synthetic oligonucleotide
  Target: LAMA2; (-) strand; PAM type: YTN; PAM sequence: CTT
ttacatgcttacacaaaagt

SEQ ID NO: 235816 - DNA, 20 bp, Artificial Sequence
  Description of Artificial Sequence: Synthetic oligonucleotide
  Target: LAMA2; (-) strand; PAM type: YTN; PAM sequence: TTC
ttttacatgcttacacaaaa

SEQ ID NO: 235817 - DNA, 20 bp, Artificial Sequence
  Description of Artificial Sequence: Synthetic oligonucleotide
  Target: LAMA2; (-) strand; PAM type: YTN; PAM sequence: CTA
aaatccagttcttttacatg

SEQ ID NO: 235818 - DNA, 20 bp, Artificial Sequence
  Description of Artificial Sequence: Synthetic oligonucleotide
  Target: LAMA2; (-) strand; PAM type: YTN; PAM sequence: TTC
taaaatccagttcttttaca

SEQ ID NO: 235819 - DNA, 20 bp, Artificial Sequence
  Description of Artificial Sequence: Synthetic oligonucleotide
  Target: LAMA2; (-) strand; PAM type: YTN; PAM sequence: TTT
ctaaaatccagttcttttac

SEQ ID NO: 235820 - DNA, 20 bp, Artificial Sequence
  Description of Artificial Sequence: Synthetic oligonucleotide
  Target: LAMA2; (-) strand; PAM type: YTN; PAM sequence: TTA
taatttctaaaatccagttc

SEQ ID NO: 235821 - DNA, 20 bp, Artificial Sequence
  Description of Artificial Sequence: Synthetic oligonucleotide
  Target: LAMA2; (-) strand; PAM type: YTN; PAM sequence: TTT
ataatttctaaaatccagtt

SEQ ID NO: 235822 - DNA, 20 bp, Artificial Sequence
  Description of Artificial Sequence: Synthetic oligonucleotide
  Target: LAMA2; (-) strand; PAM type: YTN; PAM sequence: TTA
atacatgtttataatttcta

SEQ ID NO: 235823 - DNA, 20 bp, Artificial Sequence
  Description of Artificial Sequence: Synthetic oligonucleotide
  Target: LAMA2; (-) strand; PAM type: YTN; PAM sequence: TTT
aatacatgtttataatttct

SEQ ID NO: 235824 - DNA, 20 bp, Artificial Sequence
  Description of Artificial Sequence: Synthetic oligonucleotide
  Target: LAMA2; (-) strand; PAM type: YTN; PAM sequence: CTT
taatacatgtttataatttc

SEQ ID NO: 235825 - DNA, 20 bp, Artificial Sequence
  Description of Artificial Sequence: Synthetic oligonucleotide
  Target: LAMA2; (-) strand; PAM type: YTN; PAM sequence: TTA
cctttaatacatgtttataa

SEQ ID NO: 235826 - DNA, 20 bp, Artificial Sequence
  Description of Artificial Sequence: Synthetic oligonucleotide
  Target: LAMA2; (-) strand; PAM type: YTN; PAM sequence: CTA
taagaattacctttaataca

SEQ ID NO: 235827 - DNA, 20 bp, Artificial Sequence
  Description of Artificial Sequence: Synthetic oligonucleotide
  Target: LAMA2; (-) strand; PAM type: YTN; PAM sequence: TTG
agaaaactataagaattacc

SEQ ID NO: 235828 - DNA, 20 bp, Artificial Sequence
  Description of Artificial Sequence: Synthetic oligonucleotide
  Target: LAMA2; (-) strand; PAM type: YTN; PAM sequence: TTA
ttgagaaaactataagaatt

SEQ ID NO: 235829 - DNA, 20 bp, Artificial Sequence
  Description of Artificial Sequence: Synthetic oligonucleotide
  Target: LAMA2; (-) strand; PAM type: YTN; PAM sequence: TTA
ataatacagagcagcaaatt

SEQ ID NO: 235830 - DNA, 20 bp, Artificial Sequence
  Description of Artificial Sequence: Synthetic oligonucleotide
  Target: LAMA2; (-) strand; PAM type: YTN; PAM sequence: TTT
aataatacagagcagcaaat

SEQ ID NO: 235831 - DNA, 20 bp, Artificial Sequence
  Description of Artificial Sequence: Synthetic oligonucleotide
  Target: LAMA2; (-) strand; PAM type: YTN; PAM sequence: TTT
taataatacagagcagcaaa

SEQ ID NO: 235832 - DNA, 20 bp, Artificial Sequence
  Description of Artificial Sequence: Synthetic oligonucleotide
  Target: LAMA2; (-) strand; PAM type: YTN; PAM sequence: TTA
tagacaaagtagttttaata

SEQ ID NO: 235833 - DNA, 20 bp, Artificial Sequence
  Description of Artificial Sequence: Synthetic oligonucleotide
  Target: LAMA2; (-) strand; PAM type: YTN; PAM sequence: TTT
atagacaaagtagttttaat

SEQ ID NO: 235834 - DNA, 20 bp, Artificial Sequence
  Description of Artificial Sequence: Synthetic oligonucleotide
  Target: LAMA2; (-) strand; PAM type: YTN; PAM sequence: TTT
tatagacaaagtagttttaa

SEQ ID NO: 235835 - DNA, 20 bp, Artificial Sequence
  Description of Artificial Sequence: Synthetic oligonucleotide
  Target: LAMA2; (-) strand; PAM type: YTN; PAM sequence: CTT
ttatagacaaagtagtttta

SEQ ID NO: 235836 - DNA, 20 bp, Artificial Sequence
  Description of Artificial Sequence: Synthetic oligonucleotide
  Target: LAMA2; (-) strand; PAM type: YTN; PAM sequence: TTC
agcaaacttttatagacaaa

SEQ ID NO: 235837 - DNA, 20 bp, Artificial Sequence
  Description of Artificial Sequence: Synthetic oligonucleotide
  Target: LAMA2; (-) strand; PAM type: YTN; PAM sequence: CTT
cagcaaacttttatagacaa

SEQ ID NO: 235838 - DNA, 20 bp, Artificial Sequence
  Description of Artificial Sequence: Synthetic oligonucleotide
  Target: LAMA2; (-) strand; PAM type: YTN; PAM sequence: TTC
acttcagcaaacttttatag

SEQ ID NO: 235839 - DNA, 20 bp, Artificial Sequence
  Description of Artificial Sequence: Synthetic oligonucleotide
  Target: LAMA2; (-) strand; PAM type: YTN; PAM sequence: TTT
cacttcagcaaacttttata

SEQ ID NO: 235840 - DNA, 20 bp, Artificial Sequence
  Description of Artificial Sequence: Synthetic oligonucleotide
  Target: LAMA2; (-) strand; PAM type: YTN; PAM sequence: TTT
tcacttcagcaaacttttat

SEQ ID NO: 235841 - DNA, 20 bp, Artificial Sequence
  Description of Artificial Sequence: Synthetic oligonucleotide
  Target: LAMA2; (-) strand; PAM type: YTN; PAM sequence: TTT
ttcacttcagcaaactttta

SEQ ID NO: 235842 - DNA, 20 bp, Artificial Sequence
  Description of Artificial Sequence: Synthetic oligonucleotide
  Target: LAMA2; (-) strand; PAM type: YTN; PAM sequence: TTA
acgaagtgtaatagaaacag

SEQ ID NO: 235843 - DNA, 20 bp, Artificial Sequence
  Description of Artificial Sequence: Synthetic oligonucleotide
  Target: LAMA2; (-) strand; PAM type: YTN; PAM sequence: TTT
aacgaagtgtaatagaaaca

SEQ ID NO: 235844 - DNA, 20 bp, Artificial Sequence
  Description of Artificial Sequence: Synthetic oligonucleotide
  Target: LAMA2; (-) strand; PAM type: YTN; PAM sequence: TTA
aaatgaatttaacgaagtgt

SEQ ID NO: 235845 - DNA, 20 bp, Artificial Sequence
  Description of Artificial Sequence: Synthetic oligonucleotide
  Target: LAMA2; (-) strand; PAM type: YTN; PAM sequence: CTA
acaaaaatattaaaatgaat

SEQ ID NO: 235846 - DNA, 20 bp, Artificial Sequence
  Description of Artificial Sequence: Synthetic oligonucleotide
  Target: LAMA2; (-) strand; PAM type: YTN; PAM sequence: TTG
gagatacctaacaaaaatat

SEQ ID NO: 235847 - DNA, 20 bp, Artificial Sequence
  Description of Artificial Sequence: Synthetic oligonucleotide
  Target: LAMA2; (-) strand; PAM type: YTN; PAM sequence: TTT
ggagatacctaacaaaaata

SEQ ID NO: 235848 - DNA, 20 bp, Artificial Sequence
  Description of Artificial Sequence: Synthetic oligonucleotide
  Target: LAMA2; (-) strand; PAM type: YTN; PAM sequence: TTG
gataatttggagatacctaa

SEQ ID NO: 235849 - DNA, 20 bp, Artificial Sequence
  Description of Artificial Sequence: Synthetic oligonucleotide
  Target: LAMA2; (-) strand; PAM type: YTN; PAM sequence: CTT
ggataatttggagataccta

SEQ ID NO: 235850 - DNA, 20 bp, Artificial Sequence
  Description of Artificial Sequence: Synthetic oligonucleotide
  Target: LAMA2; (-) strand; PAM type: YTN; PAM sequence: CTG
gcatggccttggataatttg

SEQ ID NO: 235851 - DNA, 20 bp, Artificial Sequence
  Description of Artificial Sequence: Synthetic oligonucleotide
  Target: LAMA2; (-) strand; PAM type: YTN; PAM sequence: TTG
gatcgcaatgacatggctgg

SEQ ID NO: 235852 - DNA, 20 bp, Artificial Sequence
  Description of Artificial Sequence: Synthetic oligonucleotide
  Target: LAMA2; (-) strand; PAM type: YTN; PAM sequence: TTA
aggaaccaattggatcgcaa

SEQ ID NO: 235853 - DNA, 20 bp, Artificial Sequence
  Description of Artificial Sequence: Synthetic oligonucleotide
  Target: LAMA2; (-) strand; PAM type: YTN; PAM sequence: TTT
aaggaaccaattggatcgca

SEQ ID NO: 235854 - DNA, 20 bp, Artificial Sequence
  Description of Artificial Sequence: Synthetic oligonucleotide
  Target: LAMA2; (-) strand; PAM type: YTN; PAM sequence: TTC
atttaaggaaccaattggat

SEQ ID NO: 235855 - DNA, 20 bp, Artificial Sequence
  Description of Artificial Sequence: Synthetic oligonucleotide
  Target: LAMA2; (-) strand; PAM type: YTN; PAM sequence: CTT
catttaaggaaccaattgga

SEQ ID NO: 235856 - DNA, 20 bp, Artificial Sequence
  Description of Artificial Sequence: Synthetic oligonucleotide
  Target: LAMA2; (-) strand; PAM type: YTN; PAM sequence: TTG
acacagacttcatttaagga

SEQ ID NO: 235857 - DNA, 20 bp, Artificial Sequence
  Description of Artificial Sequence: Synthetic oligonucleotide
  Target: LAMA2; (-) strand; PAM type: YTN; PAM sequence: CTT
gacacagacttcatttaagg

SEQ ID NO: 235858 - DNA, 20 bp, Artificial Sequence
  Description of Artificial Sequence: Synthetic oligonucleotide
  Target: LAMA2; (-) strand; PAM type: YTN; PAM sequence: CTC
atccttgacacagacttcat

SEQ ID NO: 235859 - DNA, 20 bp, Artificial Sequence
  Description of Artificial Sequence: Synthetic oligonucleotide
  Target: LAMA2; (-) strand; PAM type: YTN; PAM sequence: TTC
tcatccttgacacagacttc

SEQ ID NO: 235860 - DNA, 20 bp, Artificial Sequence
  Description of Artificial Sequence: Synthetic oligonucleotide
  Target: LAMA2; (-) strand; PAM type: YTN; PAM sequence: TTT
ctcatccttgacacagactt

SEQ ID NO: 235861 - DNA, 20 bp, Artificial Sequence
  Description of Artificial Sequence: Synthetic oligonucleotide
  Target: LAMA2; (-) strand; PAM type: YTN; PAM sequence: CTC
gtcgagcatgtttctcatcc

SEQ ID NO: 235862 - DNA, 20 bp, Artificial Sequence
  Description of Artificial Sequence: Synthetic oligonucleotide
  Target: LAMA2; (-) strand; PAM type: YTN; PAM sequence: CTC
acctcgtcgagcatgtttct

SEQ ID NO: 235863 - DNA, 20 bp, Artificial Sequence
  Description of Artificial Sequence: Synthetic oligonucleotide
  Target: LAMA2; (-) strand; PAM type: YTN; PAM sequence: CTC
tcacctcgtcgagcatgttt

SEQ ID NO: 235864 - DNA, 20 bp, Artificial Sequence
  Description of Artificial Sequence: Synthetic oligonucleotide
  Target: LAMA2; (-) strand; PAM type: YTN; PAM sequence: CTG
cagctctcacctcgtcgagc

SEQ ID NO: 235865 - DNA, 20 bp, Artificial Sequence
  Description of Artificial Sequence: Synthetic oligonucleotide
  Target: LAMA2; (-) strand; PAM type: YTN; PAM sequence: CTG
ctgcagctctcacctcgtcg

SEQ ID NO: 235866 - DNA, 20 bp, Artificial Sequence
  Description of Artificial Sequence: Synthetic oligonucleotide
  Target: LAMA2; (-) strand; PAM type: YTN; PAM sequence: TTC
tgctgcagctctcacctcgt

SEQ ID NO: 235867 - DNA, 20 bp, Artificial Sequence
  Description of Artificial Sequence: Synthetic oligonucleotide
  Target: LAMA2; (-) strand; PAM type: YTN; PAM sequence: TTA
tcagagcagtgacattctgc

SEQ ID NO: 235868 - DNA, 20 bp, Artificial Sequence
  Description of Artificial Sequence: Synthetic oligonucleotide
  Target: LAMA2; (-) strand; PAM type: YTN; PAM sequence: TTT
atcagagcagtgacattctg

SEQ ID NO: 235869 - DNA, 20 bp, Artificial Sequence
  Description of Artificial Sequence: Synthetic oligonucleotide
  Target: LAMA2; (-) strand; PAM type: YTN; PAM sequence: TTT
tatcagagcagtgacattct

SEQ ID NO: 235870 - DNA, 20 bp, Artificial Sequence
  Description of Artificial Sequence: Synthetic oligonucleotide
  Target: LAMA2; (-) strand; PAM type: YTN; PAM sequence: CTT
ttatcagagcagtgacattc

SEQ ID NO: 235871 - DNA, 20 bp, Artificial Sequence
  Description of Artificial Sequence: Synthetic oligonucleotide
  Target: LAMA2; (-) strand; PAM type: YTN; PAM sequence: TTG
tccttttatcagagcagtga

SEQ ID NO: 235872 - DNA, 20 bp, Artificial Sequence
  Description of Artificial Sequence: Synthetic oligonucleotide
  Target: LAMA2; (-) strand; PAM type: YTN; PAM sequence: TTA
gttgtccttttatcagagca

SEQ ID NO: 235873 - DNA, 20 bp, Artificial Sequence
  Description of Artificial Sequence: Synthetic oligonucleotide
  Target: LAMA2; (-) strand; PAM type: YTN; PAM sequence: TTT
agttgtccttttatcagagc

SEQ ID NO: 235874 - DNA, 20 bp, Artificial Sequence
  Description of Artificial Sequence: Synthetic oligonucleotide
  Target: LAMA2; (-) strand; PAM type: YTN; PAM sequence: TTT
tagttgtccttttatcagag

SEQ ID NO: 235875 - DNA, 20 bp, Artificial Sequence
  Description of Artificial Sequence: Synthetic oligonucleotide
  Target: LAMA2; (-) strand; PAM type: YTN; PAM sequence: CTT
ttagttgtccttttatcaga

SEQ ID NO: 235876 - DNA, 20 bp, Artificial Sequence
  Description of Artificial Sequence: Synthetic oligonucleotide
  Target: LAMA2; (-) strand; PAM type: YTN; PAM sequence: TTG
gcttttagttgtccttttat

SEQ ID NO: 235877 - DNA, 20 bp, Artificial Sequence
  Description of Artificial Sequence: Synthetic oligonucleotide
  Target: LAMA2; (-) strand; PAM type: YTN; PAM sequence: TTT
ggcttttagttgtcctttta

SEQ ID NO: 235878 - DNA, 20 bp, Artificial Sequence
  Description of Artificial Sequence: Synthetic oligonucleotide
  Target: LAMA2; (-) strand; PAM type: YTN; PAM sequence: CTG
aaaataatcatatttggctt

SEQ ID NO: 235879 - DNA, 20 bp, Artificial Sequence
  Description of Artificial Sequence: Synthetic oligonucleotide
  Target: LAMA2; (-) strand; PAM type: YTN; PAM sequence: TTC
tgaaaataatcatatttggc

SEQ ID NO: 235880 - DNA, 20 bp, Artificial Sequence
  Description of Artificial Sequence: Synthetic oligonucleotide
  Target: LAMA2; (-) strand; PAM type: YTN; PAM sequence: CTT
ctgaaaataatcatatttgg

SEQ ID NO: 235881 - DNA, 20 bp, Artificial Sequence
  Description of Artificial Sequence: Synthetic oligonucleotide
  Target: LAMA2; (-) strand; PAM type: YTN; PAM sequence: TTC
ttctgaaaataatcatattt

SEQ ID NO: 235882 - DNA, 20 bp, Artificial Sequence
  Description of Artificial Sequence: Synthetic oligonucleotide
  Target: LAMA2; (-) strand; PAM type: YTN; PAM sequence: CTG
caaaatattcttctgaaaat

SEQ ID NO: 235883 - DNA, 20 bp, Artificial Sequence
  Description of Artificial Sequence: Synthetic oligonucleotide
  Target: LAMA2; (-) strand; PAM type: YTN; PAM sequence: TTA
ctgcaaaatattcttctgaa

SEQ ID NO: 235884 - DNA, 20 bp, Artificial Sequence
  Description of Artificial Sequence: Synthetic oligonucleotide
  Target: LAMA2; (-) strand; PAM type: YTN; PAM sequence: TTT
actgcaaaatattcttctga

SEQ ID NO: 235885 - DNA, 20 bp, Artificial Sequence
  Description of Artificial Sequence: Synthetic oligonucleotide
  Target: LAMA2; (-) strand; PAM type: YTN; PAM sequence: TTA
catgaataacatttactgca

SEQ ID NO: 235886 - DNA, 20 bp, Artificial Sequence
  Description of Artificial Sequence: Synthetic oligonucleotide
  Target: LAMA2; (-) strand; PAM type: YTN; PAM sequence: TTA
ttacatgaataacatttact

SEQ ID NO: 235887 - DNA, 20 bp, Artificial Sequence
  Description of Artificial Sequence: Synthetic oligonucleotide
  Target: LAMA2; (-) strand; PAM type: YTN; PAM sequence: TTT
attacatgaataacatttac

SEQ ID NO: 235888 - DNA, 20 bp, Artificial Sequence
  Description of Artificial Sequence: Synthetic oligonucleotide
  Target: LAMA2; (-) strand; PAM type: YTN; PAM sequence: TTA
aagaataaatttattacatg

SEQ ID NO: 235889 - DNA, 20 bp, Artificial Sequence
  Description of Artificial Sequence: Synthetic oligonucleotide
  Target: LAMA2; (-) strand; PAM type: YTN; PAM sequence: CTG
atagattaaagaataaattt

SEQ ID NO: 235890 - DNA, 20 bp, Artificial Sequence
  Description of Artificial Sequence: Synthetic oligonucleotide
  Target: LAMA2; (-) strand; PAM type: YTN; PAM sequence: CTA
atacactgatagattaaaga

SEQ ID NO: 235891 - DNA, 20 bp, Artificial Sequence
  Description of Artificial Sequence: Synthetic oligonucleotide
  Target: LAMA2; (-) strand; PAM type: YTN; PAM sequence: CTG
gagggaacgctaatacactg

SEQ ID NO: 235892 - DNA, 20 bp, Artificial Sequence
  Description of Artificial Sequence: Synthetic oligonucleotide
  Target: LAMA2; (-) strand; PAM type: YTN; PAM sequence: TTC
ctggagggaacgctaataca

SEQ ID NO: 235893 - DNA, 20 bp, Artificial Sequence
  Description of Artificial Sequence: Synthetic oligonucleotide
  Target: LAMA2; (-) strand; PAM type: YTN; PAM sequence: CTT
cctggagggaacgctaatac

SEQ ID NO: 235894 - DNA, 20 bp, Artificial Sequence
  Description of Artificial Sequence: Synthetic oligonucleotide
  Target: LAMA2; (-) strand; PAM type: YTN; PAM sequence: CTA
cttcctggagggaacgctaa

SEQ ID NO: 235895 - DNA, 20 bp, Artificial Sequence
  Description of Artificial Sequence: Synthetic oligonucleotide
  Target: LAMA2; (-) strand; PAM type: YTN; PAM sequence: TTA
aaaactacttcctggaggga

SEQ ID NO: 235896 - DNA, 20 bp, Artificial Sequence
  Description of Artificial Sequence: Synthetic oligonucleotide
  Target: LAMA2; (-) strand; PAM type: YTN; PAM sequence: TTT
aaaaactacttcctggaggg

SEQ ID NO: 235897 - DNA, 20 bp, Artificial Sequence
  Description of Artificial Sequence: Synthetic oligonucleotide
  Target: LAMA2; (-) strand; PAM type: YTN; PAM sequence: TTG
agatgagtttaaaaactact

SEQ ID NO: 235898 - DNA, 20 bp, Artificial Sequence
  Description of Artificial Sequence: Synthetic oligonucleotide
  Target: LAMA2; (-) strand; PAM type: YTN; PAM sequence: TTA
ttgagatgagtttaaaaact

SEQ ID NO: 235899 - DNA, 20 bp, Artificial Sequence
  Description of Artificial Sequence: Synthetic oligonucleotide
  Target: LAMA2; (-) strand; PAM type: YTN; PAM sequence: TTA
aacatgaaagtaattattga

SEQ ID NO: 235900 - DNA, 20 bp, Artificial Sequence
  Description of Artificial Sequence: Synthetic oligonucleotide
  Target: LAMA2; (-) strand; PAM type: YTN; PAM sequence: TTA
taattaaacatgaaagtaat

SEQ ID NO: 235901 - DNA, 20 bp, Artificial Sequence
  Description of Artificial Sequence: Synthetic oligonucleotide
  Target: LAMA2; (-) strand; PAM type: YTN; PAM sequence: CTA
tgaaaacattataattaaac

SEQ ID NO: 235902 - DNA, 20 bp, Artificial Sequence
  Description of Artificial Sequence: Synthetic oligonucleotide
  Target: LAMA2; (-) strand; PAM type: YTN; PAM sequence: TTG
ctatgaaaacattataatta

SEQ ID NO: 235903 - DNA, 20 bp, Artificial Sequence
  Description of Artificial Sequence: Synthetic oligonucleotide
  Target: LAMA2; (-) strand; PAM type: YTN; PAM sequence: CTT
gctatgaaaacattataatt

SEQ ID NO: 235904 - DNA, 20 bp, Artificial Sequence
  Description of Artificial Sequence: Synthetic oligonucleotide
  Target: LAMA2; (-) strand; PAM type: YTN; PAM sequence: TTC
ttgctatgaaaacattataa

SEQ ID NO: 235905 - DNA, 20 bp, Artificial Sequence
  Description of Artificial Sequence: Synthetic oligonucleotide
  Target: LAMA2; (-) strand; PAM type: YTN; PAM sequence: CTT
cttgctatgaaaacattata

SEQ ID NO: 235906 - DNA, 20 bp, Artificial Sequence
  Description of Artificial Sequence: Synthetic oligonucleotide
  Target: LAMA2; (-) strand; PAM type: YTN; PAM sequence: CTC
ttcttgctatgaaaacatta

SEQ ID NO: 235907 - DNA, 20 bp, Artificial Sequence
  Description of Artificial Sequence: Synthetic oligonucleotide
  Target: LAMA2; (-) strand; PAM type: YTN; PAM sequence: TTC
aactcttcttgctatgaaaa

SEQ ID NO: 235908 - DNA, 20 bp, Artificial Sequence
  Description of Artificial Sequence: Synthetic oligonucleotide
  Target: LAMA2; (-) strand; PAM type: YTN; PAM sequence: CTC
aaaatacataattcaactct

SEQ ID NO: 235909 - DNA, 20 bp, Artificial Sequence
  Description of Artificial Sequence: Synthetic oligonucleotide
  Target: LAMA2; (-) strand; PAM type: YTN; PAM sequence: CTG
tgtatgtgtgtgtgtgtatc

SEQ ID NO: 235910 - DNA, 20 bp, Artificial Sequence
  Description of Artificial Sequence: Synthetic oligonucleotide
  Target: LAMA2; (-) strand; PAM type: YTN; PAM sequence: CTC
tgtgtatgtgtgtgtgtgta

SEQ ID NO: 235911 - DNA, 20 bp, Artificial Sequence
  Description of Artificial Sequence: Synthetic oligonucleotide
  Target: LAMA2; (-) strand; PAM type: YTN; PAM sequence: TTA
tctctgtgtatgtgtgtgtg

SEQ ID NO: 235912 - DNA, 20 bp, Artificial Sequence
  Description of Artificial Sequence: Synthetic oligonucleotide
  Target: LAMA2; (-) strand; PAM type: YTN; PAM sequence: TTT
atctctgtgtatgtgtgtgt

SEQ ID NO: 235913 - DNA, 20 bp, Artificial Sequence
  Description of Artificial Sequence: Synthetic oligonucleotide
  Target: LAMA2; (-) strand; PAM type: YTN; PAM sequence: CTT
tatctctgtgtatgtgtgtg

SEQ ID NO: 235914 - DNA, 20 bp, Artificial Sequence
  Description of Artificial Sequence: Synthetic oligonucleotide
  Target: LAMA2; (-) strand; PAM type: YTN; PAM sequence: TTC
tttatctctgtgtatgtgtg

SEQ ID NO: 235915 - DNA, 20 bp, Artificial Sequence
  Description of Artificial Sequence: Synthetic oligonucleotide
  Target: LAMA2; (-) strand; PAM type: YTN; PAM sequence: TTT
ctttatctctgtgtatgtgt

SEQ ID NO: 235916 - DNA, 20 bp, Artificial Sequence
  Description of Artificial Sequence: Synthetic oligonucleotide
  Target: LAMA2; (-) strand; PAM type: YTN; PAM sequence: CTT
tctttatctctgtgtatgtg

SEQ ID NO: 235917 - DNA, 20 bp, Artificial Sequence
  Description of Artificial Sequence: Synthetic oligonucleotide
  Target: LAMA2; (-) strand; PAM type: YTN; PAM sequence: CTC
tttctttatctctgtgtatg

SEQ ID NO: 235918 - DNA, 20 bp, Artificial Sequence
  Description of Artificial Sequence: Synthetic oligonucleotide
  Target: LAMA2; (-) strand; PAM type: YTN; PAM sequence: CTC
tctttctttatctctgtgta

SEQ ID NO: 235919 - DNA, 20 bp, Artificial Sequence
  Description of Artificial Sequence: Synthetic oligonucleotide
  Target: LAMA2; (-) strand; PAM type: YTN; PAM sequence: CTC
tctctttctttatctctgtg

SEQ ID NO: 235920 - DNA, 20 bp, Artificial Sequence
  Description of Artificial Sequence: Synthetic oligonucleotide
  Target: LAMA2; (-) strand; PAM type: YTN; PAM sequence: CTC
tctctctttctttatctctg

SEQ ID NO: 235921 - DNA, 20 bp, Artificial Sequence
  Description of Artificial Sequence: Synthetic oligonucleotide
  Target: LAMA2; (-) strand; PAM type: YTN; PAM sequence: TTG
actctctctctttctttatc

SEQ ID NO: 235922 - DNA, 20 bp, Artificial Sequence
  Description of Artificial Sequence: Synthetic oligonucleotide
  Target: LAMA2; (-) strand; PAM type: YTN; PAM sequence: TTG
tgattgactctctctctttc

SEQ ID NO: 235923 - DNA, 20 bp, Artificial Sequence
  Description of Artificial Sequence: Synthetic oligonucleotide
  Target: LAMA2; (-) strand; PAM type: YTN; PAM sequence: TTT
gtgattgactctctctcttt

SEQ ID NO: 235924 - DNA, 20 bp, Artificial Sequence
  Description of Artificial Sequence: Synthetic oligonucleotide
  Target: LAMA2; (-) strand; PAM type: YTN; PAM sequence: TTA
catataccacagatttgtga

SEQ ID NO: 235925 - DNA, 20 bp, Artificial Sequence
  Description of Artificial Sequence: Synthetic oligonucleotide
  Target: LAMA2; (-) strand; PAM type: YTN; PAM sequence: CTA
ataaataacacgatatgaaa

SEQ ID NO: 235926 - DNA, 20 bp, Artificial Sequence
  Description of Artificial Sequence: Synthetic oligonucleotide
  Target: LAMA2; (-) strand; PAM type: YTN; PAM sequence: CTA
caaacaatctaataaataac

SEQ ID NO: 235927 - DNA, 20 bp, Artificial Sequence
  Description of Artificial Sequence: Synthetic oligonucleotide
  Target: LAMA2; (-) strand; PAM type: YTN; PAM sequence: CTC
atagaagctacaaacaatct

SEQ ID NO: 235928 - DNA, 20 bp, Artificial Sequence
  Description of Artificial Sequence: Synthetic oligonucleotide
  Target: LAMA2; (-) strand; PAM type: YTN; PAM sequence: CTA
gaactcatagaagctacaaa

SEQ ID NO: 235929 - DNA, 20 bp, Artificial Sequence
  Description of Artificial Sequence: Synthetic oligonucleotide
  Target: LAMA2; (-) strand; PAM type: YTN; PAM sequence: TTC
atgctagaactcatagaagc

SEQ ID NO: 235930 - DNA, 20 bp, Artificial Sequence
  Description of Artificial Sequence: Synthetic oligonucleotide
  Target: LAMA2; (-) strand; PAM type: YTN; PAM sequence: TTT
catgctagaactcatagaag

SEQ ID NO: 235931 - DNA, 20 bp, Artificial Sequence
  Description of Artificial Sequence: Synthetic oligonucleotide
  Target: LAMA2; (-) strand; PAM type: YTN; PAM sequence: CTG
gcatttcatgctagaactca

SEQ ID NO: 235932 - DNA, 20 bp, Artificial Sequence
  Description of Artificial Sequence: Synthetic oligonucleotide
  Target: LAMA2; (-) strand; PAM type: YTN; PAM sequence: CTC
agtgaacgctggcatttcat

SEQ ID NO: 235933 - DNA, 20 bp, Artificial Sequence
  Description of Artificial Sequence: Synthetic oligonucleotide
  Target: LAMA2; (-) strand; PAM type: YTN; PAM sequence: TTC
ctcagtgaacgctggcattt

SEQ ID NO: 235934 - DNA, 20 bp, Artificial Sequence
  Description of Artificial Sequence: Synthetic oligonucleotide
  Target: LAMA2; (-) strand; PAM type: YTN; PAM sequence: CTA
cagcacacacattcctcagt

SEQ ID NO: 235935 - DNA, 20 bp, Artificial Sequence
  Description of Artificial Sequence: Synthetic oligonucleotide
  Target: LAMA2; (-) strand; PAM type: YTN; PAM sequence: TTC
ccactacagcacacacattc

SEQ ID NO: 235936 - DNA, 20 bp, Artificial Sequence
  Description of Artificial Sequence: Synthetic oligonucleotide
  Target: LAMA2; (-) strand; PAM type: YTN; PAM sequence: TTT
cccactacagcacacacatt

SEQ ID NO: 235937 - DNA, 20 bp, Artificial Sequence
  Description of Artificial Sequence: Synthetic oligonucleotide
  Target: LAMA2; (-) strand; PAM type: YTN; PAM sequence: TTT
tcccactacagcacacacat

SEQ ID NO: 235938 - DNA, 20 bp, Artificial Sequence
  Description of Artificial Sequence: Synthetic oligonucleotide
  Target: LAMA2; (-) strand; PAM type: YTN; PAM sequence: CTT
ttcccactacagcacacaca

SEQ ID NO: 235939 - DNA, 20 bp, Artificial Sequence
  Description of Artificial Sequence: Synthetic oligonucleotide
  Target: LAMA2; (-) strand; PAM type: YTN; PAM sequence: TTG
cttttcccactacagcacac

SEQ ID NO: 235940 - DNA, 20 bp, Artificial Sequence
  Description of Artificial Sequence: Synthetic oligonucleotide
  Target: LAMA2; (-) strand; PAM type: YTN; PAM sequence: TTT
gcttttcccactacagcaca

SEQ ID NO: 235941 - DNA, 20 bp, Artificial Sequence
  Description of Artificial Sequence: Synthetic oligonucleotide
  Target: LAMA2; (-) strand; PAM type: YTN; PAM sequence: CTA
tttgcttttcccactacagc

SEQ ID NO: 235942 - DNA, 20 bp, Artificial Sequence
  Description of Artificial Sequence: Synthetic oligonucleotide
  Target: LAMA2; (-) strand; PAM type: YTN; PAM sequence: TTC
tatttgcttttcccactaca

SEQ ID NO: 235943 - DNA, 20 bp, Artificial Sequence
  Description of Artificial Sequence: Synthetic oligonucleotide
  Target: LAMA2; (-) strand; PAM type: YTN; PAM sequence: CTT
ctatttgcttttcccactac

SEQ ID NO: 235944 - DNA, 20 bp, Artificial Sequence
  Description of Artificial Sequence: Synthetic oligonucleotide
  Target: LAMA2; (-) strand; PAM type: YTN; PAM sequence: TTC
ttctatttgcttttcccact

SEQ ID NO: 235945 - DNA, 20 bp, Artificial Sequence
  Description of Artificial Sequence: Synthetic oligonucleotide
  Target: LAMA2; (-) strand; PAM type: YTN; PAM sequence: CTC
agtgtgtgagttcttctatt

SEQ ID NO: 235946 - DNA, 20 bp, Artificial Sequence
  Description of Artificial Sequence: Synthetic oligonucleotide
  Target: LAMA2; (-) strand; PAM type: YTN; PAM sequence: CTA
catctcagtgtgtgagttct

SEQ ID NO: 235947 - DNA, 20 bp, Artificial Sequence
  Description of Artificial Sequence: Synthetic oligonucleotide
  Target: LAMA2; (-) strand; PAM type: YTN; PAM sequence: TTG
cctacatctcagtgtgtgag

SEQ ID NO: 235948 - DNA, 20 bp, Artificial Sequence
  Description of Artificial Sequence: Synthetic oligonucleotide
  Target: LAMA2; (-) strand; PAM type: YTN; PAM sequence: TTA
ttgcctacatctcagtgtgt

SEQ ID NO: 235949 - DNA, 20 bp, Artificial Sequence
  Description of Artificial Sequence: Synthetic oligonucleotide
  Target: LAMA2; (-) strand; PAM type: YTN; PAM sequence: CTA
tattattgcctacatctcag

SEQ ID NO: 235950 - DNA, 20 bp, Artificial Sequence
  Description of Artificial Sequence: Synthetic oligonucleotide
  Target: LAMA2; (-) strand; PAM type: YTN; PAM sequence: TTC
tatattattgcctacatctc

SEQ ID NO: 235951 - DNA, 20 bp, Artificial Sequence
  Description of Artificial Sequence: Synthetic oligonucleotide
  Target: LAMA2; (-) strand; PAM type: YTN; PAM sequence: TTT
ctatattattgcctacatct

SEQ ID NO: 235952 - DNA, 20 bp, Artificial Sequence
  Description of Artificial Sequence: Synthetic oligonucleotide
  Target: LAMA2; (-) strand; PAM type: YTN; PAM sequence: CTT
tctatattattgcctacatc

SEQ ID NO: 235953 - DNA, 20 bp, Artificial Sequence
  Description of Artificial Sequence: Synthetic oligonucleotide
  Target: LAMA2; (-) strand; PAM type: YTN; PAM sequence: TTG
ctttctatattattgcctac

SEQ ID NO: 235954 - DNA, 20 bp, Artificial Sequence
  Description of Artificial Sequence: Synthetic oligonucleotide
  Target: LAMA2; (-) strand; PAM type: YTN; PAM sequence: CTT
gctttctatattattgccta

SEQ ID NO: 235955 - DNA, 20 bp, Artificial Sequence
  Description of Artificial Sequence: Synthetic oligonucleotide
  Target: LAMA2; (-) strand; PAM type: YTN; PAM sequence: TTC
ttgctttctatattattgcc

SEQ ID NO: 235956 - DNA, 20 bp, Artificial Sequence
  Description of Artificial Sequence: Synthetic oligonucleotide
  Target: LAMA2; (-) strand; PAM type: YTN; PAM sequence: CTT
cttgctttctatattattgc

SEQ ID NO: 235957 - DNA, 20 bp, Artificial Sequence
  Description of Artificial Sequence: Synthetic oligonucleotide
  Target: LAMA2; (-) strand; PAM type: YTN; PAM sequence: TTA
tgaacacttcttgctttcta

SEQ ID NO: 235958 - DNA, 20 bp, Artificial Sequence
  Description of Artificial Sequence: Synthetic oligonucleotide
  Target: LAMA2; (-) strand; PAM type: YTN; PAM sequence: TTT
atgaacacttcttgctttct

SEQ ID NO: 235959 - DNA, 20 bp, Artificial Sequence
  Description of Artificial Sequence: Synthetic oligonucleotide
  Target: LAMA2; (-) strand; PAM type: YTN; PAM sequence: CTT
tatgaacacttcttgctttc

SEQ ID NO: 235960 - DNA, 20 bp, Artificial Sequence
  Description of Artificial Sequence: Synthetic oligonucleotide
  Target: LAMA2; (-) strand; PAM type: YTN; PAM sequence: TTA
gtcctttatgaacacttctt

SEQ ID NO: 235961 - DNA, 20 bp, Artificial Sequence
  Description of Artificial Sequence: Synthetic oligonucleotide
  Target: LAMA2; (-) strand; PAM type: YTN; PAM sequence: CTT
agtcctttatgaacacttct

SEQ ID NO: 235962 - DNA, 20 bp, Artificial Sequence
  Description of Artificial Sequence: Synthetic oligonucleotide
  Target: LAMA2; (-) strand; PAM type: YTN; PAM sequence: TTC
ttagtcctttatgaacactt

SEQ ID NO: 235963 - DNA, 20 bp, Artificial Sequence
  Description of Artificial Sequence: Synthetic oligonucleotide
  Target: LAMA2; (-) strand; PAM type: YTN; PAM sequence: CTT
cttagtcctttatgaacact

SEQ ID NO: 235964 - DNA, 20 bp, Artificial Sequence
  Description of Artificial Sequence: Synthetic oligonucleotide
  Target: LAMA2; (-) strand; PAM type: YTN; PAM sequence: CTA
ccttcttagtcctttatgaa

SEQ ID NO: 235965 - DNA, 20 bp, Artificial Sequence
  Description of Artificial Sequence: Synthetic oligonucleotide
  Target: LAMA2; (-) strand; PAM type: YTN; PAM sequence: CTA
ctaccttcttagtcctttat

SEQ ID NO: 235966 - DNA, 20 bp, Artificial Sequence
  Description of Artificial Sequence: Synthetic oligonucleotide
  Target: LAMA2; (-) strand; PAM type: YTN; PAM sequence: TTC
atgactactaccttcttagt

SEQ ID NO: 235967 - DNA, 20 bp, Artificial Sequence
  Description of Artificial Sequence: Synthetic oligonucleotide
  Target: LAMA2; (-) strand; PAM type: YTN; PAM sequence: TTA
attcatgactactaccttct

SEQ ID NO: 235968 - DNA, 20 bp, Artificial Sequence
  Description of Artificial Sequence: Synthetic oligonucleotide
  Target: LAMA2; (-) strand; PAM type: YTN; PAM sequence: TTC
attaattcatgactactacc

SEQ ID NO: 235969 - DNA, 20 bp, Artificial Sequence
  Description of Artificial Sequence: Synthetic oligonucleotide
  Target: LAMA2; (-) strand; PAM type: YTN; PAM sequence: CTG
ttcattaattcatgactact

SEQ ID NO: 235970 - DNA, 20 bp, Artificial Sequence
  Description of Artificial Sequence: Synthetic oligonucleotide
  Target: LAMA2; (-) strand; PAM type: YTN; PAM sequence: TTC
tgttcattaattcatgacta

SEQ ID NO: 235971 - DNA, 20 bp, Artificial Sequence
  Description of Artificial Sequence: Synthetic oligonucleotide
  Target: LAMA2; (-) strand; PAM type: YTN; PAM sequence: TTT
ctgttcattaattcatgact

SEQ ID NO: 235972 - DNA, 20 bp, Artificial Sequence
  Description of Artificial Sequence: Synthetic oligonucleotide
  Target: LAMA2; (-) strand; PAM type: YTN; PAM sequence: CTT
tctgttcattaattcatgac

SEQ ID NO: 235973 - DNA, 20 bp, Artificial Sequence
  Description of Artificial Sequence: Synthetic oligonucleotide
  Target: LAMA2; (-) strand; PAM type: YTN; PAM sequence: CTC
tttctgttcattaattcatg

SEQ ID NO: 235974 - DNA, 20 bp, Artificial Sequence
  Description of Artificial Sequence: Synthetic oligonucleotide
  Target: LAMA2; (-) strand; PAM type: YTN; PAM sequence: TTA
gtgtcagcctctttctgttc

SEQ ID NO: 235975 - DNA, 20 bp, Artificial Sequence
  Description of Artificial Sequence: Synthetic oligonucleotide
  Target: LAMA2; (-) strand; PAM type: YTN; PAM sequence: TTA
aattagtgtcagcctctttc

SEQ ID NO: 235976 - DNA, 20 bp, Artificial Sequence
  Description of Artificial Sequence: Synthetic oligonucleotide
  Target: LAMA2; (-) strand; PAM type: YTN; PAM sequence: CTT
aaattagtgtcagcctcttt

SEQ ID NO: 235977 - DNA, 20 bp, Artificial Sequence
  Description of Artificial Sequence: Synthetic oligonucleotide
  Target: LAMA2; (-) strand; PAM type: YTN; PAM sequence: TTA
gcttaaattagtgtcagcct

SEQ ID NO: 235978 - DNA, 20 bp, Artificial Sequence
  Description of Artificial Sequence: Synthetic oligonucleotide
  Target: LAMA2; (-) strand; PAM type: YTN; PAM sequence: TTT
agcttaaattagtgtcagcc

SEQ ID NO: 235979 - DNA, 20 bp, Artificial Sequence
  Description of Artificial Sequence: Synthetic oligonucleotide
  Target: LAMA2; (-) strand; PAM type: YTN; PAM sequence: CTT
tagcttaaattagtgtcagc

SEQ ID NO: 235980 - DNA, 20 bp, Artificial Sequence
  Description of Artificial Sequence: Synthetic oligonucleotide
  Target: LAMA2; (-) strand; PAM type: YTN; PAM sequence: CTC
aaaggaaggctttagcttaa

SEQ ID NO: 235981 - DNA, 20 bp, Artificial Sequence
  Description of Artificial Sequence: Synthetic oligonucleotide
  Target: LAMA2; (-) strand; PAM type: YTN; PAM sequence: TTC
ctcaaaggaaggctttagct

SEQ ID NO: 235982 - DNA, 20 bp, Artificial Sequence
  Description of Artificial Sequence: Synthetic oligonucleotide
  Target: LAMA2; (-) strand; PAM type: YTN; PAM sequence: TTC
attcctcaaaggaaggcttt

SEQ ID NO: 235983 - DNA, 20 bp, Artificial Sequence
  Description of Artificial Sequence: Synthetic oligonucleotide
  Target: LAMA2; (-) strand; PAM type: YTN; PAM sequence: TTT
cattcctcaaaggaaggctt

SEQ ID NO: 235984 - DNA, 20 bp, Artificial Sequence
  Description of Artificial Sequence: Synthetic oligonucleotide
  Target: LAMA2; (-) strand; PAM type: YTN; PAM sequence: TTC
atgaatttcattcctcaaag

SEQ ID NO: 235985 - DNA, 20 bp, Artificial Sequence
  Description of Artificial Sequence: Synthetic oligonucleotide
  Target: LAMA2; (-) strand; PAM type: YTN; PAM sequence: TTG
gagttcatgaatttcattcc

SEQ ID NO: 235986 - DNA, 20 bp, Artificial Sequence
  Description of Artificial Sequence: Synthetic oligonucleotide
  Target: LAMA2; (-) strand; PAM type: YTN; PAM sequence: TTT
ggagttcatgaatttcattc

SEQ ID NO: 235987 - DNA, 20 bp, Artificial Sequence
  Description of Artificial Sequence: Synthetic oligonucleotide
  Target: LAMA2; (-) strand; PAM type: YTN; PAM sequence: TTA
atgtttggagttcatgaatt

SEQ ID NO: 235988 - DNA, 20 bp, Artificial Sequence
  Description of Artificial Sequence: Synthetic oligonucleotide
  Target: LAMA2; (-) strand; PAM type: YTN; PAM sequence: CTT
aatgtttggagttcatgaat

SEQ ID NO: 235989 - DNA, 20 bp, Artificial Sequence
  Description of Artificial Sequence: Synthetic oligonucleotide
  Target: LAMA2; (-) strand; PAM type: YTN; PAM sequence: TTC
ttaatgtttggagttcatga

SEQ ID NO: 235990 - DNA, 20 bp, Artificial Sequence
  Description of Artificial Sequence: Synthetic oligonucleotide
  Target: LAMA2; (-) strand; PAM type: YTN; PAM sequence: TTT
cttaatgtttggagttcatg

SEQ ID NO: 235991 - DNA, 20 bp, Artificial Sequence
  Description of Artificial Sequence: Synthetic oligonucleotide
  Target: LAMA2; (-) strand; PAM type: YTN; PAM sequence: TTG
atttcttaatgtttggagtt

SEQ ID NO: 235992 - DNA, 20 bp, Artificial Sequence
  Description of Artificial Sequence: Synthetic oligonucleotide
  Target: LAMA2; (-) strand; PAM type: YTN; PAM sequence: TTT
gatttcttaatgtttggagt

SEQ ID NO: 235993 - DNA, 20 bp, Artificial Sequence
  Description of Artificial Sequence: Synthetic oligonucleotide
  Target: LAMA2; (-) strand; PAM type: YTN; PAM sequence: TTG
gcatttgatttcttaatgtt

SEQ ID NO: 235994 - DNA, 20 bp, Artificial Sequence
  Description of Artificial Sequence: Synthetic oligonucleotide
  Target: LAMA2; (-) strand; PAM type: YTN; PAM sequence: TTA
tgttggcatttgatttctta

SEQ ID NO: 235995 - DNA, 20 bp, Artificial Sequence
  Description of Artificial Sequence: Synthetic oligonucleotide
  Target: LAMA2; (-) strand; PAM type: YTN; PAM sequence: TTA
tatcaaggagttatgttggc

SEQ ID NO: 235996 - DNA, 20 bp, Artificial Sequence
  Description of Artificial Sequence: Synthetic oligonucleotide
  Target: LAMA2; (-) strand; PAM type: YTN; PAM sequence: TTT
atatcaaggagttatgttgg

SEQ ID NO: 235997 - DNA, 20 bp, Artificial Sequence
  Description of Artificial Sequence: Synthetic oligonucleotide
  Target: LAMA2; (-) strand; PAM type: YTN; PAM sequence: TTT
tatatcaaggagttatgttg

SEQ ID NO: 235998 - DNA, 20 bp, Artificial Sequence
  Description of Artificial Sequence: Synthetic oligonucleotide
  Target: LAMA2; (-) strand; PAM type: YTN; PAM sequence: CTT
ttatatcaaggagttatgtt

SEQ ID NO: 235999 - DNA, 20 bp, Artificial Sequence
  Description of Artificial Sequence: Synthetic oligonucleotide
  Target: LAMA2; (-) strand; PAM type: YTN; PAM sequence: CTC
ccaaacgcttttatatcaag

SEQ ID NO: 236000 - DNA, 20 bp, Artificial Sequence
  Description of Artificial Sequence: Synthetic oligonucleotide
  Target: LAMA2; (-) strand; PAM type: YTN; PAM sequence: CTG
gaagtagctcccaaacgctt

SEQ ID NO: 236001 - DNA, 20 bp, Artificial Sequence
  Description of Artificial Sequence: Synthetic oligonucleotide
  Target: LAMA2; (-) strand; PAM type: YTN; PAM sequence: CTG
ccctggaagtagctcccaaa

SEQ ID NO: 236002 - DNA, 20 bp, Artificial Sequence
  Description of Artificial Sequence: Synthetic oligonucleotide
  Target: LAMA2; (-) strand; PAM type: YTN; PAM sequence: TTG
gcgagcaactgccctggaag

SEQ ID NO: 236003 - DNA, 20 bp, Artificial Sequence
  Description of Artificial Sequence: Synthetic oligonucleotide
  Target: LAMA2; (-) strand; PAM type: YTN; PAM sequence: CTT
ggcgagcaactgccctggaa

SEQ ID NO: 236004 - DNA, 20 bp, Artificial Sequence
  Description of Artificial Sequence: Synthetic oligonucleotide
  Target: LAMA2; (-) strand; PAM type: YTN; PAM sequence: TTA
aacttggcgagcaactgccc

SEQ ID NO: 236005 - DNA, 20 bp, Artificial Sequence
  Description of Artificial Sequence: Synthetic oligonucleotide
  Target: LAMA2; (-) strand; PAM type: YTN; PAM sequence: CTT
aaacttggcgagcaactgcc

SEQ ID NO: 236006 - DNA, 20 bp, Artificial Sequence
  Description of Artificial Sequence: Synthetic oligonucleotide
  Target: LAMA2; (-) strand; PAM type: YTN; PAM sequence: CTA
cttaaacttggcgagcaact

SEQ ID NO: 236007 - DNA, 20 bp, Artificial Sequence
  Description of Artificial Sequence: Synthetic oligonucleotide
  Target: LAMA2; (-) strand; PAM type: YTN; PAM sequence: TTC
ctacttaaacttggcgagca

SEQ ID NO: 236008 - DNA, 20 bp, Artificial Sequence
  Description of Artificial Sequence: Synthetic oligonucleotide
  Target: LAMA2; (-) strand; PAM type: YTN; PAM sequence: TTT
cctacttaaacttggcgagc

SEQ ID NO: 236009 - DNA, 20 bp, Artificial Sequence
  Description of Artificial Sequence: Synthetic oligonucleotide
  Target: LAMA2; (-) strand; PAM type: YTN; PAM sequence: CTA
tgaatttcctacttaaactt

SEQ ID NO: 236010 - DNA, 20 bp, Artificial Sequence
  Description of Artificial Sequence: Synthetic oligonucleotide
  Target: LAMA2; (-) strand; PAM type: YTN; PAM sequence: TTC
tatgaatttcctacttaaac

SEQ ID NO: 236011 - DNA, 20 bp, Artificial Sequence
  Description of Artificial Sequence: Synthetic oligonucleotide
  Target: LAMA2; (-) strand; PAM type: YTN; PAM sequence: CTA
gagaagaagcgtcccagtgc

SEQ ID NO: 236012 - DNA, 20 bp, Artificial Sequence
  Description of Artificial Sequence: Synthetic oligonucleotide
  Target: LAMA2; (-) strand; PAM type: YTN; PAM sequence: TTC
tagagaagaagcgtcccagt

SEQ ID NO: 236013 - DNA, 20 bp, Artificial Sequence
  Description of Artificial Sequence: Synthetic oligonucleotide
  Target: LAMA2; (-) strand; PAM type: YTN; PAM sequence: TTT
ctagagaagaagcgtcccag

SEQ ID NO: 236014 - DNA, 20 bp, Artificial Sequence
  Description of Artificial Sequence: Synthetic oligonucleotide
  Target: LAMA2; (-) strand; PAM type: YTN; PAM sequence: CTT
tctagagaagaagcgtccca

SEQ ID NO: 236015 - DNA, 20 bp, Artificial Sequence
  Description of Artificial Sequence: Synthetic oligonucleotide
  Target: LAMA2; (-) strand; PAM type: YTN; PAM sequence: TTA
gtctttctagagaagaagcg

SEQ ID NO: 236016 - DNA, 20 bp, Artificial Sequence
  Description of Artificial Sequence: Synthetic oligonucleotide
  Target: LAMA2; (-) strand; PAM type: YTN; PAM sequence: TTT
agtctttctagagaagaagc

SEQ ID NO: 236017 - DNA, 20 bp, Artificial Sequence
  Description of Artificial Sequence: Synthetic oligonucleotide
  Target: LAMA2; (-) strand; PAM type: YTN; PAM sequence: TTT
tagtctttctagagaagaag

SEQ ID NO: 236018 - DNA, 20 bp, Artificial Sequence
  Description of Artificial Sequence: Synthetic oligonucleotide
  Target: LAMA2; (-) strand; PAM type: YTN; PAM sequence: TTA
attttagtctttctagagaa

SEQ ID NO: 236019 - DNA, 20 bp, Artificial Sequence
  Description of Artificial Sequence: Synthetic oligonucleotide
  Target: LAMA2; (-) strand; PAM type: YTN; PAM sequence: TTG
attaattttagtctttctag

SEQ ID NO: 236020 - DNA, 20 bp, Artificial Sequence
  Description of Artificial Sequence: Synthetic oligonucleotide
  Target: LAMA2; (-) strand; PAM type: YTN; PAM sequence: CTT
gattaattttagtctttcta

SEQ ID NO: 236021 - DNA, 20 bp, Artificial Sequence
  Description of Artificial Sequence: Synthetic oligonucleotide
  Target: LAMA2; (-) strand; PAM type: YTN; PAM sequence: TTG
tagccttgattaattttagt

SEQ ID NO: 236022 - DNA, 20 bp, Artificial Sequence
  Description of Artificial Sequence: Synthetic oligonucleotide
  Target: LAMA2; (-) strand; PAM type: YTN; PAM sequence: CTA
cattgtagccttgattaatt

SEQ ID NO: 236023 - DNA, 20 bp, Artificial Sequence
  Description of Artificial Sequence: Synthetic oligonucleotide
  Target: LAMA2; (-) strand; PAM type: YTN; PAM sequence: TTA
gggaaaaaaacactacattg

SEQ ID NO: 236024 - DNA, 20 bp, Artificial Sequence
  Description of Artificial Sequence: Synthetic oligonucleotide
  Target: LAMA2; (-) strand; PAM type: YTN; PAM sequence: CTA
aagtcattagggaaaaaaac

SEQ ID NO: 236025 - DNA, 20 bp, Artificial Sequence
  Description of Artificial Sequence: Synthetic oligonucleotide
  Target: LAMA2; (-) strand; PAM type: YTN; PAM sequence: TTA
acgctaaagtcattagggaa

SEQ ID NO: 236026 - DNA, 20 bp, Artificial Sequence
  Description of Artificial Sequence: Synthetic oligonucleotide
  Target: LAMA2; (-) strand; PAM type: YTN; PAM sequence: TTT
aacgctaaagtcattaggga

SEQ ID NO: 236027 - DNA, 20 bp, Artificial Sequence
  Description of Artificial Sequence: Synthetic oligonucleotide
  Target: LAMA2; (-) strand; PAM type: YTN; PAM sequence: TTT
taacgctaaagtcattaggg

SEQ ID NO: 236028 - DNA, 20 bp, Artificial Sequence
  Description of Artificial Sequence: Synthetic oligonucleotide
  Target: LAMA2; (-) strand; PAM type: YTN; PAM sequence: CTT
ttaacgctaaagtcattagg

SEQ ID NO: 236029 - DNA, 20 bp, Artificial Sequence
  Description of Artificial Sequence: Synthetic oligonucleotide
  Target: LAMA2; (-) strand; PAM type: YTN; PAM sequence: CTG
gtcttttaacgctaaagtca

SEQ ID NO: 236030 - DNA, 20 bp, Artificial Sequence
  Description of Artificial Sequence: Synthetic oligonucleotide
  Target: LAMA2; (-) strand; PAM type: YTN; PAM sequence: TTG
ctggtcttttaacgctaaag

SEQ ID NO: 236031 - DNA, 20 bp, Artificial Sequence
  Description of Artificial Sequence: Synthetic oligonucleotide
  Target: LAMA2; (-) strand; PAM type: YTN; PAM sequence: CTA
agaaacattgctggtctttt

SEQ ID NO: 236032 - DNA, 20 bp, Artificial Sequence
  Description of Artificial Sequence: Synthetic oligonucleotide
  Target: LAMA2; (-) strand; PAM type: YTN; PAM sequence: TTG
tacctaagaaacattgctgg

SEQ ID NO: 236033 - DNA, 20 bp, Artificial Sequence
  Description of Artificial Sequence: Synthetic oligonucleotide
  Target: LAMA2; (-) strand; PAM type: YTN; PAM sequence: TTA
taaagaaagcaggtaacaag

SEQ ID NO: 236034 - DNA, 20 bp, Artificial Sequence
  Description of Artificial Sequence: Synthetic oligonucleotide
  Target: LAMA2; (-) strand; PAM type: YTN; PAM sequence: TTT
ataaagaaagcaggtaacaa

SEQ ID NO: 236035 - DNA, 20 bp, Artificial Sequence
  Description of Artificial Sequence: Synthetic oligonucleotide
  Target: LAMA2; (-) strand; PAM type: YTN; PAM sequence: TTT
tataaagaaagcaggtaaca

SEQ ID NO: 236036 - DNA, 20 bp, Artificial Sequence
  Description of Artificial Sequence: Synthetic oligonucleotide
  Target: LAMA2; (-) strand; PAM type: YTN; PAM sequence: CTA
cagttttataaagaaagcag

SEQ ID NO: 236037 - DNA, 20 bp, Artificial Sequence
  Description of Artificial Sequence: Synthetic oligonucleotide
  Target: LAMA2; (-) strand; PAM type: YTN; PAM sequence: TTG
ataatcctacagttttataa

SEQ ID NO: 236038 - DNA, 20 bp, Artificial Sequence
  Description of Artificial Sequence: Synthetic oligonucleotide
  Target: LAMA2; (-) strand; PAM type: YTN; PAM sequence: CTC
agattgataatcctacagtt

SEQ ID NO: 236039 - DNA, 20 bp, Artificial Sequence
  Description of Artificial Sequence: Synthetic oligonucleotide
  Target: LAMA2; (-) strand; PAM type: YTN; PAM sequence: CTA
catgtaatgctcagattgat

SEQ ID NO: 236040 - DNA, 20 bp, Artificial Sequence
  Description of Artificial Sequence: Synthetic oligonucleotide
  Target: LAMA2; (-) strand; PAM type: YTN; PAM sequence: TTA
gtctacatgtaatgctcaga

SEQ ID NO: 236041 - DNA, 20 bp, Artificial Sequence
  Description of Artificial Sequence: Synthetic oligonucleotide
  Target: LAMA2; (-) strand; PAM type: YTN; PAM sequence: TTT
agtctacatgtaatgctcag

SEQ ID NO: 236042 - DNA, 20 bp, Artificial Sequence
  Description of Artificial Sequence: Synthetic oligonucleotide
  Target: LAMA2; (-) strand; PAM type: YTN; PAM sequence: TTC
aaaatttagtctacatgtaa

SEQ ID NO: 236043 - DNA, 20 bp, Artificial Sequence
  Description of Artificial Sequence: Synthetic oligonucleotide
  Target: LAMA2; (-) strand; PAM type: YTN; PAM sequence: TTT
caaaatttagtctacatgta

SEQ ID NO: 236044 - DNA, 20 bp, Artificial Sequence
  Description of Artificial Sequence: Synthetic oligonucleotide
  Target: LAMA2; (-) strand; PAM type: YTN; PAM sequence: TTA
atatttcaaaatttagtcta

SEQ ID NO: 236045 - DNA, 20 bp, Artificial Sequence
  Description of Artificial Sequence: Synthetic oligonucleotide
  Target: LAMA2; (-) strand; PAM type: YTN; PAM sequence: TTT
aatatttcaaaatttagtct

SEQ ID NO: 236046 - DNA, 20 bp, Artificial Sequence
  Description of Artificial Sequence: Synthetic oligonucleotide
  Target: LAMA2; (-) strand; PAM type: YTN; PAM sequence: TTT
taatatttcaaaatttagtc

SEQ ID NO: 236047 - DNA, 20 bp, Artificial Sequence
  Description of Artificial Sequence: Synthetic oligonucleotide
  Target: LAMA2; (-) strand; PAM type: YTN; PAM sequence: TTT
ttaatatttcaaaatttagt

SEQ ID NO: 236048 - DNA, 20 bp, Artificial Sequence
  Description of Artificial Sequence: Synthetic oligonucleotide
  Target: LAMA2; (-) strand; PAM type: YTN; PAM sequence: TTT
tttaatatttcaaaatttag

SEQ ID NO: 236049 - DNA, 20 bp, Artificial Sequence
  Description of Artificial Sequence: Synthetic oligonucleotide
  Target: LAMA2; (-) strand; PAM type: YTN; PAM sequence: CTA
tcaaaacgtatccgtttttt

SEQ ID NO: 236050 - DNA, 20 bp, Artificial Sequence
  Description of Artificial Sequence: Synthetic oligonucleotide
  Target: LAMA2; (-) strand; PAM type: YTN; PAM sequence: TTC
gactatcaaaacgtatccgt

SEQ ID NO: 236051 - DNA, 20 bp, Artificial Sequence
  Description of Artificial Sequence: Synthetic oligonucleotide
  Target: LAMA2; (-) strand; PAM type: YTN; PAM sequence: TTC
atcattcgactatcaaaacg

SEQ ID NO: 236052 - DNA, 20 bp, Artificial Sequence
  Description of Artificial Sequence: Synthetic oligonucleotide
  Target: LAMA2; (-) strand; PAM type: YTN; PAM sequence: CTC
agtaattcatcattcgacta

SEQ ID NO: 236053 - DNA, 20 bp, Artificial Sequence
  Description of Artificial Sequence: Synthetic oligonucleotide
  Target: LAMA2; (-) strand; PAM type: YTN; PAM sequence: TTA
aaacgaaaagtgagctcagt

SEQ ID NO: 236054 - DNA, 20 bp, Artificial Sequence
  Description of Artificial Sequence: Synthetic oligonucleotide
  Target: LAMA2; (-) strand; PAM type: YTN; PAM sequence: CTT
aaaacgaaaagtgagctcag

SEQ ID NO: 236055 - DNA, 20 bp, Artificial Sequence
  Description of Artificial Sequence: Synthetic oligonucleotide
  Target: LAMA2; (-) strand; PAM type: YTN; PAM sequence: TTG
taaacacaaagagaaaaggc

SEQ ID NO: 236056 - DNA, 20 bp, Artificial Sequence
  Description of Artificial Sequence: Synthetic oligonucleotide
  Target: LAMA2; (-) strand; PAM type: YTN; PAM sequence: CTT
gtaaacacaaagagaaaagg

SEQ ID NO: 236057 - DNA, 20 bp, Artificial Sequence
  Description of Artificial Sequence: Synthetic oligonucleotide
  Target: LAMA2; (-) strand; PAM type: YTN; PAM sequence: TTA
cttgtaaacacaaagagaaa

SEQ ID NO: 236058 - DNA, 20 bp, Artificial Sequence
  Description of Artificial Sequence: Synthetic oligonucleotide
  Target: LAMA2; (-) strand; PAM type: YTN; PAM sequence: TTT
acttgtaaacacaaagagaa

SEQ ID NO: 236059 - DNA, 20 bp, Artificial Sequence
  Description of Artificial Sequence: Synthetic oligonucleotide
  Target: LAMA2; (-) strand; PAM type: YTN; PAM sequence: TTG
tgatttacttgtaaacacaa

SEQ ID NO: 236060 - DNA, 20 bp, Artificial Sequence
  Description of Artificial Sequence: Synthetic oligonucleotide
  Target: LAMA2; (-) strand; PAM type: YTN; PAM sequence: TTA
atgaaaacaacattgtgatt

SEQ ID NO: 236061 - DNA, 20 bp, Artificial Sequence
  Description of Artificial Sequence: Synthetic oligonucleotide
  Target: LAMA2; (-) strand; PAM type: YTN; PAM sequence: TTA
aatgatattaatgaaaacaa

SEQ ID NO: 236062 - DNA, 20 bp, Artificial Sequence
  Description of Artificial Sequence: Synthetic oligonucleotide
  Target: LAMA2; (-) strand; PAM type: YTN; PAM sequence: CTC
aaaaaggggtagggaagagt

SEQ ID NO: 236063 - DNA, 20 bp, Artificial Sequence
  Description of Artificial Sequence: Synthetic oligonucleotide
  Target: LAMA2; (-) strand; PAM type: YTN; PAM sequence: TTA
ctcaaaaaggggtagggaag

SEQ ID NO: 236064 - DNA, 20 bp, Artificial Sequence
  Description of Artificial Sequence: Synthetic oligonucleotide
  Target: LAMA2; (-) strand; PAM type: YTN; PAM sequence: CTC
attactcaaaaaggggtagg

SEQ ID NO: 236065 - DNA, 20 bp, Artificial Sequence
  Description of Artificial Sequence: Synthetic oligonucleotide
  Target: LAMA2; (-) strand; PAM type: YTN; PAM sequence: CTG
tgatcatatactcattactc

SEQ ID NO: 236066 - DNA, 20 bp, Artificial Sequence
  Description of Artificial Sequence: Synthetic oligonucleotide
  Target: LAMA2; (-) strand; PAM type: YTN; PAM sequence: TTC
tgtgatcatatactcattac

SEQ ID NO: 236067 - DNA, 20 bp, Artificial Sequence
  Description of Artificial Sequence: Synthetic oligonucleotide
  Target: LAMA2; (-) strand; PAM type: YTN; PAM sequence: TTA
ttctgtgatcatatactcat

SEQ ID NO: 236068 - DNA, 20 bp, Artificial Sequence
  Description of Artificial Sequence: Synthetic oligonucleotide
  Target: LAMA2; (-) strand; PAM type: YTN; PAM sequence: TTT
attctgtgatcatatactca

SEQ ID NO: 236069 - DNA, 20 bp, Artificial Sequence
  Description of Artificial Sequence: Synthetic oligonucleotide
  Target: LAMA2; (-) strand; PAM type: YTN; PAM sequence: TTT
tattctgtgatcatatactc

SEQ ID NO: 236070 - DNA, 20 bp, Artificial Sequence
  Description of Artificial Sequence: Synthetic oligonucleotide
  Target: LAMA2; (-) strand; PAM type: YTN; PAM sequence: TTT
ttattctgtgatcatatact

SEQ ID NO: 236071 - DNA, 20 bp, Artificial Sequence
  Description of Artificial Sequence: Synthetic oligonucleotide
  Target: LAMA2; (-) strand; PAM type: YTN; PAM sequence: TTC
catttttattctgtgatcat

SEQ ID NO: 236072 - DNA, 20 bp, Artificial Sequence
  Description of Artificial Sequence: Synthetic oligonucleotide
  Target: LAMA2; (-) strand; PAM type: YTN; PAM sequence: TTT
ccatttttattctgtgatca

SEQ ID NO: 236073 - DNA, 20 bp, Artificial Sequence
  Description of Artificial Sequence: Synthetic oligonucleotide
  Target: LAMA2; (-) strand; PAM type: YTN; PAM sequence: TTT
tccatttttattctgtgatc

SEQ ID NO: 236074 - DNA, 20 bp, Artificial Sequence
  Description of Artificial Sequence: Synthetic oligonucleotide
  Target: LAMA2; (-) strand; PAM type: YTN; PAM sequence: CTT
ttccatttttattctgtgat

SEQ ID NO: 236075 - DNA, 20 bp, Artificial Sequence
  Description of Artificial Sequence: Synthetic oligonucleotide
  Target: LAMA2; (-) strand; PAM type: YTN; PAM sequence: CTA
cttttccatttttattctgt

SEQ ID NO: 236076 - DNA, 20 bp, Artificial Sequence
  Description of Artificial Sequence: Synthetic oligonucleotide
  Target: LAMA2; (-) strand; PAM type: YTN; PAM sequence: TTC
tacttttccatttttattct

SEQ ID NO: 236077 - DNA, 20 bp, Artificial Sequence
  Description of Artificial Sequence: Synthetic oligonucleotide
  Target: LAMA2; (-) strand; PAM type: YTN; PAM sequence: TTT
ctacttttccatttttattc

SEQ ID NO: 236078 - DNA, 20 bp, Artificial Sequence
  Description of Artificial Sequence: Synthetic oligonucleotide
  Target: LAMA2; (-) strand; PAM type: YTN; PAM sequence: TTT
tctacttttccatttttatt

SEQ ID NO: 236079 - DNA, 20 bp, Artificial Sequence
  Description of Artificial Sequence: Synthetic oligonucleotide
  Target: LAMA2; (-) strand; PAM type: YTN; PAM sequence: TTT
ttctacttttccatttttat

SEQ ID NO: 236080 - DNA, 20 bp, Artificial Sequence
  Description of Artificial Sequence: Synthetic oligonucleotide
  Target: LAMA2; (-) strand; PAM type: YTN; PAM sequence: TTA
tttttctacttttccatttt

SEQ ID NO: 236081 - DNA, 20 bp, Artificial Sequence
  Description of Artificial Sequence: Synthetic oligonucleotide
  Target: LAMA2; (-) strand; PAM type: YTN; PAM sequence: TTT
atttttctacttttccattt

SEQ ID NO: 236082 - DNA, 20 bp, Artificial Sequence
  Description of Artificial Sequence: Synthetic oligonucleotide
  Target: LAMA2; (-) strand; PAM type: YTN; PAM sequence: TTG
tatatttatttttctacttt

SEQ ID NO: 236083 - DNA, 20 bp, Artificial Sequence
  Description of Artificial Sequence: Synthetic oligonucleotide
  Target: LAMA2; (-) strand; PAM type: YTN; PAM sequence: CTG
aattgtatatttatttttct

SEQ ID NO: 236084 - DNA, 20 bp, Artificial Sequence
  Description of Artificial Sequence: Synthetic oligonucleotide
  Target: LAMA2; (-) strand; PAM type: YTN; PAM sequence: TTA
ccactgaattgtatatttat

SEQ ID NO: 236085 - DNA, 20 bp, Artificial Sequence
  Description of Artificial Sequence: Synthetic oligonucleotide
  Target: LAMA2; (-) strand; PAM type: YTN; PAM sequence: CTG
aattaccactgaattgtata

SEQ ID NO: 236086 - DNA, 20 bp, Artificial Sequence
  Description of Artificial Sequence: Synthetic oligonucleotide
  Target: LAMA2; (-) strand; PAM type: YTN; PAM sequence: CTC
ctgaattaccactgaattgt

SEQ ID NO: 236087 - DNA, 20 bp, Artificial Sequence
  Description of Artificial Sequence: Synthetic oligonucleotide
  Target: LAMA2; (-) strand; PAM type: YTN; PAM sequence: CTC
tcctgaattaccactgaatt

SEQ ID NO: 236088 - DNA, 20 bp, Artificial Sequence
  Description of Artificial Sequence: Synthetic oligonucleotide
  Target: LAMA2; (-) strand; PAM type: YTN; PAM sequence: TTA
atagtggtatctctcctgaa

SEQ ID NO: 236089 - DNA, 20 bp, Artificial Sequence
  Description of Artificial Sequence: Synthetic oligonucleotide
  Target: LAMA2; (-) strand; PAM type: YTN; PAM sequence: TTA
tgacagaaatatatgaaaat

SEQ ID NO: 236090 - DNA, 20 bp, Artificial Sequence
  Description of Artificial Sequence: Synthetic oligonucleotide
  Target: LAMA2; (-) strand; PAM type: YTN; PAM sequence: TTG
tatgcattatgacagaaata

SEQ ID NO: 236091 - DNA, 20 bp, Artificial Sequence
  Description of Artificial Sequence: Synthetic oligonucleotide
  Target: LAMA2; (-) strand; PAM type: YTN; PAM sequence: TTT
gtatgcattatgacagaaat

SEQ ID NO: 236092 - DNA, 20 bp, Artificial Sequence
  Description of Artificial Sequence: Synthetic oligonucleotide
  Target: LAMA2; (-) strand; PAM type: YTN; PAM sequence: TTT
tgtatgcattatgacagaaa

SEQ ID NO: 236093 - DNA, 20 bp, Artificial Sequence
  Description of Artificial Sequence: Synthetic oligonucleotide
  Target: LAMA2; (-) strand; PAM type: YTN; PAM sequence: TTT
ttgtatgcattatgacagaa

SEQ ID NO: 236094 - DNA, 20 bp, Artificial Sequence
  Description of Artificial Sequence: Synthetic oligonucleotide
  Target: LAMA2; (-) strand; PAM type: YTN; PAM sequence: TTA
agaggagcaatatcagaaat

SEQ ID NO: 236095 - DNA, 20 bp, Artificial Sequence
  Description of Artificial Sequence: Synthetic oligonucleotide
  Target: LAMA2; (-) strand; PAM type: YTN; PAM sequence: CTC
atcacataaagttaagagga

SEQ ID NO: 236096 - DNA, 20 bp, Artificial Sequence
  Description of Artificial Sequence: Synthetic oligonucleotide
  Target: LAMA2; (-) strand; PAM type: YTN; PAM sequence: TTG
gggaaactcatcacataaag

SEQ ID NO: 236097 - DNA, 20 bp, Artificial Sequence
  Description of Artificial Sequence: Synthetic oligonucleotide
  Target: LAMA2; (-) strand; PAM type: YTN; PAM sequence: TTT
ggggaaactcatcacataaa

SEQ ID NO: 236098 - DNA, 20 bp, Artificial Sequence
  Description of Artificial Sequence: Synthetic oligonucleotide
  Target: LAMA2; (-) strand; PAM type: YTN; PAM sequence: TTT
tggggaaactcatcacataa

SEQ ID NO: 236099 - DNA, 20 bp, Artificial Sequence
  Description of Artificial Sequence: Synthetic oligonucleotide
  Target: LAMA2; (-) strand; PAM type: YTN; PAM sequence: TTT
ttggggaaactcatcacata

SEQ ID NO: 236100 - DNA, 20 bp, Artificial Sequence
  Description of Artificial Sequence: Synthetic oligonucleotide
  Target: LAMA2; (-) strand; PAM type: YTN; PAM sequence: TTC
atagatttttggggaaactc

SEQ ID NO: 236101 - DNA, 20 bp, Artificial Sequence
  Description of Artificial Sequence: Synthetic oligonucleotide
  Target: LAMA2; (-) strand; PAM type: YTN; PAM sequence: TTT
catagatttttggggaaact

SEQ ID NO: 236102 - DNA, 20 bp, Artificial Sequence
  Description of Artificial Sequence: Synthetic oligonucleotide
  Target: LAMA2; (-) strand; PAM type: YTN; PAM sequence: TTT
tcatagatttttggggaaac

SEQ ID NO: 236103 - DNA, 20 bp, Artificial Sequence
  Description of Artificial Sequence: Synthetic oligonucleotide
  Target: LAMA2; (-) strand; PAM type: YTN; PAM sequence: TTC
agagaaagttttcatagatt

SEQ ID NO: 236104 - DNA, 20 bp, Artificial Sequence
  Description of Artificial Sequence: Synthetic oligonucleotide
  Target: LAMA2; (-) strand; PAM type: YTN; PAM sequence: CTT
cagagaaagttttcatagat

SEQ ID NO: 236105 - DNA, 20 bp, Artificial Sequence
  Description of Artificial Sequence: Synthetic oligonucleotide
  Target: LAMA2; (-) strand; PAM type: YTN; PAM sequence: CTG
aagccagacttcagagaaag

SEQ ID NO: 236106 - DNA, 20 bp, Artificial Sequence
  Description of Artificial Sequence: Synthetic oligonucleotide
  Target: LAMA2; (-) strand; PAM type: YTN; PAM sequence: TTA
ggtgctgaagccagacttca

SEQ ID NO: 236107 - DNA, 20 bp, Artificial Sequence
  Description of Artificial Sequence: Synthetic oligonucleotide
  Target: LAMA2; (-) strand; PAM type: YTN; PAM sequence: TTT
aggtgctgaagccagacttc

SEQ ID NO: 236108 - DNA, 20 bp, Artificial Sequence
  Description of Artificial Sequence: Synthetic oligonucleotide
  Target: LAMA2; (-) strand; PAM type: YTN; PAM sequence: TTA
tttaggtgctgaagccagac

SEQ ID NO: 236109 - DNA, 20 bp, Artificial Sequence
  Description of Artificial Sequence: Synthetic oligonucleotide
  Target: LAMA2; (-) strand; PAM type: YTN; PAM sequence: TTA
tggcacgaccatataataat

SEQ ID NO: 236110 - DNA, 20 bp, Artificial Sequence
  Description of Artificial Sequence: Synthetic oligonucleotide
  Target: LAMA2; (-) strand; PAM type: YTN; PAM sequence: TTG
agagggtaaataattatggc

SEQ ID NO: 236111 - DNA, 20 bp, Artificial Sequence
  Description of Artificial Sequence: Synthetic oligonucleotide
  Target: LAMA2; (-) strand; PAM type: YTN; PAM sequence: TTA
atgtccatataaagttgaga

SEQ ID NO: 236112 - DNA, 20 bp, Artificial Sequence
  Description of Artificial Sequence: Synthetic oligonucleotide
  Target: LAMA2; (-) strand; PAM type: YTN; PAM sequence: CTT
aatgtccatataaagttgag

SEQ ID NO: 236113 - DNA, 20 bp, Artificial Sequence
  Description of Artificial Sequence: Synthetic oligonucleotide
  Target: LAMA2; (-) strand; PAM type: YTN; PAM sequence: TTG
aaacaatcttaatgtccata

SEQ ID NO: 236114 - DNA, 20 bp, Artificial Sequence
  Description of Artificial Sequence: Synthetic oligonucleotide
  Target: LAMA2; (-) strand; PAM type: YTN; PAM sequence: TTT
gaaacaatcttaatgtccat

SEQ ID NO: 236115 - DNA, 20 bp, Artificial Sequence
  Description of Artificial Sequence: Synthetic oligonucleotide
  Target: LAMA2; (-) strand; PAM type: YTN; PAM sequence: TTA
aaataaacaaaaatttgaaa

SEQ ID NO: 236116 - DNA, 20 bp, Artificial Sequence
  Description of Artificial Sequence: Synthetic oligonucleotide
  Target: LAMA2; (-) strand; PAM type: YTN; PAM sequence: TTG
gttaaaataaacaaaaattt

SEQ ID NO: 236117 - DNA, 20 bp, Artificial Sequence
  Description of Artificial Sequence: Synthetic oligonucleotide
  Target: LAMA2; (-) strand; PAM type: YTN; PAM sequence: TTA
aaggattggttaaaataaac

SEQ ID NO: 236118 - DNA, 20 bp, Artificial Sequence
  Description of Artificial Sequence: Synthetic oligonucleotide
  Target: LAMA2; (-) strand; PAM type: YTN; PAM sequence: TTA
ttaaaggattggttaaaata

SEQ ID NO: 236119 - DNA, 20 bp, Artificial Sequence
  Description of Artificial Sequence: Synthetic oligonucleotide
  Target: LAMA2; (-) strand; PAM type: YTN; PAM sequence: TTA
tatggaataagtattattaa

SEQ ID NO: 236120 - DNA, 20 bp, Artificial Sequence
  Description of Artificial Sequence: Synthetic oligonucleotide
  Target: LAMA2; (-) strand; PAM type: YTN; PAM sequence: TTG
aaaagtaattatatggaata

SEQ ID NO: 236121 - DNA, 20 bp, Artificial Sequence
  Description of Artificial Sequence: Synthetic oligonucleotide
  Target: LAMA2; (-) strand; PAM type: YTN; PAM sequence: TTA
caataattgaaaagtaatta

SEQ ID NO: 236122 - DNA, 20 bp, Artificial Sequence
  Description of Artificial Sequence: Synthetic oligonucleotide
  Target: LAMA2; (-) strand; PAM type: YTN; PAM sequence: TTT
acaataattgaaaagtaatt

SEQ ID NO: 236123 - DNA, 20 bp, Artificial Sequence
  Description of Artificial Sequence: Synthetic oligonucleotide
  Target: LAMA2; (-) strand; PAM type: YTN; PAM sequence: TTT
tacaataattgaaaagtaat

SEQ ID NO: 236124 - DNA, 20 bp, Artificial Sequence
  Description of Artificial Sequence: Synthetic oligonucleotide
  Target: LAMA2; (-) strand; PAM type: YTN; PAM sequence: TTT
ttacaataattgaaaagtaa

SEQ ID NO: 236125 - DNA, 20 bp, Artificial Sequence
  Description of Artificial Sequence: Synthetic oligonucleotide
  Target: LAMA2; (-) strand; PAM type: YTN; PAM sequence: TTG
tttttacaataattgaaaag

SEQ ID NO: 236126 - DNA, 20 bp, Artificial Sequence
  Description of Artificial Sequence: Synthetic oligonucleotide
  Target: LAMA2; (-) strand; PAM type: YTN; PAM sequence: CTA
tgtattgtttttacaataat

SEQ ID NO: 236127 - DNA, 20 bp, Artificial Sequence
  Description of Artificial Sequence: Synthetic oligonucleotide
  Target: LAMA2; (-) strand; PAM type: YTN; PAM sequence: TTA
ctatgtattgtttttacaat

SEQ ID NO: 236128 - DNA, 20 bp, Artificial Sequence
  Description of Artificial Sequence: Synthetic oligonucleotide
  Target: LAMA2; (-) strand; PAM type: YTN; PAM sequence: TTT
actatgtattgtttttacaa

SEQ ID NO: 236129 - DNA, 20 bp, Artificial Sequence
  Description of Artificial Sequence: Synthetic oligonucleotide
  Target: LAMA2; (-) strand; PAM type: YTN; PAM sequence: TTT
tactatgtattgtttttaca

SEQ ID NO: 236130 - DNA, 20 bp, Artificial Sequence
  Description of Artificial Sequence: Synthetic oligonucleotide
  Target: LAMA2; (-) strand; PAM type: YTN; PAM sequence: TTA
ttttactatgtattgttttt

SEQ ID NO: 236131 - DNA, 20 bp, Artificial Sequence
  Description of Artificial Sequence: Synthetic oligonucleotide
  Target: LAMA2; (-) strand; PAM type: YTN; PAM sequence: TTT
attttactatgtattgtttt

SEQ ID NO: 236132 - DNA, 20 bp, Artificial Sequence
  Description of Artificial Sequence: Synthetic oligonucleotide
  Target: LAMA2; (-) strand; PAM type: YTN; PAM sequence: TTA
agaatttattttactatgta

SEQ ID NO: 236133 - DNA, 20 bp, Artificial Sequence
  Description of Artificial Sequence: Synthetic oligonucleotide
  Target: LAMA2; (-) strand; PAM type: YTN; PAM sequence: CTA
ttaagaatttattttactat

SEQ ID NO: 236134 - DNA, 20 bp, Artificial Sequence
  Description of Artificial Sequence: Synthetic oligonucleotide
  Target: LAMA2; (-) strand; PAM type: YTN; PAM sequence: TTA
ctattaagaatttattttac

SEQ ID NO: 236135 - DNA, 20 bp, Artificial Sequence
  Description of Artificial Sequence: Synthetic oligonucleotide
  Target: LAMA2; (-) strand; PAM type: YTN; PAM sequence: TTT
actattaagaatttatttta

SEQ ID NO: 236136 - DNA, 20 bp, Artificial Sequence
  Description of Artificial Sequence: Synthetic oligonucleotide
  Target: LAMA2; (-) strand; PAM type: YTN; PAM sequence: CTT
tactattaagaatttatttt

SEQ ID NO: 236137 - DNA, 20 bp, Artificial Sequence
  Description of Artificial Sequence: Synthetic oligonucleotide
  Target: LAMA2; (-) strand; PAM type: YTN; PAM sequence: TTC
tttactattaagaatttatt

SEQ ID NO: 236138 - DNA, 20 bp, Artificial Sequence
  Description of Artificial Sequence: Synthetic oligonucleotide
  Target: LAMA2; (-) strand; PAM type: YTN; PAM sequence: TTT
ctttactattaagaatttat

SEQ ID NO: 236139 - DNA, 20 bp, Artificial Sequence
  Description of Artificial Sequence: Synthetic oligonucleotide
  Target: LAMA2; (-) strand; PAM type: YTN; PAM sequence: TTA
tttctttactattaagaatt

SEQ ID NO: 236140 - DNA, 20 bp, Artificial Sequence
  Description of Artificial Sequence: Synthetic oligonucleotide
  Target: LAMA2; (-) strand; PAM type: YTN; PAM sequence: TTT
atttctttactattaagaat

SEQ ID NO: 236141 - DNA, 20 bp, Artificial Sequence
  Description of Artificial Sequence: Synthetic oligonucleotide
  Target: LAMA2; (-) strand; PAM type: YTN; PAM sequence: TTT
tatttctttactattaagaa

SEQ ID NO: 236142 - DNA, 20 bp, Artificial Sequence
  Description of Artificial Sequence: Synthetic oligonucleotide
  Target: LAMA2; (-) strand; PAM type: YTN; PAM sequence: TTA
ttttatttctttactattaa

SEQ ID NO: 236143 - DNA, 20 bp, Artificial Sequence
  Description of Artificial Sequence: Synthetic oligonucleotide
  Target: LAMA2; (-) strand; PAM type: YTN; PAM sequence: TTA
ttattttatttctttactat

SEQ ID NO: 236144 - DNA, 20 bp, Artificial Sequence
  Description of Artificial Sequence: Synthetic oligonucleotide
  Target: LAMA2; (-) strand; PAM type: YTN; PAM sequence: CTT
attattttatttctttacta

SEQ ID NO: 236145 - DNA, 20 bp, Artificial Sequence
  Description of Artificial Sequence: Synthetic oligonucleotide
  Target: LAMA2; (-) strand; PAM type: YTN; PAM sequence: TTG
aagaggacacttattatttt

SEQ ID NO: 236146 - DNA, 20 bp, Artificial Sequence
  Description of Artificial Sequence: Synthetic oligonucleotide
  Target: LAMA2; (-) strand; PAM type: YTN; PAM sequence: CTG
ggataaataggttgaagagg

SEQ ID NO: 236147 - DNA, 20 bp, Artificial Sequence
  Description of Artificial Sequence: Synthetic oligonucleotide
  Target: LAMA2; (-) strand; PAM type: YTN; PAM sequence: TTG
gaagtaagactgggataaat

SEQ ID NO: 236148 - DNA, 20 bp, Artificial Sequence
  Description of Artificial Sequence: Synthetic oligonucleotide
  Target: LAMA2; (-) strand; PAM type: YTN; PAM sequence: TTT
ggaagtaagactgggataaa

SEQ ID NO: 236149 - DNA, 20 bp, Artificial Sequence
  Description of Artificial Sequence: Synthetic oligonucleotide
  Target: LAMA2; (-) strand; PAM type: YTN; PAM sequence: TTA
aatttggaagtaagactggg

SEQ ID NO: 236150 - DNA, 20 bp, Artificial Sequence
  Description of Artificial Sequence: Synthetic oligonucleotide
  Target: LAMA2; (-) strand; PAM type: YTN; PAM sequence: TTT
aaatttggaagtaagactgg

SEQ ID NO: 236151 - DNA, 20 bp, Artificial Sequence
  Description of Artificial Sequence: Synthetic oligonucleotide
  Target: LAMA2; (-) strand; PAM type: YTN; PAM sequence: TTT
taaatttggaagtaagactg

SEQ ID NO: 236152 - DNA, 20 bp, Artificial Sequence
  Description of Artificial Sequence: Synthetic oligonucleotide
  Target: LAMA2; (-) strand; PAM type: YTN; PAM sequence: TTT
ttaaatttggaagtaagact

SEQ ID NO: 236153 - DNA, 20 bp, Artificial Sequence
  Description of Artificial Sequence: Synthetic oligonucleotide
  Target: LAMA2; (-) strand; PAM type: YTN; PAM sequence: CTC
aatatttttaaatttggaag

SEQ ID NO: 236154 - DNA, 20 bp, Artificial Sequence
  Description of Artificial Sequence: Synthetic oligonucleotide
  Target: LAMA2; (-) strand; PAM type: YTN; PAM sequence: CTG
aatcggaaaaaaggctcaat

SEQ ID NO: 236155 - DNA, 20 bp, Artificial Sequence
  Description of Artificial Sequence: Synthetic oligonucleotide
  Target: LAMA2; (-) strand; PAM type: YTN; PAM sequence: TTA
aaaaaaataaaaactgaatc

SEQ ID NO: 236156 - DNA, 20 bp, Artificial Sequence
  Description of Artificial Sequence: Synthetic oligonucleotide
  Target: LAMA2; (-) strand; PAM type: YTN; PAM sequence: TTA
aagtataattaaaaaaaata

SEQ ID NO: 236157 - DNA, 20 bp, Artificial Sequence
  Description of Artificial Sequence: Synthetic oligonucleotide
  Target: LAMA2; (-) strand; PAM type: YTN; PAM sequence: CTT
aaagtataattaaaaaaaat

SEQ ID NO: 236158 - DNA, 20 bp, Artificial Sequence
  Description of Artificial Sequence: Synthetic oligonucleotide
  Target: LAMA2; (-) strand; PAM type: YTN; PAM sequence: CTA
aaacttaaagtataattaaa

SEQ ID NO: 236159 - DNA, 20 bp, Artificial Sequence
  Description of Artificial Sequence: Synthetic oligonucleotide
  Target: LAMA2; (-) strand; PAM type: YTN; PAM sequence: TTG
tgcacatgtaccctaaaact

SEQ ID NO: 236160 - DNA, 20 bp, Artificial Sequence
  Description of Artificial Sequence: Synthetic oligonucleotide
  Target: LAMA2; (-) strand; PAM type: YTN; PAM sequence: CTG
cacattgtgcacatgtaccc

SEQ ID NO: 236161 - DNA, 20 bp, Artificial Sequence
  Description of Artificial Sequence: Synthetic oligonucleotide
  Target: LAMA2; (-) strand; PAM type: YTN; PAM sequence: CTA
acctgcacattgtgcacatg

SEQ ID NO: 236162 - DNA, 20 bp, Artificial Sequence
  Description of Artificial Sequence: Synthetic oligonucleotide
  Target: LAMA2; (-) strand; PAM type: YTN; PAM sequence: TTA
gtgggtgcagtgcaccagca

SEQ ID NO: 236163 - DNA, 20 bp, Artificial Sequence
  Description of Artificial Sequence: Synthetic oligonucleotide
  Target: LAMA2; (-) strand; PAM type: YTN; PAM sequence: CTA
gatgacgagttagtgggtgc

SEQ ID NO: 236164 - DNA, 20 bp, Artificial Sequence
  Description of Artificial Sequence: Synthetic oligonucleotide
  Target: LAMA2; (-) strand; PAM type: YTN; PAM sequence: CTA
atgctagatgacgagttagt

SEQ ID NO: 236165 - DNA, 20 bp, Artificial Sequence
  Description of Artificial Sequence: Synthetic oligonucleotide
  Target: LAMA2; (-) strand; PAM type: YTN; PAM sequence: TTG
ggagatatacctaatgctag

SEQ ID NO: 236166 - DNA, 20 bp, Artificial Sequence
  Description of Artificial Sequence: Synthetic oligonucleotide
  Target: LAMA2; (-) strand; PAM type: YTN; PAM sequence: TTG
tggggtggggggagggggga

SEQ ID NO: 236167 - DNA, 20 bp, Artificial Sequence
  Description of Artificial Sequence: Synthetic oligonucleotide
  Target: LAMA2; (-) strand; PAM type: YTN; PAM sequence: CTG
ttgtggggtggggggagggg

SEQ ID NO: 236168 - DNA, 20 bp, Artificial Sequence
  Description of Artificial Sequence: Synthetic oligonucleotide
  Target: LAMA2; (-) strand; PAM type: YTN; PAM sequence: CTG
gggactgttgtggggtgggg

SEQ ID NO: 236169 - DNA, 20 bp, Artificial Sequence
  Description of Artificial Sequence: Synthetic oligonucleotide
  Target: LAMA2; (-) strand; PAM type: YTN; PAM sequence: CTC
tggggactgttgtggggtgg

SEQ ID NO: 236170 - DNA, 20 bp, Artificial Sequence
  Description of Artificial Sequence: Synthetic oligonucleotide
  Target: LAMA2; (-) strand; PAM type: YTN; PAM sequence: CTA
tcacatggacacaggaaggg

SEQ ID NO: 236171 - DNA, 20 bp, Artificial Sequence
  Description of Artificial Sequence: Synthetic oligonucleotide
  Target: LAMA2; (-) strand; PAM type: YTN; PAM sequence: TTG
aacaatgctatcacatggac

SEQ ID NO: 236172 - DNA, 20 bp, Artificial Sequence
  Description of Artificial Sequence: Synthetic oligonucleotide
  Target: LAMA2; (-) strand; PAM type: YTN; PAM sequence: CTC
ataggtgggaattgaacaat

SEQ ID NO: 236173 - DNA, 20 bp, Artificial Sequence
  Description of Artificial Sequence: Synthetic oligonucleotide
  Target: LAMA2; (-) strand; PAM type: YTN; PAM sequence: CTC
actcataggtgggaattgaa

SEQ ID NO: 236174 - DNA, 20 bp, Artificial Sequence
  Description of Artificial Sequence: Synthetic oligonucleotide
  Target: LAMA2; (-) strand; PAM type: YTN; PAM sequence: TTC
tcactcataggtgggaattg

SEQ ID NO: 236175 - DNA, 20 bp, Artificial Sequence
  Description of Artificial Sequence: Synthetic oligonucleotide
  Target: LAMA2; (-) strand; PAM type: YTN; PAM sequence: TTG
caagaacaaaaaaccaaaca

SEQ ID NO: 236176 - DNA, 20 bp, Artificial Sequence
  Description of Artificial Sequence: Synthetic oligonucleotide
  Target: LAMA2; (-) strand; PAM type: YTN; PAM sequence: CTC
agtaaacgattgcaagaaca

SEQ ID NO: 236177 - DNA, 20 bp, Artificial Sequence
  Description of Artificial Sequence: Synthetic oligonucleotide
  Target: LAMA2; (-) strand; PAM type: YTN; PAM sequence: TTC
tcagtaaacgattgcaagaa

SEQ ID NO: 236178 - DNA, 20 bp, Artificial Sequence
  Description of Artificial Sequence: Synthetic oligonucleotide
  Target: LAMA2; (-) strand; PAM type: YTN; PAM sequence: TTG
gaaaacatcattctcagtaa

SEQ ID NO: 236179 - DNA, 20 bp, Artificial Sequence
  Description of Artificial Sequence: Synthetic oligonucleotide
  Target: LAMA2; (-) strand; PAM type: YTN; PAM sequence: TTG
tagggacatggatgaaattg

SEQ ID NO: 236180 - DNA, 20 bp, Artificial Sequence
  Description of Artificial Sequence: Synthetic oligonucleotide
  Target: LAMA2; (-) strand; PAM type: YTN; PAM sequence: TTT
gtagggacatggatgaaatt

SEQ ID NO: 236181 - DNA, 20 bp, Artificial Sequence
  Description of Artificial Sequence: Synthetic oligonucleotide
  Target: LAMA2; (-) strand; PAM type: YTN; PAM sequence: CTT
tgtagggacatggatgaaat

SEQ ID NO: 236182 - DNA, 20 bp, Artificial Sequence
  Description of Artificial Sequence: Synthetic oligonucleotide
  Target: LAMA2; (-) strand; PAM type: YTN; PAM sequence: TTC
atgtcctttgtagggacatg

SEQ ID NO: 236183 - DNA, 20 bp, Artificial Sequence
  Description of Artificial Sequence: Synthetic oligonucleotide
  Target: LAMA2; (-) strand; PAM type: YTN; PAM sequence: CTA
tgcagccataaaaaatgatg

SEQ ID NO: 236184 - DNA, 20 bp, Artificial Sequence
  Description of Artificial Sequence: Synthetic oligonucleotide
  Target: LAMA2; (-) strand; PAM type: YTN; PAM sequence: TTA
tacaccatggaatactatgc

SEQ ID NO: 236185 - DNA, 20 bp, Artificial Sequence
  Description of Artificial Sequence: Synthetic oligonucleotide
  Target: LAMA2; (-) strand; PAM type: YTN; PAM sequence: CTT
atacaccatggaatactatg

SEQ ID NO: 236186 - DNA, 20 bp, Artificial Sequence
  Description of Artificial Sequence: Synthetic oligonucleotide
  Target: LAMA2; (-) strand; PAM type: YTN; PAM sequence: TTA
agaaaatgtggcacttatac

SEQ ID NO: 236187 - DNA, 20 bp, Artificial Sequence
  Description of Artificial Sequence: Synthetic oligonucleotide
  Target: LAMA2; (-) strand; PAM type: YTN; PAM sequence: CTG
gattaagaaaatgtggcact

SEQ ID NO: 236188 - DNA, 20 bp, Artificial Sequence
  Description of Artificial Sequence: Synthetic oligonucleotide
  Target: LAMA2; (-) strand; PAM type: YTN; PAM sequence: TTG
gaaccaacccaaatgtccaa

SEQ ID NO: 236189 - DNA, 20 bp, Artificial Sequence
  Description of Artificial Sequence: Synthetic oligonucleotide
  Target: LAMA2; (-) strand; PAM type: YTN; PAM sequence: CTT
ggaaccaacccaaatgtcca

SEQ ID NO: 236190 - DNA, 20 bp, Artificial Sequence
  Description of Artificial Sequence: Synthetic oligonucleotide
  Target: LAMA2; (-) strand; PAM type: YTN; PAM sequence: TTA
tccacaatagcaaagacttg

SEQ ID NO: 236191 - DNA, 20 bp, Artificial Sequence
  Description of Artificial Sequence: Synthetic oligonucleotide
  Target: LAMA2; (-) strand; PAM type: YTN; PAM sequence: TTG
cggcattatccacaatagca

SEQ ID NO: 236192 - DNA, 20 bp, Artificial Sequence
  Description of Artificial Sequence: Synthetic oligonucleotide
  Target: LAMA2; (-) strand; PAM type: YTN; PAM sequence: TTA
ttgcggcattatccacaata

SEQ ID NO: 236193 - DNA, 20 bp, Artificial Sequence
  Description of Artificial Sequence: Synthetic oligonucleotide
  Target: LAMA2; (-) strand; PAM type: YTN; PAM sequence: TTT
attgcggcattatccacaat

SEQ ID NO: 236194 - DNA, 20 bp, Artificial Sequence
  Description of Artificial Sequence: Synthetic oligonucleotide
  Target: LAMA2; (-) strand; PAM type: YTN; PAM sequence: CTA
tgaagacacatgcacacgta

SEQ ID NO: 236195 - DNA, 20 bp, Artificial Sequence
  Description of Artificial Sequence: Synthetic oligonucleotide
  Target: LAMA2; (-) strand; PAM type: YTN; PAM sequence: CTG
ctatgaagacacatgcacac

SEQ ID NO: 236196 - DNA, 20 bp, Artificial Sequence
  Description of Artificial Sequence: Synthetic oligonucleotide
  Target: LAMA2; (-) strand; PAM type: YTN; PAM sequence: CTG
taaatcatgctgctatgaag

SEQ ID NO: 236197 - DNA, 20 bp, Artificial Sequence
  Description of Artificial Sequence: Synthetic oligonucleotide
  Target: LAMA2; (-) strand; PAM type: YTN; PAM sequence: CTG
ggtatatacccaaaggactg

SEQ ID NO: 236198 - DNA, 20 bp, Artificial Sequence
  Description of Artificial Sequence: Synthetic oligonucleotide
  Target: LAMA2; (-) strand; PAM type: YTN; PAM sequence: TTA
ctgggtatatacccaaagga

SEQ ID NO: 236199 - DNA, 20 bp, Artificial Sequence
  Description of Artificial Sequence: Synthetic oligonucleotide
  Target: LAMA2; (-) strand; PAM type: YTN; PAM sequence: TTG
acccagccatcccattactg

SEQ ID NO: 236200 - DNA, 20 bp, Artificial Sequence
  Description of Artificial Sequence: Synthetic oligonucleotide
  Target: LAMA2; (-) strand; PAM type: YTN; PAM sequence: TTT
gacccagccatcccattact

SEQ ID NO: 236201 - DNA, 20 bp, Artificial Sequence
  Description of Artificial Sequence: Synthetic oligonucleotide
  Target: LAMA2; (-) strand; PAM type: YTN; PAM sequence: CTT
tgacccagccatcccattac

SEQ ID NO: 236202 - DNA, 20 bp, Artificial Sequence
  Description of Artificial Sequence: Synthetic oligonucleotide
  Target: LAMA2; (-) strand; PAM type: YTN; PAM sequence: CTG
gaaataccctttgacccagc

SEQ ID NO: 236203 - DNA, 20 bp, Artificial Sequence
  Description of Artificial Sequence: Synthetic oligonucleotide
  Target: LAMA2; (-) strand; PAM type: YTN; PAM sequence: CTA
gaactggaaataccctttga

SEQ ID NO: 236204 - DNA, 20 bp, Artificial Sequence
  Description of Artificial Sequence: Synthetic oligonucleotide
  Target: LAMA2; (-) strand; PAM type: YTN; PAM sequence: CTC
agggatctagaactggaaat

SEQ ID NO: 236205 - DNA, 20 bp, Artificial Sequence
  Description of Artificial Sequence: Synthetic oligonucleotide
  Target: LAMA2; (-) strand; PAM type: YTN; PAM sequence: TTC
ctcagggatctagaactgga

SEQ ID NO: 236206 - DNA, 20 bp, Artificial Sequence
  Description of Artificial Sequence: Synthetic oligonucleotide
  Target: LAMA2; (-) strand; PAM type: YTN; PAM sequence: TTG
tggaagtcagtgtggccatt

SEQ ID NO: 236207 - DNA, 20 bp, Artificial Sequence
  Description of Artificial Sequence: Synthetic oligonucleotide
  Target: LAMA2; (-) strand; PAM type: YTN; PAM sequence: TTC
aaccattgtggaagtcagtg

SEQ ID NO: 236208 - DNA, 20 bp, Artificial Sequence
  Description of Artificial Sequence: Synthetic oligonucleotide
  Target: LAMA2; (-) strand; PAM type: YTN; PAM sequence: CTA
gttcaaccattgtggaagtc

SEQ ID NO: 236209 - DNA, 20 bp, Artificial Sequence
  Description of Artificial Sequence: Synthetic oligonucleotide
  Target: LAMA2; (-) strand; PAM type: YTN; PAM sequence: CTG
taaactagttcaaccattgt

SEQ ID NO: 236210 - DNA, 20 bp, Artificial Sequence
  Description of Artificial Sequence: Synthetic oligonucleotide
  Target: LAMA2; (-) strand; PAM type: YTN; PAM sequence: TTG
gtgggactgtaaactagttc

SEQ ID NO: 236211 - DNA, 20 bp, Artificial Sequence
  Description of Artificial Sequence: Synthetic oligonucleotide
  Target: LAMA2; (-) strand; PAM type: YTN; PAM sequence: CTG
ttggtgggactgtaaactag

SEQ ID NO: 236212 - DNA, 20 bp, Artificial Sequence
  Description of Artificial Sequence: Synthetic oligonucleotide
  Target: LAMA2; (-) strand; PAM type: YTN; PAM sequence: TTA
cacactgttggtgggactgt

SEQ ID NO: 236213 - DNA, 20 bp, Artificial Sequence
  Description of Artificial Sequence: Synthetic oligonucleotide
  Target: LAMA2; (-) strand; PAM type: YTN; PAM sequence: TTT
acacactgttggtgggactg

SEQ ID NO: 236214 - DNA, 20 bp, Artificial Sequence
  Description of Artificial Sequence: Synthetic oligonucleotide
  Target: LAMA2; (-) strand; PAM type: YTN; PAM sequence: TTT
tacacactgttggtgggact

SEQ ID NO: 236215 - DNA, 20 bp, Artificial Sequence
  Description of Artificial Sequence: Synthetic oligonucleotide
  Target: LAMA2; (-) strand; PAM type: YTN; PAM sequence: CTT
ttacacactgttggtgggac

SEQ ID NO: 236216 - DNA, 20 bp, Artificial Sequence
  Description of Artificial Sequence: Synthetic oligonucleotide
  Target: LAMA2; (-) strand; PAM type: YTN; PAM sequence: CTG
gagaggatgtggagaaatag

SEQ ID NO: 236217 - DNA, 20 bp, Artificial Sequence
  Description of Artificial Sequence: Synthetic oligonucleotide
  Target: LAMA2; (-) strand; PAM type: YTN; PAM sequence: TTA
aaaagtcaggaaacaacagg

SEQ ID NO: 236218 - DNA, 20 bp, Artificial Sequence
  Description of Artificial Sequence: Synthetic oligonucleotide
  Target: LAMA2; (-) strand; PAM type: YTN; PAM sequence: TTA
gaatggcaatcattaaaaag

SEQ ID NO: 236219 - DNA, 20 bp, Artificial Sequence
  Description of Artificial Sequence: Synthetic oligonucleotide
  Target: LAMA2; (-) strand; PAM type: YTN; PAM sequence: CTC
acaccagttagaatggcaat

SEQ ID NO: 236220 - DNA, 20 bp, Artificial Sequence
  Description of Artificial Sequence: Synthetic oligonucleotide
  Target: LAMA2; (-) strand; PAM type: YTN; PAM sequence: CTG
gccatcagagaaatgcaaat

SEQ ID NO: 236221 - DNA, 20 bp, Artificial Sequence
  Description of Artificial Sequence: Synthetic oligonucleotide
  Target: LAMA2; (-) strand; PAM type: YTN; PAM sequence: CTC
atcatcactggccatcagag

SEQ ID NO: 236222 - DNA, 20 bp, Artificial Sequence
  Description of Artificial Sequence: Synthetic oligonucleotide
  Target: LAMA2; (-) strand; PAM type: YTN; PAM sequence: TTA
tgcagccaaaaaacacatga

SEQ ID NO: 236223 - DNA, 20 bp, Artificial Sequence
  Description of Artificial Sequence: Synthetic oligonucleotide
  Target: LAMA2; (-) strand; PAM type: YTN; PAM sequence: TTT
atgcagccaaaaaacacatg

SEQ ID NO: 236224 - DNA, 20 bp, Artificial Sequence
  Description of Artificial Sequence: Synthetic oligonucleotide
  Target: LAMA2; (-) strand; PAM type: YTN; PAM sequence: CTC
aaaagaagacatttatgcag

SEQ ID NO: 236225 - DNA, 20 bp, Artificial Sequence
  Description of Artificial Sequence: Synthetic oligonucleotide
  Target: LAMA2; (-) strand; PAM type: YTN; PAM sequence: TTC
tcaaaagaagacatttatgc

SEQ ID NO: 236226 - DNA, 20 bp, Artificial Sequence
  Description of Artificial Sequence: Synthetic oligonucleotide
  Target: LAMA2; (-) strand; PAM type: YTN; PAM sequence: CTT
ctcaaaagaagacatttatg

SEQ ID NO: 236227 - DNA, 20 bp, Artificial Sequence
  Description of Artificial Sequence: Synthetic oligonucleotide
  Target: LAMA2; (-) strand; PAM type: YTN; PAM sequence: TTA
caagaaaaaaacaaacaacc

SEQ ID NO: 236228 - DNA, 20 bp, Artificial Sequence
  Description of Artificial Sequence: Synthetic oligonucleotide
  Target: LAMA2; (-) strand; PAM type: YTN; PAM sequence: TTT
acaagaaaaaaacaaacaac

SEQ ID NO: 236229 - DNA, 20 bp, Artificial Sequence
  Description of Artificial Sequence: Synthetic oligonucleotide
  Target: LAMA2; (-) strand; PAM type: YTN; PAM sequence: CTC
aaacaaatttacaagaaaaa

SEQ ID NO: 236230 - DNA, 20 bp, Artificial Sequence
  Description of Artificial Sequence: Synthetic oligonucleotide
  Target: LAMA2; (-) strand; PAM type: YTN; PAM sequence: CTA
caatgaactcaaacaaattt

SEQ ID NO: 236231 - DNA, 20 bp, Artificial Sequence
  Description of Artificial Sequence: Synthetic oligonucleotide
  Target: LAMA2; (-) strand; PAM type: YTN; PAM sequence: CTA
atatccagaatctacaatga

SEQ ID NO: 236232 - DNA, 20 bp, Artificial Sequence
  Description of Artificial Sequence: Synthetic oligonucleotide
  Target: LAMA2; (-) strand; PAM type: YTN; PAM sequence: CTG
acaaagggctaatatccaga

SEQ ID NO: 236233 - DNA, 20 bp, Artificial Sequence
  Description of Artificial Sequence: Synthetic oligonucleotide
  Target: LAMA2; (-) strand; PAM type: YTN; PAM sequence: CTC
atctgacaaagggctaatat

SEQ ID NO: 236234 - DNA, 20 bp, Artificial Sequence
  Description of Artificial Sequence: Synthetic oligonucleotide
  Target: LAMA2; (-) strand; PAM type: YTN; PAM sequence: CTA
ctcatctgacaaagggctaa

SEQ ID NO: 236235 - DNA, 20 bp, Artificial Sequence
  Description of Artificial Sequence: Synthetic oligonucleotide
  Target: LAMA2; (-) strand; PAM type: YTN; PAM sequence: TTG
caacctactcatctgacaaa

SEQ ID NO: 236236 - DNA, 20 bp, Artificial Sequence
  Description of Artificial Sequence: Synthetic oligonucleotide
  Target: LAMA2; (-) strand; PAM type: YTN; PAM sequence: TTT
gcaacctactcatctgacaa

SEQ ID NO: 236237 - DNA, 20 bp, Artificial Sequence
  Description of Artificial Sequence: Synthetic oligonucleotide
  Target: LAMA2; (-) strand; PAM type: YTN; PAM sequence: TTT
tgcaacctactcatctgaca

SEQ ID NO: 236238 - DNA, 20 bp, Artificial Sequence
  Description of Artificial Sequence: Synthetic oligonucleotide
  Target: LAMA2; (-) strand; PAM type: YTN; PAM sequence: TTT
ttgcaacctactcatctgac

SEQ ID NO: 236239 - DNA, 20 bp, Artificial Sequence
  Description of Artificial Sequence: Synthetic oligonucleotide
  Target: LAMA2; (-) strand; PAM type: YTN; PAM sequence: CTA
caaaatgggagaaaattttt

SEQ ID NO: 236240 - DNA, 20 bp, Artificial Sequence
  Description of Artificial Sequence: Synthetic oligonucleotide
  Target: LAMA2; (-) strand; PAM type: YTN; PAM sequence: CTA
ccatcagagtgaacaggcaa

SEQ ID NO: 236241 - DNA, 20 bp, Artificial Sequence
  Description of Artificial Sequence: Synthetic oligonucleotide
  Target: LAMA2; (-) strand; PAM type: YTN; PAM sequence: CTG
cacagcaaaagaaactacca

SEQ ID NO: 236242 - DNA, 20 bp, Artificial Sequence
  Description of Artificial Sequence: Synthetic oligonucleotide
  Target: LAMA2; (-) strand; PAM type: YTN; PAM sequence: TTC
tgcacagcaaaagaaactac

SEQ ID NO: 236243 - DNA, 20 bp, Artificial Sequence
  Description of Artificial Sequence: Synthetic oligonucleotide
  Target: LAMA2; (-) strand; PAM type: YTN; PAM sequence: CTT
ctgcacagcaaaagaaacta

SEQ ID NO: 236244 - DNA, 20 bp, Artificial Sequence
  Description of Artificial Sequence: Synthetic oligonucleotide
  Target: LAMA2; (-) strand; PAM type: YTN; PAM sequence: CTA
aagagcttctgcacagcaaa

SEQ ID NO: 236245 - DNA, 20 bp, Artificial Sequence
  Description of Artificial Sequence: Synthetic oligonucleotide
  Target: LAMA2; (-) strand; PAM type: YTN; PAM sequence: TTA
aactaaagagcttctgcaca

SEQ ID NO: 236246 - DNA, 20 bp, Artificial Sequence
  Description of Artificial Sequence: Synthetic oligonucleotide
  Target: LAMA2; (-) strand; PAM type: YTN; PAM sequence: CTA
attaaactaaagagcttctg

SEQ ID NO: 236247 - DNA, 20 bp, Artificial Sequence
  Description of Artificial Sequence: Synthetic oligonucleotide
  Target: LAMA2; (-) strand; PAM type: YTN; PAM sequence: TTG
acaaatgggatctaattaaa

SEQ ID NO: 236248 - DNA, 20 bp, Artificial Sequence
  Description of Artificial Sequence: Synthetic oligonucleotide
  Target: LAMA2; (-) strand; PAM type: YTN; PAM sequence: CTA
aaacaccaaaagcaatggca

SEQ ID NO: 236249 - DNA, 20 bp, Artificial Sequence
  Description of Artificial Sequence: Synthetic oligonucleotide
  Target: LAMA2; (-) strand; PAM type: YTN; PAM sequence: TTC
atgtctaaaacaccaaaagc

SEQ ID NO: 236250 - DNA, 20 bp, Artificial Sequence
  Description of Artificial Sequence: Synthetic oligonucleotide
  Target: LAMA2; (-) strand; PAM type: YTN; PAM sequence: CTT
catgtctaaaacaccaaaag

SEQ ID NO: 236251 - DNA, 20 bp, Artificial Sequence
  Description of Artificial Sequence: Synthetic oligonucleotide
  Target: LAMA2; (-) strand; PAM type: YTN; PAM sequence: TTC
aggacataggcatgggcaag

SEQ ID NO: 236252 - DNA, 20 bp, Artificial Sequence
  Description of Artificial Sequence: Synthetic oligonucleotide
  Target: LAMA2; (-) strand; PAM type: YTN; PAM sequence: CTA
ggcagtaccattcaggacat

SEQ ID NO: 236253 - DNA, 20 bp, Artificial Sequence
  Description of Artificial Sequence: Synthetic oligonucleotide
  Target: LAMA2; (-) strand; PAM type: YTN; PAM sequence: CTA
gaagaaaacctaggcagtac

SEQ ID NO: 236254 - DNA, 20 bp, Artificial Sequence
  Description of Artificial Sequence: Synthetic oligonucleotide
  Target: LAMA2; (-) strand; PAM type: YTN; PAM sequence: CTA
aaaccataaaaaccctagaa

SEQ ID NO: 236255 - DNA, 20 bp, Artificial Sequence
  Description of Artificial Sequence: Synthetic oligonucleotide
  Target: LAMA2; (-) strand; PAM type: YTN; PAM sequence: TTA
gacctaaaaccataaaaacc

SEQ ID NO: 236256 - DNA, 20 bp, Artificial Sequence
  Description of Artificial Sequence: Synthetic oligonucleotide
  Target: LAMA2; (-) strand; PAM type: YTN; PAM sequence: TTA
aacgttagacctaaaaccat

SEQ ID NO: 236257 - DNA, 20 bp, Artificial Sequence
  Description of Artificial Sequence: Synthetic oligonucleotide
  Target: LAMA2; (-) strand; PAM type: YTN; PAM sequence: CTT
aaacgttagacctaaaacca

SEQ ID NO: 236258 - DNA, 20 bp, Artificial Sequence
  Description of Artificial Sequence: Synthetic oligonucleotide
  Target: LAMA2; (-) strand; PAM type: YTN; PAM sequence: TTA
aagacttaaacgttagacct

SEQ ID NO: 236259 - DNA, 20 bp, Artificial Sequence
  Description of Artificial Sequence: Synthetic oligonucleotide
  Target: LAMA2; (-) strand; PAM type: YTN; PAM sequence: TTC
aagatggattaaagacttaa

SEQ ID NO: 236260 - DNA, 20 bp, Artificial Sequence
  Description of Artificial Sequence: Synthetic oligonucleotide
  Target: LAMA2; (-) strand; PAM type: YTN; PAM sequence: TTA
tacaaaaatcaattcaagat

SEQ ID NO: 236261 - DNA, 20 bp, Artificial Sequence
  Description of Artificial Sequence: Synthetic oligonucleotide
  Target: LAMA2; (-) strand; PAM type: YTN; PAM sequence: CTT
atacaaaaatcaattcaaga

SEQ ID NO: 236262 - DNA, 20 bp, Artificial Sequence
  Description of Artificial Sequence: Synthetic oligonucleotide
  Target: LAMA2; (-) strand; PAM type: YTN; PAM sequence: TTA
caccttatacaaaaatcaat

SEQ ID NO: 236263 - DNA, 20 bp, Artificial Sequence
  Description of Artificial Sequence: Synthetic oligonucleotide
  Target: LAMA2; (-) strand; PAM type: YTN; PAM sequence: CTT
acaccttatacaaaaatcaa

SEQ ID NO: 236264 - DNA, 20 bp, Artificial Sequence
  Description of Artificial Sequence: Synthetic oligonucleotide
  Target: LAMA2; (-) strand; PAM type: YTN; PAM sequence: TTC
cttacaccttatacaaaaat

SEQ ID NO: 236265 - DNA, 20 bp, Artificial Sequence
  Description of Artificial Sequence: Synthetic oligonucleotide
  Target: LAMA2; (-) strand; PAM type: YTN; PAM sequence: CTT
ccttacaccttatacaaaaa

SEQ ID NO: 236266 - DNA, 20 bp, Artificial Sequence
  Description of Artificial Sequence: Synthetic oligonucleotide
  Target: LAMA2; (-) strand; PAM type: YTN; PAM sequence: CTG
gatcccttccttacacctta

SEQ ID NO: 236267 - DNA, 20 bp, Artificial Sequence
  Description of Artificial Sequence: Synthetic oligonucleotide
  Target: LAMA2; (-) strand; PAM type: YTN; PAM sequence: CTG
aaactggatcccttccttac

SEQ ID NO: 236268 - DNA, 20 bp, Artificial Sequence
  Description of Artificial Sequence: Synthetic oligonucleotide
  Target: LAMA2; (-) strand; PAM type: YTN; PAM sequence: CTA
gccatatgtagaaagctgaa

SEQ ID NO: 236269 - DNA, 20 bp, Artificial Sequence
  Description of Artificial Sequence: Synthetic oligonucleotide
  Target: LAMA2; (-) strand; PAM type: YTN; PAM sequence: CTG
gctagccatatgtagaaagc

SEQ ID NO: 236270 - DNA, 20 bp, Artificial Sequence
  Description of Artificial Sequence: Synthetic oligonucleotide
  Target: LAMA2; (-) strand; PAM type: YTN; PAM sequence: CTG
ggagaactggctagccatat

SEQ ID NO: 236271 - DNA, 20 bp, Artificial Sequence
  Description of Artificial Sequence: Synthetic oligonucleotide
  Target: LAMA2; (-) strand; PAM type: YTN; PAM sequence: TTA
ataaatggtgctgggagaac

SEQ ID NO: 236272 - DNA, 20 bp, Artificial Sequence
  Description of Artificial Sequence: Synthetic oligonucleotide
  Target: LAMA2; (-) strand; PAM type: YTN; PAM sequence: TTT
aataaatggtgctgggagaa

SEQ ID NO: 236273 - DNA, 20 bp, Artificial Sequence
  Description of Artificial Sequence: Synthetic oligonucleotide
  Target: LAMA2; (-) strand; PAM type: YTN; PAM sequence: CTG
tttaataaatggtgctggga

SEQ ID NO: 236274 - DNA, 20 bp, Artificial Sequence
  Description of Artificial Sequence: Synthetic oligonucleotide
  Target: LAMA2; (-) strand; PAM type: YTN; PAM sequence: TTC
cctgtttaataaatggtgct

SEQ ID NO: 236275 - DNA, 20 bp, Artificial Sequence
  Description of Artificial Sequence: Synthetic oligonucleotide
  Target: LAMA2; (-) strand; PAM type: YTN; PAM sequence: CTG
agaaaaacaagcaatgggga

SEQ ID NO: 236276 - DNA, 20 bp, Artificial Sequence
  Description of Artificial Sequence: Synthetic oligonucleotide
  Target: LAMA2; (-) strand; PAM type: YTN; PAM sequence: TTG
acaaacctgagaaaaacaag

SEQ ID NO: 236277 - DNA, 20 bp, Artificial Sequence
  Description of Artificial Sequence: Synthetic oligonucleotide
  Target: LAMA2; (-) strand; PAM type: YTN; PAM sequence: TTT
gacaaacctgagaaaaacaa

SEQ ID NO: 236278 - DNA, 20 bp, Artificial Sequence
  Description of Artificial Sequence: Synthetic oligonucleotide
  Target: LAMA2; (-) strand; PAM type: YTN; PAM sequence: CTT
tgacaaacctgagaaaaaca

SEQ ID NO: 236279 - DNA, 20 bp, Artificial Sequence
  Description of Artificial Sequence: Synthetic oligonucleotide
  Target: LAMA2; (-) strand; PAM type: YTN; PAM sequence: CTG
atctttgacaaacctgagaa

SEQ ID NO: 236280 - DNA, 20 bp, Artificial Sequence
  Description of Artificial Sequence: Synthetic oligonucleotide
  Target: LAMA2; (-) strand; PAM type: YTN; PAM sequence: CTA
cctgatctttgacaaacctg

SEQ ID NO: 236281 - DNA, 20 bp, Artificial Sequence
  Description of Artificial Sequence: Synthetic oligonucleotide
  Target: LAMA2; (-) strand; PAM type: YTN; PAM sequence: CTC
agaaataacgccgcatatgt

SEQ ID NO: 236282 - DNA, 20 bp, Artificial Sequence
  Description of Artificial Sequence: Synthetic oligonucleotide
  Target: LAMA2; (-) strand; PAM type: YTN; PAM sequence: CTG
gtaccaaaacagagatatag

SEQ ID NO: 236283 - DNA, 20 bp, Artificial Sequence
  Description of Artificial Sequence: Synthetic oligonucleotide
  Target: LAMA2; (-) strand; PAM type: YTN; PAM sequence: CTA
cagtaaccaaaacagcatgg

SEQ ID NO: 236284 - DNA, 20 bp, Artificial Sequence
  Description of Artificial Sequence: Synthetic oligonucleotide
  Target: LAMA2; (-) strand; PAM type: YTN; PAM sequence: CTA
caagtctacagtaaccaaaa

SEQ ID NO: 236285 - DNA, 20 bp, Artificial Sequence
  Description of Artificial Sequence: Synthetic oligonucleotide
  Target: LAMA2; (-) strand; PAM type: YTN; PAM sequence: CTA
tactacaagtctacagtaac

SEQ ID NO: 236286 - DNA, 20 bp, Artificial Sequence
  Description of Artificial Sequence: Synthetic oligonucleotide
  Target: LAMA2; (-) strand; PAM type: YTN; PAM sequence: TTC
aaactatactacaagtctac

SEQ ID NO: 236287 - DNA, 20 bp, Artificial Sequence
  Description of Artificial Sequence: Synthetic oligonucleotide
  Target: LAMA2; (-) strand; PAM type: YTN; PAM sequence: CTT
caaactatactacaagtcta

SEQ ID NO: 236288 - DNA, 20 bp, Artificial Sequence
  Description of Artificial Sequence: Synthetic oligonucleotide
  Target: LAMA2; (-) strand; PAM type: YTN; PAM sequence: CTG
acttcaaactatactacaag

SEQ ID NO: 236289 - DNA, 20 bp, Artificial Sequence
  Description of Artificial Sequence: Synthetic oligonucleotide
  Target: LAMA2; (-) strand; PAM type: YTN; PAM sequence: CTA
cctgacttcaaactatacta

SEQ ID NO: 236290 - DNA, 20 bp, Artificial Sequence
  Description of Artificial Sequence: Synthetic oligonucleotide
  Target: LAMA2; (-) strand; PAM type: YTN; PAM sequence: CTG
gaggcatcacactacctgac

SEQ ID NO: 236291 - DNA, 20 bp, Artificial Sequence
  Description of Artificial Sequence: Synthetic oligonucleotide
  Target: LAMA2; (-) strand; PAM type: YTN; PAM sequence: CTA
agccaaaagaacaaagctgg

SEQ ID NO: 236292 - DNA, 20 bp, Artificial Sequence
  Description of Artificial Sequence: Synthetic oligonucleotide
  Target: LAMA2; (-) strand; PAM type: YTN; PAM sequence: TTC
atatggaaccaaaaaagagc

SEQ ID NO: 236293 - DNA, 20 bp, Artificial Sequence
  Description of Artificial Sequence: Synthetic oligonucleotide
  Target: LAMA2; (-) strand; PAM type: YTN; PAM sequence: TTA
aagttcatatggaaccaaaa

SEQ ID NO: 236294 - DNA, 20 bp, Artificial Sequence
  Description of Artificial Sequence: Synthetic oligonucleotide
  Target: LAMA2; (-) strand; PAM type: YTN; PAM sequence: TTT
aaagttcatatggaaccaaa

SEQ ID NO: 236295 - DNA, 20 bp, Artificial Sequence
  Description of Artificial Sequence: Synthetic oligonucleotide
  Target: LAMA2; (-) strand; PAM type: YTN; PAM sequence: CTT
taaagttcatatggaaccaa

SEQ ID NO: 236296 - DNA, 20 bp, Artificial Sequence
  Description of Artificial Sequence: Synthetic oligonucleotide
  Target: LAMA2; (-) strand; PAM type: YTN; PAM sequence: CTA
ctttaaagttcatatggaac

SEQ ID NO: 236297 - DNA, 20 bp, Artificial Sequence
  Description of Artificial Sequence: Synthetic oligonucleotide
  Target: LAMA2; (-) strand; PAM type: YTN; PAM sequence: TTG
gaaaaaactactttaaagtt

SEQ ID NO: 236298 - DNA, 20 bp, Artificial Sequence
  Description of Artificial Sequence: Synthetic oligonucleotide
  Target: LAMA2; (-) strand; PAM type: YTN; PAM sequence: TTC
acagaattggaaaaaactac

SEQ ID NO: 236299 - DNA, 20 bp, Artificial Sequence
  Description of Artificial Sequence: Synthetic oligonucleotide
  Target: LAMA2; (-) strand; PAM type: YTN; PAM sequence: CTT
cacagaattggaaaaaacta

SEQ ID NO: 236300 - DNA, 20 bp, Artificial Sequence
  Description of Artificial Sequence: Synthetic oligonucleotide
  Target: LAMA2; (-) strand; PAM type: YTN; PAM sequence: TTC
ttcacagaattggaaaaaac

SEQ ID NO: 236301 - DNA, 20 bp, Artificial Sequence
  Description of Artificial Sequence: Synthetic oligonucleotide
  Target: LAMA2; (-) strand; PAM type: YTN; PAM sequence: TTT
cttcacagaattggaaaaaa

SEQ ID NO: 236302 - DNA, 20 bp, Artificial Sequence
  Description of Artificial Sequence: Synthetic oligonucleotide
  Target: LAMA2; (-) strand; PAM type: YTN; PAM sequence: CTT
tcttcacagaattggaaaaa

SEQ ID NO: 236303 - DNA, 20 bp, Artificial Sequence
  Description of Artificial Sequence: Synthetic oligonucleotide
  Target: LAMA2; (-) strand; PAM type: YTN; PAM sequence: CTA
ccaatgcctttcttcacaga

SEQ ID NO: 236304 - DNA, 20 bp, Artificial Sequence
  Description of Artificial Sequence: Synthetic oligonucleotide
  Target: LAMA2; (-) strand; PAM type: YTN; PAM sequence: TTC
aatgccatccccatcaagct

SEQ ID NO: 236305 - DNA, 20 bp, Artificial Sequence
  Description of Artificial Sequence: Synthetic oligonucleotide
  Target: LAMA2; (-) strand; PAM type: YTN; PAM sequence: TTA
cagattcaatgccatcccca

SEQ ID NO: 236306 - DNA, 20 bp, Artificial Sequence
  Description of Artificial Sequence: Synthetic oligonucleotide
  Target: LAMA2; (-) strand; PAM type: YTN; PAM sequence: TTT
acagattcaatgccatcccc

SEQ ID NO: 236307 - DNA, 20 bp, Artificial Sequence
  Description of Artificial Sequence: Synthetic oligonucleotide
  Target: LAMA2; (-) strand; PAM type: YTN; PAM sequence: CTG
cccaaggtaatttacagatt

SEQ ID NO: 236308 - DNA, 20 bp, Artificial Sequence
  Description of Artificial Sequence: Synthetic oligonucleotide
  Target: LAMA2; (-) strand; PAM type: YTN; PAM sequence: CTC
atgggtaggaagaatcaata

SEQ ID NO: 236309 - DNA, 20 bp, Artificial Sequence
  Description of Artificial Sequence: Synthetic oligonucleotide
  Target: LAMA2; (-) strand; PAM type: YTN; PAM sequence: TTC
catgctcatgggtaggaaga

SEQ ID NO: 236310 - DNA, 20 bp, Artificial Sequence
  Description of Artificial Sequence: Synthetic oligonucleotide
  Target: LAMA2; (-) strand; PAM type: YTN; PAM sequence: CTC
aaggaaataaaagaggatac

SEQ ID NO: 236311 - DNA, 20 bp, Artificial Sequence
  Description of Artificial Sequence: Synthetic oligonucleotide
  Target: LAMA2; (-) strand; PAM type: YTN; PAM sequence: CTG
ctcaaggaaataaaagagga

SEQ ID NO: 236312 - DNA, 20 bp, Artificial Sequence
  Description of Artificial Sequence: Synthetic oligonucleotide
  Target: LAMA2; (-) strand; PAM type: YTN; PAM sequence: CTA
caaaccactgctcaaggaaa

SEQ ID NO: 236313 - DNA, 20 bp, Artificial Sequence
  Description of Artificial Sequence: Synthetic oligonucleotide
  Target: LAMA2; (-) strand; PAM type: YTN; PAM sequence: TTC
aaggagaactacaaaccact

SEQ ID NO: 236314 - DNA, 20 bp, Artificial Sequence
  Description of Artificial Sequence: Synthetic oligonucleotide
  Target: LAMA2; (-) strand; PAM type: YTN; PAM sequence: CTT
caaggagaactacaaaccac

SEQ ID NO: 236315 - DNA, 20 bp, Artificial Sequence
  Description of Artificial Sequence: Synthetic oligonucleotide
  Target: LAMA2; (-) strand; PAM type: YTN; PAM sequence: CTC
ttcaaggagaactacaaacc

SEQ ID NO: 236316 - DNA, 20 bp, Artificial Sequence
  Description of Artificial Sequence: Synthetic oligonucleotide
  Target: LAMA2; (-) strand; PAM type: YTN; PAM sequence: TTA
caagggatgtgaaggacctc

SEQ ID NO: 236317 - DNA, 20 bp, Artificial Sequence
  Description of Artificial Sequence: Synthetic oligonucleotide
  Target: LAMA2; (-) strand; PAM type: YTN; PAM sequence: CTT
acaagggatgtgaaggacct

SEQ ID NO: 236318 - DNA, 20 bp, Artificial Sequence
  Description of Artificial Sequence: Synthetic oligonucleotide
  Target: LAMA2; (-) strand; PAM type: YTN; PAM sequence: CTA
ggaatccaacttacaaggga

SEQ ID NO: 236319 - DNA, 20 bp, Artificial Sequence
  Description of Artificial Sequence: Synthetic oligonucleotide
  Target: LAMA2; (-) strand; PAM type: YTN; PAM sequence: TTC
aaagagaataaaatacctag

SEQ ID NO: 236320 - DNA, 20 bp, Artificial Sequence
  Description of Artificial Sequence: Synthetic oligonucleotide
  Target: LAMA2; (-) strand; PAM type: YTN; PAM sequence: CTT
caaagagaataaaataccta

SEQ ID NO: 236321 - DNA, 20 bp, Artificial Sequence
  Description of Artificial Sequence: Synthetic oligonucleotide
  Target: LAMA2; (-) strand; PAM type: YTN; PAM sequence: TTG
cttcaaagagaataaaatac

SEQ ID NO: 236322 - DNA, 20 bp, Artificial Sequence
  Description of Artificial Sequence: Synthetic oligonucleotide
  Target: LAMA2; (-) strand; PAM type: YTN; PAM sequence: TTC
acaattgcttcaaagagaat

SEQ ID NO: 236323 - DNA, 20 bp, Artificial Sequence
  Description of Artificial Sequence: Synthetic oligonucleotide
  Target: LAMA2; (-) strand; PAM type: YTN; PAM sequence: CTC
ccattcacaattgcttcaaa

SEQ ID NO: 236324 - DNA, 20 bp, Artificial Sequence
  Description of Artificial Sequence: Synthetic oligonucleotide
  Target: LAMA2; (-) strand; PAM type: YTN; PAM sequence: TTA
tacaacaacaacaaacagag

SEQ ID NO: 236325 - DNA, 20 bp, Artificial Sequence
  Description of Artificial Sequence: Synthetic oligonucleotide
  Target: LAMA2; (-) strand; PAM type: YTN; PAM sequence: CTT
atacaacaacaacaaacaga

SEQ ID NO: 236326 - DNA, 20 bp, Artificial Sequence
  Description of Artificial Sequence: Synthetic oligonucleotide
  Target: LAMA2; (-) strand; PAM type: YTN; PAM sequence: TTC
ttatacaacaacaacaaaca

SEQ ID NO: 236327 - DNA, 20 bp, Artificial Sequence
  Description of Artificial Sequence: Synthetic oligonucleotide
  Target: LAMA2; (-) strand; PAM type: YTN; PAM sequence: CTC
aggatacaaaatcaatgtac

SEQ ID NO: 236328 - DNA, 20 bp, Artificial Sequence
  Description of Artificial Sequence: Synthetic oligonucleotide
  Target: LAMA2; (-) strand; PAM type: YTN; PAM sequence: TTC
agcaaagtctcaggatacaa

SEQ ID NO: 236329 - DNA, 20 bp, Artificial Sequence
  Description of Artificial Sequence: Synthetic oligonucleotide
  Target: LAMA2; (-) strand; PAM type: YTN; PAM sequence: CTT
cagcaaagtctcaggataca

SEQ ID NO: 236330 - DNA, 20 bp, Artificial Sequence
  Description of Artificial Sequence: Synthetic oligonucleotide
  Target: LAMA2; (-) strand; PAM type: YTN; PAM sequence: CTG
ataagcaacttcagcaaagt

SEQ ID NO: 236331 - DNA, 20 bp, Artificial Sequence
  Description of Artificial Sequence: Synthetic oligonucleotide
  Target: LAMA2; (-) strand; PAM type: YTN; PAM sequence: TTA
agctgataagcaacttcagc

SEQ ID NO: 236332 - DNA, 20 bp, Artificial Sequence
  Description of Artificial Sequence: Synthetic oligonucleotide
  Target: LAMA2; (-) strand; PAM type: YTN; PAM sequence: CTT
aagctgataagcaacttcag

SEQ ID NO: 236333 - DNA, 20 bp, Artificial Sequence
  Description of Artificial Sequence: Synthetic oligonucleotide
  Target: LAMA2; (-) strand; PAM type: YTN; PAM sequence: CTC
cttaagctgataagcaactt

SEQ ID NO: 236334 - DNA, 20 bp, Artificial Sequence
  Description of Artificial Sequence: Synthetic oligonucleotide
  Target: LAMA2; (-) strand; PAM type: YTN; PAM sequence: CTC
agtccaaaatctccttaagc

SEQ ID NO: 236335 - DNA, 20 bp, Artificial Sequence
  Description of Artificial Sequence: Synthetic oligonucleotide
  Target: LAMA2; (-) strand; PAM type: YTN; PAM sequence: TTG
tctcagtccaaaatctcctt

SEQ ID NO: 236336 - DNA, 20 bp, Artificial Sequence
  Description of Artificial Sequence: Synthetic oligonucleotide
  Target: LAMA2; (-) strand; PAM type: YTN; PAM sequence: CTA
gaaaaccccattgtctcagt

SEQ ID NO: 236337 - DNA, 20 bp, Artificial Sequence
  Description of Artificial Sequence: Synthetic oligonucleotide
  Target: LAMA2; (-) strand; PAM type: YTN; PAM sequence: TTG
tatatctagaaaaccccatt

SEQ ID NO: 236338 - DNA, 20 bp, Artificial Sequence
  Description of Artificial Sequence: Synthetic oligonucleotide
  Target: LAMA2; (-) strand; PAM type: YTN; PAM sequence: TTG
cagacgacatgattgtatat

SEQ ID NO: 236339 - DNA, 20 bp, Artificial Sequence
  Description of Artificial Sequence: Synthetic oligonucleotide
  Target: LAMA2; (-) strand; PAM type: YTN; PAM sequence: TTT
gcagacgacatgattgtata

SEQ ID NO: 236340 - DNA, 20 bp, Artificial Sequence
  Description of Artificial Sequence: Synthetic oligonucleotide
  Target: LAMA2; (-) strand; PAM type: YTN; PAM sequence: TTG
tccccgtttgcagacgacat

SEQ ID NO: 236341 - DNA, 20 bp, Artificial Sequence
  Description of Artificial Sequence: Synthetic oligonucleotide
  Target: LAMA2; (-) strand; PAM type: YTN; PAM sequence: TTA
ggaaaagaggaagtcaaatt

SEQ ID NO: 236342 - DNA, 20 bp, Artificial Sequence
  Description of Artificial Sequence: Synthetic oligonucleotide
  Target: LAMA2; (-) strand; PAM type: YTN; PAM sequence: TTC
aattaggaaaagaggaagtc

SEQ ID NO: 236343 - DNA, 20 bp, Artificial Sequence
  Description of Artificial Sequence: Synthetic oligonucleotide
  Target: LAMA2; (-) strand; PAM type: YTN; PAM sequence: TTA
ggcaggagaaggaaataaag

SEQ ID NO: 236344 - DNA, 20 bp, Artificial Sequence
  Description of Artificial Sequence: Synthetic oligonucleotide
  Target: LAMA2; (-) strand; PAM type: YTN; PAM sequence: CTG
gccagggcaattaggcagga

SEQ ID NO: 236345 - DNA, 20 bp, Artificial Sequence
  Description of Artificial Sequence: Synthetic oligonucleotide
  Target: LAMA2; (-) strand; PAM type: YTN; PAM sequence: TTC
tggccagggcaattaggcag

SEQ ID NO: 236346 - DNA, 20 bp, Artificial Sequence
  Description of Artificial Sequence: Synthetic oligonucleotide
  Target: LAMA2; (-) strand; PAM type: YTN; PAM sequence: TTG
gaagttctggccagggcaat

SEQ ID NO: 236347 - DNA, 20 bp, Artificial Sequence
  Description of Artificial Sequence: Synthetic oligonucleotide
  Target: LAMA2; (-) strand; PAM type: YTN; PAM sequence: TTC
aacatagtgttggaagttct

SEQ ID NO: 236348 - DNA, 20 bp, Artificial Sequence
  Description of Artificial Sequence: Synthetic oligonucleotide
  Target: LAMA2; (-) strand; PAM type: YTN; PAM sequence: CTA
ttcaacatagtgttggaagt

SEQ ID NO: 236349 - DNA, 20 bp, Artificial Sequence
  Description of Artificial Sequence: Synthetic oligonucleotide
  Target: LAMA2; (-) strand; PAM type: YTN; PAM sequence: CTC
ctattcaacatagtgttgga

SEQ ID NO: 236350 - DNA, 20 bp, Artificial Sequence
  Description of Artificial Sequence: Synthetic oligonucleotide
  Target: LAMA2; (-) strand; PAM type: YTN; PAM sequence: CTC
accgctcctattcaacatag

SEQ ID NO: 236351 - DNA, 20 bp, Artificial Sequence
  Description of Artificial Sequence: Synthetic oligonucleotide
  Target: LAMA2; (-) strand; PAM type: YTN; PAM sequence: CTC
tcaccgctcctattcaacat

SEQ ID NO: 236352 - DNA, 20 bp, Artificial Sequence
  Description of Artificial Sequence: Synthetic oligonucleotide
  Target: LAMA2; (-) strand; PAM type: YTN; PAM sequence: CTC
tctcaccgctcctattcaac

SEQ ID NO: 236353 - DNA, 20 bp, Artificial Sequence
  Description of Artificial Sequence: Synthetic oligonucleotide
  Target: LAMA2; (-) strand; PAM type: YTN; PAM sequence: CTG
gcacaagacagggatgccct

SEQ ID NO: 236354 - DNA, 20 bp, Artificial Sequence
  Description of Artificial Sequence: Synthetic oligonucleotide
  Target: LAMA2; (-) strand; PAM type: YTN; PAM sequence: TTG
aaaactggcacaagacaggg

SEQ ID NO: 236355 - DNA, 20 bp, Artificial Sequence
  Description of Artificial Sequence: Synthetic oligonucleotide
  Target: LAMA2; (-) strand; PAM type: YTN; PAM sequence: TTT
gaaaactggcacaagacagg

SEQ ID NO: 236356 - DNA, 20 bp, Artificial Sequence
  Description of Artificial Sequence: Synthetic oligonucleotide
  Target: LAMA2; (-) strand; PAM type: YTN; PAM sequence: CTT
tgaaaactggcacaagacag

SEQ ID NO: 236357 - DNA, 20 bp, Artificial Sequence
  Description of Artificial Sequence: Synthetic oligonucleotide
  Target: LAMA2; (-) strand; PAM type: YTN; PAM sequence: TTC
cctttgaaaactggcacaag

SEQ ID NO: 236358 - DNA, 20 bp, Artificial Sequence
  Description of Artificial Sequence: Synthetic oligonucleotide
  Target: LAMA2; (-) strand; PAM type: YTN; PAM sequence: CTG
gaagcattccctttgaaaac

SEQ ID NO: 236359 - DNA, 20 bp, Artificial Sequence
  Description of Artificial Sequence: Synthetic oligonucleotide
  Target: LAMA2; (-) strand; PAM type: YTN; PAM sequence: CTA
tgacaaacccacagccagta

SEQ ID NO: 236360 - DNA, 20 bp, Artificial Sequence
  Description of Artificial Sequence: Synthetic oligonucleotide
  Target: LAMA2; (-) strand; PAM type: YTN; PAM sequence: CTA
tctatgacaaacccacagcc

SEQ ID NO: 236361 - DNA, 20 bp, Artificial Sequence
  Description of Artificial Sequence: Synthetic oligonucleotide
  Target: LAMA2; (-) strand; PAM type: YTN; PAM sequence: TTA
agagctatctatgacaaacc

SEQ ID NO: 236362 - DNA, 20 bp, Artificial Sequence
  Description of Artificial Sequence: Synthetic oligonucleotide
  Target: LAMA2; (-) strand; PAM type: YTN; PAM sequence: TTC
aaaatattaagagctatcta

SEQ ID NO: 236363 - DNA, 20 bp, Artificial Sequence
  Description of Artificial Sequence: Synthetic oligonucleotide
  Target: LAMA2; (-) strand; PAM type: YTN; PAM sequence: TTG
atgggacgtaattcaaaata

SEQ ID NO: 236364 - DNA, 20 bp, Artificial Sequence
  Description of Artificial Sequence: Synthetic oligonucleotide
  Target: LAMA2; (-) strand; PAM type: YTN; PAM sequence: TTA
ggtattgatgggacgtaatt

SEQ ID NO: 236365 - DNA, 20 bp, Artificial Sequence
  Description of Artificial Sequence: Synthetic oligonucleotide
  Target: LAMA2; (-) strand; PAM type: YTN; PAM sequence: CTC
aataaattaggtattgatgg

SEQ ID NO: 236366 - DNA, 20 bp, Artificial Sequence
  Description of Artificial Sequence: Synthetic oligonucleotide
  Target: LAMA2; (-) strand; PAM type: YTN; PAM sequence: CTC
tcaataaattaggtattgat

SEQ ID NO: 236367 - DNA, 20 bp, Artificial Sequence
  Description of Artificial Sequence: Synthetic oligonucleotide
  Target: LAMA2; (-) strand; PAM type: YTN; PAM sequence: CTA
aaaactctcaataaattagg

SEQ ID NO: 236368 - DNA, 20 bp, Artificial Sequence
  Description of Artificial Sequence: Synthetic oligonucleotide
  Target: LAMA2; (-) strand; PAM type: YTN; PAM sequence: TTC
atgctaaaaactctcaataa

SEQ ID NO: 236369 - DNA, 20 bp, Artificial Sequence
  Description of Artificial Sequence: Synthetic oligonucleotide
  Target: LAMA2; (-) strand; PAM type: YTN; PAM sequence: CTT
catgctaaaaactctcaata

SEQ ID NO: 236370 - DNA, 20 bp, Artificial Sequence
  Description of Artificial Sequence: Synthetic oligonucleotide
  Target: LAMA2; (-) strand; PAM type: YTN; PAM sequence: TTC
aacaacccttcatgctaaaa

SEQ ID NO: 236371 - DNA, 20 bp, Artificial Sequence
  Description of Artificial Sequence: Synthetic oligonucleotide
  Target: LAMA2; (-) strand; PAM type: YTN; PAM sequence: TTG
acaaaattcaacaacccttc

SEQ ID NO: 236372 - DNA, 20 bp, Artificial Sequence
  Description of Artificial Sequence: Synthetic oligonucleotide
  Target: LAMA2; (-) strand; PAM type: YTN; PAM sequence: TTT
gacaaaattcaacaaccctt

SEQ ID NO: 236373 - DNA, 20 bp, Artificial Sequence
  Description of Artificial Sequence: Synthetic oligonucleotide
  Target: LAMA2; (-) strand; PAM type: YTN; PAM sequence: CTT
tgacaaaattcaacaaccct

SEQ ID NO: 236374 - DNA, 20 bp, Artificial Sequence
  Description of Artificial Sequence: Synthetic oligonucleotide
  Target: LAMA2; (-) strand; PAM type: YTN; PAM sequence: CTC
aatagatgcagaaaaagcct

SEQ ID NO: 236375 - DNA, 20 bp, Artificial Sequence
  Description of Artificial Sequence: Synthetic oligonucleotide
  Target: LAMA2; (-) strand; PAM type: YTN; PAM sequence: TTA
tctcaatagatgcagaaaaa

SEQ ID NO: 236376 - DNA, 20 bp, Artificial Sequence
  Description of Artificial Sequence: Synthetic oligonucleotide
  Target: LAMA2; (-) strand; PAM type: YTN; PAM sequence: TTC
aatatacacaaatcaataaa

SEQ ID NO: 236377 - DNA, 20 bp, Artificial Sequence
  Description of Artificial Sequence: Synthetic oligonucleotide
  Target: LAMA2; (-) strand; PAM type: YTN; PAM sequence: CTG
gttcaatatacacaaatcaa

SEQ ID NO: 236378 - DNA, 20 bp, Artificial Sequence
  Description of Artificial Sequence: Synthetic oligonucleotide
  Target: LAMA2; (-) strand; PAM type: YTN; PAM sequence: CTG
ggatgcaaggctggttcaat

SEQ ID NO: 236379 - DNA, 20 bp, Artificial Sequence
  Description of Artificial Sequence: Synthetic oligonucleotide
  Target: LAMA2; (-) strand; PAM type: YTN; PAM sequence: TTC
atccctgggatgcaaggctg

SEQ ID NO: 236380 - DNA, 20 bp, Artificial Sequence
  Description of Artificial Sequence: Synthetic oligonucleotide
  Target: LAMA2; (-) strand; PAM type: YTN; PAM sequence: CTT
catccctgggatgcaaggct

SEQ ID NO: 236381 - DNA, 20 bp, Artificial Sequence
  Description of Artificial Sequence: Synthetic oligonucleotide
  Target: LAMA2; (-) strand; PAM type: YTN; PAM sequence: TTA
tccaccatgatcaagtaggc

SEQ ID NO: 236382 - DNA, 20 bp, Artificial Sequence
  Description of Artificial Sequence: Synthetic oligonucleotide
  Target: LAMA2; (-) strand; PAM type: YTN; PAM sequence: CTT
atccaccatgatcaagtagg

SEQ ID NO: 236383 - DNA, 20 bp, Artificial Sequence
  Description of Artificial Sequence: Synthetic oligonucleotide
  Target: LAMA2; (-) strand; PAM type: YTN; PAM sequence: CTG
gcaaaacgaatccagcagca

SEQ ID NO: 236384 - DNA, 20 bp, Artificial Sequence
  Description of Artificial Sequence: Synthetic oligonucleotide
  Target: LAMA2; (-) strand; PAM type: YTN; PAM sequence: CTC
agtaaaatactggcaaaacg

SEQ ID NO: 236385 - DNA, 20 bp, Artificial Sequence
  Description of Artificial Sequence: Synthetic oligonucleotide
  Target: LAMA2; (-) strand; PAM type: YTN; PAM sequence: TTG
atgcaaaaatcctcagtaaa

SEQ ID NO: 236386 - DNA, 20 bp, Artificial Sequence
  Description of Artificial Sequence: Synthetic oligonucleotide
  Target: LAMA2; (-) strand; PAM type: YTN; PAM sequence: TTG
atgaacattgatgcaaaaat

SEQ ID NO: 236387 - DNA, 20 bp, Artificial Sequence
  Description of Artificial Sequence: Synthetic oligonucleotide
  Target: LAMA2; (-) strand; PAM type: YTN; PAM sequence: CTT
gatgaacattgatgcaaaaa

SEQ ID NO: 236388 - DNA, 20 bp, Artificial Sequence
  Description of Artificial Sequence: Synthetic oligonucleotide
  Target: LAMA2; (-) strand; PAM type: YTN; PAM sequence: TTA
gaccaatatccttgatgaac

SEQ ID NO: 236389 - DNA, 20 bp, Artificial Sequence
  Description of Artificial Sequence: Synthetic oligonucleotide
  Target: LAMA2; (-) strand; PAM type: YTN; PAM sequence: TTT
agaccaatatccttgatgaa

SEQ ID NO: 236390 - DNA, 20 bp, Artificial Sequence
  Description of Artificial Sequence: Synthetic oligonucleotide
  Target: LAMA2; (-) strand; PAM type: YTN; PAM sequence: TTT
tagaccaatatccttgatga

SEQ ID NO: 236391 - DNA, 20 bp, Artificial Sequence
  Description of Artificial Sequence: Synthetic oligonucleotide
  Target: LAMA2; (-) strand; PAM type: YTN; PAM sequence: CTG
ataccaaagccaggcagaga

SEQ ID NO: 236392 - DNA, 20 bp, Artificial Sequence
  Description of Artificial Sequence: Synthetic oligonucleotide
  Target: LAMA2; (-) strand; PAM type: YTN; PAM sequence: TTC
tgataccaaagccaggcaga

SEQ ID NO: 236393 - DNA, 20 bp, Artificial Sequence
  Description of Artificial Sequence: Synthetic oligonucleotide
  Target: LAMA2; (-) strand; PAM type: YTN; PAM sequence: TTA
tgaggccagcatcattctga

SEQ ID NO: 236394 - DNA, 20 bp, Artificial Sequence
  Description of Artificial Sequence: Synthetic oligonucleotide
  Target: LAMA2; (-) strand; PAM type: YTN; PAM sequence: TTT
atgaggccagcatcattctg

SEQ ID NO: 236395 - DNA, 20 bp, Artificial Sequence
  Description of Artificial Sequence: Synthetic oligonucleotide
  Target: LAMA2; (-) strand; PAM type: YTN; PAM sequence: TTT
tatgaggccagcatcattct

SEQ ID NO: 236396 - DNA, 20 bp, Artificial Sequence
  Description of Artificial Sequence: Synthetic oligonucleotide
  Target: LAMA2; (-) strand; PAM type: YTN; PAM sequence: CTC
attttatgaggccagcatca

SEQ ID NO: 236397 - DNA, 20 bp, Artificial Sequence
  Description of Artificial Sequence: Synthetic oligonucleotide
  Target: LAMA2; (-) strand; PAM type: YTN; PAM sequence: CTA
actcattttatgaggccagc

SEQ ID NO: 236398 - DNA, 20 bp, Artificial Sequence
  Description of Artificial Sequence: Synthetic oligonucleotide
  Target: LAMA2; (-) strand; PAM type: YTN; PAM sequence: CTC
cctaactcattttatgaggc

SEQ ID NO: 236399 - DNA, 20 bp, Artificial Sequence
  Description of Artificial Sequence: Synthetic oligonucleotide
  Target: LAMA2; (-) strand; PAM type: YTN; PAM sequence: TTC
caatcaatagaaaaagaggg

SEQ ID NO: 236400 - DNA, 20 bp, Artificial Sequence
  Description of Artificial Sequence: Synthetic oligonucleotide
  Target: LAMA2; (-) strand; PAM type: YTN; PAM sequence: CTA
ttccaatcaatagaaaaaga

SEQ ID NO: 236401 - DNA, 20 bp, Artificial Sequence
  Description of Artificial Sequence: Synthetic oligonucleotide
  Target: LAMA2; (-) strand; PAM type: YTN; PAM sequence: CTG
aaactattccaatcaataga

SEQ ID NO: 236402 - DNA, 20 bp, Artificial Sequence
  Description of Artificial Sequence: Synthetic oligonucleotide
  Target: LAMA2; (-) strand; PAM type: YTN; PAM sequence: TTC
tgaaactattccaatcaata

SEQ ID NO: 236403 - DNA, 20 bp, Artificial Sequence
  Description of Artificial Sequence: Synthetic oligonucleotide
  Target: LAMA2; (-) strand; PAM type: YTN; PAM sequence: CTT
ctgaaactattccaatcaat

SEQ ID NO: 236404 - DNA, 20 bp, Artificial Sequence
  Description of Artificial Sequence: Synthetic oligonucleotide
  Target: LAMA2; (-) strand; PAM type: YTN; PAM sequence: TTC
cttctgaaactattccaatc

SEQ ID NO: 236405 - DNA, 20 bp, Artificial Sequence
  Description of Artificial Sequence: Synthetic oligonucleotide
  Target: LAMA2; (-) strand; PAM type: YTN; PAM sequence: CTG
gtaccattccttctgaaact

SEQ ID NO: 236406 - DNA, 20 bp, Artificial Sequence
  Description of Artificial Sequence: Synthetic oligonucleotide
  Target: LAMA2; (-) strand; PAM type: YTN; PAM sequence: CTA
ccagaggtacaaggaggaac

SEQ ID NO: 236407 - DNA, 20 bp, Artificial Sequence
  Description of Artificial Sequence: Synthetic oligonucleotide
  Target: LAMA2; (-) strand; PAM type: YTN; PAM sequence: TTC
taccagaggtacaaggagga

SEQ ID NO: 236408 - DNA, 20 bp, Artificial Sequence
  Description of Artificial Sequence: Synthetic oligonucleotide
  Target: LAMA2; (-) strand; PAM type: YTN; PAM sequence: TTC
acagccgaattctaccagag

SEQ ID NO: 236409 - DNA, 20 bp, Artificial Sequence
  Description of Artificial Sequence: Synthetic oligonucleotide
  Target: LAMA2; (-) strand; PAM type: YTN; PAM sequence: TTA
ccaaccaaaaagagtccagg

SEQ ID NO: 236410 - DNA, 20 bp, Artificial Sequence
  Description of Artificial Sequence: Synthetic oligonucleotide
  Target: LAMA2; (-) strand; PAM type: YTN; PAM sequence: CTT
accaaccaaaaagagtccag

SEQ ID NO: 236411 - DNA, 20 bp, Artificial Sequence
  Description of Artificial Sequence: Synthetic oligonucleotide
  Target: LAMA2; (-) strand; PAM type: YTN; PAM sequence: TTG
tggcaataatcaatagctta

SEQ ID NO: 236412 - DNA, 20 bp, Artificial Sequence
  Description of Artificial Sequence: Synthetic oligonucleotide
  Target: LAMA2; (-) strand; PAM type: YTN; PAM sequence: CTG
aaattgtggcaataatcaat

SEQ ID NO: 236413 - DNA, 20 bp, Artificial Sequence
  Description of Artificial Sequence: Synthetic oligonucleotide
  Target: LAMA2; (-) strand; PAM type: YTN; PAM sequence: CTG
aatagaccaataacaggatc

SEQ ID NO: 236414 - DNA, 20 bp, Artificial Sequence
  Description of Artificial Sequence: Synthetic oligonucleotide
  Target: LAMA2; (-) strand; PAM type: YTN; PAM sequence: CTC
tgaatagaccaataacagga

SEQ ID NO: 236415 - DNA, 20 bp, Artificial Sequence
  Description of Artificial Sequence: Synthetic oligonucleotide
  Target: LAMA2; (-) strand; PAM type: YTN; PAM sequence: TTG
aatctctgaatagaccaata

SEQ ID NO: 236416 - DNA, 20 bp, Artificial Sequence
  Description of Artificial Sequence: Synthetic oligonucleotide
  Target: LAMA2; (-) strand; PAM type: YTN; PAM sequence: CTA
aaccaggaagaagttgaatc

SEQ ID NO: 236417 - DNA, 20 bp, Artificial Sequence
  Description of Artificial Sequence: Synthetic oligonucleotide
  Target: LAMA2; (-) strand; PAM type: YTN; PAM sequence: CTC
ccaagactaaaccaggaaga

SEQ ID NO: 236418 - DNA, 20 bp, Artificial Sequence
  Description of Artificial Sequence: Synthetic oligonucleotide
  Target: LAMA2; (-) strand; PAM type: YTN; PAM sequence: CTC
tcccaagactaaaccaggaa

SEQ ID NO: 236419 - DNA, 20 bp, Artificial Sequence
  Description of Artificial Sequence: Synthetic oligonucleotide
  Target: LAMA2; (-) strand; PAM type: YTN; PAM sequence: CTC
gacacatacactctcccaag

SEQ ID NO: 236420 - DNA, 20 bp, Artificial Sequence
  Description of Artificial Sequence: Synthetic oligonucleotide
  Target: LAMA2; (-) strand; PAM type: YTN; PAM sequence: TTC
ctcgacacatacactctccc

SEQ ID NO: 236421 - DNA, 20 bp, Artificial Sequence
  Description of Artificial Sequence: Synthetic oligonucleotide
  Target: LAMA2; (-) strand; PAM type: YTN; PAM sequence: CTA
gaagaaatggataaattcct

SEQ ID NO: 236422 - DNA, 20 bp, Artificial Sequence
  Description of Artificial Sequence: Synthetic oligonucleotide
  Target: LAMA2; (-) strand; PAM type: YTN; PAM sequence: CTA
gaaaatctagaagaaatgga

SEQ ID NO: 236423 - DNA, 20 bp, Artificial Sequence
  Description of Artificial Sequence: Synthetic oligonucleotide
  Target: LAMA2; (-) strand; PAM type: YTN; PAM sequence: CTA
tgcaaataaactagaaaatc

SEQ ID NO: 236424 - DNA, 20 bp, Artificial Sequence
  Description of Artificial Sequence: Synthetic oligonucleotide
  Target: LAMA2; (-) strand; PAM type: YTN; PAM sequence: CTC
tatgcaaataaactagaaaa

SEQ ID NO: 236425 - DNA, 20 bp, Artificial Sequence
  Description of Artificial Sequence: Synthetic oligonucleotide
  Target: LAMA2; (-) strand; PAM type: YTN; PAM sequence: CTA
caaacacctctatgcaaata

SEQ ID NO: 236426 - DNA, 20 bp, Artificial Sequence
  Description of Artificial Sequence: Synthetic oligonucleotide
  Target: LAMA2; (-) strand; PAM type: YTN; PAM sequence: CTA
aaatcagagaatactacaaa

SEQ ID NO: 236427 - DNA, 20 bp, Artificial Sequence
  Description of Artificial Sequence: Synthetic oligonucleotide
  Target: LAMA2; (-) strand; PAM type: YTN; PAM sequence: CTA
atagatgcaataaaaaatga

SEQ ID NO: 236428 - DNA, 20 bp, Artificial Sequence
  Description of Artificial Sequence: Synthetic oligonucleotide
  Target: LAMA2; (-) strand; PAM type: YTN; PAM sequence: CTA
ataaagaaaaaaagagagaa

SEQ ID NO: 236429 - DNA, 20 bp, Artificial Sequence
  Description of Artificial Sequence: Synthetic oligonucleotide
  Target: LAMA2; (-) strand; PAM type: YTN; PAM sequence: CTA
gcaagactaataaagaaaaa

SEQ ID NO: 236430 - DNA, 20 bp, Artificial Sequence
  Description of Artificial Sequence: Synthetic oligonucleotide
  Target: LAMA2; (-) strand; PAM type: YTN; PAM sequence: TTG
atagaccgctagcaagacta

SEQ ID NO: 236431 - DNA, 20 bp, Artificial Sequence
  Description of Artificial Sequence: Synthetic oligonucleotide
  Target: LAMA2; (-) strand; PAM type: YTN; PAM sequence: TTG
aaagggtcaacaaaattgat

SEQ ID NO: 236432 - DNA, 20 bp, Artificial Sequence
  Description of Artificial Sequence: Synthetic oligonucleotide
  Target: LAMA2; (-) strand; PAM type: YTN; PAM sequence: TTT
gaaagggtcaacaaaattga

SEQ ID NO: 236433 - DNA, 20 bp, Artificial Sequence
  Description of Artificial Sequence: Synthetic oligonucleotide
  Target: LAMA2; (-) strand; PAM type: YTN; PAM sequence: TTT
tgaaagggtcaacaaaattg

SEQ ID NO: 236434 - DNA, 20 bp, Artificial Sequence
  Description of Artificial Sequence: Synthetic oligonucleotide
  Target: LAMA2; (-) strand; PAM type: YTN; PAM sequence: TTT
ttgaaagggtcaacaaaatt

SEQ ID NO: 236435 - DNA, 20 bp, Artificial Sequence
  Description of Artificial Sequence: Synthetic oligonucleotide
  Target: LAMA2; (-) strand; PAM type: YTN; PAM sequence: TTT
tttgaaagggtcaacaaaat

SEQ ID NO: 236436 - DNA, 20 bp, Artificial Sequence
  Description of Artificial Sequence: Synthetic oligonucleotide
  Target: LAMA2; (-) strand; PAM type: YTN; PAM sequence: CTG
gttttttgaaagggtcaaca

SEQ ID NO: 236437 - DNA, 20 bp, Artificial Sequence
  Description of Artificial Sequence: Synthetic oligonucleotide
  Target: LAMA2; (-) strand; PAM type: YTN; PAM sequence: TTA
atgaatccaggagctggttt

SEQ ID NO: 236438 - DNA, 20 bp, Artificial Sequence
  Description of Artificial Sequence: Synthetic oligonucleotide
  Target: LAMA2; (-) strand; PAM type: YTN; PAM sequence: TTC
aaaaaattaatgaatccagg

SEQ ID NO: 236439 - DNA, 20 bp, Artificial Sequence
  Description of Artificial Sequence: Synthetic oligonucleotide
  Target: LAMA2; (-) strand; PAM type: YTN; PAM sequence: CTT
caaaaaattaatgaatccag

SEQ ID NO: 236440 - DNA, 20 bp, Artificial Sequence
  Description of Artificial Sequence: Synthetic oligonucleotide
  Target: LAMA2; (-) strand; PAM type: YTN; PAM sequence: CTG
aaggaaatagagacacaaaa

SEQ ID NO: 236441 - DNA, 20 bp, Artificial Sequence
  Description of Artificial Sequence: Synthetic oligonucleotide
  Target: LAMA2; (-) strand; PAM type: YTN; PAM sequence: CTA
aaatcagagcagaactgaag

SEQ ID NO: 236442 - DNA, 20 bp, Artificial Sequence
  Description of Artificial Sequence: Synthetic oligonucleotide
  Target: LAMA2; (-) strand; PAM type: YTN; PAM sequence: CTA
gcagaaggcaagaaataact

SEQ ID NO: 236443 - DNA, 20 bp, Artificial Sequence
  Description of Artificial Sequence: Synthetic oligonucleotide
  Target: LAMA2; (-) strand; PAM type: YTN; PAM sequence: TTC
aaaagctagcagaaggcaag

SEQ ID NO: 236444 - DNA, 20 bp, Artificial Sequence
  Description of Artificial Sequence: Synthetic oligonucleotide
  Target: LAMA2; (-) strand; PAM type: YTN; PAM sequence: CTA
gaaaagcaggagcaaacaca

SEQ ID NO: 236445 - DNA, 20 bp, Artificial Sequence
  Description of Artificial Sequence: Synthetic oligonucleotide
  Target: LAMA2; (-) strand; PAM type: YTN; PAM sequence: TTA
aaagaactagaaaagcagga

SEQ ID NO: 236446 - DNA, 20 bp, Artificial Sequence
  Description of Artificial Sequence: Synthetic oligonucleotide
  Target: LAMA2; (-) strand; PAM type: YTN; PAM sequence: CTA
acatcacaattaaaagaact

SEQ ID NO: 236447 - DNA, 20 bp, Artificial Sequence
  Description of Artificial Sequence: Synthetic oligonucleotide
  Target: LAMA2; (-) strand; PAM type: YTN; PAM sequence: TTG
acaccctaacatcacaatta

SEQ ID NO: 236448 - DNA, 20 bp, Artificial Sequence
  Description of Artificial Sequence: Synthetic oligonucleotide
  Target: LAMA2; (-) strand; PAM type: YTN; PAM sequence: CTA
aatgcccacaagagaaagca

SEQ ID NO: 236449 - DNA, 20 bp, Artificial Sequence
  Description of Artificial Sequence: Synthetic oligonucleotide
  Target: LAMA2; (-) strand; PAM type: YTN; PAM sequence: TTA
tagcactaaatgcccacaag

SEQ ID NO: 236450 - DNA, 20 bp, Artificial Sequence
  Description of Artificial Sequence: Synthetic oligonucleotide
  Target: LAMA2; (-) strand; PAM type: YTN; PAM sequence: TTT
atagcactaaatgcccacaa

SEQ ID NO: 236451 - DNA, 20 bp, Artificial Sequence
  Description of Artificial Sequence: Synthetic oligonucleotide
  Target: LAMA2; (-) strand; PAM type: YTN; PAM sequence: TTC
aaagcagtgtgtagagggaa

SEQ ID NO: 236452 - DNA, 20 bp, Artificial Sequence
  Description of Artificial Sequence: Synthetic oligonucleotide
  Target: LAMA2; (-) strand; PAM type: YTN; PAM sequence: CTG
ggacgcattcaaagcagtgt

SEQ ID NO: 236453 - DNA, 20 bp, Artificial Sequence
  Description of Artificial Sequence: Synthetic oligonucleotide
  Target: LAMA2; (-) strand; PAM type: YTN; PAM sequence: CTC
tgggacgcattcaaagcagt

SEQ ID NO: 236454 - DNA, 20 bp, Artificial Sequence
  Description of Artificial Sequence: Synthetic oligonucleotide
  Target: LAMA2; (-) strand; PAM type: YTN; PAM sequence: TTG
aaacccatgagaacaaagac

SEQ ID NO: 236455 - DNA, 20 bp, Artificial Sequence
  Description of Artificial Sequence: Synthetic oligonucleotide
  Target: LAMA2; (-) strand; PAM type: YTN; PAM sequence: TTT
gaaacccatgagaacaaaga

SEQ ID NO: 236456 - DNA, 20 bp, Artificial Sequence
  Description of Artificial Sequence: Synthetic oligonucleotide
  Target: LAMA2; (-) strand; PAM type: YTN; PAM sequence: CTT
tgaaacccatgagaacaaag

SEQ ID NO: 236457 - DNA, 20 bp, Artificial Sequence
  Description of Artificial Sequence: Synthetic oligonucleotide
  Target: LAMA2; (-) strand; PAM type: YTN; PAM sequence: TTC
tttgaaacccatgagaacaa

SEQ ID NO: 236458 - DNA, 20 bp, Artificial Sequence
  Description of Artificial Sequence: Synthetic oligonucleotide
  Target: LAMA2; (-) strand; PAM type: YTN; PAM sequence: CTG
ggtacataacgaaatgaagg

SEQ ID NO: 236459 - DNA, 20 bp, Artificial Sequence
  Description of Artificial Sequence: Synthetic oligonucleotide
  Target: LAMA2; (-) strand; PAM type: YTN; PAM sequence: CTA
ctgggtacataacgaaatga

SEQ ID NO: 236460 - DNA, 20 bp, Artificial Sequence
  Description of Artificial Sequence: Synthetic oligonucleotide
  Target: LAMA2; (-) strand; PAM type: YTN; PAM sequence: CTG
aatgactactgggtacataa

SEQ ID NO: 236461 - DNA, 20 bp, Artificial Sequence
  Description of Artificial Sequence: Synthetic oligonucleotide
  Target: LAMA2; (-) strand; PAM type: YTN; PAM sequence: CTC
ctgaatgactactgggtaca

SEQ ID NO: 236462 - DNA, 20 bp, Artificial Sequence
  Description of Artificial Sequence: Synthetic oligonucleotide
  Target: LAMA2; (-) strand; PAM type: YTN; PAM sequence: CTG
ctcctgaatgactactgggt

SEQ ID NO: 236463 - DNA, 20 bp, Artificial Sequence
  Description of Artificial Sequence: Synthetic oligonucleotide
  Target: LAMA2; (-) strand; PAM type: YTN; PAM sequence: CTG
aacaacctgctcctgaatga

SEQ ID NO: 236464 - DNA, 20 bp, Artificial Sequence
  Description of Artificial Sequence: Synthetic oligonucleotide
  Target: LAMA2; (-) strand; PAM type: YTN; PAM sequence: CTA
catggaaactgaacaacctg

SEQ ID NO: 236465 - DNA, 20 bp, Artificial Sequence
  Description of Artificial Sequence: Synthetic oligonucleotide
  Target: LAMA2; (-) strand; PAM type: YTN; PAM sequence: CTC
aactacatggaaactgaaca

SEQ ID NO: 236466 - DNA, 20 bp, Artificial Sequence
  Description of Artificial Sequence: Synthetic oligonucleotide
  Target: LAMA2; (-) strand; PAM type: YTN; PAM sequence: CTG
ctcaactacatggaaactga

SEQ ID NO: 236467 - DNA, 20 bp, Artificial Sequence
  Description of Artificial Sequence: Synthetic oligonucleotide
  Target: LAMA2; (-) strand; PAM type: YTN; PAM sequence: CTC
aaaactgctcaactacatgg

SEQ ID NO: 236468 - DNA, 20 bp, Artificial Sequence
  Description of Artificial Sequence: Synthetic oligonucleotide
  Target: LAMA2; (-) strand; PAM type: YTN; PAM sequence: CTC
actcaaaactgctcaactac

SEQ ID NO: 236469 - DNA, 20 bp, Artificial Sequence
  Description of Artificial Sequence: Synthetic oligonucleotide
  Target: LAMA2; (-) strand; PAM type: YTN; PAM sequence: TTA
agaatctcactcaaaactgc

SEQ ID NO: 236470 - DNA, 20 bp, Artificial Sequence
  Description of Artificial Sequence: Synthetic oligonucleotide
  Target: LAMA2; (-) strand; PAM type: YTN; PAM sequence: CTC
aggattaagaatctcactca

SEQ ID NO: 236471 - DNA, 20 bp, Artificial Sequence
  Description of Artificial Sequence: Synthetic oligonucleotide
  Target: LAMA2; (-) strand; PAM type: YTN; PAM sequence: CTA
gaactcaggattaagaatct

SEQ ID NO: 236472 - DNA, 20 bp, Artificial Sequence
  Description of Artificial Sequence: Synthetic oligonucleotide
  Target: LAMA2; (-) strand; PAM type: YTN; PAM sequence: CTC
agaccacagtgcaatcaaac

SEQ ID NO: 236473 - DNA, 20 bp, Artificial Sequence
  Description of Artificial Sequence: Synthetic oligonucleotide
  Target: LAMA2; (-) strand; PAM type: YTN; PAM sequence: CTC
tcagaccacagtgcaatcaa

SEQ ID NO: 236474 - DNA, 20 bp, Artificial Sequence
  Description of Artificial Sequence: Synthetic oligonucleotide
  Target: LAMA2; (-) strand; PAM type: YTN; PAM sequence: CTA
tctctcagaccacagtgcaa

SEQ ID NO: 236475 - DNA, 20 bp, Artificial Sequence
  Description of Artificial Sequence: Synthetic oligonucleotide
  Target: LAMA2; (-) strand; PAM type: YTN; PAM sequence: TTA
taacaaactatctctcagac

SEQ ID NO: 236476 - DNA, 20 bp, Artificial Sequence
  Description of Artificial Sequence: Synthetic oligonucleotide
  Target: LAMA2; (-) strand; PAM type: YTN; PAM sequence: CTC
agcaaatgtaaaagaacaga

SEQ ID NO: 236477 - DNA, 20 bp, Artificial Sequence
  Description of Artificial Sequence: Synthetic oligonucleotide
  Target: LAMA2; (-) strand; PAM type: YTN; PAM sequence: CTC
ctcagcaaatgtaaaagaac

SEQ ID NO: 236478 - DNA, 20 bp, Artificial Sequence
  Description of Artificial Sequence: Synthetic oligonucleotide
  Target: LAMA2; (-) strand; PAM type: YTN; PAM sequence: CTC
tcctcagcaaatgtaaaaga

SEQ ID NO: 236479 - DNA, 20 bp, Artificial Sequence
  Description of Artificial Sequence: Synthetic oligonucleotide
  Target: LAMA2; (-) strand; PAM type: YTN; PAM sequence: TTG
gaagtaaagctctcctcagc

SEQ ID NO: 236480 - DNA, 20 bp, Artificial Sequence
  Description of Artificial Sequence: Synthetic oligonucleotide
  Target: LAMA2; (-) strand; PAM type: YTN; PAM sequence: CTT
ggaagtaaagctctcctcag

SEQ ID NO: 236481 - DNA, 20 bp, Artificial Sequence
  Description of Artificial Sequence: Synthetic oligonucleotide
  Target: LAMA2; (-) strand; PAM type: YTN; PAM sequence: TTG
accacatacttggaagtaaa

SEQ ID NO: 236482 - DNA, 20 bp, Artificial Sequence
  Description of Artificial Sequence: Synthetic oligonucleotide
  Target: LAMA2; (-) strand; PAM type: YTN; PAM sequence: TTC
caaaattgaccacatacttg

SEQ ID NO: 236483 - DNA, 20 bp, Artificial Sequence
  Description of Artificial Sequence: Synthetic oligonucleotide
  Target: LAMA2; (-) strand; PAM type: YTN; PAM sequence: CTA
ttccaaaattgaccacatac

SEQ ID NO: 236484 - DNA, 20 bp, Artificial Sequence
  Description of Artificial Sequence: Synthetic oligonucleotide
  Target: LAMA2; (-) strand; PAM type: YTN; PAM sequence: TTC
agcaccacaccacacctatt

SEQ ID NO: 236485 - DNA, 20 bp, Artificial Sequence
  Description of Artificial Sequence: Synthetic oligonucleotide
  Target: LAMA2; (-) strand; PAM type: YTN; PAM sequence: TTT
cagcaccacaccacacctat

SEQ ID NO: 236486 - DNA, 20 bp, Artificial Sequence
  Description of Artificial Sequence: Synthetic oligonucleotide
  Target: LAMA2; (-) strand; PAM type: YTN; PAM sequence: TTT
tcagcaccacaccacaccta

SEQ ID NO: 236487 - DNA, 20 bp, Artificial Sequence
  Description of Artificial Sequence: Synthetic oligonucleotide
  Target: LAMA2; (-) strand; PAM type: YTN; PAM sequence: TTT
ttcagcaccacaccacacct

SEQ ID NO: 236488 - DNA, 20 bp, Artificial Sequence
  Description of Artificial Sequence: Synthetic oligonucleotide
  Target: LAMA2; (-) strand; PAM type: YTN; PAM sequence: TTT
tttcagcaccacaccacacc

SEQ ID NO: 236489 - DNA, 20 bp, Artificial Sequence
  Description of Artificial Sequence: Synthetic oligonucleotide
  Target: LAMA2; (-) strand; PAM type: YTN; PAM sequence: TTT
ttttcagcaccacaccacac

SEQ ID NO: 236490 - DNA, 20 bp, Artificial Sequence
  Description of Artificial Sequence: Synthetic oligonucleotide
  Target: LAMA2; (-) strand; PAM type: YTN; PAM sequence: CTC
caccccaaatcaacagaata

SEQ ID NO: 236491 - DNA, 20 bp, Artificial Sequence
  Description of Artificial Sequence: Synthetic oligonucleotide
  Target: LAMA2; (-) strand; PAM type: YTN; PAM sequence: CTC
tccaccccaaatcaacagaa

SEQ ID NO: 236492 - DNA, 20 bp, Artificial Sequence
  Description of Artificial Sequence: Synthetic oligonucleotide
  Target: LAMA2; (-) strand; PAM type: YTN; PAM sequence: CTA
cagaactctccaccccaaat

SEQ ID NO: 236493 - DNA, 20 bp, Artificial Sequence
  Description of Artificial Sequence: Synthetic oligonucleotide
  Target: LAMA2; (-) strand; PAM type: YTN; PAM sequence: CTA
ataaacatctacagaactct

SEQ ID NO: 236494 - DNA, 20 bp, Artificial Sequence
  Description of Artificial Sequence: Synthetic oligonucleotide
  Target: LAMA2; (-) strand; PAM type: YTN; PAM sequence: CTG
caccaagcggacctaataaa

SEQ ID NO: 236495 - DNA, 20 bp, Artificial Sequence
  Description of Artificial Sequence: Synthetic oligonucleotide
  Target: LAMA2; (-) strand; PAM type: YTN; PAM sequence: CTC
tgcaccaagcggacctaata

SEQ ID NO: 236496 - DNA, 20 bp, Artificial Sequence
  Description of Artificial Sequence: Synthetic oligonucleotide
  Target: LAMA2; (-) strand; PAM type: YTN; PAM sequence: TTG
aacacagctctgcaccaagc

SEQ ID NO: 236497 - DNA, 20 bp, Artificial Sequence
  Description of Artificial Sequence: Synthetic oligonucleotide
  Target: LAMA2; (-) strand; PAM type: YTN; PAM sequence: TTA
gacagatcaacgagacagaa

SEQ ID NO: 236498 - DNA, 20 bp, Artificial Sequence
  Description of Artificial Sequence: Synthetic oligonucleotide
  Target: LAMA2; (-) strand; PAM type: YTN; PAM sequence: CTG
tcaacattagacagatcaac

SEQ ID NO: 236499 - DNA, 20 bp, Artificial Sequence
  Description of Artificial Sequence: Synthetic oligonucleotide
  Target: LAMA2; (-) strand; PAM type: YTN; PAM sequence: TTA
acaccccactgtcaacatta

SEQ ID NO: 236500 - DNA, 20 bp, Artificial Sequence
  Description of Artificial Sequence: Synthetic oligonucleotide
  Target: LAMA2; (-) strand; PAM type: YTN; PAM sequence: TTT
aacaccccactgtcaacatt

SEQ ID NO: 236501 - DNA, 20 bp, Artificial Sequence
  Description of Artificial Sequence: Synthetic oligonucleotide
  Target: LAMA2; (-) strand; PAM type: YTN; PAM sequence: CTT
taacaccccactgtcaacat

SEQ ID NO: 236502 - DNA, 20 bp, Artificial Sequence
  Description of Artificial Sequence: Synthetic oligonucleotide
  Target: LAMA2; (-) strand; PAM type: YTN; PAM sequence: TTA
ataatgggagactttaacac

SEQ ID NO: 236503 - DNA, 20 bp, Artificial Sequence
  Description of Artificial Sequence: Synthetic oligonucleotide
  Target: LAMA2; (-) strand; PAM type: YTN; PAM sequence: CTC
ccacacattaataatgggag

SEQ ID NO: 236504 - DNA, 20 bp, Artificial Sequence
  Description of Artificial Sequence: Synthetic oligonucleotide
  Target: LAMA2; (-) strand; PAM type: YTN; PAM sequence: TTA
gactcccacacattaataat

SEQ ID NO: 236505 - DNA, 20 bp, Artificial Sequence
  Description of Artificial Sequence: Synthetic oligonucleotide
  Target: LAMA2; (-) strand; PAM type: YTN; PAM sequence: CTT
agactcccacacattaataa

SEQ ID NO: 236506 - DNA, 20 bp, Artificial Sequence
  Description of Artificial Sequence: Synthetic oligonucleotide
  Target: LAMA2; (-) strand; PAM type: YTN; PAM sequence: CTA
caaagagacttagactccca

SEQ ID NO: 236507 - DNA, 20 bp, Artificial Sequence
  Description of Artificial Sequence: Synthetic oligonucleotide
  Target: LAMA2; (-) strand; PAM type: YTN; PAM sequence: CTG
agtgacctacaaagagactt

SEQ ID NO: 236508 - DNA, 20 bp, Artificial Sequence
  Description of Artificial Sequence: Synthetic oligonucleotide
  Target: LAMA2; (-) strand; PAM type: YTN; PAM sequence: TTC
ataaagcaagtcctgagtga

SEQ ID NO: 236509 - DNA, 20 bp, Artificial Sequence
  Description of Artificial Sequence: Synthetic oligonucleotide
  Target: LAMA2; (-) strand; PAM type: YTN; PAM sequence: CTA
aatatatatgcacccaatac

SEQ ID NO: 236510 - DNA, 20 bp, Artificial Sequence
  Description of Artificial Sequence: Synthetic oligonucleotide
  Target: LAMA2; (-) strand; PAM type: YTN; PAM sequence: CTA
tcctaaatatatatgcaccc

SEQ ID NO: 236511 - DNA, 20 bp, Artificial Sequence
  Description of Artificial Sequence: Synthetic oligonucleotide
  Target: LAMA2; (-) strand; PAM type: YTN; PAM sequence: CTA
actatcctaaatatatatgc

SEQ ID NO: 236512 - DNA, 20 bp, Artificial Sequence
  Description of Artificial Sequence: Synthetic oligonucleotide
  Target: LAMA2; (-) strand; PAM type: YTN; PAM sequence: TTC
aacaagaagagctaactatc

SEQ ID NO: 236513 - DNA, 20 bp, Artificial Sequence
  Description of Artificial Sequence: Synthetic oligonucleotide
  Target: LAMA2; (-) strand; PAM type: YTN; PAM sequence: TTA
cataatggtaaagggatcaa

SEQ ID NO: 236514 - DNA, 20 bp, Artificial Sequence
  Description of Artificial Sequence: Synthetic oligonucleotide
  Target: LAMA2; (-) strand; PAM type: YTN; PAM sequence: TTA
aaccaacaaacatcaaaaga

SEQ ID NO: 236515 - DNA, 20 bp, Artificial Sequence
  Description of Artificial Sequence: Synthetic oligonucleotide
  Target: LAMA2; (-) strand; PAM type: YTN; PAM sequence: TTT
aaaccaacaaacatcaaaag

SEQ ID NO: 236516 - DNA, 20 bp, Artificial Sequence
  Description of Artificial Sequence: Synthetic oligonucleotide
  Target: LAMA2; (-) strand; PAM type: YTN; PAM sequence: CTT
taaaccaacaaacatcaaaa

SEQ ID NO: 236517 - DNA, 20 bp, Artificial Sequence
  Description of Artificial Sequence: Synthetic oligonucleotide
  Target: LAMA2; (-) strand; PAM type: YTN; PAM sequence: CTG
ataaaacagactttaaacca

SEQ ID NO: 236518 - DNA, 20 bp, Artificial Sequence
  Description of Artificial Sequence: Synthetic oligonucleotide
  Target: LAMA2; (-) strand; PAM type: YTN; PAM sequence: CTC
tgataaaacagactttaaac

SEQ ID NO: 236519 - DNA, 20 bp, Artificial Sequence
  Description of Artificial Sequence: Synthetic oligonucleotide
  Target: LAMA2; (-) strand; PAM type: YTN; PAM sequence: CTA
gtctctgataaaacagactt

SEQ ID NO: 236520 - DNA, 20 bp, Artificial Sequence
  Description of Artificial Sequence: Synthetic oligonucleotide
  Target: LAMA2; (-) strand; PAM type: YTN; PAM sequence: TTG
caatcctagtctctgataaa

SEQ ID NO: 236521 - DNA, 20 bp, Artificial Sequence
  Description of Artificial Sequence: Synthetic oligonucleotide
  Target: LAMA2; (-) strand; PAM type: YTN; PAM sequence: CTA
ccaagcaaatggaaaacaaa

SEQ ID NO: 236522 - DNA, 20 bp, Artificial Sequence
  Description of Artificial Sequence: Synthetic oligonucleotide
  Target: LAMA2; (-) strand; PAM type: YTN; PAM sequence: CTC
aaaataaaaggatggaggaa

SEQ ID NO: 236523 - DNA, 20 bp, Artificial Sequence
  Description of Artificial Sequence: Synthetic oligonucleotide
  Target: LAMA2; (-) strand; PAM type: YTN; PAM sequence: CTC
atgtgcagagacacacatag

SEQ ID NO: 236524 - DNA, 20 bp, Artificial Sequence
  Description of Artificial Sequence: Synthetic oligonucleotide
  Target: LAMA2; (-) strand; PAM type: YTN; PAM sequence: TTC
aggaaacccatctcatgtgc

SEQ ID NO: 236525 - DNA, 20 bp, Artificial Sequence
  Description of Artificial Sequence: Synthetic oligonucleotide
  Target: LAMA2; (-) strand; PAM type: YTN; PAM sequence: TTC
cgtattcaggaaacccatct

SEQ ID NO: 236526 - DNA, 20 bp, Artificial Sequence
  Description of Artificial Sequence: Synthetic oligonucleotide
  Target: LAMA2; (-) strand; PAM type: YTN; PAM sequence: TTG
gataaagagtcaagacccat

SEQ ID NO: 236527 - DNA, 20 bp, Artificial Sequence
  Description of Artificial Sequence: Synthetic oligonucleotide
  Target: LAMA2; (-) strand; PAM type: YTN; PAM sequence: CTG
gcaaattggataaagagtca

SEQ ID NO: 236528 - DNA, 20 bp, Artificial Sequence
  Description of Artificial Sequence: Synthetic oligonucleotide
  Target: LAMA2; (-) strand; PAM type: YTN; PAM sequence: TTA
aaagacacagactggcaaat

SEQ ID NO: 236529 - DNA, 20 bp, Artificial Sequence
  Description of Artificial Sequence: Synthetic oligonucleotide
  Target: LAMA2; (-) strand; PAM type: YTN; PAM sequence: CTC
caattaaaagacacagactg

SEQ ID NO: 236530 - DNA, 20 bp, Artificial Sequence
  Description of Artificial Sequence: Synthetic oligonucleotide
  Target: LAMA2; (-) strand; PAM type: YTN; PAM sequence: CTA
aatgctccaattaaaagaca

SEQ ID NO: 236531 - DNA, 20 bp, Artificial Sequence
  Description of Artificial Sequence: Synthetic oligonucleotide
  Target: LAMA2; (-) strand; PAM type: YTN; PAM sequence: TTA
aatgtaaatggactaaatgc

SEQ ID NO: 236532 - DNA, 20 bp, Artificial Sequence
  Description of Artificial Sequence: Synthetic oligonucleotide
  Target: LAMA2; (-) strand; PAM type: YTN; PAM sequence: TTT
aaatgtaaatggactaaatg

SEQ ID NO: 236533 - DNA, 20 bp, Artificial Sequence
  Description of Artificial Sequence: Synthetic oligonucleotide
  Target: LAMA2; (-) strand; PAM type: YTN; PAM sequence: CTT
taaatgtaaatggactaaat

SEQ ID NO: 236534 - DNA, 20 bp, Artificial Sequence
  Description of Artificial Sequence: Synthetic oligonucleotide
  Target: LAMA2; (-) strand; PAM type: YTN; PAM sequence: TTA
actttaaatgtaaatggact

SEQ ID NO: 236535 - DNA, 20 bp, Artificial Sequence
  Description of Artificial Sequence: Synthetic oligonucleotide
  Target: LAMA2; (-) strand; PAM type: YTN; PAM sequence: TTC
acacataacaatattaactt

SEQ ID NO: 236536 - DNA, 20 bp, Artificial Sequence
  Description of Artificial Sequence: Synthetic oligonucleotide
  Target: LAMA2; (-) strand; PAM type: YTN; PAM sequence: CTA
acatcatcatgacaggatca

SEQ ID NO: 236537 - DNA, 20 bp, Artificial Sequence
  Description of Artificial Sequence: Synthetic oligonucleotide
  Target: LAMA2; (-) strand; PAM type: YTN; PAM sequence: CTA
acgagcaaaataaccagcta

SEQ ID NO: 236538 - DNA, 20 bp, Artificial Sequence
  Description of Artificial Sequence: Synthetic oligonucleotide
  Target: LAMA2; (-) strand; PAM type: YTN; PAM sequence: CTG
catcaactaacgagcaaaat

SEQ ID NO: 236539 - DNA, 20 bp, Artificial Sequence
  Description of Artificial Sequence: Synthetic oligonucleotide
  Target: LAMA2; (-) strand; PAM type: YTN; PAM sequence: CTA
ggaagaaactgcatcaacta

SEQ ID NO: 236540 - DNA, 20 bp, Artificial Sequence
  Description of Artificial Sequence: Synthetic oligonucleotide
  Target: LAMA2; (-) strand; PAM type: YTN; PAM sequence: TTG
taaagaccatcgatgctagg

SEQ ID NO: 236541 - DNA, 20 bp, Artificial Sequence
  Description of Artificial Sequence: Synthetic oligonucleotide
  Target: LAMA2; (-) strand; PAM type: YTN; PAM sequence: CTG
caaaagcatgccaaattgta

SEQ ID NO: 236542 - DNA, 20 bp, Artificial Sequence
  Description of Artificial Sequence: Synthetic oligonucleotide
  Target: LAMA2; (-) strand; PAM type: YTN; PAM sequence: CTA
aacatggaaaggaacaacca

SEQ ID NO: 236543 - DNA, 20 bp, Artificial Sequence
  Description of Artificial Sequence: Synthetic oligonucleotide
  Target: LAMA2; (-) strand; PAM type: YTN; PAM sequence: CTG
aaggaagcactaaacatgga

SEQ ID NO: 236544 - DNA, 20 bp, Artificial Sequence
  Description of Artificial Sequence: Synthetic oligonucleotide
  Target: LAMA2; (-) strand; PAM type: YTN; PAM sequence: CTC
ctgaaggaagcactaaacat

SEQ ID NO: 236545 - DNA, 20 bp, Artificial Sequence
  Description of Artificial Sequence: Synthetic oligonucleotide
  Target: LAMA2; (-) strand; PAM type: YTN; PAM sequence: CTA
aaagagctcctgaaggaagc

SEQ ID NO: 236546 - DNA, 20 bp, Artificial Sequence
  Description of Artificial Sequence: Synthetic oligonucleotide
  Target: LAMA2; (-) strand; PAM type: YTN; PAM sequence: CTG
ccctaaaagagctcctgaag

SEQ ID NO: 236547 - DNA, 20 bp, Artificial Sequence
  Description of Artificial Sequence: Synthetic oligonucleotide
  Target: LAMA2; (-) strand; PAM type: YTN; PAM sequence: TTG
tcaccaccagtcctgcccta

SEQ ID NO: 236548 - DNA, 20 bp, Artificial Sequence
  Description of Artificial Sequence: Synthetic oligonucleotide
  Target: LAMA2; (-) strand; PAM type: YTN; PAM sequence: TTT
gtcaccaccagtcctgccct

SEQ ID NO: 236549 - DNA, 20 bp, Artificial Sequence
  Description of Artificial Sequence: Synthetic oligonucleotide
  Target: LAMA2; (-) strand; PAM type: YTN; PAM sequence: TTT
tgtcaccaccagtcctgccc

SEQ ID NO: 236550 - DNA, 20 bp, Artificial Sequence
  Description of Artificial Sequence: Synthetic oligonucleotide
  Target: LAMA2; (-) strand; PAM type: YTN; PAM sequence: CTG
agagattttgtcaccaccag

SEQ ID NO: 236551 - DNA, 20 bp, Artificial Sequence
  Description of Artificial Sequence: Synthetic oligonucleotide
  Target: LAMA2; (-) strand; PAM type: YTN; PAM sequence: TTA
cagacaagcaaatgctgaga

SEQ ID NO: 236552 - DNA, 20 bp, Artificial Sequence
  Description of Artificial Sequence: Synthetic oligonucleotide
  Target: LAMA2; (-) strand; PAM type: YTN; PAM sequence: TTT
acagacaagcaaatgctgag

SEQ ID NO: 236553 - DNA, 20 bp, Artificial Sequence
  Description of Artificial Sequence: Synthetic oligonucleotide
  Target: LAMA2; (-) strand; PAM type: YTN; PAM sequence: CTT
tacagacaagcaaatgctga

SEQ ID NO: 236554 - DNA, 20 bp, Artificial Sequence
  Description of Artificial Sequence: Synthetic oligonucleotide
  Target: LAMA2; (-) strand; PAM type: YTN; PAM sequence: TTC
ataagcgaaggagaaataaa

SEQ ID NO: 236555 - DNA, 20 bp, Artificial Sequence
  Description of Artificial Sequence: Synthetic oligonucleotide
  Target: LAMA2; (-) strand; PAM type: YTN; PAM sequence: CTT
cataagcgaaggagaaataa

SEQ ID NO: 236556 - DNA, 20 bp, Artificial Sequence
  Description of Artificial Sequence: Synthetic oligonucleotide
  Target: LAMA2; (-) strand; PAM type: YTN; PAM sequence: CTA
agcttcataagcgaaggaga

SEQ ID NO: 236557 - DNA, 20 bp, Artificial Sequence
  Description of Artificial Sequence: Synthetic oligonucleotide
  Target: LAMA2; (-) strand; PAM type: YTN; PAM sequence: TTC
atatccagccaaactaagct

SEQ ID NO: 236558 - DNA, 20 bp, Artificial Sequence
  Description of Artificial Sequence: Synthetic oligonucleotide
  Target: LAMA2; (-) strand; PAM type: YTN; PAM sequence: TTT
catatccagccaaactaagc

SEQ ID NO: 236559 - DNA, 20 bp, Artificial Sequence
  Description of Artificial Sequence: Synthetic oligonucleotide
  Target: LAMA2; (-) strand; PAM type: YTN; PAM sequence: TTC
aacccagaatttcatatcca

SEQ ID NO: 236560 - DNA, 20 bp, Artificial Sequence
  Description of Artificial Sequence: Synthetic oligonucleotide
  Target: LAMA2; (-) strand; PAM type: YTN; PAM sequence: TTT
caacccagaatttcatatcc

SEQ ID NO: 236561 - DNA, 20 bp, Artificial Sequence
  Description of Artificial Sequence: Synthetic oligonucleotide
  Target: LAMA2; (-) strand; PAM type: YTN; PAM sequence: TTT
tcaacccagaatttcatatc

SEQ ID NO: 236562 - DNA, 20 bp, Artificial Sequence
  Description of Artificial Sequence: Synthetic oligonucleotide
  Target: LAMA2; (-) strand; PAM type: YTN; PAM sequence: TTA
aagaaaagaattttcaaccc

SEQ ID NO: 236563 - DNA, 20 bp, Artificial Sequence
  Description of Artificial Sequence: Synthetic oligonucleotide
  Target: LAMA2; (-) strand; PAM type: YTN; PAM sequence: CTT
aaagaaaagaattttcaacc

SEQ ID NO: 236564 - DNA, 20 bp, Artificial Sequence
  Description of Artificial Sequence: Synthetic oligonucleotide
  Target: LAMA2; (-) strand; PAM type: YTN; PAM sequence: TTC
ttaaagaaaagaattttcaa

SEQ ID NO: 236565 - DNA, 20 bp, Artificial Sequence
  Description of Artificial Sequence: Synthetic oligonucleotide
  Target: LAMA2; (-) strand; PAM type: YTN; PAM sequence: TTC
aacattcttaaagaaaagaa

SEQ ID NO: 236566 - DNA, 20 bp, Artificial Sequence
  Description of Artificial Sequence: Synthetic oligonucleotide
  Target: LAMA2; (-) strand; PAM type: YTN; PAM sequence: CTA
caagccggaagagagtgggg

SEQ ID NO: 236567 - DNA, 20 bp, Artificial Sequence
  Description of Artificial Sequence: Synthetic oligonucleotide
  Target: LAMA2; (-) strand; PAM type: YTN; PAM sequence: CTC
tacaagccggaagagagtgg

SEQ ID NO: 236568 - DNA, 20 bp, Artificial Sequence
  Description of Artificial Sequence: Synthetic oligonucleotide
  Target: LAMA2; (-) strand; PAM type: YTN; PAM sequence: CTC
ggcagaaactctacaagccg

SEQ ID NO: 236569 - DNA, 20 bp, Artificial Sequence
  Description of Artificial Sequence: Synthetic oligonucleotide
  Target: LAMA2; (-) strand; PAM type: YTN; PAM sequence: CTA
acagcagatcgctcggcaga

SEQ ID NO: 236570 - DNA, 20 bp, Artificial Sequence
  Description of Artificial Sequence: Synthetic oligonucleotide
  Target: LAMA2; (-) strand; PAM type: YTN; PAM sequence: CTC
aaagggaagcccatcagact

SEQ ID NO: 236571 - DNA, 20 bp, Artificial Sequence
  Description of Artificial Sequence: Synthetic oligonucleotide
  Target: LAMA2; (-) strand; PAM type: YTN; PAM sequence: TTA
ccctcaaagggaagcccatc

SEQ ID NO: 236572 - DNA, 20 bp, Artificial Sequence
  Description of Artificial Sequence: Synthetic oligonucleotide
  Target: LAMA2; (-) strand; PAM type: YTN; PAM sequence: TTA
agggcagccagagagaaagg

SEQ ID NO: 236573 - DNA, 20 bp, Artificial Sequence
  Description of Artificial Sequence: Synthetic oligonucleotide
  Target: LAMA2; (-) strand; PAM type: YTN; PAM sequence: CTG
aaatgaaggaaaaaatgtta

SEQ ID NO: 236574 - DNA, 20 bp, Artificial Sequence
  Description of Artificial Sequence: Synthetic oligonucleotide
  Target: LAMA2; (-) strand; PAM type: YTN; PAM sequence: TTC
accaaagctgaaatgaagga

SEQ ID NO: 236575 - DNA, 20 bp, Artificial Sequence
  Description of Artificial Sequence: Synthetic oligonucleotide
  Target: LAMA2; (-) strand; PAM type: YTN; PAM sequence: TTG
tcagattcaccaaagctgaa

SEQ ID NO: 236576 - DNA, 20 bp, Artificial Sequence
  Description of Artificial Sequence: Synthetic oligonucleotide
  Target: LAMA2; (-) strand; PAM type: YTN; PAM sequence: CTC
caagacacataattgtcaga

SEQ ID NO: 236577 - DNA, 20 bp, Artificial Sequence
  Description of Artificial Sequence: Synthetic oligonucleotide
  Target: LAMA2; (-) strand; PAM type: YTN; PAM sequence: CTC
gagaagagcaactccaagac

SEQ ID NO: 236578 - DNA, 20 bp, Artificial Sequence
  Description of Artificial Sequence: Synthetic oligonucleotide
  Target: LAMA2; (-) strand; PAM type: YTN; PAM sequence: CTC
ctcgagaagagcaactccaa

SEQ ID NO: 236579 - DNA, 20 bp, Artificial Sequence
  Description of Artificial Sequence: Synthetic oligonucleotide
  Target: LAMA2; (-) strand; PAM type: YTN; PAM sequence: TTC
aggaaatacagagaacgcca

SEQ ID NO: 236580 - DNA, 20 bp, Artificial Sequence
  Description of Artificial Sequence: Synthetic oligonucleotide
  Target: LAMA2; (-) strand; PAM type: YTN; PAM sequence: TTC
agattcaggaaatacagaga

SEQ ID NO: 236581 - DNA, 20 bp, Artificial Sequence
  Description of Artificial Sequence: Synthetic oligonucleotide
  Target: LAMA2; (-) strand; PAM type: YTN; PAM sequence: CTA
gcaaggcaggccaacgttca

SEQ ID NO: 236582 - DNA, 20 bp, Artificial Sequence
  Description of Artificial Sequence: Synthetic oligonucleotide
  Target: LAMA2; (-) strand; PAM type: YTN; PAM sequence: TTC
cccaatctagcaaggcaggc

SEQ ID NO: 236583 - DNA, 20 bp, Artificial Sequence
  Description of Artificial Sequence: Synthetic oligonucleotide
  Target: LAMA2; (-) strand; PAM type: YTN; PAM sequence: CTT
ccccaatctagcaaggcagg

SEQ ID NO: 236584 - DNA, 20 bp, Artificial Sequence
  Description of Artificial Sequence: Synthetic oligonucleotide
  Target: LAMA2; (-) strand; PAM type: YTN; PAM sequence: TTA
tccaggagaacttccccaat

SEQ ID NO: 236585 - DNA, 20 bp, Artificial Sequence
  Description of Artificial Sequence: Synthetic oligonucleotide
  Target: LAMA2; (-) strand; PAM type: YTN; PAM sequence: CTG
caggatattatccaggagaa

SEQ ID NO: 236586 - DNA, 20 bp, Artificial Sequence
  Description of Artificial Sequence: Synthetic oligonucleotide
  Target: LAMA2; (-) strand; PAM type: YTN; PAM sequence: CTC
tgcaggatattatccaggag

SEQ ID NO: 236587 - DNA, 20 bp, Artificial Sequence
  Description of Artificial Sequence: Synthetic oligonucleotide
  Target: LAMA2; (-) strand; PAM type: YTN; PAM sequence: TTG
gaaaacactctgcaggatat

SEQ ID NO: 236588 - DNA, 20 bp, Artificial Sequence
  Description of Artificial Sequence: Synthetic oligonucleotide
  Target: LAMA2; (-) strand; PAM type: YTN; PAM sequence: CTG
aaagtgatggggagaatgga

SEQ ID NO: 236589 - DNA, 20 bp, Artificial Sequence
  Description of Artificial Sequence: Synthetic oligonucleotide
  Target: LAMA2; (-) strand; PAM type: YTN; PAM sequence: TTG
gtgtacctgaaagtgatggg

SEQ ID NO: 236590 - DNA, 20 bp, Artificial Sequence
  Description of Artificial Sequence: Synthetic oligonucleotide
  Target: LAMA2; (-) strand; PAM type: YTN; PAM sequence: CTG
attggtgtacctgaaagtga

SEQ ID NO: 236591 - DNA, 20 bp, Artificial Sequence
  Description of Artificial Sequence: Synthetic oligonucleotide
  Target: LAMA2; (-) strand; PAM type: YTN; PAM sequence: CTA
cgtctgattggtgtacctga

SEQ ID NO: 236592 - DNA, 20 bp, Artificial Sequence
  Description of Artificial Sequence: Synthetic oligonucleotide
  Target: LAMA2; (-) strand; PAM type: YTN; PAM sequence: CTA
tgtgaaaagaccaaatctac

SEQ ID NO: 236593 - DNA, 20 bp, Artificial Sequence
  Description of Artificial Sequence: Synthetic oligonucleotide
  Target: LAMA2; (-) strand; PAM type: YTN; PAM sequence: CTC
caagaaatatgggactatgt

SEQ ID NO: 236594 - DNA, 20 bp, Artificial Sequence
  Description of Artificial Sequence: Synthetic oligonucleotide
  Target: LAMA2; (-) strand; PAM type: YTN; PAM sequence: TTA
gagaaaaaagaataaaaaga

SEQ ID NO: 236595 - DNA, 20 bp, Artificial Sequence
  Description of Artificial Sequence: Synthetic oligonucleotide
  Target: LAMA2; (-) strand; PAM type: YTN; PAM sequence: TTT
agagaaaaaagaataaaaag

SEQ ID NO: 236596 - DNA, 20 bp, Artificial Sequence
  Description of Artificial Sequence: Synthetic oligonucleotide
  Target: LAMA2; (-) strand; PAM type: YTN; PAM sequence: CTG
gaagaaagggtatcagcaat

SEQ ID NO: 236597 - DNA, 20 bp, Artificial Sequence
  Description of Artificial Sequence: Synthetic oligonucleotide
  Target: LAMA2; (-) strand; PAM type: YTN; PAM sequence: CTC
aggagccgatgcgatcaact

SEQ ID NO: 236598 - DNA, 20 bp, Artificial Sequence
  Description of Artificial Sequence: Synthetic oligonucleotide
  Target: LAMA2; (-) strand; PAM type: YTN; PAM sequence: CTA
cgtgaagaatgcagaagcct

SEQ ID NO: 236599 - DNA, 20 bp, Artificial Sequence
  Description of Artificial Sequence: Synthetic oligonucleotide
  Target: LAMA2; (-) strand; PAM type: YTN; PAM sequence: CTC
gagaactacgtgaagaatgc

SEQ ID NO: 236600 - DNA, 20 bp, Artificial Sequence
  Description of Artificial Sequence: Synthetic oligonucleotide
  Target: LAMA2; (-) strand; PAM type: YTN; PAM sequence: CTG
aaaaccaaggctcgagaact

SEQ ID NO: 236601 - DNA, 20 bp, Artificial Sequence
  Description of Artificial Sequence: Synthetic oligonucleotide
  Target: LAMA2; (-) strand; PAM type: YTN; PAM sequence: CTG
atggagctgaaaaccaaggc

SEQ ID NO: 236602 - DNA, 20 bp, Artificial Sequence
  Description of Artificial Sequence: Synthetic oligonucleotide
  Target: LAMA2; (-) strand; PAM type: YTN; PAM sequence: TTA
aaggagctgatggagctgaa

SEQ ID NO: 236603 - DNA, 20 bp, Artificial Sequence
  Description of Artificial Sequence: Synthetic oligonucleotide
  Target: LAMA2; (-) strand; PAM type: YTN; PAM sequence: CTT
aaaggagctgatggagctga

SEQ ID NO: 236604 - DNA, 20 bp, Artificial Sequence
  Description of Artificial Sequence: Synthetic oligonucleotide
  Target: LAMA2; (-) strand; PAM type: YTN; PAM sequence: CTA
gaataaccaatacagagaag

SEQ ID NO: 236605 - DNA, 20 bp, Artificial Sequence
  Description of Artificial Sequence: Synthetic oligonucleotide
  Target: LAMA2; (-) strand; PAM type: YTN; PAM sequence: TTG
aaaaaaatgtagaagaatgt

SEQ ID NO: 236606 - DNA, 20 bp, Artificial Sequence
  Description of Artificial Sequence: Synthetic oligonucleotide
  Target: LAMA2; (-) strand; PAM type: YTN; PAM sequence: TTT
gaaaaaaatgtagaagaatg

SEQ ID NO: 236607 - DNA, 20 bp, Artificial Sequence
  Description of Artificial Sequence: Synthetic oligonucleotide
  Target: LAMA2; (-) strand; PAM type: YTN; PAM sequence: CTT
tgaaaaaaatgtagaagaat

SEQ ID NO: 236608 - DNA, 20 bp, Artificial Sequence
  Description of Artificial Sequence: Synthetic oligonucleotide
  Target: LAMA2; (-) strand; PAM type: YTN; PAM sequence: TTG
aaaactttgaaaaaaatgta

SEQ ID NO: 236609 - DNA, 20 bp, Artificial Sequence
  Description of Artificial Sequence: Synthetic oligonucleotide
  Target: LAMA2; (-) strand; PAM type: YTN; PAM sequence: TTC
aaaccaaaggcaaagaagtt

SEQ ID NO: 236610 - DNA, 20 bp, Artificial Sequence
  Description of Artificial Sequence: Synthetic oligonucleotide
  Target: LAMA2; (-) strand; PAM type: YTN; PAM sequence: CTA
cgggaggacattcaaaccaa

SEQ ID NO: 236611 - DNA, 20 bp, Artificial Sequence
  Description of Artificial Sequence: Synthetic oligonucleotide
  Target: LAMA2; (-) strand; PAM type: YTN; PAM sequence: CTG
agctacgggaggacattcaa

SEQ ID NO: 236612 - DNA, 20 bp, Artificial Sequence
  Description of Artificial Sequence: Synthetic oligonucleotide
  Target: LAMA2; (-) strand; PAM type: YTN; PAM sequence: CTC
tgagctacgggaggacattc

SEQ ID NO: 236613 - DNA, 20 bp, Artificial Sequence
  Description of Artificial Sequence: Synthetic oligonucleotide
  Target: LAMA2; (-) strand; PAM type: YTN; PAM sequence: TTA
ctctgagctacgggaggaca

SEQ ID NO: 236614 - DNA, 20 bp, Artificial Sequence
  Description of Artificial Sequence: Synthetic oligonucleotide
  Target: LAMA2; (-) strand; PAM type: YTN; PAM sequence: TTC
agacgatcaaattactctga

SEQ ID NO: 236615 - DNA, 20 bp, Artificial Sequence
  Description of Artificial Sequence: Synthetic oligonucleotide
  Target: LAMA2; (-) strand; PAM type: YTN; PAM sequence: CTT
cagacgatcaaattactctg

SEQ ID NO: 236616 - DNA, 20 bp, Artificial Sequence
  Description of Artificial Sequence: Synthetic oligonucleotide
  Target: LAMA2; (-) strand; PAM type: YTN; PAM sequence: CTG
agagaagaaggcttcagacg

SEQ ID NO: 236617 - DNA, 20 bp, Artificial Sequence
  Description of Artificial Sequence: Synthetic oligonucleotide
  Target: LAMA2; (-) strand; PAM type: YTN; PAM sequence: TTG
acgagctgagagaagaaggc

SEQ ID NO: 236618 - DNA, 20 bp, Artificial Sequence
  Description of Artificial Sequence: Synthetic oligonucleotide
  Target: LAMA2; (-) strand; PAM type: YTN; PAM sequence: TTT
gacgagctgagagaagaagg

SEQ ID NO: 236619 - DNA, 20 bp, Artificial Sequence
  Description of Artificial Sequence: Synthetic oligonucleotide
  Target: LAMA2; (-) strand; PAM type: YTN; PAM sequence: CTT
tgacgagctgagagaagaag

SEQ ID NO: 236620 - DNA, 20 bp, Artificial Sequence
  Description of Artificial Sequence: Synthetic oligonucleotide
  Target: LAMA2; (-) strand; PAM type: YTN; PAM sequence: CTG
gatggagaacgactttgacg

SEQ ID NO: 236621 - DNA, 20 bp, Artificial Sequence
  Description of Artificial Sequence: Synthetic oligonucleotide
  Target: LAMA2; (-) strand; PAM type: YTN; PAM sequence: CTC
accagcaacggaacaaagct

SEQ ID NO: 236622 - DNA, 20 bp, Artificial Sequence
  Description of Artificial Sequence: Synthetic oligonucleotide
  Target: LAMA2; (-) strand; PAM type: YTN; PAM sequence: TTC
ctcaccagcaacggaacaaa

SEQ ID NO: 236623 - DNA, 20 bp, Artificial Sequence
  Description of Artificial Sequence: Synthetic oligonucleotide
  Target: LAMA2; (-) strand; PAM type: YTN; PAM sequence: CTC
caaaggaacgcagttcctca

SEQ ID NO: 236624 - DNA, 20 bp, Artificial Sequence
  Description of Artificial Sequence: Synthetic oligonucleotide
  Target: LAMA2; (-) strand; PAM type: YTN; PAM sequence: CTC
ctccaaaggaacgcagttcc

SEQ ID NO: 236625 - DNA, 20 bp, Artificial Sequence
  Description of Artificial Sequence: Synthetic oligonucleotide
  Target: LAMA2; (-) strand; PAM type: YTN; PAM sequence: CTC
ctcctccaaaggaacgcagt

SEQ ID NO: 236626 - DNA, 20 bp, Artificial Sequence
  Description of Artificial Sequence: Synthetic oligonucleotide
  Target: LAMA2; (-) strand; PAM type: YTN; PAM sequence: CTC
tcctcctccaaaggaacgca

SEQ ID NO: 236627 - DNA, 20 bp, Artificial Sequence
  Description of Artificial Sequence: Synthetic oligonucleotide
  Target: LAMA2; (-) strand; PAM type: YTN; PAM sequence: CTA
aaaagcagagtgcctctcct

SEQ ID NO: 236628 - DNA, 20 bp, Artificial Sequence
  Description of Artificial Sequence: Synthetic oligonucleotide
  Target: LAMA2; (-) strand; PAM type: YTN; PAM sequence: CTC
taaaaagcagagtgcctctc

SEQ ID NO: 236629 - DNA, 20 bp, Artificial Sequence
  Description of Artificial Sequence: Synthetic oligonucleotide
  Target: LAMA2; (-) strand; PAM type: YTN; PAM sequence: CTG
gaaactctaaaaagcagagt

SEQ ID NO: 236630 - DNA, 20 bp, Artificial Sequence
  Description of Artificial Sequence: Synthetic oligonucleotide
  Target: LAMA2; (-) strand; PAM type: YTN; PAM sequence: CTG
tacatcaccatcatcaaaga

SEQ ID NO: 236631 - DNA, 20 bp, Artificial Sequence
  Description of Artificial Sequence: Synthetic oligonucleotide
  Target: LAMA2; (-) strand; PAM type: YTN; PAM sequence: CTA
acaaacagaaaggacatcca

SEQ ID NO: 236632 - DNA, 20 bp, Artificial Sequence
  Description of Artificial Sequence: Synthetic oligonucleotide
  Target: LAMA2; (-) strand; PAM type: YTN; PAM sequence: TTA
gaaggaaaactaacaaacag

SEQ ID NO: 236633 - DNA, 20 bp, Artificial Sequence
  Description of Artificial Sequence: Synthetic oligonucleotide
  Target: LAMA2; (-) strand; PAM type: YTN; PAM sequence: CTG
ttagaaggaaaactaacaaa

SEQ ID NO: 236634 - DNA, 20 bp, Artificial Sequence
  Description of Artificial Sequence: Synthetic oligonucleotide
  Target: LAMA2; (-) strand; PAM type: YTN; PAM sequence: CTG
tctgttagaaggaaaactaa

SEQ ID NO: 236635 - DNA, 20 bp, Artificial Sequence
  Description of Artificial Sequence: Synthetic oligonucleotide
  Target: LAMA2; (-) strand; PAM type: YTN; PAM sequence: TTC
ctgtctgttagaaggaaaac

SEQ ID NO: 236636 - DNA, 20 bp, Artificial Sequence
  Description of Artificial Sequence: Synthetic oligonucleotide
  Target: LAMA2; (-) strand; PAM type: YTN; PAM sequence: CTG
aggttcctgtctgttagaag

SEQ ID NO: 236637 - DNA, 20 bp, Artificial Sequence
  Description of Artificial Sequence: Synthetic oligonucleotide
  Target: LAMA2; (-) strand; PAM type: YTN; PAM sequence: CTG
cagctgaggttcctgtctgt

SEQ ID NO: 236638 - DNA, 20 bp, Artificial Sequence
  Description of Artificial Sequence: Synthetic oligonucleotide
  Target: LAMA2; (-) strand; PAM type: YTN; PAM sequence: TTG
caacagacctgcagctgagg

SEQ ID NO: 236639 - DNA, 20 bp, Artificial Sequence
  Description of Artificial Sequence: Synthetic oligonucleotide
  Target: LAMA2; (-) strand; PAM type: YTN; PAM sequence: CTC
acacggcagggtattgcaac

SEQ ID NO: 236640 - DNA, 20 bp, Artificial Sequence
  Description of Artificial Sequence: Synthetic oligonucleotide
  Target: LAMA2; (-) strand; PAM type: YTN; PAM sequence: CTG
acacctcacacggcagggta

SEQ ID NO: 236641 - DNA, 20 bp, Artificial Sequence
  Description of Artificial Sequence: Synthetic oligonucleotide
  Target: LAMA2; (-) strand; PAM type: YTN; PAM sequence: CTG
ggaggcaccccccagcaggg

SEQ ID NO: 236642 - DNA, 20 bp, Artificial Sequence
  Description of Artificial Sequence: Synthetic oligonucleotide
  Target: LAMA2; (-) strand; PAM type: YTN; PAM sequence: CTG
agcagcgtaactgggaggca

SEQ ID NO: 236643 - DNA, 20 bp, Artificial Sequence
  Description of Artificial Sequence: Synthetic oligonucleotide
  Target: LAMA2; (-) strand; PAM type: YTN; PAM sequence: CTG
acccctgagcagcgtaactg

SEQ ID NO: 236644 - DNA, 20 bp, Artificial Sequence
  Description of Artificial Sequence: Synthetic oligonucleotide
  Target: LAMA2; (-) strand; PAM type: YTN; PAM sequence: CTG
acccctgacccctgagcagc

SEQ ID NO: 236645 - DNA, 20 bp, Artificial Sequence
  Description of Artificial Sequence: Synthetic oligonucleotide
  Target: LAMA2; (-) strand; PAM type: YTN; PAM sequence: CTC
aagtgggtccctgacccctg

SEQ ID NO: 236646 - DNA, 20 bp, Artificial Sequence
  Description of Artificial Sequence: Synthetic oligonucleotide
  Target: LAMA2; (-) strand; PAM type: YTN; PAM sequence: CTC
ctcaagtgggtccctgaccc

SEQ ID NO: 236647 - DNA, 20 bp, Artificial Sequence
  Description of Artificial Sequence: Synthetic oligonucleotide
  Target: LAMA2; (-) strand; PAM type: YTN; PAM sequence: CTG
cctcctcaagtgggtccctg

SEQ ID NO: 236648 - DNA, 20 bp, Artificial Sequence
  Description of Artificial Sequence: Synthetic oligonucleotide
  Target: LAMA2; (-) strand; PAM type: YTN; PAM sequence: CTA
agaacgggcagactgcctcc

SEQ ID NO: 236649 - DNA, 20 bp, Artificial Sequence
  Description of Artificial Sequence: Synthetic oligonucleotide
  Target: LAMA2; (-) strand; PAM type: YTN; PAM sequence: CTG
gagatctaagaacgggcaga

SEQ ID NO: 236650 - DNA, 20 bp, Artificial Sequence
  Description of Artificial Sequence: Synthetic oligonucleotide
  Target: LAMA2; (-) strand; PAM type: YTN; PAM sequence: CTC
ccagcacgcagctggagatc

SEQ ID NO: 236651 - DNA, 20 bp, Artificial Sequence
  Description of Artificial Sequence: Synthetic oligonucleotide
  Target: LAMA2; (-) strand; PAM type: YTN; PAM sequence: TTC
tcccagcacgcagctggaga

SEQ ID NO: 236652 - DNA, 20 bp, Artificial Sequence
  Description of Artificial Sequence: Synthetic oligonucleotide
  Target: LAMA2; (-) strand; PAM type: YTN; PAM sequence: TTG
aagagagcagtggttctccc

SEQ ID NO: 236653 - DNA, 20 bp, Artificial Sequence
  Description of Artificial Sequence: Synthetic oligonucleotide
  Target: LAMA2; (-) strand; PAM type: YTN; PAM sequence: TTT
gaagagagcagtggttctcc

SEQ ID NO: 236654 - DNA, 20 bp, Artificial Sequence
  Description of Artificial Sequence: Synthetic oligonucleotide
  Target: LAMA2; (-) strand; PAM type: YTN; PAM sequence: CTT
tgaagagagcagtggttctc

SEQ ID NO: 236655 - DNA, 20 bp, Artificial Sequence
  Description of Artificial Sequence: Synthetic oligonucleotide
  Target: LAMA2; (-) strand; PAM type: YTN; PAM sequence: CTG
acagctttgaagagagcagt

SEQ ID NO: 236656 - DNA, 20 bp, Artificial Sequence
  Description of Artificial Sequence: Synthetic oligonucleotide
  Target: LAMA2; (-) strand; PAM type: YTN; PAM sequence: CTC
tgacagctttgaagagagca

SEQ ID NO: 236657 - DNA, 20 bp, Artificial Sequence
  Description of Artificial Sequence: Synthetic oligonucleotide
  Target: LAMA2; (-) strand; PAM type: YTN; PAM sequence: TTA
aatgtccctctgacagcttt

SEQ ID NO: 236658 - DNA, 20 bp, Artificial Sequence
  Description of Artificial Sequence: Synthetic oligonucleotide
  Target: LAMA2; (-) strand; PAM type: YTN; PAM sequence: CTT
aaatgtccctctgacagctt

SEQ ID NO: 236659 - DNA, 20 bp, Artificial Sequence
  Description of Artificial Sequence: Synthetic oligonucleotide
  Target: LAMA2; (-) strand; PAM type: YTN; PAM sequence: CTG
cagacttaaatgtccctctg

SEQ ID NO: 236660 - DNA, 20 bp, Artificial Sequence
  Description of Artificial Sequence: Synthetic oligonucleotide
  Target: LAMA2; (-) strand; PAM type: YTN; PAM sequence: CTC
tgcagacttaaatgtccctc

SEQ ID NO: 236661 - DNA, 20 bp, Artificial Sequence
  Description of Artificial Sequence: Synthetic oligonucleotide
  Target: LAMA2; (-) strand; PAM type: YTN; PAM sequence: CTG
ggggcagggcacagacaaac

SEQ ID NO: 236662 - DNA, 20 bp, Artificial Sequence
  Description of Artificial Sequence: Synthetic oligonucleotide
  Target: LAMA2; (-) strand; PAM type: YTN; PAM sequence: CTC
tgggggcagggcacagacaa

SEQ ID NO: 236663 - DNA, 20 bp, Artificial Sequence
  Description of Artificial Sequence: Synthetic oligonucleotide
  Target: LAMA2; (-) strand; PAM type: YTN; PAM sequence: CTC
cacctctgggggcagggcac

SEQ ID NO: 236664 - DNA, 20 bp, Artificial Sequence
  Description of Artificial Sequence: Synthetic oligonucleotide
  Target: LAMA2; (-) strand; PAM type: YTN; PAM sequence: CTG
taggctccacctctgggggc

SEQ ID NO: 236665 - DNA, 20 bp, Artificial Sequence
  Description of Artificial Sequence: Synthetic oligonucleotide
  Target: LAMA2; (-) strand; PAM type: YTN; PAM sequence: CTC
tgtaggctccacctctgggg

SEQ ID NO: 236666 - DNA, 20 bp, Artificial Sequence
  Description of Artificial Sequence: Synthetic oligonucleotide
  Target: LAMA2; (-) strand; PAM type: YTN; PAM sequence: CTG
cctctgtaggctccacctct

SEQ ID NO: 236667 - DNA, 20 bp, Artificial Sequence
  Description of Artificial Sequence: Synthetic oligonucleotide
  Target: LAMA2; (-) strand; PAM type: YTN; PAM sequence: CTG
cctgcctctgtaggctccac

SEQ ID NO: 236668 - DNA, 20 bp, Artificial Sequence
  Description of Artificial Sequence: Synthetic oligonucleotide
  Target: LAMA2; (-) strand; PAM type: YTN; PAM sequence: CTC
aaggaggcctgcctgcctct

SEQ ID NO: 236669 - DNA, 20 bp, Artificial Sequence
  Description of Artificial Sequence: Synthetic oligonucleotide
  Target: LAMA2; (-) strand; PAM type: YTN; PAM sequence: CTG
ggtggagcccaccacagctc

SEQ ID NO: 236670 - DNA, 20 bp, Artificial Sequence
  Description of Artificial Sequence: Synthetic oligonucleotide
  Target: LAMA2; (-) strand; PAM type: YTN; PAM sequence: CTC
caactgggtggagcccacca

SEQ ID NO: 236671 - DNA, 20 bp, Artificial Sequence
  Description of Artificial Sequence: Synthetic oligonucleotide
  Target: LAMA2; (-) strand; PAM type: YTN; PAM sequence: CTG
ggaagctccaactgggtgga

SEQ ID NO: 236672 - DNA, 20 bp, Artificial Sequence
  Description of Artificial Sequence: Synthetic oligonucleotide
  Target: LAMA2; (-) strand; PAM type: YTN; PAM sequence: TTA
ggtaaacaaagcagctggga

SEQ ID NO: 236673 - DNA, 20 bp, Artificial Sequence
  Description of Artificial Sequence: Synthetic oligonucleotide
  Target: LAMA2; (-) strand; PAM type: YTN; PAM sequence: TTG
attaggtaaacaaagcagct

SEQ ID NO: 236674 - DNA, 20 bp, Artificial Sequence
  Description of Artificial Sequence: Synthetic oligonucleotide
  Target: LAMA2; (-) strand; PAM type: YTN; PAM sequence: CTT
gattaggtaaacaaagcagc

SEQ ID NO: 236675 - DNA, 20 bp, Artificial Sequence
  Description of Artificial Sequence: Synthetic oligonucleotide
  Target: LAMA2; (-) strand; PAM type: YTN; PAM sequence: TTG
cccaggcttgattaggtaaa

SEQ ID NO: 236676 - DNA, 20 bp, Artificial Sequence
  Description of Artificial Sequence: Synthetic oligonucleotide
  Target: LAMA2; (-) strand; PAM type: YTN; PAM sequence: CTG
ggggaggggcgccgccattg

SEQ ID NO: 236677 - DNA, 20 bp, Artificial Sequence
  Description of Artificial Sequence: Synthetic oligonucleotide
  Target: LAMA2; (-) strand; PAM type: YTN; PAM sequence: CTG
caaggcagcagcgaggctgg

SEQ ID NO: 236678 - DNA, 20 bp, Artificial Sequence
  Description of Artificial Sequence: Synthetic oligonucleotide
  Target: LAMA2; (-) strand; PAM type: YTN; PAM sequence: CTG
agatcaaactgcaaggcagc

SEQ ID NO: 236679 - DNA, 20 bp, Artificial Sequence
  Description of Artificial Sequence: Synthetic oligonucleotide
  Target: LAMA2; (-) strand; PAM type: YTN; PAM sequence: CTA
gcacagcagtctgagatcaa

SEQ ID NO: 236680 - DNA, 20 bp, Artificial Sequence
  Description of Artificial Sequence: Synthetic oligonucleotide
  Target: LAMA2; (-) strand; PAM type: YTN; PAM sequence: TTG
ctagcacagcagtctgagat

SEQ ID NO: 236681 - DNA, 20 bp, Artificial Sequence
  Description of Artificial Sequence: Synthetic oligonucleotide
  Target: LAMA2; (-) strand; PAM type: YTN; PAM sequence: CTG
attgctagcacagcagtctg

SEQ ID NO: 236682 - DNA, 20 bp, Artificial Sequence
  Description of Artificial Sequence: Synthetic oligonucleotide
  Target: LAMA2; (-) strand; PAM type: YTN; PAM sequence: CTC
gctgattgctagcacagcag

SEQ ID NO: 236683 - DNA, 20 bp, Artificial Sequence
  Description of Artificial Sequence: Synthetic oligonucleotide
  Target: LAMA2; (-) strand; PAM type: YTN; PAM sequence: CTA
cgcccatggagtctcgctga

SEQ ID NO: 236684 - DNA, 20 bp, Artificial Sequence
  Description of Artificial Sequence: Synthetic oligonucleotide
  Target: LAMA2; (-) strand; PAM type: YTN; PAM sequence: TTG
gagggtcctacgcccatgga

SEQ ID NO: 236685 - DNA, 20 bp, Artificial Sequence
  Description of Artificial Sequence: Synthetic oligonucleotide
  Target: LAMA2; (-) strand; PAM type: YTN; PAM sequence: CTT
ggagggtcctacgcccatgg

SEQ ID NO: 236686 - DNA, 20 bp, Artificial Sequence
  Description of Artificial Sequence: Synthetic oligonucleotide
  Target: LAMA2; (-) strand; PAM type: YTN; PAM sequence: CTG
gcttggagggtcctacgccc

SEQ ID NO: 236687 - DNA, 20 bp, Artificial Sequence
  Description of Artificial Sequence: Synthetic oligonucleotide
  Target: LAMA2; (-) strand; PAM type: YTN; PAM sequence: CTG
cacctggcttggagggtcct

SEQ ID NO: 236688 - DNA, 20 bp, Artificial Sequence
  Description of Artificial Sequence: Synthetic oligonucleotide
  Target: LAMA2; (-) strand; PAM type: YTN; PAM sequence: TTA
tatcctgcacctggcttgga

SEQ ID NO: 236689 - DNA, 20 bp, Artificial Sequence
  Description of Artificial Sequence: Synthetic oligonucleotide
  Target: LAMA2; (-) strand; PAM type: YTN; PAM sequence: TTA
aaaaacggtgaaccatgaga

SEQ ID NO: 236690 - DNA, 20 bp, Artificial Sequence
  Description of Artificial Sequence: Synthetic oligonucleotide
  Target: LAMA2; (-) strand; PAM type: YTN; PAM sequence: CTT
aaaaaacggtgaaccatgag

SEQ ID NO: 236691 - DNA, 20 bp, Artificial Sequence
  Description of Artificial Sequence: Synthetic oligonucleotide
  Target: LAMA2; (-) strand; PAM type: YTN; PAM sequence: TTC
cgacgggcttaaaaaacggt

SEQ ID NO: 236692 - DNA, 20 bp, Artificial Sequence
  Description of Artificial Sequence: Synthetic oligonucleotide
  Target: LAMA2; (-) strand; PAM type: YTN; PAM sequence: TTT
ccgacgggcttaaaaaacgg

SEQ ID NO: 236693 - DNA, 20 bp, Artificial Sequence
  Description of Artificial Sequence: Synthetic oligonucleotide
  Target: LAMA2; (-) strand; PAM type: YTN; PAM sequence: TTT
tccgacgggcttaaaaaacg

SEQ ID NO: 236694 - DNA, 20 bp, Artificial Sequence
  Description of Artificial Sequence: Synthetic oligonucleotide
  Target: LAMA2; (-) strand; PAM type: YTN; PAM sequence: CTT
ttccgacgggcttaaaaaac

SEQ ID NO: 236695 - DNA, 20 bp, Artificial Sequence
  Description of Artificial Sequence: Synthetic oligonucleotide
  Target: LAMA2; (-) strand; PAM type: YTN; PAM sequence: CTG
cgcttttccgacgggcttaa

SEQ ID NO: 236696 - DNA, 20 bp, Artificial Sequence
  Description of Artificial Sequence: Synthetic oligonucleotide
  Target: LAMA2; (-) strand; PAM type: YTN; PAM sequence: CTC
ccaccggaatactgcgcttt

SEQ ID NO: 236697 - DNA, 20 bp, Artificial Sequence
  Description of Artificial Sequence: Synthetic oligonucleotide
  Target: LAMA2; (-) strand; PAM type: YTN; PAM sequence: CTG
gaaaatcgggtcactcccac

SEQ ID NO: 236698 - DNA, 20 bp, Artificial Sequence
  Description of Artificial Sequence: Synthetic oligonucleotide
  Target: LAMA2; (-) strand; PAM type: YTN; PAM sequence: TTC
cgagtcacagaaaggggtga

SEQ ID NO: 236699 - DNA, 20 bp, Artificial Sequence
  Description of Artificial Sequence: Synthetic oligonucleotide
  Target: LAMA2; (-) strand; PAM type: YTN; PAM sequence: TTT
ccgagtcacagaaaggggtg

SEQ ID NO: 236700 - DNA, 20 bp, Artificial Sequence
  Description of Artificial Sequence: Synthetic oligonucleotide
  Target: LAMA2; (-) strand; PAM type: YTN; PAM sequence: CTT
tccgagtcacagaaaggggt

SEQ ID NO: 236701 - DNA, 20 bp, Artificial Sequence
  Description of Artificial Sequence: Synthetic oligonucleotide
  Target: LAMA2; (-) strand; PAM type: YTN; PAM sequence: TTC
cctttccgagtcacagaaag

SEQ ID NO: 236702 - DNA, 20 bp, Artificial Sequence
  Description of Artificial Sequence: Synthetic oligonucleotide
  Target: LAMA2; (-) strand; PAM type: YTN; PAM sequence: TTG
ggaagcgcaaggggtcaggg

SEQ ID NO: 236703 - DNA, 20 bp, Artificial Sequence
  Description of Artificial Sequence: Synthetic oligonucleotide
  Target: LAMA2; (-) strand; PAM type: YTN; PAM sequence: CTT
gggaagcgcaaggggtcagg

SEQ ID NO: 236704 - DNA, 20 bp, Artificial Sequence
  Description of Artificial Sequence: Synthetic oligonucleotide
  Target: LAMA2; (-) strand; PAM type: YTN; PAM sequence: CTC
acttgggaagcgcaaggggt

SEQ ID NO: 236705 - DNA, 20 bp, Artificial Sequence
  Description of Artificial Sequence: Synthetic oligonucleotide
  Target: LAMA2; (-) strand; PAM type: YTN; PAM sequence: TTG
cctcacttgggaagcgcaag

SEQ ID NO: 236706 - DNA, 20 bp, Artificial Sequence
  Description of Artificial Sequence: Synthetic oligonucleotide
  Target: LAMA2; (-) strand; PAM type: YTN; PAM sequence: CTG
cgcgagccgaagcagggcga

SEQ ID NO: 236707 - DNA, 20 bp, Artificial Sequence
  Description of Artificial Sequence: Synthetic oligonucleotide
  Target: LAMA2; (-) strand; PAM type: YTN; PAM sequence: CTA
gggaatgccagacagtgggc

SEQ ID NO: 236708 - DNA, 20 bp, Artificial Sequence
  Description of Artificial Sequence: Synthetic oligonucleotide
  Target: LAMA2; (-) strand; PAM type: YTN; PAM sequence: CTC
actagggaatgccagacagt

SEQ ID NO: 236709 - DNA, 20 bp, Artificial Sequence
  Description of Artificial Sequence: Synthetic oligonucleotide
  Target: LAMA2; (-) strand; PAM type: YTN; PAM sequence: TTC
atctcactagggaatgccag

SEQ ID NO: 236710 - DNA, 20 bp, Artificial Sequence
  Description of Artificial Sequence: Synthetic oligonucleotide
  Target: LAMA2; (-) strand; PAM type: YTN; PAM sequence: CTG
aggtaccgggttcatctcac

SEQ ID NO: 236711 - DNA, 20 bp, Artificial Sequence
  Description of Artificial Sequence: Synthetic oligonucleotide
  Target: LAMA2; (-) strand; PAM type: YTN; PAM sequence: TTC
catctgaggtaccgggttca

SEQ ID NO: 236712 - DNA, 20 bp, Artificial Sequence
  Description of Artificial Sequence: Synthetic oligonucleotide
  Target: LAMA2; (-) strand; PAM type: YTN; PAM sequence: TTT
ccatctgaggtaccgggttc

SEQ ID NO: 236713 - DNA, 20 bp, Artificial Sequence
  Description of Artificial Sequence: Synthetic oligonucleotide
  Target: LAMA2; (-) strand; PAM type: YTN; PAM sequence: CTG
catttccatctgaggtaccg

SEQ ID NO: 236714 - DNA, 20 bp, Artificial Sequence
  Description of Artificial Sequence: Synthetic oligonucleotide
  Target: LAMA2; (-) strand; PAM type: YTN; PAM sequence: TTC
tgcatttccatctgaggtac

SEQ ID NO: 236715 - DNA, 20 bp, Artificial Sequence
  Description of Artificial Sequence: Synthetic oligonucleotide
  Target: LAMA2; (-) strand; PAM type: YTN; PAM sequence: TTT
ctgcatttccatctgaggta

SEQ ID NO: 236716 - DNA, 20 bp, Artificial Sequence
  Description of Artificial Sequence: Synthetic oligonucleotide
  Target: LAMA2; (-) strand; PAM type: YTN; PAM sequence: CTC
ccagcgtgagcgacgcagaa

SEQ ID NO: 236717 - DNA, 20 bp, Artificial Sequence
  Description of Artificial Sequence: Synthetic oligonucleotide
  Target: LAMA2; (-) strand; PAM type: YTN; PAM sequence: CTA
cagctcccagcgtgagcgac

SEQ ID NO: 236718 - DNA, 20 bp, Artificial Sequence
  Description of Artificial Sequence: Synthetic oligonucleotide
  Target: LAMA2; (-) strand; PAM type: YTN; PAM sequence: CTC
cggtctacagctcccagcgt

SEQ ID NO: 236719 - DNA, 20 bp, Artificial Sequence
  Description of Artificial Sequence: Synthetic oligonucleotide
  Target: LAMA2; (-) strand; PAM type: YTN; PAM sequence: CTG
aatcggggagaggagccaac

SEQ ID NO: 236720 - DNA, 20 bp, Artificial Sequence
  Description of Artificial Sequence: Synthetic oligonucleotide
  Target: LAMA2; (-) strand; PAM type: YTN; PAM sequence: CTA
aaaaactgaatcggggagag

SEQ ID NO: 236721 - DNA, 20 bp, Artificial Sequence
  Description of Artificial Sequence: Synthetic oligonucleotide
  Target: LAMA2; (-) strand; PAM type: YTN; PAM sequence: CTC
actaaaaaactgaatcgggg

SEQ ID NO: 236722 - DNA, 20 bp, Artificial Sequence
  Description of Artificial Sequence: Synthetic oligonucleotide
  Target: LAMA2; (-) strand; PAM type: YTN; PAM sequence: CTA
aaggtaactcactaaaaaac

SEQ ID NO: 236723 - DNA, 20 bp, Artificial Sequence
  Description of Artificial Sequence: Synthetic oligonucleotide
  Target: LAMA2; (-) strand; PAM type: YTN; PAM sequence: TTA
gatactaaaggtaactcact

SEQ ID NO: 236724 - DNA, 20 bp, Artificial Sequence
  Description of Artificial Sequence: Synthetic oligonucleotide
  Target: LAMA2; (-) strand; PAM type: YTN; PAM sequence: TTT
agatactaaaggtaactcac

SEQ ID NO: 236725 - DNA, 20 bp, Artificial Sequence
  Description of Artificial Sequence: Synthetic oligonucleotide
  Target: LAMA2; (-) strand; PAM type: YTN; PAM sequence: TTA
tttagatactaaaggtaact

SEQ ID NO: 236726 - DNA, 20 bp, Artificial Sequence
  Description of Artificial Sequence: Synthetic oligonucleotide
  Target: LAMA2; (-) strand; PAM type: YTN; PAM sequence: CTG
ataagaatattatttagata

SEQ ID NO: 236727 - DNA, 20 bp, Artificial Sequence
  Description of Artificial Sequence: Synthetic oligonucleotide
  Target: LAMA2; (-) strand; PAM type: YTN; PAM sequence: TTC
aagacggagagtcaataggc

SEQ ID NO: 236728 - DNA, 20 bp, Artificial Sequence
  Description of Artificial Sequence: Synthetic oligonucleotide
  Target: LAMA2; (-) strand; PAM type: YTN; PAM sequence: TTT
caagacggagagtcaatagg

SEQ ID NO: 236729 - DNA, 20 bp, Artificial Sequence
  Description of Artificial Sequence: Synthetic oligonucleotide
  Target: LAMA2; (-) strand; PAM type: YTN; PAM sequence: CTT
tcaagacggagagtcaatag

SEQ ID NO: 236730 - DNA, 20 bp, Artificial Sequence
  Description of Artificial Sequence: Synthetic oligonucleotide
  Target: LAMA2; (-) strand; PAM type: YTN; PAM sequence: TTC
acctttcaagacggagagtc

SEQ ID NO: 236731 - DNA, 20 bp, Artificial Sequence
  Description of Artificial Sequence: Synthetic oligonucleotide
  Target: LAMA2; (-) strand; PAM type: YTN; PAM sequence: CTT
cacctttcaagacggagagt

SEQ ID NO: 236732 - DNA, 20 bp, Artificial Sequence
  Description of Artificial Sequence: Synthetic oligonucleotide
  Target: LAMA2; (-) strand; PAM type: YTN; PAM sequence: TTC
ttcacctttcaagacggaga

SEQ ID NO: 236733 - DNA, 20 bp, Artificial Sequence
  Description of Artificial Sequence: Synthetic oligonucleotide
  Target: LAMA2; (-) strand; PAM type: YTN; PAM sequence: TTT
cttcacctttcaagacggag

SEQ ID NO: 236734 - DNA, 20 bp, Artificial Sequence
  Description of Artificial Sequence: Synthetic oligonucleotide
  Target: LAMA2; (-) strand; PAM type: YTN; PAM sequence: TTG
tgaatgatacatttcttcac

SEQ ID NO: 236735 - DNA, 20 bp, Artificial Sequence
  Description of Artificial Sequence: Synthetic oligonucleotide
  Target: LAMA2; (-) strand; PAM type: YTN; PAM sequence: TTG
aacatgataaagatatcgta

SEQ ID NO: 236736 - DNA, 20 bp, Artificial Sequence
  Description of Artificial Sequence: Synthetic oligonucleotide
  Target: LAMA2; (-) strand; PAM type: YTN; PAM sequence: CTT
gaacatgataaagatatcgt

SEQ ID NO: 236737 - DNA, 20 bp, Artificial Sequence
  Description of Artificial Sequence: Synthetic oligonucleotide
  Target: LAMA2; (-) strand; PAM type: YTN; PAM sequence: CTC
ttgaacatgataaagatatc

SEQ ID NO: 236738 - DNA, 20 bp, Artificial Sequence
  Description of Artificial Sequence: Synthetic oligonucleotide
  Target: LAMA2; (-) strand; PAM type: YTN; PAM sequence: CTC
tcttgaacatgataaagata

SEQ ID NO: 236739 - DNA, 20 bp, Artificial Sequence
  Description of Artificial Sequence: Synthetic oligonucleotide
  Target: LAMA2; (-) strand; PAM type: YTN; PAM sequence: TTG
atgaaatagacatgtaagct

SEQ ID NO: 236740 - DNA, 20 bp, Artificial Sequence
  Description of Artificial Sequence: Synthetic oligonucleotide
  Target: LAMA2; (-) strand; PAM type: YTN; PAM sequence: CTA
aatgtagtcattgatgaaat

SEQ ID NO: 236741 - DNA, 20 bp, Artificial Sequence
  Description of Artificial Sequence: Synthetic oligonucleotide
  Target: LAMA2; (-) strand; PAM type: YTN; PAM sequence: CTC
aagagaaagtctaaatgtag

SEQ ID NO: 236742 - DNA, 20 bp, Artificial Sequence
  Description of Artificial Sequence: Synthetic oligonucleotide
  Target: LAMA2; (-) strand; PAM type: YTN; PAM sequence: TTA
tatagtaggacctcaagaga

SEQ ID NO: 236743 - DNA, 20 bp, Artificial Sequence
  Description of Artificial Sequence: Synthetic oligonucleotide
  Target: LAMA2; (-) strand; PAM type: YTN; PAM sequence: CTT
atatagtaggacctcaagag

SEQ ID NO: 236744 - DNA, 20 bp, Artificial Sequence
  Description of Artificial Sequence: Synthetic oligonucleotide
  Target: LAMA2; (-) strand; PAM type: YTN; PAM sequence: TTA
tcacatcttatatagtagga

SEQ ID NO: 236745 - DNA, 20 bp, Artificial Sequence
  Description of Artificial Sequence: Synthetic oligonucleotide
  Target: LAMA2; (-) strand; PAM type: YTN; PAM sequence: TTT
atcacatcttatatagtagg

SEQ ID NO: 236746 - DNA, 20 bp, Artificial Sequence
  Description of Artificial Sequence: Synthetic oligonucleotide
  Target: LAMA2; (-) strand; PAM type: YTN; PAM sequence: CTT
tatcacatcttatatagtag

SEQ ID NO: 236747 - DNA, 20 bp, Artificial Sequence
  Description of Artificial Sequence: Synthetic oligonucleotide
  Target: LAMA2; (-) strand; PAM type: YTN; PAM sequence: CTG
acaagtggtgaagaatgtag

SEQ ID NO: 236748 - DNA, 20 bp, Artificial Sequence
  Description of Artificial Sequence: Synthetic oligonucleotide
  Target: LAMA2; (-) strand; PAM type: YTN; PAM sequence: TTG
acagacactgacaagtggtg

SEQ ID NO: 236749 - DNA, 20 bp, Artificial Sequence
  Description of Artificial Sequence: Synthetic oligonucleotide
  Target: LAMA2; (-) strand; PAM type: YTN; PAM sequence: TTC
aaagatatgtaattgacaga

SEQ ID NO: 236750 - DNA, 20 bp, Artificial Sequence
  Description of Artificial Sequence: Synthetic oligonucleotide
  Target: LAMA2; (-) strand; PAM type: YTN; PAM sequence: TTT
caaagatatgtaattgacag

SEQ ID NO: 236751 - DNA, 20 bp, Artificial Sequence
  Description of Artificial Sequence: Synthetic oligonucleotide
  Target: LAMA2; (-) strand; PAM type: YTN; PAM sequence: TTG
aaaagatttcaaagatatgt

SEQ ID NO: 236752 - DNA, 20 bp, Artificial Sequence
  Description of Artificial Sequence: Synthetic oligonucleotide
  Target: LAMA2; (-) strand; PAM type: YTN; PAM sequence: TTT
gaaaagatttcaaagatatg

SEQ ID NO: 236753 - DNA, 20 bp, Artificial Sequence
  Description of Artificial Sequence: Synthetic oligonucleotide
  Target: LAMA2; (-) strand; PAM type: YTN; PAM sequence: CTT
tgaaaagatttcaaagatat

SEQ ID NO: 236754 - DNA, 20 bp, Artificial Sequence
  Description of Artificial Sequence: Synthetic oligonucleotide
  Target: LAMA2; (-) strand; PAM type: YTN; PAM sequence: CTG
tgaaaatctttgaaaagatt

SEQ ID NO: 236755 - DNA, 20 bp, Artificial Sequence
  Description of Artificial Sequence: Synthetic oligonucleotide
  Target: LAMA2; (-) strand; PAM type: YTN; PAM sequence: CTG
aatgtaactgtgaaaatctt

SEQ ID NO: 236756 - DNA, 20 bp, Artificial Sequence
  Description of Artificial Sequence: Synthetic oligonucleotide
  Target: LAMA2; (-) strand; PAM type: YTN; PAM sequence: TTG
gtccagagctgaatgtaact

SEQ ID NO: 236757 - DNA, 20 bp, Artificial Sequence
  Description of Artificial Sequence: Synthetic oligonucleotide
  Target: LAMA2; (-) strand; PAM type: YTN; PAM sequence: TTA
ttggtccagagctgaatgta

SEQ ID NO: 236758 - DNA, 20 bp, Artificial Sequence
  Description of Artificial Sequence: Synthetic oligonucleotide
  Target: LAMA2; (-) strand; PAM type: YTN; PAM sequence: TTA
attattggtccagagctgaa

SEQ ID NO: 236759 - DNA, 20 bp, Artificial Sequence
  Description of Artificial Sequence: Synthetic oligonucleotide
  Target: LAMA2; (-) strand; PAM type: YTN; PAM sequence: TTA
taagcattaattattggtcc

SEQ ID NO: 236760 - DNA, 20 bp, Artificial Sequence
  Description of Artificial Sequence: Synthetic oligonucleotide
  Target: LAMA2; (-) strand; PAM type: YTN; PAM sequence: TTG
aattataagcattaattatt

SEQ ID NO: 236761 - DNA, 20 bp, Artificial Sequence
  Description of Artificial Sequence: Synthetic oligonucleotide
  Target: LAMA2; (-) strand; PAM type: YTN; PAM sequence: TTT
gaattataagcattaattat

SEQ ID NO: 236762 - DNA, 20 bp, Artificial Sequence
  Description of Artificial Sequence: Synthetic oligonucleotide
  Target: LAMA2; (-) strand; PAM type: YTN; PAM sequence: TTT
tgaattataagcattaatta

SEQ ID NO: 236763 - DNA, 20 bp, Artificial Sequence
  Description of Artificial Sequence: Synthetic oligonucleotide
  Target: LAMA2; (-) strand; PAM type: YTN; PAM sequence: TTT
ttgaattataagcattaatt

SEQ ID NO: 236764 - DNA, 20 bp, Artificial Sequence
  Description of Artificial Sequence: Synthetic oligonucleotide
  Target: LAMA2; (-) strand; PAM type: YTN; PAM sequence: CTA
tttttgaattataagcatta

SEQ ID NO: 236765 - DNA, 20 bp, Artificial Sequence
  Description of Artificial Sequence: Synthetic oligonucleotide
  Target: LAMA2; (-) strand; PAM type: YTN; PAM sequence: TTC
tatttttgaattataagcat

SEQ ID NO: 236766 - DNA, 20 bp, Artificial Sequence
  Description of Artificial Sequence: Synthetic oligonucleotide
  Target: LAMA2; (-) strand; PAM type: YTN; PAM sequence: TTT
ctatttttgaattataagca

SEQ ID NO: 236767 - DNA, 20 bp, Artificial Sequence
  Description of Artificial Sequence: Synthetic oligonucleotide
  Target: LAMA2; (-) strand; PAM type: YTN; PAM sequence: TTA
tatttctatttttgaattat

SEQ ID NO: 236768 - DNA, 20 bp, Artificial Sequence
  Description of Artificial Sequence: Synthetic oligonucleotide
  Target: LAMA2; (-) strand; PAM type: YTN; PAM sequence: TTA
ttatatttctatttttgaat

SEQ ID NO: 236769 - DNA, 20 bp, Artificial Sequence
  Description of Artificial Sequence: Synthetic oligonucleotide
  Target: LAMA2; (-) strand; PAM type: YTN; PAM sequence: TTG
attattatatttctattttt

SEQ ID NO: 236770 - DNA, 20 bp, Artificial Sequence
  Description of Artificial Sequence: Synthetic oligonucleotide
  Target: LAMA2; (-) strand; PAM type: YTN; PAM sequence: CTT
gattattatatttctatttt

SEQ ID NO: 236771 - DNA, 20 bp, Artificial Sequence
  Description of Artificial Sequence: Synthetic oligonucleotide
  Target: LAMA2; (-) strand; PAM type: YTN; PAM sequence: TTA
caatcttgattattatattt

SEQ ID NO: 236772 - DNA, 20 bp, Artificial Sequence
  Description of Artificial Sequence: Synthetic oligonucleotide
  Target: LAMA2; (-) strand; PAM type: YTN; PAM sequence: TTA
cagtattacaatcttgatta

SEQ ID NO: 236773 - DNA, 20 bp, Artificial Sequence
  Description of Artificial Sequence: Synthetic oligonucleotide
  Target: LAMA2; (-) strand; PAM type: YTN; PAM sequence: CTA
attacagtattacaatcttg

SEQ ID NO: 236774 - DNA, 20 bp, Artificial Sequence
  Description of Artificial Sequence: Synthetic oligonucleotide
  Target: LAMA2; (-) strand; PAM type: YTN; PAM sequence: CTG
tatcaaataatatgtatcta

SEQ ID NO: 236775 - DNA, 20 bp, Artificial Sequence
  Description of Artificial Sequence: Synthetic oligonucleotide
  Target: LAMA2; (-) strand; PAM type: YTN; PAM sequence: TTC
gagcctgtatcaaataatat

SEQ ID NO: 236776 - DNA, 20 bp, Artificial Sequence
  Description of Artificial Sequence: Synthetic oligonucleotide
  Target: LAMA2; (-) strand; PAM type: YTN; PAM sequence: TTG
caattcgagcctgtatcaaa

SEQ ID NO: 236777 - DNA, 20 bp, Artificial Sequence
  Description of Artificial Sequence: Synthetic oligonucleotide
  Target: LAMA2; (-) strand; PAM type: YTN; PAM sequence: TTT
gcaattcgagcctgtatcaa

SEQ ID NO: 236778 - DNA, 20 bp, Artificial Sequence
  Description of Artificial Sequence: Synthetic oligonucleotide
  Target: LAMA2; (-) strand; PAM type: YTN; PAM sequence: TTT
tgcaattcgagcctgtatca

SEQ ID NO: 236779 - DNA, 20 bp, Artificial Sequence
  Description of Artificial Sequence: Synthetic oligonucleotide
  Target: LAMA2; (-) strand; PAM type: YTN; PAM sequence: CTA
caaatatgtgtccaattttg

SEQ ID NO: 236780 - DNA, 20 bp, Artificial Sequence
  Description of Artificial Sequence: Synthetic oligonucleotide
  Target: LAMA2; (-) strand; PAM type: YTN; PAM sequence: TTA
tcagagcaagcatgaagata

SEQ ID NO: 236781 - DNA, 20 bp, Artificial Sequence
  Description of Artificial Sequence: Synthetic oligonucleotide
  Target: LAMA2; (-) strand; PAM type: YTN; PAM sequence: CTA
aataagttatcagagcaagc

SEQ ID NO: 236782 - DNA, 20 bp, Artificial Sequence
  Description of Artificial Sequence: Synthetic oligonucleotide
  Target: LAMA2; (-) strand; PAM type: YTN; PAM sequence: TTC
ctaaataagttatcagagca

SEQ ID NO: 236783 - DNA, 20 bp, Artificial Sequence
  Description of Artificial Sequence: Synthetic oligonucleotide
  Target: LAMA2; (-) strand; PAM type: YTN; PAM sequence: TTT
cctaaataagttatcagagc

SEQ ID NO: 236784 - DNA, 20 bp, Artificial Sequence
  Description of Artificial Sequence: Synthetic oligonucleotide
  Target: LAMA2; (-) strand; PAM type: YTN; PAM sequence: CTT
tcctaaataagttatcagag

SEQ ID NO: 236785 - DNA, 20 bp, Artificial Sequence
  Description of Artificial Sequence: Synthetic oligonucleotide
  Target: LAMA2; (-) strand; PAM type: YTN; PAM sequence: CTC
tttcctaaataagttatcag

SEQ ID NO: 236786 - DNA, 20 bp, Artificial Sequence
  Description of Artificial Sequence: Synthetic oligonucleotide
  Target: LAMA2; (-) strand; PAM type: YTN; PAM sequence: TTA
cactctttcctaaataagtt

SEQ ID NO: 236787 - DNA, 20 bp, Artificial Sequence
  Description of Artificial Sequence: Synthetic oligonucleotide
  Target: LAMA2; (-) strand; PAM type: YTN; PAM sequence: CTT
acactctttcctaaataagt

SEQ ID NO: 236788 - DNA, 20 bp, Artificial Sequence
  Description of Artificial Sequence: Synthetic oligonucleotide
  Target: LAMA2; (-) strand; PAM type: YTN; PAM sequence: CTG
atgaagaagtgcaaaccatg

SEQ ID NO: 236789 - DNA, 20 bp, Artificial Sequence
  Description of Artificial Sequence: Synthetic oligonucleotide
  Target: LAMA2; (-) strand; PAM type: YTN; PAM sequence: TTA
tgtaatctgatgaagaagtg

SEQ ID NO: 236790 - DNA, 20 bp, Artificial Sequence
  Description of Artificial Sequence: Synthetic oligonucleotide
  Target: LAMA2; (-) strand; PAM type: YTN; PAM sequence: CTG
gttatgtaatctgatgaaga

SEQ ID NO: 236791 - DNA, 20 bp, Artificial Sequence
  Description of Artificial Sequence: Synthetic oligonucleotide
  Target: LAMA2; (-) strand; PAM type: YTN; PAM sequence: CTA
tctggttatgtaatctgatg

SEQ ID NO: 236792 - DNA, 20 bp, Artificial Sequence
  Description of Artificial Sequence: Synthetic oligonucleotide
  Target: LAMA2; (-) strand; PAM type: YTN; PAM sequence: CTA
ctatctggttatgtaatctg

SEQ ID NO: 236793 - DNA, 20 bp, Artificial Sequence
  Description of Artificial Sequence: Synthetic oligonucleotide
  Target: LAMA2; (-) strand; PAM type: YTN; PAM sequence: TTC
tactatctggttatgtaatc

SEQ ID NO: 236794 - DNA, 20 bp, Artificial Sequence
  Description of Artificial Sequence: Synthetic oligonucleotide
  Target: LAMA2; (-) strand; PAM type: YTN; PAM sequence: TTT
ctactatctggttatgtaat

SEQ ID NO: 236795 - DNA, 20 bp, Artificial Sequence
  Description of Artificial Sequence: Synthetic oligonucleotide
  Target: LAMA2; (-) strand; PAM type: YTN; PAM sequence: TTT
tctactatctggttatgtaa

SEQ ID NO: 236796 - DNA, 20 bp, Artificial Sequence
  Description of Artificial Sequence: Synthetic oligonucleotide
  Target: LAMA2; (-) strand; PAM type: YTN; PAM sequence: CTT
ttctactatctggttatgta

SEQ ID NO: 236797 - DNA, 20 bp, Artificial Sequence
  Description of Artificial Sequence: Synthetic oligonucleotide
  Target: LAMA2; (-) strand; PAM type: YTN; PAM sequence: CTA
aaatatccttttctactatc

SEQ ID NO: 236798 - DNA, 20 bp, Artificial Sequence
  Description of Artificial Sequence: Synthetic oligonucleotide
  Target: LAMA2; (-) strand; PAM type: YTN; PAM sequence: CTC
gtaatcaaatgaatgccagt

SEQ ID NO: 236799 - DNA, 20 bp, Artificial Sequence
  Description of Artificial Sequence: Synthetic oligonucleotide
  Target: LAMA2; (-) strand; PAM type: YTN; PAM sequence: TTC
cctcgtaatcaaatgaatgc

SEQ ID NO: 236800 - DNA, 20 bp, Artificial Sequence
  Description of Artificial Sequence: Synthetic oligonucleotide
  Target: LAMA2; (-) strand; PAM type: YTN; PAM sequence: TTT
ccctcgtaatcaaatgaatg

SEQ ID NO: 236801 - DNA, 20 bp, Artificial Sequence
  Description of Artificial Sequence: Synthetic oligonucleotide
  Target: LAMA2; (-) strand; PAM type: YTN; PAM sequence: CTA
aaagaaaaatcagagaagaa

SEQ ID NO: 236802 - DNA, 20 bp, Artificial Sequence
  Description of Artificial Sequence: Synthetic oligonucleotide
  Target: LAMA2; (-) strand; PAM type: YTN; PAM sequence: CTA
aaagaaaatgaagaaaacta

SEQ ID NO: 236803 - DNA, 20 bp, Artificial Sequence
  Description of Artificial Sequence: Synthetic oligonucleotide
  Target: LAMA2; (-) strand; PAM type: YTN; PAM sequence: CTA
ctaaaagaaaatgaagaaaa

SEQ ID NO: 236804 - DNA, 20 bp, Artificial Sequence
  Description of Artificial Sequence: Synthetic oligonucleotide
  Target: LAMA2; (-) strand; PAM type: YTN; PAM sequence: TTC
tactaaaagaaaatgaagaa

SEQ ID NO: 236805 - DNA, 20 bp, Artificial Sequence
  Description of Artificial Sequence: Synthetic oligonucleotide
  Target: LAMA2; (-) strand; PAM type: YTN; PAM sequence: CTT
ctactaaaagaaaatgaaga

SEQ ID NO: 236806 - DNA, 20 bp, Artificial Sequence
  Description of Artificial Sequence: Synthetic oligonucleotide
  Target: LAMA2; (-) strand; PAM type: YTN; PAM sequence: TTC
cttctactaaaagaaaatga

SEQ ID NO: 236807 - DNA, 20 bp, Artificial Sequence
  Description of Artificial Sequence: Synthetic oligonucleotide
  Target: LAMA2; (-) strand; PAM type: YTN; PAM sequence: CTT
ccttctactaaaagaaaatg

SEQ ID NO: 236808 - DNA, 20 bp, Artificial Sequence
  Description of Artificial Sequence: Synthetic oligonucleotide
  Target: LAMA2; (-) strand; PAM type: YTN; PAM sequence: CTA
caagggagaaaacttccttc

SEQ ID NO: 236809 - DNA, 20 bp, Artificial Sequence
  Description of Artificial Sequence: Synthetic oligonucleotide
  Target: LAMA2; (-) strand; PAM type: YTN; PAM sequence: TTA
caaatctacaagggagaaaa

SEQ ID NO: 236810 - DNA, 20 bp, Artificial Sequence
  Description of Artificial Sequence: Synthetic oligonucleotide
  Target: LAMA2; (-) strand; PAM type: YTN; PAM sequence: CTT
acaaatctacaagggagaaa

SEQ ID NO: 236811 - DNA, 20 bp, Artificial Sequence
  Description of Artificial Sequence: Synthetic oligonucleotide
  Target: LAMA2; (-) strand; PAM type: YTN; PAM sequence: CTC
ttacaaatctacaagggaga

SEQ ID NO: 236812 - DNA, 20 bp, Artificial Sequence
  Description of Artificial Sequence: Synthetic oligonucleotide
  Target: LAMA2; (-) strand; PAM type: YTN; PAM sequence: TTA
aagtgctcttacaaatctac

SEQ ID NO: 236813 - DNA, 20 bp, Artificial Sequence
  Description of Artificial Sequence: Synthetic oligonucleotide
  Target: LAMA2; (-) strand; PAM type: YTN; PAM sequence: TTT
aaagtgctcttacaaatcta

SEQ ID NO: 236814 - DNA, 20 bp, Artificial Sequence
  Description of Artificial Sequence: Synthetic oligonucleotide
  Target: LAMA2; (-) strand; PAM type: YTN; PAM sequence: TTA
atatttaaagtgctcttaca

SEQ ID NO: 236815 - DNA, 20 bp, Artificial Sequence
  Description of Artificial Sequence: Synthetic oligonucleotide
  Target: LAMA2; (-) strand; PAM type: YTN; PAM sequence: TTT
aatatttaaagtgctcttac

SEQ ID NO: 236816 - DNA, 20 bp, Artificial Sequence
  Description of Artificial Sequence: Synthetic oligonucleotide
  Target: LAMA2; (-) strand; PAM type: YTN; PAM sequence: TTT
taatatttaaagtgctctta

SEQ ID NO: 236817 - DNA, 20 bp, Artificial Sequence
  Description of Artificial Sequence: Synthetic oligonucleotide
  Target: LAMA2; (-) strand; PAM type: YTN; PAM sequence: TTT
ttaatatttaaagtgctctt

SEQ ID NO: 236818 - DNA, 20 bp, Artificial Sequence
  Description of Artificial Sequence: Synthetic oligonucleotide
  Target: LAMA2; (-) strand; PAM type: YTN; PAM sequence: CTG
tttttaatatttaaagtgct

SEQ ID NO: 236819 - DNA, 20 bp, Artificial Sequence
  Description of Artificial Sequence: Synthetic oligonucleotide
  Target: LAMA2; (-) strand; PAM type: YTN; PAM sequence: CTA
tcactgtttttaatatttaa

SEQ ID NO: 236820 - DNA, 20 bp, Artificial Sequence
  Description of Artificial Sequence: Synthetic oligonucleotide
  Target: LAMA2; (-) strand; PAM type: YTN; PAM sequence: TTA
aaaaatgatatactatcact

SEQ ID NO: 236821 - DNA, 20 bp, Artificial Sequence
  Description of Artificial Sequence: Synthetic oligonucleotide
  Target: LAMA2; (-) strand; PAM type: YTN; PAM sequence: TTA
ttaaaaaatgatatactatc

SEQ ID NO: 236822 - DNA, 20 bp, Artificial Sequence
  Description of Artificial Sequence: Synthetic oligonucleotide
  Target: LAMA2; (-) strand; PAM type: YTN; PAM sequence: CTG
attattaaaaaatgatatac

SEQ ID NO: 236823 - DNA, 20 bp, Artificial Sequence
  Description of Artificial Sequence: Synthetic oligonucleotide
  Target: LAMA2; (-) strand; PAM type: YTN; PAM sequence: CTG
aaaactgattattaaaaaat

SEQ ID NO: 236824 - DNA, 20 bp, Artificial Sequence
  Description of Artificial Sequence: Synthetic oligonucleotide
  Target: LAMA2; (-) strand; PAM type: YTN; PAM sequence: TTA
tcaacagtagtgagacacaa

SEQ ID NO: 236825 - DNA, 20 bp, Artificial Sequence
  Description of Artificial Sequence: Synthetic oligonucleotide
  Target: LAMA2; (-) strand; PAM type: YTN; PAM sequence: CTA
gaaattatcaacagtagtga

SEQ ID NO: 236826 - DNA, 20 bp, Artificial Sequence
  Description of Artificial Sequence: Synthetic oligonucleotide
  Target: LAMA2; (-) strand; PAM type: YTN; PAM sequence: TTG
tgcactagaaattatcaaca

SEQ ID NO: 236827 - DNA, 20 bp, Artificial Sequence
  Description of Artificial Sequence: Synthetic oligonucleotide
  Target: LAMA2; (-) strand; PAM type: YTN; PAM sequence: TTT
gtgcactagaaattatcaac

SEQ ID NO: 236828 - DNA, 20 bp, Artificial Sequence
  Description of Artificial Sequence: Synthetic oligonucleotide
  Target: LAMA2; (-) strand; PAM type: YTN; PAM sequence: TTG
aagtttgtgcactagaaatt

SEQ ID NO: 236829 - DNA, 20 bp, Artificial Sequence
  Description of Artificial Sequence: Synthetic oligonucleotide
  Target: LAMA2; (-) strand; PAM type: YTN; PAM sequence: TTT
gaagtttgtgcactagaaat

SEQ ID NO: 236830 - DNA, 20 bp, Artificial Sequence
  Description of Artificial Sequence: Synthetic oligonucleotide
  Target: LAMA2; (-) strand; PAM type: YTN; PAM sequence: TTT
tgaagtttgtgcactagaaa

SEQ ID NO: 236831 - DNA, 20 bp, Artificial Sequence
  Description of Artificial Sequence: Synthetic oligonucleotide
  Target: LAMA2; (-) strand; PAM type: YTN; PAM sequence: TTT
ttgaagtttgtgcactagaa

SEQ ID NO: 236832 - DNA, 20 bp, Artificial Sequence
  Description of Artificial Sequence: Synthetic oligonucleotide
  Target: LAMA2; (-) strand; PAM type: YTN; PAM sequence: TTA
cataaaatttttgaagtttg

SEQ ID NO: 236833 - DNA, 20 bp, Artificial Sequence
  Description of Artificial Sequence: Synthetic oligonucleotide
  Target: LAMA2; (-) strand; PAM type: YTN; PAM sequence: CTG
attacataaaatttttgaag

SEQ ID NO: 236834 - DNA, 20 bp, Artificial Sequence
  Description of Artificial Sequence: Synthetic oligonucleotide
  Target: LAMA2; (-) strand; PAM type: YTN; PAM sequence: TTG
acagctgattacataaaatt

SEQ ID NO: 236835 - DNA, 20 bp, Artificial Sequence
  Description of Artificial Sequence: Synthetic oligonucleotide
  Target: LAMA2; (-) strand; PAM type: YTN; PAM sequence: TTT
gacagctgattacataaaat

SEQ ID NO: 236836 - DNA, 20 bp, Artificial Sequence
  Description of Artificial Sequence: Synthetic oligonucleotide
  Target: LAMA2; (-) strand; PAM type: YTN; PAM sequence: CTT
tgacagctgattacataaaa

SEQ ID NO: 236837 - DNA, 20 bp, Artificial Sequence
  Description of Artificial Sequence: Synthetic oligonucleotide
  Target: LAMA2; (-) strand; PAM type: YTN; PAM sequence: CTG
aactttgacagctgattaca

SEQ ID NO: 236838 - DNA, 20 bp, Artificial Sequence
  Description of Artificial Sequence: Synthetic oligonucleotide
  Target: LAMA2; (-) strand; PAM type: YTN; PAM sequence: TTA
cctgaactttgacagctgat

SEQ ID NO: 236839 - DNA, 20 bp, Artificial Sequence
  Description of Artificial Sequence: Synthetic oligonucleotide
  Target: LAMA2; (-) strand; PAM type: YTN; PAM sequence: TTT
acctgaactttgacagctga

SEQ ID NO: 236840 - DNA, 20 bp, Artificial Sequence
  Description of Artificial Sequence: Synthetic oligonucleotide
  Target: LAMA2; (-) strand; PAM type: YTN; PAM sequence: TTT
tacctgaactttgacagctg

SEQ ID NO: 236841 - DNA, 20 bp, Artificial Sequence
  Description of Artificial Sequence: Synthetic oligonucleotide
  Target: LAMA2; (-) strand; PAM type: YTN; PAM sequence: TTA
taagtaaagaattttacctg

SEQ ID NO: 236842 - DNA, 20 bp, Artificial Sequence
  Description of Artificial Sequence: Synthetic oligonucleotide
  Target: LAMA2; (-) strand; PAM type: YTN; PAM sequence: TTA
ttataagtaaagaattttac

SEQ ID NO: 236843 - DNA, 20 bp, Artificial Sequence
  Description of Artificial Sequence: Synthetic oligonucleotide
  Target: LAMA2; (-) strand; PAM type: YTN; PAM sequence: TTG
gtatcattattataagtaaa

SEQ ID NO: 236844 - DNA, 20 bp, Artificial Sequence
  Description of Artificial Sequence: Synthetic oligonucleotide
  Target: LAMA2; (-) strand; PAM type: YTN; PAM sequence: TTA
taaagcatgtaagaaataca

SEQ ID NO: 236845 - DNA, 20 bp, Artificial Sequence
  Description of Artificial Sequence: Synthetic oligonucleotide
  Target: LAMA2; (-) strand; PAM type: YTN; PAM sequence: CTA
ggattataaagcatgtaaga

SEQ ID NO: 236846 - DNA, 20 bp, Artificial Sequence
  Description of Artificial Sequence: Synthetic oligonucleotide
  Target: LAMA2; (-) strand; PAM type: YTN; PAM sequence: TTC
taggattataaagcatgtaa

SEQ ID NO: 236847 - DNA, 20 bp, Artificial Sequence
  Description of Artificial Sequence: Synthetic oligonucleotide
  Target: LAMA2; (-) strand; PAM type: YTN; PAM sequence: TTG
ggatagatgagagttctagg

SEQ ID NO: 236848 - DNA, 20 bp, Artificial Sequence
  Description of Artificial Sequence: Synthetic oligonucleotide
  Target: LAMA2; (-) strand; PAM type: YTN; PAM sequence: CTT
gggatagatgagagttctag

SEQ ID NO: 236849 - DNA, 20 bp, Artificial Sequence
  Description of Artificial Sequence: Synthetic oligonucleotide
  Target: LAMA2; (-) strand; PAM type: YTN; PAM sequence: CTA
atcttgggatagatgagagt

SEQ ID NO: 236850 - DNA, 20 bp, Artificial Sequence
  Description of Artificial Sequence: Synthetic oligonucleotide
  Target: LAMA2; (-) strand; PAM type: YTN; PAM sequence: TTC
taatcttgggatagatgaga

SEQ ID NO: 236851 - DNA, 20 bp, Artificial Sequence
  Description of Artificial Sequence: Synthetic oligonucleotide
  Target: LAMA2; (-) strand; PAM type: YTN; PAM sequence: TTT
ctaatcttgggatagatgag

SEQ ID NO: 236852 - DNA, 20 bp, Artificial Sequence
  Description of Artificial Sequence: Synthetic oligonucleotide
  Target: LAMA2; (-) strand; PAM type: YTN; PAM sequence: TTT
tctaatcttgggatagatga

SEQ ID NO: 236853 - DNA, 20 bp, Artificial Sequence
  Description of Artificial Sequence: Synthetic oligonucleotide
  Target: LAMA2; (-) strand; PAM type: YTN; PAM sequence: TTT
ttctaatcttgggatagatg

SEQ ID NO: 236854 - DNA, 20 bp, Artificial Sequence
  Description of Artificial Sequence: Synthetic oligonucleotide
  Target: LAMA2; (-) strand; PAM type: YTN; PAM sequence: TTA
taaaatgaaatcatacaaat

SEQ ID NO: 236855 - DNA, 20 bp, Artificial Sequence
  Description of Artificial Sequence: Synthetic oligonucleotide
  Target: LAMA2; (-) strand; PAM type: YTN; PAM sequence: TTA
agtattataaaatgaaatca

SEQ ID NO: 236856 - DNA, 20 bp, Artificial Sequence
  Description of Artificial Sequence: Synthetic oligonucleotide
  Target: LAMA2; (-) strand; PAM type: YTN; PAM sequence: CTA
gatggaataaaaaattaagt

SEQ ID NO: 236857 - DNA, 20 bp, Artificial Sequence
  Description of Artificial Sequence: Synthetic oligonucleotide
  Target: LAMA2; (-) strand; PAM type: YTN; PAM sequence: TTC
tagatggaataaaaaattaa

SEQ ID NO: 236858 - DNA, 20 bp, Artificial Sequence
  Description of Artificial Sequence: Synthetic oligonucleotide
  Target: LAMA2; (-) strand; PAM type: YTN; PAM sequence: TTA
tgaaatataacaaaataaat

SEQ ID NO: 236859 - DNA, 20 bp, Artificial Sequence
  Description of Artificial Sequence: Synthetic oligonucleotide
  Target: LAMA2; (-) strand; PAM type: YTN; PAM sequence: CTT
atgaaatataacaaaataaa

SEQ ID NO: 236860 - DNA, 20 bp, Artificial Sequence
  Description of Artificial Sequence: Synthetic oligonucleotide
  Target: LAMA2; (-) strand; PAM type: YTN; PAM sequence: TTC
cttatgaaatataacaaaat

SEQ ID NO: 236861 - DNA, 20 bp, Artificial Sequence
  Description of Artificial Sequence: Synthetic oligonucleotide
  Target: LAMA2; (-) strand; PAM type: YTN; PAM sequence: TTT
ccttatgaaatataacaaaa

SEQ ID NO: 236862 - DNA, 20 bp, Artificial Sequence
  Description of Artificial Sequence: Synthetic oligonucleotide
  Target: LAMA2; (-) strand; PAM type: YTN; PAM sequence: TTG
aaaatttccttatgaaatat

SEQ ID NO: 236863 - DNA, 20 bp, Artificial Sequence
  Description of Artificial Sequence: Synthetic oligonucleotide
  Target: LAMA2; (-) strand; PAM type: YTN; PAM sequence: TTT
gaaaatttccttatgaaata

SEQ ID NO: 236864 - DNA, 20 bp, Artificial Sequence
  Description of Artificial Sequence: Synthetic oligonucleotide
  Target: LAMA2; (-) strand; PAM type: YTN; PAM sequence: TTG
gaaaacaaaatgtagtttga

SEQ ID NO: 236865 - DNA, 20 bp, Artificial Sequence
  Description of Artificial Sequence: Synthetic oligonucleotide
  Target: LAMA2; (-) strand; PAM type: YTN; PAM sequence: TTA
aatgtagatgagtaaaaaag

SEQ ID NO: 236866 - DNA, 20 bp, Artificial Sequence
  Description of Artificial Sequence: Synthetic oligonucleotide
  Target: LAMA2; (-) strand; PAM type: YTN; PAM sequence: CTG
aaagtaatattaaatgtaga

SEQ ID NO: 236867 - DNA, 20 bp, Artificial Sequence
  Description of Artificial Sequence: Synthetic oligonucleotide
  Target: LAMA2; (-) strand; PAM type: YTN; PAM sequence: CTA
aagagctgaaagtaatatta

SEQ ID NO: 236868 - DNA, 20 bp, Artificial Sequence
  Description of Artificial Sequence: Synthetic oligonucleotide
  Target: LAMA2; (-) strand; PAM type: YTN; PAM sequence: TTA
atatgtctaaagagctgaaa

SEQ ID NO: 236869 - DNA, 20 bp, Artificial Sequence
  Description of Artificial Sequence: Synthetic oligonucleotide
  Target: LAMA2; (-) strand; PAM type: YTN; PAM sequence: TTT
aatatgtctaaagagctgaa

SEQ ID NO: 236870 - DNA, 20 bp, Artificial Sequence
  Description of Artificial Sequence: Synthetic oligonucleotide
  Target: LAMA2; (-) strand; PAM type: YTN; PAM sequence: TTC
cgaaaataaaataaatatat

SEQ ID NO: 236871 - DNA, 20 bp, Artificial Sequence
  Description of Artificial Sequence: Synthetic oligonucleotide
  Target: LAMA2; (-) strand; PAM type: YTN; PAM sequence: CTA
acagattccgaaaataaaat

SEQ ID NO: 236872 - DNA, 20 bp, Artificial Sequence
  Description of Artificial Sequence: Synthetic oligonucleotide
  Target: LAMA2; (-) strand; PAM type: YTN; PAM sequence: TTC
taacagattccgaaaataaa

SEQ ID NO: 236873 - DNA, 20 bp, Artificial Sequence
  Description of Artificial Sequence: Synthetic oligonucleotide
  Target: LAMA2; (-) strand; PAM type: YTN; PAM sequence: CTT
ctaacagattccgaaaataa

SEQ ID NO: 236874 - DNA, 20 bp, Artificial Sequence
  Description of Artificial Sequence: Synthetic oligonucleotide
  Target: LAMA2; (-) strand; PAM type: YTN; PAM sequence: CTC
aataacagagtgcttctaac

SEQ ID NO: 236875 - DNA, 20 bp, Artificial Sequence
  Description of Artificial Sequence: Synthetic oligonucleotide
  Target: LAMA2; (-) strand; PAM type: YTN; PAM sequence: CTC
agactcaataacagagtgct

SEQ ID NO: 236876 - DNA, 20 bp, Artificial Sequence
  Description of Artificial Sequence: Synthetic oligonucleotide
  Target: LAMA2; (-) strand; PAM type: YTN; PAM sequence: TTA
gaagagaaataaaaatgcag

SEQ ID NO: 236877 - DNA, 20 bp, Artificial Sequence
  Description of Artificial Sequence: Synthetic oligonucleotide
  Target: LAMA2; (-) strand; PAM type: YTN; PAM sequence: TTA
cgaaacataagaaaatgaag

SEQ ID NO: 236878 - DNA, 20 bp, Artificial Sequence
  Description of Artificial Sequence: Synthetic oligonucleotide
  Target: LAMA2; (-) strand; PAM type: YTN; PAM sequence: CTT
acgaaacataagaaaatgaa

SEQ ID NO: 236879 - DNA, 20 bp, Artificial Sequence
  Description of Artificial Sequence: Synthetic oligonucleotide
  Target: LAMA2; (-) strand; PAM type: YTN; PAM sequence: CTA
agaaatacatatgcacgcat

SEQ ID NO: 236880 - DNA, 20 bp, Artificial Sequence
  Description of Artificial Sequence: Synthetic oligonucleotide
  Target: LAMA2; (-) strand; PAM type: YTN; PAM sequence: CTG
aaagaataaactaagaaata

SEQ ID NO: 236881 - DNA, 20 bp, Artificial Sequence
  Description of Artificial Sequence: Synthetic oligonucleotide
  Target: LAMA2; (-) strand; PAM type: YTN; PAM sequence: TTC
tgaaagaataaactaagaaa

SEQ ID NO: 236882 - DNA, 20 bp, Artificial Sequence
  Description of Artificial Sequence: Synthetic oligonucleotide
  Target: LAMA2; (-) strand; PAM type: YTN; PAM sequence: CTT
ctgaaagaataaactaagaa

SEQ ID NO: 236883 - DNA, 20 bp, Artificial Sequence
  Description of Artificial Sequence: Synthetic oligonucleotide
  Target: LAMA2; (-) strand; PAM type: YTN; PAM sequence: TTC
aaggcttctgaaagaataaa

SEQ ID NO: 236884 - DNA, 20 bp, Artificial Sequence
  Description of Artificial Sequence: Synthetic oligonucleotide
  Target: LAMA2; (-) strand; PAM type: YTN; PAM sequence: TTC
atgtaaattcaaggcttctg

SEQ ID NO: 236885 - DNA, 20 bp, Artificial Sequence
  Description of Artificial Sequence: Synthetic oligonucleotide
  Target: LAMA2; (-) strand; PAM type: YTN; PAM sequence: CTT
catgtaaattcaaggcttct

SEQ ID NO: 236886 - DNA, 20 bp, Artificial Sequence
  Description of Artificial Sequence: Synthetic oligonucleotide
  Target: LAMA2; (-) strand; PAM type: YTN; PAM sequence: TTA
tcacataacttcatgtaaat

SEQ ID NO: 236887 - DNA, 20 bp, Artificial Sequence
  Description of Artificial Sequence: Synthetic oligonucleotide
  Target: LAMA2; (-) strand; PAM type: YTN; PAM sequence: CTA
tataaggtaggtcattatca

SEQ ID NO: 236888 - DNA, 20 bp, Artificial Sequence
  Description of Artificial Sequence: Synthetic oligonucleotide
  Target: LAMA2; (-) strand; PAM type: YTN; PAM sequence: CTA
ggtcctatataaggtaggtc

SEQ ID NO: 236889 - DNA, 20 bp, Artificial Sequence
  Description of Artificial Sequence: Synthetic oligonucleotide
  Target: LAMA2; (-) strand; PAM type: YTN; PAM sequence: TTC
taggtcctatataaggtagg

SEQ ID NO: 236890 - DNA, 20 bp, Artificial Sequence
  Description of Artificial Sequence: Synthetic oligonucleotide
  Target: LAMA2; (-) strand; PAM type: YTN; PAM sequence: TTA
cagaagaacaacaaaaaatt

SEQ ID NO: 236891 - DNA, 20 bp, Artificial Sequence
  Description of Artificial Sequence: Synthetic oligonucleotide
  Target: LAMA2; (-) strand; PAM type: YTN; PAM sequence: TTT
acagaagaacaacaaaaaat

SEQ ID NO: 236892 - DNA, 20 bp, Artificial Sequence
  Description of Artificial Sequence: Synthetic oligonucleotide
  Target: LAMA2; (-) strand; PAM type: YTN; PAM sequence: TTT
tacagaagaacaacaaaaaa

SEQ ID NO: 236893 - DNA, 20 bp, Artificial Sequence
  Description of Artificial Sequence: Synthetic oligonucleotide
  Target: LAMA2; (-) strand; PAM type: YTN; PAM sequence: TTC
agggagcatggttttacaga

SEQ ID NO: 236894 - DNA, 20 bp, Artificial Sequence
  Description of Artificial Sequence: Synthetic oligonucleotide
  Target: LAMA2; (-) strand; PAM type: YTN; PAM sequence: CTA
cagttcagggagcatggttt

SEQ ID NO: 236895 - DNA, 20 bp, Artificial Sequence
  Description of Artificial Sequence: Synthetic oligonucleotide
  Target: LAMA2; (-) strand; PAM type: YTN; PAM sequence: CTA
gactacagttcagggagcat

SEQ ID NO: 236896 - DNA, 20 bp, Artificial Sequence
  Description of Artificial Sequence: Synthetic oligonucleotide
  Target: LAMA2; (-) strand; PAM type: YTN; PAM sequence: CTG
atgactagactacagttcag

SEQ ID NO: 236897 - DNA, 20 bp, Artificial Sequence
  Description of Artificial Sequence: Synthetic oligonucleotide
  Target: LAMA2; (-) strand; PAM type: YTN; PAM sequence: TTC
tgatgactagactacagttc

SEQ ID NO: 236898 - DNA, 20 bp, Artificial Sequence
  Description of Artificial Sequence: Synthetic oligonucleotide
  Target: LAMA2; (-) strand; PAM type: YTN; PAM sequence: CTG
gcaaattctgatgactagac

SEQ ID NO: 236899 - DNA, 20 bp, Artificial Sequence
  Description of Artificial Sequence: Synthetic oligonucleotide
  Target: LAMA2; (-) strand; PAM type: YTN; PAM sequence: TTG
actggcaaattctgatgact

SEQ ID NO: 236900 - DNA, 20 bp, Artificial Sequence
  Description of Artificial Sequence: Synthetic oligonucleotide
  Target: LAMA2; (-) strand; PAM type: YTN; PAM sequence: CTG
gagttgactggcaaattctg

SEQ ID NO: 236901 - DNA, 20 bp, Artificial Sequence
  Description of Artificial Sequence: Synthetic oligonucleotide
  Target: LAMA2; (-) strand; PAM type: YTN; PAM sequence: TTC
ctggagttgactggcaaatt

SEQ ID NO: 236902 - DNA, 20 bp, Artificial Sequence
  Description of Artificial Sequence: Synthetic oligonucleotide
  Target: LAMA2; (-) strand; PAM type: YTN; PAM sequence: TTT
cctggagttgactggcaaat

SEQ ID NO: 236903 - DNA, 20 bp, Artificial Sequence
  Description of Artificial Sequence: Synthetic oligonucleotide
  Target: LAMA2; (-) strand; PAM type: YTN; PAM sequence: CTT
tcctggagttgactggcaaa

SEQ ID NO: 236904 - DNA, 20 bp, Artificial Sequence
  Description of Artificial Sequence: Synthetic oligonucleotide
  Target: LAMA2; (-) strand; PAM type: YTN; PAM sequence: TTA
aaacaatgtctttcctggag

SEQ ID NO: 236905 - DNA, 20 bp, Artificial Sequence
  Description of Artificial Sequence: Synthetic oligonucleotide
  Target: LAMA2; (-) strand; PAM type: YTN; PAM sequence: TTT
aaaacaatgtctttcctgga

SEQ ID NO: 236906 - DNA, 20 bp, Artificial Sequence
  Description of Artificial Sequence: Synthetic oligonucleotide
  Target: LAMA2; (-) strand; PAM type: YTN; PAM sequence: CTT
taaaacaatgtctttcctgg

SEQ ID NO: 236907 - DNA, 20 bp, Artificial Sequence
  Description of Artificial Sequence: Synthetic oligonucleotide
  Target: LAMA2; (-) strand; PAM type: YTN; PAM sequence: TTC
tttaaaacaatgtctttcct

SEQ ID NO: 236908 - DNA, 20 bp, Artificial Sequence
  Description of Artificial Sequence: Synthetic oligonucleotide
  Target: LAMA2; (-) strand; PAM type: YTN; PAM sequence: TTA
cgtcattctttaaaacaatg

SEQ ID NO: 236909 - DNA, 20 bp, Artificial Sequence
  Description of Artificial Sequence: Synthetic oligonucleotide
  Target: LAMA2; (-) strand; PAM type: YTN; PAM sequence: CTT
acgtcattctttaaaacaat

SEQ ID NO: 236910 - DNA, 20 bp, Artificial Sequence
  Description of Artificial Sequence: Synthetic oligonucleotide
  Target: LAMA2; (-) strand; PAM type: YTN; PAM sequence: CTA
gaaagcttacgtcattcttt

SEQ ID NO: 236911 - DNA, 20 bp, Artificial Sequence
  Description of Artificial Sequence: Synthetic oligonucleotide
  Target: LAMA2; (-) strand; PAM type: YTN; PAM sequence: TTC
tagaaagcttacgtcattct

SEQ ID NO: 236912 - DNA, 20 bp, Artificial Sequence
  Description of Artificial Sequence: Synthetic oligonucleotide
  Target: LAMA2; (-) strand; PAM type: YTN; PAM sequence: CTT
ctagaaagcttacgtcattc

SEQ ID NO: 236913 - DNA, 20 bp, Artificial Sequence
  Description of Artificial Sequence: Synthetic oligonucleotide
  Target: LAMA2; (-) strand; PAM type: YTN; PAM sequence: TTG
acttctagaaagcttacgtc

SEQ ID NO: 236914 - DNA, 20 bp, Artificial Sequence
  Description of Artificial Sequence: Synthetic oligonucleotide
  Target: LAMA2; (-) strand; PAM type: YTN; PAM sequence: CTA
caaaattgacttctagaaag

SEQ ID NO: 236915 - DNA, 20 bp, Artificial Sequence
  Description of Artificial Sequence: Synthetic oligonucleotide
  Target: LAMA2; (-) strand; PAM type: YTN; PAM sequence: TTG
gagatgagaaactacaaaat

SEQ ID NO: 236916 - DNA, 20 bp, Artificial Sequence
  Description of Artificial Sequence: Synthetic oligonucleotide
  Target: LAMA2; (-) strand; PAM type: YTN; PAM sequence: CTT
ggagatgagaaactacaaaa

SEQ ID NO: 236917 - DNA, 20 bp, Artificial Sequence
  Description of Artificial Sequence: Synthetic oligonucleotide
  Target: LAMA2; (-) strand; PAM type: YTN; PAM sequence: CTG
gcaagaaataaagaaacccc

SEQ ID NO: 236918 - DNA, 20 bp, Artificial Sequence
  Description of Artificial Sequence: Synthetic oligonucleotide
  Target: LAMA2; (-) strand; PAM type: YTN; PAM sequence: TTG
cgctggcaagaaataaagaa

SEQ ID NO: 236919 - DNA, 20 bp, Artificial Sequence
  Description of Artificial Sequence: Synthetic oligonucleotide
  Target: LAMA2; (-) strand; PAM type: YTN; PAM sequence: TTA
aacgtagaaaaatagatagg

SEQ ID NO: 236920 - DNA, 20 bp, Artificial Sequence
  Description of Artificial Sequence: Synthetic oligonucleotide
  Target: LAMA2; (-) strand; PAM type: YTN; PAM sequence: TTG
aagatacagaataaaattaa

SEQ ID NO: 236921 - DNA, 20 bp, Artificial Sequence
  Description of Artificial Sequence: Synthetic oligonucleotide
  Target: LAMA2; (-) strand; PAM type: YTN; PAM sequence: TTC
agaacagttgaagatacaga

SEQ ID NO: 236922 - DNA, 20 bp, Artificial Sequence
  Description of Artificial Sequence: Synthetic oligonucleotide
  Target: LAMA2; (-) strand; PAM type: YTN; PAM sequence: CTG
ttcagaacagttgaagatac

SEQ ID NO: 236923 - DNA, 20 bp, Artificial Sequence
  Description of Artificial Sequence: Synthetic oligonucleotide
  Target: LAMA2; (-) strand; PAM type: YTN; PAM sequence: CTC
ctgttcagaacagttgaaga

SEQ ID NO: 236924 - DNA, 20 bp, Artificial Sequence
  Description of Artificial Sequence: Synthetic oligonucleotide
  Target: LAMA2; (-) strand; PAM type: YTN; PAM sequence: CTA
gatgtccaaaaaacccctcc

SEQ ID NO: 236925 - DNA, 20 bp, Artificial Sequence
  Description of Artificial Sequence: Synthetic oligonucleotide
  Target: LAMA2; (-) strand; PAM type: YTN; PAM sequence: TTG
tagactagatgtccaaaaaa

SEQ ID NO: 236926 - DNA, 20 bp, Artificial Sequence
  Description of Artificial Sequence: Synthetic oligonucleotide
  Target: LAMA2; (-) strand; PAM type: YTN; PAM sequence: CTG
gaagtattgtagactagatg

SEQ ID NO: 236927 - DNA, 20 bp, Artificial Sequence
  Description of Artificial Sequence: Synthetic oligonucleotide
  Target: LAMA2; (-) strand; PAM type: YTN; PAM sequence: TTC
tggaagtattgtagactaga

SEQ ID NO: 236928 - DNA, 20 bp, Artificial Sequence
  Description of Artificial Sequence: Synthetic oligonucleotide
  Target: LAMA2; (-) strand; PAM type: YTN; PAM sequence: TTT
ctggaagtattgtagactag

SEQ ID NO: 236929 - DNA, 20 bp, Artificial Sequence
  Description of Artificial Sequence: Synthetic oligonucleotide
  Target: LAMA2; (-) strand; PAM type: YTN; PAM sequence: TTA
tttctggaagtattgtagac

SEQ ID NO: 236930 - DNA, 20 bp, Artificial Sequence
  Description of Artificial Sequence: Synthetic oligonucleotide
  Target: LAMA2; (-) strand; PAM type: YTN; PAM sequence: TTT
atttctggaagtattgtaga

SEQ ID NO: 236931 - DNA, 20 bp, Artificial Sequence
  Description of Artificial Sequence: Synthetic oligonucleotide
  Target: LAMA2; (-) strand; PAM type: YTN; PAM sequence: TTT
tatttctggaagtattgtag

SEQ ID NO: 236932 - DNA, 20 bp, Artificial Sequence
  Description of Artificial Sequence: Synthetic oligonucleotide
  Target: LAMA2; (-) strand; PAM type: YTN; PAM sequence: CTT
ttatttctggaagtattgta

SEQ ID NO: 236933 - DNA, 20 bp, Artificial Sequence
  Description of Artificial Sequence: Synthetic oligonucleotide
  Target: LAMA2; (-) strand; PAM type: YTN; PAM sequence: TTA
acttttatttctggaagtat

SEQ ID NO: 236934 - DNA, 20 bp, Artificial Sequence
  Description of Artificial Sequence: Synthetic oligonucleotide
  Target: LAMA2; (-) strand; PAM type: YTN; PAM sequence: CTT
aacttttatttctggaagta

SEQ ID NO: 236935 - DNA, 20 bp, Artificial Sequence
  Description of Artificial Sequence: Synthetic oligonucleotide
  Target: LAMA2; (-) strand; PAM type: YTN; PAM sequence: CTA
tcttaacttttatttctgga

SEQ ID NO: 236936 - DNA, 20 bp, Artificial Sequence
  Description of Artificial Sequence: Synthetic oligonucleotide
  Target: LAMA2; (-) strand; PAM type: YTN; PAM sequence: TTA
aacaatgtctatcttaactt

SEQ ID NO: 236937 - DNA, 20 bp, Artificial Sequence
  Description of Artificial Sequence: Synthetic oligonucleotide
  Target: LAMA2; (-) strand; PAM type: YTN; PAM sequence: TTC
atgtattaaacaatgtctat

SEQ ID NO: 236938 - DNA, 20 bp, Artificial Sequence
  Description of Artificial Sequence: Synthetic oligonucleotide
  Target: LAMA2; (-) strand; PAM type: YTN; PAM sequence: CTT
catgtattaaacaatgtcta

SEQ ID NO: 236939 - DNA, 20 bp, Artificial Sequence
  Description of Artificial Sequence: Synthetic oligonucleotide
  Target: LAMA2; (-) strand; PAM type: YTN; PAM sequence: CTA
aatgtagaagtacttcatgt

SEQ ID NO: 236940 - DNA, 20 bp, Artificial Sequence
  Description of Artificial Sequence: Synthetic oligonucleotide
  Target: LAMA2; (-) strand; PAM type: YTN; PAM sequence: TTG
aggctaaatgtagaagtact

SEQ ID NO: 236941 - DNA, 20 bp, Artificial Sequence
  Description of Artificial Sequence: Synthetic oligonucleotide
  Target: LAMA2; (-) strand; PAM type: YTN; PAM sequence: TTC
cagaaattgaggctaaatgt

SEQ ID NO: 236942 - DNA, 20 bp, Artificial Sequence
  Description of Artificial Sequence: Synthetic oligonucleotide
  Target: LAMA2; (-) strand; PAM type: YTN; PAM sequence: TTT
ccagaaattgaggctaaatg

SEQ ID NO: 236943 - DNA, 20 bp, Artificial Sequence
  Description of Artificial Sequence: Synthetic oligonucleotide
  Target: LAMA2; (-) strand; PAM type: YTN; PAM sequence: TTA
aaatttccagaaattgaggc

SEQ ID NO: 236944 - DNA, 20 bp, Artificial Sequence
  Description of Artificial Sequence: Synthetic oligonucleotide
  Target: LAMA2; (-) strand; PAM type: YTN; PAM sequence: CTG
atgttaaaatttccagaaat

SEQ ID NO: 236945 - DNA, 20 bp, Artificial Sequence
  Description of Artificial Sequence: Synthetic oligonucleotide
  Target: LAMA2; (-) strand; PAM type: YTN; PAM sequence: TTC
tgatgttaaaatttccagaa

SEQ ID NO: 236946 - DNA, 20 bp, Artificial Sequence
  Description of Artificial Sequence: Synthetic oligonucleotide
  Target: LAMA2; (-) strand; PAM type: YTN; PAM sequence: TTT
ctgatgttaaaatttccaga

SEQ ID NO: 236947 - DNA, 20 bp, Artificial Sequence
  Description of Artificial Sequence: Synthetic oligonucleotide
  Target: LAMA2; (-) strand; PAM type: YTN; PAM sequence: TTA
tttctgatgttaaaatttcc

SEQ ID NO: 236948 - DNA, 20 bp, Artificial Sequence
  Description of Artificial Sequence: Synthetic oligonucleotide
  Target: LAMA2; (-) strand; PAM type: YTN; PAM sequence: TTA
acattatttctgatgttaaa

SEQ ID NO: 236949 - DNA, 20 bp, Artificial Sequence
  Description of Artificial Sequence: Synthetic oligonucleotide
  Target: LAMA2; (-) strand; PAM type: YTN; PAM sequence: TTT
aacattatttctgatgttaa

SEQ ID NO: 236950 - DNA, 20 bp, Artificial Sequence
  Description of Artificial Sequence: Synthetic oligonucleotide
  Target: LAMA2; (-) strand; PAM type: YTN; PAM sequence: TTA
aatagtttaacattatttct

SEQ ID NO: 236951 - DNA, 20 bp, Artificial Sequence
  Description of Artificial Sequence: Synthetic oligonucleotide
  Target: LAMA2; (-) strand; PAM type: YTN; PAM sequence: TTG
caaaggcattaaatagttta

SEQ ID NO: 236952 - DNA, 20 bp, Artificial Sequence
  Description of Artificial Sequence: Synthetic oligonucleotide
  Target: LAMA2; (-) strand; PAM type: YTN; PAM sequence: TTT
gcaaaggcattaaatagttt

SEQ ID NO: 236953 - DNA, 20 bp, Artificial Sequence
  Description of Artificial Sequence: Synthetic oligonucleotide
  Target: LAMA2; (-) strand; PAM type: YTN; PAM sequence: TTA
ataaagtttgcaaaggcatt

SEQ ID NO: 236954 - DNA, 20 bp, Artificial Sequence
  Description of Artificial Sequence: Synthetic oligonucleotide
  Target: LAMA2; (-) strand; PAM type: YTN; PAM sequence: TTT
aataaagtttgcaaaggcat

SEQ ID NO: 236955 - DNA, 20 bp, Artificial Sequence
  Description of Artificial Sequence: Synthetic oligonucleotide
  Target: LAMA2; (-) strand; PAM type: YTN; PAM sequence: TTT
taataaagtttgcaaaggca

SEQ ID NO: 236956 - DNA, 20 bp, Artificial Sequence
  Description of Artificial Sequence: Synthetic oligonucleotide
  Target: LAMA2; (-) strand; PAM type: YTN; PAM sequence: CTG
ataattttaataaagtttgc

SEQ ID NO: 236957 - DNA, 20 bp, Artificial Sequence
  Description of Artificial Sequence: Synthetic oligonucleotide
  Target: LAMA2; (-) strand; PAM type: YTN; PAM sequence: TTA
cccaatagaccaaatgggaa

SEQ ID NO: 236958 - DNA, 20 bp, Artificial Sequence
  Description of Artificial Sequence: Synthetic oligonucleotide
  Target: LAMA2; (-) strand; PAM type: YTN; PAM sequence: CTA
atagattacccaatagacca

SEQ ID NO: 236959 - DNA, 20 bp, Artificial Sequence
  Description of Artificial Sequence: Synthetic oligonucleotide
  Target: LAMA2; (-) strand; PAM type: YTN; PAM sequence: TTC
taatagattacccaatagac

SEQ ID NO: 236960 - DNA, 20 bp, Artificial Sequence
  Description of Artificial Sequence: Synthetic oligonucleotide
  Target: LAMA2; (-) strand; PAM type: YTN; PAM sequence: TTT
ctaatagattacccaataga

SEQ ID NO: 236961 - DNA, 20 bp, Artificial Sequence
  Description of Artificial Sequence: Synthetic oligonucleotide
  Target: LAMA2; (-) strand; PAM type: YTN; PAM sequence: TTC
gtttctaatagattacccaa

SEQ ID NO: 236962 - DNA, 20 bp, Artificial Sequence
  Description of Artificial Sequence: Synthetic oligonucleotide
  Target: LAMA2; (-) strand; PAM type: YTN; PAM sequence: TTA
gtaagttcgtttctaataga

SEQ ID NO: 236963 - DNA, 20 bp, Artificial Sequence
  Description of Artificial Sequence: Synthetic oligonucleotide
  Target: LAMA2; (-) strand; PAM type: YTN; PAM sequence: TTG
atattagtaagttcgtttct

SEQ ID NO: 236964 - DNA, 20 bp, Artificial Sequence
  Description of Artificial Sequence: Synthetic oligonucleotide
  Target: LAMA2; (-) strand; PAM type: YTN; PAM sequence: TTT
gatattagtaagttcgtttc

SEQ ID NO: 236965 - DNA, 20 bp, Artificial Sequence
  Description of Artificial Sequence: Synthetic oligonucleotide
  Target: LAMA2; (-) strand; PAM type: YTN; PAM sequence: TTG
tttgatattagtaagttcgt

SEQ ID NO: 236966 - DNA, 20 bp, Artificial Sequence
  Description of Artificial Sequence: Synthetic oligonucleotide
  Target: LAMA2; (-) strand; PAM type: YTN; PAM sequence: CTG
gtaaaataaatattgtttga

SEQ ID NO: 236967 - DNA, 20 bp, Artificial Sequence
  Description of Artificial Sequence: Synthetic oligonucleotide
  Target: LAMA2; (-) strand; PAM type: YTN; PAM sequence: CTC
tggtaaaataaatattgttt

SEQ ID NO: 236968 - DNA, 20 bp, Artificial Sequence
  Description of Artificial Sequence: Synthetic oligonucleotide
  Target: LAMA2; (-) strand; PAM type: YTN; PAM sequence: CTA
tgatgtccaagtagaacata

SEQ ID NO: 236969 - DNA, 20 bp, Artificial Sequence
  Description of Artificial Sequence: Synthetic oligonucleotide
  Target: LAMA2; (-) strand; PAM type: YTN; PAM sequence: CTC
tatgatgtccaagtagaaca

SEQ ID NO: 236970 - DNA, 20 bp, Artificial Sequence
  Description of Artificial Sequence: Synthetic oligonucleotide
  Target: LAMA2; (-) strand; PAM type: YTN; PAM sequence: TTA
aaaggatcctctatgatgtc

SEQ ID NO: 236971 - DNA, 20 bp, Artificial Sequence
  Description of Artificial Sequence: Synthetic oligonucleotide
  Target: LAMA2; (-) strand; PAM type: YTN; PAM sequence: CTA
aagtacattaaaaggatcct

SEQ ID NO: 236972 - DNA, 20 bp, Artificial Sequence
  Description of Artificial Sequence: Synthetic oligonucleotide
  Target: LAMA2; (-) strand; PAM type: YTN; PAM sequence: CTG
aatcctaaagtacattaaaa

SEQ ID NO: 236973 - DNA, 20 bp, Artificial Sequence
  Description of Artificial Sequence: Synthetic oligonucleotide
  Target: LAMA2; (-) strand; PAM type: YTN; PAM sequence: TTA
tgaatccagatgagcaaaac

SEQ ID NO: 236974 - DNA, 20 bp, Artificial Sequence
  Description of Artificial Sequence: Synthetic oligonucleotide
  Target: LAMA2; (-) strand; PAM type: YTN; PAM sequence: CTT
atgaatccagatgagcaaaa

SEQ ID NO: 236975 - DNA, 20 bp, Artificial Sequence
  Description of Artificial Sequence: Synthetic oligonucleotide
  Target: LAMA2; (-) strand; PAM type: YTN; PAM sequence: TTA
acttatgaatccagatgagc

SEQ ID NO: 236976 - DNA, 20 bp, Artificial Sequence
  Description of Artificial Sequence: Synthetic oligonucleotide
  Target: LAMA2; (-) strand; PAM type: YTN; PAM sequence: CTG
agtcacaggcaattaactta

SEQ ID NO: 236977 - DNA, 20 bp, Artificial Sequence
  Description of Artificial Sequence: Synthetic oligonucleotide
  Target: LAMA2; (-) strand; PAM type: YTN; PAM sequence: CTG
gtgggtgtctgagtcacagg

SEQ ID NO: 236978 - DNA, 20 bp, Artificial Sequence
  Description of Artificial Sequence: Synthetic oligonucleotide
  Target: LAMA2; (-) strand; PAM type: YTN; PAM sequence: TTG
ccaaaggagcacaactggtg

SEQ ID NO: 236979 - DNA, 20 bp, Artificial Sequence
  Description of Artificial Sequence: Synthetic oligonucleotide
  Target: LAMA2; (-) strand; PAM type: YTN; PAM sequence: TTT
gccaaaggagcacaactggt

SEQ ID NO: 236980 - DNA, 20 bp, Artificial Sequence
  Description of Artificial Sequence: Synthetic oligonucleotide
  Target: LAMA2; (-) strand; PAM type: YTN; PAM sequence: TTA
agtgatttgccaaaggagca

SEQ ID NO: 236981 - DNA, 20 bp, Artificial Sequence
  Description of Artificial Sequence: Synthetic oligonucleotide
  Target: LAMA2; (-) strand; PAM type: YTN; PAM sequence: CTA
aggcatggagaaattaagtg

SEQ ID NO: 236982 - DNA, 20 bp, Artificial Sequence
  Description of Artificial Sequence: Synthetic oligonucleotide
  Target: LAMA2; (-) strand; PAM type: YTN; PAM sequence: TTC
acagatgaggtaactaaggc

SEQ ID NO: 236983 - DNA, 20 bp, Artificial Sequence
  Description of Artificial Sequence: Synthetic oligonucleotide
  Target: LAMA2; (-) strand; PAM type: YTN; PAM sequence: TTT
cacagatgaggtaactaagg

SEQ ID NO: 236984 - DNA, 20 bp, Artificial Sequence
  Description of Artificial Sequence: Synthetic oligonucleotide
  Target: LAMA2; (-) strand; PAM type: YTN; PAM sequence: CTG
tttcacagatgaggtaacta

SEQ ID NO: 236985 - DNA, 20 bp, Artificial Sequence
  Description of Artificial Sequence: Synthetic oligonucleotide
  Target: LAMA2; (-) strand; PAM type: YTN; PAM sequence: TTC
ctgtttcacagatgaggtaa

SEQ ID NO: 236986 - DNA, 20 bp, Artificial Sequence
  Description of Artificial Sequence: Synthetic oligonucleotide
  Target: LAMA2; (-) strand; PAM type: YTN; PAM sequence: TTT
cctgtttcacagatgaggta

SEQ ID NO: 236987 - DNA, 20 bp, Artificial Sequence
  Description of Artificial Sequence: Synthetic oligonucleotide
  Target: LAMA2; (-) strand; PAM type: YTN; PAM sequence: TTT
tcctgtttcacagatgaggt

SEQ ID NO: 236988 - DNA, 20 bp, Artificial Sequence
  Description of Artificial Sequence: Synthetic oligonucleotide
  Target: LAMA2; (-) strand; PAM type: YTN; PAM sequence: TTT
ttcctgtttcacagatgagg

SEQ ID NO: 236989 - DNA, 20 bp, Artificial Sequence
  Description of Artificial Sequence: Synthetic oligonucleotide
  Target: LAMA2; (-) strand; PAM type: YTN; PAM sequence: TTA
tttttcctgtttcacagatg

SEQ ID NO: 236990 - DNA, 20 bp, Artificial Sequence
  Description of Artificial Sequence: Synthetic oligonucleotide
  Target: LAMA2; (-) strand; PAM type: YTN; PAM sequence: CTA
ttatttttcctgtttcacag

SEQ ID NO: 236991 - DNA, 20 bp, Artificial Sequence
  Description of Artificial Sequence: Synthetic oligonucleotide
  Target: LAMA2; (-) strand; PAM type: YTN; PAM sequence: CTA
tatgagatagacactattat

SEQ ID NO: 236992 - DNA, 20 bp, Artificial Sequence
  Description of Artificial Sequence: Synthetic oligonucleotide
  Target: LAMA2; (-) strand; PAM type: YTN; PAM sequence: CTC
aaaacatctatatgagatag

SEQ ID NO: 236993 - DNA, 20 bp, Artificial Sequence
  Description of Artificial Sequence: Synthetic oligonucleotide
  Target: LAMA2; (-) strand; PAM type: YTN; PAM sequence: TTA
gtactcaaaacatctatatg

SEQ ID NO: 236994 - DNA, 20 bp, Artificial Sequence
  Description of Artificial Sequence: Synthetic oligonucleotide
  Target: LAMA2; (-) strand; PAM type: YTN; PAM sequence: TTC
agttagtactcaaaacatct

SEQ ID NO: 236995 - DNA, 20 bp, Artificial Sequence
  Description of Artificial Sequence: Synthetic oligonucleotide
  Target: LAMA2; (-) strand; PAM type: YTN; PAM sequence: TTA
attcagttagtactcaaaac

SEQ ID NO: 236996 - DNA, 20 bp, Artificial Sequence
  Description of Artificial Sequence: Synthetic oligonucleotide
  Target: LAMA2; (-) strand; PAM type: YTN; PAM sequence: TTA
cacaaaacacaggggttaat

SEQ ID NO: 236997 - DNA, 20 bp, Artificial Sequence
  Description of Artificial Sequence: Synthetic oligonucleotide
  Target: LAMA2; (-) strand; PAM type: YTN; PAM sequence: TTA
gcattacacaaaacacaggg

SEQ ID NO: 236998 - DNA, 20 bp, Artificial Sequence
  Description of Artificial Sequence: Synthetic oligonucleotide
  Target: LAMA2; (-) strand; PAM type: YTN; PAM sequence: CTT
agcattacacaaaacacagg

SEQ ID NO: 236999 - DNA, 20 bp, Artificial Sequence
  Description of Artificial Sequence: Synthetic oligonucleotide
  Target: LAMA2; (-) strand; PAM type: YTN; PAM sequence: TTA
tacttagcattacacaaaac

SEQ ID NO: 237000 - DNA, 20 bp, Artificial Sequence
  Description of Artificial Sequence: Synthetic oligonucleotide
  Target: LAMA2; (-) strand; PAM type: YTN; PAM sequence: TTA
tggtagtcattatacttagc

SEQ ID NO: 237001 - DNA, 20 bp, Artificial Sequence
  Description of Artificial Sequence: Synthetic oligonucleotide
  Target: LAMA2; (-) strand; PAM type: YTN; PAM sequence: CTT
atggtagtcattatacttag

SEQ ID NO: 237002 - DNA, 20 bp, Artificial Sequence
  Description of Artificial Sequence: Synthetic oligonucleotide
  Target: LAMA2; (-) strand; PAM type: YTN; PAM sequence: TTA
tcttatggtagtcattatac

SEQ ID NO: 237003 - DNA, 20 bp, Artificial Sequence
  Description of Artificial Sequence: Synthetic oligonucleotide
  Target: LAMA2; (-) strand; PAM type: YTN; PAM sequence: CTT
atcttatggtagtcattata

SEQ ID NO: 237004 - DNA, 20 bp, Artificial Sequence
  Description of Artificial Sequence: Synthetic oligonucleotide
  Target: LAMA2; (-) strand; PAM type: YTN; PAM sequence: CTC
aaatagcacttatcttatgg

SEQ ID NO: 237005 - DNA, 20 bp, Artificial Sequence
  Description of Artificial Sequence: Synthetic oligonucleotide
  Target: LAMA2; (-) strand; PAM type: YTN; PAM sequence: CTA
agactcaaatagcacttatc

SEQ ID NO: 237006 - DNA, 20 bp, Artificial Sequence
  Description of Artificial Sequence: Synthetic oligonucleotide
  Target: LAMA2; (-) strand; PAM type: YTN; PAM sequence: TTC
taagactcaaatagcactta

SEQ ID NO: 237007 - DNA, 20 bp, Artificial Sequence
  Description of Artificial Sequence: Synthetic oligonucleotide
  Target: LAMA2; (-) strand; PAM type: YTN; PAM sequence: CTT
ctaagactcaaatagcactt

SEQ ID NO: 237008 - DNA, 20 bp, Artificial Sequence
  Description of Artificial Sequence: Synthetic oligonucleotide
  Target: LAMA2; (-) strand; PAM type: YTN; PAM sequence: TTG
atacccaaatgcaaatgata

SEQ ID NO: 237009 - DNA, 20 bp, Artificial Sequence
  Description of Artificial Sequence: Synthetic oligonucleotide
  Target: LAMA2; (-) strand; PAM type: YTN; PAM sequence: CTT
gatacccaaatgcaaatgat

SEQ ID NO: 237010 - DNA, 20 bp, Artificial Sequence
  Description of Artificial Sequence: Synthetic oligonucleotide
  Target: LAMA2; (-) strand; PAM type: YTN; PAM sequence: CTA
acttgatacccaaatgcaaa

SEQ ID NO: 237011 - DNA, 20 bp, Artificial Sequence
  Description of Artificial Sequence: Synthetic oligonucleotide
  Target: LAMA2; (-) strand; PAM type: YTN; PAM sequence: TTC
taacttgatacccaaatgca

SEQ ID NO: 237012 - DNA, 20 bp, Artificial Sequence
  Description of Artificial Sequence: Synthetic oligonucleotide
  Target: LAMA2; (-) strand; PAM type: YTN; PAM sequence: TTA
tgaagcaaattctaacttga

SEQ ID NO: 237013 - DNA, 20 bp, Artificial Sequence
  Description of Artificial Sequence: Synthetic oligonucleotide
  Target: LAMA2; (-) strand; PAM type: YTN; PAM sequence: TTT
atgaagcaaattctaacttg

SEQ ID NO: 237014 - DNA, 20 bp, Artificial Sequence
  Description of Artificial Sequence: Synthetic oligonucleotide
  Target: LAMA2; (-) strand; PAM type: YTN; PAM sequence: TTC
aatttatgaagcaaattcta

SEQ ID NO: 237015 - DNA, 20 bp, Artificial Sequence
  Description of Artificial Sequence: Synthetic oligonucleotide
  Target: LAMA2; (-) strand; PAM type: YTN; PAM sequence: CTA
tgtaattcaatttatgaagc

SEQ ID NO: 237016 - DNA, 20 bp, Artificial Sequence
  Description of Artificial Sequence: Synthetic oligonucleotide
  Target: LAMA2; (-) strand; PAM type: YTN; PAM sequence: TTA
tggtcatataaaaatggaga

SEQ ID NO: 237017 - DNA, 20 bp, Artificial Sequence
  Description of Artificial Sequence: Synthetic oligonucleotide
  Target: LAMA2; (-) strand; PAM type: YTN; PAM sequence: CTT
atggtcatataaaaatggag

SEQ ID NO: 237018 - DNA, 20 bp, Artificial Sequence
  Description of Artificial Sequence: Synthetic oligonucleotide
  Target: LAMA2; (-) strand; PAM type: YTN; PAM sequence: CTC
ttatggtcatataaaaatgg

SEQ ID NO: 237019 - DNA, 20 bp, Artificial Sequence
  Description of Artificial Sequence: Synthetic oligonucleotide
  Target: LAMA2; (-) strand; PAM type: YTN; PAM sequence: TTG
aaactcttatggtcatataa

SEQ ID NO: 237020 - DNA, 20 bp, Artificial Sequence
  Description of Artificial Sequence: Synthetic oligonucleotide
  Target: LAMA2; (-) strand; PAM type: YTN; PAM sequence: CTT
gaaactcttatggtcatata

SEQ ID NO: 237021 - DNA, 20 bp, Artificial Sequence
  Description of Artificial Sequence: Synthetic oligonucleotide
  Target: LAMA2; (-) strand; PAM type: YTN; PAM sequence: TTC
aaaacttgaaactcttatgg

SEQ ID NO: 237022 - DNA, 20 bp, Artificial Sequence
  Description of Artificial Sequence: Synthetic oligonucleotide
  Target: LAMA2; (-) strand; PAM type: YTN; PAM sequence: TTT
caaaacttgaaactcttatg

SEQ ID NO: 237023 - DNA, 20 bp, Artificial Sequence
  Description of Artificial Sequence: Synthetic oligonucleotide
  Target: LAMA2; (-) strand; PAM type: YTN; PAM sequence: TTT
tcaaaacttgaaactcttat

SEQ ID NO: 237024 - DNA, 20 bp, Artificial Sequence
  Description of Artificial Sequence: Synthetic oligonucleotide
  Target: LAMA2; (-) strand; PAM type: YTN; PAM sequence: CTG
ttttcaaaacttgaaactct

SEQ ID NO: 237025 - DNA, 20 bp, Artificial Sequence
  Description of Artificial Sequence: Synthetic oligonucleotide
  Target: LAMA2; (-) strand; PAM type: YTN; PAM sequence: TTA
cagactgttttcaaaacttg

SEQ ID NO: 237026 - DNA, 20 bp, Artificial Sequence
  Description of Artificial Sequence: Synthetic oligonucleotide
  Target: LAMA2; (-) strand; PAM type: YTN; PAM sequence: TTT
acagactgttttcaaaactt

SEQ ID NO: 237027 - DNA, 20 bp, Artificial Sequence
  Description of Artificial Sequence: Synthetic oligonucleotide
  Target: LAMA2; (-) strand; PAM type: YTN; PAM sequence: TTT
tacagactgttttcaaaact

SEQ ID NO: 237028 - DNA, 20 bp, Artificial Sequence
  Description of Artificial Sequence: Synthetic oligonucleotide
  Target: LAMA2; (-) strand; PAM type: YTN; PAM sequence: TTT
ttacagactgttttcaaaac

SEQ ID NO: 237029 - DNA, 20 bp, Artificial Sequence
  Description of Artificial Sequence: Synthetic oligonucleotide
  Target: LAMA2; (-) strand; PAM type: YTN; PAM sequence: TTA
atttttacagactgttttca

SEQ ID NO: 237030 - DNA, 20 bp, Artificial Sequence
  Description of Artificial Sequence: Synthetic oligonucleotide
  Target: LAMA2; (-) strand; PAM type: YTN; PAM sequence: CTA
gttaatttttacagactgtt

SEQ ID NO: 237031 - DNA, 20 bp, Artificial Sequence
  Description of Artificial Sequence: Synthetic oligonucleotide
  Target: LAMA2; (-) strand; PAM type: YTN; PAM sequence: CTG
taatgctagttaatttttac

SEQ ID NO: 237032 - DNA, 20 bp, Artificial Sequence
  Description of Artificial Sequence: Synthetic oligonucleotide
  Target: LAMA2; (-) strand; PAM type: YTN; PAM sequence: TTC
tgtaatgctagttaattttt

SEQ ID NO: 237033 - DNA, 20 bp, Artificial Sequence
  Description of Artificial Sequence: Synthetic oligonucleotide
  Target: LAMA2; (-) strand; PAM type: YTN; PAM sequence: TTT
ctgtaatgctagttaatttt

SEQ ID NO: 237034 - DNA, 20 bp, Artificial Sequence
  Description of Artificial Sequence: Synthetic oligonucleotide
  Target: LAMA2; (-) strand; PAM type: YTN; PAM sequence: TTT
tctgtaatgctagttaattt

SEQ ID NO: 237035 - DNA, 20 bp, Artificial Sequence
  Description of Artificial Sequence: Synthetic oligonucleotide
  Target: LAMA2; (-) strand; PAM type: YTN; PAM sequence: TTG
gttttctgtaatgctagtta

SEQ ID NO: 237036 - DNA, 20 bp, Artificial Sequence
  Description of Artificial Sequence: Synthetic oligonucleotide
  Target: LAMA2; (-) strand; PAM type: YTN; PAM sequence: TTT
ggttttctgtaatgctagtt

SEQ ID NO: 237037 - DNA, 20 bp, Artificial Sequence
  Description of Artificial Sequence: Synthetic oligonucleotide
  Target: LAMA2; (-) strand; PAM type: YTN; PAM sequence: TTA
cgagtaagaacatgcggtgt

SEQ ID NO: 237038 - DNA, 20 bp, Artificial Sequence
  Description of Artificial Sequence: Synthetic oligonucleotide
  Target: LAMA2; (-) strand; PAM type: YTN; PAM sequence: CTT
acgagtaagaacatgcggtg

SEQ ID NO: 237039 - DNA, 20 bp, Artificial Sequence
  Description of Artificial Sequence: Synthetic oligonucleotide
  Target: LAMA2; (-) strand; PAM type: YTN; PAM sequence: CTC
ccacttacgagtaagaacat

SEQ ID NO: 237040 - DNA, 20 bp, Artificial Sequence
  Description of Artificial Sequence: Synthetic oligonucleotide
  Target: LAMA2; (-) strand; PAM type: YTN; PAM sequence: TTC
aactcccacttacgagtaag

SEQ ID NO: 237041 - DNA, 20 bp, Artificial Sequence
  Description of Artificial Sequence: Synthetic oligonucleotide
  Target: LAMA2; (-) strand; PAM type: YTN; PAM sequence: TTG
ttcaactcccacttacgagt

SEQ ID NO: 237042 - DNA, 20 bp, Artificial Sequence
  Description of Artificial Sequence: Synthetic oligonucleotide
  Target: LAMA2; (-) strand; PAM type: YTN; PAM sequence: CTC
attgttcaactcccacttac

SEQ ID NO: 237043 - DNA, 20 bp, Artificial Sequence
  Description of Artificial Sequence: Synthetic oligonucleotide
  Target: LAMA2; (-) strand; PAM type: YTN; PAM sequence: TTC
tcattgttcaactcccactt

SEQ ID NO: 237044 - DNA, 20 bp, Artificial Sequence
  Description of Artificial Sequence: Synthetic oligonucleotide
  Target: LAMA2; (-) strand; PAM type: YTN; PAM sequence: TTC
atgtgttctcattgttcaac

SEQ ID NO: 237045 - DNA, 20 bp, Artificial Sequence
  Description of Artificial Sequence: Synthetic oligonucleotide
  Target: LAMA2; (-) strand; PAM type: YTN; PAM sequence: CTG
tgttcatgtgttctcattgt

SEQ ID NO: 237046 - DNA, 20 bp, Artificial Sequence
  Description of Artificial Sequence: Synthetic oligonucleotide
  Target: LAMA2; (-) strand; PAM type: YTN; PAM sequence: CTG
tctgtgttcatgtgttctca

SEQ ID NO: 237047 - DNA, 20 bp, Artificial Sequence
  Description of Artificial Sequence: Synthetic oligonucleotide
  Target: LAMA2; (-) strand; PAM type: YTN; PAM sequence: TTC
ccctgtctgtgttcatgtgt

SEQ ID NO: 237048 - DNA, 20 bp, Artificial Sequence
  Description of Artificial Sequence: Synthetic oligonucleotide
  Target: LAMA2; (-) strand; PAM type: YTN; PAM sequence: CTG
gcatgtgatgttcccctgtc

SEQ ID NO: 237049 - DNA, 20 bp, Artificial Sequence
  Description of Artificial Sequence: Synthetic oligonucleotide
  Target: LAMA2; (-) strand; PAM type: YTN; PAM sequence: CTG
acaggccctggcatgtgatg

SEQ ID NO: 237050 - DNA, 20 bp, Artificial Sequence
  Description of Artificial Sequence: Synthetic oligonucleotide
  Target: LAMA2; (-) strand; PAM type: YTN; PAM sequence: CTA
gacccccacccactgacagg

SEQ ID NO: 237051 - DNA, 20 bp, Artificial Sequence
  Description of Artificial Sequence: Synthetic oligonucleotide
  Target: LAMA2; (-) strand; PAM type: YTN; PAM sequence: CTC
ccctagacccccacccactg

SEQ ID NO: 237052 - DNA, 20 bp, Artificial Sequence
  Description of Artificial Sequence: Synthetic oligonucleotide
  Target: LAMA2; (-) strand; PAM type: YTN; PAM sequence: TTC
ctcccctagacccccaccca

SEQ ID NO: 237053 - DNA, 20 bp, Artificial Sequence
  Description of Artificial Sequence: Synthetic oligonucleotide
  Target: LAMA2; (-) strand; PAM type: YTN; PAM sequence: CTG
ttcctcccctagacccccac

SEQ ID NO: 237054 - DNA, 20 bp, Artificial Sequence
  Description of Artificial Sequence: Synthetic oligonucleotide
  Target: LAMA2; (-) strand; PAM type: YTN; PAM sequence: CTA
atgctgttcctcccctagac

SEQ ID NO: 237055 - DNA, 20 bp, Artificial Sequence
  Description of Artificial Sequence: Synthetic oligonucleotide
  Target: LAMA2; (-) strand; PAM type: YTN; PAM sequence: CTC
ctaatgctgttcctccccta

SEQ ID NO: 237056 - DNA, 20 bp, Artificial Sequence
  Description of Artificial Sequence: Synthetic oligonucleotide
  Target: LAMA2; (-) strand; PAM type: YTN; PAM sequence: TTC
tcctaatgctgttcctcccc

SEQ ID NO: 237057 - DNA, 20 bp, Artificial Sequence
  Description of Artificial Sequence: Synthetic oligonucleotide
  Target: LAMA2; (-) strand; PAM type: YTN; PAM sequence: TTT
ctcctaatgctgttcctccc

SEQ ID NO: 237058 - DNA, 20 bp, Artificial Sequence
  Description of Artificial Sequence: Synthetic oligonucleotide
  Target: LAMA2; (-) strand; PAM type: YTN; PAM sequence: TTA
ggtatttctcctaatgctgt

SEQ ID NO: 237059 - DNA, 20 bp, Artificial Sequence
  Description of Artificial Sequence: Synthetic oligonucleotide
  Target: LAMA2; (-) strand; PAM type: YTN; PAM sequence: CTA
cattaggtatttctcctaat

SEQ ID NO: 237060 - DNA, 20 bp, Artificial Sequence
  Description of Artificial Sequence: Synthetic oligonucleotide
  Target: LAMA2; (-) strand; PAM type: YTN; PAM sequence: CTG
tcatctacattaggtatttc

SEQ ID NO: 237061 - DNA, 20 bp, Artificial Sequence
  Description of Artificial Sequence: Synthetic oligonucleotide
  Target: LAMA2; (-) strand; PAM type: YTN; PAM sequence: CTG
cagccatcgacctgtcatct

SEQ ID NO: 237062 - DNA, 20 bp, Artificial Sequence
  Description of Artificial Sequence: Synthetic oligonucleotide
  Target: LAMA2; (-) strand; PAM type: YTN; PAM sequence: TTG
ctgcagccatcgacctgtca

SEQ ID NO: 237063 - DNA, 20 bp, Artificial Sequence
  Description of Artificial Sequence: Synthetic oligonucleotide
  Target: LAMA2; (-) strand; PAM type: YTN; PAM sequence: TTT
gctgcagccatcgacctgtc

SEQ ID NO: 237064 - DNA, 20 bp, Artificial Sequence
  Description of Artificial Sequence: Synthetic oligonucleotide
  Target: LAMA2; (-) strand; PAM type: YTN; PAM sequence: TTG
tcacataggtatgcacgtgc

SEQ ID NO: 237065 - DNA, 20 bp, Artificial Sequence
  Description of Artificial Sequence: Synthetic oligonucleotide
  Target: LAMA2; (-) strand; PAM type: YTN; PAM sequence: TTT
gtcacataggtatgcacgtg

SEQ ID NO: 237066 - DNA, 20 bp, Artificial Sequence
  Description of Artificial Sequence: Synthetic oligonucleotide
  Target: LAMA2; (-) strand; PAM type: YTN; PAM sequence: CTG
gaatacatgtgcagaacatc

SEQ ID NO: 237067 - DNA, 20 bp, Artificial Sequence
  Description of Artificial Sequence: Synthetic oligonucleotide
  Target: LAMA2; (-) strand; PAM type: YTN; PAM sequence: TTC
tggaatacatgtgcagaaca

SEQ ID NO: 237068 - DNA, 20 bp, Artificial Sequence
  Description of Artificial Sequence: Synthetic oligonucleotide
  Target: LAMA2; (-) strand; PAM type: YTN; PAM sequence: TTA
agttctggaatacatgtgca

SEQ ID NO: 237069 - DNA, 20 bp, Artificial Sequence
  Description of Artificial Sequence: Synthetic oligonucleotide
  Target: LAMA2; (-) strand; PAM type: YTN; PAM sequence: TTT
aagttctggaatacatgtgc

SEQ ID NO: 237070 - DNA, 20 bp, Artificial Sequence
  Description of Artificial Sequence: Synthetic oligonucleotide
  Target: LAMA2; (-) strand; PAM type: YTN; PAM sequence: CTT
taagttctggaatacatgtg

SEQ ID NO: 237071 - DNA, 20 bp, Artificial Sequence
  Description of Artificial Sequence: Synthetic oligonucleotide
  Target: LAMA2; (-) strand; PAM type: YTN; PAM sequence: TTA
tactttaagttctggaatac

SEQ ID NO: 237072 - DNA, 20 bp, Artificial Sequence
  Description of Artificial Sequence: Synthetic oligonucleotide
  Target: LAMA2; (-) strand; PAM type: YTN; PAM sequence: TTA
ttatactttaagttctggaa

SEQ ID NO: 237073 - DNA, 20 bp, Artificial Sequence
  Description of Artificial Sequence: Synthetic oligonucleotide
  Target: LAMA2; (-) strand; PAM type: YTN; PAM sequence: TTA
ttattatactttaagttctg

SEQ ID NO: 237074 - DNA, 20 bp, Artificial Sequence
  Description of Artificial Sequence: Synthetic oligonucleotide
  Target: LAMA2; (-) strand; PAM type: YTN; PAM sequence: TTT
attattatactttaagttct

SEQ ID NO: 237075 - DNA, 20 bp, Artificial Sequence
  Description of Artificial Sequence: Synthetic oligonucleotide
  Target: LAMA2; (-) strand; PAM type: YTN; PAM sequence: TTT
tattattatactttaagttc

SEQ ID NO: 237076 - DNA, 20 bp, Artificial Sequence
  Description of Artificial Sequence: Synthetic oligonucleotide
  Target: LAMA2; (-) strand; PAM type: YTN; PAM sequence: TTT
ttattattatactttaagtt

SEQ ID NO: 237077 - DNA, 20 bp, Artificial Sequence
  Description of Artificial Sequence: Synthetic oligonucleotide
  Target: LAMA2; (-) strand; PAM type: YTN; PAM sequence: TTT
tttattattatactttaagt

SEQ ID NO: 237078 - DNA, 20 bp, Artificial Sequence
  Description of Artificial Sequence: Synthetic oligonucleotide
  Target: LAMA2; (-) strand; PAM type: YTN; PAM sequence: TTT
ttttattattatactttaag

SEQ ID NO: 237079 - DNA, 20 bp, Artificial Sequence
  Description of Artificial Sequence: Synthetic oligonucleotide
  Target: LAMA2; (-) strand; PAM type: YTN; PAM sequence: TTT
tttttattattatactttaa

SEQ ID NO: 237080 - DNA, 20 bp, Artificial Sequence
  Description of Artificial Sequence: Synthetic oligonucleotide
  Target: LAMA2; (-) strand; PAM type: YTN; PAM sequence: TTA
attttttttattattatact

SEQ ID NO: 237081 - DNA, 20 bp, Artificial Sequence
  Description of Artificial Sequence: Synthetic oligonucleotide
  Target: LAMA2; (-) strand; PAM type: YTN; PAM sequence: TTA
atgatagttaatttttttta

SEQ ID NO: 237082 - DNA, 20 bp, Artificial Sequence
  Description of Artificial Sequence: Synthetic oligonucleotide
  Target: LAMA2; (-) strand; PAM type: YTN; PAM sequence: TTT
aatgatagttaatttttttt

SEQ ID NO: 237083 - DNA, 20 bp, Artificial Sequence
  Description of Artificial Sequence: Synthetic oligonucleotide
  Target: LAMA2; (-) strand; PAM type: YTN; PAM sequence: TTT
taatgatagttaattttttt

SEQ ID NO: 237084 - DNA, 20 bp, Artificial Sequence
  Description of Artificial Sequence: Synthetic oligonucleotide
  Target: LAMA2; (-) strand; PAM type: YTN; PAM sequence: CTA
ccacaaacatgttttaatga

SEQ ID NO: 237085 - DNA, 20 bp, Artificial Sequence
  Description of Artificial Sequence: Synthetic oligonucleotide
  Target: LAMA2; (-) strand; PAM type: YTN; PAM sequence: TTA
tcaaagaactaccacaaaca

SEQ ID NO: 237086 - DNA, 20 bp, Artificial Sequence
  Description of Artificial Sequence: Synthetic oligonucleotide
  Target: LAMA2; (-) strand; PAM type: YTN; PAM sequence: CTA
atcaagggtatcaaaagagg

SEQ ID NO: 237087 - DNA, 20 bp, Artificial Sequence
  Description of Artificial Sequence: Synthetic oligonucleotide
  Target: LAMA2; (-) strand; PAM type: YTN; PAM sequence: TTG
aaaaaaagaaaagcaagcaa

SEQ ID NO: 237088 - DNA, 20 bp, Artificial Sequence
  Description of Artificial Sequence: Synthetic oligonucleotide
  Target: LAMA2; (-) strand; PAM type: YTN; PAM sequence: TTT
gaaaaaaagaaaagcaagca

SEQ ID NO: 237089 - DNA, 20 bp, Artificial Sequence
  Description of Artificial Sequence: Synthetic oligonucleotide
  Target: LAMA2; (-) strand; PAM type: YTN; PAM sequence: TTA
agtataaaaaagagaaaata

SEQ ID NO: 237090 - DNA, 20 bp, Artificial Sequence
  Description of Artificial Sequence: Synthetic oligonucleotide
  Target: LAMA2; (-) strand; PAM type: YTN; PAM sequence: TTT
aagtataaaaaagagaaaat

SEQ ID NO: 237091 - DNA, 20 bp, Artificial Sequence
  Description of Artificial Sequence: Synthetic oligonucleotide
  Target: LAMA2; (-) strand; PAM type: YTN; PAM sequence: TTC
atttaagtataaaaaagaga

SEQ ID NO: 237092 - DNA, 20 bp, Artificial Sequence
  Description of Artificial Sequence: Synthetic oligonucleotide
  Target: LAMA2; (-) strand; PAM type: YTN; PAM sequence: TTA
attcatttaagtataaaaaa

SEQ ID NO: 237093 - DNA, 20 bp, Artificial Sequence
  Description of Artificial Sequence: Synthetic oligonucleotide
  Target: LAMA2; (-) strand; PAM type: YTN; PAM sequence: TTT
aattcatttaagtataaaaa

SEQ ID NO: 237094 - DNA, 20 bp, Artificial Sequence
  Description of Artificial Sequence: Synthetic oligonucleotide
  Target: LAMA2; (-) strand; PAM type: YTN; PAM sequence: TTA
aaatttaattcatttaagta

SEQ ID NO: 237095 - DNA, 20 bp, Artificial Sequence
  Description of Artificial Sequence: Synthetic oligonucleotide
  Target: LAMA2; (-) strand; PAM type: YTN; PAM sequence: TTA
aaaatagataaattaaaatt

SEQ ID NO: 237096 - DNA, 20 bp, Artificial Sequence
  Description of Artificial Sequence: Synthetic oligonucleotide
  Target: LAMA2; (-) strand; PAM type: YTN; PAM sequence: TTT
aaaaatagataaattaaaat

SEQ ID NO: 237097 - DNA, 20 bp, Artificial Sequence
  Description of Artificial Sequence: Synthetic oligonucleotide
  Target: LAMA2; (-) strand; PAM type: YTN; PAM sequence: TTT
taaaaatagataaattaaaa

SEQ ID NO: 237098 - DNA, 20 bp, Artificial Sequence
  Description of Artificial Sequence: Synthetic oligonucleotide
  Target: LAMA2; (-) strand; PAM type: YTN; PAM sequence: TTA
ttttaaaaatagataaatta

SEQ ID NO: 237099 - DNA, 20 bp, Artificial Sequence
  Description of Artificial Sequence: Synthetic oligonucleotide
  Target: LAMA2; (-) strand; PAM type: YTN; PAM sequence: TTA
aatagtccattattttaaaa

SEQ ID NO: 237100 - DNA, 20 bp, Artificial Sequence
  Description of Artificial Sequence: Synthetic oligonucleotide
  Target: LAMA2; (-) strand; PAM type: YTN; PAM sequence: CTT
aaatagtccattattttaaa

SEQ ID NO: 237101 - DNA, 20 bp, Artificial Sequence
  Description of Artificial Sequence: Synthetic oligonucleotide
  Target: LAMA2; (-) strand; PAM type: YTN; PAM sequence: TTA
taggcttaaatagtccatta

SEQ ID NO: 237102 - DNA, 20 bp, Artificial Sequence
  Description of Artificial Sequence: Synthetic oligonucleotide
  Target: LAMA2; (-) strand; PAM type: YTN; PAM sequence: CTT
ataggcttaaatagtccatt

SEQ ID NO: 237103 - DNA, 20 bp, Artificial Sequence
  Description of Artificial Sequence: Synthetic oligonucleotide
  Target: LAMA2; (-) strand; PAM type: YTN; PAM sequence: CTG
tacccaaaagtaaacttata

SEQ ID NO: 237104 - DNA, 20 bp, Artificial Sequence
  Description of Artificial Sequence: Synthetic oligonucleotide
  Target: LAMA2; (-) strand; PAM type: YTN; PAM sequence: TTG
agtatggaaaaactgtaccc

SEQ ID NO: 237105 - DNA, 20 bp, Artificial Sequence
  Description of Artificial Sequence: Synthetic oligonucleotide
  Target: LAMA2; (-) strand; PAM type: YTN; PAM sequence: TTG
ttgagtatggaaaaactgta

SEQ ID NO: 237106 - DNA, 20 bp, Artificial Sequence
  Description of Artificial Sequence: Synthetic oligonucleotide
  Target: LAMA2; (-) strand; PAM type: YTN; PAM sequence: TTT
gttgagtatggaaaaactgt

SEQ ID NO: 237107 - DNA, 20 bp, Artificial Sequence
  Description of Artificial Sequence: Synthetic oligonucleotide
  Target: LAMA2; (-) strand; PAM type: YTN; PAM sequence: TTT
tgttgagtatggaaaaactg

SEQ ID NO: 237108 - DNA, 20 bp, Artificial Sequence
  Description of Artificial Sequence: Synthetic oligonucleotide
  Target: LAMA2; (-) strand; PAM type: YTN; PAM sequence: TTT
ttgttgagtatggaaaaact

SEQ ID NO: 237109 - DNA, 20 bp, Artificial Sequence
  Description of Artificial Sequence: Synthetic oligonucleotide
  Target: LAMA2; (-) strand; PAM type: YTN; PAM sequence: TTA
atttttgttgagtatggaaa

SEQ ID NO: 237110 - DNA, 20 bp, Artificial Sequence
  Description of Artificial Sequence: Synthetic oligonucleotide
  Target: LAMA2; (-) strand; PAM type: YTN; PAM sequence: CTT
aatttttgttgagtatggaa

SEQ ID NO: 237111 - DNA, 20 bp, Artificial Sequence
  Description of Artificial Sequence: Synthetic oligonucleotide
  Target: LAMA2; (-) strand; PAM type: YTN; PAM sequence: CTA
ggtagaatataatagcagta

SEQ ID NO: 237112 - DNA, 20 bp, Artificial Sequence
  Description of Artificial Sequence: Synthetic oligonucleotide
  Target: LAMA2; (-) strand; PAM type: YTN; PAM sequence: CTA
tctaggtagaatataatagc

SEQ ID NO: 237113 - DNA, 20 bp, Artificial Sequence
  Description of Artificial Sequence: Synthetic oligonucleotide
  Target: LAMA2; (-) strand; PAM type: YTN; PAM sequence: TTA
aaaataaatagctatctagg

SEQ ID NO: 237114 - DNA, 20 bp, Artificial Sequence
  Description of Artificial Sequence: Synthetic oligonucleotide
  Target: LAMA2; (-) strand; PAM type: YTN; PAM sequence: TTC
aattaaaaataaatagctat

SEQ ID NO: 237115 - DNA, 20 bp, Artificial Sequence
  Description of Artificial Sequence: Synthetic oligonucleotide
  Target: LAMA2; (-) strand; PAM type: YTN; PAM sequence: CTT
caattaaaaataaatagcta

SEQ ID NO: 237116 - DNA, 20 bp, Artificial Sequence
  Description of Artificial Sequence: Synthetic oligonucleotide
  Target: LAMA2; (-) strand; PAM type: YTN; PAM sequence: TTA
aagagaaaatcaagacttca

SEQ ID NO: 237117 - DNA, 20 bp, Artificial Sequence
  Description of Artificial Sequence: Synthetic oligonucleotide
  Target: LAMA2; (-) strand; PAM type: YTN; PAM sequence: TTG
ggttaaagagaaaatcaaga

SEQ ID NO: 237118 - DNA, 20 bp, Artificial Sequence
  Description of Artificial Sequence: Synthetic oligonucleotide
  Target: LAMA2; (-) strand; PAM type: YTN; PAM sequence: CTT
gggttaaagagaaaatcaag

SEQ ID NO: 237119 - DNA, 20 bp, Artificial Sequence
  Description of Artificial Sequence: Synthetic oligonucleotide
  Target: LAMA2; (-) strand; PAM type: YTN; PAM sequence: CTC
ttgggttaaagagaaaatca

SEQ ID NO: 237120 - DNA, 20 bp, Artificial Sequence
  Description of Artificial Sequence: Synthetic oligonucleotide
  Target: LAMA2; (-) strand; PAM type: YTN; PAM sequence: TTA
ataactcttgggttaaagag

SEQ ID NO: 237121 - DNA, 20 bp, Artificial Sequence
  Description of Artificial Sequence: Synthetic oligonucleotide
  Target: LAMA2; (-) strand; PAM type: YTN; PAM sequence: TTT
aataactcttgggttaaaga

SEQ ID NO: 237122 - DNA, 20 bp, Artificial Sequence
  Description of Artificial Sequence: Synthetic oligonucleotide
  Target: LAMA2; (-) strand; PAM type: YTN; PAM sequence: CTT
taataactcttgggttaaag

SEQ ID NO: 237123 - DNA, 20 bp, Artificial Sequence
  Description of Artificial Sequence: Synthetic oligonucleotide
  Target: LAMA2; (-) strand; PAM type: YTN; PAM sequence: CTC
tttaataactcttgggttaa

SEQ ID NO: 237124 - DNA, 20 bp, Artificial Sequence
  Description of Artificial Sequence: Synthetic oligonucleotide
  Target: LAMA2; (-) strand; PAM type: YTN; PAM sequence: TTC
tctttaataactcttgggtt

SEQ ID NO: 237125 - DNA, 20 bp, Artificial Sequence
  Description of Artificial Sequence: Synthetic oligonucleotide
  Target: LAMA2; (-) strand; PAM type: YTN; PAM sequence: TTT
ctctttaataactcttgggt

SEQ ID NO: 237126 - DNA, 20 bp, Artificial Sequence
  Description of Artificial Sequence: Synthetic oligonucleotide
  Target: LAMA2; (-) strand; PAM type: YTN; PAM sequence: CTA
aatatttctctttaataact

SEQ ID NO: 237127 - DNA, 20 bp, Artificial Sequence
  Description of Artificial Sequence: Synthetic oligonucleotide
  Target: LAMA2; (-) strand; PAM type: YTN; PAM sequence: TTA
atgcctaaatatttctcttt

SEQ ID NO: 237128 - DNA, 20 bp, Artificial Sequence
  Description of Artificial Sequence: Synthetic oligonucleotide
  Target: LAMA2; (-) strand; PAM type: YTN; PAM sequence: CTA
aaaattaatgcctaaatatt

SEQ ID NO: 237129 - DNA, 20 bp, Artificial Sequence
  Description of Artificial Sequence: Synthetic oligonucleotide
  Target: LAMA2; (-) strand; PAM type: YTN; PAM sequence: TTC
taaaaattaatgcctaaata

SEQ ID NO: 237130 - DNA, 20 bp, Artificial Sequence
  Description of Artificial Sequence: Synthetic oligonucleotide
  Target: LAMA2; (-) strand; PAM type: YTN; PAM sequence: CTG
ttctaaaaattaatgcctaa

SEQ ID NO: 237131 - DNA, 20 bp, Artificial Sequence
  Description of Artificial Sequence: Synthetic oligonucleotide
  Target: LAMA2; (-) strand; PAM type: YTN; PAM sequence: TTC
aactgttctaaaaattaatg

SEQ ID NO: 237132 - DNA, 20 bp, Artificial Sequence
  Description of Artificial Sequence: Synthetic oligonucleotide
  Target: LAMA2; (-) strand; PAM type: YTN; PAM sequence: TTA
tgcaaaattcaactgttcta

SEQ ID NO: 237133 - DNA, 20 bp, Artificial Sequence
  Description of Artificial Sequence: Synthetic oligonucleotide
  Target: LAMA2; (-) strand; PAM type: YTN; PAM sequence: TTT
atgcaaaattcaactgttct

SEQ ID NO: 237134 - DNA, 20 bp, Artificial Sequence
  Description of Artificial Sequence: Synthetic oligonucleotide
  Target: LAMA2; (-) strand; PAM type: YTN; PAM sequence: TTT
tatgcaaaattcaactgttc

SEQ ID NO: 237135 - DNA, 20 bp, Artificial Sequence
  Description of Artificial Sequence: Synthetic oligonucleotide
  Target: LAMA2; (-) strand; PAM type: YTN; PAM sequence: CTG
aatatcaaacatgatgagag

SEQ ID NO: 237136 - DNA, 20 bp, Artificial Sequence
  Description of Artificial Sequence: Synthetic oligonucleotide
  Target: LAMA2; (-) strand; PAM type: YTN; PAM sequence: TTC
tgaatatcaaacatgatgag

SEQ ID NO: 237137 - DNA, 20 bp, Artificial Sequence
  Description of Artificial Sequence: Synthetic oligonucleotide
  Target: LAMA2; (-) strand; PAM type: YTN; PAM sequence: TTA
gttctgaatatcaaacatga

SEQ ID NO: 237138 - DNA, 20 bp, Artificial Sequence
  Description of Artificial Sequence: Synthetic oligonucleotide
  Target: LAMA2; (-) strand; PAM type: YTN; PAM sequence: TTA
aattagttctgaatatcaaa

SEQ ID NO: 237139 - DNA, 20 bp, Artificial Sequence
  Description of Artificial Sequence: Synthetic oligonucleotide
  Target: LAMA2; (-) strand; PAM type: YTN; PAM sequence: TTA
agattaaattagttctgaat

SEQ ID NO: 237140 - DNA, 20 bp, Artificial Sequence
  Description of Artificial Sequence: Synthetic oligonucleotide
  Target: LAMA2; (-) strand; PAM type: YTN; PAM sequence: TTA
gatgtgtatcaaatgccaca

SEQ ID NO: 237141 - DNA, 20 bp, Artificial Sequence
  Description of Artificial Sequence: Synthetic oligonucleotide
  Target: LAMA2; (-) strand; PAM type: YTN; PAM sequence: TTT
agatgtgtatcaaatgccac

SEQ ID NO: 237142 - DNA, 20 bp, Artificial Sequence
  Description of Artificial Sequence: Synthetic oligonucleotide
  Target: LAMA2; (-) strand; PAM type: YTN; PAM sequence: TTT
tagatgtgtatcaaatgcca

SEQ ID NO: 237143 - DNA, 20 bp, Artificial Sequence
  Description of Artificial Sequence: Synthetic oligonucleotide
  Target: LAMA2; (-) strand; PAM type: YTN; PAM sequence: CTT
ttagatgtgtatcaaatgcc

SEQ ID NO: 237144 - DNA, 20 bp, Artificial Sequence
  Description of Artificial Sequence: Synthetic oligonucleotide
  Target: LAMA2; (-) strand; PAM type: YTN; PAM sequence: CTA
cttttagatgtgtatcaaat

SEQ ID NO: 237145 - DNA, 20 bp, Artificial Sequence
  Description of Artificial Sequence: Synthetic oligonucleotide
  Target: LAMA2; (-) strand; PAM type: YTN; PAM sequence: TTA
ctacttttagatgtgtatca

SEQ ID NO: 237146 - DNA, 20 bp, Artificial Sequence
  Description of Artificial Sequence: Synthetic oligonucleotide
  Target: LAMA2; (-) strand; PAM type: YTN; PAM sequence: TTA
acataaattactacttttag

SEQ ID NO: 237147 - DNA, 20 bp, Artificial Sequence
  Description of Artificial Sequence: Synthetic oligonucleotide
  Target: LAMA2; (-) strand; PAM type: YTN; PAM sequence: CTT
aacataaattactactttta

SEQ ID NO: 237148 - DNA, 20 bp, Artificial Sequence
  Description of Artificial Sequence: Synthetic oligonucleotide
  Target: LAMA2; (-) strand; PAM type: YTN; PAM sequence: TTC
ttaacataaattactacttt

SEQ ID NO: 237149 - DNA, 20 bp, Artificial Sequence
  Description of Artificial Sequence: Synthetic oligonucleotide
  Target: LAMA2; (-) strand; PAM type: YTN; PAM sequence: TTT
cttaacataaattactactt

SEQ ID NO: 237150 - DNA, 20 bp, Artificial Sequence
  Description of Artificial Sequence: Synthetic oligonucleotide
  Target: LAMA2; (-) strand; PAM type: YTN; PAM sequence: TTT
tcttaacataaattactact

SEQ ID NO: 237151 - DNA, 20 bp, Artificial Sequence
  Description of Artificial Sequence: Synthetic oligonucleotide
  Target: LAMA2; (-) strand; PAM type: YTN; PAM sequence: TTA
ttttcttaacataaattact

SEQ ID NO: 237152 - DNA, 20 bp, Artificial Sequence
  Description of Artificial Sequence: Synthetic oligonucleotide
  Target: LAMA2; (-) strand; PAM type: YTN; PAM sequence: CTT
attttcttaacataaattac

SEQ ID NO: 237153 - DNA, 20 bp, Artificial Sequence
  Description of Artificial Sequence: Synthetic oligonucleotide
  Target: LAMA2; (-) strand; PAM type: YTN; PAM sequence: CTA
aggcttattttcttaacata

SEQ ID NO: 237154 - DNA, 20 bp, Artificial Sequence
  Description of Artificial Sequence: Synthetic oligonucleotide
  Target: LAMA2; (-) strand; PAM type: YTN; PAM sequence: TTA
tctaaggcttattttcttaa

SEQ ID NO: 237155 - DNA, 20 bp, Artificial Sequence
  Description of Artificial Sequence: Synthetic oligonucleotide
  Target: LAMA2; (-) strand; PAM type: YTN; PAM sequence: TTA
tcaaagcagaaattatctaa

SEQ ID NO: 237156 - DNA, 20 bp, Artificial Sequence
  Description of Artificial Sequence: Synthetic oligonucleotide
  Target: LAMA2; (-) strand; PAM type: YTN; PAM sequence: CTC
aattatcaaagcagaaatta

SEQ ID NO: 237157 - DNA, 20 bp, Artificial Sequence
  Description of Artificial Sequence: Synthetic oligonucleotide
  Target: LAMA2; (-) strand; PAM type: YTN; PAM sequence: CTA
taaaaaatactcaattatca

SEQ ID NO: 237158 - DNA, 20 bp, Artificial Sequence
  Description of Artificial Sequence: Synthetic oligonucleotide
  Target: LAMA2; (-) strand; PAM type: YTN; PAM sequence: TTG
actataaaaaatactcaatt

SEQ ID NO: 237159 - DNA, 20 bp, Artificial Sequence
  Description of Artificial Sequence: Synthetic oligonucleotide
  Target: LAMA2; (-) strand; PAM type: YTN; PAM sequence: TTG
tgattgactataaaaaatac

SEQ ID NO: 237160 - DNA, 20 bp, Artificial Sequence
  Description of Artificial Sequence: Synthetic oligonucleotide
  Target: LAMA2; (-) strand; PAM type: YTN; PAM sequence: TTT
gtgattgactataaaaaata

SEQ ID NO: 237161 - DNA, 20 bp, Artificial Sequence
  Description of Artificial Sequence: Synthetic oligonucleotide
  Target: LAMA2; (-) strand; PAM type: YTN; PAM sequence: TTA
ccatagtttgtgattgacta

SEQ ID NO: 237162 - DNA, 20 bp, Artificial Sequence
  Description of Artificial Sequence: Synthetic oligonucleotide
  Target: LAMA2; (-) strand; PAM type: YTN; PAM sequence: TTT
accatagtttgtgattgact

SEQ ID NO: 237163 - DNA, 20 bp, Artificial Sequence
  Description of Artificial Sequence: Synthetic oligonucleotide
  Target: LAMA2; (-) strand; PAM type: YTN; PAM sequence: CTA
aatatttaccatagtttgtg

SEQ ID NO: 237164 - DNA, 20 bp, Artificial Sequence
  Description of Artificial Sequence: Synthetic oligonucleotide
  Target: LAMA2; (-) strand; PAM type: YTN; PAM sequence: TTA
tgtggtatataactaaatat

SEQ ID NO: 237165 - DNA, 20 bp, Artificial Sequence
  Description of Artificial Sequence: Synthetic oligonucleotide
  Target: LAMA2; (-) strand; PAM type: YTN; PAM sequence: TTA
catattatgtggtatataac

SEQ ID NO: 237166 - DNA, 20 bp, Artificial Sequence
  Description of Artificial Sequence: Synthetic oligonucleotide
  Target: LAMA2; (-) strand; PAM type: YTN; PAM sequence: CTA
ataatatcaaattacatatt

SEQ ID NO: 237167 - DNA, 20 bp, Artificial Sequence
  Description of Artificial Sequence: Synthetic oligonucleotide
  Target: LAMA2; (-) strand; PAM type: YTN; PAM sequence: TTG
aataatctaataatatcaaa

SEQ ID NO: 237168 - DNA, 20 bp, Artificial Sequence
  Description of Artificial Sequence: Synthetic oligonucleotide
  Target: LAMA2; (-) strand; PAM type: YTN; PAM sequence: TTT
gaataatctaataatatcaa

SEQ ID NO: 237169 - DNA, 20 bp, Artificial Sequence
  Description of Artificial Sequence: Synthetic oligonucleotide
  Target: LAMA2; (-) strand; PAM type: YTN; PAM sequence: TTA
cagatgaagtaagaaaaaac

SEQ ID NO: 237170 - DNA, 20 bp, Artificial Sequence
  Description of Artificial Sequence: Synthetic oligonucleotide
  Target: LAMA2; (-) strand; PAM type: YTN; PAM sequence: TTT
acagatgaagtaagaaaaaa

SEQ ID NO: 237171 - DNA, 20 bp, Artificial Sequence
  Description of Artificial Sequence: Synthetic oligonucleotide
  Target: LAMA2; (-) strand; PAM type: YTN; PAM sequence: TTA
agtatttacagatgaagtaa

SEQ ID NO: 237172 - DNA, 20 bp, Artificial Sequence
  Description of Artificial Sequence: Synthetic oligonucleotide
  Target: LAMA2; (-) strand; PAM type: YTN; PAM sequence: CTT
aagtatttacagatgaagta

SEQ ID NO: 237173 - DNA, 20 bp, Artificial Sequence
  Description of Artificial Sequence: Synthetic oligonucleotide
  Target: LAMA2; (-) strand; PAM type: YTN; PAM sequence: CTC
atcttaagtatttacagatg

SEQ ID NO: 237174 - DNA, 20 bp, Artificial Sequence
  Description of Artificial Sequence: Synthetic oligonucleotide
  Target: LAMA2; (-) strand; PAM type: YTN; PAM sequence: TTA
ctcatcttaagtatttacag

SEQ ID NO: 237175 - DNA, 20 bp, Artificial Sequence
  Description of Artificial Sequence: Synthetic oligonucleotide
  Target: LAMA2; (-) strand; PAM type: YTN; PAM sequence: CTT
actcatcttaagtatttaca

SEQ ID NO: 237176 - DNA, 20 bp, Artificial Sequence
  Description of Artificial Sequence: Synthetic oligonucleotide
  Target: LAMA2; (-) strand; PAM type: YTN; PAM sequence: CTA
acttactcatcttaagtatt

SEQ ID NO: 237177 - DNA, 20 bp, Artificial Sequence
  Description of Artificial Sequence: Synthetic oligonucleotide
  Target: LAMA2; (-) strand; PAM type: YTN; PAM sequence: CTG
aaaatgatgctaacttactc

SEQ ID NO: 237178 - DNA, 20 bp, Artificial Sequence
  Description of Artificial Sequence: Synthetic oligonucleotide
  Target: LAMA2; (-) strand; PAM type: YTN; PAM sequence: TTA
aaagtcaatggctgaaaatg

SEQ ID NO: 237179 - DNA, 20 bp, Artificial Sequence
  Description of Artificial Sequence: Synthetic oligonucleotide
  Target: LAMA2; (-) strand; PAM type: YTN; PAM sequence: TTT
aaaagtcaatggctgaaaat

SEQ ID NO: 237180 - DNA, 20 bp, Artificial Sequence
  Description of Artificial Sequence: Synthetic oligonucleotide
  Target: LAMA2; (-) strand; PAM type: YTN; PAM sequence: CTT
taaaagtcaatggctgaaaa

SEQ ID NO: 237181 - DNA, 20 bp, Artificial Sequence
  Description of Artificial Sequence: Synthetic oligonucleotide
  Target: LAMA2; (-) strand; PAM type: YTN; PAM sequence: TTG
gaaataaaaactttaaaagt

SEQ ID NO: 237182 - DNA, 20 bp, Artificial Sequence
  Description of Artificial Sequence: Synthetic oligonucleotide
  Target: LAMA2; (-) strand; PAM type: YTN; PAM sequence: TTA
tcagtacaaaaatatgtgga

SEQ ID NO: 237183 - DNA, 20 bp, Artificial Sequence
  Description of Artificial Sequence: Synthetic oligonucleotide
  Target: LAMA2; (-) strand; PAM type: YTN; PAM sequence: CTA
attatcagtacaaaaatatg

SEQ ID NO: 237184 - DNA, 20 bp, Artificial Sequence
  Description of Artificial Sequence: Synthetic oligonucleotide
  Target: LAMA2; (-) strand; PAM type: YTN; PAM sequence: TTC
aaataagcactaattatcag

SEQ ID NO: 237185 - DNA, 20 bp, Artificial Sequence
  Description of Artificial Sequence: Synthetic oligonucleotide
  Target: LAMA2; (-) strand; PAM type: YTN; PAM sequence: CTT
caaataagcactaattatca

SEQ ID NO: 237186 - DNA, 20 bp, Artificial Sequence
  Description of Artificial Sequence: Synthetic oligonucleotide
  Target: LAMA2; (-) strand; PAM type: YTN; PAM sequence: TTA
tgcttcaaataagcactaat

SEQ ID NO: 237187 - DNA, 20 bp, Artificial Sequence
  Description of Artificial Sequence: Synthetic oligonucleotide
  Target: LAMA2; (-) strand; PAM type: YTN; PAM sequence: TTT
atgcttcaaataagcactaa

SEQ ID NO: 237188 - DNA, 20 bp, Artificial Sequence
  Description of Artificial Sequence: Synthetic oligonucleotide
  Target: LAMA2; (-) strand; PAM type: YTN; PAM sequence: TTA
tgtttatgcttcaaataagc

SEQ ID NO: 237189 - DNA, 20 bp, Artificial Sequence
  Description of Artificial Sequence: Synthetic oligonucleotide
  Target: LAMA2; (-) strand; PAM type: YTN; PAM sequence: TTA
ttatgtttatgcttcaaata

SEQ ID NO: 237190 - DNA, 20 bp, Artificial Sequence
  Description of Artificial Sequence: Synthetic oligonucleotide
  Target: LAMA2; (-) strand; PAM type: YTN; PAM sequence: TTA
aattattatgtttatgcttc

SEQ ID NO: 237191 - DNA, 20 bp, Artificial Sequence
  Description of Artificial Sequence: Synthetic oligonucleotide
  Target: LAMA2; (-) strand; PAM type: YTN; PAM sequence: TTT
aaattattatgtttatgctt

SEQ ID NO: 237192 - DNA, 20 bp, Artificial Sequence
  Description of Artificial Sequence: Synthetic oligonucleotide
  Target: LAMA2; (-) strand; PAM type: YTN; PAM sequence: TTG
ataaaaatataataaaaaca

SEQ ID NO: 237193 - DNA, 20 bp, Artificial Sequence
  Description of Artificial Sequence: Synthetic oligonucleotide
  Target: LAMA2; (-) strand; PAM type: YTN; PAM sequence: TTA
cattgataaaaatataataa

SEQ ID NO: 237194 - DNA, 20 bp, Artificial Sequence
  Description of Artificial Sequence: Synthetic oligonucleotide
  Target: LAMA2; (-) strand; PAM type: YTN; PAM sequence: TTT
acattgataaaaatataata

SEQ ID NO: 237195 - DNA, 20 bp, Artificial Sequence
  Description of Artificial Sequence: Synthetic oligonucleotide
  Target: LAMA2; (-) strand; PAM type: YTN; PAM sequence: TTT
tacattgataaaaatataat

SEQ ID NO: 237196 - DNA, 20 bp, Artificial Sequence
  Description of Artificial Sequence: Synthetic oligonucleotide
  Target: LAMA2; (-) strand; PAM type: YTN; PAM sequence: CTC
attttacattgataaaaata

SEQ ID NO: 237197 - DNA, 20 bp, Artificial Sequence
  Description of Artificial Sequence: Synthetic oligonucleotide
  Target: LAMA2; (-) strand; PAM type: YTN; PAM sequence: CTC
tcattttacattgataaaaa

SEQ ID NO: 237198 - DNA, 20 bp, Artificial Sequence
  Description of Artificial Sequence: Synthetic oligonucleotide
  Target: LAMA2; (-) strand; PAM type: YTN; PAM sequence: TTC
agtaaggcaagctctcattt

SEQ ID NO: 237199 - DNA, 20 bp, Artificial Sequence
  Description of Artificial Sequence: Synthetic oligonucleotide
  Target: LAMA2; (-) strand; PAM type: YTN; PAM sequence: CTA
ggttcagtaaggcaagctct

SEQ ID NO: 237200 - DNA, 20 bp, Artificial Sequence
  Description of Artificial Sequence: Synthetic oligonucleotide
  Target: LAMA2; (-) strand; PAM type: YTN; PAM sequence: CTC
aaataaactaggttcagtaa

SEQ ID NO: 237201 - DNA, 20 bp, Artificial Sequence
  Description of Artificial Sequence: Synthetic oligonucleotide
  Target: LAMA2; (-) strand; PAM type: YTN; PAM sequence: TTA
aatagggccaaagtagaact

SEQ ID NO: 237202 - DNA, 20 bp, Artificial Sequence
  Description of Artificial Sequence: Synthetic oligonucleotide
  Target: LAMA2; (-) strand; PAM type: YTN; PAM sequence: TTG
tgaaatattaaatagggcca

SEQ ID NO: 237203 - DNA, 20 bp, Artificial Sequence
  Description of Artificial Sequence: Synthetic oligonucleotide
  Target: LAMA2; (-) strand; PAM type: YTN; PAM sequence: TTA
caagtaaaagaaaatgaatg

SEQ ID NO: 237204 - DNA, 20 bp, Artificial Sequence
  Description of Artificial Sequence: Synthetic oligonucleotide
  Target: LAMA2; (-) strand; PAM type: YTN; PAM sequence: TTG
caaataaaatattacaagta

SEQ ID NO: 237205 - DNA, 20 bp, Artificial Sequence
  Description of Artificial Sequence: Synthetic oligonucleotide
  Target: LAMA2; (-) strand; PAM type: YTN; PAM sequence: TTA
aaaacataaacatgtaatgt

SEQ ID NO: 237206 - DNA, 20 bp, Artificial Sequence
  Description of Artificial Sequence: Synthetic oligonucleotide
  Target: LAMA2; (-) strand; PAM type: YTN; PAM sequence: TTA
ttaaaaacataaacatgtaa

SEQ ID NO: 237207 - DNA, 20 bp, Artificial Sequence
  Description of Artificial Sequence: Synthetic oligonucleotide
  Target: LAMA2; (-) strand; PAM type: YTN; PAM sequence: CTT
attaaaaacataaacatgta

SEQ ID NO: 237208 - DNA, 20 bp, Artificial Sequence
  Description of Artificial Sequence: Synthetic oligonucleotide
  Target: LAMA2; (-) strand; PAM type: YTN; PAM sequence: TTC
ttattaaaaacataaacatg

SEQ ID NO: 237209 - DNA, 20 bp, Artificial Sequence
  Description of Artificial Sequence: Synthetic oligonucleotide
  Target: LAMA2; (-) strand; PAM type: YTN; PAM sequence: CTG
ttcttattaaaaacataaac

SEQ ID NO: 237210 - DNA, 20 bp, Artificial Sequence
  Description of Artificial Sequence: Synthetic oligonucleotide
  Target: LAMA2; (-) strand; PAM type: YTN; PAM sequence: TTA
ctgttcttattaaaaacata

SEQ ID NO: 237211 - DNA, 20 bp, Artificial Sequence
  Description of Artificial Sequence: Synthetic oligonucleotide
  Target: LAMA2; (-) strand; PAM type: YTN; PAM sequence: CTT
actgttcttattaaaaacat

SEQ ID NO: 237212 - DNA, 20 bp, Artificial Sequence
  Description of Artificial Sequence: Synthetic oligonucleotide
  Target: LAMA2; (-) strand; PAM type: YTN; PAM sequence: TTA
agcagtcttactgttcttat

SEQ ID NO: 237213 - DNA, 20 bp, Artificial Sequence
  Description of Artificial Sequence: Synthetic oligonucleotide
  Target: LAMA2; (-) strand; PAM type: YTN; PAM sequence: CTA
atgagttaagcagtcttact

SEQ ID NO: 237214 - DNA, 20 bp, Artificial Sequence
  Description of Artificial Sequence: Synthetic oligonucleotide
  Target: LAMA2; (-) strand; PAM type: YTN; PAM sequence: CTA
aatacatactaatgagttaa

SEQ ID NO: 237215 - DNA, 20 bp, Artificial Sequence
  Description of Artificial Sequence: Synthetic oligonucleotide
  Target: LAMA2; (-) strand; PAM type: YTN; PAM sequence: TTA
gtgtcagaaatgcatactaa

SEQ ID NO: 237216 - DNA, 20 bp, Artificial Sequence
  Description of Artificial Sequence: Synthetic oligonucleotide
  Target: LAMA2; (-) strand; PAM type: YTN; PAM sequence: TTA
gggagagaaagcaaaaagca

SEQ ID NO: 237217 - DNA, 20 bp, Artificial Sequence
  Description of Artificial Sequence: Synthetic oligonucleotide
  Target: LAMA2; (-) strand; PAM type: YTN; PAM sequence: CTG
gagaaagataaaagcaaatc

SEQ ID NO: 237218 - DNA, 20 bp, Artificial Sequence
  Description of Artificial Sequence: Synthetic oligonucleotide
  Target: LAMA2; (-) strand; PAM type: YTN; PAM sequence: TTC
aaaatctggagaaagataaa

SEQ ID NO: 237219 - DNA, 20 bp, Artificial Sequence
  Description of Artificial Sequence: Synthetic oligonucleotide
  Target: LAMA2; (-) strand; PAM type: YTN; PAM sequence: CTT
caaaatctggagaaagataa

SEQ ID NO: 237220 - DNA, 20 bp, Artificial Sequence
  Description of Artificial Sequence: Synthetic oligonucleotide
  Target: LAMA2; (-) strand; PAM type: YTN; PAM sequence: CTA
acagaccttcaaaatctgga

SEQ ID NO: 237221 - DNA, 20 bp, Artificial Sequence
  Description of Artificial Sequence: Synthetic oligonucleotide
  Target: LAMA2; (-) strand; PAM type: YTN; PAM sequence: TTA
aaaaatagaaataatacagg

SEQ ID NO: 237222 - DNA, 20 bp, Artificial Sequence
  Description of Artificial Sequence: Synthetic oligonucleotide
  Target: LAMA2; (-) strand; PAM type: YTN; PAM sequence: TTG
attaaaaaatagaaataata

SEQ ID NO: 237223 - DNA, 20 bp, Artificial Sequence
  Description of Artificial Sequence: Synthetic oligonucleotide
  Target: LAMA2; (-) strand; PAM type: YTN; PAM sequence: TTT
gattaaaaaatagaaataat

SEQ ID NO: 237224 - DNA, 20 bp, Artificial Sequence
  Description of Artificial Sequence: Synthetic oligonucleotide
  Target: LAMA2; (-) strand; PAM type: YTN; PAM sequence: CTT
tgattaaaaaatagaaataa

SEQ ID NO: 237225 - DNA, 20 bp, Artificial Sequence
  Description of Artificial Sequence: Synthetic oligonucleotide
  Target: LAMA2; (-) strand; PAM type: YTN; PAM sequence: TTC
atgtctttgattaaaaaata

SEQ ID NO: 237226 - DNA, 20 bp, Artificial Sequence
  Description of Artificial Sequence: Synthetic oligonucleotide
  Target: LAMA2; (-) strand; PAM type: YTN; PAM sequence: TTA
ttcatgtctttgattaaaaa

SEQ ID NO: 237227 - DNA, 20 bp, Artificial Sequence
  Description of Artificial Sequence: Synthetic oligonucleotide
  Target: LAMA2; (-) strand; PAM type: YTN; PAM sequence: TTT
attcatgtctttgattaaaa

SEQ ID NO: 237228 - DNA, 20 bp, Artificial Sequence
  Description of Artificial Sequence: Synthetic oligonucleotide
  Target: LAMA2; (-) strand; PAM type: YTN; PAM sequence: TTA
acatacagaaatacaaaaca

SEQ ID NO: 237229 - DNA, 20 bp, Artificial Sequence
  Description of Artificial Sequence: Synthetic oligonucleotide
  Target: LAMA2; (-) strand; PAM type: YTN; PAM sequence: TTT
aacatacagaaatacaaaac

SEQ ID NO: 237230 - DNA, 20 bp, Artificial Sequence
  Description of Artificial Sequence: Synthetic oligonucleotide
  Target: LAMA2; (-) strand; PAM type: YTN; PAM sequence: TTT
taacatacagaaatacaaaa

SEQ ID NO: 237231 - DNA, 20 bp, Artificial Sequence
  Description of Artificial Sequence: Synthetic oligonucleotide
  Target: LAMA2; (-) strand; PAM type: YTN; PAM sequence: TTT
ttaacatacagaaatacaaa

SEQ ID NO: 237232 - DNA, 20 bp, Artificial Sequence
  Description of Artificial Sequence: Synthetic oligonucleotide
  Target: LAMA2; (-) strand; PAM type: YTN; PAM sequence: TTT
tttaacatacagaaatacaa

SEQ ID NO: 237233 - DNA, 20 bp, Artificial Sequence
  Description of Artificial Sequence: Synthetic oligonucleotide
  Target: LAMA2; (-) strand; PAM type: YTN; PAM sequence: CTT
ttttaacatacagaaataca

SEQ ID NO: 237234 - DNA, 20 bp, Artificial Sequence
  Description of Artificial Sequence: Synthetic oligonucleotide
  Target: LAMA2; (-) strand; PAM type: YTN; PAM sequence: TTA
cttttttaacatacagaaat

SEQ ID NO: 237235 - DNA, 20 bp, Artificial Sequence
  Description of Artificial Sequence: Synthetic oligonucleotide
  Target: LAMA2; (-) strand; PAM type: YTN; PAM sequence: TTT
acttttttaacatacagaaa

SEQ ID NO: 237236 - DNA, 20 bp, Artificial Sequence
  Description of Artificial Sequence: Synthetic oligonucleotide
  Target: LAMA2; (-) strand; PAM type: YTN; PAM sequence: TTA
aatttacttttttaacatac

SEQ ID NO: 237237 - DNA, 20 bp, Artificial Sequence
  Description of Artificial Sequence: Synthetic oligonucleotide
  Target: LAMA2; (-) strand; PAM type: YTN; PAM sequence: TTT
aaatttacttttttaacata

SEQ ID NO: 237238 - DNA, 20 bp, Artificial Sequence
  Description of Artificial Sequence: Synthetic oligonucleotide
  Target: LAMA2; (-) strand; PAM type: YTN; PAM sequence: TTG
gggataagaagcaatagatg

SEQ ID NO: 237239 - DNA, 20 bp, Artificial Sequence
  Description of Artificial Sequence: Synthetic oligonucleotide
  Target: LAMA2; (-) strand; PAM type: YTN; PAM sequence: TTT
ggggataagaagcaatagat

SEQ ID NO: 237240 - DNA, 20 bp, Artificial Sequence
  Description of Artificial Sequence: Synthetic oligonucleotide
  Target: LAMA2; (-) strand; PAM type: YTN; PAM sequence: TTT
tggggataagaagcaataga

SEQ ID NO: 237241 - DNA, 20 bp, Artificial Sequence
  Description of Artificial Sequence: Synthetic oligonucleotide
  Target: LAMA2; (-) strand; PAM type: YTN; PAM sequence: TTG
atattttggggataagaagc

SEQ ID NO: 237242 - DNA, 20 bp, Artificial Sequence
  Description of Artificial Sequence: Synthetic oligonucleotide
  Target: LAMA2; (-) strand; PAM type: YTN; PAM sequence: TTG
gaattgatattttggggata

SEQ ID NO: 237243 - DNA, 20 bp, Artificial Sequence
  Description of Artificial Sequence: Synthetic oligonucleotide
  Target: LAMA2; (-) strand; PAM type: YTN; PAM sequence: TTC
attggaattgatattttggg

SEQ ID NO: 237244 - DNA, 20 bp, Artificial Sequence
  Description of Artificial Sequence: Synthetic oligonucleotide
  Target: LAMA2; (-) strand; PAM type: YTN; PAM sequence: CTA
aagaaaataaaggtgttcat

SEQ ID NO: 237245 - DNA, 20 bp, Artificial Sequence
  Description of Artificial Sequence: Synthetic oligonucleotide
  Target: LAMA2; (-) strand; PAM type: YTN; PAM sequence: TTA
ctaaagaaaataaaggtgtt

SEQ ID NO: 237246 - DNA, 20 bp, Artificial Sequence
  Description of Artificial Sequence: Synthetic oligonucleotide
  Target: LAMA2; (-) strand; PAM type: YTN; PAM sequence: CTG
gcagtattactaaagaaaat

SEQ ID NO: 237247 - DNA, 20 bp, Artificial Sequence
  Description of Artificial Sequence: Synthetic oligonucleotide
  Target: LAMA2; (-) strand; PAM type: YTN; PAM sequence: CTA
agaacatgccactggcagta

SEQ ID NO: 237248 - DNA, 20 bp, Artificial Sequence
  Description of Artificial Sequence: Synthetic oligonucleotide
  Target: LAMA2; (-) strand; PAM type: YTN; PAM sequence: CTC
taagaacatgccactggcag

SEQ ID NO: 237249 - DNA, 20 bp, Artificial Sequence
  Description of Artificial Sequence: Synthetic oligonucleotide
  Target: LAMA2; (-) strand; PAM type: YTN; PAM sequence: TTA
acaatgatactctaagaaca

SEQ ID NO: 237250 - DNA, 20 bp, Artificial Sequence
  Description of Artificial Sequence: Synthetic oligonucleotide
  Target: LAMA2; (-) strand; PAM type: YTN; PAM sequence: TTT
aacaatgatactctaagaac

SEQ ID NO: 237251 - DNA, 20 bp, Artificial Sequence
  Description of Artificial Sequence: Synthetic oligonucleotide
  Target: LAMA2; (-) strand; PAM type: YTN; PAM sequence: TTA
aaataacagtttaacaatga

SEQ ID NO: 237252 - DNA, 20 bp, Artificial Sequence
  Description of Artificial Sequence: Synthetic oligonucleotide
  Target: LAMA2; (-) strand; PAM type: YTN; PAM sequence: CTT
aaaataacagtttaacaatg

SEQ ID NO: 237253 - DNA, 20 bp, Artificial Sequence
  Description of Artificial Sequence: Synthetic oligonucleotide
  Target: LAMA2; (-) strand; PAM type: YTN; PAM sequence: TTA
cttaaaataacagtttaaca

SEQ ID NO: 237254 - DNA, 20 bp, Artificial Sequence
  Description of Artificial Sequence: Synthetic oligonucleotide
  Target: LAMA2; (-) strand; PAM type: YTN; PAM sequence: TTG
ggaataaagacatattactt

SEQ ID NO: 237255 - DNA, 20 bp, Artificial Sequence
  Description of Artificial Sequence: Synthetic oligonucleotide
  Target: LAMA2; (-) strand; PAM type: YTN; PAM sequence: CTT
gggaataaagacatattact

SEQ ID NO: 237256 - DNA, 20 bp, Artificial Sequence
  Description of Artificial Sequence: Synthetic oligonucleotide
  Target: LAMA2; (-) strand; PAM type: YTN; PAM sequence: TTA
caggtgcaaagtagccttgg

SEQ ID NO: 237257 - DNA, 20 bp, Artificial Sequence
  Description of Artificial Sequence: Synthetic oligonucleotide
  Target: LAMA2; (-) strand; PAM type: YTN; PAM sequence: CTA
ttacaggtgcaaagtagcct

SEQ ID NO: 237258 - DNA, 20 bp, Artificial Sequence
  Description of Artificial Sequence: Synthetic oligonucleotide
  Target: LAMA2; (-) strand; PAM type: YTN; PAM sequence: CTC
caccagactattacaggtgc

SEQ ID NO: 237259 - DNA, 20 bp, Artificial Sequence
  Description of Artificial Sequence: Synthetic oligonucleotide
  Target: LAMA2; (-) strand; PAM type: YTN; PAM sequence: CTG
ctccaccagactattacagg

SEQ ID NO: 237260 - DNA, 20 bp, Artificial Sequence
  Description of Artificial Sequence: Synthetic oligonucleotide
  Target: LAMA2; (-) strand; PAM type: YTN; PAM sequence: CTC
acggaacaagcctgctccac

SEQ ID NO: 237261 - DNA, 20 bp, Artificial Sequence
  Description of Artificial Sequence: Synthetic oligonucleotide
  Target: LAMA2; (-) strand; PAM type: YTN; PAM sequence: CTA
gtggctcacggaacaagcct

SEQ ID NO: 237262 - DNA, 20 bp, Artificial Sequence
  Description of Artificial Sequence: Synthetic oligonucleotide
  Target: LAMA2; (-) strand; PAM type: YTN; PAM sequence: TTG
agaagaataagcagtaacaa

SEQ ID NO: 237263 - DNA, 20 bp, Artificial Sequence
  Description of Artificial Sequence: Synthetic oligonucleotide
  Target: LAMA2; (-) strand; PAM type: YTN; PAM sequence: CTA
cattgagaagaataagcagt

SEQ ID NO: 237264 - DNA, 20 bp, Artificial Sequence
  Description of Artificial Sequence: Synthetic oligonucleotide
  Target: LAMA2; (-) strand; PAM type: YTN; PAM sequence: CTG
atgatgctacattgagaaga

SEQ ID NO: 237265 - DNA, 20 bp, Artificial Sequence
  Description of Artificial Sequence: Synthetic oligonucleotide
  Target: LAMA2; (-) strand; PAM type: YTN; PAM sequence: CTA
atgctgatgatgctacattg

SEQ ID NO: 237266 - DNA, 20 bp, Artificial Sequence
  Description of Artificial Sequence: Synthetic oligonucleotide
  Target: LAMA2; (-) strand; PAM type: YTN; PAM sequence: TTC
cacaaacgctaatgctgatg

SEQ ID NO: 237267 - DNA, 20 bp, Artificial Sequence
  Description of Artificial Sequence: Synthetic oligonucleotide
  Target: LAMA2; (-) strand; PAM type: YTN; PAM sequence: TTT
ccacaaacgctaatgctgat

SEQ ID NO: 237268 - DNA, 20 bp, Artificial Sequence
  Description of Artificial Sequence: Synthetic oligonucleotide
  Target: LAMA2; (-) strand; PAM type: YTN; PAM sequence: CTA
tagaaaacaatgaccaagga

SEQ ID NO: 237269 - DNA, 20 bp, Artificial Sequence
  Description of Artificial Sequence: Synthetic oligonucleotide
  Target: LAMA2; (-) strand; PAM type: YTN; PAM sequence: CTA
tggctatagaaaacaatgac

SEQ ID NO: 237270 - DNA, 20 bp, Artificial Sequence
  Description of Artificial Sequence: Synthetic oligonucleotide
  Target: LAMA2; (-) strand; PAM type: YTN; PAM sequence: CTA
ccaaactatggctatagaaa

SEQ ID NO: 237271 - DNA, 20 bp, Artificial Sequence
  Description of Artificial Sequence: Synthetic oligonucleotide
  Target: LAMA2; (-) strand; PAM type: YTN; PAM sequence: CTC
aaagcatctaccaaactatg

SEQ ID NO: 237272 - DNA, 20 bp, Artificial Sequence
  Description of Artificial Sequence: Synthetic oligonucleotide
  Target: LAMA2; (-) strand; PAM type: YTN; PAM sequence: TTA
aaaatgtaaacaagaaagat

SEQ ID NO: 237273 - DNA, 20 bp, Artificial Sequence
  Description of Artificial Sequence: Synthetic oligonucleotide
  Target: LAMA2; (-) strand; PAM type: YTN; PAM sequence: CTA
agtgtcaatagaaatattaa

SEQ ID NO: 237274 - DNA, 20 bp, Artificial Sequence
  Description of Artificial Sequence: Synthetic oligonucleotide
  Target: LAMA2; (-) strand; PAM type: YTN; PAM sequence: TTC
taagtgtcaatagaaatatt

SEQ ID NO: 237275 - DNA, 20 bp, Artificial Sequence
  Description of Artificial Sequence: Synthetic oligonucleotide
  Target: LAMA2; (-) strand; PAM type: YTN; PAM sequence: CTT
ctaagtgtcaatagaaatat

SEQ ID NO: 237276 - DNA, 20 bp, Artificial Sequence
  Description of Artificial Sequence: Synthetic oligonucleotide
  Target: LAMA2; (-) strand; PAM type: YTN; PAM sequence: TTA
cgtgaacatagcatcttcta

SEQ ID NO: 237277 - DNA, 20 bp, Artificial Sequence
  Description of Artificial Sequence: Synthetic oligonucleotide
  Target: LAMA2; (-) strand; PAM type: YTN; PAM sequence: CTA
tgattacgtgaacatagcat

SEQ ID NO: 237278 - DNA, 20 bp, Artificial Sequence
  Description of Artificial Sequence: Synthetic oligonucleotide
  Target: LAMA2; (-) strand; PAM type: YTN; PAM sequence: TTC
tatgattacgtgaacatagc

SEQ ID NO: 237279 - DNA, 20 bp, Artificial Sequence
  Description of Artificial Sequence: Synthetic oligonucleotide
  Target: LAMA2; (-) strand; PAM type: YTN; PAM sequence: TTT
ctatgattacgtgaacatag

SEQ ID NO: 237280 - DNA, 20 bp, Artificial Sequence
  Description of Artificial Sequence: Synthetic oligonucleotide
  Target: LAMA2; (-) strand; PAM type: YTN; PAM sequence: CTT
tctatgattacgtgaacata

SEQ ID NO: 237281 - DNA, 20 bp, Artificial Sequence
  Description of Artificial Sequence: Synthetic oligonucleotide
  Target: LAMA2; (-) strand; PAM type: YTN; PAM sequence: TTA
aaagctttctatgattacgt

SEQ ID NO: 237282 - DNA, 20 bp, Artificial Sequence
  Description of Artificial Sequence: Synthetic oligonucleotide
  Target: LAMA2; (-) strand; PAM type: YTN; PAM sequence: TTA
attaaaagctttctatgatt

SEQ ID NO: 237283 - DNA, 20 bp, Artificial Sequence
  Description of Artificial Sequence: Synthetic oligonucleotide
  Target: LAMA2; (-) strand; PAM type: YTN; PAM sequence: TTT
aattaaaagctttctatgat

SEQ ID NO: 237284 - DNA, 20 bp, Artificial Sequence
  Description of Artificial Sequence: Synthetic oligonucleotide
  Target: LAMA2; (-) strand; PAM type: YTN; PAM sequence: TTA
aaaccaaagagtagagggtt

SEQ ID NO: 237285 - DNA, 20 bp, Artificial Sequence
  Description of Artificial Sequence: Synthetic oligonucleotide
  Target: LAMA2; (-) strand; PAM type: YTN; PAM sequence: TTA
tatatatcaataaagaaaag

SEQ ID NO: 237286 - DNA, 20 bp, Artificial Sequence
  Description of Artificial Sequence: Synthetic oligonucleotide
  Target: LAMA2; (-) strand; PAM type: YTN; PAM sequence: TTT
atatatatcaataaagaaaa

SEQ ID NO: 237287 - DNA, 20 bp, Artificial Sequence
  Description of Artificial Sequence: Synthetic oligonucleotide
  Target: LAMA2; (-) strand; PAM type: YTN; PAM sequence: TTT
tatatatatcaataaagaaa

SEQ ID NO: 237288 - DNA, 20 bp, Artificial Sequence
  Description of Artificial Sequence: Synthetic oligonucleotide
  Target: LAMA2; (-) strand; PAM type: YTN; PAM sequence: TTT
ttatatatatcaataaagaa

SEQ ID NO: 237289 - DNA, 20 bp, Artificial Sequence
  Description of Artificial Sequence: Synthetic oligonucleotide
  Target: LAMA2; (-) strand; PAM type: YTN; PAM sequence: TTT
tttatatatatcaataaaga

SEQ ID NO: 237290 - DNA, 20 bp, Artificial Sequence
  Description of Artificial Sequence: Synthetic oligonucleotide
  Target: LAMA2; (-) strand; PAM type: YTN; PAM sequence: TTG
acacaaaaatagatttttta

SEQ ID NO: 237291 - DNA, 20 bp, Artificial Sequence
  Description of Artificial Sequence: Synthetic oligonucleotide
  Target: LAMA2; (-) strand; PAM type: YTN; PAM sequence: TTT
gacacaaaaatagatttttt

SEQ ID NO: 237292 - DNA, 20 bp, Artificial Sequence
  Description of Artificial Sequence: Synthetic oligonucleotide
  Target: LAMA2; (-) strand; PAM type: YTN; PAM sequence: TTT
tgacacaaaaatagattttt

SEQ ID NO: 237293 - DNA, 20 bp, Artificial Sequence
  Description of Artificial Sequence: Synthetic oligonucleotide
  Target: LAMA2; (-) strand; PAM type: YTN; PAM sequence: CTA
ttttgacacaaaaatagatt

SEQ ID NO: 237294 - DNA, 20 bp, Artificial Sequence
  Description of Artificial Sequence: Synthetic oligonucleotide
  Target: LAMA2; (-) strand; PAM type: YTN; PAM sequence: TTA
aaatgctattttgacacaaa

SEQ ID NO: 237295 - DNA, 20 bp, Artificial Sequence
  Description of Artificial Sequence: Synthetic oligonucleotide
  Target: LAMA2; (-) strand; PAM type: YTN; PAM sequence: TTT
aaaatgctattttgacacaa

SEQ ID NO: 237296 - DNA, 20 bp, Artificial Sequence
  Description of Artificial Sequence: Synthetic oligonucleotide
  Target: LAMA2; (-) strand; PAM type: YTN; PAM sequence: CTT
taaaatgctattttgacaca

SEQ ID NO: 237297 - DNA, 20 bp, Artificial Sequence
  Description of Artificial Sequence: Synthetic oligonucleotide
  Target: LAMA2; (-) strand; PAM type: YTN; PAM sequence: TTA
atgacagtaacctttaaaat

SEQ ID NO: 237298 - DNA, 20 bp, Artificial Sequence
  Description of Artificial Sequence: Synthetic oligonucleotide
  Target: LAMA2; (-) strand; PAM type: YTN; PAM sequence: TTT
aatgacagtaacctttaaaa

SEQ ID NO: 237299 - DNA, 20 bp, Artificial Sequence
  Description of Artificial Sequence: Synthetic oligonucleotide
  Target: LAMA2; (-) strand; PAM type: YTN; PAM sequence: TTT
taatgacagtaacctttaaa

SEQ ID NO: 237300 - DNA, 20 bp, Artificial Sequence
  Description of Artificial Sequence: Synthetic oligonucleotide
  Target: LAMA2; (-) strand; PAM type: YTN; PAM sequence: TTA
aagttttaatgacagtaacc

SEQ ID NO: 237301 - DNA, 20 bp, Artificial Sequence
  Description of Artificial Sequence: Synthetic oligonucleotide
  Target: LAMA2; (-) strand; PAM type: YTN; PAM sequence: TTG
ttaaagttttaatgacagta

SEQ ID NO: 237302 - DNA, 20 bp, Artificial Sequence
  Description of Artificial Sequence: Synthetic oligonucleotide
  Target: LAMA2; (-) strand; PAM type: YTN; PAM sequence: TTA
gttgttaaagttttaatgac

SEQ ID NO: 237303 - DNA, 20 bp, Artificial Sequence
  Description of Artificial Sequence: Synthetic oligonucleotide
  Target: LAMA2; (-) strand; PAM type: YTN; PAM sequence: TTT
agttgttaaagttttaatga

SEQ ID NO: 237304 - DNA, 20 bp, Artificial Sequence
  Description of Artificial Sequence: Synthetic oligonucleotide
  Target: LAMA2; (-) strand; PAM type: YTN; PAM sequence: CTA
aaacaagtacataatttagt

SEQ ID NO: 237305 - DNA, 20 bp, Artificial Sequence
  Description of Artificial Sequence: Synthetic oligonucleotide
  Target: LAMA2; (-) strand; PAM type: YTN; PAM sequence: TTC
taaaacaagtacataattta

SEQ ID NO: 237306 - DNA, 20 bp, Artificial Sequence
  Description of Artificial Sequence: Synthetic oligonucleotide
  Target: LAMA2; (-) strand; PAM type: YTN; PAM sequence: TTT
ctaaaacaagtacataattt

SEQ ID NO: 237307 - DNA, 20 bp, Artificial Sequence
  Description of Artificial Sequence: Synthetic oligonucleotide
  Target: LAMA2; (-) strand; PAM type: YTN; PAM sequence: CTA
aagaaagatgagccacatat

SEQ ID NO: 237308 - DNA, 20 bp, Artificial Sequence
  Description of Artificial Sequence: Synthetic oligonucleotide
  Target: LAMA2; (-) strand; PAM type: YTN; PAM sequence: TTG
caatgacaggatccaggtgc

SEQ ID NO: 237309 - DNA, 20 bp, Artificial Sequence
  Description of Artificial Sequence: Synthetic oligonucleotide
  Target: LAMA2; (-) strand; PAM type: YTN; PAM sequence: TTT
gcaatgacaggatccaggtg

SEQ ID NO: 237310 - DNA, 20 bp, Artificial Sequence
  Description of Artificial Sequence: Synthetic oligonucleotide
  Target: LAMA2; (-) strand; PAM type: YTN; PAM sequence: TTT
tgcaatgacaggatccaggt

SEQ ID NO: 237311 - DNA, 20 bp, Artificial Sequence
  Description of Artificial Sequence: Synthetic oligonucleotide
  Target: LAMA2; (-) strand; PAM type: YTN; PAM sequence: CTC
caaaaccagttttgcaatga

SEQ ID NO: 237312 - DNA, 20 bp, Artificial Sequence
  Description of Artificial Sequence: Synthetic oligonucleotide
  Target: LAMA2; (-) strand; PAM type: YTN; PAM sequence: CTC
acacctccaaaaccagtttt

SEQ ID NO: 237313 - DNA, 20 bp, Artificial Sequence
  Description of Artificial Sequence: Synthetic oligonucleotide
  Target: LAMA2; (-) strand; PAM type: YTN; PAM sequence: CTG
gcacaccgatcacagctcac

SEQ ID NO: 237314 - DNA, 20 bp, Artificial Sequence
  Description of Artificial Sequence: Synthetic oligonucleotide
  Target: LAMA2; (-) strand; PAM type: YTN; PAM sequence: TTG
cagtccgggtagccagtgta

SEQ ID NO: 237315 - DNA, 20 bp, Artificial Sequence
  Description of Artificial Sequence: Synthetic oligonucleotide
  Target: LAMA2; (-) strand; PAM type: YTN; PAM sequence: TTT
gcagtccgggtagccagtgt

SEQ ID NO: 237316 - DNA, 20 bp, Artificial Sequence
  Description of Artificial Sequence: Synthetic oligonucleotide
  Target: LAMA2; (-) strand; PAM type: YTN; PAM sequence: CTT
tgcagtccgggtagccagtg

SEQ ID NO: 237317 - DNA, 20 bp, Artificial Sequence
  Description of Artificial Sequence: Synthetic oligonucleotide
  Target: LAMA2; (-) strand; PAM type: YTN; PAM sequence: TTA
caggctttgcagtccgggta

SEQ ID NO: 237318 - DNA, 20 bp, Artificial Sequence
  Description of Artificial Sequence: Synthetic oligonucleotide
  Target: LAMA2; (-) strand; PAM type: YTN; PAM sequence: CTG
cagttacaggctttgcagtc

SEQ ID NO: 237319 - DNA, 20 bp, Artificial Sequence
  Description of Artificial Sequence: Synthetic oligonucleotide
  Target: LAMA2; (-) strand; PAM type: YTN; PAM sequence: CTA
acccactgcagttacaggct

SEQ ID NO: 237320 - DNA, 20 bp, Artificial Sequence
  Description of Artificial Sequence: Synthetic oligonucleotide
  Target: LAMA2; (-) strand; PAM type: YTN; PAM sequence: CTC
cctaacccactgcagttaca

SEQ ID NO: 237321 - DNA, 20 bp, Artificial Sequence
  Description of Artificial Sequence: Synthetic oligonucleotide
  Target: LAMA2; (-) strand; PAM type: YTN; PAM sequence: TTG
ctccctaacccactgcagtt

SEQ ID NO: 237322 - DNA, 20 bp, Artificial Sequence
  Description of Artificial Sequence: Synthetic oligonucleotide
  Target: LAMA2; (-) strand; PAM type: YTN; PAM sequence: TTT
gctccctaacccactgcagt

SEQ ID NO: 237323 - DNA, 20 bp, Artificial Sequence
  Description of Artificial Sequence: Synthetic oligonucleotide
  Target: LAMA2; (-) strand; PAM type: YTN; PAM sequence: TTT
tgctccctaacccactgcag

SEQ ID NO: 237324 - DNA, 20 bp, Artificial Sequence
  Description of Artificial Sequence: Synthetic oligonucleotide
  Target: LAMA2; (-) strand; PAM type: YTN; PAM sequence: TTT
ttgctccctaacccactgca

SEQ ID NO: 237325 - DNA, 20 bp, Artificial Sequence
  Description of Artificial Sequence: Synthetic oligonucleotide
  Target: LAMA2; (-) strand; PAM type: YTN; PAM sequence: CTC
atttttgctccctaacccac

SEQ ID NO: 237326 - DNA, 20 bp, Artificial Sequence
  Description of Artificial Sequence: Synthetic oligonucleotide
  Target: LAMA2; (-) strand; PAM type: YTN; PAM sequence: TTG
cagatacaggggccaaaaca

SEQ ID NO: 237327 - DNA, 20 bp, Artificial Sequence
  Description of Artificial Sequence: Synthetic oligonucleotide
  Target: LAMA2; (-) strand; PAM type: YTN; PAM sequence: CTT
gcagatacaggggccaaaac

SEQ ID NO: 237328 - DNA, 20 bp, Artificial Sequence
  Description of Artificial Sequence: Synthetic oligonucleotide
  Target: LAMA2; (-) strand; PAM type: YTN; PAM sequence: CTG
gaataaacaatgtaccttgc

SEQ ID NO: 237329 - DNA, 20 bp, Artificial Sequence
  Description of Artificial Sequence: Synthetic oligonucleotide
  Target: LAMA2; (-) strand; PAM type: YTN; PAM sequence: TTA
ctggaataaacaatgtacct

SEQ ID NO: 237330 - DNA, 20 bp, Artificial Sequence
  Description of Artificial Sequence: Synthetic oligonucleotide
  Target: LAMA2; (-) strand; PAM type: YTN; PAM sequence: TTG
acagtgggacattactggaa

SEQ ID NO: 237331 - DNA, 20 bp, Artificial Sequence
  Description of Artificial Sequence: Synthetic oligonucleotide
  Target: LAMA2; (-) strand; PAM type: YTN; PAM sequence: CTT
gacagtgggacattactgga

SEQ ID NO: 237332 - DNA, 20 bp, Artificial Sequence
  Description of Artificial Sequence: Synthetic oligonucleotide
  Target: LAMA2; (-) strand; PAM type: YTN; PAM sequence: CTG
tcttgacagtgggacattac

SEQ ID NO: 237333 - DNA, 20 bp, Artificial Sequence
  Description of Artificial Sequence: Synthetic oligonucleotide
  Target: LAMA2; (-) strand; PAM type: YTN; PAM sequence: TTC
tgtcttgacagtgggacatt

SEQ ID NO: 237334 - DNA, 20 bp, Artificial Sequence
  Description of Artificial Sequence: Synthetic oligonucleotide
  Target: LAMA2; (-) strand; PAM type: YTN; PAM sequence: CTT
ctgtcttgacagtgggacat

SEQ ID NO: 237335 - DNA, 20 bp, Artificial Sequence
  Description of Artificial Sequence: Synthetic oligonucleotide
  Target: LAMA2; (-) strand; PAM type: YTN; PAM sequence: TTA
atgccaaggaaatcaacaga

SEQ ID NO: 237336 - DNA, 20 bp, Artificial Sequence
  Description of Artificial Sequence: Synthetic oligonucleotide
  Target: LAMA2; (-) strand; PAM type: YTN; PAM sequence: CTT
aatgccaaggaaatcaacag

SEQ ID NO: 237337 - DNA, 20 bp, Artificial Sequence
  Description of Artificial Sequence: Synthetic oligonucleotide
  Target: LAMA2; (-) strand; PAM type: YTN; PAM sequence: TTG
cttaatgccaaggaaatcaa

SEQ ID NO: 237338 - DNA, 20 bp, Artificial Sequence
  Description of Artificial Sequence: Synthetic oligonucleotide
  Target: LAMA2; (-) strand; PAM type: YTN; PAM sequence: TTA
aaattgcttaatgccaagga

SEQ ID NO: 237339 - DNA, 20 bp, Artificial Sequence
  Description of Artificial Sequence: Synthetic oligonucleotide
  Target: LAMA2; (-) strand; PAM type: YTN; PAM sequence: TTC
cagaagtcattaaaattgct

SEQ ID NO: 237340 - DNA, 20 bp, Artificial Sequence
  Description of Artificial Sequence: Synthetic oligonucleotide
  Target: LAMA2; (-) strand; PAM type: YTN; PAM sequence: CTT
ccagaagtcattaaaattgc

SEQ ID NO: 237341 - DNA, 20 bp, Artificial Sequence
  Description of Artificial Sequence: Synthetic oligonucleotide
  Target: LAMA2; (-) strand; PAM type: YTN; PAM sequence: TTA
tggatacttccagaagtcat

SEQ ID NO: 237342 - DNA, 20 bp, Artificial Sequence
  Description of Artificial Sequence: Synthetic oligonucleotide
  Target: LAMA2; (-) strand; PAM type: YTN; PAM sequence: CTG
gtgggtcaccacacgtagaa

SEQ ID NO: 237343 - DNA, 20 bp, Artificial Sequence
  Description of Artificial Sequence: Synthetic oligonucleotide
  Target: LAMA2; (-) strand; PAM type: YTN; PAM sequence: CTA
cagtgaacctggtgggtcac

SEQ ID NO: 237344 - DNA, 20 bp, Artificial Sequence
  Description of Artificial Sequence: Synthetic oligonucleotide
  Target: LAMA2; (-) strand; PAM type: YTN; PAM sequence: CTG
ctacagtgaacctggtgggt

SEQ ID NO: 237345 - DNA, 20 bp, Artificial Sequence
  Description of Artificial Sequence: Synthetic oligonucleotide
  Target: LAMA2; (-) strand; PAM type: YTN; PAM sequence: TTA
taaacatcctgctacagtga

SEQ ID NO: 237346 - DNA, 20 bp, Artificial Sequence
  Description of Artificial Sequence: Synthetic oligonucleotide
  Target: LAMA2; (-) strand; PAM type: YTN; PAM sequence: CTT
ataaacatcctgctacagtg

SEQ ID NO: 237347 - DNA, 20 bp, Artificial Sequence
  Description of Artificial Sequence: Synthetic oligonucleotide
  Target: LAMA2; (-) strand; PAM type: YTN; PAM sequence: TTA
gataagtgccttataaacat

SEQ ID NO: 237348 - DNA, 20 bp, Artificial Sequence
  Description of Artificial Sequence: Synthetic oligonucleotide
  Target: LAMA2; (-) strand; PAM type: YTN; PAM sequence: TTT
agataagtgccttataaaca

SEQ ID NO: 237349 - DNA, 20 bp, Artificial Sequence
  Description of Artificial Sequence: Synthetic oligonucleotide
  Target: LAMA2; (-) strand; PAM type: YTN; PAM sequence: TTT
tagataagtgccttataaac

SEQ ID NO: 237350 - DNA, 20 bp, Artificial Sequence
  Description of Artificial Sequence: Synthetic oligonucleotide
  Target: LAMA2; (-) strand; PAM type: YTN; PAM sequence: CTT
ttagataagtgccttataaa

SEQ ID NO: 237351 - DNA, 20 bp, Artificial Sequence
  Description of Artificial Sequence: Synthetic oligonucleotide
  Target: LAMA2; (-) strand; PAM type: YTN; PAM sequence: TTG
taggcttttagataagtgcc

SEQ ID NO: 237352 - DNA, 20 bp, Artificial Sequence
  Description of Artificial Sequence: Synthetic oligonucleotide
  Target: LAMA2; (-) strand; PAM type: YTN; PAM sequence: TTT
gtaggcttttagataagtgc

SEQ ID NO: 237353 - DNA, 20 bp, Artificial Sequence
  Description of Artificial Sequence: Synthetic oligonucleotide
  Target: LAMA2; (-) strand; PAM type: YTN; PAM sequence: CTC
cgtgcatttgtaggctttta

SEQ ID NO: 237354 - DNA, 20 bp, Artificial Sequence
  Description of Artificial Sequence: Synthetic oligonucleotide
  Target: LAMA2; (-) strand; PAM type: YTN; PAM sequence: TTA
tcctccgtgcatttgtaggc

SEQ ID NO: 237355 - DNA, 20 bp, Artificial Sequence
  Description of Artificial Sequence: Synthetic oligonucleotide
  Target: LAMA2; (-) strand; PAM type: YTN; PAM sequence: TTT
atcctccgtgcatttgtagg

SEQ ID NO: 237356 - DNA, 20 bp, Artificial Sequence
  Description of Artificial Sequence: Synthetic oligonucleotide
  Target: LAMA2; (-) strand; PAM type: YTN; PAM sequence: TTA
aacgtggtttatcctccgtg

SEQ ID NO: 237357 - DNA, 20 bp, Artificial Sequence
  Description of Artificial Sequence: Synthetic oligonucleotide
  Target: LAMA2; (-) strand; PAM type: YTN; PAM sequence: TTT
aaacgtggtttatcctccgt

SEQ ID NO: 237358 - DNA, 20 bp, Artificial Sequence
  Description of Artificial Sequence: Synthetic oligonucleotide
  Target: LAMA2; (-) strand; PAM type: YTN; PAM sequence: CTT
taaacgtggtttatcctccg

SEQ ID NO: 237359 - DNA, 20 bp, Artificial Sequence
  Description of Artificial Sequence: Synthetic oligonucleotide
  Target: LAMA2; (-) strand; PAM type: YTN; PAM sequence: TTA
taaaataacaagcctttaaa

SEQ ID NO: 237360 - DNA, 20 bp, Artificial Sequence
  Description of Artificial Sequence: Synthetic oligonucleotide
  Target: LAMA2; (-) strand; PAM type: YTN; PAM sequence: TTG
ttataaaataacaagccttt

SEQ ID NO: 237361 - DNA, 20 bp, Artificial Sequence
  Description of Artificial Sequence: Synthetic oligonucleotide
  Target: LAMA2; (-) strand; PAM type: YTN; PAM sequence: TTT
gttataaaataacaagcctt

SEQ ID NO: 237362 - DNA, 20 bp, Artificial Sequence
  Description of Artificial Sequence: Synthetic oligonucleotide
  Target: LAMA2; (-) strand; PAM type: YTN; PAM sequence: TTT
tgttataaaataacaagcct

SEQ ID NO: 237363 - DNA, 20 bp, Artificial Sequence
  Description of Artificial Sequence: Synthetic oligonucleotide
  Target: LAMA2; (-) strand; PAM type: YTN; PAM sequence: TTT
ttgttataaaataacaagcc

SEQ ID NO: 237364 - DNA, 20 bp, Artificial Sequence
  Description of Artificial Sequence: Synthetic oligonucleotide
  Target: LAMA2; (-) strand; PAM type: YTN; PAM sequence: TTG
ggcaatggggtgaaagtgtt

SEQ ID NO: 237365 - DNA, 20 bp, Artificial Sequence
  Description of Artificial Sequence: Synthetic oligonucleotide
  Target: LAMA2; (-) strand; PAM type: YTN; PAM sequence: CTA
gttgggcaatggggtgaaag

SEQ ID NO: 237366 - DNA, 20 bp, Artificial Sequence
  Description of Artificial Sequence: Synthetic oligonucleotide
  Target: LAMA2; (-) strand; PAM type: YTN; PAM sequence: TTA
acacactagttgggcaatgg

SEQ ID NO: 237367 - DNA, 20 bp, Artificial Sequence
  Description of Artificial Sequence: Synthetic oligonucleotide
  Target: LAMA2; (-) strand; PAM type: YTN; PAM sequence: TTA
aattaacacactagttgggc

SEQ ID NO: 237368 - DNA, 20 bp, Artificial Sequence
  Description of Artificial Sequence: Synthetic oligonucleotide
  Target: LAMA2; (-) strand; PAM type: YTN; PAM sequence: TTT
aaattaacacactagttggg

SEQ ID NO: 237369 - DNA, 20 bp, Artificial Sequence
  Description of Artificial Sequence: Synthetic oligonucleotide
  Target: LAMA2; (-) strand; PAM type: YTN; PAM sequence: TTT
taaattaacacactagttgg

SEQ ID NO: 237370 - DNA, 20 bp, Artificial Sequence
  Description of Artificial Sequence: Synthetic oligonucleotide
  Target: LAMA2; (-) strand; PAM type: YTN; PAM sequence: TTT
ttaaattaacacactagttg

SEQ ID NO: 237371 - DNA, 20 bp, Artificial Sequence
  Description of Artificial Sequence: Synthetic oligonucleotide
  Target: LAMA2; (-) strand; PAM type: YTN; PAM sequence: CTA
gtgccgtatatttttaaatt

SEQ ID NO: 237372 - DNA, 20 bp, Artificial Sequence
  Description of Artificial Sequence: Synthetic oligonucleotide
  Target: LAMA2; (-) strand; PAM type: YTN; PAM sequence: TTC
tagtgccgtatatttttaaa

SEQ ID NO: 237373 - DNA, 20 bp, Artificial Sequence
  Description of Artificial Sequence: Synthetic oligonucleotide
  Target: LAMA2; (-) strand; PAM type: YTN; PAM sequence: TTT
ctagtgccgtatatttttaa

SEQ ID NO: 237374 - DNA, 20 bp, Artificial Sequence
  Description of Artificial Sequence: Synthetic oligonucleotide
  Target: LAMA2; (-) strand; PAM type: YTN; PAM sequence: CTA
tttctagtgccgtatatttt

SEQ ID NO: 237375 - DNA, 20 bp, Artificial Sequence
  Description of Artificial Sequence: Synthetic oligonucleotide
  Target: LAMA2; (-) strand; PAM type: YTN; PAM sequence: TTG
ctatttctagtgccgtatat

SEQ ID NO: 237376 - DNA, 20 bp, Artificial Sequence
  Description of Artificial Sequence: Synthetic oligonucleotide
  Target: LAMA2; (-) strand; PAM type: YTN; PAM sequence: TTA
aagggttgctatttctagtg

SEQ ID NO: 237377 - DNA, 20 bp, Artificial Sequence
  Description of Artificial Sequence: Synthetic oligonucleotide
  Target: LAMA2; (-) strand; PAM type: YTN; PAM sequence: TTT
aaagggttgctatttctagt

SEQ ID NO: 237378 - DNA, 20 bp, Artificial Sequence
  Description of Artificial Sequence: Synthetic oligonucleotide
  Target: LAMA2; (-) strand; PAM type: YTN; PAM sequence: TTT
taaagggttgctatttctag

SEQ ID NO: 237379 - DNA, 20 bp, Artificial Sequence
  Description of Artificial Sequence: Synthetic oligonucleotide
  Target: LAMA2; (-) strand; PAM type: YTN; PAM sequence: TTA
gttttaaagggttgctattt

SEQ ID NO: 237380 - DNA, 20 bp, Artificial Sequence
  Description of Artificial Sequence: Synthetic oligonucleotide
  Target: LAMA2; (-) strand; PAM type: YTN; PAM sequence: TTT
agttttaaagggttgctatt

SEQ ID NO: 237381 - DNA, 20 bp, Artificial Sequence
  Description of Artificial Sequence: Synthetic oligonucleotide
  Target: LAMA2; (-) strand; PAM type: YTN; PAM sequence: CTT
tagttttaaagggttgctat

SEQ ID NO: 237382 - DNA, 20 bp, Artificial Sequence
  Description of Artificial Sequence: Synthetic oligonucleotide
  Target: LAMA2; (-) strand; PAM type: YTN; PAM sequence: TTG
aatgcactttagttttaaag

SEQ ID NO: 237383 - DNA, 20 bp, Artificial Sequence
  Description of Artificial Sequence: Synthetic oligonucleotide
  Target: LAMA2; (-) strand; PAM type: YTN; PAM sequence: TTT
gaatgcactttagttttaaa

SEQ ID NO: 237384 - DNA, 20 bp, Artificial Sequence
  Description of Artificial Sequence: Synthetic oligonucleotide
  Target: LAMA2; (-) strand; PAM type: YTN; PAM sequence: TTA
gatgcaaaggtagatttgaa

SEQ ID NO: 237385 - DNA, 20 bp, Artificial Sequence
  Description of Artificial Sequence: Synthetic oligonucleotide
  Target: LAMA2; (-) strand; PAM type: YTN; PAM sequence: CTG
aattagatgcaaaggtagat

SEQ ID NO: 237386 - DNA, 20 bp, Artificial Sequence
  Description of Artificial Sequence: Synthetic oligonucleotide
  Target: LAMA2; (-) strand; PAM type: YTN; PAM sequence: TTA
ctgaattagatgcaaaggta

SEQ ID NO: 237387 - DNA, 20 bp, Artificial Sequence
  Description of Artificial Sequence: Synthetic oligonucleotide
  Target: LAMA2; (-) strand; PAM type: YTN; PAM sequence: TTC
attactgaattagatgcaaa

SEQ ID NO: 237388 - DNA, 20 bp, Artificial Sequence
  Description of Artificial Sequence: Synthetic oligonucleotide
  Target: LAMA2; (-) strand; PAM type: YTN; PAM sequence: TTG
acagaattcattactgaatt

SEQ ID NO: 237389 - DNA, 20 bp, Artificial Sequence
  Description of Artificial Sequence: Synthetic oligonucleotide
  Target: LAMA2; (-) strand; PAM type: YTN; PAM sequence: CTT
gacagaattcattactgaat

SEQ ID NO: 237390 - DNA, 20 bp, Artificial Sequence
  Description of Artificial Sequence: Synthetic oligonucleotide
  Target: LAMA2; (-) strand; PAM type: YTN; PAM sequence: TTC
agaataaaacccttgacaga

SEQ ID NO: 237391 - DNA, 20 bp, Artificial Sequence
  Description of Artificial Sequence: Synthetic oligonucleotide
  Target: LAMA2; (-) strand; PAM type: YTN; PAM sequence: TTA
aaaattcagaataaaaccct

SEQ ID NO: 237392 - DNA, 20 bp, Artificial Sequence
  Description of Artificial Sequence: Synthetic oligonucleotide
  Target: LAMA2; (-) strand; PAM type: YTN; PAM sequence: TTT
aaaaattcagaataaaaccc

SEQ ID NO: 237393 - DNA, 20 bp, Artificial Sequence
  Description of Artificial Sequence: Synthetic oligonucleotide
  Target: LAMA2; (-) strand; PAM type: YTN; PAM sequence: TTA
tttaaaaattcagaataaaa

SEQ ID NO: 237394 - DNA, 20 bp, Artificial Sequence
  Description of Artificial Sequence: Synthetic oligonucleotide
  Target: LAMA2; (-) strand; PAM type: YTN; PAM sequence: TTA
gaagattatttaaaaattca

SEQ ID NO: 237395 - DNA, 20 bp, Artificial Sequence
  Description of Artificial Sequence: Synthetic oligonucleotide
  Target: LAMA2; (-) strand; PAM type: YTN; PAM sequence: TTT
agaagattatttaaaaattc

SEQ ID NO: 237396 - DNA, 20 bp, Artificial Sequence
  Description of Artificial Sequence: Synthetic oligonucleotide
  Target: LAMA2; (-) strand; PAM type: YTN; PAM sequence: CTT
tagaagattatttaaaaatt

SEQ ID NO: 237397 - DNA, 20 bp, Artificial Sequence
  Description of Artificial Sequence: Synthetic oligonucleotide
  Target: LAMA2; (-) strand; PAM type: YTN; PAM sequence: TTC
aaactttagaagattattta

SEQ ID NO: 237398 - DNA, 20 bp, Artificial Sequence
  Description of Artificial Sequence: Synthetic oligonucleotide
  Target: LAMA2; (-) strand; PAM type: YTN; PAM sequence: CTG
ggttcaaactttagaagatt

SEQ ID NO: 237399 - DNA, 20 bp, Artificial Sequence
  Description of Artificial Sequence: Synthetic oligonucleotide
  Target: LAMA2; (-) strand; PAM type: YTN; PAM sequence: TTA
tctgggttcaaactttagaa

SEQ ID NO: 237400 - DNA, 20 bp, Artificial Sequence
  Description of Artificial Sequence: Synthetic oligonucleotide
  Target: LAMA2; (-) strand; PAM type: YTN; PAM sequence: CTT
atctgggttcaaactttaga

SEQ ID NO: 237401 - DNA, 20 bp, Artificial Sequence
  Description of Artificial Sequence: Synthetic oligonucleotide
  Target: LAMA2; (-) strand; PAM type: YTN; PAM sequence: TTA
aggcttatctgggttcaaac

SEQ ID NO: 237402 - DNA, 20 bp, Artificial Sequence
  Description of Artificial Sequence: Synthetic oligonucleotide
  Target: LAMA2; (-) strand; PAM type: YTN; PAM sequence: TTT
aaggcttatctgggttcaaa

SEQ ID NO: 237403 - DNA, 20 bp, Artificial Sequence
  Description of Artificial Sequence: Synthetic oligonucleotide
  Target: LAMA2; (-) strand; PAM type: YTN; PAM sequence: TTT
taaggcttatctgggttcaa

SEQ ID NO: 237404 - DNA, 20 bp, Artificial Sequence
  Description of Artificial Sequence: Synthetic oligonucleotide
  Target: LAMA2; (-) strand; PAM type: YTN; PAM sequence: TTG
aatataatgagtattttaag

SEQ ID NO: 237405 - DNA, 20 bp, Artificial Sequence
  Description of Artificial Sequence: Synthetic oligonucleotide
  Target: LAMA2; (-) strand; PAM type: YTN; PAM sequence: TTT
gaatataatgagtattttaa

SEQ ID NO: 237406 - DNA, 20 bp, Artificial Sequence
  Description of Artificial Sequence: Synthetic oligonucleotide
  Target: LAMA2; (-) strand; PAM type: YTN; PAM sequence: TTG
aacagaaaaatttgaatata

SEQ ID NO: 237407 - DNA, 20 bp, Artificial Sequence
  Description of Artificial Sequence: Synthetic oligonucleotide
  Target: LAMA2; (-) strand; PAM type: YTN; PAM sequence: TTA
taattgaacagaaaaatttg

SEQ ID NO: 237408 - DNA, 20 bp, Artificial Sequence
  Description of Artificial Sequence: Synthetic oligonucleotide
  Target: LAMA2; (-) strand; PAM type: YTN; PAM sequence: TTT
ataattgaacagaaaaattt

SEQ ID NO: 237409 - DNA, 20 bp, Artificial Sequence
  Description of Artificial Sequence: Synthetic oligonucleotide
  Target: LAMA2; (-) strand; PAM type: YTN; PAM sequence: TTT
tataattgaacagaaaaatt

SEQ ID NO: 237410 - DNA, 20 bp, Artificial Sequence
  Description of Artificial Sequence: Synthetic oligonucleotide
  Target: LAMA2; (-) strand; PAM type: YTN; PAM sequence: TTT
ttataattgaacagaaaaat

SEQ ID NO: 237411 - DNA, 20 bp, Artificial Sequence
  Description of Artificial Sequence: Synthetic oligonucleotide
  Target: LAMA2; (-) strand; PAM type: YTN; PAM sequence: TTT
tttataattgaacagaaaaa

SEQ ID NO: 237412 - DNA, 20 bp, Artificial Sequence
  Description of Artificial Sequence: Synthetic oligonucleotide
  Target: LAMA2; (-) strand; PAM type: YTN; PAM sequence: CTT
ttttataattgaacagaaaa

SEQ ID NO: 237413 - DNA, 20 bp, Artificial Sequence
  Description of Artificial Sequence: Synthetic oligonucleotide
  Target: LAMA2; (-) strand; PAM type: YTN; PAM sequence: TTG
tacttttttataattgaaca

SEQ ID NO: 237414 - DNA, 20 bp, Artificial Sequence
  Description of Artificial Sequence: Synthetic oligonucleotide
  Target: LAMA2; (-) strand; PAM type: YTN; PAM sequence: TTT
gtacttttttataattgaac

SEQ ID NO: 237415 - DNA, 20 bp, Artificial Sequence
  Description of Artificial Sequence: Synthetic oligonucleotide
  Target: LAMA2; (-) strand; PAM type: YTN; PAM sequence: CTT
tgtacttttttataattgaa

SEQ ID NO: 237416 - DNA, 20 bp, Artificial Sequence
  Description of Artificial Sequence: Synthetic oligonucleotide
  Target: LAMA2; (-) strand; PAM type: YTN; PAM sequence: TTA
gggctttgtacttttttata

SEQ ID NO: 237417 - DNA, 20 bp, Artificial Sequence
  Description of Artificial Sequence: Synthetic oligonucleotide
  Target: LAMA2; (-) strand; PAM type: YTN; PAM sequence: TTC
cattagggctttgtactttt

SEQ ID NO: 237418 - DNA, 20 bp, Artificial Sequence
  Description of Artificial Sequence: Synthetic oligonucleotide
  Target: LAMA2; (-) strand; PAM type: YTN; PAM sequence: TTA
attccattagggctttgtac

SEQ ID NO: 237419 - DNA, 20 bp, Artificial Sequence
  Description of Artificial Sequence: Synthetic oligonucleotide
  Target: LAMA2; (-) strand; PAM type: YTN; PAM sequence: TTA
attaattccattagggcttt

SEQ ID NO: 237420 - DNA, 20 bp, Artificial Sequence
  Description of Artificial Sequence: Synthetic oligonucleotide
  Target: LAMA2; (-) strand; PAM type: YTN; PAM sequence: TTT
aattaattccattagggctt

SEQ ID NO: 237421 - DNA, 20 bp, Artificial Sequence
  Description of Artificial Sequence: Synthetic oligonucleotide
  Target: LAMA2; (-) strand; PAM type: YTN; PAM sequence: CTT
taattaattccattagggct

SEQ ID NO: 237422 - DNA, 20 bp, Artificial Sequence
  Description of Artificial Sequence: Synthetic oligonucleotide
  Target: LAMA2; (-) strand; PAM type: YTN; PAM sequence: TTG
agcctttaattaattccatt

SEQ ID NO: 237423 - DNA, 20 bp, Artificial Sequence
  Description of Artificial Sequence: Synthetic oligonucleotide
  Target: LAMA2; (-) strand; PAM type: YTN; PAM sequence: TTG
gaagaaaatattgagccttt

SEQ ID NO: 237424 - DNA, 20 bp, Artificial Sequence
  Description of Artificial Sequence: Synthetic oligonucleotide
  Target: LAMA2; (-) strand; PAM type: YTN; PAM sequence: CTT
ggaagaaaatattgagcctt

SEQ ID NO: 237425 - DNA, 20 bp, Artificial Sequence
  Description of Artificial Sequence: Synthetic oligonucleotide
  Target: LAMA2; (-) strand; PAM type: YTN; PAM sequence: CTA
aaagtaatcttggaagaaaa

SEQ ID NO: 237426 - DNA, 20 bp, Artificial Sequence
  Description of Artificial Sequence: Synthetic oligonucleotide
  Target: LAMA2; (-) strand; PAM type: YTN; PAM sequence: TTC
taaaagtaatcttggaagaa

SEQ ID NO: 237427 - DNA, 20 bp, Artificial Sequence
  Description of Artificial Sequence: Synthetic oligonucleotide
  Target: LAMA2; (-) strand; PAM type: YTN; PAM sequence: TTT
ctaaaagtaatcttggaaga

SEQ ID NO: 237428 - DNA, 20 bp, Artificial Sequence
  Description of Artificial Sequence: Synthetic oligonucleotide
  Target: LAMA2; (-) strand; PAM type: YTN; PAM sequence: TTG
catttctaaaagtaatcttg

SEQ ID NO: 237429 - DNA, 20 bp, Artificial Sequence
  Description of Artificial Sequence: Synthetic oligonucleotide
  Target: LAMA2; (-) strand; PAM type: YTN; PAM sequence: TTA
ggtgagcatgtacaacaaat

SEQ ID NO: 237430 - DNA, 20 bp, Artificial Sequence
  Description of Artificial Sequence: Synthetic oligonucleotide
  Target: LAMA2; (-) strand; PAM type: YTN; PAM sequence: TTA
ttaggtgagcatgtacaaca

SEQ ID NO: 237431 - DNA, 20 bp, Artificial Sequence
  Description of Artificial Sequence: Synthetic oligonucleotide
  Target: LAMA2; (-) strand; PAM type: YTN; PAM sequence: TTG
ttattaggtgagcatgtaca

SEQ ID NO: 237432 - DNA, 20 bp, Artificial Sequence
  Description of Artificial Sequence: Synthetic oligonucleotide
  Target: LAMA2; (-) strand; PAM type: YTN; PAM sequence: TTT
gttattaggtgagcatgtac

SEQ ID NO: 237433 - DNA, 20 bp, Artificial Sequence
  Description of Artificial Sequence: Synthetic oligonucleotide
  Target: LAMA2; (-) strand; PAM type: YTN; PAM sequence: TTA
acatgatttgttattaggtg

SEQ ID NO: 237434 - DNA, 20 bp, Artificial Sequence
  Description of Artificial Sequence: Synthetic oligonucleotide
  Target: LAMA2; (-) strand; PAM type: YTN; PAM sequence: TTG
gtgttaacatgatttgttat

SEQ ID NO: 237435 - DNA, 20 bp, Artificial Sequence
  Description of Artificial Sequence: Synthetic oligonucleotide
  Target: LAMA2; (-) strand; PAM type: YTN; PAM sequence: CTT
ggtgttaacatgatttgtta

SEQ ID NO: 237436 - DNA, 20 bp, Artificial Sequence
  Description of Artificial Sequence: Synthetic oligonucleotide
  Target: LAMA2; (-) strand; PAM type: YTN; PAM sequence: CTG
cagaggtaatgcatcccttg

SEQ ID NO: 237437 - DNA, 20 bp, Artificial Sequence
  Description of Artificial Sequence: Synthetic oligonucleotide
  Target: LAMA2; (-) strand; PAM type: YTN; PAM sequence: TTA
taagctgcagaggtaatgca

SEQ ID NO: 237438 - DNA, 20 bp, Artificial Sequence
  Description of Artificial Sequence: Synthetic oligonucleotide
  Target: LAMA2; (-) strand; PAM type: YTN; PAM sequence: TTT
ataagctgcagaggtaatgc

SEQ ID NO: 237439 - DNA, 20 bp, Artificial Sequence
  Description of Artificial Sequence: Synthetic oligonucleotide
  Target: LAMA2; (-) strand; PAM type: YTN; PAM sequence: TTC
ataatgtttataagctgcag

SEQ ID NO: 237440 - DNA, 20 bp, Artificial Sequence
  Description of Artificial Sequence: Synthetic oligonucleotide
  Target: LAMA2; (-) strand; PAM type: YTN; PAM sequence: CTT
cataatgtttataagctgca

SEQ ID NO: 237441 - DNA, 20 bp, Artificial Sequence
  Description of Artificial Sequence: Synthetic oligonucleotide
  Target: LAMA2; (-) strand; PAM type: YTN; PAM sequence: CTG
tatgcttcataatgtttata

SEQ ID NO: 237442 - DNA, 20 bp, Artificial Sequence
  Description of Artificial Sequence: Synthetic oligonucleotide
  Target: LAMA2; (-) strand; PAM type: YTN; PAM sequence: TTG
tgcatgcctgtatgcttcat

SEQ ID NO: 237443 - DNA, 20 bp, Artificial Sequence
  Description of Artificial Sequence: Synthetic oligonucleotide
  Target: LAMA2; (-) strand; PAM type: YTN; PAM sequence: CTT
gtgcatgcctgtatgcttca

SEQ ID NO: 237444 - DNA, 20 bp, Artificial Sequence
  Description of Artificial Sequence: Synthetic oligonucleotide
  Target: LAMA2; (-) strand; PAM type: YTN; PAM sequence: TTC
acttgtgcatgcctgtatgc

SEQ ID NO: 237445 - DNA, 20 bp, Artificial Sequence
  Description of Artificial Sequence: Synthetic oligonucleotide
  Target: LAMA2; (-) strand; PAM type: YTN; PAM sequence: TTT
cacttgtgcatgcctgtatg

SEQ ID NO: 237446 - DNA, 20 bp, Artificial Sequence
  Description of Artificial Sequence: Synthetic oligonucleotide
  Target: LAMA2; (-) strand; PAM type: YTN; PAM sequence: TTT
tcacttgtgcatgcctgtat

SEQ ID NO: 237447 - DNA, 20 bp, Artificial Sequence
  Description of Artificial Sequence: Synthetic oligonucleotide
  Target: LAMA2; (-) strand; PAM type: YTN; PAM sequence: TTT
ttcacttgtgcatgcctgta

SEQ ID NO: 237448 - DNA, 20 bp, Artificial Sequence
  Description of Artificial Sequence: Synthetic oligonucleotide
  Target: LAMA2; (-) strand; PAM type: YTN; PAM sequence: TTC
atttttcacttgtgcatgcc

SEQ ID NO: 237449 - DNA, 20 bp, Artificial Sequence
  Description of Artificial Sequence: Synthetic oligonucleotide
  Target: LAMA2; (-) strand; PAM type: YTN; PAM sequence: TTT
catttttcacttgtgcatgc

SEQ ID NO: 237450 - DNA, 20 bp, Artificial Sequence
  Description of Artificial Sequence: Synthetic oligonucleotide
  Target: LAMA2; (-) strand; PAM type: YTN; PAM sequence: TTT
tcatttttcacttgtgcatg

SEQ ID NO: 237451 - DNA, 20 bp, Artificial Sequence
  Description of Artificial Sequence: Synthetic oligonucleotide
  Target: LAMA2; (-) strand; PAM type: YTN; PAM sequence: CTT
ttcatttttcacttgtgcat

SEQ ID NO: 237452 - DNA, 20 bp, Artificial Sequence
  Description of Artificial Sequence: Synthetic oligonucleotide
  Target: LAMA2; (-) strand; PAM type: YTN; PAM sequence: CTA
taggtaaagtaaatcagtct

SEQ ID NO: 237453 - DNA, 20 bp, Artificial Sequence
  Description of Artificial Sequence: Synthetic oligonucleotide
  Target: LAMA2; (-) strand; PAM type: YTN; PAM sequence: TTA
ctataggtaaagtaaatcag

SEQ ID NO: 237454 - DNA, 20 bp, Artificial Sequence
  Description of Artificial Sequence: Synthetic oligonucleotide
  Target: LAMA2; (-) strand; PAM type: YTN; PAM sequence: CTC
attactataggtaaagtaaa

SEQ ID NO: 237455 - DNA, 20 bp, Artificial Sequence
  Description of Artificial Sequence: Synthetic oligonucleotide
  Target: LAMA2; (-) strand; PAM type: YTN; PAM sequence: TTA
tagaactcattactataggt

SEQ ID NO: 237456 - DNA, 20 bp, Artificial Sequence
  Description of Artificial Sequence: Synthetic oligonucleotide
  Target: LAMA2; (-) strand; PAM type: YTN; PAM sequence: CTG
gtcagaatgttatagaactc

SEQ ID NO: 237457 - DNA, 20 bp, Artificial Sequence
  Description of Artificial Sequence: Synthetic oligonucleotide
  Target: LAMA2; (-) strand; PAM type: YTN; PAM sequence: TTA
tacaccgtctggtcagaatg

SEQ ID NO: 237458 - DNA, 20 bp, Artificial Sequence
  Description of Artificial Sequence: Synthetic oligonucleotide
  Target: LAMA2; (-) strand; PAM type: YTN; PAM sequence: CTA
atgtagttatacaccgtctg

SEQ ID NO: 237459 - DNA, 20 bp, Artificial Sequence
  Description of Artificial Sequence: Synthetic oligonucleotide
  Target: LAMA2; (-) strand; PAM type: YTN; PAM sequence: CTC
agctaatgtagttatacacc

SEQ ID NO: 237460 - DNA, 20 bp, Artificial Sequence
  Description of Artificial Sequence: Synthetic oligonucleotide
  Target: LAMA2; (-) strand; PAM type: YTN; PAM sequence: CTC
tcagctaatgtagttataca

SEQ ID NO: 237461 - DNA, 20 bp, Artificial Sequence
  Description of Artificial Sequence: Synthetic oligonucleotide
  Target: LAMA2; (-) strand; PAM type: YTN; PAM sequence: TTC
tctcagctaatgtagttata

SEQ ID NO: 237462 - DNA, 20 bp, Artificial Sequence
  Description of Artificial Sequence: Synthetic oligonucleotide
  Target: LAMA2; (-) strand; PAM type: YTN; PAM sequence: TTC
attctctcagctaatgtagt

SEQ ID NO: 237463 - DNA, 20 bp, Artificial Sequence
  Description of Artificial Sequence: Synthetic oligonucleotide
  Target: LAMA2; (-) strand; PAM type: YTN; PAM sequence: TTC
aaagaatggttcattctctc

SEQ ID NO: 237464 - DNA, 20 bp, Artificial Sequence
  Description of Artificial Sequence: Synthetic oligonucleotide
  Target: LAMA2; (-) strand; PAM type: YTN; PAM sequence: TTT
caaagaatggttcattctct

SEQ ID NO: 237465 - DNA, 20 bp, Artificial Sequence
  Description of Artificial Sequence: Synthetic oligonucleotide
  Target: LAMA2; (-) strand; PAM type: YTN; PAM sequence: TTT
tcaaagaatggttcattctc

SEQ ID NO: 237466 - DNA, 20 bp, Artificial Sequence
  Description of Artificial Sequence: Synthetic oligonucleotide
  Target: LAMA2; (-) strand; PAM type: YTN; PAM sequence: TTT
ttcaaagaatggttcattct

SEQ ID NO: 237467 - DNA, 20 bp, Artificial Sequence
  Description of Artificial Sequence: Synthetic oligonucleotide
  Target: LAMA2; (-) strand; PAM type: YTN; PAM sequence: CTT
tttcaaagaatggttcattc

SEQ ID NO: 237468 - DNA, 20 bp, Artificial Sequence
  Description of Artificial Sequence: Synthetic oligonucleotide
  Target: LAMA2; (-) strand; PAM type: YTN; PAM sequence: CTA
actttttcaaagaatggttc

SEQ ID NO: 237469 - DNA, 20 bp, Artificial Sequence
  Description of Artificial Sequence: Synthetic oligonucleotide
  Target: LAMA2; (-) strand; PAM type: YTN; PAM sequence: TTA
cataagtatggtatgctaac

SEQ ID NO: 237470 - DNA, 20 bp, Artificial Sequence
  Description of Artificial Sequence: Synthetic oligonucleotide
  Target: LAMA2; (-) strand; PAM type: YTN; PAM sequence: TTT
acataagtatggtatgctaa

SEQ ID NO: 237471 - DNA, 20 bp, Artificial Sequence
  Description of Artificial Sequence: Synthetic oligonucleotide
  Target: LAMA2; (-) strand; PAM type: YTN; PAM sequence: TTT
tacataagtatggtatgcta

SEQ ID NO: 237472 - DNA, 20 bp, Artificial Sequence
  Description of Artificial Sequence: Synthetic oligonucleotide
  Target: LAMA2; (-) strand; PAM type: YTN; PAM sequence: TTT
ttacataagtatggtatgct

SEQ ID NO: 237473 - DNA, 20 bp, Artificial Sequence
  Description of Artificial Sequence: Synthetic oligonucleotide
  Target: LAMA2; (-) strand; PAM type: YTN; PAM sequence: TTC
atttttacataagtatggta

SEQ ID NO: 237474 - DNA, 20 bp, Artificial Sequence
  Description of Artificial Sequence: Synthetic oligonucleotide
  Target: LAMA2; (-) strand; PAM type: YTN; PAM sequence: TTT
catttttacataagtatggt

SEQ ID NO: 237475 - DNA, 20 bp, Artificial Sequence
  Description of Artificial Sequence: Synthetic oligonucleotide
  Target: LAMA2; (-) strand; PAM type: YTN; PAM sequence: CTT
tcatttttacataagtatgg

SEQ ID NO: 237476 - DNA, 20 bp, Artificial Sequence
  Description of Artificial Sequence: Synthetic oligonucleotide
  Target: LAMA2; (-) strand; PAM type: YTN; PAM sequence: TTG
aaaataaagaaaaaagtagt

SEQ ID NO: 237477 - DNA, 20 bp, Artificial Sequence
  Description of Artificial Sequence: Synthetic oligonucleotide
  Target: LAMA2; (-) strand; PAM type: YTN; PAM sequence: TTA
attgaaaataaagaaaaaag

SEQ ID NO: 237478 - DNA, 20 bp, Artificial Sequence
  Description of Artificial Sequence: Synthetic oligonucleotide
  Target: LAMA2; (-) strand; PAM type: YTN; PAM sequence: TTT
aattgaaaataaagaaaaaa

SEQ ID NO: 237479 - DNA, 20 bp, Artificial Sequence
  Description of Artificial Sequence: Synthetic oligonucleotide
  Target: LAMA2; (-) strand; PAM type: YTN; PAM sequence: CTT
taattgaaaataaagaaaaa

SEQ ID NO: 237480 - DNA, 20 bp, Artificial Sequence
  Description of Artificial Sequence: Synthetic oligonucleotide
  Target: LAMA2; (-) strand; PAM type: YTN; PAM sequence: CTC
tttaattgaaaataaagaaa

SEQ ID NO: 237481 - DNA, 20 bp, Artificial Sequence
  Description of Artificial Sequence: Synthetic oligonucleotide
  Target: LAMA2; (-) strand; PAM type: YTN; PAM sequence: TTA
ataagggtccctctttaatt

SEQ ID NO: 237482 - DNA, 20 bp, Artificial Sequence
  Description of Artificial Sequence: Synthetic oligonucleotide
  Target: LAMA2; (-) strand; PAM type: YTN; PAM sequence: TTT
aataagggtccctctttaat

SEQ ID NO: 237483 - DNA, 20 bp, Artificial Sequence
  Description of Artificial Sequence: Synthetic oligonucleotide
  Target: LAMA2; (-) strand; PAM type: YTN; PAM sequence: TTT
taataagggtccctctttaa

SEQ ID NO: 237484 - DNA, 20 bp, Artificial Sequence
  Description of Artificial Sequence: Synthetic oligonucleotide
  Target: LAMA2; (-) strand; PAM type: YTN; PAM sequence: TTT
ttaataagggtccctcttta

SEQ ID NO: 237485 - DNA, 20 bp, Artificial Sequence
  Description of Artificial Sequence: Synthetic oligonucleotide
  Target: LAMA2; (-) strand; PAM type: YTN; PAM sequence: TTA
ataaaaatatttttaataag

SEQ ID NO: 237486 - DNA, 20 bp, Artificial Sequence
  Description of Artificial Sequence: Synthetic oligonucleotide
  Target: LAMA2; (-) strand; PAM type: YTN; PAM sequence: CTA
acaggttaataaaaatattt

SEQ ID NO: 237487 - DNA, 20 bp, Artificial Sequence
  Description of Artificial Sequence: Synthetic oligonucleotide
  Target: LAMA2; (-) strand; PAM type: YTN; PAM sequence: CTG
ccaagataagactaacaggt

SEQ ID NO: 237488 - DNA, 20 bp, Artificial Sequence
  Description of Artificial Sequence: Synthetic oligonucleotide
  Target: LAMA2; (-) strand; PAM type: YTN; PAM sequence: TTA
tagctgccaagataagacta

SEQ ID NO: 237489 - DNA, 20 bp, Artificial Sequence
  Description of Artificial Sequence: Synthetic oligonucleotide
  Target: LAMA2; (-) strand; PAM type: YTN; PAM sequence: TTT
atagctgccaagataagact

SEQ ID NO: 237490 - DNA, 20 bp, Artificial Sequence
  Description of Artificial Sequence: Synthetic oligonucleotide
  Target: LAMA2; (-) strand; PAM type: YTN; PAM sequence: TTT
tatagctgccaagataagac

SEQ ID NO: 237491 - DNA, 20 bp, Artificial Sequence
  Description of Artificial Sequence: Synthetic oligonucleotide
  Target: LAMA2; (-) strand; PAM type: YTN; PAM sequence: CTA
tataatattttatagctgcc

SEQ ID NO: 237492 - DNA, 20 bp, Artificial Sequence
  Description of Artificial Sequence: Synthetic oligonucleotide
  Target: LAMA2; (-) strand; PAM type: YTN; PAM sequence: CTC
acatgtaccaaatataacta

SEQ ID NO: 237493 - DNA, 20 bp, Artificial Sequence
  Description of Artificial Sequence: Synthetic oligonucleotide
  Target: LAMA2; (-) strand; PAM type: YTN; PAM sequence: TTG
tatatgtacacatatgctca

SEQ ID NO: 237494 - DNA, 20 bp, Artificial Sequence
  Description of Artificial Sequence: Synthetic oligonucleotide
  Target: LAMA2; (-) strand; PAM type: YTN; PAM sequence: TTA
atggttgtatatgtacacat

SEQ ID NO: 237495 - DNA, 20 bp, Artificial Sequence
  Description of Artificial Sequence: Synthetic oligonucleotide
  Target: LAMA2; (-) strand; PAM type: YTN; PAM sequence: CTT
aatggttgtatatgtacaca

SEQ ID NO: 237496 - DNA, 20 bp, Artificial Sequence
  Description of Artificial Sequence: Synthetic oligonucleotide
  Target: LAMA2; (-) strand; PAM type: YTN; PAM sequence: TTA
tggcttaatggttgtatatg

SEQ ID NO: 237497 - DNA, 20 bp, Artificial Sequence
  Description of Artificial Sequence: Synthetic oligonucleotide
  Target: LAMA2; (-) strand; PAM type: YTN; PAM sequence: TTA
tattatggcttaatggttgt

SEQ ID NO: 237498 - DNA, 20 bp, Artificial Sequence
  Description of Artificial Sequence: Synthetic oligonucleotide
  Target: LAMA2; (-) strand; PAM type: YTN; PAM sequence: CTT
atattatggcttaatggttg

SEQ ID NO: 237499 - DNA, 20 bp, Artificial Sequence
  Description of Artificial Sequence: Synthetic oligonucleotide
  Target: LAMA2; (-) strand; PAM type: YTN; PAM sequence: CTA
cttatattatggcttaatgg

SEQ ID NO: 237500 - DNA, 20 bp, Artificial Sequence
  Description of Artificial Sequence: Synthetic oligonucleotide
  Target: LAMA2; (-) strand; PAM type: YTN; PAM sequence: TTA
ctacttatattatggcttaa

SEQ ID NO: 237501 - DNA, 20 bp, Artificial Sequence
  Description of Artificial Sequence: Synthetic oligonucleotide
  Target: LAMA2; (-) strand; PAM type: YTN; PAM sequence: TTT
actacttatattatggctta

SEQ ID NO: 237502 - DNA, 20 bp, Artificial Sequence
  Description of Artificial Sequence: Synthetic oligonucleotide
  Target: LAMA2; (-) strand; PAM type: YTN; PAM sequence: CTA
atatttactacttatattat

SEQ ID NO: 237503 - DNA, 20 bp, Artificial Sequence
  Description of Artificial Sequence: Synthetic oligonucleotide
  Target: LAMA2; (-) strand; PAM type: YTN; PAM sequence: TTA
aaactaatatttactactta

SEQ ID NO: 237504 - DNA, 20 bp, Artificial Sequence
  Description of Artificial Sequence: Synthetic oligonucleotide
  Target: LAMA2; (-) strand; PAM type: YTN; PAM sequence: TTC
attaaaactaatatttacta

SEQ ID NO: 237505 - DNA, 20 bp, Artificial Sequence
  Description of Artificial Sequence: Synthetic oligonucleotide
  Target: LAMA2; (-) strand; PAM type: YTN; PAM sequence: CTT
cattaaaactaatatttact

SEQ ID NO: 237506 - DNA, 20 bp, Artificial Sequence
  Description of Artificial Sequence: Synthetic oligonucleotide
  Target: LAMA2; (-) strand; PAM type: YTN; PAM sequence: TTC
ataaacacttcattaaaact

SEQ ID NO: 237507 - DNA, 20 bp, Artificial Sequence
  Description of Artificial Sequence: Synthetic oligonucleotide
  Target: LAMA2; (-) strand; PAM type: YTN; PAM sequence: TTG
tcccaattcataaacacttc

SEQ ID NO: 237508 - DNA, 20 bp, Artificial Sequence
  Description of Artificial Sequence: Synthetic oligonucleotide
  Target: LAMA2; (-) strand; PAM type: YTN; PAM sequence: CTT
gtcccaattcataaacactt

SEQ ID NO: 237509 - DNA, 20 bp, Artificial Sequence
  Description of Artificial Sequence: Synthetic oligonucleotide
  Target: LAMA2; (-) strand; PAM type: YTN; PAM sequence: TTC
ttgtcccaattcataaacac

SEQ ID NO: 237510 - DNA, 20 bp, Artificial Sequence
  Description of Artificial Sequence: Synthetic oligonucleotide
  Target: LAMA2; (-) strand; PAM type: YTN; PAM sequence: TTC
cagacattcttgtcccaatt

SEQ ID NO: 237511 - DNA, 20 bp, Artificial Sequence
  Description of Artificial Sequence: Synthetic oligonucleotide
  Target: LAMA2; (-) strand; PAM type: YTN; PAM sequence: TTT
ccagacattcttgtcccaat

SEQ ID NO: 237512 - DNA, 20 bp, Artificial Sequence
  Description of Artificial Sequence: Synthetic oligonucleotide
  Target: LAMA2; (-) strand; PAM type: YTN; PAM sequence: TTG
atatttccagacattcttgt

SEQ ID NO: 237513 - DNA, 20 bp, Artificial Sequence
  Description of Artificial Sequence: Synthetic oligonucleotide
  Target: LAMA2; (-) strand; PAM type: YTN; PAM sequence: CTT
gatatttccagacattcttg

SEQ ID NO: 237514 - DNA, 20 bp, Artificial Sequence
  Description of Artificial Sequence: Synthetic oligonucleotide
  Target: LAMA2; (-) strand; PAM type: YTN; PAM sequence: TTA
gcttgatatttccagacatt

SEQ ID NO: 237515 - DNA, 20 bp, Artificial Sequence
  Description of Artificial Sequence: Synthetic oligonucleotide
  Target: LAMA2; (-) strand; PAM type: YTN; PAM sequence: TTT
agcttgatatttccagacat

SEQ ID NO: 237516 - DNA, 20 bp, Artificial Sequence
  Description of Artificial Sequence: Synthetic oligonucleotide
  Target: LAMA2; (-) strand; PAM type: YTN; PAM sequence: TTA
tatttagcttgatatttcca

SEQ ID NO: 237517 - DNA, 20 bp, Artificial Sequence
  Description of Artificial Sequence: Synthetic oligonucleotide
  Target: LAMA2; (-) strand; PAM type: YTN; PAM sequence: TTA
ttatatttagcttgatattt

SEQ ID NO: 237518 - DNA, 20 bp, Artificial Sequence
  Description of Artificial Sequence: Synthetic oligonucleotide
  Target: LAMA2; (-) strand; PAM type: YTN; PAM sequence: TTA
ttattatatttagcttgata

SEQ ID NO: 237519 - DNA, 20 bp, Artificial Sequence
  Description of Artificial Sequence: Synthetic oligonucleotide
  Target: LAMA2; (-) strand; PAM type: YTN; PAM sequence: CTA
ttattattatatttagcttg

SEQ ID NO: 237520 - DNA, 20 bp, Artificial Sequence
  Description of Artificial Sequence: Synthetic oligonucleotide
  Target: LAMA2; (-) strand; PAM type: YTN; PAM sequence: TTA
tgtaactattattattatat

SEQ ID NO: 237521 - DNA, 20 bp, Artificial Sequence
  Description of Artificial Sequence: Synthetic oligonucleotide
  Target: LAMA2; (-) strand; PAM type: YTN; PAM sequence: CTA
ttatgtaactattattatta

SEQ ID NO: 237522 - DNA, 20 bp, Artificial Sequence
  Description of Artificial Sequence: Synthetic oligonucleotide
  Target: LAMA2; (-) strand; PAM type: YTN; PAM sequence: CTG
atgtaacatatacctattat

SEQ ID NO: 237523 - DNA, 20 bp, Artificial Sequence
  Description of Artificial Sequence: Synthetic oligonucleotide
  Target: LAMA2; (-) strand; PAM type: YTN; PAM sequence: TTG
cccctgatgtaacatatacc

SEQ ID NO: 237524 - DNA, 20 bp, Artificial Sequence
  Description of Artificial Sequence: Synthetic oligonucleotide
  Target: LAMA2; (-) strand; PAM type: YTN; PAM sequence: CTA
aattgcccctgatgtaacat

SEQ ID NO: 237525 - DNA, 20 bp, Artificial Sequence
  Description of Artificial Sequence: Synthetic oligonucleotide
  Target: LAMA2; (-) strand; PAM type: YTN; PAM sequence: TTC
aaaataggaacctaaattgc

SEQ ID NO: 237526 - DNA, 20 bp, Artificial Sequence
  Description of Artificial Sequence: Synthetic oligonucleotide
  Target: LAMA2; (-) strand; PAM type: YTN; PAM sequence: TTC
agtagttcaaaataggaacc

SEQ ID NO: 237527 - DNA, 20 bp, Artificial Sequence
  Description of Artificial Sequence: Synthetic oligonucleotide
  Target: LAMA2; (-) strand; PAM type: YTN; PAM sequence: TTT
cagtagttcaaaataggaac

SEQ ID NO: 237528 - DNA, 20 bp, Artificial Sequence
  Description of Artificial Sequence: Synthetic oligonucleotide
  Target: LAMA2; (-) strand; PAM type: YTN; PAM sequence: TTA
tttcagtagttcaaaatagg

SEQ ID NO: 237529 - DNA, 20 bp, Artificial Sequence
  Description of Artificial Sequence: Synthetic oligonucleotide
  Target: LAMA2; (-) strand; PAM type: YTN; PAM sequence: TTA
ttatttcagtagttcaaaat

SEQ ID NO: 237530 - DNA, 20 bp, Artificial Sequence
  Description of Artificial Sequence: Synthetic oligonucleotide
  Target: LAMA2; (-) strand; PAM type: YTN; PAM sequence: TTT
attatttcagtagttcaaaa

SEQ ID NO: 237531 - DNA, 20 bp, Artificial Sequence
  Description of Artificial Sequence: Synthetic oligonucleotide
  Target: LAMA2; (-) strand; PAM type: YTN; PAM sequence: TTT
tattatttcagtagttcaaa

SEQ ID NO: 237532 - DNA, 20 bp, Artificial Sequence
  Description of Artificial Sequence: Synthetic oligonucleotide
  Target: LAMA2; (-) strand; PAM type: YTN; PAM sequence: CTG
tgtccacaggagttttatta

SEQ ID NO: 237533 - DNA, 20 bp, Artificial Sequence
  Description of Artificial Sequence: Synthetic oligonucleotide
  Target: LAMA2; (-) strand; PAM type: YTN; PAM sequence: TTA
ctgtgtccacaggagtttta

SEQ ID NO: 237534 - DNA, 20 bp, Artificial Sequence
  Description of Artificial Sequence: Synthetic oligonucleotide
  Target: LAMA2; (-) strand; PAM type: YTN; PAM sequence: CTT
actgtgtccacaggagtttt

SEQ ID NO: 237535 - DNA, 20 bp, Artificial Sequence
  Description of Artificial Sequence: Synthetic oligonucleotide
  Target: LAMA2; (-) strand; PAM type: YTN; PAM sequence: CTG
cttactgtgtccacaggagt

SEQ ID NO: 237536 - DNA, 20 bp, Artificial Sequence
  Description of Artificial Sequence: Synthetic oligonucleotide
  Target: LAMA2; (-) strand; PAM type: YTN; PAM sequence: TTC
tgcttactgtgtccacagga

SEQ ID NO: 237537 - DNA, 20 bp, Artificial Sequence
  Description of Artificial Sequence: Synthetic oligonucleotide
  Target: LAMA2; (-) strand; PAM type: YTN; PAM sequence: TTT
ctgcttactgtgtccacagg

SEQ ID NO: 237538 - DNA, 20 bp, Artificial Sequence
  Description of Artificial Sequence: Synthetic oligonucleotide
  Target: LAMA2; (-) strand; PAM type: YTN; PAM sequence: TTT
tctgcttactgtgtccacag

SEQ ID NO: 237539 - DNA, 20 bp, Artificial Sequence
  Description of Artificial Sequence: Synthetic oligonucleotide
  Target: LAMA2; (-) strand; PAM type: YTN; PAM sequence: CTT
ttctgcttactgtgtccaca

SEQ ID NO: 237540 - DNA, 20 bp, Artificial Sequence
  Description of Artificial Sequence: Synthetic oligonucleotide
  Target: LAMA2; (-) strand; PAM type: YTN; PAM sequence: TTG
tggacttttctgcttactgt

SEQ ID NO: 237541 - DNA, 20 bp, Artificial Sequence
  Description of Artificial Sequence: Synthetic oligonucleotide
  Target: LAMA2; (-) strand; PAM type: YTN; PAM sequence: CTT
gtggacttttctgcttactg

SEQ ID NO: 237542 - DNA, 20 bp, Artificial Sequence
  Description of Artificial Sequence: Synthetic oligonucleotide
  Target: LAMA2; (-) strand; PAM type: YTN; PAM sequence: CTA
tgggcttgtggacttttctg

SEQ ID NO: 237543 - DNA, 20 bp, Artificial Sequence
  Description of Artificial Sequence: Synthetic oligonucleotide
  Target: LAMA2; (-) strand; PAM type: YTN; PAM sequence: TTA
ctatgggcttgtggactttt

SEQ ID NO: 237544 - DNA, 20 bp, Artificial Sequence
  Description of Artificial Sequence: Synthetic oligonucleotide
  Target: LAMA2; (-) strand; PAM type: YTN; PAM sequence: TTT
actatgggcttgtggacttt

SEQ ID NO: 237545 - DNA, 20 bp, Artificial Sequence
  Description of Artificial Sequence: Synthetic oligonucleotide
  Target: LAMA2; (-) strand; PAM type: YTN; PAM sequence: TTT
tactatgggcttgtggactt

SEQ ID NO: 237546 - DNA, 20 bp, Artificial Sequence
  Description of Artificial Sequence: Synthetic oligonucleotide
  Target: LAMA2; (-) strand; PAM type: YTN; PAM sequence: TTT
ttactatgggcttgtggact

SEQ ID NO: 237547 - DNA, 20 bp, Artificial Sequence
  Description of Artificial Sequence: Synthetic oligonucleotide
  Target: LAMA2; (-) strand; PAM type: YTN; PAM sequence: CTT
tttactatgggcttgtggac

SEQ ID NO: 237548 - DNA, 20 bp, Artificial Sequence
  Description of Artificial Sequence: Synthetic oligonucleotide
  Target: LAMA2; (-) strand; PAM type: YTN; PAM sequence: TTC
caggacatggcaacttttta

SEQ ID NO: 237549 - DNA, 20 bp, Artificial Sequence
  Description of Artificial Sequence: Synthetic oligonucleotide
  Target: LAMA2; (-) strand; PAM type: YTN; PAM sequence: CTA
cattccaggacatggcaact

SEQ ID NO: 237550 - DNA, 20 bp, Artificial Sequence
  Description of Artificial Sequence: Synthetic oligonucleotide
  Target: LAMA2; (-) strand; PAM type: YTN; PAM sequence: TTA
ctacattccaggacatggca

SEQ ID NO: 237551 - DNA, 20 bp, Artificial Sequence
  Description of Artificial Sequence: Synthetic oligonucleotide
  Target: LAMA2; (-) strand; PAM type: YTN; PAM sequence: TTT
actacattccaggacatggc

SEQ ID NO: 237552 - DNA, 20 bp, Artificial Sequence
  Description of Artificial Sequence: Synthetic oligonucleotide
  Target: LAMA2; (-) strand; PAM type: YTN; PAM sequence: TTA
gaaaatttactacattccag

SEQ ID NO: 237553 - DNA, 20 bp, Artificial Sequence
  Description of Artificial Sequence: Synthetic oligonucleotide
  Target: LAMA2; (-) strand; PAM type: YTN; PAM sequence: TTG
gaatgaaatgtaatagatta

SEQ ID NO: 237554 - DNA, 20 bp, Artificial Sequence
  Description of Artificial Sequence: Synthetic oligonucleotide
  Target: LAMA2; (-) strand; PAM type: YTN; PAM sequence: TTC
agataatattggaatgaaat

SEQ ID NO: 237555 - DNA, 20 bp, Artificial Sequence
  Description of Artificial Sequence: Synthetic oligonucleotide
  Target: LAMA2; (-) strand; PAM type: YTN; PAM sequence: TTT
cagataatattggaatgaaa

SEQ ID NO: 237556 - DNA, 20 bp, Artificial Sequence
  Description of Artificial Sequence: Synthetic oligonucleotide
  Target: LAMA2; (-) strand; PAM type: YTN; PAM sequence: TTC
atttcagataatattggaat

SEQ ID NO: 237557 - DNA, 20 bp, Artificial Sequence
  Description of Artificial Sequence: Synthetic oligonucleotide
  Target: LAMA2; (-) strand; PAM type: YTN; PAM sequence: TTT
catttcagataatattggaa

SEQ ID NO: 237558 - DNA, 20 bp, Artificial Sequence
  Description of Artificial Sequence: Synthetic oligonucleotide
  Target: LAMA2; (-) strand; PAM type: YTN; PAM sequence: TTT
tcatttcagataatattgga

SEQ ID NO: 237559 - DNA, 20 bp, Artificial Sequence
  Description of Artificial Sequence: Synthetic oligonucleotide
  Target: LAMA2; (-) strand; PAM type: YTN; PAM sequence: TTT
ttcatttcagataatattgg

SEQ ID NO: 237560 - DNA, 20 bp, Artificial Sequence
  Description of Artificial Sequence: Synthetic oligonucleotide
  Target: LAMA2; (-) strand; PAM type: YTN; PAM sequence: CTC
aagcaatttttcatttcaga

SEQ ID NO: 237561 - DNA, 20 bp, Artificial Sequence
  Description of Artificial Sequence: Synthetic oligonucleotide
  Target: LAMA2; (-) strand; PAM type: YTN; PAM sequence: TTG
gtcaactcaagcaatttttc

SEQ ID NO: 237562 - DNA, 20 bp, Artificial Sequence
  Description of Artificial Sequence: Synthetic oligonucleotide
  Target: LAMA2; (-) strand; PAM type: YTN; PAM sequence: CTT
ggtcaactcaagcaattttt

SEQ ID NO: 237563 - DNA, 20 bp, Artificial Sequence
  Description of Artificial Sequence: Synthetic oligonucleotide
  Target: LAMA2; (-) strand; PAM type: YTN; PAM sequence: CTA
cacaatcttggtcaactcaa

SEQ ID NO: 237564 - DNA, 20 bp, Artificial Sequence
  Description of Artificial Sequence: Synthetic oligonucleotide
  Target: LAMA2; (-) strand; PAM type: YTN; PAM sequence: CTG
ctacacaatcttggtcaact

SEQ ID NO: 237565 - DNA, 20 bp, Artificial Sequence
  Description of Artificial Sequence: Synthetic oligonucleotide
  Target: LAMA2; (-) strand; PAM type: YTN; PAM sequence: CTC
acacactgctacacaatctt

SEQ ID NO: 237566 - DNA, 20 bp, Artificial Sequence
  Description of Artificial Sequence: Synthetic oligonucleotide
  Target: LAMA2; (-) strand; PAM type: YTN; PAM sequence: TTA
agcaagcaatcactcacaca

SEQ ID NO: 237567 - DNA, 20 bp, Artificial Sequence
  Description of Artificial Sequence: Synthetic oligonucleotide
  Target: LAMA2; (-) strand; PAM type: YTN; PAM sequence: CTT
aagcaagcaatcactcacac

SEQ ID NO: 237568 - DNA, 20 bp, Artificial Sequence
  Description of Artificial Sequence: Synthetic oligonucleotide
  Target: LAMA2; (-) strand; PAM type: YTN; PAM sequence: TTG
cccacagagacatacaagat

SEQ ID NO: 237569 - DNA, 20 bp, Artificial Sequence
  Description of Artificial Sequence: Synthetic oligonucleotide
  Target: LAMA2; (-) strand; PAM type: YTN; PAM sequence: CTG
caggattgcccacagagaca

SEQ ID NO: 237570 - DNA, 20 bp, Artificial Sequence
  Description of Artificial Sequence: Synthetic oligonucleotide
  Target: LAMA2; (-) strand; PAM type: YTN; PAM sequence: CTA
agagcctgcaggattgccca

SEQ ID NO: 237571 - DNA, 20 bp, Artificial Sequence
  Description of Artificial Sequence: Synthetic oligonucleotide
  Target: LAMA2; (-) strand; PAM type: YTN; PAM sequence: CTA
gagaagatgcactaagagcc

SEQ ID NO: 237572 - DNA, 20 bp, Artificial Sequence
  Description of Artificial Sequence: Synthetic oligonucleotide
  Target: LAMA2; (-) strand; PAM type: YTN; PAM sequence: TTG
ataaatactagagaagatgc

SEQ ID NO: 237573 - DNA, 20 bp, Artificial Sequence
  Description of Artificial Sequence: Synthetic oligonucleotide
  Target: LAMA2; (-) strand; PAM type: YTN; PAM sequence: TTT
gataaatactagagaagatg

SEQ ID NO: 237574 - DNA, 20 bp, Artificial Sequence
  Description of Artificial Sequence: Synthetic oligonucleotide
  Target: LAMA2; (-) strand; PAM type: YTN; PAM sequence: TTT
tgataaatactagagaagat

SEQ ID NO: 237575 - DNA, 20 bp, Artificial Sequence
  Description of Artificial Sequence: Synthetic oligonucleotide
  Target: LAMA2; (-) strand; PAM type: YTN; PAM sequence: TTG
aaaagagaataaagcacaca

SEQ ID NO: 237576 - DNA, 20 bp, Artificial Sequence
  Description of Artificial Sequence: Synthetic oligonucleotide
  Target: LAMA2; (-) strand; PAM type: YTN; PAM sequence: TTT
gaaaagagaataaagcacac

SEQ ID NO: 237577 - DNA, 20 bp, Artificial Sequence
  Description of Artificial Sequence: Synthetic oligonucleotide
  Target: LAMA2; (-) strand; PAM type: YTN; PAM sequence: TTT
tgaaaagagaataaagcaca

SEQ ID NO: 237578 - DNA, 20 bp, Artificial Sequence
  Description of Artificial Sequence: Synthetic oligonucleotide
  Target: LAMA2; (-) strand; PAM type: YTN; PAM sequence: CTG
tggagttttgaaaagagaat

SEQ ID NO: 237579 - DNA, 20 bp, Artificial Sequence
  Description of Artificial Sequence: Synthetic oligonucleotide
  Target: LAMA2; (-) strand; PAM type: YTN; PAM sequence: TTC
tgtggagttttgaaaagaga

SEQ ID NO: 237580 - DNA, 20 bp, Artificial Sequence
  Description of Artificial Sequence: Synthetic oligonucleotide
  Target: LAMA2; (-) strand; PAM type: YTN; PAM sequence: TTT
ctgtggagttttgaaaagag

SEQ ID NO: 237581 - DNA, 20 bp, Artificial Sequence
  Description of Artificial Sequence: Synthetic oligonucleotide
  Target: LAMA2; (-) strand; PAM type: YTN; PAM sequence: TTA
gagatttctgtggagttttg

SEQ ID NO: 237582 - DNA, 20 bp, Artificial Sequence
  Description of Artificial Sequence: Synthetic oligonucleotide
  Target: LAMA2; (-) strand; PAM type: YTN; PAM sequence: TTG
agcaagtggtaaaggttaga

SEQ ID NO: 237583 - DNA, 20 bp, Artificial Sequence
  Description of Artificial Sequence: Synthetic oligonucleotide
  Target: LAMA2; (-) strand; PAM type: YTN; PAM sequence: TTT
gagcaagtggtaaaggttag

SEQ ID NO: 237584 - DNA, 20 bp, Artificial Sequence
  Description of Artificial Sequence: Synthetic oligonucleotide
  Target: LAMA2; (-) strand; PAM type: YTN; PAM sequence: TTA
tttgagcaagtggtaaaggt

SEQ ID NO: 237585 - DNA, 20 bp, Artificial Sequence
  Description of Artificial Sequence: Synthetic oligonucleotide
  Target: LAMA2; (-) strand; PAM type: YTN; PAM sequence: TTT
atttgagcaagtggtaaagg

SEQ ID NO: 237586 - DNA, 20 bp, Artificial Sequence
  Description of Artificial Sequence: Synthetic oligonucleotide
  Target: LAMA2; (-) strand; PAM type: YTN; PAM sequence: CTT
tatttgagcaagtggtaaag

SEQ ID NO: 237587 - DNA, 20 bp, Artificial Sequence
  Description of Artificial Sequence: Synthetic oligonucleotide
  Target: LAMA2; (-) strand; PAM type: YTN; PAM sequence: CTG
tcctttatttgagcaagtgg

SEQ ID NO: 237588 - DNA, 20 bp, Artificial Sequence
  Description of Artificial Sequence: Synthetic oligonucleotide
  Target: LAMA2; (-) strand; PAM type: YTN; PAM sequence: TTG
actgtcctttatttgagcaa

SEQ ID NO: 237589 - DNA, 20 bp, Artificial Sequence
  Description of Artificial Sequence: Synthetic oligonucleotide
  Target: LAMA2; (-) strand; PAM type: YTN; PAM sequence: TTT
gactgtcctttatttgagca

SEQ ID NO: 237590 - DNA, 20 bp, Artificial Sequence
  Description of Artificial Sequence: Synthetic oligonucleotide
  Target: LAMA2; (-) strand; PAM type: YTN; PAM sequence: TTT
tgactgtcctttatttgagc

SEQ ID NO: 237591 - DNA, 20 bp, Artificial Sequence
  Description of Artificial Sequence: Synthetic oligonucleotide
  Target: LAMA2; (-) strand; PAM type: YTN; PAM sequence: TTA
gttttgactgtcctttattt

SEQ ID NO: 237592 - DNA, 20 bp, Artificial Sequence
  Description of Artificial Sequence: Synthetic oligonucleotide
  Target: LAMA2; (-) strand; PAM type: YTN; PAM sequence: CTT
agttttgactgtcctttatt

SEQ ID NO: 237593 - DNA, 20 bp, Artificial Sequence
  Description of Artificial Sequence: Synthetic oligonucleotide
  Target: LAMA2; (-) strand; PAM type: YTN; PAM sequence: TTA
agcttagttttgactgtcct

SEQ ID NO: 237594 - DNA, 20 bp, Artificial Sequence
  Description of Artificial Sequence: Synthetic oligonucleotide
  Target: LAMA2; (-) strand; PAM type: YTN; PAM sequence: TTT
aagcttagttttgactgtcc

SEQ ID NO: 237595 - DNA, 20 bp, Artificial Sequence
  Description of Artificial Sequence: Synthetic oligonucleotide
  Target: LAMA2; (-) strand; PAM type: YTN; PAM sequence: TTT
taagcttagttttgactgtc

SEQ ID NO: 237596 - DNA, 20 bp, Artificial Sequence
  Description of Artificial Sequence: Synthetic oligonucleotide
  Target: LAMA2; (-) strand; PAM type: YTN; PAM sequence: TTC
cattttaagcttagttttga

SEQ ID NO: 237597 - DNA, 20 bp, Artificial Sequence
  Description of Artificial Sequence: Synthetic oligonucleotide
  Target: LAMA2; (-) strand; PAM type: YTN; PAM sequence: TTT
ccattttaagcttagttttg

SEQ ID NO: 237598 - DNA, 20 bp, Artificial Sequence
  Description of Artificial Sequence: Synthetic oligonucleotide
  Target: LAMA2; (-) strand; PAM type: YTN; PAM sequence: TTT
tccattttaagcttagtttt

SEQ ID NO: 237599 - DNA, 20 bp, Artificial Sequence
  Description of Artificial Sequence: Synthetic oligonucleotide
  Target: LAMA2; (-) strand; PAM type: YTN; PAM sequence: CTT
ttccattttaagcttagttt

SEQ ID NO: 237600 - DNA, 20 bp, Artificial Sequence
  Description of Artificial Sequence: Synthetic oligonucleotide
  Target: LAMA2; (-) strand; PAM type: YTN; PAM sequence: TTC
ttttccattttaagcttagt

SEQ ID NO: 237601 - DNA, 20 bp, Artificial Sequence
  Description of Artificial Sequence: Synthetic oligonucleotide
  Target: LAMA2; (-) strand; PAM type: YTN; PAM sequence: TTT
cttttccattttaagcttag

SEQ ID NO: 237602 - DNA, 20 bp, Artificial Sequence
  Description of Artificial Sequence: Synthetic oligonucleotide
  Target: LAMA2; (-) strand; PAM type: YTN; PAM sequence: CTC
aggaggtttcttttccattt

SEQ ID NO: 237603 - DNA, 20 bp, Artificial Sequence
  Description of Artificial Sequence: Synthetic oligonucleotide
  Target: LAMA2; (-) strand; PAM type: YTN; PAM sequence: CTA
gaaactcaggaggtttcttt

SEQ ID NO: 237604 - DNA, 20 bp, Artificial Sequence
  Description of Artificial Sequence: Synthetic oligonucleotide
  Target: LAMA2; (-) strand; PAM type: YTN; PAM sequence: TTC
tagaaactcaggaggtttct

SEQ ID NO: 237605 - DNA, 20 bp, Artificial Sequence
  Description of Artificial Sequence: Synthetic oligonucleotide
  Target: LAMA2; (-) strand; PAM type: YTN; PAM sequence: TTA
tatattctagaaactcagga

SEQ ID NO: 237606 - DNA, 20 bp, Artificial Sequence
  Description of Artificial Sequence: Synthetic oligonucleotide
  Target: LAMA2; (-) strand; PAM type: YTN; PAM sequence: TTT
atatattctagaaactcagg

SEQ ID NO: 237607 - DNA, 20 bp, Artificial Sequence
  Description of Artificial Sequence: Synthetic oligonucleotide
  Target: LAMA2; (-) strand; PAM type: YTN; PAM sequence: TTT
tatatattctagaaactcag

SEQ ID NO: 237608 - DNA, 20 bp, Artificial Sequence
  Description of Artificial Sequence: Synthetic oligonucleotide
  Target: LAMA2; (-) strand; PAM type: YTN; PAM sequence: TTG
attttatatattctagaaac

SEQ ID NO: 237609 - DNA, 20 bp, Artificial Sequence
  Description of Artificial Sequence: Synthetic oligonucleotide
  Target: LAMA2; (-) strand; PAM type: YTN; PAM sequence: TTT
gattttatatattctagaaa

SEQ ID NO: 237610 - DNA, 20 bp, Artificial Sequence
  Description of Artificial Sequence: Synthetic oligonucleotide
  Target: LAMA2; (-) strand; PAM type: YTN; PAM sequence: CTG
tttgattttatatattctag

SEQ ID NO: 237611 - DNA, 20 bp, Artificial Sequence
  Description of Artificial Sequence: Synthetic oligonucleotide
  Target: LAMA2; (-) strand; PAM type: YTN; PAM sequence: TTC
cctgtttgattttatatatt

SEQ ID NO: 237612 - DNA, 20 bp, Artificial Sequence
  Description of Artificial Sequence: Synthetic oligonucleotide
  Target: LAMA2; (-) strand; PAM type: YTN; PAM sequence: CTT
ccctgtttgattttatatat

SEQ ID NO: 237613 - DNA, 20 bp, Artificial Sequence
  Description of Artificial Sequence: Synthetic oligonucleotide
  Target: LAMA2; (-) strand; PAM type: YTN; PAM sequence: TTC
ttccctgtttgattttatat

SEQ ID NO: 237614 - DNA, 20 bp, Artificial Sequence
  Description of Artificial Sequence: Synthetic oligonucleotide
  Target: LAMA2; (-) strand; PAM type: YTN; PAM sequence: TTT
cttccctgtttgattttata

SEQ ID NO: 237615 - DNA, 20 bp, Artificial Sequence
  Description of Artificial Sequence: Synthetic oligonucleotide
  Target: LAMA2; (-) strand; PAM type: YTN; PAM sequence: TTT
tcttccctgtttgattttat

SEQ ID NO: 237616 - DNA, 20 bp, Artificial Sequence
  Description of Artificial Sequence: Synthetic oligonucleotide
  Target: LAMA2; (-) strand; PAM type: YTN; PAM sequence: TTT
ttcttccctgtttgatttta

SEQ ID NO: 237617 - DNA, 20 bp, Artificial Sequence
  Description of Artificial Sequence: Synthetic oligonucleotide
  Target: LAMA2; (-) strand; PAM type: YTN; PAM sequence: TTG
tttttcttccctgtttgatt

SEQ ID NO: 237618 - DNA, 20 bp, Artificial Sequence
  Description of Artificial Sequence: Synthetic oligonucleotide
  Target: LAMA2; (-) strand; PAM type: YTN; PAM sequence: CTT
gtttttcttccctgtttgat

SEQ ID NO: 237619 - DNA, 20 bp, Artificial Sequence
  Description of Artificial Sequence: Synthetic oligonucleotide
  Target: LAMA2; (-) strand; PAM type: YTN; PAM sequence: CTG
tatgagtggtaggtgtagaa

SEQ ID NO: 237620 - DNA, 20 bp, Artificial Sequence
  Description of Artificial Sequence: Synthetic oligonucleotide
  Target: LAMA2; (-) strand; PAM type: YTN; PAM sequence: TTG
caaataccagacatcaccac

SEQ ID NO: 237621 - DNA, 20 bp, Artificial Sequence
  Description of Artificial Sequence: Synthetic oligonucleotide
  Target: LAMA2; (-) strand; PAM type: YTN; PAM sequence: CTT
gcaaataccagacatcacca

SEQ ID NO: 237622 - DNA, 20 bp, Artificial Sequence
  Description of Artificial Sequence: Synthetic oligonucleotide
  Target: LAMA2; (-) strand; PAM type: YTN; PAM sequence: TTC
cttgcaaataccagacatca

SEQ ID NO: 237623 - DNA, 20 bp, Artificial Sequence
  Description of Artificial Sequence: Synthetic oligonucleotide
  Target: LAMA2; (-) strand; PAM type: YTN; PAM sequence: TTT
ccttgcaaataccagacatc

SEQ ID NO: 237624 - DNA, 20 bp, Artificial Sequence
  Description of Artificial Sequence: Synthetic oligonucleotide
  Target: LAMA2; (-) strand; PAM type: YTN; PAM sequence: CTT
tccttgcaaataccagacat

SEQ ID NO: 237625 - DNA, 20 bp, Artificial Sequence
  Description of Artificial Sequence: Synthetic oligonucleotide
  Target: LAMA2; (-) strand; PAM type: YTN; PAM sequence: CTC
cctttccttgcaaataccag

SEQ ID NO: 237626 - DNA, 20 bp, Artificial Sequence
  Description of Artificial Sequence: Synthetic oligonucleotide
  Target: LAMA2; (-) strand; PAM type: YTN; PAM sequence: TTA
ctccctttccttgcaaatac

SEQ ID NO: 237627 - DNA, 20 bp, Artificial Sequence
  Description of Artificial Sequence: Synthetic oligonucleotide
  Target: LAMA2; (-) strand; PAM type: YTN; PAM sequence: TTA
ttactccctttccttgcaaa

SEQ ID NO: 237628 - DNA, 20 bp, Artificial Sequence
  Description of Artificial Sequence: Synthetic oligonucleotide
  Target: LAMA2; (-) strand; PAM type: YTN; PAM sequence: CTT
attactccctttccttgcaa

SEQ ID NO: 237629 - DNA, 20 bp, Artificial Sequence
  Description of Artificial Sequence: Synthetic oligonucleotide
  Target: LAMA2; (-) strand; PAM type: YTN; PAM sequence: CTC
gcttattactccctttcctt

SEQ ID NO: 237630 - DNA, 20 bp, Artificial Sequence
  Description of Artificial Sequence: Synthetic oligonucleotide
  Target: LAMA2; (-) strand; PAM type: YTN; PAM sequence: TTA
actcgcttattactcccttt

SEQ ID NO: 237631 - DNA, 20 bp, Artificial Sequence
  Description of Artificial Sequence: Synthetic oligonucleotide
  Target: LAMA2; (-) strand; PAM type: YTN; PAM sequence: TTA
ccaaagaaaattaactcgct

SEQ ID NO: 237632 - DNA, 20 bp, Artificial Sequence
  Description of Artificial Sequence: Synthetic oligonucleotide
  Target: LAMA2; (-) strand; PAM type: YTN; PAM sequence: TTT
accaaagaaaattaactcgc

SEQ ID NO: 237633 - DNA, 20 bp, Artificial Sequence
  Description of Artificial Sequence: Synthetic oligonucleotide
  Target: LAMA2; (-) strand; PAM type: YTN; PAM sequence: CTA
tatttaccaaagaaaattaa

SEQ ID NO: 237634 - DNA, 20 bp, Artificial Sequence
  Description of Artificial Sequence: Synthetic oligonucleotide
  Target: LAMA2; (-) strand; PAM type: YTN; PAM sequence: CTC
gctatatttaccaaagaaaa

SEQ ID NO: 237635 - DNA, 20 bp, Artificial Sequence
  Description of Artificial Sequence: Synthetic oligonucleotide
  Target: LAMA2; (-) strand; PAM type: YTN; PAM sequence: TTC
tcgctatatttaccaaagaa

SEQ ID NO: 237636 - DNA, 20 bp, Artificial Sequence
  Description of Artificial Sequence: Synthetic oligonucleotide
  Target: LAMA2; (-) strand; PAM type: YTN; PAM sequence: TTT
ctcgctatatttaccaaaga

SEQ ID NO: 237637 - DNA, 20 bp, Artificial Sequence
  Description of Artificial Sequence: Synthetic oligonucleotide
  Target: LAMA2; (-) strand; PAM type: YTN; PAM sequence: CTT
tctcgctatatttaccaaag

SEQ ID NO: 237638 - DNA, 20 bp, Artificial Sequence
  Description of Artificial Sequence: Synthetic oligonucleotide
  Target: LAMA2; (-) strand; PAM type: YTN; PAM sequence: CTC
cagcctttctcgctatattt

SEQ ID NO: 237639 - DNA, 20 bp, Artificial Sequence
  Description of Artificial Sequence: Synthetic oligonucleotide
  Target: LAMA2; (-) strand; PAM type: YTN; PAM sequence: TTG
ctccagcctttctcgctata

SEQ ID NO: 237640 - DNA, 20 bp, Artificial Sequence
  Description of Artificial Sequence: Synthetic oligonucleotide
  Target: LAMA2; (-) strand; PAM type: YTN; PAM sequence: CTT
gctccagcctttctcgctat

SEQ ID NO: 237641 - DNA, 20 bp, Artificial Sequence
  Description of Artificial Sequence: Synthetic oligonucleotide
  Target: LAMA2; (-) strand; PAM type: YTN; PAM sequence: CTC
ttgctccagcctttctcgct

SEQ ID NO: 237642 - DNA, 20 bp, Artificial Sequence
  Description of Artificial Sequence: Synthetic oligonucleotide
  Target: LAMA2; (-) strand; PAM type: YTN; PAM sequence: CTC
tcttgctccagcctttctcg

SEQ ID NO: 237643 - DNA, 20 bp, Artificial Sequence
  Description of Artificial Sequence: Synthetic oligonucleotide
  Target: LAMA2; (-) strand; PAM type: YTN; PAM sequence: CTA
cagctctcttgctccagcct

SEQ ID NO: 237644 - DNA, 20 bp, Artificial Sequence
  Description of Artificial Sequence: Synthetic oligonucleotide
  Target: LAMA2; (-) strand; PAM type: YTN; PAM sequence: CTA
atcactacagctctcttgct

SEQ ID NO: 237645 - DNA, 20 bp, Artificial Sequence
  Description of Artificial Sequence: Synthetic oligonucleotide
  Target: LAMA2; (-) strand; PAM type: YTN; PAM sequence: CTG
ctaatcactacagctctctt

SEQ ID NO: 237646 - DNA, 20 bp, Artificial Sequence
  Description of Artificial Sequence: Synthetic oligonucleotide
  Target: LAMA2; (-) strand; PAM type: YTN; PAM sequence: TTG
gagccctgctaatcactaca

SEQ ID NO: 237647 - DNA, 20 bp, Artificial Sequence
  Description of Artificial Sequence: Synthetic oligonucleotide
  Target: LAMA2; (-) strand; PAM type: YTN; PAM sequence: CTT
ggagccctgctaatcactac

SEQ ID NO: 237648 - DNA, 20 bp, Artificial Sequence
  Description of Artificial Sequence: Synthetic oligonucleotide
  Target: LAMA2; (-) strand; PAM type: YTN; PAM sequence: TTC
ccttggagccctgctaatca

SEQ ID NO: 237649 - DNA, 20 bp, Artificial Sequence
  Description of Artificial Sequence: Synthetic oligonucleotide
  Target: LAMA2; (-) strand; PAM type: YTN; PAM sequence: TTT
cccttggagccctgctaatc

SEQ ID NO: 237650 - DNA, 20 bp, Artificial Sequence
  Description of Artificial Sequence: Synthetic oligonucleotide
  Target: LAMA2; (-) strand; PAM type: YTN; PAM sequence: CTT
tcccttggagccctgctaat

SEQ ID NO: 237651 - DNA, 20 bp, Artificial Sequence
  Description of Artificial Sequence: Synthetic oligonucleotide
  Target: LAMA2; (-) strand; PAM type: YTN; PAM sequence: CTC
aaggggctttcccttggagc

SEQ ID NO: 237652 - DNA, 20 bp, Artificial Sequence
  Description of Artificial Sequence: Synthetic oligonucleotide
  Target: LAMA2; (-) strand; PAM type: YTN; PAM sequence: CTG
agagcaggcagtaagtagct

SEQ ID NO: 237653 - DNA, 20 bp, Artificial Sequence
  Description of Artificial Sequence: Synthetic oligonucleotide
  Target: LAMA2; (-) strand; PAM type: YTN; PAM sequence: TTC
ggctgagagcaggcagtaag

SEQ ID NO: 237654 - DNA, 20 bp, Artificial Sequence
  Description of Artificial Sequence: Synthetic oligonucleotide
  Target: LAMA2; (-) strand; PAM type: YTN; PAM sequence: TTG
agttcggctgagagcaggca

SEQ ID NO: 237655 - DNA, 20 bp, Artificial Sequence
  Description of Artificial Sequence: Synthetic oligonucleotide
  Target: LAMA2; (-) strand; PAM type: YTN; PAM sequence: CTC
agtacaatattgagttcggc

SEQ ID NO: 237656 - DNA, 20 bp, Artificial Sequence
  Description of Artificial Sequence: Synthetic oligonucleotide
  Target: LAMA2; (-) strand; PAM type: YTN; PAM sequence: TTC
tcagtacaatattgagttcg

SEQ ID NO: 237657 - DNA, 20 bp, Artificial Sequence
  Description of Artificial Sequence: Synthetic oligonucleotide
  Target: LAMA2; (-) strand; PAM type: YTN; PAM sequence: TTA
taataattctcagtacaata

SEQ ID NO: 237658 - DNA, 20 bp, Artificial Sequence
  Description of Artificial Sequence: Synthetic oligonucleotide
  Target: LAMA2; (-) strand; PAM type: YTN; PAM sequence: TTA
ggattataataattctcagt

SEQ ID NO: 237659 - DNA, 20 bp, Artificial Sequence
  Description of Artificial Sequence: Synthetic oligonucleotide
  Target: LAMA2; (-) strand; PAM type: YTN; PAM sequence: TTA
ttaggattataataattctc

SEQ ID NO: 237660 - DNA, 20 bp, Artificial Sequence
  Description of Artificial Sequence: Synthetic oligonucleotide
  Target: LAMA2; (-) strand; PAM type: YTN; PAM sequence: CTT
attaggattataataattct

SEQ ID NO: 237661 - DNA, 20 bp, Artificial Sequence
  Description of Artificial Sequence: Synthetic oligonucleotide
  Target: LAMA2; (-) strand; PAM type: YTN; PAM sequence: TTC
ttattaggattataataatt

SEQ ID NO: 237662 - DNA, 20 bp, Artificial Sequence
  Description of Artificial Sequence: Synthetic oligonucleotide
  Target: LAMA2; (-) strand; PAM type: YTN; PAM sequence: TTT
cttattaggattataataat

SEQ ID NO: 237663 - DNA, 20 bp, Artificial Sequence
  Description of Artificial Sequence: Synthetic oligonucleotide
  Target: LAMA2; (-) strand; PAM type: YTN; PAM sequence: CTT
tcttattaggattataataa

SEQ ID NO: 237664 - DNA, 20 bp, Artificial Sequence
  Description of Artificial Sequence: Synthetic oligonucleotide
  Target: LAMA2; (-) strand; PAM type: YTN; PAM sequence: CTA
cacaggaggcatctttctta

SEQ ID NO: 237665 - DNA, 20 bp, Artificial Sequence
  Description of Artificial Sequence: Synthetic oligonucleotide
  Target: LAMA2; (-) strand; PAM type: YTN; PAM sequence: TTC
aagtgtctacacaggaggca

SEQ ID NO: 237666 - DNA, 20 bp, Artificial Sequence
  Description of Artificial Sequence: Synthetic oligonucleotide
  Target: LAMA2; (-) strand; PAM type: YTN; PAM sequence: CTT
caagtgtctacacaggaggc

SEQ ID NO: 237667 - DNA, 20 bp, Artificial Sequence
  Description of Artificial Sequence: Synthetic oligonucleotide
  Target: LAMA2; (-) strand; PAM type: YTN; PAM sequence: CTG
tgtagagcttcaagtgtcta

SEQ ID NO: 237668 - DNA, 20 bp, Artificial Sequence
  Description of Artificial Sequence: Synthetic oligonucleotide
  Target: LAMA2; (-) strand; PAM type: YTN; PAM sequence: TTG
tctgtgtagagcttcaagtg

SEQ ID NO: 237669 - DNA, 20 bp, Artificial Sequence
  Description of Artificial Sequence: Synthetic oligonucleotide
  Target: LAMA2; (-) strand; PAM type: YTN; PAM sequence: TTA
attgtctgtgtagagcttca

SEQ ID NO: 237670 - DNA, 20 bp, Artificial Sequence
  Description of Artificial Sequence: Synthetic oligonucleotide
  Target: LAMA2; (-) strand; PAM type: YTN; PAM sequence: TTT
aattgtctgtgtagagcttc

SEQ ID NO: 237671 - DNA, 20 bp, Artificial Sequence
  Description of Artificial Sequence: Synthetic oligonucleotide
  Target: LAMA2; (-) strand; PAM type: YTN; PAM sequence: TTT
taattgtctgtgtagagctt

SEQ ID NO: 237672 - DNA, 20 bp, Artificial Sequence
  Description of Artificial Sequence: Synthetic oligonucleotide
  Target: LAMA2; (-) strand; PAM type: YTN; PAM sequence: TTG
cattttaattgtctgtgtag

SEQ ID NO: 237673 - DNA, 20 bp, Artificial Sequence
  Description of Artificial Sequence: Synthetic oligonucleotide
  Target: LAMA2; (-) strand; PAM type: YTN; PAM sequence: TTG
ttgcattttaattgtctgtg

SEQ ID NO: 237674 - DNA, 20 bp, Artificial Sequence
  Description of Artificial Sequence: Synthetic oligonucleotide
  Target: LAMA2; (-) strand; PAM type: YTN; PAM sequence: TTA
ttgttgcattttaattgtct

SEQ ID NO: 237675 - DNA, 20 bp, Artificial Sequence
  Description of Artificial Sequence: Synthetic oligonucleotide
  Target: LAMA2; (-) strand; PAM type: YTN; PAM sequence: TTT
attgttgcattttaattgtc

SEQ ID NO: 237676 - DNA, 20 bp, Artificial Sequence
  Description of Artificial Sequence: Synthetic oligonucleotide
  Target: LAMA2; (-) strand; PAM type: YTN; PAM sequence: CTG
tttattgttgcattttaatt

SEQ ID NO: 237677 - DNA, 20 bp, Artificial Sequence
  Description of Artificial Sequence: Synthetic oligonucleotide
  Target: LAMA2; (-) strand; PAM type: YTN; PAM sequence: TTG
ctgtttattgttgcatttta

SEQ ID NO: 237678 - DNA, 20 bp, Artificial Sequence
  Description of Artificial Sequence: Synthetic oligonucleotide
  Target: LAMA2; (-) strand; PAM type: YTN; PAM sequence: TTA
attgctgtttattgttgcat

SEQ ID NO: 237679 - DNA, 20 bp, Artificial Sequence
  Description of Artificial Sequence: Synthetic oligonucleotide
  Target: LAMA2; (-) strand; PAM type: YTN; PAM sequence: CTT
aattgctgtttattgttgca

SEQ ID NO: 237680 - DNA, 20 bp, Artificial Sequence
  Description of Artificial Sequence: Synthetic oligonucleotide
  Target: LAMA2; (-) strand; PAM type: YTN; PAM sequence: TTC
ttaattgctgtttattgttg

SEQ ID NO: 237681 - DNA, 20 bp, Artificial Sequence
  Description of Artificial Sequence: Synthetic oligonucleotide
  Target: LAMA2; (-) strand; PAM type: YTN; PAM sequence: TTT
cttaattgctgtttattgtt

SEQ ID NO: 237682 - DNA, 20 bp, Artificial Sequence
  Description of Artificial Sequence: Synthetic oligonucleotide
  Target: LAMA2; (-) strand; PAM type: YTN; PAM sequence: TTA
tgatttcttaattgctgttt

SEQ ID NO: 237683 - DNA, 20 bp, Artificial Sequence
  Description of Artificial Sequence: Synthetic oligonucleotide
  Target: LAMA2; (-) strand; PAM type: YTN; PAM sequence: TTT
atgatttcttaattgctgtt

SEQ ID NO: 237684 - DNA, 20 bp, Artificial Sequence
  Description of Artificial Sequence: Synthetic oligonucleotide
  Target: LAMA2; (-) strand; PAM type: YTN; PAM sequence: TTT
tatgatttcttaattgctgt

SEQ ID NO: 237685 - DNA, 20 bp, Artificial Sequence
  Description of Artificial Sequence: Synthetic oligonucleotide
  Target: LAMA2; (-) strand; PAM type: YTN; PAM sequence: CTT
ttatgatttcttaattgctg

SEQ ID NO: 237686 - DNA, 20 bp, Artificial Sequence
  Description of Artificial Sequence: Synthetic oligonucleotide
  Target: LAMA2; (-) strand; PAM type: YTN; PAM sequence: CTC
ttttatgatttcttaattgc

SEQ ID NO: 237687 - DNA, 20 bp, Artificial Sequence
  Description of Artificial Sequence: Synthetic oligonucleotide
  Target: LAMA2; (-) strand; PAM type: YTN; PAM sequence: TTC
tcttttatgatttcttaatt

SEQ ID NO: 237688 - DNA, 20 bp, Artificial Sequence
  Description of Artificial Sequence: Synthetic oligonucleotide
  Target: LAMA2; (-) strand; PAM type: YTN; PAM sequence: TTC
attctcttttatgatttctt

SEQ ID NO: 237689 - DNA, 20 bp, Artificial Sequence
  Description of Artificial Sequence: Synthetic oligonucleotide
  Target: LAMA2; (-) strand; PAM type: YTN; PAM sequence: TTT
cattctcttttatgatttct

SEQ ID NO: 237690 - DNA, 20 bp, Artificial Sequence
  Description of Artificial Sequence: Synthetic oligonucleotide
  Target: LAMA2; (-) strand; PAM type: YTN; PAM sequence: TTT
tcattctcttttatgatttc

SEQ ID NO: 237691 - DNA, 20 bp, Artificial Sequence
  Description of Artificial Sequence: Synthetic oligonucleotide
  Target: LAMA2; (-) strand; PAM type: YTN; PAM sequence: TTA
attttcattctcttttatga

SEQ ID NO: 237692 - DNA, 20 bp, Artificial Sequence
  Description of Artificial Sequence: Synthetic oligonucleotide
  Target: LAMA2; (-) strand; PAM type: YTN; PAM sequence: CTT
aattttcattctcttttatg

SEQ ID NO: 237693 - DNA, 20 bp, Artificial Sequence
  Description of Artificial Sequence: Synthetic oligonucleotide
  Target: LAMA2; (-) strand; PAM type: YTN; PAM sequence: TTA
cttaattttcattctctttt

SEQ ID NO: 237694 - DNA, 20 bp, Artificial Sequence
  Description of Artificial Sequence: Synthetic oligonucleotide
  Target: LAMA2; (-) strand; PAM type: YTN; PAM sequence: TTT
acttaattttcattctcttt

SEQ ID NO: 237695 - DNA, 20 bp, Artificial Sequence
  Description of Artificial Sequence: Synthetic oligonucleotide
  Target: LAMA2; (-) strand; PAM type: YTN; PAM sequence: CTA
tttacttaattttcattctc

SEQ ID NO: 237696 - DNA, 20 bp, Artificial Sequence
  Description of Artificial Sequence: Synthetic oligonucleotide
  Target: LAMA2; (-) strand; PAM type: YTN; PAM sequence: TTA
ataatgctatttacttaatt

SEQ ID NO: 237697 - DNA, 20 bp, Artificial Sequence
  Description of Artificial Sequence: Synthetic oligonucleotide
  Target: LAMA2; (-) strand; PAM type: YTN; PAM sequence: TTT
aataatgctatttacttaat

SEQ ID NO: 237698 - DNA, 20 bp, Artificial Sequence
  Description of Artificial Sequence: Synthetic oligonucleotide
  Target: LAMA2; (-) strand; PAM type: YTN; PAM sequence: TTT
taataatgctatttacttaa

SEQ ID NO: 237699 - DNA, 20 bp, Artificial Sequence
  Description of Artificial Sequence: Synthetic oligonucleotide
  Target: LAMA2; (-) strand; PAM type: YTN; PAM sequence: TTA
ttttaataatgctatttact

SEQ ID NO: 237700 - DNA, 20 bp, Artificial Sequence
  Description of Artificial Sequence: Synthetic oligonucleotide
  Target: LAMA2; (-) strand; PAM type: YTN; PAM sequence: TTT
attttaataatgctatttac

SEQ ID NO: 237701 - DNA, 20 bp, Artificial Sequence
  Description of Artificial Sequence: Synthetic oligonucleotide
  Target: LAMA2; (-) strand; PAM type: YTN; PAM sequence: TTA
agatatcacatggtagaaag

SEQ ID NO: 237702 - DNA, 20 bp, Artificial Sequence
  Description of Artificial Sequence: Synthetic oligonucleotide
  Target: LAMA2; (-) strand; PAM type: YTN; PAM sequence: TTT
aagatatcacatggtagaaa

SEQ ID NO: 237703 - DNA, 20 bp, Artificial Sequence
  Description of Artificial Sequence: Synthetic oligonucleotide
  Target: LAMA2; (-) strand; PAM type: YTN; PAM sequence: CTA
tttaagatatcacatggtag

SEQ ID NO: 237704 - DNA, 20 bp, Artificial Sequence
  Description of Artificial Sequence: Synthetic oligonucleotide
  Target: LAMA2; (-) strand; PAM type: YTN; PAM sequence: TTC
tatttaagatatcacatggt

SEQ ID NO: 237705 - DNA, 20 bp, Artificial Sequence
  Description of Artificial Sequence: Synthetic oligonucleotide
  Target: LAMA2; (-) strand; PAM type: YTN; PAM sequence: TTT
ctatttaagatatcacatgg

SEQ ID NO: 237706 - DNA, 20 bp, Artificial Sequence
  Description of Artificial Sequence: Synthetic oligonucleotide
  Target: LAMA2; (-) strand; PAM type: YTN; PAM sequence: TTT
tctatttaagatatcacatg

SEQ ID NO: 237707 - DNA, 20 bp, Artificial Sequence
  Description of Artificial Sequence: Synthetic oligonucleotide
  Target: LAMA2; (-) strand; PAM type: YTN; PAM sequence: TTA
cagttttctatttaagatat

SEQ ID NO: 237708 - DNA, 20 bp, Artificial Sequence
  Description of Artificial Sequence: Synthetic oligonucleotide
  Target: LAMA2; (-) strand; PAM type: YTN; PAM sequence: CTT
acagttttctatttaagata

SEQ ID NO: 237709 - DNA, 20 bp, Artificial Sequence
  Description of Artificial Sequence: Synthetic oligonucleotide
  Target: LAMA2; (-) strand; PAM type: YTN; PAM sequence: TTA
taagaacttacagttttcta

SEQ ID NO: 237710 - DNA, 20 bp, Artificial Sequence
  Description of Artificial Sequence: Synthetic oligonucleotide
  Target: LAMA2; (-) strand; PAM type: YTN; PAM sequence: TTT
ataagaacttacagttttct

SEQ ID NO: 237711 - DNA, 20 bp, Artificial Sequence
  Description of Artificial Sequence: Synthetic oligonucleotide
  Target: LAMA2; (-) strand; PAM type: YTN; PAM sequence: TTA
gtttataagaacttacagtt

SEQ ID NO: 237712 - DNA, 20 bp, Artificial Sequence
  Description of Artificial Sequence: Synthetic oligonucleotide
  Target: LAMA2; (-) strand; PAM type: YTN; PAM sequence: TTT
agtttataagaacttacagt

SEQ ID NO: 237713 - DNA, 20 bp, Artificial Sequence
  Description of Artificial Sequence: Synthetic oligonucleotide
  Target: LAMA2; (-) strand; PAM type: YTN; PAM sequence: CTG
aaacaatttagtttataaga

SEQ ID NO: 237714 - DNA, 20 bp, Artificial Sequence
  Description of Artificial Sequence: Synthetic oligonucleotide
  Target: LAMA2; (-) strand; PAM type: YTN; PAM sequence: TTA
atcctgaaacaatttagttt

SEQ ID NO: 237715 - DNA, 20 bp, Artificial Sequence
  Description of Artificial Sequence: Synthetic oligonucleotide
  Target: LAMA2; (-) strand; PAM type: YTN; PAM sequence: TTT
aatcctgaaacaatttagtt

SEQ ID NO: 237716 - DNA, 20 bp, Artificial Sequence
  Description of Artificial Sequence: Synthetic oligonucleotide
  Target: LAMA2; (-) strand; PAM type: YTN; PAM sequence: TTT
taatcctgaaacaatttagt

SEQ ID NO: 237717 - DNA, 20 bp, Artificial Sequence
  Description of Artificial Sequence: Synthetic oligonucleotide
  Target: LAMA2; (-) strand; PAM type: YTN; PAM sequence: TTT
ttaatcctgaaacaatttag

SEQ ID NO: 237718 - DNA, 20 bp, Artificial Sequence
  Description of Artificial Sequence: Synthetic oligonucleotide
  Target: LAMA2; (-) strand; PAM type: YTN; PAM sequence: CTG
caagtttttaatcctgaaac

SEQ ID NO: 237719 - DNA, 20 bp, Artificial Sequence
  Description of Artificial Sequence: Synthetic oligonucleotide
  Target: LAMA2; (-) strand; PAM type: YTN; PAM sequence: TTC
tgcaagtttttaatcctgaa

SEQ ID NO: 237720 - DNA, 20 bp, Artificial Sequence
  Description of Artificial Sequence: Synthetic oligonucleotide
  Target: LAMA2; (-) strand; PAM type: YTN; PAM sequence: TTT
ctgcaagtttttaatcctga

SEQ ID NO: 237721 - DNA, 20 bp, Artificial Sequence
  Description of Artificial Sequence: Synthetic oligonucleotide
  Target: LAMA2; (-) strand; PAM type: YTN; PAM sequence: CTT
tctgcaagtttttaatcctg

SEQ ID NO: 237722 - DNA, 20 bp, Artificial Sequence
  Description of Artificial Sequence: Synthetic oligonucleotide
  Target: LAMA2; (-) strand; PAM type: YTN; PAM sequence: TTG
ctttctgcaagtttttaatc

SEQ ID NO: 237723 - DNA, 20 bp, Artificial Sequence
  Description of Artificial Sequence: Synthetic oligonucleotide
  Target: LAMA2; (-) strand; PAM type: YTN; PAM sequence: CTT
gctttctgcaagtttttaat

SEQ ID NO: 237724 - DNA, 20 bp, Artificial Sequence
  Description of Artificial Sequence: Synthetic oligonucleotide
  Target: LAMA2; (-) strand; PAM type: YTN; PAM sequence: TTA
tgaaacttgctttctgcaag

SEQ ID NO: 237725 - DNA, 20 bp, Artificial Sequence
  Description of Artificial Sequence: Synthetic oligonucleotide
  Target: LAMA2; (-) strand; PAM type: YTN; PAM sequence: TTT
atgaaacttgctttctgcaa

SEQ ID NO: 237726 - DNA, 20 bp, Artificial Sequence
  Description of Artificial Sequence: Synthetic oligonucleotide
  Target: LAMA2; (-) strand; PAM type: YTN; PAM sequence: TTT
tatgaaacttgctttctgca

SEQ ID NO: 237727 - DNA, 20 bp, Artificial Sequence
  Description of Artificial Sequence: Synthetic oligonucleotide
  Target: LAMA2; (-) strand; PAM type: YTN; PAM sequence: TTA
tgtagatgttttatgaaact

SEQ ID NO: 237728 - DNA, 20 bp, Artificial Sequence
  Description of Artificial Sequence: Synthetic oligonucleotide
  Target: LAMA2; (-) strand; PAM type: YTN; PAM sequence: TTA
taattatgtagatgttttat

SEQ ID NO: 237729 - DNA, 20 bp, Artificial Sequence
  Description of Artificial Sequence: Synthetic oligonucleotide
  Target: LAMA2; (-) strand; PAM type: YTN; PAM sequence: TTT
ataattatgtagatgtttta

SEQ ID NO: 237730 - DNA, 20 bp, Artificial Sequence
  Description of Artificial Sequence: Synthetic oligonucleotide
  Target: LAMA2; (-) strand; PAM type: YTN; PAM sequence: TTT
tataattatgtagatgtttt

SEQ ID NO: 237731 - DNA, 20 bp, Artificial Sequence
  Description of Artificial Sequence: Synthetic oligonucleotide
  Target: LAMA2; (-) strand; PAM type: YTN; PAM sequence: TTT
ttataattatgtagatgttt

SEQ ID NO: 237732 - DNA, 20 bp, Artificial Sequence
  Description of Artificial Sequence: Synthetic oligonucleotide
  Target: LAMA2; (-) strand; PAM type: YTN; PAM sequence: TTG
tgatttttataattatgtag

SEQ ID NO: 237733 - DNA, 20 bp, Artificial Sequence
  Description of Artificial Sequence: Synthetic oligonucleotide
  Target: LAMA2; (-) strand; PAM type: YTN; PAM sequence: TTT
gtgatttttataattatgta

SEQ ID NO: 237734 - DNA, 20 bp, Artificial Sequence
  Description of Artificial Sequence: Synthetic oligonucleotide
  Target: LAMA2; (-) strand; PAM type: YTN; PAM sequence: TTA
tatgcatataatttgtgatt

SEQ ID NO: 237735 - DNA, 20 bp, Artificial Sequence
  Description of Artificial Sequence: Synthetic oligonucleotide
  Target: LAMA2; (-) strand; PAM type: YTN; PAM sequence: TTC
atgttatatgcatataattt

SEQ ID NO: 237736 - DNA, 20 bp, Artificial Sequence
  Description of Artificial Sequence: Synthetic oligonucleotide
  Target: LAMA2; (-) strand; PAM type: YTN; PAM sequence: CTG
tgatgtaattcatgttatat

SEQ ID NO: 237737 - DNA, 20 bp, Artificial Sequence
  Description of Artificial Sequence: Synthetic oligonucleotide
  Target: LAMA2; (-) strand; PAM type: YTN; PAM sequence: TTC
tgtgatgtaattcatgttat

SEQ ID NO: 237738 - DNA, 20 bp, Artificial Sequence
  Description of Artificial Sequence: Synthetic oligonucleotide
  Target: LAMA2; (-) strand; PAM type: YTN; PAM sequence: TTG
tgatatataattctgtgatg

SEQ ID NO: 237739 - DNA, 20 bp, Artificial Sequence
  Description of Artificial Sequence: Synthetic oligonucleotide
  Target: LAMA2; (-) strand; PAM type: YTN; PAM sequence: TTA
ttgtgatatataattctgtg

SEQ ID NO: 237740 - DNA, 20 bp, Artificial Sequence
  Description of Artificial Sequence: Synthetic oligonucleotide
  Target: LAMA2; (-) strand; PAM type: YTN; PAM sequence: TTG
tgatattattgtgatatata

SEQ ID NO: 237741 - DNA, 20 bp, Artificial Sequence
  Description of Artificial Sequence: Synthetic oligonucleotide
  Target: LAMA2; (-) strand; PAM type: YTN; PAM sequence: CTC
atcgtggcatattgtgatat

SEQ ID NO: 237742 - DNA, 20 bp, Artificial Sequence
  Description of Artificial Sequence: Synthetic oligonucleotide
  Target: LAMA2; (-) strand; PAM type: YTN; PAM sequence: TTG
atataactcatcgtggcata

SEQ ID NO: 237743 - DNA, 20 bp, Artificial Sequence
  Description of Artificial Sequence: Synthetic oligonucleotide
  Target: LAMA2; (-) strand; PAM type: YTN; PAM sequence: TTT
gatataactcatcgtggcat

SEQ ID NO: 237744 - DNA, 20 bp, Artificial Sequence
  Description of Artificial Sequence: Synthetic oligonucleotide
  Target: LAMA2; (-) strand; PAM type: YTN; PAM sequence: TTT
tgatataactcatcgtggca

SEQ ID NO: 237745 - DNA, 20 bp, Artificial Sequence
  Description of Artificial Sequence: Synthetic oligonucleotide
  Target: LAMA2; (-) strand; PAM type: YTN; PAM sequence: TTG
catgcacattttgatataac

SEQ ID NO: 237746 - DNA, 20 bp, Artificial Sequence
  Description of Artificial Sequence: Synthetic oligonucleotide
  Target: LAMA2; (-) strand; PAM type: YTN; PAM sequence: TTG
tagtacattgcatgcacatt

SEQ ID NO: 237747 - DNA, 20 bp, Artificial Sequence
  Description of Artificial Sequence: Synthetic oligonucleotide
  Target: LAMA2; (-) strand; PAM type: YTN; PAM sequence: TTA
attgtagtacattgcatgca

SEQ ID NO: 237748 - DNA, 20 bp, Artificial Sequence
  Description of Artificial Sequence: Synthetic oligonucleotide
  Target: LAMA2; (-) strand; PAM type: YTN; PAM sequence: CTT
aattgtagtacattgcatgc

SEQ ID NO: 237749 - DNA, 20 bp, Artificial Sequence
  Description of Artificial Sequence: Synthetic oligonucleotide
  Target: LAMA2; (-) strand; PAM type: YTN; PAM sequence: CTG
taggcacttaattgtagtac

SEQ ID NO: 237750 - DNA, 20 bp, Artificial Sequence
  Description of Artificial Sequence: Synthetic oligonucleotide
  Target: LAMA2; (-) strand; PAM type: YTN; PAM sequence: TTA
aacaagagactgtaggcact

SEQ ID NO: 237751 - DNA, 20 bp, Artificial Sequence
  Description of Artificial Sequence: Synthetic oligonucleotide
  Target: LAMA2; (-) strand; PAM type: YTN; PAM sequence: TTT
aaacaagagactgtaggcac

SEQ ID NO: 237752 - DNA, 20 bp, Artificial Sequence
  Description of Artificial Sequence: Synthetic oligonucleotide
  Target: LAMA2; (-) strand; PAM type: YTN; PAM sequence: TTT
taaacaagagactgtaggca

SEQ ID NO: 237753 - DNA, 20 bp, Artificial Sequence
  Description of Artificial Sequence: Synthetic oligonucleotide
  Target: LAMA2; (-) strand; PAM type: YTN; PAM sequence: TTT
ttaaacaagagactgtaggc

SEQ ID NO: 237754 - DNA, 20 bp, Artificial Sequence
  Description of Artificial Sequence: Synthetic oligonucleotide
  Target: LAMA2; (-) strand; PAM type: YTN; PAM sequence: TTT
tttaaacaagagactgtagg

SEQ ID NO: 237755 - DNA, 20 bp, Artificial Sequence
  Description of Artificial Sequence: Synthetic oligonucleotide
  Target: LAMA2; (-) strand; PAM type: YTN; PAM sequence: TTA
ttttttaaacaagagactgt

SEQ ID NO: 237756 - DNA, 20 bp, Artificial Sequence
  Description of Artificial Sequence: Synthetic oligonucleotide
  Target: LAMA2; (-) strand; PAM type: YTN; PAM sequence: TTA
attattttttaaacaagaga

SEQ ID NO: 237757 - DNA, 20 bp, Artificial Sequence
  Description of Artificial Sequence: Synthetic oligonucleotide
  Target: LAMA2; (-) strand; PAM type: YTN; PAM sequence: TTA
ttaattattttttaaacaag

SEQ ID NO: 237758 - DNA, 20 bp, Artificial Sequence
  Description of Artificial Sequence: Synthetic oligonucleotide
  Target: LAMA2; (-) strand; PAM type: YTN; PAM sequence: CTA
ggttattaattattttttaa

SEQ ID NO: 237759 - DNA, 20 bp, Artificial Sequence
  Description of Artificial Sequence: Synthetic oligonucleotide
  Target: LAMA2; (-) strand; PAM type: YTN; PAM sequence: TTG
aaatgctaggttattaatta

SEQ ID NO: 237760 - DNA, 20 bp, Artificial Sequence
  Description of Artificial Sequence: Synthetic oligonucleotide
  Target: LAMA2; (-) strand; PAM type: YTN; PAM sequence: TTG
ttgaaatgctaggttattaa

SEQ ID NO: 237761 - DNA, 20 bp, Artificial Sequence
  Description of Artificial Sequence: Synthetic oligonucleotide
  Target: LAMA2; (-) strand; PAM type: YTN; PAM sequence: TTT
gttgaaatgctaggttatta

SEQ ID NO: 237762 - DNA, 20 bp, Artificial Sequence
  Description of Artificial Sequence: Synthetic oligonucleotide
  Target: LAMA2; (-) strand; PAM type: YTN; PAM sequence: TTT
tgttgaaatgctaggttatt

SEQ ID NO: 237763 - DNA, 20 bp, Artificial Sequence
  Description of Artificial Sequence: Synthetic oligonucleotide
  Target: LAMA2; (-) strand; PAM type: YTN; PAM sequence: TTG
tatgcatattttgttgaaat

SEQ ID NO: 237764 - DNA, 20 bp, Artificial Sequence
  Description of Artificial Sequence: Synthetic oligonucleotide
  Target: LAMA2; (-) strand; PAM type: YTN; PAM sequence: TTA
aattgtatgcatattttgtt

SEQ ID NO: 237765 - DNA, 20 bp, Artificial Sequence
  Description of Artificial Sequence: Synthetic oligonucleotide
  Target: LAMA2; (-) strand; PAM type: YTN; PAM sequence: TTT
aaattgtatgcatattttgt

SEQ ID NO: 237766 - DNA, 20 bp, Artificial Sequence
  Description of Artificial Sequence: Synthetic oligonucleotide
  Target: LAMA2; (-) strand; PAM type: YTN; PAM sequence: TTC
agtatttaaattgtatgcat

SEQ ID NO: 237767 - DNA, 20 bp, Artificial Sequence
  Description of Artificial Sequence: Synthetic oligonucleotide
  Target: LAMA2; (-) strand; PAM type: YTN; PAM sequence: TTT
cagtatttaaattgtatgca

SEQ ID NO: 237768 - DNA, 20 bp, Artificial Sequence
  Description of Artificial Sequence: Synthetic oligonucleotide
  Target: LAMA2; (-) strand; PAM type: YTN; PAM sequence: TTT
tcagtatttaaattgtatgc

SEQ ID NO: 237769 - DNA, 20 bp, Artificial Sequence
  Description of Artificial Sequence: Synthetic oligonucleotide
  Target: LAMA2; (-) strand; PAM type: YTN; PAM sequence: CTT
ttcagtatttaaattgtatg

SEQ ID NO: 237770 - DNA, 20 bp, Artificial Sequence
  Description of Artificial Sequence: Synthetic oligonucleotide
  Target: LAMA2; (-) strand; PAM type: YTN; PAM sequence: CTA
agtgtcttttcagtatttaa

SEQ ID NO: 237771 - DNA, 20 bp, Artificial Sequence
  Description of Artificial Sequence: Synthetic oligonucleotide
  Target: LAMA2; (-) strand; PAM type: YTN; PAM sequence: CTA
cactaagtgtcttttcagta

SEQ ID NO: 237772 - DNA, 20 bp, Artificial Sequence
  Description of Artificial Sequence: Synthetic oligonucleotide
  Target: LAMA2; (-) strand; PAM type: YTN; PAM sequence: TTA
aatacactacactaagtgtc

SEQ ID NO: 237773 - DNA, 20 bp, Artificial Sequence
  Description of Artificial Sequence: Synthetic oligonucleotide
  Target: LAMA2; (-) strand; PAM type: YTN; PAM sequence: TTT
aaatacactacactaagtgt

SEQ ID NO: 237774 - DNA, 20 bp, Artificial Sequence
  Description of Artificial Sequence: Synthetic oligonucleotide
  Target: LAMA2; (-) strand; PAM type: YTN; PAM sequence: TTC
agtatttaaatacactacac

SEQ ID NO: 237775 - DNA, 20 bp, Artificial Sequence
  Description of Artificial Sequence: Synthetic oligonucleotide
  Target: LAMA2; (-) strand; PAM type: YTN; PAM sequence: TTT
cagtatttaaatacactaca

SEQ ID NO: 237776 - DNA, 20 bp, Artificial Sequence
  Description of Artificial Sequence: Synthetic oligonucleotide
  Target: LAMA2; (-) strand; PAM type: YTN; PAM sequence: TTT
tcagtatttaaatacactac

SEQ ID NO: 237777 - DNA, 20 bp, Artificial Sequence
  Description of Artificial Sequence: Synthetic oligonucleotide
  Target: LAMA2; (-) strand; PAM type: YTN; PAM sequence: CTT
ttcagtatttaaatacacta

SEQ ID NO: 237778 - DNA, 20 bp, Artificial Sequence
  Description of Artificial Sequence: Synthetic oligonucleotide
  Target: LAMA2; (-) strand; PAM type: YTN; PAM sequence: CTA
agtgtcttttcagtatttaa

SEQ ID NO: 237779 - DNA, 20 bp, Artificial Sequence
  Description of Artificial Sequence: Synthetic oligonucleotide
  Target: LAMA2; (-) strand; PAM type: YTN; PAM sequence: CTA
cactaagtgtcttttcagta

SEQ ID NO: 237780 - DNA, 20 bp, Artificial Sequence
  Description of Artificial Sequence: Synthetic oligonucleotide
  Target: LAMA2; (-) strand; PAM type: YTN; PAM sequence: TTA
aatacactacactaagtgtc

SEQ ID NO: 237781 - DNA, 20 bp, Artificial Sequence
  Description of Artificial Sequence: Synthetic oligonucleotide
  Target: LAMA2; (-) strand; PAM type: YTN; PAM sequence: TTT
aaatacactacactaagtgt

SEQ ID NO: 237782 - DNA, 20 bp, Artificial Sequence
  Description of Artificial Sequence: Synthetic oligonucleotide
  Target: LAMA2; (-) strand; PAM type: YTN; PAM sequence: TTC
agtatttaaatacactacac

SEQ ID NO: 237783 - DNA, 20 bp, Artificial Sequence
  Description of Artificial Sequence: Synthetic oligonucleotide
  Target: LAMA2; (-) strand; PAM type: YTN; PAM sequence: TTT
cagtatttaaatacactaca

SEQ ID NO: 237784 - DNA, 20 bp, Artificial Sequence
  Description of Artificial Sequence: Synthetic oligonucleotide
  Target: LAMA2; (-) strand; PAM type: YTN; PAM sequence: TTT
tcagtatttaaatacactac

SEQ ID NO: 237785 - DNA, 20 bp, Artificial Sequence
  Description of Artificial Sequence: Synthetic oligonucleotide
  Target: LAMA2; (-) strand; PAM type: YTN; PAM sequence: CTT
ttcagtatttaaatacacta

SEQ ID NO: 237786 - DNA, 20 bp, Artificial Sequence
  Description of Artificial Sequence: Synthetic oligonucleotide
  Target: LAMA2; (-) strand; PAM type: YTN; PAM sequence: TTA
agtgtcttttcagtatttaa

SEQ ID NO: 237787 - DNA, 20 bp, Artificial Sequence
  Description of Artificial Sequence: Synthetic oligonucleotide
  Target: LAMA2; (-) strand; PAM type: YTN; PAM sequence: TTA
cattaagtgtcttttcagta

SEQ ID NO: 237788 - DNA, 20 bp, Artificial Sequence
  Description of Artificial Sequence: Synthetic oligonucleotide
  Target: LAMA2; (-) strand; PAM type: YTN; PAM sequence: CTG
ttacattaagtgtcttttca

SEQ ID NO: 237789 - DNA, 20 bp, Artificial Sequence
  Description of Artificial Sequence: Synthetic oligonucleotide
  Target: LAMA2; (-) strand; PAM type: YTN; PAM sequence: TTG
tgaaacagtatgaactgtta

SEQ ID NO: 237790 - DNA, 20 bp, Artificial Sequence
  Description of Artificial Sequence: Synthetic oligonucleotide
  Target: LAMA2; (-) strand; PAM type: YTN; PAM sequence: TTT
gtgaaacagtatgaactgtt

SEQ ID NO: 237791 - DNA, 20 bp, Artificial Sequence
  Description of Artificial Sequence: Synthetic oligonucleotide
  Target: LAMA2; (-) strand; PAM type: YTN; PAM sequence: TTT
tgtgaaacagtatgaactgt

SEQ ID NO: 237792 - DNA, 20 bp, Artificial Sequence
  Description of Artificial Sequence: Synthetic oligonucleotide
  Target: LAMA2; (-) strand; PAM type: YTN; PAM sequence: TTT
ttgtgaaacagtatgaactg

SEQ ID NO: 237793 - DNA, 20 bp, Artificial Sequence
  Description of Artificial Sequence: Synthetic oligonucleotide
  Target: LAMA2; (-) strand; PAM type: YTN; PAM sequence: CTA
tgtcaaatcatgtttttgtg

SEQ ID NO: 237794 - DNA, 20 bp, Artificial Sequence
  Description of Artificial Sequence: Synthetic oligonucleotide
  Target: LAMA2; (-) strand; PAM type: YTN; PAM sequence: TTG
acatatctatgtcaaatcat

SEQ ID NO: 237795 - DNA, 20 bp, Artificial Sequence
  Description of Artificial Sequence: Synthetic oligonucleotide
  Target: LAMA2; (-) strand; PAM type: YTN; PAM sequence: TTA
caatcagttgacatatctat

SEQ ID NO: 237796 - DNA, 20 bp, Artificial Sequence
  Description of Artificial Sequence: Synthetic oligonucleotide
  Target: LAMA2; (-) strand; PAM type: YTN; PAM sequence: TTT
acaatcagttgacatatcta

SEQ ID NO: 237797 - DNA, 20 bp, Artificial Sequence
  Description of Artificial Sequence: Synthetic oligonucleotide
  Target: LAMA2; (-) strand; PAM type: YTN; PAM sequence: TTT
tacaatcagttgacatatct

SEQ ID NO: 237798 - DNA, 20 bp, Artificial Sequence
  Description of Artificial Sequence: Synthetic oligonucleotide
  Target: LAMA2; (-) strand; PAM type: YTN; PAM sequence: TTT
ttacaatcagttgacatatc

SEQ ID NO: 237799 - DNA, 20 bp, Artificial Sequence
  Description of Artificial Sequence: Synthetic oligonucleotide
  Target: LAMA2; (-) strand; PAM type: YTN; PAM sequence: CTG
tttttacaatcagttgacat

SEQ ID NO: 237800 - DNA, 20 bp, Artificial Sequence
  Description of Artificial Sequence: Synthetic oligonucleotide
  Target: LAMA2; (-) strand; PAM type: YTN; PAM sequence: TTG
atccatgctgtttttacaat

SEQ ID NO: 237801 - DNA, 20 bp, Artificial Sequence
  Description of Artificial Sequence: Synthetic oligonucleotide
  Target: LAMA2; (-) strand; PAM type: YTN; PAM sequence: TTT
gatccatgctgtttttacaa

SEQ ID NO: 237802 - DNA, 20 bp, Artificial Sequence
  Description of Artificial Sequence: Synthetic oligonucleotide
  Target: LAMA2; (-) strand; PAM type: YTN; PAM sequence: TTT
tgatccatgctgtttttaca

SEQ ID NO: 237803 - DNA, 20 bp, Artificial Sequence
  Description of Artificial Sequence: Synthetic oligonucleotide
  Target: LAMA2; (-) strand; PAM type: YTN; PAM sequence: TTA
agcagcattttgatccatgc

SEQ ID NO: 237804 - DNA, 20 bp, Artificial Sequence
  Description of Artificial Sequence: Synthetic oligonucleotide
  Target: LAMA2; (-) strand; PAM type: YTN; PAM sequence: CTT
aagcagcattttgatccatg

SEQ ID NO: 237805 - DNA, 20 bp, Artificial Sequence
  Description of Artificial Sequence: Synthetic oligonucleotide
  Target: LAMA2; (-) strand; PAM type: YTN; PAM sequence: TTC
ttaagcagcattttgatcca

SEQ ID NO: 237806 - DNA, 20 bp, Artificial Sequence
  Description of Artificial Sequence: Synthetic oligonucleotide
  Target: LAMA2; (-) strand; PAM type: YTN; PAM sequence: CTT
cttaagcagcattttgatcc

SEQ ID NO: 237807 - DNA, 20 bp, Artificial Sequence
  Description of Artificial Sequence: Synthetic oligonucleotide
  Target: LAMA2; (-) strand; PAM type: YTN; PAM sequence: TTG
cttcttaagcagcattttga

SEQ ID NO: 237808 - DNA, 20 bp, Artificial Sequence
  Description of Artificial Sequence: Synthetic oligonucleotide
  Target: LAMA2; (-) strand; PAM type: YTN; PAM sequence: TTT
gcttcttaagcagcattttg

SEQ ID NO: 237809 - DNA, 20 bp, Artificial Sequence
  Description of Artificial Sequence: Synthetic oligonucleotide
  Target: LAMA2; (-) strand; PAM type: YTN; PAM sequence: TTT
tgcttcttaagcagcatttt

SEQ ID NO: 237810 - DNA, 20 bp, Artificial Sequence
  Description of Artificial Sequence: Synthetic oligonucleotide
  Target: LAMA2; (-) strand; PAM type: YTN; PAM sequence: TTC
aataaaattttgcttcttaa

SEQ ID NO: 237811 - DNA, 20 bp, Artificial Sequence
  Description of Artificial Sequence: Synthetic oligonucleotide
  Target: LAMA2; (-) strand; PAM type: YTN; PAM sequence: TTT
caataaaattttgcttctta

SEQ ID NO: 237812 - DNA, 20 bp, Artificial Sequence
  Description of Artificial Sequence: Synthetic oligonucleotide
  Target: LAMA2; (-) strand; PAM type: YTN; PAM sequence: CTT
tcaataaaattttgcttctt

SEQ ID NO: 237813 - DNA, 20 bp, Artificial Sequence
  Description of Artificial Sequence: Synthetic oligonucleotide
  Target: LAMA2; (-) strand; PAM type: YTN; PAM sequence: TTA
gtctttcaataaaattttgc

SEQ ID NO: 237814 - DNA, 20 bp, Artificial Sequence
  Description of Artificial Sequence: Synthetic oligonucleotide
  Target: LAMA2; (-) strand; PAM type: YTN; PAM sequence: TTT
agtctttcaataaaattttg

SEQ ID NO: 237815 - DNA, 20 bp, Artificial Sequence
  Description of Artificial Sequence: Synthetic oligonucleotide
  Target: LAMA2; (-) strand; PAM type: YTN; PAM sequence: TTT
tagtctttcaataaaatttt

SEQ ID NO: 237816 - DNA, 20 bp, Artificial Sequence
  Description of Artificial Sequence: Synthetic oligonucleotide
  Target: LAMA2; (-) strand; PAM type: YTN; PAM sequence: CTC
caatattttagtctttcaat

SEQ ID NO: 237817 - DNA, 20 bp, Artificial Sequence
  Description of Artificial Sequence: Synthetic oligonucleotide
  Target: LAMA2; (-) strand; PAM type: YTN; PAM sequence: TTA
tatctccaatattttagtct

SEQ ID NO: 237818 - DNA, 20 bp, Artificial Sequence
  Description of Artificial Sequence: Synthetic oligonucleotide
  Target: LAMA2; (-) strand; PAM type: YTN; PAM sequence: TTT
atatctccaatattttagtc

SEQ ID NO: 237819 - DNA, 20 bp, Artificial Sequence
  Description of Artificial Sequence: Synthetic oligonucleotide
  Target: LAMA2; (-) strand; PAM type: YTN; PAM sequence: TTG
aatttatatctccaatattt

SEQ ID NO: 237820 - DNA, 20 bp, Artificial Sequence
  Description of Artificial Sequence: Synthetic oligonucleotide
  Target: LAMA2; (-) strand; PAM type: YTN; PAM sequence: TTT
gaatttatatctccaatatt

SEQ ID NO: 237821 - DNA, 20 bp, Artificial Sequence
  Description of Artificial Sequence: Synthetic oligonucleotide
  Target: LAMA2; (-) strand; PAM type: YTN; PAM sequence: TTA
atttgaatttatatctccaa

SEQ ID NO: 237822 - DNA, 20 bp, Artificial Sequence
  Description of Artificial Sequence: Synthetic oligonucleotide
  Target: LAMA2; (-) strand; PAM type: YTN; PAM sequence: TTT
aatttgaatttatatctcca

SEQ ID NO: 237823 - DNA, 20 bp, Artificial Sequence
  Description of Artificial Sequence: Synthetic oligonucleotide
  Target: LAMA2; (-) strand; PAM type: YTN; PAM sequence: CTG
tcatttaatttgaatttata

SEQ ID NO: 237824 - DNA, 20 bp, Artificial Sequence
  Description of Artificial Sequence: Synthetic oligonucleotide
  Target: LAMA2; (-) strand; PAM type: YTN; PAM sequence: CTA
aaaacctgtcatttaatttg

SEQ ID NO: 237825 - DNA, 20 bp, Artificial Sequence
  Description of Artificial Sequence: Synthetic oligonucleotide
  Target: LAMA2; (-) strand; PAM type: YTN; PAM sequence: CTG
ctaaaaacctgtcatttaat

SEQ ID NO: 237826 - DNA, 20 bp, Artificial Sequence
  Description of Artificial Sequence: Synthetic oligonucleotide
  Target: LAMA2; (-) strand; PAM type: YTN; PAM sequence: TTC
tgctaaaaacctgtcattta

SEQ ID NO: 237827 - DNA, 20 bp, Artificial Sequence
  Description of Artificial Sequence: Synthetic oligonucleotide
  Target: LAMA2; (-) strand; PAM type: YTN; PAM sequence: CTT
ctgctaaaaacctgtcattt

SEQ ID NO: 237828 - DNA, 20 bp, Artificial Sequence
  Description of Artificial Sequence: Synthetic oligonucleotide
  Target: LAMA2; (-) strand; PAM type: YTN; PAM sequence: TTC
cccttctgctaaaaacctgt

SEQ ID NO: 237829 - DNA, 20 bp, Artificial Sequence
  Description of Artificial Sequence: Synthetic oligonucleotide
  Target: LAMA2; (-) strand; PAM type: YTN; PAM sequence: CTT
ccccttctgctaaaaacctg

SEQ ID NO: 237830 - DNA, 20 bp, Artificial Sequence
  Description of Artificial Sequence: Synthetic oligonucleotide
  Target: LAMA2; (-) strand; PAM type: YTN; PAM sequence: TTC
ttccccttctgctaaaaacc

SEQ ID NO: 237831 - DNA, 20 bp, Artificial Sequence
  Description of Artificial Sequence: Synthetic oligonucleotide
  Target: LAMA2; (-) strand; PAM type: YTN; PAM sequence: TTA
tgtatatattcttccccttc

SEQ ID NO: 237832 - DNA, 20 bp, Artificial Sequence
  Description of Artificial Sequence: Synthetic oligonucleotide
  Target: LAMA2; (-) strand; PAM type: YTN; PAM sequence: CTT
atgtatatattcttcccctt

SEQ ID NO: 237833 - DNA, 20 bp, Artificial Sequence
  Description of Artificial Sequence: Synthetic oligonucleotide
  Target: LAMA2; (-) strand; PAM type: YTN; PAM sequence: TTG
gatagaaatatatggacact

SEQ ID NO: 237834 - DNA, 20 bp, Artificial Sequence
  Description of Artificial Sequence: Synthetic oligonucleotide
  Target: LAMA2; (-) strand; PAM type: YTN; PAM sequence: CTT
ggatagaaatatatggacac

SEQ ID NO: 237835 - DNA, 20 bp, Artificial Sequence
  Description of Artificial Sequence: Synthetic oligonucleotide
  Target: LAMA2; (-) strand; PAM type: YTN; PAM sequence: CTA
acttggatagaaatatatgg

SEQ ID NO: 237836 - DNA, 20 bp, Artificial Sequence
  Description of Artificial Sequence: Synthetic oligonucleotide
  Target: LAMA2; (-) strand; PAM type: YTN; PAM sequence: TTA
ctaacttggatagaaatata

SEQ ID NO: 237837 - DNA, 20 bp, Artificial Sequence
  Description of Artificial Sequence: Synthetic oligonucleotide
  Target: LAMA2; (-) strand; PAM type: YTN; PAM sequence: TTA
aagttactaacttggataga

SEQ ID NO: 237838 - DNA, 20 bp, Artificial Sequence
  Description of Artificial Sequence: Synthetic oligonucleotide
  Target: LAMA2; (-) strand; PAM type: YTN; PAM sequence: TTT
aaagttactaacttggatag

SEQ ID NO: 237839 - DNA, 20 bp, Artificial Sequence
  Description of Artificial Sequence: Synthetic oligonucleotide
  Target: LAMA2; (-) strand; PAM type: YTN; PAM sequence: TTA
tttaaagttactaacttgga

SEQ ID NO: 237840 - DNA, 20 bp, Artificial Sequence
  Description of Artificial Sequence: Synthetic oligonucleotide
  Target: LAMA2; (-) strand; PAM type: YTN; PAM sequence: CTT
atttaaagttactaacttgg

SEQ ID NO: 237841 - DNA, 20 bp, Artificial Sequence
  Description of Artificial Sequence: Synthetic oligonucleotide
  Target: LAMA2; (-) strand; PAM type: YTN; PAM sequence: TTA
cagataaatacttatttaaa

SEQ ID NO: 237842 - DNA, 20 bp, Artificial Sequence
  Description of Artificial Sequence: Synthetic oligonucleotide
  Target: LAMA2; (-) strand; PAM type: YTN; PAM sequence: TTT
acagataaatacttatttaa

SEQ ID NO: 237843 - DNA, 20 bp, Artificial Sequence
  Description of Artificial Sequence: Synthetic oligonucleotide
  Target: LAMA2; (-) strand; PAM type: YTN; PAM sequence: CTA
tttacagataaatacttatt

SEQ ID NO: 237844 - DNA, 20 bp, Artificial Sequence
  Description of Artificial Sequence: Synthetic oligonucleotide
  Target: LAMA2; (-) strand; PAM type: YTN; PAM sequence: TTC
tatttacagataaatactta

SEQ ID NO: 237845 - DNA, 20 bp, Artificial Sequence
  Description of Artificial Sequence: Synthetic oligonucleotide
  Target: LAMA2; (-) strand; PAM type: YTN; PAM sequence: TTT
ctatttacagataaatactt

SEQ ID NO: 237846 - DNA, 20 bp, Artificial Sequence
  Description of Artificial Sequence: Synthetic oligonucleotide
  Target: LAMA2; (-) strand; PAM type: YTN; PAM sequence: TTA
tttctatttacagataaata

SEQ ID NO: 237847 - DNA, 20 bp, Artificial Sequence
  Description of Artificial Sequence: Synthetic oligonucleotide
  Target: LAMA2; (-) strand; PAM type: YTN; PAM sequence: TTA
tattatttctatttacagat

SEQ ID NO: 237848 - DNA, 20 bp, Artificial Sequence
  Description of Artificial Sequence: Synthetic oligonucleotide
  Target: LAMA2; (-) strand; PAM type: YTN; PAM sequence: TTT
atattatttctatttacaga

SEQ ID NO: 237849 - DNA, 20 bp, Artificial Sequence
  Description of Artificial Sequence: Synthetic oligonucleotide
  Target: LAMA2; (-) strand; PAM type: YTN; PAM sequence: TTC
atatgtgatttatattattt

SEQ ID NO: 237850 - DNA, 20 bp, Artificial Sequence
  Description of Artificial Sequence: Synthetic oligonucleotide
  Target: LAMA2; (-) strand; PAM type: YTN; PAM sequence: TTT
catatgtgatttatattatt

SEQ ID NO: 237851 - DNA, 20 bp, Artificial Sequence
  Description of Artificial Sequence: Synthetic oligonucleotide
  Target: LAMA2; (-) strand; PAM type: YTN; PAM sequence: TTA
tttcatatgtgatttatatt

SEQ ID NO: 237852 - DNA, 20 bp, Artificial Sequence
  Description of Artificial Sequence: Synthetic oligonucleotide
  Target: LAMA2; (-) strand; PAM type: YTN; PAM sequence: TTA
tatacacattatttcatatg

SEQ ID NO: 237853 - DNA, 20 bp, Artificial Sequence
  Description of Artificial Sequence: Synthetic oligonucleotide
  Target: LAMA2; (-) strand; PAM type: YTN; PAM sequence: CTT
atatacacattatttcatat

SEQ ID NO: 237854 - DNA, 20 bp, Artificial Sequence
  Description of Artificial Sequence: Synthetic oligonucleotide
  Target: LAMA2; (-) strand; PAM type: YTN; PAM sequence: TTG
gagatgaatacttatataca

SEQ ID NO: 237855 - DNA, 20 bp, Artificial Sequence
  Description of Artificial Sequence: Synthetic oligonucleotide
  Target: LAMA2; (-) strand; PAM type: YTN; PAM sequence: TTT
ggagatgaatacttatatac

SEQ ID NO: 237856 - DNA, 20 bp, Artificial Sequence
  Description of Artificial Sequence: Synthetic oligonucleotide
  Target: LAMA2; (-) strand; PAM type: YTN; PAM sequence: TTT
tggagatgaatacttatata

SEQ ID NO: 237857 - DNA, 20 bp, Artificial Sequence
  Description of Artificial Sequence: Synthetic oligonucleotide
  Target: LAMA2; (-) strand; PAM type: YTN; PAM sequence: TTA
ataagcattttggagatgaa

SEQ ID NO: 237858 - DNA, 20 bp, Artificial Sequence
  Description of Artificial Sequence: Synthetic oligonucleotide
  Target: LAMA2; (-) strand; PAM type: YTN; PAM sequence: TTA
aggttaataagcattttgga

SEQ ID NO: 237859 - DNA, 20 bp, Artificial Sequence
  Description of Artificial Sequence: Synthetic oligonucleotide
  Target: LAMA2; (-) strand; PAM type: YTN; PAM sequence: TTT
aaggttaataagcattttgg

SEQ ID NO: 237860 - DNA, 20 bp, Artificial Sequence
  Description of Artificial Sequence: Synthetic oligonucleotide
  Target: LAMA2; (-) strand; PAM type: YTN; PAM sequence: TTA
tagtataagagaataaaggt

SEQ ID NO: 237861 - DNA, 20 bp, Artificial Sequence
  Description of Artificial Sequence: Synthetic oligonucleotide
  Target: LAMA2; (-) strand; PAM type: YTN; PAM sequence: CTC
atatgttatagtataagaga

SEQ ID NO: 237862 - DNA, 20 bp, Artificial Sequence
  Description of Artificial Sequence: Synthetic oligonucleotide
  Target: LAMA2; (-) strand; PAM type: YTN; PAM sequence: TTA
aaaactcatatgttatagta

SEQ ID NO: 237863 - DNA, 20 bp, Artificial Sequence
  Description of Artificial Sequence: Synthetic oligonucleotide
  Target: LAMA2; (-) strand; PAM type: YTN; PAM sequence: TTT
aaaaactcatatgttatagt

SEQ ID NO: 237864 - DNA, 20 bp, Artificial Sequence
  Description of Artificial Sequence: Synthetic oligonucleotide
  Target: LAMA2; (-) strand; PAM type: YTN; PAM sequence: CTA
tttaaaaactcatatgttat

SEQ ID NO: 237865 - DNA, 20 bp, Artificial Sequence
  Description of Artificial Sequence: Synthetic oligonucleotide
  Target: LAMA2; (-) strand; PAM type: YTN; PAM sequence: CTG
ataaaaaaaaactatttaaa

SEQ ID NO: 237866 - DNA, 20 bp, Artificial Sequence
  Description of Artificial Sequence: Synthetic oligonucleotide
  Target: LAMA2; (-) strand; PAM type: YTN; PAM sequence: TTC
tgataaaaaaaaactattta

SEQ ID NO: 237867 - DNA, 20 bp, Artificial Sequence
  Description of Artificial Sequence: Synthetic oligonucleotide
  Target: LAMA2; (-) strand; PAM type: YTN; PAM sequence: TTT
ctgataaaaaaaaactattt

SEQ ID NO: 237868 - DNA, 20 bp, Artificial Sequence
  Description of Artificial Sequence: Synthetic oligonucleotide
  Target: LAMA2; (-) strand; PAM type: YTN; PAM sequence: CTT
tctgataaaaaaaaactatt

SEQ ID NO: 237869 - DNA, 20 bp, Artificial Sequence
  Description of Artificial Sequence: Synthetic oligonucleotide
  Target: LAMA2; (-) strand; PAM type: YTN; PAM sequence: TTC
tttctgataaaaaaaaacta

SEQ ID NO: 237870 - DNA, 20 bp, Artificial Sequence
  Description of Artificial Sequence: Synthetic oligonucleotide
  Target: LAMA2; (-) strand; PAM type: YTN; PAM sequence: TTT
ctttctgataaaaaaaaact

SEQ ID NO: 237871 - DNA, 20 bp, Artificial Sequence
  Description of Artificial Sequence: Synthetic oligonucleotide
  Target: LAMA2; (-) strand; PAM type: YTN; PAM sequence: TTC
agtaagatatttctttctga

SEQ ID NO: 237872 - DNA, 20 bp, Artificial Sequence
  Description of Artificial Sequence: Synthetic oligonucleotide
  Target: LAMA2; (-) strand; PAM type: YTN; PAM sequence: CTT
cagtaagatatttctttctg

SEQ ID NO: 237873 - DNA, 20 bp, Artificial Sequence
  Description of Artificial Sequence: Synthetic oligonucleotide
  Target: LAMA2; (-) strand; PAM type: YTN; PAM sequence: TTC
acacttcagtaagatatttc

SEQ ID NO: 237874 - DNA, 20 bp, Artificial Sequence
  Description of Artificial Sequence: Synthetic oligonucleotide
  Target: LAMA2; (-) strand; PAM type: YTN; PAM sequence: CTT
cacacttcagtaagatattt

SEQ ID NO: 237875 - DNA, 20 bp, Artificial Sequence
  Description of Artificial Sequence: Synthetic oligonucleotide
  Target: LAMA2; (-) strand; PAM type: YTN; PAM sequence: TTA
aaaatgtcttcacacttcag

SEQ ID NO: 237876 - DNA, 20 bp, Artificial Sequence
  Description of Artificial Sequence: Synthetic oligonucleotide
  Target: LAMA2; (-) strand; PAM type: YTN; PAM sequence: TTT
aaaaatgtcttcacacttca

SEQ ID NO: 237877 - DNA, 20 bp, Artificial Sequence
  Description of Artificial Sequence: Synthetic oligonucleotide
  Target: LAMA2; (-) strand; PAM type: YTN; PAM sequence: TTT
taaaaatgtcttcacacttc

SEQ ID NO: 237878 - DNA, 20 bp, Artificial Sequence
  Description of Artificial Sequence: Synthetic oligonucleotide
  Target: LAMA2; (-) strand; PAM type: YTN; PAM sequence: TTT
ttaaaaatgtcttcacactt

SEQ ID NO: 237879 - DNA, 20 bp, Artificial Sequence
  Description of Artificial Sequence: Synthetic oligonucleotide
  Target: LAMA2; (-) strand; PAM type: YTN; PAM sequence: CTT
tttaaaaatgtcttcacact

SEQ ID NO: 237880 - DNA, 20 bp, Artificial Sequence
  Description of Artificial Sequence: Synthetic oligonucleotide
  Target: LAMA2; (-) strand; PAM type: YTN; PAM sequence: CTC
tttttaaaaatgtcttcaca

SEQ ID NO: 237881 - DNA, 20 bp, Artificial Sequence
  Description of Artificial Sequence: Synthetic oligonucleotide
  Target: LAMA2; (-) strand; PAM type: YTN; PAM sequence: CTA
atgaagctctttttaaaaat

SEQ ID NO: 237882 - DNA, 20 bp, Artificial Sequence
  Description of Artificial Sequence: Synthetic oligonucleotide
  Target: LAMA2; (-) strand; PAM type: YTN; PAM sequence: TTC
ctaatgaagctctttttaaa

SEQ ID NO: 237883 - DNA, 20 bp, Artificial Sequence
  Description of Artificial Sequence: Synthetic oligonucleotide
  Target: LAMA2; (-) strand; PAM type: YTN; PAM sequence: CTT
cctaatgaagctctttttaa

SEQ ID NO: 237884 - DNA, 20 bp, Artificial Sequence
  Description of Artificial Sequence: Synthetic oligonucleotide
  Target: LAMA2; (-) strand; PAM type: YTN; PAM sequence: TTA
ggcccaagacttcctaatga

SEQ ID NO: 237885 - DNA, 20 bp, Artificial Sequence
  Description of Artificial Sequence: Synthetic oligonucleotide
  Target: LAMA2; (-) strand; PAM type: YTN; PAM sequence: TTA
taaaacaaaaaacaattagg

SEQ ID NO: 237886 - DNA, 20 bp, Artificial Sequence
  Description of Artificial Sequence: Synthetic oligonucleotide
  Target: LAMA2; (-) strand; PAM type: YTN; PAM sequence: TTT
ataaaacaaaaaacaattag

SEQ ID NO: 237887 - DNA, 20 bp, Artificial Sequence
  Description of Artificial Sequence: Synthetic oligonucleotide
  Target: LAMA2; (-) strand; PAM type: YTN; PAM sequence: TTA
aaatttataaaacaaaaaac

SEQ ID NO: 237888 - DNA, 20 bp, Artificial Sequence
  Description of Artificial Sequence: Synthetic oligonucleotide
  Target: LAMA2; (-) strand; PAM type: YTN; PAM sequence: TTT
aaaatttataaaacaaaaaa

SEQ ID NO: 237889 - DNA, 20 bp, Artificial Sequence
  Description of Artificial Sequence: Synthetic oligonucleotide
  Target: LAMA2; (-) strand; PAM type: YTN; PAM sequence: CTC
atcacagagcagtcatttaa

SEQ ID NO: 237890 - DNA, 20 bp, Artificial Sequence
  Description of Artificial Sequence: Synthetic oligonucleotide
  Target: LAMA2; (-) strand; PAM type: YTN; PAM sequence: CTG
aaatgggctcatcacagagc

SEQ ID NO: 237891 - DNA, 20 bp, Artificial Sequence
  Description of Artificial Sequence: Synthetic oligonucleotide
  Target: LAMA2; (-) strand; PAM type: YTN; PAM sequence: CTC
aactgaaatgggctcatcac

SEQ ID NO: 237892 - DNA, 20 bp, Artificial Sequence
  Description of Artificial Sequence: Synthetic oligonucleotide
  Target: LAMA2; (-) strand; PAM type: YTN; PAM sequence: TTA
cccacaggaaaaataataca

SEQ ID NO: 237893 - DNA, 20 bp, Artificial Sequence
  Description of Artificial Sequence: Synthetic oligonucleotide
  Target: LAMA2; (-) strand; PAM type: YTN; PAM sequence: TTT
acccacaggaaaaataatac

SEQ ID NO: 237894 - DNA, 20 bp, Artificial Sequence
  Description of Artificial Sequence: Synthetic oligonucleotide
  Target: LAMA2; (-) strand; PAM type: YTN; PAM sequence: TTT
tacccacaggaaaaataata

SEQ ID NO: 237895 - DNA, 20 bp, Artificial Sequence
  Description of Artificial Sequence: Synthetic oligonucleotide
  Target: LAMA2; (-) strand; PAM type: YTN; PAM sequence: CTC
agtatgtcattttacccaca

SEQ ID NO: 237896 - DNA, 20 bp, Artificial Sequence
  Description of Artificial Sequence: Synthetic oligonucleotide
  Target: LAMA2; (-) strand; PAM type: YTN; PAM sequence: TTA
aaatagcaaaagtgggagaa

SEQ ID NO: 237897 - DNA, 20 bp, Artificial Sequence
  Description of Artificial Sequence: Synthetic oligonucleotide
  Target: LAMA2; (-) strand; PAM type: YTN; PAM sequence: TTT
aaaatagcaaaagtgggaga

SEQ ID NO: 237898 - DNA, 20 bp, Artificial Sequence
  Description of Artificial Sequence: Synthetic oligonucleotide
  Target: LAMA2; (-) strand; PAM type: YTN; PAM sequence: TTT
taaaatagcaaaagtgggag

SEQ ID NO: 237899 - DNA, 20 bp, Artificial Sequence
  Description of Artificial Sequence: Synthetic oligonucleotide
  Target: LAMA2; (-) strand; PAM type: YTN; PAM sequence: TTT
ttaaaatagcaaaagtggga

SEQ ID NO: 237900 - DNA, 20 bp, Artificial Sequence
  Description of Artificial Sequence: Synthetic oligonucleotide
  Target: LAMA2; (-) strand; PAM type: YTN; PAM sequence: CTG
tatttttaaaatagcaaaag

SEQ ID NO: 237901 - DNA, 20 bp, Artificial Sequence
  Description of Artificial Sequence: Synthetic oligonucleotide
  Target: LAMA2; (-) strand; PAM type: YTN; PAM sequence: TTA
tgcagcatatctgtattttt

SEQ ID NO: 237902 - DNA, 20 bp, Artificial Sequence
  Description of Artificial Sequence: Synthetic oligonucleotide
  Target: LAMA2; (-) strand; PAM type: YTN; PAM sequence: TTT
atgcagcatatctgtatttt

SEQ ID NO: 237903 - DNA, 20 bp, Artificial Sequence
  Description of Artificial Sequence: Synthetic oligonucleotide
  Target: LAMA2; (-) strand; PAM type: YTN; PAM sequence: CTA
tgtttatgcagcatatctgt

SEQ ID NO: 237904 - DNA, 20 bp, Artificial Sequence
  Description of Artificial Sequence: Synthetic oligonucleotide
  Target: LAMA2; (-) strand; PAM type: YTN; PAM sequence: TTG
ctatgtttatgcagcatatc

SEQ ID NO: 237905 - DNA, 20 bp, Artificial Sequence
  Description of Artificial Sequence: Synthetic oligonucleotide
  Target: LAMA2; (-) strand; PAM type: YTN; PAM sequence: TTT
gctatgtttatgcagcatat

SEQ ID NO: 237906 - DNA, 20 bp, Artificial Sequence
  Description of Artificial Sequence: Synthetic oligonucleotide
  Target: LAMA2; (-) strand; PAM type: YTN; PAM sequence: CTA
tttgctatgtttatgcagca

SEQ ID NO: 237907 - DNA, 20 bp, Artificial Sequence
  Description of Artificial Sequence: Synthetic oligonucleotide
  Target: LAMA2; (-) strand; PAM type: YTN; PAM sequence: TTA
taaatctatttgctatgttt

SEQ ID NO: 237908 - DNA, 20 bp, Artificial Sequence
  Description of Artificial Sequence: Synthetic oligonucleotide
  Target: LAMA2; (-) strand; PAM type: YTN; PAM sequence: TTT
ataaatctatttgctatgtt

SEQ ID NO: 237909 - DNA, 20 bp, Artificial Sequence
  Description of Artificial Sequence: Synthetic oligonucleotide
  Target: LAMA2; (-) strand; PAM type: YTN; PAM sequence: CTA
aatgtttataaatctatttg

SEQ ID NO: 237910 - DNA, 20 bp, Artificial Sequence
  Description of Artificial Sequence: Synthetic oligonucleotide
  Target: LAMA2; (-) strand; PAM type: YTN; PAM sequence: TTG
aatctaaatgtttataaatc

SEQ ID NO: 237911 - DNA, 20 bp, Artificial Sequence
  Description of Artificial Sequence: Synthetic oligonucleotide
  Target: LAMA2; (-) strand; PAM type: YTN; PAM sequence: CTT
gaatctaaatgtttataaat

SEQ ID NO: 237912 - DNA, 20 bp, Artificial Sequence
  Description of Artificial Sequence: Synthetic oligonucleotide
  Target: LAMA2; (-) strand; PAM type: YTN; PAM sequence: TTC
ttgaatctaaatgtttataa

SEQ ID NO: 237913 - DNA, 20 bp, Artificial Sequence
  Description of Artificial Sequence: Synthetic oligonucleotide
  Target: LAMA2; (-) strand; PAM type: YTN; PAM sequence: TTT
cttgaatctaaatgtttata

SEQ ID NO: 237914 - DNA, 20 bp, Artificial Sequence
  Description of Artificial Sequence: Synthetic oligonucleotide
  Target: LAMA2; (-) strand; PAM type: YTN; PAM sequence: CTT
tcttgaatctaaatgtttat

SEQ ID NO: 237915 - DNA, 20 bp, Artificial Sequence
  Description of Artificial Sequence: Synthetic oligonucleotide
  Target: LAMA2; (-) strand; PAM type: YTN; PAM sequence: TTC
tttcttgaatctaaatgttt

SEQ ID NO: 237916 - DNA, 20 bp, Artificial Sequence
  Description of Artificial Sequence: Synthetic oligonucleotide
  Target: LAMA2; (-) strand; PAM type: YTN; PAM sequence: TTT
ctttcttgaatctaaatgtt

SEQ ID NO: 237917 - DNA, 20 bp, Artificial Sequence
  Description of Artificial Sequence: Synthetic oligonucleotide
  Target: LAMA2; (-) strand; PAM type: YTN; PAM sequence: CTT
tctttcttgaatctaaatgt

SEQ ID NO: 237918 - DNA, 20 bp, Artificial Sequence
  Description of Artificial Sequence: Synthetic oligonucleotide
  Target: LAMA2; (-) strand; PAM type: YTN; PAM sequence: TTC
cctttctttcttgaatctaa

SEQ ID NO: 237919 - DNA, 20 bp, Artificial Sequence
  Description of Artificial Sequence: Synthetic oligonucleotide
  Target: LAMA2; (-) strand; PAM type: YTN; PAM sequence: TTT
ccctttctttcttgaatcta

SEQ ID NO: 237920 - DNA, 20 bp, Artificial Sequence
  Description of Artificial Sequence: Synthetic oligonucleotide
  Target: LAMA2; (-) strand; PAM type: YTN; PAM sequence: CTA
ggaatttccctttctttctt

SEQ ID NO: 237921 - DNA, 20 bp, Artificial Sequence
  Description of Artificial Sequence: Synthetic oligonucleotide
  Target: LAMA2; (-) strand; PAM type: YTN; PAM sequence: CTG
acatctaggaatttcccttt

SEQ ID NO: 237922 - DNA, 20 bp, Artificial Sequence
  Description of Artificial Sequence: Synthetic oligonucleotide
  Target: LAMA2; (-) strand; PAM type: YTN; PAM sequence: TTG
gtctgacatctaggaatttc

SEQ ID NO: 237923 - DNA, 20 bp, Artificial Sequence
  Description of Artificial Sequence: Synthetic oligonucleotide
  Target: LAMA2; (-) strand; PAM type: YTN; PAM sequence: TTT
ggtctgacatctaggaattt

SEQ ID NO: 237924 - DNA, 20 bp, Artificial Sequence
  Description of Artificial Sequence: Synthetic oligonucleotide
  Target: LAMA2; (-) strand; PAM type: YTN; PAM sequence: CTT
tggtctgacatctaggaatt

SEQ ID NO: 237925 - DNA, 20 bp, Artificial Sequence
  Description of Artificial Sequence: Synthetic oligonucleotide
  Target: LAMA2; (-) strand; PAM type: YTN; PAM sequence: CTC
tttggtctgacatctaggaa

SEQ ID NO: 237926 - DNA, 20 bp, Artificial Sequence
  Description of Artificial Sequence: Synthetic oligonucleotide
  Target: LAMA2; (-) strand; PAM type: YTN; PAM sequence: TTC
cctctttggtctgacatcta

SEQ ID NO: 237927 - DNA, 20 bp, Artificial Sequence
  Description of Artificial Sequence: Synthetic oligonucleotide
  Target: LAMA2; (-) strand; PAM type: YTN; PAM sequence: TTT
ccctctttggtctgacatct

SEQ ID NO: 237928 - DNA, 20 bp, Artificial Sequence
  Description of Artificial Sequence: Synthetic oligonucleotide
  Target: LAMA2; (-) strand; PAM type: YTN; PAM sequence: TTA
gatttccctctttggtctga

SEQ ID NO: 237929 - DNA, 20 bp, Artificial Sequence
  Description of Artificial Sequence: Synthetic oligonucleotide
  Target: LAMA2; (-) strand; PAM type: YTN; PAM sequence: CTT
agatttccctctttggtctg

SEQ ID NO: 237930 - DNA, 20 bp, Artificial Sequence
  Description of Artificial Sequence: Synthetic oligonucleotide
  Target: LAMA2; (-) strand; PAM type: YTN; PAM sequence: TTA
acttagatttccctctttgg

SEQ ID NO: 237931 - DNA, 20 bp, Artificial Sequence
  Description of Artificial Sequence: Synthetic oligonucleotide
  Target: LAMA2; (-) strand; PAM type: YTN; PAM sequence: CTT
aacttagatttccctctttg

SEQ ID NO: 237932 - DNA, 20 bp, Artificial Sequence
  Description of Artificial Sequence: Synthetic oligonucleotide
  Target: LAMA2; (-) strand; PAM type: YTN; PAM sequence: TTA
tgcttaacttagatttccct

SEQ ID NO: 237933 - DNA, 20 bp, Artificial Sequence
  Description of Artificial Sequence: Synthetic oligonucleotide
  Target: LAMA2; (-) strand; PAM type: YTN; PAM sequence: CTT
atgcttaacttagatttccc

SEQ ID NO: 237934 - DNA, 20 bp, Artificial Sequence
  Description of Artificial Sequence: Synthetic oligonucleotide
  Target: LAMA2; (-) strand; PAM type: YTN; PAM sequence: TTG
cttatgcttaacttagattt

SEQ ID NO: 237935 - DNA, 20 bp, Artificial Sequence
  Description of Artificial Sequence: Synthetic oligonucleotide
  Target: LAMA2; (-) strand; PAM type: YTN; PAM sequence: TTT
gcttatgcttaacttagatt

SEQ ID NO: 237936 - DNA, 20 bp, Artificial Sequence
  Description of Artificial Sequence: Synthetic oligonucleotide
  Target: LAMA2; (-) strand; PAM type: YTN; PAM sequence: TTT
tgcttatgcttaacttagat

SEQ ID NO: 237937 - DNA, 20 bp, Artificial Sequence
  Description of Artificial Sequence: Synthetic oligonucleotide
  Target: LAMA2; (-) strand; PAM type: YTN; PAM sequence: CTT
ttgcttatgcttaacttaga

SEQ ID NO: 237938 - DNA, 20 bp, Artificial Sequence
  Description of Artificial Sequence: Synthetic oligonucleotide
  Target: LAMA2; (-) strand; PAM type: YTN; PAM sequence: TTG
agcttttgcttatgcttaac

SEQ ID NO: 237939 - DNA, 20 bp, Artificial Sequence
  Description of Artificial Sequence: Synthetic oligonucleotide
  Target: LAMA2; (-) strand; PAM type: YTN; PAM sequence: CTT
gagcttttgcttatgcttaa

SEQ ID NO: 237940 - DNA, 20 bp, Artificial Sequence
  Description of Artificial Sequence: Synthetic oligonucleotide
  Target: LAMA2; (-) strand; PAM type: YTN; PAM sequence: TTA
gcttgagcttttgcttatgc

SEQ ID NO: 237941 - DNA, 20 bp, Artificial Sequence
  Description of Artificial Sequence: Synthetic oligonucleotide
  Target: LAMA2; (-) strand; PAM type: YTN; PAM sequence: TTT
agcttgagcttttgcttatg

SEQ ID NO: 237942 - DNA, 20 bp, Artificial Sequence
  Description of Artificial Sequence: Synthetic oligonucleotide
  Target: LAMA2; (-) strand; PAM type: YTN; PAM sequence: CTC
agtttagcttgagcttttgc

SEQ ID NO: 237943 - DNA, 20 bp, Artificial Sequence
  Description of Artificial Sequence: Synthetic oligonucleotide
  Target: LAMA2; (-) strand; PAM type: YTN; PAM sequence: TTG
ctcagtttagcttgagcttt

SEQ ID NO: 237944 - DNA, 20 bp, Artificial Sequence
  Description of Artificial Sequence: Synthetic oligonucleotide
  Target: LAMA2; (-) strand; PAM type: YTN; PAM sequence: CTC
caccccatgaccccagttgc

SEQ ID NO: 237945 - DNA, 20 bp, Artificial Sequence
  Description of Artificial Sequence: Synthetic oligonucleotide
  Target: LAMA2; (-) strand; PAM type: YTN; PAM sequence: CTC
ccaccctccaccccatgacc

SEQ ID NO: 237946 - DNA, 20 bp, Artificial Sequence
  Description of Artificial Sequence: Synthetic oligonucleotide
  Target: LAMA2; (-) strand; PAM type: YTN; PAM sequence: TTG
tctcccaccctccaccccat

SEQ ID NO: 237947 - DNA, 20 bp, Artificial Sequence
  Description of Artificial Sequence: Synthetic oligonucleotide
  Target: LAMA2; (-) strand; PAM type: YTN; PAM sequence: CTT
gtctcccaccctccacccca

SEQ ID NO: 237948 - DNA, 20 bp, Artificial Sequence
  Description of Artificial Sequence: Synthetic oligonucleotide
  Target: LAMA2; (-) strand; PAM type: YTN; PAM sequence: CTA
agacttgtctcccaccctcc

SEQ ID NO: 237949 - DNA, 20 bp, Artificial Sequence
  Description of Artificial Sequence: Synthetic oligonucleotide
  Target: LAMA2; (-) strand; PAM type: YTN; PAM sequence: TTA
gaactaagacttgtctccca

SEQ ID NO: 237950 - DNA, 20 bp, Artificial Sequence
  Description of Artificial Sequence: Synthetic oligonucleotide
  Target: LAMA2; (-) strand; PAM type: YTN; PAM sequence: CTT
agaactaagacttgtctccc

SEQ ID NO: 237951 - DNA, 20 bp, Artificial Sequence
  Description of Artificial Sequence: Synthetic oligonucleotide
  Target: LAMA2; (-) strand; PAM type: YTN; PAM sequence: CTG
atcttagaactaagacttgt

SEQ ID NO: 237952 - DNA, 20 bp, Artificial Sequence
  Description of Artificial Sequence: Synthetic oligonucleotide
  Target: LAMA2; (-) strand; PAM type: YTN; PAM sequence: TTA
gccctgatcttagaactaag

SEQ ID NO: 237953 - DNA, 20 bp, Artificial Sequence
  Description of Artificial Sequence: Synthetic oligonucleotide
  Target: LAMA2; (-) strand; PAM type: YTN; PAM sequence: TTT
agccctgatcttagaactaa

SEQ ID NO: 237954 - DNA, 20 bp, Artificial Sequence
  Description of Artificial Sequence: Synthetic oligonucleotide
  Target: LAMA2; (-) strand; PAM type: YTN; PAM sequence: CTT
tagccctgatcttagaacta

SEQ ID NO: 237955 - DNA, 20 bp, Artificial Sequence
  Description of Artificial Sequence: Synthetic oligonucleotide
  Target: LAMA2; (-) strand; PAM type: YTN; PAM sequence: CTC
caaactttagccctgatctt

SEQ ID NO: 237956 - DNA, 20 bp, Artificial Sequence
  Description of Artificial Sequence: Synthetic oligonucleotide
  Target: LAMA2; (-) strand; PAM type: YTN; PAM sequence: TTA
aaactccaaactttagccct

SEQ ID NO: 237957 - DNA, 20 bp, Artificial Sequence
  Description of Artificial Sequence: Synthetic oligonucleotide
  Target: LAMA2; (-) strand; PAM type: YTN; PAM sequence: CTA
gtgagggcattaaaactcca

SEQ ID NO: 237958 - DNA, 20 bp, Artificial Sequence
  Description of Artificial Sequence: Synthetic oligonucleotide
  Target: LAMA2; (-) strand; PAM type: YTN; PAM sequence: CTA
gtgtcaagtcctagtgaggg

SEQ ID NO: 237959 - DNA, 20 bp, Artificial Sequence
  Description of Artificial Sequence: Synthetic oligonucleotide
  Target: LAMA2; (-) strand; PAM type: YTN; PAM sequence: CTG
tgggtccaaatcctagtgtc

SEQ ID NO: 237960 - DNA, 20 bp, Artificial Sequence
  Description of Artificial Sequence: Synthetic oligonucleotide
  Target: LAMA2; (-) strand; PAM type: YTN; PAM sequence: TTC
cgtctgtgggtccaaatcct

SEQ ID NO: 237961 - DNA, 20 bp, Artificial Sequence
  Description of Artificial Sequence: Synthetic oligonucleotide
  Target: LAMA2; (-) strand; PAM type: YTN; PAM sequence: TTT
ccgtctgtgggtccaaatcc

SEQ ID NO: 237962 - DNA, 20 bp, Artificial Sequence
  Description of Artificial Sequence: Synthetic oligonucleotide
  Target: LAMA2; (-) strand; PAM type: YTN; PAM sequence: CTG
caatttccgtctgtgggtcc

SEQ ID NO: 237963 - DNA, 20 bp, Artificial Sequence
  Description of Artificial Sequence: Synthetic oligonucleotide
  Target: LAMA2; (-) strand; PAM type: YTN; PAM sequence: TTC
agctgcaatttccgtctgtg

SEQ ID NO: 237964 - DNA, 20 bp, Artificial Sequence
  Description of Artificial Sequence: Synthetic oligonucleotide
  Target: LAMA2; (-) strand; PAM type: YTN; PAM sequence: TTC
agggagttcagctgcaattt

SEQ ID NO: 237965 - DNA, 20 bp, Artificial Sequence
  Description of Artificial Sequence: Synthetic oligonucleotide
  Target: LAMA2; (-) strand; PAM type: YTN; PAM sequence: CTT
cagggagttcagctgcaatt

SEQ ID NO: 237966 - DNA, 20 bp, Artificial Sequence
  Description of Artificial Sequence: Synthetic oligonucleotide
  Target: LAMA2; (-) strand; PAM type: YTN; PAM sequence: CTG
cttcagggagttcagctgca

SEQ ID NO: 237967 - DNA, 20 bp, Artificial Sequence
  Description of Artificial Sequence: Synthetic oligonucleotide
  Target: LAMA2; (-) strand; PAM type: YTN; PAM sequence: CTA
gtgtccctgcttcagggagt

SEQ ID NO: 237968 - DNA, 20 bp, Artificial Sequence
  Description of Artificial Sequence: Synthetic oligonucleotide
  Target: LAMA2; (-) strand; PAM type: YTN; PAM sequence: TTC
tagtgtccctgcttcaggga

SEQ ID NO: 237969 - DNA, 20 bp, Artificial Sequence
  Description of Artificial Sequence: Synthetic oligonucleotide
  Target: LAMA2; (-) strand; PAM type: YTN; PAM sequence: TTT
ctagtgtccctgcttcaggg

SEQ ID NO: 237970 - DNA, 20 bp, Artificial Sequence
  Description of Artificial Sequence: Synthetic oligonucleotide
  Target: LAMA2; (-) strand; PAM type: YTN; PAM sequence: CTG
aaagcatttctagtgtccct

SEQ ID NO: 237971 - DNA, 20 bp, Artificial Sequence
  Description of Artificial Sequence: Synthetic oligonucleotide
  Target: LAMA2; (-) strand; PAM type: YTN; PAM sequence: CTG
tctgaaagcatttctagtgt

SEQ ID NO: 237972 - DNA, 20 bp, Artificial Sequence
  Description of Artificial Sequence: Synthetic oligonucleotide
  Target: LAMA2; (-) strand; PAM type: YTN; PAM sequence: TTC
actgtctgaaagcatttcta

SEQ ID NO: 237973 - DNA, 20 bp, Artificial Sequence
  Description of Artificial Sequence: Synthetic oligonucleotide
  Target: LAMA2; (-) strand; PAM type: YTN; PAM sequence: TTT
cactgtctgaaagcatttct

SEQ ID NO: 237974 - DNA, 20 bp, Artificial Sequence
  Description of Artificial Sequence: Synthetic oligonucleotide
  Target: LAMA2; (-) strand; PAM type: YTN; PAM sequence: CTA
gcccccatttcactgtctga

SEQ ID NO: 237975 - DNA, 20 bp, Artificial Sequence
  Description of Artificial Sequence: Synthetic oligonucleotide
  Target: LAMA2; (-) strand; PAM type: YTN; PAM sequence: TTC
tagcccccatttcactgtct

SEQ ID NO: 237976 - DNA, 20 bp, Artificial Sequence
  Description of Artificial Sequence: Synthetic oligonucleotide
  Target: LAMA2; (-) strand; PAM type: YTN; PAM sequence: TTT
ctagcccccatttcactgtc

SEQ ID NO: 237977 - DNA, 20 bp, Artificial Sequence
  Description of Artificial Sequence: Synthetic oligonucleotide
  Target: LAMA2; (-) strand; PAM type: YTN; PAM sequence: TTT
tctagcccccatttcactgt

SEQ ID NO: 237978 - DNA, 20 bp, Artificial Sequence
  Description of Artificial Sequence: Synthetic oligonucleotide
  Target: LAMA2; (-) strand; PAM type: YTN; PAM sequence: TTG
caggaagaattttctagccc

SEQ ID NO: 237979 - DNA, 20 bp, Artificial Sequence
  Description of Artificial Sequence: Synthetic oligonucleotide
  Target: LAMA2; (-) strand; PAM type: YTN; PAM sequence: CTT
gcaggaagaattttctagcc

SEQ ID NO: 237980 - DNA, 20 bp, Artificial Sequence
  Description of Artificial Sequence: Synthetic oligonucleotide
  Target: LAMA2; (-) strand; PAM type: YTN; PAM sequence: CTG
taggcttgcaggaagaattt

SEQ ID NO: 237981 - DNA, 20 bp, Artificial Sequence
  Description of Artificial Sequence: Synthetic oligonucleotide
  Target: LAMA2; (-) strand; PAM type: YTN; PAM sequence: CTC
tgtaggcttgcaggaagaat

SEQ ID NO: 237982 - DNA, 20 bp, Artificial Sequence
  Description of Artificial Sequence: Synthetic oligonucleotide
  Target: LAMA2; (-) strand; PAM type: YTN; PAM sequence: CTG
cctctgtaggcttgcaggaa

SEQ ID NO: 237983 - DNA, 20 bp, Artificial Sequence
  Description of Artificial Sequence: Synthetic oligonucleotide
  Target: LAMA2; (-) strand; PAM type: YTN; PAM sequence: CTA
gctgcctctgtaggcttgca

SEQ ID NO: 237984 - DNA, 20 bp, Artificial Sequence
  Description of Artificial Sequence: Synthetic oligonucleotide
  Target: LAMA2; (-) strand; PAM type: YTN; PAM sequence: TTC
tagctgcctctgtaggcttg

SEQ ID NO: 237985 - DNA, 20 bp, Artificial Sequence
  Description of Artificial Sequence: Synthetic oligonucleotide
  Target: LAMA2; (-) strand; PAM type: YTN; PAM sequence: TTT
ctagctgcctctgtaggctt

SEQ ID NO: 237986 - DNA, 20 bp, Artificial Sequence
  Description of Artificial Sequence: Synthetic oligonucleotide
  Target: LAMA2; (-) strand; PAM type: YTN; PAM sequence: TTT
tctagctgcctctgtaggct

SEQ ID NO: 237987 - DNA, 20 bp, Artificial Sequence
  Description of Artificial Sequence: Synthetic oligonucleotide
  Target: LAMA2; (-) strand; PAM type: YTN; PAM sequence: CTA
agagaaaaattttctagctg

SEQ ID NO: 237988 - DNA, 20 bp, Artificial Sequence
  Description of Artificial Sequence: Synthetic oligonucleotide
  Target: LAMA2; (-) strand; PAM type: YTN; PAM sequence: TTA
cccacccagagcccctaaga

SEQ ID NO: 237989 - DNA, 20 bp, Artificial Sequence
  Description of Artificial Sequence: Synthetic oligonucleotide
  Target: LAMA2; (-) strand; PAM type: YTN; PAM sequence: TTT
acccacccagagcccctaag

SEQ ID NO: 237990 - DNA, 20 bp, Artificial Sequence
  Description of Artificial Sequence: Synthetic oligonucleotide
  Target: LAMA2; (-) strand; PAM type: YTN; PAM sequence: TTT
tacccacccagagcccctaa

SEQ ID NO: 237991 - DNA, 20 bp, Artificial Sequence
  Description of Artificial Sequence: Synthetic oligonucleotide
  Target: LAMA2; (-) strand; PAM type: YTN; PAM sequence: CTT
ttacccacccagagccccta

SEQ ID NO: 237992 - DNA, 20 bp, Artificial Sequence
  Description of Artificial Sequence: Synthetic oligonucleotide
  Target: LAMA2; (-) strand; PAM type: YTN; PAM sequence: CTA
cacaaggtagtaacttttac

SEQ ID NO: 237993 - DNA, 20 bp, Artificial Sequence
  Description of Artificial Sequence: Synthetic oligonucleotide
  Target: LAMA2; (-) strand; PAM type: YTN; PAM sequence: TTC
ggtcctacacaaggtagtaa

SEQ ID NO: 237994 - DNA, 20 bp, Artificial Sequence
  Description of Artificial Sequence: Synthetic oligonucleotide
  Target: LAMA2; (-) strand; PAM type: YTN; PAM sequence: TTG
gggattcggtcctacacaag

SEQ ID NO: 237995 - DNA, 20 bp, Artificial Sequence
  Description of Artificial Sequence: Synthetic oligonucleotide
  Target: LAMA2; (-) strand; PAM type: YTN; PAM sequence: TTT
ggggattcggtcctacacaa

SEQ ID NO: 237996 - DNA, 20 bp, Artificial Sequence
  Description of Artificial Sequence: Synthetic oligonucleotide
  Target: LAMA2; (-) strand; PAM type: YTN; PAM sequence: TTC
ccacgtggcacacaggtttg

SEQ ID NO: 237997 - DNA, 20 bp, Artificial Sequence
  Description of Artificial Sequence: Synthetic oligonucleotide
  Target: LAMA2; (-) strand; PAM type: YTN; PAM sequence: TTG
aagaatgccagcacataagg

SEQ ID NO: 237998 - DNA, 20 bp, Artificial Sequence
  Description of Artificial Sequence: Synthetic oligonucleotide
  Target: LAMA2; (-) strand; PAM type: YTN; PAM sequence: TTG
ttgaagaatgccagcacata

SEQ ID NO: 237999 - DNA, 20 bp, Artificial Sequence
  Description of Artificial Sequence: Synthetic oligonucleotide
  Target: LAMA2; (-) strand; PAM type: YTN; PAM sequence: CTT
gttgaagaatgccagcacat

SEQ ID NO: 238000 - DNA, 20 bp, Artificial Sequence
  Description of Artificial Sequence: Synthetic oligonucleotide
  Target: LAMA2; (-) strand; PAM type: YTN; PAM sequence: TTG
acttgttgaagaatgccagc

SEQ ID NO: 238001 - DNA, 20 bp, Artificial Sequence
  Description of Artificial Sequence: Synthetic oligonucleotide
  Target: LAMA2; (-) strand; PAM type: YTN; PAM sequence: CTT
gacttgttgaagaatgccag

SEQ ID NO: 238002 - DNA, 20 bp, Artificial Sequence
  Description of Artificial Sequence: Synthetic oligonucleotide
  Target: LAMA2; (-) strand; PAM type: YTN; PAM sequence: TTC
cttgacttgttgaagaatgc

SEQ ID NO: 238003 - DNA, 20 bp, Artificial Sequence
  Description of Artificial Sequence: Synthetic oligonucleotide
  Target: LAMA2; (-) strand; PAM type: YTN; PAM sequence: TTT
ccttgacttgttgaagaatg

SEQ ID NO: 238004 - DNA, 20 bp, Artificial Sequence
  Description of Artificial Sequence: Synthetic oligonucleotide
  Target: LAMA2; (-) strand; PAM type: YTN; PAM sequence: CTA
tgggaatatcatttccttga

SEQ ID NO: 238005 - DNA, 20 bp, Artificial Sequence
  Description of Artificial Sequence: Synthetic oligonucleotide
  Target: LAMA2; (-) strand; PAM type: YTN; PAM sequence: TTC
ctatgggaatatcatttcct

SEQ ID NO: 238006 - DNA, 20 bp, Artificial Sequence
  Description of Artificial Sequence: Synthetic oligonucleotide
  Target: LAMA2; (-) strand; PAM type: YTN; PAM sequence: TTT
cctatgggaatatcatttcc

SEQ ID NO: 238007 - DNA, 20 bp, Artificial Sequence
  Description of Artificial Sequence: Synthetic oligonucleotide
  Target: LAMA2; (-) strand; PAM type: YTN; PAM sequence: TTT
tcctatgggaatatcatttc

SEQ ID NO: 238008 - DNA, 20 bp, Artificial Sequence
  Description of Artificial Sequence: Synthetic oligonucleotide
  Target: LAMA2; (-) strand; PAM type: YTN; PAM sequence: TTT
ttcctatgggaatatcattt

SEQ ID NO: 238009 - DNA, 20 bp, Artificial Sequence
  Description of Artificial Sequence: Synthetic oligonucleotide
  Target: LAMA2; (-) strand; PAM type: YTN; PAM sequence: TTA
tttttcctatgggaatatca

SEQ ID NO: 238010 - DNA, 20 bp, Artificial Sequence
  Description of Artificial Sequence: Synthetic oligonucleotide
  Target: LAMA2; (-) strand; PAM type: YTN; PAM sequence: CTG
tattatttttcctatgggaa

SEQ ID NO: 238011 - DNA, 20 bp, Artificial Sequence
  Description of Artificial Sequence: Synthetic oligonucleotide
  Target: LAMA2; (-) strand; PAM type: YTN; PAM sequence: TTG
aggctgtattatttttccta

SEQ ID NO: 238012 - DNA, 20 bp, Artificial Sequence
  Description of Artificial Sequence: Synthetic oligonucleotide
  Target: LAMA2; (-) strand; PAM type: YTN; PAM sequence: TTC
agttgaggctgtattatttt

SEQ ID NO: 238013 - DNA, 20 bp, Artificial Sequence
  Description of Artificial Sequence: Synthetic oligonucleotide
  Target: LAMA2; (-) strand; PAM type: YTN; PAM sequence: TTT
cagttgaggctgtattattt

SEQ ID NO: 238014 - DNA, 20 bp, Artificial Sequence
  Description of Artificial Sequence: Synthetic oligonucleotide
  Target: LAMA2; (-) strand; PAM type: YTN; PAM sequence: TTT
tcagttgaggctgtattatt

SEQ ID NO: 238015 - DNA, 20 bp, Artificial Sequence
  Description of Artificial Sequence: Synthetic oligonucleotide
  Target: LAMA2; (-) strand; PAM type: YTN; PAM sequence: TTG
tgatgagatcattttcagtt

SEQ ID NO: 238016 - DNA, 20 bp, Artificial Sequence
  Description of Artificial Sequence: Synthetic oligonucleotide
  Target: LAMA2; (-) strand; PAM type: YTN; PAM sequence: TTT
gtgatgagatcattttcagt

SEQ ID NO: 238017 - DNA, 20 bp, Artificial Sequence
  Description of Artificial Sequence: Synthetic oligonucleotide
  Target: LAMA2; (-) strand; PAM type: YTN; PAM sequence: CTT
tgtgatgagatcattttcag

SEQ ID NO: 238018 - DNA, 20 bp, Artificial Sequence
  Description of Artificial Sequence: Synthetic oligonucleotide
  Target: LAMA2; (-) strand; PAM type: YTN; PAM sequence: TTG
ctttgtgatgagatcatttt

SEQ ID NO: 238019 - DNA, 20 bp, Artificial Sequence
  Description of Artificial Sequence: Synthetic oligonucleotide
  Target: LAMA2; (-) strand; PAM type: YTN; PAM sequence: CTT
gctttgtgatgagatcattt

SEQ ID NO: 238020 - DNA, 20 bp, Artificial Sequence
  Description of Artificial Sequence: Synthetic oligonucleotide
  Target: LAMA2; (-) strand; PAM type: YTN; PAM sequence: TTA
cttgctttgtgatgagatca

SEQ ID NO: 238021 - DNA, 20 bp, Artificial Sequence
  Description of Artificial Sequence: Synthetic oligonucleotide
  Target: LAMA2; (-) strand; PAM type: YTN; PAM sequence: TTT
acttgctttgtgatgagatc

SEQ ID NO: 238022 - DNA, 20 bp, Artificial Sequence
  Description of Artificial Sequence: Synthetic oligonucleotide
  Target: LAMA2; (-) strand; PAM type: YTN; PAM sequence: CTT
tacttgctttgtgatgagat

SEQ ID NO: 238023 - DNA, 20 bp, Artificial Sequence
  Description of Artificial Sequence: Synthetic oligonucleotide
  Target: LAMA2; (-) strand; PAM type: YTN; PAM sequence: TTG
tgtactttacttgctttgtg

SEQ ID NO: 238024 - DNA, 20 bp, Artificial Sequence
  Description of Artificial Sequence: Synthetic oligonucleotide
  Target: LAMA2; (-) strand; PAM type: YTN; PAM sequence: TTT
gtgtactttacttgctttgt

SEQ ID NO: 238025 - DNA, 20 bp, Artificial Sequence
  Description of Artificial Sequence: Synthetic oligonucleotide
  Target: LAMA2; (-) strand; PAM type: YTN; PAM sequence: TTT
tgtgtactttacttgctttg

SEQ ID NO: 238026 - DNA, 20 bp, Artificial Sequence
  Description of Artificial Sequence: Synthetic oligonucleotide
  Target: LAMA2; (-) strand; PAM type: YTN; PAM sequence: CTT
ttgtgtactttacttgcttt

SEQ ID NO: 238027 - DNA, 20 bp, Artificial Sequence
  Description of Artificial Sequence: Synthetic oligonucleotide
  Target: LAMA2; (-) strand; PAM type: YTN; PAM sequence: TTC
cttttgtgtactttacttgc

SEQ ID NO: 238028 - DNA, 20 bp, Artificial Sequence
  Description of Artificial Sequence: Synthetic oligonucleotide
  Target: LAMA2; (-) strand; PAM type: YTN; PAM sequence: TTT
ccttttgtgtactttacttg

SEQ ID NO: 238029 - DNA, 20 bp, Artificial Sequence
  Description of Artificial Sequence: Synthetic oligonucleotide
  Target: LAMA2; (-) strand; PAM type: YTN; PAM sequence: TTT
tccttttgtgtactttactt

SEQ ID NO: 238030 - DNA, 20 bp, Artificial Sequence
  Description of Artificial Sequence: Synthetic oligonucleotide
  Target: LAMA2; (-) strand; PAM type: YTN; PAM sequence: TTA
ttttccttttgtgtacttta

SEQ ID NO: 238031 - DNA, 20 bp, Artificial Sequence
  Description of Artificial Sequence: Synthetic oligonucleotide
  Target: LAMA2; (-) strand; PAM type: YTN; PAM sequence: TTG
tagttattttccttttgtgt

SEQ ID NO: 238032 - DNA, 20 bp, Artificial Sequence
  Description of Artificial Sequence: Synthetic oligonucleotide
  Target: LAMA2; (-) strand; PAM type: YTN; PAM sequence: TTT
gtagttattttccttttgtg

SEQ ID NO: 238033 - DNA, 20 bp, Artificial Sequence
  Description of Artificial Sequence: Synthetic oligonucleotide
  Target: LAMA2; (-) strand; PAM type: YTN; PAM sequence: TTT
tgtagttattttccttttgt

SEQ ID NO: 238034 - DNA, 20 bp, Artificial Sequence
  Description of Artificial Sequence: Synthetic oligonucleotide
  Target: LAMA2; (-) strand; PAM type: YTN; PAM sequence: CTT
ttgtagttattttccttttg

SEQ ID NO: 238035 - DNA, 20 bp, Artificial Sequence
  Description of Artificial Sequence: Synthetic oligonucleotide
  Target: LAMA2; (-) strand; PAM type: YTN; PAM sequence: TTC
cttttgtagttattttcctt

SEQ ID NO: 238036 - DNA, 20 bp, Artificial Sequence
  Description of Artificial Sequence: Synthetic oligonucleotide
  Target: LAMA2; (-) strand; PAM type: YTN; PAM sequence: TTT
ccttttgtagttattttcct

SEQ ID NO: 238037 - DNA, 20 bp, Artificial Sequence
  Description of Artificial Sequence: Synthetic oligonucleotide
  Target: LAMA2; (-) strand; PAM type: YTN; PAM sequence: CTG
gtttccttttgtagttattt

SEQ ID NO: 238038 - DNA, 20 bp, Artificial Sequence
  Description of Artificial Sequence: Synthetic oligonucleotide
  Target: LAMA2; (-) strand; PAM type: YTN; PAM sequence: CTA
ctggtttccttttgtagtta

SEQ ID NO: 238039 - DNA, 20 bp, Artificial Sequence
  Description of Artificial Sequence: Synthetic oligonucleotide
  Target: LAMA2; (-) strand; PAM type: YTN; PAM sequence: TTG
tggctactggtttccttttg

SEQ ID NO: 238040 - DNA, 20 bp, Artificial Sequence
  Description of Artificial Sequence: Synthetic oligonucleotide
  Target: LAMA2; (-) strand; PAM type: YTN; PAM sequence: TTT
gtggctactggtttcctttt

SEQ ID NO: 238041 - DNA, 20 bp, Artificial Sequence
  Description of Artificial Sequence: Synthetic oligonucleotide
  Target: LAMA2; (-) strand; PAM type: YTN; PAM sequence: TTT
tgtggctactggtttccttt

SEQ ID NO: 238042 - DNA, 20 bp, Artificial Sequence
  Description of Artificial Sequence: Synthetic oligonucleotide
  Target: LAMA2; (-) strand; PAM type: YTN; PAM sequence: TTT
ttgtggctactggtttcctt

SEQ ID NO: 238043 - DNA, 20 bp, Artificial Sequence
  Description of Artificial Sequence: Synthetic oligonucleotide
  Target: LAMA2; (-) strand; PAM type: YTN; PAM sequence: CTC
atttttgtggctactggttt

SEQ ID NO: 238044 - DNA, 20 bp, Artificial Sequence
  Description of Artificial Sequence: Synthetic oligonucleotide
  Target: LAMA2; (-) strand; PAM type: YTN; PAM sequence: TTG
tgtacaaatatcctcatttt

SEQ ID NO: 238045 - DNA, 20 bp, Artificial Sequence
  Description of Artificial Sequence: Synthetic oligonucleotide
  Target: LAMA2; (-) strand; PAM type: YTN; PAM sequence: TTT
gtgtacaaatatcctcattt

SEQ ID NO: 238046 - DNA, 20 bp, Artificial Sequence
  Description of Artificial Sequence: Synthetic oligonucleotide
  Target: LAMA2; (-) strand; PAM type: YTN; PAM sequence: CTT
tgtgtacaaatatcctcatt

SEQ ID NO: 238047 - DNA, 20 bp, Artificial Sequence
  Description of Artificial Sequence: Synthetic oligonucleotide
  Target: LAMA2; (-) strand; PAM type: YTN; PAM sequence: TTC
tttgtgtacaaatatcctca

SEQ ID NO: 238048 - DNA, 20 bp, Artificial Sequence
  Description of Artificial Sequence: Synthetic oligonucleotide
  Target: LAMA2; (-) strand; PAM type: YTN; PAM sequence: CTA
gttctttgtgtacaaatatc

SEQ ID NO: 238049 - DNA, 20 bp, Artificial Sequence
  Description of Artificial Sequence: Synthetic oligonucleotide
  Target: LAMA2; (-) strand; PAM type: YTN; PAM sequence: TTC
tagttctttgtgtacaaata

SEQ ID NO: 238050 - DNA, 20 bp, Artificial Sequence
  Description of Artificial Sequence: Synthetic oligonucleotide
  Target: LAMA2; (-) strand; PAM type: YTN; PAM sequence: TTT
ctagttctttgtgtacaaat

SEQ ID NO: 238051 - DNA, 20 bp, Artificial Sequence
  Description of Artificial Sequence: Synthetic oligonucleotide
  Target: LAMA2; (-) strand; PAM type: YTN; PAM sequence: CTT
tctagttctttgtgtacaaa

SEQ ID NO: 238052 - DNA, 20 bp, Artificial Sequence
  Description of Artificial Sequence: Synthetic oligonucleotide
  Target: LAMA2; (-) strand; PAM type: YTN; PAM sequence: CTA
ccctttctagttctttgtgt

SEQ ID NO: 238053 - DNA, 20 bp, Artificial Sequence
  Description of Artificial Sequence: Synthetic oligonucleotide
  Target: LAMA2; (-) strand; PAM type: YTN; PAM sequence: TTC
agactaccctttctagttct

SEQ ID NO: 238054 - DNA, 20 bp, Artificial Sequence
  Description of Artificial Sequence: Synthetic oligonucleotide
  Target: LAMA2; (-) strand; PAM type: YTN; PAM sequence: TTT
cagactaccctttctagttc

SEQ ID NO: 238055 - DNA, 20 bp, Artificial Sequence
  Description of Artificial Sequence: Synthetic oligonucleotide
  Target: LAMA2; (-) strand; PAM type: YTN; PAM sequence: TTA
tttcagactaccctttctag

SEQ ID NO: 238056 - DNA, 20 bp, Artificial Sequence
  Description of Artificial Sequence: Synthetic oligonucleotide
  Target: LAMA2; (-) strand; PAM type: YTN; PAM sequence: TTT
atttcagactaccctttcta

SEQ ID NO: 238057 - DNA, 20 bp, Artificial Sequence
  Description of Artificial Sequence: Synthetic oligonucleotide
  Target: LAMA2; (-) strand; PAM type: YTN; PAM sequence: TTA
tgaatacaaatttatttcag

SEQ ID NO: 238058 - DNA, 20 bp, Artificial Sequence
  Description of Artificial Sequence: Synthetic oligonucleotide
  Target: LAMA2; (-) strand; PAM type: YTN; PAM sequence: TTT
atgaatacaaatttatttca

SEQ ID NO: 238059 - DNA, 20 bp, Artificial Sequence
  Description of Artificial Sequence: Synthetic oligonucleotide
  Target: LAMA2; (-) strand; PAM type: YTN; PAM sequence: TTT
tatgaatacaaatttatttc

SEQ ID NO: 238060 - DNA, 20 bp, Artificial Sequence
  Description of Artificial Sequence: Synthetic oligonucleotide
  Target: LAMA2; (-) strand; PAM type: YTN; PAM sequence: TTT
ttatgaatacaaatttattt

SEQ ID NO: 238061 - DNA, 20 bp, Artificial Sequence
  Description of Artificial Sequence: Synthetic oligonucleotide
  Target: LAMA2; (-) strand; PAM type: YTN; PAM sequence: TTA
tgtgataagaatatgatcac

SEQ ID NO: 238062 - DNA, 20 bp, Artificial Sequence
  Description of Artificial Sequence: Synthetic oligonucleotide
  Target: LAMA2; (-) strand; PAM type: YTN; PAM sequence: TTT
atgtgataagaatatgatca

SEQ ID NO: 238063 - DNA, 20 bp, Artificial Sequence
  Description of Artificial Sequence: Synthetic oligonucleotide
  Target: LAMA2; (-) strand; PAM type: YTN; PAM sequence: TTA
tgatttatgtgataagaata

SEQ ID NO: 238064 - DNA, 20 bp, Artificial Sequence
  Description of Artificial Sequence: Synthetic oligonucleotide
  Target: LAMA2; (-) strand; PAM type: YTN; PAM sequence: TTT
atgatttatgtgataagaat

SEQ ID NO: 238065 - DNA, 20 bp, Artificial Sequence
  Description of Artificial Sequence: Synthetic oligonucleotide
  Target: LAMA2; (-) strand; PAM type: YTN; PAM sequence: TTT
tatgatttatgtgataagaa

SEQ ID NO: 238066 - DNA, 20 bp, Artificial Sequence
  Description of Artificial Sequence: Synthetic oligonucleotide
  Target: LAMA2; (-) strand; PAM type: YTN; PAM sequence: TTT
ttatgatttatgtgataaga

SEQ ID NO: 238067 - DNA, 20 bp, Artificial Sequence
  Description of Artificial Sequence: Synthetic oligonucleotide
  Target: LAMA2; (-) strand; PAM type: YTN; PAM sequence: TTA
aacatatttttatgatttat

SEQ ID NO: 238068 - DNA, 20 bp, Artificial Sequence
  Description of Artificial Sequence: Synthetic oligonucleotide
  Target: LAMA2; (-) strand; PAM type: YTN; PAM sequence: TTT
aaacatatttttatgattta

SEQ ID NO: 238069 - DNA, 20 bp, Artificial Sequence
  Description of Artificial Sequence: Synthetic oligonucleotide
  Target: LAMA2; (-) strand; PAM type: YTN; PAM sequence: TTT
taaacatatttttatgattt

SEQ ID NO: 238070 - DNA, 20 bp, Artificial Sequence
  Description of Artificial Sequence: Synthetic oligonucleotide
  Target: LAMA2; (-) strand; PAM type: YTN; PAM sequence: TTG
tacattttaaacatattttt

SEQ ID NO: 238071 - DNA, 20 bp, Artificial Sequence
  Description of Artificial Sequence: Synthetic oligonucleotide
  Target: LAMA2; (-) strand; PAM type: YTN; PAM sequence: TTA
taattgtacattttaaacat

SEQ ID NO: 238072 - DNA, 20 bp, Artificial Sequence
  Description of Artificial Sequence: Synthetic oligonucleotide
  Target: LAMA2; (-) strand; PAM type: YTN; PAM sequence: TTT
ataattgtacattttaaaca

SEQ ID NO: 238073 - DNA, 20 bp, Artificial Sequence
  Description of Artificial Sequence: Synthetic oligonucleotide
  Target: LAMA2; (-) strand; PAM type: YTN; PAM sequence: TTT
tataattgtacattttaaac

SEQ ID NO: 238074 - DNA, 20 bp, Artificial Sequence
  Description of Artificial Sequence: Synthetic oligonucleotide
  Target: LAMA2; (-) strand; PAM type: YTN; PAM sequence: CTT
ttataattgtacattttaaa

SEQ ID NO: 238075 - DNA, 20 bp, Artificial Sequence
  Description of Artificial Sequence: Synthetic oligonucleotide
  Target: LAMA2; (-) strand; PAM type: YTN; PAM sequence: CTA
atcatgcttttataattgta

SEQ ID NO: 238076 - DNA, 20 bp, Artificial Sequence
  Description of Artificial Sequence: Synthetic oligonucleotide
  Target: LAMA2; (-) strand; PAM type: YTN; PAM sequence: TTC
taatcatgcttttataattg

SEQ ID NO: 238077 - DNA, 20 bp, Artificial Sequence
  Description of Artificial Sequence: Synthetic oligonucleotide
  Target: LAMA2; (-) strand; PAM type: YTN; PAM sequence: CTT
ctaatcatgcttttataatt

SEQ ID NO: 238078 - DNA, 20 bp, Artificial Sequence
  Description of Artificial Sequence: Synthetic oligonucleotide
  Target: LAMA2; (-) strand; PAM type: YTN; PAM sequence: TTC
aatcttctaatcatgctttt

SEQ ID NO: 238079 - DNA, 20 bp, Artificial Sequence
  Description of Artificial Sequence: Synthetic oligonucleotide
  Target: LAMA2; (-) strand; PAM type: YTN; PAM sequence: CTT
caatcttctaatcatgcttt

SEQ ID NO: 238080 - DNA, 20 bp, Artificial Sequence
  Description of Artificial Sequence: Synthetic oligonucleotide
  Target: LAMA2; (-) strand; PAM type: YTN; PAM sequence: TTC
ttcaatcttctaatcatgct

SEQ ID NO: 238081 - DNA, 20 bp, Artificial Sequence
  Description of Artificial Sequence: Synthetic oligonucleotide
  Target: LAMA2; (-) strand; PAM type: YTN; PAM sequence: TTA
ttcttcaatcttctaatcat

SEQ ID NO: 238082 - DNA, 20 bp, Artificial Sequence
  Description of Artificial Sequence: Synthetic oligonucleotide
  Target: LAMA2; (-) strand; PAM type: YTN; PAM sequence: TTT
attcttcaatcttctaatca

SEQ ID NO: 238083 - DNA, 20 bp, Artificial Sequence
  Description of Artificial Sequence: Synthetic oligonucleotide
  Target: LAMA2; (-) strand; PAM type: YTN; PAM sequence: TTG
tttattcttcaatcttctaa

SEQ ID NO: 238084 - DNA, 20 bp, Artificial Sequence
  Description of Artificial Sequence: Synthetic oligonucleotide
  Target: LAMA2; (-) strand; PAM type: YTN; PAM sequence: TTT
gtttattcttcaatcttcta

SEQ ID NO: 238085 - DNA, 20 bp, Artificial Sequence
  Description of Artificial Sequence: Synthetic oligonucleotide
  Target: LAMA2; (-) strand; PAM type: YTN; PAM sequence: CTT
tgtttattcttcaatcttct

SEQ ID NO: 238086 - DNA, 20 bp, Artificial Sequence
  Description of Artificial Sequence: Synthetic oligonucleotide
  Target: LAMA2; (-) strand; PAM type: YTN; PAM sequence: TTC
tttgtttattcttcaatctt

SEQ ID NO: 238087 - DNA, 20 bp, Artificial Sequence
  Description of Artificial Sequence: Synthetic oligonucleotide
  Target: LAMA2; (-) strand; PAM type: YTN; PAM sequence: CTT
ctttgtttattcttcaatct

SEQ ID NO: 238088 - DNA, 20 bp, Artificial Sequence
  Description of Artificial Sequence: Synthetic oligonucleotide
  Target: LAMA2; (-) strand; PAM type: YTN; PAM sequence: TTC
cttctttgtttattcttcaa

SEQ ID NO: 238089 - DNA, 20 bp, Artificial Sequence
  Description of Artificial Sequence: Synthetic oligonucleotide
  Target: LAMA2; (-) strand; PAM type: YTN; PAM sequence: CTA
ttccttctttgtttattctt

SEQ ID NO: 238090 - DNA, 20 bp, Artificial Sequence
  Description of Artificial Sequence: Synthetic oligonucleotide
  Target: LAMA2; (-) strand; PAM type: YTN; PAM sequence: TTC
tattccttctttgtttattc

SEQ ID NO: 238091 - DNA, 20 bp, Artificial Sequence
  Description of Artificial Sequence: Synthetic oligonucleotide
  Target: LAMA2; (-) strand; PAM type: YTN; PAM sequence: TTT
ctattccttctttgtttatt

SEQ ID NO: 238092 - DNA, 20 bp, Artificial Sequence
  Description of Artificial Sequence: Synthetic oligonucleotide
  Target: LAMA2; (-) strand; PAM type: YTN; PAM sequence: TTT
tctattccttctttgtttat

SEQ ID NO: 238093 - DNA, 20 bp, Artificial Sequence
  Description of Artificial Sequence: Synthetic oligonucleotide
  Target: LAMA2; (-) strand; PAM type: YTN; PAM sequence: TTT
ttctattccttctttgttta

SEQ ID NO: 238094 - DNA, 20 bp, Artificial Sequence
  Description of Artificial Sequence: Synthetic oligonucleotide
  Target: LAMA2; (-) strand; PAM type: YTN; PAM sequence: TTT
tttctattccttctttgttt

SEQ ID NO: 238095 - DNA, 20 bp, Artificial Sequence
  Description of Artificial Sequence: Synthetic oligonucleotide
  Target: LAMA2; (-) strand; PAM type: YTN; PAM sequence: CTT
ttttctattccttctttgtt

SEQ ID NO: 238096 - DNA, 20 bp, Artificial Sequence
  Description of Artificial Sequence: Synthetic oligonucleotide
  Target: LAMA2; (-) strand; PAM type: YTN; PAM sequence: TTA
cttttttctattccttcttt

SEQ ID NO: 238097 - DNA, 20 bp, Artificial Sequence
  Description of Artificial Sequence: Synthetic oligonucleotide
  Target: LAMA2; (-) strand; PAM type: YTN; PAM sequence: TTA
tattacttttttctattcct

SEQ ID NO: 238098 - DNA, 20 bp, Artificial Sequence
  Description of Artificial Sequence: Synthetic oligonucleotide
  Target: LAMA2; (-) strand; PAM type: YTN; PAM sequence: TTT
atattacttttttctattcc

SEQ ID NO: 238099 - DNA, 20 bp, Artificial Sequence
  Description of Artificial Sequence: Synthetic oligonucleotide
  Target: LAMA2; (-) strand; PAM type: YTN; PAM sequence: TTT
tatattacttttttctattc

SEQ ID NO: 238100 - DNA, 20 bp, Artificial Sequence
  Description of Artificial Sequence: Synthetic oligonucleotide
  Target: LAMA2; (-) strand; PAM type: YTN; PAM sequence: CTA
ttttatattacttttttcta

SEQ ID NO: 238101 - DNA, 20 bp, Artificial Sequence
  Description of Artificial Sequence: Synthetic oligonucleotide
  Target: LAMA2; (-) strand; PAM type: YTN; PAM sequence: TTA
atatagcgtctattttatat

SEQ ID NO: 238102 - DNA, 20 bp, Artificial Sequence
  Description of Artificial Sequence: Synthetic oligonucleotide
  Target: LAMA2; (-) strand; PAM type: YTN; PAM sequence: TTT
aatatagcgtctattttata

SEQ ID NO: 238103 - DNA, 20 bp, Artificial Sequence
  Description of Artificial Sequence: Synthetic oligonucleotide
  Target: LAMA2; (-) strand; PAM type: YTN; PAM sequence: TTT
taatatagcgtctattttat

SEQ ID NO: 238104 - DNA, 20 bp, Artificial Sequence
  Description of Artificial Sequence: Synthetic oligonucleotide
  Target: LAMA2; (-) strand; PAM type: YTN; PAM sequence: TTG
aattttaatatagcgtctat

SEQ ID NO: 238105 - DNA, 20 bp, Artificial Sequence
  Description of Artificial Sequence: Synthetic oligonucleotide
  Target: LAMA2; (-) strand; PAM type: YTN; PAM sequence: TTT
gaattttaatatagcgtcta

SEQ ID NO: 238106 - DNA, 20 bp, Artificial Sequence
  Description of Artificial Sequence: Synthetic oligonucleotide
  Target: LAMA2; (-) strand; PAM type: YTN; PAM sequence: TTT
tgaattttaatatagcgtct

SEQ ID NO: 238107 - DNA, 20 bp, Artificial Sequence
  Description of Artificial Sequence: Synthetic oligonucleotide
  Target: LAMA2; (-) strand; PAM type: YTN; PAM sequence: CTT
ttgaattttaatatagcgtc

SEQ ID NO: 238108 - DNA, 20 bp, Artificial Sequence
  Description of Artificial Sequence: Synthetic oligonucleotide
  Target: LAMA2; (-) strand; PAM type: YTN; PAM sequence: TTA
cttttgaattttaatatagc

SEQ ID NO: 238109 - DNA, 20 bp, Artificial Sequence
  Description of Artificial Sequence: Synthetic oligonucleotide
  Target: LAMA2; (-) strand; PAM type: YTN; PAM sequence: CTG
gttacttttgaattttaata

SEQ ID NO: 238110 - DNA, 20 bp, Artificial Sequence
  Description of Artificial Sequence: Synthetic oligonucleotide
  Target: LAMA2; (-) strand; PAM type: YTN; PAM sequence: TTC
caaacctggttacttttgaa

SEQ ID NO: 238111 - DNA, 20 bp, Artificial Sequence
  Description of Artificial Sequence: Synthetic oligonucleotide
  Target: LAMA2; (-) strand; PAM type: YTN; PAM sequence: TTT
ccaaacctggttacttttga

SEQ ID NO: 238112 - DNA, 20 bp, Artificial Sequence
  Description of Artificial Sequence: Synthetic oligonucleotide
  Target: LAMA2; (-) strand; PAM type: YTN; PAM sequence: TTT
tccaaacctggttacttttg

SEQ ID NO: 238113 - DNA, 20 bp, Artificial Sequence
  Description of Artificial Sequence: Synthetic oligonucleotide
  Target: LAMA2; (-) strand; PAM type: YTN; PAM sequence: CTT
ttccaaacctggttactttt

SEQ ID NO: 238114 - DNA, 20 bp, Artificial Sequence
  Description of Artificial Sequence: Synthetic oligonucleotide
  Target: LAMA2; (-) strand; PAM type: YTN; PAM sequence: TTC
ttttccaaacctggttactt

SEQ ID NO: 238115 - DNA, 20 bp, Artificial Sequence
  Description of Artificial Sequence: Synthetic oligonucleotide
  Target: LAMA2; (-) strand; PAM type: YTN; PAM sequence: TTT
cttttccaaacctggttact

SEQ ID NO: 238116 - DNA, 20 bp, Artificial Sequence
  Description of Artificial Sequence: Synthetic oligonucleotide
  Target: LAMA2; (-) strand; PAM type: YTN; PAM sequence: TTA
tacatgtttcttttccaaac

SEQ ID NO: 238117 - DNA, 20 bp, Artificial Sequence
  Description of Artificial Sequence: Synthetic oligonucleotide
  Target: LAMA2; (-) strand; PAM type: YTN; PAM sequence: CTG
gaagtaaattatacatgttt

SEQ ID NO: 238118 - DNA, 20 bp, Artificial Sequence
  Description of Artificial Sequence: Synthetic oligonucleotide
  Target: LAMA2; (-) strand; PAM type: YTN; PAM sequence: TTC
tggaagtaaattatacatgt

SEQ ID NO: 238119 - DNA, 20 bp, Artificial Sequence
  Description of Artificial Sequence: Synthetic oligonucleotide
  Target: LAMA2; (-) strand; PAM type: YTN; PAM sequence: TTT
ctggaagtaaattatacatg

SEQ ID NO: 238120 - DNA, 20 bp, Artificial Sequence
  Description of Artificial Sequence: Synthetic oligonucleotide
  Target: LAMA2; (-) strand; PAM type: YTN; PAM sequence: TTC
atttctggaagtaaattata

SEQ ID NO: 238121 - DNA, 20 bp, Artificial Sequence
  Description of Artificial Sequence: Synthetic oligonucleotide
  Target: LAMA2; (-) strand; PAM type: YTN; PAM sequence: TTT
catttctggaagtaaattat

SEQ ID NO: 238122 - DNA, 20 bp, Artificial Sequence
  Description of Artificial Sequence: Synthetic oligonucleotide
  Target: LAMA2; (-) strand; PAM type: YTN; PAM sequence: TTT
tcatttctggaagtaaatta

SEQ ID NO: 238123 - DNA, 20 bp, Artificial Sequence
  Description of Artificial Sequence: Synthetic oligonucleotide
  Target: LAMA2; (-) strand; PAM type: YTN; PAM sequence: TTT
ttcatttctggaagtaaatt

SEQ ID NO: 238124 - DNA, 20 bp, Artificial Sequence
  Description of Artificial Sequence: Synthetic oligonucleotide
  Target: LAMA2; (-) strand; PAM type: YTN; PAM sequence: TTT
tttcatttctggaagtaaat

SEQ ID NO: 238125 - DNA, 20 bp, Artificial Sequence
  Description of Artificial Sequence: Synthetic oligonucleotide
  Target: LAMA2; (-) strand; PAM type: YTN; PAM sequence: TTT
ttttcatttctggaagtaaa

SEQ ID NO: 238126 - DNA, 20 bp, Artificial Sequence
  Description of Artificial Sequence: Synthetic oligonucleotide
  Target: LAMA2; (-) strand; PAM type: YTN; PAM sequence: CTG
catatttttttcatttctgg

SEQ ID NO: 238127 - DNA, 20 bp, Artificial Sequence
  Description of Artificial Sequence: Synthetic oligonucleotide
  Target: LAMA2; (-) strand; PAM type: YTN; PAM sequence: TTC
aatgactgcatatttttttc

SEQ ID NO: 238128 - DNA, 20 bp, Artificial Sequence
  Description of Artificial Sequence: Synthetic oligonucleotide
  Target: LAMA2; (-) strand; PAM type: YTN; PAM sequence: TTT
caatgactgcatattttttt

SEQ ID NO: 238129 - DNA, 20 bp, Artificial Sequence
  Description of Artificial Sequence: Synthetic oligonucleotide
  Target: LAMA2; (-) strand; PAM type: YTN; PAM sequence: TTA
atttcaatgactgcatattt

SEQ ID NO: 238130 - DNA, 20 bp, Artificial Sequence
  Description of Artificial Sequence: Synthetic oligonucleotide
  Target: LAMA2; (-) strand; PAM type: YTN; PAM sequence: TTT
aatttcaatgactgcatatt

SEQ ID NO: 238131 - DNA, 20 bp, Artificial Sequence
  Description of Artificial Sequence: Synthetic oligonucleotide
  Target: LAMA2; (-) strand; PAM type: YTN; PAM sequence: TTT
taatttcaatgactgcatat

SEQ ID NO: 238132 - DNA, 20 bp, Artificial Sequence
  Description of Artificial Sequence: Synthetic oligonucleotide
  Target: LAMA2; (-) strand; PAM type: YTN; PAM sequence: TTT
ttaatttcaatgactgcata

SEQ ID NO: 238133 - DNA, 20 bp, Artificial Sequence
  Description of Artificial Sequence: Synthetic oligonucleotide
  Target: LAMA2; (-) strand; PAM type: YTN; PAM sequence: TTG
aatttttaatttcaatgact

SEQ ID NO: 238134 - DNA, 20 bp, Artificial Sequence
  Description of Artificial Sequence: Synthetic oligonucleotide
  Target: LAMA2; (-) strand; PAM type: YTN; PAM sequence: TTA
acccaatcattgaattttta

SEQ ID NO: 238135 - DNA, 20 bp, Artificial Sequence
  Description of Artificial Sequence: Synthetic oligonucleotide
  Target: LAMA2; (-) strand; PAM type: YTN; PAM sequence: TTT
aacccaatcattgaattttt

SEQ ID NO: 238136 - DNA, 20 bp, Artificial Sequence
  Description of Artificial Sequence: Synthetic oligonucleotide
  Target: LAMA2; (-) strand; PAM type: YTN; PAM sequence: TTG
tttaacccaatcattgaatt

SEQ ID NO: 238137 - DNA, 20 bp, Artificial Sequence
  Description of Artificial Sequence: Synthetic oligonucleotide
  Target: LAMA2; (-) strand; PAM type: YTN; PAM sequence: CTT
gtttaacccaatcattgaat

SEQ ID NO: 238138 - DNA, 20 bp, Artificial Sequence
  Description of Artificial Sequence: Synthetic oligonucleotide
  Target: LAMA2; (-) strand; PAM type: YTN; PAM sequence: CTC
ttgtttaacccaatcattga

SEQ ID NO: 238139 - DNA, 20 bp, Artificial Sequence
  Description of Artificial Sequence: Synthetic oligonucleotide
  Target: LAMA2; (-) strand; PAM type: YTN; PAM sequence: CTC
atctcttgtttaacccaatc

SEQ ID NO: 238140 - DNA, 20 bp, Artificial Sequence
  Description of Artificial Sequence: Synthetic oligonucleotide
  Target: LAMA2; (-) strand; PAM type: YTN; PAM sequence: TTC
tcatctcttgtttaacccaa

SEQ ID NO: 238141 - DNA, 20 bp, Artificial Sequence
  Description of Artificial Sequence: Synthetic oligonucleotide
  Target: LAMA2; (-) strand; PAM type: YTN; PAM sequence: TTT
ctcatctcttgtttaaccca

SEQ ID NO: 238142 - DNA, 20 bp, Artificial Sequence
  Description of Artificial Sequence: Synthetic oligonucleotide
  Target: LAMA2; (-) strand; PAM type: YTN; PAM sequence: CTG
cagtttctcatctcttgttt

SEQ ID NO: 238143 - DNA, 20 bp, Artificial Sequence
  Description of Artificial Sequence: Synthetic oligonucleotide
  Target: LAMA2; (-) strand; PAM type: YTN; PAM sequence: CTA
tcctgcagtttctcatctct

SEQ ID NO: 238144 - DNA, 20 bp, Artificial Sequence
  Description of Artificial Sequence: Synthetic oligonucleotide
  Target: LAMA2; (-) strand; PAM type: YTN; PAM sequence: TTC
tatcctgcagtttctcatct

SEQ ID NO: 238145 - DNA, 20 bp, Artificial Sequence
  Description of Artificial Sequence: Synthetic oligonucleotide
  Target: LAMA2; (-) strand; PAM type: YTN; PAM sequence: TTT
ctatcctgcagtttctcatc

SEQ ID NO: 238146 - DNA, 20 bp, Artificial Sequence
  Description of Artificial Sequence: Synthetic oligonucleotide
  Target: LAMA2; (-) strand; PAM type: YTN; PAM sequence: TTT
tctatcctgcagtttctcat

SEQ ID NO: 238147 - DNA, 20 bp, Artificial Sequence
  Description of Artificial Sequence: Synthetic oligonucleotide
  Target: LAMA2; (-) strand; PAM type: YTN; PAM sequence: CTG
attttctatcctgcagtttc

SEQ ID NO: 238148 - DNA, 20 bp, Artificial Sequence
  Description of Artificial Sequence: Synthetic oligonucleotide
  Target: LAMA2; (-) strand; PAM type: YTN; PAM sequence: TTC
tgattttctatcctgcagtt

SEQ ID NO: 238149 - DNA, 20 bp, Artificial Sequence
  Description of Artificial Sequence: Synthetic oligonucleotide
  Target: LAMA2; (-) strand; PAM type: YTN; PAM sequence: TTT
ctgattttctatcctgcagt

SEQ ID NO: 238150 - DNA, 20 bp, Artificial Sequence
  Description of Artificial Sequence: Synthetic oligonucleotide
  Target: LAMA2; (-) strand; PAM type: YTN; PAM sequence: CTA
tatttctgattttctatcct

SEQ ID NO: 238151 - DNA, 20 bp, Artificial Sequence
  Description of Artificial Sequence: Synthetic oligonucleotide
  Target: LAMA2; (-) strand; PAM type: YTN; PAM sequence: TTC
aggcctatatttctgatttt

SEQ ID NO: 238152 - DNA, 20 bp, Artificial Sequence
  Description of Artificial Sequence: Synthetic oligonucleotide
  Target: LAMA2; (-) strand; PAM type: YTN; PAM sequence: TTT
caggcctatatttctgattt

SEQ ID NO: 238153 - DNA, 20 bp, Artificial Sequence
  Description of Artificial Sequence: Synthetic oligonucleotide
  Target: LAMA2; (-) strand; PAM type: YTN; PAM sequence: TTT
tcaggcctatatttctgatt

SEQ ID NO: 238154 - DNA, 20 bp, Artificial Sequence
  Description of Artificial Sequence: Synthetic oligonucleotide
  Target: LAMA2; (-) strand; PAM type: YTN; PAM sequence: TTT
ttcaggcctatatttctgat

SEQ ID NO: 238155 - DNA, 20 bp, Artificial Sequence
  Description of Artificial Sequence: Synthetic oligonucleotide
  Target: LAMA2; (-) strand; PAM type: YTN; PAM sequence: TTT
tttcaggcctatatttctga

SEQ ID NO: 238156 - DNA, 20 bp, Artificial Sequence
  Description of Artificial Sequence: Synthetic oligonucleotide
  Target: LAMA2; (-) strand; PAM type: YTN; PAM sequence: TTA
taggtaattttttcaggcct

SEQ ID NO: 238157 - DNA, 20 bp, Artificial Sequence
  Description of Artificial Sequence: Synthetic oligonucleotide
  Target: LAMA2; (-) strand; PAM type: YTN; PAM sequence: TTT
ataggtaattttttcaggcc

SEQ ID NO: 238158 - DNA, 20 bp, Artificial Sequence
  Description of Artificial Sequence: Synthetic oligonucleotide
  Target: LAMA2; (-) strand; PAM type: YTN; PAM sequence: CTA
tgtcaatttataggtaattt

SEQ ID NO: 238159 - DNA, 20 bp, Artificial Sequence
  Description of Artificial Sequence: Synthetic oligonucleotide
  Target: LAMA2; (-) strand; PAM type: YTN; PAM sequence: TTC
cctatgtcaatttataggta

SEQ ID NO: 238160 - DNA, 20 bp, Artificial Sequence
  Description of Artificial Sequence: Synthetic oligonucleotide
  Target: LAMA2; (-) strand; PAM type: YTN; PAM sequence: CTT
ccctatgtcaatttataggt

SEQ ID NO: 238161 - DNA, 20 bp, Artificial Sequence
  Description of Artificial Sequence: Synthetic oligonucleotide
  Target: LAMA2; (-) strand; PAM type: YTN; PAM sequence: TTA
cttccctatgtcaatttata

SEQ ID NO: 238162 - DNA, 20 bp, Artificial Sequence
  Description of Artificial Sequence: Synthetic oligonucleotide
  Target: LAMA2; (-) strand; PAM type: YTN; PAM sequence: TTT
acttccctatgtcaatttat

SEQ ID NO: 238163 - DNA, 20 bp, Artificial Sequence
  Description of Artificial Sequence: Synthetic oligonucleotide
  Target: LAMA2; (-) strand; PAM type: YTN; PAM sequence: TTA
tttacttccctatgtcaatt

SEQ ID NO: 238164 - DNA, 20 bp, Artificial Sequence
  Description of Artificial Sequence: Synthetic oligonucleotide
  Target: LAMA2; (-) strand; PAM type: YTN; PAM sequence: TTT
atttacttccctatgtcaat

SEQ ID NO: 238165 - DNA, 20 bp, Artificial Sequence
  Description of Artificial Sequence: Synthetic oligonucleotide
  Target: LAMA2; (-) strand; PAM type: YTN; PAM sequence: TTA
gcatcatatttatttacttc

SEQ ID NO: 238166 - DNA, 20 bp, Artificial Sequence
  Description of Artificial Sequence: Synthetic oligonucleotide
  Target: LAMA2; (-) strand; PAM type: YTN; PAM sequence: CTG
tgagtcagttagcatcatat

SEQ ID NO: 238167 - DNA, 20 bp, Artificial Sequence
  Description of Artificial Sequence: Synthetic oligonucleotide
  Target: LAMA2; (-) strand; PAM type: YTN; PAM sequence: TTC
tgtgagtcagttagcatcat

SEQ ID NO: 238168 - DNA, 20 bp, Artificial Sequence
  Description of Artificial Sequence: Synthetic oligonucleotide
  Target: LAMA2; (-) strand; PAM type: YTN; PAM sequence: TTA
caattctgtgagtcagttag

SEQ ID NO: 238169 - DNA, 20 bp, Artificial Sequence
  Description of Artificial Sequence: Synthetic oligonucleotide
  Target: LAMA2; (-) strand; PAM type: YTN; PAM sequence: TTT
acaattctgtgagtcagtta

SEQ ID NO: 238170 - DNA, 20 bp, Artificial Sequence
  Description of Artificial Sequence: Synthetic oligonucleotide
  Target: LAMA2; (-) strand; PAM type: YTN; PAM sequence: TTT
tacaattctgtgagtcagtt

SEQ ID NO: 238171 - DNA, 20 bp, Artificial Sequence
  Description of Artificial Sequence: Synthetic oligonucleotide
  Target: LAMA2; (-) strand; PAM type: YTN; PAM sequence: TTC
aattttacaattctgtgagt

SEQ ID NO: 238172 - DNA, 20 bp, Artificial Sequence
  Description of Artificial Sequence: Synthetic oligonucleotide
  Target: LAMA2; (-) strand; PAM type: YTN; PAM sequence: CTG
ttcaattttacaattctgtg

SEQ ID NO: 238173 - DNA, 20 bp, Artificial Sequence
  Description of Artificial Sequence: Synthetic oligonucleotide
  Target: LAMA2; (-) strand; PAM type: YTN; PAM sequence: TTC
tgttcaattttacaattctg

SEQ ID NO: 238174 - DNA, 20 bp, Artificial Sequence
  Description of Artificial Sequence: Synthetic oligonucleotide
  Target: LAMA2; (-) strand; PAM type: YTN; PAM sequence: CTT
ctgttcaattttacaattct

SEQ ID NO: 238175 - DNA, 20 bp, Artificial Sequence
  Description of Artificial Sequence: Synthetic oligonucleotide
  Target: LAMA2; (-) strand; PAM type: YTN; PAM sequence: CTA
aacttctgttcaattttaca

SEQ ID NO: 238176 - DNA, 20 bp, Artificial Sequence
  Description of Artificial Sequence: Synthetic oligonucleotide
  Target: LAMA2; (-) strand; PAM type: YTN; PAM sequence: CTG
ctaaacttctgttcaatttt

SEQ ID NO: 238177 - DNA, 20 bp, Artificial Sequence
  Description of Artificial Sequence: Synthetic oligonucleotide
  Target: LAMA2; (-) strand; PAM type: YTN; PAM sequence: TTC
tgctaaacttctgttcaatt

SEQ ID NO: 238178 - DNA, 20 bp, Artificial Sequence
  Description of Artificial Sequence: Synthetic oligonucleotide
  Target: LAMA2; (-) strand; PAM type: YTN; PAM sequence: CTT
ctgctaaacttctgttcaat

SEQ ID NO: 238179 - DNA, 20 bp, Artificial Sequence
  Description of Artificial Sequence: Synthetic oligonucleotide
  Target: LAMA2; (-) strand; PAM type: YTN; PAM sequence: TTG
gcaacttctgctaaacttct

SEQ ID NO: 238180 - DNA, 20 bp, Artificial Sequence
  Description of Artificial Sequence: Synthetic oligonucleotide
  Target: LAMA2; (-) strand; PAM type: YTN; PAM sequence: TTT
ggcaacttctgctaaacttc

SEQ ID NO: 238181 - DNA, 20 bp, Artificial Sequence
  Description of Artificial Sequence: Synthetic oligonucleotide
  Target: LAMA2; (-) strand; PAM type: YTN; PAM sequence: CTT
tggcaacttctgctaaactt

SEQ ID NO: 238182 - DNA, 20 bp, Artificial Sequence
  Description of Artificial Sequence: Synthetic oligonucleotide
  Target: LAMA2; (-) strand; PAM type: YTN; PAM sequence: TTC
tttggcaacttctgctaaac

SEQ ID NO: 238183 - DNA, 20 bp, Artificial Sequence
  Description of Artificial Sequence: Synthetic oligonucleotide
  Target: LAMA2; (-) strand; PAM type: YTN; PAM sequence: CTT
ctttggcaacttctgctaaa

SEQ ID NO: 238184 - DNA, 20 bp, Artificial Sequence
  Description of Artificial Sequence: Synthetic oligonucleotide
  Target: LAMA2; (-) strand; PAM type: YTN; PAM sequence: CTC
ttctttggcaacttctgcta

SEQ ID NO: 238185 - DNA, 20 bp, Artificial Sequence
  Description of Artificial Sequence: Synthetic oligonucleotide
  Target: LAMA2; (-) strand; PAM type: YTN; PAM sequence: CTA
atctcttctttggcaacttc

SEQ ID NO: 238186 - DNA, 20 bp, Artificial Sequence
  Description of Artificial Sequence: Synthetic oligonucleotide
  Target: LAMA2; (-) strand; PAM type: YTN; PAM sequence: TTC
taatctcttctttggcaact

SEQ ID NO: 238187 - DNA, 20 bp, Artificial Sequence
  Description of Artificial Sequence: Synthetic oligonucleotide
  Target: LAMA2; (-) strand; PAM type: YTN; PAM sequence: CTT
ctaatctcttctttggcaac

SEQ ID NO: 238188 - DNA, 20 bp, Artificial Sequence
  Description of Artificial Sequence: Synthetic oligonucleotide
  Target: LAMA2; (-) strand; PAM type: YTN; PAM sequence: TTC
ttctaatctcttctttggca

SEQ ID NO: 238189 - DNA, 20 bp, Artificial Sequence
  Description of Artificial Sequence: Synthetic oligonucleotide
  Target: LAMA2; (-) strand; PAM type: YTN; PAM sequence: CTT
cttctaatctcttctttggc

SEQ ID NO: 238190 - DNA, 20 bp, Artificial Sequence
  Description of Artificial Sequence: Synthetic oligonucleotide
  Target: LAMA2; (-) strand; PAM type: YTN; PAM sequence: CTC
aacttcttctaatctcttct

SEQ ID NO: 238191 - DNA, 20 bp, Artificial Sequence
  Description of Artificial Sequence: Synthetic oligonucleotide
  Target: LAMA2; (-) strand; PAM type: YTN; PAM sequence: TTC
cctcaacttcttctaatctc

SEQ ID NO: 238192 - DNA, 20 bp, Artificial Sequence
  Description of Artificial Sequence: Synthetic oligonucleotide
  Target: LAMA2; (-) strand; PAM type: YTN; PAM sequence: TTT
ccctcaacttcttctaatct

SEQ ID NO: 238193 - DNA, 20 bp, Artificial Sequence
  Description of Artificial Sequence: Synthetic oligonucleotide
  Target: LAMA2; (-) strand; PAM type: YTN; PAM sequence: TTG
tttccctcaacttcttctaa

SEQ ID NO: 238194 - DNA, 20 bp, Artificial Sequence
  Description of Artificial Sequence: Synthetic oligonucleotide
  Target: LAMA2; (-) strand; PAM type: YTN; PAM sequence: TTG
aatattgtttccctcaactt

SEQ ID NO: 238195 - DNA, 20 bp, Artificial Sequence
  Description of Artificial Sequence: Synthetic oligonucleotide
  Target: LAMA2; (-) strand; PAM type: YTN; PAM sequence: TTT
gaatattgtttccctcaact

SEQ ID NO: 238196 - DNA, 20 bp, Artificial Sequence
  Description of Artificial Sequence: Synthetic oligonucleotide
  Target: LAMA2; (-) strand; PAM type: YTN; PAM sequence: TTT
tgaatattgtttccctcaac

SEQ ID NO: 238197 - DNA, 20 bp, Artificial Sequence
  Description of Artificial Sequence: Synthetic oligonucleotide
  Target: LAMA2; (-) strand; PAM type: YTN; PAM sequence: TTT
ttgaatattgtttccctcaa

SEQ ID NO: 238198 - DNA, 20 bp, Artificial Sequence
  Description of Artificial Sequence: Synthetic oligonucleotide
  Target: LAMA2; (-) strand; PAM type: YTN; PAM sequence: TTT
tttgaatattgtttccctca

SEQ ID NO: 238199 - DNA, 20 bp, Artificial Sequence
  Description of Artificial Sequence: Synthetic oligonucleotide
  Target: LAMA2; (-) strand; PAM type: YTN; PAM sequence: TTT
ttttgaatattgtttccctc

SEQ ID NO: 238200 - DNA, 20 bp, Artificial Sequence
  Description of Artificial Sequence: Synthetic oligonucleotide
  Target: LAMA2; (-) strand; PAM type: YTN; PAM sequence: TTA
tttttttgaatattgtttcc

SEQ ID NO: 238201 - DNA, 20 bp, Artificial Sequence
  Description of Artificial Sequence: Synthetic oligonucleotide
  Target: LAMA2; (-) strand; PAM type: YTN; PAM sequence: TTC
attatttttttgaatattgt

SEQ ID NO: 238202 - DNA, 20 bp, Artificial Sequence
  Description of Artificial Sequence: Synthetic oligonucleotide
  Target: LAMA2; (-) strand; PAM type: YTN; PAM sequence: CTT
cattatttttttgaatattg

SEQ ID NO: 238203 - DNA, 20 bp, Artificial Sequence
  Description of Artificial Sequence: Synthetic oligonucleotide
  Target: LAMA2; (-) strand; PAM type: YTN; PAM sequence: CTC
cttcattatttttttgaata

SEQ ID NO: 238204 - DNA, 20 bp, Artificial Sequence
  Description of Artificial Sequence: Synthetic oligonucleotide
  Target: LAMA2; (-) strand; PAM type: YTN; PAM sequence: CTC
tccttcattatttttttgaa

SEQ ID NO: 238205 - DNA, 20 bp, Artificial Sequence
  Description of Artificial Sequence: Synthetic oligonucleotide
  Target: LAMA2; (-) strand; PAM type: YTN; PAM sequence: TTC
tctccttcattatttttttg

SEQ ID NO: 238206 - DNA, 20 bp, Artificial Sequence
  Description of Artificial Sequence: Synthetic oligonucleotide
  Target: LAMA2; (-) strand; PAM type: YTN; PAM sequence: CTT
ctctccttcattattttttt

SEQ ID NO: 238207 - DNA, 20 bp, Artificial Sequence
  Description of Artificial Sequence: Synthetic oligonucleotide
  Target: LAMA2; (-) strand; PAM type: YTN; PAM sequence: TTC
ttctctccttcattattttt

SEQ ID NO: 238208 - DNA, 20 bp, Artificial Sequence
  Description of Artificial Sequence: Synthetic oligonucleotide
  Target: LAMA2; (-) strand; PAM type: YTN; PAM sequence: CTC
atgatcattcttctctcctt

SEQ ID NO: 238209 - DNA, 20 bp, Artificial Sequence
  Description of Artificial Sequence: Synthetic oligonucleotide
  Target: LAMA2; (-) strand; PAM type: YTN; PAM sequence: TTA
actcatgatcattcttctct

SEQ ID NO: 238210 - DNA, 20 bp, Artificial Sequence
  Description of Artificial Sequence: Synthetic oligonucleotide
  Target: LAMA2; (-) strand; PAM type: YTN; PAM sequence: TTT
aactcatgatcattcttctc

SEQ ID NO: 238211 - DNA, 20 bp, Artificial Sequence
  Description of Artificial Sequence: Synthetic oligonucleotide
  Target: LAMA2; (-) strand; PAM type: YTN; PAM sequence: TTT
taactcatgatcattcttct

SEQ ID NO: 238212 - DNA, 20 bp, Artificial Sequence
  Description of Artificial Sequence: Synthetic oligonucleotide
  Target: LAMA2; (-) strand; PAM type: YTN; PAM sequence: TTT
ttaactcatgatcattcttc

SEQ ID NO: 238213 - DNA, 20 bp, Artificial Sequence
  Description of Artificial Sequence: Synthetic oligonucleotide
  Target: LAMA2; (-) strand; PAM type: YTN; PAM sequence: TTA
taatagtttttaactcatga

SEQ ID NO: 238214 - DNA, 20 bp, Artificial Sequence
  Description of Artificial Sequence: Synthetic oligonucleotide
  Target: LAMA2; (-) strand; PAM type: YTN; PAM sequence: TTT
ataatagtttttaactcatg

SEQ ID NO: 238215 - DNA, 20 bp, Artificial Sequence
  Description of Artificial Sequence: Synthetic oligonucleotide
  Target: LAMA2; (-) strand; PAM type: YTN; PAM sequence: CTG
aggatttataatagttttta

SEQ ID NO: 238216 - DNA, 20 bp, Artificial Sequence
  Description of Artificial Sequence: Synthetic oligonucleotide
  Target: LAMA2; (-) strand; PAM type: YTN; PAM sequence: CTC
aaactgaggatttataatag

SEQ ID NO: 238217 - DNA, 20 bp, Artificial Sequence
  Description of Artificial Sequence: Synthetic oligonucleotide
  Target: LAMA2; (-) strand; PAM type: YTN; PAM sequence: TTA
tcatcctcaaactgaggatt

SEQ ID NO: 238218 - DNA, 20 bp, Artificial Sequence
  Description of Artificial Sequence: Synthetic oligonucleotide
  Target: LAMA2; (-) strand; PAM type: YTN; PAM sequence: TTT
atcatcctcaaactgaggat

SEQ ID NO: 238219 - DNA, 20 bp, Artificial Sequence
  Description of Artificial Sequence: Synthetic oligonucleotide
  Target: LAMA2; (-) strand; PAM type: YTN; PAM sequence: TTT
tatcatcctcaaactgagga

SEQ ID NO: 238220 - DNA, 20 bp, Artificial Sequence
  Description of Artificial Sequence: Synthetic oligonucleotide
  Target: LAMA2; (-) strand; PAM type: YTN; PAM sequence: TTT
ttatcatcctcaaactgagg

SEQ ID NO: 238221 - DNA, 20 bp, Artificial Sequence
  Description of Artificial Sequence: Synthetic oligonucleotide
  Target: LAMA2; (-) strand; PAM type: YTN; PAM sequence: TTT
tttatcatcctcaaactgag

SEQ ID NO: 238222 - DNA, 20 bp, Artificial Sequence
  Description of Artificial Sequence: Synthetic oligonucleotide
  Target: LAMA2; (-) strand; PAM type: YTN; PAM sequence: TTA
ttttttatcatcctcaaact

SEQ ID NO: 238223 - DNA, 20 bp, Artificial Sequence
  Description of Artificial Sequence: Synthetic oligonucleotide
  Target: LAMA2; (-) strand; PAM type: YTN; PAM sequence: CTT
attttttatcatcctcaaac

SEQ ID NO: 238224 - DNA, 20 bp, Artificial Sequence
  Description of Artificial Sequence: Synthetic oligonucleotide
  Target: LAMA2; (-) strand; PAM type: YTN; PAM sequence: CTA
ggggtagacttattttttat

SEQ ID NO: 238225 - DNA, 20 bp, Artificial Sequence
  Description of Artificial Sequence: Synthetic oligonucleotide
  Target: LAMA2; (-) strand; PAM type: YTN; PAM sequence: CTA
ctaggggtagacttattttt

SEQ ID NO: 238226 - DNA, 20 bp, Artificial Sequence
  Description of Artificial Sequence: Synthetic oligonucleotide
  Target: LAMA2; (-) strand; PAM type: YTN; PAM sequence: TTC
tactaggggtagacttattt

SEQ ID NO: 238227 - DNA, 20 bp, Artificial Sequence
  Description of Artificial Sequence: Synthetic oligonucleotide
  Target: LAMA2; (-) strand; PAM type: YTN; PAM sequence: TTT
ctactaggggtagacttatt

SEQ ID NO: 238228 - DNA, 20 bp, Artificial Sequence
  Description of Artificial Sequence: Synthetic oligonucleotide
  Target: LAMA2; (-) strand; PAM type: YTN; PAM sequence: TTT
tctactaggggtagacttat

SEQ ID NO: 238229 - DNA, 20 bp, Artificial Sequence
  Description of Artificial Sequence: Synthetic oligonucleotide
  Target: LAMA2; (-) strand; PAM type: YTN; PAM sequence: TTG
acaggttttctactaggggt

SEQ ID NO: 238230 - DNA, 20 bp, Artificial Sequence
  Description of Artificial Sequence: Synthetic oligonucleotide
  Target: LAMA2; (-) strand; PAM type: YTN; PAM sequence: CTG
gttgacaggttttctactag

SEQ ID NO: 238231 - DNA, 20 bp, Artificial Sequence
  Description of Artificial Sequence: Synthetic oligonucleotide
  Target: LAMA2; (-) strand; PAM type: YTN; PAM sequence: TTG
ctggttgacaggttttctac

SEQ ID NO: 238232 - DNA, 20 bp, Artificial Sequence
  Description of Artificial Sequence: Synthetic oligonucleotide
  Target: LAMA2; (-) strand; PAM type: YTN; PAM sequence: CTT
gctggttgacaggttttcta

SEQ ID NO: 238233 - DNA, 20 bp, Artificial Sequence
  Description of Artificial Sequence: Synthetic oligonucleotide
  Target: LAMA2; (-) strand; PAM type: YTN; PAM sequence: TTG
tcttgctggttgacaggttt

SEQ ID NO: 238234 - DNA, 20 bp, Artificial Sequence
  Description of Artificial Sequence: Synthetic oligonucleotide
  Target: LAMA2; (-) strand; PAM type: YTN; PAM sequence: TTT
gtcttgctggttgacaggtt

SEQ ID NO: 238235 - DNA, 20 bp, Artificial Sequence
  Description of Artificial Sequence: Synthetic oligonucleotide
  Target: LAMA2; (-) strand; PAM type: YTN; PAM sequence: CTT
tgtcttgctggttgacaggt

SEQ ID NO: 238236 - DNA, 20 bp, Artificial Sequence
  Description of Artificial Sequence: Synthetic oligonucleotide
  Target: LAMA2; (-) strand; PAM type: YTN; PAM sequence: CTC
tttgtcttgctggttgacag

SEQ ID NO: 238237 - DNA, 20 bp, Artificial Sequence
  Description of Artificial Sequence: Synthetic oligonucleotide
  Target: LAMA2; (-) strand; PAM type: YTN; PAM sequence: TTC
tctttgtcttgctggttgac

SEQ ID NO: 238238 - DNA, 20 bp, Artificial Sequence
  Description of Artificial Sequence: Synthetic oligonucleotide
  Target: LAMA2; (-) strand; PAM type: YTN; PAM sequence: TTT
ctctttgtcttgctggttga

SEQ ID NO: 238239 - DNA, 20 bp, Artificial Sequence
  Description of Artificial Sequence: Synthetic oligonucleotide
  Target: LAMA2; (-) strand; PAM type: YTN; PAM sequence: TTT
tctctttgtcttgctggttg

SEQ ID NO: 238240 - DNA, 20 bp, Artificial Sequence
  Description of Artificial Sequence: Synthetic oligonucleotide
  Target: LAMA2; (-) strand; PAM type: YTN; PAM sequence: TTT
ttctctttgtcttgctggtt

SEQ ID NO: 238241 - DNA, 20 bp, Artificial Sequence
  Description of Artificial Sequence: Synthetic oligonucleotide
  Target: LAMA2; (-) strand; PAM type: YTN; PAM sequence: TTA
atatttttctctttgtcttg

SEQ ID NO: 238242 - DNA, 20 bp, Artificial Sequence
  Description of Artificial Sequence: Synthetic oligonucleotide
  Target: LAMA2; (-) strand; PAM type: YTN; PAM sequence: TTT
aatatttttctctttgtctt

SEQ ID NO: 238243 - DNA, 20 bp, Artificial Sequence
  Description of Artificial Sequence: Synthetic oligonucleotide
  Target: LAMA2; (-) strand; PAM type: YTN; PAM sequence: TTT
taatatttttctctttgtct

SEQ ID NO: 238244 - DNA, 20 bp, Artificial Sequence
  Description of Artificial Sequence: Synthetic oligonucleotide
  Target: LAMA2; (-) strand; PAM type: YTN; PAM sequence: TTG
cccccagttttaatattttt

SEQ ID NO: 238245 - DNA, 20 bp, Artificial Sequence
  Description of Artificial Sequence: Synthetic oligonucleotide
  Target: LAMA2; (-) strand; PAM type: YTN; PAM sequence: TTT
gcccccagttttaatatttt

SEQ ID NO: 238246 - DNA, 20 bp, Artificial Sequence
  Description of Artificial Sequence: Synthetic oligonucleotide
  Target: LAMA2; (-) strand; PAM type: YTN; PAM sequence: CTC
acaataaagatatttgcccc

SEQ ID NO: 238247 - DNA, 20 bp, Artificial Sequence
  Description of Artificial Sequence: Synthetic oligonucleotide
  Target: LAMA2; (-) strand; PAM type: YTN; PAM sequence: CTG
tgagtggtaaacactcacaa

SEQ ID NO: 238248 - DNA, 20 bp, Artificial Sequence
  Description of Artificial Sequence: Synthetic oligonucleotide
  Target: LAMA2; (-) strand; PAM type: YTN; PAM sequence: TTG
gactgtgagtggtaaacact

SEQ ID NO: 238249 - DNA, 20 bp, Artificial Sequence
  Description of Artificial Sequence: Synthetic oligonucleotide
  Target: LAMA2; (-) strand; PAM type: YTN; PAM sequence: TTC
catgaagttggactgtgagt

SEQ ID NO: 238250 - DNA, 20 bp, Artificial Sequence
  Description of Artificial Sequence: Synthetic oligonucleotide
  Target: LAMA2; (-) strand; PAM type: YTN; PAM sequence: TTT
ccatgaagttggactgtgag

SEQ ID NO: 238251 - DNA, 20 bp, Artificial Sequence
  Description of Artificial Sequence: Synthetic oligonucleotide
  Target: LAMA2; (-) strand; PAM type: YTN; PAM sequence: CTT
tccatgaagttggactgtga

SEQ ID NO: 238252 - DNA, 20 bp, Artificial Sequence
  Description of Artificial Sequence: Synthetic oligonucleotide
  Target: LAMA2; (-) strand; PAM type: YTN; PAM sequence: TTC
tttccatgaagttggactgt

SEQ ID NO: 238253 - DNA, 20 bp, Artificial Sequence
  Description of Artificial Sequence: Synthetic oligonucleotide
  Target: LAMA2; (-) strand; PAM type: YTN; PAM sequence: TTA
atattctttccatgaagttg

SEQ ID NO: 238254 - DNA, 20 bp, Artificial Sequence
  Description of Artificial Sequence: Synthetic oligonucleotide
  Target: LAMA2; (-) strand; PAM type: YTN; PAM sequence: TTT
aatattctttccatgaagtt

SEQ ID NO: 238255 - DNA, 20 bp, Artificial Sequence
  Description of Artificial Sequence: Synthetic oligonucleotide
  Target: LAMA2; (-) strand; PAM type: YTN; PAM sequence: TTA
tttaatattctttccatgaa

SEQ ID NO: 238256 - DNA, 20 bp, Artificial Sequence
  Description of Artificial Sequence: Synthetic oligonucleotide
  Target: LAMA2; (-) strand; PAM type: YTN; PAM sequence: CTA
aaggacatatattatttaat

SEQ ID NO: 238257 - DNA, 20 bp, Artificial Sequence
  Description of Artificial Sequence: Synthetic oligonucleotide
  Target: LAMA2; (-) strand; PAM type: YTN; PAM sequence: TTA
ctaaaggacatatattattt

SEQ ID NO: 238258 - DNA, 20 bp, Artificial Sequence
  Description of Artificial Sequence: Synthetic oligonucleotide
  Target: LAMA2; (-) strand; PAM type: YTN; PAM sequence: CTT
actaaaggacatatattatt

SEQ ID NO: 238259 - DNA, 20 bp, Artificial Sequence
  Description of Artificial Sequence: Synthetic oligonucleotide
  Target: LAMA2; (-) strand; PAM type: YTN; PAM sequence: TTC
ttactaaaggacatatatta

SEQ ID NO: 238260 - DNA, 20 bp, Artificial Sequence
  Description of Artificial Sequence: Synthetic oligonucleotide
  Target: LAMA2; (-) strand; PAM type: YTN; PAM sequence: TTC
aatattcttactaaaggaca

SEQ ID NO: 238261 - DNA, 20 bp, Artificial Sequence
  Description of Artificial Sequence: Synthetic oligonucleotide
  Target: LAMA2; (-) strand; PAM type: YTN; PAM sequence: TTA
tgggttcaatattcttacta

SEQ ID NO: 238262 - DNA, 20 bp, Artificial Sequence
  Description of Artificial Sequence: Synthetic oligonucleotide
  Target: LAMA2; (-) strand; PAM type: YTN; PAM sequence: CTT
atgggttcaatattcttact

SEQ ID NO: 238263 - DNA, 20 bp, Artificial Sequence
  Description of Artificial Sequence: Synthetic oligonucleotide
  Target: LAMA2; (-) strand; PAM type: YTN; PAM sequence: CTG
tcttatgggttcaatattct

SEQ ID NO: 238264 - DNA, 20 bp, Artificial Sequence
  Description of Artificial Sequence: Synthetic oligonucleotide
  Target: LAMA2; (-) strand; PAM type: YTN; PAM sequence: CTA
gtgaaactgtcttatgggtt

SEQ ID NO: 238265 - DNA, 20 bp, Artificial Sequence
  Description of Artificial Sequence: Synthetic oligonucleotide
  Target: LAMA2; (-) strand; PAM type: YTN; PAM sequence: CTA
taatctagtgaaactgtctt

SEQ ID NO: 238266 - DNA, 20 bp, Artificial Sequence
  Description of Artificial Sequence: Synthetic oligonucleotide
  Target: LAMA2; (-) strand; PAM type: YTN; PAM sequence: CTG
gactataatctagtgaaact

SEQ ID NO: 238267 - DNA, 20 bp, Artificial Sequence
  Description of Artificial Sequence: Synthetic oligonucleotide
  Target: LAMA2; (-) strand; PAM type: YTN; PAM sequence: TTC
tggactataatctagtgaaa

SEQ ID NO: 238268 - DNA, 20 bp, Artificial Sequence
  Description of Artificial Sequence: Synthetic oligonucleotide
  Target: LAMA2; (-) strand; PAM type: YTN; PAM sequence: CTT
ctggactataatctagtgaa

SEQ ID NO: 238269 - DNA, 20 bp, Artificial Sequence
  Description of Artificial Sequence: Synthetic oligonucleotide
  Target: LAMA2; (-) strand; PAM type: YTN; PAM sequence: TTC
ttctggactataatctagtg

SEQ ID NO: 238270 - DNA, 20 bp, Artificial Sequence
  Description of Artificial Sequence: Synthetic oligonucleotide
  Target: LAMA2; (-) strand; PAM type: YTN; PAM sequence: TTG
attcttctggactataatct

SEQ ID NO: 238271 - DNA, 20 bp, Artificial Sequence
  Description of Artificial Sequence: Synthetic oligonucleotide
  Target: LAMA2; (-) strand; PAM type: YTN; PAM sequence: TTA
tagattgattcttctggact

SEQ ID NO: 238272 - DNA, 20 bp, Artificial Sequence
  Description of Artificial Sequence: Synthetic oligonucleotide
  Target: LAMA2; (-) strand; PAM type: YTN; PAM sequence: TTT
atagattgattcttctggac

SEQ ID NO: 238273 - DNA, 20 bp, Artificial Sequence
  Description of Artificial Sequence: Synthetic oligonucleotide
  Target: LAMA2; (-) strand; PAM type: YTN; PAM sequence: TTT
tatagattgattcttctgga

SEQ ID NO: 238274 - DNA, 20 bp, Artificial Sequence
  Description of Artificial Sequence: Synthetic oligonucleotide
  Target: LAMA2; (-) strand; PAM type: YTN; PAM sequence: TTT
ttatagattgattcttctgg

SEQ ID NO: 238275 - DNA, 20 bp, Artificial Sequence
  Description of Artificial Sequence: Synthetic oligonucleotide
  Target: LAMA2; (-) strand; PAM type: YTN; PAM sequence: CTT
tttatagattgattcttctg

SEQ ID NO: 238276 - DNA, 20 bp, Artificial Sequence
  Description of Artificial Sequence: Synthetic oligonucleotide
  Target: LAMA2; (-) strand; PAM type: YTN; PAM sequence: CTG
ctttttatagattgattctt

SEQ ID NO: 238277 - DNA, 20 bp, Artificial Sequence
  Description of Artificial Sequence: Synthetic oligonucleotide
  Target: LAMA2; (-) strand; PAM type: YTN; PAM sequence: CTA
ctgctttttatagattgatt

SEQ ID NO: 238278 - DNA, 20 bp, Artificial Sequence
  Description of Artificial Sequence: Synthetic oligonucleotide
  Target: LAMA2; (-) strand; PAM type: YTN; PAM sequence: CTG
acatatagaaatactactgc

SEQ ID NO: 238279 - DNA, 20 bp, Artificial Sequence
  Description of Artificial Sequence: Synthetic oligonucleotide
  Target: LAMA2; (-) strand; PAM type: YTN; PAM sequence: TTG
tcactgacatatagaaatac

SEQ ID NO: 238280 - DNA, 20 bp, Artificial Sequence
  Description of Artificial Sequence: Synthetic oligonucleotide
  Target: LAMA2; (-) strand; PAM type: YTN; PAM sequence: CTT
gtcactgacatatagaaata

SEQ ID NO: 238281 - DNA, 20 bp, Artificial Sequence
  Description of Artificial Sequence: Synthetic oligonucleotide
  Target: LAMA2; (-) strand; PAM type: YTN; PAM sequence: TTG
cttgtcactgacatatagaa

SEQ ID NO: 238282 - DNA, 20 bp, Artificial Sequence
  Description of Artificial Sequence: Synthetic oligonucleotide
  Target: LAMA2; (-) strand; PAM type: YTN; PAM sequence: TTT
gcttgtcactgacatataga

SEQ ID NO: 238283 - DNA, 20 bp, Artificial Sequence
  Description of Artificial Sequence: Synthetic oligonucleotide
  Target: LAMA2; (-) strand; PAM type: YTN; PAM sequence: TTA
tttgcttgtcactgacatat

SEQ ID NO: 238284 - DNA, 20 bp, Artificial Sequence
  Description of Artificial Sequence: Synthetic oligonucleotide
  Target: LAMA2; (-) strand; PAM type: YTN; PAM sequence: TTT
atttgcttgtcactgacata

SEQ ID NO: 238285 - DNA, 20 bp, Artificial Sequence
  Description of Artificial Sequence: Synthetic oligonucleotide
  Target: LAMA2; (-) strand; PAM type: YTN; PAM sequence: TTT
tatttgcttgtcactgacat

SEQ ID NO: 238286 - DNA, 20 bp, Artificial Sequence
  Description of Artificial Sequence: Synthetic oligonucleotide
  Target: LAMA2; (-) strand; PAM type: YTN; PAM sequence: TTT
ttatttgcttgtcactgaca

SEQ ID NO: 238287 - DNA, 20 bp, Artificial Sequence
  Description of Artificial Sequence: Synthetic oligonucleotide
  Target: LAMA2; (-) strand; PAM type: YTN; PAM sequence: TTT
tttatttgcttgtcactgac

SEQ ID NO: 238288 - DNA, 20 bp, Artificial Sequence
  Description of Artificial Sequence: Synthetic oligonucleotide
  Target: LAMA2; (-) strand; PAM type: YTN; PAM sequence: TTA
cattttttatttgcttgtca

SEQ ID NO: 238289 - DNA, 20 bp, Artificial Sequence
  Description of Artificial Sequence: Synthetic oligonucleotide
  Target: LAMA2; (-) strand; PAM type: YTN; PAM sequence: TTA
ttacattttttatttgcttg

SEQ ID NO: 238290 - DNA, 20 bp, Artificial Sequence
  Description of Artificial Sequence: Synthetic oligonucleotide
  Target: LAMA2; (-) strand; PAM type: YTN; PAM sequence: TTT
attacattttttatttgctt

SEQ ID NO: 238291 - DNA, 20 bp, Artificial Sequence
  Description of Artificial Sequence: Synthetic oligonucleotide
  Target: LAMA2; (-) strand; PAM type: YTN; PAM sequence: TTT
tattacattttttatttgct

SEQ ID NO: 238292 - DNA, 20 bp, Artificial Sequence
  Description of Artificial Sequence: Synthetic oligonucleotide
  Target: LAMA2; (-) strand; PAM type: YTN; PAM sequence: TTT
ttattacattttttatttgc

SEQ ID NO: 238293 - DNA, 20 bp, Artificial Sequence
  Description of Artificial Sequence: Synthetic oligonucleotide
  Target: LAMA2; (-) strand; PAM type: YTN; PAM sequence: CTA
agtatttttattacattttt

SEQ ID NO: 238294 - DNA, 20 bp, Artificial Sequence
  Description of Artificial Sequence: Synthetic oligonucleotide
  Target: LAMA2; (-) strand; PAM type: YTN; PAM sequence: TTC
taagtatttttattacattt

SEQ ID NO: 238295 - DNA, 20 bp, Artificial Sequence
  Description of Artificial Sequence: Synthetic oligonucleotide
  Target: LAMA2; (-) strand; PAM type: YTN; PAM sequence: CTA
ttctaagtatttttattaca

SEQ ID NO: 238296 - DNA, 20 bp, Artificial Sequence
  Description of Artificial Sequence: Synthetic oligonucleotide
  Target: LAMA2; (-) strand; PAM type: YTN; PAM sequence: TTG
ctattctaagtatttttatt

SEQ ID NO: 238297 - DNA, 20 bp, Artificial Sequence
  Description of Artificial Sequence: Synthetic oligonucleotide
  Target: LAMA2; (-) strand; PAM type: YTN; PAM sequence: CTT
gctattctaagtatttttat

SEQ ID NO: 238298 - DNA, 20 bp, Artificial Sequence
  Description of Artificial Sequence: Synthetic oligonucleotide
  Target: LAMA2; (-) strand; PAM type: YTN; PAM sequence: TTC
ttgctattctaagtattttt

SEQ ID NO: 238299 - DNA, 20 bp, Artificial Sequence
  Description of Artificial Sequence: Synthetic oligonucleotide
  Target: LAMA2; (-) strand; PAM type: YTN; PAM sequence: TTT
cttgctattctaagtatttt

SEQ ID NO: 238300 - DNA, 20 bp, Artificial Sequence
  Description of Artificial Sequence: Synthetic oligonucleotide
  Target: LAMA2; (-) strand; PAM type: YTN; PAM sequence: TTT
tcttgctattctaagtattt

SEQ ID NO: 238301 - DNA, 20 bp, Artificial Sequence
  Description of Artificial Sequence: Synthetic oligonucleotide
  Target: LAMA2; (-) strand; PAM type: YTN; PAM sequence: TTT
ttcttgctattctaagtatt

SEQ ID NO: 238302 - DNA, 20 bp, Artificial Sequence
  Description of Artificial Sequence: Synthetic oligonucleotide
  Target: LAMA2; (-) strand; PAM type: YTN; PAM sequence: TTA
ggtatcatgaagtttttctt

SEQ ID NO: 238303 - DNA, 20 bp, Artificial Sequence
  Description of Artificial Sequence: Synthetic oligonucleotide
  Target: LAMA2; (-) strand; PAM type: YTN; PAM sequence: TTT
aggtatcatgaagtttttct

SEQ ID NO: 238304 - DNA, 20 bp, Artificial Sequence
  Description of Artificial Sequence: Synthetic oligonucleotide
  Target: LAMA2; (-) strand; PAM type: YTN; PAM sequence: TTT
taggtatcatgaagtttttc

SEQ ID NO: 238305 - DNA, 20 bp, Artificial Sequence
  Description of Artificial Sequence: Synthetic oligonucleotide
  Target: LAMA2; (-) strand; PAM type: YTN; PAM sequence: TTT
ttaggtatcatgaagttttt

SEQ ID NO: 238306 - DNA, 20 bp, Artificial Sequence
  Description of Artificial Sequence: Synthetic oligonucleotide
  Target: LAMA2; (-) strand; PAM type: YTN; PAM sequence: TTA
tttttaggtatcatgaagtt

SEQ ID NO: 238307 - DNA, 20 bp, Artificial Sequence
  Description of Artificial Sequence: Synthetic oligonucleotide
  Target: LAMA2; (-) strand; PAM type: YTN; PAM sequence: CTT
atttttaggtatcatgaagt

SEQ ID NO: 238308 - DNA, 20 bp, Artificial Sequence
  Description of Artificial Sequence: Synthetic oligonucleotide
  Target: LAMA2; (-) strand; PAM type: YTN; PAM sequence: TTA
caaacacttatttttaggta

SEQ ID NO: 238309 - DNA, 20 bp, Artificial Sequence
  Description of Artificial Sequence: Synthetic oligonucleotide
  Target: LAMA2; (-) strand; PAM type: YTN; PAM sequence: TTT
acaaacacttatttttaggt

SEQ ID NO: 238310 - DNA, 20 bp, Artificial Sequence
  Description of Artificial Sequence: Synthetic oligonucleotide
  Target: LAMA2; (-) strand; PAM type: YTN; PAM sequence: TTT
tacaaacacttatttttagg

SEQ ID NO: 238311 - DNA, 20 bp, Artificial Sequence
  Description of Artificial Sequence: Synthetic oligonucleotide
  Target: LAMA2; (-) strand; PAM type: YTN; PAM sequence: CTC
aattttacaaacacttattt

SEQ ID NO: 238312 - DNA, 20 bp, Artificial Sequence
  Description of Artificial Sequence: Synthetic oligonucleotide
  Target: LAMA2; (-) strand; PAM type: YTN; PAM sequence: TTA
tctcaattttacaaacactt

SEQ ID NO: 238313 - DNA, 20 bp, Artificial Sequence
  Description of Artificial Sequence: Synthetic oligonucleotide
  Target: LAMA2; (-) strand; PAM type: YTN; PAM sequence: TTA
aaaattatctcaattttaca

SEQ ID NO: 238314 - DNA, 20 bp, Artificial Sequence
  Description of Artificial Sequence: Synthetic oligonucleotide
  Target: LAMA2; (-) strand; PAM type: YTN; PAM sequence: TTT
aaaaattatctcaattttac

SEQ ID NO: 238315 - DNA, 20 bp, Artificial Sequence
  Description of Artificial Sequence: Synthetic oligonucleotide
  Target: LAMA2; (-) strand; PAM type: YTN; PAM sequence: CTT
taaaaattatctcaatttta

SEQ ID NO: 238316 - DNA, 20 bp, Artificial Sequence
  Description of Artificial Sequence: Synthetic oligonucleotide
  Target: LAMA2; (-) strand; PAM type: YTN; PAM sequence: TTC
aataacctttaaaaattatc

SEQ ID NO: 238317 - DNA, 20 bp, Artificial Sequence
  Description of Artificial Sequence: Synthetic oligonucleotide
  Target: LAMA2; (-) strand; PAM type: YTN; PAM sequence: CTT
caataacctttaaaaattat

SEQ ID NO: 238318 - DNA, 20 bp, Artificial Sequence
  Description of Artificial Sequence: Synthetic oligonucleotide
  Target: LAMA2; (-) strand; PAM type: YTN; PAM sequence: TTC
ttcaataacctttaaaaatt

SEQ ID NO: 238319 - DNA, 20 bp, Artificial Sequence
  Description of Artificial Sequence: Synthetic oligonucleotide
  Target: LAMA2; (-) strand; PAM type: YTN; PAM sequence: TTA
tgttcttcaataacctttaa

SEQ ID NO: 238320 - DNA, 20 bp, Artificial Sequence
  Description of Artificial Sequence: Synthetic oligonucleotide
  Target: LAMA2; (-) strand; PAM type: YTN; PAM sequence: TTT
atgttcttcaataaccttta

SEQ ID NO: 238321 - DNA, 20 bp, Artificial Sequence
  Description of Artificial Sequence: Synthetic oligonucleotide
  Target: LAMA2; (-) strand; PAM type: YTN; PAM sequence: TTT
tatgttcttcaataaccttt

SEQ ID NO: 238322 - DNA, 20 bp, Artificial Sequence
  Description of Artificial Sequence: Synthetic oligonucleotide
  Target: LAMA2; (-) strand; PAM type: YTN; PAM sequence: TTA
gaattttatgttcttcaata

SEQ ID NO: 238323 - DNA, 20 bp, Artificial Sequence
  Description of Artificial Sequence: Synthetic oligonucleotide
  Target: LAMA2; (-) strand; PAM type: YTN; PAM sequence: TTT
agaattttatgttcttcaat

SEQ ID NO: 238324 - DNA, 20 bp, Artificial Sequence
  Description of Artificial Sequence: Synthetic oligonucleotide
  Target: LAMA2; (-) strand; PAM type: YTN; PAM sequence: CTC
atttagaattttatgttctt

SEQ ID NO: 238325 - DNA, 20 bp, Artificial Sequence
  Description of Artificial Sequence: Synthetic oligonucleotide
  Target: LAMA2; (-) strand; PAM type: YTN; PAM sequence: CTC
ctcatttagaattttatgtt

SEQ ID NO: 238326 - DNA, 20 bp, Artificial Sequence
  Description of Artificial Sequence: Synthetic oligonucleotide
  Target: LAMA2; (-) strand; PAM type: YTN; PAM sequence: CTG
tctcctcatttagaatttta

SEQ ID NO: 238327 - DNA, 20 bp, Artificial Sequence
  Description of Artificial Sequence: Synthetic oligonucleotide
  Target: LAMA2; (-) strand; PAM type: YTN; PAM sequence: CTC
agctgtctcctcatttagaa

SEQ ID NO: 238328 - DNA, 20 bp, Artificial Sequence
  Description of Artificial Sequence: Synthetic oligonucleotide
  Target: LAMA2; (-) strand; PAM type: YTN; PAM sequence: TTG
gtgatcctcagctgtctcct

SEQ ID NO: 238329 - DNA, 20 bp, Artificial Sequence
  Description of Artificial Sequence: Synthetic oligonucleotide
  Target: LAMA2; (-) strand; PAM type: YTN; PAM sequence: CTT
ggtgatcctcagctgtctcc

SEQ ID NO: 238330 - DNA, 20 bp, Artificial Sequence
  Description of Artificial Sequence: Synthetic oligonucleotide
  Target: LAMA2; (-) strand; PAM type: YTN; PAM sequence: CTG
gtacttggtgatcctcagct

SEQ ID NO: 238331 - DNA, 20 bp, Artificial Sequence
  Description of Artificial Sequence: Synthetic oligonucleotide
  Target: LAMA2; (-) strand; PAM type: YTN; PAM sequence: TTC
actggtacttggtgatcctc

SEQ ID NO: 238332 - DNA, 20 bp, Artificial Sequence
  Description of Artificial Sequence: Synthetic oligonucleotide
  Target: LAMA2; (-) strand; PAM type: YTN; PAM sequence: TTT
cactggtacttggtgatcct

SEQ ID NO: 238333 - DNA, 20 bp, Artificial Sequence
  Description of Artificial Sequence: Synthetic oligonucleotide
  Target: LAMA2; (-) strand; PAM type: YTN; PAM sequence: TTT
tcactggtacttggtgatcc

SEQ ID NO: 238334 - DNA, 20 bp, Artificial Sequence
  Description of Artificial Sequence: Synthetic oligonucleotide
  Target: LAMA2; (-) strand; PAM type: YTN; PAM sequence: TTC
acagattttcactggtactt

SEQ ID NO: 238335 - DNA, 20 bp, Artificial Sequence
  Description of Artificial Sequence: Synthetic oligonucleotide
  Target: LAMA2; (-) strand; PAM type: YTN; PAM sequence: TTT
cacagattttcactggtact

SEQ ID NO: 238336 - DNA, 20 bp, Artificial Sequence
  Description of Artificial Sequence: Synthetic oligonucleotide
  Target: LAMA2; (-) strand; PAM type: YTN; PAM sequence: TTC
aaatttcacagattttcact

SEQ ID NO: 238337 - DNA, 20 bp, Artificial Sequence
  Description of Artificial Sequence: Synthetic oligonucleotide
  Target: LAMA2; (-) strand; PAM type: YTN; PAM sequence: TTT
caaatttcacagattttcac

SEQ ID NO: 238338 - DNA, 20 bp, Artificial Sequence
  Description of Artificial Sequence: Synthetic oligonucleotide
  Target: LAMA2; (-) strand; PAM type: YTN; PAM sequence: TTA
atagaaatggtaaacatttc

SEQ ID NO: 238339 - DNA, 20 bp, Artificial Sequence
  Description of Artificial Sequence: Synthetic oligonucleotide
  Target: LAMA2; (-) strand; PAM type: YTN; PAM sequence: CTA
ttaatagaaatggtaaacat

SEQ ID NO: 238340 - DNA, 20 bp, Artificial Sequence
  Description of Artificial Sequence: Synthetic oligonucleotide
  Target: LAMA2; (-) strand; PAM type: YTN; PAM sequence: CTC
tattaatagaaatggtaaac

SEQ ID NO: 238341 - DNA, 20 bp, Artificial Sequence
  Description of Artificial Sequence: Synthetic oligonucleotide
  Target: LAMA2; (-) strand; PAM type: YTN; PAM sequence: TTA
actctattaatagaaatggt

SEQ ID NO: 238342 - DNA, 20 bp, Artificial Sequence
  Description of Artificial Sequence: Synthetic oligonucleotide
  Target: LAMA2; (-) strand; PAM type: YTN; PAM sequence: CTA
attaactctattaatagaaa

SEQ ID NO: 238343 - DNA, 20 bp, Artificial Sequence
  Description of Artificial Sequence: Synthetic oligonucleotide
  Target: LAMA2; (-) strand; PAM type: YTN; PAM sequence: TTG
tggtactaattaactctatt

SEQ ID NO: 238344 - DNA, 20 bp, Artificial Sequence
  Description of Artificial Sequence: Synthetic oligonucleotide
  Target: LAMA2; (-) strand; PAM type: YTN; PAM sequence: CTA
aattgtggtactaattaact

SEQ ID NO: 238345 - DNA, 20 bp, Artificial Sequence
  Description of Artificial Sequence: Synthetic oligonucleotide
  Target: LAMA2; (-) strand; PAM type: YTN; PAM sequence: CTC
ctaaattgtggtactaatta

SEQ ID NO: 238346 - DNA, 20 bp, Artificial Sequence
  Description of Artificial Sequence: Synthetic oligonucleotide
  Target: LAMA2; (-) strand; PAM type: YTN; PAM sequence: TTG
ccctcctaaattgtggtact

SEQ ID NO: 238347 - DNA, 20 bp, Artificial Sequence
  Description of Artificial Sequence: Synthetic oligonucleotide
  Target: LAMA2; (-) strand; PAM type: YTN; PAM sequence: CTA
gataataccatattgccctc

SEQ ID NO: 238348 - DNA, 20 bp, Artificial Sequence
  Description of Artificial Sequence: Synthetic oligonucleotide
  Target: LAMA2; (-) strand; PAM type: YTN; PAM sequence: TTC
aaagatactagataatacca

SEQ ID NO: 238349 - DNA, 20 bp, Artificial Sequence
  Description of Artificial Sequence: Synthetic oligonucleotide
  Target: LAMA2; (-) strand; PAM type: YTN; PAM sequence: CTT
caaagatactagataatacc

SEQ ID NO: 238350 - DNA, 20 bp, Artificial Sequence
  Description of Artificial Sequence: Synthetic oligonucleotide
  Target: LAMA2; (-) strand; PAM type: YTN; PAM sequence: TTA
tcaccttcaaagatactaga

SEQ ID NO: 238351 - DNA, 20 bp, Artificial Sequence
  Description of Artificial Sequence: Synthetic oligonucleotide
  Target: LAMA2; (-) strand; PAM type: YTN; PAM sequence: TTT
atcaccttcaaagatactag

SEQ ID NO: 238352 - DNA, 20 bp, Artificial Sequence
  Description of Artificial Sequence: Synthetic oligonucleotide
  Target: LAMA2; (-) strand; PAM type: YTN; PAM sequence: TTT
tatcaccttcaaagatacta

SEQ ID NO: 238353 - DNA, 20 bp, Artificial Sequence
  Description of Artificial Sequence: Synthetic oligonucleotide
  Target: LAMA2; (-) strand; PAM type: YTN; PAM sequence: TTG
acagggttttatcaccttca

SEQ ID NO: 238354 - DNA, 20 bp, Artificial Sequence
  Description of Artificial Sequence: Synthetic oligonucleotide
  Target: LAMA2; (-) strand; PAM type: YTN; PAM sequence: CTG
gttgacagggttttatcacc

SEQ ID NO: 238355 - DNA, 20 bp, Artificial Sequence
  Description of Artificial Sequence: Synthetic oligonucleotide
  Target: LAMA2; (-) strand; PAM type: YTN; PAM sequence: TTG
ctggttgacagggttttatc

SEQ ID NO: 238356 - DNA, 20 bp, Artificial Sequence
  Description of Artificial Sequence: Synthetic oligonucleotide
  Target: LAMA2; (-) strand; PAM type: YTN; PAM sequence: TTG
gatgtggaattgctggttga

SEQ ID NO: 238357 - DNA, 20 bp, Artificial Sequence
  Description of Artificial Sequence: Synthetic oligonucleotide
  Target: LAMA2; (-) strand; PAM type: YTN; PAM sequence: TTT
ggatgtggaattgctggttg

SEQ ID NO: 238358 - DNA, 20 bp, Artificial Sequence
  Description of Artificial Sequence: Synthetic oligonucleotide
  Target: LAMA2; (-) strand; PAM type: YTN; PAM sequence: TTG
gggtaaatgtttggatgtgg

SEQ ID NO: 238359 - DNA, 20 bp, Artificial Sequence
  Description of Artificial Sequence: Synthetic oligonucleotide
  Target: LAMA2; (-) strand; PAM type: YTN; PAM sequence: TTT
ggggtaaatgtttggatgtg

SEQ ID NO: 238360 - DNA, 20 bp, Artificial Sequence
  Description of Artificial Sequence: Synthetic oligonucleotide
  Target: LAMA2; (-) strand; PAM type: YTN; PAM sequence: TTT
tggggtaaatgtttggatgt

SEQ ID NO: 238361 - DNA, 20 bp, Artificial Sequence
  Description of Artificial Sequence: Synthetic oligonucleotide
  Target: LAMA2; (-) strand; PAM type: YTN; PAM sequence: TTT
ttggggtaaatgtttggatg

SEQ ID NO: 238362 - DNA, 20 bp, Artificial Sequence
  Description of Artificial Sequence: Synthetic oligonucleotide
  Target: LAMA2; (-) strand; PAM type: YTN; PAM sequence: TTT
tttggggtaaatgtttggat

SEQ ID NO: 238363 - DNA, 20 bp, Artificial Sequence
  Description of Artificial Sequence: Synthetic oligonucleotide
  Target: LAMA2; (-) strand; PAM type: YTN; PAM sequence: TTG
taagagttttttggggtaaa

SEQ ID NO: 238364 - DNA, 20 bp, Artificial Sequence
  Description of Artificial Sequence: Synthetic oligonucleotide
  Target: LAMA2; (-) strand; PAM type: YTN; PAM sequence: CTA
tacattgtaagagttttttg

SEQ ID NO: 238365 - DNA, 20 bp, Artificial Sequence
  Description of Artificial Sequence: Synthetic oligonucleotide
  Target: LAMA2; (-) strand; PAM type: YTN; PAM sequence: CTC
tatacattgtaagagttttt

SEQ ID NO: 238366 - DNA, 20 bp, Artificial Sequence
  Description of Artificial Sequence: Synthetic oligonucleotide
  Target: LAMA2; (-) strand; PAM type: YTN; PAM sequence: TTC
tctatacattgtaagagttt

SEQ ID NO: 238367 - DNA, 20 bp, Artificial Sequence
  Description of Artificial Sequence: Synthetic oligonucleotide
  Target: LAMA2; (-) strand; PAM type: YTN; PAM sequence: TTT
ctctatacattgtaagagtt

SEQ ID NO: 238368 - DNA, 20 bp, Artificial Sequence
  Description of Artificial Sequence: Synthetic oligonucleotide
  Target: LAMA2; (-) strand; PAM type: YTN; PAM sequence: TTT
tctctatacattgtaagagt

SEQ ID NO: 238369 - DNA, 20 bp, Artificial Sequence
  Description of Artificial Sequence: Synthetic oligonucleotide
  Target: LAMA2; (-) strand; PAM type: YTN; PAM sequence: TTT
ttctctatacattgtaagag

SEQ ID NO: 238370 - DNA, 20 bp, Artificial Sequence
  Description of Artificial Sequence: Synthetic oligonucleotide
  Target: LAMA2; (-) strand; PAM type: YTN; PAM sequence: TTA
gatggtttttctctatacat

SEQ ID NO: 238371 - DNA, 20 bp, Artificial Sequence
  Description of Artificial Sequence: Synthetic oligonucleotide
  Target: LAMA2; (-) strand; PAM type: YTN; PAM sequence: TTT
agatggtttttctctataca

SEQ ID NO: 238372 - DNA, 20 bp, Artificial Sequence
  Description of Artificial Sequence: Synthetic oligonucleotide
  Target: LAMA2; (-) strand; PAM type: YTN; PAM sequence: TTT
tagatggtttttctctatac

SEQ ID NO: 238373 - DNA, 20 bp, Artificial Sequence
  Description of Artificial Sequence: Synthetic oligonucleotide
  Target: LAMA2; (-) strand; PAM type: YTN; PAM sequence: TTG
agcacattttagatggtttt

SEQ ID NO: 238374 - DNA, 20 bp, Artificial Sequence
  Description of Artificial Sequence: Synthetic oligonucleotide
  Target: LAMA2; (-) strand; PAM type: YTN; PAM sequence: TTA
cgttgagcacattttagatg

SEQ ID NO: 238375 - DNA, 20 bp, Artificial Sequence
  Description of Artificial Sequence: Synthetic oligonucleotide
  Target: LAMA2; (-) strand; PAM type: YTN; PAM sequence: TTT
acgttgagcacattttagat

SEQ ID NO: 238376 - DNA, 20 bp, Artificial Sequence
  Description of Artificial Sequence: Synthetic oligonucleotide
  Target: LAMA2; (-) strand; PAM type: YTN; PAM sequence: TTC
atcatagtaagtacatttac

SEQ ID NO: 238377 - DNA, 20 bp, Artificial Sequence
  Description of Artificial Sequence: Synthetic oligonucleotide
  Target: LAMA2; (-) strand; PAM type: YTN; PAM sequence: TTT
catcatagtaagtacattta

SEQ ID NO: 238378 - DNA, 20 bp, Artificial Sequence
  Description of Artificial Sequence: Synthetic oligonucleotide
  Target: LAMA2; (-) strand; PAM type: YTN; PAM sequence: TTT
tcatcatagtaagtacattt

SEQ ID NO: 238379 - DNA, 20 bp, Artificial Sequence
  Description of Artificial Sequence: Synthetic oligonucleotide
  Target: LAMA2; (-) strand; PAM type: YTN; PAM sequence: CTC
attttcatcatagtaagtac

SEQ ID NO: 238380 - DNA, 20 bp, Artificial Sequence
  Description of Artificial Sequence: Synthetic oligonucleotide
  Target: LAMA2; (-) strand; PAM type: YTN; PAM sequence: TTC
tcattttcatcatagtaagt

SEQ ID NO: 238381 - DNA, 20 bp, Artificial Sequence
  Description of Artificial Sequence: Synthetic oligonucleotide
  Target: LAMA2; (-) strand; PAM type: YTN; PAM sequence: TTT
ctcattttcatcatagtaag

SEQ ID NO: 238382 - DNA, 20 bp, Artificial Sequence
  Description of Artificial Sequence: Synthetic oligonucleotide
  Target: LAMA2; (-) strand; PAM type: YTN; PAM sequence: TTT
tctcattttcatcatagtaa

SEQ ID NO: 238383 - DNA, 20 bp, Artificial Sequence
  Description of Artificial Sequence: Synthetic oligonucleotide
  Target: LAMA2; (-) strand; PAM type: YTN; PAM sequence: TTT
ttctcattttcatcatagta

SEQ ID NO: 238384 - DNA, 20 bp, Artificial Sequence
  Description of Artificial Sequence: Synthetic oligonucleotide
  Target: LAMA2; (-) strand; PAM type: YTN; PAM sequence: TTA
tttttctcattttcatcata

SEQ ID NO: 238385 - DNA, 20 bp, Artificial Sequence
  Description of Artificial Sequence: Synthetic oligonucleotide
  Target: LAMA2; (-) strand; PAM type: YTN; PAM sequence: TTT
atttttctcattttcatcat

SEQ ID NO: 238386 - DNA, 20 bp, Artificial Sequence
  Description of Artificial Sequence: Synthetic oligonucleotide
  Target: LAMA2; (-) strand; PAM type: YTN; PAM sequence: CTA
tttatttttctcattttcat

SEQ ID NO: 238387 - DNA, 20 bp, Artificial Sequence
  Description of Artificial Sequence: Synthetic oligonucleotide
  Target: LAMA2; (-) strand; PAM type: YTN; PAM sequence: TTG
ctatttatttttctcatttt

SEQ ID NO: 238388 - DNA, 20 bp, Artificial Sequence
  Description of Artificial Sequence: Synthetic oligonucleotide
  Target: LAMA2; (-) strand; PAM type: YTN; PAM sequence: TTT
gctatttatttttctcattt

SEQ ID NO: 238389 - DNA, 20 bp, Artificial Sequence
  Description of Artificial Sequence: Synthetic oligonucleotide
  Target: LAMA2; (-) strand; PAM type: YTN; PAM sequence: TTT
tgctatttatttttctcatt

SEQ ID NO: 238390 - DNA, 20 bp, Artificial Sequence
  Description of Artificial Sequence: Synthetic oligonucleotide
  Target: LAMA2; (-) strand; PAM type: YTN; PAM sequence: TTT
ttgctatttatttttctcat

SEQ ID NO: 238391 - DNA, 20 bp, Artificial Sequence
  Description of Artificial Sequence: Synthetic oligonucleotide
  Target: LAMA2; (-) strand; PAM type: YTN; PAM sequence: TTA
tttttgctatttatttttct

SEQ ID NO: 238392 - DNA, 20 bp, Artificial Sequence
  Description of Artificial Sequence: Synthetic oligonucleotide
  Target: LAMA2; (-) strand; PAM type: YTN; PAM sequence: TTT
atttttgctatttatttttc

SEQ ID NO: 238393 - DNA, 20 bp, Artificial Sequence
  Description of Artificial Sequence: Synthetic oligonucleotide
  Target: LAMA2; (-) strand; PAM type: YTN; PAM sequence: CTA
caatttatttttgctattta

SEQ ID NO: 238394 - DNA, 20 bp, Artificial Sequence
  Description of Artificial Sequence: Synthetic oligonucleotide
  Target: LAMA2; (-) strand; PAM type: YTN; PAM sequence: TTA
aaggaaacactacaatttat

SEQ ID NO: 238395 - DNA, 20 bp, Artificial Sequence
  Description of Artificial Sequence: Synthetic oligonucleotide
  Target: LAMA2; (-) strand; PAM type: YTN; PAM sequence: TTA
tcagattaaaggaaacacta

SEQ ID NO: 238396 - DNA, 20 bp, Artificial Sequence
  Description of Artificial Sequence: Synthetic oligonucleotide
  Target: LAMA2; (-) strand; PAM type: YTN; PAM sequence: TTT
atcagattaaaggaaacact

SEQ ID NO: 238397 - DNA, 20 bp, Artificial Sequence
  Description of Artificial Sequence: Synthetic oligonucleotide
  Target: LAMA2; (-) strand; PAM type: YTN; PAM sequence: TTT
tatcagattaaaggaaacac

SEQ ID NO: 238398 - DNA, 20 bp, Artificial Sequence
  Description of Artificial Sequence: Synthetic oligonucleotide
  Target: LAMA2; (-) strand; PAM type: YTN; PAM sequence: CTT
ttatcagattaaaggaaaca

SEQ ID NO: 238399 - DNA, 20 bp, Artificial Sequence
  Description of Artificial Sequence: Synthetic oligonucleotide
  Target: LAMA2; (-) strand; PAM type: YTN; PAM sequence: TTC
ttttatcagattaaaggaaa

SEQ ID NO: 238400 - DNA, 20 bp, Artificial Sequence
  Description of Artificial Sequence: Synthetic oligonucleotide
  Target: LAMA2; (-) strand; PAM type: YTN; PAM sequence: TTT
cttttatcagattaaaggaa

SEQ ID NO: 238401 - DNA, 20 bp, Artificial Sequence
  Description of Artificial Sequence: Synthetic oligonucleotide
  Target: LAMA2; (-) strand; PAM type: YTN; PAM sequence: CTG
tttcttttatcagattaaag

SEQ ID NO: 238402 - DNA, 20 bp, Artificial Sequence
  Description of Artificial Sequence: Synthetic oligonucleotide
  Target: LAMA2; (-) strand; PAM type: YTN; PAM sequence: TTA
actgtttcttttatcagatt

SEQ ID NO: 238403 - DNA, 20 bp, Artificial Sequence
  Description of Artificial Sequence: Synthetic oligonucleotide
  Target: LAMA2; (-) strand; PAM type: YTN; PAM sequence: TTT
aactgtttcttttatcagat

SEQ ID NO: 238404 - DNA, 20 bp, Artificial Sequence
  Description of Artificial Sequence: Synthetic oligonucleotide
  Target: LAMA2; (-) strand; PAM type: YTN; PAM sequence: CTT
taactgtttcttttatcaga

SEQ ID NO: 238405 - DNA, 20 bp, Artificial Sequence
  Description of Artificial Sequence: Synthetic oligonucleotide
  Target: LAMA2; (-) strand; PAM type: YTN; PAM sequence: TTC
aaccactttaactgtttctt

SEQ ID NO: 238406 - DNA, 20 bp, Artificial Sequence
  Description of Artificial Sequence: Synthetic oligonucleotide
  Target: LAMA2; (-) strand; PAM type: YTN; PAM sequence: TTT
caaccactttaactgtttct

SEQ ID NO: 238407 - DNA, 20 bp, Artificial Sequence
  Description of Artificial Sequence: Synthetic oligonucleotide
  Target: LAMA2; (-) strand; PAM type: YTN; PAM sequence: CTA
tttcaaccactttaactgtt

SEQ ID NO: 238408 - DNA, 20 bp, Artificial Sequence
  Description of Artificial Sequence: Synthetic oligonucleotide
  Target: LAMA2; (-) strand; PAM type: YTN; PAM sequence: TTA
tacatgaagatctatttcaa

SEQ ID NO: 238409 - DNA, 20 bp, Artificial Sequence
  Description of Artificial Sequence: Synthetic oligonucleotide
  Target: LAMA2; (-) strand; PAM type: YTN; PAM sequence: TTT
atacatgaagatctatttca

SEQ ID NO: 238410 - DNA, 20 bp, Artificial Sequence
  Description of Artificial Sequence: Synthetic oligonucleotide
  Target: LAMA2; (-) strand; PAM type: YTN; PAM sequence: TTA
tcatggtttatacatgaaga

SEQ ID NO: 238411 - DNA, 20 bp, Artificial Sequence
  Description of Artificial Sequence: Synthetic oligonucleotide
  Target: LAMA2; (-) strand; PAM type: YTN; PAM sequence: TTT
atcatggtttatacatgaag

SEQ ID NO: 238412 - DNA, 20 bp, Artificial Sequence
  Description of Artificial Sequence: Synthetic oligonucleotide
  Target: LAMA2; (-) strand; PAM type: YTN; PAM sequence: CTG
aaatttatcatggtttatac

SEQ ID NO: 238413 - DNA, 20 bp, Artificial Sequence
  Description of Artificial Sequence: Synthetic oligonucleotide
  Target: LAMA2; (-) strand; PAM type: YTN; PAM sequence: TTC
tgaaatttatcatggtttat

SEQ ID NO: 238414 - DNA, 20 bp, Artificial Sequence
  Description of Artificial Sequence: Synthetic oligonucleotide
  Target: LAMA2; (-) strand; PAM type: YTN; PAM sequence: TTT
ctgaaatttatcatggttta

SEQ ID NO: 238415 - DNA, 20 bp, Artificial Sequence
  Description of Artificial Sequence: Synthetic oligonucleotide
  Target: LAMA2; (-) strand; PAM type: YTN; PAM sequence: CTG
aagtttctgaaatttatcat

SEQ ID NO: 238416 - DNA, 20 bp, Artificial Sequence
  Description of Artificial Sequence: Synthetic oligonucleotide
  Target: LAMA2; (-) strand; PAM type: YTN; PAM sequence: TTC
cacctgaagtttctgaaatt

SEQ ID NO: 238417 - DNA, 20 bp, Artificial Sequence
  Description of Artificial Sequence: Synthetic oligonucleotide
  Target: LAMA2; (-) strand; PAM type: YTN; PAM sequence: TTT
ccacctgaagtttctgaaat

SEQ ID NO: 238418 - DNA, 20 bp, Artificial Sequence
  Description of Artificial Sequence: Synthetic oligonucleotide
  Target: LAMA2; (-) strand; PAM type: YTN; PAM sequence: TTT
tccacctgaagtttctgaaa

SEQ ID NO: 238419 - DNA, 20 bp, Artificial Sequence
  Description of Artificial Sequence: Synthetic oligonucleotide
  Target: LAMA2; (-) strand; PAM type: YTN; PAM sequence: TTT
ttccacctgaagtttctgaa

SEQ ID NO: 238420 - DNA, 20 bp, Artificial Sequence
  Description of Artificial Sequence: Synthetic oligonucleotide
  Target: LAMA2; (-) strand; PAM type: YTN; PAM sequence: TTT
tttccacctgaagtttctga

SEQ ID NO: 238421 - DNA, 20 bp, Artificial Sequence
  Description of Artificial Sequence: Synthetic oligonucleotide
  Target: LAMA2; (-) strand; PAM type: YTN; PAM sequence: TTG
ttttttccacctgaagtttc

SEQ ID NO: 238422 - DNA, 20 bp, Artificial Sequence
  Description of Artificial Sequence: Synthetic oligonucleotide
  Target: LAMA2; (-) strand; PAM type: YTN; PAM sequence: TTG
atataaataataccataatg

SEQ ID NO: 238423 - DNA, 20 bp, Artificial Sequence
  Description of Artificial Sequence: Synthetic oligonucleotide
  Target: LAMA2; (-) strand; PAM type: YTN; PAM sequence: CTT
gatataaataataccataat

SEQ ID NO: 238424 - DNA, 20 bp, Artificial Sequence
  Description of Artificial Sequence: Synthetic oligonucleotide
  Target: LAMA2; (-) strand; PAM type: YTN; PAM sequence: TTA
caacttgatataaataatac

SEQ ID NO: 238425 - DNA, 20 bp, Artificial Sequence
  Description of Artificial Sequence: Synthetic oligonucleotide
  Target: LAMA2; (-) strand; PAM type: YTN; PAM sequence: TTT
acaacttgatataaataata

SEQ ID NO: 238426 - DNA, 20 bp, Artificial Sequence
  Description of Artificial Sequence: Synthetic oligonucleotide
  Target: LAMA2; (-) strand; PAM type: YTN; PAM sequence: TTT
tacaacttgatataaataat

SEQ ID NO: 238427 - DNA, 20 bp, Artificial Sequence
  Description of Artificial Sequence: Synthetic oligonucleotide
  Target: LAMA2; (-) strand; PAM type: YTN; PAM sequence: TTA
tgttttacaacttgatataa

SEQ ID NO: 238428 - DNA, 20 bp, Artificial Sequence
  Description of Artificial Sequence: Synthetic oligonucleotide
  Target: LAMA2; (-) strand; PAM type: YTN; PAM sequence: TTT
atgttttacaacttgatata

SEQ ID NO: 238429 - DNA, 20 bp, Artificial Sequence
  Description of Artificial Sequence: Synthetic oligonucleotide
  Target: LAMA2; (-) strand; PAM type: YTN; PAM sequence: TTT
tatgttttacaacttgatat

SEQ ID NO: 238430 - DNA, 20 bp, Artificial Sequence
  Description of Artificial Sequence: Synthetic oligonucleotide
  Target: LAMA2; (-) strand; PAM type: YTN; PAM sequence: TTG
ttttatgttttacaacttga

SEQ ID NO: 238431 - DNA, 20 bp, Artificial Sequence
  Description of Artificial Sequence: Synthetic oligonucleotide
  Target: LAMA2; (-) strand; PAM type: YTN; PAM sequence: TTC
acaaacaatgtagcattgtt

SEQ ID NO: 238432 - DNA, 20 bp, Artificial Sequence
  Description of Artificial Sequence: Synthetic oligonucleotide
  Target: LAMA2; (-) strand; PAM type: YTN; PAM sequence: TTA
taatatatgtattcacaaac

SEQ ID NO: 238433 - DNA, 20 bp, Artificial Sequence
  Description of Artificial Sequence: Synthetic oligonucleotide
  Target: LAMA2; (-) strand; PAM type: YTN; PAM sequence: TTA
attataatatatgtattcac

SEQ ID NO: 238434 - DNA, 20 bp, Artificial Sequence
  Description of Artificial Sequence: Synthetic oligonucleotide
  Target: LAMA2; (-) strand; PAM type: YTN; PAM sequence: TTT
aattataatatatgtattca

SEQ ID NO: 238435 - DNA, 20 bp, Artificial Sequence
  Description of Artificial Sequence: Synthetic oligonucleotide
  Target: LAMA2; (-) strand; PAM type: YTN; PAM sequence: TTT
taattataatatatgtattc

SEQ ID NO: 238436 - DNA, 20 bp, Artificial Sequence
  Description of Artificial Sequence: Synthetic oligonucleotide
  Target: LAMA2; (-) strand; PAM type: YTN; PAM sequence: TTT
ttaattataatatatgtatt

SEQ ID NO: 238437 - DNA, 20 bp, Artificial Sequence
  Description of Artificial Sequence: Synthetic oligonucleotide
  Target: LAMA2; (-) strand; PAM type: YTN; PAM sequence: TTT
tttaattataatatatgtat

SEQ ID NO: 238438 - DNA, 20 bp, Artificial Sequence
  Description of Artificial Sequence: Synthetic oligonucleotide
  Target: LAMA2; (-) strand; PAM type: YTN; PAM sequence: TTA
aattttttaattataatata

SEQ ID NO: 238439 - DNA, 20 bp, Artificial Sequence
  Description of Artificial Sequence: Synthetic oligonucleotide
  Target: LAMA2; (-) strand; PAM type: YTN; PAM sequence: TTT
aaattttttaattataatat

SEQ ID NO: 238440 - DNA, 20 bp, Artificial Sequence
  Description of Artificial Sequence: Synthetic oligonucleotide
  Target: LAMA2; (-) strand; PAM type: YTN; PAM sequence: CTA
caagtgtatttaaatttttt

SEQ ID NO: 238441 - DNA, 20 bp, Artificial Sequence
  Description of Artificial Sequence: Synthetic oligonucleotide
  Target: LAMA2; (-) strand; PAM type: YTN; PAM sequence: TTA
ccctacaagtgtatttaaat

SEQ ID NO: 238442 - DNA, 20 bp, Artificial Sequence
  Description of Artificial Sequence: Synthetic oligonucleotide
  Target: LAMA2; (-) strand; PAM type: YTN; PAM sequence: CTT
accctacaagtgtatttaaa

SEQ ID NO: 238443 - DNA, 20 bp, Artificial Sequence
  Description of Artificial Sequence: Synthetic oligonucleotide
  Target: LAMA2; (-) strand; PAM type: YTN; PAM sequence: TTA
gtacttaccctacaagtgta

SEQ ID NO: 238444 - DNA, 20 bp, Artificial Sequence
  Description of Artificial Sequence: Synthetic oligonucleotide
  Target: LAMA2; (-) strand; PAM type: YTN; PAM sequence: CTG
aaattagtacttaccctaca

SEQ ID NO: 238445 - DNA, 20 bp, Artificial Sequence
  Description of Artificial Sequence: Synthetic oligonucleotide
  Target: LAMA2; (-) strand; PAM type: YTN; PAM sequence: TTC
tgaaattagtacttacccta

SEQ ID NO: 238446 - DNA, 20 bp, Artificial Sequence
  Description of Artificial Sequence: Synthetic oligonucleotide
  Target: LAMA2; (-) strand; PAM type: YTN; PAM sequence: CTA
ttctgaaattagtacttacc

SEQ ID NO: 238447 - DNA, 20 bp, Artificial Sequence
  Description of Artificial Sequence: Synthetic oligonucleotide
  Target: LAMA2; (-) strand; PAM type: YTN; PAM sequence: CTA
ctattctgaaattagtactt

SEQ ID NO: 238448 - DNA, 20 bp, Artificial Sequence
  Description of Artificial Sequence: Synthetic oligonucleotide
  Target: LAMA2; (-) strand; PAM type: YTN; PAM sequence: CTA
gaggtaactactattctgaa

SEQ ID NO: 238449 - DNA, 20 bp, Artificial Sequence
  Description of Artificial Sequence: Synthetic oligonucleotide
  Target: LAMA2; (-) strand; PAM type: YTN; PAM sequence: CTC
tagaggtaactactattctg

SEQ ID NO: 238450 - DNA, 20 bp, Artificial Sequence
  Description of Artificial Sequence: Synthetic oligonucleotide
  Target: LAMA2; (-) strand; PAM type: YTN; PAM sequence: TTC
tctagaggtaactactattc

SEQ ID NO: 238451 - DNA, 20 bp, Artificial Sequence
  Description of Artificial Sequence: Synthetic oligonucleotide
  Target: LAMA2; (-) strand; PAM type: YTN; PAM sequence: TTT
ctctagaggtaactactatt

SEQ ID NO: 238452 - DNA, 20 bp, Artificial Sequence
  Description of Artificial Sequence: Synthetic oligonucleotide
  Target: LAMA2; (-) strand; PAM type: YTN; PAM sequence: CTG
tttctctagaggtaactact

SEQ ID NO: 238453 - DNA, 20 bp, Artificial Sequence
  Description of Artificial Sequence: Synthetic oligonucleotide
  Target: LAMA2; (-) strand; PAM type: YTN; PAM sequence: TTC
ctgtttctctagaggtaact

SEQ ID NO: 238454 - DNA, 20 bp, Artificial Sequence
  Description of Artificial Sequence: Synthetic oligonucleotide
  Target: LAMA2; (-) strand; PAM type: YTN; PAM sequence: TTT
cctgtttctctagaggtaac

SEQ ID NO: 238455 - DNA, 20 bp, Artificial Sequence
  Description of Artificial Sequence: Synthetic oligonucleotide
  Target: LAMA2; (-) strand; PAM type: YTN; PAM sequence: CTT
tcctgtttctctagaggtaa

SEQ ID NO: 238456 - DNA, 20 bp, Artificial Sequence
  Description of Artificial Sequence: Synthetic oligonucleotide
  Target: LAMA2; (-) strand; PAM type: YTN; PAM sequence: TTC
cctttcctgtttctctagag

SEQ ID NO: 238457 - DNA, 20 bp, Artificial Sequence
  Description of Artificial Sequence: Synthetic oligonucleotide
  Target: LAMA2; (-) strand; PAM type: YTN; PAM sequence: TTA
ttccctttcctgtttctcta

SEQ ID NO: 238458 - DNA, 20 bp, Artificial Sequence
  Description of Artificial Sequence: Synthetic oligonucleotide
  Target: LAMA2; (-) strand; PAM type: YTN; PAM sequence: TTT
attccctttcctgtttctct

SEQ ID NO: 238459 - DNA, 20 bp, Artificial Sequence
  Description of Artificial Sequence: Synthetic oligonucleotide
  Target: LAMA2; (-) strand; PAM type: YTN; PAM sequence: TTT
tattccctttcctgtttctc

SEQ ID NO: 238460 - DNA, 20 bp, Artificial Sequence
  Description of Artificial Sequence: Synthetic oligonucleotide
  Target: LAMA2; (-) strand; PAM type: YTN; PAM sequence: CTG
ttttattccctttcctgttt

SEQ ID NO: 238461 - DNA, 20 bp, Artificial Sequence
  Description of Artificial Sequence: Synthetic oligonucleotide
  Target: LAMA2; (-) strand; PAM type: YTN; PAM sequence: TTC
tgttttattccctttcctgt

SEQ ID NO: 238462 - DNA, 20 bp, Artificial Sequence
  Description of Artificial Sequence: Synthetic oligonucleotide
  Target: LAMA2; (-) strand; PAM type: YTN; PAM sequence: CTT
ctgttttattccctttcctg

SEQ ID NO: 238463 - DNA, 20 bp, Artificial Sequence
  Description of Artificial Sequence: Synthetic oligonucleotide
  Target: LAMA2; (-) strand; PAM type: YTN; PAM sequence: TTC
acttctgttttattcccttt

SEQ ID NO: 238464 - DNA, 20 bp, Artificial Sequence
  Description of Artificial Sequence: Synthetic oligonucleotide
  Target: LAMA2; (-) strand; PAM type: YTN; PAM sequence: TTT
cacttctgttttattccctt

SEQ ID NO: 238465 - DNA, 20 bp, Artificial Sequence
  Description of Artificial Sequence: Synthetic oligonucleotide
  Target: LAMA2; (-) strand; PAM type: YTN; PAM sequence: CTC
atttcacttctgttttattc

SEQ ID NO: 238466 - DNA, 20 bp, Artificial Sequence
  Description of Artificial Sequence: Synthetic oligonucleotide
  Target: LAMA2; (-) strand; PAM type: YTN; PAM sequence: TTA
gatacaaatgaatctcattt

SEQ ID NO: 238467 - DNA, 20 bp, Artificial Sequence
  Description of Artificial Sequence: Synthetic oligonucleotide
  Target: LAMA2; (-) strand; PAM type: YTN; PAM sequence: CTT
agatacaaatgaatctcatt

SEQ ID NO: 238468 - DNA, 20 bp, Artificial Sequence
  Description of Artificial Sequence: Synthetic oligonucleotide
  Target: LAMA2; (-) strand; PAM type: YTN; PAM sequence: TTA
aagcaatgatacttagatac

SEQ ID NO: 238469 - DNA, 20 bp, Artificial Sequence
  Description of Artificial Sequence: Synthetic oligonucleotide
  Target: LAMA2; (-) strand; PAM type: YTN; PAM sequence: TTT
aaagcaatgatacttagata

SEQ ID NO: 238470 - DNA, 20 bp, Artificial Sequence
  Description of Artificial Sequence: Synthetic oligonucleotide
  Target: LAMA2; (-) strand; PAM type: YTN; PAM sequence: TTT
taaagcaatgatacttagat

SEQ ID NO: 238471 - DNA, 20 bp, Artificial Sequence
  Description of Artificial Sequence: Synthetic oligonucleotide
  Target: LAMA2; (-) strand; PAM type: YTN; PAM sequence: TTT
ttaaagcaatgatacttaga

SEQ ID NO: 238472 - DNA, 20 bp, Artificial Sequence
  Description of Artificial Sequence: Synthetic oligonucleotide
  Target: LAMA2; (-) strand; PAM type: YTN; PAM sequence: CTC
agatatatttttaaagcaat

SEQ ID NO: 238473 - DNA, 20 bp, Artificial Sequence
  Description of Artificial Sequence: Synthetic oligonucleotide
  Target: LAMA2; (-) strand; PAM type: YTN; PAM sequence: TTG
cctcagatatatttttaaag

SEQ ID NO: 238474 - DNA, 20 bp, Artificial Sequence
  Description of Artificial Sequence: Synthetic oligonucleotide
  Target: LAMA2; (-) strand; PAM type: YTN; PAM sequence: TTT
gcctcagatatatttttaaa

SEQ ID NO: 238475 - DNA, 20 bp, Artificial Sequence
  Description of Artificial Sequence: Synthetic oligonucleotide
  Target: LAMA2; (-) strand; PAM type: YTN; PAM sequence: TTA
tatttgcctcagatatattt

SEQ ID NO: 238476 - DNA, 20 bp, Artificial Sequence
  Description of Artificial Sequence: Synthetic oligonucleotide
  Target: LAMA2; (-) strand; PAM type: YTN; PAM sequence: TTT
atatttgcctcagatatatt

SEQ ID NO: 238477 - DNA, 20 bp, Artificial Sequence
  Description of Artificial Sequence: Synthetic oligonucleotide
  Target: LAMA2; (-) strand; PAM type: YTN; PAM sequence: TTT
tatatttgcctcagatatat

SEQ ID NO: 238478 - DNA, 20 bp, Artificial Sequence
  Description of Artificial Sequence: Synthetic oligonucleotide
  Target: LAMA2; (-) strand; PAM type: YTN; PAM sequence: TTA
tattttatatttgcctcaga

SEQ ID NO: 238479 - DNA, 20 bp, Artificial Sequence
  Description of Artificial Sequence: Synthetic oligonucleotide
  Target: LAMA2; (-) strand; PAM type: YTN; PAM sequence: TTT
atattttatatttgcctcag

SEQ ID NO: 238480 - DNA, 20 bp, Artificial Sequence
  Description of Artificial Sequence: Synthetic oligonucleotide
  Target: LAMA2; (-) strand; PAM type: YTN; PAM sequence: CTA
gaggtaacaaaatatttata

SEQ ID NO: 238481 - DNA, 20 bp, Artificial Sequence
  Description of Artificial Sequence: Synthetic oligonucleotide
  Target: LAMA2; (-) strand; PAM type: YTN; PAM sequence: TTA
cccatgcaacctagaggtaa

SEQ ID NO: 238482 - DNA, 20 bp, Artificial Sequence
  Description of Artificial Sequence: Synthetic oligonucleotide
  Target: LAMA2; (-) strand; PAM type: YTN; PAM sequence: TTC
aaaaagcacatataacatgc

SEQ ID NO: 238483 - DNA, 20 bp, Artificial Sequence
  Description of Artificial Sequence: Synthetic oligonucleotide
  Target: LAMA2; (-) strand; PAM type: YTN; PAM sequence: TTA
agacattcaaaaagcacata

SEQ ID NO: 238484 - DNA, 20 bp, Artificial Sequence
  Description of Artificial Sequence: Synthetic oligonucleotide
  Target: LAMA2; (-) strand; PAM type: YTN; PAM sequence: TTA
tattaagacattcaaaaagc

SEQ ID NO: 238485 - DNA, 20 bp, Artificial Sequence
  Description of Artificial Sequence: Synthetic oligonucleotide
  Target: LAMA2; (-) strand; PAM type: YTN; PAM sequence: TTA
gaaattatattaagacattc

SEQ ID NO: 238486 - DNA, 20 bp, Artificial Sequence
  Description of Artificial Sequence: Synthetic oligonucleotide
  Target: LAMA2; (-) strand; PAM type: YTN; PAM sequence: TTA
aattagaaattatattaaga

SEQ ID NO: 238487 - DNA, 20 bp, Artificial Sequence
  Description of Artificial Sequence: Synthetic oligonucleotide
  Target: LAMA2; (-) strand; PAM type: YTN; PAM sequence: TTT
aaattagaaattatattaag

SEQ ID NO: 238488 - DNA, 20 bp, Artificial Sequence
  Description of Artificial Sequence: Synthetic oligonucleotide
  Target: LAMA2; (-) strand; PAM type: YTN; PAM sequence: TTT
taaattagaaattatattaa

SEQ ID NO: 238489 - DNA, 20 bp, Artificial Sequence
  Description of Artificial Sequence: Synthetic oligonucleotide
  Target: LAMA2; (-) strand; PAM type: YTN; PAM sequence: TTA
aagaaattttaaattagaaa

SEQ ID NO: 238490 - DNA, 20 bp, Artificial Sequence
  Description of Artificial Sequence: Synthetic oligonucleotide
  Target: LAMA2; (-) strand; PAM type: YTN; PAM sequence: TTC
aattaaagaaattttaaatt

SEQ ID NO: 238491 - DNA, 20 bp, Artificial Sequence
  Description of Artificial Sequence: Synthetic oligonucleotide
  Target: LAMA2; (-) strand; PAM type: YTN; PAM sequence: TTA
cattcaattaaagaaatttt

SEQ ID NO: 238492 - DNA, 20 bp, Artificial Sequence
  Description of Artificial Sequence: Synthetic oligonucleotide
  Target: LAMA2; (-) strand; PAM type: YTN; PAM sequence: TTT
acattcaattaaagaaattt

SEQ ID NO: 238493 - DNA, 20 bp, Artificial Sequence
  Description of Artificial Sequence: Synthetic oligonucleotide
  Target: LAMA2; (-) strand; PAM type: YTN; PAM sequence: TTT
tacattcaattaaagaaatt

SEQ ID NO: 238494 - DNA, 20 bp, Artificial Sequence
  Description of Artificial Sequence: Synthetic oligonucleotide
  Target: LAMA2; (-) strand; PAM type: YTN; PAM sequence: TTT
ttacattcaattaaagaaat

SEQ ID NO: 238495 - DNA, 20 bp, Artificial Sequence
  Description of Artificial Sequence: Synthetic oligonucleotide
  Target: LAMA2; (-) strand; PAM type: YTN; PAM sequence: TTT
tttacattcaattaaagaaa

SEQ ID NO: 238496 - DNA, 20 bp, Artificial Sequence
  Description of Artificial Sequence: Synthetic oligonucleotide
  Target: LAMA2; (-) strand; PAM type: YTN; PAM sequence: CTT
ttttacattcaattaaagaa

SEQ ID NO: 238497 - DNA, 20 bp, Artificial Sequence
  Description of Artificial Sequence: Synthetic oligonucleotide
  Target: LAMA2; (-) strand; PAM type: YTN; PAM sequence: TTC
ttttttacattcaattaaag

SEQ ID NO: 238498 - DNA, 20 bp, Artificial Sequence
  Description of Artificial Sequence: Synthetic oligonucleotide
  Target: LAMA2; (-) strand; PAM type: YTN; PAM sequence: CTG
gaattcttttttacattcaa

SEQ ID NO: 238499 - DNA, 20 bp, Artificial Sequence
  Description of Artificial Sequence: Synthetic oligonucleotide
  Target: LAMA2; (-) strand; PAM type: YTN; PAM sequence: TTA
aatctggaattcttttttac

SEQ ID NO: 238500 - DNA, 20 bp, Artificial Sequence
  Description of Artificial Sequence: Synthetic oligonucleotide
  Target: LAMA2; (-) strand; PAM type: YTN; PAM sequence: TTT
aaatctggaattctttttta

SEQ ID NO: 238501 - DNA, 20 bp, Artificial Sequence
  Description of Artificial Sequence: Synthetic oligonucleotide
  Target: LAMA2; (-) strand; PAM type: YTN; PAM sequence: TTT
taaatctggaattctttttt

SEQ ID NO: 238502 - DNA, 20 bp, Artificial Sequence
  Description of Artificial Sequence: Synthetic oligonucleotide
  Target: LAMA2; (-) strand; PAM type: YTN; PAM sequence: TTT
ttaaatctggaattcttttt

SEQ ID NO: 238503 - DNA, 20 bp, Artificial Sequence
  Description of Artificial Sequence: Synthetic oligonucleotide
  Target: LAMA2; (-) strand; PAM type: YTN; PAM sequence: CTT
tttaaatctggaattctttt

SEQ ID NO: 238504 - DNA, 20 bp, Artificial Sequence
  Description of Artificial Sequence: Synthetic oligonucleotide
  Target: LAMA2; (-) strand; PAM type: YTN; PAM sequence: CTC
tttttaaatctggaattctt

SEQ ID NO: 238505 - DNA, 20 bp, Artificial Sequence
  Description of Artificial Sequence: Synthetic oligonucleotide
  Target: LAMA2; (-) strand; PAM type: YTN; PAM sequence: CTC
ctctttttaaatctggaatt

SEQ ID NO: 238506 - DNA, 20 bp, Artificial Sequence
  Description of Artificial Sequence: Synthetic oligonucleotide
  Target: LAMA2; (-) strand; PAM type: YTN; PAM sequence: TTC
tcctctttttaaatctggaa

SEQ ID NO: 238507 - DNA, 20 bp, Artificial Sequence
  Description of Artificial Sequence: Synthetic oligonucleotide
  Target: LAMA2; (-) strand; PAM type: YTN; PAM sequence: TTC
attctcctctttttaaatct

SEQ ID NO: 238508 - DNA, 20 bp, Artificial Sequence
  Description of Artificial Sequence: Synthetic oligonucleotide
  Target: LAMA2; (-) strand; PAM type: YTN; PAM sequence: TTT
cattctcctctttttaaatc

SEQ ID NO: 238509 - DNA, 20 bp, Artificial Sequence
  Description of Artificial Sequence: Synthetic oligonucleotide
  Target: LAMA2; (-) strand; PAM type: YTN; PAM sequence: TTA
aaaatttcattctcctcttt

SEQ ID NO: 238510 - DNA, 20 bp, Artificial Sequence
  Description of Artificial Sequence: Synthetic oligonucleotide
  Target: LAMA2; (-) strand; PAM type: YTN; PAM sequence: TTG
tattaaaaatttcattctcc

SEQ ID NO: 238511 - DNA, 20 bp, Artificial Sequence
  Description of Artificial Sequence: Synthetic oligonucleotide
  Target: LAMA2; (-) strand; PAM type: YTN; PAM sequence: TTG
acattgtattaaaaatttca

SEQ ID NO: 238512 - DNA, 20 bp, Artificial Sequence
  Description of Artificial Sequence: Synthetic oligonucleotide
  Target: LAMA2; (-) strand; PAM type: YTN; PAM sequence: TTA
tgtgtaaaatgtaataatgt

SEQ ID NO: 238513 - DNA, 20 bp, Artificial Sequence
  Description of Artificial Sequence: Synthetic oligonucleotide
  Target: LAMA2; (-) strand; PAM type: YTN; PAM sequence: CTT
atgtgtaaaatgtaataatg

SEQ ID NO: 238514 - DNA, 20 bp, Artificial Sequence
  Description of Artificial Sequence: Synthetic oligonucleotide
  Target: LAMA2; (-) strand; PAM type: YTN; PAM sequence: TTG
aagagaaaatcttatgtgta

SEQ ID NO: 238515 - DNA, 20 bp, Artificial Sequence
  Description of Artificial Sequence: Synthetic oligonucleotide
  Target: LAMA2; (-) strand; PAM type: YTN; PAM sequence: TTG
ttgaagagaaaatcttatgt

SEQ ID NO: 238516 - DNA, 20 bp, Artificial Sequence
  Description of Artificial Sequence: Synthetic oligonucleotide
  Target: LAMA2; (-) strand; PAM type: YTN; PAM sequence: TTA
acatcattgttgaagagaaa

SEQ ID NO: 238517 - DNA, 20 bp, Artificial Sequence
  Description of Artificial Sequence: Synthetic oligonucleotide
  Target: LAMA2; (-) strand; PAM type: YTN; PAM sequence: TTC
attaacatcattgttgaaga

SEQ ID NO: 238518 - DNA, 20 bp, Artificial Sequence
  Description of Artificial Sequence: Synthetic oligonucleotide
  Target: LAMA2; (-) strand; PAM type: YTN; PAM sequence: TTG
aaatataatgatgataatat

SEQ ID NO: 238519 - DNA, 20 bp, Artificial Sequence
  Description of Artificial Sequence: Synthetic oligonucleotide
  Target: LAMA2; (-) strand; PAM type: YTN; PAM sequence: TTT
gaaatataatgatgataata

SEQ ID NO: 238520 - DNA, 20 bp, Artificial Sequence
  Description of Artificial Sequence: Synthetic oligonucleotide
  Target: LAMA2; (-) strand; PAM type: YTN; PAM sequence: TTT
tgaaatataatgatgataat

SEQ ID NO: 238521 - DNA, 20 bp, Artificial Sequence
  Description of Artificial Sequence: Synthetic oligonucleotide
  Target: LAMA2; (-) strand; PAM type: YTN; PAM sequence: TTC
acattttgaaatataatgat

SEQ ID NO: 238522 - DNA, 20 bp, Artificial Sequence
  Description of Artificial Sequence: Synthetic oligonucleotide
  Target: LAMA2; (-) strand; PAM type: YTN; PAM sequence: TTT
cacattttgaaatataatga

SEQ ID NO: 238523 - DNA, 20 bp, Artificial Sequence
  Description of Artificial Sequence: Synthetic oligonucleotide
  Target: LAMA2; (-) strand; PAM type: YTN; PAM sequence: CTT
tcacattttgaaatataatg

SEQ ID NO: 238524 - DNA, 20 bp, Artificial Sequence
  Description of Artificial Sequence: Synthetic oligonucleotide
  Target: LAMA2; (-) strand; PAM type: YTN; PAM sequence: CTG
ctttcacattttgaaatata

SEQ ID NO: 238525 - DNA, 20 bp, Artificial Sequence
  Description of Artificial Sequence: Synthetic oligonucleotide
  Target: LAMA2; (-) strand; PAM type: YTN; PAM sequence: CTA
gcactgctttcacattttga

SEQ ID NO: 238526 - DNA, 20 bp, Artificial Sequence
  Description of Artificial Sequence: Synthetic oligonucleotide
  Target: LAMA2; (-) strand; PAM type: YTN; PAM sequence: TTG
agctagcactgctttcacat

SEQ ID NO: 238527 - DNA, 20 bp, Artificial Sequence
  Description of Artificial Sequence: Synthetic oligonucleotide
  Target: LAMA2; (-) strand; PAM type: YTN; PAM sequence: CTT
gagctagcactgctttcaca

SEQ ID NO: 238528 - DNA, 20 bp, Artificial Sequence
  Description of Artificial Sequence: Synthetic oligonucleotide
  Target: LAMA2; (-) strand; PAM type: YTN; PAM sequence: TTG
agtgtcttgagctagcactg

SEQ ID NO: 238529 - DNA, 20 bp, Artificial Sequence
  Description of Artificial Sequence: Synthetic oligonucleotide
  Target: LAMA2; (-) strand; PAM type: YTN; PAM sequence: TTT
gagtgtcttgagctagcact

SEQ ID NO: 238530 - DNA, 20 bp, Artificial Sequence
  Description of Artificial Sequence: Synthetic oligonucleotide
  Target: LAMA2; (-) strand; PAM type: YTN; PAM sequence: TTA
taaacatttgagtgtcttga

SEQ ID NO: 238531 - DNA, 20 bp, Artificial Sequence
  Description of Artificial Sequence: Synthetic oligonucleotide
  Target: LAMA2; (-) strand; PAM type: YTN; PAM sequence: TTA
acaatgcaaaaatattataa

SEQ ID NO: 238532 - DNA, 20 bp, Artificial Sequence
  Description of Artificial Sequence: Synthetic oligonucleotide
  Target: LAMA2; (-) strand; PAM type: YTN; PAM sequence: TTT
aacaatgcaaaaatattata

SEQ ID NO: 238533 - DNA, 20 bp, Artificial Sequence
  Description of Artificial Sequence: Synthetic oligonucleotide
  Target: LAMA2; (-) strand; PAM type: YTN; PAM sequence: TTT
taacaatgcaaaaatattat

SEQ ID NO: 238534 - DNA, 20 bp, Artificial Sequence
  Description of Artificial Sequence: Synthetic oligonucleotide
  Target: LAMA2; (-) strand; PAM type: YTN; PAM sequence: TTT
ttaacaatgcaaaaatatta

SEQ ID NO: 238535 - DNA, 20 bp, Artificial Sequence
  Description of Artificial Sequence: Synthetic oligonucleotide
  Target: LAMA2; (-) strand; PAM type: YTN; PAM sequence: TTC
aacatttttaacaatgcaaa

SEQ ID NO: 238536 - DNA, 20 bp, Artificial Sequence
  Description of Artificial Sequence: Synthetic oligonucleotide
  Target: LAMA2; (-) strand; PAM type: YTN; PAM sequence: TTT
caacatttttaacaatgcaa

SEQ ID NO: 238537 - DNA, 20 bp, Artificial Sequence
  Description of Artificial Sequence: Synthetic oligonucleotide
  Target: LAMA2; (-) strand; PAM type: YTN; PAM sequence: TTC
gtgagagaaatttcaacatt

SEQ ID NO: 238538 - DNA, 20 bp, Artificial Sequence
  Description of Artificial Sequence: Synthetic oligonucleotide
  Target: LAMA2; (-) strand; PAM type: YTN; PAM sequence: TTG
taattcgtgagagaaatttc

SEQ ID NO: 238539 - DNA, 20 bp, Artificial Sequence
  Description of Artificial Sequence: Synthetic oligonucleotide
  Target: LAMA2; (-) strand; PAM type: YTN; PAM sequence: CTT
gtaattcgtgagagaaattt

SEQ ID NO: 238540 - DNA, 20 bp, Artificial Sequence
  Description of Artificial Sequence: Synthetic oligonucleotide
  Target: LAMA2; (-) strand; PAM type: YTN; PAM sequence: CTC
ttgtaattcgtgagagaaat

SEQ ID NO: 238541 - DNA, 20 bp, Artificial Sequence
  Description of Artificial Sequence: Synthetic oligonucleotide
  Target: LAMA2; (-) strand; PAM type: YTN; PAM sequence: TTG
cctcttgtaattcgtgagag

SEQ ID NO: 238542 - DNA, 20 bp, Artificial Sequence
  Description of Artificial Sequence: Synthetic oligonucleotide
  Target: LAMA2; (-) strand; PAM type: YTN; PAM sequence: CTT
gcctcttgtaattcgtgaga

SEQ ID NO: 238543 - DNA, 20 bp, Artificial Sequence
  Description of Artificial Sequence: Synthetic oligonucleotide
  Target: LAMA2; (-) strand; PAM type: YTN; PAM sequence: TTG
acttgcctcttgtaattcgt

SEQ ID NO: 238544 - DNA, 20 bp, Artificial Sequence
  Description of Artificial Sequence: Synthetic oligonucleotide
  Target: LAMA2; (-) strand; PAM type: YTN; PAM sequence: CTG
agattgacttgcctcttgta

SEQ ID NO: 238545 - DNA, 20 bp, Artificial Sequence
  Description of Artificial Sequence: Synthetic oligonucleotide
  Target: LAMA2; (-) strand; PAM type: YTN; PAM sequence: TTG
tcatatatctgagattgact

SEQ ID NO: 238546 - DNA, 20 bp, Artificial Sequence
  Description of Artificial Sequence: Synthetic oligonucleotide
  Target: LAMA2; (-) strand; PAM type: YTN; PAM sequence: CTT
gtcatatatctgagattgac

SEQ ID NO: 238547 - DNA, 20 bp, Artificial Sequence
  Description of Artificial Sequence: Synthetic oligonucleotide
  Target: LAMA2; (-) strand; PAM type: YTN; PAM sequence: TTA
tagtcaatgacttgtcatat

SEQ ID NO: 238548 - DNA, 20 bp, Artificial Sequence
  Description of Artificial Sequence: Synthetic oligonucleotide
  Target: LAMA2; (-) strand; PAM type: YTN; PAM sequence: CTT
atagtcaatgacttgtcata

SEQ ID NO: 238549 - DNA, 20 bp, Artificial Sequence
  Description of Artificial Sequence: Synthetic oligonucleotide
  Target: LAMA2; (-) strand; PAM type: YTN; PAM sequence: CTG
agagtcagacagcacttata

SEQ ID NO: 238550 - DNA, 20 bp, Artificial Sequence
  Description of Artificial Sequence: Synthetic oligonucleotide
  Target: LAMA2; (-) strand; PAM type: YTN; PAM sequence: TTG
aaataaacaaatactgagag

SEQ ID NO: 238551 - DNA, 20 bp, Artificial Sequence
  Description of Artificial Sequence: Synthetic oligonucleotide
  Target: LAMA2; (-) strand; PAM type: YTN; PAM sequence: CTT
gaaataaacaaatactgaga

SEQ ID NO: 238552 - DNA, 20 bp, Artificial Sequence
  Description of Artificial Sequence: Synthetic oligonucleotide
  Target: LAMA2; (-) strand; PAM type: YTN; PAM sequence: CTA
gcatatggtacttgaaataa

SEQ ID NO: 238553 - DNA, 20 bp, Artificial Sequence
  Description of Artificial Sequence: Synthetic oligonucleotide
  Target: LAMA2; (-) strand; PAM type: YTN; PAM sequence: TTC
tagcatatggtacttgaaat

SEQ ID NO: 238554 - DNA, 20 bp, Artificial Sequence
  Description of Artificial Sequence: Synthetic oligonucleotide
  Target: LAMA2; (-) strand; PAM type: YTN; PAM sequence: TTT
ctagcatatggtacttgaaa

SEQ ID NO: 238555 - DNA, 20 bp, Artificial Sequence
  Description of Artificial Sequence: Synthetic oligonucleotide
  Target: LAMA2; (-) strand; PAM type: YTN; PAM sequence: CTG
caaaagagccaatttctagc

SEQ ID NO: 238556 - DNA, 20 bp, Artificial Sequence
  Description of Artificial Sequence: Synthetic oligonucleotide
  Target: LAMA2; (-) strand; PAM type: YTN; PAM sequence: TTG
cataaataatatgacaccaa

SEQ ID NO: 238557 - DNA, 20 bp, Artificial Sequence
  Description of Artificial Sequence: Synthetic oligonucleotide
  Target: LAMA2; (-) strand; PAM type: YTN; PAM sequence: TTT
gcataaataatatgacacca

SEQ ID NO: 238558 - DNA, 20 bp, Artificial Sequence
  Description of Artificial Sequence: Synthetic oligonucleotide
  Target: LAMA2; (-) strand; PAM type: YTN; PAM sequence: TTT
tgcataaataatatgacacc

SEQ ID NO: 238559 - DNA, 20 bp, Artificial Sequence
  Description of Artificial Sequence: Synthetic oligonucleotide
  Target: LAMA2; (-) strand; PAM type: YTN; PAM sequence: CTG
attttgcataaataatatga

SEQ ID NO: 238560 - DNA, 20 bp, Artificial Sequence
  Description of Artificial Sequence: Synthetic oligonucleotide
  Target: LAMA2; (-) strand; PAM type: YTN; PAM sequence: CTA
cataccaactgattttgcat

SEQ ID NO: 238561 - DNA, 20 bp, Artificial Sequence
  Description of Artificial Sequence: Synthetic oligonucleotide
  Target: LAMA2; (-) strand; PAM type: YTN; PAM sequence: TTC
tacataccaactgattttgc

SEQ ID NO: 238562 - DNA, 20 bp, Artificial Sequence
  Description of Artificial Sequence: Synthetic oligonucleotide
  Target: LAMA2; (-) strand; PAM type: YTN; PAM sequence: TTA
tgtgtgagattctacatacc

SEQ ID NO: 238563 - DNA, 20 bp, Artificial Sequence
  Description of Artificial Sequence: Synthetic oligonucleotide
  Target: LAMA2; (-) strand; PAM type: YTN; PAM sequence: TTA
tattatgtgtgagattctac

SEQ ID NO: 238564 - DNA, 20 bp, Artificial Sequence
  Description of Artificial Sequence: Synthetic oligonucleotide
  Target: LAMA2; (-) strand; PAM type: YTN; PAM sequence: TTT
atattatgtgtgagattcta

SEQ ID NO: 238565 - DNA, 20 bp, Artificial Sequence
  Description of Artificial Sequence: Synthetic oligonucleotide
  Target: LAMA2; (-) strand; PAM type: YTN; PAM sequence: CTA
gatcaatgtcaatttatatt

SEQ ID NO: 238566 - DNA, 20 bp, Artificial Sequence
  Description of Artificial Sequence: Synthetic oligonucleotide
  Target: LAMA2; (-) strand; PAM type: YTN; PAM sequence: CTA
actagatcaatgtcaattta

SEQ ID NO: 238567 - DNA, 20 bp, Artificial Sequence
  Description of Artificial Sequence: Synthetic oligonucleotide
  Target: LAMA2; (-) strand; PAM type: YTN; PAM sequence: TTC
ctaactagatcaatgtcaat

SEQ ID NO: 238568 - DNA, 20 bp, Artificial Sequence
  Description of Artificial Sequence: Synthetic oligonucleotide
  Target: LAMA2; (-) strand; PAM type: YTN; PAM sequence: TTG
ataaaaataaaagcacatgt

SEQ ID NO: 238569 - DNA, 20 bp, Artificial Sequence
  Description of Artificial Sequence: Synthetic oligonucleotide
  Target: LAMA2; (-) strand; PAM type: YTN; PAM sequence: TTT
gataaaaataaaagcacatg

SEQ ID NO: 238570 - DNA, 20 bp, Artificial Sequence
  Description of Artificial Sequence: Synthetic oligonucleotide
  Target: LAMA2; (-) strand; PAM type: YTN; PAM sequence: CTT
tgataaaaataaaagcacat

SEQ ID NO: 238571 - DNA, 20 bp, Artificial Sequence
  Description of Artificial Sequence: Synthetic oligonucleotide
  Target: LAMA2; (-) strand; PAM type: YTN; PAM sequence: TTA
taagactttgataaaaataa

SEQ ID NO: 238572 - DNA, 20 bp, Artificial Sequence
  Description of Artificial Sequence: Synthetic oligonucleotide
  Target: LAMA2; (-) strand; PAM type: YTN; PAM sequence: CTA
ttataagactttgataaaaa

SEQ ID NO: 238573 - DNA, 20 bp, Artificial Sequence
  Description of Artificial Sequence: Synthetic oligonucleotide
  Target: LAMA2; (-) strand; PAM type: YTN; PAM sequence: TTC
tattataagactttgataaa

SEQ ID NO: 238574 - DNA, 20 bp, Artificial Sequence
  Description of Artificial Sequence: Synthetic oligonucleotide
  Target: LAMA2; (-) strand; PAM type: YTN; PAM sequence: TTT
ctattataagactttgataa

SEQ ID NO: 238575 - DNA, 20 bp, Artificial Sequence
  Description of Artificial Sequence: Synthetic oligonucleotide
  Target: LAMA2; (-) strand; PAM type: YTN; PAM sequence: CTT
tctattataagactttgata

SEQ ID NO: 238576 - DNA, 20 bp, Artificial Sequence
  Description of Artificial Sequence: Synthetic oligonucleotide
  Target: LAMA2; (-) strand; PAM type: YTN; PAM sequence: TTA
tctttctattataagacttt

SEQ ID NO: 238577 - DNA, 20 bp, Artificial Sequence
  Description of Artificial Sequence: Synthetic oligonucleotide
  Target: LAMA2; (-) strand; PAM type: YTN; PAM sequence: TTT
atctttctattataagactt

SEQ ID NO: 238578 - DNA, 20 bp, Artificial Sequence
  Description of Artificial Sequence: Synthetic oligonucleotide
  Target: LAMA2; (-) strand; PAM type: YTN; PAM sequence: CTA
tttatctttctattataaga

SEQ ID NO: 238579 - DNA, 20 bp, Artificial Sequence
  Description of Artificial Sequence: Synthetic oligonucleotide
  Target: LAMA2; (-) strand; PAM type: YTN; PAM sequence: TTC
actatttatctttctattat

SEQ ID NO: 238580 - DNA, 20 bp, Artificial Sequence
  Description of Artificial Sequence: Synthetic oligonucleotide
  Target: LAMA2; (-) strand; PAM type: YTN; PAM sequence: CTT
cactatttatctttctatta

SEQ ID NO: 238581 - DNA, 20 bp, Artificial Sequence
  Description of Artificial Sequence: Synthetic oligonucleotide
  Target: LAMA2; (-) strand; PAM type: YTN; PAM sequence: CTA
cttcactatttatctttcta

SEQ ID NO: 238582 - DNA, 20 bp, Artificial Sequence
  Description of Artificial Sequence: Synthetic oligonucleotide
  Target: LAMA2; (-) strand; PAM type: YTN; PAM sequence: TTC
tacttcactatttatctttc

SEQ ID NO: 238583 - DNA, 20 bp, Artificial Sequence
  Description of Artificial Sequence: Synthetic oligonucleotide
  Target: LAMA2; (-) strand; PAM type: YTN; PAM sequence: CTT
ctacttcactatttatcttt

SEQ ID NO: 238584 - DNA, 20 bp, Artificial Sequence
  Description of Artificial Sequence: Synthetic oligonucleotide
  Target: LAMA2; (-) strand; PAM type: YTN; PAM sequence: CTA
gtcttctacttcactattta

SEQ ID NO: 238585 - DNA, 20 bp, Artificial Sequence
  Description of Artificial Sequence: Synthetic oligonucleotide
  Target: LAMA2; (-) strand; PAM type: YTN; PAM sequence: TTC
tagtcttctacttcactatt

SEQ ID NO: 238586 - DNA, 20 bp, Artificial Sequence
  Description of Artificial Sequence: Synthetic oligonucleotide
  Target: LAMA2; (-) strand; PAM type: YTN; PAM sequence: TTT
ctagtcttctacttcactat

SEQ ID NO: 238587 - DNA, 20 bp, Artificial Sequence
  Description of Artificial Sequence: Synthetic oligonucleotide
  Target: LAMA2; (-) strand; PAM type: YTN; PAM sequence: TTG
atttctagtcttctacttca

SEQ ID NO: 238588 - DNA, 20 bp, Artificial Sequence
  Description of Artificial Sequence: Synthetic oligonucleotide
  Target: LAMA2; (-) strand; PAM type: YTN; PAM sequence: TTT
gatttctagtcttctacttc

SEQ ID NO: 238589 - DNA, 20 bp, Artificial Sequence
  Description of Artificial Sequence: Synthetic oligonucleotide
  Target: LAMA2; (-) strand; PAM type: YTN; PAM sequence: CTT
tgatttctagtcttctactt

SEQ ID NO: 238590 - DNA, 20 bp, Artificial Sequence
  Description of Artificial Sequence: Synthetic oligonucleotide
  Target: LAMA2; (-) strand; PAM type: YTN; PAM sequence: TTA
atggaaaatgcaataaaaac

SEQ ID NO: 238591 - DNA, 20 bp, Artificial Sequence
  Description of Artificial Sequence: Synthetic oligonucleotide
  Target: LAMA2; (-) strand; PAM type: YTN; PAM sequence: CTT
aatggaaaatgcaataaaaa

SEQ ID NO: 238592 - DNA, 20 bp, Artificial Sequence
  Description of Artificial Sequence: Synthetic oligonucleotide
  Target: LAMA2; (-) strand; PAM type: YTN; PAM sequence: CTG
taaggacttaatggaaaatg

SEQ ID NO: 238593 - DNA, 20 bp, Artificial Sequence
  Description of Artificial Sequence: Synthetic oligonucleotide
  Target: LAMA2; (-) strand; PAM type: YTN; PAM sequence: CTC
gtgggcctgtaaggacttaa

SEQ ID NO: 238594 - DNA, 20 bp, Artificial Sequence
  Description of Artificial Sequence: Synthetic oligonucleotide
  Target: LAMA2; (-) strand; PAM type: YTN; PAM sequence: CTG
gagaggtaagccaaggccag

SEQ ID NO: 238595 - DNA, 20 bp, Artificial Sequence
  Description of Artificial Sequence: Synthetic oligonucleotide
  Target: LAMA2; (-) strand; PAM type: YTN; PAM sequence: TTC
tggagaggtaagccaaggcc

SEQ ID NO: 238596 - DNA, 20 bp, Artificial Sequence
  Description of Artificial Sequence: Synthetic oligonucleotide
  Target: LAMA2; (-) strand; PAM type: YTN; PAM sequence: CTC
aagaacattctggagaggta

SEQ ID NO: 238597 - DNA, 20 bp, Artificial Sequence
  Description of Artificial Sequence: Synthetic oligonucleotide
  Target: LAMA2; (-) strand; PAM type: YTN; PAM sequence: CTG
aaactcaagaacattctgga

SEQ ID NO: 238598 - DNA, 20 bp, Artificial Sequence
  Description of Artificial Sequence: Synthetic oligonucleotide
  Target: LAMA2; (-) strand; PAM type: YTN; PAM sequence: CTG
aaaaacagtgactgaaactc

SEQ ID NO: 238599 - DNA, 20 bp, Artificial Sequence
  Description of Artificial Sequence: Synthetic oligonucleotide
  Target: LAMA2; (-) strand; PAM type: YTN; PAM sequence: TTA
agcaaagctgaaaaacagtg

SEQ ID NO: 238600 - DNA, 20 bp, Artificial Sequence
  Description of Artificial Sequence: Synthetic oligonucleotide
  Target: LAMA2; (-) strand; PAM type: YTN; PAM sequence: TTT
aagcaaagctgaaaaacagt

SEQ ID NO: 238601 - DNA, 20 bp, Artificial Sequence
  Description of Artificial Sequence: Synthetic oligonucleotide
  Target: LAMA2; (-) strand; PAM type: YTN; PAM sequence: CTC
aagaaatttaagcaaagctg

SEQ ID NO: 238602 - DNA, 20 bp, Artificial Sequence
  Description of Artificial Sequence: Synthetic oligonucleotide
  Target: LAMA2; (-) strand; PAM type: YTN; PAM sequence: CTA
agagactcaagaaatttaag

SEQ ID NO: 238603 - DNA, 20 bp, Artificial Sequence
  Description of Artificial Sequence: Synthetic oligonucleotide
  Target: LAMA2; (-) strand; PAM type: YTN; PAM sequence: CTA
caaacaactaagagactcaa

SEQ ID NO: 238604 - DNA, 20 bp, Artificial Sequence
  Description of Artificial Sequence: Synthetic oligonucleotide
  Target: LAMA2; (-) strand; PAM type: YTN; PAM sequence: TTC
cagatgctacaaacaactaa

SEQ ID NO: 238605 - DNA, 20 bp, Artificial Sequence
  Description of Artificial Sequence: Synthetic oligonucleotide
  Target: LAMA2; (-) strand; PAM type: YTN; PAM sequence: TTA
taaaattccagatgctacaa

SEQ ID NO: 238606 - DNA, 20 bp, Artificial Sequence
  Description of Artificial Sequence: Synthetic oligonucleotide
  Target: LAMA2; (-) strand; PAM type: YTN; PAM sequence: CTT
ataaaattccagatgctaca

SEQ ID NO: 238607 - DNA, 20 bp, Artificial Sequence
  Description of Artificial Sequence: Synthetic oligonucleotide
  Target: LAMA2; (-) strand; PAM type: YTN; PAM sequence: CTG
aatagaacttataaaattcc

SEQ ID NO: 238608 - DNA, 20 bp, Artificial Sequence
  Description of Artificial Sequence: Synthetic oligonucleotide
  Target: LAMA2; (-) strand; PAM type: YTN; PAM sequence: CTA
gaaatgaggtatcccaagaa

SEQ ID NO: 238609 - DNA, 20 bp, Artificial Sequence
  Description of Artificial Sequence: Synthetic oligonucleotide
  Target: LAMA2; (-) strand; PAM type: YTN; PAM sequence: CTA
agcaaaggaatagggctaga

SEQ ID NO: 238610 - DNA, 20 bp, Artificial Sequence
  Description of Artificial Sequence: Synthetic oligonucleotide
  Target: LAMA2; (-) strand; PAM type: YTN; PAM sequence: CTG
gctaagcaaaggaatagggc

SEQ ID NO: 238611 - DNA, 20 bp, Artificial Sequence
  Description of Artificial Sequence: Synthetic oligonucleotide
  Target: LAMA2; (-) strand; PAM type: YTN; PAM sequence: TTA
aaaatgcctggctaagcaaa

SEQ ID NO: 238612 - DNA, 20 bp, Artificial Sequence
  Description of Artificial Sequence: Synthetic oligonucleotide
  Target: LAMA2; (-) strand; PAM type: YTN; PAM sequence: TTA
agccgagccattaaaaatgc

SEQ ID NO: 238613 - DNA, 20 bp, Artificial Sequence
  Description of Artificial Sequence: Synthetic oligonucleotide
  Target: LAMA2; (-) strand; PAM type: YTN; PAM sequence: TTG
aagttaagccgagccattaa

SEQ ID NO: 238614 - DNA, 20 bp, Artificial Sequence
  Description of Artificial Sequence: Synthetic oligonucleotide
  Target: LAMA2; (-) strand; PAM type: YTN; PAM sequence: CTG
agaaagttgaagttaagccg

SEQ ID NO: 238615 - DNA, 20 bp, Artificial Sequence
  Description of Artificial Sequence: Synthetic oligonucleotide
  Target: LAMA2; (-) strand; PAM type: YTN; PAM sequence: TTC
ctgagaaagttgaagttaag

SEQ ID NO: 238616 - DNA, 20 bp, Artificial Sequence
  Description of Artificial Sequence: Synthetic oligonucleotide
  Target: LAMA2; (-) strand; PAM type: YTN; PAM sequence: TTT
cctgagaaagttgaagttaa

SEQ ID NO: 238617 - DNA, 20 bp, Artificial Sequence
  Description of Artificial Sequence: Synthetic oligonucleotide
  Target: LAMA2; (-) strand; PAM type: YTN; PAM sequence: CTT
tcctgagaaagttgaagtta

SEQ ID NO: 238618 - DNA, 20 bp, Artificial Sequence
  Description of Artificial Sequence: Synthetic oligonucleotide
  Target: LAMA2; (-) strand; PAM type: YTN; PAM sequence: TTG
aggatgcaggggcagctttc

SEQ ID NO: 238619 - DNA, 20 bp, Artificial Sequence
  Description of Artificial Sequence: Synthetic oligonucleotide
  Target: LAMA2; (-) strand; PAM type: YTN; PAM sequence: CTT
gaggatgcaggggcagcttt

SEQ ID NO: 238620 - DNA, 20 bp, Artificial Sequence
  Description of Artificial Sequence: Synthetic oligonucleotide
  Target: LAMA2; (-) strand; PAM type: YTN; PAM sequence: TTA
tgccatgagaatgatatgac

SEQ ID NO: 238621 - DNA, 20 bp, Artificial Sequence
  Description of Artificial Sequence: Synthetic oligonucleotide
  Target: LAMA2; (-) strand; PAM type: YTN; PAM sequence: TTG
aaaagtgattatgccatgag

SEQ ID NO: 238622 - DNA, 20 bp, Artificial Sequence
  Description of Artificial Sequence: Synthetic oligonucleotide
  Target: LAMA2; (-) strand; PAM type: YTN; PAM sequence: TTT
gaaaagtgattatgccatga

SEQ ID NO: 238623 - DNA, 20 bp, Artificial Sequence
  Description of Artificial Sequence: Synthetic oligonucleotide
  Target: LAMA2; (-) strand; PAM type: YTN; PAM sequence: TTA
tgagatcataaaagaaaaga

SEQ ID NO: 238624 - DNA, 20 bp, Artificial Sequence
  Description of Artificial Sequence: Synthetic oligonucleotide
  Target: LAMA2; (-) strand; PAM type: YTN; PAM sequence: CTC
attatgagatcataaaagaa

SEQ ID NO: 238625 - DNA, 20 bp, Artificial Sequence
  Description of Artificial Sequence: Synthetic oligonucleotide
  Target: LAMA2; (-) strand; PAM type: YTN; PAM sequence: TTA
ctcattatgagatcataaaa

SEQ ID NO: 238626 - DNA, 20 bp, Artificial Sequence
  Description of Artificial Sequence: Synthetic oligonucleotide
  Target: LAMA2; (-) strand; PAM type: YTN; PAM sequence: TTG
tgcaatggtaaagaaaatat

SEQ ID NO: 238627 - DNA, 20 bp, Artificial Sequence
  Description of Artificial Sequence: Synthetic oligonucleotide
  Target: LAMA2; (-) strand; PAM type: YTN; PAM sequence: TTA
ttgtgcaatggtaaagaaaa

SEQ ID NO: 238628 - DNA, 20 bp, Artificial Sequence
  Description of Artificial Sequence: Synthetic oligonucleotide
  Target: LAMA2; (-) strand; PAM type: YTN; PAM sequence: CTT
attgtgcaatggtaaagaaa

SEQ ID NO: 238629 - DNA, 20 bp, Artificial Sequence
  Description of Artificial Sequence: Synthetic oligonucleotide
  Target: LAMA2; (-) strand; PAM type: YTN; PAM sequence: TTC
ttattgtgcaatggtaaaga

SEQ ID NO: 238630 - DNA, 20 bp, Artificial Sequence
  Description of Artificial Sequence: Synthetic oligonucleotide
  Target: LAMA2; (-) strand; PAM type: YTN; PAM sequence: CTT
cttattgtgcaatggtaaag

SEQ ID NO: 238631 - DNA, 20 bp, Artificial Sequence
  Description of Artificial Sequence: Synthetic oligonucleotide
  Target: LAMA2; (-) strand; PAM type: YTN; PAM sequence: TTA
tcttcttattgtgcaatggt

SEQ ID NO: 238632 - DNA, 20 bp, Artificial Sequence
  Description of Artificial Sequence: Synthetic oligonucleotide
  Target: LAMA2; (-) strand; PAM type: YTN; PAM sequence: TTG
tgttatcttcttattgtgca

SEQ ID NO: 238633 - DNA, 20 bp, Artificial Sequence
  Description of Artificial Sequence: Synthetic oligonucleotide
  Target: LAMA2; (-) strand; PAM type: YTN; PAM sequence: TTG
tatgagtcattgtgttatct

SEQ ID NO: 238634 - DNA, 20 bp, Artificial Sequence
  Description of Artificial Sequence: Synthetic oligonucleotide
  Target: LAMA2; (-) strand; PAM type: YTN; PAM sequence: TTT
gtatgagtcattgtgttatc

SEQ ID NO: 238635 - DNA, 20 bp, Artificial Sequence
  Description of Artificial Sequence: Synthetic oligonucleotide
  Target: LAMA2; (-) strand; PAM type: YTN; PAM sequence: TTT
tgtatgagtcattgtgttat

SEQ ID NO: 238636 - DNA, 20 bp, Artificial Sequence
  Description of Artificial Sequence: Synthetic oligonucleotide
  Target: LAMA2; (-) strand; PAM type: YTN; PAM sequence: CTT
ttgtatgagtcattgtgtta

SEQ ID NO: 238637 - DNA, 20 bp, Artificial Sequence
  Description of Artificial Sequence: Synthetic oligonucleotide
  Target: LAMA2; (-) strand; PAM type: YTN; PAM sequence: TTC
ttttgtatgagtcattgtgt

SEQ ID NO: 238638 - DNA, 20 bp, Artificial Sequence
  Description of Artificial Sequence: Synthetic oligonucleotide
  Target: LAMA2; (-) strand; PAM type: YTN; PAM sequence: TTT
cttttgtatgagtcattgtg

SEQ ID NO: 238639 - DNA, 20 bp, Artificial Sequence
  Description of Artificial Sequence: Synthetic oligonucleotide
  Target: LAMA2; (-) strand; PAM type: YTN; PAM sequence: CTT
tcttttgtatgagtcattgt

SEQ ID NO: 238640 - DNA, 20 bp, Artificial Sequence
  Description of Artificial Sequence: Synthetic oligonucleotide
  Target: LAMA2; (-) strand; PAM type: YTN; PAM sequence: TTC
tttcttttgtatgagtcatt

SEQ ID NO: 238641 - DNA, 20 bp, Artificial Sequence
  Description of Artificial Sequence: Synthetic oligonucleotide
  Target: LAMA2; (-) strand; PAM type: YTN; PAM sequence: CTT
ctttcttttgtatgagtcat

SEQ ID NO: 238642 - DNA, 20 bp, Artificial Sequence
  Description of Artificial Sequence: Synthetic oligonucleotide
  Target: LAMA2; (-) strand; PAM type: YTN; PAM sequence: TTC
cttctttcttttgtatgagt

SEQ ID NO: 238643 - DNA, 20 bp, Artificial Sequence
  Description of Artificial Sequence: Synthetic oligonucleotide
  Target: LAMA2; (-) strand; PAM type: YTN; PAM sequence: CTT
ccttctttcttttgtatgag

SEQ ID NO: 238644 - DNA, 20 bp, Artificial Sequence
  Description of Artificial Sequence: Synthetic oligonucleotide
  Target: LAMA2; (-) strand; PAM type: YTN; PAM sequence: TTC
cttccttctttcttttgtat

SEQ ID NO: 238645 - DNA, 20 bp, Artificial Sequence
  Description of Artificial Sequence: Synthetic oligonucleotide
  Target: LAMA2; (-) strand; PAM type: YTN; PAM sequence: CTT
ccttccttctttcttttgta

SEQ ID NO: 238646 - DNA, 20 bp, Artificial Sequence
  Description of Artificial Sequence: Synthetic oligonucleotide
  Target: LAMA2; (-) strand; PAM type: YTN; PAM sequence: CTC
ttccttccttctttcttttg

SEQ ID NO: 238647 - DNA, 20 bp, Artificial Sequence
  Description of Artificial Sequence: Synthetic oligonucleotide
  Target: LAMA2; (-) strand; PAM type: YTN; PAM sequence: TTC
tcttccttccttctttcttt

SEQ ID NO: 238648 - DNA, 20 bp, Artificial Sequence
  Description of Artificial Sequence: Synthetic oligonucleotide
  Target: LAMA2; (-) strand; PAM type: YTN; PAM sequence: TTA
gttctcttccttccttcttt

SEQ ID NO: 238649 - DNA, 20 bp, Artificial Sequence
  Description of Artificial Sequence: Synthetic oligonucleotide
  Target: LAMA2; (-) strand; PAM type: YTN; PAM sequence: TTT
agttctcttccttccttctt

SEQ ID NO: 238650 - DNA, 20 bp, Artificial Sequence
  Description of Artificial Sequence: Synthetic oligonucleotide
  Target: LAMA2; (-) strand; PAM type: YTN; PAM sequence: TTT
tagttctcttccttccttct

SEQ ID NO: 238651 - DNA, 20 bp, Artificial Sequence
  Description of Artificial Sequence: Synthetic oligonucleotide
  Target: LAMA2; (-) strand; PAM type: YTN; PAM sequence: TTC
acgagattttagttctcttc

SEQ ID NO: 238652 - DNA, 20 bp, Artificial Sequence
  Description of Artificial Sequence: Synthetic oligonucleotide
  Target: LAMA2; (-) strand; PAM type: YTN; PAM sequence: CTT
cacgagattttagttctctt

SEQ ID NO: 238653 - DNA, 20 bp, Artificial Sequence
  Description of Artificial Sequence: Synthetic oligonucleotide
  Target: LAMA2; (-) strand; PAM type: YTN; PAM sequence: CTG
tcaaagcttcacgagatttt

SEQ ID NO: 238654 - DNA, 20 bp, Artificial Sequence
  Description of Artificial Sequence: Synthetic oligonucleotide
  Target: LAMA2; (-) strand; PAM type: YTN; PAM sequence: CTA
aatgactgtcaaagcttcac

SEQ ID NO: 238655 - DNA, 20 bp, Artificial Sequence
  Description of Artificial Sequence: Synthetic oligonucleotide
  Target: LAMA2; (-) strand; PAM type: YTN; PAM sequence: TTA
taaaacagaatcggaaaggc

SEQ ID NO: 238656 - DNA, 20 bp, Artificial Sequence
  Description of Artificial Sequence: Synthetic oligonucleotide
  Target: LAMA2; (-) strand; PAM type: YTN; PAM sequence: TTC
atagattataaaacagaatc

SEQ ID NO: 238657 - DNA, 20 bp, Artificial Sequence
  Description of Artificial Sequence: Synthetic oligonucleotide
  Target: LAMA2; (-) strand; PAM type: YTN; PAM sequence: TTT
catagattataaaacagaat

SEQ ID NO: 238658 - DNA, 20 bp, Artificial Sequence
  Description of Artificial Sequence: Synthetic oligonucleotide
  Target: LAMA2; (-) strand; PAM type: YTN; PAM sequence: TTC
aataacaccatttcatagat

SEQ ID NO: 238659 - DNA, 20 bp, Artificial Sequence
  Description of Artificial Sequence: Synthetic oligonucleotide
  Target: LAMA2; (-) strand; PAM type: YTN; PAM sequence: CTG
agaggcagaaaagattcaat

SEQ ID NO: 238660 - DNA, 20 bp, Artificial Sequence
  Description of Artificial Sequence: Synthetic oligonucleotide
  Target: LAMA2; (-) strand; PAM type: YTN; PAM sequence: CTA
ctgagaggcagaaaagattc

SEQ ID NO: 238661 - DNA, 20 bp, Artificial Sequence
  Description of Artificial Sequence: Synthetic oligonucleotide
  Target: LAMA2; (-) strand; PAM type: YTN; PAM sequence: TTA
tacctactgagaggcagaaa

SEQ ID NO: 238662 - DNA, 20 bp, Artificial Sequence
  Description of Artificial Sequence: Synthetic oligonucleotide
  Target: LAMA2; (-) strand; PAM type: YTN; PAM sequence: TTC
agtgtgataattatacctac

SEQ ID NO: 238663 - DNA, 20 bp, Artificial Sequence
  Description of Artificial Sequence: Synthetic oligonucleotide
  Target: LAMA2; (-) strand; PAM type: YTN; PAM sequence: CTT
cagtgtgataattataccta

SEQ ID NO: 238664 - DNA, 20 bp, Artificial Sequence
  Description of Artificial Sequence: Synthetic oligonucleotide
  Target: LAMA2; (-) strand; PAM type: YTN; PAM sequence: TTG
tacagggcttcagtgtgata

SEQ ID NO: 238665 - DNA, 20 bp, Artificial Sequence
  Description of Artificial Sequence: Synthetic oligonucleotide
  Target: LAMA2; (-) strand; PAM type: YTN; PAM sequence: CTT
gtacagggcttcagtgtgat

SEQ ID NO: 238666 - DNA, 20 bp, Artificial Sequence
  Description of Artificial Sequence: Synthetic oligonucleotide
  Target: LAMA2; (-) strand; PAM type: YTN; PAM sequence: TTA
tacttgtacagggcttcagt

SEQ ID NO: 238667 - DNA, 20 bp, Artificial Sequence
  Description of Artificial Sequence: Synthetic oligonucleotide
  Target: LAMA2; (-) strand; PAM type: YTN; PAM sequence: TTT
atacttgtacagggcttcag

SEQ ID NO: 238668 - DNA, 20 bp, Artificial Sequence
  Description of Artificial Sequence: Synthetic oligonucleotide
  Target: LAMA2; (-) strand; PAM type: YTN; PAM sequence: CTT
tatacttgtacagggcttca

SEQ ID NO: 238669 - DNA, 20 bp, Artificial Sequence
  Description of Artificial Sequence: Synthetic oligonucleotide
  Target: LAMA2; (-) strand; PAM type: YTN; PAM sequence: TTA
tactttatacttgtacaggg

SEQ ID NO: 238670 - DNA, 20 bp, Artificial Sequence
  Description of Artificial Sequence: Synthetic oligonucleotide
  Target: LAMA2; (-) strand; PAM type: YTN; PAM sequence: TTA
tggttatactttatacttgt

SEQ ID NO: 238671 - DNA, 20 bp, Artificial Sequence
  Description of Artificial Sequence: Synthetic oligonucleotide
  Target: LAMA2; (-) strand; PAM type: YTN; PAM sequence: TTT
atggttatactttatacttg

SEQ ID NO: 238672 - DNA, 20 bp, Artificial Sequence
  Description of Artificial Sequence: Synthetic oligonucleotide
  Target: LAMA2; (-) strand; PAM type: YTN; PAM sequence: TTG
ggaaaagcaatataaacaac

SEQ ID NO: 238673 - DNA, 20 bp, Artificial Sequence
  Description of Artificial Sequence: Synthetic oligonucleotide
  Target: LAMA2; (-) strand; PAM type: YTN; PAM sequence: CTT
gggaaaagcaatataaacaa

SEQ ID NO: 238674 - DNA, 20 bp, Artificial Sequence
  Description of Artificial Sequence: Synthetic oligonucleotide
  Target: LAMA2; (-) strand; PAM type: YTN; PAM sequence: CTA
cttgggaaaagcaatataaa

SEQ ID NO: 238675 - DNA, 20 bp, Artificial Sequence
  Description of Artificial Sequence: Synthetic oligonucleotide
  Target: LAMA2; (-) strand; PAM type: YTN; PAM sequence: CTC
tacttgggaaaagcaatata

SEQ ID NO: 238676 - DNA, 20 bp, Artificial Sequence
  Description of Artificial Sequence: Synthetic oligonucleotide
  Target: LAMA2; (-) strand; PAM type: YTN; PAM sequence: TTA
tctctacttgggaaaagcaa

SEQ ID NO: 238677 - DNA, 20 bp, Artificial Sequence
  Description of Artificial Sequence: Synthetic oligonucleotide
  Target: LAMA2; (-) strand; PAM type: YTN; PAM sequence: CTT
atctctacttgggaaaagca

SEQ ID NO: 238678 - DNA, 20 bp, Artificial Sequence
  Description of Artificial Sequence: Synthetic oligonucleotide
  Target: LAMA2; (-) strand; PAM type: YTN; PAM sequence: TTC
agggaaaaagaacagaaact

SEQ ID NO: 238679 - DNA, 20 bp, Artificial Sequence
  Description of Artificial Sequence: Synthetic oligonucleotide
  Target: LAMA2; (-) strand; PAM type: YTN; PAM sequence: TTT
cagggaaaaagaacagaaac

SEQ ID NO: 238680 - DNA, 20 bp, Artificial Sequence
  Description of Artificial Sequence: Synthetic oligonucleotide
  Target: LAMA2; (-) strand; PAM type: YTN; PAM sequence: CTT
tcagggaaaaagaacagaaa

SEQ ID NO: 238681 - DNA, 20 bp, Artificial Sequence
  Description of Artificial Sequence: Synthetic oligonucleotide
  Target: LAMA2; (-) strand; PAM type: YTN; PAM sequence: TTA
acacaccataaaaatccttt

SEQ ID NO: 238682 - DNA, 20 bp, Artificial Sequence
  Description of Artificial Sequence: Synthetic oligonucleotide
  Target: LAMA2; (-) strand; PAM type: YTN; PAM sequence: CTG
tacacaaatgaaaaagaaga

SEQ ID NO: 238683 - DNA, 20 bp, Artificial Sequence
  Description of Artificial Sequence: Synthetic oligonucleotide
  Target: LAMA2; (-) strand; PAM type: YTN; PAM sequence: TTC
ctgtacacaaatgaaaaaga

SEQ ID NO: 238684 - DNA, 20 bp, Artificial Sequence
  Description of Artificial Sequence: Synthetic oligonucleotide
  Target: LAMA2; (-) strand; PAM type: YTN; PAM sequence: TTA
atgaagtgaccattcctgta

SEQ ID NO: 238685 - DNA, 20 bp, Artificial Sequence
  Description of Artificial Sequence: Synthetic oligonucleotide
  Target: LAMA2; (-) strand; PAM type: YTN; PAM sequence: CTA
caagttaatgaagtgaccat

SEQ ID NO: 238686 - DNA, 20 bp, Artificial Sequence
  Description of Artificial Sequence: Synthetic oligonucleotide
  Target: LAMA2; (-) strand; PAM type: YTN; PAM sequence: TTG
taaaaatgcccaggaatcaa

SEQ ID NO: 238687 - DNA, 20 bp, Artificial Sequence
  Description of Artificial Sequence: Synthetic oligonucleotide
  Target: LAMA2; (-) strand; PAM type: YTN; PAM sequence: TTT
gtaaaaatgcccaggaatca

SEQ ID NO: 238688 - DNA, 20 bp, Artificial Sequence
  Description of Artificial Sequence: Synthetic oligonucleotide
  Target: LAMA2; (-) strand; PAM type: YTN; PAM sequence: TTG
aagtccatttgtaaaaatgc

SEQ ID NO: 238689 - DNA, 20 bp, Artificial Sequence
  Description of Artificial Sequence: Synthetic oligonucleotide
  Target: LAMA2; (-) strand; PAM type: YTN; PAM sequence: TTA
aatgtacacattgaagtcca

SEQ ID NO: 238690 - DNA, 20 bp, Artificial Sequence
  Description of Artificial Sequence: Synthetic oligonucleotide
  Target: LAMA2; (-) strand; PAM type: YTN; PAM sequence: TTC
aggattaaatgtacacattg

SEQ ID NO: 238691 - DNA, 20 bp, Artificial Sequence
  Description of Artificial Sequence: Synthetic oligonucleotide
  Target: LAMA2; (-) strand; PAM type: YTN; PAM sequence: TTA
gattcaggattaaatgtaca

SEQ ID NO: 238692 - DNA, 20 bp, Artificial Sequence
  Description of Artificial Sequence: Synthetic oligonucleotide
  Target: LAMA2; (-) strand; PAM type: YTN; PAM sequence: TTT
agattcaggattaaatgtac

SEQ ID NO: 238693 - DNA, 20 bp, Artificial Sequence
  Description of Artificial Sequence: Synthetic oligonucleotide
  Target: LAMA2; (-) strand; PAM type: YTN; PAM sequence: CTG
taatttagattcaggattaa

SEQ ID NO: 238694 - DNA, 20 bp, Artificial Sequence
  Description of Artificial Sequence: Synthetic oligonucleotide
  Target: LAMA2; (-) strand; PAM type: YTN; PAM sequence: CTA
catctgtaatttagattcag

SEQ ID NO: 238695 - DNA, 20 bp, Artificial Sequence
  Description of Artificial Sequence: Synthetic oligonucleotide
  Target: LAMA2; (-) strand; PAM type: YTN; PAM sequence: TTC
tacatctgtaatttagattc

SEQ ID NO: 238696 - DNA, 20 bp, Artificial Sequence
  Description of Artificial Sequence: Synthetic oligonucleotide
  Target: LAMA2; (-) strand; PAM type: YTN; PAM sequence: TTA
tgccaaaaattctacatctg

SEQ ID NO: 238697 - DNA, 20 bp, Artificial Sequence
  Description of Artificial Sequence: Synthetic oligonucleotide
  Target: LAMA2; (-) strand; PAM type: YTN; PAM sequence: TTT
atgccaaaaattctacatct

SEQ ID NO: 238698 - DNA, 20 bp, Artificial Sequence
  Description of Artificial Sequence: Synthetic oligonucleotide
  Target: LAMA2; (-) strand; PAM type: YTN; PAM sequence: TTT
tatgccaaaaattctacatc

SEQ ID NO: 238699 - DNA, 20 bp, Artificial Sequence
  Description of Artificial Sequence: Synthetic oligonucleotide
  Target: LAMA2; (-) strand; PAM type: YTN; PAM sequence: CTT
ttatgccaaaaattctacat

SEQ ID NO: 238700 - DNA, 20 bp, Artificial Sequence
  Description of Artificial Sequence: Synthetic oligonucleotide
  Target: LAMA2; (-) strand; PAM type: YTN; PAM sequence: TTC
atgcatgaaccttttatgcc

SEQ ID NO: 238701 - DNA, 20 bp, Artificial Sequence
  Description of Artificial Sequence: Synthetic oligonucleotide
  Target: LAMA2; (-) strand; PAM type: YTN; PAM sequence: TTC
attcatgcatgaacctttta

SEQ ID NO: 238702 - DNA, 20 bp, Artificial Sequence
  Description of Artificial Sequence: Synthetic oligonucleotide
  Target: LAMA2; (-) strand; PAM type: YTN; PAM sequence: TTG
caagagataaattcattcat

SEQ ID NO: 238703 - DNA, 20 bp, Artificial Sequence
  Description of Artificial Sequence: Synthetic oligonucleotide
  Target: LAMA2; (-) strand; PAM type: YTN; PAM sequence: CTG
taggggttgcaagagataaa

SEQ ID NO: 238704 - DNA, 20 bp, Artificial Sequence
  Description of Artificial Sequence: Synthetic oligonucleotide
  Target: LAMA2; (-) strand; PAM type: YTN; PAM sequence: TTG
aactgtaggggttgcaagag

SEQ ID NO: 238705 - DNA, 20 bp, Artificial Sequence
  Description of Artificial Sequence: Synthetic oligonucleotide
  Target: LAMA2; (-) strand; PAM type: YTN; PAM sequence: TTT
gaactgtaggggttgcaaga

SEQ ID NO: 238706 - DNA, 20 bp, Artificial Sequence
  Description of Artificial Sequence: Synthetic oligonucleotide
  Target: LAMA2; (-) strand; PAM type: YTN; PAM sequence: TTA
tttgaactgtaggggttgca

SEQ ID NO: 238707 - DNA, 20 bp, Artificial Sequence
  Description of Artificial Sequence: Synthetic oligonucleotide
  Target: LAMA2; (-) strand; PAM type: YTN; PAM sequence: CTA
acataatattatttgaactg

SEQ ID NO: 238708 - DNA, 20 bp, Artificial Sequence
  Description of Artificial Sequence: Synthetic oligonucleotide
  Target: LAMA2; (-) strand; PAM type: YTN; PAM sequence: TTG
actaacataatattatttga

SEQ ID NO: 238709 - DNA, 20 bp, Artificial Sequence
  Description of Artificial Sequence: Synthetic oligonucleotide
  Target: LAMA2; (-) strand; PAM type: YTN; PAM sequence: CTG
tccatgtaaaaaattgacta

SEQ ID NO: 238710 - DNA, 20 bp, Artificial Sequence
  Description of Artificial Sequence: Synthetic oligonucleotide
  Target: LAMA2; (-) strand; PAM type: YTN; PAM sequence: TTG
gtcaaggagagagtctgtcc

SEQ ID NO: 238711 - DNA, 20 bp, Artificial Sequence
  Description of Artificial Sequence: Synthetic oligonucleotide
  Target: LAMA2; (-) strand; PAM type: YTN; PAM sequence: TTT
ggtcaaggagagagtctgtc

SEQ ID NO: 238712 - DNA, 20 bp, Artificial Sequence
  Description of Artificial Sequence: Synthetic oligonucleotide
  Target: LAMA2; (-) strand; PAM type: YTN; PAM sequence: TTC
caaaatttggtcaaggagag

SEQ ID NO: 238713 - DNA, 20 bp, Artificial Sequence
  Description of Artificial Sequence: Synthetic oligonucleotide
  Target: LAMA2; (-) strand; PAM type: YTN; PAM sequence: TTT
ccaaaatttggtcaaggaga

SEQ ID NO: 238714 - DNA, 20 bp, Artificial Sequence
  Description of Artificial Sequence: Synthetic oligonucleotide
  Target: LAMA2; (-) strand; PAM type: YTN; PAM sequence: CTT
tccaaaatttggtcaaggag

SEQ ID NO: 238715 - DNA, 20 bp, Artificial Sequence
  Description of Artificial Sequence: Synthetic oligonucleotide
  Target: LAMA2; (-) strand; PAM type: YTN; PAM sequence: CTC
agagaagactttccaaaatt

SEQ ID NO: 238716 - DNA, 20 bp, Artificial Sequence
  Description of Artificial Sequence: Synthetic oligonucleotide
  Target: LAMA2; (-) strand; PAM type: YTN; PAM sequence: CTC
atcaaaaagaggactcagag

SEQ ID NO: 238717 - DNA, 20 bp, Artificial Sequence
  Description of Artificial Sequence: Synthetic oligonucleotide
  Target: LAMA2; (-) strand; PAM type: YTN; PAM sequence: TTG
aggacaagggtcaacgatga

SEQ ID NO: 238718 - DNA, 20 bp, Artificial Sequence
  Description of Artificial Sequence: Synthetic oligonucleotide
  Target: LAMA2; (-) strand; PAM type: YTN; PAM sequence: TTT
gaggacaagggtcaacgatg

SEQ ID NO: 238719 - DNA, 20 bp, Artificial Sequence
  Description of Artificial Sequence: Synthetic oligonucleotide
  Target: LAMA2; (-) strand; PAM type: YTN; PAM sequence: CTA
ggtttgaggacaagggtcaa

SEQ ID NO: 238720 - DNA, 20 bp, Artificial Sequence
  Description of Artificial Sequence: Synthetic oligonucleotide
  Target: LAMA2; (-) strand; PAM type: YTN; PAM sequence: TTA
accaagctaggtttgaggac

SEQ ID NO: 238721 - DNA, 20 bp, Artificial Sequence
  Description of Artificial Sequence: Synthetic oligonucleotide
  Target: LAMA2; (-) strand; PAM type: YTN; PAM sequence: TTT
aaccaagctaggtttgagga

SEQ ID NO: 238722 - DNA, 20 bp, Artificial Sequence
  Description of Artificial Sequence: Synthetic oligonucleotide
  Target: LAMA2; (-) strand; PAM type: YTN; PAM sequence: CTT
taaccaagctaggtttgagg

SEQ ID NO: 238723 - DNA, 20 bp, Artificial Sequence
  Description of Artificial Sequence: Synthetic oligonucleotide
  Target: LAMA2; (-) strand; PAM type: YTN; PAM sequence: TTG
ctttaaccaagctaggtttg

SEQ ID NO: 238724 - DNA, 20 bp, Artificial Sequence
  Description of Artificial Sequence: Synthetic oligonucleotide
  Target: LAMA2; (-) strand; PAM type: YTN; PAM sequence: CTT
gctttaaccaagctaggttt

SEQ ID NO: 238725 - DNA, 20 bp, Artificial Sequence
  Description of Artificial Sequence: Synthetic oligonucleotide
  Target: LAMA2; (-) strand; PAM type: YTN; PAM sequence: TTC
ttgctttaaccaagctaggt

SEQ ID NO: 238726 - DNA, 20 bp, Artificial Sequence
  Description of Artificial Sequence: Synthetic oligonucleotide
  Target: LAMA2; (-) strand; PAM type: YTN; PAM sequence: TTA
gcagaattcttgctttaacc

SEQ ID NO: 238727 - DNA, 20 bp, Artificial Sequence
  Description of Artificial Sequence: Synthetic oligonucleotide
  Target: LAMA2; (-) strand; PAM type: YTN; PAM sequence: CTT
agcagaattcttgctttaac

SEQ ID NO: 238728 - DNA, 20 bp, Artificial Sequence
  Description of Artificial Sequence: Synthetic oligonucleotide
  Target: LAMA2; (-) strand; PAM type: YTN; PAM sequence: CTG
acttagcagaattcttgctt

SEQ ID NO: 238729 - DNA, 20 bp, Artificial Sequence
  Description of Artificial Sequence: Synthetic oligonucleotide
  Target: LAMA2; (-) strand; PAM type: YTN; PAM sequence: TTA
acacactgacttagcagaat

SEQ ID NO: 238730 - DNA, 20 bp, Artificial Sequence
  Description of Artificial Sequence: Synthetic oligonucleotide
  Target: LAMA2; (-) strand; PAM type: YTN; PAM sequence: CTT
aacacactgacttagcagaa

SEQ ID NO: 238731 - DNA, 20 bp, Artificial Sequence
  Description of Artificial Sequence: Synthetic oligonucleotide
  Target: LAMA2; (-) strand; PAM type: YTN; PAM sequence: TTC
ttaacacactgacttagcag

SEQ ID NO: 238732 - DNA, 20 bp, Artificial Sequence
  Description of Artificial Sequence: Synthetic oligonucleotide
  Target: LAMA2; (-) strand; PAM type: YTN; PAM sequence: TTG
aagacaggccagagggatca

SEQ ID NO: 238733 - DNA, 20 bp, Artificial Sequence
  Description of Artificial Sequence: Synthetic oligonucleotide
  Target: LAMA2; (-) strand; PAM type: YTN; PAM sequence: TTG
ttgaagacaggccagaggga

SEQ ID NO: 238734 - DNA, 20 bp, Artificial Sequence
  Description of Artificial Sequence: Synthetic oligonucleotide
  Target: LAMA2; (-) strand; PAM type: YTN; PAM sequence: CTT
gttgaagacaggccagaggg

SEQ ID NO: 238735 - DNA, 20 bp, Artificial Sequence
  Description of Artificial Sequence: Synthetic oligonucleotide
  Target: LAMA2; (-) strand; PAM type: YTN; PAM sequence: TTC
ttgttgaagacaggccagag

SEQ ID NO: 238736 - DNA, 20 bp, Artificial Sequence
  Description of Artificial Sequence: Synthetic oligonucleotide
  Target: LAMA2; (-) strand; PAM type: YTN; PAM sequence: TTA
acaggattcttgttgaagac

SEQ ID NO: 238737 - DNA, 20 bp, Artificial Sequence
  Description of Artificial Sequence: Synthetic oligonucleotide
  Target: LAMA2; (-) strand; PAM type: YTN; PAM sequence: CTA
aaccaaattaacaggattct

SEQ ID NO: 238738 - DNA, 20 bp, Artificial Sequence
  Description of Artificial Sequence: Synthetic oligonucleotide
  Target: LAMA2; (-) strand; PAM type: YTN; PAM sequence: TTG
ctaaaccaaattaacaggat

SEQ ID NO: 238739 - DNA, 20 bp, Artificial Sequence
  Description of Artificial Sequence: Synthetic oligonucleotide
  Target: LAMA2; (-) strand; PAM type: YTN; PAM sequence: CTT
gctaaaccaaattaacagga

SEQ ID NO: 238740 - DNA, 20 bp, Artificial Sequence
  Description of Artificial Sequence: Synthetic oligonucleotide
  Target: LAMA2; (-) strand; PAM type: YTN; PAM sequence: TTC
ttgctaaaccaaattaacag

SEQ ID NO: 238741 - DNA, 20 bp, Artificial Sequence
  Description of Artificial Sequence: Synthetic oligonucleotide
  Target: LAMA2; (-) strand; PAM type: YTN; PAM sequence: TTA
agaggagacatcaggggtag

SEQ ID NO: 238742 - DNA, 20 bp, Artificial Sequence
  Description of Artificial Sequence: Synthetic oligonucleotide
  Target: LAMA2; (-) strand; PAM type: YTN; PAM sequence: TTA
tagccacgagcaaggatcag

SEQ ID NO: 238743 - DNA, 20 bp, Artificial Sequence
  Description of Artificial Sequence: Synthetic oligonucleotide
  Target: LAMA2; (-) strand; PAM type: YTN; PAM sequence: TTT
atagccacgagcaaggatca

SEQ ID NO: 238744 - DNA, 20 bp, Artificial Sequence
  Description of Artificial Sequence: Synthetic oligonucleotide
  Target: LAMA2; (-) strand; PAM type: YTN; PAM sequence: TTC
agtgccaaggaaaagggtag

SEQ ID NO: 238745 - DNA, 20 bp, Artificial Sequence
  Description of Artificial Sequence: Synthetic oligonucleotide
  Target: LAMA2; (-) strand; PAM type: YTN; PAM sequence: TTC
ccaatacaacatgaacaagt

SEQ ID NO: 238746 - DNA, 20 bp, Artificial Sequence
  Description of Artificial Sequence: Synthetic oligonucleotide
  Target: LAMA2; (-) strand; PAM type: YTN; PAM sequence: CTC
cattcccaatacaacatgaa

SEQ ID NO: 238747 - DNA, 20 bp, Artificial Sequence
  Description of Artificial Sequence: Synthetic oligonucleotide
  Target: LAMA2; (-) strand; PAM type: YTN; PAM sequence: CTA
gcctccattcccaatacaac

SEQ ID NO: 238748 - DNA, 20 bp, Artificial Sequence
  Description of Artificial Sequence: Synthetic oligonucleotide
  Target: LAMA2; (-) strand; PAM type: YTN; PAM sequence: TTA
gtaaagaactagcctccatt

SEQ ID NO: 238749 - DNA, 20 bp, Artificial Sequence
  Description of Artificial Sequence: Synthetic oligonucleotide
  Target: LAMA2; (-) strand; PAM type: YTN; PAM sequence: CTT
agtaaagaactagcctccat

SEQ ID NO: 238750 - DNA, 20 bp, Artificial Sequence
  Description of Artificial Sequence: Synthetic oligonucleotide
  Target: LAMA2; (-) strand; PAM type: YTN; PAM sequence: CTA
tggcaatagagaaaaagcaa

SEQ ID NO: 238751 - DNA, 20 bp, Artificial Sequence
  Description of Artificial Sequence: Synthetic oligonucleotide
  Target: LAMA2; (-) strand; PAM type: YTN; PAM sequence: TTC
agtgagaaactatggcaata

SEQ ID NO: 238752 - DNA, 20 bp, Artificial Sequence
  Description of Artificial Sequence: Synthetic oligonucleotide
  Target: LAMA2; (-) strand; PAM type: YTN; PAM sequence: CTT
cagtgagaaactatggcaat

SEQ ID NO: 238753 - DNA, 20 bp, Artificial Sequence
  Description of Artificial Sequence: Synthetic oligonucleotide
  Target: LAMA2; (-) strand; PAM type: YTN; PAM sequence: TTA
aaacgatgaaaataggcttc

SEQ ID NO: 238754 - DNA, 20 bp, Artificial Sequence
  Description of Artificial Sequence: Synthetic oligonucleotide
  Target: LAMA2; (-) strand; PAM type: YTN; PAM sequence: CTG
gacagtagttaaaacgatga

SEQ ID NO: 238755 - DNA, 20 bp, Artificial Sequence
  Description of Artificial Sequence: Synthetic oligonucleotide
  Target: LAMA2; (-) strand; PAM type: YTN; PAM sequence: TTG
tgaaagagaaccagagctgg

SEQ ID NO: 238756 - DNA, 20 bp, Artificial Sequence
  Description of Artificial Sequence: Synthetic oligonucleotide
  Target: LAMA2; (-) strand; PAM type: YTN; PAM sequence: TTA
atattgtgaaagagaaccag

SEQ ID NO: 238757 - DNA, 20 bp, Artificial Sequence
  Description of Artificial Sequence: Synthetic oligonucleotide
  Target: LAMA2; (-) strand; PAM type: YTN; PAM sequence: TTT
aatattgtgaaagagaacca

SEQ ID NO: 238758 - DNA, 20 bp, Artificial Sequence
  Description of Artificial Sequence: Synthetic oligonucleotide
  Target: LAMA2; (-) strand; PAM type: YTN; PAM sequence: TTT
taatattgtgaaagagaacc

SEQ ID NO: 238759 - DNA, 20 bp, Artificial Sequence
  Description of Artificial Sequence: Synthetic oligonucleotide
  Target: LAMA2; (-) strand; PAM type: YTN; PAM sequence: CTT
ttaatattgtgaaagagaac

SEQ ID NO: 238760 - DNA, 20 bp, Artificial Sequence
  Description of Artificial Sequence: Synthetic oligonucleotide
  Target: LAMA2; (-) strand; PAM type: YTN; PAM sequence: TTC
agcttttaatattgtgaaag

SEQ ID NO: 238761 - DNA, 20 bp, Artificial Sequence
  Description of Artificial Sequence: Synthetic oligonucleotide
  Target: LAMA2; (-) strand; PAM type: YTN; PAM sequence: TTC
acaagttcagcttttaatat

SEQ ID NO: 238762 - DNA, 20 bp, Artificial Sequence
  Description of Artificial Sequence: Synthetic oligonucleotide
  Target: LAMA2; (-) strand; PAM type: YTN; PAM sequence: TTT
cacaagttcagcttttaata

SEQ ID NO: 238763 - DNA, 20 bp, Artificial Sequence
  Description of Artificial Sequence: Synthetic oligonucleotide
  Target: LAMA2; (-) strand; PAM type: YTN; PAM sequence: TTT
tcacaagttcagcttttaat

SEQ ID NO: 238764 - DNA, 20 bp, Artificial Sequence
  Description of Artificial Sequence: Synthetic oligonucleotide
  Target: LAMA2; (-) strand; PAM type: YTN; PAM sequence: CTC
aattttcacaagttcagctt

SEQ ID NO: 238765 - DNA, 20 bp, Artificial Sequence
  Description of Artificial Sequence: Synthetic oligonucleotide
  Target: LAMA2; (-) strand; PAM type: YTN; PAM sequence: TTC
tcaattttcacaagttcagc

SEQ ID NO: 238766 - DNA, 20 bp, Artificial Sequence
  Description of Artificial Sequence: Synthetic oligonucleotide
  Target: LAMA2; (-) strand; PAM type: YTN; PAM sequence: TTA
gttctcaattttcacaagtt

SEQ ID NO: 238767 - DNA, 20 bp, Artificial Sequence
  Description of Artificial Sequence: Synthetic oligonucleotide
  Target: LAMA2; (-) strand; PAM type: YTN; PAM sequence: TTA
gggagggagaaggaaataca

SEQ ID NO: 238768 - DNA, 20 bp, Artificial Sequence
  Description of Artificial Sequence: Synthetic oligonucleotide
  Target: LAMA2; (-) strand; PAM type: YTN; PAM sequence: TTG
atgggttagggagggagaag

SEQ ID NO: 238769 - DNA, 20 bp, Artificial Sequence
  Description of Artificial Sequence: Synthetic oligonucleotide
  Target: LAMA2; (-) strand; PAM type: YTN; PAM sequence: CTA
gataatagttgatgggttag

SEQ ID NO: 238770 - DNA, 20 bp, Artificial Sequence
  Description of Artificial Sequence: Synthetic oligonucleotide
  Target: LAMA2; (-) strand; PAM type: YTN; PAM sequence: TTC
caaggctagataatagttga

SEQ ID NO: 238771 - DNA, 20 bp, Artificial Sequence
  Description of Artificial Sequence: Synthetic oligonucleotide
  Target: LAMA2; (-) strand; PAM type: YTN; PAM sequence: TTT
ccaaggctagataatagttg

SEQ ID NO: 238772 - DNA, 20 bp, Artificial Sequence
  Description of Artificial Sequence: Synthetic oligonucleotide
  Target: LAMA2; (-) strand; PAM type: YTN; PAM sequence: TTT
tccaaggctagataatagtt

SEQ ID NO: 238773 - DNA, 20 bp, Artificial Sequence
  Description of Artificial Sequence: Synthetic oligonucleotide
  Target: LAMA2; (-) strand; PAM type: YTN; PAM sequence: CTT
ttccaaggctagataatagt

SEQ ID NO: 238774 - DNA, 20 bp, Artificial Sequence
  Description of Artificial Sequence: Synthetic oligonucleotide
  Target: LAMA2; (-) strand; PAM type: YTN; PAM sequence: CTA
aaacacacttttccaaggct

SEQ ID NO: 238775 - DNA, 20 bp, Artificial Sequence
  Description of Artificial Sequence: Synthetic oligonucleotide
  Target: LAMA2; (-) strand; PAM type: YTN; PAM sequence: CTC
ctaaaacacacttttccaag

SEQ ID NO: 238776 - DNA, 20 bp, Artificial Sequence
  Description of Artificial Sequence: Synthetic oligonucleotide
  Target: LAMA2; (-) strand; PAM type: YTN; PAM sequence: TTA
ctcctaaaacacacttttcc

SEQ ID NO: 238777 - DNA, 20 bp, Artificial Sequence
  Description of Artificial Sequence: Synthetic oligonucleotide
  Target: LAMA2; (-) strand; PAM type: YTN; PAM sequence: CTT
actcctaaaacacacttttc

SEQ ID NO: 238778 - DNA, 20 bp, Artificial Sequence
  Description of Artificial Sequence: Synthetic oligonucleotide
  Target: LAMA2; (-) strand; PAM type: YTN; PAM sequence: TTG
aggacttactcctaaaacac

SEQ ID NO: 238779 - DNA, 20 bp, Artificial Sequence
  Description of Artificial Sequence: Synthetic oligonucleotide
  Target: LAMA2; (-) strand; PAM type: YTN; PAM sequence: TTG
ttgaggacttactcctaaaa

SEQ ID NO: 238780 - DNA, 20 bp, Artificial Sequence
  Description of Artificial Sequence: Synthetic oligonucleotide
  Target: LAMA2; (-) strand; PAM type: YTN; PAM sequence: TTT
gttgaggacttactcctaaa

SEQ ID NO: 238781 - DNA, 20 bp, Artificial Sequence
  Description of Artificial Sequence: Synthetic oligonucleotide
  Target: LAMA2; (-) strand; PAM type: YTN; PAM sequence: TTA
gcagtatttgttgaggactt

SEQ ID NO: 238782 - DNA, 20 bp, Artificial Sequence
  Description of Artificial Sequence: Synthetic oligonucleotide
  Target: LAMA2; (-) strand; PAM type: YTN; PAM sequence: TTA
attagcagtatttgttgagg

SEQ ID NO: 238783 - DNA, 20 bp, Artificial Sequence
  Description of Artificial Sequence: Synthetic oligonucleotide
  Target: LAMA2; (-) strand; PAM type: YTN; PAM sequence: TTA
gttaattagcagtatttgtt

SEQ ID NO: 238784 - DNA, 20 bp, Artificial Sequence
  Description of Artificial Sequence: Synthetic oligonucleotide
  Target: LAMA2; (-) strand; PAM type: YTN; PAM sequence: TTA
acaaaagaaggataattagt

SEQ ID NO: 238785 - DNA, 20 bp, Artificial Sequence
  Description of Artificial Sequence: Synthetic oligonucleotide
  Target: LAMA2; (-) strand; PAM type: YTN; PAM sequence: TTA
aaataagttaacaaaagaag

SEQ ID NO: 238786 - DNA, 20 bp, Artificial Sequence
  Description of Artificial Sequence: Synthetic oligonucleotide
  Target: LAMA2; (-) strand; PAM type: YTN; PAM sequence: CTA
gtattaaaataagttaacaa

SEQ ID NO: 238787 - DNA, 20 bp, Artificial Sequence
  Description of Artificial Sequence: Synthetic oligonucleotide
  Target: LAMA2; (-) strand; PAM type: YTN; PAM sequence: CTA
atgcatcctagtattaaaat

SEQ ID NO: 238788 - DNA, 20 bp, Artificial Sequence
  Description of Artificial Sequence: Synthetic oligonucleotide
  Target: LAMA2; (-) strand; PAM type: YTN; PAM sequence: TTA
gactaatgcatcctagtatt

SEQ ID NO: 238789 - DNA, 20 bp, Artificial Sequence
  Description of Artificial Sequence: Synthetic oligonucleotide
  Target: LAMA2; (-) strand; PAM type: YTN; PAM sequence: TTT
agactaatgcatcctagtat

SEQ ID NO: 238790 - DNA, 20 bp, Artificial Sequence
  Description of Artificial Sequence: Synthetic oligonucleotide
  Target: LAMA2; (-) strand; PAM type: YTN; PAM sequence: CTT
tagactaatgcatcctagta

SEQ ID NO: 238791 - DNA, 20 bp, Artificial Sequence
  Description of Artificial Sequence: Synthetic oligonucleotide
  Target: LAMA2; (-) strand; PAM type: YTN; PAM sequence: TTA
tgacctttagactaatgcat

SEQ ID NO: 238792 - DNA, 20 bp, Artificial Sequence
  Description of Artificial Sequence: Synthetic oligonucleotide
  Target: LAMA2; (-) strand; PAM type: YTN; PAM sequence: CTG
ttatgacctttagactaatg

SEQ ID NO: 238793 - DNA, 20 bp, Artificial Sequence
  Description of Artificial Sequence: Synthetic oligonucleotide
  Target: LAMA2; (-) strand; PAM type: YTN; PAM sequence: TTC
tgttatgacctttagactaa

SEQ ID NO: 238794 - DNA, 20 bp, Artificial Sequence
  Description of Artificial Sequence: Synthetic oligonucleotide
  Target: LAMA2; (-) strand; PAM type: YTN; PAM sequence: CTT
ctgttatgacctttagacta

SEQ ID NO: 238795 - DNA, 20 bp, Artificial Sequence
  Description of Artificial Sequence: Synthetic oligonucleotide
  Target: LAMA2; (-) strand; PAM type: YTN; PAM sequence: TTC
ttctgttatgacctttagac

SEQ ID NO: 238796 - DNA, 20 bp, Artificial Sequence
  Description of Artificial Sequence: Synthetic oligonucleotide
  Target: LAMA2; (-) strand; PAM type: YTN; PAM sequence: TTT
cttctgttatgacctttaga

SEQ ID NO: 238797 - DNA, 20 bp, Artificial Sequence
  Description of Artificial Sequence: Synthetic oligonucleotide
  Target: LAMA2; (-) strand; PAM type: YTN; PAM sequence: TTT
tcttctgttatgacctttag

SEQ ID NO: 238798 - DNA, 20 bp, Artificial Sequence
  Description of Artificial Sequence: Synthetic oligonucleotide
  Target: LAMA2; (-) strand; PAM type: YTN; PAM sequence: TTA
caggttttcttctgttatga

SEQ ID NO: 238799 - DNA, 20 bp, Artificial Sequence
  Description of Artificial Sequence: Synthetic oligonucleotide
  Target: LAMA2; (-) strand; PAM type: YTN; PAM sequence: TTA
attacaggttttcttctgtt

SEQ ID NO: 238800 - DNA, 20 bp, Artificial Sequence
  Description of Artificial Sequence: Synthetic oligonucleotide
  Target: LAMA2; (-) strand; PAM type: YTN; PAM sequence: TTG
tagttaattacaggttttct

SEQ ID NO: 238801 - DNA, 20 bp, Artificial Sequence
  Description of Artificial Sequence: Synthetic oligonucleotide
  Target: LAMA2; (-) strand; PAM type: YTN; PAM sequence: TTT
gtagttaattacaggttttc

SEQ ID NO: 238802 - DNA, 20 bp, Artificial Sequence
  Description of Artificial Sequence: Synthetic oligonucleotide
  Target: LAMA2; (-) strand; PAM type: YTN; PAM sequence: TTG
gtagtttgtagttaattaca

SEQ ID NO: 238803 - DNA, 20 bp, Artificial Sequence
  Description of Artificial Sequence: Synthetic oligonucleotide
  Target: LAMA2; (-) strand; PAM type: YTN; PAM sequence: TTT
ggtagtttgtagttaattac

SEQ ID NO: 238804 - DNA, 20 bp, Artificial Sequence
  Description of Artificial Sequence: Synthetic oligonucleotide
  Target: LAMA2; (-) strand; PAM type: YTN; PAM sequence: TTT
tggtagtttgtagttaatta

SEQ ID NO: 238805 - DNA, 20 bp, Artificial Sequence
  Description of Artificial Sequence: Synthetic oligonucleotide
  Target: LAMA2; (-) strand; PAM type: YTN; PAM sequence: TTT
ttggtagtttgtagttaatt

SEQ ID NO: 238806 - DNA, 20 bp, Artificial Sequence
  Description of Artificial Sequence: Synthetic oligonucleotide
  Target: LAMA2; (-) strand; PAM type: YTN; PAM sequence: TTT
tttggtagtttgtagttaat

SEQ ID NO: 238807 - DNA, 20 bp, Artificial Sequence
  Description of Artificial Sequence: Synthetic oligonucleotide
  Target: LAMA2; (-) strand; PAM type: YTN; PAM sequence: TTG
gttttttggtagtttgtagt

SEQ ID NO: 238808 - DNA, 20 bp, Artificial Sequence
  Description of Artificial Sequence: Synthetic oligonucleotide
  Target: LAMA2; (-) strand; PAM type: YTN; PAM sequence: CTT
ggttttttggtagtttgtag

SEQ ID NO: 238809 - DNA, 20 bp, Artificial Sequence
  Description of Artificial Sequence: Synthetic oligonucleotide
  Target: LAMA2; (-) strand; PAM type: YTN; PAM sequence: CTC
agtcatgcttggttttttgg

SEQ ID NO: 238810 - DNA, 20 bp, Artificial Sequence
  Description of Artificial Sequence: Synthetic oligonucleotide
  Target: LAMA2; (-) strand; PAM type: YTN; PAM sequence: TTC
tcagtcatgcttggtttttt

SEQ ID NO: 238811 - DNA, 20 bp, Artificial Sequence
  Description of Artificial Sequence: Synthetic oligonucleotide
  Target: LAMA2; (-) strand; PAM type: YTN; PAM sequence: TTT
ctcagtcatgcttggttttt

SEQ ID NO: 238812 - DNA, 20 bp, Artificial Sequence
  Description of Artificial Sequence: Synthetic oligonucleotide
  Target: LAMA2; (-) strand; PAM type: YTN; PAM sequence: TTC
aggaatttctcagtcatgct

SEQ ID NO: 238813 - DNA, 20 bp, Artificial Sequence
  Description of Artificial Sequence: Synthetic oligonucleotide
  Target: LAMA2; (-) strand; PAM type: YTN; PAM sequence: CTT
caggaatttctcagtcatgc

SEQ ID NO: 238814 - DNA, 20 bp, Artificial Sequence
  Description of Artificial Sequence: Synthetic oligonucleotide
  Target: LAMA2; (-) strand; PAM type: YTN; PAM sequence: TTG
cttcaggaatttctcagtca

SEQ ID NO: 238815 - DNA, 20 bp, Artificial Sequence
  Description of Artificial Sequence: Synthetic oligonucleotide
  Target: LAMA2; (-) strand; PAM type: YTN; PAM sequence: TTG
tgtgataattgcttcaggaa

SEQ ID NO: 238816 - DNA, 20 bp, Artificial Sequence
  Description of Artificial Sequence: Synthetic oligonucleotide
  Target: LAMA2; (-) strand; PAM type: YTN; PAM sequence: TTT
gtgtgataattgcttcagga

SEQ ID NO: 238817 - DNA, 20 bp, Artificial Sequence
  Description of Artificial Sequence: Synthetic oligonucleotide
  Target: LAMA2; (-) strand; PAM type: YTN; PAM sequence: TTT
tgtgtgataattgcttcagg

SEQ ID NO: 238818 - DNA, 20 bp, Artificial Sequence
  Description of Artificial Sequence: Synthetic oligonucleotide
  Target: LAMA2; (-) strand; PAM type: YTN; PAM sequence: TTT
ttgtgtgataattgcttcag

SEQ ID NO: 238819 - DNA, 20 bp, Artificial Sequence
  Description of Artificial Sequence: Synthetic oligonucleotide
  Target: LAMA2; (-) strand; PAM type: YTN; PAM sequence: TTT
tttgtgtgataattgcttca

SEQ ID NO: 238820 - DNA, 20 bp, Artificial Sequence
  Description of Artificial Sequence: Synthetic oligonucleotide
  Target: LAMA2; (-) strand; PAM type: YTN; PAM sequence: TTT
ttttgtgtgataattgcttc

SEQ ID NO: 238821 - DNA, 20 bp, Artificial Sequence
  Description of Artificial Sequence: Synthetic oligonucleotide
  Target: LAMA2; (-) strand; PAM type: YTN; PAM sequence: TTT
tttttgtgtgataattgctt

SEQ ID NO: 238822 - DNA, 20 bp, Artificial Sequence
  Description of Artificial Sequence: Synthetic oligonucleotide
  Target: LAMA2; (-) strand; PAM type: YTN; PAM sequence: TTA
ttttttttgtgtgataattg

SEQ ID NO: 238823 - DNA, 20 bp, Artificial Sequence
  Description of Artificial Sequence: Synthetic oligonucleotide
  Target: LAMA2; (-) strand; PAM type: YTN; PAM sequence: TTA
agttattttttttgtgtgat

SEQ ID NO: 238824 - DNA, 20 bp, Artificial Sequence
  Description of Artificial Sequence: Synthetic oligonucleotide
  Target: LAMA2; (-) strand; PAM type: YTN; PAM sequence: TTT
aagttattttttttgtgtga

SEQ ID NO: 238825 - DNA, 20 bp, Artificial Sequence
  Description of Artificial Sequence: Synthetic oligonucleotide
  Target: LAMA2; (-) strand; PAM type: YTN; PAM sequence: CTC
cagtgacatttaagttattt

SEQ ID NO: 238826 - DNA, 20 bp, Artificial Sequence
  Description of Artificial Sequence: Synthetic oligonucleotide
  Target: LAMA2; (-) strand; PAM type: YTN; PAM sequence: TTA
ccaggaatagctccagtgac

SEQ ID NO: 238827 - DNA, 20 bp, Artificial Sequence
  Description of Artificial Sequence: Synthetic oligonucleotide
  Target: LAMA2; (-) strand; PAM type: YTN; PAM sequence: CTG
acaaagttaccaggaatagc

SEQ ID NO: 238828 - DNA, 20 bp, Artificial Sequence
  Description of Artificial Sequence: Synthetic oligonucleotide
  Target: LAMA2; (-) strand; PAM type: YTN; PAM sequence: CTA
ctgacaaagttaccaggaat

SEQ ID NO: 238829 - DNA, 20 bp, Artificial Sequence
  Description of Artificial Sequence: Synthetic oligonucleotide
  Target: LAMA2; (-) strand; PAM type: YTN; PAM sequence: CTG
ggagtactactgacaaagtt

SEQ ID NO: 238830 - DNA, 20 bp, Artificial Sequence
  Description of Artificial Sequence: Synthetic oligonucleotide
  Target: LAMA2; (-) strand; PAM type: YTN; PAM sequence: TTA
gtcagctgggagtactactg

SEQ ID NO: 238831 - DNA, 20 bp, Artificial Sequence
  Description of Artificial Sequence: Synthetic oligonucleotide
  Target: LAMA2; (-) strand; PAM type: YTN; PAM sequence: TTG
ttagtcagctgggagtacta

SEQ ID NO: 238832 - DNA, 20 bp, Artificial Sequence
  Description of Artificial Sequence: Synthetic oligonucleotide
  Target: LAMA2; (-) strand; PAM type: YTN; PAM sequence: CTG
tgattgttagtcagctggga

SEQ ID NO: 238833 - DNA, 20 bp, Artificial Sequence
  Description of Artificial Sequence: Synthetic oligonucleotide
  Target: LAMA2; (-) strand; PAM type: YTN; PAM sequence: TTG
aactgtgattgttagtcagc

SEQ ID NO: 238834 - DNA, 20 bp, Artificial Sequence
  Description of Artificial Sequence: Synthetic oligonucleotide
  Target: LAMA2; (-) strand; PAM type: YTN; PAM sequence: TTC
agcagtacatattgaactgt

SEQ ID NO: 238835 - DNA, 20 bp, Artificial Sequence
  Description of Artificial Sequence: Synthetic oligonucleotide
  Target: LAMA2; (-) strand; PAM type: YTN; PAM sequence: CTT
cagcagtacatattgaactg

SEQ ID NO: 238836 - DNA, 20 bp, Artificial Sequence
  Description of Artificial Sequence: Synthetic oligonucleotide
  Target: LAMA2; (-) strand; PAM type: YTN; PAM sequence: CTA
ggtacaacttcagcagtaca

SEQ ID NO: 238837 - DNA, 20 bp, Artificial Sequence
  Description of Artificial Sequence: Synthetic oligonucleotide
  Target: LAMA2; (-) strand; PAM type: YTN; PAM sequence: TTA
taaactaggtacaacttcag

SEQ ID NO: 238838 - DNA, 20 bp, Artificial Sequence
  Description of Artificial Sequence: Synthetic oligonucleotide
  Target: LAMA2; (-) strand; PAM type: YTN; PAM sequence: TTT
ataaactaggtacaacttca

SEQ ID NO: 238839 - DNA, 20 bp, Artificial Sequence
  Description of Artificial Sequence: Synthetic oligonucleotide
  Target: LAMA2; (-) strand; PAM type: YTN; PAM sequence: CTT
tataaactaggtacaacttc

SEQ ID NO: 238840 - DNA, 20 bp, Artificial Sequence
  Description of Artificial Sequence: Synthetic oligonucleotide
  Target: LAMA2; (-) strand; PAM type: YTN; PAM sequence: CTG
ctttataaactaggtacaac

SEQ ID NO: 238841 - DNA, 20 bp, Artificial Sequence
  Description of Artificial Sequence: Synthetic oligonucleotide
  Target: LAMA2; (-) strand; PAM type: YTN; PAM sequence: CTA
ctgctttataaactaggtac

SEQ ID NO: 238842 - DNA, 20 bp, Artificial Sequence
  Description of Artificial Sequence: Synthetic oligonucleotide
  Target: LAMA2; (-) strand; PAM type: YTN; PAM sequence: CTC
atagaagctactgctttata

SEQ ID NO: 238843 - DNA, 20 bp, Artificial Sequence
  Description of Artificial Sequence: Synthetic oligonucleotide
  Target: LAMA2; (-) strand; PAM type: YTN; PAM sequence: TTC
tcatagaagctactgcttta

SEQ ID NO: 238844 - DNA, 20 bp, Artificial Sequence
  Description of Artificial Sequence: Synthetic oligonucleotide
  Target: LAMA2; (-) strand; PAM type: YTN; PAM sequence: TTT
ctcatagaagctactgcttt

SEQ ID NO: 238845 - DNA, 20 bp, Artificial Sequence
  Description of Artificial Sequence: Synthetic oligonucleotide
  Target: LAMA2; (-) strand; PAM type: YTN; PAM sequence: CTT
tctcatagaagctactgctt

SEQ ID NO: 238846 - DNA, 20 bp, Artificial Sequence
  Description of Artificial Sequence: Synthetic oligonucleotide
  Target: LAMA2; (-) strand; PAM type: YTN; PAM sequence: TTC
tttctcatagaagctactgc

SEQ ID NO: 238847 - DNA, 20 bp, Artificial Sequence
  Description of Artificial Sequence: Synthetic oligonucleotide
  Target: LAMA2; (-) strand; PAM type: YTN; PAM sequence: TTG
tattctttctcatagaagct

SEQ ID NO: 238848 - DNA, 20 bp, Artificial Sequence
  Description of Artificial Sequence: Synthetic oligonucleotide
  Target: LAMA2; (-) strand; PAM type: YTN; PAM sequence: CTT
gtattctttctcatagaagc

SEQ ID NO: 238849 - DNA, 20 bp, Artificial Sequence
  Description of Artificial Sequence: Synthetic oligonucleotide
  Target: LAMA2; (-) strand; PAM type: YTN; PAM sequence: TTC
ttgtattctttctcatagaa

SEQ ID NO: 238850 - DNA, 20 bp, Artificial Sequence
  Description of Artificial Sequence: Synthetic oligonucleotide
  Target: LAMA2; (-) strand; PAM type: YTN; PAM sequence: TTT
cttgtattctttctcataga

SEQ ID NO: 238851 - DNA, 20 bp, Artificial Sequence
  Description of Artificial Sequence: Synthetic oligonucleotide
  Target: LAMA2; (-) strand; PAM type: YTN; PAM sequence: TTT
tcttgtattctttctcatag

SEQ ID NO: 238852 - DNA, 20 bp, Artificial Sequence
  Description of Artificial Sequence: Synthetic oligonucleotide
  Target: LAMA2; (-) strand; PAM type: YTN; PAM sequence: CTG
gagaaatagtcaccgtagtt

SEQ ID NO: 238853 - DNA, 20 bp, Artificial Sequence
  Description of Artificial Sequence: Synthetic oligonucleotide
  Target: LAMA2; (-) strand; PAM type: YTN; PAM sequence: CTC
tggagaaatagtcaccgtag

SEQ ID NO: 238854 - DNA, 20 bp, Artificial Sequence
  Description of Artificial Sequence: Synthetic oligonucleotide
  Target: LAMA2; (-) strand; PAM type: YTN; PAM sequence: TTC
tctggagaaatagtcaccgt

SEQ ID NO: 238855 - DNA, 20 bp, Artificial Sequence
  Description of Artificial Sequence: Synthetic oligonucleotide
  Target: LAMA2; (-) strand; PAM type: YTN; PAM sequence: TTT
ctctggagaaatagtcaccg

SEQ ID NO: 238856 - DNA, 20 bp, Artificial Sequence
  Description of Artificial Sequence: Synthetic oligonucleotide
  Target: LAMA2; (-) strand; PAM type: YTN; PAM sequence: TTT
tctctggagaaatagtcacc

SEQ ID NO: 238857 - DNA, 20 bp, Artificial Sequence
  Description of Artificial Sequence: Synthetic oligonucleotide
  Target: LAMA2; (-) strand; PAM type: YTN; PAM sequence: TTT
ttctctggagaaatagtcac

SEQ ID NO: 238858 - DNA, 20 bp, Artificial Sequence
  Description of Artificial Sequence: Synthetic oligonucleotide
  Target: LAMA2; (-) strand; PAM type: YTN; PAM sequence: CTC
agtacagtttttctctggag

SEQ ID NO: 238859 - DNA, 20 bp, Artificial Sequence
  Description of Artificial Sequence: Synthetic oligonucleotide
  Target: LAMA2; (-) strand; PAM type: YTN; PAM sequence: TTC
ctcagtacagtttttctctg

SEQ ID NO: 238860 - DNA, 20 bp, Artificial Sequence
  Description of Artificial Sequence: Synthetic oligonucleotide
  Target: LAMA2; (-) strand; PAM type: YTN; PAM sequence: TTT
cctcagtacagtttttctct

SEQ ID NO: 238861 - DNA, 20 bp, Artificial Sequence
  Description of Artificial Sequence: Synthetic oligonucleotide
  Target: LAMA2; (-) strand; PAM type: YTN; PAM sequence: CTA
tagtttcctcagtacagttt

SEQ ID NO: 238862 - DNA, 20 bp, Artificial Sequence
  Description of Artificial Sequence: Synthetic oligonucleotide
  Target: LAMA2; (-) strand; PAM type: YTN; PAM sequence: TTG
ctatagtttcctcagtacag

SEQ ID NO: 238863 - DNA, 20 bp, Artificial Sequence
  Description of Artificial Sequence: Synthetic oligonucleotide
  Target: LAMA2; (-) strand; PAM type: YTN; PAM sequence: TTT
gctatagtttcctcagtaca

SEQ ID NO: 238864 - DNA, 20 bp, Artificial Sequence
  Description of Artificial Sequence: Synthetic oligonucleotide
  Target: LAMA2; (-) strand; PAM type: YTN; PAM sequence: TTT
tgctatagtttcctcagtac

SEQ ID NO: 238865 - DNA, 20 bp, Artificial Sequence
  Description of Artificial Sequence: Synthetic oligonucleotide
  Target: LAMA2; (-) strand; PAM type: YTN; PAM sequence: TTT
ttgctatagtttcctcagta

SEQ ID NO: 238866 - DNA, 20 bp, Artificial Sequence
  Description of Artificial Sequence: Synthetic oligonucleotide
  Target: LAMA2; (-) strand; PAM type: YTN; PAM sequence: CTT
tttgctatagtttcctcagt

SEQ ID NO: 238867 - DNA, 20 bp, Artificial Sequence
  Description of Artificial Sequence: Synthetic oligonucleotide
  Target: LAMA2; (-) strand; PAM type: YTN; PAM sequence: TTC
tttttgctatagtttcctca

SEQ ID NO: 238868 - DNA, 20 bp, Artificial Sequence
  Description of Artificial Sequence: Synthetic oligonucleotide
  Target: LAMA2; (-) strand; PAM type: YTN; PAM sequence: TTT
ctttttgctatagtttcctc

SEQ ID NO: 238869 - DNA, 20 bp, Artificial Sequence
  Description of Artificial Sequence: Synthetic oligonucleotide
  Target: LAMA2; (-) strand; PAM type: YTN; PAM sequence: TTT
tctttttgctatagtttcct

SEQ ID NO: 238870 - DNA, 20 bp, Artificial Sequence
  Description of Artificial Sequence: Synthetic oligonucleotide
  Target: LAMA2; (-) strand; PAM type: YTN; PAM sequence: TTG
acatcaattttctttttgct

SEQ ID NO: 238871 - DNA, 20 bp, Artificial Sequence
  Description of Artificial Sequence: Synthetic oligonucleotide
  Target: LAMA2; (-) strand; PAM type: YTN; PAM sequence: TTG
tgttgacatcaattttcttt

SEQ ID NO: 238872 - DNA, 20 bp, Artificial Sequence
  Description of Artificial Sequence: Synthetic oligonucleotide
  Target: LAMA2; (-) strand; PAM type: YTN; PAM sequence: CTA
ttgtgttgacatcaattttc

SEQ ID NO: 238873 - DNA, 20 bp, Artificial Sequence
  Description of Artificial Sequence: Synthetic oligonucleotide
  Target: LAMA2; (-) strand; PAM type: YTN; PAM sequence: TTG
aagtgagatactattgtgtt

SEQ ID NO: 238874 - DNA, 20 bp, Artificial Sequence
  Description of Artificial Sequence: Synthetic oligonucleotide
  Target: LAMA2; (-) strand; PAM type: YTN; PAM sequence: CTT
gaagtgagatactattgtgt

SEQ ID NO: 238875 - DNA, 20 bp, Artificial Sequence
  Description of Artificial Sequence: Synthetic oligonucleotide
  Target: LAMA2; (-) strand; PAM type: YTN; PAM sequence: TTC
ttgaagtgagatactattgt

SEQ ID NO: 238876 - DNA, 20 bp, Artificial Sequence
  Description of Artificial Sequence: Synthetic oligonucleotide
  Target: LAMA2; (-) strand; PAM type: YTN; PAM sequence: TTT
cttgaagtgagatactattg

SEQ ID NO: 238877 - DNA, 20 bp, Artificial Sequence
  Description of Artificial Sequence: Synthetic oligonucleotide
  Target: LAMA2; (-) strand; PAM type: YTN; PAM sequence: TTG
atttcttgaagtgagatact

SEQ ID NO: 238878 - DNA, 20 bp, Artificial Sequence
  Description of Artificial Sequence: Synthetic oligonucleotide
  Target: LAMA2; (-) strand; PAM type: YTN; PAM sequence: TTT
gatttcttgaagtgagatac

SEQ ID NO: 238879 - DNA, 20 bp, Artificial Sequence
  Description of Artificial Sequence: Synthetic oligonucleotide
  Target: LAMA2; (-) strand; PAM type: YTN; PAM sequence: TTT
tgatttcttgaagtgagata

SEQ ID NO: 238880 - DNA, 20 bp, Artificial Sequence
  Description of Artificial Sequence: Synthetic oligonucleotide
  Target: LAMA2; (-) strand; PAM type: YTN; PAM sequence: TTT
ttgatttcttgaagtgagat

SEQ ID NO: 238881 - DNA, 20 bp, Artificial Sequence
  Description of Artificial Sequence: Synthetic oligonucleotide
  Target: LAMA2; (-) strand; PAM type: YTN; PAM sequence: TTG
tttttgatttcttgaagtga

SEQ ID NO: 238882 - DNA, 20 bp, Artificial Sequence
  Description of Artificial Sequence: Synthetic oligonucleotide
  Target: LAMA2; (-) strand; PAM type: YTN; PAM sequence: TTT
gtttttgatttcttgaagtg

SEQ ID NO: 238883 - DNA, 20 bp, Artificial Sequence
  Description of Artificial Sequence: Synthetic oligonucleotide
  Target: LAMA2; (-) strand; PAM type: YTN; PAM sequence: TTT
tgtttttgatttcttgaagt

SEQ ID NO: 238884 - DNA, 20 bp, Artificial Sequence
  Description of Artificial Sequence: Synthetic oligonucleotide
  Target: LAMA2; (-) strand; PAM type: YTN; PAM sequence: CTT
ttgtttttgatttcttgaag

SEQ ID NO: 238885 - DNA, 20 bp, Artificial Sequence
  Description of Artificial Sequence: Synthetic oligonucleotide
  Target: LAMA2; (-) strand; PAM type: YTN; PAM sequence: TTC
ttttgtttttgatttcttga

SEQ ID NO: 238886 - DNA, 20 bp, Artificial Sequence
  Description of Artificial Sequence: Synthetic oligonucleotide
  Target: LAMA2; (-) strand; PAM type: YTN; PAM sequence: CTA
agttcttttgtttttgattt

SEQ ID NO: 238887 - DNA, 20 bp, Artificial Sequence
  Description of Artificial Sequence: Synthetic oligonucleotide
  Target: LAMA2; (-) strand; PAM type: YTN; PAM sequence: TTA
ctaagttcttttgtttttga

SEQ ID NO: 238888 - DNA, 20 bp, Artificial Sequence
  Description of Artificial Sequence: Synthetic oligonucleotide
  Target: LAMA2; (-) strand; PAM type: YTN; PAM sequence: TTT
actaagttcttttgtttttg

SEQ ID NO: 238889 - DNA, 20 bp, Artificial Sequence
  Description of Artificial Sequence: Synthetic oligonucleotide
  Target: LAMA2; (-) strand; PAM type: YTN; PAM sequence: TTT
tactaagttcttttgttttt

SEQ ID NO: 238890 - DNA, 20 bp, Artificial Sequence
  Description of Artificial Sequence: Synthetic oligonucleotide
  Target: LAMA2; (-) strand; PAM type: YTN; PAM sequence: TTA
gaaaaattttactaagttct

SEQ ID NO: 238891 - DNA, 20 bp, Artificial Sequence
  Description of Artificial Sequence: Synthetic oligonucleotide
  Target: LAMA2; (-) strand; PAM type: YTN; PAM sequence: TTG
aattagaaaaattttactaa

SEQ ID NO: 238892 - DNA, 20 bp, Artificial Sequence
  Description of Artificial Sequence: Synthetic oligonucleotide
  Target: LAMA2; (-) strand; PAM type: YTN; PAM sequence: TTA
aaaacaaagttgaattagaa

SEQ ID NO: 238893 - DNA, 20 bp, Artificial Sequence
  Description of Artificial Sequence: Synthetic oligonucleotide
  Target: LAMA2; (-) strand; PAM type: YTN; PAM sequence: TTT
aaaaacaaagttgaattaga

SEQ ID NO: 238894 - DNA, 20 bp, Artificial Sequence
  Description of Artificial Sequence: Synthetic oligonucleotide
  Target: LAMA2; (-) strand; PAM type: YTN; PAM sequence: CTT
taaaaacaaagttgaattag

SEQ ID NO: 238895 - DNA, 20 bp, Artificial Sequence
  Description of Artificial Sequence: Synthetic oligonucleotide
  Target: LAMA2; (-) strand; PAM type: YTN; PAM sequence: TTC
cctttaaaaacaaagttgaa

SEQ ID NO: 238896 - DNA, 20 bp, Artificial Sequence
  Description of Artificial Sequence: Synthetic oligonucleotide
  Target: LAMA2; (-) strand; PAM type: YTN; PAM sequence: TTT
ccctttaaaaacaaagttga

SEQ ID NO: 238897 - DNA, 20 bp, Artificial Sequence
  Description of Artificial Sequence: Synthetic oligonucleotide
  Target: LAMA2; (-) strand; PAM type: YTN; PAM sequence: TTT
tccctttaaaaacaaagttg

SEQ ID NO: 238898 - DNA, 20 bp, Artificial Sequence
  Description of Artificial Sequence: Synthetic oligonucleotide
  Target: LAMA2; (-) strand; PAM type: YTN; PAM sequence: CTT
ttccctttaaaaacaaagtt

SEQ ID NO: 238899 - DNA, 20 bp, Artificial Sequence
  Description of Artificial Sequence: Synthetic oligonucleotide
  Target: LAMA2; (-) strand; PAM type: YTN; PAM sequence: CTC
ttttccctttaaaaacaaag

SEQ ID NO: 238900 - DNA, 20 bp, Artificial Sequence
  Description of Artificial Sequence: Synthetic oligonucleotide
  Target: LAMA2; (-) strand; PAM type: YTN; PAM sequence: TTC
tcttttccctttaaaaacaa

SEQ ID NO: 238901 - DNA, 20 bp, Artificial Sequence
  Description of Artificial Sequence: Synthetic oligonucleotide
  Target: LAMA2; (-) strand; PAM type: YTN; PAM sequence: TTA
gttctcttttccctttaaaa

SEQ ID NO: 238902 - DNA, 20 bp, Artificial Sequence
  Description of Artificial Sequence: Synthetic oligonucleotide
  Target: LAMA2; (-) strand; PAM type: YTN; PAM sequence: TTT
agttctcttttccctttaaa

SEQ ID NO: 238903 - DNA, 20 bp, Artificial Sequence
  Description of Artificial Sequence: Synthetic oligonucleotide
  Target: LAMA2; (-) strand; PAM type: YTN; PAM sequence: CTT
tagttctcttttccctttaa

SEQ ID NO: 238904 - DNA, 20 bp, Artificial Sequence
  Description of Artificial Sequence: Synthetic oligonucleotide
  Target: LAMA2; (-) strand; PAM type: YTN; PAM sequence: TTC
tttagttctcttttcccttt

SEQ ID NO: 238905 - DNA, 20 bp, Artificial Sequence
  Description of Artificial Sequence: Synthetic oligonucleotide
  Target: LAMA2; (-) strand; PAM type: YTN; PAM sequence: TTT
ctttagttctcttttccctt

SEQ ID NO: 238906 - DNA, 20 bp, Artificial Sequence
  Description of Artificial Sequence: Synthetic oligonucleotide
  Target: LAMA2; (-) strand; PAM type: YTN; PAM sequence: TTT
tctttagttctcttttccct

SEQ ID NO: 238907 - DNA, 20 bp, Artificial Sequence
  Description of Artificial Sequence: Synthetic oligonucleotide
  Target: LAMA2; (-) strand; PAM type: YTN; PAM sequence: TTT
ttctttagttctcttttccc

SEQ ID NO: 238908 - DNA, 20 bp, Artificial Sequence
  Description of Artificial Sequence: Synthetic oligonucleotide
  Target: LAMA2; (-) strand; PAM type: YTN; PAM sequence: TTT
tttctttagttctcttttcc

SEQ ID NO: 238909 - DNA, 20 bp, Artificial Sequence
  Description of Artificial Sequence: Synthetic oligonucleotide
  Target: LAMA2; (-) strand; PAM type: YTN; PAM sequence: TTT
ttttctttagttctcttttc

SEQ ID NO: 238910 - DNA, 20 bp, Artificial Sequence
  Description of Artificial Sequence: Synthetic oligonucleotide
  Target: LAMA2; (-) strand; PAM type: YTN; PAM sequence: TTT
tttttctttagttctctttt

SEQ ID NO: 238911 - DNA, 20 bp, Artificial Sequence
  Description of Artificial Sequence: Synthetic oligonucleotide
  Target: LAMA2; (-) strand; PAM type: YTN; PAM sequence: CTT
ttttttctttagttctcttt

SEQ ID NO: 238912 - DNA, 20 bp, Artificial Sequence
  Description of Artificial Sequence: Synthetic oligonucleotide
  Target: LAMA2; (-) strand; PAM type: YTN; PAM sequence: CTG
tcttttttttctttagttct

SEQ ID NO: 238913 - DNA, 20 bp, Artificial Sequence
  Description of Artificial Sequence: Synthetic oligonucleotide
  Target: LAMA2; (-) strand; PAM type: YTN; PAM sequence: CTA
caaaaaatcatggctgtctt

SEQ ID NO: 238914 - DNA, 20 bp, Artificial Sequence
  Description of Artificial Sequence: Synthetic oligonucleotide
  Target: LAMA2; (-) strand; PAM type: YTN; PAM sequence: CTA
cgctacaaaaaatcatggct

SEQ ID NO: 238915 - DNA, 20 bp, Artificial Sequence
  Description of Artificial Sequence: Synthetic oligonucleotide
  Target: LAMA2; (-) strand; PAM type: YTN; PAM sequence: TTG
tggcctacgctacaaaaaat

SEQ ID NO: 238916 - DNA, 20 bp, Artificial Sequence
  Description of Artificial Sequence: Synthetic oligonucleotide
  Target: LAMA2; (-) strand; PAM type: YTN; PAM sequence: CTC
aatgttgtggcctacgctac

SEQ ID NO: 238917 - DNA, 20 bp, Artificial Sequence
  Description of Artificial Sequence: Synthetic oligonucleotide
  Target: LAMA2; (-) strand; PAM type: YTN; PAM sequence: TTG
aacatagctcaatgttgtgg

SEQ ID NO: 238918 - DNA, 20 bp, Artificial Sequence
  Description of Artificial Sequence: Synthetic oligonucleotide
  Target: LAMA2; (-) strand; PAM type: YTN; PAM sequence: TTT
gaacatagctcaatgttgtg

SEQ ID NO: 238919 - DNA, 20 bp, Artificial Sequence
  Description of Artificial Sequence: Synthetic oligonucleotide
  Target: LAMA2; (-) strand; PAM type: YTN; PAM sequence: CTT
tgaacatagctcaatgttgt

SEQ ID NO: 238920 - DNA, 20 bp, Artificial Sequence
  Description of Artificial Sequence: Synthetic oligonucleotide
  Target: LAMA2; (-) strand; PAM type: YTN; PAM sequence: TTC
ctttgaacatagctcaatgt

SEQ ID NO: 238921 - DNA, 20 bp, Artificial Sequence
  Description of Artificial Sequence: Synthetic oligonucleotide
  Target: LAMA2; (-) strand; PAM type: YTN; PAM sequence: TTT
cctttgaacatagctcaatg

SEQ ID NO: 238922 - DNA, 20 bp, Artificial Sequence
  Description of Artificial Sequence: Synthetic oligonucleotide
  Target: LAMA2; (-) strand; PAM type: YTN; PAM sequence: CTA
tttcctttgaacatagctca

SEQ ID NO: 238923 - DNA, 20 bp, Artificial Sequence
  Description of Artificial Sequence: Synthetic oligonucleotide
  Target: LAMA2; (-) strand; PAM type: YTN; PAM sequence: TTA
gacatctatttcctttgaac

SEQ ID NO: 238924 - DNA, 20 bp, Artificial Sequence
  Description of Artificial Sequence: Synthetic oligonucleotide
  Target: LAMA2; (-) strand; PAM type: YTN; PAM sequence: TTT
agacatctatttcctttgaa

SEQ ID NO: 238925 - DNA, 20 bp, Artificial Sequence
  Description of Artificial Sequence: Synthetic oligonucleotide
  Target: LAMA2; (-) strand; PAM type: YTN; PAM sequence: CTT
tagacatctatttcctttga

SEQ ID NO: 238926 - DNA, 20 bp, Artificial Sequence
  Description of Artificial Sequence: Synthetic oligonucleotide
  Target: LAMA2; (-) strand; PAM type: YTN; PAM sequence: TTA
ggaagaaatgtgtgctttag

SEQ ID NO: 238927 - DNA, 20 bp, Artificial Sequence
  Description of Artificial Sequence: Synthetic oligonucleotide
  Target: LAMA2; (-) strand; PAM type: YTN; PAM sequence: TTT
aggaagaaatgtgtgcttta

SEQ ID NO: 238928 - DNA, 20 bp, Artificial Sequence
  Description of Artificial Sequence: Synthetic oligonucleotide
  Target: LAMA2; (-) strand; PAM type: YTN; PAM sequence: TTT
taggaagaaatgtgtgcttt

SEQ ID NO: 238929 - DNA, 20 bp, Artificial Sequence
  Description of Artificial Sequence: Synthetic oligonucleotide
  Target: LAMA2; (-) strand; PAM type: YTN; PAM sequence: CTT
ttaggaagaaatgtgtgctt

SEQ ID NO: 238930 - DNA, 20 bp, Artificial Sequence
  Description of Artificial Sequence: Synthetic oligonucleotide
  Target: LAMA2; (-) strand; PAM type: YTN; PAM sequence: TTC
ttttaggaagaaatgtgtgc

SEQ ID NO: 238931 - DNA, 20 bp, Artificial Sequence
  Description of Artificial Sequence: Synthetic oligonucleotide
  Target: LAMA2; (-) strand; PAM type: YTN; PAM sequence: TTC
attcttttaggaagaaatgt

SEQ ID NO: 238932 - DNA, 20 bp, Artificial Sequence
  Description of Artificial Sequence: Synthetic oligonucleotide
  Target: LAMA2; (-) strand; PAM type: YTN; PAM sequence: TTT
cattcttttaggaagaaatg

SEQ ID NO: 238933 - DNA, 20 bp, Artificial Sequence
  Description of Artificial Sequence: Synthetic oligonucleotide
  Target: LAMA2; (-) strand; PAM type: YTN; PAM sequence: TTT
tcattcttttaggaagaaat

SEQ ID NO: 238934 - DNA, 20 bp, Artificial Sequence
  Description of Artificial Sequence: Synthetic oligonucleotide
  Target: LAMA2; (-) strand; PAM type: YTN; PAM sequence: TTC
ccaaagaaccaattttcatt

SEQ ID NO: 238935 - DNA, 20 bp, Artificial Sequence
  Description of Artificial Sequence: Synthetic oligonucleotide
  Target: LAMA2; (-) strand; PAM type: YTN; PAM sequence: TTG
ttcccaaagaaccaattttc

SEQ ID NO: 238936 - DNA, 20 bp, Artificial Sequence
  Description of Artificial Sequence: Synthetic oligonucleotide
  Target: LAMA2; (-) strand; PAM type: YTN; PAM sequence: TTT
gttcccaaagaaccaatttt

SEQ ID NO: 238937 - DNA, 20 bp, Artificial Sequence
  Description of Artificial Sequence: Synthetic oligonucleotide
  Target: LAMA2; (-) strand; PAM type: YTN; PAM sequence: TTT
tgttcccaaagaaccaattt

SEQ ID NO: 238938 - DNA, 20 bp, Artificial Sequence
  Description of Artificial Sequence: Synthetic oligonucleotide
  Target: LAMA2; (-) strand; PAM type: YTN; PAM sequence: TTT
ttgttcccaaagaaccaatt

SEQ ID NO: 238939 - DNA, 20 bp, Artificial Sequence
  Description of Artificial Sequence: Synthetic oligonucleotide
  Target: LAMA2; (-) strand; PAM type: YTN; PAM sequence: TTA
cataaaatcaatatgatatt

SEQ ID NO: 238940 - DNA, 20 bp, Artificial Sequence
  Description of Artificial Sequence: Synthetic oligonucleotide
  Target: LAMA2; (-) strand; PAM type: YTN; PAM sequence: TTT
acataaaatcaatatgatat

SEQ ID NO: 238941 - DNA, 20 bp, Artificial Sequence
  Description of Artificial Sequence: Synthetic oligonucleotide
  Target: LAMA2; (-) strand; PAM type: YTN; PAM sequence: CTT
tacataaaatcaatatgata

SEQ ID NO: 238942 - DNA, 20 bp, Artificial Sequence
  Description of Artificial Sequence: Synthetic oligonucleotide
  Target: LAMA2; (-) strand; PAM type: YTN; PAM sequence: TTG
cctttacataaaatcaatat

SEQ ID NO: 238943 - DNA, 20 bp, Artificial Sequence
  Description of Artificial Sequence: Synthetic oligonucleotide
  Target: LAMA2; (-) strand; PAM type: YTN; PAM sequence: TTT
gcctttacataaaatcaata

SEQ ID NO: 238944 - DNA, 20 bp, Artificial Sequence
  Description of Artificial Sequence: Synthetic oligonucleotide
  Target: LAMA2; (-) strand; PAM type: YTN; PAM sequence: TTA
tgtacagatgcaccatgtga

SEQ ID NO: 238945 - DNA, 20 bp, Artificial Sequence
  Description of Artificial Sequence: Synthetic oligonucleotide
  Target: LAMA2; (-) strand; PAM type: YTN; PAM sequence: TTT
atgtacagatgcaccatgtg

SEQ ID NO: 238946 - DNA, 20 bp, Artificial Sequence
  Description of Artificial Sequence: Synthetic oligonucleotide
  Target: LAMA2; (-) strand; PAM type: YTN; PAM sequence: TTT
tatgtacagatgcaccatgt

SEQ ID NO: 238947 - DNA, 20 bp, Artificial Sequence
  Description of Artificial Sequence: Synthetic oligonucleotide
  Target: LAMA2; (-) strand; PAM type: YTN; PAM sequence: CTC
cagatatattttatgtacag

SEQ ID NO: 238948 - DNA, 20 bp, Artificial Sequence
  Description of Artificial Sequence: Synthetic oligonucleotide
  Target: LAMA2; (-) strand; PAM type: YTN; PAM sequence: TTA
atactccagatatattttat

SEQ ID NO: 238949 - DNA, 20 bp, Artificial Sequence
  Description of Artificial Sequence: Synthetic oligonucleotide
  Target: LAMA2; (-) strand; PAM type: YTN; PAM sequence: TTT
aatactccagatatatttta

SEQ ID NO: 238950 - DNA, 20 bp, Artificial Sequence
  Description of Artificial Sequence: Synthetic oligonucleotide
  Target: LAMA2; (-) strand; PAM type: YTN; PAM sequence: CTT
taatactccagatatatttt

SEQ ID NO: 238951 - DNA, 20 bp, Artificial Sequence
  Description of Artificial Sequence: Synthetic oligonucleotide
  Target: LAMA2; (-) strand; PAM type: YTN; PAM sequence: TTC
ataatcatccccaccatgaa

SEQ ID NO: 238952 - DNA, 20 bp, Artificial Sequence
  Description of Artificial Sequence: Synthetic oligonucleotide
  Target: LAMA2; (-) strand; PAM type: YTN; PAM sequence: TTT
cataatcatccccaccatga

SEQ ID NO: 238953 - DNA, 20 bp, Artificial Sequence
  Description of Artificial Sequence: Synthetic oligonucleotide
  Target: LAMA2; (-) strand; PAM type: YTN; PAM sequence: TTT
tcataatcatccccaccatg

SEQ ID NO: 238954 - DNA, 20 bp, Artificial Sequence
  Description of Artificial Sequence: Synthetic oligonucleotide
  Target: LAMA2; (-) strand; PAM type: YTN; PAM sequence: TTT
ttcataatcatccccaccat

SEQ ID NO: 238955 - DNA, 20 bp, Artificial Sequence
  Description of Artificial Sequence: Synthetic oligonucleotide
  Target: LAMA2; (-) strand; PAM type: YTN; PAM sequence: TTT
tttcataatcatccccacca

SEQ ID NO: 238956 - DNA, 20 bp, Artificial Sequence
  Description of Artificial Sequence: Synthetic oligonucleotide
  Target: LAMA2; (-) strand; PAM type: YTN; PAM sequence: CTA
tatagtcattttttcataat

SEQ ID NO: 238957 - DNA, 20 bp, Artificial Sequence
  Description of Artificial Sequence: Synthetic oligonucleotide
  Target: LAMA2; (-) strand; PAM type: YTN; PAM sequence: CTA
tggagcctatatagtcattt

SEQ ID NO: 238958 - DNA, 20 bp, Artificial Sequence
  Description of Artificial Sequence: Synthetic oligonucleotide
  Target: LAMA2; (-) strand; PAM type: YTN; PAM sequence: TTA
tcatcatgtccctatggagc

SEQ ID NO: 238959 - DNA, 20 bp, Artificial Sequence
  Description of Artificial Sequence: Synthetic oligonucleotide
  Target: LAMA2; (-) strand; PAM type: YTN; PAM sequence: TTT
atcatcatgtccctatggag

SEQ ID NO: 238960 - DNA, 20 bp, Artificial Sequence
  Description of Artificial Sequence: Synthetic oligonucleotide
  Target: LAMA2; (-) strand; PAM type: YTN; PAM sequence: TTT
tatcatcatgtccctatgga

SEQ ID NO: 238961 - DNA, 20 bp, Artificial Sequence
  Description of Artificial Sequence: Synthetic oligonucleotide
  Target: LAMA2; (-) strand; PAM type: YTN; PAM sequence: TTT
ttatcatcatgtccctatgg

SEQ ID NO: 238962 - DNA, 20 bp, Artificial Sequence
  Description of Artificial Sequence: Synthetic oligonucleotide
  Target: LAMA2; (-) strand; PAM type: YTN; PAM sequence: TTT
tttatcatcatgtccctatg

SEQ ID NO: 238963 - DNA, 20 bp, Artificial Sequence
  Description of Artificial Sequence: Synthetic oligonucleotide
  Target: LAMA2; (-) strand; PAM type: YTN; PAM sequence: CTA
ttttttatcatcatgtccct

SEQ ID NO: 238964 - DNA, 20 bp, Artificial Sequence
  Description of Artificial Sequence: Synthetic oligonucleotide
  Target: LAMA2; (-) strand; PAM type: YTN; PAM sequence: TTA
atctattttttatcatcatg

SEQ ID NO: 238965 - DNA, 20 bp, Artificial Sequence
  Description of Artificial Sequence: Synthetic oligonucleotide
  Target: LAMA2; (-) strand; PAM type: YTN; PAM sequence: CTT
aatctattttttatcatcat

SEQ ID NO: 238966 - DNA, 20 bp, Artificial Sequence
  Description of Artificial Sequence: Synthetic oligonucleotide
  Target: LAMA2; (-) strand; PAM type: YTN; PAM sequence: CTA
cttaatctattttttatcat

SEQ ID NO: 238967 - DNA, 20 bp, Artificial Sequence
  Description of Artificial Sequence: Synthetic oligonucleotide
  Target: LAMA2; (-) strand; PAM type: YTN; PAM sequence: TTC
aatctacttaatctattttt

SEQ ID NO: 238968 - DNA, 20 bp, Artificial Sequence
  Description of Artificial Sequence: Synthetic oligonucleotide
  Target: LAMA2; (-) strand; PAM type: YTN; PAM sequence: TTT
caatctacttaatctatttt

SEQ ID NO: 238969 - DNA, 20 bp, Artificial Sequence
  Description of Artificial Sequence: Synthetic oligonucleotide
  Target: LAMA2; (-) strand; PAM type: YTN; PAM sequence: TTT
tcaatctacttaatctattt

SEQ ID NO: 238970 - DNA, 20 bp, Artificial Sequence
  Description of Artificial Sequence: Synthetic oligonucleotide
  Target: LAMA2; (-) strand; PAM type: YTN; PAM sequence: CTA
gtgttttcaatctacttaat

SEQ ID NO: 238971 - DNA, 20 bp, Artificial Sequence
  Description of Artificial Sequence: Synthetic oligonucleotide
  Target: LAMA2; (-) strand; PAM type: YTN; PAM sequence: TTA
gactagtgttttcaatctac

SEQ ID NO: 238972 - DNA, 20 bp, Artificial Sequence
  Description of Artificial Sequence: Synthetic oligonucleotide
  Target: LAMA2; (-) strand; PAM type: YTN; PAM sequence: TTT
agactagtgttttcaatcta

SEQ ID NO: 238973 - DNA, 20 bp, Artificial Sequence
  Description of Artificial Sequence: Synthetic oligonucleotide
  Target: LAMA2; (-) strand; PAM type: YTN; PAM sequence: CTT
tagactagtgttttcaatct

SEQ ID NO: 238974 - DNA, 20 bp, Artificial Sequence
  Description of Artificial Sequence: Synthetic oligonucleotide
  Target: LAMA2; (-) strand; PAM type: YTN; PAM sequence: TTC
actttagactagtgttttca

SEQ ID NO: 238975 - DNA, 20 bp, Artificial Sequence
  Description of Artificial Sequence: Synthetic oligonucleotide
  Target: LAMA2; (-) strand; PAM type: YTN; PAM sequence: CTT
cactttagactagtgttttc

SEQ ID NO: 238976 - DNA, 20 bp, Artificial Sequence
  Description of Artificial Sequence: Synthetic oligonucleotide
  Target: LAMA2; (-) strand; PAM type: YTN; PAM sequence: TTA
aaacacatcacttcacttta

SEQ ID NO: 238977 - DNA, 20 bp, Artificial Sequence
  Description of Artificial Sequence: Synthetic oligonucleotide
  Target: LAMA2; (-) strand; PAM type: YTN; PAM sequence: TTA
tgatattaaaacacatcact

SEQ ID NO: 238978 - DNA, 20 bp, Artificial Sequence
  Description of Artificial Sequence: Synthetic oligonucleotide
  Target: LAMA2; (-) strand; PAM type: YTN; PAM sequence: CTC
acatattatgatattaaaac

SEQ ID NO: 238979 - DNA, 20 bp, Artificial Sequence
  Description of Artificial Sequence: Synthetic oligonucleotide
  Target: LAMA2; (-) strand; PAM type: YTN; PAM sequence: TTC
tcacatattatgatattaaa

SEQ ID NO: 238980 - DNA, 20 bp, Artificial Sequence
  Description of Artificial Sequence: Synthetic oligonucleotide
  Target: LAMA2; (-) strand; PAM type: YTN; PAM sequence: TTA
tattctcacatattatgata

SEQ ID NO: 238981 - DNA, 20 bp, Artificial Sequence
  Description of Artificial Sequence: Synthetic oligonucleotide
  Target: LAMA2; (-) strand; PAM type: YTN; PAM sequence: TTT
atattctcacatattatgat

SEQ ID NO: 238982 - DNA, 20 bp, Artificial Sequence
  Description of Artificial Sequence: Synthetic oligonucleotide
  Target: LAMA2; (-) strand; PAM type: YTN; PAM sequence: TTT
tatattctcacatattatga

SEQ ID NO: 238983 - DNA, 20 bp, Artificial Sequence
  Description of Artificial Sequence: Synthetic oligonucleotide
  Target: LAMA2; (-) strand; PAM type: YTN; PAM sequence: CTT
ttatattctcacatattatg

SEQ ID NO: 238984 - DNA, 20 bp, Artificial Sequence
  Description of Artificial Sequence: Synthetic oligonucleotide
  Target: LAMA2; (-) strand; PAM type: YTN; PAM sequence: TTG
taaataatccatacgtaaat

SEQ ID NO: 238985 - DNA, 20 bp, Artificial Sequence
  Description of Artificial Sequence: Synthetic oligonucleotide
  Target: LAMA2; (-) strand; PAM type: YTN; PAM sequence: TTC
cattgtaaataatccatacg

SEQ ID NO: 238986 - DNA, 20 bp, Artificial Sequence
  Description of Artificial Sequence: Synthetic oligonucleotide
  Target: LAMA2; (-) strand; PAM type: YTN; PAM sequence: TTT
ccattgtaaataatccatac

SEQ ID NO: 238987 - DNA, 20 bp, Artificial Sequence
  Description of Artificial Sequence: Synthetic oligonucleotide
  Target: LAMA2; (-) strand; PAM type: YTN; PAM sequence: TTT
tccattgtaaataatccata

SEQ ID NO: 238988 - DNA, 20 bp, Artificial Sequence
  Description of Artificial Sequence: Synthetic oligonucleotide
  Target: LAMA2; (-) strand; PAM type: YTN; PAM sequence: TTT
ttccattgtaaataatccat

SEQ ID NO: 238989 - DNA, 20 bp, Artificial Sequence
  Description of Artificial Sequence: Synthetic oligonucleotide
  Target: LAMA2; (-) strand; PAM type: YTN; PAM sequence: CTA
taatagtcatttttccattg

SEQ ID NO: 238990 - DNA, 20 bp, Artificial Sequence
  Description of Artificial Sequence: Synthetic oligonucleotide
  Target: LAMA2; (-) strand; PAM type: YTN; PAM sequence: TTA
ataaaatgaaatatgaacta

SEQ ID NO: 238991 - DNA, 20 bp, Artificial Sequence
  Description of Artificial Sequence: Synthetic oligonucleotide
  Target: LAMA2; (-) strand; PAM type: YTN; PAM sequence: TTA
cattaataaaatgaaatatg

SEQ ID NO: 238992 - DNA, 20 bp, Artificial Sequence
  Description of Artificial Sequence: Synthetic oligonucleotide
  Target: LAMA2; (-) strand; PAM type: YTN; PAM sequence: CTA
atcaattacattaataaaat

SEQ ID NO: 238993 - DNA, 20 bp, Artificial Sequence
  Description of Artificial Sequence: Synthetic oligonucleotide
  Target: LAMA2; (-) strand; PAM type: YTN; PAM sequence: TTC
taatcaattacattaataaa

SEQ ID NO: 238994 - DNA, 20 bp, Artificial Sequence
  Description of Artificial Sequence: Synthetic oligonucleotide
  Target: LAMA2; (-) strand; PAM type: YTN; PAM sequence: TTA
ttctaatcaattacattaat

SEQ ID NO: 238995 - DNA, 20 bp, Artificial Sequence
  Description of Artificial Sequence: Synthetic oligonucleotide
  Target: LAMA2; (-) strand; PAM type: YTN; PAM sequence: CTA
taccattattctaatcaatt

SEQ ID NO: 238996 - DNA, 20 bp, Artificial Sequence
  Description of Artificial Sequence: Synthetic oligonucleotide
  Target: LAMA2; (-) strand; PAM type: YTN; PAM sequence: TTC
tataccattattctaatcaa

SEQ ID NO: 238997 - DNA, 20 bp, Artificial Sequence
  Description of Artificial Sequence: Synthetic oligonucleotide
  Target: LAMA2; (-) strand; PAM type: YTN; PAM sequence: TTT
ctataccattattctaatca

SEQ ID NO: 238998 - DNA, 20 bp, Artificial Sequence
  Description of Artificial Sequence: Synthetic oligonucleotide
  Target: LAMA2; (-) strand; PAM type: YTN; PAM sequence: CTA
tttctataccattattctaa

SEQ ID NO: 238999 - DNA, 20 bp, Artificial Sequence
  Description of Artificial Sequence: Synthetic oligonucleotide
  Target: LAMA2; (-) strand; PAM type: YTN; PAM sequence: TTG
ctatttctataccattattc

SEQ ID NO: 239000 - DNA, 20 bp, Artificial Sequence
  Description of Artificial Sequence: Synthetic oligonucleotide
  Target: LAMA2; (-) strand; PAM type: YTN; PAM sequence: TTT
gctatttctataccattatt

SEQ ID NO: 239001 - DNA, 20 bp, Artificial Sequence
  Description of Artificial Sequence: Synthetic oligonucleotide
  Target: LAMA2; (-) strand; PAM type: YTN; PAM sequence: TTT
tgctatttctataccattat

SEQ ID NO: 239002 - DNA, 20 bp, Artificial Sequence
  Description of Artificial Sequence: Synthetic oligonucleotide
  Target: LAMA2; (-) strand; PAM type: YTN; PAM sequence: CTT
ttgctatttctataccatta

SEQ ID NO: 239003 - DNA, 20 bp, Artificial Sequence
  Description of Artificial Sequence: Synthetic oligonucleotide
  Target: LAMA2; (-) strand; PAM type: YTN; PAM sequence: CTG
cttttgctatttctatacca

SEQ ID NO: 239004 - DNA, 20 bp, Artificial Sequence
  Description of Artificial Sequence: Synthetic oligonucleotide
  Target: LAMA2; (-) strand; PAM type: YTN; PAM sequence: TTC
tgcttttgctatttctatac

SEQ ID NO: 239005 - DNA, 20 bp, Artificial Sequence
  Description of Artificial Sequence: Synthetic oligonucleotide
  Target: LAMA2; (-) strand; PAM type: YTN; PAM sequence: TTA
aaaccaaatattctgctttt

SEQ ID NO: 239006 - DNA, 20 bp, Artificial Sequence
  Description of Artificial Sequence: Synthetic oligonucleotide
  Target: LAMA2; (-) strand; PAM type: YTN; PAM sequence: CTT
aaaaccaaatattctgcttt

SEQ ID NO: 239007 - DNA, 20 bp, Artificial Sequence
  Description of Artificial Sequence: Synthetic oligonucleotide
  Target: LAMA2; (-) strand; PAM type: YTN; PAM sequence: TTC
ttaaaaccaaatattctgct

SEQ ID NO: 239008 - DNA, 20 bp, Artificial Sequence
  Description of Artificial Sequence: Synthetic oligonucleotide
  Target: LAMA2; (-) strand; PAM type: YTN; PAM sequence: TTT
cttaaaaccaaatattctgc

SEQ ID NO: 239009 - DNA, 20 bp, Artificial Sequence
  Description of Artificial Sequence: Synthetic oligonucleotide
  Target: LAMA2; (-) strand; PAM type: YTN; PAM sequence: TTT
tcttaaaaccaaatattctg

SEQ ID NO: 239010 - DNA, 20 bp, Artificial Sequence
  Description of Artificial Sequence: Synthetic oligonucleotide
  Target: LAMA2; (-) strand; PAM type: YTN; PAM sequence: TTA
tatcaccatattttcttaaa

SEQ ID NO: 239011 - DNA, 20 bp, Artificial Sequence
  Description of Artificial Sequence: Synthetic oligonucleotide
  Target: LAMA2; (-) strand; PAM type: YTN; PAM sequence: CTT
atatcaccatattttcttaa

SEQ ID NO: 239012 - DNA, 20 bp, Artificial Sequence
  Description of Artificial Sequence: Synthetic oligonucleotide
  Target: LAMA2; (-) strand; PAM type: YTN; PAM sequence: TTC
ccttatatcaccatattttc

SEQ ID NO: 239013 - DNA, 20 bp, Artificial Sequence
  Description of Artificial Sequence: Synthetic oligonucleotide
  Target: LAMA2; (-) strand; PAM type: YTN; PAM sequence: TTC
attcccttatatcaccatat

SEQ ID NO: 239014 - DNA, 20 bp, Artificial Sequence
  Description of Artificial Sequence: Synthetic oligonucleotide
  Target: LAMA2; (-) strand; PAM type: YTN; PAM sequence: TTA
atattcattcccttatatca

SEQ ID NO: 239015 - DNA, 20 bp, Artificial Sequence
  Description of Artificial Sequence: Synthetic oligonucleotide
  Target: LAMA2; (-) strand; PAM type: YTN; PAM sequence: CTA
gaaattaatattcattccct

SEQ ID NO: 239016 - DNA, 20 bp, Artificial Sequence
  Description of Artificial Sequence: Synthetic oligonucleotide
  Target: LAMA2; (-) strand; PAM type: YTN; PAM sequence: CTC
tagaaattaatattcattcc

SEQ ID NO: 239017 - DNA, 20 bp, Artificial Sequence
  Description of Artificial Sequence: Synthetic oligonucleotide
  Target: LAMA2; (-) strand; PAM type: YTN; PAM sequence: TTC
cactctagaaattaatattc

SEQ ID NO: 239018 - DNA, 20 bp, Artificial Sequence
  Description of Artificial Sequence: Synthetic oligonucleotide
  Target: LAMA2; (-) strand; PAM type: YTN; PAM sequence: CTT
ccactctagaaattaatatt

SEQ ID NO: 239019 - DNA, 20 bp, Artificial Sequence
  Description of Artificial Sequence: Synthetic oligonucleotide
  Target: LAMA2; (-) strand; PAM type: YTN; PAM sequence: CTA
cagacttccactctagaaat

SEQ ID NO: 239020 - DNA, 20 bp, Artificial Sequence
  Description of Artificial Sequence: Synthetic oligonucleotide
  Target: LAMA2; (-) strand; PAM type: YTN; PAM sequence: CTA
gaacgctacagacttccact

SEQ ID NO: 239021 - DNA, 20 bp, Artificial Sequence
  Description of Artificial Sequence: Synthetic oligonucleotide
  Target: LAMA2; (-) strand; PAM type: YTN; PAM sequence: TTC
tagaacgctacagacttcca

SEQ ID NO: 239022 - DNA, 20 bp, Artificial Sequence
  Description of Artificial Sequence: Synthetic oligonucleotide
  Target: LAMA2; (-) strand; PAM type: YTN; PAM sequence: TTT
ctagaacgctacagacttcc

SEQ ID NO: 239023 - DNA, 20 bp, Artificial Sequence
  Description of Artificial Sequence: Synthetic oligonucleotide
  Target: LAMA2; (-) strand; PAM type: YTN; PAM sequence: CTA
taaaacacggtaatttctag

SEQ ID NO: 239024 - DNA, 20 bp, Artificial Sequence
  Description of Artificial Sequence: Synthetic oligonucleotide
  Target: LAMA2; (-) strand; PAM type: YTN; PAM sequence: CTA
cagcctataaaacacggtaa

SEQ ID NO: 239025 - DNA, 20 bp, Artificial Sequence
  Description of Artificial Sequence: Synthetic oligonucleotide
  Target: LAMA2; (-) strand; PAM type: YTN; PAM sequence: TTC
acactacagcctataaaaca

SEQ ID NO: 239026 - DNA, 20 bp, Artificial Sequence
  Description of Artificial Sequence: Synthetic oligonucleotide
  Target: LAMA2; (-) strand; PAM type: YTN; PAM sequence: TTT
cacactacagcctataaaac

SEQ ID NO: 239027 - DNA, 20 bp, Artificial Sequence
  Description of Artificial Sequence: Synthetic oligonucleotide
  Target: LAMA2; (-) strand; PAM type: YTN; PAM sequence: TTT
tcacactacagcctataaaa

SEQ ID NO: 239028 - DNA, 20 bp, Artificial Sequence
  Description of Artificial Sequence: Synthetic oligonucleotide
  Target: LAMA2; (-) strand; PAM type: YTN; PAM sequence: TTA
atgataattttcacactaca

SEQ ID NO: 239029 - DNA, 20 bp, Artificial Sequence
  Description of Artificial Sequence: Synthetic oligonucleotide
  Target: LAMA2; (-) strand; PAM type: YTN; PAM sequence: TTT
aatgataattttcacactac

SEQ ID NO: 239030 - DNA, 20 bp, Artificial Sequence
  Description of Artificial Sequence: Synthetic oligonucleotide
  Target: LAMA2; (-) strand; PAM type: YTN; PAM sequence: TTG
cgtatttaatgataattttc

SEQ ID NO: 239031 - DNA, 20 bp, Artificial Sequence
  Description of Artificial Sequence: Synthetic oligonucleotide
  Target: LAMA2; (-) strand; PAM type: YTN; PAM sequence: TTT
gcgtatttaatgataatttt

SEQ ID NO: 239032 - DNA, 20 bp, Artificial Sequence
  Description of Artificial Sequence: Synthetic oligonucleotide
  Target: LAMA2; (-) strand; PAM type: YTN; PAM sequence: TTC
aatttgcgtatttaatgata

SEQ ID NO: 239033 - DNA, 20 bp, Artificial Sequence
  Description of Artificial Sequence: Synthetic oligonucleotide
  Target: LAMA2; (-) strand; PAM type: YTN; PAM sequence: TTT
caatttgcgtatttaatgat

SEQ ID NO: 239034 - DNA, 20 bp, Artificial Sequence
  Description of Artificial Sequence: Synthetic oligonucleotide
  Target: LAMA2; (-) strand; PAM type: YTN; PAM sequence: TTT
tcaatttgcgtatttaatga

SEQ ID NO: 239035 - DNA, 20 bp, Artificial Sequence
  Description of Artificial Sequence: Synthetic oligonucleotide
  Target: LAMA2; (-) strand; PAM type: YTN; PAM sequence: CTT
ttcaatttgcgtatttaatg

SEQ ID NO: 239036 - DNA, 20 bp, Artificial Sequence
  Description of Artificial Sequence: Synthetic oligonucleotide
  Target: LAMA2; (-) strand; PAM type: YTN; PAM sequence: TTC
ttttcaatttgcgtatttaa

SEQ ID NO: 239037 - DNA, 20 bp, Artificial Sequence
  Description of Artificial Sequence: Synthetic oligonucleotide
  Target: LAMA2; (-) strand; PAM type: YTN; PAM sequence: TTA
gtgattcttttcaatttgcg

SEQ ID NO: 239038 - DNA, 20 bp, Artificial Sequence
  Description of Artificial Sequence: Synthetic oligonucleotide
  Target: LAMA2; (-) strand; PAM type: YTN; PAM sequence: TTG
tatagagtccattagtgatt

SEQ ID NO: 239039 - DNA, 20 bp, Artificial Sequence
  Description of Artificial Sequence: Synthetic oligonucleotide
  Target: LAMA2; (-) strand; PAM type: YTN; PAM sequence: TTT
gtatagagtccattagtgat

SEQ ID NO: 239040 - DNA, 20 bp, Artificial Sequence
  Description of Artificial Sequence: Synthetic oligonucleotide
  Target: LAMA2; (-) strand; PAM type: YTN; PAM sequence: TTA
tttgtatagagtccattagt

SEQ ID NO: 239041 - DNA, 20 bp, Artificial Sequence
  Description of Artificial Sequence: Synthetic oligonucleotide
  Target: LAMA2; (-) strand; PAM type: YTN; PAM sequence: TTT
atttgtatagagtccattag

SEQ ID NO: 239042 - DNA, 20 bp, Artificial Sequence
  Description of Artificial Sequence: Synthetic oligonucleotide
  Target: LAMA2; (-) strand; PAM type: YTN; PAM sequence: CTT
tatttgtatagagtccatta

SEQ ID NO: 239043 - DNA, 20 bp, Artificial Sequence
  Description of Artificial Sequence: Synthetic oligonucleotide
  Target: LAMA2; (-) strand; PAM type: YTN; PAM sequence: TTA
acactttatttgtatagagt

SEQ ID NO: 239044 - DNA, 20 bp, Artificial Sequence
  Description of Artificial Sequence: Synthetic oligonucleotide
  Target: LAMA2; (-) strand; PAM type: YTN; PAM sequence: TTT
aacactttatttgtatagag

SEQ ID NO: 239045 - DNA, 20 bp, Artificial Sequence
  Description of Artificial Sequence: Synthetic oligonucleotide
  Target: LAMA2; (-) strand; PAM type: YTN; PAM sequence: TTT
taacactttatttgtataga

SEQ ID NO: 239046 - DNA, 20 bp, Artificial Sequence
  Description of Artificial Sequence: Synthetic oligonucleotide
  Target: LAMA2; (-) strand; PAM type: YTN; PAM sequence: TTC
attttaacactttatttgta

SEQ ID NO: 239047 - DNA, 20 bp, Artificial Sequence
  Description of Artificial Sequence: Synthetic oligonucleotide
  Target: LAMA2; (-) strand; PAM type: YTN; PAM sequence: TTG
atccaataaattcattttaa

SEQ ID NO: 239048 - DNA, 20 bp, Artificial Sequence
  Description of Artificial Sequence: Synthetic oligonucleotide
  Target: LAMA2; (-) strand; PAM type: YTN; PAM sequence: CTA
ttgatccaataaattcattt

SEQ ID NO: 239049 - DNA, 20 bp, Artificial Sequence
  Description of Artificial Sequence: Synthetic oligonucleotide
  Target: LAMA2; (-) strand; PAM type: YTN; PAM sequence: CTC
ctattgatccaataaattca

SEQ ID NO: 239050 - DNA, 20 bp, Artificial Sequence
  Description of Artificial Sequence: Synthetic oligonucleotide
  Target: LAMA2; (-) strand; PAM type: YTN; PAM sequence: CTG
ggaagctcctattgatccaa

SEQ ID NO: 239051 - DNA, 20 bp, Artificial Sequence
  Description of Artificial Sequence: Synthetic oligonucleotide
  Target: LAMA2; (-) strand; PAM type: YTN; PAM sequence: CTA
ctgggaagctcctattgatc

SEQ ID NO: 239052 - DNA, 20 bp, Artificial Sequence
  Description of Artificial Sequence: Synthetic oligonucleotide
  Target: LAMA2; (-) strand; PAM type: YTN; PAM sequence: TTC
ctactgggaagctcctattg

SEQ ID NO: 239053 - DNA, 20 bp, Artificial Sequence
  Description of Artificial Sequence: Synthetic oligonucleotide
  Target: LAMA2; (-) strand; PAM type: YTN; PAM sequence: CTC
agcattcctactgggaagct

SEQ ID NO: 239054 - DNA, 20 bp, Artificial Sequence
  Description of Artificial Sequence: Synthetic oligonucleotide
  Target: LAMA2; (-) strand; PAM type: YTN; PAM sequence: CTC
tcagcattcctactgggaag

SEQ ID NO: 239055 - DNA, 20 bp, Artificial Sequence
  Description of Artificial Sequence: Synthetic oligonucleotide
  Target: LAMA2; (-) strand; PAM type: YTN; PAM sequence: TTA
aacctctcagcattcctact

SEQ ID NO: 239056 - DNA, 20 bp, Artificial Sequence
  Description of Artificial Sequence: Synthetic oligonucleotide
  Target: LAMA2; (-) strand; PAM type: YTN; PAM sequence: CTA
ttaaacctctcagcattcct

SEQ ID NO: 239057 - DNA, 20 bp, Artificial Sequence
  Description of Artificial Sequence: Synthetic oligonucleotide
  Target: LAMA2; (-) strand; PAM type: YTN; PAM sequence: CTA
atctattaaacctctcagca

SEQ ID NO: 239058 - DNA, 20 bp, Artificial Sequence
  Description of Artificial Sequence: Synthetic oligonucleotide
  Target: LAMA2; (-) strand; PAM type: YTN; PAM sequence: CTA
aacaaaatggagtctaatct

SEQ ID NO: 239059 - DNA, 20 bp, Artificial Sequence
  Description of Artificial Sequence: Synthetic oligonucleotide
  Target: LAMA2; (-) strand; PAM type: YTN; PAM sequence: TTA
atctaaacaaaatggagtct

SEQ ID NO: 239060 - DNA, 20 bp, Artificial Sequence
  Description of Artificial Sequence: Synthetic oligonucleotide
  Target: LAMA2; (-) strand; PAM type: YTN; PAM sequence: CTG
ttaatctaaacaaaatggag

SEQ ID NO: 239061 - DNA, 20 bp, Artificial Sequence
  Description of Artificial Sequence: Synthetic oligonucleotide
  Target: LAMA2; (-) strand; PAM type: YTN; PAM sequence: TTA
actgttaatctaaacaaaat

SEQ ID NO: 239062 - DNA, 20 bp, Artificial Sequence
  Description of Artificial Sequence: Synthetic oligonucleotide
  Target: LAMA2; (-) strand; PAM type: YTN; PAM sequence: TTT
aactgttaatctaaacaaaa

SEQ ID NO: 239063 - DNA, 20 bp, Artificial Sequence
  Description of Artificial Sequence: Synthetic oligonucleotide
  Target: LAMA2; (-) strand; PAM type: YTN; PAM sequence: TTT
taactgttaatctaaacaaa

SEQ ID NO: 239064 - DNA, 20 bp, Artificial Sequence
  Description of Artificial Sequence: Synthetic oligonucleotide
  Target: LAMA2; (-) strand; PAM type: YTN; PAM sequence: TTG
ttttaactgttaatctaaac

SEQ ID NO: 239065 - DNA, 20 bp, Artificial Sequence
  Description of Artificial Sequence: Synthetic oligonucleotide
  Target: LAMA2; (-) strand; PAM type: YTN; PAM sequence: TTA
aagttgttttaactgttaat

SEQ ID NO: 239066 - DNA, 20 bp, Artificial Sequence
  Description of Artificial Sequence: Synthetic oligonucleotide
  Target: LAMA2; (-) strand; PAM type: YTN; PAM sequence: TTT
aaagttgttttaactgttaa

SEQ ID NO: 239067 - DNA, 20 bp, Artificial Sequence
  Description of Artificial Sequence: Synthetic oligonucleotide
  Target: LAMA2; (-) strand; PAM type: YTN; PAM sequence: TTT
taaagttgttttaactgtta

SEQ ID NO: 239068 - DNA, 20 bp, Artificial Sequence
  Description of Artificial Sequence: Synthetic oligonucleotide
  Target: LAMA2; (-) strand; PAM type: YTN; PAM sequence: TTT
ttaaagttgttttaactgtt

SEQ ID NO: 239069 - DNA, 20 bp, Artificial Sequence
  Description of Artificial Sequence: Synthetic oligonucleotide
  Target: LAMA2; (-) strand; PAM type: YTN; PAM sequence: TTA
ataaaaatttttaaagttgt

SEQ ID NO: 239070 - DNA, 20 bp, Artificial Sequence
  Description of Artificial Sequence: Synthetic oligonucleotide
  Target: LAMA2; (-) strand; PAM type: YTN; PAM sequence: TTT
aataaaaatttttaaagttg

SEQ ID NO: 239071 - DNA, 20 bp, Artificial Sequence
  Description of Artificial Sequence: Synthetic oligonucleotide
  Target: LAMA2; (-) strand; PAM type: YTN; PAM sequence: TTG
caaaaacataatttaataaa

SEQ ID NO: 239072 - DNA, 20 bp, Artificial Sequence
  Description of Artificial Sequence: Synthetic oligonucleotide
  Target: LAMA2; (-) strand; PAM type: YTN; PAM sequence: TTC
aatggttgcaaaaacataat

SEQ ID NO: 239073 - DNA, 20 bp, Artificial Sequence
  Description of Artificial Sequence: Synthetic oligonucleotide
  Target: LAMA2; (-) strand; PAM type: YTN; PAM sequence: CTT
caatggttgcaaaaacataa

SEQ ID NO: 239074 - DNA, 20 bp, Artificial Sequence
  Description of Artificial Sequence: Synthetic oligonucleotide
  Target: LAMA2; (-) strand; PAM type: YTN; PAM sequence: CTA
tacttcaatggttgcaaaaa

SEQ ID NO: 239075 - DNA, 20 bp, Artificial Sequence
  Description of Artificial Sequence: Synthetic oligonucleotide
  Target: LAMA2; (-) strand; PAM type: YTN; PAM sequence: TTA
tctatacttcaatggttgca

SEQ ID NO: 239076 - DNA, 20 bp, Artificial Sequence
  Description of Artificial Sequence: Synthetic oligonucleotide
  Target: LAMA2; (-) strand; PAM type: YTN; PAM sequence: TTT
atctatacttcaatggttgc

SEQ ID NO: 239077 - DNA, 20 bp, Artificial Sequence
  Description of Artificial Sequence: Synthetic oligonucleotide
  Target: LAMA2; (-) strand; PAM type: YTN; PAM sequence: TTG
tttatctatacttcaatggt

SEQ ID NO: 239078 - DNA, 20 bp, Artificial Sequence
  Description of Artificial Sequence: Synthetic oligonucleotide
  Target: LAMA2; (-) strand; PAM type: YTN; PAM sequence: TTT
gtttatctatacttcaatgg

SEQ ID NO: 239079 - DNA, 20 bp, Artificial Sequence
  Description of Artificial Sequence: Synthetic oligonucleotide
  Target: LAMA2; (-) strand; PAM type: YTN; PAM sequence: TTT
tgtttatctatacttcaatg

SEQ ID NO: 239080 - DNA, 20 bp, Artificial Sequence
  Description of Artificial Sequence: Synthetic oligonucleotide
  Target: LAMA2; (-) strand; PAM type: YTN; PAM sequence: TTT
ttgtttatctatacttcaat

SEQ ID NO: 239081 - DNA, 20 bp, Artificial Sequence
  Description of Artificial Sequence: Synthetic oligonucleotide
  Target: LAMA2; (-) strand; PAM type: YTN; PAM sequence: TTT
tttgtttatctatacttcaa

SEQ ID NO: 239082 - DNA, 20 bp, Artificial Sequence
  Description of Artificial Sequence: Synthetic oligonucleotide
  Target: LAMA2; (-) strand; PAM type: YTN; PAM sequence: TTT
ttttgtttatctatacttca

SEQ ID NO: 239083 - DNA, 20 bp, Artificial Sequence
  Description of Artificial Sequence: Synthetic oligonucleotide
  Target: LAMA2; (-) strand; PAM type: YTN; PAM sequence: CTT
tttttgtttatctatacttc

SEQ ID NO: 239084 - DNA, 20 bp, Artificial Sequence
  Description of Artificial Sequence: Synthetic oligonucleotide
  Target: LAMA2; (-) strand; PAM type: YTN; PAM sequence: TTC
tttttttgtttatctatact

SEQ ID NO: 239085 - DNA, 20 bp, Artificial Sequence
  Description of Artificial Sequence: Synthetic oligonucleotide
  Target: LAMA2; (-) strand; PAM type: YTN; PAM sequence: TTT
ctttttttgtttatctatac

SEQ ID NO: 239086 - DNA, 20 bp, Artificial Sequence
  Description of Artificial Sequence: Synthetic oligonucleotide
  Target: LAMA2; (-) strand; PAM type: YTN; PAM sequence: TTT
tctttttttgtttatctata

SEQ ID NO: 239087 - DNA, 20 bp, Artificial Sequence
  Description of Artificial Sequence: Synthetic oligonucleotide
  Target: LAMA2; (-) strand; PAM type: YTN; PAM sequence: TTT
ttctttttttgtttatctat

SEQ ID NO: 239088 - DNA, 20 bp, Artificial Sequence
  Description of Artificial Sequence: Synthetic oligonucleotide
  Target: LAMA2; (-) strand; PAM type: YTN; PAM sequence: TTT
tttctttttttgtttatcta

SEQ ID NO: 239089 - DNA, 20 bp, Artificial Sequence
  Description of Artificial Sequence: Synthetic oligonucleotide
  Target: LAMA2; (-) strand; PAM type: YTN; PAM sequence: TTT
ttttctttttttgtttatct

SEQ ID NO: 239090 - DNA, 20 bp, Artificial Sequence
  Description of Artificial Sequence: Synthetic oligonucleotide
  Target: LAMA2; (-) strand; PAM type: YTN; PAM sequence: TTA
atttttttctttttttgttt

SEQ ID NO: 239091 - DNA, 20 bp, Artificial Sequence
  Description of Artificial Sequence: Synthetic oligonucleotide
  Target: LAMA2; (-) strand; PAM type: YTN; PAM sequence: TTA
acatataattaatttttttc

SEQ ID NO: 239092 - DNA, 20 bp, Artificial Sequence
  Description of Artificial Sequence: Synthetic oligonucleotide
  Target: LAMA2; (-) strand; PAM type: YTN; PAM sequence: TTA
ttaacatataattaattttt

SEQ ID NO: 239093 - DNA, 20 bp, Artificial Sequence
  Description of Artificial Sequence: Synthetic oligonucleotide
  Target: LAMA2; (-) strand; PAM type: YTN; PAM sequence: TTA
aaaagttattaacatataat

SEQ ID NO: 239094 - DNA, 20 bp, Artificial Sequence
  Description of Artificial Sequence: Synthetic oligonucleotide
  Target: LAMA2; (-) strand; PAM type: YTN; PAM sequence: TTT
aaaaagttattaacatataa

SEQ ID NO: 239095 - DNA, 20 bp, Artificial Sequence
  Description of Artificial Sequence: Synthetic oligonucleotide
  Target: LAMA2; (-) strand; PAM type: YTN; PAM sequence: TTT
taaaaagttattaacatata

SEQ ID NO: 239096 - DNA, 20 bp, Artificial Sequence
  Description of Artificial Sequence: Synthetic oligonucleotide
  Target: LAMA2; (-) strand; PAM type: YTN; PAM sequence: CTG
atgaattttaaaaagttatt

SEQ ID NO: 239097 - DNA, 20 bp, Artificial Sequence
  Description of Artificial Sequence: Synthetic oligonucleotide
  Target: LAMA2; (-) strand; PAM type: YTN; PAM sequence: TTG
tactgatgaattttaaaaag

SEQ ID NO: 239098 - DNA, 20 bp, Artificial Sequence
  Description of Artificial Sequence: Synthetic oligonucleotide
  Target: LAMA2; (-) strand; PAM type: YTN; PAM sequence: TTT
gtactgatgaattttaaaaa

SEQ ID NO: 239099 - DNA, 20 bp, Artificial Sequence
  Description of Artificial Sequence: Synthetic oligonucleotide
  Target: LAMA2; (-) strand; PAM type: YTN; PAM sequence: TTA
tttgtactgatgaattttaa

SEQ ID NO: 239100 - DNA, 20 bp, Artificial Sequence
  Description of Artificial Sequence: Synthetic oligonucleotide
  Target: LAMA2; (-) strand; PAM type: YTN; PAM sequence: TTT
atttgtactgatgaatttta

SEQ ID NO: 239101 - DNA, 20 bp, Artificial Sequence
  Description of Artificial Sequence: Synthetic oligonucleotide
  Target: LAMA2; (-) strand; PAM type: YTN; PAM sequence: CTA
taatttatttgtactgatga

SEQ ID NO: 239102 - DNA, 20 bp, Artificial Sequence
  Description of Artificial Sequence: Synthetic oligonucleotide
  Target: LAMA2; (-) strand; PAM type: YTN; PAM sequence: TTC
tataatttatttgtactgat

SEQ ID NO: 239103 - DNA, 20 bp, Artificial Sequence
  Description of Artificial Sequence: Synthetic oligonucleotide
  Target: LAMA2; (-) strand; PAM type: YTN; PAM sequence: TTA
tgattctataatttatttgt

SEQ ID NO: 239104 - DNA, 20 bp, Artificial Sequence
  Description of Artificial Sequence: Synthetic oligonucleotide
  Target: LAMA2; (-) strand; PAM type: YTN; PAM sequence: TTT
atgattctataatttatttg

SEQ ID NO: 239105 - DNA, 20 bp, Artificial Sequence
  Description of Artificial Sequence: Synthetic oligonucleotide
  Target: LAMA2; (-) strand; PAM type: YTN; PAM sequence: CTT
tatgattctataatttattt

SEQ ID NO: 239106 - DNA, 20 bp, Artificial Sequence
  Description of Artificial Sequence: Synthetic oligonucleotide
  Target: LAMA2; (-) strand; PAM type: YTN; PAM sequence: TTC
ctttatgattctataattta

SEQ ID NO: 239107 - DNA, 20 bp, Artificial Sequence
  Description of Artificial Sequence: Synthetic oligonucleotide
  Target: LAMA2; (-) strand; PAM type: YTN; PAM sequence: TTT
cctttatgattctataattt

SEQ ID NO: 239108 - DNA, 20 bp, Artificial Sequence
  Description of Artificial Sequence: Synthetic oligonucleotide
  Target: LAMA2; (-) strand; PAM type: YTN; PAM sequence: TTT
tcctttatgattctataatt

SEQ ID NO: 239109 - DNA, 20 bp, Artificial Sequence
  Description of Artificial Sequence: Synthetic oligonucleotide
  Target: LAMA2; (-) strand; PAM type: YTN; PAM sequence: CTA
ttttcctttatgattctata

SEQ ID NO: 239110 - DNA, 20 bp, Artificial Sequence
  Description of Artificial Sequence: Synthetic oligonucleotide
  Target: LAMA2; (-) strand; PAM type: YTN; PAM sequence: TTC
tattttcctttatgattcta

SEQ ID NO: 239111 - DNA, 20 bp, Artificial Sequence
  Description of Artificial Sequence: Synthetic oligonucleotide
  Target: LAMA2; (-) strand; PAM type: YTN; PAM sequence: TTT
ctattttcctttatgattct

SEQ ID NO: 239112 - DNA, 20 bp, Artificial Sequence
  Description of Artificial Sequence: Synthetic oligonucleotide
  Target: LAMA2; (-) strand; PAM type: YTN; PAM sequence: TTA
atcatcatgagatttctatt

SEQ ID NO: 239113 - DNA, 20 bp, Artificial Sequence
  Description of Artificial Sequence: Synthetic oligonucleotide
  Target: LAMA2; (-) strand; PAM type: YTN; PAM sequence: TTT
aatcatcatgagatttctat

SEQ ID NO: 239114 - DNA, 20 bp, Artificial Sequence
  Description of Artificial Sequence: Synthetic oligonucleotide
  Target: LAMA2; (-) strand; PAM type: YTN; PAM sequence: TTT
taatcatcatgagatttcta

SEQ ID NO: 239115 - DNA, 20 bp, Artificial Sequence
  Description of Artificial Sequence: Synthetic oligonucleotide
  Target: LAMA2; (-) strand; PAM type: YTN; PAM sequence: TTA
ttttaatcatcatgagattt

SEQ ID NO: 239116 - DNA, 20 bp, Artificial Sequence
  Description of Artificial Sequence: Synthetic oligonucleotide
  Target: LAMA2; (-) strand; PAM type: YTN; PAM sequence: CTG
aatgttattttaatcatcat

SEQ ID NO: 239117 - DNA, 20 bp, Artificial Sequence
  Description of Artificial Sequence: Synthetic oligonucleotide
  Target: LAMA2; (-) strand; PAM type: YTN; PAM sequence: TTC
cagactgaatgttattttaa

SEQ ID NO: 239118 - DNA, 20 bp, Artificial Sequence
  Description of Artificial Sequence: Synthetic oligonucleotide
  Target: LAMA2; (-) strand; PAM type: YTN; PAM sequence: CTT
ccagactgaatgttatttta

SEQ ID NO: 239119 - DNA, 20 bp, Artificial Sequence
  Description of Artificial Sequence: Synthetic oligonucleotide
  Target: LAMA2; (-) strand; PAM type: YTN; PAM sequence: TTG
taccttccagactgaatgtt

SEQ ID NO: 239120 - DNA, 20 bp, Artificial Sequence
  Description of Artificial Sequence: Synthetic oligonucleotide
  Target: LAMA2; (-) strand; PAM type: YTN; PAM sequence: TTT
gtaccttccagactgaatgt

SEQ ID NO: 239121 - DNA, 20 bp, Artificial Sequence
  Description of Artificial Sequence: Synthetic oligonucleotide
  Target: LAMA2; (-) strand; PAM type: YTN; PAM sequence: TTT
tgtaccttccagactgaatg

SEQ ID NO: 239122 - DNA, 20 bp, Artificial Sequence
  Description of Artificial Sequence: Synthetic oligonucleotide
  Target: LAMA2; (-) strand; PAM type: YTN; PAM sequence: CTA
aatatcgaatgatgaaggta

SEQ ID NO: 239123 - DNA, 20 bp, Artificial Sequence
  Description of Artificial Sequence: Synthetic oligonucleotide
  Target: LAMA2; (-) strand; PAM type: YTN; PAM sequence: TTG
aacctaaatatcgaatgatg

SEQ ID NO: 239124 - DNA, 20 bp, Artificial Sequence
  Description of Artificial Sequence: Synthetic oligonucleotide
  Target: LAMA2; (-) strand; PAM type: YTN; PAM sequence: CTA
aagcatagatgggaatataa

SEQ ID NO: 239125 - DNA, 20 bp, Artificial Sequence
  Description of Artificial Sequence: Synthetic oligonucleotide
  Target: LAMA2; (-) strand; PAM type: YTN; PAM sequence: TTC
agtccctaaagcatagatgg

SEQ ID NO: 239126 - DNA, 20 bp, Artificial Sequence
  Description of Artificial Sequence: Synthetic oligonucleotide
  Target: LAMA2; (-) strand; PAM type: YTN; PAM sequence: TTA
ccaccatccaattcagtccc

SEQ ID NO: 239127 - DNA, 20 bp, Artificial Sequence
  Description of Artificial Sequence: Synthetic oligonucleotide
  Target: LAMA2; (-) strand; PAM type: YTN; PAM sequence: TTA
ttaccaccatccaattcagt

SEQ ID NO: 239128 - DNA, 20 bp, Artificial Sequence
  Description of Artificial Sequence: Synthetic oligonucleotide
  Target: LAMA2; (-) strand; PAM type: YTN; PAM sequence: CTT
attaccaccatccaattcag

SEQ ID NO: 239129 - DNA, 20 bp, Artificial Sequence
  Description of Artificial Sequence: Synthetic oligonucleotide
  Target: LAMA2; (-) strand; PAM type: YTN; PAM sequence: TTA
taccttattaccaccatcca

SEQ ID NO: 239130 - DNA, 20 bp, Artificial Sequence
  Description of Artificial Sequence: Synthetic oligonucleotide
  Target: LAMA2; (-) strand; PAM type: YTN; PAM sequence: TTG
gcacagaccatatattatac

SEQ ID NO: 239131 - DNA, 20 bp, Artificial Sequence
  Description of Artificial Sequence: Synthetic oligonucleotide
  Target: LAMA2; (-) strand; PAM type: YTN; PAM sequence: TTG
ccatccataagattggcaca

SEQ ID NO: 239132 - DNA, 20 bp, Artificial Sequence
  Description of Artificial Sequence: Synthetic oligonucleotide
  Target: LAMA2; (-) strand; PAM type: YTN; PAM sequence: CTT
gccatccataagattggcac

SEQ ID NO: 239133 - DNA, 20 bp, Artificial Sequence
  Description of Artificial Sequence: Synthetic oligonucleotide
  Target: LAMA2; (-) strand; PAM type: YTN; PAM sequence: TTC
ttgccatccataagattggc

SEQ ID NO: 239134 - DNA, 20 bp, Artificial Sequence
  Description of Artificial Sequence: Synthetic oligonucleotide
  Target: LAMA2; (-) strand; PAM type: YTN; PAM sequence: TTT
cttgccatccataagattgg

SEQ ID NO: 239135 - DNA, 20 bp, Artificial Sequence
  Description of Artificial Sequence: Synthetic oligonucleotide
  Target: LAMA2; (-) strand; PAM type: YTN; PAM sequence: TTT
tcttgccatccataagattg

SEQ ID NO: 239136 - DNA, 20 bp, Artificial Sequence
  Description of Artificial Sequence: Synthetic oligonucleotide
  Target: LAMA2; (-) strand; PAM type: YTN; PAM sequence: CTT
ttcttgccatccataagatt

SEQ ID NO: 239137 - DNA, 20 bp, Artificial Sequence
  Description of Artificial Sequence: Synthetic oligonucleotide
  Target: LAMA2; (-) strand; PAM type: YTN; PAM sequence: TTC
ttttcttgccatccataaga

SEQ ID NO: 239138 - DNA, 20 bp, Artificial Sequence
  Description of Artificial Sequence: Synthetic oligonucleotide
  Target: LAMA2; (-) strand; PAM type: YTN; PAM sequence: TTG
ttcttttcttgccatccata

SEQ ID NO: 239139 - DNA, 20 bp, Artificial Sequence
  Description of Artificial Sequence: Synthetic oligonucleotide
  Target: LAMA2; (-) strand; PAM type: YTN; PAM sequence: TTT
gttcttttcttgccatccat

SEQ ID NO: 239140 - DNA, 20 bp, Artificial Sequence
  Description of Artificial Sequence: Synthetic oligonucleotide
  Target: LAMA2; (-) strand; PAM type: YTN; PAM sequence: TTT
tgttcttttcttgccatcca

SEQ ID NO: 239141 - DNA, 20 bp, Artificial Sequence
  Description of Artificial Sequence: Synthetic oligonucleotide
  Target: LAMA2; (-) strand; PAM type: YTN; PAM sequence: TTG
aaataaataaataaataaat

SEQ ID NO: 239142 - DNA, 20 bp, Artificial Sequence
  Description of Artificial Sequence: Synthetic oligonucleotide
  Target: LAMA2; (-) strand; PAM type: YTN; PAM sequence: TTA
ttgaaataaataaataaata

SEQ ID NO: 239143 - DNA, 20 bp, Artificial Sequence
  Description of Artificial Sequence: Synthetic oligonucleotide
  Target: LAMA2; (-) strand; PAM type: YTN; PAM sequence: TTT
attgaaataaataaataaat

SEQ ID NO: 239144 - DNA, 20 bp, Artificial Sequence
  Description of Artificial Sequence: Synthetic oligonucleotide
  Target: LAMA2; (-) strand; PAM type: YTN; PAM sequence: CTA
aagggcatttattgaaataa

SEQ ID NO: 239145 - DNA, 20 bp, Artificial Sequence
  Description of Artificial Sequence: Synthetic oligonucleotide
  Target: LAMA2; (-) strand; PAM type: YTN; PAM sequence: CTA
ctaaagggcatttattgaaa

SEQ ID NO: 239146 - DNA, 20 bp, Artificial Sequence
  Description of Artificial Sequence: Synthetic oligonucleotide
  Target: LAMA2; (-) strand; PAM type: YTN; PAM sequence: CTC
cagatgtaaaaatatctact

SEQ ID NO: 239147 - DNA, 20 bp, Artificial Sequence
  Description of Artificial Sequence: Synthetic oligonucleotide
  Target: LAMA2; (-) strand; PAM type: YTN; PAM sequence: TTC
cagatgtgagaatgtctcca

SEQ ID NO: 239148 - DNA, 20 bp, Artificial Sequence
  Description of Artificial Sequence: Synthetic oligonucleotide
  Target: LAMA2; (-) strand; PAM type: YTN; PAM sequence: CTT
ccagatgtgagaatgtctcc

SEQ ID NO: 239149 - DNA, 20 bp, Artificial Sequence
  Description of Artificial Sequence: Synthetic oligonucleotide
  Target: LAMA2; (-) strand; PAM type: YTN; PAM sequence: CTC
ttccagatgtgagaatgtct

SEQ ID NO: 239150 - DNA, 20 bp, Artificial Sequence
  Description of Artificial Sequence: Synthetic oligonucleotide
  Target: LAMA2; (-) strand; PAM type: YTN; PAM sequence: TTG
cagtgtcctcttccagatgt

SEQ ID NO: 239151 - DNA, 20 bp, Artificial Sequence
  Description of Artificial Sequence: Synthetic oligonucleotide
  Target: LAMA2; (-) strand; PAM type: YTN; PAM sequence: CTG
ttgcagtgtcctcttccaga

SEQ ID NO: 239152 - DNA, 20 bp, Artificial Sequence
  Description of Artificial Sequence: Synthetic oligonucleotide
  Target: LAMA2; (-) strand; PAM type: YTN; PAM sequence: CTA
ctgttgcagtgtcctcttcc

SEQ ID NO: 239153 - DNA, 20 bp, Artificial Sequence
  Description of Artificial Sequence: Synthetic oligonucleotide
  Target: LAMA2; (-) strand; PAM type: YTN; PAM sequence: TTA
aaataggctactgttgcagt

SEQ ID NO: 239154 - DNA, 20 bp, Artificial Sequence
  Description of Artificial Sequence: Synthetic oligonucleotide
  Target: LAMA2; (-) strand; PAM type: YTN; PAM sequence: TTC
atgacaagattaaaataggc

SEQ ID NO: 239155 - DNA, 20 bp, Artificial Sequence
  Description of Artificial Sequence: Synthetic oligonucleotide
  Target: LAMA2; (-) strand; PAM type: YTN; PAM sequence: TTT
catgacaagattaaaatagg

SEQ ID NO: 239156 - DNA, 20 bp, Artificial Sequence
  Description of Artificial Sequence: Synthetic oligonucleotide
  Target: LAMA2; (-) strand; PAM type: YTN; PAM sequence: TTT
tcatgacaagattaaaatag

SEQ ID NO: 239157 - DNA, 20 bp, Artificial Sequence
  Description of Artificial Sequence: Synthetic oligonucleotide
  Target: LAMA2; (-) strand; PAM type: YTN; PAM sequence: TTG
agcaaaaaagatgtatccca

SEQ ID NO: 239158 - DNA, 20 bp, Artificial Sequence
  Description of Artificial Sequence: Synthetic oligonucleotide
  Target: LAMA2; (-) strand; PAM type: YTN; PAM sequence: CTA
tgccccgaagaaaaaaataa

SEQ ID NO: 239159 - DNA, 20 bp, Artificial Sequence
  Description of Artificial Sequence: Synthetic oligonucleotide
  Target: LAMA2; (-) strand; PAM type: YTN; PAM sequence: TTC
atcaccagtgtccactatgc

SEQ ID NO: 239160 - DNA, 20 bp, Artificial Sequence
  Description of Artificial Sequence: Synthetic oligonucleotide
  Target: LAMA2; (-) strand; PAM type: YTN; PAM sequence: CTG
acaccaaattcatcaccagt

SEQ ID NO: 239161 - DNA, 20 bp, Artificial Sequence
  Description of Artificial Sequence: Synthetic oligonucleotide
  Target: LAMA2; (-) strand; PAM type: YTN; PAM sequence: CTG
gatctgacaccaaattcatc

SEQ ID NO: 239162 - DNA, 20 bp, Artificial Sequence
  Description of Artificial Sequence: Synthetic oligonucleotide
  Target: LAMA2; (-) strand; PAM type: YTN; PAM sequence: TTC
tggatctgacaccaaattca

SEQ ID NO: 239163 - DNA, 20 bp, Artificial Sequence
  Description of Artificial Sequence: Synthetic oligonucleotide
  Target: LAMA2; (-) strand; PAM type: YTN; PAM sequence: CTG
taagaggggtacagacaaca

SEQ ID NO: 239164 - DNA, 20 bp, Artificial Sequence
  Description of Artificial Sequence: Synthetic oligonucleotide
  Target: LAMA2; (-) strand; PAM type: YTN; PAM sequence: CTG
ctgtaagaggggtacagaca

SEQ ID NO: 239165 - DNA, 20 bp, Artificial Sequence
  Description of Artificial Sequence: Synthetic oligonucleotide
  Target: LAMA2; (-) strand; PAM type: YTN; PAM sequence: TTA
caaggtggaagaaaatcact

SEQ ID NO: 239166 - DNA, 20 bp, Artificial Sequence
  Description of Artificial Sequence: Synthetic oligonucleotide
  Target: LAMA2; (-) strand; PAM type: YTN; PAM sequence: TTA
tattacaaggtggaagaaaa

SEQ ID NO: 239167 - DNA, 20 bp, Artificial Sequence
  Description of Artificial Sequence: Synthetic oligonucleotide
  Target: LAMA2; (-) strand; PAM type: YTN; PAM sequence: TTC
agataattatattacaaggt

SEQ ID NO: 239168 - DNA, 20 bp, Artificial Sequence
  Description of Artificial Sequence: Synthetic oligonucleotide
  Target: LAMA2; (-) strand; PAM type: YTN; PAM sequence: CTT
cagataattatattacaagg

SEQ ID NO: 239169 - DNA, 20 bp, Artificial Sequence
  Description of Artificial Sequence: Synthetic oligonucleotide
  Target: LAMA2; (-) strand; PAM type: YTN; PAM sequence: CTG
atgaggcggacttcagataa

SEQ ID NO: 239170 - DNA, 20 bp, Artificial Sequence
  Description of Artificial Sequence: Synthetic oligonucleotide
  Target: LAMA2; (-) strand; PAM type: YTN; PAM sequence: TTC
tgatgaggcggacttcagat

SEQ ID NO: 239171 - DNA, 20 bp, Artificial Sequence
  Description of Artificial Sequence: Synthetic oligonucleotide
  Target: LAMA2; (-) strand; PAM type: YTN; PAM sequence: TTT
ctgatgaggcggacttcaga

SEQ ID NO: 239172 - DNA, 20 bp, Artificial Sequence
  Description of Artificial Sequence: Synthetic oligonucleotide
  Target: LAMA2; (-) strand; PAM type: YTN; PAM sequence: CTT
tctgatgaggcggacttcag

SEQ ID NO: 239173 - DNA, 20 bp, Artificial Sequence
  Description of Artificial Sequence: Synthetic oligonucleotide
  Target: LAMA2; (-) strand; PAM type: YTN; PAM sequence: CTA
tgtactttctgatgaggcgg

SEQ ID NO: 239174 - DNA, 20 bp, Artificial Sequence
  Description of Artificial Sequence: Synthetic oligonucleotide
  Target: LAMA2; (-) strand; PAM type: YTN; PAM sequence: TTC
cctatgtactttctgatgag

SEQ ID NO: 239175 - DNA, 20 bp, Artificial Sequence
  Description of Artificial Sequence: Synthetic oligonucleotide
  Target: LAMA2; (-) strand; PAM type: YTN; PAM sequence: TTT
ccctatgtactttctgatga

SEQ ID NO: 239176 - DNA, 20 bp, Artificial Sequence
  Description of Artificial Sequence: Synthetic oligonucleotide
  Target: LAMA2; (-) strand; PAM type: YTN; PAM sequence: TTG
gagaaatagagtcacgatag

SEQ ID NO: 239177 - DNA, 20 bp, Artificial Sequence
  Description of Artificial Sequence: Synthetic oligonucleotide
  Target: LAMA2; (-) strand; PAM type: YTN; PAM sequence: CTT
ggagaaatagagtcacgata

SEQ ID NO: 239178 - DNA, 20 bp, Artificial Sequence
  Description of Artificial Sequence: Synthetic oligonucleotide
  Target: LAMA2; (-) strand; PAM type: YTN; PAM sequence: CTA
cttggagaaatagagtcacg

SEQ ID NO: 239179 - DNA, 20 bp, Artificial Sequence
  Description of Artificial Sequence: Synthetic oligonucleotide
  Target: LAMA2; (-) strand; PAM type: YTN; PAM sequence: TTC
tacttggagaaatagagtca

SEQ ID NO: 239180 - DNA, 20 bp, Artificial Sequence
  Description of Artificial Sequence: Synthetic oligonucleotide
  Target: LAMA2; (-) strand; PAM type: YTN; PAM sequence: TTT
ctacttggagaaatagagtc

SEQ ID NO: 239181 - DNA, 20 bp, Artificial Sequence
  Description of Artificial Sequence: Synthetic oligonucleotide
  Target: LAMA2; (-) strand; PAM type: YTN; PAM sequence: TTA
gcacagtttctacttggaga

SEQ ID NO: 239182 - DNA, 20 bp, Artificial Sequence
  Description of Artificial Sequence: Synthetic oligonucleotide
  Target: LAMA2; (-) strand; PAM type: YTN; PAM sequence: CTT
agcacagtttctacttggag

SEQ ID NO: 239183 - DNA, 20 bp, Artificial Sequence
  Description of Artificial Sequence: Synthetic oligonucleotide
  Target: LAMA2; (-) strand; PAM type: YTN; PAM sequence: TTC
ccttagcacagtttctactt

SEQ ID NO: 239184 - DNA, 20 bp, Artificial Sequence
  Description of Artificial Sequence: Synthetic oligonucleotide
  Target: LAMA2; (-) strand; PAM type: YTN; PAM sequence: TTA
gttcccttagcacagtttct

SEQ ID NO: 239185 - DNA, 20 bp, Artificial Sequence
  Description of Artificial Sequence: Synthetic oligonucleotide
  Target: LAMA2; (-) strand; PAM type: YTN; PAM sequence: TTT
agttcccttagcacagtttc

SEQ ID NO: 239186 - DNA, 20 bp, Artificial Sequence
  Description of Artificial Sequence: Synthetic oligonucleotide
  Target: LAMA2; (-) strand; PAM type: YTN; PAM sequence: CTT
tagttcccttagcacagttt

SEQ ID NO: 239187 - DNA, 20 bp, Artificial Sequence
  Description of Artificial Sequence: Synthetic oligonucleotide
  Target: LAMA2; (-) strand; PAM type: YTN; PAM sequence: TTG
ctttagttcccttagcacag

SEQ ID NO: 239188 - DNA, 20 bp, Artificial Sequence
  Description of Artificial Sequence: Synthetic oligonucleotide
  Target: LAMA2; (-) strand; PAM type: YTN; PAM sequence: TTT
gctttagttcccttagcaca

SEQ ID NO: 239189 - DNA, 20 bp, Artificial Sequence
  Description of Artificial Sequence: Synthetic oligonucleotide
  Target: LAMA2; (-) strand; PAM type: YTN; PAM sequence: TTT
tgctttagttcccttagcac

SEQ ID NO: 239190 - DNA, 20 bp, Artificial Sequence
  Description of Artificial Sequence: Synthetic oligonucleotide
  Target: LAMA2; (-) strand; PAM type: YTN; PAM sequence: TTT
ttgctttagttcccttagca

SEQ ID NO: 239191 - DNA, 20 bp, Artificial Sequence
  Description of Artificial Sequence: Synthetic oligonucleotide
  Target: LAMA2; (-) strand; PAM type: YTN; PAM sequence: TTT
tttgctttagttcccttagc

SEQ ID NO: 239192 - DNA, 20 bp, Artificial Sequence
  Description of Artificial Sequence: Synthetic oligonucleotide
  Target: LAMA2; (-) strand; PAM type: YTN; PAM sequence: CTT
ttttgctttagttcccttag

SEQ ID NO: 239193 - DNA, 20 bp, Artificial Sequence
  Description of Artificial Sequence: Synthetic oligonucleotide
  Target: LAMA2; (-) strand; PAM type: YTN; PAM sequence: TTC
ttttttgctttagttccctt

SEQ ID NO: 239194 - DNA, 20 bp, Artificial Sequence
  Description of Artificial Sequence: Synthetic oligonucleotide
  Target: LAMA2; (-) strand; PAM type: YTN; PAM sequence: TTT
cttttttgctttagttccct

SEQ ID NO: 239195 - DNA, 20 bp, Artificial Sequence
  Description of Artificial Sequence: Synthetic oligonucleotide
  Target: LAMA2; (-) strand; PAM type: YTN; PAM sequence: TTT
tcttttttgctttagttccc

SEQ ID NO: 239196 - DNA, 20 bp, Artificial Sequence
  Description of Artificial Sequence: Synthetic oligonucleotide
  Target: LAMA2; (-) strand; PAM type: YTN; PAM sequence: TTA
tagcaaaggaagtaggaatt

SEQ ID NO: 239197 - DNA, 20 bp, Artificial Sequence
  Description of Artificial Sequence: Synthetic oligonucleotide
  Target: LAMA2; (-) strand; PAM type: YTN; PAM sequence: CTC
aagaggattatagcaaagga

SEQ ID NO: 239198 - DNA, 20 bp, Artificial Sequence
  Description of Artificial Sequence: Synthetic oligonucleotide
  Target: LAMA2; (-) strand; PAM type: YTN; PAM sequence: CTA
tatacaagacatatgagata

SEQ ID NO: 239199 - DNA, 20 bp, Artificial Sequence
  Description of Artificial Sequence: Synthetic oligonucleotide
  Target: LAMA2; (-) strand; PAM type: YTN; PAM sequence: CTA
ctatatacaagacatatgag

SEQ ID NO: 239200 - DNA, 20 bp, Artificial Sequence
  Description of Artificial Sequence: Synthetic oligonucleotide
  Target: LAMA2; (-) strand; PAM type: YTN; PAM sequence: CTG
aactactatatacaagacat

SEQ ID NO: 239201 - DNA, 20 bp, Artificial Sequence
  Description of Artificial Sequence: Synthetic oligonucleotide
  Target: LAMA2; (-) strand; PAM type: YTN; PAM sequence: CTC
atagctgaactactatatac

SEQ ID NO: 239202 - DNA, 20 bp, Artificial Sequence
  Description of Artificial Sequence: Synthetic oligonucleotide
  Target: LAMA2; (-) strand; PAM type: YTN; PAM sequence: TTC
atcaactcatagctgaacta

SEQ ID NO: 239203 - DNA, 20 bp, Artificial Sequence
  Description of Artificial Sequence: Synthetic oligonucleotide
  Target: LAMA2; (-) strand; PAM type: YTN; PAM sequence: TTC
gttcatcaactcatagctga

SEQ ID NO: 239204 - DNA, 20 bp, Artificial Sequence
  Description of Artificial Sequence: Synthetic oligonucleotide
  Target: LAMA2; (-) strand; PAM type: YTN; PAM sequence: TTA
ttcgttcatcaactcatagc

SEQ ID NO: 239205 - DNA, 20 bp, Artificial Sequence
  Description of Artificial Sequence: Synthetic oligonucleotide
  Target: LAMA2; (-) strand; PAM type: YTN; PAM sequence: TTA
tattattcgttcatcaactc

SEQ ID NO: 239206 - DNA, 20 bp, Artificial Sequence
  Description of Artificial Sequence: Synthetic oligonucleotide
  Target: LAMA2; (-) strand; PAM type: YTN; PAM sequence: TTT
atattattcgttcatcaact

SEQ ID NO: 239207 - DNA, 20 bp, Artificial Sequence
  Description of Artificial Sequence: Synthetic oligonucleotide
  Target: LAMA2; (-) strand; PAM type: YTN; PAM sequence: CTT
tatattattcgttcatcaac

SEQ ID NO: 239208 - DNA, 20 bp, Artificial Sequence
  Description of Artificial Sequence: Synthetic oligonucleotide
  Target: LAMA2; (-) strand; PAM type: YTN; PAM sequence: TTC
tttatattattcgttcatca

SEQ ID NO: 239209 - DNA, 20 bp, Artificial Sequence
  Description of Artificial Sequence: Synthetic oligonucleotide
  Target: LAMA2; (-) strand; PAM type: YTN; PAM sequence: TTA
ttctttatattattcgttca

SEQ ID NO: 239210 - DNA, 20 bp, Artificial Sequence
  Description of Artificial Sequence: Synthetic oligonucleotide
  Target: LAMA2; (-) strand; PAM type: YTN; PAM sequence: TTT
attctttatattattcgttc

SEQ ID NO: 239211 - DNA, 20 bp, Artificial Sequence
  Description of Artificial Sequence: Synthetic oligonucleotide
  Target: LAMA2; (-) strand; PAM type: YTN; PAM sequence: CTT
tattctttatattattcgtt

SEQ ID NO: 239212 - DNA, 20 bp, Artificial Sequence
  Description of Artificial Sequence: Synthetic oligonucleotide
  Target: LAMA2; (-) strand; PAM type: YTN; PAM sequence: TTG
ctttattctttatattattc

SEQ ID NO: 239213 - DNA, 20 bp, Artificial Sequence
  Description of Artificial Sequence: Synthetic oligonucleotide
  Target: LAMA2; (-) strand; PAM type: YTN; PAM sequence: TTA
tcgttgctttattctttata

SEQ ID NO: 239214 - DNA, 20 bp, Artificial Sequence
  Description of Artificial Sequence: Synthetic oligonucleotide
  Target: LAMA2; (-) strand; PAM type: YTN; PAM sequence: CTT
atcgttgctttattctttat

SEQ ID NO: 239215 - DNA, 20 bp, Artificial Sequence
  Description of Artificial Sequence: Synthetic oligonucleotide
  Target: LAMA2; (-) strand; PAM type: YTN; PAM sequence: TTC
ttatcgttgctttattcttt

SEQ ID NO: 239216 - DNA, 20 bp, Artificial Sequence
  Description of Artificial Sequence: Synthetic oligonucleotide
  Target: LAMA2; (-) strand; PAM type: YTN; PAM sequence: TTT
cttatcgttgctttattctt

SEQ ID NO: 239217 - DNA, 20 bp, Artificial Sequence
  Description of Artificial Sequence: Synthetic oligonucleotide
  Target: LAMA2; (-) strand; PAM type: YTN; PAM sequence: TTA
tttcttatcgttgctttatt

SEQ ID NO: 239218 - DNA, 20 bp, Artificial Sequence
  Description of Artificial Sequence: Synthetic oligonucleotide
  Target: LAMA2; (-) strand; PAM type: YTN; PAM sequence: CTC
attatttcttatcgttgctt

SEQ ID NO: 239219 - DNA, 20 bp, Artificial Sequence
  Description of Artificial Sequence: Synthetic oligonucleotide
  Target: LAMA2; (-) strand; PAM type: YTN; PAM sequence: CTG
ctcattatttcttatcgttg

SEQ ID NO: 239220 - DNA, 20 bp, Artificial Sequence
  Description of Artificial Sequence: Synthetic oligonucleotide
  Target: LAMA2; (-) strand; PAM type: YTN; PAM sequence: CTC
tgctcattatttcttatcgt

SEQ ID NO: 239221 - DNA, 20 bp, Artificial Sequence
  Description of Artificial Sequence: Synthetic oligonucleotide
  Target: LAMA2; (-) strand; PAM type: YTN; PAM sequence: TTA
ataaatgctctgctcattat

SEQ ID NO: 239222 - DNA, 20 bp, Artificial Sequence
  Description of Artificial Sequence: Synthetic oligonucleotide
  Target: LAMA2; (-) strand; PAM type: YTN; PAM sequence: TTA
ttaataaatgctctgctcat

SEQ ID NO: 239223 - DNA, 20 bp, Artificial Sequence
  Description of Artificial Sequence: Synthetic oligonucleotide
  Target: LAMA2; (-) strand; PAM type: YTN; PAM sequence: TTA
tcaatatcaaattattaata

SEQ ID NO: 239224 - DNA, 20 bp, Artificial Sequence
  Description of Artificial Sequence: Synthetic oligonucleotide
  Target: LAMA2; (-) strand; PAM type: YTN; PAM sequence: CTG
ttatcaatatcaaattatta

SEQ ID NO: 239225 - DNA, 20 bp, Artificial Sequence
  Description of Artificial Sequence: Synthetic oligonucleotide
  Target: LAMA2; (-) strand; PAM type: YTN; PAM sequence: CTC
tgttatcaatatcaaattat

SEQ ID NO: 239226 - DNA, 20 bp, Artificial Sequence
  Description of Artificial Sequence: Synthetic oligonucleotide
  Target: LAMA2; (-) strand; PAM type: YTN; PAM sequence: TTC
ctctgttatcaatatcaaat

SEQ ID NO: 239227 - DNA, 20 bp, Artificial Sequence
  Description of Artificial Sequence: Synthetic oligonucleotide
  Target: LAMA2; (-) strand; PAM type: YTN; PAM sequence: CTT
cctctgttatcaatatcaaa

SEQ ID NO: 239228 - DNA, 20 bp, Artificial Sequence
  Description of Artificial Sequence: Synthetic oligonucleotide
  Target: LAMA2; (-) strand; PAM type: YTN; PAM sequence: TTA
acttcctctgttatcaatat

SEQ ID NO: 239229 - DNA, 20 bp, Artificial Sequence
  Description of Artificial Sequence: Synthetic oligonucleotide
  Target: LAMA2; (-) strand; PAM type: YTN; PAM sequence: TTT
aacttcctctgttatcaata

SEQ ID NO: 239230 - DNA, 20 bp, Artificial Sequence
  Description of Artificial Sequence: Synthetic oligonucleotide
  Target: LAMA2; (-) strand; PAM type: YTN; PAM sequence: TTG
aataatttaacttcctctgt

SEQ ID NO: 239231 - DNA, 20 bp, Artificial Sequence
  Description of Artificial Sequence: Synthetic oligonucleotide
  Target: LAMA2; (-) strand; PAM type: YTN; PAM sequence: TTT
gaataatttaacttcctctg

SEQ ID NO: 239232 - DNA, 20 bp, Artificial Sequence
  Description of Artificial Sequence: Synthetic oligonucleotide
  Target: LAMA2; (-) strand; PAM type: YTN; PAM sequence: CTT
tgaataatttaacttcctct

SEQ ID NO: 239233 - DNA, 20 bp, Artificial Sequence
  Description of Artificial Sequence: Synthetic oligonucleotide
  Target: LAMA2; (-) strand; PAM type: YTN; PAM sequence: CTC
tttgaataatttaacttcct

SEQ ID NO: 239234 - DNA, 20 bp, Artificial Sequence
  Description of Artificial Sequence: Synthetic oligonucleotide
  Target: LAMA2; (-) strand; PAM type: YTN; PAM sequence: TTG
agctctttgaataatttaac

SEQ ID NO: 239235 - DNA, 20 bp, Artificial Sequence
  Description of Artificial Sequence: Synthetic oligonucleotide
  Target: LAMA2; (-) strand; PAM type: YTN; PAM sequence: TTA
tggttgagctctttgaataa

SEQ ID NO: 239236 - DNA, 20 bp, Artificial Sequence
  Description of Artificial Sequence: Synthetic oligonucleotide
  Target: LAMA2; (-) strand; PAM type: YTN; PAM sequence: TTT
atggttgagctctttgaata

SEQ ID NO: 239237 - DNA, 20 bp, Artificial Sequence
  Description of Artificial Sequence: Synthetic oligonucleotide
  Target: LAMA2; (-) strand; PAM type: YTN; PAM sequence: CTT
tatggttgagctctttgaat

SEQ ID NO: 239238 - DNA, 20 bp, Artificial Sequence
  Description of Artificial Sequence: Synthetic oligonucleotide
  Target: LAMA2; (-) strand; PAM type: YTN; PAM sequence: CTG
ctttatggttgagctctttg

SEQ ID NO: 239239 - DNA, 20 bp, Artificial Sequence
  Description of Artificial Sequence: Synthetic oligonucleotide
  Target: LAMA2; (-) strand; PAM type: YTN; PAM sequence: TTG
aaagtgaagccatctgcttt

SEQ ID NO: 239240 - DNA, 20 bp, Artificial Sequence
  Description of Artificial Sequence: Synthetic oligonucleotide
  Target: LAMA2; (-) strand; PAM type: YTN; PAM sequence: CTT
gaaagtgaagccatctgctt

SEQ ID NO: 239241 - DNA, 20 bp, Artificial Sequence
  Description of Artificial Sequence: Synthetic oligonucleotide
  Target: LAMA2; (-) strand; PAM type: YTN; PAM sequence: TTC
ccagcttgaaagtgaagcca

SEQ ID NO: 239242 - DNA, 20 bp, Artificial Sequence
  Description of Artificial Sequence: Synthetic oligonucleotide
  Target: LAMA2; (-) strand; PAM type: YTN; PAM sequence: TTG
attcccagcttgaaagtgaa

SEQ ID NO: 239243 - DNA, 20 bp, Artificial Sequence
  Description of Artificial Sequence: Synthetic oligonucleotide
  Target: LAMA2; (-) strand; PAM type: YTN; PAM sequence: TTT
gattcccagcttgaaagtga

SEQ ID NO: 239244 - DNA, 20 bp, Artificial Sequence
  Description of Artificial Sequence: Synthetic oligonucleotide
  Target: LAMA2; (-) strand; PAM type: YTN; PAM sequence: TTT
tgattcccagcttgaaagtg

SEQ ID NO: 239245 - DNA, 20 bp, Artificial Sequence
  Description of Artificial Sequence: Synthetic oligonucleotide
  Target: LAMA2; (-) strand; PAM type: YTN; PAM sequence: TTT
ttgattcccagcttgaaagt

SEQ ID NO: 239246 - DNA, 20 bp, Artificial Sequence
  Description of Artificial Sequence: Synthetic oligonucleotide
  Target: LAMA2; (-) strand; PAM type: YTN; PAM sequence: TTT
tttgattcccagcttgaaag

SEQ ID NO: 239247 - DNA, 20 bp, Artificial Sequence
  Description of Artificial Sequence: Synthetic oligonucleotide
  Target: LAMA2; (-) strand; PAM type: YTN; PAM sequence: TTA
aagttttttgattcccagct

SEQ ID NO: 239248 - DNA, 20 bp, Artificial Sequence
  Description of Artificial Sequence: Synthetic oligonucleotide
  Target: LAMA2; (-) strand; PAM type: YTN; PAM sequence: CTT
aaagttttttgattcccagc

SEQ ID NO: 239249 - DNA, 20 bp, Artificial Sequence
  Description of Artificial Sequence: Synthetic oligonucleotide
  Target: LAMA2; (-) strand; PAM type: YTN; PAM sequence: CTA
gcacttaaagttttttgatt

SEQ ID NO: 239250 - DNA, 20 bp, Artificial Sequence
  Description of Artificial Sequence: Synthetic oligonucleotide
  Target: LAMA2; (-) strand; PAM type: YTN; PAM sequence: TTC
tagcacttaaagttttttga

SEQ ID NO: 239251 - DNA, 20 bp, Artificial Sequence
  Description of Artificial Sequence: Synthetic oligonucleotide
  Target: LAMA2; (-) strand; PAM type: YTN; PAM sequence: TTG
acatgaatattctagcactt

SEQ ID NO: 239252 - DNA, 20 bp, Artificial Sequence
  Description of Artificial Sequence: Synthetic oligonucleotide
  Target: LAMA2; (-) strand; PAM type: YTN; PAM sequence: CTT
gacatgaatattctagcact

SEQ ID NO: 239253 - DNA, 20 bp, Artificial Sequence
  Description of Artificial Sequence: Synthetic oligonucleotide
  Target: LAMA2; (-) strand; PAM type: YTN; PAM sequence: CTC
ttgacatgaatattctagca

SEQ ID NO: 239254 - DNA, 20 bp, Artificial Sequence
  Description of Artificial Sequence: Synthetic oligonucleotide
  Target: LAMA2; (-) strand; PAM type: YTN; PAM sequence: TTG
gaagatcctcttgacatgaa

SEQ ID NO: 239255 - DNA, 20 bp, Artificial Sequence
  Description of Artificial Sequence: Synthetic oligonucleotide
  Target: LAMA2; (-) strand; PAM type: YTN; PAM sequence: CTT
ggaagatcctcttgacatga

SEQ ID NO: 239256 - DNA, 20 bp, Artificial Sequence
  Description of Artificial Sequence: Synthetic oligonucleotide
  Target: LAMA2; (-) strand; PAM type: YTN; PAM sequence: TTC
ttggaagatcctcttgacat

SEQ ID NO: 239257 - DNA, 20 bp, Artificial Sequence
  Description of Artificial Sequence: Synthetic oligonucleotide
  Target: LAMA2; (-) strand; PAM type: YTN; PAM sequence: TTA
ttcttggaagatcctcttga

SEQ ID NO: 239258 - DNA, 20 bp, Artificial Sequence
  Description of Artificial Sequence: Synthetic oligonucleotide
  Target: LAMA2; (-) strand; PAM type: YTN; PAM sequence: CTT
attcttggaagatcctcttg

SEQ ID NO: 239259 - DNA, 20 bp, Artificial Sequence
  Description of Artificial Sequence: Synthetic oligonucleotide
  Target: LAMA2; (-) strand; PAM type: YTN; PAM sequence: CTG
gcttattcttggaagatcct

SEQ ID NO: 239260 - DNA, 20 bp, Artificial Sequence
  Description of Artificial Sequence: Synthetic oligonucleotide
  Target: LAMA2; (-) strand; PAM type: YTN; PAM sequence: TTC
ctggcttattcttggaagat

SEQ ID NO: 239261 - DNA, 20 bp, Artificial Sequence
  Description of Artificial Sequence: Synthetic oligonucleotide
  Target: LAMA2; (-) strand; PAM type: YTN; PAM sequence: TTG
cattcctggcttattcttgg

SEQ ID NO: 239262 - DNA, 20 bp, Artificial Sequence
  Description of Artificial Sequence: Synthetic oligonucleotide
  Target: LAMA2; (-) strand; PAM type: YTN; PAM sequence: CTA
attgcattcctggcttattc

SEQ ID NO: 239263 - DNA, 20 bp, Artificial Sequence
  Description of Artificial Sequence: Synthetic oligonucleotide
  Target: LAMA2; (-) strand; PAM type: YTN; PAM sequence: TTG
tcatccatgagtcagcccct

SEQ ID NO: 239264 - DNA, 20 bp, Artificial Sequence
  Description of Artificial Sequence: Synthetic oligonucleotide
  Target: LAMA2; (-) strand; PAM type: YTN; PAM sequence: CTC
atcgaccattgtcatccatg

SEQ ID NO: 239265 - DNA, 20 bp, Artificial Sequence
  Description of Artificial Sequence: Synthetic oligonucleotide
  Target: LAMA2; (-) strand; PAM type: YTN; PAM sequence: TTG
tgactcatcgaccattgtca

SEQ ID NO: 239266 - DNA, 20 bp, Artificial Sequence
  Description of Artificial Sequence: Synthetic oligonucleotide
  Target: LAMA2; (-) strand; PAM type: YTN; PAM sequence: TTT
gtgactcatcgaccattgtc

SEQ ID NO: 239267 - DNA, 20 bp, Artificial Sequence
  Description of Artificial Sequence: Synthetic oligonucleotide
  Target: LAMA2; (-) strand; PAM type: YTN; PAM sequence: CTT
tgtgactcatcgaccattgt

SEQ ID NO: 239268 - DNA, 20 bp, Artificial Sequence
  Description of Artificial Sequence: Synthetic oligonucleotide
  Target: LAMA2; (-) strand; PAM type: YTN; PAM sequence: TTC
tttgtgactcatcgaccatt

SEQ ID NO: 239269 - DNA, 20 bp, Artificial Sequence
  Description of Artificial Sequence: Synthetic oligonucleotide
  Target: LAMA2; (-) strand; PAM type: YTN; PAM sequence: TTT
ctttgtgactcatcgaccat

SEQ ID NO: 239270 - DNA, 20 bp, Artificial Sequence
  Description of Artificial Sequence: Synthetic oligonucleotide
  Target: LAMA2; (-) strand; PAM type: YTN; PAM sequence: TTC
aaaatttctttgtgactcat

SEQ ID NO: 239271 - DNA, 20 bp, Artificial Sequence
  Description of Artificial Sequence: Synthetic oligonucleotide
  Target: LAMA2; (-) strand; PAM type: YTN; PAM sequence: TTT
caaaatttctttgtgactca

SEQ ID NO: 239272 - DNA, 20 bp, Artificial Sequence
  Description of Artificial Sequence: Synthetic oligonucleotide
  Target: LAMA2; (-) strand; PAM type: YTN; PAM sequence: TTT
tcaaaatttctttgtgactc

SEQ ID NO: 239273 - DNA, 20 bp, Artificial Sequence
  Description of Artificial Sequence: Synthetic oligonucleotide
  Target: LAMA2; (-) strand; PAM type: YTN; PAM sequence: TTT
ttcaaaatttctttgtgact

SEQ ID NO: 239274 - DNA, 20 bp, Artificial Sequence
  Description of Artificial Sequence: Synthetic oligonucleotide
  Target: LAMA2; (-) strand; PAM type: YTN; PAM sequence: TTT
tttcaaaatttctttgtgac

SEQ ID NO: 239275 - DNA, 20 bp, Artificial Sequence
  Description of Artificial Sequence: Synthetic oligonucleotide
  Target: LAMA2; (-) strand; PAM type: YTN; PAM sequence: TTG
ttttttcaaaatttctttgt

SEQ ID NO: 239276 - DNA, 20 bp, Artificial Sequence
  Description of Artificial Sequence: Synthetic oligonucleotide
  Target: LAMA2; (-) strand; PAM type: YTN; PAM sequence: CTA
tgtgtccccagggacatcat

SEQ ID NO: 239277 - DNA, 20 bp, Artificial Sequence
  Description of Artificial Sequence: Synthetic oligonucleotide
  Target: LAMA2; (-) strand; PAM type: YTN; PAM sequence: TTC
tatgtgtccccagggacatc

SEQ ID NO: 239278 - DNA, 20 bp, Artificial Sequence
  Description of Artificial Sequence: Synthetic oligonucleotide
  Target: LAMA2; (-) strand; PAM type: YTN; PAM sequence: TTT
ctatgtgtccccagggacat

SEQ ID NO: 239279 - DNA, 20 bp, Artificial Sequence
  Description of Artificial Sequence: Synthetic oligonucleotide
  Target: LAMA2; (-) strand; PAM type: YTN; PAM sequence: CTT
tctatgtgtccccagggaca

SEQ ID NO: 239280 - DNA, 20 bp, Artificial Sequence
  Description of Artificial Sequence: Synthetic oligonucleotide
  Target: LAMA2; (-) strand; PAM type: YTN; PAM sequence: TTC
tttctatgtgtccccaggga

SEQ ID NO: 239281 - DNA, 20 bp, Artificial Sequence
  Description of Artificial Sequence: Synthetic oligonucleotide
  Target: LAMA2; (-) strand; PAM type: YTN; PAM sequence: TTC
caattctttctatgtgtccc

SEQ ID NO: 239282 - DNA, 20 bp, Artificial Sequence
  Description of Artificial Sequence: Synthetic oligonucleotide
  Target: LAMA2; (-) strand; PAM type: YTN; PAM sequence: CTA
gttccaattctttctatgtg

SEQ ID NO: 239283 - DNA, 20 bp, Artificial Sequence
  Description of Artificial Sequence: Synthetic oligonucleotide
  Target: LAMA2; (-) strand; PAM type: YTN; PAM sequence: TTG
acagtctagttccaattctt

SEQ ID NO: 239284 - DNA, 20 bp, Artificial Sequence
  Description of Artificial Sequence: Synthetic oligonucleotide
  Target: LAMA2; (-) strand; PAM type: YTN; PAM sequence: CTT
gacagtctagttccaattct

SEQ ID NO: 239285 - DNA, 20 bp, Artificial Sequence
  Description of Artificial Sequence: Synthetic oligonucleotide
  Target: LAMA2; (-) strand; PAM type: YTN; PAM sequence: TTA
atatatatgatcttgacagt

SEQ ID NO: 239286 - DNA, 20 bp, Artificial Sequence
  Description of Artificial Sequence: Synthetic oligonucleotide
  Target: LAMA2; (-) strand; PAM type: YTN; PAM sequence: TTG
ttaatatatatgatcttgac

SEQ ID NO: 239287 - DNA, 20 bp, Artificial Sequence
  Description of Artificial Sequence: Synthetic oligonucleotide
  Target: LAMA2; (-) strand; PAM type: YTN; PAM sequence: CTT
gttaatatatatgatcttga

SEQ ID NO: 239288 - DNA, 20 bp, Artificial Sequence
  Description of Artificial Sequence: Synthetic oligonucleotide
  Target: LAMA2; (-) strand; PAM type: YTN; PAM sequence: TTA
gcttgttaatatatatgatc

SEQ ID NO: 239289 - DNA, 20 bp, Artificial Sequence
  Description of Artificial Sequence: Synthetic oligonucleotide
  Target: LAMA2; (-) strand; PAM type: YTN; PAM sequence: CTA
ttagcttgttaatatatatg

SEQ ID NO: 239290 - DNA, 20 bp, Artificial Sequence
  Description of Artificial Sequence: Synthetic oligonucleotide
  Target: LAMA2; (-) strand; PAM type: YTN; PAM sequence: TTC
tattagcttgttaatatata

SEQ ID NO: 239291 - DNA, 20 bp, Artificial Sequence
  Description of Artificial Sequence: Synthetic oligonucleotide
  Target: LAMA2; (-) strand; PAM type: YTN; PAM sequence: CTT
ctattagcttgttaatatat

SEQ ID NO: 239292 - DNA, 20 bp, Artificial Sequence
  Description of Artificial Sequence: Synthetic oligonucleotide
  Target: LAMA2; (-) strand; PAM type: YTN; PAM sequence: TTC
ccgccttctattagcttgtt

SEQ ID NO: 239293 - DNA, 20 bp, Artificial Sequence
  Description of Artificial Sequence: Synthetic oligonucleotide
  Target: LAMA2; (-) strand; PAM type: YTN; PAM sequence: TTT
cccgccttctattagcttgt

SEQ ID NO: 239294 - DNA, 20 bp, Artificial Sequence
  Description of Artificial Sequence: Synthetic oligonucleotide
  Target: LAMA2; (-) strand; PAM type: YTN; PAM sequence: TTC
atagagaccaaaatttcccg

SEQ ID NO: 239295 - DNA, 20 bp, Artificial Sequence
  Description of Artificial Sequence: Synthetic oligonucleotide
  Target: LAMA2; (-) strand; PAM type: YTN; PAM sequence: TTT
catagagaccaaaatttccc

SEQ ID NO: 239296 - DNA, 20 bp, Artificial Sequence
  Description of Artificial Sequence: Synthetic oligonucleotide
  Target: LAMA2; (-) strand; PAM type: YTN; PAM sequence: TTT
tcatagagaccaaaatttcc

SEQ ID NO: 239297 - DNA, 20 bp, Artificial Sequence
  Description of Artificial Sequence: Synthetic oligonucleotide
  Target: LAMA2; (-) strand; PAM type: YTN; PAM sequence: TTG
tgcacattttcatagagacc

SEQ ID NO: 239298 - DNA, 20 bp, Artificial Sequence
  Description of Artificial Sequence: Synthetic oligonucleotide
  Target: LAMA2; (-) strand; PAM type: YTN; PAM sequence: TTT
gtgcacattttcatagagac

SEQ ID NO: 239299 - DNA, 20 bp, Artificial Sequence
  Description of Artificial Sequence: Synthetic oligonucleotide
  Target: LAMA2; (-) strand; PAM type: YTN; PAM sequence: TTT
tgtgcacattttcatagaga

SEQ ID NO: 239300 - DNA, 20 bp, Artificial Sequence
  Description of Artificial Sequence: Synthetic oligonucleotide
  Target: LAMA2; (-) strand; PAM type: YTN; PAM sequence: CTT
ttgtgcacattttcatagag

SEQ ID NO: 239301 - DNA, 20 bp, Artificial Sequence
  Description of Artificial Sequence: Synthetic oligonucleotide
  Target: LAMA2; (-) strand; PAM type: YTN; PAM sequence: CTG
ggacttttgtgcacattttc

SEQ ID NO: 239302 - DNA, 20 bp, Artificial Sequence
  Description of Artificial Sequence: Synthetic oligonucleotide
  Target: LAMA2; (-) strand; PAM type: YTN; PAM sequence: TTC
tgggacttttgtgcacattt

SEQ ID NO: 239303 - DNA, 20 bp, Artificial Sequence
  Description of Artificial Sequence: Synthetic oligonucleotide
  Target: LAMA2; (-) strand; PAM type: YTN; PAM sequence: TTC
aaacacagaagtatagtgtt

SEQ ID NO: 239304 - DNA, 20 bp, Artificial Sequence
  Description of Artificial Sequence: Synthetic oligonucleotide
  Target: LAMA2; (-) strand; PAM type: YTN; PAM sequence: TTA
gagtagcacagttcaaacac

SEQ ID NO: 239305 - DNA, 20 bp, Artificial Sequence
  Description of Artificial Sequence: Synthetic oligonucleotide
  Target: LAMA2; (-) strand; PAM type: YTN; PAM sequence: TTT
agagtagcacagttcaaaca

SEQ ID NO: 239306 - DNA, 20 bp, Artificial Sequence
  Description of Artificial Sequence: Synthetic oligonucleotide
  Target: LAMA2; (-) strand; PAM type: YTN; PAM sequence: TTA
tataatttagagtagcacag

SEQ ID NO: 239307 - DNA, 20 bp, Artificial Sequence
  Description of Artificial Sequence: Synthetic oligonucleotide
  Target: LAMA2; (-) strand; PAM type: YTN; PAM sequence: TTT
atataatttagagtagcaca

SEQ ID NO: 239308 - DNA, 20 bp, Artificial Sequence
  Description of Artificial Sequence: Synthetic oligonucleotide
  Target: LAMA2; (-) strand; PAM type: YTN; PAM sequence: TTT
tatataatttagagtagcac

SEQ ID NO: 239309 - DNA, 20 bp, Artificial Sequence
  Description of Artificial Sequence: Synthetic oligonucleotide
  Target: LAMA2; (-) strand; PAM type: YTN; PAM sequence: TTA
tagagtatattttatataat

SEQ ID NO: 239310 - DNA, 20 bp, Artificial Sequence
  Description of Artificial Sequence: Synthetic oligonucleotide
  Target: LAMA2; (-) strand; PAM type: YTN; PAM sequence: CTA
cattatagagtatattttat

SEQ ID NO: 239311 - DNA, 20 bp, Artificial Sequence
  Description of Artificial Sequence: Synthetic oligonucleotide
  Target: LAMA2; (-) strand; PAM type: YTN; PAM sequence: TTA
ctacattatagagtatattt

SEQ ID NO: 239312 - DNA, 20 bp, Artificial Sequence
  Description of Artificial Sequence: Synthetic oligonucleotide
  Target: LAMA2; (-) strand; PAM type: YTN; PAM sequence: TTT
actacattatagagtatatt

SEQ ID NO: 239313 - DNA, 20 bp, Artificial Sequence
  Description of Artificial Sequence: Synthetic oligonucleotide
  Target: LAMA2; (-) strand; PAM type: YTN; PAM sequence: CTT
tactacattatagagtatat

SEQ ID NO: 239314 - DNA, 20 bp, Artificial Sequence
  Description of Artificial Sequence: Synthetic oligonucleotide
  Target: LAMA2; (-) strand; PAM type: YTN; PAM sequence: TTC
tttactacattatagagtat

SEQ ID NO: 239315 - DNA, 20 bp, Artificial Sequence
  Description of Artificial Sequence: Synthetic oligonucleotide
  Target: LAMA2; (-) strand; PAM type: YTN; PAM sequence: TTT
ctttactacattatagagta

SEQ ID NO: 239316 - DNA, 20 bp, Artificial Sequence
  Description of Artificial Sequence: Synthetic oligonucleotide
  Target: LAMA2; (-) strand; PAM type: YTN; PAM sequence: CTT
tctttactacattatagagt

SEQ ID NO: 239317 - DNA, 20 bp, Artificial Sequence
  Description of Artificial Sequence: Synthetic oligonucleotide
  Target: LAMA2; (-) strand; PAM type: YTN; PAM sequence: TTG
gcataaagaaatctttcttt

SEQ ID NO: 239318 - DNA, 20 bp, Artificial Sequence
  Description of Artificial Sequence: Synthetic oligonucleotide
  Target: LAMA2; (-) strand; PAM type: YTN; PAM sequence: CTA
taaaatgtgagacattggca

SEQ ID NO: 239319 - DNA, 20 bp, Artificial Sequence
  Description of Artificial Sequence: Synthetic oligonucleotide
  Target: LAMA2; (-) strand; PAM type: YTN; PAM sequence: TTG
acagtagcaggtaaaatgtc

SEQ ID NO: 239320 - DNA, 20 bp, Artificial Sequence
  Description of Artificial Sequence: Synthetic oligonucleotide
  Target: LAMA2; (-) strand; PAM type: YTN; PAM sequence: TTA
agttgacagtagcaggtaaa

SEQ ID NO: 239321 - DNA, 20 bp, Artificial Sequence
  Description of Artificial Sequence: Synthetic oligonucleotide
  Target: LAMA2; (-) strand; PAM type: YTN; PAM sequence: CTT
aagttgacagtagcaggtaa

SEQ ID NO: 239322 - DNA, 20 bp, Artificial Sequence
  Description of Artificial Sequence: Synthetic oligonucleotide
  Target: LAMA2; (-) strand; PAM type: YTN; PAM sequence: TTG
agtaacttaagttgacagta

SEQ ID NO: 239323 - DNA, 20 bp, Artificial Sequence
  Description of Artificial Sequence: Synthetic oligonucleotide
  Target: LAMA2; (-) strand; PAM type: YTN; PAM sequence: CTT
gagtaacttaagttgacagt

SEQ ID NO: 239324 - DNA, 20 bp, Artificial Sequence
  Description of Artificial Sequence: Synthetic oligonucleotide
  Target: LAMA2; (-) strand; PAM type: YTN; PAM sequence: CTA
tacttgagtaacttaagttg

SEQ ID NO: 239325 - DNA, 20 bp, Artificial Sequence
  Description of Artificial Sequence: Synthetic oligonucleotide
  Target: LAMA2; (-) strand; PAM type: YTN; PAM sequence: TTA
ggagataaatcaacagaact

SEQ ID NO: 239326 - DNA, 20 bp, Artificial Sequence
  Description of Artificial Sequence: Synthetic oligonucleotide
  Target: LAMA2; (-) strand; PAM type: YTN; PAM sequence: TTC
attaggagataaatcaacag

SEQ ID NO: 239327 - DNA, 20 bp, Artificial Sequence
  Description of Artificial Sequence: Synthetic oligonucleotide
  Target: LAMA2; (-) strand; PAM type: YTN; PAM sequence: TTG
ttcattaggagataaatcaa

SEQ ID NO: 239328 - DNA, 20 bp, Artificial Sequence
  Description of Artificial Sequence: Synthetic oligonucleotide
  Target: LAMA2; (-) strand; PAM type: YTN; PAM sequence: TTA
gcggttgttcattaggagat

SEQ ID NO: 239329 - DNA, 20 bp, Artificial Sequence
  Description of Artificial Sequence: Synthetic oligonucleotide
  Target: LAMA2; (-) strand; PAM type: YTN; PAM sequence: TTG
gtaagtcattagcggttgtt

SEQ ID NO: 239330 - DNA, 20 bp, Artificial Sequence
  Description of Artificial Sequence: Synthetic oligonucleotide
  Target: LAMA2; (-) strand; PAM type: YTN; PAM sequence: TTA
ggaattggtaagtcattagc

SEQ ID NO: 239331 - DNA, 20 bp, Artificial Sequence
  Description of Artificial Sequence: Synthetic oligonucleotide
  Target: LAMA2; (-) strand; PAM type: YTN; PAM sequence: CTT
aggaattggtaagtcattag

SEQ ID NO: 239332 - DNA, 20 bp, Artificial Sequence
  Description of Artificial Sequence: Synthetic oligonucleotide
  Target: LAMA2; (-) strand; PAM type: YTN; PAM sequence: TTC
cttaggaattggtaagtcat

SEQ ID NO: 239333 - DNA, 20 bp, Artificial Sequence
  Description of Artificial Sequence: Synthetic oligonucleotide
  Target: LAMA2; (-) strand; PAM type: YTN; PAM sequence: CTA
agagatattccttaggaatt

SEQ ID NO: 239334 - DNA, 20 bp, Artificial Sequence
  Description of Artificial Sequence: Synthetic oligonucleotide
  Target: LAMA2; (-) strand; PAM type: YTN; PAM sequence: CTC
agaaagtccatcctaagaga

SEQ ID NO: 239335 - DNA, 20 bp, Artificial Sequence
  Description of Artificial Sequence: Synthetic oligonucleotide
  Target: LAMA2; (-) strand; PAM type: YTN; PAM sequence: CTG
ccctcagaaagtccatccta

SEQ ID NO: 239336 - DNA, 20 bp, Artificial Sequence
  Description of Artificial Sequence: Synthetic oligonucleotide
  Target: LAMA2; (-) strand; PAM type: YTN; PAM sequence: TTG
agatccagggccctgccctc

SEQ ID NO: 239337 - DNA, 20 bp, Artificial Sequence
  Description of Artificial Sequence: Synthetic oligonucleotide
  Target: LAMA2; (-) strand; PAM type: YTN; PAM sequence: CTT
gagatccagggccctgccct

SEQ ID NO: 239338 - DNA, 20 bp, Artificial Sequence
  Description of Artificial Sequence: Synthetic oligonucleotide
  Target: LAMA2; (-) strand; PAM type: YTN; PAM sequence: TTG
gtacttgagatccagggccc

SEQ ID NO: 239339 - DNA, 20 bp, Artificial Sequence
  Description of Artificial Sequence: Synthetic oligonucleotide
  Target: LAMA2; (-) strand; PAM type: YTN; PAM sequence: CTT
ggtacttgagatccagggcc

SEQ ID NO: 239340 - DNA, 20 bp, Artificial Sequence
  Description of Artificial Sequence: Synthetic oligonucleotide
  Target: LAMA2; (-) strand; PAM type: YTN; PAM sequence: TTC
acttggtacttgagatccag

SEQ ID NO: 239341 - DNA, 20 bp, Artificial Sequence
  Description of Artificial Sequence: Synthetic oligonucleotide
  Target: LAMA2; (-) strand; PAM type: YTN; PAM sequence: CTT
cacttggtacttgagatcca

SEQ ID NO: 239342 - DNA, 20 bp, Artificial Sequence
  Description of Artificial Sequence: Synthetic oligonucleotide
  Target: LAMA2; (-) strand; PAM type: YTN; PAM sequence: CTA
gaacttcacttggtacttga

SEQ ID NO: 239343 - DNA, 20 bp, Artificial Sequence
  Description of Artificial Sequence: Synthetic oligonucleotide
  Target: LAMA2; (-) strand; PAM type: YTN; PAM sequence: CTG
tatgctagaacttcacttgg

SEQ ID NO: 239344 - DNA, 20 bp, Artificial Sequence
  Description of Artificial Sequence: Synthetic oligonucleotide
  Target: LAMA2; (-) strand; PAM type: YTN; PAM sequence: TTC
ctgtatgctagaacttcact

SEQ ID NO: 239345 - DNA, 20 bp, Artificial Sequence
  Description of Artificial Sequence: Synthetic oligonucleotide
  Target: LAMA2; (-) strand; PAM type: YTN; PAM sequence: CTT
cctgtatgctagaacttcac

SEQ ID NO: 239346 - DNA, 20 bp, Artificial Sequence
  Description of Artificial Sequence: Synthetic oligonucleotide
  Target: LAMA2; (-) strand; PAM type: YTN; PAM sequence: TTA
atacttcctgtatgctagaa

SEQ ID NO: 239347 - DNA, 20 bp, Artificial Sequence
  Description of Artificial Sequence: Synthetic oligonucleotide
  Target: LAMA2; (-) strand; PAM type: YTN; PAM sequence: TTT
aatacttcctgtatgctaga

SEQ ID NO: 239348 - DNA, 20 bp, Artificial Sequence
  Description of Artificial Sequence: Synthetic oligonucleotide
  Target: LAMA2; (-) strand; PAM type: YTN; PAM sequence: CTG
tatttaatacttcctgtatg

SEQ ID NO: 239349 - DNA, 20 bp, Artificial Sequence
  Description of Artificial Sequence: Synthetic oligonucleotide
  Target: LAMA2; (-) strand; PAM type: YTN; PAM sequence: CTC
agcctgtatttaatacttcc

SEQ ID NO: 239350 - DNA, 20 bp, Artificial Sequence
  Description of Artificial Sequence: Synthetic oligonucleotide
  Target: LAMA2; (-) strand; PAM type: YTN; PAM sequence: TTG
gataagggatactcagcctg

SEQ ID NO: 239351 - DNA, 20 bp, Artificial Sequence
  Description of Artificial Sequence: Synthetic oligonucleotide
  Target: LAMA2; (-) strand; PAM type: YTN; PAM sequence: TTT
ggataagggatactcagcct

SEQ ID NO: 239352 - DNA, 20 bp, Artificial Sequence
  Description of Artificial Sequence: Synthetic oligonucleotide
  Target: LAMA2; (-) strand; PAM type: YTN; PAM sequence: TTT
tggataagggatactcagcc

SEQ ID NO: 239353 - DNA, 20 bp, Artificial Sequence
  Description of Artificial Sequence: Synthetic oligonucleotide
  Target: LAMA2; (-) strand; PAM type: YTN; PAM sequence: CTC
aagcattttggataagggat

SEQ ID NO: 239354 - DNA, 20 bp, Artificial Sequence
  Description of Artificial Sequence: Synthetic oligonucleotide
  Target: LAMA2; (-) strand; PAM type: YTN; PAM sequence: CTG
gtctcaagcattttggataa

SEQ ID NO: 239355 - DNA, 20 bp, Artificial Sequence
  Description of Artificial Sequence: Synthetic oligonucleotide
  Target: LAMA2; (-) strand; PAM type: YTN; PAM sequence: TTC
tggtctcaagcattttggat

SEQ ID NO: 239356 - DNA, 20 bp, Artificial Sequence
  Description of Artificial Sequence: Synthetic oligonucleotide
  Target: LAMA2; (-) strand; PAM type: YTN; PAM sequence: TTT
ctggtctcaagcattttgga

SEQ ID NO: 239357 - DNA, 20 bp, Artificial Sequence
  Description of Artificial Sequence: Synthetic oligonucleotide
  Target: LAMA2; (-) strand; PAM type: YTN; PAM sequence: TTC
caaaatccgaaaaaatacca

SEQ ID NO: 239358 - DNA, 20 bp, Artificial Sequence
  Description of Artificial Sequence: Synthetic oligonucleotide
  Target: LAMA2; (-) strand; PAM type: YTN; PAM sequence: CTG
caaatattccaaaatccgaa

SEQ ID NO: 239359 - DNA, 20 bp, Artificial Sequence
  Description of Artificial Sequence: Synthetic oligonucleotide
  Target: LAMA2; (-) strand; PAM type: YTN; PAM sequence: TTC
tgcaaatattccaaaatccg

SEQ ID NO: 239360 - DNA, 20 bp, Artificial Sequence
  Description of Artificial Sequence: Synthetic oligonucleotide
  Target: LAMA2; (-) strand; PAM type: YTN; PAM sequence: TTA
ggaatgatcagccagtatgt

SEQ ID NO: 239361 - DNA, 20 bp, Artificial Sequence
  Description of Artificial Sequence: Synthetic oligonucleotide
  Target: LAMA2; (-) strand; PAM type: YTN; PAM sequence: CTG
attaggaatgatcagccagt

SEQ ID NO: 239362 - DNA, 20 bp, Artificial Sequence
  Description of Artificial Sequence: Synthetic oligonucleotide
  Target: LAMA2; (-) strand; PAM type: YTN; PAM sequence: TTC
tgattaggaatgatcagcca

SEQ ID NO: 239363 - DNA, 20 bp, Artificial Sequence
  Description of Artificial Sequence: Synthetic oligonucleotide
  Target: LAMA2; (-) strand; PAM type: YTN; PAM sequence: TTT
ctgattaggaatgatcagcc

SEQ ID NO: 239364 - DNA, 20 bp, Artificial Sequence
  Description of Artificial Sequence: Synthetic oligonucleotide
  Target: LAMA2; (-) strand; PAM type: YTN; PAM sequence: TTT
tctgattaggaatgatcagc

SEQ ID NO: 239365 - DNA, 20 bp, Artificial Sequence
  Description of Artificial Sequence: Synthetic oligonucleotide
  Target: LAMA2; (-) strand; PAM type: YTN; PAM sequence: TTG
gattttctgattaggaatga

SEQ ID NO: 239366 - DNA, 20 bp, Artificial Sequence
  Description of Artificial Sequence: Synthetic oligonucleotide
  Target: LAMA2; (-) strand; PAM type: YTN; PAM sequence: TTT
ggattttctgattaggaatg

SEQ ID NO: 239367 - DNA, 20 bp, Artificial Sequence
  Description of Artificial Sequence: Synthetic oligonucleotide
  Target: LAMA2; (-) strand; PAM type: YTN; PAM sequence: TTT
tggattttctgattaggaat

SEQ ID NO: 239368 - DNA, 20 bp, Artificial Sequence
  Description of Artificial Sequence: Synthetic oligonucleotide
  Target: LAMA2; (-) strand; PAM type: YTN; PAM sequence: TTC
agattttggattttctgatt

SEQ ID NO: 239369 - DNA, 20 bp, Artificial Sequence
  Description of Artificial Sequence: Synthetic oligonucleotide
  Target: LAMA2; (-) strand; PAM type: YTN; PAM sequence: TTT
cagattttggattttctgat

SEQ ID NO: 239370 - DNA, 20 bp, Artificial Sequence
  Description of Artificial Sequence: Synthetic oligonucleotide
  Target: LAMA2; (-) strand; PAM type: YTN; PAM sequence: CTA
gagcatttcagattttggat

SEQ ID NO: 239371 - DNA, 20 bp, Artificial Sequence
  Description of Artificial Sequence: Synthetic oligonucleotide
  Target: LAMA2; (-) strand; PAM type: YTN; PAM sequence: TTC
actagagcatttcagatttt

SEQ ID NO: 239372 - DNA, 20 bp, Artificial Sequence
  Description of Artificial Sequence: Synthetic oligonucleotide
  Target: LAMA2; (-) strand; PAM type: YTN; PAM sequence: CTC
aaatggaatgttcactagag

SEQ ID NO: 239373 - DNA, 20 bp, Artificial Sequence
  Description of Artificial Sequence: Synthetic oligonucleotide
  Target: LAMA2; (-) strand; PAM type: YTN; PAM sequence: CTA
tatgatgctcaaatggaatg

SEQ ID NO: 239374 - DNA, 20 bp, Artificial Sequence
  Description of Artificial Sequence: Synthetic oligonucleotide
  Target: LAMA2; (-) strand; PAM type: YTN; PAM sequence: TTG
ggggcacctatatgatgctc

SEQ ID NO: 239375 - DNA, 20 bp, Artificial Sequence
  Description of Artificial Sequence: Synthetic oligonucleotide
  Target: LAMA2; (-) strand; PAM type: YTN; PAM sequence: TTT
gggggcacctatatgatgct

SEQ ID NO: 239376 - DNA, 20 bp, Artificial Sequence
  Description of Artificial Sequence: Synthetic oligonucleotide
  Target: LAMA2; (-) strand; PAM type: YTN; PAM sequence: CTT
tgggggcacctatatgatgc

SEQ ID NO: 239377 - DNA, 20 bp, Artificial Sequence
  Description of Artificial Sequence: Synthetic oligonucleotide
  Target: LAMA2; (-) strand; PAM type: YTN; PAM sequence: TTG
aaactttgggggcacctata

SEQ ID NO: 239378 - DNA, 20 bp, Artificial Sequence
  Description of Artificial Sequence: Synthetic oligonucleotide
  Target: LAMA2; (-) strand; PAM type: YTN; PAM sequence: TTT
gaaactttgggggcacctat

SEQ ID NO: 239379 - DNA, 20 bp, Artificial Sequence
  Description of Artificial Sequence: Synthetic oligonucleotide
  Target: LAMA2; (-) strand; PAM type: YTN; PAM sequence: TTC
aaaatttgaaactttggggg

SEQ ID NO: 239380 - DNA, 20 bp, Artificial Sequence
  Description of Artificial Sequence: Synthetic oligonucleotide
  Target: LAMA2; (-) strand; PAM type: YTN; PAM sequence: TTT
caaaatttgaaactttgggg

SEQ ID NO: 239381 - DNA, 20 bp, Artificial Sequence
  Description of Artificial Sequence: Synthetic oligonucleotide
  Target: LAMA2; (-) strand; PAM type: YTN; PAM sequence: TTA
aatgtttcaaaatttgaaac

SEQ ID NO: 239382 - DNA, 20 bp, Artificial Sequence
  Description of Artificial Sequence: Synthetic oligonucleotide
  Target: LAMA2; (-) strand; PAM type: YTN; PAM sequence: CTT
aaatgtttcaaaatttgaaa

SEQ ID NO: 239383 - DNA, 20 bp, Artificial Sequence
  Description of Artificial Sequence: Synthetic oligonucleotide
  Target: LAMA2; (-) strand; PAM type: YTN; PAM sequence: CTA
atcagaaaatccaaaatctt

SEQ ID NO: 239384 - DNA, 20 bp, Artificial Sequence
  Description of Artificial Sequence: Synthetic oligonucleotide
  Target: LAMA2; (-) strand; PAM type: YTN; PAM sequence: TTG
agcatccctaatcagaaaat

SEQ ID NO: 239385 - DNA, 20 bp, Artificial Sequence
  Description of Artificial Sequence: Synthetic oligonucleotide
  Target: LAMA2; (-) strand; PAM type: YTN; PAM sequence: TTC
aagacaaatgtgcaggttga

SEQ ID NO: 239386 - DNA, 20 bp, Artificial Sequence
  Description of Artificial Sequence: Synthetic oligonucleotide
  Target: LAMA2; (-) strand; PAM type: YTN; PAM sequence: TTT
caagacaaatgtgcaggttg

SEQ ID NO: 239387 - DNA, 20 bp, Artificial Sequence
  Description of Artificial Sequence: Synthetic oligonucleotide
  Target: LAMA2; (-) strand; PAM type: YTN; PAM sequence: TTT
tcaagacaaatgtgcaggtt

SEQ ID NO: 239388 - DNA, 20 bp, Artificial Sequence
  Description of Artificial Sequence: Synthetic oligonucleotide
  Target: LAMA2; (-) strand; PAM type: YTN; PAM sequence: TTT
ttcaagacaaatgtgcaggt

SEQ ID NO: 239389 - DNA, 20 bp, Artificial Sequence
  Description of Artificial Sequence: Synthetic oligonucleotide
  Target: LAMA2; (-) strand; PAM type: YTN; PAM sequence: TTA
tttttcaagacaaatgtgca

SEQ ID NO: 239390 - DNA, 20 bp, Artificial Sequence
  Description of Artificial Sequence: Synthetic oligonucleotide
  Target: LAMA2; (-) strand; PAM type: YTN; PAM sequence: TTT
atttttcaagacaaatgtgc

SEQ ID NO: 239391 - DNA, 20 bp, Artificial Sequence
  Description of Artificial Sequence: Synthetic oligonucleotide
  Target: LAMA2; (-) strand; PAM type: YTN; PAM sequence: TTA
tttatttttcaagacaaatg

SEQ ID NO: 239392 - DNA, 20 bp, Artificial Sequence
  Description of Artificial Sequence: Synthetic oligonucleotide
  Target: LAMA2; (-) strand; PAM type: YTN; PAM sequence: TTC
attatttatttttcaagaca

SEQ ID NO: 239393 - DNA, 20 bp, Artificial Sequence
  Description of Artificial Sequence: Synthetic oligonucleotide
  Target: LAMA2; (-) strand; PAM type: YTN; PAM sequence: TTA
ttcattatttatttttcaag

SEQ ID NO: 239394 - DNA, 20 bp, Artificial Sequence
  Description of Artificial Sequence: Synthetic oligonucleotide
  Target: LAMA2; (-) strand; PAM type: YTN; PAM sequence: TTT
attcattatttatttttcaa

SEQ ID NO: 239395 - DNA, 20 bp, Artificial Sequence
  Description of Artificial Sequence: Synthetic oligonucleotide
  Target: LAMA2; (-) strand; PAM type: YTN; PAM sequence: TTG
gaggtttattcattatttat

SEQ ID NO: 239396 - DNA, 20 bp, Artificial Sequence
  Description of Artificial Sequence: Synthetic oligonucleotide
  Target: LAMA2; (-) strand; PAM type: YTN; PAM sequence: TTA
aaagttggaggtttattcat

SEQ ID NO: 239397 - DNA, 20 bp, Artificial Sequence
  Description of Artificial Sequence: Synthetic oligonucleotide
  Target: LAMA2; (-) strand; PAM type: YTN; PAM sequence: TTT
aaaagttggaggtttattca

SEQ ID NO: 239398 - DNA, 20 bp, Artificial Sequence
  Description of Artificial Sequence: Synthetic oligonucleotide
  Target: LAMA2; (-) strand; PAM type: YTN; PAM sequence: TTT
taaaagttggaggtttattc

SEQ ID NO: 239399 - DNA, 20 bp, Artificial Sequence
  Description of Artificial Sequence: Synthetic oligonucleotide
  Target: LAMA2; (-) strand; PAM type: YTN; PAM sequence: TTC
attttaaaagttggaggttt

SEQ ID NO: 239400 - DNA, 20 bp, Artificial Sequence
  Description of Artificial Sequence: Synthetic oligonucleotide
  Target: LAMA2; (-) strand; PAM type: YTN; PAM sequence: TTG
ggaacaagaattcattttaa

SEQ ID NO: 239401 - DNA, 20 bp, Artificial Sequence
  Description of Artificial Sequence: Synthetic oligonucleotide
  Target: LAMA2; (-) strand; PAM type: YTN; PAM sequence: TTA
gcaaagacattgggaacaag

SEQ ID NO: 239402 - DNA, 20 bp, Artificial Sequence
  Description of Artificial Sequence: Synthetic oligonucleotide
  Target: LAMA2; (-) strand; PAM type: YTN; PAM sequence: TTG
tggacatagatagaatgaga

SEQ ID NO: 239403 - DNA, 20 bp, Artificial Sequence
  Description of Artificial Sequence: Synthetic oligonucleotide
  Target: LAMA2; (-) strand; PAM type: YTN; PAM sequence: CTT
gtggacatagatagaatgag

SEQ ID NO: 239404 - DNA, 20 bp, Artificial Sequence
  Description of Artificial Sequence: Synthetic oligonucleotide
  Target: LAMA2; (-) strand; PAM type: YTN; PAM sequence: TTC
aacttgtggacatagataga

SEQ ID NO: 239405 - DNA, 20 bp, Artificial Sequence
  Description of Artificial Sequence: Synthetic oligonucleotide
  Target: LAMA2; (-) strand; PAM type: YTN; PAM sequence: TTA
aaaattcaacttgtggacat

SEQ ID NO: 239406 - DNA, 20 bp, Artificial Sequence
  Description of Artificial Sequence: Synthetic oligonucleotide
  Target: LAMA2; (-) strand; PAM type: YTN; PAM sequence: TTT
aaaaattcaacttgtggaca

SEQ ID NO: 239407 - DNA, 20 bp, Artificial Sequence
  Description of Artificial Sequence: Synthetic oligonucleotide
  Target: LAMA2; (-) strand; PAM type: YTN; PAM sequence: TTG
aagcatggtttaaaaattca

SEQ ID NO: 239408 - DNA, 20 bp, Artificial Sequence
  Description of Artificial Sequence: Synthetic oligonucleotide
  Target: LAMA2; (-) strand; PAM type: YTN; PAM sequence: CTT
gaagcatggtttaaaaattc

SEQ ID NO: 239409 - DNA, 20 bp, Artificial Sequence
  Description of Artificial Sequence: Synthetic oligonucleotide
  Target: LAMA2; (-) strand; PAM type: YTN; PAM sequence: CTG
atccttgaagcatggtttaa

SEQ ID NO: 239410 - DNA, 20 bp, Artificial Sequence
  Description of Artificial Sequence: Synthetic oligonucleotide
  Target: LAMA2; (-) strand; PAM type: YTN; PAM sequence: TTG
acctgatccttgaagcatgg

SEQ ID NO: 239411 - DNA, 20 bp, Artificial Sequence
  Description of Artificial Sequence: Synthetic oligonucleotide
  Target: LAMA2; (-) strand; PAM type: YTN; PAM sequence: TTT
gacctgatccttgaagcatg

SEQ ID NO: 239412 - DNA, 20 bp, Artificial Sequence
  Description of Artificial Sequence: Synthetic oligonucleotide
  Target: LAMA2; (-) strand; PAM type: YTN; PAM sequence: TTA
tgacaggagtggagtttgac

SEQ ID NO: 239413 - DNA, 20 bp, Artificial Sequence
  Description of Artificial Sequence: Synthetic oligonucleotide
  Target: LAMA2; (-) strand; PAM type: YTN; PAM sequence: TTT
atgacaggagtggagtttga

SEQ ID NO: 239414 - DNA, 20 bp, Artificial Sequence
  Description of Artificial Sequence: Synthetic oligonucleotide
  Target: LAMA2; (-) strand; PAM type: YTN; PAM sequence: CTT
tatgacaggagtggagtttg

SEQ ID NO: 239415 - DNA, 20 bp, Artificial Sequence
  Description of Artificial Sequence: Synthetic oligonucleotide
  Target: LAMA2; (-) strand; PAM type: YTN; PAM sequence: TTA
aggaagctttatgacaggag

SEQ ID NO: 239416 - DNA, 20 bp, Artificial Sequence
  Description of Artificial Sequence: Synthetic oligonucleotide
  Target: LAMA2; (-) strand; PAM type: YTN; PAM sequence: CTT
aaggaagctttatgacagga

SEQ ID NO: 239417 - DNA, 20 bp, Artificial Sequence
  Description of Artificial Sequence: Synthetic oligonucleotide
  Target: LAMA2; (-) strand; PAM type: YTN; PAM sequence: CTA
taaggcttaaggaagcttta

SEQ ID NO: 239418 - DNA, 20 bp, Artificial Sequence
  Description of Artificial Sequence: Synthetic oligonucleotide
  Target: LAMA2; (-) strand; PAM type: YTN; PAM sequence: TTG
ctataaggcttaaggaagct

SEQ ID NO: 239419 - DNA, 20 bp, Artificial Sequence
  Description of Artificial Sequence: Synthetic oligonucleotide
  Target: LAMA2; (-) strand; PAM type: YTN; PAM sequence: TTT
gctataaggcttaaggaagc

SEQ ID NO: 239420 - DNA, 20 bp, Artificial Sequence
  Description of Artificial Sequence: Synthetic oligonucleotide
  Target: LAMA2; (-) strand; PAM type: YTN; PAM sequence: TTT
tgctataaggcttaaggaag

SEQ ID NO: 239421 - DNA, 20 bp, Artificial Sequence
  Description of Artificial Sequence: Synthetic oligonucleotide
  Target: LAMA2; (-) strand; PAM type: YTN; PAM sequence: TTT
ttgctataaggcttaaggaa

SEQ ID NO: 239422 - DNA, 20 bp, Artificial Sequence
  Description of Artificial Sequence: Synthetic oligonucleotide
  Target: LAMA2; (-) strand; PAM type: YTN; PAM sequence: CTA
atttttgctataaggcttaa

SEQ ID NO: 239423 - DNA, 20 bp, Artificial Sequence
  Description of Artificial Sequence: Synthetic oligonucleotide
  Target: LAMA2; (-) strand; PAM type: YTN; PAM sequence: TTA
cgggaacatagaggaagcac

SEQ ID NO: 239424 - DNA, 20 bp, Artificial Sequence
  Description of Artificial Sequence: Synthetic oligonucleotide
  Target: LAMA2; (-) strand; PAM type: YTN; PAM sequence: CTG
agaaataaataattacggga

SEQ ID NO: 239425 - DNA, 20 bp, Artificial Sequence
  Description of Artificial Sequence: Synthetic oligonucleotide
  Target: LAMA2; (-) strand; PAM type: YTN; PAM sequence: CTA
taatgcaaggtggaatatgg

SEQ ID NO: 239426 - DNA, 20 bp, Artificial Sequence
  Description of Artificial Sequence: Synthetic oligonucleotide
  Target: LAMA2; (-) strand; PAM type: YTN; PAM sequence: CTC
acaatcaactataatgcaag

SEQ ID NO: 239427 - DNA, 20 bp, Artificial Sequence
  Description of Artificial Sequence: Synthetic oligonucleotide
  Target: LAMA2; (-) strand; PAM type: YTN; PAM sequence: TTG
ggtaaaaagatatactcaca

SEQ ID NO: 239428 - DNA, 20 bp, Artificial Sequence
  Description of Artificial Sequence: Synthetic oligonucleotide
  Target: LAMA2; (-) strand; PAM type: YTN; PAM sequence: CTA
gttgggtaaaaagatatact

SEQ ID NO: 239429 - DNA, 20 bp, Artificial Sequence
  Description of Artificial Sequence: Synthetic oligonucleotide
  Target: LAMA2; (-) strand; PAM type: YTN; PAM sequence: TTA
aaggccaatatctagttggg

SEQ ID NO: 239430 - DNA, 20 bp, Artificial Sequence
  Description of Artificial Sequence: Synthetic oligonucleotide
  Target: LAMA2; (-) strand; PAM type: YTN; PAM sequence: TTT
aaaggccaatatctagttgg

SEQ ID NO: 239431 - DNA, 20 bp, Artificial Sequence
  Description of Artificial Sequence: Synthetic oligonucleotide
  Target: LAMA2; (-) strand; PAM type: YTN; PAM sequence: CTT
taaaggccaatatctagttg

SEQ ID NO: 239432 - DNA, 20 bp, Artificial Sequence
  Description of Artificial Sequence: Synthetic oligonucleotide
  Target: LAMA2; (-) strand; PAM type: YTN; PAM sequence: CTG
tctttaaaggccaatatcta

SEQ ID NO: 239433 - DNA, 20 bp, Artificial Sequence
  Description of Artificial Sequence: Synthetic oligonucleotide
  Target: LAMA2; (-) strand; PAM type: YTN; PAM sequence: TTA
aataagtctgtctttaaagg

SEQ ID NO: 239434 - DNA, 20 bp, Artificial Sequence
  Description of Artificial Sequence: Synthetic oligonucleotide
  Target: LAMA2; (-) strand; PAM type: YTN; PAM sequence: TTT
aaataagtctgtctttaaag

SEQ ID NO: 239435 - DNA, 20 bp, Artificial Sequence
  Description of Artificial Sequence: Synthetic oligonucleotide
  Target: LAMA2; (-) strand; PAM type: YTN; PAM sequence: CTT
taaataagtctgtctttaaa

SEQ ID NO: 239436 - DNA, 20 bp, Artificial Sequence
  Description of Artificial Sequence: Synthetic oligonucleotide
  Target: LAMA2; (-) strand; PAM type: YTN; PAM sequence: CTG
tctttaaataagtctgtctt

SEQ ID NO: 239437 - DNA, 20 bp, Artificial Sequence
  Description of Artificial Sequence: Synthetic oligonucleotide
  Target: LAMA2; (-) strand; PAM type: YTN; PAM sequence: CTA
tgaagataaataagtcaagg

SEQ ID NO: 239438 - DNA, 20 bp, Artificial Sequence
  Description of Artificial Sequence: Synthetic oligonucleotide
  Target: LAMA2; (-) strand; PAM type: YTN; PAM sequence: CTA
ggcactatgaagataaataa

SEQ ID NO: 239439 - DNA, 20 bp, Artificial Sequence
  Description of Artificial Sequence: Synthetic oligonucleotide
  Target: LAMA2; (-) strand; PAM type: YTN; PAM sequence: TTC
taggcactatgaagataaat

SEQ ID NO: 239440 - DNA, 20 bp, Artificial Sequence
  Description of Artificial Sequence: Synthetic oligonucleotide
  Target: LAMA2; (-) strand; PAM type: YTN; PAM sequence: TTA
gggtaggaattctaggcact

SEQ ID NO: 239441 - DNA, 20 bp, Artificial Sequence
  Description of Artificial Sequence: Synthetic oligonucleotide
  Target: LAMA2; (-) strand; PAM type: YTN; PAM sequence: CTG
aagcaacacattagggtagg

SEQ ID NO: 239442 - DNA, 20 bp, Artificial Sequence
  Description of Artificial Sequence: Synthetic oligonucleotide
  Target: LAMA2; (-) strand; PAM type: YTN; PAM sequence: TTA
ataacctgaagcaacacatt

SEQ ID NO: 239443 - DNA, 20 bp, Artificial Sequence
  Description of Artificial Sequence: Synthetic oligonucleotide
  Target: LAMA2; (-) strand; PAM type: YTN; PAM sequence: TTT
aataacctgaagcaacacat

SEQ ID NO: 239444 - DNA, 20 bp, Artificial Sequence
  Description of Artificial Sequence: Synthetic oligonucleotide
  Target: LAMA2; (-) strand; PAM type: YTN; PAM sequence: TTA
tttaataacctgaagcaaca

SEQ ID NO: 239445 - DNA, 20 bp, Artificial Sequence
  Description of Artificial Sequence: Synthetic oligonucleotide
  Target: LAMA2; (-) strand; PAM type: YTN; PAM sequence: TTT
atttaataacctgaagcaac

SEQ ID NO: 239446 - DNA, 20 bp, Artificial Sequence
  Description of Artificial Sequence: Synthetic oligonucleotide
  Target: LAMA2; (-) strand; PAM type: YTN; PAM sequence: TTT
tatttaataacctgaagcaa

SEQ ID NO: 239447 - DNA, 20 bp, Artificial Sequence
  Description of Artificial Sequence: Synthetic oligonucleotide
  Target: LAMA2; (-) strand; PAM type: YTN; PAM sequence: TTC
aattttatttaataacctga

SEQ ID NO: 239448 - DNA, 20 bp, Artificial Sequence
  Description of Artificial Sequence: Synthetic oligonucleotide
  Target: LAMA2; (-) strand; PAM type: YTN; PAM sequence: TTC
acattcaattttatttaata

SEQ ID NO: 239449 - DNA, 20 bp, Artificial Sequence
  Description of Artificial Sequence: Synthetic oligonucleotide
  Target: LAMA2; (-) strand; PAM type: YTN; PAM sequence: TTT
cacattcaattttatttaat

SEQ ID NO: 239450 - DNA, 20 bp, Artificial Sequence
  Description of Artificial Sequence: Synthetic oligonucleotide
  Target: LAMA2; (-) strand; PAM type: YTN; PAM sequence: TTA
aataatttcacattcaattt

SEQ ID NO: 239451 - DNA, 20 bp, Artificial Sequence
  Description of Artificial Sequence: Synthetic oligonucleotide
  Target: LAMA2; (-) strand; PAM type: YTN; PAM sequence: TTG
aaaaaatatgattaaataat

SEQ ID NO: 239452 - DNA, 20 bp, Artificial Sequence
  Description of Artificial Sequence: Synthetic oligonucleotide
  Target: LAMA2; (-) strand; PAM type: YTN; PAM sequence: CTT
gaaaaaatatgattaaataa

SEQ ID NO: 239453 - DNA, 20 bp, Artificial Sequence
  Description of Artificial Sequence: Synthetic oligonucleotide
  Target: LAMA2; (-) strand; PAM type: YTN; PAM sequence: CTA
gtaaaatgaccttgaaaaaa

SEQ ID NO: 239454 - DNA, 20 bp, Artificial Sequence
  Description of Artificial Sequence: Synthetic oligonucleotide
  Target: LAMA2; (-) strand; PAM type: YTN; PAM sequence: TTA
gcctagtaaaatgaccttga

SEQ ID NO: 239455 - DNA, 20 bp, Artificial Sequence
  Description of Artificial Sequence: Synthetic oligonucleotide
  Target: LAMA2; (-) strand; PAM type: YTN; PAM sequence: TTT
agcctagtaaaatgaccttg

SEQ ID NO: 239456 - DNA, 20 bp, Artificial Sequence
  Description of Artificial Sequence: Synthetic oligonucleotide
  Target: LAMA2; (-) strand; PAM type: YTN; PAM sequence: TTT
tagcctagtaaaatgacctt

SEQ ID NO: 239457 - DNA, 20 bp, Artificial Sequence
  Description of Artificial Sequence: Synthetic oligonucleotide
  Target: LAMA2; (-) strand; PAM type: YTN; PAM sequence: CTC
cattttagcctagtaaaatg

SEQ ID NO: 239458 - DNA, 20 bp, Artificial Sequence
  Description of Artificial Sequence: Synthetic oligonucleotide
  Target: LAMA2; (-) strand; PAM type: YTN; PAM sequence: TTA
gctccattttagcctagtaa

SEQ ID NO: 239459 - DNA, 20 bp, Artificial Sequence
  Description of Artificial Sequence: Synthetic oligonucleotide
  Target: LAMA2; (-) strand; PAM type: YTN; PAM sequence: CTT
agctccattttagcctagta

SEQ ID NO: 239460 - DNA, 20 bp, Artificial Sequence
  Description of Artificial Sequence: Synthetic oligonucleotide
  Target: LAMA2; (-) strand; PAM type: YTN; PAM sequence: TTC
cttagctccattttagccta

SEQ ID NO: 239461 - DNA, 20 bp, Artificial Sequence
  Description of Artificial Sequence: Synthetic oligonucleotide
  Target: LAMA2; (-) strand; PAM type: YTN; PAM sequence: TTT
ccttagctccattttagcct

SEQ ID NO: 239462 - DNA, 20 bp, Artificial Sequence
  Description of Artificial Sequence: Synthetic oligonucleotide
  Target: LAMA2; (-) strand; PAM type: YTN; PAM sequence: TTT
tccttagctccattttagcc

SEQ ID NO: 239463 - DNA, 20 bp, Artificial Sequence
  Description of Artificial Sequence: Synthetic oligonucleotide
  Target: LAMA2; (-) strand; PAM type: YTN; PAM sequence: CTA
cattttccttagctccattt

SEQ ID NO: 239464 - DNA, 20 bp, Artificial Sequence
  Description of Artificial Sequence: Synthetic oligonucleotide
  Target: LAMA2; (-) strand; PAM type: YTN; PAM sequence: TTA
gctacattttccttagctcc

SEQ ID NO: 239465 - DNA, 20 bp, Artificial Sequence
  Description of Artificial Sequence: Synthetic oligonucleotide
  Target: LAMA2; (-) strand; PAM type: YTN; PAM sequence: TTG
cagacattagctacattttc

SEQ ID NO: 239466 - DNA, 20 bp, Artificial Sequence
  Description of Artificial Sequence: Synthetic oligonucleotide
  Target: LAMA2; (-) strand; PAM type: YTN; PAM sequence: TTT
gcagacattagctacatttt

SEQ ID NO: 239467 - DNA, 20 bp, Artificial Sequence
  Description of Artificial Sequence: Synthetic oligonucleotide
  Target: LAMA2; (-) strand; PAM type: YTN; PAM sequence: TTA
gaaatttgcagacattagct

SEQ ID NO: 239468 - DNA, 20 bp, Artificial Sequence
  Description of Artificial Sequence: Synthetic oligonucleotide
  Target: LAMA2; (-) strand; PAM type: YTN; PAM sequence: TTC
aacaattagaaatttgcaga

SEQ ID NO: 239469 - DNA, 20 bp, Artificial Sequence
  Description of Artificial Sequence: Synthetic oligonucleotide
  Target: LAMA2; (-) strand; PAM type: YTN; PAM sequence: CTA
agttcaacaattagaaattt

SEQ ID NO: 239470 - DNA, 20 bp, Artificial Sequence
  Description of Artificial Sequence: Synthetic oligonucleotide
  Target: LAMA2; (-) strand; PAM type: YTN; PAM sequence: TTC
agactaagttcaacaattag

SEQ ID NO: 239471 - DNA, 20 bp, Artificial Sequence
  Description of Artificial Sequence: Synthetic oligonucleotide
  Target: LAMA2; (-) strand; PAM type: YTN; PAM sequence: CTG
agattcagactaagttcaac

SEQ ID NO: 239472 - DNA, 20 bp, Artificial Sequence
  Description of Artificial Sequence: Synthetic oligonucleotide
  Target: LAMA2; (-) strand; PAM type: YTN; PAM sequence: TTC
tgagattcagactaagttca

SEQ ID NO: 239473 - DNA, 20 bp, Artificial Sequence
  Description of Artificial Sequence: Synthetic oligonucleotide
  Target: LAMA2; (-) strand; PAM type: YTN; PAM sequence: CTA
ttctgagattcagactaagt

SEQ ID NO: 239474 - DNA, 20 bp, Artificial Sequence
  Description of Artificial Sequence: Synthetic oligonucleotide
  Target: LAMA2; (-) strand; PAM type: YTN; PAM sequence: TTA
taatgccactattctgagat

SEQ ID NO: 239475 - DNA, 20 bp, Artificial Sequence
  Description of Artificial Sequence: Synthetic oligonucleotide
  Target: LAMA2; (-) strand; PAM type: YTN; PAM sequence: CTT
ataatgccactattctgaga

SEQ ID NO: 239476 - DNA, 20 bp, Artificial Sequence
  Description of Artificial Sequence: Synthetic oligonucleotide
  Target: LAMA2; (-) strand; PAM type: YTN; PAM sequence: TTG
aaagcttataatgccactat

SEQ ID NO: 239477 - DNA, 20 bp, Artificial Sequence
  Description of Artificial Sequence: Synthetic oligonucleotide
  Target: LAMA2; (-) strand; PAM type: YTN; PAM sequence: TTT
gaaagcttataatgccacta

SEQ ID NO: 239478 - DNA, 20 bp, Artificial Sequence
  Description of Artificial Sequence: Synthetic oligonucleotide
  Target: LAMA2; (-) strand; PAM type: YTN; PAM sequence: CTA
atttgaaagcttataatgcc

SEQ ID NO: 239479 - DNA, 20 bp, Artificial Sequence
  Description of Artificial Sequence: Synthetic oligonucleotide
  Target: LAMA2; (-) strand; PAM type: YTN; PAM sequence: CTC
taatttgaaagcttataatg

SEQ ID NO: 239480 - DNA, 20 bp, Artificial Sequence
  Description of Artificial Sequence: Synthetic oligonucleotide
  Target: LAMA2; (-) strand; PAM type: YTN; PAM sequence: TTA
ctctaatttgaaagcttata

SEQ ID NO: 239481 - DNA, 20 bp, Artificial Sequence
  Description of Artificial Sequence: Synthetic oligonucleotide
  Target: LAMA2; (-) strand; PAM type: YTN; PAM sequence: TTT
actctaatttgaaagcttat

SEQ ID NO: 239482 - DNA, 20 bp, Artificial Sequence
  Description of Artificial Sequence: Synthetic oligonucleotide
  Target: LAMA2; (-) strand; PAM type: YTN; PAM sequence: TTC
atttactctaatttgaaagc

SEQ ID NO: 239483 - DNA, 20 bp, Artificial Sequence
  Description of Artificial Sequence: Synthetic oligonucleotide
  Target: LAMA2; (-) strand; PAM type: YTN; PAM sequence: TTT
catttactctaatttgaaag

SEQ ID NO: 239484 - DNA, 20 bp, Artificial Sequence
  Description of Artificial Sequence: Synthetic oligonucleotide
  Target: LAMA2; (-) strand; PAM type: YTN; PAM sequence: TTT
tcatttactctaatttgaaa

SEQ ID NO: 239485 - DNA, 20 bp, Artificial Sequence
  Description of Artificial Sequence: Synthetic oligonucleotide
  Target: LAMA2; (-) strand; PAM type: YTN; PAM sequence: CTT
ttcatttactctaatttgaa

SEQ ID NO: 239486 - DNA, 20 bp, Artificial Sequence
  Description of Artificial Sequence: Synthetic oligonucleotide
  Target: LAMA2; (-) strand; PAM type: YTN; PAM sequence: CTA
cttttcatttactctaattt

SEQ ID NO: 239487 - DNA, 20 bp, Artificial Sequence
  Description of Artificial Sequence: Synthetic oligonucleotide
  Target: LAMA2; (-) strand; PAM type: YTN; PAM sequence: CTA
atctacttttcatttactct

SEQ ID NO: 239488 - DNA, 20 bp, Artificial Sequence
  Description of Artificial Sequence: Synthetic oligonucleotide
  Target: LAMA2; (-) strand; PAM type: YTN; PAM sequence: TTG
gtctaatctacttttcattt

SEQ ID NO: 239489 - DNA, 20 bp, Artificial Sequence
  Description of Artificial Sequence: Synthetic oligonucleotide
  Target: LAMA2; (-) strand; PAM type: YTN; PAM sequence: CTT
ggtctaatctacttttcatt

SEQ ID NO: 239490 - DNA, 20 bp, Artificial Sequence
  Description of Artificial Sequence: Synthetic oligonucleotide
  Target: LAMA2; (-) strand; PAM type: YTN; PAM sequence: TTA
tgcgcttggtctaatctact

SEQ ID NO: 239491 - DNA, 20 bp, Artificial Sequence
  Description of Artificial Sequence: Synthetic oligonucleotide
  Target: LAMA2; (-) strand; PAM type: YTN; PAM sequence: CTT
atgcgcttggtctaatctac

SEQ ID NO: 239492 - DNA, 20 bp, Artificial Sequence
  Description of Artificial Sequence: Synthetic oligonucleotide
  Target: LAMA2; (-) strand; PAM type: YTN; PAM sequence: TTC
ttatgcgcttggtctaatct

SEQ ID NO: 239493 - DNA, 20 bp, Artificial Sequence
  Description of Artificial Sequence: Synthetic oligonucleotide
  Target: LAMA2; (-) strand; PAM type: YTN; PAM sequence: CTG
tgttcttatgcgcttggtct

SEQ ID NO: 239494 - DNA, 20 bp, Artificial Sequence
  Description of Artificial Sequence: Synthetic oligonucleotide
  Target: LAMA2; (-) strand; PAM type: YTN; PAM sequence: CTG
tatactgtgttcttatgcgc

SEQ ID NO: 239495 - DNA, 20 bp, Artificial Sequence
  Description of Artificial Sequence: Synthetic oligonucleotide
  Target: LAMA2; (-) strand; PAM type: YTN; PAM sequence: TTC
tgtatactgtgttcttatgc

SEQ ID NO: 239496 - DNA, 20 bp, Artificial Sequence
  Description of Artificial Sequence: Synthetic oligonucleotide
  Target: LAMA2; (-) strand; PAM type: YTN; PAM sequence: CTG
ttctgtatactgtgttctta

SEQ ID NO: 239497 - DNA, 20 bp, Artificial Sequence
  Description of Artificial Sequence: Synthetic oligonucleotide
  Target: LAMA2; (-) strand; PAM type: YTN; PAM sequence: TTG
aggacacagtacagctgttc

SEQ ID NO: 239498 - DNA, 20 bp, Artificial Sequence
  Description of Artificial Sequence: Synthetic oligonucleotide
  Target: LAMA2; (-) strand; PAM type: YTN; PAM sequence: TTA
tcccgttgaggacacagtac

SEQ ID NO: 239499 - DNA, 20 bp, Artificial Sequence
  Description of Artificial Sequence: Synthetic oligonucleotide
  Target: LAMA2; (-) strand; PAM type: YTN; PAM sequence: TTT
atcccgttgaggacacagta

SEQ ID NO: 239500 - DNA, 20 bp, Artificial Sequence
  Description of Artificial Sequence: Synthetic oligonucleotide
  Target: LAMA2; (-) strand; PAM type: YTN; PAM sequence: TTA
gtttatcccgttgaggacac

SEQ ID NO: 239501 - DNA, 20 bp, Artificial Sequence
  Description of Artificial Sequence: Synthetic oligonucleotide
  Target: LAMA2; (-) strand; PAM type: YTN; PAM sequence: TTT
agtttatcccgttgaggaca

SEQ ID NO: 239502 - DNA, 20 bp, Artificial Sequence
  Description of Artificial Sequence: Synthetic oligonucleotide
  Target: LAMA2; (-) strand; PAM type: YTN; PAM sequence: TTA
tgatttagtttatcccgttg

SEQ ID NO: 239503 - DNA, 20 bp, Artificial Sequence
  Description of Artificial Sequence: Synthetic oligonucleotide
  Target: LAMA2; (-) strand; PAM type: YTN; PAM sequence: CTG
taattatgatttagtttatc

SEQ ID NO: 239504 - DNA, 20 bp, Artificial Sequence
  Description of Artificial Sequence: Synthetic oligonucleotide
  Target: LAMA2; (-) strand; PAM type: YTN; PAM sequence: TTC
aaaagagtataaaggcaaga

SEQ ID NO: 239505 - DNA, 20 bp, Artificial Sequence
  Description of Artificial Sequence: Synthetic oligonucleotide
  Target: LAMA2; (-) strand; PAM type: YTN; PAM sequence: CTT
caaaagagtataaaggcaag

SEQ ID NO: 239506 - DNA, 20 bp, Artificial Sequence
  Description of Artificial Sequence: Synthetic oligonucleotide
  Target: LAMA2; (-) strand; PAM type: YTN; PAM sequence: TTG
agagcatcttcaaaagagta

SEQ ID NO: 239507 - DNA, 20 bp, Artificial Sequence
  Description of Artificial Sequence: Synthetic oligonucleotide
  Target: LAMA2; (-) strand; PAM type: YTN; PAM sequence: CTG
aagttgagagcatcttcaaa

SEQ ID NO: 239508 - DNA, 20 bp, Artificial Sequence
  Description of Artificial Sequence: Synthetic oligonucleotide
  Target: LAMA2; (-) strand; PAM type: YTN; PAM sequence: TTA
cagtgacaaataaatcccca

SEQ ID NO: 239509 - DNA, 20 bp, Artificial Sequence
  Description of Artificial Sequence: Synthetic oligonucleotide
  Target: LAMA2; (-) strand; PAM type: YTN; PAM sequence: CTT
acagtgacaaataaatcccc

SEQ ID NO: 239510 - DNA, 20 bp, Artificial Sequence
  Description of Artificial Sequence: Synthetic oligonucleotide
  Target: LAMA2; (-) strand; PAM type: YTN; PAM sequence: TTC
agacttacagtgacaaataa

SEQ ID NO: 239511 - DNA, 20 bp, Artificial Sequence
  Description of Artificial Sequence: Synthetic oligonucleotide
  Target: LAMA2; (-) strand; PAM type: YTN; PAM sequence: TTT
cagacttacagtgacaaata

SEQ ID NO: 239512 - DNA, 20 bp, Artificial Sequence
  Description of Artificial Sequence: Synthetic oligonucleotide
  Target: LAMA2; (-) strand; PAM type: YTN; PAM sequence: CTA
atttcagacttacagtgaca

SEQ ID NO: 239513 - DNA, 20 bp, Artificial Sequence
  Description of Artificial Sequence: Synthetic oligonucleotide
  Target: LAMA2; (-) strand; PAM type: YTN; PAM sequence: CTA
atcaaactaatttcagactt

SEQ ID NO: 239514 - DNA, 20 bp, Artificial Sequence
  Description of Artificial Sequence: Synthetic oligonucleotide
  Target: LAMA2; (-) strand; PAM type: YTN; PAM sequence: TTG
aaatgatagatatcagcaaa

SEQ ID NO: 239515 - DNA, 20 bp, Artificial Sequence
  Description of Artificial Sequence: Synthetic oligonucleotide
  Target: LAMA2; (-) strand; PAM type: YTN; PAM sequence: TTT
gaaatgatagatatcagcaa

SEQ ID NO: 239516 - DNA, 20 bp, Artificial Sequence
  Description of Artificial Sequence: Synthetic oligonucleotide
  Target: LAMA2; (-) strand; PAM type: YTN; PAM sequence: TTT
tgaaatgatagatatcagca

SEQ ID NO: 239517 - DNA, 20 bp, Artificial Sequence
  Description of Artificial Sequence: Synthetic oligonucleotide
  Target: LAMA2; (-) strand; PAM type: YTN; PAM sequence: TTC
agacattttgaaatgataga

SEQ ID NO: 239518 - DNA, 20 bp, Artificial Sequence
  Description of Artificial Sequence: Synthetic oligonucleotide
  Target: LAMA2; (-) strand; PAM type: YTN; PAM sequence: TTT
cagacattttgaaatgatag

SEQ ID NO: 239519 - DNA, 20 bp, Artificial Sequence
  Description of Artificial Sequence: Synthetic oligonucleotide
  Target: LAMA2; (-) strand; PAM type: YTN; PAM sequence: TTA
aggcagatttcagacatttt

SEQ ID NO: 239520 - DNA, 20 bp, Artificial Sequence
  Description of Artificial Sequence: Synthetic oligonucleotide
  Target: LAMA2; (-) strand; PAM type: YTN; PAM sequence: TTT
aaggcagatttcagacattt

SEQ ID NO: 239521 - DNA, 20 bp, Artificial Sequence
  Description of Artificial Sequence: Synthetic oligonucleotide
  Target: LAMA2; (-) strand; PAM type: YTN; PAM sequence: TTT
taaggcagatttcagacatt

SEQ ID NO: 239522 - DNA, 20 bp, Artificial Sequence
  Description of Artificial Sequence: Synthetic oligonucleotide
  Target: LAMA2; (-) strand; PAM type: YTN; PAM sequence: TTT
ttaaggcagatttcagacat

SEQ ID NO: 239523 - DNA, 20 bp, Artificial Sequence
  Description of Artificial Sequence: Synthetic oligonucleotide
  Target: LAMA2; (-) strand; PAM type: YTN; PAM sequence: CTT
tttaaggcagatttcagaca

SEQ ID NO: 239524 - DNA, 20 bp, Artificial Sequence
  Description of Artificial Sequence: Synthetic oligonucleotide
  Target: LAMA2; (-) strand; PAM type: YTN; PAM sequence: TTA
ctttttaaggcagatttcag

SEQ ID NO: 239525 - DNA, 20 bp, Artificial Sequence
  Description of Artificial Sequence: Synthetic oligonucleotide
  Target: LAMA2; (-) strand; PAM type: YTN; PAM sequence: CTT
actttttaaggcagatttca

SEQ ID NO: 239526 - DNA, 20 bp, Artificial Sequence
  Description of Artificial Sequence: Synthetic oligonucleotide
  Target: LAMA2; (-) strand; PAM type: YTN; PAM sequence: TTG
tgccagcttactttttaagg

SEQ ID NO: 239527 - DNA, 20 bp, Artificial Sequence
  Description of Artificial Sequence: Synthetic oligonucleotide
  Target: LAMA2; (-) strand; PAM type: YTN; PAM sequence: TTT
gtgccagcttactttttaag

SEQ ID NO: 239528 - DNA, 20 bp, Artificial Sequence
  Description of Artificial Sequence: Synthetic oligonucleotide
  Target: LAMA2; (-) strand; PAM type: YTN; PAM sequence: CTG
ccccaagatttgtgccagct

SEQ ID NO: 239529 - DNA, 20 bp, Artificial Sequence
  Description of Artificial Sequence: Synthetic oligonucleotide
  Target: LAMA2; (-) strand; PAM type: YTN; PAM sequence: TTA
ataagcactgccccaagatt

SEQ ID NO: 239530 - DNA, 20 bp, Artificial Sequence
  Description of Artificial Sequence: Synthetic oligonucleotide
  Target: LAMA2; (-) strand; PAM type: YTN; PAM sequence: CTT
aataagcactgccccaagat

SEQ ID NO: 239531 - DNA, 20 bp, Artificial Sequence
  Description of Artificial Sequence: Synthetic oligonucleotide
  Target: LAMA2; (-) strand; PAM type: YTN; PAM sequence: CTA
tgtgggaaccttaataagca

SEQ ID NO: 239532 - DNA, 20 bp, Artificial Sequence
  Description of Artificial Sequence: Synthetic oligonucleotide
  Target: LAMA2; (-) strand; PAM type: YTN; PAM sequence: TTC
tatgtgggaaccttaataag

SEQ ID NO: 239533 - DNA, 20 bp, Artificial Sequence
  Description of Artificial Sequence: Synthetic oligonucleotide
  Target: LAMA2; (-) strand; PAM type: YTN; PAM sequence: CTT
ctatgtgggaaccttaataa

SEQ ID NO: 239534 - DNA, 20 bp, Artificial Sequence
  Description of Artificial Sequence: Synthetic oligonucleotide
  Target: LAMA2; (-) strand; PAM type: YTN; PAM sequence: CTC
agccacttctatgtgggaac

SEQ ID NO: 239535 - DNA, 20 bp, Artificial Sequence
  Description of Artificial Sequence: Synthetic oligonucleotide
  Target: LAMA2; (-) strand; PAM type: YTN; PAM sequence: TTA
caaactcagccacttctatg

SEQ ID NO: 239536 - DNA, 20 bp, Artificial Sequence
  Description of Artificial Sequence: Synthetic oligonucleotide
  Target: LAMA2; (-) strand; PAM type: YTN; PAM sequence: TTT
acaaactcagccacttctat

SEQ ID NO: 239537 - DNA, 20 bp, Artificial Sequence
  Description of Artificial Sequence: Synthetic oligonucleotide
  Target: LAMA2; (-) strand; PAM type: YTN; PAM sequence: CTC
atttacaaactcagccactt

SEQ ID NO: 239538 - DNA, 20 bp, Artificial Sequence
  Description of Artificial Sequence: Synthetic oligonucleotide
  Target: LAMA2; (-) strand; PAM type: YTN; PAM sequence: CTA
tgactcatttacaaactcag

SEQ ID NO: 239539 - DNA, 20 bp, Artificial Sequence
  Description of Artificial Sequence: Synthetic oligonucleotide
  Target: LAMA2; (-) strand; PAM type: YTN; PAM sequence: TTC
tatgactcatttacaaactc

SEQ ID NO: 239540 - DNA, 20 bp, Artificial Sequence
  Description of Artificial Sequence: Synthetic oligonucleotide
  Target: LAMA2; (-) strand; PAM type: YTN; PAM sequence: TTT
ctatgactcatttacaaact

SEQ ID NO: 239541 - DNA, 20 bp, Artificial Sequence
  Description of Artificial Sequence: Synthetic oligonucleotide
  Target: LAMA2; (-) strand; PAM type: YTN; PAM sequence: CTG
aatttctatgactcatttac

SEQ ID NO: 239542 - DNA, 20 bp, Artificial Sequence
  Description of Artificial Sequence: Synthetic oligonucleotide
  Target: LAMA2; (-) strand; PAM type: YTN; PAM sequence: TTG
atactgaatttctatgactc

SEQ ID NO: 239543 - DNA, 20 bp, Artificial Sequence
  Description of Artificial Sequence: Synthetic oligonucleotide
  Target: LAMA2; (-) strand; PAM type: YTN; PAM sequence: TTT
gatactgaatttctatgact

SEQ ID NO: 239544 - DNA, 20 bp, Artificial Sequence
  Description of Artificial Sequence: Synthetic oligonucleotide
  Target: LAMA2; (-) strand; PAM type: YTN; PAM sequence: TTT
tgatactgaatttctatgac

SEQ ID NO: 239545 - DNA, 20 bp, Artificial Sequence
  Description of Artificial Sequence: Synthetic oligonucleotide
  Target: LAMA2; (-) strand; PAM type: YTN; PAM sequence: TTT
ttgatactgaatttctatga

SEQ ID NO: 239546 - DNA, 20 bp, Artificial Sequence
  Description of Artificial Sequence: Synthetic oligonucleotide
  Target: LAMA2; (-) strand; PAM type: YTN; PAM sequence: CTT
tttgatactgaatttctatg

SEQ ID NO: 239547 - DNA, 20 bp, Artificial Sequence
  Description of Artificial Sequence: Synthetic oligonucleotide
  Target: LAMA2; (-) strand; PAM type: YTN; PAM sequence: TTA
actttttgatactgaatttc

SEQ ID NO: 239548 - DNA, 20 bp, Artificial Sequence
  Description of Artificial Sequence: Synthetic oligonucleotide
  Target: LAMA2; (-) strand; PAM type: YTN; PAM sequence: TTA
aattaactttttgatactga

SEQ ID NO: 239549 - DNA, 20 bp, Artificial Sequence
  Description of Artificial Sequence: Synthetic oligonucleotide
  Target: LAMA2; (-) strand; PAM type: YTN; PAM sequence: TTT
aaattaactttttgatactg

SEQ ID NO: 239550 - DNA, 20 bp, Artificial Sequence
  Description of Artificial Sequence: Synthetic oligonucleotide
  Target: LAMA2; (-) strand; PAM type: YTN; PAM sequence: TTT
taaattaactttttgatact

SEQ ID NO: 239551 - DNA, 20 bp, Artificial Sequence
  Description of Artificial Sequence: Synthetic oligonucleotide
  Target: LAMA2; (-) strand; PAM type: YTN; PAM sequence: TTG
ttttaaattaactttttgat

SEQ ID NO: 239552 - DNA, 20 bp, Artificial Sequence
  Description of Artificial Sequence: Synthetic oligonucleotide
  Target: LAMA2; (-) strand; PAM type: YTN; PAM sequence: TTT
gttttaaattaactttttga

SEQ ID NO: 239553 - DNA, 20 bp, Artificial Sequence
  Description of Artificial Sequence: Synthetic oligonucleotide
  Target: LAMA2; (-) strand; PAM type: YTN; PAM sequence: TTA
tatccaagagaataatttgt

SEQ ID NO: 239554 - DNA, 20 bp, Artificial Sequence
  Description of Artificial Sequence: Synthetic oligonucleotide
  Target: LAMA2; (-) strand; PAM type: YTN; PAM sequence: CTT
atatccaagagaataatttg

SEQ ID NO: 239555 - DNA, 20 bp, Artificial Sequence
  Description of Artificial Sequence: Synthetic oligonucleotide
  Target: LAMA2; (-) strand; PAM type: YTN; PAM sequence: CTC
cttatatccaagagaataat

SEQ ID NO: 239556 - DNA, 20 bp, Artificial Sequence
  Description of Artificial Sequence: Synthetic oligonucleotide
  Target: LAMA2; (-) strand; PAM type: YTN; PAM sequence: TTA
agaataaacaaagcagtcct

SEQ ID NO: 239557 - DNA, 20 bp, Artificial Sequence
  Description of Artificial Sequence: Synthetic oligonucleotide
  Target: LAMA2; (-) strand; PAM type: YTN; PAM sequence: TTT
aagaataaacaaagcagtcc

SEQ ID NO: 239558 - DNA, 20 bp, Artificial Sequence
  Description of Artificial Sequence: Synthetic oligonucleotide
  Target: LAMA2; (-) strand; PAM type: YTN; PAM sequence: CTG
agaacatataaggaaaatca

SEQ ID NO: 239559 - DNA, 20 bp, Artificial Sequence
  Description of Artificial Sequence: Synthetic oligonucleotide
  Target: LAMA2; (-) strand; PAM type: YTN; PAM sequence: TTG
agcagaagatagggatgata

SEQ ID NO: 239560 - DNA, 20 bp, Artificial Sequence
  Description of Artificial Sequence: Synthetic oligonucleotide
  Target: LAMA2; (-) strand; PAM type: YTN; PAM sequence: TTA
aacaaacccagattgagcag

SEQ ID NO: 239561 - DNA, 20 bp, Artificial Sequence
  Description of Artificial Sequence: Synthetic oligonucleotide
  Target: LAMA2; (-) strand; PAM type: YTN; PAM sequence: TTT
aaacaaacccagattgagca

SEQ ID NO: 239562 - DNA, 20 bp, Artificial Sequence
  Description of Artificial Sequence: Synthetic oligonucleotide
  Target: LAMA2; (-) strand; PAM type: YTN; PAM sequence: CTT
taaacaaacccagattgagc

SEQ ID NO: 239563 - DNA, 20 bp, Artificial Sequence
  Description of Artificial Sequence: Synthetic oligonucleotide
  Target: LAMA2; (-) strand; PAM type: YTN; PAM sequence: CTG
aataaaaacactttaaacaa

SEQ ID NO: 239564 - DNA, 20 bp, Artificial Sequence
  Description of Artificial Sequence: Synthetic oligonucleotide
  Target: LAMA2; (-) strand; PAM type: YTN; PAM sequence: CTA
tacgcatagtacgagctgaa

SEQ ID NO: 239565 - DNA, 20 bp, Artificial Sequence
  Description of Artificial Sequence: Synthetic oligonucleotide
  Target: LAMA2; (-) strand; PAM type: YTN; PAM sequence: TTC
atgcatagcaaagtgctata

SEQ ID NO: 239566 - DNA, 20 bp, Artificial Sequence
  Description of Artificial Sequence: Synthetic oligonucleotide
  Target: LAMA2; (-) strand; PAM type: YTN; PAM sequence: TTT
catgcatagcaaagtgctat

SEQ ID NO: 239567 - DNA, 20 bp, Artificial Sequence
  Description of Artificial Sequence: Synthetic oligonucleotide
  Target: LAMA2; (-) strand; PAM type: YTN; PAM sequence: TTT
tcatgcatagcaaagtgcta

SEQ ID NO: 239568 - DNA, 20 bp, Artificial Sequence
  Description of Artificial Sequence: Synthetic oligonucleotide
  Target: LAMA2; (-) strand; PAM type: YTN; PAM sequence: TTT
ttcatgcatagcaaagtgct

SEQ ID NO: 239569 - DNA, 20 bp, Artificial Sequence
  Description of Artificial Sequence: Synthetic oligonucleotide
  Target: LAMA2; (-) strand; PAM type: YTN; PAM sequence: TTG
gcagtcatgtttttcatgca

SEQ ID NO: 239570 - DNA, 20 bp, Artificial Sequence
  Description of Artificial Sequence: Synthetic oligonucleotide
  Target: LAMA2; (-) strand; PAM type: YTN; PAM sequence: CTT
ggcagtcatgtttttcatgc

SEQ ID NO: 239571 - DNA, 20 bp, Artificial Sequence
  Description of Artificial Sequence: Synthetic oligonucleotide
  Target: LAMA2; (-) strand; PAM type: YTN; PAM sequence: CTC
ttggcagtcatgtttttcat

SEQ ID NO: 239572 - DNA, 20 bp, Artificial Sequence
  Description of Artificial Sequence: Synthetic oligonucleotide
  Target: LAMA2; (-) strand; PAM type: YTN; PAM sequence: TTC
aaataaatctcttggcagtc

SEQ ID NO: 239573 - DNA, 20 bp, Artificial Sequence
  Description of Artificial Sequence: Synthetic oligonucleotide
  Target: LAMA2; (-) strand; PAM type: YTN; PAM sequence: TTA
agttcaaataaatctcttgg

SEQ ID NO: 239574 - DNA, 20 bp, Artificial Sequence
  Description of Artificial Sequence: Synthetic oligonucleotide
  Target: LAMA2; (-) strand; PAM type: YTN; PAM sequence: TTA
ttaagttcaaataaatctct

SEQ ID NO: 239575 - DNA, 20 bp, Artificial Sequence
  Description of Artificial Sequence: Synthetic oligonucleotide
  Target: LAMA2; (-) strand; PAM type: YTN; PAM sequence: TTT
attaagttcaaataaatctc

SEQ ID NO: 239576 - DNA, 20 bp, Artificial Sequence
  Description of Artificial Sequence: Synthetic oligonucleotide
  Target: LAMA2; (-) strand; PAM type: YTN; PAM sequence: TTC
ataaaatttattaagttcaa

SEQ ID NO: 239577 - DNA, 20 bp, Artificial Sequence
  Description of Artificial Sequence: Synthetic oligonucleotide
  Target: LAMA2; (-) strand; PAM type: YTN; PAM sequence: CTT
cataaaatttattaagttca

SEQ ID NO: 239578 - DNA, 20 bp, Artificial Sequence
  Description of Artificial Sequence: Synthetic oligonucleotide
  Target: LAMA2; (-) strand; PAM type: YTN; PAM sequence: TTA
gcttcataaaatttattaag

SEQ ID NO: 239579 - DNA, 20 bp, Artificial Sequence
  Description of Artificial Sequence: Synthetic oligonucleotide
  Target: LAMA2; (-) strand; PAM type: YTN; PAM sequence: CTG
agcattagcttcataaaatt

SEQ ID NO: 239580 - DNA, 20 bp, Artificial Sequence
  Description of Artificial Sequence: Synthetic oligonucleotide
  Target: LAMA2; (-) strand; PAM type: YTN; PAM sequence: CTG
gtacagcactgagcattagc

SEQ ID NO: 239581 - DNA, 20 bp, Artificial Sequence
  Description of Artificial Sequence: Synthetic oligonucleotide
  Target: LAMA2; (-) strand; PAM type: YTN; PAM sequence: TTC
ctggtacagcactgagcatt

SEQ ID NO: 239582 - DNA, 20 bp, Artificial Sequence
  Description of Artificial Sequence: Synthetic oligonucleotide
  Target: LAMA2; (-) strand; PAM type: YTN; PAM sequence: CTG
agaaaataacatggttcctg

SEQ ID NO: 239583 - DNA, 20 bp, Artificial Sequence
  Description of Artificial Sequence: Synthetic oligonucleotide
  Target: LAMA2; (-) strand; PAM type: YTN; PAM sequence: TTA
tagtctgagaaaataacatg

SEQ ID NO: 239584 - DNA, 20 bp, Artificial Sequence
  Description of Artificial Sequence: Synthetic oligonucleotide
  Target: LAMA2; (-) strand; PAM type: YTN; PAM sequence: TTT
atagtctgagaaaataacat

SEQ ID NO: 239585 - DNA, 20 bp, Artificial Sequence
  Description of Artificial Sequence: Synthetic oligonucleotide
  Target: LAMA2; (-) strand; PAM type: YTN; PAM sequence: CTT
tatagtctgagaaaataaca

SEQ ID NO: 239586 - DNA, 20 bp, Artificial Sequence
  Description of Artificial Sequence: Synthetic oligonucleotide
  Target: LAMA2; (-) strand; PAM type: YTN; PAM sequence: CTA
actttatagtctgagaaaat

SEQ ID NO: 239587 - DNA, 20 bp, Artificial Sequence
  Description of Artificial Sequence: Synthetic oligonucleotide
  Target: LAMA2; (-) strand; PAM type: YTN; PAM sequence: TTA
ctaactttatagtctgagaa

SEQ ID NO: 239588 - DNA, 20 bp, Artificial Sequence
  Description of Artificial Sequence: Synthetic oligonucleotide
  Target: LAMA2; (-) strand; PAM type: YTN; PAM sequence: CTT
actaactttatagtctgaga

SEQ ID NO: 239589 - DNA, 20 bp, Artificial Sequence
  Description of Artificial Sequence: Synthetic oligonucleotide
  Target: LAMA2; (-) strand; PAM type: YTN; PAM sequence: CTG
tcttactaactttatagtct

SEQ ID NO: 239590 - DNA, 20 bp, Artificial Sequence
  Description of Artificial Sequence: Synthetic oligonucleotide
  Target: LAMA2; (-) strand; PAM type: YTN; PAM sequence: TTC
tgtcttactaactttatagt

SEQ ID NO: 239591 - DNA, 20 bp, Artificial Sequence
  Description of Artificial Sequence: Synthetic oligonucleotide
  Target: LAMA2; (-) strand; PAM type: YTN; PAM sequence: TTC
agaggtagaaattctgtctt

SEQ ID NO: 239592 - DNA, 20 bp, Artificial Sequence
  Description of Artificial Sequence: Synthetic oligonucleotide
  Target: LAMA2; (-) strand; PAM type: YTN; PAM sequence: CTA
ttcagaggtagaaattctgt

SEQ ID NO: 239593 - DNA, 20 bp, Artificial Sequence
  Description of Artificial Sequence: Synthetic oligonucleotide
  Target: LAMA2; (-) strand; PAM type: YTN; PAM sequence: CTA
ccataatctattcagaggta

SEQ ID NO: 239594 - DNA, 20 bp, Artificial Sequence
  Description of Artificial Sequence: Synthetic oligonucleotide
  Target: LAMA2; (-) strand; PAM type: YTN; PAM sequence: CTA
tctaccataatctattcaga

SEQ ID NO: 239595 - DNA, 20 bp, Artificial Sequence
  Description of Artificial Sequence: Synthetic oligonucleotide
  Target: LAMA2; (-) strand; PAM type: YTN; PAM sequence: CTA
gctatctaccataatctatt

SEQ ID NO: 239596 - DNA, 20 bp, Artificial Sequence
  Description of Artificial Sequence: Synthetic oligonucleotide
  Target: LAMA2; (-) strand; PAM type: YTN; PAM sequence: CTC
tagctatctaccataatcta

SEQ ID NO: 239597 - DNA, 20 bp, Artificial Sequence
  Description of Artificial Sequence: Synthetic oligonucleotide
  Target: LAMA2; (-) strand; PAM type: YTN; PAM sequence: CTC
tctagctatctaccataatc

SEQ ID NO: 239598 - DNA, 20 bp, Artificial Sequence
  Description of Artificial Sequence: Synthetic oligonucleotide
  Target: LAMA2; (-) strand; PAM type: YTN; PAM sequence: TTC
tctctagctatctaccataa

SEQ ID NO: 239599 - DNA, 20 bp, Artificial Sequence
  Description of Artificial Sequence: Synthetic oligonucleotide
  Target: LAMA2; (-) strand; PAM type: YTN; PAM sequence: TTG
ttctctctagctatctacca

SEQ ID NO: 239600 - DNA, 20 bp, Artificial Sequence
  Description of Artificial Sequence: Synthetic oligonucleotide
  Target: LAMA2; (-) strand; PAM type: YTN; PAM sequence: CTC
aaagattgttctctctagct

SEQ ID NO: 239601 - DNA, 20 bp, Artificial Sequence
  Description of Artificial Sequence: Synthetic oligonucleotide
  Target: LAMA2; (-) strand; PAM type: YTN; PAM sequence: TTG
ctcaaagattgttctctcta

SEQ ID NO: 239602 - DNA, 20 bp, Artificial Sequence
  Description of Artificial Sequence: Synthetic oligonucleotide
  Target: LAMA2; (-) strand; PAM type: YTN; PAM sequence: CTA
tcacaaccacaaaaaagtat

SEQ ID NO: 239603 - DNA, 20 bp, Artificial Sequence
  Description of Artificial Sequence: Synthetic oligonucleotide
  Target: LAMA2; (-) strand; PAM type: YTN; PAM sequence: TTA
ccctatcacaaccacaaaaa

SEQ ID NO: 239604 - DNA, 20 bp, Artificial Sequence
  Description of Artificial Sequence: Synthetic oligonucleotide
  Target: LAMA2; (-) strand; PAM type: YTN; PAM sequence: CTG
tatacattaccctatcacaa

SEQ ID NO: 239605 - DNA, 20 bp, Artificial Sequence
  Description of Artificial Sequence: Synthetic oligonucleotide
  Target: LAMA2; (-) strand; PAM type: YTN; PAM sequence: TTC
gtggccctgtatacattacc

SEQ ID NO: 239606 - DNA, 20 bp, Artificial Sequence
  Description of Artificial Sequence: Synthetic oligonucleotide
  Target: LAMA2; (-) strand; PAM type: YTN; PAM sequence: TTT
cgtggccctgtatacattac

SEQ ID NO: 239607 - DNA, 20 bp, Artificial Sequence
  Description of Artificial Sequence: Synthetic oligonucleotide
  Target: LAMA2; (-) strand; PAM type: YTN; PAM sequence: TTT
tcgtggccctgtatacatta

SEQ ID NO: 239608 - DNA, 20 bp, Artificial Sequence
  Description of Artificial Sequence: Synthetic oligonucleotide
  Target: LAMA2; (-) strand; PAM type: YTN; PAM sequence: CTC
catgtagttttcgtggccct

SEQ ID NO: 239609 - DNA, 20 bp, Artificial Sequence
  Description of Artificial Sequence: Synthetic oligonucleotide
  Target: LAMA2; (-) strand; PAM type: YTN; PAM sequence: CTC
tccatgtagttttcgtggcc

SEQ ID NO: 239610 - DNA, 20 bp, Artificial Sequence
  Description of Artificial Sequence: Synthetic oligonucleotide
  Target: LAMA2; (-) strand; PAM type: YTN; PAM sequence: CTC
tctccatgtagttttcgtgg

SEQ ID NO: 239611 - DNA, 20 bp, Artificial Sequence
  Description of Artificial Sequence: Synthetic oligonucleotide
  Target: LAMA2; (-) strand; PAM type: YTN; PAM sequence: TTC
tctctccatgtagttttcgt

SEQ ID NO: 239612 - DNA, 20 bp, Artificial Sequence
  Description of Artificial Sequence: Synthetic oligonucleotide
  Target: LAMA2; (-) strand; PAM type: YTN; PAM sequence: CTT
ctctctccatgtagttttcg

SEQ ID NO: 239613 - DNA, 20 bp, Artificial Sequence
  Description of Artificial Sequence: Synthetic oligonucleotide
  Target: LAMA2; (-) strand; PAM type: YTN; PAM sequence: CTA
acttctctctccatgtagtt

SEQ ID NO: 239614 - DNA, 20 bp, Artificial Sequence
  Description of Artificial Sequence: Synthetic oligonucleotide
  Target: LAMA2; (-) strand; PAM type: YTN; PAM sequence: TTG
gacaactaacttctctctcc

SEQ ID NO: 239615 - DNA, 20 bp, Artificial Sequence
  Description of Artificial Sequence: Synthetic oligonucleotide
  Target: LAMA2; (-) strand; PAM type: YTN; PAM sequence: CTT
ggacaactaacttctctctc

SEQ ID NO: 239616 - DNA, 20 bp, Artificial Sequence
  Description of Artificial Sequence: Synthetic oligonucleotide
  Target: LAMA2; (-) strand; PAM type: YTN; PAM sequence: TTC
ccttggacaactaacttctc

SEQ ID NO: 239617 - DNA, 20 bp, Artificial Sequence
  Description of Artificial Sequence: Synthetic oligonucleotide
  Target: LAMA2; (-) strand; PAM type: YTN; PAM sequence: TTA
aaaaattcccttggacaact

SEQ ID NO: 239618 - DNA, 20 bp, Artificial Sequence
  Description of Artificial Sequence: Synthetic oligonucleotide
  Target: LAMA2; (-) strand; PAM type: YTN; PAM sequence: TTT
aaaaaattcccttggacaac

SEQ ID NO: 239619 - DNA, 20 bp, Artificial Sequence
  Description of Artificial Sequence: Synthetic oligonucleotide
  Target: LAMA2; (-) strand; PAM type: YTN; PAM sequence: TTT
taaaaaattcccttggacaa

SEQ ID NO: 239620 - DNA, 20 bp, Artificial Sequence
  Description of Artificial Sequence: Synthetic oligonucleotide
  Target: LAMA2; (-) strand; PAM type: YTN; PAM sequence: TTT
ttaaaaaattcccttggaca

SEQ ID NO: 239621 - DNA, 20 bp, Artificial Sequence
  Description of Artificial Sequence: Synthetic oligonucleotide
  Target: LAMA2; (-) strand; PAM type: YTN; PAM sequence: CTT
tttaaaaaattcccttggac

SEQ ID NO: 239622 - DNA, 20 bp, Artificial Sequence
  Description of Artificial Sequence: Synthetic oligonucleotide
  Target: LAMA2; (-) strand; PAM type: YTN; PAM sequence: CTG
aggctttttaaaaaattccc

SEQ ID NO: 239623 - DNA, 20 bp, Artificial Sequence
  Description of Artificial Sequence: Synthetic oligonucleotide
  Target: LAMA2; (-) strand; PAM type: YTN; PAM sequence: TTA
tcaatactgaggctttttaa

SEQ ID NO: 239624 - DNA, 20 bp, Artificial Sequence
  Description of Artificial Sequence: Synthetic oligonucleotide
  Target: LAMA2; (-) strand; PAM type: YTN; PAM sequence: TTA
ttatcaatactgaggctttt

SEQ ID NO: 239625 - DNA, 20 bp, Artificial Sequence
  Description of Artificial Sequence: Synthetic oligonucleotide
  Target: LAMA2; (-) strand; PAM type: YTN; PAM sequence: CTT
attatcaatactgaggcttt

SEQ ID NO: 239626 - DNA, 20 bp, Artificial Sequence
  Description of Artificial Sequence: Synthetic oligonucleotide
  Target: LAMA2; (-) strand; PAM type: YTN; PAM sequence: TTC
ccttattatcaatactgagg

SEQ ID NO: 239627 - DNA, 20 bp, Artificial Sequence
  Description of Artificial Sequence: Synthetic oligonucleotide
  Target: LAMA2; (-) strand; PAM type: YTN; PAM sequence: TTG
aattcccttattatcaatac

SEQ ID NO: 239628 - DNA, 20 bp, Artificial Sequence
  Description of Artificial Sequence: Synthetic oligonucleotide
  Target: LAMA2; (-) strand; PAM type: YTN; PAM sequence: CTT
gaattcccttattatcaata

SEQ ID NO: 239629 - DNA, 20 bp, Artificial Sequence
  Description of Artificial Sequence: Synthetic oligonucleotide
  Target: LAMA2; (-) strand; PAM type: YTN; PAM sequence: TTC
cttgaattcccttattatca

SEQ ID NO: 239630 - DNA, 20 bp, Artificial Sequence
  Description of Artificial Sequence: Synthetic oligonucleotide
  Target: LAMA2; (-) strand; PAM type: YTN; PAM sequence: CTT
ccttgaattcccttattatc

SEQ ID NO: 239631 - DNA, 20 bp, Artificial Sequence
  Description of Artificial Sequence: Synthetic oligonucleotide
  Target: LAMA2; (-) strand; PAM type: YTN; PAM sequence: CTC
ttccttgaattcccttatta

SEQ ID NO: 239632 - DNA, 20 bp, Artificial Sequence
  Description of Artificial Sequence: Synthetic oligonucleotide
  Target: LAMA2; (-) strand; PAM type: YTN; PAM sequence: TTC
ccctcttccttgaattccct

SEQ ID NO: 239633 - DNA, 20 bp, Artificial Sequence
  Description of Artificial Sequence: Synthetic oligonucleotide
  Target: LAMA2; (-) strand; PAM type: YTN; PAM sequence: TTT
cccctcttccttgaattccc

SEQ ID NO: 239634 - DNA, 20 bp, Artificial Sequence
  Description of Artificial Sequence: Synthetic oligonucleotide
  Target: LAMA2; (-) strand; PAM type: YTN; PAM sequence: CTA
catttcccctcttccttgaa

SEQ ID NO: 239635 - DNA, 20 bp, Artificial Sequence
  Description of Artificial Sequence: Synthetic oligonucleotide
  Target: LAMA2; (-) strand; PAM type: YTN; PAM sequence: CTC
tacatttcccctcttccttg

SEQ ID NO: 239636 - DNA, 20 bp, Artificial Sequence
  Description of Artificial Sequence: Synthetic oligonucleotide
  Target: LAMA2; (-) strand; PAM type: YTN; PAM sequence: TTC
tctacatttcccctcttcct

SEQ ID NO: 239637 - DNA, 20 bp, Artificial Sequence
  Description of Artificial Sequence: Synthetic oligonucleotide
  Target: LAMA2; (-) strand; PAM type: YTN; PAM sequence: TTT
ctctacatttcccctcttcc

SEQ ID NO: 239638 - DNA, 20 bp, Artificial Sequence
  Description of Artificial Sequence: Synthetic oligonucleotide
  Target: LAMA2; (-) strand; PAM type: YTN; PAM sequence: TTT
tctctacatttcccctcttc

SEQ ID NO: 239639 - DNA, 20 bp, Artificial Sequence
  Description of Artificial Sequence: Synthetic oligonucleotide
  Target: LAMA2; (-) strand; PAM type: YTN; PAM sequence: CTA
catacgcattttctctacat

SEQ ID NO: 239640 - DNA, 20 bp, Artificial Sequence
  Description of Artificial Sequence: Synthetic oligonucleotide
  Target: LAMA2; (-) strand; PAM type: YTN; PAM sequence: TTC
cctacatacgcattttctct

SEQ ID NO: 239641 - DNA, 20 bp, Artificial Sequence
  Description of Artificial Sequence: Synthetic oligonucleotide
  Target: LAMA2; (-) strand; PAM type: YTN; PAM sequence: TTG
taatattccctacatacgca

SEQ ID NO: 239642 - DNA, 20 bp, Artificial Sequence
  Description of Artificial Sequence: Synthetic oligonucleotide
  Target: LAMA2; (-) strand; PAM type: YTN; PAM sequence: TTT
gtaatattccctacatacgc

SEQ ID NO: 239643 - DNA, 20 bp, Artificial Sequence
  Description of Artificial Sequence: Synthetic oligonucleotide
  Target: LAMA2; (-) strand; PAM type: YTN; PAM sequence: TTC
caggaaacagatttgtaata

SEQ ID NO: 239644 - DNA, 20 bp, Artificial Sequence
  Description of Artificial Sequence: Synthetic oligonucleotide
  Target: LAMA2; (-) strand; PAM type: YTN; PAM sequence: TTT
ccaggaaacagatttgtaat

SEQ ID NO: 239645 - DNA, 20 bp, Artificial Sequence
  Description of Artificial Sequence: Synthetic oligonucleotide
  Target: LAMA2; (-) strand; PAM type: YTN; PAM sequence: CTT
tccaggaaacagatttgtaa

SEQ ID NO: 239646 - DNA, 20 bp, Artificial Sequence
  Description of Artificial Sequence: Synthetic oligonucleotide
  Target: LAMA2; (-) strand; PAM type: YTN; PAM sequence: CTG
ctttccaggaaacagatttg

SEQ ID NO: 239647 - DNA, 20 bp, Artificial Sequence
  Description of Artificial Sequence: Synthetic oligonucleotide
  Target: LAMA2; (-) strand; PAM type: YTN; PAM sequence: CTA
aaggaaggcatcctgctttc

SEQ ID NO: 239648 - DNA, 20 bp, Artificial Sequence
  Description of Artificial Sequence: Synthetic oligonucleotide
  Target: LAMA2; (-) strand; PAM type: YTN; PAM sequence: TTC
taaaggaaggcatcctgctt

SEQ ID NO: 239649 - DNA, 20 bp, Artificial Sequence
  Description of Artificial Sequence: Synthetic oligonucleotide
  Target: LAMA2; (-) strand; PAM type: YTN; PAM sequence: CTA
ataattctaaaggaaggcat

SEQ ID NO: 239650 - DNA, 20 bp, Artificial Sequence
  Description of Artificial Sequence: Synthetic oligonucleotide
  Target: LAMA2; (-) strand; PAM type: YTN; PAM sequence: TTA
actaataattctaaaggaag

SEQ ID NO: 239651 - DNA, 20 bp, Artificial Sequence
  Description of Artificial Sequence: Synthetic oligonucleotide
  Target: LAMA2; (-) strand; PAM type: YTN; PAM sequence: CTT
aactaataattctaaaggaa

SEQ ID NO: 239652 - DNA, 20 bp, Artificial Sequence
  Description of Artificial Sequence: Synthetic oligonucleotide
  Target: LAMA2; (-) strand; PAM type: YTN; PAM sequence: TTA
atcttaactaataattctaa

SEQ ID NO: 239653 - DNA, 20 bp, Artificial Sequence
  Description of Artificial Sequence: Synthetic oligonucleotide
  Target: LAMA2; (-) strand; PAM type: YTN; PAM sequence: TTA
aagagtggttaatcttaact

SEQ ID NO: 239654 - DNA, 20 bp, Artificial Sequence
  Description of Artificial Sequence: Synthetic oligonucleotide
  Target: LAMA2; (-) strand; PAM type: YTN; PAM sequence: TTT
aaagagtggttaatcttaac

SEQ ID NO: 239655 - DNA, 20 bp, Artificial Sequence
  Description of Artificial Sequence: Synthetic oligonucleotide
  Target: LAMA2; (-) strand; PAM type: YTN; PAM sequence: CTC
aatttaaagagtggttaatc

SEQ ID NO: 239656 - DNA, 20 bp, Artificial Sequence
  Description of Artificial Sequence: Synthetic oligonucleotide
  Target: LAMA2; (-) strand; PAM type: YTN; PAM sequence: CTC
tcaatttaaagagtggttaa

SEQ ID NO: 239657 - DNA, 20 bp, Artificial Sequence
  Description of Artificial Sequence: Synthetic oligonucleotide
  Target: LAMA2; (-) strand; PAM type: YTN; PAM sequence: CTG
accatataatgaaaaacagg

SEQ ID NO: 239658 - DNA, 20 bp, Artificial Sequence
  Description of Artificial Sequence: Synthetic oligonucleotide
  Target: LAMA2; (-) strand; PAM type: YTN; PAM sequence: CTC
aggccagtgaaagctgacca

SEQ ID NO: 239659 - DNA, 20 bp, Artificial Sequence
  Description of Artificial Sequence: Synthetic oligonucleotide
  Target: LAMA2; (-) strand; PAM type: YTN; PAM sequence: TTA
aaatgtggactcaggccagt

SEQ ID NO: 239660 - DNA, 20 bp, Artificial Sequence
  Description of Artificial Sequence: Synthetic oligonucleotide
  Target: LAMA2; (-) strand; PAM type: YTN; PAM sequence: CTT
aaaatgtggactcaggccag

SEQ ID NO: 239661 - DNA, 20 bp, Artificial Sequence
  Description of Artificial Sequence: Synthetic oligonucleotide
  Target: LAMA2; (-) strand; PAM type: YTN; PAM sequence: TTG
agcttaaaatgtggactcag

SEQ ID NO: 239662 - DNA, 20 bp, Artificial Sequence
  Description of Artificial Sequence: Synthetic oligonucleotide
  Target: LAMA2; (-) strand; PAM type: YTN; PAM sequence: TTG
tatatagttgagcttaaaat

SEQ ID NO: 239663 - DNA, 20 bp, Artificial Sequence
  Description of Artificial Sequence: Synthetic oligonucleotide
  Target: LAMA2; (-) strand; PAM type: YTN; PAM sequence: TTT
gtatatagttgagcttaaaa

SEQ ID NO: 239664 - DNA, 20 bp, Artificial Sequence
  Description of Artificial Sequence: Synthetic oligonucleotide
  Target: LAMA2; (-) strand; PAM type: YTN; PAM sequence: TTA
tttgtatatagttgagctta

SEQ ID NO: 239665 - DNA, 20 bp, Artificial Sequence
  Description of Artificial Sequence: Synthetic oligonucleotide
  Target: LAMA2; (-) strand; PAM type: YTN; PAM sequence: CTG
aaaaattatttgtatatagt

SEQ ID NO: 239666 - DNA, 20 bp, Artificial Sequence
  Description of Artificial Sequence: Synthetic oligonucleotide
  Target: LAMA2; (-) strand; PAM type: YTN; PAM sequence: CTC
agtatactgaaaaattattt

SEQ ID NO: 239667 - DNA, 20 bp, Artificial Sequence
  Description of Artificial Sequence: Synthetic oligonucleotide
  Target: LAMA2; (-) strand; PAM type: YTN; PAM sequence: CTC
tcagtatactgaaaaattat

SEQ ID NO: 239668 - DNA, 20 bp, Artificial Sequence
  Description of Artificial Sequence: Synthetic oligonucleotide
  Target: LAMA2; (-) strand; PAM type: YTN; PAM sequence: CTA
ctctcagtatactgaaaaat

SEQ ID NO: 239669 - DNA, 20 bp, Artificial Sequence
  Description of Artificial Sequence: Synthetic oligonucleotide
  Target: LAMA2; (-) strand; PAM type: YTN; PAM sequence: TTA
atcctactctcagtatactg

SEQ ID NO: 239670 - DNA, 20 bp, Artificial Sequence
  Description of Artificial Sequence: Synthetic oligonucleotide
  Target: LAMA2; (-) strand; PAM type: YTN; PAM sequence: TTC
attaatcctactctcagtat

SEQ ID NO: 239671 - DNA, 20 bp, Artificial Sequence
  Description of Artificial Sequence: Synthetic oligonucleotide
  Target: LAMA2; (-) strand; PAM type: YTN; PAM sequence: TTT
cattaatcctactctcagta

SEQ ID NO: 239672 - DNA, 20 bp, Artificial Sequence
  Description of Artificial Sequence: Synthetic oligonucleotide
  Target: LAMA2; (-) strand; PAM type: YTN; PAM sequence: CTG
gtttcattaatcctactctc

SEQ ID NO: 239673 - DNA, 20 bp, Artificial Sequence
  Description of Artificial Sequence: Synthetic oligonucleotide
  Target: LAMA2; (-) strand; PAM type: YTN; PAM sequence: CTC
cagactggtttcattaatcc

SEQ ID NO: 239674 - DNA, 20 bp, Artificial Sequence
  Description of Artificial Sequence: Synthetic oligonucleotide
  Target: LAMA2; (-) strand; PAM type: YTN; PAM sequence: CTC
tccagactggtttcattaat

SEQ ID NO: 239675 - DNA, 20 bp, Artificial Sequence
  Description of Artificial Sequence: Synthetic oligonucleotide
  Target: LAMA2; (-) strand; PAM type: YTN; PAM sequence: CTG
ctctccagactggtttcatt

SEQ ID NO: 239676 - DNA, 20 bp, Artificial Sequence
  Description of Artificial Sequence: Synthetic oligonucleotide
  Target: LAMA2; (-) strand; PAM type: YTN; PAM sequence: CTG
tgactgctctccagactggt

SEQ ID NO: 239677 - DNA, 20 bp, Artificial Sequence
  Description of Artificial Sequence: Synthetic oligonucleotide
  Target: LAMA2; (-) strand; PAM type: YTN; PAM sequence: TTC
tgtgactgctctccagactg

SEQ ID NO: 239678 - DNA, 20 bp, Artificial Sequence
  Description of Artificial Sequence: Synthetic oligonucleotide
  Target: LAMA2; (-) strand; PAM type: YTN; PAM sequence: CTC
attctgtgactgctctccag

SEQ ID NO: 239679 - DNA, 20 bp, Artificial Sequence
  Description of Artificial Sequence: Synthetic oligonucleotide
  Target: LAMA2; (-) strand; PAM type: YTN; PAM sequence: TTC
tcattctgtgactgctctcc

SEQ ID NO: 239680 - DNA, 20 bp, Artificial Sequence
  Description of Artificial Sequence: Synthetic oligonucleotide
  Target: LAMA2; (-) strand; PAM type: YTN; PAM sequence: CTA
ttctcattctgtgactgctc

SEQ ID NO: 239681 - DNA, 20 bp, Artificial Sequence
  Description of Artificial Sequence: Synthetic oligonucleotide
  Target: LAMA2; (-) strand; PAM type: YTN; PAM sequence: CTA
tgggaaagatctattctcat

SEQ ID NO: 239682 - DNA, 20 bp, Artificial Sequence
  Description of Artificial Sequence: Synthetic oligonucleotide
  Target: LAMA2; (-) strand; PAM type: YTN; PAM sequence: TTA
gtcacatagtgatactatgg

SEQ ID NO: 239683 - DNA, 20 bp, Artificial Sequence
  Description of Artificial Sequence: Synthetic oligonucleotide
  Target: LAMA2; (-) strand; PAM type: YTN; PAM sequence: CTG
taacacatcagtacaatcag

SEQ ID NO: 239684 - DNA, 20 bp, Artificial Sequence
  Description of Artificial Sequence: Synthetic oligonucleotide
  Target: LAMA2; (-) strand; PAM type: YTN; PAM sequence: TTC
tgtaacacatcagtacaatc

SEQ ID NO: 239685 - DNA, 20 bp, Artificial Sequence
  Description of Artificial Sequence: Synthetic oligonucleotide
  Target: LAMA2; (-) strand; PAM type: YTN; PAM sequence: TTT
ctgtaacacatcagtacaat

SEQ ID NO: 239686 - DNA, 20 bp, Artificial Sequence
  Description of Artificial Sequence: Synthetic oligonucleotide
  Target: LAMA2; (-) strand; PAM type: YTN; PAM sequence: TTT
tctgtaacacatcagtacaa

SEQ ID NO: 239687 - DNA, 20 bp, Artificial Sequence
  Description of Artificial Sequence: Synthetic oligonucleotide
  Target: LAMA2; (-) strand; PAM type: YTN; PAM sequence: TTA
cagtgttttctgtaacacat

SEQ ID NO: 239688 - DNA, 20 bp, Artificial Sequence
  Description of Artificial Sequence: Synthetic oligonucleotide
  Target: LAMA2; (-) strand; PAM type: YTN; PAM sequence: TTT
acagtgttttctgtaacaca

SEQ ID NO: 239689 - DNA, 20 bp, Artificial Sequence
  Description of Artificial Sequence: Synthetic oligonucleotide
  Target: LAMA2; (-) strand; PAM type: YTN; PAM sequence: TTT
tacagtgttttctgtaacac

SEQ ID NO: 239690 - DNA, 20 bp, Artificial Sequence
  Description of Artificial Sequence: Synthetic oligonucleotide
  Target: LAMA2; (-) strand; PAM type: YTN; PAM sequence: TTT
ttacagtgttttctgtaaca

SEQ ID NO: 239691 - DNA, 20 bp, Artificial Sequence
  Description of Artificial Sequence: Synthetic oligonucleotide
  Target: LAMA2; (-) strand; PAM type: YTN; PAM sequence: CTT
tttacagtgttttctgtaac

SEQ ID NO: 239692 - DNA, 20 bp, Artificial Sequence
  Description of Artificial Sequence: Synthetic oligonucleotide
  Target: LAMA2; (-) strand; PAM type: YTN; PAM sequence: TTA
actttttacagtgttttctg

SEQ ID NO: 239693 - DNA, 20 bp, Artificial Sequence
  Description of Artificial Sequence: Synthetic oligonucleotide
  Target: LAMA2; (-) strand; PAM type: YTN; PAM sequence: CTG
gttaactttttacagtgttt

SEQ ID NO: 239694 - DNA, 20 bp, Artificial Sequence
  Description of Artificial Sequence: Synthetic oligonucleotide
  Target: LAMA2; (-) strand; PAM type: YTN; PAM sequence: CTC
tggttaactttttacagtgt

SEQ ID NO: 239695 - DNA, 20 bp, Artificial Sequence
  Description of Artificial Sequence: Synthetic oligonucleotide
  Target: LAMA2; (-) strand; PAM type: YTN; PAM sequence: TTC
ctctggttaactttttacag

SEQ ID NO: 239696 - DNA, 20 bp, Artificial Sequence
  Description of Artificial Sequence: Synthetic oligonucleotide
  Target: LAMA2; (-) strand; PAM type: YTN; PAM sequence: TTT
cctctggttaactttttaca

SEQ ID NO: 239697 - DNA, 20 bp, Artificial Sequence
  Description of Artificial Sequence: Synthetic oligonucleotide
  Target: LAMA2; (-) strand; PAM type: YTN; PAM sequence: TTT
tcctctggttaactttttac

SEQ ID NO: 239698 - DNA, 20 bp, Artificial Sequence
  Description of Artificial Sequence: Synthetic oligonucleotide
  Target: LAMA2; (-) strand; PAM type: YTN; PAM sequence: CTG
gggtaaagatcagataaagt

SEQ ID NO: 239699 - DNA, 20 bp, Artificial Sequence
  Description of Artificial Sequence: Synthetic oligonucleotide
  Target: LAMA2; (-) strand; PAM type: YTN; PAM sequence: TTG
acaggtagagaaactggggt

SEQ ID NO: 239700 - DNA, 20 bp, Artificial Sequence
  Description of Artificial Sequence: Synthetic oligonucleotide
  Target: LAMA2; (-) strand; PAM type: YTN; PAM sequence: TTT
gacaggtagagaaactgggg

SEQ ID NO: 239701 - DNA, 20 bp, Artificial Sequence
  Description of Artificial Sequence: Synthetic oligonucleotide
  Target: LAMA2; (-) strand; PAM type: YTN; PAM sequence: TTG
aggcaagcataggaatttga

SEQ ID NO: 239702 - DNA, 20 bp, Artificial Sequence
  Description of Artificial Sequence: Synthetic oligonucleotide
  Target: LAMA2; (-) strand; PAM type: YTN; PAM sequence: TTT
gaggcaagcataggaatttg

SEQ ID NO: 239703 - DNA, 20 bp, Artificial Sequence
  Description of Artificial Sequence: Synthetic oligonucleotide
  Target: LAMA2; (-) strand; PAM type: YTN; PAM sequence: TTA
aaaatatgtacatttgaggc

SEQ ID NO: 239704 - DNA, 20 bp, Artificial Sequence
  Description of Artificial Sequence: Synthetic oligonucleotide
  Target: LAMA2; (-) strand; PAM type: YTN; PAM sequence: TTC
agattaaaaatatgtacatt

SEQ ID NO: 239705 - DNA, 20 bp, Artificial Sequence
  Description of Artificial Sequence: Synthetic oligonucleotide
  Target: LAMA2; (-) strand; PAM type: YTN; PAM sequence: TTT
cagattaaaaatatgtacat

SEQ ID NO: 239706 - DNA, 20 bp, Artificial Sequence
  Description of Artificial Sequence: Synthetic oligonucleotide
  Target: LAMA2; (-) strand; PAM type: YTN; PAM sequence: TTC
acatttcagattaaaaatat

SEQ ID NO: 239707 - DNA, 20 bp, Artificial Sequence
  Description of Artificial Sequence: Synthetic oligonucleotide
  Target: LAMA2; (-) strand; PAM type: YTN; PAM sequence: TTT
cacatttcagattaaaaata

SEQ ID NO: 239708 - DNA, 20 bp, Artificial Sequence
  Description of Artificial Sequence: Synthetic oligonucleotide
  Target: LAMA2; (-) strand; PAM type: YTN; PAM sequence: TTT
tcacatttcagattaaaaat

SEQ ID NO: 239709 - DNA, 20 bp, Artificial Sequence
  Description of Artificial Sequence: Synthetic oligonucleotide
  Target: LAMA2; (-) strand; PAM type: YTN; PAM sequence: CTT
ttcacatttcagattaaaaa

SEQ ID NO: 239710 - DNA, 20 bp, Artificial Sequence
  Description of Artificial Sequence: Synthetic oligonucleotide
  Target: LAMA2; (-) strand; PAM type: YTN; PAM sequence: TTA
taaatacttttcacatttca

SEQ ID NO: 239711 - DNA, 20 bp, Artificial Sequence
  Description of Artificial Sequence: Synthetic oligonucleotide
  Target: LAMA2; (-) strand; PAM type: YTN; PAM sequence: TTA
caccagttataaatactttt

SEQ ID NO: 239712 - DNA, 20 bp, Artificial Sequence
  Description of Artificial Sequence: Synthetic oligonucleotide
  Target: LAMA2; (-) strand; PAM type: YTN; PAM sequence: TTG
atattacaccagttataaat

SEQ ID NO: 239713 - DNA, 20 bp, Artificial Sequence
  Description of Artificial Sequence: Synthetic oligonucleotide
  Target: LAMA2; (-) strand; PAM type: YTN; PAM sequence: TTA
atgcatggatgtataataga

SEQ ID NO: 239714 - DNA, 20 bp, Artificial Sequence
  Description of Artificial Sequence: Synthetic oligonucleotide
  Target: LAMA2; (-) strand; PAM type: YTN; PAM sequence: TTA
aagacattaatgcatggatg

SEQ ID NO: 239715 - DNA, 20 bp, Artificial Sequence
  Description of Artificial Sequence: Synthetic oligonucleotide
  Target: LAMA2; (-) strand; PAM type: YTN; PAM sequence: TTC
atggtaaaattaaagacatt

SEQ ID NO: 239716 - DNA, 20 bp, Artificial Sequence
  Description of Artificial Sequence: Synthetic oligonucleotide
  Target: LAMA2; (-) strand; PAM type: YTN; PAM sequence: TTT
catggtaaaattaaagacat

SEQ ID NO: 239717 - DNA, 20 bp, Artificial Sequence
  Description of Artificial Sequence: Synthetic oligonucleotide
  Target: LAMA2; (-) strand; PAM type: YTN; PAM sequence: TTA
atttcatggtaaaattaaag

SEQ ID NO: 239718 - DNA, 20 bp, Artificial Sequence
  Description of Artificial Sequence: Synthetic oligonucleotide
  Target: LAMA2; (-) strand; PAM type: YTN; PAM sequence: TTT
aatttcatggtaaaattaaa

SEQ ID NO: 239719 - DNA, 20 bp, Artificial Sequence
  Description of Artificial Sequence: Synthetic oligonucleotide
  Target: LAMA2; (-) strand; PAM type: YTN; PAM sequence: TTC
atttaatttcatggtaaaat

SEQ ID NO: 239720 - DNA, 20 bp, Artificial Sequence
  Description of Artificial Sequence: Synthetic oligonucleotide
  Target: LAMA2; (-) strand; PAM type: YTN; PAM sequence: CTT
catttaatttcatggtaaaa

SEQ ID NO: 239721 - DNA, 20 bp, Artificial Sequence
  Description of Artificial Sequence: Synthetic oligonucleotide
  Target: LAMA2; (-) strand; PAM type: YTN; PAM sequence: TTG
aggtacttcatttaatttca

SEQ ID NO: 239722 - DNA, 20 bp, Artificial Sequence
  Description of Artificial Sequence: Synthetic oligonucleotide
  Target: LAMA2; (-) strand; PAM type: YTN; PAM sequence: TTA
ttgaggtacttcatttaatt

SEQ ID NO: 239723 - DNA, 20 bp, Artificial Sequence
  Description of Artificial Sequence: Synthetic oligonucleotide
  Target: LAMA2; (-) strand; PAM type: YTN; PAM sequence: CTG
ttattgaggtacttcattta

SEQ ID NO: 239724 - DNA, 20 bp, Artificial Sequence
  Description of Artificial Sequence: Synthetic oligonucleotide
  Target: LAMA2; (-) strand; PAM type: YTN; PAM sequence: TTC
tgttattgaggtacttcatt

SEQ ID NO: 239725 - DNA, 20 bp, Artificial Sequence
  Description of Artificial Sequence: Synthetic oligonucleotide
  Target: LAMA2; (-) strand; PAM type: YTN; PAM sequence: CTG
ttctgttattgaggtacttc

SEQ ID NO: 239726 - DNA, 20 bp, Artificial Sequence
  Description of Artificial Sequence: Synthetic oligonucleotide
  Target: LAMA2; (-) strand; PAM type: YTN; PAM sequence: TTC
actgttctgttattgaggta

SEQ ID NO: 239727 - DNA, 20 bp, Artificial Sequence
  Description of Artificial Sequence: Synthetic oligonucleotide
  Target: LAMA2; (-) strand; PAM type: YTN; PAM sequence: TTA
aagttcactgttctgttatt

SEQ ID NO: 239728 - DNA, 20 bp, Artificial Sequence
  Description of Artificial Sequence: Synthetic oligonucleotide
  Target: LAMA2; (-) strand; PAM type: YTN; PAM sequence: TTT
aaagttcactgttctgttat

SEQ ID NO: 239729 - DNA, 20 bp, Artificial Sequence
  Description of Artificial Sequence: Synthetic oligonucleotide
  Target: LAMA2; (-) strand; PAM type: YTN; PAM sequence: TTC
atttaaagttcactgttctg

SEQ ID NO: 239730 - DNA, 20 bp, Artificial Sequence
  Description of Artificial Sequence: Synthetic oligonucleotide
  Target: LAMA2; (-) strand; PAM type: YTN; PAM sequence: CTT
catttaaagttcactgttct

SEQ ID NO: 239731 - DNA, 20 bp, Artificial Sequence
  Description of Artificial Sequence: Synthetic oligonucleotide
  Target: LAMA2; (-) strand; PAM type: YTN; PAM sequence: CTA
cttcatttaaagttcactgt

SEQ ID NO: 239732 - DNA, 20 bp, Artificial Sequence
  Description of Artificial Sequence: Synthetic oligonucleotide
  Target: LAMA2; (-) strand; PAM type: YTN; PAM sequence: TTG
agctacttcatttaaagttc

SEQ ID NO: 239733 - DNA, 20 bp, Artificial Sequence
  Description of Artificial Sequence: Synthetic oligonucleotide
  Target: LAMA2; (-) strand; PAM type: YTN; PAM sequence: TTA
ttgagctacttcatttaaag

SEQ ID NO: 239734 - DNA, 20 bp, Artificial Sequence
  Description of Artificial Sequence: Synthetic oligonucleotide
  Target: LAMA2; (-) strand; PAM type: YTN; PAM sequence: CTG
ttattgagctacttcattta

SEQ ID NO: 239735 - DNA, 20 bp, Artificial Sequence
  Description of Artificial Sequence: Synthetic oligonucleotide
  Target: LAMA2; (-) strand; PAM type: YTN; PAM sequence: TTC
tgttattgagctacttcatt

SEQ ID NO: 239736 - DNA, 20 bp, Artificial Sequence
  Description of Artificial Sequence: Synthetic oligonucleotide
  Target: LAMA2; (-) strand; PAM type: YTN; PAM sequence: CTG
ttctgttattgagctacttc

SEQ ID NO: 239737 - DNA, 20 bp, Artificial Sequence
  Description of Artificial Sequence: Synthetic oligonucleotide
  Target: LAMA2; (-) strand; PAM type: YTN; PAM sequence: TTC
actgttctgttattgagcta

SEQ ID NO: 239738 - DNA, 20 bp, Artificial Sequence
  Description of Artificial Sequence: Synthetic oligonucleotide
  Target: LAMA2; (-) strand; PAM type: YTN; PAM sequence: TTA
ggttcactgttctgttattg

SEQ ID NO: 239739 - DNA, 20 bp, Artificial Sequence
  Description of Artificial Sequence: Synthetic oligonucleotide
  Target: LAMA2; (-) strand; PAM type: YTN; PAM sequence: CTA
aaatggggccagttaggttc

SEQ ID NO: 239740 - DNA, 20 bp, Artificial Sequence
  Description of Artificial Sequence: Synthetic oligonucleotide
  Target: LAMA2; (-) strand; PAM type: YTN; PAM sequence: TTG
actaaaatggggccagttag

SEQ ID NO: 239741 - DNA, 20 bp, Artificial Sequence
  Description of Artificial Sequence: Synthetic oligonucleotide
  Target: LAMA2; (-) strand; PAM type: YTN; PAM sequence: TTA
gattgactaaaatggggcca

SEQ ID NO: 239742 - DNA, 20 bp, Artificial Sequence
  Description of Artificial Sequence: Synthetic oligonucleotide
  Target: LAMA2; (-) strand; PAM type: YTN; PAM sequence: CTG
tgcaggaatgcattagattg

SEQ ID NO: 239743 - DNA, 20 bp, Artificial Sequence
  Description of Artificial Sequence: Synthetic oligonucleotide
  Target: LAMA2; (-) strand; PAM type: YTN; PAM sequence: TTG
agtgtagagtaaatgtcatg

SEQ ID NO: 239744 - DNA, 20 bp, Artificial Sequence
  Description of Artificial Sequence: Synthetic oligonucleotide
  Target: LAMA2; (-) strand; PAM type: YTN; PAM sequence: TTC
atgtaggttgagtgtagagt

SEQ ID NO: 239745 - DNA, 20 bp, Artificial Sequence
  Description of Artificial Sequence: Synthetic oligonucleotide
  Target: LAMA2; (-) strand; PAM type: YTN; PAM sequence: CTT
catgtaggttgagtgtagag

SEQ ID NO: 239746 - DNA, 20 bp, Artificial Sequence
  Description of Artificial Sequence: Synthetic oligonucleotide
  Target: LAMA2; (-) strand; PAM type: YTN; PAM sequence: TTG
atcttcatgtaggttgagtg

SEQ ID NO: 239747 - DNA, 20 bp, Artificial Sequence
  Description of Artificial Sequence: Synthetic oligonucleotide
  Target: LAMA2; (-) strand; PAM type: YTN; PAM sequence: CTA
tgttgatcttcatgtaggtt

SEQ ID NO: 239748 - DNA, 20 bp, Artificial Sequence
  Description of Artificial Sequence: Synthetic oligonucleotide
  Target: LAMA2; (-) strand; PAM type: YTN; PAM sequence: CTC
gtaaaagtgactatgttgat

SEQ ID NO: 239749 - DNA, 20 bp, Artificial Sequence
  Description of Artificial Sequence: Synthetic oligonucleotide
  Target: LAMA2; (-) strand; PAM type: YTN; PAM sequence: CTC
tcgtaaaagtgactatgttg

SEQ ID NO: 239750 - DNA, 20 bp, Artificial Sequence
  Description of Artificial Sequence: Synthetic oligonucleotide
  Target: LAMA2; (-) strand; PAM type: YTN; PAM sequence: CTA
ctctcgtaaaagtgactatg

SEQ ID NO: 239751 - DNA, 20 bp, Artificial Sequence
  Description of Artificial Sequence: Synthetic oligonucleotide
  Target: LAMA2; (-) strand; PAM type: YTN; PAM sequence: TTG
gatggatgcaaatctactct

SEQ ID NO: 239752 - DNA, 20 bp, Artificial Sequence
  Description of Artificial Sequence: Synthetic oligonucleotide
  Target: LAMA2; (-) strand; PAM type: YTN; PAM sequence: TTA
ttggatggatgcaaatctac

SEQ ID NO: 239753 - DNA, 20 bp, Artificial Sequence
  Description of Artificial Sequence: Synthetic oligonucleotide
  Target: LAMA2; (-) strand; PAM type: YTN; PAM sequence: CTG
gtgagaaagattattggatg

SEQ ID NO: 239754 - DNA, 20 bp, Artificial Sequence
  Description of Artificial Sequence: Synthetic oligonucleotide
  Target: LAMA2; (-) strand; PAM type: YTN; PAM sequence: TTA
cactggtgagaaagattatt

SEQ ID NO: 239755 - DNA, 20 bp, Artificial Sequence
  Description of Artificial Sequence: Synthetic oligonucleotide
  Target: LAMA2; (-) strand; PAM type: YTN; PAM sequence: CTA
attacactggtgagaaagat

SEQ ID NO: 239756 - DNA, 20 bp, Artificial Sequence
  Description of Artificial Sequence: Synthetic oligonucleotide
  Target: LAMA2; (-) strand; PAM type: YTN; PAM sequence: TTC
taattacactggtgagaaag

SEQ ID NO: 239757 - DNA, 20 bp, Artificial Sequence
  Description of Artificial Sequence: Synthetic oligonucleotide
  Target: LAMA2; (-) strand; PAM type: YTN; PAM sequence: TTT
ctaattacactggtgagaaa

SEQ ID NO: 239758 - DNA, 20 bp, Artificial Sequence
  Description of Artificial Sequence: Synthetic oligonucleotide
  Target: LAMA2; (-) strand; PAM type: YTN; PAM sequence: CTT
tctaattacactggtgagaa

SEQ ID NO: 239759 - DNA, 20 bp, Artificial Sequence
  Description of Artificial Sequence: Synthetic oligonucleotide
  Target: LAMA2; (-) strand; PAM type: YTN; PAM sequence: CTG
tatcctttctaattacactg

SEQ ID NO: 239760 - DNA, 20 bp, Artificial Sequence
  Description of Artificial Sequence: Synthetic oligonucleotide
  Target: LAMA2; (-) strand; PAM type: YTN; PAM sequence: TTA
agctgtatcctttctaatta

SEQ ID NO: 239761 - DNA, 20 bp, Artificial Sequence
  Description of Artificial Sequence: Synthetic oligonucleotide
  Target: LAMA2; (-) strand; PAM type: YTN; PAM sequence: CTA
tgtgttaagctgtatccttt

SEQ ID NO: 239762 - DNA, 20 bp, Artificial Sequence
  Description of Artificial Sequence: Synthetic oligonucleotide
  Target: LAMA2; (-) strand; PAM type: YTN; PAM sequence: CTC
aaaagctatgtgttaagctg

SEQ ID NO: 239763 - DNA, 20 bp, Artificial Sequence
  Description of Artificial Sequence: Synthetic oligonucleotide
  Target: LAMA2; (-) strand; PAM type: YTN; PAM sequence: CTG
ctcaaaagctatgtgttaag

SEQ ID NO: 239764 - DNA, 20 bp, Artificial Sequence
  Description of Artificial Sequence: Synthetic oligonucleotide
  Target: LAMA2; (-) strand; PAM type: YTN; PAM sequence: TTA
aaaatctgctcaaaagctat

SEQ ID NO: 239765 - DNA, 20 bp, Artificial Sequence
  Description of Artificial Sequence: Synthetic oligonucleotide
  Target: LAMA2; (-) strand; PAM type: YTN; PAM sequence: TTT
aaaaatctgctcaaaagcta

SEQ ID NO: 239766 - DNA, 20 bp, Artificial Sequence
  Description of Artificial Sequence: Synthetic oligonucleotide
  Target: LAMA2; (-) strand; PAM type: YTN; PAM sequence: TTT
taaaaatctgctcaaaagct

SEQ ID NO: 239767 - DNA, 20 bp, Artificial Sequence
  Description of Artificial Sequence: Synthetic oligonucleotide
  Target: LAMA2; (-) strand; PAM type: YTN; PAM sequence: TTT
ttaaaaatctgctcaaaagc

SEQ ID NO: 239768 - DNA, 20 bp, Artificial Sequence
  Description of Artificial Sequence: Synthetic oligonucleotide
  Target: LAMA2; (-) strand; PAM type: YTN; PAM sequence: TTA
acgtataatgatatttttaa

SEQ ID NO: 239769 - DNA, 20 bp, Artificial Sequence
  Description of Artificial Sequence: Synthetic oligonucleotide
  Target: LAMA2; (-) strand; PAM type: YTN; PAM sequence: TTT
aacgtataatgatattttta

SEQ ID NO: 239770 - DNA, 20 bp, Artificial Sequence
  Description of Artificial Sequence: Synthetic oligonucleotide
  Target: LAMA2; (-) strand; PAM type: YTN; PAM sequence: CTA
tatttaacgtataatgatat

SEQ ID NO: 239771 - DNA, 20 bp, Artificial Sequence
  Description of Artificial Sequence: Synthetic oligonucleotide
  Target: LAMA2; (-) strand; PAM type: YTN; PAM sequence: CTC
aactatatttaacgtataat

SEQ ID NO: 239772 - DNA, 20 bp, Artificial Sequence
  Description of Artificial Sequence: Synthetic oligonucleotide
  Target: LAMA2; (-) strand; PAM type: YTN; PAM sequence: CTC
tcaactatatttaacgtata

SEQ ID NO: 239773 - DNA, 20 bp, Artificial Sequence
  Description of Artificial Sequence: Synthetic oligonucleotide
  Target: LAMA2; (-) strand; PAM type: YTN; PAM sequence: TTA
ccctctcaactatatttaac

SEQ ID NO: 239774 - DNA, 20 bp, Artificial Sequence
  Description of Artificial Sequence: Synthetic oligonucleotide
  Target: LAMA2; (-) strand; PAM type: YTN; PAM sequence: TTT
accctctcaactatatttaa

SEQ ID NO: 239775 - DNA, 20 bp, Artificial Sequence
  Description of Artificial Sequence: Synthetic oligonucleotide
  Target: LAMA2; (-) strand; PAM type: YTN; PAM sequence: TTT
taccctctcaactatattta

SEQ ID NO: 239776 - DNA, 20 bp, Artificial Sequence
  Description of Artificial Sequence: Synthetic oligonucleotide
  Target: LAMA2; (-) strand; PAM type: YTN; PAM sequence: TTC
attttaccctctcaactata

SEQ ID NO: 239777 - DNA, 20 bp, Artificial Sequence
  Description of Artificial Sequence: Synthetic oligonucleotide
  Target: LAMA2; (-) strand; PAM type: YTN; PAM sequence: CTT
cattttaccctctcaactat

SEQ ID NO: 239778 - DNA, 20 bp, Artificial Sequence
  Description of Artificial Sequence: Synthetic oligonucleotide
  Target: LAMA2; (-) strand; PAM type: YTN; PAM sequence: TTC
ttcattttaccctctcaact

SEQ ID NO: 239779 - DNA, 20 bp, Artificial Sequence
  Description of Artificial Sequence: Synthetic oligonucleotide
  Target: LAMA2; (-) strand; PAM type: YTN; PAM sequence: CTG
tacattcttcattttaccct

SEQ ID NO: 239780 - DNA, 20 bp, Artificial Sequence
  Description of Artificial Sequence: Synthetic oligonucleotide
  Target: LAMA2; (-) strand; PAM type: YTN; PAM sequence: TTA
actgtacattcttcatttta

SEQ ID NO: 239781 - DNA, 20 bp, Artificial Sequence
  Description of Artificial Sequence: Synthetic oligonucleotide
  Target: LAMA2; (-) strand; PAM type: YTN; PAM sequence: CTG
tataaggaaaatattaactg

SEQ ID NO: 239782 - DNA, 20 bp, Artificial Sequence
  Description of Artificial Sequence: Synthetic oligonucleotide
  Target: LAMA2; (-) strand; PAM type: YTN; PAM sequence: CTG
cgtccatgtctgtataagga

SEQ ID NO: 239783 - DNA, 20 bp, Artificial Sequence
  Description of Artificial Sequence: Synthetic oligonucleotide
  Target: LAMA2; (-) strand; PAM type: YTN; PAM sequence: TTA
tgagctgcgtccatgtctgt

SEQ ID NO: 239784 - DNA, 20 bp, Artificial Sequence
  Description of Artificial Sequence: Synthetic oligonucleotide
  Target: LAMA2; (-) strand; PAM type: YTN; PAM sequence: TTC
aacattatgagctgcgtcca

SEQ ID NO: 239785 - DNA, 20 bp, Artificial Sequence
  Description of Artificial Sequence: Synthetic oligonucleotide
  Target: LAMA2; (-) strand; PAM type: YTN; PAM sequence: CTT
caacattatgagctgcgtcc

SEQ ID NO: 239786 - DNA, 20 bp, Artificial Sequence
  Description of Artificial Sequence: Synthetic oligonucleotide
  Target: LAMA2; (-) strand; PAM type: YTN; PAM sequence: CTG
caaataaagagatgtatcag

SEQ ID NO: 239787 - DNA, 20 bp, Artificial Sequence
  Description of Artificial Sequence: Synthetic oligonucleotide
  Target: LAMA2; (-) strand; PAM type: YTN; PAM sequence: TTC
ctgcaaataaagagatgtat

SEQ ID NO: 239788 - DNA, 20 bp, Artificial Sequence
  Description of Artificial Sequence: Synthetic oligonucleotide
  Target: LAMA2; (-) strand; PAM type: YTN; PAM sequence: TTT
cctgcaaataaagagatgta

SEQ ID NO: 239789 - DNA, 20 bp, Artificial Sequence
  Description of Artificial Sequence: Synthetic oligonucleotide
  Target: LAMA2; (-) strand; PAM type: YTN; PAM sequence: TTT
tcctgcaaataaagagatgt

SEQ ID NO: 239790 - DNA, 20 bp, Artificial Sequence
  Description of Artificial Sequence: Synthetic oligonucleotide
  Target: LAMA2; (-) strand; PAM type: YTN; PAM sequence: TTC
aacattttcctgcaaataaa

SEQ ID NO: 239791 - DNA, 20 bp, Artificial Sequence
  Description of Artificial Sequence: Synthetic oligonucleotide
  Target: LAMA2; (-) strand; PAM type: YTN; PAM sequence: CTT
caacattttcctgcaaataa

SEQ ID NO: 239792 - DNA, 20 bp, Artificial Sequence
  Description of Artificial Sequence: Synthetic oligonucleotide
  Target: LAMA2; (-) strand; PAM type: YTN; PAM sequence: CTC
cttcaacattttcctgcaaa

SEQ ID NO: 239793 - DNA, 20 bp, Artificial Sequence
  Description of Artificial Sequence: Synthetic oligonucleotide
  Target: LAMA2; (-) strand; PAM type: YTN; PAM sequence: CTC
ctccttcaacattttcctgc

SEQ ID NO: 239794 - DNA, 20 bp, Artificial Sequence
  Description of Artificial Sequence: Synthetic oligonucleotide
  Target: LAMA2; (-) strand; PAM type: YTN; PAM sequence: CTA
cagtctcctccttcaacatt

SEQ ID NO: 239795 - DNA, 20 bp, Artificial Sequence
  Description of Artificial Sequence: Synthetic oligonucleotide
  Target: LAMA2; (-) strand; PAM type: YTN; PAM sequence: TTG
caacgactacagtctcctcc

SEQ ID NO: 239796 - DNA, 20 bp, Artificial Sequence
  Description of Artificial Sequence: Synthetic oligonucleotide
  Target: LAMA2; (-) strand; PAM type: YTN; PAM sequence: TTT
gcaacgactacagtctcctc

SEQ ID NO: 239797 - DNA, 20 bp, Artificial Sequence
  Description of Artificial Sequence: Synthetic oligonucleotide
  Target: LAMA2; (-) strand; PAM type: YTN; PAM sequence: TTG
aagaagccggatttgcaacg

SEQ ID NO: 239798 - DNA, 20 bp, Artificial Sequence
  Description of Artificial Sequence: Synthetic oligonucleotide
  Target: LAMA2; (-) strand; PAM type: YTN; PAM sequence: TTG
caaattgaagaagccggatt

SEQ ID NO: 239799 - DNA, 20 bp, Artificial Sequence
  Description of Artificial Sequence: Synthetic oligonucleotide
  Target: LAMA2; (-) strand; PAM type: YTN; PAM sequence: CTT
gcaaattgaagaagccggat

SEQ ID NO: 239800 - DNA, 20 bp, Artificial Sequence
  Description of Artificial Sequence: Synthetic oligonucleotide
  Target: LAMA2; (-) strand; PAM type: YTN; PAM sequence: CTC
ttgcaaattgaagaagccgg

SEQ ID NO: 239801 - DNA, 20 bp, Artificial Sequence
  Description of Artificial Sequence: Synthetic oligonucleotide
  Target: LAMA2; (-) strand; PAM type: YTN; PAM sequence: TTA
tcctcttgcaaattgaagaa

SEQ ID NO: 239802 - DNA, 20 bp, Artificial Sequence
  Description of Artificial Sequence: Synthetic oligonucleotide
  Target: LAMA2; (-) strand; PAM type: YTN; PAM sequence: TTC
caattatcctcttgcaaatt

SEQ ID NO: 239803 - DNA, 20 bp, Artificial Sequence
  Description of Artificial Sequence: Synthetic oligonucleotide
  Target: LAMA2; (-) strand; PAM type: YTN; PAM sequence: TTT
ccaattatcctcttgcaaat

SEQ ID NO: 239804 - DNA, 20 bp, Artificial Sequence
  Description of Artificial Sequence: Synthetic oligonucleotide
  Target: LAMA2; (-) strand; PAM type: YTN; PAM sequence: CTT
tccaattatcctcttgcaaa

SEQ ID NO: 239805 - DNA, 20 bp, Artificial Sequence
  Description of Artificial Sequence: Synthetic oligonucleotide
  Target: LAMA2; (-) strand; PAM type: YTN; PAM sequence: CTC
atcgcagcctttccaattat

SEQ ID NO: 239806 - DNA, 20 bp, Artificial Sequence
  Description of Artificial Sequence: Synthetic oligonucleotide
  Target: LAMA2; (-) strand; PAM type: YTN; PAM sequence: CTG
aacagaaacactcatcgcag

SEQ ID NO: 239807 - DNA, 20 bp, Artificial Sequence
  Description of Artificial Sequence: Synthetic oligonucleotide
  Target: LAMA2; (-) strand; PAM type: YTN; PAM sequence: TTG
aaacccctgaacagaaacac

SEQ ID NO: 239808 - DNA, 20 bp, Artificial Sequence
  Description of Artificial Sequence: Synthetic oligonucleotide
  Target: LAMA2; (-) strand; PAM type: YTN; PAM sequence: TTT
gaaacccctgaacagaaaca

SEQ ID NO: 239809 - DNA, 20 bp, Artificial Sequence
  Description of Artificial Sequence: Synthetic oligonucleotide
  Target: LAMA2; (-) strand; PAM type: YTN; PAM sequence: CTG
tttgaaacccctgaacagaa

SEQ ID NO: 239810 - DNA, 20 bp, Artificial Sequence
  Description of Artificial Sequence: Synthetic oligonucleotide
  Target: LAMA2; (-) strand; PAM type: YTN; PAM sequence: CTG
acatctgtttgaaacccctg

SEQ ID NO: 239811 - DNA, 20 bp, Artificial Sequence
  Description of Artificial Sequence: Synthetic oligonucleotide
  Target: LAMA2; (-) strand; PAM type: YTN; PAM sequence: CTC
tgacatctgtttgaaacccc

SEQ ID NO: 239812 - DNA, 20 bp, Artificial Sequence
  Description of Artificial Sequence: Synthetic oligonucleotide
  Target: LAMA2; (-) strand; PAM type: YTN; PAM sequence: TTG
ccataggtccagtaggaact

SEQ ID NO: 239813 - DNA, 20 bp, Artificial Sequence
  Description of Artificial Sequence: Synthetic oligonucleotide
  Target: LAMA2; (-) strand; PAM type: YTN; PAM sequence: TTT
gccataggtccagtaggaac

SEQ ID NO: 239814 - DNA, 20 bp, Artificial Sequence
  Description of Artificial Sequence: Synthetic oligonucleotide
  Target: LAMA2; (-) strand; PAM type: YTN; PAM sequence: CTT
tgccataggtccagtaggaa

SEQ ID NO: 239815 - DNA, 20 bp, Artificial Sequence
  Description of Artificial Sequence: Synthetic oligonucleotide
  Target: LAMA2; (-) strand; PAM type: YTN; PAM sequence: TTA
ctttgccataggtccagtag

SEQ ID NO: 239816 - DNA, 20 bp, Artificial Sequence
  Description of Artificial Sequence: Synthetic oligonucleotide
  Target: LAMA2; (-) strand; PAM type: YTN; PAM sequence: CTT
actttgccataggtccagta

SEQ ID NO: 239817 - DNA, 20 bp, Artificial Sequence
  Description of Artificial Sequence: Synthetic oligonucleotide
  Target: LAMA2; (-) strand; PAM type: YTN; PAM sequence: TTG
cttactttgccataggtcca

SEQ ID NO: 239818 - DNA, 20 bp, Artificial Sequence
  Description of Artificial Sequence: Synthetic oligonucleotide
  Target: LAMA2; (-) strand; PAM type: YTN; PAM sequence: CTT
gcttactttgccataggtcc

SEQ ID NO: 239819 - DNA, 20 bp, Artificial Sequence
  Description of Artificial Sequence: Synthetic oligonucleotide
  Target: LAMA2; (-) strand; PAM type: YTN; PAM sequence: CTG
gggcagcaaacagaaccaaa

SEQ ID NO: 239820 - DNA, 20 bp, Artificial Sequence
  Description of Artificial Sequence: Synthetic oligonucleotide
  Target: LAMA2; (-) strand; PAM type: YTN; PAM sequence: CTG
ctggggcagcaaacagaacc

SEQ ID NO: 239821 - DNA, 20 bp, Artificial Sequence
  Description of Artificial Sequence: Synthetic oligonucleotide
  Target: LAMA2; (-) strand; PAM type: YTN; PAM sequence: TTC
atacaaaagaacaacgatga

SEQ ID NO: 239822 - DNA, 20 bp, Artificial Sequence
  Description of Artificial Sequence: Synthetic oligonucleotide
  Target: LAMA2; (-) strand; PAM type: YTN; PAM sequence: CTG
ttcatacaaaagaacaacga

SEQ ID NO: 239823 - DNA, 20 bp, Artificial Sequence
  Description of Artificial Sequence: Synthetic oligonucleotide
  Target: LAMA2; (-) strand; PAM type: YTN; PAM sequence: CTA
tcagaaactgttcatacaaa

SEQ ID NO: 239824 - DNA, 20 bp, Artificial Sequence
  Description of Artificial Sequence: Synthetic oligonucleotide
  Target: LAMA2; (-) strand; PAM type: YTN; PAM sequence: TTC
actatcagaaactgttcata

SEQ ID NO: 239825 - DNA, 20 bp, Artificial Sequence
  Description of Artificial Sequence: Synthetic oligonucleotide
  Target: LAMA2; (-) strand; PAM type: YTN; PAM sequence: TTA
tgtagaagttcactatcaga

SEQ ID NO: 239826 - DNA, 20 bp, Artificial Sequence
  Description of Artificial Sequence: Synthetic oligonucleotide
  Target: LAMA2; (-) strand; PAM type: YTN; PAM sequence: TTT
atgtagaagttcactatcag

SEQ ID NO: 239827 - DNA, 20 bp, Artificial Sequence
  Description of Artificial Sequence: Synthetic oligonucleotide
  Target: LAMA2; (-) strand; PAM type: YTN; PAM sequence: CTT
tatgtagaagttcactatca

SEQ ID NO: 239828 - DNA, 20 bp, Artificial Sequence
  Description of Artificial Sequence: Synthetic oligonucleotide
  Target: LAMA2; (-) strand; PAM type: YTN; PAM sequence: CTG
taactttatgtagaagttca

SEQ ID NO: 239829 - DNA, 20 bp, Artificial Sequence
  Description of Artificial Sequence: Synthetic oligonucleotide
  Target: LAMA2; (-) strand; PAM type: YTN; PAM sequence: TTC
ctgtaactttatgtagaagt

SEQ ID NO: 239830 - DNA, 20 bp, Artificial Sequence
  Description of Artificial Sequence: Synthetic oligonucleotide
  Target: LAMA2; (-) strand; PAM type: YTN; PAM sequence: CTT
cctgtaactttatgtagaag

SEQ ID NO: 239831 - DNA, 20 bp, Artificial Sequence
  Description of Artificial Sequence: Synthetic oligonucleotide
  Target: LAMA2; (-) strand; PAM type: YTN; PAM sequence: TTC
ttcctgtaactttatgtaga

SEQ ID NO: 239832 - DNA, 20 bp, Artificial Sequence
  Description of Artificial Sequence: Synthetic oligonucleotide
  Target: LAMA2; (-) strand; PAM type: YTN; PAM sequence: CTT
cttcctgtaactttatgtag

SEQ ID NO: 239833 - DNA, 20 bp, Artificial Sequence
  Description of Artificial Sequence: Synthetic oligonucleotide
  Target: LAMA2; (-) strand; PAM type: YTN; PAM sequence: TTA
cttcttcctgtaactttatg

SEQ ID NO: 239834 - DNA, 20 bp, Artificial Sequence
  Description of Artificial Sequence: Synthetic oligonucleotide
  Target: LAMA2; (-) strand; PAM type: YTN; PAM sequence: TTC
cattacttcttcctgtaact

SEQ ID NO: 239835 - DNA, 20 bp, Artificial Sequence
  Description of Artificial Sequence: Synthetic oligonucleotide
  Target: LAMA2; (-) strand; PAM type: YTN; PAM sequence: TTG
aagaaaattccattacttct

SEQ ID NO: 239836 - DNA, 20 bp, Artificial Sequence
  Description of Artificial Sequence: Synthetic oligonucleotide
  Target: LAMA2; (-) strand; PAM type: YTN; PAM sequence: TTT
gaagaaaattccattacttc

SEQ ID NO: 239837 - DNA, 20 bp, Artificial Sequence
  Description of Artificial Sequence: Synthetic oligonucleotide
  Target: LAMA2; (-) strand; PAM type: YTN; PAM sequence: TTG
agcaaaaatacacaacagca

SEQ ID NO: 239838 - DNA, 20 bp, Artificial Sequence
  Description of Artificial Sequence: Synthetic oligonucleotide
  Target: LAMA2; (-) strand; PAM type: YTN; PAM sequence: TTT
gagcaaaaatacacaacagc

SEQ ID NO: 239839 - DNA, 20 bp, Artificial Sequence
  Description of Artificial Sequence: Synthetic oligonucleotide
  Target: LAMA2; (-) strand; PAM type: YTN; PAM sequence: CTT
tgagcaaaaatacacaacag

SEQ ID NO: 239840 - DNA, 20 bp, Artificial Sequence
  Description of Artificial Sequence: Synthetic oligonucleotide
  Target: LAMA2; (-) strand; PAM type: YTN; PAM sequence: CTC
aaaggctttgagcaaaaata

SEQ ID NO: 239841 - DNA, 20 bp, Artificial Sequence
  Description of Artificial Sequence: Synthetic oligonucleotide
  Target: LAMA2; (-) strand; PAM type: YTN; PAM sequence: TTA
caaatacaacctcaaaggct

SEQ ID NO: 239842 - DNA, 20 bp, Artificial Sequence
  Description of Artificial Sequence: Synthetic oligonucleotide
  Target: LAMA2; (-) strand; PAM type: YTN; PAM sequence: CTA
cacaatattacaaatacaac

SEQ ID NO: 239843 - DNA, 20 bp, Artificial Sequence
  Description of Artificial Sequence: Synthetic oligonucleotide
  Target: LAMA2; (-) strand; PAM type: YTN; PAM sequence: TTC
cagtctacacaatattacaa

SEQ ID NO: 239844 - DNA, 20 bp, Artificial Sequence
  Description of Artificial Sequence: Synthetic oligonucleotide
  Target: LAMA2; (-) strand; PAM type: YTN; PAM sequence: CTA
agaaattccagtctacacaa

SEQ ID NO: 239845 - DNA, 20 bp, Artificial Sequence
  Description of Artificial Sequence: Synthetic oligonucleotide
  Target: LAMA2; (-) strand; PAM type: YTN; PAM sequence: TTC
taagaaattccagtctacac

SEQ ID NO: 239846 - DNA, 20 bp, Artificial Sequence
  Description of Artificial Sequence: Synthetic oligonucleotide
  Target: LAMA2; (-) strand; PAM type: YTN; PAM sequence: CTA
ttctaagaaattccagtcta

SEQ ID NO: 239847 - DNA, 20 bp, Artificial Sequence
  Description of Artificial Sequence: Synthetic oligonucleotide
  Target: LAMA2; (-) strand; PAM type: YTN; PAM sequence: CTA
cctattctaagaaattccag

SEQ ID NO: 239848 - DNA, 20 bp, Artificial Sequence
  Description of Artificial Sequence: Synthetic oligonucleotide
  Target: LAMA2; (-) strand; PAM type: YTN; PAM sequence: CTA
tgtctacctattctaagaaa

SEQ ID NO: 239849 - DNA, 20 bp, Artificial Sequence
  Description of Artificial Sequence: Synthetic oligonucleotide
  Target: LAMA2; (-) strand; PAM type: YTN; PAM sequence: CTA
aaaagactatgtctacctat

SEQ ID NO: 239850 - DNA, 20 bp, Artificial Sequence
  Description of Artificial Sequence: Synthetic oligonucleotide
  Target: LAMA2; (-) strand; PAM type: YTN; PAM sequence: TTC
atagagtaatcatggacact

SEQ ID NO: 239851 - DNA, 20 bp, Artificial Sequence
  Description of Artificial Sequence: Synthetic oligonucleotide
  Target: LAMA2; (-) strand; PAM type: YTN; PAM sequence: TTT
catagagtaatcatggacac

SEQ ID NO: 239852 - DNA, 20 bp, Artificial Sequence
  Description of Artificial Sequence: Synthetic oligonucleotide
  Target: LAMA2; (-) strand; PAM type: YTN; PAM sequence: TTG
tttcatagagtaatcatgga

SEQ ID NO: 239853 - DNA, 20 bp, Artificial Sequence
  Description of Artificial Sequence: Synthetic oligonucleotide
  Target: LAMA2; (-) strand; PAM type: YTN; PAM sequence: TTA
ttgtttcatagagtaatcat

SEQ ID NO: 239854 - DNA, 20 bp, Artificial Sequence
  Description of Artificial Sequence: Synthetic oligonucleotide
  Target: LAMA2; (-) strand; PAM type: YTN; PAM sequence: TTG
cattattgtttcatagagta

SEQ ID NO: 239855 - DNA, 20 bp, Artificial Sequence
  Description of Artificial Sequence: Synthetic oligonucleotide
  Target: LAMA2; (-) strand; PAM type: YTN; PAM sequence: TTA
attgcattattgtttcatag

SEQ ID NO: 239856 - DNA, 20 bp, Artificial Sequence
  Description of Artificial Sequence: Synthetic oligonucleotide
  Target: LAMA2; (-) strand; PAM type: YTN; PAM sequence: CTT
aattgcattattgtttcata

SEQ ID NO: 239857 - DNA, 20 bp, Artificial Sequence
  Description of Artificial Sequence: Synthetic oligonucleotide
  Target: LAMA2; (-) strand; PAM type: YTN; PAM sequence: TTG
aaaccttaattgcattattg

SEQ ID NO: 239858 - DNA, 20 bp, Artificial Sequence
  Description of Artificial Sequence: Synthetic oligonucleotide
  Target: LAMA2; (-) strand; PAM type: YTN; PAM sequence: TTG
gagttgaaaccttaattgca

SEQ ID NO: 239859 - DNA, 20 bp, Artificial Sequence
  Description of Artificial Sequence: Synthetic oligonucleotide
  Target: LAMA2; (-) strand; PAM type: YTN; PAM sequence: CTT
ggagttgaaaccttaattgc

SEQ ID NO: 239860 - DNA, 20 bp, Artificial Sequence
  Description of Artificial Sequence: Synthetic oligonucleotide
  Target: LAMA2; (-) strand; PAM type: YTN; PAM sequence: TTA
aatcatgcacccttggagtt

SEQ ID NO: 239861 - DNA, 20 bp, Artificial Sequence
  Description of Artificial Sequence: Synthetic oligonucleotide
  Target: LAMA2; (-) strand; PAM type: YTN; PAM sequence: CTT
aaatcatgcacccttggagt

SEQ ID NO: 239862 - DNA, 20 bp, Artificial Sequence
  Description of Artificial Sequence: Synthetic oligonucleotide
  Target: LAMA2; (-) strand; PAM type: YTN; PAM sequence: CTC
ttaaatcatgcacccttgga

SEQ ID NO: 239863 - DNA, 20 bp, Artificial Sequence
  Description of Artificial Sequence: Synthetic oligonucleotide
  Target: LAMA2; (-) strand; PAM type: YTN; PAM sequence: CTC
tcttaaatcatgcacccttg

SEQ ID NO: 239864 - DNA, 20 bp, Artificial Sequence
  Description of Artificial Sequence: Synthetic oligonucleotide
  Target: LAMA2; (-) strand; PAM type: YTN; PAM sequence: TTC
tctcttaaatcatgcaccct

SEQ ID NO: 239865 - DNA, 20 bp, Artificial Sequence
  Description of Artificial Sequence: Synthetic oligonucleotide
  Target: LAMA2; (-) strand; PAM type: YTN; PAM sequence: TTT
ctctcttaaatcatgcaccc

SEQ ID NO: 239866 - DNA, 20 bp, Artificial Sequence
  Description of Artificial Sequence: Synthetic oligonucleotide
  Target: LAMA2; (-) strand; PAM type: YTN; PAM sequence: TTT
tctctcttaaatcatgcacc

SEQ ID NO: 239867 - DNA, 20 bp, Artificial Sequence
  Description of Artificial Sequence: Synthetic oligonucleotide
  Target: LAMA2; (-) strand; PAM type: YTN; PAM sequence: TTC
atatcacaatgtagtgtttt

SEQ ID NO: 239868 - DNA, 20 bp, Artificial Sequence
  Description of Artificial Sequence: Synthetic oligonucleotide
  Target: LAMA2; (-) strand; PAM type: YTN; PAM sequence: CTA
gtaatggaaaatataattca

SEQ ID NO: 239869 - DNA, 20 bp, Artificial Sequence
  Description of Artificial Sequence: Synthetic oligonucleotide
  Target: LAMA2; (-) strand; PAM type: YTN; PAM sequence: TTG
catacgaacatactagtaat

SEQ ID NO: 239870 - DNA, 20 bp, Artificial Sequence
  Description of Artificial Sequence: Synthetic oligonucleotide
  Target: LAMA2; (-) strand; PAM type: YTN; PAM sequence: CTT
gcatacgaacatactagtaa

SEQ ID NO: 239871 - DNA, 20 bp, Artificial Sequence
  Description of Artificial Sequence: Synthetic oligonucleotide
  Target: LAMA2; (-) strand; PAM type: YTN; PAM sequence: CTC
aacttgcatacgaacatact

SEQ ID NO: 239872 - DNA, 20 bp, Artificial Sequence
  Description of Artificial Sequence: Synthetic oligonucleotide
  Target: LAMA2; (-) strand; PAM type: YTN; PAM sequence: TTC
tcaacttgcatacgaacata

SEQ ID NO: 239873 - DNA, 20 bp, Artificial Sequence
  Description of Artificial Sequence: Synthetic oligonucleotide
  Target: LAMA2; (-) strand; PAM type: YTN; PAM sequence: TTT
ctcaacttgcatacgaacat

SEQ ID NO: 239874 - DNA, 20 bp, Artificial Sequence
  Description of Artificial Sequence: Synthetic oligonucleotide
  Target: LAMA2; (-) strand; PAM type: YTN; PAM sequence: TTT
tctcaacttgcatacgaaca

SEQ ID NO: 239875 - DNA, 20 bp, Artificial Sequence
  Description of Artificial Sequence: Synthetic oligonucleotide
  Target: LAMA2; (-) strand; PAM type: YTN; PAM sequence: TTT
ttctcaacttgcatacgaac

SEQ ID NO: 239876 - DNA, 20 bp, Artificial Sequence
  Description of Artificial Sequence: Synthetic oligonucleotide
  Target: LAMA2; (-) strand; PAM type: YTN; PAM sequence: TTA
tgtatacagatgatacagag

SEQ ID NO: 239877 - DNA, 20 bp, Artificial Sequence
  Description of Artificial Sequence: Synthetic oligonucleotide
  Target: LAMA2; (-) strand; PAM type: YTN; PAM sequence: TTG
gtggataatatgtattatgt

SEQ ID NO: 239878 - DNA, 20 bp, Artificial Sequence
  Description of Artificial Sequence: Synthetic oligonucleotide
  Target: LAMA2; (-) strand; PAM type: YTN; PAM sequence: CTA
aagcgttggtggataatatg

SEQ ID NO: 239879 - DNA, 20 bp, Artificial Sequence
  Description of Artificial Sequence: Synthetic oligonucleotide
  Target: LAMA2; (-) strand; PAM type: YTN; PAM sequence: CTA
ggcaacatcaaatagtaact

SEQ ID NO: 239880 - DNA, 20 bp, Artificial Sequence
  Description of Artificial Sequence: Synthetic oligonucleotide
  Target: LAMA2; (-) strand; PAM type: YTN; PAM sequence: TTA
ataatgaaagagcctaggca

SEQ ID NO: 239881 - DNA, 20 bp, Artificial Sequence
  Description of Artificial Sequence: Synthetic oligonucleotide
  Target: LAMA2; (-) strand; PAM type: YTN; PAM sequence: TTT
aataatgaaagagcctaggc

SEQ ID NO: 239882 - DNA, 20 bp, Artificial Sequence
  Description of Artificial Sequence: Synthetic oligonucleotide
  Target: LAMA2; (-) strand; PAM type: YTN; PAM sequence: TTT
taataatgaaagagcctagg

SEQ ID NO: 239883 - DNA, 20 bp, Artificial Sequence
  Description of Artificial Sequence: Synthetic oligonucleotide
  Target: LAMA2; (-) strand; PAM type: YTN; PAM sequence: CTT
ttaataatgaaagagcctag

SEQ ID NO: 239884 - DNA, 20 bp, Artificial Sequence
  Description of Artificial Sequence: Synthetic oligonucleotide
  Target: LAMA2; (-) strand; PAM type: YTN; PAM sequence: TTA
atgtccccttttaataatga

SEQ ID NO: 239885 - DNA, 20 bp, Artificial Sequence
  Description of Artificial Sequence: Synthetic oligonucleotide
  Target: LAMA2; (-) strand; PAM type: YTN; PAM sequence: TTT
aatgtccccttttaataatg

SEQ ID NO: 239886 - DNA, 20 bp, Artificial Sequence
  Description of Artificial Sequence: Synthetic oligonucleotide
  Target: LAMA2; (-) strand; PAM type: YTN; PAM sequence: CTA
tatttaatgtccccttttaa

SEQ ID NO: 239887 - DNA, 20 bp, Artificial Sequence
  Description of Artificial Sequence: Synthetic oligonucleotide
  Target: LAMA2; (-) strand; PAM type: YTN; PAM sequence: TTG
cctatatttaatgtcccctt

SEQ ID NO: 239888 - DNA, 20 bp, Artificial Sequence
  Description of Artificial Sequence: Synthetic oligonucleotide
  Target: LAMA2; (-) strand; PAM type: YTN; PAM sequence: CTC
agaatgaaggtattgcctat

SEQ ID NO: 239889 - DNA, 20 bp, Artificial Sequence
  Description of Artificial Sequence: Synthetic oligonucleotide
  Target: LAMA2; (-) strand; PAM type: YTN; PAM sequence: TTC
aaaccaactcagaatgaagg

SEQ ID NO: 239890 - DNA, 20 bp, Artificial Sequence
  Description of Artificial Sequence: Synthetic oligonucleotide
  Target: LAMA2; (-) strand; PAM type: YTN; PAM sequence: TTT
caaaccaactcagaatgaag

SEQ ID NO: 239891 - DNA, 20 bp, Artificial Sequence
  Description of Artificial Sequence: Synthetic oligonucleotide
  Target: LAMA2; (-) strand; PAM type: YTN; PAM sequence: TTT
tcaaaccaactcagaatgaa

SEQ ID NO: 239892 - DNA, 20 bp, Artificial Sequence
  Description of Artificial Sequence: Synthetic oligonucleotide
  Target: LAMA2; (-) strand; PAM type: YTN; PAM sequence: TTT
ttcaaaccaactcagaatga

SEQ ID NO: 239893 - DNA, 20 bp, Artificial Sequence
  Description of Artificial Sequence: Synthetic oligonucleotide
  Target: LAMA2; (-) strand; PAM type: YTN; PAM sequence: TTA
agtaataatttttcaaacca

SEQ ID NO: 239894 - DNA, 20 bp, Artificial Sequence
  Description of Artificial Sequence: Synthetic oligonucleotide
  Target: LAMA2; (-) strand; PAM type: YTN; PAM sequence: TTT
aagtaataatttttcaaacc

SEQ ID NO: 239895 - DNA, 20 bp, Artificial Sequence
  Description of Artificial Sequence: Synthetic oligonucleotide
  Target: LAMA2; (-) strand; PAM type: YTN; PAM sequence: TTA
aatagtttaagtaataattt

SEQ ID NO: 239896 - DNA, 20 bp, Artificial Sequence
  Description of Artificial Sequence: Synthetic oligonucleotide
  Target: LAMA2; (-) strand; PAM type: YTN; PAM sequence: CTA
ttaaatagtttaagtaataa

SEQ ID NO: 239897 - DNA, 20 bp, Artificial Sequence
  Description of Artificial Sequence: Synthetic oligonucleotide
  Target: LAMA2; (-) strand; PAM type: YTN; PAM sequence: TTG
ctattaaatagtttaagtaa

SEQ ID NO: 239898 - DNA, 20 bp, Artificial Sequence
  Description of Artificial Sequence: Synthetic oligonucleotide
  Target: LAMA2; (-) strand; PAM type: YTN; PAM sequence: TTC
agttgctattaaatagttta

SEQ ID NO: 239899 - DNA, 20 bp, Artificial Sequence
  Description of Artificial Sequence: Synthetic oligonucleotide
  Target: LAMA2; (-) strand; PAM type: YTN; PAM sequence: TTT
cagttgctattaaatagttt

SEQ ID NO: 239900 - DNA, 20 bp, Artificial Sequence
  Description of Artificial Sequence: Synthetic oligonucleotide
  Target: LAMA2; (-) strand; PAM type: YTN; PAM sequence: TTA
aagaaagaaaatttcagttg

SEQ ID NO: 239901 - DNA, 20 bp, Artificial Sequence
  Description of Artificial Sequence: Synthetic oligonucleotide
  Target: LAMA2; (-) strand; PAM type: YTN; PAM sequence: TTA
cgttaaagaaagaaaatttc

SEQ ID NO: 239902 - DNA, 20 bp, Artificial Sequence
  Description of Artificial Sequence: Synthetic oligonucleotide
  Target: LAMA2; (-) strand; PAM type: YTN; PAM sequence: TTT
acgttaaagaaagaaaattt

SEQ ID NO: 239903 - DNA, 20 bp, Artificial Sequence
  Description of Artificial Sequence: Synthetic oligonucleotide
  Target: LAMA2; (-) strand; PAM type: YTN; PAM sequence: TTA
gaaaggtaaacacatttacg

SEQ ID NO: 239904 - DNA, 20 bp, Artificial Sequence
  Description of Artificial Sequence: Synthetic oligonucleotide
  Target: LAMA2; (-) strand; PAM type: YTN; PAM sequence: TTG
aaaaggcagtgggtagtgta

SEQ ID NO: 239905 - DNA, 20 bp, Artificial Sequence
  Description of Artificial Sequence: Synthetic oligonucleotide
  Target: LAMA2; (-) strand; PAM type: YTN; PAM sequence: TTT
gaaaaggcagtgggtagtgt

SEQ ID NO: 239906 - DNA, 20 bp, Artificial Sequence
  Description of Artificial Sequence: Synthetic oligonucleotide
  Target: LAMA2; (-) strand; PAM type: YTN; PAM sequence: TTG
cacagatttgaaaaggcagt

SEQ ID NO: 239907 - DNA, 20 bp, Artificial Sequence
  Description of Artificial Sequence: Synthetic oligonucleotide
  Target: LAMA2; (-) strand; PAM type: YTN; PAM sequence: TTT
gcacagatttgaaaaggcag

SEQ ID NO: 239908 - DNA, 20 bp, Artificial Sequence
  Description of Artificial Sequence: Synthetic oligonucleotide
  Target: LAMA2; (-) strand; PAM type: YTN; PAM sequence: CTT
tgcacagatttgaaaaggca

SEQ ID NO: 239909 - DNA, 20 bp, Artificial Sequence
  Description of Artificial Sequence: Synthetic oligonucleotide
  Target: LAMA2; (-) strand; PAM type: YTN; PAM sequence: CTC
tttgcacagatttgaaaagg

SEQ ID NO: 239910 - DNA, 20 bp, Artificial Sequence
  Description of Artificial Sequence: Synthetic oligonucleotide
  Target: LAMA2; (-) strand; PAM type: YTN; PAM sequence: CTG
tatagggagacaacatgctc

SEQ ID NO: 239911 - DNA, 20 bp, Artificial Sequence
  Description of Artificial Sequence: Synthetic oligonucleotide
  Target: LAMA2; (-) strand; PAM type: YTN; PAM sequence: TTC
tgtatagggagacaacatgc

SEQ ID NO: 239912 - DNA, 20 bp, Artificial Sequence
  Description of Artificial Sequence: Synthetic oligonucleotide
  Target: LAMA2; (-) strand; PAM type: YTN; PAM sequence: TTT
ctgtatagggagacaacatg

SEQ ID NO: 239913 - DNA, 20 bp, Artificial Sequence
  Description of Artificial Sequence: Synthetic oligonucleotide
  Target: LAMA2; (-) strand; PAM type: YTN; PAM sequence: TTT
tctgtatagggagacaacat

SEQ ID NO: 239914 - DNA, 20 bp, Artificial Sequence
  Description of Artificial Sequence: Synthetic oligonucleotide
  Target: LAMA2; (-) strand; PAM type: YTN; PAM sequence: CTT
ttctgtatagggagacaaca

SEQ ID NO: 239915 - DNA, 20 bp, Artificial Sequence
  Description of Artificial Sequence: Synthetic oligonucleotide
  Target: LAMA2; (-) strand; PAM type: YTN; PAM sequence: CTG
acacttttctgtatagggag

SEQ ID NO: 239916 - DNA, 20 bp, Artificial Sequence
  Description of Artificial Sequence: Synthetic oligonucleotide
  Target: LAMA2; (-) strand; PAM type: YTN; PAM sequence: CTC
tgacacttttctgtataggg

SEQ ID NO: 239917 - DNA, 20 bp, Artificial Sequence
  Description of Artificial Sequence: Synthetic oligonucleotide
  Target: LAMA2; (-) strand; PAM type: YTN; PAM sequence: TTC
ctctgacacttttctgtata

SEQ ID NO: 239918 - DNA, 20 bp, Artificial Sequence
  Description of Artificial Sequence: Synthetic oligonucleotide
  Target: LAMA2; (-) strand; PAM type: YTN; PAM sequence: TTT
cctctgacacttttctgtat

SEQ ID NO: 239919 - DNA, 20 bp, Artificial Sequence
  Description of Artificial Sequence: Synthetic oligonucleotide
  Target: LAMA2; (-) strand; PAM type: YTN; PAM sequence: TTT
tcctctgacacttttctgta

SEQ ID NO: 239920 - DNA, 20 bp, Artificial Sequence
  Description of Artificial Sequence: Synthetic oligonucleotide
  Target: LAMA2; (-) strand; PAM type: YTN; PAM sequence: TTC
ccagaaggtcccattttcct

SEQ ID NO: 239921 - DNA, 20 bp, Artificial Sequence
  Description of Artificial Sequence: Synthetic oligonucleotide
  Target: LAMA2; (-) strand; PAM type: YTN; PAM sequence: CTG
tgtgaaattcccagaaggtc

SEQ ID NO: 239922 - DNA, 20 bp, Artificial Sequence
  Description of Artificial Sequence: Synthetic oligonucleotide
  Target: LAMA2; (-) strand; PAM type: YTN; PAM sequence: TTA
agtccagccacacaggctgt

SEQ ID NO: 239923 - DNA, 20 bp, Artificial Sequence
  Description of Artificial Sequence: Synthetic oligonucleotide
  Target: LAMA2; (-) strand; PAM type: YTN; PAM sequence: CTT
aagtccagccacacaggctg

SEQ ID NO: 239924 - DNA, 20 bp, Artificial Sequence
  Description of Artificial Sequence: Synthetic oligonucleotide
  Target: LAMA2; (-) strand; PAM type: YTN; PAM sequence: CTC
ttaagtccagccacacaggc

SEQ ID NO: 239925 - DNA, 20 bp, Artificial Sequence
  Description of Artificial Sequence: Synthetic oligonucleotide
  Target: LAMA2; (-) strand; PAM type: YTN; PAM sequence: CTG
cactcttaagtccagccaca

SEQ ID NO: 239926 - DNA, 20 bp, Artificial Sequence
  Description of Artificial Sequence: Synthetic oligonucleotide
  Target: LAMA2; (-) strand; PAM type: YTN; PAM sequence: TTC
tgcactcttaagtccagcca

SEQ ID NO: 239927 - DNA, 20 bp, Artificial Sequence
  Description of Artificial Sequence: Synthetic oligonucleotide
  Target: LAMA2; (-) strand; PAM type: YTN; PAM sequence: CTA
ccattctgcactcttaagtc

SEQ ID NO: 239928 - DNA, 20 bp, Artificial Sequence
  Description of Artificial Sequence: Synthetic oligonucleotide
  Target: LAMA2; (-) strand; PAM type: YTN; PAM sequence: TTC
ctaccattctgcactcttaa

SEQ ID NO: 239929 - DNA, 20 bp, Artificial Sequence
  Description of Artificial Sequence: Synthetic oligonucleotide
  Target: LAMA2; (-) strand; PAM type: YTN; PAM sequence: TTT
cctaccattctgcactctta

SEQ ID NO: 239930 - DNA, 20 bp, Artificial Sequence
  Description of Artificial Sequence: Synthetic oligonucleotide
  Target: LAMA2; (-) strand; PAM type: YTN; PAM sequence: CTC
cagcccatttcctaccattc

SEQ ID NO: 239931 - DNA, 20 bp, Artificial Sequence
  Description of Artificial Sequence: Synthetic oligonucleotide
  Target: LAMA2; (-) strand; PAM type: YTN; PAM sequence: CTC
tccagcccatttcctaccat

SEQ ID NO: 239932 - DNA, 20 bp, Artificial Sequence
  Description of Artificial Sequence: Synthetic oligonucleotide
  Target: LAMA2; (-) strand; PAM type: YTN; PAM sequence: CTC
tctccagcccatttcctacc

SEQ ID NO: 239933 - DNA, 20 bp, Artificial Sequence
  Description of Artificial Sequence: Synthetic oligonucleotide
  Target: LAMA2; (-) strand; PAM type: YTN; PAM sequence: TTC
tctctccagcccatttccta

SEQ ID NO: 239934 - DNA, 20 bp, Artificial Sequence
  Description of Artificial Sequence: Synthetic oligonucleotide
  Target: LAMA2; (-) strand; PAM type: YTN; PAM sequence: TTT
ctctctccagcccatttcct

SEQ ID NO: 239935 - DNA, 20 bp, Artificial Sequence
  Description of Artificial Sequence: Synthetic oligonucleotide
  Target: LAMA2; (-) strand; PAM type: YTN; PAM sequence: CTT
tctctctccagcccatttcc

SEQ ID NO: 239936 - DNA, 20 bp, Artificial Sequence
  Description of Artificial Sequence: Synthetic oligonucleotide
  Target: LAMA2; (-) strand; PAM type: YTN; PAM sequence: TTC
tttctctctccagcccattt

SEQ ID NO: 239937 - DNA, 20 bp, Artificial Sequence
  Description of Artificial Sequence: Synthetic oligonucleotide
  Target: LAMA2; (-) strand; PAM type: YTN; PAM sequence: CTT
ctttctctctccagcccatt

SEQ ID NO: 239938 - DNA, 20 bp, Artificial Sequence
  Description of Artificial Sequence: Synthetic oligonucleotide
  Target: LAMA2; (-) strand; PAM type: YTN; PAM sequence: CTA
gacttctttctctctccagc

SEQ ID NO: 239939 - DNA, 20 bp, Artificial Sequence
  Description of Artificial Sequence: Synthetic oligonucleotide
  Target: LAMA2; (-) strand; PAM type: YTN; PAM sequence: TTC
ccccgtctagacttctttct

SEQ ID NO: 239940 - DNA, 20 bp, Artificial Sequence
  Description of Artificial Sequence: Synthetic oligonucleotide
  Target: LAMA2; (-) strand; PAM type: YTN; PAM sequence: CTC
attcccccgtctagacttct

SEQ ID NO: 239941 - DNA, 20 bp, Artificial Sequence
  Description of Artificial Sequence: Synthetic oligonucleotide
  Target: LAMA2; (-) strand; PAM type: YTN; PAM sequence: TTC
tcattcccccgtctagactt

SEQ ID NO: 239942 - DNA, 20 bp, Artificial Sequence
  Description of Artificial Sequence: Synthetic oligonucleotide
  Target: LAMA2; (-) strand; PAM type: YTN; PAM sequence: CTA
gattctcattcccccgtcta

SEQ ID NO: 239943 - DNA, 20 bp, Artificial Sequence
  Description of Artificial Sequence: Synthetic oligonucleotide
  Target: LAMA2; (-) strand; PAM type: YTN; PAM sequence: TTC
tagattctcattcccccgtc

SEQ ID NO: 239944 - DNA, 20 bp, Artificial Sequence
  Description of Artificial Sequence: Synthetic oligonucleotide
  Target: LAMA2; (-) strand; PAM type: YTN; PAM sequence: CTA
taagttctagattctcattc

SEQ ID NO: 239945 - DNA, 20 bp, Artificial Sequence
  Description of Artificial Sequence: Synthetic oligonucleotide
  Target: LAMA2; (-) strand; PAM type: YTN; PAM sequence: TTC
aaccctataagttctagatt

SEQ ID NO: 239946 - DNA, 20 bp, Artificial Sequence
  Description of Artificial Sequence: Synthetic oligonucleotide
  Target: LAMA2; (-) strand; PAM type: YTN; PAM sequence: TTA
gtatattcaaccctataagt

SEQ ID NO: 239947 - DNA, 20 bp, Artificial Sequence
  Description of Artificial Sequence: Synthetic oligonucleotide
  Target: LAMA2; (-) strand; PAM type: YTN; PAM sequence: CTT
agtatattcaaccctataag

SEQ ID NO: 239948 - DNA, 20 bp, Artificial Sequence
  Description of Artificial Sequence: Synthetic oligonucleotide
  Target: LAMA2; (-) strand; PAM type: YTN; PAM sequence: TTC
ttagtatattcaaccctata

SEQ ID NO: 239949 - DNA, 20 bp, Artificial Sequence
  Description of Artificial Sequence: Synthetic oligonucleotide
  Target: LAMA2; (-) strand; PAM type: YTN; PAM sequence: CTC
aaattcttagtatattcaac

SEQ ID NO: 239950 - DNA, 20 bp, Artificial Sequence
  Description of Artificial Sequence: Synthetic oligonucleotide
  Target: LAMA2; (-) strand; PAM type: YTN; PAM sequence: CTC
caagtaaaatatctcaaatt

SEQ ID NO: 239951 - DNA, 20 bp, Artificial Sequence
  Description of Artificial Sequence: Synthetic oligonucleotide
  Target: LAMA2; (-) strand; PAM type: YTN; PAM sequence: TTC
aatgacactccaagtaaaat

SEQ ID NO: 239952 - DNA, 20 bp, Artificial Sequence
  Description of Artificial Sequence: Synthetic oligonucleotide
  Target: LAMA2; (-) strand; PAM type: YTN; PAM sequence: CTT
caatgacactccaagtaaaa

SEQ ID NO: 239953 - DNA, 20 bp, Artificial Sequence
  Description of Artificial Sequence: Synthetic oligonucleotide
  Target: LAMA2; (-) strand; PAM type: YTN; PAM sequence: TTC
ttcaatgacactccaagtaa

SEQ ID NO: 239954 - DNA, 20 bp, Artificial Sequence
  Description of Artificial Sequence: Synthetic oligonucleotide
  Target: LAMA2; (-) strand; PAM type: YTN; PAM sequence: TTT
cttcaatgacactccaagta

SEQ ID NO: 239955 - DNA, 20 bp, Artificial Sequence
  Description of Artificial Sequence: Synthetic oligonucleotide
  Target: LAMA2; (-) strand; PAM type: YTN; PAM sequence: TTA
aatttcttcaatgacactcc

SEQ ID NO: 239956 - DNA, 20 bp, Artificial Sequence
  Description of Artificial Sequence: Synthetic oligonucleotide
  Target: LAMA2; (-) strand; PAM type: YTN; PAM sequence: CTT
aaatttcttcaatgacactc

SEQ ID NO: 239957 - DNA, 20 bp, Artificial Sequence
  Description of Artificial Sequence: Synthetic oligonucleotide
  Target: LAMA2; (-) strand; PAM type: YTN; PAM sequence: TTA
gcttaaatttcttcaatgac

SEQ ID NO: 239958 - DNA, 20 bp, Artificial Sequence
  Description of Artificial Sequence: Synthetic oligonucleotide
  Target: LAMA2; (-) strand; PAM type: YTN; PAM sequence: TTT
agcttaaatttcttcaatga

SEQ ID NO: 239959 - DNA, 20 bp, Artificial Sequence
  Description of Artificial Sequence: Synthetic oligonucleotide
  Target: LAMA2; (-) strand; PAM type: YTN; PAM sequence: CTT
tagcttaaatttcttcaatg

SEQ ID NO: 239960 - DNA, 20 bp, Artificial Sequence
  Description of Artificial Sequence: Synthetic oligonucleotide
  Target: LAMA2; (-) strand; PAM type: YTN; PAM sequence: CTG
ataatgtcagtctttagctt

SEQ ID NO: 239961 - DNA, 20 bp, Artificial Sequence
  Description of Artificial Sequence: Synthetic oligonucleotide
  Target: LAMA2; (-) strand; PAM type: YTN; PAM sequence: CTC
tgataatgtcagtctttagc

SEQ ID NO: 239962 - DNA, 20 bp, Artificial Sequence
  Description of Artificial Sequence: Synthetic oligonucleotide
  Target: LAMA2; (-) strand; PAM type: YTN; PAM sequence: TTA
taaaacacaactctgataat

SEQ ID NO: 239963 - DNA, 20 bp, Artificial Sequence
  Description of Artificial Sequence: Synthetic oligonucleotide
  Target: LAMA2; (-) strand; PAM type: YTN; PAM sequence: TTT
ataaaacacaactctgataa

SEQ ID NO: 239964 - DNA, 20 bp, Artificial Sequence
  Description of Artificial Sequence: Synthetic oligonucleotide
  Target: LAMA2; (-) strand; PAM type: YTN; PAM sequence: CTT
tataaaacacaactctgata

SEQ ID NO: 239965 - DNA, 20 bp, Artificial Sequence
  Description of Artificial Sequence: Synthetic oligonucleotide
  Target: LAMA2; (-) strand; PAM type: YTN; PAM sequence: CTA
aatagtagtctttataaaac

SEQ ID NO: 239966 - DNA, 20 bp, Artificial Sequence
  Description of Artificial Sequence: Synthetic oligonucleotide
  Target: LAMA2; (-) strand; PAM type: YTN; PAM sequence: TTA
tctaaatagtagtctttata

SEQ ID NO: 239967 - DNA, 20 bp, Artificial Sequence
  Description of Artificial Sequence: Synthetic oligonucleotide
  Target: LAMA2; (-) strand; PAM type: YTN; PAM sequence: TTT
atctaaatagtagtctttat

SEQ ID NO: 239968 - DNA, 20 bp, Artificial Sequence
  Description of Artificial Sequence: Synthetic oligonucleotide
  Target: LAMA2; (-) strand; PAM type: YTN; PAM sequence: TTA
ggaaatagtttatctaaata

SEQ ID NO: 239969 - DNA, 20 bp, Artificial Sequence
  Description of Artificial Sequence: Synthetic oligonucleotide
  Target: LAMA2; (-) strand; PAM type: YTN; PAM sequence: TTT
aggaaatagtttatctaaat

SEQ ID NO: 239970 - DNA, 20 bp, Artificial Sequence
  Description of Artificial Sequence: Synthetic oligonucleotide
  Target: LAMA2; (-) strand; PAM type: YTN; PAM sequence: TTG
aaaggaagaagtgtttagga

SEQ ID NO: 239971 - DNA, 20 bp, Artificial Sequence
  Description of Artificial Sequence: Synthetic oligonucleotide
  Target: LAMA2; (-) strand; PAM type: YTN; PAM sequence: TTA
aagttgaaaggaagaagtgt

SEQ ID NO: 239972 - DNA, 20 bp, Artificial Sequence
  Description of Artificial Sequence: Synthetic oligonucleotide
  Target: LAMA2; (-) strand; PAM type: YTN; PAM sequence: CTG
attaaagttgaaaggaagaa

SEQ ID NO: 239973 - DNA, 20 bp, Artificial Sequence
  Description of Artificial Sequence: Synthetic oligonucleotide
  Target: LAMA2; (-) strand; PAM type: YTN; PAM sequence: TTC
actgattaaagttgaaagga

SEQ ID NO: 239974 - DNA, 20 bp, Artificial Sequence
  Description of Artificial Sequence: Synthetic oligonucleotide
  Target: LAMA2; (-) strand; PAM type: YTN; PAM sequence: TTA
gttcactgattaaagttgaa

SEQ ID NO: 239975 - DNA, 20 bp, Artificial Sequence
  Description of Artificial Sequence: Synthetic oligonucleotide
  Target: LAMA2; (-) strand; PAM type: YTN; PAM sequence: TTC
aggattagttcactgattaa

SEQ ID NO: 239976 - DNA, 20 bp, Artificial Sequence
  Description of Artificial Sequence: Synthetic oligonucleotide
  Target: LAMA2; (-) strand; PAM type: YTN; PAM sequence: CTG
ttcaggattagttcactgat

SEQ ID NO: 239977 - DNA, 20 bp, Artificial Sequence
  Description of Artificial Sequence: Synthetic oligonucleotide
  Target: LAMA2; (-) strand; PAM type: YTN; PAM sequence: CTC
tgttcaggattagttcactg

SEQ ID NO: 239978 - DNA, 20 bp, Artificial Sequence
  Description of Artificial Sequence: Synthetic oligonucleotide
  Target: LAMA2; (-) strand; PAM type: YTN; PAM sequence: TTA
tagctctgttcaggattagt

SEQ ID NO: 239979 - DNA, 20 bp, Artificial Sequence
  Description of Artificial Sequence: Synthetic oligonucleotide
  Target: LAMA2; (-) strand; PAM type: YTN; PAM sequence: TTT
atagctctgttcaggattag

SEQ ID NO: 239980 - DNA, 20 bp, Artificial Sequence
  Description of Artificial Sequence: Synthetic oligonucleotide
  Target: LAMA2; (-) strand; PAM type: YTN; PAM sequence: TTT
tatagctctgttcaggatta

SEQ ID NO: 239981 - DNA, 20 bp, Artificial Sequence
  Description of Artificial Sequence: Synthetic oligonucleotide
  Target: LAMA2; (-) strand; PAM type: YTN; PAM sequence: CTG
caggcagagaaaatatttta

SEQ ID NO: 239982 - DNA, 20 bp, Artificial Sequence
  Description of Artificial Sequence: Synthetic oligonucleotide
  Target: LAMA2; (-) strand; PAM type: YTN; PAM sequence: TTA
aaagcactgcaggcagagaa

SEQ ID NO: 239983 - DNA, 20 bp, Artificial Sequence
  Description of Artificial Sequence: Synthetic oligonucleotide
  Target: LAMA2; (-) strand; PAM type: YTN; PAM sequence: CTT
aaaagcactgcaggcagaga

SEQ ID NO: 239984 - DNA, 20 bp, Artificial Sequence
  Description of Artificial Sequence: Synthetic oligonucleotide
  Target: LAMA2; (-) strand; PAM type: YTN; PAM sequence: TTG
acttaaaagcactgcaggca

SEQ ID NO: 239985 - DNA, 20 bp, Artificial Sequence
  Description of Artificial Sequence: Synthetic oligonucleotide
  Target: LAMA2; (-) strand; PAM type: YTN; PAM sequence: CTT
gacttaaaagcactgcaggc

SEQ ID NO: 239986 - DNA, 20 bp, Artificial Sequence
  Description of Artificial Sequence: Synthetic oligonucleotide
  Target: LAMA2; (-) strand; PAM type: YTN; PAM sequence: TTC
ataatatgaggcttgactta

SEQ ID NO: 239987 - DNA, 20 bp, Artificial Sequence
  Description of Artificial Sequence: Synthetic oligonucleotide
  Target: LAMA2; (-) strand; PAM type: YTN; PAM sequence: TTT
cataatatgaggcttgactt

SEQ ID NO: 239988 - DNA, 20 bp, Artificial Sequence
  Description of Artificial Sequence: Synthetic oligonucleotide
  Target: LAMA2; (-) strand; PAM type: YTN; PAM sequence: TTG
ataacgtatagataatattt

SEQ ID NO: 239989 - DNA, 20 bp, Artificial Sequence
  Description of Artificial Sequence: Synthetic oligonucleotide
  Target: LAMA2; (-) strand; PAM type: YTN; PAM sequence: CTG
aaagcaatacagttgataac

SEQ ID NO: 239990 - DNA, 20 bp, Artificial Sequence
  Description of Artificial Sequence: Synthetic oligonucleotide
  Target: LAMA2; (-) strand; PAM type: YTN; PAM sequence: CTC
tgaaagcaatacagttgata

SEQ ID NO: 239991 - DNA, 20 bp, Artificial Sequence
  Description of Artificial Sequence: Synthetic oligonucleotide
  Target: LAMA2; (-) strand; PAM type: YTN; PAM sequence: CTG
ctctgaaagcaatacagttg

SEQ ID NO: 239992 - DNA, 20 bp, Artificial Sequence
  Description of Artificial Sequence: Synthetic oligonucleotide
  Target: LAMA2; (-) strand; PAM type: YTN; PAM sequence: TTG
aagtctgctctgaaagcaat

SEQ ID NO: 239993 - DNA, 20 bp, Artificial Sequence
  Description of Artificial Sequence: Synthetic oligonucleotide
  Target: LAMA2; (-) strand; PAM type: YTN; PAM sequence: TTT
gaagtctgctctgaaagcaa

SEQ ID NO: 239994 - DNA, 20 bp, Artificial Sequence
  Description of Artificial Sequence: Synthetic oligonucleotide
  Target: LAMA2; (-) strand; PAM type: YTN; PAM sequence: CTT
tgaagtctgctctgaaagca

SEQ ID NO: 239995 - DNA, 20 bp, Artificial Sequence
  Description of Artificial Sequence: Synthetic oligonucleotide
  Target: LAMA2; (-) strand; PAM type: YTN; PAM sequence: TTC
tttgaagtctgctctgaaag

SEQ ID NO: 239996 - DNA, 20 bp, Artificial Sequence
  Description of Artificial Sequence: Synthetic oligonucleotide
  Target: LAMA2; (-) strand; PAM type: YTN; PAM sequence: TTG
attctttgaagtctgctctg

SEQ ID NO: 239997 - DNA, 20 bp, Artificial Sequence
  Description of Artificial Sequence: Synthetic oligonucleotide
  Target: LAMA2; (-) strand; PAM type: YTN; PAM sequence: CTG
tggttgattctttgaagtct

SEQ ID NO: 239998 - DNA, 20 bp, Artificial Sequence
  Description of Artificial Sequence: Synthetic oligonucleotide
  Target: LAMA2; (-) strand; PAM type: YTN; PAM sequence: CTA
gatgtccatctgtggttgat

SEQ ID NO: 239999 - DNA, 20 bp, Artificial Sequence
  Description of Artificial Sequence: Synthetic oligonucleotide
  Target: LAMA2; (-) strand; PAM type: YTN; PAM sequence: TTA
gactagatgtccatctgtgg

SEQ ID NO: 240000 - DNA, 20 bp, Artificial Sequence
  Description of Artificial Sequence: Synthetic oligonucleotide
  Target: LAMA2; (-) strand; PAM type: YTN; PAM sequence: TTA
taaacaaaagaggaagttag

SEQ ID NO: 240001 - DNA, 20 bp, Artificial Sequence
  Description of Artificial Sequence: Synthetic oligonucleotide
  Target: LAMA2; (-) strand; PAM type: YTN; PAM sequence: TTT
ataaacaaaagaggaagtta

SEQ ID NO: 240002 - DNA, 20 bp, Artificial Sequence
  Description of Artificial Sequence: Synthetic oligonucleotide
  Target: LAMA2; (-) strand; PAM type: YTN; PAM sequence: CTT
tataaacaaaagaggaagtt

SEQ ID NO: 240003 - DNA, 20 bp, Artificial Sequence
  Description of Artificial Sequence: Synthetic oligonucleotide
  Target: LAMA2; (-) strand; PAM type: YTN; PAM sequence: CTG
gagggtggggtgggacttta

SEQ ID NO: 240004 - DNA, 20 bp, Artificial Sequence
  Description of Artificial Sequence: Synthetic oligonucleotide
  Target: LAMA2; (-) strand; PAM type: YTN; PAM sequence: CTA
tcagtggggcagtctggagg

SEQ ID NO: 240005 - DNA, 20 bp, Artificial Sequence
  Description of Artificial Sequence: Synthetic oligonucleotide
  Target: LAMA2; (-) strand; PAM type: YTN; PAM sequence: TTG
atctatcagtggggcagtct

SEQ ID NO: 240006 - DNA, 20 bp, Artificial Sequence
  Description of Artificial Sequence: Synthetic oligonucleotide
  Target: LAMA2; (-) strand; PAM type: YTN; PAM sequence: TTT
gatctatcagtggggcagtc

SEQ ID NO: 240007 - DNA, 20 bp, Artificial Sequence
  Description of Artificial Sequence: Synthetic oligonucleotide
  Target: LAMA2; (-) strand; PAM type: YTN; PAM sequence: CTT
tgatctatcagtggggcagt

SEQ ID NO: 240008 - DNA, 20 bp, Artificial Sequence
  Description of Artificial Sequence: Synthetic oligonucleotide
  Target: LAMA2; (-) strand; PAM type: YTN; PAM sequence: CTA
tgaaactttgatctatcagt

SEQ ID NO: 240009 - DNA, 20 bp, Artificial Sequence
  Description of Artificial Sequence: Synthetic oligonucleotide
  Target: LAMA2; (-) strand; PAM type: YTN; PAM sequence: CTG
gctatgaaactttgatctat

SEQ ID NO: 240010 - DNA, 20 bp, Artificial Sequence
  Description of Artificial Sequence: Synthetic oligonucleotide
  Target: LAMA2; (-) strand; PAM type: YTN; PAM sequence: TTG
gctggctatgaaactttgat

SEQ ID NO: 240011 - DNA, 20 bp, Artificial Sequence
  Description of Artificial Sequence: Synthetic oligonucleotide
  Target: LAMA2; (-) strand; PAM type: YTN; PAM sequence: CTT
ggctggctatgaaactttga

SEQ ID NO: 240012 - DNA, 20 bp, Artificial Sequence
  Description of Artificial Sequence: Synthetic oligonucleotide
  Target: LAMA2; (-) strand; PAM type: YTN; PAM sequence: CTG
ccccttggctggctatgaaa

SEQ ID NO: 240013 - DNA, 20 bp, Artificial Sequence
  Description of Artificial Sequence: Synthetic oligonucleotide
  Target: LAMA2; (-) strand; PAM type: YTN; PAM sequence: CTC
tgccccttggctggctatga

SEQ ID NO: 240014 - DNA, 20 bp, Artificial Sequence
  Description of Artificial Sequence: Synthetic oligonucleotide
  Target: LAMA2; (-) strand; PAM type: YTN; PAM sequence: TTG
agtaccagctctgccccttg

SEQ ID NO: 240015 - DNA, 20 bp, Artificial Sequence
  Description of Artificial Sequence: Synthetic oligonucleotide
  Target: LAMA2; (-) strand; PAM type: YTN; PAM sequence: CTT
gagtaccagctctgcccctt

SEQ ID NO: 240016 - DNA, 20 bp, Artificial Sequence
  Description of Artificial Sequence: Synthetic oligonucleotide
  Target: LAMA2; (-) strand; PAM type: YTN; PAM sequence: CTG
atgatcaaagcttgagtacc

SEQ ID NO: 240017 - DNA, 20 bp, Artificial Sequence
  Description of Artificial Sequence: Synthetic oligonucleotide
  Target: LAMA2; (-) strand; PAM type: YTN; PAM sequence: CTA
gcatctgatgatcaaagctt

SEQ ID NO: 240018 - DNA, 20 bp, Artificial Sequence
  Description of Artificial Sequence: Synthetic oligonucleotide
  Target: LAMA2; (-) strand; PAM type: YTN; PAM sequence: CTC
tagcatctgatgatcaaagc

SEQ ID NO: 240019 - DNA, 20 bp, Artificial Sequence
  Description of Artificial Sequence: Synthetic oligonucleotide
  Target: LAMA2; (-) strand; PAM type: YTN; PAM sequence: CTG
tgtctctagcatctgatgat

SEQ ID NO: 240020 - DNA, 20 bp, Artificial Sequence
  Description of Artificial Sequence: Synthetic oligonucleotide
  Target: LAMA2; (-) strand; PAM type: YTN; PAM sequence: TTC
tgtgtctctagcatctgatg

SEQ ID NO: 240021 - DNA, 20 bp, Artificial Sequence
  Description of Artificial Sequence: Synthetic oligonucleotide
  Target: LAMA2; (-) strand; PAM type: YTN; PAM sequence: TTG
aatgggattctgtgtctcta

SEQ ID NO: 240022 - DNA, 20 bp, Artificial Sequence
  Description of Artificial Sequence: Synthetic oligonucleotide
  Target: LAMA2; (-) strand; PAM type: YTN; PAM sequence: TTG
taagacagttgaatgggatt

SEQ ID NO: 240023 - DNA, 20 bp, Artificial Sequence
  Description of Artificial Sequence: Synthetic oligonucleotide
  Target: LAMA2; (-) strand; PAM type: YTN; PAM sequence: TTG
aggcattgtaagacagttga

SEQ ID NO: 240024 - DNA, 20 bp, Artificial Sequence
  Description of Artificial Sequence: Synthetic oligonucleotide
  Target: LAMA2; (-) strand; PAM type: YTN; PAM sequence: CTT
gaggcattgtaagacagttg

SEQ ID NO: 240025 - DNA, 20 bp, Artificial Sequence
  Description of Artificial Sequence: Synthetic oligonucleotide
  Target: LAMA2; (-) strand; PAM type: YTN; PAM sequence: CTA
acgtcacccttgaggcattg

SEQ ID NO: 240026 - DNA, 20 bp, Artificial Sequence
  Description of Artificial Sequence: Synthetic oligonucleotide
  Target: LAMA2; (-) strand; PAM type: YTN; PAM sequence: TTC
taacgtcacccttgaggcat

SEQ ID NO: 240027 - DNA, 20 bp, Artificial Sequence
  Description of Artificial Sequence: Synthetic oligonucleotide
  Target: LAMA2; (-) strand; PAM type: YTN; PAM sequence: TTT
ctaacgtcacccttgaggca

SEQ ID NO: 240028 - DNA, 20 bp, Artificial Sequence
  Description of Artificial Sequence: Synthetic oligonucleotide
  Target: LAMA2; (-) strand; PAM type: YTN; PAM sequence: CTT
tctaacgtcacccttgaggc

SEQ ID NO: 240029 - DNA, 20 bp, Artificial Sequence
  Description of Artificial Sequence: Synthetic oligonucleotide
  Target: LAMA2; (-) strand; PAM type: YTN; PAM sequence: TTC
cctttctaacgtcacccttg

SEQ ID NO: 240030 - DNA, 20 bp, Artificial Sequence
  Description of Artificial Sequence: Synthetic oligonucleotide
  Target: LAMA2; (-) strand; PAM type: YTN; PAM sequence: CTT
ccctttctaacgtcaccctt

SEQ ID NO: 240031 - DNA, 20 bp, Artificial Sequence
  Description of Artificial Sequence: Synthetic oligonucleotide
  Target: LAMA2; (-) strand; PAM type: YTN; PAM sequence: TTC
ttccctttctaacgtcaccc

SEQ ID NO: 240032 - DNA, 20 bp, Artificial Sequence
  Description of Artificial Sequence: Synthetic oligonucleotide
  Target: LAMA2; (-) strand; PAM type: YTN; PAM sequence: TTT
cttccctttctaacgtcacc

SEQ ID NO: 240033 - DNA, 20 bp, Artificial Sequence
  Description of Artificial Sequence: Synthetic oligonucleotide
  Target: LAMA2; (-) strand; PAM type: YTN; PAM sequence: TTG
catttcttccctttctaacg

SEQ ID NO: 240034 - DNA, 20 bp, Artificial Sequence
  Description of Artificial Sequence: Synthetic oligonucleotide
  Target: LAMA2; (-) strand; PAM type: YTN; PAM sequence: CTT
gcatttcttccctttctaac

SEQ ID NO: 240035 - DNA, 20 bp, Artificial Sequence
  Description of Artificial Sequence: Synthetic oligonucleotide
  Target: LAMA2; (-) strand; PAM type: YTN; PAM sequence: TTC
cttgcatttcttccctttct

SEQ ID NO: 240036 - DNA, 20 bp, Artificial Sequence
  Description of Artificial Sequence: Synthetic oligonucleotide
  Target: LAMA2; (-) strand; PAM type: YTN; PAM sequence: CTG
gacaacaagtaatatattcc

SEQ ID NO: 240037 - DNA, 20 bp, Artificial Sequence
  Description of Artificial Sequence: Synthetic oligonucleotide
  Target: LAMA2; (-) strand; PAM type: YTN; PAM sequence: TTC
tggacaacaagtaatatatt

SEQ ID NO: 240038 - DNA, 20 bp, Artificial Sequence
  Description of Artificial Sequence: Synthetic oligonucleotide
  Target: LAMA2; (-) strand; PAM type: YTN; PAM sequence: TTT
ctggacaacaagtaatatat

SEQ ID NO: 240039 - DNA, 20 bp, Artificial Sequence
  Description of Artificial Sequence: Synthetic oligonucleotide
  Target: LAMA2; (-) strand; PAM type: YTN; PAM sequence: CTT
tctggacaacaagtaatata

SEQ ID NO: 240040 - DNA, 20 bp, Artificial Sequence
  Description of Artificial Sequence: Synthetic oligonucleotide
  Target: LAMA2; (-) strand; PAM type: YTN; PAM sequence: TTG
actttctggacaacaagtaa

SEQ ID NO: 240041 - DNA, 20 bp, Artificial Sequence
  Description of Artificial Sequence: Synthetic oligonucleotide
  Target: LAMA2; (-) strand; PAM type: YTN; PAM sequence: CTG
ttgactttctggacaacaag

SEQ ID NO: 240042 - DNA, 20 bp, Artificial Sequence
  Description of Artificial Sequence: Synthetic oligonucleotide
  Target: LAMA2; (-) strand; PAM type: YTN; PAM sequence: TTA
aatgagaaatagaaaccagg

SEQ ID NO: 240043 - DNA, 20 bp, Artificial Sequence
  Description of Artificial Sequence: Synthetic oligonucleotide
  Target: LAMA2; (-) strand; PAM type: YTN; PAM sequence: TTA
gttaaatgagaaatagaaac

SEQ ID NO: 240044 - DNA, 20 bp, Artificial Sequence
  Description of Artificial Sequence: Synthetic oligonucleotide
  Target: LAMA2; (-) strand; PAM type: YTN; PAM sequence: CTT
agttaaatgagaaatagaaa

SEQ ID NO: 240045 - DNA, 20 bp, Artificial Sequence
  Description of Artificial Sequence: Synthetic oligonucleotide
  Target: LAMA2; (-) strand; PAM type: YTN; PAM sequence: TTC
ccttagttaaatgagaaata

SEQ ID NO: 240046 - DNA, 20 bp, Artificial Sequence
  Description of Artificial Sequence: Synthetic oligonucleotide
  Target: LAMA2; (-) strand; PAM type: YTN; PAM sequence: CTG
caattcccttagttaaatga

SEQ ID NO: 240047 - DNA, 20 bp, Artificial Sequence
  Description of Artificial Sequence: Synthetic oligonucleotide
  Target: LAMA2; (-) strand; PAM type: YTN; PAM sequence: CTG
tggaatcactgcaattccct

SEQ ID NO: 240048 - DNA, 20 bp, Artificial Sequence
  Description of Artificial Sequence: Synthetic oligonucleotide
  Target: LAMA2; (-) strand; PAM type: YTN; PAM sequence: TTA
tcccaaagctgtggaatcac

SEQ ID NO: 240049 - DNA, 20 bp, Artificial Sequence
  Description of Artificial Sequence: Synthetic oligonucleotide
  Target: LAMA2; (-) strand; PAM type: YTN; PAM sequence: CTT
atcccaaagctgtggaatca

SEQ ID NO: 240050 - DNA, 20 bp, Artificial Sequence
  Description of Artificial Sequence: Synthetic oligonucleotide
  Target: LAMA2; (-) strand; PAM type: YTN; PAM sequence: CTG
cttatcccaaagctgtggaa

SEQ ID NO: 240051 - DNA, 20 bp, Artificial Sequence
  Description of Artificial Sequence: Synthetic oligonucleotide
  Target: LAMA2; (-) strand; PAM type: YTN; PAM sequence: CTC
tgcttatcccaaagctgtgg

SEQ ID NO: 240052 - DNA, 20 bp, Artificial Sequence
  Description of Artificial Sequence: Synthetic oligonucleotide
  Target: LAMA2; (-) strand; PAM type: YTN; PAM sequence: TTG
actctgcttatcccaaagct

SEQ ID NO: 240053 - DNA, 20 bp, Artificial Sequence
  Description of Artificial Sequence: Synthetic oligonucleotide
  Target: LAMA2; (-) strand; PAM type: YTN; PAM sequence: TTT
gactctgcttatcccaaagc

SEQ ID NO: 240054 - DNA, 20 bp, Artificial Sequence
  Description of Artificial Sequence: Synthetic oligonucleotide
  Target: LAMA2; (-) strand; PAM type: YTN; PAM sequence: CTA
tttgactctgcttatcccaa

SEQ ID NO: 240055 - DNA, 20 bp, Artificial Sequence
  Description of Artificial Sequence: Synthetic oligonucleotide
  Target: LAMA2; (-) strand; PAM type: YTN; PAM sequence: TTC
atagactatttgactctgct

SEQ ID NO: 240056 - DNA, 20 bp, Artificial Sequence
  Description of Artificial Sequence: Synthetic oligonucleotide
  Target: LAMA2; (-) strand; PAM type: YTN; PAM sequence: CTT
catagactatttgactctgc

SEQ ID NO: 240057 - DNA, 20 bp, Artificial Sequence
  Description of Artificial Sequence: Synthetic oligonucleotide
  Target: LAMA2; (-) strand; PAM type: YTN; PAM sequence: TTC
ttcatagactatttgactct

SEQ ID NO: 240058 - DNA, 20 bp, Artificial Sequence
  Description of Artificial Sequence: Synthetic oligonucleotide
  Target: LAMA2; (-) strand; PAM type: YTN; PAM sequence: TTT
cttcatagactatttgactc

SEQ ID NO: 240059 - DNA, 20 bp, Artificial Sequence
  Description of Artificial Sequence: Synthetic oligonucleotide
  Target: LAMA2; (-) strand; PAM type: YTN; PAM sequence: TTA
aaatttcttcatagactatt

SEQ ID NO: 240060 - DNA, 20 bp, Artificial Sequence
  Description of Artificial Sequence: Synthetic oligonucleotide
  Target: LAMA2; (-) strand; PAM type: YTN; PAM sequence: TTT
aaaatttcttcatagactat

SEQ ID NO: 240061 - DNA, 20 bp, Artificial Sequence
  Description of Artificial Sequence: Synthetic oligonucleotide
  Target: LAMA2; (-) strand; PAM type: YTN; PAM sequence: TTT
taaaatttcttcatagacta

SEQ ID NO: 240062 - DNA, 20 bp, Artificial Sequence
  Description of Artificial Sequence: Synthetic oligonucleotide
  Target: LAMA2; (-) strand; PAM type: YTN; PAM sequence: TTT
ttaaaatttcttcatagact

SEQ ID NO: 240063 - DNA, 20 bp, Artificial Sequence
  Description of Artificial Sequence: Synthetic oligonucleotide
  Target: LAMA2; (-) strand; PAM type: YTN; PAM sequence: TTT
tttaaaatttcttcatagac

SEQ ID NO: 240064 - DNA, 20 bp, Artificial Sequence
  Description of Artificial Sequence: Synthetic oligonucleotide
  Target: LAMA2; (-) strand; PAM type: YTN; PAM sequence: CTG
aaatattttttaaaatttct

SEQ ID NO: 240065 - DNA, 20 bp, Artificial Sequence
  Description of Artificial Sequence: Synthetic oligonucleotide
  Target: LAMA2; (-) strand; PAM type: YTN; PAM sequence: CTA
tgtggctgaaatatttttta

SEQ ID NO: 240066 - DNA, 20 bp, Artificial Sequence
  Description of Artificial Sequence: Synthetic oligonucleotide
  Target: LAMA2; (-) strand; PAM type: YTN; PAM sequence: CTC
tatgtggctgaaatattttt

SEQ ID NO: 240067 - DNA, 20 bp, Artificial Sequence
  Description of Artificial Sequence: Synthetic oligonucleotide
  Target: LAMA2; (-) strand; PAM type: YTN; PAM sequence: CTA
agggtgactctatgtggctg

SEQ ID NO: 240068 - DNA, 20 bp, Artificial Sequence
  Description of Artificial Sequence: Synthetic oligonucleotide
  Target: LAMA2; (-) strand; PAM type: YTN; PAM sequence: TTG
tgggtgatgggaagcagaat

SEQ ID NO: 240069 - DNA, 20 bp, Artificial Sequence
  Description of Artificial Sequence: Synthetic oligonucleotide
  Target: LAMA2; (-) strand; PAM type: YTN; PAM sequence: TTC
atgttgtgggtgatgggaag

SEQ ID NO: 240070 - DNA, 20 bp, Artificial Sequence
  Description of Artificial Sequence: Synthetic oligonucleotide
  Target: LAMA2; (-) strand; PAM type: YTN; PAM sequence: CTT
catgttgtgggtgatgggaa

SEQ ID NO: 240071 - DNA, 20 bp, Artificial Sequence
  Description of Artificial Sequence: Synthetic oligonucleotide
  Target: LAMA2; (-) strand; PAM type: YTN; PAM sequence: CTG
cttcatgttgtgggtgatgg

SEQ ID NO: 240072 - DNA, 20 bp, Artificial Sequence
  Description of Artificial Sequence: Synthetic oligonucleotide
  Target: LAMA2; (-) strand; PAM type: YTN; PAM sequence: CTA
gacatgcatgagctgcttca

SEQ ID NO: 240073 - DNA, 20 bp, Artificial Sequence
  Description of Artificial Sequence: Synthetic oligonucleotide
  Target: LAMA2; (-) strand; PAM type: YTN; PAM sequence: CTA
ctagacatgcatgagctgct

SEQ ID NO: 240074 - DNA, 20 bp, Artificial Sequence
  Description of Artificial Sequence: Synthetic oligonucleotide
  Target: LAMA2; (-) strand; PAM type: YTN; PAM sequence: CTA
ccaggaacctactagacatg

SEQ ID NO: 240075 - DNA, 20 bp, Artificial Sequence
  Description of Artificial Sequence: Synthetic oligonucleotide
  Target: LAMA2; (-) strand; PAM type: YTN; PAM sequence: TTA
gggtaccagctaccaggaac

SEQ ID NO: 240076 - DNA, 20 bp, Artificial Sequence
  Description of Artificial Sequence: Synthetic oligonucleotide
  Target: LAMA2; (-) strand; PAM type: YTN; PAM sequence: CTT
agggtaccagctaccaggaa

SEQ ID NO: 240077 - DNA, 20 bp, Artificial Sequence
  Description of Artificial Sequence: Synthetic oligonucleotide
  Target: LAMA2; (-) strand; PAM type: YTN; PAM sequence: CTG
agggcttagggtaccagcta

SEQ ID NO: 240078 - DNA, 20 bp, Artificial Sequence
  Description of Artificial Sequence: Synthetic oligonucleotide
  Target: LAMA2; (-) strand; PAM type: YTN; PAM sequence: TTA
ctgagggcttagggtaccag

SEQ ID NO: 240079 - DNA, 20 bp, Artificial Sequence
  Description of Artificial Sequence: Synthetic oligonucleotide
  Target: LAMA2; (-) strand; PAM type: YTN; PAM sequence: CTG
attactgagggcttagggta

SEQ ID NO: 240080 - DNA, 20 bp, Artificial Sequence
  Description of Artificial Sequence: Synthetic oligonucleotide
  Target: LAMA2; (-) strand; PAM type: YTN; PAM sequence: CTA
gtcaggacaaaacactgatt

SEQ ID NO: 240081 - DNA, 20 bp, Artificial Sequence
  Description of Artificial Sequence: Synthetic oligonucleotide
  Target: LAMA2; (-) strand; PAM type: YTN; PAM sequence: CTA
cctagtcaggacaaaacact

SEQ ID NO: 240082 - DNA, 20 bp, Artificial Sequence
  Description of Artificial Sequence: Synthetic oligonucleotide
  Target: LAMA2; (-) strand; PAM type: YTN; PAM sequence: TTA
aagcatcctacctagtcagg

SEQ ID NO: 240083 - DNA, 20 bp, Artificial Sequence
  Description of Artificial Sequence: Synthetic oligonucleotide
  Target: LAMA2; (-) strand; PAM type: YTN; PAM sequence: TTT
aaagcatcctacctagtcag

SEQ ID NO: 240084 - DNA, 20 bp, Artificial Sequence
  Description of Artificial Sequence: Synthetic oligonucleotide
  Target: LAMA2; (-) strand; PAM type: YTN; PAM sequence: CTA
atttaaagcatcctacctag

SEQ ID NO: 240085 - DNA, 20 bp, Artificial Sequence
  Description of Artificial Sequence: Synthetic oligonucleotide
  Target: LAMA2; (-) strand; PAM type: YTN; PAM sequence: CTC
taatttaaagcatcctacct

SEQ ID NO: 240086 - DNA, 20 bp, Artificial Sequence
  Description of Artificial Sequence: Synthetic oligonucleotide
  Target: LAMA2; (-) strand; PAM type: YTN; PAM sequence: CTA
cacctctaatttaaagcatc

SEQ ID NO: 240087 - DNA, 20 bp, Artificial Sequence
  Description of Artificial Sequence: Synthetic oligonucleotide
  Target: LAMA2; (-) strand; PAM type: YTN; PAM sequence: CTA
cagctacacctctaatttaa

SEQ ID NO: 240088 - DNA, 20 bp, Artificial Sequence
  Description of Artificial Sequence: Synthetic oligonucleotide
  Target: LAMA2; (-) strand; PAM type: YTN; PAM sequence: TTC
agccaaggtcaggcctacag

SEQ ID NO: 240089 - DNA, 20 bp, Artificial Sequence
  Description of Artificial Sequence: Synthetic oligonucleotide
  Target: LAMA2; (-) strand; PAM type: YTN; PAM sequence: CTT
cagccaaggtcaggcctaca

SEQ ID NO: 240090 - DNA, 20 bp, Artificial Sequence
  Description of Artificial Sequence: Synthetic oligonucleotide
  Target: LAMA2; (-) strand; PAM type: YTN; PAM sequence: TTA
tgcttcagccaaggtcaggc

SEQ ID NO: 240091 - DNA, 20 bp, Artificial Sequence
  Description of Artificial Sequence: Synthetic oligonucleotide
  Target: LAMA2; (-) strand; PAM type: YTN; PAM sequence: TTT
atgcttcagccaaggtcagg

SEQ ID NO: 240092 - DNA, 20 bp, Artificial Sequence
  Description of Artificial Sequence: Synthetic oligonucleotide
  Target: LAMA2; (-) strand; PAM type: YTN; PAM sequence: CTT
tatgcttcagccaaggtcag

SEQ ID NO: 240093 - DNA, 20 bp, Artificial Sequence
  Description of Artificial Sequence: Synthetic oligonucleotide
  Target: LAMA2; (-) strand; PAM type: YTN; PAM sequence: TTA
catctttatgcttcagccaa

SEQ ID NO: 240094 - DNA, 20 bp, Artificial Sequence
  Description of Artificial Sequence: Synthetic oligonucleotide
  Target: LAMA2; (-) strand; PAM type: YTN; PAM sequence: TTT
acatctttatgcttcagcca

SEQ ID NO: 240095 - DNA, 20 bp, Artificial Sequence
  Description of Artificial Sequence: Synthetic oligonucleotide
  Target: LAMA2; (-) strand; PAM type: YTN; PAM sequence: TTT
tacatctttatgcttcagcc

SEQ ID NO: 240096 - DNA, 20 bp, Artificial Sequence
  Description of Artificial Sequence: Synthetic oligonucleotide
  Target: LAMA2; (-) strand; PAM type: YTN; PAM sequence: TTT
ttacatctttatgcttcagc

SEQ ID NO: 240097 - DNA, 20 bp, Artificial Sequence
  Description of Artificial Sequence: Synthetic oligonucleotide
  Target: LAMA2; (-) strand; PAM type: YTN; PAM sequence: TTG
tttttacatctttatgcttc

SEQ ID NO: 240098 - DNA, 20 bp, Artificial Sequence
  Description of Artificial Sequence: Synthetic oligonucleotide
  Target: LAMA2; (-) strand; PAM type: YTN; PAM sequence: TTT
gtttttacatctttatgctt

SEQ ID NO: 240099 - DNA, 20 bp, Artificial Sequence
  Description of Artificial Sequence: Synthetic oligonucleotide
  Target: LAMA2; (-) strand; PAM type: YTN; PAM sequence: CTG
ggaatgcataatgatttgtt

SEQ ID NO: 240100 - DNA, 20 bp, Artificial Sequence
  Description of Artificial Sequence: Synthetic oligonucleotide
  Target: LAMA2; (-) strand; PAM type: YTN; PAM sequence: TTA
aaggaggaatctgggaatgc

SEQ ID NO: 240101 - DNA, 20 bp, Artificial Sequence
  Description of Artificial Sequence: Synthetic oligonucleotide
  Target: LAMA2; (-) strand; PAM type: YTN; PAM sequence: CTT
aaaggaggaatctgggaatg

SEQ ID NO: 240102 - DNA, 20 bp, Artificial Sequence
  Description of Artificial Sequence: Synthetic oligonucleotide
  Target: LAMA2; (-) strand; PAM type: YTN; PAM sequence: CTG
gcccagaaatggaaggaacc

SEQ ID NO: 240103 - DNA, 20 bp, Artificial Sequence
  Description of Artificial Sequence: Synthetic oligonucleotide
  Target: LAMA2; (-) strand; PAM type: YTN; PAM sequence: CTA
gatccctggcccagaaatgg

SEQ ID NO: 240104 - DNA, 20 bp, Artificial Sequence
  Description of Artificial Sequence: Synthetic oligonucleotide
  Target: LAMA2; (-) strand; PAM type: YTN; PAM sequence: CTA
cagcctagatccctggccca

SEQ ID NO: 240105 - DNA, 20 bp, Artificial Sequence
  Description of Artificial Sequence: Synthetic oligonucleotide
  Target: LAMA2; (-) strand; PAM type: YTN; PAM sequence: CTG
tggggacctacagcctagat

SEQ ID NO: 240106 - DNA, 20 bp, Artificial Sequence
  Description of Artificial Sequence: Synthetic oligonucleotide
  Target: LAMA2; (-) strand; PAM type: YTN; PAM sequence: TTC
agatagggtcagaagtgctg

SEQ ID NO: 240107 - DNA, 20 bp, Artificial Sequence
  Description of Artificial Sequence: Synthetic oligonucleotide
  Target: LAMA2; (-) strand; PAM type: YTN; PAM sequence: CTT
cagatagggtcagaagtgct

SEQ ID NO: 240108 - DNA, 20 bp, Artificial Sequence
  Description of Artificial Sequence: Synthetic oligonucleotide
  Target: LAMA2; (-) strand; PAM type: YTN; PAM sequence: TTC
cttcagatagggtcagaagt

SEQ ID NO: 240109 - DNA, 20 bp, Artificial Sequence
  Description of Artificial Sequence: Synthetic oligonucleotide
  Target: LAMA2; (-) strand; PAM type: YTN; PAM sequence: CTG
tatgtattccttcagatagg

SEQ ID NO: 240110 - DNA, 20 bp, Artificial Sequence
  Description of Artificial Sequence: Synthetic oligonucleotide
  Target: LAMA2; (-) strand; PAM type: YTN; PAM sequence: CTG
gcaatactgtatgtattcct

SEQ ID NO: 240111 - DNA, 20 bp, Artificial Sequence
  Description of Artificial Sequence: Synthetic oligonucleotide
  Target: LAMA2; (-) strand; PAM type: YTN; PAM sequence: CTA
tgacaacacctggcaatact

SEQ ID NO: 240112 - DNA, 20 bp, Artificial Sequence
  Description of Artificial Sequence: Synthetic oligonucleotide
  Target: LAMA2; (-) strand; PAM type: YTN; PAM sequence: TTG
gtgctatgacaacacctggc

SEQ ID NO: 240113 - DNA, 20 bp, Artificial Sequence
  Description of Artificial Sequence: Synthetic oligonucleotide
  Target: LAMA2; (-) strand; PAM type: YTN; PAM sequence: CTT
ggtgctatgacaacacctgg

SEQ ID NO: 240114 - DNA, 20 bp, Artificial Sequence
  Description of Artificial Sequence: Synthetic oligonucleotide
  Target: LAMA2; (-) strand; PAM type: YTN; PAM sequence: TTG
aacccaccagccttggtgct

SEQ ID NO: 240115 - DNA, 20 bp, Artificial Sequence
  Description of Artificial Sequence: Synthetic oligonucleotide
  Target: LAMA2; (-) strand; PAM type: YTN; PAM sequence: TTT
gaacccaccagccttggtgc

SEQ ID NO: 240116 - DNA, 20 bp, Artificial Sequence
  Description of Artificial Sequence: Synthetic oligonucleotide
  Target: LAMA2; (-) strand; PAM type: YTN; PAM sequence: TTA
aggatatttgaacccaccag

SEQ ID NO: 240117 - DNA, 20 bp, Artificial Sequence
  Description of Artificial Sequence: Synthetic oligonucleotide
  Target: LAMA2; (-) strand; PAM type: YTN; PAM sequence: CTT
aaggatatttgaacccacca

SEQ ID NO: 240118 - DNA, 20 bp, Artificial Sequence
  Description of Artificial Sequence: Synthetic oligonucleotide
  Target: LAMA2; (-) strand; PAM type: YTN; PAM sequence: TTG
aggcttaaggatatttgaac

SEQ ID NO: 240119 - DNA, 20 bp, Artificial Sequence
  Description of Artificial Sequence: Synthetic oligonucleotide
  Target: LAMA2; (-) strand; PAM type: YTN; PAM sequence: TTT
gaggcttaaggatatttgaa

SEQ ID NO: 240120 - DNA, 20 bp, Artificial Sequence
  Description of Artificial Sequence: Synthetic oligonucleotide
  Target: LAMA2; (-) strand; PAM type: YTN; PAM sequence: CTT
tgaggcttaaggatatttga

SEQ ID NO: 240121 - DNA, 20 bp, Artificial Sequence
  Description of Artificial Sequence: Synthetic oligonucleotide
  Target: LAMA2; (-) strand; PAM type: YTN; PAM sequence: CTA
ctttgaggcttaaggatatt

SEQ ID NO: 240122 - DNA, 20 bp, Artificial Sequence
  Description of Artificial Sequence: Synthetic oligonucleotide
  Target: LAMA2; (-) strand; PAM type: YTN; PAM sequence: TTC
tactttgaggcttaaggata

SEQ ID NO: 240123 - DNA, 20 bp, Artificial Sequence
  Description of Artificial Sequence: Synthetic oligonucleotide
  Target: LAMA2; (-) strand; PAM type: YTN; PAM sequence: TTT
ctactttgaggcttaaggat

SEQ ID NO: 240124 - DNA, 20 bp, Artificial Sequence
  Description of Artificial Sequence: Synthetic oligonucleotide
  Target: LAMA2; (-) strand; PAM type: YTN; PAM sequence: TTA
aaatttctactttgaggctt

SEQ ID NO: 240125 - DNA, 20 bp, Artificial Sequence
  Description of Artificial Sequence: Synthetic oligonucleotide
  Target: LAMA2; (-) strand; PAM type: YTN; PAM sequence: TTT
aaaatttctactttgaggct

SEQ ID NO: 240126 - DNA, 20 bp, Artificial Sequence
  Description of Artificial Sequence: Synthetic oligonucleotide
  Target: LAMA2; (-) strand; PAM type: YTN; PAM sequence: TTT
taaaatttctactttgaggc

SEQ ID NO: 240127 - DNA, 20 bp, Artificial Sequence
  Description of Artificial Sequence: Synthetic oligonucleotide
  Target: LAMA2; (-) strand; PAM type: YTN; PAM sequence: TTT
ttaaaatttctactttgagg

SEQ ID NO: 240128 - DNA, 20 bp, Artificial Sequence
  Description of Artificial Sequence: Synthetic oligonucleotide
  Target: LAMA2; (-) strand; PAM type: YTN; PAM sequence: CTT
tttaaaatttctactttgag

SEQ ID NO: 240129 - DNA, 20 bp, Artificial Sequence
  Description of Artificial Sequence: Synthetic oligonucleotide
  Target: LAMA2; (-) strand; PAM type: YTN; PAM sequence: CTC
ccactttttaaaatttctac

SEQ ID NO: 240130 - DNA, 20 bp, Artificial Sequence
  Description of Artificial Sequence: Synthetic oligonucleotide
  Target: LAMA2; (-) strand; PAM type: YTN; PAM sequence: TTC
cacccctcccactttttaaa

SEQ ID NO: 240131 - DNA, 20 bp, Artificial Sequence
  Description of Artificial Sequence: Synthetic oligonucleotide
  Target: LAMA2; (-) strand; PAM type: YTN; PAM sequence: TTT
ccacccctcccactttttaa

SEQ ID NO: 240132 - DNA, 20 bp, Artificial Sequence
  Description of Artificial Sequence: Synthetic oligonucleotide
  Target: LAMA2; (-) strand; PAM type: YTN; PAM sequence: TTC
agtatttccacccctcccac

SEQ ID NO: 240133 - DNA, 20 bp, Artificial Sequence
  Description of Artificial Sequence: Synthetic oligonucleotide
  Target: LAMA2; (-) strand; PAM type: YTN; PAM sequence: TTC
attcagtatttccacccctc

SEQ ID NO: 240134 - DNA, 20 bp, Artificial Sequence
  Description of Artificial Sequence: Synthetic oligonucleotide
  Target: LAMA2; (-) strand; PAM type: YTN; PAM sequence: TTT
cattcagtatttccacccct

SEQ ID NO: 240135 - DNA, 20 bp, Artificial Sequence
  Description of Artificial Sequence: Synthetic oligonucleotide
  Target: LAMA2; (-) strand; PAM type: YTN; PAM sequence: CTG
aaaggtggtgtttcattcag

SEQ ID NO: 240136 - DNA, 20 bp, Artificial Sequence
  Description of Artificial Sequence: Synthetic oligonucleotide
  Target: LAMA2; (-) strand; PAM type: YTN; PAM sequence: CTA
tgcaagtacctgaaaggtgg

SEQ ID NO: 240137 - DNA, 20 bp, Artificial Sequence
  Description of Artificial Sequence: Synthetic oligonucleotide
  Target: LAMA2; (-) strand; PAM type: YTN; PAM sequence: TTG
taatgcagagggaaaaagaa

SEQ ID NO: 240138 - DNA, 20 bp, Artificial Sequence
  Description of Artificial Sequence: Synthetic oligonucleotide
  Target: LAMA2; (-) strand; PAM type: YTN; PAM sequence: TTT
gtaatgcagagggaaaaaga

SEQ ID NO: 240139 - DNA, 20 bp, Artificial Sequence
  Description of Artificial Sequence: Synthetic oligonucleotide
  Target: LAMA2; (-) strand; PAM type: YTN; PAM sequence: TTG
cgtatgtatttgtaatgcag

SEQ ID NO: 240140 - DNA, 20 bp, Artificial Sequence
  Description of Artificial Sequence: Synthetic oligonucleotide
  Target: LAMA2; (-) strand; PAM type: YTN; PAM sequence: CTG
aaaaagtattgcgtatgtat

SEQ ID NO: 240141 - DNA, 20 bp, Artificial Sequence
  Description of Artificial Sequence: Synthetic oligonucleotide
  Target: LAMA2; (-) strand; PAM type: YTN; PAM sequence: TTG
gaaaaaacaacctgaaaaag

SEQ ID NO: 240142 - DNA, 20 bp, Artificial Sequence
  Description of Artificial Sequence: Synthetic oligonucleotide
  Target: LAMA2; (-) strand; PAM type: YTN; PAM sequence: TTT
ggaaaaaacaacctgaaaaa

SEQ ID NO: 240143 - DNA, 20 bp, Artificial Sequence
  Description of Artificial Sequence: Synthetic oligonucleotide
  Target: LAMA2; (-) strand; PAM type: YTN; PAM sequence: TTT
tggaaaaaacaacctgaaaa

SEQ ID NO: 240144 - DNA, 20 bp, Artificial Sequence
  Description of Artificial Sequence: Synthetic oligonucleotide
  Target: LAMA2; (-) strand; PAM type: YTN; PAM sequence: CTT
ttggaaaaaacaacctgaaa

SEQ ID NO: 240145 - DNA, 20 bp, Artificial Sequence
  Description of Artificial Sequence: Synthetic oligonucleotide
  Target: LAMA2; (-) strand; PAM type: YTN; PAM sequence: TTG
cttttggaaaaaacaacctg

SEQ ID NO: 240146 - DNA, 20 bp, Artificial Sequence
  Description of Artificial Sequence: Synthetic oligonucleotide
  Target: LAMA2; (-) strand; PAM type: YTN; PAM sequence: TTG
ttgcttttggaaaaaacaac

SEQ ID NO: 240147 - DNA, 20 bp, Artificial Sequence
  Description of Artificial Sequence: Synthetic oligonucleotide
  Target: LAMA2; (-) strand; PAM type: YTN; PAM sequence: TTA
ttgttgcttttggaaaaaac

SEQ ID NO: 240148 - DNA, 20 bp, Artificial Sequence
  Description of Artificial Sequence: Synthetic oligonucleotide
  Target: LAMA2; (-) strand; PAM type: YTN; PAM sequence: TTT
attgttgcttttggaaaaaa

SEQ ID NO: 240149 - DNA, 20 bp, Artificial Sequence
  Description of Artificial Sequence: Synthetic oligonucleotide
  Target: LAMA2; (-) strand; PAM type: YTN; PAM sequence: CTA
gtagtttattgttgcttttg

SEQ ID NO: 240150 - DNA, 20 bp, Artificial Sequence
  Description of Artificial Sequence: Synthetic oligonucleotide
  Target: LAMA2; (-) strand; PAM type: YTN; PAM sequence: CTC
cactagtagtttattgttgc

SEQ ID NO: 240151 - DNA, 20 bp, Artificial Sequence
  Description of Artificial Sequence: Synthetic oligonucleotide
  Target: LAMA2; (-) strand; PAM type: YTN; PAM sequence: TTA
ctccactagtagtttattgt

SEQ ID NO: 240152 - DNA, 20 bp, Artificial Sequence
  Description of Artificial Sequence: Synthetic oligonucleotide
  Target: LAMA2; (-) strand; PAM type: YTN; PAM sequence: TTT
actccactagtagtttattg

SEQ ID NO: 240153 - DNA, 20 bp, Artificial Sequence
  Description of Artificial Sequence: Synthetic oligonucleotide
  Target: LAMA2; (-) strand; PAM type: YTN; PAM sequence: TTT
tactccactagtagtttatt

SEQ ID NO: 240154 - DNA, 20 bp, Artificial Sequence
  Description of Artificial Sequence: Synthetic oligonucleotide
  Target: LAMA2; (-) strand; PAM type: YTN; PAM sequence: TTT
ttactccactagtagtttat

SEQ ID NO: 240155 - DNA, 20 bp, Artificial Sequence
  Description of Artificial Sequence: Synthetic oligonucleotide
  Target: LAMA2; (-) strand; PAM type: YTN; PAM sequence: TTT
tttactccactagtagttta

SEQ ID NO: 240156 - DNA, 20 bp, Artificial Sequence
  Description of Artificial Sequence: Synthetic oligonucleotide
  Target: LAMA2; (-) strand; PAM type: YTN; PAM sequence: TTC
cgtattttttactccactag

SEQ ID NO: 240157 - DNA, 20 bp, Artificial Sequence
  Description of Artificial Sequence: Synthetic oligonucleotide
  Target: LAMA2; (-) strand; PAM type: YTN; PAM sequence: TTC
agttccgtattttttactcc

SEQ ID NO: 240158 - DNA, 20 bp, Artificial Sequence
  Description of Artificial Sequence: Synthetic oligonucleotide
  Target: LAMA2; (-) strand; PAM type: YTN; PAM sequence: TTT
cagttccgtattttttactc

SEQ ID NO: 240159 - DNA, 20 bp, Artificial Sequence
  Description of Artificial Sequence: Synthetic oligonucleotide
  Target: LAMA2; (-) strand; PAM type: YTN; PAM sequence: CTT
tcagttccgtattttttact

SEQ ID NO: 240160 - DNA, 20 bp, Artificial Sequence
  Description of Artificial Sequence: Synthetic oligonucleotide
  Target: LAMA2; (-) strand; PAM type: YTN; PAM sequence: TTG
gactttcagttccgtatttt

SEQ ID NO: 240161 - DNA, 20 bp, Artificial Sequence
  Description of Artificial Sequence: Synthetic oligonucleotide
  Target: LAMA2; (-) strand; PAM type: YTN; PAM sequence: TTA
atcaaacagttggactttca

SEQ ID NO: 240162 - DNA, 20 bp, Artificial Sequence
  Description of Artificial Sequence: Synthetic oligonucleotide
  Target: LAMA2; (-) strand; PAM type: YTN; PAM sequence: CTT
aatcaaacagttggactttc

SEQ ID NO: 240163 - DNA, 20 bp, Artificial Sequence
  Description of Artificial Sequence: Synthetic oligonucleotide
  Target: LAMA2; (-) strand; PAM type: YTN; PAM sequence: TTA
taacatacacttaatcaaac

SEQ ID NO: 240164 - DNA, 20 bp, Artificial Sequence
  Description of Artificial Sequence: Synthetic oligonucleotide
  Target: LAMA2; (-) strand; PAM type: YTN; PAM sequence: CTC
aaagtcatacaatggttata

SEQ ID NO: 240165 - DNA, 20 bp, Artificial Sequence
  Description of Artificial Sequence: Synthetic oligonucleotide
  Target: LAMA2; (-) strand; PAM type: YTN; PAM sequence: TTC
actcaaagtcatacaatggt

SEQ ID NO: 240166 - DNA, 20 bp, Artificial Sequence
  Description of Artificial Sequence: Synthetic oligonucleotide
  Target: LAMA2; (-) strand; PAM type: YTN; PAM sequence: TTA
aaaatagaaattcactcaaa

SEQ ID NO: 240167 - DNA, 20 bp, Artificial Sequence
  Description of Artificial Sequence: Synthetic oligonucleotide
  Target: LAMA2; (-) strand; PAM type: YTN; PAM sequence: CTT
aaaaatagaaattcactcaa

SEQ ID NO: 240168 - DNA, 20 bp, Artificial Sequence
  Description of Artificial Sequence: Synthetic oligonucleotide
  Target: LAMA2; (-) strand; PAM type: YTN; PAM sequence: TTC
ttaaaaatagaaattcactc

SEQ ID NO: 240169 - DNA, 20 bp, Artificial Sequence
  Description of Artificial Sequence: Synthetic oligonucleotide
  Target: LAMA2; (-) strand; PAM type: YTN; PAM sequence: TTT
cttaaaaatagaaattcact

SEQ ID NO: 240170 - DNA, 20 bp, Artificial Sequence
  Description of Artificial Sequence: Synthetic oligonucleotide
  Target: LAMA2; (-) strand; PAM type: YTN; PAM sequence: CTT
tcttaaaaatagaaattcac

SEQ ID NO: 240171 - DNA, 20 bp, Artificial Sequence
  Description of Artificial Sequence: Synthetic oligonucleotide
  Target: LAMA2; (-) strand; PAM type: YTN; PAM sequence: TTC
caaataccactttcttaaaa

SEQ ID NO: 240172 - DNA, 20 bp, Artificial Sequence
  Description of Artificial Sequence: Synthetic oligonucleotide
  Target: LAMA2; (-) strand; PAM type: YTN; PAM sequence: TTG
tggttccaaataccactttc

SEQ ID NO: 240173 - DNA, 20 bp, Artificial Sequence
  Description of Artificial Sequence: Synthetic oligonucleotide
  Target: LAMA2; (-) strand; PAM type: YTN; PAM sequence: TTA
aaaaattgtggttccaaata

SEQ ID NO: 240174 - DNA, 20 bp, Artificial Sequence
  Description of Artificial Sequence: Synthetic oligonucleotide
  Target: LAMA2; (-) strand; PAM type: YTN; PAM sequence: TTT
aaaaaattgtggttccaaat

SEQ ID NO: 240175 - DNA, 20 bp, Artificial Sequence
  Description of Artificial Sequence: Synthetic oligonucleotide
  Target: LAMA2; (-) strand; PAM type: YTN; PAM sequence: TTT
taaaaaattgtggttccaaa

SEQ ID NO: 240176 - DNA, 20 bp, Artificial Sequence
  Description of Artificial Sequence: Synthetic oligonucleotide
  Target: LAMA2; (-) strand; PAM type: YTN; PAM sequence: TTT
ttaaaaaattgtggttccaa

SEQ ID NO: 240177 - DNA, 20 bp, Artificial Sequence
  Description of Artificial Sequence: Synthetic oligonucleotide
  Target: LAMA2; (-) strand; PAM type: YTN; PAM sequence: CTT
tttaaaaaattgtggttcca

SEQ ID NO: 240178 - DNA, 20 bp, Artificial Sequence
  Description of Artificial Sequence: Synthetic oligonucleotide
  Target: LAMA2; (-) strand; PAM type: YTN; PAM sequence: CTA
tgctttttaaaaaattgtgg

SEQ ID NO: 240179 - DNA, 20 bp, Artificial Sequence
  Description of Artificial Sequence: Synthetic oligonucleotide
  Target: LAMA2; (-) strand; PAM type: YTN; PAM sequence: TTG
aacctatgctttttaaaaaa

SEQ ID NO: 240180 - DNA, 20 bp, Artificial Sequence
  Description of Artificial Sequence: Synthetic oligonucleotide
  Target: LAMA2; (-) strand; PAM type: YTN; PAM sequence: TTC
attgaacctatgctttttaa

SEQ ID NO: 240181 - DNA, 20 bp, Artificial Sequence
  Description of Artificial Sequence: Synthetic oligonucleotide
  Target: LAMA2; (-) strand; PAM type: YTN; PAM sequence: TTT
cattgaacctatgcttttta

SEQ ID NO: 240182 - DNA, 20 bp, Artificial Sequence
  Description of Artificial Sequence: Synthetic oligonucleotide
  Target: LAMA2; (-) strand; PAM type: YTN; PAM sequence: TTT
tcattgaacctatgcttttt

SEQ ID NO: 240183 - DNA, 20 bp, Artificial Sequence
  Description of Artificial Sequence: Synthetic oligonucleotide
  Target: LAMA2; (-) strand; PAM type: YTN; PAM sequence: CTG
ttttcattgaacctatgctt

SEQ ID NO: 240184 - DNA, 20 bp, Artificial Sequence
  Description of Artificial Sequence: Synthetic oligonucleotide
  Target: LAMA2; (-) strand; PAM type: YTN; PAM sequence: CTA
taataatctgttttcattga

SEQ ID NO: 240185 - DNA, 20 bp, Artificial Sequence
  Description of Artificial Sequence: Synthetic oligonucleotide
  Target: LAMA2; (-) strand; PAM type: YTN; PAM sequence: TTC
tataataatctgttttcatt

SEQ ID NO: 240186 - DNA, 20 bp, Artificial Sequence
  Description of Artificial Sequence: Synthetic oligonucleotide
  Target: LAMA2; (-) strand; PAM type: YTN; PAM sequence: TTC
caaggtattctataataatc

SEQ ID NO: 240187 - DNA, 20 bp, Artificial Sequence
  Description of Artificial Sequence: Synthetic oligonucleotide
  Target: LAMA2; (-) strand; PAM type: YTN; PAM sequence: TTT
ccaaggtattctataataat

SEQ ID NO: 240188 - DNA, 20 bp, Artificial Sequence
  Description of Artificial Sequence: Synthetic oligonucleotide
  Target: LAMA2; (-) strand; PAM type: YTN; PAM sequence: CTA
ggagtttccaaggtattcta

SEQ ID NO: 240189 - DNA, 20 bp, Artificial Sequence
  Description of Artificial Sequence: Synthetic oligonucleotide
  Target: LAMA2; (-) strand; PAM type: YTN; PAM sequence: TTC
taggagtttccaaggtattc

SEQ ID NO: 240190 - DNA, 20 bp, Artificial Sequence
  Description of Artificial Sequence: Synthetic oligonucleotide
  Target: LAMA2; (-) strand; PAM type: YTN; PAM sequence: TTT
ctaggagtttccaaggtatt

SEQ ID NO: 240191 - DNA, 20 bp, Artificial Sequence
  Description of Artificial Sequence: Synthetic oligonucleotide
  Target: LAMA2; (-) strand; PAM type: YTN; PAM sequence: TTG
atgtttctaggagtttccaa

SEQ ID NO: 240192 - DNA, 20 bp, Artificial Sequence
  Description of Artificial Sequence: Synthetic oligonucleotide
  Target: LAMA2; (-) strand; PAM type: YTN; PAM sequence: CTT
gatgtttctaggagtttcca

SEQ ID NO: 240193 - DNA, 20 bp, Artificial Sequence
  Description of Artificial Sequence: Synthetic oligonucleotide
  Target: LAMA2; (-) strand; PAM type: YTN; PAM sequence: TTC
cttgatgtttctaggagttt

SEQ ID NO: 240194 - DNA, 20 bp, Artificial Sequence
  Description of Artificial Sequence: Synthetic oligonucleotide
  Target: LAMA2; (-) strand; PAM type: YTN; PAM sequence: TTT
ccttgatgtttctaggagtt

SEQ ID NO: 240195 - DNA, 20 bp, Artificial Sequence
  Description of Artificial Sequence: Synthetic oligonucleotide
  Target: LAMA2; (-) strand; PAM type: YTN; PAM sequence: TTT
tccttgatgtttctaggagt

SEQ ID NO: 240196 - DNA, 20 bp, Artificial Sequence
  Description of Artificial Sequence: Synthetic oligonucleotide
  Target: LAMA2; (-) strand; PAM type: YTN; PAM sequence: TTT
ttccttgatgtttctaggag

SEQ ID NO: 240197 - DNA, 20 bp, Artificial Sequence
  Description of Artificial Sequence: Synthetic oligonucleotide
  Target: LAMA2; (-) strand; PAM type: YTN; PAM sequence: TTT
tttccttgatgtttctagga

SEQ ID NO: 240198 - DNA, 20 bp, Artificial Sequence
  Description of Artificial Sequence: Synthetic oligonucleotide
  Target: LAMA2; (-) strand; PAM type: YTN; PAM sequence: TTT
ttttccttgatgtttctagg

SEQ ID NO: 240199 - DNA, 20 bp, Artificial Sequence
  Description of Artificial Sequence: Synthetic oligonucleotide
  Target: LAMA2; (-) strand; PAM type: YTN; PAM sequence: TTT
tttttccttgatgtttctag

SEQ ID NO: 240200 - DNA, 20 bp, Artificial Sequence
  Description of Artificial Sequence: Synthetic oligonucleotide
  Target: LAMA2; (-) strand; PAM type: YTN; PAM sequence: TTA
ttttttttccttgatgtttc

SEQ ID NO: 240201 - DNA, 20 bp, Artificial Sequence
  Description of Artificial Sequence: Synthetic oligonucleotide
  Target: LAMA2; (-) strand; PAM type: YTN; PAM sequence: TTT
attttttttccttgatgttt

SEQ ID NO: 240202 - DNA, 20 bp, Artificial Sequence
  Description of Artificial Sequence: Synthetic oligonucleotide
  Target: LAMA2; (-) strand; PAM type: YTN; PAM sequence: TTG
tttattttttttccttgatg

SEQ ID NO: 240203 - DNA, 20 bp, Artificial Sequence
  Description of Artificial Sequence: Synthetic oligonucleotide
  Target: LAMA2; (-) strand; PAM type: YTN; PAM sequence: TTC
cattgtttattttttttcct

SEQ ID NO: 240204 - DNA, 20 bp, Artificial Sequence
  Description of Artificial Sequence: Synthetic oligonucleotide
  Target: LAMA2; (-) strand; PAM type: YTN; PAM sequence: CTT
ccattgtttattttttttcc

SEQ ID NO: 240205 - DNA, 20 bp, Artificial Sequence
  Description of Artificial Sequence: Synthetic oligonucleotide
  Target: LAMA2; (-) strand; PAM type: YTN; PAM sequence: CTC
acataggcttccattgttta

SEQ ID NO: 240206 - DNA, 20 bp, Artificial Sequence
  Description of Artificial Sequence: Synthetic oligonucleotide
  Target: LAMA2; (-) strand; PAM type: YTN; PAM sequence: TTA
tatgtactcacataggcttc

SEQ ID NO: 240207 - DNA, 20 bp, Artificial Sequence
  Description of Artificial Sequence: Synthetic oligonucleotide
  Target: LAMA2; (-) strand; PAM type: YTN; PAM sequence: TTA
gacatattatatgtactcac

SEQ ID NO: 240208 - DNA, 20 bp, Artificial Sequence
  Description of Artificial Sequence: Synthetic oligonucleotide
  Target: LAMA2; (-) strand; PAM type: YTN; PAM sequence: TTA
tgaatatcattagacatatt

SEQ ID NO: 240209 - DNA, 20 bp, Artificial Sequence
  Description of Artificial Sequence: Synthetic oligonucleotide
  Target: LAMA2; (-) strand; PAM type: YTN; PAM sequence: CTG
agcattatgaatatcattag

SEQ ID NO: 240210 - DNA, 20 bp, Artificial Sequence
  Description of Artificial Sequence: Synthetic oligonucleotide
  Target: LAMA2; (-) strand; PAM type: YTN; PAM sequence: TTA
gaaaaaaacctgagcattat

SEQ ID NO: 240211 - DNA, 20 bp, Artificial Sequence
  Description of Artificial Sequence: Synthetic oligonucleotide
  Target: LAMA2; (-) strand; PAM type: YTN; PAM sequence: TTT
agaaaaaaacctgagcatta

SEQ ID NO: 240212 - DNA, 20 bp, Artificial Sequence
  Description of Artificial Sequence: Synthetic oligonucleotide
  Target: LAMA2; (-) strand; PAM type: YTN; PAM sequence: TTA
aaaacaaaaaaaaccaaacc

SEQ ID NO: 240213 - DNA, 20 bp, Artificial Sequence
  Description of Artificial Sequence: Synthetic oligonucleotide
  Target: LAMA2; (-) strand; PAM type: YTN; PAM sequence: TTG
gaaattaaaaacaaaaaaaa

SEQ ID NO: 240214 - DNA, 20 bp, Artificial Sequence
  Description of Artificial Sequence: Synthetic oligonucleotide
  Target: LAMA2; (-) strand; PAM type: YTN; PAM sequence: TTT
ggaaattaaaaacaaaaaaa

SEQ ID NO: 240215 - DNA, 20 bp, Artificial Sequence
  Description of Artificial Sequence: Synthetic oligonucleotide
  Target: LAMA2; (-) strand; PAM type: YTN; PAM sequence: TTT
tggaaattaaaaacaaaaaa

SEQ ID NO: 240216 - DNA, 20 bp, Artificial Sequence
  Description of Artificial Sequence: Synthetic oligonucleotide
  Target: LAMA2; (-) strand; PAM type: YTN; PAM sequence: CTT
ttggaaattaaaaacaaaaa

SEQ ID NO: 240217 - DNA, 20 bp, Artificial Sequence
  Description of Artificial Sequence: Synthetic oligonucleotide
  Target: LAMA2; (-) strand; PAM type: YTN; PAM sequence: CTG
gtcgtgtccacttttggaaa

SEQ ID NO: 240218 - DNA, 20 bp, Artificial Sequence
  Description of Artificial Sequence: Synthetic oligonucleotide
  Target: LAMA2; (-) strand; PAM type: YTN; PAM sequence: TTC
ctggtcgtgtccacttttgg

SEQ ID NO: 240219 - DNA, 20 bp, Artificial Sequence
  Description of Artificial Sequence: Synthetic oligonucleotide
  Target: LAMA2; (-) strand; PAM type: YTN; PAM sequence: TTC
atgttcctggtcgtgtccac

SEQ ID NO: 240220 - DNA, 20 bp, Artificial Sequence
  Description of Artificial Sequence: Synthetic oligonucleotide
  Target: LAMA2; (-) strand; PAM type: YTN; PAM sequence: TTT
catgttcctggtcgtgtcca

SEQ ID NO: 240221 - DNA, 20 bp, Artificial Sequence
  Description of Artificial Sequence: Synthetic oligonucleotide
  Target: LAMA2; (-) strand; PAM type: YTN; PAM sequence: CTT
tcatgttcctggtcgtgtcc

SEQ ID NO: 240222 - DNA, 20 bp, Artificial Sequence
  Description of Artificial Sequence: Synthetic oligonucleotide
  Target: LAMA2; (-) strand; PAM type: YTN; PAM sequence: CTC
tttcatgttcctggtcgtgt

SEQ ID NO: 240223 - DNA, 20 bp, Artificial Sequence
  Description of Artificial Sequence: Synthetic oligonucleotide
  Target: LAMA2; (-) strand; PAM type: YTN; PAM sequence: TTC
tctttcatgttcctggtcgt

SEQ ID NO: 240224 - DNA, 20 bp, Artificial Sequence
  Description of Artificial Sequence: Synthetic oligonucleotide
  Target: LAMA2; (-) strand; PAM type: YTN; PAM sequence: TTT
ctctttcatgttcctggtcg

SEQ ID NO: 240225 - DNA, 20 bp, Artificial Sequence
  Description of Artificial Sequence: Synthetic oligonucleotide
  Target: LAMA2; (-) strand; PAM type: YTN; PAM sequence: TTT
tctctttcatgttcctggtc

SEQ ID NO: 240226 - DNA, 20 bp, Artificial Sequence
  Description of Artificial Sequence: Synthetic oligonucleotide
  Target: LAMA2; (-) strand; PAM type: YTN; PAM sequence: CTT
ttctctttcatgttcctggt

SEQ ID NO: 240227 - DNA, 20 bp, Artificial Sequence
  Description of Artificial Sequence: Synthetic oligonucleotide
  Target: LAMA2; (-) strand; PAM type: YTN; PAM sequence: CTG
cttttctctttcatgttcct

SEQ ID NO: 240228 - DNA, 20 bp, Artificial Sequence
  Description of Artificial Sequence: Synthetic oligonucleotide
  Target: LAMA2; (-) strand; PAM type: YTN; PAM sequence: CTA
tcagctgcttttctctttca

SEQ ID NO: 240229 - DNA, 20 bp, Artificial Sequence
  Description of Artificial Sequence: Synthetic oligonucleotide
  Target: LAMA2; (-) strand; PAM type: YTN; PAM sequence: TTA
aaaaatatctatcagctgct

SEQ ID NO: 240230 - DNA, 20 bp, Artificial Sequence
  Description of Artificial Sequence: Synthetic oligonucleotide
  Target: LAMA2; (-) strand; PAM type: YTN; PAM sequence: TTT
aaaaaatatctatcagctgc

SEQ ID NO: 240231 - DNA, 20 bp, Artificial Sequence
  Description of Artificial Sequence: Synthetic oligonucleotide
  Target: LAMA2; (-) strand; PAM type: YTN; PAM sequence: TTT
taaaaaatatctatcagctg

SEQ ID NO: 240232 - DNA, 20 bp, Artificial Sequence
  Description of Artificial Sequence: Synthetic oligonucleotide
  Target: LAMA2; (-) strand; PAM type: YTN; PAM sequence: TTT
ttaaaaaatatctatcagct

SEQ ID NO: 240233 - DNA, 20 bp, Artificial Sequence
  Description of Artificial Sequence: Synthetic oligonucleotide
  Target: LAMA2; (-) strand; PAM type: YTN; PAM sequence: TTA
atttttaaaaaatatctatc

SEQ ID NO: 240234 - DNA, 20 bp, Artificial Sequence
  Description of Artificial Sequence: Synthetic oligonucleotide
  Target: LAMA2; (-) strand; PAM type: YTN; PAM sequence: TTA
gagaaaacacacagtcatca

SEQ ID NO: 240235 - DNA, 20 bp, Artificial Sequence
  Description of Artificial Sequence: Synthetic oligonucleotide
  Target: LAMA2; (-) strand; PAM type: YTN; PAM sequence: CTT
agagaaaacacacagtcatc

SEQ ID NO: 240236 - DNA, 20 bp, Artificial Sequence
  Description of Artificial Sequence: Synthetic oligonucleotide
  Target: LAMA2; (-) strand; PAM type: YTN; PAM sequence: TTG
tatcttagagaaaacacaca

SEQ ID NO: 240237 - DNA, 20 bp, Artificial Sequence
  Description of Artificial Sequence: Synthetic oligonucleotide
  Target: LAMA2; (-) strand; PAM type: YTN; PAM sequence: CTT
gtatcttagagaaaacacac

SEQ ID NO: 240238 - DNA, 20 bp, Artificial Sequence
  Description of Artificial Sequence: Synthetic oligonucleotide
  Target: LAMA2; (-) strand; PAM type: YTN; PAM sequence: CTC
atatcttgtatcttagagaa

SEQ ID NO: 240239 - DNA, 20 bp, Artificial Sequence
  Description of Artificial Sequence: Synthetic oligonucleotide
  Target: LAMA2; (-) strand; PAM type: YTN; PAM sequence: CTC
gaatgcggccaggaaggtca

SEQ ID NO: 240240 - DNA, 20 bp, Artificial Sequence
  Description of Artificial Sequence: Synthetic oligonucleotide
  Target: LAMA2; (-) strand; PAM type: YTN; PAM sequence: CTG
gggagccactcgaatgcggc

SEQ ID NO: 240241 - DNA, 20 bp, Artificial Sequence
  Description of Artificial Sequence: Synthetic oligonucleotide
  Target: LAMA2; (-) strand; PAM type: YTN; PAM sequence: CTG
ctggggagccactcgaatgc

SEQ ID NO: 240242 - DNA, 20 bp, Artificial Sequence
  Description of Artificial Sequence: Synthetic oligonucleotide
  Target: LAMA2; (-) strand; PAM type: YTN; PAM sequence: CTG
aggtgagtccaagtcgtcct

SEQ ID NO: 240243 - DNA, 20 bp, Artificial Sequence
  Description of Artificial Sequence: Synthetic oligonucleotide
  Target: LAMA2; (-) strand; PAM type: YTN; PAM sequence: CTG
ctgaggtgagtccaagtcgt

SEQ ID NO: 240244 - DNA, 20 bp, Artificial Sequence
  Description of Artificial Sequence: Synthetic oligonucleotide
  Target: LAMA2; (-) strand; PAM type: YTN; PAM sequence: CTG
atctgctgaggtgagtccaa

SEQ ID NO: 240245 - DNA, 20 bp, Artificial Sequence
  Description of Artificial Sequence: Synthetic oligonucleotide
  Target: LAMA2; (-) strand; PAM type: YTN; PAM sequence: CTG
atgctgatctgctgaggtga

SEQ ID NO: 240246 - DNA, 20 bp, Artificial Sequence
  Description of Artificial Sequence: Synthetic oligonucleotide
  Target: LAMA2; (-) strand; PAM type: YTN; PAM sequence: TTA
ctgatgctgatctgctgagg

SEQ ID NO: 240247 - DNA, 20 bp, Artificial Sequence
  Description of Artificial Sequence: Synthetic oligonucleotide
  Target: LAMA2; (-) strand; PAM type: YTN; PAM sequence: CTC
cgcgttactgatgctgatct

SEQ ID NO: 240248 - DNA, 20 bp, Artificial Sequence
  Description of Artificial Sequence: Synthetic oligonucleotide
  Target: LAMA2; (-) strand; PAM type: YTN; PAM sequence: TTG
ccgggcctccgcgttactga

SEQ ID NO: 240249 - DNA, 20 bp, Artificial Sequence
  Description of Artificial Sequence: Synthetic oligonucleotide
  Target: LAMA2; (-) strand; PAM type: YTN; PAM sequence: CTT
gccgggcctccgcgttactg

SEQ ID NO: 240250 - DNA, 20 bp, Artificial Sequence
  Description of Artificial Sequence: Synthetic oligonucleotide
  Target: LAMA2; (-) strand; PAM type: YTN; PAM sequence: CTG
tgcggcagggcttgccgggc

SEQ ID NO: 240251 - DNA, 20 bp, Artificial Sequence
  Description of Artificial Sequence: Synthetic oligonucleotide
  Target: LAMA2; (-) strand; PAM type: YTN; PAM sequence: CTC
cagtagtagctgtgcggcag

SEQ ID NO: 240252 - DNA, 20 bp, Artificial Sequence
  Description of Artificial Sequence: Synthetic oligonucleotide
  Target: LAMA2; (-) strand; PAM type: YTN; PAM sequence: TTC
ccagatagggagccggcgcg

SEQ ID NO: 240253 - DNA, 20 bp, Artificial Sequence
  Description of Artificial Sequence: Synthetic oligonucleotide
  Target: LAMA2; (-) strand; PAM type: YTN; PAM sequence: TTT
cccagatagggagccggcgc

SEQ ID NO: 240254 - DNA, 20 bp, Artificial Sequence
  Description of Artificial Sequence: Synthetic oligonucleotide
  Target: LAMA2; (-) strand; PAM type: YTN; PAM sequence: TTG
tttcccagatagggagccgg

SEQ ID NO: 240255 - DNA, 20 bp, Artificial Sequence
  Description of Artificial Sequence: Synthetic oligonucleotide
  Target: LAMA2; (-) strand; PAM type: YTN; PAM sequence: TTT
gtttcccagatagggagccg

SEQ ID NO: 240256 - DNA, 20 bp, Artificial Sequence
  Description of Artificial Sequence: Synthetic oligonucleotide
  Target: LAMA2; (-) strand; PAM type: YTN; PAM sequence: CTT
tgtttcccagatagggagcc

SEQ ID NO: 240257 - DNA, 20 bp, Artificial Sequence
  Description of Artificial Sequence: Synthetic oligonucleotide
  Target: LAMA2; (-) strand; PAM type: YTN; PAM sequence: TTA
ctttgtttcccagataggga

SEQ ID NO: 240258 - DNA, 20 bp, Artificial Sequence
  Description of Artificial Sequence: Synthetic oligonucleotide
  Target: LAMA2; (-) strand; PAM type: YTN; PAM sequence: CTT
actttgtttcccagataggg

SEQ ID NO: 240259 - DNA, 20 bp, Artificial Sequence
  Description of Artificial Sequence: Synthetic oligonucleotide
  Target: LAMA2; (-) strand; PAM type: YTN; PAM sequence: TTA
aagcagaatagcgggaagca

SEQ ID NO: 240260 - DNA, 20 bp, Artificial Sequence
  Description of Artificial Sequence: Synthetic oligonucleotide
  Target: LAMA2; (-) strand; PAM type: YTN; PAM sequence: CTC
acgatcagtcagttaaagca

SEQ ID NO: 240261 - DNA, 20 bp, Artificial Sequence
  Description of Artificial Sequence: Synthetic oligonucleotide
  Target: LAMA2; (-) strand; PAM type: YTN; PAM sequence: TTC
tcacgatcagtcagttaaag

SEQ ID NO: 240262 - DNA, 20 bp, Artificial Sequence
  Description of Artificial Sequence: Synthetic oligonucleotide
  Target: LAMA2; (-) strand; PAM type: YTN; PAM sequence: CTA
aaacccattctcacgatcag

SEQ ID NO: 240263 - DNA, 20 bp, Artificial Sequence
  Description of Artificial Sequence: Synthetic oligonucleotide
  Target: LAMA2; (-) strand; PAM type: YTN; PAM sequence: TTA
ccaactaaaacccattctca

SEQ ID NO: 240264 - DNA, 20 bp, Artificial Sequence
  Description of Artificial Sequence: Synthetic oligonucleotide
  Target: LAMA2; (-) strand; PAM type: YTN; PAM sequence: TTA
aaagaattaccaactaaaac

SEQ ID NO: 240265 - DNA, 20 bp, Artificial Sequence
  Description of Artificial Sequence: Synthetic oligonucleotide
  Target: LAMA2; (-) strand; PAM type: YTN; PAM sequence: TTT
aaaagaattaccaactaaaa

SEQ ID NO: 240266 - DNA, 20 bp, Artificial Sequence
  Description of Artificial Sequence: Synthetic oligonucleotide
  Target: LAMA2; (-) strand; PAM type: YTN; PAM sequence: CTT
taaaagaattaccaactaaa

SEQ ID NO: 240267 - DNA, 20 bp, Artificial Sequence
  Description of Artificial Sequence: Synthetic oligonucleotide
  Target: LAMA2; (-) strand; PAM type: YTN; PAM sequence: TTC
tttaaaagaattaccaacta

SEQ ID NO: 240268 - DNA, 20 bp, Artificial Sequence
  Description of Artificial Sequence: Synthetic oligonucleotide
  Target: LAMA2; (-) strand; PAM type: YTN; PAM sequence: TTT
ctttaaaagaattaccaact

SEQ ID NO: 240269 - DNA, 20 bp, Artificial Sequence
  Description of Artificial Sequence: Synthetic oligonucleotide
  Target: LAMA2; (-) strand; PAM type: YTN; PAM sequence: CTT
tctttaaaagaattaccaac

SEQ ID NO: 240270 - DNA, 20 bp, Artificial Sequence
  Description of Artificial Sequence: Synthetic oligonucleotide
  Target: LAMA2; (-) strand; PAM type: YTN; PAM sequence: TTG
tctttctttaaaagaattac

SEQ ID NO: 240271 - DNA, 20 bp, Artificial Sequence
  Description of Artificial Sequence: Synthetic oligonucleotide
  Target: LAMA2; (-) strand; PAM type: YTN; PAM sequence: TTT
gtctttctttaaaagaatta

SEQ ID NO: 240272 - DNA, 20 bp, Artificial Sequence
  Description of Artificial Sequence: Synthetic oligonucleotide
  Target: LAMA2; (-) strand; PAM type: YTN; PAM sequence: TTT
tgtctttctttaaaagaatt

SEQ ID NO: 240273 - DNA, 20 bp, Artificial Sequence
  Description of Artificial Sequence: Synthetic oligonucleotide
  Target: LAMA2; (-) strand; PAM type: YTN; PAM sequence: TTG
attttgtctttctttaaaag

SEQ ID NO: 240274 - DNA, 20 bp, Artificial Sequence
  Description of Artificial Sequence: Synthetic oligonucleotide
  Target: LAMA2; (-) strand; PAM type: YTN; PAM sequence: TTT
gattttgtctttctttaaaa

SEQ ID NO: 240275 - DNA, 20 bp, Artificial Sequence
  Description of Artificial Sequence: Synthetic oligonucleotide
  Target: LAMA2; (-) strand; PAM type: YTN; PAM sequence: TTC
agtgtgtatttgattttgtc

SEQ ID NO: 240276 - DNA, 20 bp, Artificial Sequence
  Description of Artificial Sequence: Synthetic oligonucleotide
  Target: LAMA2; (-) strand; PAM type: YTN; PAM sequence: CTG
gcaatccaattcagtgtgta

SEQ ID NO: 240277 - DNA, 20 bp, Artificial Sequence
  Description of Artificial Sequence: Synthetic oligonucleotide
  Target: LAMA2; (-) strand; PAM type: YTN; PAM sequence: TTC
tggcaatccaattcagtgtg

SEQ ID NO: 240278 - DNA, 20 bp, Artificial Sequence
  Description of Artificial Sequence: Synthetic oligonucleotide
  Target: LAMA2; (-) strand; PAM type: YTN; PAM sequence: CTG
gttctggcaatccaattcag

SEQ ID NO: 240279 - DNA, 20 bp, Artificial Sequence
  Description of Artificial Sequence: Synthetic oligonucleotide
  Target: LAMA2; (-) strand; PAM type: YTN; PAM sequence: TTA
gctggttctggcaatccaat

SEQ ID NO: 240280 - DNA, 20 bp, Artificial Sequence
  Description of Artificial Sequence: Synthetic oligonucleotide
  Target: LAMA2; (-) strand; PAM type: YTN; PAM sequence: TTT
agctggttctggcaatccaa

SEQ ID NO: 240281 - DNA, 20 bp, Artificial Sequence
  Description of Artificial Sequence: Synthetic oligonucleotide
  Target: LAMA2; (-) strand; PAM type: YTN; PAM sequence: CTC
aatgtgatttagctggttct

SEQ ID NO: 240282 - DNA, 20 bp, Artificial Sequence
  Description of Artificial Sequence: Synthetic oligonucleotide
  Target: LAMA2; (-) strand; PAM type: YTN; PAM sequence: TTG
tgcaacatggaagaaacgcc

SEQ ID NO: 240283 - DNA, 20 bp, Artificial Sequence
  Description of Artificial Sequence: Synthetic oligonucleotide
  Target: LAMA2; (-) strand; PAM type: YTN; PAM sequence: CTT
gtgcaacatggaagaaacgc

SEQ ID NO: 240284 - DNA, 20 bp, Artificial Sequence
  Description of Artificial Sequence: Synthetic oligonucleotide
  Target: LAMA2; (-) strand; PAM type: YTN; PAM sequence: TTA
aggtcttgtgcaacatggaa

SEQ ID NO: 240285 - DNA, 20 bp, Artificial Sequence
  Description of Artificial Sequence: Synthetic oligonucleotide
  Target: LAMA2; (-) strand; PAM type: YTN; PAM sequence: TTT
aaggtcttgtgcaacatgga

SEQ ID NO: 240286 - DNA, 20 bp, Artificial Sequence
  Description of Artificial Sequence: Synthetic oligonucleotide
  Target: LAMA2; (-) strand; PAM type: YTN; PAM sequence: CTT
taaggtcttgtgcaacatgg

SEQ ID NO: 240287 - DNA, 20 bp, Artificial Sequence
  Description of Artificial Sequence: Synthetic oligonucleotide
  Target: LAMA2; (-) strand; PAM type: YTN; PAM sequence: CTC
tttaaggtcttgtgcaacat

SEQ ID NO: 240288 - DNA, 20 bp, Artificial Sequence
  Description of Artificial Sequence: Synthetic oligonucleotide
  Target: LAMA2; (-) strand; PAM type: YTN; PAM sequence: TTA
aggatgccgtggctctttaa

SEQ ID NO: 240289 - DNA, 20 bp, Artificial Sequence
  Description of Artificial Sequence: Synthetic oligonucleotide
  Target: LAMA2; (-) strand; PAM type: YTN; PAM sequence: TTG
catattaaggatgccgtggc

SEQ ID NO: 240290 - DNA, 20 bp, Artificial Sequence
  Description of Artificial Sequence: Synthetic oligonucleotide
  Target: LAMA2; (-) strand; PAM type: YTN; PAM sequence: CTA
tacaaagttgcatattaagg

SEQ ID NO: 240291 - DNA, 20 bp, Artificial Sequence
  Description of Artificial Sequence: Synthetic oligonucleotide
  Target: LAMA2; (-) strand; PAM type: YTN; PAM sequence: TTA
catagaacatcagctataca

SEQ ID NO: 240292 - DNA, 20 bp, Artificial Sequence
  Description of Artificial Sequence: Synthetic oligonucleotide
  Target: LAMA2; (-) strand; PAM type: YTN; PAM sequence: TTT
acatagaacatcagctatac

SEQ ID NO: 240293 - DNA, 20 bp, Artificial Sequence
  Description of Artificial Sequence: Synthetic oligonucleotide
  Target: LAMA2; (-) strand; PAM type: YTN; PAM sequence: TTC
aaaaagtttacatagaacat

SEQ ID NO: 240294 - DNA, 20 bp, Artificial Sequence
  Description of Artificial Sequence: Synthetic oligonucleotide
  Target: LAMA2; (-) strand; PAM type: YTN; PAM sequence: TTG
cccattcaaaaagtttacat

SEQ ID NO: 240295 - DNA, 20 bp, Artificial Sequence
  Description of Artificial Sequence: Synthetic oligonucleotide
  Target: LAMA2; (-) strand; PAM type: YTN; PAM sequence: TTT
gcccattcaaaaagtttaca

SEQ ID NO: 240296 - DNA, 20 bp, Artificial Sequence
  Description of Artificial Sequence: Synthetic oligonucleotide
  Target: LAMA2; (-) strand; PAM type: YTN; PAM sequence: TTA
tttgcccattcaaaaagttt

SEQ ID NO: 240297 - DNA, 20 bp, Artificial Sequence
  Description of Artificial Sequence: Synthetic oligonucleotide
  Target: LAMA2; (-) strand; PAM type: YTN; PAM sequence: TTT
atttgcccattcaaaaagtt

SEQ ID NO: 240298 - DNA, 20 bp, Artificial Sequence
  Description of Artificial Sequence: Synthetic oligonucleotide
  Target: LAMA2; (-) strand; PAM type: YTN; PAM sequence: TTA
atttatttgcccattcaaaa

SEQ ID NO: 240299 - DNA, 20 bp, Artificial Sequence
  Description of Artificial Sequence: Synthetic oligonucleotide
  Target: LAMA2; (-) strand; PAM type: YTN; PAM sequence: TTC
attaatttatttgcccattc

SEQ ID NO: 240300 - DNA, 20 bp, Artificial Sequence
  Description of Artificial Sequence: Synthetic oligonucleotide
  Target: LAMA2; (-) strand; PAM type: YTN; PAM sequence: CTT
cattaatttatttgcccatt

SEQ ID NO: 240301 - DNA, 20 bp, Artificial Sequence
  Description of Artificial Sequence: Synthetic oligonucleotide
  Target: LAMA2; (-) strand; PAM type: YTN; PAM sequence: CTA
gcggcttcattaatttattt

SEQ ID NO: 240302 - DNA, 20 bp, Artificial Sequence
  Description of Artificial Sequence: Synthetic oligonucleotide
  Target: LAMA2; (-) strand; PAM type: YTN; PAM sequence: TTA
cgaaaatacactagcggctt

SEQ ID NO: 240303 - DNA, 20 bp, Artificial Sequence
  Description of Artificial Sequence: Synthetic oligonucleotide
  Target: LAMA2; (-) strand; PAM type: YTN; PAM sequence: TTT
acgaaaatacactagcggct

SEQ ID NO: 240304 - DNA, 20 bp, Artificial Sequence
  Description of Artificial Sequence: Synthetic oligonucleotide
  Target: LAMA2; (-) strand; PAM type: YTN; PAM sequence: CTT
tacgaaaatacactagcggc

SEQ ID NO: 240305 - DNA, 20 bp, Artificial Sequence
  Description of Artificial Sequence: Synthetic oligonucleotide
  Target: LAMA2; (-) strand; PAM type: YTN; PAM sequence: TTG
ctttacgaaaatacactagc

SEQ ID NO: 240306 - DNA, 20 bp, Artificial Sequence
  Description of Artificial Sequence: Synthetic oligonucleotide
  Target: LAMA2; (-) strand; PAM type: YTN; PAM sequence: TTT
gctttacgaaaatacactag

SEQ ID NO: 240307 - DNA, 20 bp, Artificial Sequence
  Description of Artificial Sequence: Synthetic oligonucleotide
  Target: LAMA2; (-) strand; PAM type: YTN; PAM sequence: CTA
taatttgctttacgaaaata

SEQ ID NO: 240308 - DNA, 20 bp, Artificial Sequence
  Description of Artificial Sequence: Synthetic oligonucleotide
  Target: LAMA2; (-) strand; PAM type: YTN; PAM sequence: TTC
caatacctataatttgcttt

SEQ ID NO: 240309 - DNA, 20 bp, Artificial Sequence
  Description of Artificial Sequence: Synthetic oligonucleotide
  Target: LAMA2; (-) strand; PAM type: YTN; PAM sequence: CTT
ccaatacctataatttgctt

SEQ ID NO: 240310 - DNA, 20 bp, Artificial Sequence
  Description of Artificial Sequence: Synthetic oligonucleotide
  Target: LAMA2; (-) strand; PAM type: YTN; PAM sequence: TTC
ttccaatacctataatttgc

SEQ ID NO: 240311 - DNA, 20 bp, Artificial Sequence
  Description of Artificial Sequence: Synthetic oligonucleotide
  Target: LAMA2; (-) strand; PAM type: YTN; PAM sequence: TTT
cttccaatacctataatttg

SEQ ID NO: 240312 - DNA, 20 bp, Artificial Sequence
  Description of Artificial Sequence: Synthetic oligonucleotide
  Target: LAMA2; (-) strand; PAM type: YTN; PAM sequence: TTC
acataaacacaacacagttt

SEQ ID NO: 240313 - DNA, 20 bp, Artificial Sequence
  Description of Artificial Sequence: Synthetic oligonucleotide
  Target: LAMA2; (-) strand; PAM type: YTN; PAM sequence: TTT
cacataaacacaacacagtt

SEQ ID NO: 240314 - DNA, 20 bp, Artificial Sequence
  Description of Artificial Sequence: Synthetic oligonucleotide
  Target: LAMA2; (-) strand; PAM type: YTN; PAM sequence: TTT
tcacataaacacaacacagt

SEQ ID NO: 240315 - DNA, 20 bp, Artificial Sequence
  Description of Artificial Sequence: Synthetic oligonucleotide
  Target: LAMA2; (-) strand; PAM type: YTN; PAM sequence: CTT
ttcacataaacacaacacag

SEQ ID NO: 240316 - DNA, 20 bp, Artificial Sequence
  Description of Artificial Sequence: Synthetic oligonucleotide
  Target: LAMA2; (-) strand; PAM type: YTN; PAM sequence: CTC
ttttcacataaacacaacac

SEQ ID NO: 240317 - DNA, 20 bp, Artificial Sequence
  Description of Artificial Sequence: Synthetic oligonucleotide
  Target: LAMA2; (-) strand; PAM type: YTN; PAM sequence: CTC
cagaaaacagctcttttcac

SEQ ID NO: 240318 - DNA, 20 bp, Artificial Sequence
  Description of Artificial Sequence: Synthetic oligonucleotide
  Target: LAMA2; (-) strand; PAM type: YTN; PAM sequence: TTA
gtaagtatcccaccacagac

SEQ ID NO: 240319 - DNA, 20 bp, Artificial Sequence
  Description of Artificial Sequence: Synthetic oligonucleotide
  Target: LAMA2; (-) strand; PAM type: YTN; PAM sequence: TTT
agtaagtatcccaccacaga

SEQ ID NO: 240320 - DNA, 20 bp, Artificial Sequence
  Description of Artificial Sequence: Synthetic oligonucleotide
  Target: LAMA2; (-) strand; PAM type: YTN; PAM sequence: CTT
tagtaagtatcccaccacag

SEQ ID NO: 240321 - DNA, 20 bp, Artificial Sequence
  Description of Artificial Sequence: Synthetic oligonucleotide
  Target: LAMA2; (-) strand; PAM type: YTN; PAM sequence: TTG
aaatgaaatagaaaccgatg

SEQ ID NO: 240322 - DNA, 20 bp, Artificial Sequence
  Description of Artificial Sequence: Synthetic oligonucleotide
  Target: LAMA2; (-) strand; PAM type: YTN; PAM sequence: TTT
gaaatgaaatagaaaccgat

SEQ ID NO: 240323 - DNA, 20 bp, Artificial Sequence
  Description of Artificial Sequence: Synthetic oligonucleotide
  Target: LAMA2; (-) strand; PAM type: YTN; PAM sequence: TTT
tgaaatgaaatagaaaccga

SEQ ID NO: 240324 - DNA, 20 bp, Artificial Sequence
  Description of Artificial Sequence: Synthetic oligonucleotide
  Target: LAMA2; (-) strand; PAM type: YTN; PAM sequence: CTG
agtatcagttttgaaatgaa

SEQ ID NO: 240325 - DNA, 20 bp, Artificial Sequence
  Description of Artificial Sequence: Synthetic oligonucleotide
  Target: LAMA2; (-) strand; PAM type: YTN; PAM sequence: CTC
ctgagtatcagttttgaaat

SEQ ID NO: 240326 - DNA, 20 bp, Artificial Sequence
  Description of Artificial Sequence: Synthetic oligonucleotide
  Target: LAMA2; (-) strand; PAM type: YTN; PAM sequence: TTC
atatcaggtagaaggaaaag

SEQ ID NO: 240327 - DNA, 20 bp, Artificial Sequence
  Description of Artificial Sequence: Synthetic oligonucleotide
  Target: LAMA2; (-) strand; PAM type: YTN; PAM sequence: TTA
acattcatatcaggtagaag

SEQ ID NO: 240328 - DNA, 20 bp, Artificial Sequence
  Description of Artificial Sequence: Synthetic oligonucleotide
  Target: LAMA2; (-) strand; PAM type: YTN; PAM sequence: TTC
caattaacattcatatcagg

SEQ ID NO: 240329 - DNA, 20 bp, Artificial Sequence
  Description of Artificial Sequence: Synthetic oligonucleotide
  Target: LAMA2; (-) strand; PAM type: YTN; PAM sequence: TTT
ccaattaacattcatatcag

SEQ ID NO: 240330 - DNA, 20 bp, Artificial Sequence
  Description of Artificial Sequence: Synthetic oligonucleotide
  Target: LAMA2; (-) strand; PAM type: YTN; PAM sequence: TTT
tccaattaacattcatatca

SEQ ID NO: 240331 - DNA, 20 bp, Artificial Sequence
  Description of Artificial Sequence: Synthetic oligonucleotide
  Target: LAMA2; (-) strand; PAM type: YTN; PAM sequence: CTT
ttccaattaacattcatatc

SEQ ID NO: 240332 - DNA, 20 bp, Artificial Sequence
  Description of Artificial Sequence: Synthetic oligonucleotide
  Target: LAMA2; (-) strand; PAM type: YTN; PAM sequence: TTC
ttttccaattaacattcata

SEQ ID NO: 240333 - DNA, 20 bp, Artificial Sequence
  Description of Artificial Sequence: Synthetic oligonucleotide
  Target: LAMA2; (-) strand; PAM type: YTN; PAM sequence: TTT
cttttccaattaacattcat

SEQ ID NO: 240334 - DNA, 20 bp, Artificial Sequence
  Description of Artificial Sequence: Synthetic oligonucleotide
  Target: LAMA2; (-) strand; PAM type: YTN; PAM sequence: TTA
tgtaatacatttcttttcca

SEQ ID NO: 240335 - DNA, 20 bp, Artificial Sequence
  Description of Artificial Sequence: Synthetic oligonucleotide
  Target: LAMA2; (-) strand; PAM type: YTN; PAM sequence: TTA
gttatgtaatacatttcttt

SEQ ID NO: 240336 - DNA, 20 bp, Artificial Sequence
  Description of Artificial Sequence: Synthetic oligonucleotide
  Target: LAMA2; (-) strand; PAM type: YTN; PAM sequence: TTA
attagttatgtaatacattt

SEQ ID NO: 240337 - DNA, 20 bp, Artificial Sequence
  Description of Artificial Sequence: Synthetic oligonucleotide
  Target: LAMA2; (-) strand; PAM type: YTN; PAM sequence: TTT
aattagttatgtaatacatt

SEQ ID NO: 240338 - DNA, 20 bp, Artificial Sequence
  Description of Artificial Sequence: Synthetic oligonucleotide
  Target: LAMA2; (-) strand; PAM type: YTN; PAM sequence: CTC
atggcaagcatttaattagt

SEQ ID NO: 240339 - DNA, 20 bp, Artificial Sequence
  Description of Artificial Sequence: Synthetic oligonucleotide
  Target: LAMA2; (-) strand; PAM type: YTN; PAM sequence: TTA
cataagcctcatggcaagca

SEQ ID NO: 240340 - DNA, 20 bp, Artificial Sequence
  Description of Artificial Sequence: Synthetic oligonucleotide
  Target: LAMA2; (-) strand; PAM type: YTN; PAM sequence: TTT
acataagcctcatggcaagc

SEQ ID NO: 240341 - DNA, 20 bp, Artificial Sequence
  Description of Artificial Sequence: Synthetic oligonucleotide
  Target: LAMA2; (-) strand; PAM type: YTN; PAM sequence: TTG
tttacataagcctcatggca

SEQ ID NO: 240342 - DNA, 20 bp, Artificial Sequence
  Description of Artificial Sequence: Synthetic oligonucleotide
  Target: LAMA2; (-) strand; PAM type: YTN; PAM sequence: CTC
cagcaaatatgttgtttaca

SEQ ID NO: 240343 - DNA, 20 bp, Artificial Sequence
  Description of Artificial Sequence: Synthetic oligonucleotide
  Target: LAMA2; (-) strand; PAM type: YTN; PAM sequence: CTG
agctccagcaaatatgttgt

SEQ ID NO: 240344 - DNA, 20 bp, Artificial Sequence
  Description of Artificial Sequence: Synthetic oligonucleotide
  Target: LAMA2; (-) strand; PAM type: YTN; PAM sequence: CTG
cctgagctccagcaaatatg

SEQ ID NO: 240345 - DNA, 20 bp, Artificial Sequence
  Description of Artificial Sequence: Synthetic oligonucleotide
  Target: LAMA2; (-) strand; PAM type: YTN; PAM sequence: TTC
tgcctgagctccagcaaata

SEQ ID NO: 240346 - DNA, 20 bp, Artificial Sequence
  Description of Artificial Sequence: Synthetic oligonucleotide
  Target: LAMA2; (-) strand; PAM type: YTN; PAM sequence: TTT
ctgcctgagctccagcaaat

SEQ ID NO: 240347 - DNA, 20 bp, Artificial Sequence
  Description of Artificial Sequence: Synthetic oligonucleotide
  Target: LAMA2; (-) strand; PAM type: YTN; PAM sequence: TTA
gggtagtttctgcctgagct

SEQ ID NO: 240348 - DNA, 20 bp, Artificial Sequence
  Description of Artificial Sequence: Synthetic oligonucleotide
  Target: LAMA2; (-) strand; PAM type: YTN; PAM sequence: TTT
agggtagtttctgcctgagc

SEQ ID NO: 240349 - DNA, 20 bp, Artificial Sequence
  Description of Artificial Sequence: Synthetic oligonucleotide
  Target: LAMA2; (-) strand; PAM type: YTN; PAM sequence: TTT
tagggtagtttctgcctgag

SEQ ID NO: 240350 - DNA, 20 bp, Artificial Sequence
  Description of Artificial Sequence: Synthetic oligonucleotide
  Target: LAMA2; (-) strand; PAM type: YTN; PAM sequence: CTT
ttagggtagtttctgcctga

SEQ ID NO: 240351 - DNA, 20 bp, Artificial Sequence
  Description of Artificial Sequence: Synthetic oligonucleotide
  Target: LAMA2; (-) strand; PAM type: YTN; PAM sequence: CTG
gcacttttagggtagtttct

SEQ ID NO: 240352 - DNA, 20 bp, Artificial Sequence
  Description of Artificial Sequence: Synthetic oligonucleotide
  Target: LAMA2; (-) strand; PAM type: YTN; PAM sequence: TTC
caatctggcacttttagggt

SEQ ID NO: 240353 - DNA, 20 bp, Artificial Sequence
  Description of Artificial Sequence: Synthetic oligonucleotide
  Target: LAMA2; (-) strand; PAM type: YTN; PAM sequence: CTT
ccaatctggcacttttaggg

SEQ ID NO: 240354 - DNA, 20 bp, Artificial Sequence
  Description of Artificial Sequence: Synthetic oligonucleotide
  Target: LAMA2; (-) strand; PAM type: YTN; PAM sequence: TTA
aaacaaacgtgcttccaatc

SEQ ID NO: 240355 - DNA, 20 bp, Artificial Sequence
  Description of Artificial Sequence: Synthetic oligonucleotide
  Target: LAMA2; (-) strand; PAM type: YTN; PAM sequence: TTT
aaaacaaacgtgcttccaat

SEQ ID NO: 240356 - DNA, 20 bp, Artificial Sequence
  Description of Artificial Sequence: Synthetic oligonucleotide
  Target: LAMA2; (-) strand; PAM type: YTN; PAM sequence: CTT
taaaacaaacgtgcttccaa

SEQ ID NO: 240357 - DNA, 20 bp, Artificial Sequence
  Description of Artificial Sequence: Synthetic oligonucleotide
  Target: LAMA2; (-) strand; PAM type: YTN; PAM sequence: TTA
catatgtgtgggctttaaaa

SEQ ID NO: 240358 - DNA, 20 bp, Artificial Sequence
  Description of Artificial Sequence: Synthetic oligonucleotide
  Target: LAMA2; (-) strand; PAM type: YTN; PAM sequence: TTT
acatatgtgtgggctttaaa

SEQ ID NO: 240359 - DNA, 20 bp, Artificial Sequence
  Description of Artificial Sequence: Synthetic oligonucleotide
  Target: LAMA2; (-) strand; PAM type: YTN; PAM sequence: TTT
tacatatgtgtgggctttaa

SEQ ID NO: 240360 - DNA, 20 bp, Artificial Sequence
  Description of Artificial Sequence: Synthetic oligonucleotide
  Target: LAMA2; (-) strand; PAM type: YTN; PAM sequence: TTT
ttacatatgtgtgggcttta

SEQ ID NO: 240361 - DNA, 20 bp, Artificial Sequence
  Description of Artificial Sequence: Synthetic oligonucleotide
  Target: LAMA2; (-) strand; PAM type: YTN; PAM sequence: CTG
tgtatgtttttacatatgtg

SEQ ID NO: 240362 - DNA, 20 bp, Artificial Sequence
  Description of Artificial Sequence: Synthetic oligonucleotide
  Target: LAMA2; (-) strand; PAM type: YTN; PAM sequence: TTA
tctgtgtatgtttttacata

SEQ ID NO: 240363 - DNA, 20 bp, Artificial Sequence
  Description of Artificial Sequence: Synthetic oligonucleotide
  Target: LAMA2; (-) strand; PAM type: YTN; PAM sequence: TTT
atctgtgtatgtttttacat

SEQ ID NO: 240364 - DNA, 20 bp, Artificial Sequence
  Description of Artificial Sequence: Synthetic oligonucleotide
  Target: LAMA2; (-) strand; PAM type: YTN; PAM sequence: TTG
tttatctgtgtatgttttta

SEQ ID NO: 240365 - DNA, 20 bp, Artificial Sequence
  Description of Artificial Sequence: Synthetic oligonucleotide
  Target: LAMA2; (-) strand; PAM type: YTN; PAM sequence: TTT
gtttatctgtgtatgttttt

SEQ ID NO: 240366 - DNA, 20 bp, Artificial Sequence
  Description of Artificial Sequence: Synthetic oligonucleotide
  Target: LAMA2; (-) strand; PAM type: YTN; PAM sequence: CTA
catttgtttatctgtgtatg

SEQ ID NO: 240367 - DNA, 20 bp, Artificial Sequence
  Description of Artificial Sequence: Synthetic oligonucleotide
  Target: LAMA2; (-) strand; PAM type: YTN; PAM sequence: CTG
ctacatttgtttatctgtgt

SEQ ID NO: 240368 - DNA, 20 bp, Artificial Sequence
  Description of Artificial Sequence: Synthetic oligonucleotide
  Target: LAMA2; (-) strand; PAM type: YTN; PAM sequence: CTG
aggctgctacatttgtttat

SEQ ID NO: 240369 - DNA, 20 bp, Artificial Sequence
  Description of Artificial Sequence: Synthetic oligonucleotide
  Target: LAMA2; (-) strand; PAM type: YTN; PAM sequence: TTC
tgaggctgctacatttgttt

SEQ ID NO: 240370 - DNA, 20 bp, Artificial Sequence
  Description of Artificial Sequence: Synthetic oligonucleotide
  Target: LAMA2; (-) strand; PAM type: YTN; PAM sequence: TTT
ctgaggctgctacatttgtt

SEQ ID NO: 240371 - DNA, 20 bp, Artificial Sequence
  Description of Artificial Sequence: Synthetic oligonucleotide
  Target: LAMA2; (-) strand; PAM type: YTN; PAM sequence: CTG
tatttctgaggctgctacat

SEQ ID NO: 240372 - DNA, 20 bp, Artificial Sequence
  Description of Artificial Sequence: Synthetic oligonucleotide
  Target: LAMA2; (-) strand; PAM type: YTN; PAM sequence: CTA
gatagaagtaatccacaaca

SEQ ID NO: 240373 - DNA, 20 bp, Artificial Sequence
  Description of Artificial Sequence: Synthetic oligonucleotide
  Target: LAMA2; (-) strand; PAM type: YTN; PAM sequence: CTA
tctagatagaagtaatccac

SEQ ID NO: 240374 - DNA, 20 bp, Artificial Sequence
  Description of Artificial Sequence: Synthetic oligonucleotide
  Target: LAMA2; (-) strand; PAM type: YTN; PAM sequence: CTA
aaccccaggatatctatcta

SEQ ID NO: 240375 - DNA, 20 bp, Artificial Sequence
  Description of Artificial Sequence: Synthetic oligonucleotide
  Target: LAMA2; (-) strand; PAM type: YTN; PAM sequence: TTC
taaaccccaggatatctatc

SEQ ID NO: 240376 - DNA, 20 bp, Artificial Sequence
  Description of Artificial Sequence: Synthetic oligonucleotide
  Target: LAMA2; (-) strand; PAM type: YTN; PAM sequence: TTA
ggcaagataaaataaaattc

SEQ ID NO: 240377 - DNA, 20 bp, Artificial Sequence
  Description of Artificial Sequence: Synthetic oligonucleotide
  Target: LAMA2; (-) strand; PAM type: YTN; PAM sequence: TTC
caacaaagtattaggcaaga

SEQ ID NO: 240378 - DNA, 20 bp, Artificial Sequence
  Description of Artificial Sequence: Synthetic oligonucleotide
  Target: LAMA2; (-) strand; PAM type: YTN; PAM sequence: TTT
ccaacaaagtattaggcaag

SEQ ID NO: 240379 - DNA, 20 bp, Artificial Sequence
  Description of Artificial Sequence: Synthetic oligonucleotide
  Target: LAMA2; (-) strand; PAM type: YTN; PAM sequence: TTG
tttccaacaaagtattaggc

SEQ ID NO: 240380 - DNA, 20 bp, Artificial Sequence
  Description of Artificial Sequence: Synthetic oligonucleotide
  Target: LAMA2; (-) strand; PAM type: YTN; PAM sequence: TTT
gtttccaacaaagtattagg

SEQ ID NO: 240381 - DNA, 20 bp, Artificial Sequence
  Description of Artificial Sequence: Synthetic oligonucleotide
  Target: LAMA2; (-) strand; PAM type: YTN; PAM sequence: TTT
tgtttccaacaaagtattag

SEQ ID NO: 240382 - DNA, 20 bp, Artificial Sequence
  Description of Artificial Sequence: Synthetic oligonucleotide
  Target: LAMA2; (-) strand; PAM type: YTN; PAM sequence: TTA
taaataagtcaccaaatttt

SEQ ID NO: 240383 - DNA, 20 bp, Artificial Sequence
  Description of Artificial Sequence: Synthetic oligonucleotide
  Target: LAMA2; (-) strand; PAM type: YTN; PAM sequence: TTT
ataaataagtcaccaaattt

SEQ ID NO: 240384 - DNA, 20 bp, Artificial Sequence
  Description of Artificial Sequence: Synthetic oligonucleotide
  Target: LAMA2; (-) strand; PAM type: YTN; PAM sequence: TTC
acgtttataaataagtcacc

SEQ ID NO: 240385 - DNA, 20 bp, Artificial Sequence
  Description of Artificial Sequence: Synthetic oligonucleotide
  Target: LAMA2; (-) strand; PAM type: YTN; PAM sequence: TTC
acagaacaagcaagtattca

SEQ ID NO: 240386 - DNA, 20 bp, Artificial Sequence
  Description of Artificial Sequence: Synthetic oligonucleotide
  Target: LAMA2; (-) strand; PAM type: YTN; PAM sequence: TTT
cacagaacaagcaagtattc

SEQ ID NO: 240387 - DNA, 20 bp, Artificial Sequence
  Description of Artificial Sequence: Synthetic oligonucleotide
  Target: LAMA2; (-) strand; PAM type: YTN; PAM sequence: CTT
tcacagaacaagcaagtatt

SEQ ID NO: 240388 - DNA, 20 bp, Artificial Sequence
  Description of Artificial Sequence: Synthetic oligonucleotide
  Target: LAMA2; (-) strand; PAM type: YTN; PAM sequence: TTA
actttcacagaacaagcaag

SEQ ID NO: 240389 - DNA, 20 bp, Artificial Sequence
  Description of Artificial Sequence: Synthetic oligonucleotide
  Target: LAMA2; (-) strand; PAM type: YTN; PAM sequence: CTG
agaaggtattaactttcaca

SEQ ID NO: 240390 - DNA, 20 bp, Artificial Sequence
  Description of Artificial Sequence: Synthetic oligonucleotide
  Target: LAMA2; (-) strand; PAM type: YTN; PAM sequence: CTA
tcagctgagaaggtattaac

SEQ ID NO: 240391 - DNA, 20 bp, Artificial Sequence
  Description of Artificial Sequence: Synthetic oligonucleotide
  Target: LAMA2; (-) strand; PAM type: YTN; PAM sequence: TTA
actatcagctgagaaggtat

SEQ ID NO: 240392 - DNA, 20 bp, Artificial Sequence
  Description of Artificial Sequence: Synthetic oligonucleotide
  Target: LAMA2; (-) strand; PAM type: YTN; PAM sequence: TTT
aactatcagctgagaaggta

SEQ ID NO: 240393 - DNA, 20 bp, Artificial Sequence
  Description of Artificial Sequence: Synthetic oligonucleotide
  Target: LAMA2; (-) strand; PAM type: YTN; PAM sequence: TTT
taactatcagctgagaaggt

SEQ ID NO: 240394 - DNA, 20 bp, Artificial Sequence
  Description of Artificial Sequence: Synthetic oligonucleotide
  Target: LAMA2; (-) strand; PAM type: YTN; PAM sequence: CTG
gtgtgatcaggtattttaac

SEQ ID NO: 240395 - DNA, 20 bp, Artificial Sequence
  Description of Artificial Sequence: Synthetic oligonucleotide
  Target: LAMA2; (-) strand; PAM type: YTN; PAM sequence: TTC
tggtgtgatcaggtatttta

SEQ ID NO: 240396 - DNA, 20 bp, Artificial Sequence
  Description of Artificial Sequence: Synthetic oligonucleotide
  Target: LAMA2; (-) strand; PAM type: YTN; PAM sequence: CTT
ctggtgtgatcaggtatttt

SEQ ID NO: 240397 - DNA, 20 bp, Artificial Sequence
  Description of Artificial Sequence: Synthetic oligonucleotide
  Target: LAMA2; (-) strand; PAM type: YTN; PAM sequence: TTC
ccatcacaccttctggtgtg

SEQ ID NO: 240398 - DNA, 20 bp, Artificial Sequence
  Description of Artificial Sequence: Synthetic oligonucleotide
  Target: LAMA2; (-) strand; PAM type: YTN; PAM sequence: TTT
cccatcacaccttctggtgt

SEQ ID NO: 240399 - DNA, 20 bp, Artificial Sequence
  Description of Artificial Sequence: Synthetic oligonucleotide
  Target: LAMA2; (-) strand; PAM type: YTN; PAM sequence: TTT
tcccatcacaccttctggtg

SEQ ID NO: 240400 - DNA, 20 bp, Artificial Sequence
  Description of Artificial Sequence: Synthetic oligonucleotide
  Target: LAMA2; (-) strand; PAM type: YTN; PAM sequence: TTA
ggaagggattttcccatcac

SEQ ID NO: 240401 - DNA, 20 bp, Artificial Sequence
  Description of Artificial Sequence: Synthetic oligonucleotide
  Target: LAMA2; (-) strand; PAM type: YTN; PAM sequence: TTT
aggaagggattttcccatca

SEQ ID NO: 240402 - DNA, 20 bp, Artificial Sequence
  Description of Artificial Sequence: Synthetic oligonucleotide
  Target: LAMA2; (-) strand; PAM type: YTN; PAM sequence: TTA
atttaggaagggattttccc

SEQ ID NO: 240403 - DNA, 20 bp, Artificial Sequence
  Description of Artificial Sequence: Synthetic oligonucleotide
  Target: LAMA2; (-) strand; PAM type: YTN; PAM sequence: TTA
aacaacattaatttaggaag

SEQ ID NO: 240404 - DNA, 20 bp, Artificial Sequence
  Description of Artificial Sequence: Synthetic oligonucleotide
  Target: LAMA2; (-) strand; PAM type: YTN; PAM sequence: CTT
aaacaacattaatttaggaa

SEQ ID NO: 240405 - DNA, 20 bp, Artificial Sequence
  Description of Artificial Sequence: Synthetic oligonucleotide
  Target: LAMA2; (-) strand; PAM type: YTN; PAM sequence: CTA
ggcttaaacaacattaattt

SEQ ID NO: 240406 - DNA, 20 bp, Artificial Sequence
  Description of Artificial Sequence: Synthetic oligonucleotide
  Target: LAMA2; (-) strand; PAM type: YTN; PAM sequence: TTA
ggtgtaaactaggcttaaac

SEQ ID NO: 240407 - DNA, 20 bp, Artificial Sequence
  Description of Artificial Sequence: Synthetic oligonucleotide
  Target: LAMA2; (-) strand; PAM type: YTN; PAM sequence: TTG
ttaggtgtaaactaggctta

SEQ ID NO: 240408 - DNA, 20 bp, Artificial Sequence
  Description of Artificial Sequence: Synthetic oligonucleotide
  Target: LAMA2; (-) strand; PAM type: YTN; PAM sequence: TTT
gttaggtgtaaactaggctt

SEQ ID NO: 240409 - DNA, 20 bp, Artificial Sequence
  Description of Artificial Sequence: Synthetic oligonucleotide
  Target: LAMA2; (-) strand; PAM type: YTN; PAM sequence: TTT
tgttaggtgtaaactaggct

SEQ ID NO: 240410 - DNA, 20 bp, Artificial Sequence
  Description of Artificial Sequence: Synthetic oligonucleotide
  Target: LAMA2; (-) strand; PAM type: YTN; PAM sequence: CTA
tattttgttaggtgtaaact

SEQ ID NO: 240411 - DNA, 20 bp, Artificial Sequence
  Description of Artificial Sequence: Synthetic oligonucleotide
  Target: LAMA2; (-) strand; PAM type: YTN; PAM sequence: TTC
ataaataatgctatattttg

SEQ ID NO: 240412 - DNA, 20 bp, Artificial Sequence
  Description of Artificial Sequence: Synthetic oligonucleotide
  Target: LAMA2; (-) strand; PAM type: YTN; PAM sequence: CTT
cataaataatgctatatttt

SEQ ID NO: 240413 - DNA, 20 bp, Artificial Sequence
  Description of Artificial Sequence: Synthetic oligonucleotide
  Target: LAMA2; (-) strand; PAM type: YTN; PAM sequence: TTC
ttcataaataatgctatatt

SEQ ID NO: 240414 - DNA, 20 bp, Artificial Sequence
  Description of Artificial Sequence: Synthetic oligonucleotide
  Target: LAMA2; (-) strand; PAM type: YTN; PAM sequence: TTT
cttcataaataatgctatat

SEQ ID NO: 240415 - DNA, 20 bp, Artificial Sequence
  Description of Artificial Sequence: Synthetic oligonucleotide
  Target: LAMA2; (-) strand; PAM type: YTN; PAM sequence: TTA
tgatttcttcataaataatg

SEQ ID NO: 240416 - DNA, 20 bp, Artificial Sequence
  Description of Artificial Sequence: Synthetic oligonucleotide
  Target: LAMA2; (-) strand; PAM type: YTN; PAM sequence: TTA
atcaattatgatttcttcat

SEQ ID NO: 240417 - DNA, 20 bp, Artificial Sequence
  Description of Artificial Sequence: Synthetic oligonucleotide
  Target: LAMA2; (-) strand; PAM type: YTN; PAM sequence: CTT
aatcaattatgatttcttca

SEQ ID NO: 240418 - DNA, 20 bp, Artificial Sequence
  Description of Artificial Sequence: Synthetic oligonucleotide
  Target: LAMA2; (-) strand; PAM type: YTN; PAM sequence: TTG
cttaatcaattatgatttct

SEQ ID NO: 240419 - DNA, 20 bp, Artificial Sequence
  Description of Artificial Sequence: Synthetic oligonucleotide
  Target: LAMA2; (-) strand; PAM type: YTN; PAM sequence: TTT
gcttaatcaattatgatttc

SEQ ID NO: 240420 - DNA, 20 bp, Artificial Sequence
  Description of Artificial Sequence: Synthetic oligonucleotide
  Target: LAMA2; (-) strand; PAM type: YTN; PAM sequence: TTA
tttgcttaatcaattatgat

SEQ ID NO: 240421 - DNA, 20 bp, Artificial Sequence
  Description of Artificial Sequence: Synthetic oligonucleotide
  Target: LAMA2; (-) strand; PAM type: YTN; PAM sequence: TTT
atttgcttaatcaattatga

SEQ ID NO: 240422 - DNA, 20 bp, Artificial Sequence
  Description of Artificial Sequence: Synthetic oligonucleotide
  Target: LAMA2; (-) strand; PAM type: YTN; PAM sequence: TTT
tatttgcttaatcaattatg

SEQ ID NO: 240423 - DNA, 20 bp, Artificial Sequence
  Description of Artificial Sequence: Synthetic oligonucleotide
  Target: LAMA2; (-) strand; PAM type: YTN; PAM sequence: CTT
ttatttgcttaatcaattat

SEQ ID NO: 240424 - DNA, 20 bp, Artificial Sequence
  Description of Artificial Sequence: Synthetic oligonucleotide
  Target: LAMA2; (-) strand; PAM type: YTN; PAM sequence: CTA
taaacatacttttatttgct

SEQ ID NO: 240425 - DNA, 20 bp, Artificial Sequence
  Description of Artificial Sequence: Synthetic oligonucleotide
  Target: LAMA2; (-) strand; PAM type: YTN; PAM sequence: CTG
actataaacatacttttatt

SEQ ID NO: 240426 - DNA, 20 bp, Artificial Sequence
  Description of Artificial Sequence: Synthetic oligonucleotide
  Target: LAMA2; (-) strand; PAM type: YTN; PAM sequence: CTC
acatgtcatgcaagaaaacc

SEQ ID NO: 240427 - DNA, 20 bp, Artificial Sequence
  Description of Artificial Sequence: Synthetic oligonucleotide
  Target: LAMA2; (-) strand; PAM type: YTN; PAM sequence: TTC
aatactcacatgtcatgcaa

SEQ ID NO: 240428 - DNA, 20 bp, Artificial Sequence
  Description of Artificial Sequence: Synthetic oligonucleotide
  Target: LAMA2; (-) strand; PAM type: YTN; PAM sequence: TTT
caatactcacatgtcatgca

SEQ ID NO: 240429 - DNA, 20 bp, Artificial Sequence
  Description of Artificial Sequence: Synthetic oligonucleotide
  Target: LAMA2; (-) strand; PAM type: YTN; PAM sequence: CTA
tttcaatactcacatgtcat

SEQ ID NO: 240430 - DNA, 20 bp, Artificial Sequence
  Description of Artificial Sequence: Synthetic oligonucleotide
  Target: LAMA2; (-) strand; PAM type: YTN; PAM sequence: TTC
tatttcaatactcacatgtc

SEQ ID NO: 240431 - DNA, 20 bp, Artificial Sequence
  Description of Artificial Sequence: Synthetic oligonucleotide
  Target: LAMA2; (-) strand; PAM type: YTN; PAM sequence: TTT
ctatttcaatactcacatgt

SEQ ID NO: 240432 - DNA, 20 bp, Artificial Sequence
  Description of Artificial Sequence: Synthetic oligonucleotide
  Target: LAMA2; (-) strand; PAM type: YTN; PAM sequence: TTT
tctatttcaatactcacatg

SEQ ID NO: 240433 - DNA, 20 bp, Artificial Sequence
  Description of Artificial Sequence: Synthetic oligonucleotide
  Target: LAMA2; (-) strand; PAM type: YTN; PAM sequence: TTT
ttctatttcaatactcacat

SEQ ID NO: 240434 - DNA, 20 bp, Artificial Sequence
  Description of Artificial Sequence: Synthetic oligonucleotide
  Target: LAMA2; (-) strand; PAM type: YTN; PAM sequence: CTA
agtttttctatttcaatact

SEQ ID NO: 240435 - DNA, 20 bp, Artificial Sequence
  Description of Artificial Sequence: Synthetic oligonucleotide
  Target: LAMA2; (-) strand; PAM type: YTN; PAM sequence: CTG
agtagcatatgagatactaa

SEQ ID NO: 240436 - DNA, 20 bp, Artificial Sequence
  Description of Artificial Sequence: Synthetic oligonucleotide
  Target: LAMA2; (-) strand; PAM type: YTN; PAM sequence: TTC
actgagtagcatatgagata

SEQ ID NO: 240437 - DNA, 20 bp, Artificial Sequence
  Description of Artificial Sequence: Synthetic oligonucleotide
  Target: LAMA2; (-) strand; PAM type: YTN; PAM sequence: TTC
ccattcactgagtagcatat

SEQ ID NO: 240438 - DNA, 20 bp, Artificial Sequence
  Description of Artificial Sequence: Synthetic oligonucleotide
  Target: LAMA2; (-) strand; PAM type: YTN; PAM sequence: TTC
aaccagccaacaccaccagt

SEQ ID NO: 240439 - DNA, 20 bp, Artificial Sequence
  Description of Artificial Sequence: Synthetic oligonucleotide
  Target: LAMA2; (-) strand; PAM type: YTN; PAM sequence: TTT
caaccagccaacaccaccag

SEQ ID NO: 240440 - DNA, 20 bp, Artificial Sequence
  Description of Artificial Sequence: Synthetic oligonucleotide
  Target: LAMA2; (-) strand; PAM type: YTN; PAM sequence: TTA
aaagtgtttcaaccagccaa

SEQ ID NO: 240441 - DNA, 20 bp, Artificial Sequence
  Description of Artificial Sequence: Synthetic oligonucleotide
  Target: LAMA2; (-) strand; PAM type: YTN; PAM sequence: CTG
gccataagttaaaagtgttt

SEQ ID NO: 240442 - DNA, 20 bp, Artificial Sequence
  Description of Artificial Sequence: Synthetic oligonucleotide
  Target: LAMA2; (-) strand; PAM type: YTN; PAM sequence: TTA
aatataagaaactggccata

SEQ ID NO: 240443 - DNA, 20 bp, Artificial Sequence
  Description of Artificial Sequence: Synthetic oligonucleotide
  Target: LAMA2; (-) strand; PAM type: YTN; PAM sequence: CTG
ttaaatataagaaactggcc

SEQ ID NO: 240444 - DNA, 20 bp, Artificial Sequence
  Description of Artificial Sequence: Synthetic oligonucleotide
  Target: LAMA2; (-) strand; PAM type: YTN; PAM sequence: TTC
tgttaaatataagaaactgg

SEQ ID NO: 240445 - DNA, 20 bp, Artificial Sequence
  Description of Artificial Sequence: Synthetic oligonucleotide
  Target: LAMA2; (-) strand; PAM type: YTN; PAM sequence: TTC
agagttctgttaaatataag

SEQ ID NO: 240446 - DNA, 20 bp, Artificial Sequence
  Description of Artificial Sequence: Synthetic oligonucleotide
  Target: LAMA2; (-) strand; PAM type: YTN; PAM sequence: TTG
taatagcattcagagttctg

SEQ ID NO: 240447 - DNA, 20 bp, Artificial Sequence
  Description of Artificial Sequence: Synthetic oligonucleotide
  Target: LAMA2; (-) strand; PAM type: YTN; PAM sequence: TTT
gtaatagcattcagagttct

SEQ ID NO: 240448 - DNA, 20 bp, Artificial Sequence
  Description of Artificial Sequence: Synthetic oligonucleotide
  Target: LAMA2; (-) strand; PAM type: YTN; PAM sequence: TTT
tgtaatagcattcagagttc

SEQ ID NO: 240449 - DNA, 20 bp, Artificial Sequence
  Description of Artificial Sequence: Synthetic oligonucleotide
  Target: LAMA2; (-) strand; PAM type: YTN; PAM sequence: TTT
ttgtaatagcattcagagtt

SEQ ID NO: 240450 - DNA, 20 bp, Artificial Sequence
  Description of Artificial Sequence: Synthetic oligonucleotide
  Target: LAMA2; (-) strand; PAM type: YTN; PAM sequence: TTT
tttgtaatagcattcagagt

SEQ ID NO: 240451 - DNA, 20 bp, Artificial Sequence
  Description of Artificial Sequence: Synthetic oligonucleotide
  Target: LAMA2; (-) strand; PAM type: YTN; PAM sequence: TTA
cacattttttgtaatagcat

SEQ ID NO: 240452 - DNA, 20 bp, Artificial Sequence
  Description of Artificial Sequence: Synthetic oligonucleotide
  Target: LAMA2; (-) strand; PAM type: YTN; PAM sequence: TTT
acacattttttgtaatagca

SEQ ID NO: 240453 - DNA, 20 bp, Artificial Sequence
  Description of Artificial Sequence: Synthetic oligonucleotide
  Target: LAMA2; (-) strand; PAM type: YTN; PAM sequence: TTA
gacatttacacattttttgt

SEQ ID NO: 240454 - DNA, 20 bp, Artificial Sequence
  Description of Artificial Sequence: Synthetic oligonucleotide
  Target: LAMA2; (-) strand; PAM type: YTN; PAM sequence: TTT
agacatttacacattttttg

SEQ ID NO: 240455 - DNA, 20 bp, Artificial Sequence
  Description of Artificial Sequence: Synthetic oligonucleotide
  Target: LAMA2; (-) strand; PAM type: YTN; PAM sequence: TTT
tagacatttacacatttttt

SEQ ID NO: 240456 - DNA, 20 bp, Artificial Sequence
  Description of Artificial Sequence: Synthetic oligonucleotide
  Target: LAMA2; (-) strand; PAM type: YTN; PAM sequence: CTT
ttagacatttacacattttt

SEQ ID NO: 240457 - DNA, 20 bp, Artificial Sequence
  Description of Artificial Sequence: Synthetic oligonucleotide
  Target: LAMA2; (-) strand; PAM type: YTN; PAM sequence: TTG
aaaatgtcttttagacattt

SEQ ID NO: 240458 - DNA, 20 bp, Artificial Sequence
  Description of Artificial Sequence: Synthetic oligonucleotide
  Target: LAMA2; (-) strand; PAM type: YTN; PAM sequence: TTC
attgaaaatgtcttttagac

SEQ ID NO: 240459 - DNA, 20 bp, Artificial Sequence
  Description of Artificial Sequence: Synthetic oligonucleotide
  Target: LAMA2; (-) strand; PAM type: YTN; PAM sequence: TTA
aaatacatgttcattgaaaa

SEQ ID NO: 240460 - DNA, 20 bp, Artificial Sequence
  Description of Artificial Sequence: Synthetic oligonucleotide
  Target: LAMA2; (-) strand; PAM type: YTN; PAM sequence: CTT
aaaatacatgttcattgaaa

SEQ ID NO: 240461 - DNA, 20 bp, Artificial Sequence
  Description of Artificial Sequence: Synthetic oligonucleotide
  Target: LAMA2; (-) strand; PAM type: YTN; PAM sequence: CTC
ttaaaatacatgttcattga

SEQ ID NO: 240462 - DNA, 20 bp, Artificial Sequence
  Description of Artificial Sequence: Synthetic oligonucleotide
  Target: LAMA2; (-) strand; PAM type: YTN; PAM sequence: CTG
tctcttaaaatacatgttca

SEQ ID NO: 240463 - DNA, 20 bp, Artificial Sequence
  Description of Artificial Sequence: Synthetic oligonucleotide
  Target: LAMA2; (-) strand; PAM type: YTN; PAM sequence: CTC
tgtctcttaaaatacatgtt

SEQ ID NO: 240464 - DNA, 20 bp, Artificial Sequence
  Description of Artificial Sequence: Synthetic oligonucleotide
  Target: LAMA2; (-) strand; PAM type: YTN; PAM sequence: TTA
tgcaacatactctgtctctt

SEQ ID NO: 240465 - DNA, 20 bp, Artificial Sequence
  Description of Artificial Sequence: Synthetic oligonucleotide
  Target: LAMA2; (-) strand; PAM type: YTN; PAM sequence: TTT
atgcaacatactctgtctct

SEQ ID NO: 240466 - DNA, 20 bp, Artificial Sequence
  Description of Artificial Sequence: Synthetic oligonucleotide
  Target: LAMA2; (-) strand; PAM type: YTN; PAM sequence: TTT
tatgcaacatactctgtctc

SEQ ID NO: 240467 - DNA, 20 bp, Artificial Sequence
  Description of Artificial Sequence: Synthetic oligonucleotide
  Target: LAMA2; (-) strand; PAM type: YTN; PAM sequence: TTG
aattttatgcaacatactct

SEQ ID NO: 240468 - DNA, 20 bp, Artificial Sequence
  Description of Artificial Sequence: Synthetic oligonucleotide
  Target: LAMA2; (-) strand; PAM type: YTN; PAM sequence: CTA
ttgaattttatgcaacatac

SEQ ID NO: 240469 - DNA, 20 bp, Artificial Sequence
  Description of Artificial Sequence: Synthetic oligonucleotide
  Target: LAMA2; (-) strand; PAM type: YTN; PAM sequence: TTA
cagctattgaattttatgca

SEQ ID NO: 240470 - DNA, 20 bp, Artificial Sequence
  Description of Artificial Sequence: Synthetic oligonucleotide
  Target: LAMA2; (-) strand; PAM type: YTN; PAM sequence: TTT
acagctattgaattttatgc

SEQ ID NO: 240471 - DNA, 20 bp, Artificial Sequence
  Description of Artificial Sequence: Synthetic oligonucleotide
  Target: LAMA2; (-) strand; PAM type: YTN; PAM sequence: TTT
tacagctattgaattttatg

SEQ ID NO: 240472 - DNA, 20 bp, Artificial Sequence
  Description of Artificial Sequence: Synthetic oligonucleotide
  Target: LAMA2; (-) strand; PAM type: YTN; PAM sequence: TTA
ttttacagctattgaatttt

SEQ ID NO: 240473 - DNA, 20 bp, Artificial Sequence
  Description of Artificial Sequence: Synthetic oligonucleotide
  Target: LAMA2; (-) strand; PAM type: YTN; PAM sequence: TTT
attttacagctattgaattt

SEQ ID NO: 240474 - DNA, 20 bp, Artificial Sequence
  Description of Artificial Sequence: Synthetic oligonucleotide
  Target: LAMA2; (-) strand; PAM type: YTN; PAM sequence: TTT
tattttacagctattgaatt

SEQ ID NO: 240475 - DNA, 20 bp, Artificial Sequence
  Description of Artificial Sequence: Synthetic oligonucleotide
  Target: LAMA2; (-) strand; PAM type: YTN; PAM sequence: TTT
ttattttacagctattgaat

SEQ ID NO: 240476 - DNA, 20 bp, Artificial Sequence
  Description of Artificial Sequence: Synthetic oligonucleotide
  Target: LAMA2; (-) strand; PAM type: YTN; PAM sequence: TTC
gatttttattttacagctat

SEQ ID NO: 240477 - DNA, 20 bp, Artificial Sequence
  Description of Artificial Sequence: Synthetic oligonucleotide
  Target: LAMA2; (-) strand; PAM type: YTN; PAM sequence: TTA
attcgatttttattttacag

SEQ ID NO: 240478 - DNA, 20 bp, Artificial Sequence
  Description of Artificial Sequence: Synthetic oligonucleotide
  Target: LAMA2; (-) strand; PAM type: YTN; PAM sequence: TTT
aattcgatttttattttaca

SEQ ID NO: 240479 - DNA, 20 bp, Artificial Sequence
  Description of Artificial Sequence: Synthetic oligonucleotide
  Target: LAMA2; (-) strand; PAM type: YTN; PAM sequence: TTG
caaataaaagtttaattcga

SEQ ID NO: 240480 - DNA, 20 bp, Artificial Sequence
  Description of Artificial Sequence: Synthetic oligonucleotide
  Target: LAMA2; (-) strand; PAM type: YTN; PAM sequence: CTT
gcaaataaaagtttaattcg

SEQ ID NO: 240481 - DNA, 20 bp, Artificial Sequence
  Description of Artificial Sequence: Synthetic oligonucleotide
  Target: LAMA2; (-) strand; PAM type: YTN; PAM sequence: CTG
taaagggccttgcaaataaa

SEQ ID NO: 240482 - DNA, 20 bp, Artificial Sequence
  Description of Artificial Sequence: Synthetic oligonucleotide
  Target: LAMA2; (-) strand; PAM type: YTN; PAM sequence: TTG
ctgtaaagggccttgcaaat

SEQ ID NO: 240483 - DNA, 20 bp, Artificial Sequence
  Description of Artificial Sequence: Synthetic oligonucleotide
  Target: LAMA2; (-) strand; PAM type: YTN; PAM sequence: CTT
gctgtaaagggccttgcaaa

SEQ ID NO: 240484 - DNA, 20 bp, Artificial Sequence
  Description of Artificial Sequence: Synthetic oligonucleotide
  Target: LAMA2; (-) strand; PAM type: YTN; PAM sequence: TTC
ttgctgtaaagggccttgca

SEQ ID NO: 240485 - DNA, 20 bp, Artificial Sequence
  Description of Artificial Sequence: Synthetic oligonucleotide
  Target: LAMA2; (-) strand; PAM type: YTN; PAM sequence: CTT
cttgctgtaaagggccttgc

SEQ ID NO: 240486 - DNA, 20 bp, Artificial Sequence
  Description of Artificial Sequence: Synthetic oligonucleotide
  Target: LAMA2; (-) strand; PAM type: YTN; PAM sequence: CTA
aatagaataggataaaatga

SEQ ID NO: 240487 - DNA, 20 bp, Artificial Sequence
  Description of Artificial Sequence: Synthetic oligonucleotide
  Target: LAMA2; (-) strand; PAM type: YTN; PAM sequence: TTC
ctaaatagaataggataaaa

SEQ ID NO: 240488 - DNA, 20 bp, Artificial Sequence
  Description of Artificial Sequence: Synthetic oligonucleotide
  Target: LAMA2; (-) strand; PAM type: YTN; PAM sequence: TTT
cctaaatagaataggataaa

SEQ ID NO: 240489 - DNA, 20 bp, Artificial Sequence
  Description of Artificial Sequence: Synthetic oligonucleotide
  Target: LAMA2; (-) strand; PAM type: YTN; PAM sequence: TTG
ggaataccagagtttcctaa

SEQ ID NO: 240490 - DNA, 20 bp, Artificial Sequence
  Description of Artificial Sequence: Synthetic oligonucleotide
  Target: LAMA2; (-) strand; PAM type: YTN; PAM sequence: TTT
gggaataccagagtttccta

SEQ ID NO: 240491 - DNA, 20 bp, Artificial Sequence
  Description of Artificial Sequence: Synthetic oligonucleotide
  Target: LAMA2; (-) strand; PAM type: YTN; PAM sequence: TTT
tgggaataccagagtttcct

SEQ ID NO: 240492 - DNA, 20 bp, Artificial Sequence
  Description of Artificial Sequence: Synthetic oligonucleotide
  Target: LAMA2; (-) strand; PAM type: YTN; PAM sequence: CTT
ttgggaataccagagtttcc

SEQ ID NO: 240493 - DNA, 20 bp, Artificial Sequence
  Description of Artificial Sequence: Synthetic oligonucleotide
  Target: LAMA2; (-) strand; PAM type: YTN; PAM sequence: TTC
ttttgggaataccagagttt

SEQ ID NO: 240494 - DNA, 20 bp, Artificial Sequence
  Description of Artificial Sequence: Synthetic oligonucleotide
  Target: LAMA2; (-) strand; PAM type: YTN; PAM sequence: TTG
ttcttttgggaataccagag

SEQ ID NO: 240495 - DNA, 20 bp, Artificial Sequence
  Description of Artificial Sequence: Synthetic oligonucleotide
  Target: LAMA2; (-) strand; PAM type: YTN; PAM sequence: TTT
gttcttttgggaataccaga

SEQ ID NO: 240496 - DNA, 20 bp, Artificial Sequence
  Description of Artificial Sequence: Synthetic oligonucleotide
  Target: LAMA2; (-) strand; PAM type: YTN; PAM sequence: TTT
tgttcttttgggaataccag

SEQ ID NO: 240497 - DNA, 20 bp, Artificial Sequence
  Description of Artificial Sequence: Synthetic oligonucleotide
  Target: LAMA2; (-) strand; PAM type: YTN; PAM sequence: CTG
ttttgttcttttgggaatac

SEQ ID NO: 240498 - DNA, 20 bp, Artificial Sequence
  Description of Artificial Sequence: Synthetic oligonucleotide
  Target: LAMA2; (-) strand; PAM type: YTN; PAM sequence: TTA
tgtgctgttttgttcttttg

SEQ ID NO: 240499 - DNA, 20 bp, Artificial Sequence
  Description of Artificial Sequence: Synthetic oligonucleotide
  Target: LAMA2; (-) strand; PAM type: YTN; PAM sequence: CTT
atgtgctgttttgttctttt

SEQ ID NO: 240500 - DNA, 20 bp, Artificial Sequence
  Description of Artificial Sequence: Synthetic oligonucleotide
  Target: LAMA2; (-) strand; PAM type: YTN; PAM sequence: TTC
aagtcttatgtgctgttttg

SEQ ID NO: 240501 - DNA, 20 bp, Artificial Sequence
  Description of Artificial Sequence: Synthetic oligonucleotide
  Target: LAMA2; (-) strand; PAM type: YTN; PAM sequence: TTA
agcagtagaaattcaagtct

SEQ ID NO: 240502 - DNA, 20 bp, Artificial Sequence
  Description of Artificial Sequence: Synthetic oligonucleotide
  Target: LAMA2; (-) strand; PAM type: YTN; PAM sequence: TTT
aagcagtagaaattcaagtc

SEQ ID NO: 240503 - DNA, 20 bp, Artificial Sequence
  Description of Artificial Sequence: Synthetic oligonucleotide
  Target: LAMA2; (-) strand; PAM type: YTN; PAM sequence: TTT
taagcagtagaaattcaagt

SEQ ID NO: 240504 - DNA, 20 bp, Artificial Sequence
  Description of Artificial Sequence: Synthetic oligonucleotide
  Target: LAMA2; (-) strand; PAM type: YTN; PAM sequence: TTG
gcaattttaagcagtagaaa

SEQ ID NO: 240505 - DNA, 20 bp, Artificial Sequence
  Description of Artificial Sequence: Synthetic oligonucleotide
  Target: LAMA2; (-) strand; PAM type: YTN; PAM sequence: TTT
ggcaattttaagcagtagaa

SEQ ID NO: 240506 - DNA, 20 bp, Artificial Sequence
  Description of Artificial Sequence: Synthetic oligonucleotide
  Target: LAMA2; (-) strand; PAM type: YTN; PAM sequence: TTT
tggcaattttaagcagtaga

SEQ ID NO: 240507 - DNA, 20 bp, Artificial Sequence
  Description of Artificial Sequence: Synthetic oligonucleotide
  Target: LAMA2; (-) strand; PAM type: YTN; PAM sequence: TTT
ttggcaattttaagcagtag

SEQ ID NO: 240508 - DNA, 20 bp, Artificial Sequence
  Description of Artificial Sequence: Synthetic oligonucleotide
  Target: LAMA2; (-) strand; PAM type: YTN; PAM sequence: TTT
tttggcaattttaagcagta

SEQ ID NO: 240509 - DNA, 20 bp, Artificial Sequence
  Description of Artificial Sequence: Synthetic oligonucleotide
  Target: LAMA2; (-) strand; PAM type: YTN; PAM sequence: TTT
ttttggcaattttaagcagt

SEQ ID NO: 240510 - DNA, 20 bp, Artificial Sequence
  Description of Artificial Sequence: Synthetic oligonucleotide
  Target: LAMA2; (-) strand; PAM type: YTN; PAM sequence: TTA
tatttttttggcaattttaa

SEQ ID NO: 240511 - DNA, 20 bp, Artificial Sequence
  Description of Artificial Sequence: Synthetic oligonucleotide
  Target: LAMA2; (-) strand; PAM type: YTN; PAM sequence: TTT
atatttttttggcaatttta

SEQ ID NO: 240512 - DNA, 20 bp, Artificial Sequence
  Description of Artificial Sequence: Synthetic oligonucleotide
  Target: LAMA2; (-) strand; PAM type: YTN; PAM sequence: TTT
tatatttttttggcaatttt

SEQ ID NO: 240513 - DNA, 20 bp, Artificial Sequence
  Description of Artificial Sequence: Synthetic oligonucleotide
  Target: LAMA2; (-) strand; PAM type: YTN; PAM sequence: TTT
ttatatttttttggcaattt

SEQ ID NO: 240514 - DNA, 20 bp, Artificial Sequence
  Description of Artificial Sequence: Synthetic oligonucleotide
  Target: LAMA2; (-) strand; PAM type: YTN; PAM sequence: TTG
acagtatatttttatatttt

SEQ ID NO: 240515 - DNA, 20 bp, Artificial Sequence
  Description of Artificial Sequence: Synthetic oligonucleotide
  Target: LAMA2; (-) strand; PAM type: YTN; PAM sequence: TTA
aattgacagtatatttttat

SEQ ID NO: 240516 - DNA, 20 bp, Artificial Sequence
  Description of Artificial Sequence: Synthetic oligonucleotide
  Target: LAMA2; (-) strand; PAM type: YTN; PAM sequence: TTT
aaattgacagtatattttta

SEQ ID NO: 240517 - DNA, 20 bp, Artificial Sequence
  Description of Artificial Sequence: Synthetic oligonucleotide
  Target: LAMA2; (-) strand; PAM type: YTN; PAM sequence: TTT
taaattgacagtatattttt

SEQ ID NO: 240518 - DNA, 20 bp, Artificial Sequence
  Description of Artificial Sequence: Synthetic oligonucleotide
  Target: LAMA2; (-) strand; PAM type: YTN; PAM sequence: TTT
ttaaattgacagtatatttt

SEQ ID NO: 240519 - DNA, 20 bp, Artificial Sequence
  Description of Artificial Sequence: Synthetic oligonucleotide
  Target: LAMA2; (-) strand; PAM type: YTN; PAM sequence: TTT
tttaaattgacagtatattt

SEQ ID NO: 240520 - DNA, 20 bp, Artificial Sequence
  Description of Artificial Sequence: Synthetic oligonucleotide
  Target: LAMA2; (-) strand; PAM type: YTN; PAM sequence: TTT
ttttaaattgacagtatatt

SEQ ID NO: 240521 - DNA, 20 bp, Artificial Sequence
  Description of Artificial Sequence: Synthetic oligonucleotide
  Target: LAMA2; (-) strand; PAM type: YTN; PAM sequence: TTT
tttttaaattgacagtatat

SEQ ID NO: 240522 - DNA, 20 bp, Artificial Sequence
  Description of Artificial Sequence: Synthetic oligonucleotide
  Target: LAMA2; (-) strand; PAM type: YTN; PAM sequence: TTT
ttttttaaattgacagtata

SEQ ID NO: 240523 - DNA, 20 bp, Artificial Sequence
  Description of Artificial Sequence: Synthetic oligonucleotide
  Target: LAMA2; (-) strand; PAM type: YTN; PAM sequence: TTT
tttttttaaattgacagtat

SEQ ID NO: 240524 - DNA, 20 bp, Artificial Sequence
  Description of Artificial Sequence: Synthetic oligonucleotide
  Target: LAMA2; (-) strand; PAM type: YTN; PAM sequence: TTG
ttttttttttaaattgacag

SEQ ID NO: 240525 - DNA, 20 bp, Artificial Sequence
  Description of Artificial Sequence: Synthetic oligonucleotide
  Target: LAMA2; (-) strand; PAM type: YTN; PAM sequence: CTC
agttgttttttttttaaatt

SEQ ID NO: 240526 - DNA, 20 bp, Artificial Sequence
  Description of Artificial Sequence: Synthetic oligonucleotide
  Target: LAMA2; (-) strand; PAM type: YTN; PAM sequence: CTC
tcagttgttttttttttaaa

SEQ ID NO: 240527 - DNA, 20 bp, Artificial Sequence
  Description of Artificial Sequence: Synthetic oligonucleotide
  Target: LAMA2; (-) strand; PAM type: YTN; PAM sequence: TTG
gagctctcagttgttttttt

SEQ ID NO: 240528 - DNA, 20 bp, Artificial Sequence
  Description of Artificial Sequence: Synthetic oligonucleotide
  Target: LAMA2; (-) strand; PAM type: YTN; PAM sequence: CTT
ggagctctcagttgtttttt

SEQ ID NO: 240529 - DNA, 20 bp, Artificial Sequence
  Description of Artificial Sequence: Synthetic oligonucleotide
  Target: LAMA2; (-) strand; PAM type: YTN; PAM sequence: TTC
ttggagctctcagttgtttt

SEQ ID NO: 240530 - DNA, 20 bp, Artificial Sequence
  Description of Artificial Sequence: Synthetic oligonucleotide
  Target: LAMA2; (-) strand; PAM type: YTN; PAM sequence: CTT
cttggagctctcagttgttt

SEQ ID NO: 240531 - DNA, 20 bp, Artificial Sequence
  Description of Artificial Sequence: Synthetic oligonucleotide
  Target: LAMA2; (-) strand; PAM type: YTN; PAM sequence: CTC
ttcttggagctctcagttgt

SEQ ID NO: 240532 - DNA, 20 bp, Artificial Sequence
  Description of Artificial Sequence: Synthetic oligonucleotide
  Target: LAMA2; (-) strand; PAM type: YTN; PAM sequence: CTA
aggctcttcttggagctctc

SEQ ID NO: 240533 - DNA, 20 bp, Artificial Sequence
  Description of Artificial Sequence: Synthetic oligonucleotide
  Target: LAMA2; (-) strand; PAM type: YTN; PAM sequence: TTG
acctaaggctcttcttggag

SEQ ID NO: 240534 - DNA, 20 bp, Artificial Sequence
  Description of Artificial Sequence: Synthetic oligonucleotide
  Target: LAMA2; (-) strand; PAM type: YTN; PAM sequence: TTT
gacctaaggctcttcttgga

SEQ ID NO: 240535 - DNA, 20 bp, Artificial Sequence
  Description of Artificial Sequence: Synthetic oligonucleotide
  Target: LAMA2; (-) strand; PAM type: YTN; PAM sequence: TTT
tgacctaaggctcttcttgg

SEQ ID NO: 240536 - DNA, 20 bp, Artificial Sequence
  Description of Artificial Sequence: Synthetic oligonucleotide
  Target: LAMA2; (-) strand; PAM type: YTN; PAM sequence: TTC
atccaattttgacctaaggc

SEQ ID NO: 240537 - DNA, 20 bp, Artificial Sequence
  Description of Artificial Sequence: Synthetic oligonucleotide
  Target: LAMA2; (-) strand; PAM type: YTN; PAM sequence: CTG
aaattcatccaattttgacc

SEQ ID NO: 240538 - DNA, 20 bp, Artificial Sequence
  Description of Artificial Sequence: Synthetic oligonucleotide
  Target: LAMA2; (-) strand; PAM type: YTN; PAM sequence: CTC
tgaaattcatccaattttga

SEQ ID NO: 240539 - DNA, 20 bp, Artificial Sequence
  Description of Artificial Sequence: Synthetic oligonucleotide
  Target: LAMA2; (-) strand; PAM type: YTN; PAM sequence: TTG
ccatcatataagaaataagg

SEQ ID NO: 240540 - DNA, 20 bp, Artificial Sequence
  Description of Artificial Sequence: Synthetic oligonucleotide
  Target: LAMA2; (-) strand; PAM type: YTN; PAM sequence: TTA
agtgttgccatcatataaga

SEQ ID NO: 240541 - DNA, 20 bp, Artificial Sequence
  Description of Artificial Sequence: Synthetic oligonucleotide
  Target: LAMA2; (-) strand; PAM type: YTN; PAM sequence: TTA
attaagtgttgccatcatat

SEQ ID NO: 240542 - DNA, 20 bp, Artificial Sequence
  Description of Artificial Sequence: Synthetic oligonucleotide
  Target: LAMA2; (-) strand; PAM type: YTN; PAM sequence: TTT
aattaagtgttgccatcata

SEQ ID NO: 240543 - DNA, 20 bp, Artificial Sequence
  Description of Artificial Sequence: Synthetic oligonucleotide
  Target: LAMA2; (-) strand; PAM type: YTN; PAM sequence: CTT
taattaagtgttgccatcat

SEQ ID NO: 240544 - DNA, 20 bp, Artificial Sequence
  Description of Artificial Sequence: Synthetic oligonucleotide
  Target: LAMA2; (-) strand; PAM type: YTN; PAM sequence: CTA
ctttaattaagtgttgccat

SEQ ID NO: 240545 - DNA, 20 bp, Artificial Sequence
  Description of Artificial Sequence: Synthetic oligonucleotide
  Target: LAMA2; (-) strand; PAM type: YTN; PAM sequence: TTA
taagctactttaattaagtg

SEQ ID NO: 240546 - DNA, 20 bp, Artificial Sequence
  Description of Artificial Sequence: Synthetic oligonucleotide
  Target: LAMA2; (-) strand; PAM type: YTN; PAM sequence: CTA
ttataagctactttaattaa

SEQ ID NO: 240547 - DNA, 20 bp, Artificial Sequence
  Description of Artificial Sequence: Synthetic oligonucleotide
  Target: LAMA2; (-) strand; PAM type: YTN; PAM sequence: TTC
tattataagctactttaatt

SEQ ID NO: 240548 - DNA, 20 bp, Artificial Sequence
  Description of Artificial Sequence: Synthetic oligonucleotide
  Target: LAMA2; (-) strand; PAM type: YTN; PAM sequence: TTT
ctattataagctactttaat

SEQ ID NO: 240549 - DNA, 20 bp, Artificial Sequence
  Description of Artificial Sequence: Synthetic oligonucleotide
  Target: LAMA2; (-) strand; PAM type: YTN; PAM sequence: CTG
gtaaagaatatttctattat

SEQ ID NO: 240550 - DNA, 20 bp, Artificial Sequence
  Description of Artificial Sequence: Synthetic oligonucleotide
  Target: LAMA2; (-) strand; PAM type: YTN; PAM sequence: TTG
tcagccaacagaaaaaaaaa

SEQ ID NO: 240551 - DNA, 20 bp, Artificial Sequence
  Description of Artificial Sequence: Synthetic oligonucleotide
  Target: LAMA2; (-) strand; PAM type: YTN; PAM sequence: TTG
attgtcagccaacagaaaaa

SEQ ID NO: 240552 - DNA, 20 bp, Artificial Sequence
  Description of Artificial Sequence: Synthetic oligonucleotide
  Target: LAMA2; (-) strand; PAM type: YTN; PAM sequence: TTT
gattgtcagccaacagaaaa

SEQ ID NO: 240553 - DNA, 20 bp, Artificial Sequence
  Description of Artificial Sequence: Synthetic oligonucleotide
  Target: LAMA2; (-) strand; PAM type: YTN; PAM sequence: CTG
tcagtttgattgtcagccaa

SEQ ID NO: 240554 - DNA, 20 bp, Artificial Sequence
  Description of Artificial Sequence: Synthetic oligonucleotide
  Target: LAMA2; (-) strand; PAM type: YTN; PAM sequence: TTC
tgtcagtttgattgtcagcc

SEQ ID NO: 240555 - DNA, 20 bp, Artificial Sequence
  Description of Artificial Sequence: Synthetic oligonucleotide
  Target: LAMA2; (-) strand; PAM type: YTN; PAM sequence: CTT
ctgtcagtttgattgtcagc

SEQ ID NO: 240556 - DNA, 20 bp, Artificial Sequence
  Description of Artificial Sequence: Synthetic oligonucleotide
  Target: LAMA2; (-) strand; PAM type: YTN; PAM sequence: TTC
cttctgtcagtttgattgtc

SEQ ID NO: 240557 - DNA, 20 bp, Artificial Sequence
  Description of Artificial Sequence: Synthetic oligonucleotide
  Target: LAMA2; (-) strand; PAM type: YTN; PAM sequence: TTT
ccttctgtcagtttgattgt

SEQ ID NO: 240558 - DNA, 20 bp, Artificial Sequence
  Description of Artificial Sequence: Synthetic oligonucleotide
  Target: LAMA2; (-) strand; PAM type: YTN; PAM sequence: CTT
tccttctgtcagtttgattg

SEQ ID NO: 240559 - DNA, 20 bp, Artificial Sequence
  Description of Artificial Sequence: Synthetic oligonucleotide
  Target: LAMA2; (-) strand; PAM type: YTN; PAM sequence: TTG
ctttccttctgtcagtttga

SEQ ID NO: 240560 - DNA, 20 bp, Artificial Sequence
  Description of Artificial Sequence: Synthetic oligonucleotide
  Target: LAMA2; (-) strand; PAM type: YTN; PAM sequence: CTT
gctttccttctgtcagtttg

SEQ ID NO: 240561 - DNA, 20 bp, Artificial Sequence
  Description of Artificial Sequence: Synthetic oligonucleotide
  Target: LAMA2; (-) strand; PAM type: YTN; PAM sequence: TTG
cttgctttccttctgtcagt

SEQ ID NO: 240562 - DNA, 20 bp, Artificial Sequence
  Description of Artificial Sequence: Synthetic oligonucleotide
  Target: LAMA2; (-) strand; PAM type: YTN; PAM sequence: TTT
gcttgctttccttctgtcag

SEQ ID NO: 240563 - DNA, 20 bp, Artificial Sequence
  Description of Artificial Sequence: Synthetic oligonucleotide
  Target: LAMA2; (-) strand; PAM type: YTN; PAM sequence: TTC
catttgcttgctttccttct

SEQ ID NO: 240564 - DNA, 20 bp, Artificial Sequence
  Description of Artificial Sequence: Synthetic oligonucleotide
  Target: LAMA2; (-) strand; PAM type: YTN; PAM sequence: CTA
ccgaatattccatttgcttg

SEQ ID NO: 240565 - DNA, 20 bp, Artificial Sequence
  Description of Artificial Sequence: Synthetic oligonucleotide
  Target: LAMA2; (-) strand; PAM type: YTN; PAM sequence: TTC
taccgaatattccatttgct

SEQ ID NO: 240566 - DNA, 20 bp, Artificial Sequence
  Description of Artificial Sequence: Synthetic oligonucleotide
  Target: LAMA2; (-) strand; PAM type: YTN; PAM sequence: CTG
attctaccgaatattccatt

SEQ ID NO: 240567 - DNA, 20 bp, Artificial Sequence
  Description of Artificial Sequence: Synthetic oligonucleotide
  Target: LAMA2; (-) strand; PAM type: YTN; PAM sequence: TTC
tgattctaccgaatattcca

SEQ ID NO: 240568 - DNA, 20 bp, Artificial Sequence
  Description of Artificial Sequence: Synthetic oligonucleotide
  Target: LAMA2; (-) strand; PAM type: YTN; PAM sequence: TTG
ttctgattctaccgaatatt

SEQ ID NO: 240569 - DNA, 20 bp, Artificial Sequence
  Description of Artificial Sequence: Synthetic oligonucleotide
  Target: LAMA2; (-) strand; PAM type: YTN; PAM sequence: TTT
gttctgattctaccgaatat

SEQ ID NO: 240570 - DNA, 20 bp, Artificial Sequence
  Description of Artificial Sequence: Synthetic oligonucleotide
  Target: LAMA2; (-) strand; PAM type: YTN; PAM sequence: CTT
tgttctgattctaccgaata

SEQ ID NO: 240571 - DNA, 20 bp, Artificial Sequence
  Description of Artificial Sequence: Synthetic oligonucleotide
  Target: LAMA2; (-) strand; PAM type: YTN; PAM sequence: TTC
tttgttctgattctaccgaa

SEQ ID NO: 240572 - DNA, 20 bp, Artificial Sequence
  Description of Artificial Sequence: Synthetic oligonucleotide
  Target: LAMA2; (-) strand; PAM type: YTN; PAM sequence: CTA
atgggatgtccaaattcttt

SEQ ID NO: 240573 - DNA, 20 bp, Artificial Sequence
  Description of Artificial Sequence: Synthetic oligonucleotide
  Target: LAMA2; (-) strand; PAM type: YTN; PAM sequence: CTA
ctaatgggatgtccaaattc

SEQ ID NO: 240574 - DNA, 20 bp, Artificial Sequence
  Description of Artificial Sequence: Synthetic oligonucleotide
  Target: LAMA2; (-) strand; PAM type: YTN; PAM sequence: TTC
gggaaccaacaactactaat

SEQ ID NO: 240575 - DNA, 20 bp, Artificial Sequence
  Description of Artificial Sequence: Synthetic oligonucleotide
  Target: LAMA2; (-) strand; PAM type: YTN; PAM sequence: CTT
cgggaaccaacaactactaa

SEQ ID NO: 240576 - DNA, 20 bp, Artificial Sequence
  Description of Artificial Sequence: Synthetic oligonucleotide
  Target: LAMA2; (-) strand; PAM type: YTN; PAM sequence: TTA
tcttcgggaaccaacaacta

SEQ ID NO: 240577 - DNA, 20 bp, Artificial Sequence
  Description of Artificial Sequence: Synthetic oligonucleotide
  Target: LAMA2; (-) strand; PAM type: YTN; PAM sequence: TTC
agccaggataagggaagtta

SEQ ID NO: 240578 - DNA, 20 bp, Artificial Sequence
  Description of Artificial Sequence: Synthetic oligonucleotide
  Target: LAMA2; (-) strand; PAM type: YTN; PAM sequence: TTT
cagccaggataagggaagtt

SEQ ID NO: 240579 - DNA, 20 bp, Artificial Sequence
  Description of Artificial Sequence: Synthetic oligonucleotide
  Target: LAMA2; (-) strand; PAM type: YTN; PAM sequence: TTA
taagaaaaatatttcagcca

SEQ ID NO: 240580 - DNA, 20 bp, Artificial Sequence
  Description of Artificial Sequence: Synthetic oligonucleotide
  Target: LAMA2; (-) strand; PAM type: YTN; PAM sequence: CTG
tgggttataagaaaaatatt

SEQ ID NO: 240581 - DNA, 20 bp, Artificial Sequence
  Description of Artificial Sequence: Synthetic oligonucleotide
  Target: LAMA2; (-) strand; PAM type: YTN; PAM sequence: TTC
actgtgggttataagaaaaa

SEQ ID NO: 240582 - DNA, 20 bp, Artificial Sequence
  Description of Artificial Sequence: Synthetic oligonucleotide
  Target: LAMA2; (-) strand; PAM type: YTN; PAM sequence: CTT
cactgtgggttataagaaaa

SEQ ID NO: 240583 - DNA, 20 bp, Artificial Sequence
  Description of Artificial Sequence: Synthetic oligonucleotide
  Target: LAMA2; (-) strand; PAM type: YTN; PAM sequence: TTG
atgtgaaaatgatcggtagg

SEQ ID NO: 240584 - DNA, 20 bp, Artificial Sequence
  Description of Artificial Sequence: Synthetic oligonucleotide
  Target: LAMA2; (-) strand; PAM type: YTN; PAM sequence: TTT
gatgtgaaaatgatcggtag

SEQ ID NO: 240585 - DNA, 20 bp, Artificial Sequence
  Description of Artificial Sequence: Synthetic oligonucleotide
  Target: LAMA2; (-) strand; PAM type: YTN; PAM sequence: TTT
tgatgtgaaaatgatcggta

SEQ ID NO: 240586 - DNA, 20 bp, Artificial Sequence
  Description of Artificial Sequence: Synthetic oligonucleotide
  Target: LAMA2; (-) strand; PAM type: YTN; PAM sequence: CTG
aatggaaacggcagtacagg

SEQ ID NO: 240587 - DNA, 20 bp, Artificial Sequence
  Description of Artificial Sequence: Synthetic oligonucleotide
  Target: LAMA2; (-) strand; PAM type: YTN; PAM sequence: TTC
actgaatggaaacggcagta

SEQ ID NO: 240588 - DNA, 20 bp, Artificial Sequence
  Description of Artificial Sequence: Synthetic oligonucleotide
  Target: LAMA2; (-) strand; PAM type: YTN; PAM sequence: TTG
ttcactgaatggaaacggca

SEQ ID NO: 240589 - DNA, 20 bp, Artificial Sequence
  Description of Artificial Sequence: Synthetic oligonucleotide
  Target: LAMA2; (-) strand; PAM type: YTN; PAM sequence: TTT
gttcactgaatggaaacggc

SEQ ID NO: 240590 - DNA, 20 bp, Artificial Sequence
  Description of Artificial Sequence: Synthetic oligonucleotide
  Target: LAMA2; (-) strand; PAM type: YTN; PAM sequence: TTT
tgttcactgaatggaaacgg

SEQ ID NO: 240591 - DNA, 20 bp, Artificial Sequence
  Description of Artificial Sequence: Synthetic oligonucleotide
  Target: LAMA2; (-) strand; PAM type: YTN; PAM sequence: TTA
ttttgttcactgaatggaaa

SEQ ID NO: 240592 - DNA, 20 bp, Artificial Sequence
  Description of Artificial Sequence: Synthetic oligonucleotide
  Target: LAMA2; (-) strand; PAM type: YTN; PAM sequence: TTA
atgttattttgttcactgaa

SEQ ID NO: 240593 - DNA, 20 bp, Artificial Sequence
  Description of Artificial Sequence: Synthetic oligonucleotide
  Target: LAMA2; (-) strand; PAM type: YTN; PAM sequence: CTG
ttaatgttattttgttcact

SEQ ID NO: 240594 - DNA, 20 bp, Artificial Sequence
  Description of Artificial Sequence: Synthetic oligonucleotide
  Target: LAMA2; (-) strand; PAM type: YTN; PAM sequence: TTG
cacaccctgttaatgttatt

SEQ ID NO: 240595 - DNA, 20 bp, Artificial Sequence
  Description of Artificial Sequence: Synthetic oligonucleotide
  Target: LAMA2; (-) strand; PAM type: YTN; PAM sequence: TTT
gcacaccctgttaatgttat

SEQ ID NO: 240596 - DNA, 20 bp, Artificial Sequence
  Description of Artificial Sequence: Synthetic oligonucleotide
  Target: LAMA2; (-) strand; PAM type: YTN; PAM sequence: TTC
aaacaatttgcacaccctgt

SEQ ID NO: 240597 - DNA, 20 bp, Artificial Sequence
  Description of Artificial Sequence: Synthetic oligonucleotide
  Target: LAMA2; (-) strand; PAM type: YTN; PAM sequence: CTC
cgtattcaaacaatttgcac

SEQ ID NO: 240598 - DNA, 20 bp, Artificial Sequence
  Description of Artificial Sequence: Synthetic oligonucleotide
  Target: LAMA2; (-) strand; PAM type: YTN; PAM sequence: TTA
aaaatgtcctccgtattcaa

SEQ ID NO: 240599 - DNA, 20 bp, Artificial Sequence
  Description of Artificial Sequence: Synthetic oligonucleotide
  Target: LAMA2; (-) strand; PAM type: YTN; PAM sequence: TTA
cattaaaaatgtcctccgta

SEQ ID NO: 240600 - DNA, 20 bp, Artificial Sequence
  Description of Artificial Sequence: Synthetic oligonucleotide
  Target: LAMA2; (-) strand; PAM type: YTN; PAM sequence: TTC
cacgttacattaaaaatgtc

SEQ ID NO: 240601 - DNA, 20 bp, Artificial Sequence
  Description of Artificial Sequence: Synthetic oligonucleotide
  Target: LAMA2; (-) strand; PAM type: YTN; PAM sequence: CTT
ccacgttacattaaaaatgt

SEQ ID NO: 240602 - DNA, 20 bp, Artificial Sequence
  Description of Artificial Sequence: Synthetic oligonucleotide
  Target: LAMA2; (-) strand; PAM type: YTN; PAM sequence: CTG
acagtaaaccaccaagggct

SEQ ID NO: 240603 - DNA, 20 bp, Artificial Sequence
  Description of Artificial Sequence: Synthetic oligonucleotide
  Target: LAMA2; (-) strand; PAM type: YTN; PAM sequence: CTG
agatgcctgacagtaaacca

SEQ ID NO: 240604 - DNA, 20 bp, Artificial Sequence
  Description of Artificial Sequence: Synthetic oligonucleotide
  Target: LAMA2; (-) strand; PAM type: YTN; PAM sequence: TTC
atactgagatgcctgacagt

SEQ ID NO: 240605 - DNA, 20 bp, Artificial Sequence
  Description of Artificial Sequence: Synthetic oligonucleotide
  Target: LAMA2; (-) strand; PAM type: YTN; PAM sequence: TTC
attcatactgagatgcctga

SEQ ID NO: 240606 - DNA, 20 bp, Artificial Sequence
  Description of Artificial Sequence: Synthetic oligonucleotide
  Target: LAMA2; (-) strand; PAM type: YTN; PAM sequence: TTT
cattcatactgagatgcctg

SEQ ID NO: 240607 - DNA, 20 bp, Artificial Sequence
  Description of Artificial Sequence: Synthetic oligonucleotide
  Target: LAMA2; (-) strand; PAM type: YTN; PAM sequence: TTG
tttcattcatactgagatgc

SEQ ID NO: 240608 - DNA, 20 bp, Artificial Sequence
  Description of Artificial Sequence: Synthetic oligonucleotide
  Target: LAMA2; (-) strand; PAM type: YTN; PAM sequence: TTA
aggcaaattgtttcattcat

SEQ ID NO: 240609 - DNA, 20 bp, Artificial Sequence
  Description of Artificial Sequence: Synthetic oligonucleotide
  Target: LAMA2; (-) strand; PAM type: YTN; PAM sequence: TTA
ttaaggcaaattgtttcatt

SEQ ID NO: 240610 - DNA, 20 bp, Artificial Sequence
  Description of Artificial Sequence: Synthetic oligonucleotide
  Target: LAMA2; (-) strand; PAM type: YTN; PAM sequence: TTC
agttattaaggcaaattgtt

SEQ ID NO: 240611 - DNA, 20 bp, Artificial Sequence
  Description of Artificial Sequence: Synthetic oligonucleotide
  Target: LAMA2; (-) strand; PAM type: YTN; PAM sequence: TTA
catggttcagttattaaggc

SEQ ID NO: 240612 - DNA, 20 bp, Artificial Sequence
  Description of Artificial Sequence: Synthetic oligonucleotide
  Target: LAMA2; (-) strand; PAM type: YTN; PAM sequence: TTT
acatggttcagttattaagg

SEQ ID NO: 240613 - DNA, 20 bp, Artificial Sequence
  Description of Artificial Sequence: Synthetic oligonucleotide
  Target: LAMA2; (-) strand; PAM type: YTN; PAM sequence: TTG
tagtatcaaaaatttacatg

SEQ ID NO: 240614 - DNA, 20 bp, Artificial Sequence
  Description of Artificial Sequence: Synthetic oligonucleotide
  Target: LAMA2; (-) strand; PAM type: YTN; PAM sequence: TTA
ttgtagtatcaaaaatttac

SEQ ID NO: 240615 - DNA, 20 bp, Artificial Sequence
  Description of Artificial Sequence: Synthetic oligonucleotide
  Target: LAMA2; (-) strand; PAM type: YTN; PAM sequence: TTG
cagtattattgtagtatcaa

SEQ ID NO: 240616 - DNA, 20 bp, Artificial Sequence
  Description of Artificial Sequence: Synthetic oligonucleotide
  Target: LAMA2; (-) strand; PAM type: YTN; PAM sequence: CTT
gcagtattattgtagtatca

SEQ ID NO: 240617 - DNA, 20 bp, Artificial Sequence
  Description of Artificial Sequence: Synthetic oligonucleotide
  Target: LAMA2; (-) strand; PAM type: YTN; PAM sequence: CTG
agagcttgcagtattattgt

SEQ ID NO: 240618 - DNA, 20 bp, Artificial Sequence
  Description of Artificial Sequence: Synthetic oligonucleotide
  Target: LAMA2; (-) strand; PAM type: YTN; PAM sequence: TTC
tgagagcttgcagtattatt

SEQ ID NO: 240619 - DNA, 20 bp, Artificial Sequence
  Description of Artificial Sequence: Synthetic oligonucleotide
  Target: LAMA2; (-) strand; PAM type: YTN; PAM sequence: TTT
ctgagagcttgcagtattat

SEQ ID NO: 240620 - DNA, 20 bp, Artificial Sequence
  Description of Artificial Sequence: Synthetic oligonucleotide
  Target: LAMA2; (-) strand; PAM type: YTN; PAM sequence: CTG
tggtaatttctgagagcttg

SEQ ID NO: 240621 - DNA, 20 bp, Artificial Sequence
  Description of Artificial Sequence: Synthetic oligonucleotide
  Target: LAMA2; (-) strand; PAM type: YTN; PAM sequence: TTA
agatgtactgtggtaatttc

SEQ ID NO: 240622 - DNA, 20 bp, Artificial Sequence
  Description of Artificial Sequence: Synthetic oligonucleotide
  Target: LAMA2; (-) strand; PAM type: YTN; PAM sequence: TTA
cgtgatgtgacatgacagtt

SEQ ID NO: 240623 - DNA, 20 bp, Artificial Sequence
  Description of Artificial Sequence: Synthetic oligonucleotide
  Target: LAMA2; (-) strand; PAM type: YTN; PAM sequence: TTT
acgtgatgtgacatgacagt

SEQ ID NO: 240624 - DNA, 20 bp, Artificial Sequence
  Description of Artificial Sequence: Synthetic oligonucleotide
  Target: LAMA2; (-) strand; PAM type: YTN; PAM sequence: CTA
taatttacgtgatgtgacat

SEQ ID NO: 240625 - DNA, 20 bp, Artificial Sequence
  Description of Artificial Sequence: Synthetic oligonucleotide
  Target: LAMA2; (-) strand; PAM type: YTN; PAM sequence: CTA
agcatgtcatcatgactata

SEQ ID NO: 240626 - DNA, 20 bp, Artificial Sequence
  Description of Artificial Sequence: Synthetic oligonucleotide
  Target: LAMA2; (-) strand; PAM type: YTN; PAM sequence: TTA
aatcaaccaagctaagcatg

SEQ ID NO: 240627 - DNA, 20 bp, Artificial Sequence
  Description of Artificial Sequence: Synthetic oligonucleotide
  Target: LAMA2; (-) strand; PAM type: YTN; PAM sequence: TTA
gcaagatattaaatcaacca

SEQ ID NO: 240628 - DNA, 20 bp, Artificial Sequence
  Description of Artificial Sequence: Synthetic oligonucleotide
  Target: LAMA2; (-) strand; PAM type: YTN; PAM sequence: CTT
agcaagatattaaatcaacc

SEQ ID NO: 240629 - DNA, 20 bp, Artificial Sequence
  Description of Artificial Sequence: Synthetic oligonucleotide
  Target: LAMA2; (-) strand; PAM type: YTN; PAM sequence: TTC
cttagcaagatattaaatca

SEQ ID NO: 240630 - DNA, 20 bp, Artificial Sequence
  Description of Artificial Sequence: Synthetic oligonucleotide
  Target: LAMA2; (-) strand; PAM type: YTN; PAM sequence: CTT
ccttagcaagatattaaatc

SEQ ID NO: 240631 - DNA, 20 bp, Artificial Sequence
  Description of Artificial Sequence: Synthetic oligonucleotide
  Target: LAMA2; (-) strand; PAM type: YTN; PAM sequence: TTC
cacttccttagcaagatatt

SEQ ID NO: 240632 - DNA, 20 bp, Artificial Sequence
  Description of Artificial Sequence: Synthetic oligonucleotide
  Target: LAMA2; (-) strand; PAM type: YTN; PAM sequence: TTT
ccacttccttagcaagatat

SEQ ID NO: 240633 - DNA, 20 bp, Artificial Sequence
  Description of Artificial Sequence: Synthetic oligonucleotide
  Target: LAMA2; (-) strand; PAM type: YTN; PAM sequence: TTT
tccacttccttagcaagata

SEQ ID NO: 240634 - DNA, 20 bp, Artificial Sequence
  Description of Artificial Sequence: Synthetic oligonucleotide
  Target: LAMA2; (-) strand; PAM type: YTN; PAM sequence: CTA
caattttccacttccttagc

SEQ ID NO: 240635 - DNA, 20 bp, Artificial Sequence
  Description of Artificial Sequence: Synthetic oligonucleotide
  Target: LAMA2; (-) strand; PAM type: YTN; PAM sequence: TTA
ccaacaaggccctacaattt

SEQ ID NO: 240636 - DNA, 20 bp, Artificial Sequence
  Description of Artificial Sequence: Synthetic oligonucleotide
  Target: LAMA2; (-) strand; PAM type: YTN; PAM sequence: TTT
accaacaaggccctacaatt

SEQ ID NO: 240637 - DNA, 20 bp, Artificial Sequence
  Description of Artificial Sequence: Synthetic oligonucleotide
  Target: LAMA2; (-) strand; PAM type: YTN; PAM sequence: TTG
aatttaccaacaaggcccta

SEQ ID NO: 240638 - DNA, 20 bp, Artificial Sequence
  Description of Artificial Sequence: Synthetic oligonucleotide
  Target: LAMA2; (-) strand; PAM type: YTN; PAM sequence: TTA
ttgaatttaccaacaaggcc

SEQ ID NO: 240639 - DNA, 20 bp, Artificial Sequence
  Description of Artificial Sequence: Synthetic oligonucleotide
  Target: LAMA2; (-) strand; PAM type: YTN; PAM sequence: TTT
attgaatttaccaacaaggc

SEQ ID NO: 240640 - DNA, 20 bp, Artificial Sequence
  Description of Artificial Sequence: Synthetic oligonucleotide
  Target: LAMA2; (-) strand; PAM type: YTN; PAM sequence: CTT
tattgaatttaccaacaagg

SEQ ID NO: 240641 - DNA, 20 bp, Artificial Sequence
  Description of Artificial Sequence: Synthetic oligonucleotide
  Target: LAMA2; (-) strand; PAM type: YTN; PAM sequence: TTA
gaaaagtggctttattgaat

SEQ ID NO: 240642 - DNA, 20 bp, Artificial Sequence
  Description of Artificial Sequence: Synthetic oligonucleotide
  Target: LAMA2; (-) strand; PAM type: YTN; PAM sequence: TTT
agaaaagtggctttattgaa

SEQ ID NO: 240643 - DNA, 20 bp, Artificial Sequence
  Description of Artificial Sequence: Synthetic oligonucleotide
  Target: LAMA2; (-) strand; PAM type: YTN; PAM sequence: CTA
tttagaaaagtggctttatt

SEQ ID NO: 240644 - DNA, 20 bp, Artificial Sequence
  Description of Artificial Sequence: Synthetic oligonucleotide
  Target: LAMA2; (-) strand; PAM type: YTN; PAM sequence: CTC
aactatttagaaaagtggct

SEQ ID NO: 240645 - DNA, 20 bp, Artificial Sequence
  Description of Artificial Sequence: Synthetic oligonucleotide
  Target: LAMA2; (-) strand; PAM type: YTN; PAM sequence: TTA
gcctcaactatttagaaaag

SEQ ID NO: 240646 - DNA, 20 bp, Artificial Sequence
  Description of Artificial Sequence: Synthetic oligonucleotide
  Target: LAMA2; (-) strand; PAM type: YTN; PAM sequence: TTT
agcctcaactatttagaaaa

SEQ ID NO: 240647 - DNA, 20 bp, Artificial Sequence
  Description of Artificial Sequence: Synthetic oligonucleotide
  Target: LAMA2; (-) strand; PAM type: YTN; PAM sequence: CTG
gtaaagaatttagcctcaac

SEQ ID NO: 240648 - DNA, 20 bp, Artificial Sequence
  Description of Artificial Sequence: Synthetic oligonucleotide
  Target: LAMA2; (-) strand; PAM type: YTN; PAM sequence: TTA
ctggtaaagaatttagcctc

SEQ ID NO: 240649 - DNA, 20 bp, Artificial Sequence
  Description of Artificial Sequence: Synthetic oligonucleotide
  Target: LAMA2; (-) strand; PAM type: YTN; PAM sequence: TTC
gaacagcaattactggtaaa

SEQ ID NO: 240650 - DNA, 20 bp, Artificial Sequence
  Description of Artificial Sequence: Synthetic oligonucleotide
  Target: LAMA2; (-) strand; PAM type: YTN; PAM sequence: CTG
attcgaacagcaattactgg

SEQ ID NO: 240651 - DNA, 20 bp, Artificial Sequence
  Description of Artificial Sequence: Synthetic oligonucleotide
  Target: LAMA2; (-) strand; PAM type: YTN; PAM sequence: TTC
tgattcgaacagcaattact

SEQ ID NO: 240652 - DNA, 20 bp, Artificial Sequence
  Description of Artificial Sequence: Synthetic oligonucleotide
  Target: LAMA2; (-) strand; PAM type: YTN; PAM sequence: CTG
gcaatggttctgattcgaac

SEQ ID NO: 240653 - DNA, 20 bp, Artificial Sequence
  Description of Artificial Sequence: Synthetic oligonucleotide
  Target: LAMA2; (-) strand; PAM type: YTN; PAM sequence: TTC
tggcaatggttctgattcga

SEQ ID NO: 240654 - DNA, 20 bp, Artificial Sequence
  Description of Artificial Sequence: Synthetic oligonucleotide
  Target: LAMA2; (-) strand; PAM type: YTN; PAM sequence: CTG
tcagattctggcaatggttc

SEQ ID NO: 240655 - DNA, 20 bp, Artificial Sequence
  Description of Artificial Sequence: Synthetic oligonucleotide
  Target: LAMA2; (-) strand; PAM type: YTN; PAM sequence: TTC
tgtcagattctggcaatggt

SEQ ID NO: 240656 - DNA, 20 bp, Artificial Sequence
  Description of Artificial Sequence: Synthetic oligonucleotide
  Target: LAMA2; (-) strand; PAM type: YTN; PAM sequence: TTT
ctgtcagattctggcaatgg

SEQ ID NO: 240657 - DNA, 20 bp, Artificial Sequence
  Description of Artificial Sequence: Synthetic oligonucleotide
  Target: LAMA2; (-) strand; PAM type: YTN; PAM sequence: CTA
tttctgtcagattctggcaa

SEQ ID NO: 240658 - DNA, 20 bp, Artificial Sequence
  Description of Artificial Sequence: Synthetic oligonucleotide
  Target: LAMA2; (-) strand; PAM type: YTN; PAM sequence: TTG
atacgctatttctgtcagat

SEQ ID NO: 240659 - DNA, 20 bp, Artificial Sequence
  Description of Artificial Sequence: Synthetic oligonucleotide
  Target: LAMA2; (-) strand; PAM type: YTN; PAM sequence: CTT
gatacgctatttctgtcaga

SEQ ID NO: 240660 - DNA, 20 bp, Artificial Sequence
  Description of Artificial Sequence: Synthetic oligonucleotide
  Target: LAMA2; (-) strand; PAM type: YTN; PAM sequence: TTG
tatcttgatacgctatttct

SEQ ID NO: 240661 - DNA, 20 bp, Artificial Sequence
  Description of Artificial Sequence: Synthetic oligonucleotide
  Target: LAMA2; (-) strand; PAM type: YTN; PAM sequence: CTT
gtatcttgatacgctatttc

SEQ ID NO: 240662 - DNA, 20 bp, Artificial Sequence
  Description of Artificial Sequence: Synthetic oligonucleotide
  Target: LAMA2; (-) strand; PAM type: YTN; PAM sequence: TTA
agcagatgcacttgtatctt

SEQ ID NO: 240663 - DNA, 20 bp, Artificial Sequence
  Description of Artificial Sequence: Synthetic oligonucleotide
  Target: LAMA2; (-) strand; PAM type: YTN; PAM sequence: TTT
aagcagatgcacttgtatct

SEQ ID NO: 240664 - DNA, 20 bp, Artificial Sequence
  Description of Artificial Sequence: Synthetic oligonucleotide
  Target: LAMA2; (-) strand; PAM type: YTN; PAM sequence: TTC
aatatttaagcagatgcact

SEQ ID NO: 240665 - DNA, 20 bp, Artificial Sequence
  Description of Artificial Sequence: Synthetic oligonucleotide
  Target: LAMA2; (-) strand; PAM type: YTN; PAM sequence: CTG
gtcatggatgtaaataaaat

SEQ ID NO: 240666 - DNA, 20 bp, Artificial Sequence
  Description of Artificial Sequence: Synthetic oligonucleotide
  Target: LAMA2; (-) strand; PAM type: YTN; PAM sequence: CTC
ctggtcatggatgtaaataa

SEQ ID NO: 240667 - DNA, 20 bp, Artificial Sequence
  Description of Artificial Sequence: Synthetic oligonucleotide
  Target: LAMA2; (-) strand; PAM type: YTN; PAM sequence: TTA
tgtaccatagactcctggtc

SEQ ID NO: 240668 - DNA, 20 bp, Artificial Sequence
  Description of Artificial Sequence: Synthetic oligonucleotide
  Target: LAMA2; (-) strand; PAM type: YTN; PAM sequence: CTA
aaaaagcagaggaaggatta

SEQ ID NO: 240669 - DNA, 20 bp, Artificial Sequence
  Description of Artificial Sequence: Synthetic oligonucleotide
  Target: LAMA2; (-) strand; PAM type: YTN; PAM sequence: TTA
ggaaataacactaaaaaagc

SEQ ID NO: 240670 - DNA, 20 bp, Artificial Sequence
  Description of Artificial Sequence: Synthetic oligonucleotide
  Target: LAMA2; (-) strand; PAM type: YTN; PAM sequence: TTC
caattaggaaataacactaa

SEQ ID NO: 240671 - DNA, 20 bp, Artificial Sequence
  Description of Artificial Sequence: Synthetic oligonucleotide
  Target: LAMA2; (-) strand; PAM type: YTN; PAM sequence: TTT
ccaattaggaaataacacta

SEQ ID NO: 240672 - DNA, 20 bp, Artificial Sequence
  Description of Artificial Sequence: Synthetic oligonucleotide
  Target: LAMA2; (-) strand; PAM type: YTN; PAM sequence: TTT
tccaattaggaaataacact

SEQ ID NO: 240673 - DNA, 20 bp, Artificial Sequence
  Description of Artificial Sequence: Synthetic oligonucleotide
  Target: LAMA2; (-) strand; PAM type: YTN; PAM sequence: TTT
ttccaattaggaaataacac

SEQ ID NO: 240674 - DNA, 20 bp, Artificial Sequence
  Description of Artificial Sequence: Synthetic oligonucleotide
  Target: LAMA2; (-) strand; PAM type: YTN; PAM sequence: TTT
tttccaattaggaaataaca

SEQ ID NO: 240675 - DNA, 20 bp, Artificial Sequence
  Description of Artificial Sequence: Synthetic oligonucleotide
  Target: LAMA2; (-) strand; PAM type: YTN; PAM sequence: CTC
ataattttttccaattagga

SEQ ID NO: 240676 - DNA, 20 bp, Artificial Sequence
  Description of Artificial Sequence: Synthetic oligonucleotide
  Target: LAMA2; (-) strand; PAM type: YTN; PAM sequence: CTA
atagcatctcataatttttt

SEQ ID NO: 240677 - DNA, 20 bp, Artificial Sequence
  Description of Artificial Sequence: Synthetic oligonucleotide
  Target: LAMA2; (-) strand; PAM type: YTN; PAM sequence: TTA
ggaaaagctaatagcatctc

SEQ ID NO: 240678 - DNA, 20 bp, Artificial Sequence
  Description of Artificial Sequence: Synthetic oligonucleotide
  Target: LAMA2; (-) strand; PAM type: YTN; PAM sequence: TTT
aggaaaagctaatagcatct

SEQ ID NO: 240679 - DNA, 20 bp, Artificial Sequence
  Description of Artificial Sequence: Synthetic oligonucleotide
  Target: LAMA2; (-) strand; PAM type: YTN; PAM sequence: CTG
tatataaatatttaggaaaa

SEQ ID NO: 240680 - DNA, 20 bp, Artificial Sequence
  Description of Artificial Sequence: Synthetic oligonucleotide
  Target: LAMA2; (-) strand; PAM type: YTN; PAM sequence: TTG
aaagtctgtatataaatatt

SEQ ID NO: 240681 - DNA, 20 bp, Artificial Sequence
  Description of Artificial Sequence: Synthetic oligonucleotide
  Target: LAMA2; (-) strand; PAM type: YTN; PAM sequence: TTT
gaaagtctgtatataaatat

SEQ ID NO: 240682 - DNA, 20 bp, Artificial Sequence
  Description of Artificial Sequence: Synthetic oligonucleotide
  Target: LAMA2; (-) strand; PAM type: YTN; PAM sequence: TTG
gaaaatgtttgaaagtctgt

SEQ ID NO: 240683 - DNA, 20 bp, Artificial Sequence
  Description of Artificial Sequence: Synthetic oligonucleotide
  Target: LAMA2; (-) strand; PAM type: YTN; PAM sequence: CTT
ggaaaatgtttgaaagtctg

SEQ ID NO: 240684 - DNA, 20 bp, Artificial Sequence
  Description of Artificial Sequence: Synthetic oligonucleotide
  Target: LAMA2; (-) strand; PAM type: YTN; PAM sequence: TTA
taaccaagcaacttggaaaa

SEQ ID NO: 240685 - DNA, 20 bp, Artificial Sequence
  Description of Artificial Sequence: Synthetic oligonucleotide
  Target: LAMA2; (-) strand; PAM type: YTN; PAM sequence: CTT
ataaccaagcaacttggaaa

SEQ ID NO: 240686 - DNA, 20 bp, Artificial Sequence
  Description of Artificial Sequence: Synthetic oligonucleotide
  Target: LAMA2; (-) strand; PAM type: YTN; PAM sequence: TTA
gaagaagccttataaccaag

SEQ ID NO: 240687 - DNA, 20 bp, Artificial Sequence
  Description of Artificial Sequence: Synthetic oligonucleotide
  Target: LAMA2; (-) strand; PAM type: YTN; PAM sequence: CTG
ttagaagaagccttataacc

SEQ ID NO: 240688 - DNA, 20 bp, Artificial Sequence
  Description of Artificial Sequence: Synthetic oligonucleotide
  Target: LAMA2; (-) strand; PAM type: YTN; PAM sequence: TTC
tgttagaagaagccttataa

SEQ ID NO: 240689 - DNA, 20 bp, Artificial Sequence
  Description of Artificial Sequence: Synthetic oligonucleotide
  Target: LAMA2; (-) strand; PAM type: YTN; PAM sequence: CTT
ctgttagaagaagccttata

SEQ ID NO: 240690 - DNA, 20 bp, Artificial Sequence
  Description of Artificial Sequence: Synthetic oligonucleotide
  Target: LAMA2; (-) strand; PAM type: YTN; PAM sequence: TTA
taagagaacatgcacagcat

SEQ ID NO: 240691 - DNA, 20 bp, Artificial Sequence
  Description of Artificial Sequence: Synthetic oligonucleotide
  Target: LAMA2; (-) strand; PAM type: YTN; PAM sequence: CTC
cattataagagaacatgcac

SEQ ID NO: 240692 - DNA, 20 bp, Artificial Sequence
  Description of Artificial Sequence: Synthetic oligonucleotide
  Target: LAMA2; (-) strand; PAM type: YTN; PAM sequence: CTA
aaaaaagaataacagcatgt

SEQ ID NO: 240693 - DNA, 20 bp, Artificial Sequence
  Description of Artificial Sequence: Synthetic oligonucleotide
  Target: LAMA2; (-) strand; PAM type: YTN; PAM sequence: CTC
ctaaaaaaagaataacagca

SEQ ID NO: 240694 - DNA, 20 bp, Artificial Sequence
  Description of Artificial Sequence: Synthetic oligonucleotide
  Target: LAMA2; (-) strand; PAM type: YTN; PAM sequence: TTA
ggctcctaaaaaaagaataa

SEQ ID NO: 240695 - DNA, 20 bp, Artificial Sequence
  Description of Artificial Sequence: Synthetic oligonucleotide
  Target: LAMA2; (-) strand; PAM type: YTN; PAM sequence: TTG
ggattaggctcctaaaaaaa

SEQ ID NO: 240696 - DNA, 20 bp, Artificial Sequence
  Description of Artificial Sequence: Synthetic oligonucleotide
  Target: LAMA2; (-) strand; PAM type: YTN; PAM sequence: TTT
gggattaggctcctaaaaaa

SEQ ID NO: 240697 - DNA, 20 bp, Artificial Sequence
  Description of Artificial Sequence: Synthetic oligonucleotide
  Target: LAMA2; (-) strand; PAM type: YTN; PAM sequence: TTA
tttgggattaggctcctaaa

SEQ ID NO: 240698 - DNA, 20 bp, Artificial Sequence
  Description of Artificial Sequence: Synthetic oligonucleotide
  Target: LAMA2; (-) strand; PAM type: YTN; PAM sequence: TTA
ttatttgggattaggctcct

SEQ ID NO: 240699 - DNA, 20 bp, Artificial Sequence
  Description of Artificial Sequence: Synthetic oligonucleotide
  Target: LAMA2; (-) strand; PAM type: YTN; PAM sequence: TTT
attatttgggattaggctcc

SEQ ID NO: 240700 - DNA, 20 bp, Artificial Sequence
  Description of Artificial Sequence: Synthetic oligonucleotide
  Target: LAMA2; (-) strand; PAM type: YTN; PAM sequence: TTT
tattatttgggattaggctc

SEQ ID NO: 240701 - DNA, 20 bp, Artificial Sequence
  Description of Artificial Sequence: Synthetic oligonucleotide
  Target: LAMA2; (-) strand; PAM type: YTN; PAM sequence: CTT
ttattatttgggattaggct

SEQ ID NO: 240702 - DNA, 20 bp, Artificial Sequence
  Description of Artificial Sequence: Synthetic oligonucleotide
  Target: LAMA2; (-) strand; PAM type: YTN; PAM sequence: TTA
gcaaaaatgtgtcccatgtg

SEQ ID NO: 240703 - DNA, 20 bp, Artificial Sequence
  Description of Artificial Sequence: Synthetic oligonucleotide
  Target: LAMA2; (-) strand; PAM type: YTN; PAM sequence: TTA
caaccaggcagacatccatg

SEQ ID NO: 240704 - DNA, 20 bp, Artificial Sequence
  Description of Artificial Sequence: Synthetic oligonucleotide
  Target: LAMA2; (-) strand; PAM type: YTN; PAM sequence: TTA
ttacaaccaggcagacatcc

SEQ ID NO: 240705 - DNA, 20 bp, Artificial Sequence
  Description of Artificial Sequence: Synthetic oligonucleotide
  Target: LAMA2; (-) strand; PAM type: YTN; PAM sequence: TTT
attacaaccaggcagacatc

SEQ ID NO: 240706 - DNA, 20 bp, Artificial Sequence
  Description of Artificial Sequence: Synthetic oligonucleotide
  Target: LAMA2; (-) strand; PAM type: YTN; PAM sequence: TTT
tattacaaccaggcagacat

SEQ ID NO: 240707 - DNA, 20 bp, Artificial Sequence
  Description of Artificial Sequence: Synthetic oligonucleotide
  Target: LAMA2; (-) strand; PAM type: YTN; PAM sequence: TTG
agttttattacaaccaggca

SEQ ID NO: 240708 - DNA, 20 bp, Artificial Sequence
  Description of Artificial Sequence: Synthetic oligonucleotide
  Target: LAMA2; (-) strand; PAM type: YTN; PAM sequence: CTT
gagttttattacaaccaggc

SEQ ID NO: 240709 - DNA, 20 bp, Artificial Sequence
  Description of Artificial Sequence: Synthetic oligonucleotide
  Target: LAMA2; (-) strand; PAM type: YTN; PAM sequence: TTC
ttgagttttattacaaccag

SEQ ID NO: 240710 - DNA, 20 bp, Artificial Sequence
  Description of Artificial Sequence: Synthetic oligonucleotide
  Target: LAMA2; (-) strand; PAM type: YTN; PAM sequence: CTA
gtattcttgagttttattac

SEQ ID NO: 240711 - DNA, 20 bp, Artificial Sequence
  Description of Artificial Sequence: Synthetic oligonucleotide
  Target: LAMA2; (-) strand; PAM type: YTN; PAM sequence: TTG
gctagtattcttgagtttta

SEQ ID NO: 240712 - DNA, 20 bp, Artificial Sequence
  Description of Artificial Sequence: Synthetic oligonucleotide
  Target: LAMA2; (-) strand; PAM type: YTN; PAM sequence: CTA
aattggctagtattcttgag

SEQ ID NO: 240713 - DNA, 20 bp, Artificial Sequence
  Description of Artificial Sequence: Synthetic oligonucleotide
  Target: LAMA2; (-) strand; PAM type: YTN; PAM sequence: TTG
ctaaattggctagtattctt

SEQ ID NO: 240714 - DNA, 20 bp, Artificial Sequence
  Description of Artificial Sequence: Synthetic oligonucleotide
  Target: LAMA2; (-) strand; PAM type: YTN; PAM sequence: TTT
gctaaattggctagtattct

SEQ ID NO: 240715 - DNA, 20 bp, Artificial Sequence
  Description of Artificial Sequence: Synthetic oligonucleotide
  Target: LAMA2; (-) strand; PAM type: YTN; PAM sequence: CTT
tgctaaattggctagtattc

SEQ ID NO: 240716 - DNA, 20 bp, Artificial Sequence
  Description of Artificial Sequence: Synthetic oligonucleotide
  Target: LAMA2; (-) strand; PAM type: YTN; PAM sequence: CTC
ctttgctaaattggctagta

SEQ ID NO: 240717 - DNA, 20 bp, Artificial Sequence
  Description of Artificial Sequence: Synthetic oligonucleotide
  Target: LAMA2; (-) strand; PAM type: YTN; PAM sequence: TTC
acaggatacaaagcactcct

SEQ ID NO: 240718 - DNA, 20 bp, Artificial Sequence
  Description of Artificial Sequence: Synthetic oligonucleotide
  Target: LAMA2; (-) strand; PAM type: YTN; PAM sequence: TTT
cacaggatacaaagcactcc

SEQ ID NO: 240719 - DNA, 20 bp, Artificial Sequence
  Description of Artificial Sequence: Synthetic oligonucleotide
  Target: LAMA2; (-) strand; PAM type: YTN; PAM sequence: TTC
caaaacagtaaaaatgtgaa

SEQ ID NO: 240720 - DNA, 20 bp, Artificial Sequence
  Description of Artificial Sequence: Synthetic oligonucleotide
  Target: LAMA2; (-) strand; PAM type: YTN; PAM sequence: TTA
ttccaaaacagtaaaaatgt

SEQ ID NO: 240721 - DNA, 20 bp, Artificial Sequence
  Description of Artificial Sequence: Synthetic oligonucleotide
  Target: LAMA2; (-) strand; PAM type: YTN; PAM sequence: TTC
attattccaaaacagtaaaa

SEQ ID NO: 240722 - DNA, 20 bp, Artificial Sequence
  Description of Artificial Sequence: Synthetic oligonucleotide
  Target: LAMA2; (-) strand; PAM type: YTN; PAM sequence: CTT
cattattccaaaacagtaaa

SEQ ID NO: 240723 - DNA, 20 bp, Artificial Sequence
  Description of Artificial Sequence: Synthetic oligonucleotide
  Target: LAMA2; (-) strand; PAM type: YTN; PAM sequence: TTA
tacttcattattccaaaaca

SEQ ID NO: 240724 - DNA, 20 bp, Artificial Sequence
  Description of Artificial Sequence: Synthetic oligonucleotide
  Target: LAMA2; (-) strand; PAM type: YTN; PAM sequence: CTT
atacttcattattccaaaac

SEQ ID NO: 240725 - DNA, 20 bp, Artificial Sequence
  Description of Artificial Sequence: Synthetic oligonucleotide
  Target: LAMA2; (-) strand; PAM type: YTN; PAM sequence: TTA
cttatacttcattattccaa

SEQ ID NO: 240726 - DNA, 20 bp, Artificial Sequence
  Description of Artificial Sequence: Synthetic oligonucleotide
  Target: LAMA2; (-) strand; PAM type: YTN; PAM sequence: CTT
acttatacttcattattcca

SEQ ID NO: 240727 - DNA, 20 bp, Artificial Sequence
  Description of Artificial Sequence: Synthetic oligonucleotide
  Target: LAMA2; (-) strand; PAM type: YTN; PAM sequence: TTA
taatcacttacttatacttc

SEQ ID NO: 240728 - DNA, 20 bp, Artificial Sequence
  Description of Artificial Sequence: Synthetic oligonucleotide
  Target: LAMA2; (-) strand; PAM type: YTN; PAM sequence: CTT
ataatcacttacttatactt

SEQ ID NO: 240729 - DNA, 20 bp, Artificial Sequence
  Description of Artificial Sequence: Synthetic oligonucleotide
  Target: LAMA2; (-) strand; PAM type: YTN; PAM sequence: TTA
tccacacatacacttataat

SEQ ID NO: 240730 - DNA, 20 bp, Artificial Sequence
  Description of Artificial Sequence: Synthetic oligonucleotide
  Target: LAMA2; (-) strand; PAM type: YTN; PAM sequence: CTC
atccattatccacacataca

SEQ ID NO: 240731 - DNA, 20 bp, Artificial Sequence
  Description of Artificial Sequence: Synthetic oligonucleotide
  Target: LAMA2; (-) strand; PAM type: YTN; PAM sequence: CTA
ggcctcatccattatccaca

SEQ ID NO: 240732 - DNA, 20 bp, Artificial Sequence
  Description of Artificial Sequence: Synthetic oligonucleotide
  Target: LAMA2; (-) strand; PAM type: YTN; PAM sequence: TTC
ctaggcctcatccattatcc

SEQ ID NO: 240733 - DNA, 20 bp, Artificial Sequence
  Description of Artificial Sequence: Synthetic oligonucleotide
  Target: LAMA2; (-) strand; PAM type: YTN; PAM sequence: TTT
cctaggcctcatccattatc

SEQ ID NO: 240734 - DNA, 20 bp, Artificial Sequence
  Description of Artificial Sequence: Synthetic oligonucleotide
  Target: LAMA2; (-) strand; PAM type: YTN; PAM sequence: TTT
tcctaggcctcatccattat

SEQ ID NO: 240735 - DNA, 20 bp, Artificial Sequence
  Description of Artificial Sequence: Synthetic oligonucleotide
  Target: LAMA2; (-) strand; PAM type: YTN; PAM sequence: CTA
agttttcctaggcctcatcc

SEQ ID NO: 240736 - DNA, 20 bp, Artificial Sequence
  Description of Artificial Sequence: Synthetic oligonucleotide
  Target: LAMA2; (-) strand; PAM type: YTN; PAM sequence: TTC
aaaaatagaaagtataaaaa

SEQ ID NO: 240737 - DNA, 20 bp, Artificial Sequence
  Description of Artificial Sequence: Synthetic oligonucleotide
  Target: LAMA2; (-) strand; PAM type: YTN; PAM sequence: TTT
caaaaatagaaagtataaaa

SEQ ID NO: 240738 - DNA, 20 bp, Artificial Sequence
  Description of Artificial Sequence: Synthetic oligonucleotide
  Target: LAMA2; (-) strand; PAM type: YTN; PAM sequence: CTG
tgggaatttcaaaaatagaa

SEQ ID NO: 240739 - DNA, 20 bp, Artificial Sequence
  Description of Artificial Sequence: Synthetic oligonucleotide
  Target: LAMA2; (-) strand; PAM type: YTN; PAM sequence: CTG
agactgtgggaatttcaaaa

SEQ ID NO: 240740 - DNA, 20 bp, Artificial Sequence
  Description of Artificial Sequence: Synthetic oligonucleotide
  Target: LAMA2; (-) strand; PAM type: YTN; PAM sequence: CTA
gctgagactgtgggaatttc

SEQ ID NO: 240741 - DNA, 20 bp, Artificial Sequence
  Description of Artificial Sequence: Synthetic oligonucleotide
  Target: LAMA2; (-) strand; PAM type: YTN; PAM sequence: CTC
ctagctgagactgtgggaat

SEQ ID NO: 240742 - DNA, 20 bp, Artificial Sequence
  Description of Artificial Sequence: Synthetic oligonucleotide
  Target: LAMA2; (-) strand; PAM type: YTN; PAM sequence: TTG
gaggaacaactcctagctga

SEQ ID NO: 240743 - DNA, 20 bp, Artificial Sequence
  Description of Artificial Sequence: Synthetic oligonucleotide
  Target: LAMA2; (-) strand; PAM type: YTN; PAM sequence: CTG
gtacataggggaaaaaattg

SEQ ID NO: 240744 - DNA, 20 bp, Artificial Sequence
  Description of Artificial Sequence: Synthetic oligonucleotide
  Target: LAMA2; (-) strand; PAM type: YTN; PAM sequence: TTC
actggtacataggggaaaaa

SEQ ID NO: 240745 - DNA, 20 bp, Artificial Sequence
  Description of Artificial Sequence: Synthetic oligonucleotide
  Target: LAMA2; (-) strand; PAM type: YTN; PAM sequence: TTG
tgccaaatattcactggtac

SEQ ID NO: 240746 - DNA, 20 bp, Artificial Sequence
  Description of Artificial Sequence: Synthetic oligonucleotide
  Target: LAMA2; (-) strand; PAM type: YTN; PAM sequence: CTG
ccagttgtgccaaatattca

SEQ ID NO: 240747 - DNA, 20 bp, Artificial Sequence
  Description of Artificial Sequence: Synthetic oligonucleotide
  Target: LAMA2; (-) strand; PAM type: YTN; PAM sequence: TTC
tgccagttgtgccaaatatt

SEQ ID NO: 240748 - DNA, 20 bp, Artificial Sequence
  Description of Artificial Sequence: Synthetic oligonucleotide
  Target: LAMA2; (-) strand; PAM type: YTN; PAM sequence: TTG
attctgccagttgtgccaaa

SEQ ID NO: 240749 - DNA, 20 bp, Artificial Sequence
  Description of Artificial Sequence: Synthetic oligonucleotide
  Target: LAMA2; (-) strand; PAM type: YTN; PAM sequence: CTT
gattctgccagttgtgccaa

SEQ ID NO: 240750 - DNA, 20 bp, Artificial Sequence
  Description of Artificial Sequence: Synthetic oligonucleotide
  Target: LAMA2; (-) strand; PAM type: YTN; PAM sequence: TTA
acacttgattctgccagttg

SEQ ID NO: 240751 - DNA, 20 bp, Artificial Sequence
  Description of Artificial Sequence: Synthetic oligonucleotide
  Target: LAMA2; (-) strand; PAM type: YTN; PAM sequence: CTA
tcaagaacgaggcgggaaaa

SEQ ID NO: 240752 - DNA, 20 bp, Artificial Sequence
  Description of Artificial Sequence: Synthetic oligonucleotide
  Target: LAMA2; (-) strand; PAM type: YTN; PAM sequence: TTG
actatcaagaacgaggcggg

SEQ ID NO: 240753 - DNA, 20 bp, Artificial Sequence
  Description of Artificial Sequence: Synthetic oligonucleotide
  Target: LAMA2; (-) strand; PAM type: YTN; PAM sequence: TTT
gactatcaagaacgaggcgg

SEQ ID NO: 240754 - DNA, 20 bp, Artificial Sequence
  Description of Artificial Sequence: Synthetic oligonucleotide
  Target: LAMA2; (-) strand; PAM type: YTN; PAM sequence: CTT
tgactatcaagaacgaggcg

SEQ ID NO: 240755 - DNA, 20 bp, Artificial Sequence
  Description of Artificial Sequence: Synthetic oligonucleotide
  Target: LAMA2; (-) strand; PAM type: YTN; PAM sequence: CTC
tttgactatcaagaacgagg

SEQ ID NO: 240756 - DNA, 20 bp, Artificial Sequence
  Description of Artificial Sequence: Synthetic oligonucleotide
  Target: LAMA2; (-) strand; PAM type: YTN; PAM sequence: TTC
tctttgactatcaagaacga

SEQ ID NO: 240757 - DNA, 20 bp, Artificial Sequence
  Description of Artificial Sequence: Synthetic oligonucleotide
  Target: LAMA2; (-) strand; PAM type: YTN; PAM sequence: TTA
attctctttgactatcaaga

SEQ ID NO: 240758 - DNA, 20 bp, Artificial Sequence
  Description of Artificial Sequence: Synthetic oligonucleotide
  Target: LAMA2; (-) strand; PAM type: YTN; PAM sequence: TTT
aattctctttgactatcaag

SEQ ID NO: 240759 - DNA, 20 bp, Artificial Sequence
  Description of Artificial Sequence: Synthetic oligonucleotide
  Target: LAMA2; (-) strand; PAM type: YTN; PAM sequence: CTG
atttaattctctttgactat

SEQ ID NO: 240760 - DNA, 20 bp, Artificial Sequence
  Description of Artificial Sequence: Synthetic oligonucleotide
  Target: LAMA2; (-) strand; PAM type: YTN; PAM sequence: CTG
tgggtgcctgatttaattct

SEQ ID NO: 240761 - DNA, 20 bp, Artificial Sequence
  Description of Artificial Sequence: Synthetic oligonucleotide
  Target: LAMA2; (-) strand; PAM type: YTN; PAM sequence: CTA
ggatagccctgtgggtgcct

SEQ ID NO: 240762 - DNA, 20 bp, Artificial Sequence
  Description of Artificial Sequence: Synthetic oligonucleotide
  Target: LAMA2; (-) strand; PAM type: YTN; PAM sequence: TTG
aaaatgaaatgcacctagga

SEQ ID NO: 240763 - DNA, 20 bp, Artificial Sequence
  Description of Artificial Sequence: Synthetic oligonucleotide
  Target: LAMA2; (-) strand; PAM type: YTN; PAM sequence: TTT
gaaaatgaaatgcacctagg

SEQ ID NO: 240764 - DNA, 20 bp, Artificial Sequence
  Description of Artificial Sequence: Synthetic oligonucleotide
  Target: LAMA2; (-) strand; PAM type: YTN; PAM sequence: TTT
tgaaaatgaaatgcacctag

SEQ ID NO: 240765 - DNA, 20 bp, Artificial Sequence
  Description of Artificial Sequence: Synthetic oligonucleotide
  Target: LAMA2; (-) strand; PAM type: YTN; PAM sequence: TTG
ccaagcattttgaaaatgaa

SEQ ID NO: 240766 - DNA, 20 bp, Artificial Sequence
  Description of Artificial Sequence: Synthetic oligonucleotide
  Target: LAMA2; (-) strand; PAM type: YTN; PAM sequence: TTT
gccaagcattttgaaaatga

SEQ ID NO: 240767 - DNA, 20 bp, Artificial Sequence
  Description of Artificial Sequence: Synthetic oligonucleotide
  Target: LAMA2; (-) strand; PAM type: YTN; PAM sequence: TTA
acatttgccaagcattttga

SEQ ID NO: 240768 - DNA, 20 bp, Artificial Sequence
  Description of Artificial Sequence: Synthetic oligonucleotide
  Target: LAMA2; (-) strand; PAM type: YTN; PAM sequence: CTA
aaaccaagcattaacatttg

SEQ ID NO: 240769 - DNA, 20 bp, Artificial Sequence
  Description of Artificial Sequence: Synthetic oligonucleotide
  Target: LAMA2; (-) strand; PAM type: YTN; PAM sequence: TTA
aacaaatgccctaaaaccaa

SEQ ID NO: 240770 - DNA, 20 bp, Artificial Sequence
  Description of Artificial Sequence: Synthetic oligonucleotide
  Target: LAMA2; (-) strand; PAM type: YTN; PAM sequence: CTT
aaacaaatgccctaaaacca

SEQ ID NO: 240771 - DNA, 20 bp, Artificial Sequence
  Description of Artificial Sequence: Synthetic oligonucleotide
  Target: LAMA2; (-) strand; PAM type: YTN; PAM sequence: TTG
cttaaacaaatgccctaaaa

SEQ ID NO: 240772 - DNA, 20 bp, Artificial Sequence
  Description of Artificial Sequence: Synthetic oligonucleotide
  Target: LAMA2; (-) strand; PAM type: YTN; PAM sequence: CTA
gttgcttaaacaaatgccct

SEQ ID NO: 240773 - DNA, 20 bp, Artificial Sequence
  Description of Artificial Sequence: Synthetic oligonucleotide
  Target: LAMA2; (-) strand; PAM type: YTN; PAM sequence: CTG
cctagttgcttaaacaaatg

SEQ ID NO: 240774 - DNA, 20 bp, Artificial Sequence
  Description of Artificial Sequence: Synthetic oligonucleotide
  Target: LAMA2; (-) strand; PAM type: YTN; PAM sequence: CTG
ctgcctagttgcttaaacaa

SEQ ID NO: 240775 - DNA, 20 bp, Artificial Sequence
  Description of Artificial Sequence: Synthetic oligonucleotide
  Target: LAMA2; (-) strand; PAM type: YTN; PAM sequence: TTC
cactgctgcctagttgctta

SEQ ID NO: 240776 - DNA, 20 bp, Artificial Sequence
  Description of Artificial Sequence: Synthetic oligonucleotide
  Target: LAMA2; (-) strand; PAM type: YTN; PAM sequence: TTT
ccactgctgcctagttgctt

SEQ ID NO: 240777 - DNA, 20 bp, Artificial Sequence
  Description of Artificial Sequence: Synthetic oligonucleotide
  Target: LAMA2; (-) strand; PAM type: YTN; PAM sequence: CTT
tccactgctgcctagttgct

SEQ ID NO: 240778 - DNA, 20 bp, Artificial Sequence
  Description of Artificial Sequence: Synthetic oligonucleotide
  Target: LAMA2; (-) strand; PAM type: YTN; PAM sequence: CTC
tttccactgctgcctagttg

SEQ ID NO: 240779 - DNA, 20 bp, Artificial Sequence
  Description of Artificial Sequence: Synthetic oligonucleotide
  Target: LAMA2; (-) strand; PAM type: YTN; PAM sequence: CTA
gctctttccactgctgccta

SEQ ID NO: 240780 - DNA, 20 bp, Artificial Sequence
  Description of Artificial Sequence: Synthetic oligonucleotide
  Target: LAMA2; (-) strand; PAM type: YTN; PAM sequence: CTC
tagctctttccactgctgcc

SEQ ID NO: 240781 - DNA, 20 bp, Artificial Sequence
  Description of Artificial Sequence: Synthetic oligonucleotide
  Target: LAMA2; (-) strand; PAM type: YTN; PAM sequence: TTG
tcctctagctctttccactg

SEQ ID NO: 240782 - DNA, 20 bp, Artificial Sequence
  Description of Artificial Sequence: Synthetic oligonucleotide
  Target: LAMA2; (-) strand; PAM type: YTN; PAM sequence: TTT
gtcctctagctctttccact

SEQ ID NO: 240783 - DNA, 20 bp, Artificial Sequence
  Description of Artificial Sequence: Synthetic oligonucleotide
  Target: LAMA2; (-) strand; PAM type: YTN; PAM sequence: CTT
tgtcctctagctctttccac

SEQ ID NO: 240784 - DNA, 20 bp, Artificial Sequence
  Description of Artificial Sequence: Synthetic oligonucleotide
  Target: LAMA2; (-) strand; PAM type: YTN; PAM sequence: TTC
tttgtcctctagctctttcc

SEQ ID NO: 240785 - DNA, 20 bp, Artificial Sequence
  Description of Artificial Sequence: Synthetic oligonucleotide
  Target: LAMA2; (-) strand; PAM type: YTN; PAM sequence: CTG
cagcaaaccagcaggattct

SEQ ID NO: 240786 - DNA, 20 bp, Artificial Sequence
  Description of Artificial Sequence: Synthetic oligonucleotide
  Target: LAMA2; (-) strand; PAM type: YTN; PAM sequence: CTG
tagcctgcagcaaaccagca

SEQ ID NO: 240787 - DNA, 20 bp, Artificial Sequence
  Description of Artificial Sequence: Synthetic oligonucleotide
  Target: LAMA2; (-) strand; PAM type: YTN; PAM sequence: CTG
aatagctgtagcctgcagca

SEQ ID NO: 240788 - DNA, 20 bp, Artificial Sequence
  Description of Artificial Sequence: Synthetic oligonucleotide
  Target: LAMA2; (-) strand; PAM type: YTN; PAM sequence: TTC
tgaatagctgtagcctgcag

SEQ ID NO: 240789 - DNA, 20 bp, Artificial Sequence
  Description of Artificial Sequence: Synthetic oligonucleotide
  Target: LAMA2; (-) strand; PAM type: YTN; PAM sequence: TTT
ctgaatagctgtagcctgca

SEQ ID NO: 240790 - DNA, 20 bp, Artificial Sequence
  Description of Artificial Sequence: Synthetic oligonucleotide
  Target: LAMA2; (-) strand; PAM type: YTN; PAM sequence: CTG
tttctgaatagctgtagcct

SEQ ID NO: 240791 - DNA, 20 bp, Artificial Sequence
  Description of Artificial Sequence: Synthetic oligonucleotide
  Target: LAMA2; (-) strand; PAM type: YTN; PAM sequence: TTC
ccaaactgtttctgaatagc

SEQ ID NO: 240792 - DNA, 20 bp, Artificial Sequence
  Description of Artificial Sequence: Synthetic oligonucleotide
  Target: LAMA2; (-) strand; PAM type: YTN; PAM sequence: CTG
aaattcccaaactgtttctg

SEQ ID NO: 240793 - DNA, 20 bp, Artificial Sequence
  Description of Artificial Sequence: Synthetic oligonucleotide
  Target: LAMA2; (-) strand; PAM type: YTN; PAM sequence: CTC
tgaaattcccaaactgtttc

SEQ ID NO: 240794 - DNA, 20 bp, Artificial Sequence
  Description of Artificial Sequence: Synthetic oligonucleotide
  Target: LAMA2; (-) strand; PAM type: YTN; PAM sequence: TTA
tcccaactctgaaattccca

SEQ ID NO: 240795 - DNA, 20 bp, Artificial Sequence
  Description of Artificial Sequence: Synthetic oligonucleotide
  Target: LAMA2; (-) strand; PAM type: YTN; PAM sequence: CTA
gggcagtaaattatcccaac

SEQ ID NO: 240796 - DNA, 20 bp, Artificial Sequence
  Description of Artificial Sequence: Synthetic oligonucleotide
  Target: LAMA2; (-) strand; PAM type: YTN; PAM sequence: TTA
ctagggcagtaaattatccc

SEQ ID NO: 240797 - DNA, 20 bp, Artificial Sequence
  Description of Artificial Sequence: Synthetic oligonucleotide
  Target: LAMA2; (-) strand; PAM type: YTN; PAM sequence: TTT
actagggcagtaaattatcc

SEQ ID NO: 240798 - DNA, 20 bp, Artificial Sequence
  Description of Artificial Sequence: Synthetic oligonucleotide
  Target: LAMA2; (-) strand; PAM type: YTN; PAM sequence: TTA
gtttactagggcagtaaatt

SEQ ID NO: 240799 - DNA, 20 bp, Artificial Sequence
  Description of Artificial Sequence: Synthetic oligonucleotide
  Target: LAMA2; (-) strand; PAM type: YTN; PAM sequence: CTT
agtttactagggcagtaaat

SEQ ID NO: 240800 - DNA, 20 bp, Artificial Sequence
  Description of Artificial Sequence: Synthetic oligonucleotide
  Target: LAMA2; (-) strand; PAM type: YTN; PAM sequence: TTC
cagtagcacttagtttacta

SEQ ID NO: 240801 - DNA, 20 bp, Artificial Sequence
  Description of Artificial Sequence: Synthetic oligonucleotide
  Target: LAMA2; (-) strand; PAM type: YTN; PAM sequence: TTG
caatgttccagtagcactta

SEQ ID NO: 240802 - DNA, 20 bp, Artificial Sequence
  Description of Artificial Sequence: Synthetic oligonucleotide
  Target: LAMA2; (-) strand; PAM type: YTN; PAM sequence: CTG
ttgcaatgttccagtagcac

SEQ ID NO: 240803 - DNA, 20 bp, Artificial Sequence
  Description of Artificial Sequence: Synthetic oligonucleotide
  Target: LAMA2; (-) strand; PAM type: YTN; PAM sequence: TTA
agcaaatgactgttgcaatg

SEQ ID NO: 240804 - DNA, 20 bp, Artificial Sequence
  Description of Artificial Sequence: Synthetic oligonucleotide
  Target: LAMA2; (-) strand; PAM type: YTN; PAM sequence: CTT
aagcaaatgactgttgcaat

SEQ ID NO: 240805 - DNA, 20 bp, Artificial Sequence
  Description of Artificial Sequence: Synthetic oligonucleotide
  Target: LAMA2; (-) strand; PAM type: YTN; PAM sequence: CTA
gggcaaccttaagcaaatga

SEQ ID NO: 240806 - DNA, 20 bp, Artificial Sequence
  Description of Artificial Sequence: Synthetic oligonucleotide
  Target: LAMA2; (-) strand; PAM type: YTN; PAM sequence: TTC
agaccactagggcaacctta

SEQ ID NO: 240807 - DNA, 20 bp, Artificial Sequence
  Description of Artificial Sequence: Synthetic oligonucleotide
  Target: LAMA2; (-) strand; PAM type: YTN; PAM sequence: TTT
cagaccactagggcaacctt

SEQ ID NO: 240808 - DNA, 20 bp, Artificial Sequence
  Description of Artificial Sequence: Synthetic oligonucleotide
  Target: LAMA2; (-) strand; PAM type: YTN; PAM sequence: CTA
tttcagaccactagggcaac

SEQ ID NO: 240809 - DNA, 20 bp, Artificial Sequence
  Description of Artificial Sequence: Synthetic oligonucleotide
  Target: LAMA2; (-) strand; PAM type: YTN; PAM sequence: CTC
aactatttcagaccactagg

SEQ ID NO: 240810 - DNA, 20 bp, Artificial Sequence
  Description of Artificial Sequence: Synthetic oligonucleotide
  Target: LAMA2; (-) strand; PAM type: YTN; PAM sequence: CTG
cctcaactatttcagaccac

SEQ ID NO: 240811 - DNA, 20 bp, Artificial Sequence
  Description of Artificial Sequence: Synthetic oligonucleotide
  Target: LAMA2; (-) strand; PAM type: YTN; PAM sequence: TTG
gaagctgcctcaactatttc

SEQ ID NO: 240812 - DNA, 20 bp, Artificial Sequence
  Description of Artificial Sequence: Synthetic oligonucleotide
  Target: LAMA2; (-) strand; PAM type: YTN; PAM sequence: TTT
ggaagctgcctcaactattt

SEQ ID NO: 240813 - DNA, 20 bp, Artificial Sequence
  Description of Artificial Sequence: Synthetic oligonucleotide
  Target: LAMA2; (-) strand; PAM type: YTN; PAM sequence: TTT
tggaagctgcctcaactatt

SEQ ID NO: 240814 - DNA, 20 bp, Artificial Sequence
  Description of Artificial Sequence: Synthetic oligonucleotide
  Target: LAMA2; (-) strand; PAM type: YTN; PAM sequence: CTT
ttggaagctgcctcaactat

SEQ ID NO: 240815 - DNA, 20 bp, Artificial Sequence
  Description of Artificial Sequence: Synthetic oligonucleotide
  Target: LAMA2; (-) strand; PAM type: YTN; PAM sequence: TTG
cttttggaagctgcctcaac

SEQ ID NO: 240816 - DNA, 20 bp, Artificial Sequence
  Description of Artificial Sequence: Synthetic oligonucleotide
  Target: LAMA2; (-) strand; PAM type: YTN; PAM sequence: TTA
cagatgcaaagagaattgct

SEQ ID NO: 240817 - DNA, 20 bp, Artificial Sequence
  Description of Artificial Sequence: Synthetic oligonucleotide
  Target: LAMA2; (-) strand; PAM type: YTN; PAM sequence: TTT
acagatgcaaagagaattgc

SEQ ID NO: 240818 - DNA, 20 bp, Artificial Sequence
  Description of Artificial Sequence: Synthetic oligonucleotide
  Target: LAMA2; (-) strand; PAM type: YTN; PAM sequence: CTT
tacagatgcaaagagaattg

SEQ ID NO: 240819 - DNA, 20 bp, Artificial Sequence
  Description of Artificial Sequence: Synthetic oligonucleotide
  Target: LAMA2; (-) strand; PAM type: YTN; PAM sequence: CTC
ccagaactttacagatgcaa

SEQ ID NO: 240820 - DNA, 20 bp, Artificial Sequence
  Description of Artificial Sequence: Synthetic oligonucleotide
  Target: LAMA2; (-) strand; PAM type: YTN; PAM sequence: TTC
tcccagaactttacagatgc

SEQ ID NO: 240821 - DNA, 20 bp, Artificial Sequence
  Description of Artificial Sequence: Synthetic oligonucleotide
  Target: LAMA2; (-) strand; PAM type: YTN; PAM sequence: CTT
ctcccagaactttacagatg

SEQ ID NO: 240822 - DNA, 20 bp, Artificial Sequence
  Description of Artificial Sequence: Synthetic oligonucleotide
  Target: LAMA2; (-) strand; PAM type: YTN; PAM sequence: CTA
gcttctcccagaactttaca

SEQ ID NO: 240823 - DNA, 20 bp, Artificial Sequence
  Description of Artificial Sequence: Synthetic oligonucleotide
  Target: LAMA2; (-) strand; PAM type: YTN; PAM sequence: TTA
atggtaatgcaggaacagca

SEQ ID NO: 240824 - DNA, 20 bp, Artificial Sequence
  Description of Artificial Sequence: Synthetic oligonucleotide
  Target: LAMA2; (-) strand; PAM type: YTN; PAM sequence: CTT
aatggtaatgcaggaacagc

SEQ ID NO: 240825 - DNA, 20 bp, Artificial Sequence
  Description of Artificial Sequence: Synthetic oligonucleotide
  Target: LAMA2; (-) strand; PAM type: YTN; PAM sequence: TTC
aaaccttaatggtaatgcag

SEQ ID NO: 240826 - DNA, 20 bp, Artificial Sequence
  Description of Artificial Sequence: Synthetic oligonucleotide
  Target: LAMA2; (-) strand; PAM type: YTN; PAM sequence: TTT
caaaccttaatggtaatgca

SEQ ID NO: 240827 - DNA, 20 bp, Artificial Sequence
  Description of Artificial Sequence: Synthetic oligonucleotide
  Target: LAMA2; (-) strand; PAM type: YTN; PAM sequence: TTC
agagagagaatttcaaacct

SEQ ID NO: 240828 - DNA, 20 bp, Artificial Sequence
  Description of Artificial Sequence: Synthetic oligonucleotide
  Target: LAMA2; (-) strand; PAM type: YTN; PAM sequence: TTA
ataatattcagagagagaat

SEQ ID NO: 240829 - DNA, 20 bp, Artificial Sequence
  Description of Artificial Sequence: Synthetic oligonucleotide
  Target: LAMA2; (-) strand; PAM type: YTN; PAM sequence: TTT
aataatattcagagagagaa

SEQ ID NO: 240830 - DNA, 20 bp, Artificial Sequence
  Description of Artificial Sequence: Synthetic oligonucleotide
  Target: LAMA2; (-) strand; PAM type: YTN; PAM sequence: TTA
atttaataatattcagagag

SEQ ID NO: 240831 - DNA, 20 bp, Artificial Sequence
  Description of Artificial Sequence: Synthetic oligonucleotide
  Target: LAMA2; (-) strand; PAM type: YTN; PAM sequence: TTG
gtaaagaacaaatcacataa

SEQ ID NO: 240832 - DNA, 20 bp, Artificial Sequence
  Description of Artificial Sequence: Synthetic oligonucleotide
  Target: LAMA2; (-) strand; PAM type: YTN; PAM sequence: TTT
ggtaaagaacaaatcacata

SEQ ID NO: 240833 - DNA, 20 bp, Artificial Sequence
  Description of Artificial Sequence: Synthetic oligonucleotide
  Target: LAMA2; (-) strand; PAM type: YTN; PAM sequence: TTT
tggtaaagaacaaatcacat

SEQ ID NO: 240834 - DNA, 20 bp, Artificial Sequence
  Description of Artificial Sequence: Synthetic oligonucleotide
  Target: LAMA2; (-) strand; PAM type: YTN; PAM sequence: CTG
tagaaaataagcaggttttg

SEQ ID NO: 240835 - DNA, 20 bp, Artificial Sequence
  Description of Artificial Sequence: Synthetic oligonucleotide
  Target: LAMA2; (-) strand; PAM type: YTN; PAM sequence: CTA
gaaacagaaagatagcataa

SEQ ID NO: 240836 - DNA, 20 bp, Artificial Sequence
  Description of Artificial Sequence: Synthetic oligonucleotide
  Target: LAMA2; (-) strand; PAM type: YTN; PAM sequence: CTA
agctagaaacagaaagatag

SEQ ID NO: 240837 - DNA, 20 bp, Artificial Sequence
  Description of Artificial Sequence: Synthetic oligonucleotide
  Target: LAMA2; (-) strand; PAM type: YTN; PAM sequence: CTC
taagctagaaacagaaagat

SEQ ID NO: 240838 - DNA, 20 bp, Artificial Sequence
  Description of Artificial Sequence: Synthetic oligonucleotide
  Target: LAMA2; (-) strand; PAM type: YTN; PAM sequence: TTC
tctaagctagaaacagaaag

SEQ ID NO: 240839 - DNA, 20 bp, Artificial Sequence
  Description of Artificial Sequence: Synthetic oligonucleotide
  Target: LAMA2; (-) strand; PAM type: YTN; PAM sequence: CTT
ctctaagctagaaacagaaa

SEQ ID NO: 240840 - DNA, 20 bp, Artificial Sequence
  Description of Artificial Sequence: Synthetic oligonucleotide
  Target: LAMA2; (-) strand; PAM type: YTN; PAM sequence: TTA
aaggcttctctaagctagaa

SEQ ID NO: 240841 - DNA, 20 bp, Artificial Sequence
  Description of Artificial Sequence: Synthetic oligonucleotide
  Target: LAMA2; (-) strand; PAM type: YTN; PAM sequence: TTT
aaaggcttctctaagctaga

SEQ ID NO: 240842 - DNA, 20 bp, Artificial Sequence
  Description of Artificial Sequence: Synthetic oligonucleotide
  Target: LAMA2; (-) strand; PAM type: YTN; PAM sequence: CTA
tatgaacaaatttaaaggct

SEQ ID NO: 240843 - DNA, 20 bp, Artificial Sequence
  Description of Artificial Sequence: Synthetic oligonucleotide
  Target: LAMA2; (-) strand; PAM type: YTN; PAM sequence: TTG
gcaactatatgaacaaattt

SEQ ID NO: 240844 - DNA, 20 bp, Artificial Sequence
  Description of Artificial Sequence: Synthetic oligonucleotide
  Target: LAMA2; (-) strand; PAM type: YTN; PAM sequence: CTT
ggcaactatatgaacaaatt

SEQ ID NO: 240845 - DNA, 20 bp, Artificial Sequence
  Description of Artificial Sequence: Synthetic oligonucleotide
  Target: LAMA2; (-) strand; PAM type: YTN; PAM sequence: TTC
ttggcaactatatgaacaaa

SEQ ID NO: 240846 - DNA, 20 bp, Artificial Sequence
  Description of Artificial Sequence: Synthetic oligonucleotide
  Target: LAMA2; (-) strand; PAM type: YTN; PAM sequence: CTA
taggtattcttggcaactat

SEQ ID NO: 240847 - DNA, 20 bp, Artificial Sequence
  Description of Artificial Sequence: Synthetic oligonucleotide
  Target: LAMA2; (-) strand; PAM type: YTN; PAM sequence: CTA
gactataggtattcttggca

SEQ ID NO: 240848 - DNA, 20 bp, Artificial Sequence
  Description of Artificial Sequence: Synthetic oligonucleotide
  Target: LAMA2; (-) strand; PAM type: YTN; PAM sequence: TTA
aactagactataggtattct

SEQ ID NO: 240849 - DNA, 20 bp, Artificial Sequence
  Description of Artificial Sequence: Synthetic oligonucleotide
  Target: LAMA2; (-) strand; PAM type: YTN; PAM sequence: CTT
aaactagactataggtattc

SEQ ID NO: 240850 - DNA, 20 bp, Artificial Sequence
  Description of Artificial Sequence: Synthetic oligonucleotide
  Target: LAMA2; (-) strand; PAM type: YTN; PAM sequence: CTA
atgtgcatcttaaactagac

SEQ ID NO: 240851 - DNA, 20 bp, Artificial Sequence
  Description of Artificial Sequence: Synthetic oligonucleotide
  Target: LAMA2; (-) strand; PAM type: YTN; PAM sequence: CTC
ctaatgtgcatcttaaacta

SEQ ID NO: 240852 - DNA, 20 bp, Artificial Sequence
  Description of Artificial Sequence: Synthetic oligonucleotide
  Target: LAMA2; (-) strand; PAM type: YTN; PAM sequence: CTC
tcctaatgtgcatcttaaac

SEQ ID NO: 240853 - DNA, 20 bp, Artificial Sequence
  Description of Artificial Sequence: Synthetic oligonucleotide
  Target: LAMA2; (-) strand; PAM type: YTN; PAM sequence: TTA
tgtcagcagactctcctaat

SEQ ID NO: 240854 - DNA, 20 bp, Artificial Sequence
  Description of Artificial Sequence: Synthetic oligonucleotide
  Target: LAMA2; (-) strand; PAM type: YTN; PAM sequence: CTA
ttatgtcagcagactctcct

SEQ ID NO: 240855 - DNA, 20 bp, Artificial Sequence
  Description of Artificial Sequence: Synthetic oligonucleotide
  Target: LAMA2; (-) strand; PAM type: YTN; PAM sequence: TTA
gaagccagatgctattatgt

SEQ ID NO: 240856 - DNA, 20 bp, Artificial Sequence
  Description of Artificial Sequence: Synthetic oligonucleotide
  Target: LAMA2; (-) strand; PAM type: YTN; PAM sequence: TTT
agaagccagatgctattatg

SEQ ID NO: 240857 - DNA, 20 bp, Artificial Sequence
  Description of Artificial Sequence: Synthetic oligonucleotide
  Target: LAMA2; (-) strand; PAM type: YTN; PAM sequence: TTT
tagaagccagatgctattat

SEQ ID NO: 240858 - DNA, 20 bp, Artificial Sequence
  Description of Artificial Sequence: Synthetic oligonucleotide
  Target: LAMA2; (-) strand; PAM type: YTN; PAM sequence: CTT
ttagaagccagatgctatta

SEQ ID NO: 240859 - DNA, 20 bp, Artificial Sequence
  Description of Artificial Sequence: Synthetic oligonucleotide
  Target: LAMA2; (-) strand; PAM type: YTN; PAM sequence: TTA
cttttagaagccagatgcta

SEQ ID NO: 240860 - DNA, 20 bp, Artificial Sequence
  Description of Artificial Sequence: Synthetic oligonucleotide
  Target: LAMA2; (-) strand; PAM type: YTN; PAM sequence: TTA
ccagagattacttttagaag

SEQ ID NO: 240861 - DNA, 20 bp, Artificial Sequence
  Description of Artificial Sequence: Synthetic oligonucleotide
  Target: LAMA2; (-) strand; PAM type: YTN; PAM sequence: TTT
accagagattacttttagaa

SEQ ID NO: 240862 - DNA, 20 bp, Artificial Sequence
  Description of Artificial Sequence: Synthetic oligonucleotide
  Target: LAMA2; (-) strand; PAM type: YTN; PAM sequence: TTG
agatccgtgaagtagaatgg

SEQ ID NO: 240863 - DNA, 20 bp, Artificial Sequence
  Description of Artificial Sequence: Synthetic oligonucleotide
  Target: LAMA2; (-) strand; PAM type: YTN; PAM sequence: TTT
gagatccgtgaagtagaatg

SEQ ID NO: 240864 - DNA, 20 bp, Artificial Sequence
  Description of Artificial Sequence: Synthetic oligonucleotide
  Target: LAMA2; (-) strand; PAM type: YTN; PAM sequence: TTA
atttgagatccgtgaagtag

SEQ ID NO: 240865 - DNA, 20 bp, Artificial Sequence
  Description of Artificial Sequence: Synthetic oligonucleotide
  Target: LAMA2; (-) strand; PAM type: YTN; PAM sequence: TTT
aatttgagatccgtgaagta

SEQ ID NO: 240866 - DNA, 20 bp, Artificial Sequence
  Description of Artificial Sequence: Synthetic oligonucleotide
  Target: LAMA2; (-) strand; PAM type: YTN; PAM sequence: CTT
taatttgagatccgtgaagt

SEQ ID NO: 240867 - DNA, 20 bp, Artificial Sequence
  Description of Artificial Sequence: Synthetic oligonucleotide
  Target: LAMA2; (-) strand; PAM type: YTN; PAM sequence: CTA
tagctttaatttgagatccg

SEQ ID NO: 240868 - DNA, 20 bp, Artificial Sequence
  Description of Artificial Sequence: Synthetic oligonucleotide
  Target: LAMA2; (-) strand; PAM type: YTN; PAM sequence: TTC
aaatctatagctttaatttg

SEQ ID NO: 240869 - DNA, 20 bp, Artificial Sequence
  Description of Artificial Sequence: Synthetic oligonucleotide
  Target: LAMA2; (-) strand; PAM type: YTN; PAM sequence: CTT
caaatctatagctttaattt

SEQ ID NO: 240870 - DNA, 20 bp, Artificial Sequence
  Description of Artificial Sequence: Synthetic oligonucleotide
  Target: LAMA2; (-) strand; PAM type: YTN; PAM sequence: TTC
ttcaaatctatagctttaat

SEQ ID NO: 240871 - DNA, 20 bp, Artificial Sequence
  Description of Artificial Sequence: Synthetic oligonucleotide
  Target: LAMA2; (-) strand; PAM type: YTN; PAM sequence: CTT
cttcaaatctatagctttaa

SEQ ID NO: 240872 - DNA, 20 bp, Artificial Sequence
  Description of Artificial Sequence: Synthetic oligonucleotide
  Target: LAMA2; (-) strand; PAM type: YTN; PAM sequence: TTC
cttcttcaaatctatagctt

SEQ ID NO: 240873 - DNA, 20 bp, Artificial Sequence
  Description of Artificial Sequence: Synthetic oligonucleotide
  Target: LAMA2; (-) strand; PAM type: YTN; PAM sequence: TTT
ccttcttcaaatctatagct

SEQ ID NO: 240874 - DNA, 20 bp, Artificial Sequence
  Description of Artificial Sequence: Synthetic oligonucleotide
  Target: LAMA2; (-) strand; PAM type: YTN; PAM sequence: CTC
aaatatcagtttccttcttc

SEQ ID NO: 240875 - DNA, 20 bp, Artificial Sequence
  Description of Artificial Sequence: Synthetic oligonucleotide
  Target: LAMA2; (-) strand; PAM type: YTN; PAM sequence: CTA
caaatctcaaatatcagttt

SEQ ID NO: 240876 - DNA, 20 bp, Artificial Sequence
  Description of Artificial Sequence: Synthetic oligonucleotide
  Target: LAMA2; (-) strand; PAM type: YTN; PAM sequence: CTG
tcctacaaatctcaaatatc

SEQ ID NO: 240877 - DNA, 20 bp, Artificial Sequence
  Description of Artificial Sequence: Synthetic oligonucleotide
  Target: LAMA2; (-) strand; PAM type: YTN; PAM sequence: CTA
ccctgtcctacaaatctcaa

SEQ ID NO: 240878 - DNA, 20 bp, Artificial Sequence
  Description of Artificial Sequence: Synthetic oligonucleotide
  Target: LAMA2; (-) strand; PAM type: YTN; PAM sequence: TTA
tatgatgagatctaccctgt

SEQ ID NO: 240879 - DNA, 20 bp, Artificial Sequence
  Description of Artificial Sequence: Synthetic oligonucleotide
  Target: LAMA2; (-) strand; PAM type: YTN; PAM sequence: TTT
atatgatgagatctaccctg

SEQ ID NO: 240880 - DNA, 20 bp, Artificial Sequence
  Description of Artificial Sequence: Synthetic oligonucleotide
  Target: LAMA2; (-) strand; PAM type: YTN; PAM sequence: TTT
tatatgatgagatctaccct

SEQ ID NO: 240881 - DNA, 20 bp, Artificial Sequence
  Description of Artificial Sequence: Synthetic oligonucleotide
  Target: LAMA2; (-) strand; PAM type: YTN; PAM sequence: CTT
ttatatgatgagatctaccc

SEQ ID NO: 240882 - DNA, 20 bp, Artificial Sequence
  Description of Artificial Sequence: Synthetic oligonucleotide
  Target: LAMA2; (-) strand; PAM type: YTN; PAM sequence: TTC
ttttatatgatgagatctac

SEQ ID NO: 240883 - DNA, 20 bp, Artificial Sequence
  Description of Artificial Sequence: Synthetic oligonucleotide
  Target: LAMA2; (-) strand; PAM type: YTN; PAM sequence: CTT
cttttatatgatgagatcta

SEQ ID NO: 240884 - DNA, 20 bp, Artificial Sequence
  Description of Artificial Sequence: Synthetic oligonucleotide
  Target: LAMA2; (-) strand; PAM type: YTN; PAM sequence: TTG
agcttcttttatatgatgag

SEQ ID NO: 240885 - DNA, 20 bp, Artificial Sequence
  Description of Artificial Sequence: Synthetic oligonucleotide
  Target: LAMA2; (-) strand; PAM type: YTN; PAM sequence: TTG
ttgagcttcttttatatgat

SEQ ID NO: 240886 - DNA, 20 bp, Artificial Sequence
  Description of Artificial Sequence: Synthetic oligonucleotide
  Target: LAMA2; (-) strand; PAM type: YTN; PAM sequence: TTT
gttgagcttcttttatatga

SEQ ID NO: 240887 - DNA, 20 bp, Artificial Sequence
  Description of Artificial Sequence: Synthetic oligonucleotide
  Target: LAMA2; (-) strand; PAM type: YTN; PAM sequence: TTA
caaggtatttgttgagcttc

SEQ ID NO: 240888 - DNA, 20 bp, Artificial Sequence
  Description of Artificial Sequence: Synthetic oligonucleotide
  Target: LAMA2; (-) strand; PAM type: YTN; PAM sequence: TTA
agcatgtagcatcaattaca

SEQ ID NO: 240889 - DNA, 20 bp, Artificial Sequence
  Description of Artificial Sequence: Synthetic oligonucleotide
  Target: LAMA2; (-) strand; PAM type: YTN; PAM sequence: TTG
tgttaagcatgtagcatcaa

SEQ ID NO: 240890 - DNA, 20 bp, Artificial Sequence
  Description of Artificial Sequence: Synthetic oligonucleotide
  Target: LAMA2; (-) strand; PAM type: YTN; PAM sequence: TTT
gtgttaagcatgtagcatca

SEQ ID NO: 240891 - DNA, 20 bp, Artificial Sequence
  Description of Artificial Sequence: Synthetic oligonucleotide
  Target: LAMA2; (-) strand; PAM type: YTN; PAM sequence: TTG
tttgtgttaagcatgtagca

SEQ ID NO: 240892 - DNA, 20 bp, Artificial Sequence
  Description of Artificial Sequence: Synthetic oligonucleotide
  Target: LAMA2; (-) strand; PAM type: YTN; PAM sequence: TTT
gtttgtgttaagcatgtagc

SEQ ID NO: 240893 - DNA, 20 bp, Artificial Sequence
  Description of Artificial Sequence: Synthetic oligonucleotide
  Target: LAMA2; (-) strand; PAM type: YTN; PAM sequence: TTG
tttgtttgtgttaagcatgt

SEQ ID NO: 240894 - DNA, 20 bp, Artificial Sequence
  Description of Artificial Sequence: Synthetic oligonucleotide
  Target: LAMA2; (-) strand; PAM type: YTN; PAM sequence: TTT
gtttgtttgtgttaagcatg

SEQ ID NO: 240895 - DNA, 20 bp, Artificial Sequence
  Description of Artificial Sequence: Synthetic oligonucleotide
  Target: LAMA2; (-) strand; PAM type: YTN; PAM sequence: TTT
tgtttgtttgtgttaagcat

SEQ ID NO: 240896 - DNA, 20 bp, Artificial Sequence
  Description of Artificial Sequence: Synthetic oligonucleotide
  Target: LAMA2; (-) strand; PAM type: YTN; PAM sequence: TTA
gagttttgtttgtttgtgtt

SEQ ID NO: 240897 - DNA, 20 bp, Artificial Sequence
  Description of Artificial Sequence: Synthetic oligonucleotide
  Target: LAMA2; (-) strand; PAM type: YTN; PAM sequence: CTT
agagttttgtttgtttgtgt

SEQ ID NO: 240898 - DNA, 20 bp, Artificial Sequence
  Description of Artificial Sequence: Synthetic oligonucleotide
  Target: LAMA2; (-) strand; PAM type: YTN; PAM sequence: TTC
ttagagttttgtttgtttgt

SEQ ID NO: 240899 - DNA, 20 bp, Artificial Sequence
  Description of Artificial Sequence: Synthetic oligonucleotide
  Target: LAMA2; (-) strand; PAM type: YTN; PAM sequence: TTT
cttagagttttgtttgtttg

SEQ ID NO: 240900 - DNA, 20 bp, Artificial Sequence
  Description of Artificial Sequence: Synthetic oligonucleotide
  Target: LAMA2; (-) strand; PAM type: YTN; PAM sequence: CTA
aaaaaaacaatttcttagag

SEQ ID NO: 240901 - DNA, 20 bp, Artificial Sequence
  Description of Artificial Sequence: Synthetic oligonucleotide
  Target: LAMA2; (-) strand; PAM type: YTN; PAM sequence: CTG
agcaacctaaaaaaaacaat

SEQ ID NO: 240902 - DNA, 20 bp, Artificial Sequence
  Description of Artificial Sequence: Synthetic oligonucleotide
  Target: LAMA2; (-) strand; PAM type: YTN; PAM sequence: TTC
tgagcaacctaaaaaaaaca

SEQ ID NO: 240903 - DNA, 20 bp, Artificial Sequence
  Description of Artificial Sequence: Synthetic oligonucleotide
  Target: LAMA2; (-) strand; PAM type: YTN; PAM sequence: TTT
ctgagcaacctaaaaaaaac

SEQ ID NO: 240904 - DNA, 20 bp, Artificial Sequence
  Description of Artificial Sequence: Synthetic oligonucleotide
  Target: LAMA2; (-) strand; PAM type: YTN; PAM sequence: CTC
aatgggcatttctgagcaac

SEQ ID NO: 240905 - DNA, 20 bp, Artificial Sequence
  Description of Artificial Sequence: Synthetic oligonucleotide
  Target: LAMA2; (-) strand; PAM type: YTN; PAM sequence: CTC
ccacaaatccaactcaatgg

SEQ ID NO: 240906 - DNA, 20 bp, Artificial Sequence
  Description of Artificial Sequence: Synthetic oligonucleotide
  Target: LAMA2; (-) strand; PAM type: YTN; PAM sequence: TTC
aactcccacaaatccaactc

SEQ ID NO: 240907 - DNA, 20 bp, Artificial Sequence
  Description of Artificial Sequence: Synthetic oligonucleotide
  Target: LAMA2; (-) strand; PAM type: YTN; PAM sequence: TTT
caactcccacaaatccaact

SEQ ID NO: 240908 - DNA, 20 bp, Artificial Sequence
  Description of Artificial Sequence: Synthetic oligonucleotide
  Target: LAMA2; (-) strand; PAM type: YTN; PAM sequence: CTT
tcaactcccacaaatccaac

SEQ ID NO: 240909 - DNA, 20 bp, Artificial Sequence
  Description of Artificial Sequence: Synthetic oligonucleotide
  Target: LAMA2; (-) strand; PAM type: YTN; PAM sequence: TTC
atctttcaactcccacaaat

SEQ ID NO: 240910 - DNA, 20 bp, Artificial Sequence
  Description of Artificial Sequence: Synthetic oligonucleotide
  Target: LAMA2; (-) strand; PAM type: YTN; PAM sequence: TTG
taaagcaagacagaattcat

SEQ ID NO: 240911 - DNA, 20 bp, Artificial Sequence
  Description of Artificial Sequence: Synthetic oligonucleotide
  Target: LAMA2; (-) strand; PAM type: YTN; PAM sequence: TTT
gtaaagcaagacagaattca

SEQ ID NO: 240912 - DNA, 20 bp, Artificial Sequence
  Description of Artificial Sequence: Synthetic oligonucleotide
  Target: LAMA2; (-) strand; PAM type: YTN; PAM sequence: TTT
tgtaaagcaagacagaattc

SEQ ID NO: 240913 - DNA, 20 bp, Artificial Sequence
  Description of Artificial Sequence: Synthetic oligonucleotide
  Target: LAMA2; (-) strand; PAM type: YTN; PAM sequence: TTA
ttttgtaaagcaagacagaa

SEQ ID NO: 240914 - DNA, 20 bp, Artificial Sequence
  Description of Artificial Sequence: Synthetic oligonucleotide
  Target: LAMA2; (-) strand; PAM type: YTN; PAM sequence: TTA
attattttgtaaagcaagac

SEQ ID NO: 240915 - DNA, 20 bp, Artificial Sequence
  Description of Artificial Sequence: Synthetic oligonucleotide
  Target: LAMA2; (-) strand; PAM type: YTN; PAM sequence: TTT
aattattttgtaaagcaaga

SEQ ID NO: 240916 - DNA, 20 bp, Artificial Sequence
  Description of Artificial Sequence: Synthetic oligonucleotide
  Target: LAMA2; (-) strand; PAM type: YTN; PAM sequence: TTT
taattattttgtaaagcaag

SEQ ID NO: 240917 - DNA, 20 bp, Artificial Sequence
  Description of Artificial Sequence: Synthetic oligonucleotide
  Target: LAMA2; (-) strand; PAM type: YTN; PAM sequence: TTT
ttaattattttgtaaagcaa

SEQ ID NO: 240918 - DNA, 20 bp, Artificial Sequence
  Description of Artificial Sequence: Synthetic oligonucleotide
  Target: LAMA2; (-) strand; PAM type: YTN; PAM sequence: TTA
gcgagtttttaattattttg

SEQ ID NO: 240919 - DNA, 20 bp, Artificial Sequence
  Description of Artificial Sequence: Synthetic oligonucleotide
  Target: LAMA2; (-) strand; PAM type: YTN; PAM sequence: TTG
ttagcgagtttttaattatt

SEQ ID NO: 240920 - DNA, 20 bp, Artificial Sequence
  Description of Artificial Sequence: Synthetic oligonucleotide
  Target: LAMA2; (-) strand; PAM type: YTN; PAM sequence: TTT
gttagcgagtttttaattat

SEQ ID NO: 240921 - DNA, 20 bp, Artificial Sequence
  Description of Artificial Sequence: Synthetic oligonucleotide
  Target: LAMA2; (-) strand; PAM type: YTN; PAM sequence: CTC
aaaggagagtggaacatatt

SEQ ID NO: 240922 - DNA, 20 bp, Artificial Sequence
  Description of Artificial Sequence: Synthetic oligonucleotide
  Target: LAMA2; (-) strand; PAM type: YTN; PAM sequence: CTG
ctcaaaggagagtggaacat

SEQ ID NO: 240923 - DNA, 20 bp, Artificial Sequence
  Description of Artificial Sequence: Synthetic oligonucleotide
  Target: LAMA2; (-) strand; PAM type: YTN; PAM sequence: CTA
tggagcaaagaagtcacaaa

SEQ ID NO: 240924 - DNA, 20 bp, Artificial Sequence
  Description of Artificial Sequence: Synthetic oligonucleotide
  Target: LAMA2; (-) strand; PAM type: YTN; PAM sequence: TTG
aggactatggagcaaagaag

SEQ ID NO: 240925 - DNA, 20 bp, Artificial Sequence
  Description of Artificial Sequence: Synthetic oligonucleotide
  Target: LAMA2; (-) strand; PAM type: YTN; PAM sequence: TTT
gaggactatggagcaaagaa

SEQ ID NO: 240926 - DNA, 20 bp, Artificial Sequence
  Description of Artificial Sequence: Synthetic oligonucleotide
  Target: LAMA2; (-) strand; PAM type: YTN; PAM sequence: TTT
tgaggactatggagcaaaga

SEQ ID NO: 240927 - DNA, 20 bp, Artificial Sequence
  Description of Artificial Sequence: Synthetic oligonucleotide
  Target: LAMA2; (-) strand; PAM type: YTN; PAM sequence: CTG
aataattttgaggactatgg

SEQ ID NO: 240928 - DNA, 20 bp, Artificial Sequence
  Description of Artificial Sequence: Synthetic oligonucleotide
  Target: LAMA2; (-) strand; PAM type: YTN; PAM sequence: TTC
tgaataattttgaggactat

SEQ ID NO: 240929 - DNA, 20 bp, Artificial Sequence
  Description of Artificial Sequence: Synthetic oligonucleotide
  Target: LAMA2; (-) strand; PAM type: YTN; PAM sequence: CTT
ctgaataattttgaggacta

SEQ ID NO: 240930 - DNA, 20 bp, Artificial Sequence
  Description of Artificial Sequence: Synthetic oligonucleotide
  Target: LAMA2; (-) strand; PAM type: YTN; PAM sequence: CTC
cacttctgaataattttgag

SEQ ID NO: 240931 - DNA, 20 bp, Artificial Sequence
  Description of Artificial Sequence: Synthetic oligonucleotide
  Target: LAMA2; (-) strand; PAM type: YTN; PAM sequence: TTG
aactccacttctgaataatt

SEQ ID NO: 240932 - DNA, 20 bp, Artificial Sequence
  Description of Artificial Sequence: Synthetic oligonucleotide
  Target: LAMA2; (-) strand; PAM type: YTN; PAM sequence: TTT
gaactccacttctgaataat

SEQ ID NO: 240933 - DNA, 20 bp, Artificial Sequence
  Description of Artificial Sequence: Synthetic oligonucleotide
  Target: LAMA2; (-) strand; PAM type: YTN; PAM sequence: TTA
tggatggcgaggaggggttt

SEQ ID NO: 240934 - DNA, 20 bp, Artificial Sequence
  Description of Artificial Sequence: Synthetic oligonucleotide
  Target: LAMA2; (-) strand; PAM type: YTN; PAM sequence: TTA
aataggaggaagttatggat

SEQ ID NO: 240935 - DNA, 20 bp, Artificial Sequence
  Description of Artificial Sequence: Synthetic oligonucleotide
  Target: LAMA2; (-) strand; PAM type: YTN; PAM sequence: TTT
aaataggaggaagttatgga

SEQ ID NO: 240936 - DNA, 20 bp, Artificial Sequence
  Description of Artificial Sequence: Synthetic oligonucleotide
  Target: LAMA2; (-) strand; PAM type: YTN; PAM sequence: TTA
atccaagatttaaataggag

SEQ ID NO: 240937 - DNA, 20 bp, Artificial Sequence
  Description of Artificial Sequence: Synthetic oligonucleotide
  Target: LAMA2; (-) strand; PAM type: YTN; PAM sequence: TTT
aatccaagatttaaatagga

SEQ ID NO: 240938 - DNA, 20 bp, Artificial Sequence
  Description of Artificial Sequence: Synthetic oligonucleotide
  Target: LAMA2; (-) strand; PAM type: YTN; PAM sequence: CTA
acccatttaatccaagattt

SEQ ID NO: 240939 - DNA, 20 bp, Artificial Sequence
  Description of Artificial Sequence: Synthetic oligonucleotide
  Target: LAMA2; (-) strand; PAM type: YTN; PAM sequence: TTA
actaacccatttaatccaag

SEQ ID NO: 240940 - DNA, 20 bp, Artificial Sequence
  Description of Artificial Sequence: Synthetic oligonucleotide
  Target: LAMA2; (-) strand; PAM type: YTN; PAM sequence: CTT
aactaacccatttaatccaa

SEQ ID NO: 240941 - DNA, 20 bp, Artificial Sequence
  Description of Artificial Sequence: Synthetic oligonucleotide
  Target: LAMA2; (-) strand; PAM type: YTN; PAM sequence: TTC
ttaactaacccatttaatcc

SEQ ID NO: 240942 - DNA, 20 bp, Artificial Sequence
  Description of Artificial Sequence: Synthetic oligonucleotide
  Target: LAMA2; (-) strand; PAM type: YTN; PAM sequence: CTT
cttaactaacccatttaatc

SEQ ID NO: 240943 - DNA, 20 bp, Artificial Sequence
  Description of Artificial Sequence: Synthetic oligonucleotide
  Target: LAMA2; (-) strand; PAM type: YTN; PAM sequence: TTG
cataatgatcttcttaacta

SEQ ID NO: 240944 - DNA, 20 bp, Artificial Sequence
  Description of Artificial Sequence: Synthetic oligonucleotide
  Target: LAMA2; (-) strand; PAM type: YTN; PAM sequence: CTT
gcataatgatcttcttaact

SEQ ID NO: 240945 - DNA, 20 bp, Artificial Sequence
  Description of Artificial Sequence: Synthetic oligonucleotide
  Target: LAMA2; (-) strand; PAM type: YTN; PAM sequence: TTC
acttgcataatgatcttctt

SEQ ID NO: 240946 - DNA, 20 bp, Artificial Sequence
  Description of Artificial Sequence: Synthetic oligonucleotide
  Target: LAMA2; (-) strand; PAM type: YTN; PAM sequence: CTT
cacttgcataatgatcttct

SEQ ID NO: 240947 - DNA, 20 bp, Artificial Sequence
  Description of Artificial Sequence: Synthetic oligonucleotide
  Target: LAMA2; (-) strand; PAM type: YTN; PAM sequence: TTC
ttcacttgcataatgatctt

SEQ ID NO: 240948 - DNA, 20 bp, Artificial Sequence
  Description of Artificial Sequence: Synthetic oligonucleotide
  Target: LAMA2; (-) strand; PAM type: YTN; PAM sequence: TTA
tagccataccattcttcact

SEQ ID NO: 240949 - DNA, 20 bp, Artificial Sequence
  Description of Artificial Sequence: Synthetic oligonucleotide
  Target: LAMA2; (-) strand; PAM type: YTN; PAM sequence: TTT
atagccataccattcttcac

SEQ ID NO: 240950 - DNA, 20 bp, Artificial Sequence
  Description of Artificial Sequence: Synthetic oligonucleotide
  Target: LAMA2; (-) strand; PAM type: YTN; PAM sequence: TTT
tatagccataccattcttca

SEQ ID NO: 240951 - DNA, 20 bp, Artificial Sequence
  Description of Artificial Sequence: Synthetic oligonucleotide
  Target: LAMA2; (-) strand; PAM type: YTN; PAM sequence: CTT
ttatagccataccattcttc

SEQ ID NO: 240952 - DNA, 20 bp, Artificial Sequence
  Description of Artificial Sequence: Synthetic oligonucleotide
  Target: LAMA2; (-) strand; PAM type: YTN; PAM sequence: TTA
cttttatagccataccattc

SEQ ID NO: 240953 - DNA, 20 bp, Artificial Sequence
  Description of Artificial Sequence: Synthetic oligonucleotide
  Target: LAMA2; (-) strand; PAM type: YTN; PAM sequence: TTT
acttttatagccataccatt

SEQ ID NO: 240954 - DNA, 20 bp, Artificial Sequence
  Description of Artificial Sequence: Synthetic oligonucleotide
  Target: LAMA2; (-) strand; PAM type: YTN; PAM sequence: CTA
tttacttttatagccatacc

SEQ ID NO: 240955 - DNA, 20 bp, Artificial Sequence
  Description of Artificial Sequence: Synthetic oligonucleotide
  Target: LAMA2; (-) strand; PAM type: YTN; PAM sequence: TTA
tcctatttacttttatagcc

SEQ ID NO: 240956 - DNA, 20 bp, Artificial Sequence
  Description of Artificial Sequence: Synthetic oligonucleotide
  Target: LAMA2; (-) strand; PAM type: YTN; PAM sequence: TTT
atcctatttacttttatagc

SEQ ID NO: 240957 - DNA, 20 bp, Artificial Sequence
  Description of Artificial Sequence: Synthetic oligonucleotide
  Target: LAMA2; (-) strand; PAM type: YTN; PAM sequence: TTG
atttatcctatttactttta

SEQ ID NO: 240958 - DNA, 20 bp, Artificial Sequence
  Description of Artificial Sequence: Synthetic oligonucleotide
  Target: LAMA2; (-) strand; PAM type: YTN; PAM sequence: TTA
tggaataaaaaatcaaccac

SEQ ID NO: 240959 - DNA, 20 bp, Artificial Sequence
  Description of Artificial Sequence: Synthetic oligonucleotide
  Target: LAMA2; (-) strand; PAM type: YTN; PAM sequence: TTT
atggaataaaaaatcaacca

SEQ ID NO: 240960 - DNA, 20 bp, Artificial Sequence
  Description of Artificial Sequence: Synthetic oligonucleotide
  Target: LAMA2; (-) strand; PAM type: YTN; PAM sequence: CTG
atttatggaataaaaaatca

SEQ ID NO: 240961 - DNA, 20 bp, Artificial Sequence
  Description of Artificial Sequence: Synthetic oligonucleotide
  Target: LAMA2; (-) strand; PAM type: YTN; PAM sequence: TTG
atgggatctgatttatggaa

SEQ ID NO: 240962 - DNA, 20 bp, Artificial Sequence
  Description of Artificial Sequence: Synthetic oligonucleotide
  Target: LAMA2; (-) strand; PAM type: YTN; PAM sequence: CTT
gatgggatctgatttatgga

SEQ ID NO: 240963 - DNA, 20 bp, Artificial Sequence
  Description of Artificial Sequence: Synthetic oligonucleotide
  Target: LAMA2; (-) strand; PAM type: YTN; PAM sequence: TTA
gtcttgatgggatctgattt

SEQ ID NO: 240964 - DNA, 20 bp, Artificial Sequence
  Description of Artificial Sequence: Synthetic oligonucleotide
  Target: LAMA2; (-) strand; PAM type: YTN; PAM sequence: TTG
ccaagttagtcttgatggga

SEQ ID NO: 240965 - DNA, 20 bp, Artificial Sequence
  Description of Artificial Sequence: Synthetic oligonucleotide
  Target: LAMA2; (-) strand; PAM type: YTN; PAM sequence: CTC
cattgccaagttagtcttga

SEQ ID NO: 240966 - DNA, 20 bp, Artificial Sequence
  Description of Artificial Sequence: Synthetic oligonucleotide
  Target: LAMA2; (-) strand; PAM type: YTN; PAM sequence: CTA
ctccattgccaagttagtct

SEQ ID NO: 240967 - DNA, 20 bp, Artificial Sequence
  Description of Artificial Sequence: Synthetic oligonucleotide
  Target: LAMA2; (-) strand; PAM type: YTN; PAM sequence: TTC
tactccattgccaagttagt

SEQ ID NO: 240968 - DNA, 20 bp, Artificial Sequence
  Description of Artificial Sequence: Synthetic oligonucleotide
  Target: LAMA2; (-) strand; PAM type: YTN; PAM sequence: CTG
gttctactccattgccaagt

SEQ ID NO: 240969 - DNA, 20 bp, Artificial Sequence
  Description of Artificial Sequence: Synthetic oligonucleotide
  Target: LAMA2; (-) strand; PAM type: YTN; PAM sequence: TTC
ctggttctactccattgcca

SEQ ID NO: 240970 - DNA, 20 bp, Artificial Sequence
  Description of Artificial Sequence: Synthetic oligonucleotide
  Target: LAMA2; (-) strand; PAM type: YTN; PAM sequence: CTT
cctggttctactccattgcc

SEQ ID NO: 240971 - DNA, 20 bp, Artificial Sequence
  Description of Artificial Sequence: Synthetic oligonucleotide
  Target: LAMA2; (-) strand; PAM type: YTN; PAM sequence: TTC
ttcctggttctactccattg

SEQ ID NO: 240972 - DNA, 20 bp, Artificial Sequence
  Description of Artificial Sequence: Synthetic oligonucleotide
  Target: LAMA2; (-) strand; PAM type: YTN; PAM sequence: CTT
cttcctggttctactccatt

SEQ ID NO: 240973 - DNA, 20 bp, Artificial Sequence
  Description of Artificial Sequence: Synthetic oligonucleotide
  Target: LAMA2; (-) strand; PAM type: YTN; PAM sequence: CTA
ggcagcaaaccttcttcctg

SEQ ID NO: 240974 - DNA, 20 bp, Artificial Sequence
  Description of Artificial Sequence: Synthetic oligonucleotide
  Target: LAMA2; (-) strand; PAM type: YTN; PAM sequence: TTC
taggcagcaaaccttcttcc

SEQ ID NO: 240975 - DNA, 20 bp, Artificial Sequence
  Description of Artificial Sequence: Synthetic oligonucleotide
  Target: LAMA2; (-) strand; PAM type: YTN; PAM sequence: TTA
ttctaggcagcaaaccttct

SEQ ID NO: 240976 - DNA, 20 bp, Artificial Sequence
  Description of Artificial Sequence: Synthetic oligonucleotide
  Target: LAMA2; (-) strand; PAM type: YTN; PAM sequence: TTT
attctaggcagcaaaccttc

SEQ ID NO: 240977 - DNA, 20 bp, Artificial Sequence
  Description of Artificial Sequence: Synthetic oligonucleotide
  Target: LAMA2; (-) strand; PAM type: YTN; PAM sequence: TTC
agtttattctaggcagcaaa

SEQ ID NO: 240978 - DNA, 20 bp, Artificial Sequence
  Description of Artificial Sequence: Synthetic oligonucleotide
  Target: LAMA2; (-) strand; PAM type: YTN; PAM sequence: TTC
attcagtttattctaggcag

SEQ ID NO: 240979 - DNA, 20 bp, Artificial Sequence
  Description of Artificial Sequence: Synthetic oligonucleotide
  Target: LAMA2; (-) strand; PAM type: YTN; PAM sequence: TTA
caaattcattcagtttattc

SEQ ID NO: 240980 - DNA, 20 bp, Artificial Sequence
  Description of Artificial Sequence: Synthetic oligonucleotide
  Target: LAMA2; (-) strand; PAM type: YTN; PAM sequence: TTT
acaaattcattcagtttatt

SEQ ID NO: 240981 - DNA, 20 bp, Artificial Sequence
  Description of Artificial Sequence: Synthetic oligonucleotide
  Target: LAMA2; (-) strand; PAM type: YTN; PAM sequence: TTG
gtttacaaattcattcagtt

SEQ ID NO: 240982 - DNA, 20 bp, Artificial Sequence
  Description of Artificial Sequence: Synthetic oligonucleotide
  Target: LAMA2; (-) strand; PAM type: YTN; PAM sequence: TTT
ggtttacaaattcattcagt

SEQ ID NO: 240983 - DNA, 20 bp, Artificial Sequence
  Description of Artificial Sequence: Synthetic oligonucleotide
  Target: LAMA2; (-) strand; PAM type: YTN; PAM sequence: TTT
tggtttacaaattcattcag

SEQ ID NO: 240984 - DNA, 20 bp, Artificial Sequence
  Description of Artificial Sequence: Synthetic oligonucleotide
  Target: LAMA2; (-) strand; PAM type: YTN; PAM sequence: TTT
ttggtttacaaattcattca

SEQ ID NO: 240985 - DNA, 20 bp, Artificial Sequence
  Description of Artificial Sequence: Synthetic oligonucleotide
  Target: LAMA2; (-) strand; PAM type: YTN; PAM sequence: TTA
tttttggtttacaaattcat

SEQ ID NO: 240986 - DNA, 20 bp, Artificial Sequence
  Description of Artificial Sequence: Synthetic oligonucleotide
  Target: LAMA2; (-) strand; PAM type: YTN; PAM sequence: TTT
atttttggtttacaaattca

SEQ ID NO: 240987 - DNA, 20 bp, Artificial Sequence
  Description of Artificial Sequence: Synthetic oligonucleotide
  Target: LAMA2; (-) strand; PAM type: YTN; PAM sequence: TTT
tatttttggtttacaaattc

SEQ ID NO: 240988 - DNA, 20 bp, Artificial Sequence
  Description of Artificial Sequence: Synthetic oligonucleotide
  Target: LAMA2; (-) strand; PAM type: YTN; PAM sequence: TTA
gaattttatttttggtttac

SEQ ID NO: 240989 - DNA, 20 bp, Artificial Sequence
  Description of Artificial Sequence: Synthetic oligonucleotide
  Target: LAMA2; (-) strand; PAM type: YTN; PAM sequence: CTT
agaattttatttttggttta

SEQ ID NO: 240990 - DNA, 20 bp, Artificial Sequence
  Description of Artificial Sequence: Synthetic oligonucleotide
  Target: LAMA2; (-) strand; PAM type: YTN; PAM sequence: TTC
agtcaggggtcttagaattt

SEQ ID NO: 240991 - DNA, 20 bp, Artificial Sequence
  Description of Artificial Sequence: Synthetic oligonucleotide
  Target: LAMA2; (-) strand; PAM type: YTN; PAM sequence: TTG
gccaagaagggggtccgttc

SEQ ID NO: 240992 - DNA, 20 bp, Artificial Sequence
  Description of Artificial Sequence: Synthetic oligonucleotide
  Target: LAMA2; (-) strand; PAM type: YTN; PAM sequence: CTT
ggccaagaagggggtccgtt

SEQ ID NO: 240993 - DNA, 20 bp, Artificial Sequence
  Description of Artificial Sequence: Synthetic oligonucleotide
  Target: LAMA2; (-) strand; PAM type: YTN; PAM sequence: TTC
ccttggccaagaagggggtc

SEQ ID NO: 240994 - DNA, 20 bp, Artificial Sequence
  Description of Artificial Sequence: Synthetic oligonucleotide
  Target: LAMA2; (-) strand; PAM type: YTN; PAM sequence: TTG
ggattcccttggccaagaag

SEQ ID NO: 240995 - DNA, 20 bp, Artificial Sequence
  Description of Artificial Sequence: Synthetic oligonucleotide
  Target: LAMA2; (-) strand; PAM type: YTN; PAM sequence: TTT
gggattcccttggccaagaa

SEQ ID NO: 240996 - DNA, 20 bp, Artificial Sequence
  Description of Artificial Sequence: Synthetic oligonucleotide
  Target: LAMA2; (-) strand; PAM type: YTN; PAM sequence: CTT
tgggattcccttggccaaga

SEQ ID NO: 240997 - DNA, 20 bp, Artificial Sequence
  Description of Artificial Sequence: Synthetic oligonucleotide
  Target: LAMA2; (-) strand; PAM type: YTN; PAM sequence: TTC
tttgggattcccttggccaa

SEQ ID NO: 240998 - DNA, 20 bp, Artificial Sequence
  Description of Artificial Sequence: Synthetic oligonucleotide
  Target: LAMA2; (-) strand; PAM type: YTN; PAM sequence: TTT
ctttgggattcccttggcca

SEQ ID NO: 240999 - DNA, 20 bp, Artificial Sequence
  Description of Artificial Sequence: Synthetic oligonucleotide
  Target: LAMA2; (-) strand; PAM type: YTN; PAM sequence: TTA
ggtttctttgggattccctt

SEQ ID NO: 241000 - DNA, 20 bp, Artificial Sequence
  Description of Artificial Sequence: Synthetic oligonucleotide
  Target: LAMA2; (-) strand; PAM type: YTN; PAM sequence: TTT
aggtttctttgggattccct

SEQ ID NO: 241001 - DNA, 20 bp, Artificial Sequence
  Description of Artificial Sequence: Synthetic oligonucleotide
  Target: LAMA2; (-) strand; PAM type: YTN; PAM sequence: CTT
taggtttctttgggattccc

SEQ ID NO: 241002 - DNA, 20 bp, Artificial Sequence
  Description of Artificial Sequence: Synthetic oligonucleotide
  Target: LAMA2; (-) strand; PAM type: YTN; PAM sequence: TTC
tttaggtttctttgggattc

SEQ ID NO: 241003 - DNA, 20 bp, Artificial Sequence
  Description of Artificial Sequence: Synthetic oligonucleotide
  Target: LAMA2; (-) strand; PAM type: YTN; PAM sequence: TTT
ctttaggtttctttgggatt

SEQ ID NO: 241004 - DNA, 20 bp, Artificial Sequence
  Description of Artificial Sequence: Synthetic oligonucleotide
  Target: LAMA2; (-) strand; PAM type: YTN; PAM sequence: TTC
aggtttctttaggtttcttt

SEQ ID NO: 241005 - DNA, 20 bp, Artificial Sequence
  Description of Artificial Sequence: Synthetic oligonucleotide
  Target: LAMA2; (-) strand; PAM type: YTN; PAM sequence: TTC
ccatgatgttcaggtttctt

SEQ ID NO: 241006 - DNA, 20 bp, Artificial Sequence
  Description of Artificial Sequence: Synthetic oligonucleotide
  Target: LAMA2; (-) strand; PAM type: YTN; PAM sequence: CTT
cccatgatgttcaggtttct

SEQ ID NO: 241007 - DNA, 20 bp, Artificial Sequence
  Description of Artificial Sequence: Synthetic oligonucleotide
  Target: LAMA2; (-) strand; PAM type: YTN; PAM sequence: CTC
caaagggagcagggtataat

SEQ ID NO: 241008 - DNA, 20 bp, Artificial Sequence
  Description of Artificial Sequence: Synthetic oligonucleotide
  Target: LAMA2; (-) strand; PAM type: YTN; PAM sequence: CTA
aactccaaagggagcagggt

SEQ ID NO: 241009 - DNA, 20 bp, Artificial Sequence
  Description of Artificial Sequence: Synthetic oligonucleotide
  Target: LAMA2; (-) strand; PAM type: YTN; PAM sequence: CTG
tggtgtctaaactccaaagg

SEQ ID NO: 241010 - DNA, 20 bp, Artificial Sequence
  Description of Artificial Sequence: Synthetic oligonucleotide
  Target: LAMA2; (-) strand; PAM type: YTN; PAM sequence: TTG
gtctgtggtgtctaaactcc

SEQ ID NO: 241011 - DNA, 20 bp, Artificial Sequence
  Description of Artificial Sequence: Synthetic oligonucleotide
  Target: LAMA2; (-) strand; PAM type: YTN; PAM sequence: CTG
ttggtctgtggtgtctaaac

SEQ ID NO: 241012 - DNA, 20 bp, Artificial Sequence
  Description of Artificial Sequence: Synthetic oligonucleotide
  Target: LAMA2; (-) strand; PAM type: YTN; PAM sequence: TTA
ctgttggtctgtggtgtcta

SEQ ID NO: 241013 - DNA, 20 bp, Artificial Sequence
  Description of Artificial Sequence: Synthetic oligonucleotide
  Target: LAMA2; (-) strand; PAM type: YTN; PAM sequence: TTA
atgttactgttggtctgtgg

SEQ ID NO: 241014 - DNA, 20 bp, Artificial Sequence
  Description of Artificial Sequence: Synthetic oligonucleotide
  Target: LAMA2; (-) strand; PAM type: YTN; PAM sequence: TTT
aatgttactgttggtctgtg

SEQ ID NO: 241015 - DNA, 20 bp, Artificial Sequence
  Description of Artificial Sequence: Synthetic oligonucleotide
  Target: LAMA2; (-) strand; PAM type: YTN; PAM sequence: TTT
taatgttactgttggtctgt

SEQ ID NO: 241016 - DNA, 20 bp, Artificial Sequence
  Description of Artificial Sequence: Synthetic oligonucleotide
  Target: LAMA2; (-) strand; PAM type: YTN; PAM sequence: CTG
ttttaatgttactgttggtc

SEQ ID NO: 241017 - DNA, 20 bp, Artificial Sequence
  Description of Artificial Sequence: Synthetic oligonucleotide
  Target: LAMA2; (-) strand; PAM type: YTN; PAM sequence: CTC
tgttttaatgttactgttgg

SEQ ID NO: 241018 - DNA, 20 bp, Artificial Sequence
  Description of Artificial Sequence: Synthetic oligonucleotide
  Target: LAMA2; (-) strand; PAM type: YTN; PAM sequence: TTA
aaatctctgttttaatgtta

SEQ ID NO: 241019 - DNA, 20 bp, Artificial Sequence
  Description of Artificial Sequence: Synthetic oligonucleotide
  Target: LAMA2; (-) strand; PAM type: YTN; PAM sequence: TTT
aaaatctctgttttaatgtt

SEQ ID NO: 241020 - DNA, 20 bp, Artificial Sequence
  Description of Artificial Sequence: Synthetic oligonucleotide
  Target: LAMA2; (-) strand; PAM type: YTN; PAM sequence: TTT
taaaatctctgttttaatgt

SEQ ID NO: 241021 - DNA, 20 bp, Artificial Sequence
  Description of Artificial Sequence: Synthetic oligonucleotide
  Target: LAMA2; (-) strand; PAM type: YTN; PAM sequence: CTA
gtcagttttaaaatctctgt

SEQ ID NO: 241022 - DNA, 20 bp, Artificial Sequence
  Description of Artificial Sequence: Synthetic oligonucleotide
  Target: LAMA2; (-) strand; PAM type: YTN; PAM sequence: CTG
tctagtcagttttaaaatct

SEQ ID NO: 241023 - DNA, 20 bp, Artificial Sequence
  Description of Artificial Sequence: Synthetic oligonucleotide
  Target: LAMA2; (-) strand; PAM type: YTN; PAM sequence: CTG
taaagtgtctgtctagtcag

SEQ ID NO: 241024 - DNA, 20 bp, Artificial Sequence
  Description of Artificial Sequence: Synthetic oligonucleotide
  Target: LAMA2; (-) strand; PAM type: YTN; PAM sequence: TTG
ctgtaaagtgtctgtctagt

SEQ ID NO: 241025 - DNA, 20 bp, Artificial Sequence
  Description of Artificial Sequence: Synthetic oligonucleotide
  Target: LAMA2; (-) strand; PAM type: YTN; PAM sequence: TTG
ttgctgtaaagtgtctgtct

SEQ ID NO: 241026 - DNA, 20 bp, Artificial Sequence
  Description of Artificial Sequence: Synthetic oligonucleotide
  Target: LAMA2; (-) strand; PAM type: YTN; PAM sequence: CTT
gttgctgtaaagtgtctgtc

SEQ ID NO: 241027 - DNA, 20 bp, Artificial Sequence
  Description of Artificial Sequence: Synthetic oligonucleotide
  Target: LAMA2; (-) strand; PAM type: YTN; PAM sequence: TTG
gtatcttgttgctgtaaagt

SEQ ID NO: 241028 - DNA, 20 bp, Artificial Sequence
  Description of Artificial Sequence: Synthetic oligonucleotide
  Target: LAMA2; (-) strand; PAM type: YTN; PAM sequence: TTT
ggtatcttgttgctgtaaag

SEQ ID NO: 241029 - DNA, 20 bp, Artificial Sequence
  Description of Artificial Sequence: Synthetic oligonucleotide
  Target: LAMA2; (-) strand; PAM type: YTN; PAM sequence: TTA
gaatttggtatcttgttgct

SEQ ID NO: 241030 - DNA, 20 bp, Artificial Sequence
  Description of Artificial Sequence: Synthetic oligonucleotide
  Target: LAMA2; (-) strand; PAM type: YTN; PAM sequence: CTA
taccagagtgaggttagaat

SEQ ID NO: 241031 - DNA, 20 bp, Artificial Sequence
  Description of Artificial Sequence: Synthetic oligonucleotide
  Target: LAMA2; (-) strand; PAM type: YTN; PAM sequence: TTA
tgctataccagagtgaggtt

SEQ ID NO: 241032 - DNA, 20 bp, Artificial Sequence
  Description of Artificial Sequence: Synthetic oligonucleotide
  Target: LAMA2; (-) strand; PAM type: YTN; PAM sequence: TTA
tgttatgctataccagagtg

SEQ ID NO: 241033 - DNA, 20 bp, Artificial Sequence
  Description of Artificial Sequence: Synthetic oligonucleotide
  Target: LAMA2; (-) strand; PAM type: YTN; PAM sequence: CTG
ttatgttatgctataccaga

SEQ ID NO: 241034 - DNA, 20 bp, Artificial Sequence
  Description of Artificial Sequence: Synthetic oligonucleotide
  Target: LAMA2; (-) strand; PAM type: YTN; PAM sequence: CTA
tctgttatgttatgctatac

SEQ ID NO: 241035 - DNA, 20 bp, Artificial Sequence
  Description of Artificial Sequence: Synthetic oligonucleotide
  Target: LAMA2; (-) strand; PAM type: YTN; PAM sequence: CTG
ctatctgttatgttatgcta

SEQ ID NO: 241036 - DNA, 20 bp, Artificial Sequence
  Description of Artificial Sequence: Synthetic oligonucleotide
  Target: LAMA2; (-) strand; PAM type: YTN; PAM sequence: TTA
gggcctgctatctgttatgt

SEQ ID NO: 241037 - DNA, 20 bp, Artificial Sequence
  Description of Artificial Sequence: Synthetic oligonucleotide
  Target: LAMA2; (-) strand; PAM type: YTN; PAM sequence: TTT
agggcctgctatctgttatg

SEQ ID NO: 241038 - DNA, 20 bp, Artificial Sequence
  Description of Artificial Sequence: Synthetic oligonucleotide
  Target: LAMA2; (-) strand; PAM type: YTN; PAM sequence: TTT
tagggcctgctatctgttat

SEQ ID NO: 241039 - DNA, 20 bp, Artificial Sequence
  Description of Artificial Sequence: Synthetic oligonucleotide
  Target: LAMA2; (-) strand; PAM type: YTN; PAM sequence: CTT
ttagggcctgctatctgtta

SEQ ID NO: 241040 - DNA, 20 bp, Artificial Sequence
  Description of Artificial Sequence: Synthetic oligonucleotide
  Target: LAMA2; (-) strand; PAM type: YTN; PAM sequence: TTC
ttttagggcctgctatctgt

SEQ ID NO: 241041 - DNA, 20 bp, Artificial Sequence
  Description of Artificial Sequence: Synthetic oligonucleotide
  Target: LAMA2; (-) strand; PAM type: YTN; PAM sequence: TTT
cttttagggcctgctatctg

SEQ ID NO: 241042 - DNA, 20 bp, Artificial Sequence
  Description of Artificial Sequence: Synthetic oligonucleotide
  Target: LAMA2; (-) strand; PAM type: YTN; PAM sequence: TTG
atttcttttagggcctgcta

SEQ ID NO: 241043 - DNA, 20 bp, Artificial Sequence
  Description of Artificial Sequence: Synthetic oligonucleotide
  Target: LAMA2; (-) strand; PAM type: YTN; PAM sequence: TTT
gatttcttttagggcctgct

SEQ ID NO: 241044 - DNA, 20 bp, Artificial Sequence
  Description of Artificial Sequence: Synthetic oligonucleotide
  Target: LAMA2; (-) strand; PAM type: YTN; PAM sequence: CTT
tgatttcttttagggcctgc

SEQ ID NO: 241045 - DNA, 20 bp, Artificial Sequence
  Description of Artificial Sequence: Synthetic oligonucleotide
  Target: LAMA2; (-) strand; PAM type: YTN; PAM sequence: TTG
gtataaaatactttgatttc

SEQ ID NO: 241046 - DNA, 20 bp, Artificial Sequence
  Description of Artificial Sequence: Synthetic oligonucleotide
  Target: LAMA2; (-) strand; PAM type: YTN; PAM sequence: TTT
ggtataaaatactttgattt

SEQ ID NO: 241047 - DNA, 20 bp, Artificial Sequence
  Description of Artificial Sequence: Synthetic oligonucleotide
  Target: LAMA2; (-) strand; PAM type: YTN; PAM sequence: TTT
tggtataaaatactttgatt

SEQ ID NO: 241048 - DNA, 20 bp, Artificial Sequence
  Description of Artificial Sequence: Synthetic oligonucleotide
  Target: LAMA2; (-) strand; PAM type: YTN; PAM sequence: TTC
agaatatgtcaaataaatat

SEQ ID NO: 241049 - DNA, 20 bp, Artificial Sequence
  Description of Artificial Sequence: Synthetic oligonucleotide
  Target: LAMA2; (-) strand; PAM type: YTN; PAM sequence: TTT
cagaatatgtcaaataaata

SEQ ID NO: 241050 - DNA, 20 bp, Artificial Sequence
  Description of Artificial Sequence: Synthetic oligonucleotide
  Target: LAMA2; (-) strand; PAM type: YTN; PAM sequence: TTG
caaggtcatttcagaatatg

SEQ ID NO: 241051 - DNA, 20 bp, Artificial Sequence
  Description of Artificial Sequence: Synthetic oligonucleotide
  Target: LAMA2; (-) strand; PAM type: YTN; PAM sequence: TTT
gcaaggtcatttcagaatat

SEQ ID NO: 241052 - DNA, 20 bp, Artificial Sequence
  Description of Artificial Sequence: Synthetic oligonucleotide
  Target: LAMA2; (-) strand; PAM type: YTN; PAM sequence: CTT
tgcaaggtcatttcagaata

SEQ ID NO: 241053 - DNA, 20 bp, Artificial Sequence
  Description of Artificial Sequence: Synthetic oligonucleotide
  Target: LAMA2; (-) strand; PAM type: YTN; PAM sequence: TTC
cccaagagacagctttgcaa

SEQ ID NO: 241054 - DNA, 20 bp, Artificial Sequence
  Description of Artificial Sequence: Synthetic oligonucleotide
  Target: LAMA2; (-) strand; PAM type: YTN; PAM sequence: TTT
ccccaagagacagctttgca

SEQ ID NO: 241055 - DNA, 20 bp, Artificial Sequence
  Description of Artificial Sequence: Synthetic oligonucleotide
  Target: LAMA2; (-) strand; PAM type: YTN; PAM sequence: CTA
tagaatgcaaatttccccaa

SEQ ID NO: 241056 - DNA, 20 bp, Artificial Sequence
  Description of Artificial Sequence: Synthetic oligonucleotide
  Target: LAMA2; (-) strand; PAM type: YTN; PAM sequence: CTC
tatagaatgcaaatttcccc

SEQ ID NO: 241057 - DNA, 20 bp, Artificial Sequence
  Description of Artificial Sequence: Synthetic oligonucleotide
  Target: LAMA2; (-) strand; PAM type: YTN; PAM sequence: TTC
tctatagaatgcaaatttcc

SEQ ID NO: 241058 - DNA, 20 bp, Artificial Sequence
  Description of Artificial Sequence: Synthetic oligonucleotide
  Target: LAMA2; (-) strand; PAM type: YTN; PAM sequence: TTA
gtaagggaaggagattctct

SEQ ID NO: 241059 - DNA, 20 bp, Artificial Sequence
  Description of Artificial Sequence: Synthetic oligonucleotide
  Target: LAMA2; (-) strand; PAM type: YTN; PAM sequence: CTT
agtaagggaaggagattctc

SEQ ID NO: 241060 - DNA, 20 bp, Artificial Sequence
  Description of Artificial Sequence: Synthetic oligonucleotide
  Target: LAMA2; (-) strand; PAM type: YTN; PAM sequence: CTC
cagaaaagacttagtaaggg

SEQ ID NO: 241061 - DNA, 20 bp, Artificial Sequence
  Description of Artificial Sequence: Synthetic oligonucleotide
  Target: LAMA2; (-) strand; PAM type: YTN; PAM sequence: CTC
tccagaaaagacttagtaag

SEQ ID NO: 241062 - DNA, 20 bp, Artificial Sequence
  Description of Artificial Sequence: Synthetic oligonucleotide
  Target: LAMA2; (-) strand; PAM type: YTN; PAM sequence: CTG
actctccagaaaagacttag

SEQ ID NO: 241063 - DNA, 20 bp, Artificial Sequence
  Description of Artificial Sequence: Synthetic oligonucleotide
  Target: LAMA2; (-) strand; PAM type: YTN; PAM sequence: TTA
aaaggtatctgactctccag

SEQ ID NO: 241064 - DNA, 20 bp, Artificial Sequence
  Description of Artificial Sequence: Synthetic oligonucleotide
  Target: LAMA2; (-) strand; PAM type: YTN; PAM sequence: CTT
aaaaggtatctgactctcca

SEQ ID NO: 241065 - DNA, 20 bp, Artificial Sequence
  Description of Artificial Sequence: Synthetic oligonucleotide
  Target: LAMA2; (-) strand; PAM type: YTN; PAM sequence: TTG
ccagaccttaaaaggtatct

SEQ ID NO: 241066 - DNA, 20 bp, Artificial Sequence
  Description of Artificial Sequence: Synthetic oligonucleotide
  Target: LAMA2; (-) strand; PAM type: YTN; PAM sequence: CTT
gccagaccttaaaaggtatc

SEQ ID NO: 241067 - DNA, 20 bp, Artificial Sequence
  Description of Artificial Sequence: Synthetic oligonucleotide
  Target: LAMA2; (-) strand; PAM type: YTN; PAM sequence: CTC
ttgccagaccttaaaaggta

SEQ ID NO: 241068 - DNA, 20 bp, Artificial Sequence
  Description of Artificial Sequence: Synthetic oligonucleotide
  Target: LAMA2; (-) strand; PAM type: YTN; PAM sequence: CTG
atggtgaatgtctcttgcca

SEQ ID NO: 241069 - DNA, 20 bp, Artificial Sequence
  Description of Artificial Sequence: Synthetic oligonucleotide
  Target: LAMA2; (-) strand; PAM type: YTN; PAM sequence: CTC
aaggtagtagggtaaagtag

SEQ ID NO: 241070 - DNA, 20 bp, Artificial Sequence
  Description of Artificial Sequence: Synthetic oligonucleotide
  Target: LAMA2; (-) strand; PAM type: YTN; PAM sequence: TTG
tcatgtagatgaagcctcaa

SEQ ID NO: 241071 - DNA, 20 bp, Artificial Sequence
  Description of Artificial Sequence: Synthetic oligonucleotide
  Target: LAMA2; (-) strand; PAM type: YTN; PAM sequence: CTT
gtcatgtagatgaagcctca

SEQ ID NO: 241072 - DNA, 20 bp, Artificial Sequence
  Description of Artificial Sequence: Synthetic oligonucleotide
  Target: LAMA2; (-) strand; PAM type: YTN; PAM sequence: TTC
ttgtcatgtagatgaagcct

SEQ ID NO: 241073 - DNA, 20 bp, Artificial Sequence
  Description of Artificial Sequence: Synthetic oligonucleotide
  Target: LAMA2; (-) strand; PAM type: YTN; PAM sequence: TTG
tggaagccacggttcttgtc

SEQ ID NO: 241074 - DNA, 20 bp, Artificial Sequence
  Description of Artificial Sequence: Synthetic oligonucleotide
  Target: LAMA2; (-) strand; PAM type: YTN; PAM sequence: TTA
agagagtgggttgtggaagc

SEQ ID NO: 241075 - DNA, 20 bp, Artificial Sequence
  Description of Artificial Sequence: Synthetic oligonucleotide
  Target: LAMA2; (-) strand; PAM type: YTN; PAM sequence: TTG
agttaagagagtgggttgtg

SEQ ID NO: 241076 - DNA, 20 bp, Artificial Sequence
  Description of Artificial Sequence: Synthetic oligonucleotide
  Target: LAMA2; (-) strand; PAM type: YTN; PAM sequence: CTT
gagttaagagagtgggttgt

SEQ ID NO: 241077 - DNA, 20 bp, Artificial Sequence
  Description of Artificial Sequence: Synthetic oligonucleotide
  Target: LAMA2; (-) strand; PAM type: YTN; PAM sequence: TTG
aagtcagcttgagttaagag

SEQ ID NO: 241078 - DNA, 20 bp, Artificial Sequence
  Description of Artificial Sequence: Synthetic oligonucleotide
  Target: LAMA2; (-) strand; PAM type: YTN; PAM sequence: CTG
aacagttgaagtcagcttga

SEQ ID NO: 241079 - DNA, 20 bp, Artificial Sequence
  Description of Artificial Sequence: Synthetic oligonucleotide
  Target: LAMA2; (-) strand; PAM type: YTN; PAM sequence: CTG
cctgaacagttgaagtcagc

SEQ ID NO: 241080 - DNA, 20 bp, Artificial Sequence
  Description of Artificial Sequence: Synthetic oligonucleotide
  Target: LAMA2; (-) strand; PAM type: YTN; PAM sequence: TTC
tgcctgaacagttgaagtca

SEQ ID NO: 241081 - DNA, 20 bp, Artificial Sequence
  Description of Artificial Sequence: Synthetic oligonucleotide
  Target: LAMA2; (-) strand; PAM type: YTN; PAM sequence: TTG
gtcgaaagagtaaaattctg

SEQ ID NO: 241082 - DNA, 20 bp, Artificial Sequence
  Description of Artificial Sequence: Synthetic oligonucleotide
  Target: LAMA2; (-) strand; PAM type: YTN; PAM sequence: CTG
gcaattggtcgaaagagtaa

SEQ ID NO: 241083 - DNA, 20 bp, Artificial Sequence
  Description of Artificial Sequence: Synthetic oligonucleotide
  Target: LAMA2; (-) strand; PAM type: YTN; PAM sequence: CTG
actggcaattggtcgaaaga

SEQ ID NO: 241084 - DNA, 20 bp, Artificial Sequence
  Description of Artificial Sequence: Synthetic oligonucleotide
  Target: LAMA2; (-) strand; PAM type: YTN; PAM sequence: TTC
tgactggcaattggtcgaaa

SEQ ID NO: 241085 - DNA, 20 bp, Artificial Sequence
  Description of Artificial Sequence: Synthetic oligonucleotide
  Target: LAMA2; (-) strand; PAM type: YTN; PAM sequence: TTT
ctgactggcaattggtcgaa

SEQ ID NO: 241086 - DNA, 20 bp, Artificial Sequence
  Description of Artificial Sequence: Synthetic oligonucleotide
  Target: LAMA2; (-) strand; PAM type: YTN; PAM sequence: TTT
tctgactggcaattggtcga

SEQ ID NO: 241087 - DNA, 20 bp, Artificial Sequence
  Description of Artificial Sequence: Synthetic oligonucleotide
  Target: LAMA2; (-) strand; PAM type: YTN; PAM sequence: TTC
aaagattttctgactggcaa

SEQ ID NO: 241088 - DNA, 20 bp, Artificial Sequence
  Description of Artificial Sequence: Synthetic oligonucleotide
  Target: LAMA2; (-) strand; PAM type: YTN; PAM sequence: TTG
atggattcaaagattttctg

SEQ ID NO: 241089 - DNA, 20 bp, Artificial Sequence
  Description of Artificial Sequence: Synthetic oligonucleotide
  Target: LAMA2; (-) strand; PAM type: YTN; PAM sequence: TTC
caagtcattgatggattcaa

SEQ ID NO: 241090 - DNA, 20 bp, Artificial Sequence
  Description of Artificial Sequence: Synthetic oligonucleotide
  Target: LAMA2; (-) strand; PAM type: YTN; PAM sequence: CTT
ccaagtcattgatggattca

SEQ ID NO: 241091 - DNA, 20 bp, Artificial Sequence
  Description of Artificial Sequence: Synthetic oligonucleotide
  Target: LAMA2; (-) strand; PAM type: YTN; PAM sequence: TTG
aagcgaggtgggggcttcca

SEQ ID NO: 241092 - DNA, 20 bp, Artificial Sequence
  Description of Artificial Sequence: Synthetic oligonucleotide
  Target: LAMA2; (-) strand; PAM type: YTN; PAM sequence: CTT
gaagcgaggtgggggcttcc

SEQ ID NO: 241093 - DNA, 20 bp, Artificial Sequence
  Description of Artificial Sequence: Synthetic oligonucleotide
  Target: LAMA2; (-) strand; PAM type: YTN; PAM sequence: TTC
ggcccagaaaagtaggacat

SEQ ID NO: 241094 - DNA, 20 bp, Artificial Sequence
  Description of Artificial Sequence: Synthetic oligonucleotide
  Target: LAMA2; (-) strand; PAM type: YTN; PAM sequence: TTG
gttcggcccagaaaagtagg

SEQ ID NO: 241095 - DNA, 20 bp, Artificial Sequence
  Description of Artificial Sequence: Synthetic oligonucleotide
  Target: LAMA2; (-) strand; PAM type: YTN; PAM sequence: TTA
cacattggttcggcccagaa

SEQ ID NO: 241096 - DNA, 20 bp, Artificial Sequence
  Description of Artificial Sequence: Synthetic oligonucleotide
  Target: LAMA2; (-) strand; PAM type: YTN; PAM sequence: CTA
agttacacattggttcggcc

SEQ ID NO: 241097 - DNA, 20 bp, Artificial Sequence
  Description of Artificial Sequence: Synthetic oligonucleotide
  Target: LAMA2; (-) strand; PAM type: YTN; PAM sequence: TTG
caggcaaagacatacaccag

SEQ ID NO: 241098 - DNA, 20 bp, Artificial Sequence
  Description of Artificial Sequence: Synthetic oligonucleotide
  Target: LAMA2; (-) strand; PAM type: YTN; PAM sequence: TTA
gggagacgaaagttgcaggc

SEQ ID NO: 241099 - DNA, 20 bp, Artificial Sequence
  Description of Artificial Sequence: Synthetic oligonucleotide
  Target: LAMA2; (-) strand; PAM type: YTN; PAM sequence: TTT
agggagacgaaagttgcagg

SEQ ID NO: 241100 - DNA, 20 bp, Artificial Sequence
  Description of Artificial Sequence: Synthetic oligonucleotide
  Target: LAMA2; (-) strand; PAM type: YTN; PAM sequence: TTT
tagggagacgaaagttgcag

SEQ ID NO: 241101 - DNA, 20 bp, Artificial Sequence
  Description of Artificial Sequence: Synthetic oligonucleotide
  Target: LAMA2; (-) strand; PAM type: YTN; PAM sequence: TTA
tatattttagggagacgaaa

SEQ ID NO: 241102 - DNA, 20 bp, Artificial Sequence
  Description of Artificial Sequence: Synthetic oligonucleotide
  Target: LAMA2; (-) strand; PAM type: YTN; PAM sequence: TTG
gcgttatatattttagggag

SEQ ID NO: 241103 - DNA, 20 bp, Artificial Sequence
  Description of Artificial Sequence: Synthetic oligonucleotide
  Target: LAMA2; (-) strand; PAM type: YTN; PAM sequence: CTT
ggcgttatatattttaggga

SEQ ID NO: 241104 - DNA, 20 bp, Artificial Sequence
  Description of Artificial Sequence: Synthetic oligonucleotide
  Target: LAMA2; (-) strand; PAM type: YTN; PAM sequence: TTA
cagcttggcgttatatattt

SEQ ID NO: 241105 - DNA, 20 bp, Artificial Sequence
  Description of Artificial Sequence: Synthetic oligonucleotide
  Target: LAMA2; (-) strand; PAM type: YTN; PAM sequence: CTG
ggttacagcttggcgttata

SEQ ID NO: 241106 - DNA, 20 bp, Artificial Sequence
  Description of Artificial Sequence: Synthetic oligonucleotide
  Target: LAMA2; (-) strand; PAM type: YTN; PAM sequence: CTG
agaatatgtgccaaagatga

SEQ ID NO: 241107 - DNA, 20 bp, Artificial Sequence
  Description of Artificial Sequence: Synthetic oligonucleotide
  Target: LAMA2; (-) strand; PAM type: YTN; PAM sequence: TTA
ggaggtcctgagaatatgtg

SEQ ID NO: 241108 - DNA, 20 bp, Artificial Sequence
  Description of Artificial Sequence: Synthetic oligonucleotide
  Target: LAMA2; (-) strand; PAM type: YTN; PAM sequence: CTT
aggaggtcctgagaatatgt

SEQ ID NO: 241109 - DNA, 20 bp, Artificial Sequence
  Description of Artificial Sequence: Synthetic oligonucleotide
  Target: LAMA2; (-) strand; PAM type: YTN; PAM sequence: CTG
tgacacagccttaggaggtc

SEQ ID NO: 241110 - DNA, 20 bp, Artificial Sequence
  Description of Artificial Sequence: Synthetic oligonucleotide
  Target: LAMA2; (-) strand; PAM type: YTN; PAM sequence: TTA
aggaccatggcctgtgacac

SEQ ID NO: 241111 - DNA, 20 bp, Artificial Sequence
  Description of Artificial Sequence: Synthetic oligonucleotide
  Target: LAMA2; (-) strand; PAM type: YTN; PAM sequence: TTG
gcaaggttaaggaccatggc

SEQ ID NO: 241112 - DNA, 20 bp, Artificial Sequence
  Description of Artificial Sequence: Synthetic oligonucleotide
  Target: LAMA2; (-) strand; PAM type: YTN; PAM sequence: TTT
ggcaaggttaaggaccatgg

SEQ ID NO: 241113 - DNA, 20 bp, Artificial Sequence
  Description of Artificial Sequence: Synthetic oligonucleotide
  Target: LAMA2; (-) strand; PAM type: YTN; PAM sequence: TTA
tttggcaaggttaaggacca

SEQ ID NO: 241114 - DNA, 20 bp, Artificial Sequence
  Description of Artificial Sequence: Synthetic oligonucleotide
  Target: LAMA2; (-) strand; PAM type: YTN; PAM sequence: TTT
atttggcaaggttaaggacc

SEQ ID NO: 241115 - DNA, 20 bp, Artificial Sequence
  Description of Artificial Sequence: Synthetic oligonucleotide
  Target: LAMA2; (-) strand; PAM type: YTN; PAM sequence: TTA
gaggtttatttggcaaggtt

SEQ ID NO: 241116 - DNA, 20 bp, Artificial Sequence
  Description of Artificial Sequence: Synthetic oligonucleotide
  Target: LAMA2; (-) strand; PAM type: YTN; PAM sequence: TTT
agaggtttatttggcaaggt

SEQ ID NO: 241117 - DNA, 20 bp, Artificial Sequence
  Description of Artificial Sequence: Synthetic oligonucleotide
  Target: LAMA2; (-) strand; PAM type: YTN; PAM sequence: CTC
aatcaatttagaggtttatt

SEQ ID NO: 241118 - DNA, 20 bp, Artificial Sequence
  Description of Artificial Sequence: Synthetic oligonucleotide
  Target: LAMA2; (-) strand; PAM type: YTN; PAM sequence: TTG
taaaccaaaaagtatcagaa

SEQ ID NO: 241119 - DNA, 20 bp, Artificial Sequence
  Description of Artificial Sequence: Synthetic oligonucleotide
  Target: LAMA2; (-) strand; PAM type: YTN; PAM sequence: TTT
gtaaaccaaaaagtatcaga

SEQ ID NO: 241120 - DNA, 20 bp, Artificial Sequence
  Description of Artificial Sequence: Synthetic oligonucleotide
  Target: LAMA2; (-) strand; PAM type: YTN; PAM sequence: TTA
acaatttgtaaaccaaaaag

SEQ ID NO: 241121 - DNA, 20 bp, Artificial Sequence
  Description of Artificial Sequence: Synthetic oligonucleotide
  Target: LAMA2; (-) strand; PAM type: YTN; PAM sequence: CTT
aacaatttgtaaaccaaaaa

SEQ ID NO: 241122 - DNA, 20 bp, Artificial Sequence
  Description of Artificial Sequence: Synthetic oligonucleotide
  Target: LAMA2; (-) strand; PAM type: YTN; PAM sequence: TTA
tccttaacaatttgtaaacc

SEQ ID NO: 241123 - DNA, 20 bp, Artificial Sequence
  Description of Artificial Sequence: Synthetic oligonucleotide
  Target: LAMA2; (-) strand; PAM type: YTN; PAM sequence: TTT
atccttaacaatttgtaaac

SEQ ID NO: 241124 - DNA, 20 bp, Artificial Sequence
  Description of Artificial Sequence: Synthetic oligonucleotide
  Target: LAMA2; (-) strand; PAM type: YTN; PAM sequence: CTC
atttatccttaacaatttgt

SEQ ID NO: 241125 - DNA, 20 bp, Artificial Sequence
  Description of Artificial Sequence: Synthetic oligonucleotide
  Target: LAMA2; (-) strand; PAM type: YTN; PAM sequence: TTC
tcatttatccttaacaattt

SEQ ID NO: 241126 - DNA, 20 bp, Artificial Sequence
  Description of Artificial Sequence: Synthetic oligonucleotide
  Target: LAMA2; (-) strand; PAM type: YTN; PAM sequence: TTT
ctcatttatccttaacaatt

SEQ ID NO: 241127 - DNA, 20 bp, Artificial Sequence
  Description of Artificial Sequence: Synthetic oligonucleotide
  Target: LAMA2; (-) strand; PAM type: YTN; PAM sequence: TTT
tctcatttatccttaacaat

SEQ ID NO: 241128 - DNA, 20 bp, Artificial Sequence
  Description of Artificial Sequence: Synthetic oligonucleotide
  Target: LAMA2; (-) strand; PAM type: YTN; PAM sequence: TTA
ttttctcatttatccttaac

SEQ ID NO: 241129 - DNA, 20 bp, Artificial Sequence
  Description of Artificial Sequence: Synthetic oligonucleotide
  Target: LAMA2; (-) strand; PAM type: YTN; PAM sequence: CTT
attttctcatttatccttaa

SEQ ID NO: 241130 - DNA, 20 bp, Artificial Sequence
  Description of Artificial Sequence: Synthetic oligonucleotide
  Target: LAMA2; (-) strand; PAM type: YTN; PAM sequence: TTA
atacttattttctcatttat

SEQ ID NO: 241131 - DNA, 20 bp, Artificial Sequence
  Description of Artificial Sequence: Synthetic oligonucleotide
  Target: LAMA2; (-) strand; PAM type: YTN; PAM sequence: TTT
aatacttattttctcattta

SEQ ID NO: 241132 - DNA, 20 bp, Artificial Sequence
  Description of Artificial Sequence: Synthetic oligonucleotide
  Target: LAMA2; (-) strand; PAM type: YTN; PAM sequence: TTT
taatacttattttctcattt

SEQ ID NO: 241133 - DNA, 20 bp, Artificial Sequence
  Description of Artificial Sequence: Synthetic oligonucleotide
  Target: LAMA2; (-) strand; PAM type: YTN; PAM sequence: TTT
ttaatacttattttctcatt

SEQ ID NO: 241134 - DNA, 20 bp, Artificial Sequence
  Description of Artificial Sequence: Synthetic oligonucleotide
  Target: LAMA2; (-) strand; PAM type: YTN; PAM sequence: TTT
tttaatacttattttctcat

SEQ ID NO: 241135 - DNA, 20 bp, Artificial Sequence
  Description of Artificial Sequence: Synthetic oligonucleotide
  Target: LAMA2; (-) strand; PAM type: YTN; PAM sequence: TTG
ttttttaatacttattttct

SEQ ID NO: 241136 - DNA, 20 bp, Artificial Sequence
  Description of Artificial Sequence: Synthetic oligonucleotide
  Target: LAMA2; (-) strand; PAM type: YTN; PAM sequence: TTT
gttttttaatacttattttc

SEQ ID NO: 241137 - DNA, 20 bp, Artificial Sequence
  Description of Artificial Sequence: Synthetic oligonucleotide
  Target: LAMA2; (-) strand; PAM type: YTN; PAM sequence: TTT
tgttttttaatacttatttt

SEQ ID NO: 241138 - DNA, 20 bp, Artificial Sequence
  Description of Artificial Sequence: Synthetic oligonucleotide
  Target: LAMA2; (-) strand; PAM type: YTN; PAM sequence: TTT
ttgttttttaatacttattt

SEQ ID NO: 241139 - DNA, 20 bp, Artificial Sequence
  Description of Artificial Sequence: Synthetic oligonucleotide
  Target: LAMA2; (-) strand; PAM type: YTN; PAM sequence: TTT
tttgttttttaatacttatt

SEQ ID NO: 241140 - DNA, 20 bp, Artificial Sequence
  Description of Artificial Sequence: Synthetic oligonucleotide
  Target: LAMA2; (-) strand; PAM type: YTN; PAM sequence: TTT
ttttgttttttaatacttat

SEQ ID NO: 241141 - DNA, 20 bp, Artificial Sequence
  Description of Artificial Sequence: Synthetic oligonucleotide
  Target: LAMA2; (-) strand; PAM type: YTN; PAM sequence: TTT
tttttgttttttaatactta

SEQ ID NO: 241142 - DNA, 20 bp, Artificial Sequence
  Description of Artificial Sequence: Synthetic oligonucleotide
  Target: LAMA2; (-) strand; PAM type: YTN; PAM sequence: TTG
attttttttgttttttaata

SEQ ID NO: 241143 - DNA, 20 bp, Artificial Sequence
  Description of Artificial Sequence: Synthetic oligonucleotide
  Target: LAMA2; (-) strand; PAM type: YTN; PAM sequence: CTT
gattttttttgttttttaat

SEQ ID NO: 241144 - DNA, 20 bp, Artificial Sequence
  Description of Artificial Sequence: Synthetic oligonucleotide
  Target: LAMA2; (-) strand; PAM type: YTN; PAM sequence: CTA
tgggaaataaatgagtcctt

SEQ ID NO: 241145 - DNA, 20 bp, Artificial Sequence
  Description of Artificial Sequence: Synthetic oligonucleotide
  Target: LAMA2; (-) strand; PAM type: YTN; PAM sequence: CTA
tcatagctatgggaaataaa

SEQ ID NO: 241146 - DNA, 20 bp, Artificial Sequence
  Description of Artificial Sequence: Synthetic oligonucleotide
  Target: LAMA2; (-) strand; PAM type: YTN; PAM sequence: TTC
tatcatagctatgggaaata

SEQ ID NO: 241147 - DNA, 20 bp, Artificial Sequence
  Description of Artificial Sequence: Synthetic oligonucleotide
  Target: LAMA2; (-) strand; PAM type: YTN; PAM sequence: TTA
cacagcagattctatcatag

SEQ ID NO: 241148 - DNA, 20 bp, Artificial Sequence
  Description of Artificial Sequence: Synthetic oligonucleotide
  Target: LAMA2; (-) strand; PAM type: YTN; PAM sequence: TTT
acacagcagattctatcata

SEQ ID NO: 241149 - DNA, 20 bp, Artificial Sequence
  Description of Artificial Sequence: Synthetic oligonucleotide
  Target: LAMA2; (-) strand; PAM type: YTN; PAM sequence: TTT
tacacagcagattctatcat

SEQ ID NO: 241150 - DNA, 20 bp, Artificial Sequence
  Description of Artificial Sequence: Synthetic oligonucleotide
  Target: LAMA2; (-) strand; PAM type: YTN; PAM sequence: CTT
ttacacagcagattctatca

SEQ ID NO: 241151 - DNA, 20 bp, Artificial Sequence
  Description of Artificial Sequence: Synthetic oligonucleotide
  Target: LAMA2; (-) strand; PAM type: YTN; PAM sequence: TTA
cttttacacagcagattcta

SEQ ID NO: 241152 - DNA, 20 bp, Artificial Sequence
  Description of Artificial Sequence: Synthetic oligonucleotide
  Target: LAMA2; (-) strand; PAM type: YTN; PAM sequence: TTG
tgttacttttacacagcaga

SEQ ID NO: 241153 - DNA, 20 bp, Artificial Sequence
  Description of Artificial Sequence: Synthetic oligonucleotide
  Target: LAMA2; (-) strand; PAM type: YTN; PAM sequence: TTT
gtgttacttttacacagcag

SEQ ID NO: 241154 - DNA, 20 bp, Artificial Sequence
  Description of Artificial Sequence: Synthetic oligonucleotide
  Target: LAMA2; (-) strand; PAM type: YTN; PAM sequence: CTG
catttgtgttacttttacac

SEQ ID NO: 241155 - DNA, 20 bp, Artificial Sequence
  Description of Artificial Sequence: Synthetic oligonucleotide
  Target: LAMA2; (-) strand; PAM type: YTN; PAM sequence: CTC
ctgcatttgtgttactttta

SEQ ID NO: 241156 - DNA, 20 bp, Artificial Sequence
  Description of Artificial Sequence: Synthetic oligonucleotide
  Target: LAMA2; (-) strand; PAM type: YTN; PAM sequence: TTG
agctcctgcatttgtgttac

SEQ ID NO: 241157 - DNA, 20 bp, Artificial Sequence
  Description of Artificial Sequence: Synthetic oligonucleotide
  Target: LAMA2; (-) strand; PAM type: YTN; PAM sequence: CTT
gagctcctgcatttgtgtta

SEQ ID NO: 241158 - DNA, 20 bp, Artificial Sequence
  Description of Artificial Sequence: Synthetic oligonucleotide
  Target: LAMA2; (-) strand; PAM type: YTN; PAM sequence: TTG
accttgagctcctgcatttg

SEQ ID NO: 241159 - DNA, 20 bp, Artificial Sequence
  Description of Artificial Sequence: Synthetic oligonucleotide
  Target: LAMA2; (-) strand; PAM type: YTN; PAM sequence: TTT
gaccttgagctcctgcattt

SEQ ID NO: 241160 - DNA, 20 bp, Artificial Sequence
  Description of Artificial Sequence: Synthetic oligonucleotide
  Target: LAMA2; (-) strand; PAM type: YTN; PAM sequence: CTA
tgtttgaccttgagctcctg

SEQ ID NO: 241161 - DNA, 20 bp, Artificial Sequence
  Description of Artificial Sequence: Synthetic oligonucleotide
  Target: LAMA2; (-) strand; PAM type: YTN; PAM sequence: TTC
tatgtttgaccttgagctcc

SEQ ID NO: 241162 - DNA, 20 bp, Artificial Sequence
  Description of Artificial Sequence: Synthetic oligonucleotide
  Target: LAMA2; (-) strand; PAM type: YTN; PAM sequence: TTT
ctatgtttgaccttgagctc

SEQ ID NO: 241163 - DNA, 20 bp, Artificial Sequence
  Description of Artificial Sequence: Synthetic oligonucleotide
  Target: LAMA2; (-) strand; PAM type: YTN; PAM sequence: TTA
tgacggatatgtaagacaga

SEQ ID NO: 241164 - DNA, 20 bp, Artificial Sequence
  Description of Artificial Sequence: Synthetic oligonucleotide
  Target: LAMA2; (-) strand; PAM type: YTN; PAM sequence: TTA
ggaaaaacgtcaagagaatg

SEQ ID NO: 241165 - DNA, 20 bp, Artificial Sequence
  Description of Artificial Sequence: Synthetic oligonucleotide
  Target: LAMA2; (-) strand; PAM type: YTN; PAM sequence: TTA
attaggaaaaacgtcaagag

SEQ ID NO: 241166 - DNA, 20 bp, Artificial Sequence
  Description of Artificial Sequence: Synthetic oligonucleotide
  Target: LAMA2; (-) strand; PAM type: YTN; PAM sequence: TTT
aattaggaaaaacgtcaaga

SEQ ID NO: 241167 - DNA, 20 bp, Artificial Sequence
  Description of Artificial Sequence: Synthetic oligonucleotide
  Target: LAMA2; (-) strand; PAM type: YTN; PAM sequence: TTA
taaatttaattaggaaaaac

SEQ ID NO: 241168 - DNA, 20 bp, Artificial Sequence
  Description of Artificial Sequence: Synthetic oligonucleotide
  Target: LAMA2; (-) strand; PAM type: YTN; PAM sequence: TTT
ataaatttaattaggaaaaa

SEQ ID NO: 241169 - DNA, 20 bp, Artificial Sequence
  Description of Artificial Sequence: Synthetic oligonucleotide
  Target: LAMA2; (-) strand; PAM type: YTN; PAM sequence: CTT
tataaatttaattaggaaaa

SEQ ID NO: 241170 - DNA, 20 bp, Artificial Sequence
  Description of Artificial Sequence: Synthetic oligonucleotide
  Target: LAMA2; (-) strand; PAM type: YTN; PAM sequence: CTA
atgctttataaatttaatta

SEQ ID NO: 241171 - DNA, 20 bp, Artificial Sequence
  Description of Artificial Sequence: Synthetic oligonucleotide
  Target: LAMA2; (-) strand; PAM type: YTN; PAM sequence: TTA
gaactaatgctttataaatt

SEQ ID NO: 241172 - DNA, 20 bp, Artificial Sequence
  Description of Artificial Sequence: Synthetic oligonucleotide
  Target: LAMA2; (-) strand; PAM type: YTN; PAM sequence: TTA
acattagaactaatgcttta

SEQ ID NO: 241173 - DNA, 20 bp, Artificial Sequence
  Description of Artificial Sequence: Synthetic oligonucleotide
  Target: LAMA2; (-) strand; PAM type: YTN; PAM sequence: TTT
aacattagaactaatgcttt

SEQ ID NO: 241174 - DNA, 20 bp, Artificial Sequence
  Description of Artificial Sequence: Synthetic oligonucleotide
  Target: LAMA2; (-) strand; PAM type: YTN; PAM sequence: TTT
taacattagaactaatgctt

SEQ ID NO: 241175 - DNA, 20 bp, Artificial Sequence
  Description of Artificial Sequence: Synthetic oligonucleotide
  Target: LAMA2; (-) strand; PAM type: YTN; PAM sequence: TTT
ttaacattagaactaatgct

SEQ ID NO: 241176 - DNA, 20 bp, Artificial Sequence
  Description of Artificial Sequence: Synthetic oligonucleotide
  Target: LAMA2; (-) strand; PAM type: YTN; PAM sequence: TTA
tataacaatttttaacatta

SEQ ID NO: 241177 - DNA, 20 bp, Artificial Sequence
  Description of Artificial Sequence: Synthetic oligonucleotide
  Target: LAMA2; (-) strand; PAM type: YTN; PAM sequence: TTT
atataacaatttttaacatt

SEQ ID NO: 241178 - DNA, 20 bp, Artificial Sequence
  Description of Artificial Sequence: Synthetic oligonucleotide
  Target: LAMA2; (-) strand; PAM type: YTN; PAM sequence: TTT
tatataacaatttttaacat

SEQ ID NO: 241179 - DNA, 20 bp, Artificial Sequence
  Description of Artificial Sequence: Synthetic oligonucleotide
  Target: LAMA2; (-) strand; PAM type: YTN; PAM sequence: TTT
ttatataacaatttttaaca

SEQ ID NO: 241180 - DNA, 20 bp, Artificial Sequence
  Description of Artificial Sequence: Synthetic oligonucleotide
  Target: LAMA2; (-) strand; PAM type: YTN; PAM sequence: CTT
tttatataacaatttttaac

SEQ ID NO: 241181 - DNA, 20 bp, Artificial Sequence
  Description of Artificial Sequence: Synthetic oligonucleotide
  Target: LAMA2; (-) strand; PAM type: YTN; PAM sequence: TTA
aaatgctttttatataacaa

SEQ ID NO: 241182 - DNA, 20 bp, Artificial Sequence
  Description of Artificial Sequence: Synthetic oligonucleotide
  Target: LAMA2; (-) strand; PAM type: YTN; PAM sequence: CTG
tagacagatgcatgtgaata

SEQ ID NO: 241183 - DNA, 20 bp, Artificial Sequence
  Description of Artificial Sequence: Synthetic oligonucleotide
  Target: LAMA2; (-) strand; PAM type: YTN; PAM sequence: TTA
taaacaaaatgtaaaacact

SEQ ID NO: 241184 - DNA, 20 bp, Artificial Sequence
  Description of Artificial Sequence: Synthetic oligonucleotide
  Target: LAMA2; (-) strand; PAM type: YTN; PAM sequence: TTG
acgaattataaacaaaatgt

SEQ ID NO: 241185 - DNA, 20 bp, Artificial Sequence
  Description of Artificial Sequence: Synthetic oligonucleotide
  Target: LAMA2; (-) strand; PAM type: YTN; PAM sequence: TTC
agttgacgaattataaacaa

SEQ ID NO: 241186 - DNA, 20 bp, Artificial Sequence
  Description of Artificial Sequence: Synthetic oligonucleotide
  Target: LAMA2; (-) strand; PAM type: YTN; PAM sequence: TTC
attcagttgacgaattataa

SEQ ID NO: 241187 - DNA, 20 bp, Artificial Sequence
  Description of Artificial Sequence: Synthetic oligonucleotide
  Target: LAMA2; (-) strand; PAM type: YTN; PAM sequence: CTA
gtattcattcagttgacgaa

SEQ ID NO: 241188 - DNA, 20 bp, Artificial Sequence
  Description of Artificial Sequence: Synthetic oligonucleotide
  Target: LAMA2; (-) strand; PAM type: YTN; PAM sequence: CTA
tctagtattcattcagttga

SEQ ID NO: 241189 - DNA, 20 bp, Artificial Sequence
  Description of Artificial Sequence: Synthetic oligonucleotide
  Target: LAMA2; (-) strand; PAM type: YTN; PAM sequence: CTC
ctatctagtattcattcagt

SEQ ID NO: 241190 - DNA, 20 bp, Artificial Sequence
  Description of Artificial Sequence: Synthetic oligonucleotide
  Target: LAMA2; (-) strand; PAM type: YTN; PAM sequence: TTC
tcctatctagtattcattca

SEQ ID NO: 241191 - DNA, 20 bp, Artificial Sequence
  Description of Artificial Sequence: Synthetic oligonucleotide
  Target: LAMA2; (-) strand; PAM type: YTN; PAM sequence: TTA
aatggaacattctcctatct

SEQ ID NO: 241192 - DNA, 20 bp, Artificial Sequence
  Description of Artificial Sequence: Synthetic oligonucleotide
  Target: LAMA2; (-) strand; PAM type: YTN; PAM sequence: TTA
ttaaatggaacattctccta

SEQ ID NO: 241193 - DNA, 20 bp, Artificial Sequence
  Description of Artificial Sequence: Synthetic oligonucleotide
  Target: LAMA2; (-) strand; PAM type: YTN; PAM sequence: TTT
attaaatggaacattctcct

SEQ ID NO: 241194 - DNA, 20 bp, Artificial Sequence
  Description of Artificial Sequence: Synthetic oligonucleotide
  Target: LAMA2; (-) strand; PAM type: YTN; PAM sequence: TTT
tattaaatggaacattctcc

SEQ ID NO: 241195 - DNA, 20 bp, Artificial Sequence
  Description of Artificial Sequence: Synthetic oligonucleotide
  Target: LAMA2; (-) strand; PAM type: YTN; PAM sequence: TTT
ttattaaatggaacattctc

SEQ ID NO: 241196 - DNA, 20 bp, Artificial Sequence
  Description of Artificial Sequence: Synthetic oligonucleotide
  Target: LAMA2; (-) strand; PAM type: YTN; PAM sequence: CTC
aagagtttttattaaatgga

SEQ ID NO: 241197 - DNA, 20 bp, Artificial Sequence
  Description of Artificial Sequence: Synthetic oligonucleotide
  Target: LAMA2; (-) strand; PAM type: YTN; PAM sequence: TTC
tcaagagtttttattaaatg

SEQ ID NO: 241198 - DNA, 20 bp, Artificial Sequence
  Description of Artificial Sequence: Synthetic oligonucleotide
  Target: LAMA2; (-) strand; PAM type: YTN; PAM sequence: TTT
ctcaagagtttttattaaat

SEQ ID NO: 241199 - DNA, 20 bp, Artificial Sequence
  Description of Artificial Sequence: Synthetic oligonucleotide
  Target: LAMA2; (-) strand; PAM type: YTN; PAM sequence: TTT
tctcaagagtttttattaaa

SEQ ID NO: 241200 - DNA, 20 bp, Artificial Sequence
  Description of Artificial Sequence: Synthetic oligonucleotide
  Target: LAMA2; (-) strand; PAM type: YTN; PAM sequence: TTT
ttctcaagagtttttattaa

SEQ ID NO: 241201 - DNA, 20 bp, Artificial Sequence
  Description of Artificial Sequence: Synthetic oligonucleotide
  Target: LAMA2; (-) strand; PAM type: YTN; PAM sequence: TTA
tttttctcaagagtttttat

SEQ ID NO: 241202 - DNA, 20 bp, Artificial Sequence
  Description of Artificial Sequence: Synthetic oligonucleotide
  Target: LAMA2; (-) strand; PAM type: YTN; PAM sequence: TTT
atttttctcaagagttttta

SEQ ID NO: 241203 - DNA, 20 bp, Artificial Sequence
  Description of Artificial Sequence: Synthetic oligonucleotide
  Target: LAMA2; (-) strand; PAM type: YTN; PAM sequence: TTT
tatttttctcaagagttttt

SEQ ID NO: 241204 - DNA, 20 bp, Artificial Sequence
  Description of Artificial Sequence: Synthetic oligonucleotide
  Target: LAMA2; (-) strand; PAM type: YTN; PAM sequence: CTA
ttttatttttctcaagagtt

SEQ ID NO: 241205 - DNA, 20 bp, Artificial Sequence
  Description of Artificial Sequence: Synthetic oligonucleotide
  Target: LAMA2; (-) strand; PAM type: YTN; PAM sequence: TTA
agtaagctattttatttttc

SEQ ID NO: 241206 - DNA, 20 bp, Artificial Sequence
  Description of Artificial Sequence: Synthetic oligonucleotide
  Target: LAMA2; (-) strand; PAM type: YTN; PAM sequence: CTG
ttaagtaagctattttattt

SEQ ID NO: 241207 - DNA, 20 bp, Artificial Sequence
  Description of Artificial Sequence: Synthetic oligonucleotide
  Target: LAMA2; (-) strand; PAM type: YTN; PAM sequence: TTA
ctgttaagtaagctatttta

SEQ ID NO: 241208 - DNA, 20 bp, Artificial Sequence
  Description of Artificial Sequence: Synthetic oligonucleotide
  Target: LAMA2; (-) strand; PAM type: YTN; PAM sequence: TTG
aaattactgttaagtaagct

SEQ ID NO: 241209 - DNA, 20 bp, Artificial Sequence
  Description of Artificial Sequence: Synthetic oligonucleotide
  Target: LAMA2; (-) strand; PAM type: YTN; PAM sequence: CTC
acattgaaattactgttaag

SEQ ID NO: 241210 - DNA, 20 bp, Artificial Sequence
  Description of Artificial Sequence: Synthetic oligonucleotide
  Target: LAMA2; (-) strand; PAM type: YTN; PAM sequence: TTG
ccaaccacatcacaaaccaa

SEQ ID NO: 241211 - DNA, 20 bp, Artificial Sequence
  Description of Artificial Sequence: Synthetic oligonucleotide
  Target: LAMA2; (-) strand; PAM type: YTN; PAM sequence: TTG
ttgccaaccacatcacaaac

SEQ ID NO: 241212 - DNA, 20 bp, Artificial Sequence
  Description of Artificial Sequence: Synthetic oligonucleotide
  Target: LAMA2; (-) strand; PAM type: YTN; PAM sequence: TTT
gttgccaaccacatcacaaa

SEQ ID NO: 241213 - DNA, 20 bp, Artificial Sequence
  Description of Artificial Sequence: Synthetic oligonucleotide
  Target: LAMA2; (-) strand; PAM type: YTN; PAM sequence: TTT
tgttgccaaccacatcacaa

SEQ ID NO: 241214 - DNA, 20 bp, Artificial Sequence
  Description of Artificial Sequence: Synthetic oligonucleotide
  Target: LAMA2; (-) strand; PAM type: YTN; PAM sequence: TTA
cgtaagttttgttgccaacc

SEQ ID NO: 241215 - DNA, 20 bp, Artificial Sequence
  Description of Artificial Sequence: Synthetic oligonucleotide
  Target: LAMA2; (-) strand; PAM type: YTN; PAM sequence: CTA
gattacgtaagttttgttgc

SEQ ID NO: 241216 - DNA, 20 bp, Artificial Sequence
  Description of Artificial Sequence: Synthetic oligonucleotide
  Target: LAMA2; (-) strand; PAM type: YTN; PAM sequence: CTG
ccaatgtagccctagattac

SEQ ID NO: 241217 - DNA, 20 bp, Artificial Sequence
  Description of Artificial Sequence: Synthetic oligonucleotide
  Target: LAMA2; (-) strand; PAM type: YTN; PAM sequence: TTC
ctgccaatgtagccctagat

SEQ ID NO: 241218 - DNA, 20 bp, Artificial Sequence
  Description of Artificial Sequence: Synthetic oligonucleotide
  Target: LAMA2; (-) strand; PAM type: YTN; PAM sequence: CTG
accagtaaattcctgccaat

SEQ ID NO: 241219 - DNA, 20 bp, Artificial Sequence
  Description of Artificial Sequence: Synthetic oligonucleotide
  Target: LAMA2; (-) strand; PAM type: YTN; PAM sequence: TTG
tcctgaccagtaaattcctg

SEQ ID NO: 241220 - DNA, 20 bp, Artificial Sequence
  Description of Artificial Sequence: Synthetic oligonucleotide
  Target: LAMA2; (-) strand; PAM type: YTN; PAM sequence: TTT
gtcctgaccagtaaattcct

SEQ ID NO: 241221 - DNA, 20 bp, Artificial Sequence
  Description of Artificial Sequence: Synthetic oligonucleotide
  Target: LAMA2; (-) strand; PAM type: YTN; PAM sequence: CTT
tgtcctgaccagtaaattcc

SEQ ID NO: 241222 - DNA, 20 bp, Artificial Sequence
  Description of Artificial Sequence: Synthetic oligonucleotide
  Target: LAMA2; (-) strand; PAM type: YTN; PAM sequence: CTC
ctttgtcctgaccagtaaat

SEQ ID NO: 241223 - DNA, 20 bp, Artificial Sequence
  Description of Artificial Sequence: Synthetic oligonucleotide
  Target: LAMA2; (-) strand; PAM type: YTN; PAM sequence: CTA
cctcctttgtcctgaccagt

SEQ ID NO: 241224 - DNA, 20 bp, Artificial Sequence
  Description of Artificial Sequence: Synthetic oligonucleotide
  Target: LAMA2; (-) strand; PAM type: YTN; PAM sequence: CTG
tataaacactacctcctttg

SEQ ID NO: 241225 - DNA, 20 bp, Artificial Sequence
  Description of Artificial Sequence: Synthetic oligonucleotide
  Target: LAMA2; (-) strand; PAM type: YTN; PAM sequence: TTG
tgcagaatctgtataaacac

SEQ ID NO: 241226 - DNA, 20 bp, Artificial Sequence
  Description of Artificial Sequence: Synthetic oligonucleotide
  Target: LAMA2; (-) strand; PAM type: YTN; PAM sequence: TTT
gtgcagaatctgtataaaca

SEQ ID NO: 241227 - DNA, 20 bp, Artificial Sequence
  Description of Artificial Sequence: Synthetic oligonucleotide
  Target: LAMA2; (-) strand; PAM type: YTN; PAM sequence: TTT
tgtgcagaatctgtataaac

SEQ ID NO: 241228 - DNA, 20 bp, Artificial Sequence
  Description of Artificial Sequence: Synthetic oligonucleotide
  Target: LAMA2; (-) strand; PAM type: YTN; PAM sequence: TTA
ggtgacatgcgttttgtgca

SEQ ID NO: 241229 - DNA, 20 bp, Artificial Sequence
  Description of Artificial Sequence: Synthetic oligonucleotide
  Target: LAMA2; (-) strand; PAM type: YTN; PAM sequence: TTA
ataataatattaggtgacat

SEQ ID NO: 241230 - DNA, 20 bp, Artificial Sequence
  Description of Artificial Sequence: Synthetic oligonucleotide
  Target: LAMA2; (-) strand; PAM type: YTN; PAM sequence: TTT
aataataatattaggtgaca

SEQ ID NO: 241231 - DNA, 20 bp, Artificial Sequence
  Description of Artificial Sequence: Synthetic oligonucleotide
  Target: LAMA2; (-) strand; PAM type: YTN; PAM sequence: TTA
ataatatttaataataatat

SEQ ID NO: 241232 - DNA, 20 bp, Artificial Sequence
  Description of Artificial Sequence: Synthetic oligonucleotide
  Target: LAMA2; (-) strand; PAM type: YTN; PAM sequence: TTT
aataatatttaataataata

SEQ ID NO: 241233 - DNA, 20 bp, Artificial Sequence
  Description of Artificial Sequence: Synthetic oligonucleotide
  Target: LAMA2; (-) strand; PAM type: YTN; PAM sequence: TTA
ataatatttaataatattta

SEQ ID NO: 241234 - DNA, 20 bp, Artificial Sequence
  Description of Artificial Sequence: Synthetic oligonucleotide
  Target: LAMA2; (-) strand; PAM type: YTN; PAM sequence: CTA
aatattaataatatttaata

SEQ ID NO: 241235 - DNA, 20 bp, Artificial Sequence
  Description of Artificial Sequence: Synthetic oligonucleotide
  Target: LAMA2; (-) strand; PAM type: YTN; PAM sequence: TTC
acaagtaagctaaatattaa

SEQ ID NO: 241236 - DNA, 20 bp, Artificial Sequence
  Description of Artificial Sequence: Synthetic oligonucleotide
  Target: LAMA2; (-) strand; PAM type: YTN; PAM sequence: TTA
acaaagataaaaagagaaat

SEQ ID NO: 241237 - DNA, 20 bp, Artificial Sequence
  Description of Artificial Sequence: Synthetic oligonucleotide
  Target: LAMA2; (-) strand; PAM type: YTN; PAM sequence: TTG
ggtcatgtatattaacaaag

SEQ ID NO: 241238 - DNA, 20 bp, Artificial Sequence
  Description of Artificial Sequence: Synthetic oligonucleotide
  Target: LAMA2; (-) strand; PAM type: YTN; PAM sequence: CTT
gggtcatgtatattaacaaa

SEQ ID NO: 241239 - DNA, 20 bp, Artificial Sequence
  Description of Artificial Sequence: Synthetic oligonucleotide
  Target: LAMA2; (-) strand; PAM type: YTN; PAM sequence: CTG
atgacttgggtcatgtatat

SEQ ID NO: 241240 - DNA, 20 bp, Artificial Sequence
  Description of Artificial Sequence: Synthetic oligonucleotide
  Target: LAMA2; (-) strand; PAM type: YTN; PAM sequence: TTA
gctgatgacttgggtcatgt

SEQ ID NO: 241241 - DNA, 20 bp, Artificial Sequence
  Description of Artificial Sequence: Synthetic oligonucleotide
  Target: LAMA2; (-) strand; PAM type: YTN; PAM sequence: TTA
ttagctgatgacttgggtca

SEQ ID NO: 241242 - DNA, 20 bp, Artificial Sequence
  Description of Artificial Sequence: Synthetic oligonucleotide
  Target: LAMA2; (-) strand; PAM type: YTN; PAM sequence: TTT
attagctgatgacttgggtc

SEQ ID NO: 241243 - DNA, 20 bp, Artificial Sequence
  Description of Artificial Sequence: Synthetic oligonucleotide
  Target: LAMA2; (-) strand; PAM type: YTN; PAM sequence: TTG
gtttattagctgatgacttg

SEQ ID NO: 241244 - DNA, 20 bp, Artificial Sequence
  Description of Artificial Sequence: Synthetic oligonucleotide
  Target: LAMA2; (-) strand; PAM type: YTN; PAM sequence: CTT
ggtttattagctgatgactt

SEQ ID NO: 241245 - DNA, 20 bp, Artificial Sequence
  Description of Artificial Sequence: Synthetic oligonucleotide
  Target: LAMA2; (-) strand; PAM type: YTN; PAM sequence: TTC
ttggtttattagctgatgac

SEQ ID NO: 241246 - DNA, 20 bp, Artificial Sequence
  Description of Artificial Sequence: Synthetic oligonucleotide
  Target: LAMA2; (-) strand; PAM type: YTN; PAM sequence: TTT
cttggtttattagctgatga

SEQ ID NO: 241247 - DNA, 20 bp, Artificial Sequence
  Description of Artificial Sequence: Synthetic oligonucleotide
  Target: LAMA2; (-) strand; PAM type: YTN; PAM sequence: TTG
gatttcttggtttattagct

SEQ ID NO: 241248 - DNA, 20 bp, Artificial Sequence
  Description of Artificial Sequence: Synthetic oligonucleotide
  Target: LAMA2; (-) strand; PAM type: YTN; PAM sequence: TTT
ggatttcttggtttattagc

SEQ ID NO: 241249 - DNA, 20 bp, Artificial Sequence
  Description of Artificial Sequence: Synthetic oligonucleotide
  Target: LAMA2; (-) strand; PAM type: YTN; PAM sequence: CTA
atttggatttcttggtttat

SEQ ID NO: 241250 - DNA, 20 bp, Artificial Sequence
  Description of Artificial Sequence: Synthetic oligonucleotide
  Target: LAMA2; (-) strand; PAM type: YTN; PAM sequence: TTC
ctaatttggatttcttggtt

SEQ ID NO: 241251 - DNA, 20 bp, Artificial Sequence
  Description of Artificial Sequence: Synthetic oligonucleotide
  Target: LAMA2; (-) strand; PAM type: YTN; PAM sequence: CTT
cctaatttggatttcttggt

SEQ ID NO: 241252 - DNA, 20 bp, Artificial Sequence
  Description of Artificial Sequence: Synthetic oligonucleotide
  Target: LAMA2; (-) strand; PAM type: YTN; PAM sequence: TTC
ttcctaatttggatttcttg

SEQ ID NO: 241253 - DNA, 20 bp, Artificial Sequence
  Description of Artificial Sequence: Synthetic oligonucleotide
  Target: LAMA2; (-) strand; PAM type: YTN; PAM sequence: TTT
cttcctaatttggatttctt

SEQ ID NO: 241254 - DNA, 20 bp, Artificial Sequence
  Description of Artificial Sequence: Synthetic oligonucleotide
  Target: LAMA2; (-) strand; PAM type: YTN; PAM sequence: CTA
tttcttcctaatttggattt

SEQ ID NO: 241255 - DNA, 20 bp, Artificial Sequence
  Description of Artificial Sequence: Synthetic oligonucleotide
  Target: LAMA2; (-) strand; PAM type: YTN; PAM sequence: CTC
tatttcttcctaatttggat

SEQ ID NO: 241256 - DNA, 20 bp, Artificial Sequence
  Description of Artificial Sequence: Synthetic oligonucleotide
  Target: LAMA2; (-) strand; PAM type: YTN; PAM sequence: CTG
gctctatttcttcctaattt

SEQ ID NO: 241257 - DNA, 20 bp, Artificial Sequence
  Description of Artificial Sequence: Synthetic oligonucleotide
  Target: LAMA2; (-) strand; PAM type: YTN; PAM sequence: TTG
taatcctggctctatttctt

SEQ ID NO: 241258 - DNA, 20 bp, Artificial Sequence
  Description of Artificial Sequence: Synthetic oligonucleotide
  Target: LAMA2; (-) strand; PAM type: YTN; PAM sequence: CTG
gattgtaatcctggctctat

SEQ ID NO: 241259 - DNA, 20 bp, Artificial Sequence
  Description of Artificial Sequence: Synthetic oligonucleotide
  Target: LAMA2; (-) strand; PAM type: YTN; PAM sequence: CTA
tagacacatctggattgtaa

SEQ ID NO: 241260 - DNA, 20 bp, Artificial Sequence
  Description of Artificial Sequence: Synthetic oligonucleotide
  Target: LAMA2; (-) strand; PAM type: YTN; PAM sequence: CTG
gaatgggctatagacacatc

SEQ ID NO: 241261 - DNA, 20 bp, Artificial Sequence
  Description of Artificial Sequence: Synthetic oligonucleotide
  Target: LAMA2; (-) strand; PAM type: YTN; PAM sequence: TTA
actggaatgggctatagaca

SEQ ID NO: 241262 - DNA, 20 bp, Artificial Sequence
  Description of Artificial Sequence: Synthetic oligonucleotide
  Target: LAMA2; (-) strand; PAM type: YTN; PAM sequence: CTT
aactggaatgggctatagac

SEQ ID NO: 241263 - DNA, 20 bp, Artificial Sequence
  Description of Artificial Sequence: Synthetic oligonucleotide
  Target: LAMA2; (-) strand; PAM type: YTN; PAM sequence: TTG
aaaaaatgcttaactggaat

SEQ ID NO: 241264 - DNA, 20 bp, Artificial Sequence
  Description of Artificial Sequence: Synthetic oligonucleotide
  Target: LAMA2; (-) strand; PAM type: YTN; PAM sequence: CTG
attgaaaaaatgcttaactg

SEQ ID NO: 241265 - DNA, 20 bp, Artificial Sequence
  Description of Artificial Sequence: Synthetic oligonucleotide
  Target: LAMA2; (-) strand; PAM type: YTN; PAM sequence: TTA
actgattgaaaaaatgctta

SEQ ID NO: 241266 - DNA, 20 bp, Artificial Sequence
  Description of Artificial Sequence: Synthetic oligonucleotide
  Target: LAMA2; (-) strand; PAM type: YTN; PAM sequence: CTT
aactgattgaaaaaatgctt

SEQ ID NO: 241267 - DNA, 20 bp, Artificial Sequence
  Description of Artificial Sequence: Synthetic oligonucleotide
  Target: LAMA2; (-) strand; PAM type: YTN; PAM sequence: CTA
ataaacttaactgattgaaa

SEQ ID NO: 241268 - DNA, 20 bp, Artificial Sequence
  Description of Artificial Sequence: Synthetic oligonucleotide
  Target: LAMA2; (-) strand; PAM type: YTN; PAM sequence: TTG
caagaactaataaacttaac

SEQ ID NO: 241269 - DNA, 20 bp, Artificial Sequence
  Description of Artificial Sequence: Synthetic oligonucleotide
  Target: LAMA2; (-) strand; PAM type: YTN; PAM sequence: CTT
gcaagaactaataaacttaa

SEQ ID NO: 241270 - DNA, 20 bp, Artificial Sequence
  Description of Artificial Sequence: Synthetic oligonucleotide
  Target: LAMA2; (-) strand; PAM type: YTN; PAM sequence: TTC
caaagatcaatgccttgcaa

SEQ ID NO: 241271 - DNA, 20 bp, Artificial Sequence
  Description of Artificial Sequence: Synthetic oligonucleotide
  Target: LAMA2; (-) strand; PAM type: YTN; PAM sequence: CTA
ttccaaagatcaatgccttg

SEQ ID NO: 241272 - DNA, 20 bp, Artificial Sequence
  Description of Artificial Sequence: Synthetic oligonucleotide
  Target: LAMA2; (-) strand; PAM type: YTN; PAM sequence: CTC
tattccaaagatcaatgcct

SEQ ID NO: 241273 - DNA, 20 bp, Artificial Sequence
  Description of Artificial Sequence: Synthetic oligonucleotide
  Target: LAMA2; (-) strand; PAM type: YTN; PAM sequence: TTC
agcatctctattccaaagat

SEQ ID NO: 241274 - DNA, 20 bp, Artificial Sequence
  Description of Artificial Sequence: Synthetic oligonucleotide
  Target: LAMA2; (-) strand; PAM type: YTN; PAM sequence: CTT
cagcatctctattccaaaga

SEQ ID NO: 241275 - DNA, 20 bp, Artificial Sequence
  Description of Artificial Sequence: Synthetic oligonucleotide
  Target: LAMA2; (-) strand; PAM type: YTN; PAM sequence: CTG
cttcagcatctctattccaa

SEQ ID NO: 241276 - DNA, 20 bp, Artificial Sequence
  Description of Artificial Sequence: Synthetic oligonucleotide
  Target: LAMA2; (-) strand; PAM type: YTN; PAM sequence: TTG
aataagctgcttcagcatct

SEQ ID NO: 241277 - DNA, 20 bp, Artificial Sequence
  Description of Artificial Sequence: Synthetic oligonucleotide
  Target: LAMA2; (-) strand; PAM type: YTN; PAM sequence: TTT
gaataagctgcttcagcatc

SEQ ID NO: 241278 - DNA, 20 bp, Artificial Sequence
  Description of Artificial Sequence: Synthetic oligonucleotide
  Target: LAMA2; (-) strand; PAM type: YTN; PAM sequence: TTT
tgaataagctgcttcagcat

SEQ ID NO: 241279 - DNA, 20 bp, Artificial Sequence
  Description of Artificial Sequence: Synthetic oligonucleotide
  Target: LAMA2; (-) strand; PAM type: YTN; PAM sequence: CTT
ttgaataagctgcttcagca

SEQ ID NO: 241280 - DNA, 20 bp, Artificial Sequence
  Description of Artificial Sequence: Synthetic oligonucleotide
  Target: LAMA2; (-) strand; PAM type: YTN; PAM sequence: TTC
ttttgaataagctgcttcag

SEQ ID NO: 241281 - DNA, 20 bp, Artificial Sequence
  Description of Artificial Sequence: Synthetic oligonucleotide
  Target: LAMA2; (-) strand; PAM type: YTN; PAM sequence: TTT
cttttgaataagctgcttca

SEQ ID NO: 241282 - DNA, 20 bp, Artificial Sequence
  Description of Artificial Sequence: Synthetic oligonucleotide
  Target: LAMA2; (-) strand; PAM type: YTN; PAM sequence: CTT
tcttttgaataagctgcttc

SEQ ID NO: 241283 - DNA, 20 bp, Artificial Sequence
  Description of Artificial Sequence: Synthetic oligonucleotide
  Target: LAMA2; (-) strand; PAM type: YTN; PAM sequence: TTC
cctttcttttgaataagctg

SEQ ID NO: 241284 - DNA, 20 bp, Artificial Sequence
  Description of Artificial Sequence: Synthetic oligonucleotide
  Target: LAMA2; (-) strand; PAM type: YTN; PAM sequence: TTG
tcgttccctttcttttgaat

SEQ ID NO: 241285 - DNA, 20 bp, Artificial Sequence
  Description of Artificial Sequence: Synthetic oligonucleotide
  Target: LAMA2; (-) strand; PAM type: YTN; PAM sequence: TTT
gtcgttccctttcttttgaa

SEQ ID NO: 241286 - DNA, 20 bp, Artificial Sequence
  Description of Artificial Sequence: Synthetic oligonucleotide
  Target: LAMA2; (-) strand; PAM type: YTN; PAM sequence: CTT
tgtcgttccctttcttttga

SEQ ID NO: 241287 - DNA, 20 bp, Artificial Sequence
  Description of Artificial Sequence: Synthetic oligonucleotide
  Target: LAMA2; (-) strand; PAM type: YTN; PAM sequence: TTC
atatctttgtcgttcccttt

SEQ ID NO: 241288 - DNA, 20 bp, Artificial Sequence
  Description of Artificial Sequence: Synthetic oligonucleotide
  Target: LAMA2; (-) strand; PAM type: YTN; PAM sequence: TTA
taaattcatatctttgtcgt

SEQ ID NO: 241289 - DNA, 20 bp, Artificial Sequence
  Description of Artificial Sequence: Synthetic oligonucleotide
  Target: LAMA2; (-) strand; PAM type: YTN; PAM sequence: TTT
ataaattcatatctttgtcg

SEQ ID NO: 241290 - DNA, 20 bp, Artificial Sequence
  Description of Artificial Sequence: Synthetic oligonucleotide
  Target: LAMA2; (-) strand; PAM type: YTN; PAM sequence: TTT
tataaattcatatctttgtc

SEQ ID NO: 241291 - DNA, 20 bp, Artificial Sequence
  Description of Artificial Sequence: Synthetic oligonucleotide
  Target: LAMA2; (-) strand; PAM type: YTN; PAM sequence: TTT
ttataaattcatatctttgt

SEQ ID NO: 241292 - DNA, 20 bp, Artificial Sequence
  Description of Artificial Sequence: Synthetic oligonucleotide
  Target: LAMA2; (-) strand; PAM type: YTN; PAM sequence: TTG
tatttttataaattcatatc

SEQ ID NO: 241293 - DNA, 20 bp, Artificial Sequence
  Description of Artificial Sequence: Synthetic oligonucleotide
  Target: LAMA2; (-) strand; PAM type: YTN; PAM sequence: TTT
gtatttttataaattcatat

SEQ ID NO: 241294 - DNA, 20 bp, Artificial Sequence
  Description of Artificial Sequence: Synthetic oligonucleotide
  Target: LAMA2; (-) strand; PAM type: YTN; PAM sequence: TTC
atttgtatttttataaattc

SEQ ID NO: 241295 - DNA, 20 bp, Artificial Sequence
  Description of Artificial Sequence: Synthetic oligonucleotide
  Target: LAMA2; (-) strand; PAM type: YTN; PAM sequence: CTC
attcatttgtatttttataa

SEQ ID NO: 241296 - DNA, 20 bp, Artificial Sequence
  Description of Artificial Sequence: Synthetic oligonucleotide
  Target: LAMA2; (-) strand; PAM type: YTN; PAM sequence: TTC
atctcattcatttgtatttt

SEQ ID NO: 241297 - DNA, 20 bp, Artificial Sequence
  Description of Artificial Sequence: Synthetic oligonucleotide
  Target: LAMA2; (-) strand; PAM type: YTN; PAM sequence: TTA
ttcatctcattcatttgtat

SEQ ID NO: 241298 - DNA, 20 bp, Artificial Sequence
  Description of Artificial Sequence: Synthetic oligonucleotide
  Target: LAMA2; (-) strand; PAM type: YTN; PAM sequence: TTG
ttattcatctcattcatttg

SEQ ID NO: 241299 - DNA, 20 bp, Artificial Sequence
  Description of Artificial Sequence: Synthetic oligonucleotide
  Target: LAMA2; (-) strand; PAM type: YTN; PAM sequence: TTT
gttattcatctcattcattt

SEQ ID NO: 241300 - DNA, 20 bp, Artificial Sequence
  Description of Artificial Sequence: Synthetic oligonucleotide
  Target: LAMA2; (-) strand; PAM type: YTN; PAM sequence: TTG
acatttgttattcatctcat

SEQ ID NO: 241301 - DNA, 20 bp, Artificial Sequence
  Description of Artificial Sequence: Synthetic oligonucleotide
  Target: LAMA2; (-) strand; PAM type: YTN; PAM sequence: CTA
ttgacatttgttattcatct

SEQ ID NO: 241302 - DNA, 20 bp, Artificial Sequence
  Description of Artificial Sequence: Synthetic oligonucleotide
  Target: LAMA2; (-) strand; PAM type: YTN; PAM sequence: CTC
tattgacatttgttattcat

SEQ ID NO: 241303 - DNA, 20 bp, Artificial Sequence
  Description of Artificial Sequence: Synthetic oligonucleotide
  Target: LAMA2; (-) strand; PAM type: YTN; PAM sequence: TTG
tgtcccctctattgacattt

SEQ ID NO: 241304 - DNA, 20 bp, Artificial Sequence
  Description of Artificial Sequence: Synthetic oligonucleotide
  Target: LAMA2; (-) strand; PAM type: YTN; PAM sequence: TTT
gtgtcccctctattgacatt

SEQ ID NO: 241305 - DNA, 20 bp, Artificial Sequence
  Description of Artificial Sequence: Synthetic oligonucleotide
  Target: LAMA2; (-) strand; PAM type: YTN; PAM sequence: TTG
gatttgtgtcccctctattg

SEQ ID NO: 241306 - DNA, 20 bp, Artificial Sequence
  Description of Artificial Sequence: Synthetic oligonucleotide
  Target: LAMA2; (-) strand; PAM type: YTN; PAM sequence: TTG
ttggatttgtgtcccctcta

SEQ ID NO: 241307 - DNA, 20 bp, Artificial Sequence
  Description of Artificial Sequence: Synthetic oligonucleotide
  Target: LAMA2; (-) strand; PAM type: YTN; PAM sequence: CTT
gttggatttgtgtcccctct

SEQ ID NO: 241308 - DNA, 20 bp, Artificial Sequence
  Description of Artificial Sequence: Synthetic oligonucleotide
  Target: LAMA2; (-) strand; PAM type: YTN; PAM sequence: TTA
aaaaacttgttggatttgtg

SEQ ID NO: 241309 - DNA, 20 bp, Artificial Sequence
  Description of Artificial Sequence: Synthetic oligonucleotide
  Target: LAMA2; (-) strand; PAM type: YTN; PAM sequence: TTT
aaaaaacttgttggatttgt

SEQ ID NO: 241310 - DNA, 20 bp, Artificial Sequence
  Description of Artificial Sequence: Synthetic oligonucleotide
  Target: LAMA2; (-) strand; PAM type: YTN; PAM sequence: TTG
aaaccatttaaaaaacttgt

SEQ ID NO: 241311 - DNA, 20 bp, Artificial Sequence
  Description of Artificial Sequence: Synthetic oligonucleotide
  Target: LAMA2; (-) strand; PAM type: YTN; PAM sequence: TTT
gaaaccatttaaaaaacttg

SEQ ID NO: 241312 - DNA, 20 bp, Artificial Sequence
  Description of Artificial Sequence: Synthetic oligonucleotide
  Target: LAMA2; (-) strand; PAM type: YTN; PAM sequence: CTT
tgaaaccatttaaaaaactt

SEQ ID NO: 241313 - DNA, 20 bp, Artificial Sequence
  Description of Artificial Sequence: Synthetic oligonucleotide
  Target: LAMA2; (-) strand; PAM type: YTN; PAM sequence: TTG
ccagagctttgaaaccattt

SEQ ID NO: 241314 - DNA, 20 bp, Artificial Sequence
  Description of Artificial Sequence: Synthetic oligonucleotide
  Target: LAMA2; (-) strand; PAM type: YTN; PAM sequence: CTT
gccagagctttgaaaccatt

SEQ ID NO: 241315 - DNA, 20 bp, Artificial Sequence
  Description of Artificial Sequence: Synthetic oligonucleotide
  Target: LAMA2; (-) strand; PAM type: YTN; PAM sequence: TTA
atcttgccagagctttgaaa

SEQ ID NO: 241316 - DNA, 20 bp, Artificial Sequence
  Description of Artificial Sequence: Synthetic oligonucleotide
  Target: LAMA2; (-) strand; PAM type: YTN; PAM sequence: TTG
attaatcttgccagagcttt

SEQ ID NO: 241317 - DNA, 20 bp, Artificial Sequence
  Description of Artificial Sequence: Synthetic oligonucleotide
  Target: LAMA2; (-) strand; PAM type: YTN; PAM sequence: CTT
gattaatcttgccagagctt

SEQ ID NO: 241318 - DNA, 20 bp, Artificial Sequence
  Description of Artificial Sequence: Synthetic oligonucleotide
  Target: LAMA2; (-) strand; PAM type: YTN; PAM sequence: TTG
cttgattaatcttgccagag

SEQ ID NO: 241319 - DNA, 20 bp, Artificial Sequence
  Description of Artificial Sequence: Synthetic oligonucleotide
  Target: LAMA2; (-) strand; PAM type: YTN; PAM sequence: TTT
gcttgattaatcttgccaga

SEQ ID NO: 241320 - DNA, 20 bp, Artificial Sequence
  Description of Artificial Sequence: Synthetic oligonucleotide
  Target: LAMA2; (-) strand; PAM type: YTN; PAM sequence: TTT
tgcttgattaatcttgccag

SEQ ID NO: 241321 - DNA, 20 bp, Artificial Sequence
  Description of Artificial Sequence: Synthetic oligonucleotide
  Target: LAMA2; (-) strand; PAM type: YTN; PAM sequence: TTA
cccacgttttgcttgattaa

SEQ ID NO: 241322 - DNA, 20 bp, Artificial Sequence
  Description of Artificial Sequence: Synthetic oligonucleotide
  Target: LAMA2; (-) strand; PAM type: YTN; PAM sequence: TTT
acccacgttttgcttgatta

SEQ ID NO: 241323 - DNA, 20 bp, Artificial Sequence
  Description of Artificial Sequence: Synthetic oligonucleotide
  Target: LAMA2; (-) strand; PAM type: YTN; PAM sequence: TTT
tacccacgttttgcttgatt

SEQ ID NO: 241324 - DNA, 20 bp, Artificial Sequence
  Description of Artificial Sequence: Synthetic oligonucleotide
  Target: LAMA2; (-) strand; PAM type: YTN; PAM sequence: TTG
tgttttacccacgttttgct

SEQ ID NO: 241325 - DNA, 20 bp, Artificial Sequence
  Description of Artificial Sequence: Synthetic oligonucleotide
  Target: LAMA2; (-) strand; PAM type: YTN; PAM sequence: TTT
gtgttttacccacgttttgc

SEQ ID NO: 241326 - DNA, 20 bp, Artificial Sequence
  Description of Artificial Sequence: Synthetic oligonucleotide
  Target: LAMA2; (-) strand; PAM type: YTN; PAM sequence: TTA
tttgtgttttacccacgttt

SEQ ID NO: 241327 - DNA, 20 bp, Artificial Sequence
  Description of Artificial Sequence: Synthetic oligonucleotide
  Target: LAMA2; (-) strand; PAM type: YTN; PAM sequence: TTT
atttgtgttttacccacgtt

SEQ ID NO: 241328 - DNA, 20 bp, Artificial Sequence
  Description of Artificial Sequence: Synthetic oligonucleotide
  Target: LAMA2; (-) strand; PAM type: YTN; PAM sequence: TTG
tttatttgtgttttacccac

SEQ ID NO: 241329 - DNA, 20 bp, Artificial Sequence
  Description of Artificial Sequence: Synthetic oligonucleotide
  Target: LAMA2; (-) strand; PAM type: YTN; PAM sequence: CTA
aaattgtttatttgtgtttt

SEQ ID NO: 241330 - DNA, 20 bp, Artificial Sequence
  Description of Artificial Sequence: Synthetic oligonucleotide
  Target: LAMA2; (-) strand; PAM type: YTN; PAM sequence: TTC
taaaattgtttatttgtgtt

SEQ ID NO: 241331 - DNA, 20 bp, Artificial Sequence
  Description of Artificial Sequence: Synthetic oligonucleotide
  Target: LAMA2; (-) strand; PAM type: YTN; PAM sequence: TTT
ctaaaattgtttatttgtgt

SEQ ID NO: 241332 - DNA, 20 bp, Artificial Sequence
  Description of Artificial Sequence: Synthetic oligonucleotide
  Target: LAMA2; (-) strand; PAM type: YTN; PAM sequence: TTA
catttctaaaattgtttatt

SEQ ID NO: 241333 - DNA, 20 bp, Artificial Sequence
  Description of Artificial Sequence: Synthetic oligonucleotide
  Target: LAMA2; (-) strand; PAM type: YTN; PAM sequence: TTT
acatttctaaaattgtttat

SEQ ID NO: 241334 - DNA, 20 bp, Artificial Sequence
  Description of Artificial Sequence: Synthetic oligonucleotide
  Target: LAMA2; (-) strand; PAM type: YTN; PAM sequence: TTT
tacatttctaaaattgttta

SEQ ID NO: 241335 - DNA, 20 bp, Artificial Sequence
  Description of Artificial Sequence: Synthetic oligonucleotide
  Target: LAMA2; (-) strand; PAM type: YTN; PAM sequence: TTT
ttacatttctaaaattgttt

SEQ ID NO: 241336 - DNA, 20 bp, Artificial Sequence
  Description of Artificial Sequence: Synthetic oligonucleotide
  Target: LAMA2; (-) strand; PAM type: YTN; PAM sequence: TTA
tgcccatttttacatttcta

SEQ ID NO: 241337 - DNA, 20 bp, Artificial Sequence
  Description of Artificial Sequence: Synthetic oligonucleotide
  Target: LAMA2; (-) strand; PAM type: YTN; PAM sequence: TTG
cagttatgcccatttttaca

SEQ ID NO: 241338 - DNA, 20 bp, Artificial Sequence
  Description of Artificial Sequence: Synthetic oligonucleotide
  Target: LAMA2; (-) strand; PAM type: YTN; PAM sequence: TTG
aagtaattgcagttatgccc

SEQ ID NO: 241339 - DNA, 20 bp, Artificial Sequence
  Description of Artificial Sequence: Synthetic oligonucleotide
  Target: LAMA2; (-) strand; PAM type: YTN; PAM sequence: TTT
gaagtaattgcagttatgcc

SEQ ID NO: 241340 - DNA, 20 bp, Artificial Sequence
  Description of Artificial Sequence: Synthetic oligonucleotide
  Target: LAMA2; (-) strand; PAM type: YTN; PAM sequence: TTT
tgaagtaattgcagttatgc

SEQ ID NO: 241341 - DNA, 20 bp, Artificial Sequence
  Description of Artificial Sequence: Synthetic oligonucleotide
  Target: LAMA2; (-) strand; PAM type: YTN; PAM sequence: TTT
ttgaagtaattgcagttatg

SEQ ID NO: 241342 - DNA, 20 bp, Artificial Sequence
  Description of Artificial Sequence: Synthetic oligonucleotide
  Target: LAMA2; (-) strand; PAM type: YTN; PAM sequence: TTA
tttttgaagtaattgcagtt

SEQ ID NO: 241343 - DNA, 20 bp, Artificial Sequence
  Description of Artificial Sequence: Synthetic oligonucleotide
  Target: LAMA2; (-) strand; PAM type: YTN; PAM sequence: TTT
atttttgaagtaattgcagt

SEQ ID NO: 241344 - DNA, 20 bp, Artificial Sequence
  Description of Artificial Sequence: Synthetic oligonucleotide
  Target: LAMA2; (-) strand; PAM type: YTN; PAM sequence: TTG
tttatttttgaagtaattgc

SEQ ID NO: 241345 - DNA, 20 bp, Artificial Sequence
  Description of Artificial Sequence: Synthetic oligonucleotide
  Target: LAMA2; (-) strand; PAM type: YTN; PAM sequence: TTT
gtttatttttgaagtaattg

SEQ ID NO: 241346 - DNA, 20 bp, Artificial Sequence
  Description of Artificial Sequence: Synthetic oligonucleotide
  Target: LAMA2; (-) strand; PAM type: YTN; PAM sequence: TTA
tttgtttatttttgaagtaa

SEQ ID NO: 241347 - DNA, 20 bp, Artificial Sequence
  Description of Artificial Sequence: Synthetic oligonucleotide
  Target: LAMA2; (-) strand; PAM type: YTN; PAM sequence: CTT
atttgtttatttttgaagta

SEQ ID NO: 241348 - DNA, 20 bp, Artificial Sequence
  Description of Artificial Sequence: Synthetic oligonucleotide
  Target: LAMA2; (-) strand; PAM type: YTN; PAM sequence: TTC
cttatttgtttatttttgaa

SEQ ID NO: 241349 - DNA, 20 bp, Artificial Sequence
  Description of Artificial Sequence: Synthetic oligonucleotide
  Target: LAMA2; (-) strand; PAM type: YTN; PAM sequence: CTT
ccttatttgtttatttttga

SEQ ID NO: 241350 - DNA, 20 bp, Artificial Sequence
  Description of Artificial Sequence: Synthetic oligonucleotide
  Target: LAMA2; (-) strand; PAM type: YTN; PAM sequence: CTG
atacttccttatttgtttat

SEQ ID NO: 241351 - DNA, 20 bp, Artificial Sequence
  Description of Artificial Sequence: Synthetic oligonucleotide
  Target: LAMA2; (-) strand; PAM type: YTN; PAM sequence: TTC
tgatacttccttatttgttt

SEQ ID NO: 241352 - DNA, 20 bp, Artificial Sequence
  Description of Artificial Sequence: Synthetic oligonucleotide
  Target: LAMA2; (-) strand; PAM type: YTN; PAM sequence: TTT
ctgatacttccttatttgtt

SEQ ID NO: 241353 - DNA, 20 bp, Artificial Sequence
  Description of Artificial Sequence: Synthetic oligonucleotide
  Target: LAMA2; (-) strand; PAM type: YTN; PAM sequence: TTT
tctgatacttccttatttgt

SEQ ID NO: 241354 - DNA, 20 bp, Artificial Sequence
  Description of Artificial Sequence: Synthetic oligonucleotide
  Target: LAMA2; (-) strand; PAM type: YTN; PAM sequence: TTA
ttttctgatacttccttatt

SEQ ID NO: 241355 - DNA, 20 bp, Artificial Sequence
  Description of Artificial Sequence: Synthetic oligonucleotide
  Target: LAMA2; (-) strand; PAM type: YTN; PAM sequence: TTT
attttctgatacttccttat

SEQ ID NO: 241356 - DNA, 20 bp, Artificial Sequence
  Description of Artificial Sequence: Synthetic oligonucleotide
  Target: LAMA2; (-) strand; PAM type: YTN; PAM sequence: TTG
tttattttctgatacttcct

SEQ ID NO: 241357 - DNA, 20 bp, Artificial Sequence
  Description of Artificial Sequence: Synthetic oligonucleotide
  Target: LAMA2; (-) strand; PAM type: YTN; PAM sequence: TTT
gtttattttctgatacttcc

SEQ ID NO: 241358 - DNA, 20 bp, Artificial Sequence
  Description of Artificial Sequence: Synthetic oligonucleotide
  Target: LAMA2; (-) strand; PAM type: YTN; PAM sequence: TTA
atttgtttattttctgatac

SEQ ID NO: 241359 - DNA, 20 bp, Artificial Sequence
  Description of Artificial Sequence: Synthetic oligonucleotide
  Target: LAMA2; (-) strand; PAM type: YTN; PAM sequence: CTT
aatttgtttattttctgata

SEQ ID NO: 241360 - DNA, 20 bp, Artificial Sequence
  Description of Artificial Sequence: Synthetic oligonucleotide
  Target: LAMA2; (-) strand; PAM type: YTN; PAM sequence: CTC
ttaatttgtttattttctga

SEQ ID NO: 241361 - DNA, 20 bp, Artificial Sequence
  Description of Artificial Sequence: Synthetic oligonucleotide
  Target: LAMA2; (-) strand; PAM type: YTN; PAM sequence: TTC
ataatactcttaatttgttt

SEQ ID NO: 241362 - DNA, 20 bp, Artificial Sequence
  Description of Artificial Sequence: Synthetic oligonucleotide
  Target: LAMA2; (-) strand; PAM type: YTN; PAM sequence: TTT
cataatactcttaatttgtt

SEQ ID NO: 241363 - DNA, 20 bp, Artificial Sequence
  Description of Artificial Sequence: Synthetic oligonucleotide
  Target: LAMA2; (-) strand; PAM type: YTN; PAM sequence: TTT
tcataatactcttaatttgt

SEQ ID NO: 241364 - DNA, 20 bp, Artificial Sequence
  Description of Artificial Sequence: Synthetic oligonucleotide
  Target: LAMA2; (-) strand; PAM type: YTN; PAM sequence: TTG
tgtgtaaattttcataatac

SEQ ID NO: 241365 - DNA, 20 bp, Artificial Sequence
  Description of Artificial Sequence: Synthetic oligonucleotide
  Target: LAMA2; (-) strand; PAM type: YTN; PAM sequence: TTA
ttgtgtgtaaattttcataa

SEQ ID NO: 241366 - DNA, 20 bp, Artificial Sequence
  Description of Artificial Sequence: Synthetic oligonucleotide
  Target: LAMA2; (-) strand; PAM type: YTN; PAM sequence: CTT
attgtgtgtaaattttcata

SEQ ID NO: 241367 - DNA, 20 bp, Artificial Sequence
  Description of Artificial Sequence: Synthetic oligonucleotide
  Target: LAMA2; (-) strand; PAM type: YTN; PAM sequence: TTC
ttattgtgtgtaaattttca

SEQ ID NO: 241368 - DNA, 20 bp, Artificial Sequence
  Description of Artificial Sequence: Synthetic oligonucleotide
  Target: LAMA2; (-) strand; PAM type: YTN; PAM sequence: TTG
tattcttattgtgtgtaaat

SEQ ID NO: 241369 - DNA, 20 bp, Artificial Sequence
  Description of Artificial Sequence: Synthetic oligonucleotide
  Target: LAMA2; (-) strand; PAM type: YTN; PAM sequence: CTA
aattgtattcttattgtgtg

SEQ ID NO: 241370 - DNA, 20 bp, Artificial Sequence
  Description of Artificial Sequence: Synthetic oligonucleotide
  Target: LAMA2; (-) strand; PAM type: YTN; PAM sequence: TTC
taaattgtattcttattgtg

SEQ ID NO: 241371 - DNA, 20 bp, Artificial Sequence
  Description of Artificial Sequence: Synthetic oligonucleotide
  Target: LAMA2; (-) strand; PAM type: YTN; PAM sequence: TTT
ctaaattgtattcttattgt

SEQ ID NO: 241372 - DNA, 20 bp, Artificial Sequence
  Description of Artificial Sequence: Synthetic oligonucleotide
  Target: LAMA2; (-) strand; PAM type: YTN; PAM sequence: TTT
tctaaattgtattcttattg

SEQ ID NO: 241373 - DNA, 20 bp, Artificial Sequence
  Description of Artificial Sequence: Synthetic oligonucleotide
  Target: LAMA2; (-) strand; PAM type: YTN; PAM sequence: TTT
ttctaaattgtattcttatt

SEQ ID NO: 241374 - DNA, 20 bp, Artificial Sequence
  Description of Artificial Sequence: Synthetic oligonucleotide
  Target: LAMA2; (-) strand; PAM type: YTN; PAM sequence: CTT
tttctaaattgtattcttat

SEQ ID NO: 241375 - DNA, 20 bp, Artificial Sequence
  Description of Artificial Sequence: Synthetic oligonucleotide
  Target: LAMA2; (-) strand; PAM type: YTN; PAM sequence: TTC
ctttttctaaattgtattct

SEQ ID NO: 241376 - DNA, 20 bp, Artificial Sequence
  Description of Artificial Sequence: Synthetic oligonucleotide
  Target: LAMA2; (-) strand; PAM type: YTN; PAM sequence: CTA
gaaggatattcctttttcta

SEQ ID NO: 241377 - DNA, 20 bp, Artificial Sequence
  Description of Artificial Sequence: Synthetic oligonucleotide
  Target: LAMA2; (-) strand; PAM type: YTN; PAM sequence: TTC
ctagaaggatattccttttt

SEQ ID NO: 241378 - DNA, 20 bp, Artificial Sequence
  Description of Artificial Sequence: Synthetic oligonucleotide
  Target: LAMA2; (-) strand; PAM type: YTN; PAM sequence: TTT
cctagaaggatattcctttt

SEQ ID NO: 241379 - DNA, 20 bp, Artificial Sequence
  Description of Artificial Sequence: Synthetic oligonucleotide
  Target: LAMA2; (-) strand; PAM type: YTN; PAM sequence: TTT
tcctagaaggatattccttt

SEQ ID NO: 241380 - DNA, 20 bp, Artificial Sequence
  Description of Artificial Sequence: Synthetic oligonucleotide
  Target: LAMA2; (-) strand; PAM type: YTN; PAM sequence: TTG
cattttcctagaaggatatt

SEQ ID NO: 241381 - DNA, 20 bp, Artificial Sequence
  Description of Artificial Sequence: Synthetic oligonucleotide
  Target: LAMA2; (-) strand; PAM type: YTN; PAM sequence: TTA
agttgcattttcctagaagg

SEQ ID NO: 241382 - DNA, 20 bp, Artificial Sequence
  Description of Artificial Sequence: Synthetic oligonucleotide
  Target: LAMA2; (-) strand; PAM type: YTN; PAM sequence: TTT
aagttgcattttcctagaag

SEQ ID NO: 241383 - DNA, 20 bp, Artificial Sequence
  Description of Artificial Sequence: Synthetic oligonucleotide
  Target: LAMA2; (-) strand; PAM type: YTN; PAM sequence: TTT
taagttgcattttcctagaa

SEQ ID NO: 241384 - DNA, 20 bp, Artificial Sequence
  Description of Artificial Sequence: Synthetic oligonucleotide
  Target: LAMA2; (-) strand; PAM type: YTN; PAM sequence: TTT
ttaagttgcattttcctaga

SEQ ID NO: 241385 - DNA, 20 bp, Artificial Sequence
  Description of Artificial Sequence: Synthetic oligonucleotide
  Target: LAMA2; (-) strand; PAM type: YTN; PAM sequence: TTT
tttaagttgcattttcctag

SEQ ID NO: 241386 - DNA, 20 bp, Artificial Sequence
  Description of Artificial Sequence: Synthetic oligonucleotide
  Target: LAMA2; (-) strand; PAM type: YTN; PAM sequence: TTT
ttttaagttgcattttccta

SEQ ID NO: 241387 - DNA, 20 bp, Artificial Sequence
  Description of Artificial Sequence: Synthetic oligonucleotide
  Target: LAMA2; (-) strand; PAM type: YTN; PAM sequence: TTG
agtcagtttttttaagttgc

SEQ ID NO: 241388 - DNA, 20 bp, Artificial Sequence
  Description of Artificial Sequence: Synthetic oligonucleotide
  Target: LAMA2; (-) strand; PAM type: YTN; PAM sequence: TTT
gagtcagtttttttaagttg

SEQ ID NO: 241389 - DNA, 20 bp, Artificial Sequence
  Description of Artificial Sequence: Synthetic oligonucleotide
  Target: LAMA2; (-) strand; PAM type: YTN; PAM sequence: CTT
tgagtcagtttttttaagtt

SEQ ID NO: 241390 - DNA, 20 bp, Artificial Sequence
  Description of Artificial Sequence: Synthetic oligonucleotide
  Target: LAMA2; (-) strand; PAM type: YTN; PAM sequence: TTC
tttgagtcagtttttttaag

SEQ ID NO: 241391 - DNA, 20 bp, Artificial Sequence
  Description of Artificial Sequence: Synthetic oligonucleotide
  Target: LAMA2; (-) strand; PAM type: YTN; PAM sequence: TTT
ctttgagtcagtttttttaa

SEQ ID NO: 241392 - DNA, 20 bp, Artificial Sequence
  Description of Artificial Sequence: Synthetic oligonucleotide
  Target: LAMA2; (-) strand; PAM type: YTN; PAM sequence: TTT
tctttgagtcagttttttta

SEQ ID NO: 241393 - DNA, 20 bp, Artificial Sequence
  Description of Artificial Sequence: Synthetic oligonucleotide
  Target: LAMA2; (-) strand; PAM type: YTN; PAM sequence: TTT
ttctttgagtcagttttttt

SEQ ID NO: 241394 - DNA, 20 bp, Artificial Sequence
  Description of Artificial Sequence: Synthetic oligonucleotide
  Target: LAMA2; (-) strand; PAM type: YTN; PAM sequence: TTT
tttctttgagtcagtttttt

SEQ ID NO: 241395 - DNA, 20 bp, Artificial Sequence
  Description of Artificial Sequence: Synthetic oligonucleotide
  Target: LAMA2; (-) strand; PAM type: YTN; PAM sequence: TTT
ttttctttgagtcagttttt

SEQ ID NO: 241396 - DNA, 20 bp, Artificial Sequence
  Description of Artificial Sequence: Synthetic oligonucleotide
  Target: LAMA2; (-) strand; PAM type: YTN; PAM sequence: TTT
tttttctttgagtcagtttt

SEQ ID NO: 241397 - DNA, 20 bp, Artificial Sequence
  Description of Artificial Sequence: Synthetic oligonucleotide
  Target: LAMA2; (-) strand; PAM type: YTN; PAM sequence: TTA
tagattttttttctttgagt

SEQ ID NO: 241398 - DNA, 20 bp, Artificial Sequence
  Description of Artificial Sequence: Synthetic oligonucleotide
  Target: LAMA2; (-) strand; PAM type: YTN; PAM sequence: CTG
acattatagattttttttct

SEQ ID NO: 241399 - DNA, 20 bp, Artificial Sequence
  Description of Artificial Sequence: Synthetic oligonucleotide
  Target: LAMA2; (-) strand; PAM type: YTN; PAM sequence: TTA
tctgacattatagatttttt

SEQ ID NO: 241400 - DNA, 20 bp, Artificial Sequence
  Description of Artificial Sequence: Synthetic oligonucleotide
  Target: LAMA2; (-) strand; PAM type: YTN; PAM sequence: TTT
atctgacattatagattttt

SEQ ID NO: 241401 - DNA, 20 bp, Artificial Sequence
  Description of Artificial Sequence: Synthetic oligonucleotide
  Target: LAMA2; (-) strand; PAM type: YTN; PAM sequence: TTA
atgtttatctgacattatag

SEQ ID NO: 241402 - DNA, 20 bp, Artificial Sequence
  Description of Artificial Sequence: Synthetic oligonucleotide
  Target: LAMA2; (-) strand; PAM type: YTN; PAM sequence: TTT
aatgtttatctgacattata

SEQ ID NO: 241403 - DNA, 20 bp, Artificial Sequence
  Description of Artificial Sequence: Synthetic oligonucleotide
  Target: LAMA2; (-) strand; PAM type: YTN; PAM sequence: CTT
taatgtttatctgacattat

SEQ ID NO: 241404 - DNA, 20 bp, Artificial Sequence
  Description of Artificial Sequence: Synthetic oligonucleotide
  Target: LAMA2; (-) strand; PAM type: YTN; PAM sequence: TTA
ctttaatgtttatctgacat

SEQ ID NO: 241405 - DNA, 20 bp, Artificial Sequence
  Description of Artificial Sequence: Synthetic oligonucleotide
  Target: LAMA2; (-) strand; PAM type: YTN; PAM sequence: TTC
aattactttaatgtttatct

SEQ ID NO: 241406 - DNA, 20 bp, Artificial Sequence
  Description of Artificial Sequence: Synthetic oligonucleotide
  Target: LAMA2; (-) strand; PAM type: YTN; PAM sequence: CTG
attcaattactttaatgttt

SEQ ID NO: 241407 - DNA, 20 bp, Artificial Sequence
  Description of Artificial Sequence: Synthetic oligonucleotide
  Target: LAMA2; (-) strand; PAM type: YTN; PAM sequence: CTG
ctgattcaattactttaatg

SEQ ID NO: 241408 - DNA, 20 bp, Artificial Sequence
  Description of Artificial Sequence: Synthetic oligonucleotide
  Target: LAMA2; (-) strand; PAM type: YTN; PAM sequence: TTG
actgctgattcaattacttt

SEQ ID NO: 241409 - DNA, 20 bp, Artificial Sequence
  Description of Artificial Sequence: Synthetic oligonucleotide
  Target: LAMA2; (-) strand; PAM type: YTN; PAM sequence: TTT
gactgctgattcaattactt

SEQ ID NO: 241410 - DNA, 20 bp, Artificial Sequence
  Description of Artificial Sequence: Synthetic oligonucleotide
  Target: LAMA2; (-) strand; PAM type: YTN; PAM sequence: TTA
tttgactgctgattcaatta

SEQ ID NO: 241411 - DNA, 20 bp, Artificial Sequence
  Description of Artificial Sequence: Synthetic oligonucleotide
  Target: LAMA2; (-) strand; PAM type: YTN; PAM sequence: TTT
atttgactgctgattcaatt

SEQ ID NO: 241412 - DNA, 20 bp, Artificial Sequence
  Description of Artificial Sequence: Synthetic oligonucleotide
  Target: LAMA2; (-) strand; PAM type: YTN; PAM sequence: TTG
gaaggtttatttgactgctg

SEQ ID NO: 241413 - DNA, 20 bp, Artificial Sequence
  Description of Artificial Sequence: Synthetic oligonucleotide
  Target: LAMA2; (-) strand; PAM type: YTN; PAM sequence: TTC
attggaaggtttatttgact

SEQ ID NO: 241414 - DNA, 20 bp, Artificial Sequence
  Description of Artificial Sequence: Synthetic oligonucleotide
  Target: LAMA2; (-) strand; PAM type: YTN; PAM sequence: CTT
cattggaaggtttatttgac

SEQ ID NO: 241415 - DNA, 20 bp, Artificial Sequence
  Description of Artificial Sequence: Synthetic oligonucleotide
  Target: LAMA2; (-) strand; PAM type: YTN; PAM sequence: TTA
acttcattggaaggtttatt

SEQ ID NO: 241416 - DNA, 20 bp, Artificial Sequence
  Description of Artificial Sequence: Synthetic oligonucleotide
  Target: LAMA2; (-) strand; PAM type: YTN; PAM sequence: TTG
gagttaacttcattggaagg

SEQ ID NO: 241417 - DNA, 20 bp, Artificial Sequence
  Description of Artificial Sequence: Synthetic oligonucleotide
  Target: LAMA2; (-) strand; PAM type: YTN; PAM sequence: CTT
ggagttaacttcattggaag

SEQ ID NO: 241418 - DNA, 20 bp, Artificial Sequence
  Description of Artificial Sequence: Synthetic oligonucleotide
  Target: LAMA2; (-) strand; PAM type: YTN; PAM sequence: TTG
caaatcaataggcttggagt

SEQ ID NO: 241419 - DNA, 20 bp, Artificial Sequence
  Description of Artificial Sequence: Synthetic oligonucleotide
  Target: LAMA2; (-) strand; PAM type: YTN; PAM sequence: CTT
gcaaatcaataggcttggag

SEQ ID NO: 241420 - DNA, 20 bp, Artificial Sequence
  Description of Artificial Sequence: Synthetic oligonucleotide
  Target: LAMA2; (-) strand; PAM type: YTN; PAM sequence: TTA
cttgcaaatcaataggcttg

SEQ ID NO: 241421 - DNA, 20 bp, Artificial Sequence
  Description of Artificial Sequence: Synthetic oligonucleotide
  Target: LAMA2; (-) strand; PAM type: YTN; PAM sequence: TTG
atattacttgcaaatcaata

SEQ ID NO: 241422 - DNA, 20 bp, Artificial Sequence
  Description of Artificial Sequence: Synthetic oligonucleotide
  Target: LAMA2; (-) strand; PAM type: YTN; PAM sequence: TTG
attgatattacttgcaaatc

SEQ ID NO: 241423 - DNA, 20 bp, Artificial Sequence
  Description of Artificial Sequence: Synthetic oligonucleotide
  Target: LAMA2; (-) strand; PAM type: YTN; PAM sequence: TTT
gattgatattacttgcaaat

SEQ ID NO: 241424 - DNA, 20 bp, Artificial Sequence
  Description of Artificial Sequence: Synthetic oligonucleotide
  Target: LAMA2; (-) strand; PAM type: YTN; PAM sequence: TTT
tgattgatattacttgcaaa

SEQ ID NO: 241425 - DNA, 20 bp, Artificial Sequence
  Description of Artificial Sequence: Synthetic oligonucleotide
  Target: LAMA2; (-) strand; PAM type: YTN; PAM sequence: TTG
aattttgattgatattactt

SEQ ID NO: 241426 - DNA, 20 bp, Artificial Sequence
  Description of Artificial Sequence: Synthetic oligonucleotide
  Target: LAMA2; (-) strand; PAM type: YTN; PAM sequence: TTT
gaattttgattgatattact

SEQ ID NO: 241427 - DNA, 20 bp, Artificial Sequence
  Description of Artificial Sequence: Synthetic oligonucleotide
  Target: LAMA2; (-) strand; PAM type: YTN; PAM sequence: TTT
tgaattttgattgatattac

SEQ ID NO: 241428 - DNA, 20 bp, Artificial Sequence
  Description of Artificial Sequence: Synthetic oligonucleotide
  Target: LAMA2; (-) strand; PAM type: YTN; PAM sequence: TTT
ttgaattttgattgatatta

SEQ ID NO: 241429 - DNA, 20 bp, Artificial Sequence
  Description of Artificial Sequence: Synthetic oligonucleotide
  Target: LAMA2; (-) strand; PAM type: YTN; PAM sequence: TTA
aaaatttttgaattttgatt

SEQ ID NO: 241430 - DNA, 20 bp, Artificial Sequence
  Description of Artificial Sequence: Synthetic oligonucleotide
  Target: LAMA2; (-) strand; PAM type: YTN; PAM sequence: TTT
aaaaatttttgaattttgat

SEQ ID NO: 241431 - DNA, 20 bp, Artificial Sequence
  Description of Artificial Sequence: Synthetic oligonucleotide
  Target: LAMA2; (-) strand; PAM type: YTN; PAM sequence: TTT
taaaaatttttgaattttga

SEQ ID NO: 241432 - DNA, 20 bp, Artificial Sequence
  Description of Artificial Sequence: Synthetic oligonucleotide
  Target: LAMA2; (-) strand; PAM type: YTN; PAM sequence: TTT
ttaaaaatttttgaattttg

SEQ ID NO: 241433 - DNA, 20 bp, Artificial Sequence
  Description of Artificial Sequence: Synthetic oligonucleotide
  Target: LAMA2; (-) strand; PAM type: YTN; PAM sequence: TTG
catttttaaaaatttttgaa

SEQ ID NO: 241434 - DNA, 20 bp, Artificial Sequence
  Description of Artificial Sequence: Synthetic oligonucleotide
  Target: LAMA2; (-) strand; PAM type: YTN; PAM sequence: TTT
gcatttttaaaaatttttga

SEQ ID NO: 241435 - DNA, 20 bp, Artificial Sequence
  Description of Artificial Sequence: Synthetic oligonucleotide
  Target: LAMA2; (-) strand; PAM type: YTN; PAM sequence: TTT
tgcatttttaaaaatttttg

SEQ ID NO: 241436 - DNA, 20 bp, Artificial Sequence
  Description of Artificial Sequence: Synthetic oligonucleotide
  Target: LAMA2; (-) strand; PAM type: YTN; PAM sequence: TTG
tataattttgcatttttaaa

SEQ ID NO: 241437 - DNA, 20 bp, Artificial Sequence
  Description of Artificial Sequence: Synthetic oligonucleotide
  Target: LAMA2; (-) strand; PAM type: YTN; PAM sequence: TTT
gtataattttgcatttttaa

SEQ ID NO: 241438 - DNA, 20 bp, Artificial Sequence
  Description of Artificial Sequence: Synthetic oligonucleotide
  Target: LAMA2; (-) strand; PAM type: YTN; PAM sequence: CTG
gaaagtttgtataattttgc

SEQ ID NO: 241439 - DNA, 20 bp, Artificial Sequence
  Description of Artificial Sequence: Synthetic oligonucleotide
  Target: LAMA2; (-) strand; PAM type: YTN; PAM sequence: CTC
tggaaagtttgtataatttt

SEQ ID NO: 241440 - DNA, 20 bp, Artificial Sequence
  Description of Artificial Sequence: Synthetic oligonucleotide
  Target: LAMA2; (-) strand; PAM type: YTN; PAM sequence: TTC
tctggaaagtttgtataatt

SEQ ID NO: 241441 - DNA, 20 bp, Artificial Sequence
  Description of Artificial Sequence: Synthetic oligonucleotide
  Target: LAMA2; (-) strand; PAM type: YTN; PAM sequence: CTA
ttctctggaaagtttgtata

SEQ ID NO: 241442 - DNA, 20 bp, Artificial Sequence
  Description of Artificial Sequence: Synthetic oligonucleotide
  Target: LAMA2; (-) strand; PAM type: YTN; PAM sequence: TTC
tattctctggaaagtttgta

SEQ ID NO: 241443 - DNA, 20 bp, Artificial Sequence
  Description of Artificial Sequence: Synthetic oligonucleotide
  Target: LAMA2; (-) strand; PAM type: YTN; PAM sequence: TTG
ttctattctctggaaagttt

SEQ ID NO: 241444 - DNA, 20 bp, Artificial Sequence
  Description of Artificial Sequence: Synthetic oligonucleotide
  Target: LAMA2; (-) strand; PAM type: YTN; PAM sequence: TTA
tgtgaggagtacgtcccagt

SEQ ID NO: 241445 - DNA, 20 bp, Artificial Sequence
  Description of Artificial Sequence: Synthetic oligonucleotide
  Target: LAMA2; (-) strand; PAM type: YTN; PAM sequence: TTA
tatcaagccacataaaatta

SEQ ID NO: 241446 - DNA, 20 bp, Artificial Sequence
  Description of Artificial Sequence: Synthetic oligonucleotide
  Target: LAMA2; (-) strand; PAM type: YTN; PAM sequence: TTT
atatcaagccacataaaatt

SEQ ID NO: 241447 - DNA, 20 bp, Artificial Sequence
  Description of Artificial Sequence: Synthetic oligonucleotide
  Target: LAMA2; (-) strand; PAM type: YTN; PAM sequence: TTT
tatatcaagccacataaaat

SEQ ID NO: 241448 - DNA, 20 bp, Artificial Sequence
  Description of Artificial Sequence: Synthetic oligonucleotide
  Target: LAMA2; (-) strand; PAM type: YTN; PAM sequence: TTG
tcaagattttatatcaagcc

SEQ ID NO: 241449 - DNA, 20 bp, Artificial Sequence
  Description of Artificial Sequence: Synthetic oligonucleotide
  Target: LAMA2; (-) strand; PAM type: YTN; PAM sequence: CTT
gtcaagattttatatcaagc

SEQ ID NO: 241450 - DNA, 20 bp, Artificial Sequence
  Description of Artificial Sequence: Synthetic oligonucleotide
  Target: LAMA2; (-) strand; PAM type: YTN; PAM sequence: CTC
ttgtcaagattttatatcaa

SEQ ID NO: 241451 - DNA, 20 bp, Artificial Sequence
  Description of Artificial Sequence: Synthetic oligonucleotide
  Target: LAMA2; (-) strand; PAM type: YTN; PAM sequence: TTC
atagtcctcttgtcaagatt

SEQ ID NO: 241452 - DNA, 20 bp, Artificial Sequence
  Description of Artificial Sequence: Synthetic oligonucleotide
  Target: LAMA2; (-) strand; PAM type: YTN; PAM sequence: CTT
catagtcctcttgtcaagat

SEQ ID NO: 241453 - DNA, 20 bp, Artificial Sequence
  Description of Artificial Sequence: Synthetic oligonucleotide
  Target: LAMA2; (-) strand; PAM type: YTN; PAM sequence: TTC
ttcatagtcctcttgtcaag

SEQ ID NO: 241454 - DNA, 20 bp, Artificial Sequence
  Description of Artificial Sequence: Synthetic oligonucleotide
  Target: LAMA2; (-) strand; PAM type: YTN; PAM sequence: CTT
cttcatagtcctcttgtcaa

SEQ ID NO: 241455 - DNA, 20 bp, Artificial Sequence
  Description of Artificial Sequence: Synthetic oligonucleotide
  Target: LAMA2; (-) strand; PAM type: YTN; PAM sequence: TTC
ttcttcatagtcctcttgtc

SEQ ID NO: 241456 - DNA, 20 bp, Artificial Sequence
  Description of Artificial Sequence: Synthetic oligonucleotide
  Target: LAMA2; (-) strand; PAM type: YTN; PAM sequence: TTT
cttcttcatagtcctcttgt

SEQ ID NO: 241457 - DNA, 20 bp, Artificial Sequence
  Description of Artificial Sequence: Synthetic oligonucleotide
  Target: LAMA2; (-) strand; PAM type: YTN; PAM sequence: TTT
tcttcttcatagtcctcttg

SEQ ID NO: 241458 - DNA, 20 bp, Artificial Sequence
  Description of Artificial Sequence: Synthetic oligonucleotide
  Target: LAMA2; (-) strand; PAM type: YTN; PAM sequence: TTG
ggtaggggttttcttcttca

SEQ ID NO: 241459 - DNA, 20 bp, Artificial Sequence
  Description of Artificial Sequence: Synthetic oligonucleotide
  Target: LAMA2; (-) strand; PAM type: YTN; PAM sequence: TTT
gggtaggggttttcttcttc

SEQ ID NO: 241460 - DNA, 20 bp, Artificial Sequence
  Description of Artificial Sequence: Synthetic oligonucleotide
  Target: LAMA2; (-) strand; PAM type: YTN; PAM sequence: CTT
tgggtaggggttttcttctt

SEQ ID NO: 241461 - DNA, 20 bp, Artificial Sequence
  Description of Artificial Sequence: Synthetic oligonucleotide
  Target: LAMA2; (-) strand; PAM type: YTN; PAM sequence: TTC
atgagtgactttgggtaggg

SEQ ID NO: 241462 - DNA, 20 bp, Artificial Sequence
  Description of Artificial Sequence: Synthetic oligonucleotide
  Target: LAMA2; (-) strand; PAM type: YTN; PAM sequence: CTA
cgttcatgagtgactttggg

SEQ ID NO: 241463 - DNA, 20 bp, Artificial Sequence
  Description of Artificial Sequence: Synthetic oligonucleotide
  Target: LAMA2; (-) strand; PAM type: YTN; PAM sequence: TTC
atctacgttcatgagtgact

SEQ ID NO: 241464 - DNA, 20 bp, Artificial Sequence
  Description of Artificial Sequence: Synthetic oligonucleotide
  Target: LAMA2; (-) strand; PAM type: YTN; PAM sequence: TTT
catctacgttcatgagtgac

SEQ ID NO: 241465 - DNA, 20 bp, Artificial Sequence
  Description of Artificial Sequence: Synthetic oligonucleotide
  Target: LAMA2; (-) strand; PAM type: YTN; PAM sequence: TTT
tcatctacgttcatgagtga

SEQ ID NO: 241466 - DNA, 20 bp, Artificial Sequence
  Description of Artificial Sequence: Synthetic oligonucleotide
  Target: LAMA2; (-) strand; PAM type: YTN; PAM sequence: TTA
ggatattttcatctacgttc

SEQ ID NO: 241467 - DNA, 20 bp, Artificial Sequence
  Description of Artificial Sequence: Synthetic oligonucleotide
  Target: LAMA2; (-) strand; PAM type: YTN; PAM sequence: TTT
aggatattttcatctacgtt

SEQ ID NO: 241468 - DNA, 20 bp, Artificial Sequence
  Description of Artificial Sequence: Synthetic oligonucleotide
  Target: LAMA2; (-) strand; PAM type: YTN; PAM sequence: TTA
tttaggatattttcatctac

SEQ ID NO: 241469 - DNA, 20 bp, Artificial Sequence
  Description of Artificial Sequence: Synthetic oligonucleotide
  Target: LAMA2; (-) strand; PAM type: YTN; PAM sequence: TTT
atttaggatattttcatcta

SEQ ID NO: 241470 - DNA, 20 bp, Artificial Sequence
  Description of Artificial Sequence: Synthetic oligonucleotide
  Target: LAMA2; (-) strand; PAM type: YTN; PAM sequence: TTT
tatttaggatattttcatct

SEQ ID NO: 241471 - DNA, 20 bp, Artificial Sequence
  Description of Artificial Sequence: Synthetic oligonucleotide
  Target: LAMA2; (-) strand; PAM type: YTN; PAM sequence: TTA
atattttatttaggatattt

SEQ ID NO: 241472 - DNA, 20 bp, Artificial Sequence
  Description of Artificial Sequence: Synthetic oligonucleotide
  Target: LAMA2; (-) strand; PAM type: YTN; PAM sequence: TTG
ttaatattttatttaggata

SEQ ID NO: 241473 - DNA, 20 bp, Artificial Sequence
  Description of Artificial Sequence: Synthetic oligonucleotide
  Target: LAMA2; (-) strand; PAM type: YTN; PAM sequence: TTG
ggttgttaatattttattta

SEQ ID NO: 241474 - DNA, 20 bp, Artificial Sequence
  Description of Artificial Sequence: Synthetic oligonucleotide
  Target: LAMA2; (-) strand; PAM type: YTN; PAM sequence: TTT
gggttgttaatattttattt

SEQ ID NO: 241475 - DNA, 20 bp, Artificial Sequence
  Description of Artificial Sequence: Synthetic oligonucleotide
  Target: LAMA2; (-) strand; PAM type: YTN; PAM sequence: CTG
atggatttgggttgttaata

SEQ ID NO: 241476 - DNA, 20 bp, Artificial Sequence
  Description of Artificial Sequence: Synthetic oligonucleotide
  Target: LAMA2; (-) strand; PAM type: YTN; PAM sequence: TTA
taaactgatggatttgggtt

SEQ ID NO: 241477 - DNA, 20 bp, Artificial Sequence
  Description of Artificial Sequence: Synthetic oligonucleotide
  Target: LAMA2; (-) strand; PAM type: YTN; PAM sequence: TTT
ataaactgatggatttgggt

SEQ ID NO: 241478 - DNA, 20 bp, Artificial Sequence
  Description of Artificial Sequence: Synthetic oligonucleotide
  Target: LAMA2; (-) strand; PAM type: YTN; PAM sequence: TTT
tataaactgatggatttggg

SEQ ID NO: 241479 - DNA, 20 bp, Artificial Sequence
  Description of Artificial Sequence: Synthetic oligonucleotide
  Target: LAMA2; (-) strand; PAM type: YTN; PAM sequence: TTT
ttataaactgatggatttgg

SEQ ID NO: 241480 - DNA, 20 bp, Artificial Sequence
  Description of Artificial Sequence: Synthetic oligonucleotide
  Target: LAMA2; (-) strand; PAM type: YTN; PAM sequence: CTA
tttttataaactgatggatt

SEQ ID NO: 241481 - DNA, 20 bp, Artificial Sequence
  Description of Artificial Sequence: Synthetic oligonucleotide
  Target: LAMA2; (-) strand; PAM type: YTN; PAM sequence: CTG
actatttttataaactgatg

SEQ ID NO: 241482 - DNA, 20 bp, Artificial Sequence
  Description of Artificial Sequence: Synthetic oligonucleotide
  Target: LAMA2; (-) strand; PAM type: YTN; PAM sequence: TTA
gcctgactatttttataaac

SEQ ID NO: 241483 - DNA, 20 bp, Artificial Sequence
  Description of Artificial Sequence: Synthetic oligonucleotide
  Target: LAMA2; (-) strand; PAM type: YTN; PAM sequence: TTT
agcctgactatttttataaa

SEQ ID NO: 241484 - DNA, 20 bp, Artificial Sequence
  Description of Artificial Sequence: Synthetic oligonucleotide
  Target: LAMA2; (-) strand; PAM type: YTN; PAM sequence: TTG
gccaatttagcctgactatt

SEQ ID NO: 241485 - DNA, 20 bp, Artificial Sequence
  Description of Artificial Sequence: Synthetic oligonucleotide
  Target: LAMA2; (-) strand; PAM type: YTN; PAM sequence: CTT
ggccaatttagcctgactat

SEQ ID NO: 241486 - DNA, 20 bp, Artificial Sequence
  Description of Artificial Sequence: Synthetic oligonucleotide
  Target: LAMA2; (-) strand; PAM type: YTN; PAM sequence: CTC
aaacacggatgataaaatcc

SEQ ID NO: 241487 - DNA, 20 bp, Artificial Sequence
  Description of Artificial Sequence: Synthetic oligonucleotide
  Target: LAMA2; (-) strand; PAM type: YTN; PAM sequence: TTA
aagtaacctcaaacacggat

SEQ ID NO: 241488 - DNA, 20 bp, Artificial Sequence
  Description of Artificial Sequence: Synthetic oligonucleotide
  Target: LAMA2; (-) strand; PAM type: YTN; PAM sequence: TTT
aaagtaacctcaaacacgga

SEQ ID NO: 241489 - DNA, 20 bp, Artificial Sequence
  Description of Artificial Sequence: Synthetic oligonucleotide
  Target: LAMA2; (-) strand; PAM type: YTN; PAM sequence: TTT
taaagtaacctcaaacacgg

SEQ ID NO: 241490 - DNA, 20 bp, Artificial Sequence
  Description of Artificial Sequence: Synthetic oligonucleotide
  Target: LAMA2; (-) strand; PAM type: YTN; PAM sequence: CTA
attttaaagtaacctcaaac

SEQ ID NO: 241491 - DNA, 20 bp, Artificial Sequence
  Description of Artificial Sequence: Synthetic oligonucleotide
  Target: LAMA2; (-) strand; PAM type: YTN; PAM sequence: TTC
taattttaaagtaacctcaa

SEQ ID NO: 241492 - DNA, 20 bp, Artificial Sequence
  Description of Artificial Sequence: Synthetic oligonucleotide
  Target: LAMA2; (-) strand; PAM type: YTN; PAM sequence: TTT
ctaattttaaagtaacctca

SEQ ID NO: 241493 - DNA, 20 bp, Artificial Sequence
  Description of Artificial Sequence: Synthetic oligonucleotide
  Target: LAMA2; (-) strand; PAM type: YTN; PAM sequence: TTT
tctaattttaaagtaacctc

SEQ ID NO: 241494 - DNA, 20 bp, Artificial Sequence
  Description of Artificial Sequence: Synthetic oligonucleotide
  Target: LAMA2; (-) strand; PAM type: YTN; PAM sequence: CTG
gttttctaattttaaagtaa

SEQ ID NO: 241495 - DNA, 20 bp, Artificial Sequence
  Description of Artificial Sequence: Synthetic oligonucleotide
  Target: LAMA2; (-) strand; PAM type: YTN; PAM sequence: TTA
aactggttttctaattttaa

SEQ ID NO: 241496 - DNA, 20 bp, Artificial Sequence
  Description of Artificial Sequence: Synthetic oligonucleotide
  Target: LAMA2; (-) strand; PAM type: YTN; PAM sequence: CTT
aaactggttttctaatttta

SEQ ID NO: 241497 - DNA, 20 bp, Artificial Sequence
  Description of Artificial Sequence: Synthetic oligonucleotide
  Target: LAMA2; (-) strand; PAM type: YTN; PAM sequence: TTA
cttaaactggttttctaatt

SEQ ID NO: 241498 - DNA, 20 bp, Artificial Sequence
  Description of Artificial Sequence: Synthetic oligonucleotide
  Target: LAMA2; (-) strand; PAM type: YTN; PAM sequence: TTA
atcagtcaatatggtcaatt

SEQ ID NO: 241499 - DNA, 20 bp, Artificial Sequence
  Description of Artificial Sequence: Synthetic oligonucleotide
  Target: LAMA2; (-) strand; PAM type: YTN; PAM sequence: TTT
aatcagtcaatatggtcaat

SEQ ID NO: 241500 - DNA, 20 bp, Artificial Sequence
  Description of Artificial Sequence: Synthetic oligonucleotide
  Target: LAMA2; (-) strand; PAM type: YTN; PAM sequence: TTT
taatcagtcaatatggtcaa

SEQ ID NO: 241501 - DNA, 20 bp, Artificial Sequence
  Description of Artificial Sequence: Synthetic oligonucleotide
  Target: LAMA2; (-) strand; PAM type: YTN; PAM sequence: CTT
ttaatcagtcaatatggtca

SEQ ID NO: 241502 - DNA, 20 bp, Artificial Sequence
  Description of Artificial Sequence: Synthetic oligonucleotide
  Target: LAMA2; (-) strand; PAM type: YTN; PAM sequence: CTC
ttttaatcagtcaatatggt

SEQ ID NO: 241503 - DNA, 20 bp, Artificial Sequence
  Description of Artificial Sequence: Synthetic oligonucleotide
  Target: LAMA2; (-) strand; PAM type: YTN; PAM sequence: TTC
tcttttaatcagtcaatatg

SEQ ID NO: 241504 - DNA, 20 bp, Artificial Sequence
  Description of Artificial Sequence: Synthetic oligonucleotide
  Target: LAMA2; (-) strand; PAM type: YTN; PAM sequence: TTT
ctcttttaatcagtcaatat

SEQ ID NO: 241505 - DNA, 20 bp, Artificial Sequence
  Description of Artificial Sequence: Synthetic oligonucleotide
  Target: LAMA2; (-) strand; PAM type: YTN; PAM sequence: TTT
tctcttttaatcagtcaata

SEQ ID NO: 241506 - DNA, 20 bp, Artificial Sequence
  Description of Artificial Sequence: Synthetic oligonucleotide
  Target: LAMA2; (-) strand; PAM type: YTN; PAM sequence: TTT
ttctcttttaatcagtcaat

SEQ ID NO: 241507 - DNA, 20 bp, Artificial Sequence
  Description of Artificial Sequence: Synthetic oligonucleotide
  Target: LAMA2; (-) strand; PAM type: YTN; PAM sequence: TTT
tttctcttttaatcagtcaa

SEQ ID NO: 241508 - DNA, 20 bp, Artificial Sequence
  Description of Artificial Sequence: Synthetic oligonucleotide
  Target: LAMA2; (-) strand; PAM type: YTN; PAM sequence: TTT
ttttctcttttaatcagtca

SEQ ID NO: 241509 - DNA, 20 bp, Artificial Sequence
  Description of Artificial Sequence: Synthetic oligonucleotide
  Target: LAMA2; (-) strand; PAM type: YTN; PAM sequence: TTG
atttttttctcttttaatca

SEQ ID NO: 241510 - DNA, 20 bp, Artificial Sequence
  Description of Artificial Sequence: Synthetic oligonucleotide
  Target: LAMA2; (-) strand; PAM type: YTN; PAM sequence: TTG
agataattgatttttttctc

SEQ ID NO: 241511 - DNA, 20 bp, Artificial Sequence
  Description of Artificial Sequence: Synthetic oligonucleotide
  Target: LAMA2; (-) strand; PAM type: YTN; PAM sequence: CTA
ttgagataattgattttttt

SEQ ID NO: 241512 - DNA, 20 bp, Artificial Sequence
  Description of Artificial Sequence: Synthetic oligonucleotide
  Target: LAMA2; (-) strand; PAM type: YTN; PAM sequence: CTG
tgtctattgagataattgat

SEQ ID NO: 241513 - DNA, 20 bp, Artificial Sequence
  Description of Artificial Sequence: Synthetic oligonucleotide
  Target: LAMA2; (-) strand; PAM type: YTN; PAM sequence: TTC
tgtgtctattgagataattg

SEQ ID NO: 241514 - DNA, 20 bp, Artificial Sequence
  Description of Artificial Sequence: Synthetic oligonucleotide
  Target: LAMA2; (-) strand; PAM type: YTN; PAM sequence: TTT
ctgtgtctattgagataatt

SEQ ID NO: 241515 - DNA, 20 bp, Artificial Sequence
  Description of Artificial Sequence: Synthetic oligonucleotide
  Target: LAMA2; (-) strand; PAM type: YTN; PAM sequence: TTT
tctgtgtctattgagataat

SEQ ID NO: 241516 - DNA, 20 bp, Artificial Sequence
  Description of Artificial Sequence: Synthetic oligonucleotide
  Target: LAMA2; (-) strand; PAM type: YTN; PAM sequence: TTT
ttctgtgtctattgagataa

SEQ ID NO: 241517 - DNA, 20 bp, Artificial Sequence
  Description of Artificial Sequence: Synthetic oligonucleotide
  Target: LAMA2; (-) strand; PAM type: YTN; PAM sequence: CTT
tttctgtgtctattgagata

SEQ ID NO: 241518 - DNA, 20 bp, Artificial Sequence
  Description of Artificial Sequence: Synthetic oligonucleotide
  Target: LAMA2; (-) strand; PAM type: YTN; PAM sequence: TTC
tttttctgtgtctattgaga

SEQ ID NO: 241519 - DNA, 20 bp, Artificial Sequence
  Description of Artificial Sequence: Synthetic oligonucleotide
  Target: LAMA2; (-) strand; PAM type: YTN; PAM sequence: TTT
ctttttctgtgtctattgag

SEQ ID NO: 241520 - DNA, 20 bp, Artificial Sequence
  Description of Artificial Sequence: Synthetic oligonucleotide
  Target: LAMA2; (-) strand; PAM type: YTN; PAM sequence: TTA
cccatttctttttctgtgtc

SEQ ID NO: 241521 - DNA, 20 bp, Artificial Sequence
  Description of Artificial Sequence: Synthetic oligonucleotide
  Target: LAMA2; (-) strand; PAM type: YTN; PAM sequence: TTT
acccatttctttttctgtgt

SEQ ID NO: 241522 - DNA, 20 bp, Artificial Sequence
  Description of Artificial Sequence: Synthetic oligonucleotide
  Target: LAMA2; (-) strand; PAM type: YTN; PAM sequence: TTT
tacccatttctttttctgtg

SEQ ID NO: 241523 - DNA, 20 bp, Artificial Sequence
  Description of Artificial Sequence: Synthetic oligonucleotide
  Target: LAMA2; (-) strand; PAM type: YTN; PAM sequence: TTA
attttacccatttctttttc

SEQ ID NO: 241524 - DNA, 20 bp, Artificial Sequence
  Description of Artificial Sequence: Synthetic oligonucleotide
  Target: LAMA2; (-) strand; PAM type: YTN; PAM sequence: TTT
aattttacccatttcttttt

SEQ ID NO: 241525 - DNA, 20 bp, Artificial Sequence
  Description of Artificial Sequence: Synthetic oligonucleotide
  Target: LAMA2; (-) strand; PAM type: YTN; PAM sequence: TTC
agacatgaagaatgtttaat

SEQ ID NO: 241526 - DNA, 20 bp, Artificial Sequence
  Description of Artificial Sequence: Synthetic oligonucleotide
  Target: LAMA2; (-) strand; PAM type: YTN; PAM sequence: TTT
cagacatgaagaatgtttaa

SEQ ID NO: 241527 - DNA, 20 bp, Artificial Sequence
  Description of Artificial Sequence: Synthetic oligonucleotide
  Target: LAMA2; (-) strand; PAM type: YTN; PAM sequence: TTT
tcagacatgaagaatgttta

SEQ ID NO: 241528 - DNA, 20 bp, Artificial Sequence
  Description of Artificial Sequence: Synthetic oligonucleotide
  Target: LAMA2; (-) strand; PAM type: YTN; PAM sequence: TTT
ttcagacatgaagaatgttt

SEQ ID NO: 241529 - DNA, 20 bp, Artificial Sequence
  Description of Artificial Sequence: Synthetic oligonucleotide
  Target: LAMA2; (-) strand; PAM type: YTN; PAM sequence: TTC
aaaatttttcagacatgaag

SEQ ID NO: 241530 - DNA, 20 bp, Artificial Sequence
  Description of Artificial Sequence: Synthetic oligonucleotide
  Target: LAMA2; (-) strand; PAM type: YTN; PAM sequence: TTT
caaaatttttcagacatgaa

SEQ ID NO: 241531 - DNA, 20 bp, Artificial Sequence
  Description of Artificial Sequence: Synthetic oligonucleotide
  Target: LAMA2; (-) strand; PAM type: YTN; PAM sequence: TTT
tcaaaatttttcagacatga

SEQ ID NO: 241532 - DNA, 20 bp, Artificial Sequence
  Description of Artificial Sequence: Synthetic oligonucleotide
  Target: LAMA2; (-) strand; PAM type: YTN; PAM sequence: CTA
gttttcaaaatttttcagac

SEQ ID NO: 241533 - DNA, 20 bp, Artificial Sequence
  Description of Artificial Sequence: Synthetic oligonucleotide
  Target: LAMA2; (-) strand; PAM type: YTN; PAM sequence: TTC
tagttttcaaaatttttcag

SEQ ID NO: 241534 - DNA, 20 bp, Artificial Sequence
  Description of Artificial Sequence: Synthetic oligonucleotide
  Target: LAMA2; (-) strand; PAM type: YTN; PAM sequence: TTC
caattctagttttcaaaatt

SEQ ID NO: 241535 - DNA, 20 bp, Artificial Sequence
  Description of Artificial Sequence: Synthetic oligonucleotide
  Target: LAMA2; (-) strand; PAM type: YTN; PAM sequence: TTT
ccaattctagttttcaaaat

SEQ ID NO: 241536 - DNA, 20 bp, Artificial Sequence
  Description of Artificial Sequence: Synthetic oligonucleotide
  Target: LAMA2; (-) strand; PAM type: YTN; PAM sequence: TTT
tccaattctagttttcaaaa

SEQ ID NO: 241537 - DNA, 20 bp, Artificial Sequence
  Description of Artificial Sequence: Synthetic oligonucleotide
  Target: LAMA2; (-) strand; PAM type: YTN; PAM sequence: CTT
ttccaattctagttttcaaa

SEQ ID NO: 241538 - DNA, 20 bp, Artificial Sequence
  Description of Artificial Sequence: Synthetic oligonucleotide
  Target: LAMA2; (-) strand; PAM type: YTN; PAM sequence: TTA
aagtgcttttccaattctag

SEQ ID NO: 241539 - DNA, 20 bp, Artificial Sequence
  Description of Artificial Sequence: Synthetic oligonucleotide
  Target: LAMA2; (-) strand; PAM type: YTN; PAM sequence: TTC
atcagttaaagtgcttttcc

SEQ ID NO: 241540 - DNA, 20 bp, Artificial Sequence
  Description of Artificial Sequence: Synthetic oligonucleotide
  Target: LAMA2; (-) strand; PAM type: YTN; PAM sequence: CTT
catcagttaaagtgcttttc

SEQ ID NO: 241541 - DNA, 20 bp, Artificial Sequence
  Description of Artificial Sequence: Synthetic oligonucleotide
  Target: LAMA2; (-) strand; PAM type: YTN; PAM sequence: TTA
tgtagatagccttcatcagt

SEQ ID NO: 241542 - DNA, 20 bp, Artificial Sequence
  Description of Artificial Sequence: Synthetic oligonucleotide
  Target: LAMA2; (-) strand; PAM type: YTN; PAM sequence: TTT
atgtagatagccttcatcag

SEQ ID NO: 241543 - DNA, 20 bp, Artificial Sequence
  Description of Artificial Sequence: Synthetic oligonucleotide
  Target: LAMA2; (-) strand; PAM type: YTN; PAM sequence: TTT
tatgtagatagccttcatca

SEQ ID NO: 241544 - DNA, 20 bp, Artificial Sequence
  Description of Artificial Sequence: Synthetic oligonucleotide
  Target: LAMA2; (-) strand; PAM type: YTN; PAM sequence: TTT
ttatgtagatagccttcatc

SEQ ID NO: 241545 - DNA, 20 bp, Artificial Sequence
  Description of Artificial Sequence: Synthetic oligonucleotide
  Target: LAMA2; (-) strand; PAM type: YTN; PAM sequence: TTG
atttttatgtagatagcctt

SEQ ID NO: 241546 - DNA, 20 bp, Artificial Sequence
  Description of Artificial Sequence: Synthetic oligonucleotide
  Target: LAMA2; (-) strand; PAM type: YTN; PAM sequence: CTA
ttgatttttatgtagatagc

SEQ ID NO: 241547 - DNA, 20 bp, Artificial Sequence
  Description of Artificial Sequence: Synthetic oligonucleotide
  Target: LAMA2; (-) strand; PAM type: YTN; PAM sequence: TTG
ctattgatttttatgtagat

SEQ ID NO: 241548 - DNA, 20 bp, Artificial Sequence
  Description of Artificial Sequence: Synthetic oligonucleotide
  Target: LAMA2; (-) strand; PAM type: YTN; PAM sequence: TTT
gctattgatttttatgtaga

SEQ ID NO: 241549 - DNA, 20 bp, Artificial Sequence
  Description of Artificial Sequence: Synthetic oligonucleotide
  Target: LAMA2; (-) strand; PAM type: YTN; PAM sequence: TTA
aataagatatttgctattga

SEQ ID NO: 241550 - DNA, 20 bp, Artificial Sequence
  Description of Artificial Sequence: Synthetic oligonucleotide
  Target: LAMA2; (-) strand; PAM type: YTN; PAM sequence: TTA
tattaaataagatatttgct

SEQ ID NO: 241551 - DNA, 20 bp, Artificial Sequence
  Description of Artificial Sequence: Synthetic oligonucleotide
  Target: LAMA2; (-) strand; PAM type: YTN; PAM sequence: TTT
atattaaataagatatttgc

SEQ ID NO: 241552 - DNA, 20 bp, Artificial Sequence
  Description of Artificial Sequence: Synthetic oligonucleotide
  Target: LAMA2; (-) strand; PAM type: YTN; PAM sequence: TTT
tatattaaataagatatttg

SEQ ID NO: 241553 - DNA, 20 bp, Artificial Sequence
  Description of Artificial Sequence: Synthetic oligonucleotide
  Target: LAMA2; (-) strand; PAM type: YTN; PAM sequence: TTG
aacattttatattaaataag

SEQ ID NO: 241554 - DNA, 20 bp, Artificial Sequence
  Description of Artificial Sequence: Synthetic oligonucleotide
  Target: LAMA2; (-) strand; PAM type: YTN; PAM sequence: TTT
gaacattttatattaaataa

SEQ ID NO: 241555 - DNA, 20 bp, Artificial Sequence
  Description of Artificial Sequence: Synthetic oligonucleotide
  Target: LAMA2; (-) strand; PAM type: YTN; PAM sequence: CTT
tgaacattttatattaaata

SEQ ID NO: 241556 - DNA, 20 bp, Artificial Sequence
  Description of Artificial Sequence: Synthetic oligonucleotide
  Target: LAMA2; (-) strand; PAM type: YTN; PAM sequence: TTA
aacaatactttgaacatttt

SEQ ID NO: 241557 - DNA, 20 bp, Artificial Sequence
  Description of Artificial Sequence: Synthetic oligonucleotide
  Target: LAMA2; (-) strand; PAM type: YTN; PAM sequence: CTT
aaacaatactttgaacattt

SEQ ID NO: 241558 - DNA, 20 bp, Artificial Sequence
  Description of Artificial Sequence: Synthetic oligonucleotide
  Target: LAMA2; (-) strand; PAM type: YTN; PAM sequence: TTG
tgatcttaaacaatactttg

SEQ ID NO: 241559 - DNA, 20 bp, Artificial Sequence
  Description of Artificial Sequence: Synthetic oligonucleotide
  Target: LAMA2; (-) strand; PAM type: YTN; PAM sequence: TTT
gtgatcttaaacaatacttt

SEQ ID NO: 241560 - DNA, 20 bp, Artificial Sequence
  Description of Artificial Sequence: Synthetic oligonucleotide
  Target: LAMA2; (-) strand; PAM type: YTN; PAM sequence: TTC
atgtttgtgatcttaaacaa

SEQ ID NO: 241561 - DNA, 20 bp, Artificial Sequence
  Description of Artificial Sequence: Synthetic oligonucleotide
  Target: LAMA2; (-) strand; PAM type: YTN; PAM sequence: TTT
catgtttgtgatcttaaaca

SEQ ID NO: 241562 - DNA, 20 bp, Artificial Sequence
  Description of Artificial Sequence: Synthetic oligonucleotide
  Target: LAMA2; (-) strand; PAM type: YTN; PAM sequence: TTG
tttcatgtttgtgatcttaa

SEQ ID NO: 241563 - DNA, 20 bp, Artificial Sequence
  Description of Artificial Sequence: Synthetic oligonucleotide
  Target: LAMA2; (-) strand; PAM type: YTN; PAM sequence: TTA
tagtgagaattgtttcatgt

SEQ ID NO: 241564 - DNA, 20 bp, Artificial Sequence
  Description of Artificial Sequence: Synthetic oligonucleotide
  Target: LAMA2; (-) strand; PAM type: YTN; PAM sequence: TTA
agtgggagtcgttatagtga

SEQ ID NO: 241565 - DNA, 20 bp, Artificial Sequence
  Description of Artificial Sequence: Synthetic oligonucleotide
  Target: LAMA2; (-) strand; PAM type: YTN; PAM sequence: CTA
gcacaatgttaagtgggagt

SEQ ID NO: 241566 - DNA, 20 bp, Artificial Sequence
  Description of Artificial Sequence: Synthetic oligonucleotide
  Target: LAMA2; (-) strand; PAM type: YTN; PAM sequence: TTC
tagcacaatgttaagtggga

SEQ ID NO: 241567 - DNA, 20 bp, Artificial Sequence
  Description of Artificial Sequence: Synthetic oligonucleotide
  Target: LAMA2; (-) strand; PAM type: YTN; PAM sequence: CTT
ctagcacaatgttaagtggg

SEQ ID NO: 241568 - DNA, 20 bp, Artificial Sequence
  Description of Artificial Sequence: Synthetic oligonucleotide
  Target: LAMA2; (-) strand; PAM type: YTN; PAM sequence: CTG
tccacatcttctagcacaat

SEQ ID NO: 241569 - DNA, 20 bp, Artificial Sequence
  Description of Artificial Sequence: Synthetic oligonucleotide
  Target: LAMA2; (-) strand; PAM type: YTN; PAM sequence: CTG
cactgtccacatcttctagc

SEQ ID NO: 241570 - DNA, 20 bp, Artificial Sequence
  Description of Artificial Sequence: Synthetic oligonucleotide
  Target: LAMA2; (-) strand; PAM type: YTN; PAM sequence: CTA
ctgcactgtccacatcttct

SEQ ID NO: 241571 - DNA, 20 bp, Artificial Sequence
  Description of Artificial Sequence: Synthetic oligonucleotide
  Target: LAMA2; (-) strand; PAM type: YTN; PAM sequence: CTA
tctactgcactgtccacatc

SEQ ID NO: 241572 - DNA, 20 bp, Artificial Sequence
  Description of Artificial Sequence: Synthetic oligonucleotide
  Target: LAMA2; (-) strand; PAM type: YTN; PAM sequence: TTC
ctatctactgcactgtccac

SEQ ID NO: 241573 - DNA, 20 bp, Artificial Sequence
  Description of Artificial Sequence: Synthetic oligonucleotide
  Target: LAMA2; (-) strand; PAM type: YTN; PAM sequence: TTT
cctatctactgcactgtcca

SEQ ID NO: 241574 - DNA, 20 bp, Artificial Sequence
  Description of Artificial Sequence: Synthetic oligonucleotide
  Target: LAMA2; (-) strand; PAM type: YTN; PAM sequence: TTA
tttcctatctactgcactgt

SEQ ID NO: 241575 - DNA, 20 bp, Artificial Sequence
  Description of Artificial Sequence: Synthetic oligonucleotide
  Target: LAMA2; (-) strand; PAM type: YTN; PAM sequence: TTT
atttcctatctactgcactg

SEQ ID NO: 241576 - DNA, 20 bp, Artificial Sequence
  Description of Artificial Sequence: Synthetic oligonucleotide
  Target: LAMA2; (-) strand; PAM type: YTN; PAM sequence: TTT
tatttcctatctactgcact

SEQ ID NO: 241577 - DNA, 20 bp, Artificial Sequence
  Description of Artificial Sequence: Synthetic oligonucleotide
  Target: LAMA2; (-) strand; PAM type: YTN; PAM sequence: CTA
tatattttatttcctatcta

SEQ ID NO: 241578 - DNA, 20 bp, Artificial Sequence
  Description of Artificial Sequence: Synthetic oligonucleotide
  Target: LAMA2; (-) strand; PAM type: YTN; PAM sequence: CTG
atccctatatattttatttc

SEQ ID NO: 241579 - DNA, 20 bp, Artificial Sequence
  Description of Artificial Sequence: Synthetic oligonucleotide
  Target: LAMA2; (-) strand; PAM type: YTN; PAM sequence: TTC
tgatccctatatattttatt

SEQ ID NO: 241580 - DNA, 20 bp, Artificial Sequence
  Description of Artificial Sequence: Synthetic oligonucleotide
  Target: LAMA2; (-) strand; PAM type: YTN; PAM sequence: TTT
ctgatccctatatattttat

SEQ ID NO: 241581 - DNA, 20 bp, Artificial Sequence
  Description of Artificial Sequence: Synthetic oligonucleotide
  Target: LAMA2; (-) strand; PAM type: YTN; PAM sequence: CTT
tctgatccctatatatttta

SEQ ID NO: 241582 - DNA, 20 bp, Artificial Sequence
  Description of Artificial Sequence: Synthetic oligonucleotide
  Target: LAMA2; (-) strand; PAM type: YTN; PAM sequence: TTC
ctttctgatccctatatatt

SEQ ID NO: 241583 - DNA, 20 bp, Artificial Sequence
  Description of Artificial Sequence: Synthetic oligonucleotide
  Target: LAMA2; (-) strand; PAM type: YTN; PAM sequence: CTT
cctttctgatccctatatat

SEQ ID NO: 241584 - DNA, 20 bp, Artificial Sequence
  Description of Artificial Sequence: Synthetic oligonucleotide
  Target: LAMA2; (-) strand; PAM type: YTN; PAM sequence: TTC
ttcctttctgatccctatat

SEQ ID NO: 241585 - DNA, 20 bp, Artificial Sequence
  Description of Artificial Sequence: Synthetic oligonucleotide
  Target: LAMA2; (-) strand; PAM type: YTN; PAM sequence: TTT
cttcctttctgatccctata

SEQ ID NO: 241586 - DNA, 20 bp, Artificial Sequence
  Description of Artificial Sequence: Synthetic oligonucleotide
  Target: LAMA2; (-) strand; PAM type: YTN; PAM sequence: TTA
tttcttcctttctgatccct

SEQ ID NO: 241587 - DNA, 20 bp, Artificial Sequence
  Description of Artificial Sequence: Synthetic oligonucleotide
  Target: LAMA2; (-) strand; PAM type: YTN; PAM sequence: TTT
atttcttcctttctgatccc

SEQ ID NO: 241588 - DNA, 20 bp, Artificial Sequence
  Description of Artificial Sequence: Synthetic oligonucleotide
  Target: LAMA2; (-) strand; PAM type: YTN; PAM sequence: TTT
tatttcttcctttctgatcc

SEQ ID NO: 241589 - DNA, 20 bp, Artificial Sequence
  Description of Artificial Sequence: Synthetic oligonucleotide
  Target: LAMA2; (-) strand; PAM type: YTN; PAM sequence: CTA
taagtgagttttatttcttc

SEQ ID NO: 241590 - DNA, 20 bp, Artificial Sequence
  Description of Artificial Sequence: Synthetic oligonucleotide
  Target: LAMA2; (-) strand; PAM type: YTN; PAM sequence: TTA
caagcagataagtatatcat

SEQ ID NO: 241591 - DNA, 20 bp, Artificial Sequence
  Description of Artificial Sequence: Synthetic oligonucleotide
  Target: LAMA2; (-) strand; PAM type: YTN; PAM sequence: TTT
acaagcagataagtatatca

SEQ ID NO: 241592 - DNA, 20 bp, Artificial Sequence
  Description of Artificial Sequence: Synthetic oligonucleotide
  Target: LAMA2; (-) strand; PAM type: YTN; PAM sequence: TTT
tacaagcagataagtatatc

SEQ ID NO: 241593 - DNA, 20 bp, Artificial Sequence
  Description of Artificial Sequence: Synthetic oligonucleotide
  Target: LAMA2; (-) strand; PAM type: YTN; PAM sequence: TTG
attttacaagcagataagta

SEQ ID NO: 241594 - DNA, 20 bp, Artificial Sequence
  Description of Artificial Sequence: Synthetic oligonucleotide
  Target: LAMA2; (-) strand; PAM type: YTN; PAM sequence: CTT
gattttacaagcagataagt

SEQ ID NO: 241595 - DNA, 20 bp, Artificial Sequence
  Description of Artificial Sequence: Synthetic oligonucleotide
  Target: LAMA2; (-) strand; PAM type: YTN; PAM sequence: CTC
ttgattttacaagcagataa

SEQ ID NO: 241596 - DNA, 20 bp, Artificial Sequence
  Description of Artificial Sequence: Synthetic oligonucleotide
  Target: LAMA2; (-) strand; PAM type: YTN; PAM sequence: TTC
tcttgattttacaagcagat

SEQ ID NO: 241597 - DNA, 20 bp, Artificial Sequence
  Description of Artificial Sequence: Synthetic oligonucleotide
  Target: LAMA2; (-) strand; PAM type: YTN; PAM sequence: CTG
tagattctcttgattttaca

SEQ ID NO: 241598 - DNA, 20 bp, Artificial Sequence
  Description of Artificial Sequence: Synthetic oligonucleotide
  Target: LAMA2; (-) strand; PAM type: YTN; PAM sequence: TTG
tctgtagattctcttgattt

SEQ ID NO: 241599 - DNA, 20 bp, Artificial Sequence
  Description of Artificial Sequence: Synthetic oligonucleotide
  Target: LAMA2; (-) strand; PAM type: YTN; PAM sequence: TTT
gtctgtagattctcttgatt

SEQ ID NO: 241600 - DNA, 20 bp, Artificial Sequence
  Description of Artificial Sequence: Synthetic oligonucleotide
  Target: LAMA2; (-) strand; PAM type: YTN; PAM sequence: TTA
agaatttgtctgtagattct

SEQ ID NO: 241601 - DNA, 20 bp, Artificial Sequence
  Description of Artificial Sequence: Synthetic oligonucleotide
  Target: LAMA2; (-) strand; PAM type: YTN; PAM sequence: CTG
attaagaatttgtctgtaga

SEQ ID NO: 241602 - DNA, 20 bp, Artificial Sequence
  Description of Artificial Sequence: Synthetic oligonucleotide
  Target: LAMA2; (-) strand; PAM type: YTN; PAM sequence: CTC
actgattaagaatttgtctg

SEQ ID NO: 241603 - DNA, 20 bp, Artificial Sequence
  Description of Artificial Sequence: Synthetic oligonucleotide
  Target: LAMA2; (-) strand; PAM type: YTN; PAM sequence: TTG
actcactgattaagaatttg

SEQ ID NO: 241604 - DNA, 20 bp, Artificial Sequence
  Description of Artificial Sequence: Synthetic oligonucleotide
  Target: LAMA2; (-) strand; PAM type: YTN; PAM sequence: TTA
ttgactcactgattaagaat

SEQ ID NO: 241605 - DNA, 20 bp, Artificial Sequence
  Description of Artificial Sequence: Synthetic oligonucleotide
  Target: LAMA2; (-) strand; PAM type: YTN; PAM sequence: CTT
attgactcactgattaagaa

SEQ ID NO: 241606 - DNA, 20 bp, Artificial Sequence
  Description of Artificial Sequence: Synthetic oligonucleotide
  Target: LAMA2; (-) strand; PAM type: YTN; PAM sequence: CTC
cttattgactcactgattaa

SEQ ID NO: 241607 - DNA, 20 bp, Artificial Sequence
  Description of Artificial Sequence: Synthetic oligonucleotide
  Target: LAMA2; (-) strand; PAM type: YTN; PAM sequence: TTG
catatagtctccttattgac

SEQ ID NO: 241608 - DNA, 20 bp, Artificial Sequence
  Description of Artificial Sequence: Synthetic oligonucleotide
  Target: LAMA2; (-) strand; PAM type: YTN; PAM sequence: TTT
gcatatagtctccttattga

SEQ ID NO: 241609 - DNA, 20 bp, Artificial Sequence
  Description of Artificial Sequence: Synthetic oligonucleotide
  Target: LAMA2; (-) strand; PAM type: YTN; PAM sequence: TTT
tgcatatagtctccttattg

SEQ ID NO: 241610 - DNA, 20 bp, Artificial Sequence
  Description of Artificial Sequence: Synthetic oligonucleotide
  Target: LAMA2; (-) strand; PAM type: YTN; PAM sequence: TTA
attttgcatatagtctcctt

SEQ ID NO: 241611 - DNA, 20 bp, Artificial Sequence
  Description of Artificial Sequence: Synthetic oligonucleotide
  Target: LAMA2; (-) strand; PAM type: YTN; PAM sequence: TTG
tatattaattttgcatatag

SEQ ID NO: 241612 - DNA, 20 bp, Artificial Sequence
  Description of Artificial Sequence: Synthetic oligonucleotide
  Target: LAMA2; (-) strand; PAM type: YTN; PAM sequence: TTT
gtatattaattttgcatata

SEQ ID NO: 241613 - DNA, 20 bp, Artificial Sequence
  Description of Artificial Sequence: Synthetic oligonucleotide
  Target: LAMA2; (-) strand; PAM type: YTN; PAM sequence: TTT
tgtatattaattttgcatat

SEQ ID NO: 241614 - DNA, 20 bp, Artificial Sequence
  Description of Artificial Sequence: Synthetic oligonucleotide
  Target: LAMA2; (-) strand; PAM type: YTN; PAM sequence: CTT
ttgtatattaattttgcata

SEQ ID NO: 241615 - DNA, 20 bp, Artificial Sequence
  Description of Artificial Sequence: Synthetic oligonucleotide
  Target: LAMA2; (-) strand; PAM type: YTN; PAM sequence: TTG
acttttgtatattaattttg

SEQ ID NO: 241616 - DNA, 20 bp, Artificial Sequence
  Description of Artificial Sequence: Synthetic oligonucleotide
  Target: LAMA2; (-) strand; PAM type: YTN; PAM sequence: TTG
atataaagaaacatgattga

SEQ ID NO: 241617 - DNA, 20 bp, Artificial Sequence
  Description of Artificial Sequence: Synthetic oligonucleotide
  Target: LAMA2; (-) strand; PAM type: YTN; PAM sequence: TTG
ttgatataaagaaacatgat

SEQ ID NO: 241618 - DNA, 20 bp, Artificial Sequence
  Description of Artificial Sequence: Synthetic oligonucleotide
  Target: LAMA2; (-) strand; PAM type: YTN; PAM sequence: TTG
aaaagtgttgttgatataaa

SEQ ID NO: 241619 - DNA, 20 bp, Artificial Sequence
  Description of Artificial Sequence: Synthetic oligonucleotide
  Target: LAMA2; (-) strand; PAM type: YTN; PAM sequence: TTT
gaaaagtgttgttgatataa

SEQ ID NO: 241620 - DNA, 20 bp, Artificial Sequence
  Description of Artificial Sequence: Synthetic oligonucleotide
  Target: LAMA2; (-) strand; PAM type: YTN; PAM sequence: TTT
tgaaaagtgttgttgatata

SEQ ID NO: 241621 - DNA, 20 bp, Artificial Sequence
  Description of Artificial Sequence: Synthetic oligonucleotide
  Target: LAMA2; (-) strand; PAM type: YTN; PAM sequence: TTT
ttgaaaagtgttgttgatat

SEQ ID NO: 241622 - DNA, 20 bp, Artificial Sequence
  Description of Artificial Sequence: Synthetic oligonucleotide
  Target: LAMA2; (-) strand; PAM type: YTN; PAM sequence: TTT
tttgaaaagtgttgttgata

SEQ ID NO: 241623 - DNA, 20 bp, Artificial Sequence
  Description of Artificial Sequence: Synthetic oligonucleotide
  Target: LAMA2; (-) strand; PAM type: YTN; PAM sequence: TTT
ttttgaaaagtgttgttgat

SEQ ID NO: 241624 - DNA, 20 bp, Artificial Sequence
  Description of Artificial Sequence: Synthetic oligonucleotide
  Target: LAMA2; (-) strand; PAM type: YTN; PAM sequence: TTT
tttttgaaaagtgttgttga

SEQ ID NO: 241625 - DNA, 20 bp, Artificial Sequence
  Description of Artificial Sequence: Synthetic oligonucleotide
  Target: LAMA2; (-) strand; PAM type: YTN; PAM sequence: TTA
aaaattttttttgaaaagtg

SEQ ID NO: 241626 - DNA, 20 bp, Artificial Sequence
  Description of Artificial Sequence: Synthetic oligonucleotide
  Target: LAMA2; (-) strand; PAM type: YTN; PAM sequence: CTT
aaaaattttttttgaaaagt

SEQ ID NO: 241627 - DNA, 20 bp, Artificial Sequence
  Description of Artificial Sequence: Synthetic oligonucleotide
  Target: LAMA2; (-) strand; PAM type: YTN; PAM sequence: CTC
ttaaaaattttttttgaaaa

SEQ ID NO: 241628 - DNA, 20 bp, Artificial Sequence
  Description of Artificial Sequence: Synthetic oligonucleotide
  Target: LAMA2; (-) strand; PAM type: YTN; PAM sequence: TTA
tacatggcctcttaaaaatt

SEQ ID NO: 241629 - DNA, 20 bp, Artificial Sequence
  Description of Artificial Sequence: Synthetic oligonucleotide
  Target: LAMA2; (-) strand; PAM type: YTN; PAM sequence: CTA
ttatacatggcctcttaaaa

SEQ ID NO: 241630 - DNA, 20 bp, Artificial Sequence
  Description of Artificial Sequence: Synthetic oligonucleotide
  Target: LAMA2; (-) strand; PAM type: YTN; PAM sequence: TTG
ctattatacatggcctctta

SEQ ID NO: 241631 - DNA, 20 bp, Artificial Sequence
  Description of Artificial Sequence: Synthetic oligonucleotide
  Target: LAMA2; (-) strand; PAM type: YTN; PAM sequence: TTA
tatgtattgctattatacat

SEQ ID NO: 241632 - DNA, 20 bp, Artificial Sequence
  Description of Artificial Sequence: Synthetic oligonucleotide
  Target: LAMA2; (-) strand; PAM type: YTN; PAM sequence: TTT
atatgtattgctattataca

SEQ ID NO: 241633 - DNA, 20 bp, Artificial Sequence
  Description of Artificial Sequence: Synthetic oligonucleotide
  Target: LAMA2; (-) strand; PAM type: YTN; PAM sequence: CTA
tttatatgtattgctattat

SEQ ID NO: 241634 - DNA, 20 bp, Artificial Sequence
  Description of Artificial Sequence: Synthetic oligonucleotide
  Target: LAMA2; (-) strand; PAM type: YTN; PAM sequence: TTG
gtactatttatatgtattgc

SEQ ID NO: 241635 - DNA, 20 bp, Artificial Sequence
  Description of Artificial Sequence: Synthetic oligonucleotide
  Target: LAMA2; (-) strand; PAM type: YTN; PAM sequence: CTT
ggtactatttatatgtattg

SEQ ID NO: 241636 - DNA, 20 bp, Artificial Sequence
  Description of Artificial Sequence: Synthetic oligonucleotide
  Target: LAMA2; (-) strand; PAM type: YTN; PAM sequence: TTA
atccttggtactatttatat

SEQ ID NO: 241637 - DNA, 20 bp, Artificial Sequence
  Description of Artificial Sequence: Synthetic oligonucleotide
  Target: LAMA2; (-) strand; PAM type: YTN; PAM sequence: TTT
aatccttggtactatttata

SEQ ID NO: 241638 - DNA, 20 bp, Artificial Sequence
  Description of Artificial Sequence: Synthetic oligonucleotide
  Target: LAMA2; (-) strand; PAM type: YTN; PAM sequence: CTA
caaatttaatccttggtact

SEQ ID NO: 241639 - DNA, 20 bp, Artificial Sequence
  Description of Artificial Sequence: Synthetic oligonucleotide
  Target: LAMA2; (-) strand; PAM type: YTN; PAM sequence: TTC
cctacaaatttaatccttgg

SEQ ID NO: 241640 - DNA, 20 bp, Artificial Sequence
  Description of Artificial Sequence: Synthetic oligonucleotide
  Target: LAMA2; (-) strand; PAM type: YTN; PAM sequence: TTT
ccctacaaatttaatccttg

SEQ ID NO: 241641 - DNA, 20 bp, Artificial Sequence
  Description of Artificial Sequence: Synthetic oligonucleotide
  Target: LAMA2; (-) strand; PAM type: YTN; PAM sequence: TTT
tccctacaaatttaatcctt

SEQ ID NO: 241642 - DNA, 20 bp, Artificial Sequence
  Description of Artificial Sequence: Synthetic oligonucleotide
  Target: LAMA2; (-) strand; PAM type: YTN; PAM sequence: CTT
ttccctacaaatttaatcct

SEQ ID NO: 241643 - DNA, 20 bp, Artificial Sequence
  Description of Artificial Sequence: Synthetic oligonucleotide
  Target: LAMA2; (-) strand; PAM type: YTN; PAM sequence: TTG
gcttttccctacaaatttaa

SEQ ID NO: 241644 - DNA, 20 bp, Artificial Sequence
  Description of Artificial Sequence: Synthetic oligonucleotide
  Target: LAMA2; (-) strand; PAM type: YTN; PAM sequence: TTG
gccattggcttttccctaca

SEQ ID NO: 241645 - DNA, 20 bp, Artificial Sequence
  Description of Artificial Sequence: Synthetic oligonucleotide
  Target: LAMA2; (-) strand; PAM type: YTN; PAM sequence: CTT
ggccattggcttttccctac

SEQ ID NO: 241646 - DNA, 20 bp, Artificial Sequence
  Description of Artificial Sequence: Synthetic oligonucleotide
  Target: LAMA2; (-) strand; PAM type: YTN; PAM sequence: TTC
ttggccattggcttttccct

SEQ ID NO: 241647 - DNA, 20 bp, Artificial Sequence
  Description of Artificial Sequence: Synthetic oligonucleotide
  Target: LAMA2; (-) strand; PAM type: YTN; PAM sequence: TTA
ttcttggccattggcttttc

SEQ ID NO: 241648 - DNA, 20 bp, Artificial Sequence
  Description of Artificial Sequence: Synthetic oligonucleotide
  Target: LAMA2; (-) strand; PAM type: YTN; PAM sequence: TTG
attattcttggccattggct

SEQ ID NO: 241649 - DNA, 20 bp, Artificial Sequence
  Description of Artificial Sequence: Synthetic oligonucleotide
  Target: LAMA2; (-) strand; PAM type: YTN; PAM sequence: TTT
gattattcttggccattggc

SEQ ID NO: 241650 - DNA, 20 bp, Artificial Sequence
  Description of Artificial Sequence: Synthetic oligonucleotide
  Target: LAMA2; (-) strand; PAM type: YTN; PAM sequence: TTT
tgattattcttggccattgg

SEQ ID NO: 241651 - DNA, 20 bp, Artificial Sequence
  Description of Artificial Sequence: Synthetic oligonucleotide
  Target: LAMA2; (-) strand; PAM type: YTN; PAM sequence: CTT
ttgattattcttggccattg

SEQ ID NO: 241652 - DNA, 20 bp, Artificial Sequence
  Description of Artificial Sequence: Synthetic oligonucleotide
  Target: LAMA2; (-) strand; PAM type: YTN; PAM sequence: TTC
ttttgattattcttggccat

SEQ ID NO: 241653 - DNA, 20 bp, Artificial Sequence
  Description of Artificial Sequence: Synthetic oligonucleotide
  Target: LAMA2; (-) strand; PAM type: YTN; PAM sequence: TTT
cttttgattattcttggcca

SEQ ID NO: 241654 - DNA, 20 bp, Artificial Sequence
  Description of Artificial Sequence: Synthetic oligonucleotide
  Target: LAMA2; (-) strand; PAM type: YTN; PAM sequence: CTA
taatttcttttgattattct

SEQ ID NO: 241655 - DNA, 20 bp, Artificial Sequence
  Description of Artificial Sequence: Synthetic oligonucleotide
  Target: LAMA2; (-) strand; PAM type: YTN; PAM sequence: TTA
catatgtgagccatcgcacc

SEQ ID NO: 241656 - DNA, 20 bp, Artificial Sequence
  Description of Artificial Sequence: Synthetic oligonucleotide
  Target: LAMA2; (-) strand; PAM type: YTN; PAM sequence: CTG
ggattacatatgtgagccat

SEQ ID NO: 241657 - DNA, 20 bp, Artificial Sequence
  Description of Artificial Sequence: Synthetic oligonucleotide
  Target: LAMA2; (-) strand; PAM type: YTN; PAM sequence: CTC
ccaaagtgctgggattacat

SEQ ID NO: 241658 - DNA, 20 bp, Artificial Sequence
  Description of Artificial Sequence: Synthetic oligonucleotide
  Target: LAMA2; (-) strand; PAM type: YTN; PAM sequence: TTG
gcctcccaaagtgctgggat

SEQ ID NO: 241659 - DNA, 20 bp, Artificial Sequence
  Description of Artificial Sequence: Synthetic oligonucleotide
  Target: LAMA2; (-) strand; PAM type: YTN; PAM sequence: CTT
ggcctcccaaagtgctggga

SEQ ID NO: 241660 - DNA, 20 bp, Artificial Sequence
  Description of Artificial Sequence: Synthetic oligonucleotide
  Target: LAMA2; (-) strand; PAM type: YTN; PAM sequence: CTA
ccttggcctcccaaagtgct

SEQ ID NO: 241661 - DNA, 20 bp, Artificial Sequence
  Description of Artificial Sequence: Synthetic oligonucleotide
  Target: LAMA2; (-) strand; PAM type: YTN; PAM sequence: CTC
aggtgatccacctaccttgg

SEQ ID NO: 241662 - DNA, 20 bp, Artificial Sequence
  Description of Artificial Sequence: Synthetic oligonucleotide
  Target: LAMA2; (-) strand; PAM type: YTN; PAM sequence: CTG
acctcaggtgatccacctac

SEQ ID NO: 241663 - DNA, 20 bp, Artificial Sequence
  Description of Artificial Sequence: Synthetic oligonucleotide
  Target: LAMA2; (-) strand; PAM type: YTN; PAM sequence: TTC
tgacctcaggtgatccacct

SEQ ID NO: 241664 - DNA, 20 bp, Artificial Sequence
  Description of Artificial Sequence: Synthetic oligonucleotide
  Target: LAMA2; (-) strand; PAM type: YTN; PAM sequence: CTT
ctgacctcaggtgatccacc

SEQ ID NO: 241665 - DNA, 20 bp, Artificial Sequence
  Description of Artificial Sequence: Synthetic oligonucleotide
  Target: LAMA2; (-) strand; PAM type: YTN; PAM sequence: CTC
gaacttctgacctcaggtga

SEQ ID NO: 241666 - DNA, 20 bp, Artificial Sequence
  Description of Artificial Sequence: Synthetic oligonucleotide
  Target: LAMA2; (-) strand; PAM type: YTN; PAM sequence: TTG
gccagggtggtctcgaactt

SEQ ID NO: 241667 - DNA, 20 bp, Artificial Sequence
  Description of Artificial Sequence: Synthetic oligonucleotide
  Target: LAMA2; (-) strand; PAM type: YTN; PAM sequence: TTG
ccatgttggccagggtggtc

SEQ ID NO: 241668 - DNA, 20 bp, Artificial Sequence
  Description of Artificial Sequence: Synthetic oligonucleotide
  Target: LAMA2; (-) strand; PAM type: YTN; PAM sequence: TTT
gccatgttggccagggtggt

SEQ ID NO: 241669 - DNA, 20 bp, Artificial Sequence
  Description of Artificial Sequence: Synthetic oligonucleotide
  Target: LAMA2; (-) strand; PAM type: YTN; PAM sequence: TTT
tgccatgttggccagggtgg

SEQ ID NO: 241670 - DNA, 20 bp, Artificial Sequence
  Description of Artificial Sequence: Synthetic oligonucleotide
  Target: LAMA2; (-) strand; PAM type: YTN; PAM sequence: TTA
gtagagacagggttttgcca

SEQ ID NO: 241671 - DNA, 20 bp, Artificial Sequence
  Description of Artificial Sequence: Synthetic oligonucleotide
  Target: LAMA2; (-) strand; PAM type: YTN; PAM sequence: TTT
agtagagacagggttttgcc

SEQ ID NO: 241672 - DNA, 20 bp, Artificial Sequence
  Description of Artificial Sequence: Synthetic oligonucleotide
  Target: LAMA2; (-) strand; PAM type: YTN; PAM sequence: TTT
tagtagagacagggttttgc

SEQ ID NO: 241673 - DNA, 20 bp, Artificial Sequence
  Description of Artificial Sequence: Synthetic oligonucleotide
  Target: LAMA2; (-) strand; PAM type: YTN; PAM sequence: TTT
ttagtagagacagggttttg

SEQ ID NO: 241674 - DNA, 20 bp, Artificial Sequence
  Description of Artificial Sequence: Synthetic oligonucleotide
  Target: LAMA2; (-) strand; PAM type: YTN; PAM sequence: TTG
tatttttagtagagacaggg

SEQ ID NO: 241675 - DNA, 20 bp, Artificial Sequence
  Description of Artificial Sequence: Synthetic oligonucleotide
  Target: LAMA2; (-) strand; PAM type: YTN; PAM sequence: TTT
gtatttttagtagagacagg

SEQ ID NO: 241676 - DNA, 20 bp, Artificial Sequence
  Description of Artificial Sequence: Synthetic oligonucleotide
  Target: LAMA2; (-) strand; PAM type: YTN; PAM sequence: TTT
tgtatttttagtagagacag

SEQ ID NO: 241677 - DNA, 20 bp, Artificial Sequence
  Description of Artificial Sequence: Synthetic oligonucleotide
  Target: LAMA2; (-) strand; PAM type: YTN; PAM sequence: TTT
ttgtatttttagtagagaca

SEQ ID NO: 241678 - DNA, 20 bp, Artificial Sequence
  Description of Artificial Sequence: Synthetic oligonucleotide
  Target: LAMA2; (-) strand; PAM type: YTN; PAM sequence: CTA
atttttgtatttttagtaga

SEQ ID NO: 241679 - DNA, 20 bp, Artificial Sequence
  Description of Artificial Sequence: Synthetic oligonucleotide
  Target: LAMA2; (-) strand; PAM type: YTN; PAM sequence: CTG
gctaatttttgtatttttag

SEQ ID NO: 241680 - DNA, 20 bp, Artificial Sequence
  Description of Artificial Sequence: Synthetic oligonucleotide
  Target: LAMA2; (-) strand; PAM type: YTN; PAM sequence: TTG
tcaccacacctggctaattt

SEQ ID NO: 241681 - DNA, 20 bp, Artificial Sequence
  Description of Artificial Sequence: Synthetic oligonucleotide
  Target: LAMA2; (-) strand; PAM type: YTN; PAM sequence: TTT
gtcaccacacctggctaatt

SEQ ID NO: 241682 - DNA, 20 bp, Artificial Sequence
  Description of Artificial Sequence: Synthetic oligonucleotide
  Target: LAMA2; (-) strand; PAM type: YTN; PAM sequence: TTG
caggcgtttgtcaccacacc

SEQ ID NO: 241683 - DNA, 20 bp, Artificial Sequence
  Description of Artificial Sequence: Synthetic oligonucleotide
  Target: LAMA2; (-) strand; PAM type: YTN; PAM sequence: CTG
ggattgcaggcgtttgtcac

SEQ ID NO: 241684 - DNA, 20 bp, Artificial Sequence
  Description of Artificial Sequence: Synthetic oligonucleotide
  Target: LAMA2; (-) strand; PAM type: YTN; PAM sequence: CTC
ccgagtagctgggattgcag

SEQ ID NO: 241685 - DNA, 20 bp, Artificial Sequence
  Description of Artificial Sequence: Synthetic oligonucleotide
  Target: LAMA2; (-) strand; PAM type: YTN; PAM sequence: TTG
catcagcctcccgagtagct

SEQ ID NO: 241686 - DNA, 20 bp, Artificial Sequence
  Description of Artificial Sequence: Synthetic oligonucleotide
  Target: LAMA2; (-) strand; PAM type: YTN; PAM sequence: CTT
gcatcagcctcccgagtagc

SEQ ID NO: 241687 - DNA, 20 bp, Artificial Sequence
  Description of Artificial Sequence: Synthetic oligonucleotide
  Target: LAMA2; (-) strand; PAM type: YTN; PAM sequence: CTC
ttgcatcagcctcccgagta

SEQ ID NO: 241688 - DNA, 20 bp, Artificial Sequence
  Description of Artificial Sequence: Synthetic oligonucleotide
  Target: LAMA2; (-) strand; PAM type: YTN; PAM sequence: TTC
tcttgcatcagcctcccgag

SEQ ID NO: 241689 - DNA, 20 bp, Artificial Sequence
  Description of Artificial Sequence: Synthetic oligonucleotide
  Target: LAMA2; (-) strand; PAM type: YTN; PAM sequence: CTG
ggtccaagcaattctcttgc

SEQ ID NO: 241690 - DNA, 20 bp, Artificial Sequence
  Description of Artificial Sequence: Synthetic oligonucleotide
  Target: LAMA2; (-) strand; PAM type: YTN; PAM sequence: CTC
ctgggtccaagcaattctct

SEQ ID NO: 241691 - DNA, 20 bp, Artificial Sequence
  Description of Artificial Sequence: Synthetic oligonucleotide
  Target: LAMA2; (-) strand; PAM type: YTN; PAM sequence: CTG
cctcctgggtccaagcaatt

SEQ ID NO: 241692 - DNA, 20 bp, Artificial Sequence
  Description of Artificial Sequence: Synthetic oligonucleotide
  Target: LAMA2; (-) strand; PAM type: YTN; PAM sequence: CTC
tgcctcctgggtccaagcaa

SEQ ID NO: 241693 - DNA, 20 bp, Artificial Sequence
  Description of Artificial Sequence: Synthetic oligonucleotide
  Target: LAMA2; (-) strand; PAM type: YTN; PAM sequence: CTG
cagcctctgcctcctgggtc

SEQ ID NO: 241694 - DNA, 20 bp, Artificial Sequence
  Description of Artificial Sequence: Synthetic oligonucleotide
  Target: LAMA2; (-) strand; PAM type: YTN; PAM sequence: CTC
actgcagcctctgcctcctg

SEQ ID NO: 241695 - DNA, 20 bp, Artificial Sequence
  Description of Artificial Sequence: Synthetic oligonucleotide
  Target: LAMA2; (-) strand; PAM type: YTN; PAM sequence: TTG
gctcactgcagcctctgcct

SEQ ID NO: 241696 - DNA, 20 bp, Artificial Sequence
  Description of Artificial Sequence: Synthetic oligonucleotide
  Target: LAMA2; (-) strand; PAM type: YTN; PAM sequence: CTT
ggctcactgcagcctctgcc

SEQ ID NO: 241697 - DNA, 20 bp, Artificial Sequence
  Description of Artificial Sequence: Synthetic oligonucleotide
  Target: LAMA2; (-) strand; PAM type: YTN; PAM sequence: CTG
gagtgcagtgacccaatctt

SEQ ID NO: 241698 - DNA, 20 bp, Artificial Sequence
  Description of Artificial Sequence: Synthetic oligonucleotide
  Target: LAMA2; (-) strand; PAM type: YTN; PAM sequence: CTA
tgccccaggctggagtgcag

SEQ ID NO: 241699 - DNA, 20 bp, Artificial Sequence
  Description of Artificial Sequence: Synthetic oligonucleotide
  Target: LAMA2; (-) strand; PAM type: YTN; PAM sequence: CTC
tatgccccaggctggagtgc

SEQ ID NO: 241700 - DNA, 20 bp, Artificial Sequence
  Description of Artificial Sequence: Synthetic oligonucleotide
  Target: LAMA2; (-) strand; PAM type: YTN; PAM sequence: CTC
gctctatgccccaggctgga

SEQ ID NO: 241701 - DNA, 20 bp, Artificial Sequence
  Description of Artificial Sequence: Synthetic oligonucleotide
  Target: LAMA2; (-) strand; PAM type: YTN; PAM sequence: TTG
gagagggtctcgctctatgc

SEQ ID NO: 241702 - DNA, 20 bp, Artificial Sequence
  Description of Artificial Sequence: Synthetic oligonucleotide
  Target: LAMA2; (-) strand; PAM type: YTN; PAM sequence: TTT
ggagagggtctcgctctatg

SEQ ID NO: 241703 - DNA, 20 bp, Artificial Sequence
  Description of Artificial Sequence: Synthetic oligonucleotide
  Target: LAMA2; (-) strand; PAM type: YTN; PAM sequence: TTT
tggagagggtctcgctctat

SEQ ID NO: 241704 - DNA, 20 bp, Artificial Sequence
  Description of Artificial Sequence: Synthetic oligonucleotide
  Target: LAMA2; (-) strand; PAM type: YTN; PAM sequence: TTT
ttggagagggtctcgctcta

SEQ ID NO: 241705 - DNA, 20 bp, Artificial Sequence
  Description of Artificial Sequence: Synthetic oligonucleotide
  Target: LAMA2; (-) strand; PAM type: YTN; PAM sequence: CTC
acatatatacatatatgcat

SEQ ID NO: 241706 - DNA, 20 bp, Artificial Sequence
  Description of Artificial Sequence: Synthetic oligonucleotide
  Target: LAMA2; (-) strand; PAM type: YTN; PAM sequence: CTA
aatatatatatatacacaca

SEQ ID NO: 241707 - DNA, 20 bp, Artificial Sequence
  Description of Artificial Sequence: Synthetic oligonucleotide
  Target: LAMA2; (-) strand; PAM type: YTN; PAM sequence: TTC
taaatatatatatatacaca

SEQ ID NO: 241708 - DNA, 20 bp, Artificial Sequence
  Description of Artificial Sequence: Synthetic oligonucleotide
  Target: LAMA2; (-) strand; PAM type: YTN; PAM sequence: TTT
ctaaatatatatatatacac

SEQ ID NO: 241709 - DNA, 20 bp, Artificial Sequence
  Description of Artificial Sequence: Synthetic oligonucleotide
  Target: LAMA2; (-) strand; PAM type: YTN; PAM sequence: TTA
gaatttctaaatatatatat

SEQ ID NO: 241710 - DNA, 20 bp, Artificial Sequence
  Description of Artificial Sequence: Synthetic oligonucleotide
  Target: LAMA2; (-) strand; PAM type: YTN; PAM sequence: TTT
agaatttctaaatatatata

SEQ ID NO: 241711 - DNA, 20 bp, Artificial Sequence
  Description of Artificial Sequence: Synthetic oligonucleotide
  Target: LAMA2; (-) strand; PAM type: YTN; PAM sequence: CTT
tagaatttctaaatatatat

SEQ ID NO: 241712 - DNA, 20 bp, Artificial Sequence
  Description of Artificial Sequence: Synthetic oligonucleotide
  Target: LAMA2; (-) strand; PAM type: YTN; PAM sequence: TTC
ctttagaatttctaaatata

SEQ ID NO: 241713 - DNA, 20 bp, Artificial Sequence
  Description of Artificial Sequence: Synthetic oligonucleotide
  Target: LAMA2; (-) strand; PAM type: YTN; PAM sequence: TTT
cctttagaatttctaaatat

SEQ ID NO: 241714 - DNA, 20 bp, Artificial Sequence
  Description of Artificial Sequence: Synthetic oligonucleotide
  Target: LAMA2; (-) strand; PAM type: YTN; PAM sequence: CTT
tcctttagaatttctaaata

SEQ ID NO: 241715 - DNA, 20 bp, Artificial Sequence
  Description of Artificial Sequence: Synthetic oligonucleotide
  Target: LAMA2; (-) strand; PAM type: YTN; PAM sequence: TTC
tttcctttagaatttctaaa

SEQ ID NO: 241716 - DNA, 20 bp, Artificial Sequence
  Description of Artificial Sequence: Synthetic oligonucleotide
  Target: LAMA2; (-) strand; PAM type: YTN; PAM sequence: CTT
ctttcctttagaatttctaa

SEQ ID NO: 241717 - DNA, 20 bp, Artificial Sequence
  Description of Artificial Sequence: Synthetic oligonucleotide
  Target: LAMA2; (-) strand; PAM type: YTN; PAM sequence: TTC
caaaaagccccacttctttc

SEQ ID NO: 241718 - DNA, 20 bp, Artificial Sequence
  Description of Artificial Sequence: Synthetic oligonucleotide
  Target: LAMA2; (-) strand; PAM type: YTN; PAM sequence: TTT
ccaaaaagccccacttcttt

SEQ ID NO: 241719 - DNA, 20 bp, Artificial Sequence
  Description of Artificial Sequence: Synthetic oligonucleotide
  Target: LAMA2; (-) strand; PAM type: YTN; PAM sequence: CTT
tccaaaaagccccacttctt

SEQ ID NO: 241720 - DNA, 20 bp, Artificial Sequence
  Description of Artificial Sequence: Synthetic oligonucleotide
  Target: LAMA2; (-) strand; PAM type: YTN; PAM sequence: CTA
atccctttccaaaaagcccc

SEQ ID NO: 241721 - DNA, 20 bp, Artificial Sequence
  Description of Artificial Sequence: Synthetic oligonucleotide
  Target: LAMA2; (-) strand; PAM type: YTN; PAM sequence: CTC
atgacctaatccctttccaa

SEQ ID NO: 241722 - DNA, 20 bp, Artificial Sequence
  Description of Artificial Sequence: Synthetic oligonucleotide
  Target: LAMA2; (-) strand; PAM type: YTN; PAM sequence: TTA
gaaccctcatgacctaatcc

SEQ ID NO: 241723 - DNA, 20 bp, Artificial Sequence
  Description of Artificial Sequence: Synthetic oligonucleotide
  Target: LAMA2; (-) strand; PAM type: YTN; PAM sequence: TTC
atggagattagaaccctcat

SEQ ID NO: 241724 - DNA, 20 bp, Artificial Sequence
  Description of Artificial Sequence: Synthetic oligonucleotide
  Target: LAMA2; (-) strand; PAM type: YTN; PAM sequence: TTC
cattcatggagattagaacc

SEQ ID NO: 241725 - DNA, 20 bp, Artificial Sequence
  Description of Artificial Sequence: Synthetic oligonucleotide
  Target: LAMA2; (-) strand; PAM type: YTN; PAM sequence: TTA
attccattcatggagattag

SEQ ID NO: 241726 - DNA, 20 bp, Artificial Sequence
  Description of Artificial Sequence: Synthetic oligonucleotide
  Target: LAMA2; (-) strand; PAM type: YTN; PAM sequence: TTC
ataagggcattaattccatt

SEQ ID NO: 241727 - DNA, 20 bp, Artificial Sequence
  Description of Artificial Sequence: Synthetic oligonucleotide
  Target: LAMA2; (-) strand; PAM type: YTN; PAM sequence: TTT
cataagggcattaattccat

SEQ ID NO: 241728 - DNA, 20 bp, Artificial Sequence
  Description of Artificial Sequence: Synthetic oligonucleotide
  Target: LAMA2; (-) strand; PAM type: YTN; PAM sequence: TTT
tcataagggcattaattcca

SEQ ID NO: 241729 - DNA, 20 bp, Artificial Sequence
  Description of Artificial Sequence: Synthetic oligonucleotide
  Target: LAMA2; (-) strand; PAM type: YTN; PAM sequence: TTA
tatcagataagattttcata

SEQ ID NO: 241730 - DNA, 20 bp, Artificial Sequence
  Description of Artificial Sequence: Synthetic oligonucleotide
  Target: LAMA2; (-) strand; PAM type: YTN; PAM sequence: TTT
atatcagataagattttcat

SEQ ID NO: 241731 - DNA, 20 bp, Artificial Sequence
  Description of Artificial Sequence: Synthetic oligonucleotide
  Target: LAMA2; (-) strand; PAM type: YTN; PAM sequence: CTT
tatatcagataagattttca

SEQ ID NO: 241732 - DNA, 20 bp, Artificial Sequence
  Description of Artificial Sequence: Synthetic oligonucleotide
  Target: LAMA2; (-) strand; PAM type: YTN; PAM sequence: CTC
tttatatcagataagatttt

SEQ ID NO: 241733 - DNA, 20 bp, Artificial Sequence
  Description of Artificial Sequence: Synthetic oligonucleotide
  Target: LAMA2; (-) strand; PAM type: YTN; PAM sequence: CTA
actctttatatcagataaga

SEQ ID NO: 241734 - DNA, 20 bp, Artificial Sequence
  Description of Artificial Sequence: Synthetic oligonucleotide
  Target: LAMA2; (-) strand; PAM type: YTN; PAM sequence: TTA
aagtaagtcctaactcttta

SEQ ID NO: 241735 - DNA, 20 bp, Artificial Sequence
  Description of Artificial Sequence: Synthetic oligonucleotide
  Target: LAMA2; (-) strand; PAM type: YTN; PAM sequence: TTT
aaagtaagtcctaactcttt

SEQ ID NO: 241736 - DNA, 20 bp, Artificial Sequence
  Description of Artificial Sequence: Synthetic oligonucleotide
  Target: LAMA2; (-) strand; PAM type: YTN; PAM sequence: TTT
taaagtaagtcctaactctt

SEQ ID NO: 241737 - DNA, 20 bp, Artificial Sequence
  Description of Artificial Sequence: Synthetic oligonucleotide
  Target: LAMA2; (-) strand; PAM type: YTN; PAM sequence: CTT
ttaaagtaagtcctaactct

SEQ ID NO: 241738 - DNA, 20 bp, Artificial Sequence
  Description of Artificial Sequence: Synthetic oligonucleotide
  Target: LAMA2; (-) strand; PAM type: YTN; PAM sequence: TTA
tatcttttaaagtaagtcct

SEQ ID NO: 241739 - DNA, 20 bp, Artificial Sequence
  Description of Artificial Sequence: Synthetic oligonucleotide
  Target: LAMA2; (-) strand; PAM type: YTN; PAM sequence: TTA
gtcattatatcttttaaagt

SEQ ID NO: 241740 - DNA, 20 bp, Artificial Sequence
  Description of Artificial Sequence: Synthetic oligonucleotide
  Target: LAMA2; (-) strand; PAM type: YTN; PAM sequence: CTT
agtcattatatcttttaaag

SEQ ID NO: 241741 - DNA, 20 bp, Artificial Sequence
  Description of Artificial Sequence: Synthetic oligonucleotide
  Target: LAMA2; (-) strand; PAM type: YTN; PAM sequence: TTG
ccttagtcattatatctttt

SEQ ID NO: 241742 - DNA, 20 bp, Artificial Sequence
  Description of Artificial Sequence: Synthetic oligonucleotide
  Target: LAMA2; (-) strand; PAM type: YTN; PAM sequence: TTT
gccttagtcattatatcttt

SEQ ID NO: 241743 - DNA, 20 bp, Artificial Sequence
  Description of Artificial Sequence: Synthetic oligonucleotide
  Target: LAMA2; (-) strand; PAM type: YTN; PAM sequence: TTT
tgccttagtcattatatctt

SEQ ID NO: 241744 - DNA, 20 bp, Artificial Sequence
  Description of Artificial Sequence: Synthetic oligonucleotide
  Target: LAMA2; (-) strand; PAM type: YTN; PAM sequence: CTG
atagcattttgccttagtca

SEQ ID NO: 241745 - DNA, 20 bp, Artificial Sequence
  Description of Artificial Sequence: Synthetic oligonucleotide
  Target: LAMA2; (-) strand; PAM type: YTN; PAM sequence: TTC
acactgatagcattttgcct

SEQ ID NO: 241746 - DNA, 20 bp, Artificial Sequence
  Description of Artificial Sequence: Synthetic oligonucleotide
  Target: LAMA2; (-) strand; PAM type: YTN; PAM sequence: TTT
cacactgatagcattttgcc

SEQ ID NO: 241747 - DNA, 20 bp, Artificial Sequence
  Description of Artificial Sequence: Synthetic oligonucleotide
  Target: LAMA2; (-) strand; PAM type: YTN; PAM sequence: TTT
tcacactgatagcattttgc

SEQ ID NO: 241748 - DNA, 20 bp, Artificial Sequence
  Description of Artificial Sequence: Synthetic oligonucleotide
  Target: LAMA2; (-) strand; PAM type: YTN; PAM sequence: TTA
ttttcacactgatagcattt

SEQ ID NO: 241749 - DNA, 20 bp, Artificial Sequence
  Description of Artificial Sequence: Synthetic oligonucleotide
  Target: LAMA2; (-) strand; PAM type: YTN; PAM sequence: TTT
attttcacactgatagcatt

SEQ ID NO: 241750 - DNA, 20 bp, Artificial Sequence
  Description of Artificial Sequence: Synthetic oligonucleotide
  Target: LAMA2; (-) strand; PAM type: YTN; PAM sequence: TTG
gtttattttcacactgatag

SEQ ID NO: 241751 - DNA, 20 bp, Artificial Sequence
  Description of Artificial Sequence: Synthetic oligonucleotide
  Target: LAMA2; (-) strand; PAM type: YTN; PAM sequence: CTA
ttggtttattttcacactga

SEQ ID NO: 241752 - DNA, 20 bp, Artificial Sequence
  Description of Artificial Sequence: Synthetic oligonucleotide
  Target: LAMA2; (-) strand; PAM type: YTN; PAM sequence: TTC
aggtctattggtttattttc

SEQ ID NO: 241753 - DNA, 20 bp, Artificial Sequence
  Description of Artificial Sequence: Synthetic oligonucleotide
  Target: LAMA2; (-) strand; PAM type: YTN; PAM sequence: TTT
caggtctattggtttatttt

SEQ ID NO: 241754 - DNA, 20 bp, Artificial Sequence
  Description of Artificial Sequence: Synthetic oligonucleotide
  Target: LAMA2; (-) strand; PAM type: YTN; PAM sequence: TTT
tcaggtctattggtttattt

SEQ ID NO: 241755 - DNA, 20 bp, Artificial Sequence
  Description of Artificial Sequence: Synthetic oligonucleotide
  Target: LAMA2; (-) strand; PAM type: YTN; PAM sequence: TTT
ttcaggtctattggtttatt

SEQ ID NO: 241756 - DNA, 20 bp, Artificial Sequence
  Description of Artificial Sequence: Synthetic oligonucleotide
  Target: LAMA2; (-) strand; PAM type: YTN; PAM sequence: TTT
tttcaggtctattggtttat

SEQ ID NO: 241757 - DNA, 20 bp, Artificial Sequence
  Description of Artificial Sequence: Synthetic oligonucleotide
  Target: LAMA2; (-) strand; PAM type: YTN; PAM sequence: CTA
ttttttcaggtctattggtt

SEQ ID NO: 241758 - DNA, 20 bp, Artificial Sequence
  Description of Artificial Sequence: Synthetic oligonucleotide
  Target: LAMA2; (-) strand; PAM type: YTN; PAM sequence: CTA
tgggctattttttcaggtct

SEQ ID NO: 241759 - DNA, 20 bp, Artificial Sequence
  Description of Artificial Sequence: Synthetic oligonucleotide
  Target: LAMA2; (-) strand; PAM type: YTN; PAM sequence: CTA
tgtatgtgatatctatgggc

SEQ ID NO: 241760 - DNA, 20 bp, Artificial Sequence
  Description of Artificial Sequence: Synthetic oligonucleotide
  Target: LAMA2; (-) strand; PAM type: YTN; PAM sequence: TTC
atctatgtatgtgatatcta

SEQ ID NO: 241761 - DNA, 20 bp, Artificial Sequence
  Description of Artificial Sequence: Synthetic oligonucleotide
  Target: LAMA2; (-) strand; PAM type: YTN; PAM sequence: TTA
agtattcatctatgtatgtg

SEQ ID NO: 241762 - DNA, 20 bp, Artificial Sequence
  Description of Artificial Sequence: Synthetic oligonucleotide
  Target: LAMA2; (-) strand; PAM type: YTN; PAM sequence: TTC
aataaaagttaagtattcat

SEQ ID NO: 241763 - DNA, 20 bp, Artificial Sequence
  Description of Artificial Sequence: Synthetic oligonucleotide
  Target: LAMA2; (-) strand; PAM type: YTN; PAM sequence: TTT
caataaaagttaagtattca

SEQ ID NO: 241764 - DNA, 20 bp, Artificial Sequence
  Description of Artificial Sequence: Synthetic oligonucleotide
  Target: LAMA2; (-) strand; PAM type: YTN; PAM sequence: CTA
tttcaataaaagttaagtat

SEQ ID NO: 241765 - DNA, 20 bp, Artificial Sequence
  Description of Artificial Sequence: Synthetic oligonucleotide
  Target: LAMA2; (-) strand; PAM type: YTN; PAM sequence: CTG
caatgcctatttcaataaaa

SEQ ID NO: 241766 - DNA, 20 bp, Artificial Sequence
  Description of Artificial Sequence: Synthetic oligonucleotide
  Target: LAMA2; (-) strand; PAM type: YTN; PAM sequence: TTG
atctgcaatgcctatttcaa

SEQ ID NO: 241767 - DNA, 20 bp, Artificial Sequence
  Description of Artificial Sequence: Synthetic oligonucleotide
  Target: LAMA2; (-) strand; PAM type: YTN; PAM sequence: TTG
tcattgatctgcaatgccta

SEQ ID NO: 241768 - DNA, 20 bp, Artificial Sequence
  Description of Artificial Sequence: Synthetic oligonucleotide
  Target: LAMA2; (-) strand; PAM type: YTN; PAM sequence: CTA
tcccattgtcattgatctgc

SEQ ID NO: 241769 - DNA, 20 bp, Artificial Sequence
  Description of Artificial Sequence: Synthetic oligonucleotide
  Target: LAMA2; (-) strand; PAM type: YTN; PAM sequence: CTG
tatagggtctatcccattgt

SEQ ID NO: 241770 - DNA, 20 bp, Artificial Sequence
  Description of Artificial Sequence: Synthetic oligonucleotide
  Target: LAMA2; (-) strand; PAM type: YTN; PAM sequence: TTA
ctgtatagggtctatcccat

SEQ ID NO: 241771 - DNA, 20 bp, Artificial Sequence
  Description of Artificial Sequence: Synthetic oligonucleotide
  Target: LAMA2; (-) strand; PAM type: YTN; PAM sequence: TTT
actgtatagggtctatccca

SEQ ID NO: 241772 - DNA, 20 bp, Artificial Sequence
  Description of Artificial Sequence: Synthetic oligonucleotide
  Target: LAMA2; (-) strand; PAM type: YTN; PAM sequence: CTA
gataatcagtggtaccagac

SEQ ID NO: 241773 - DNA, 20 bp, Artificial Sequence
  Description of Artificial Sequence: Synthetic oligonucleotide
  Target: LAMA2; (-) strand; PAM type: YTN; PAM sequence: CTC
tagataatcagtggtaccag

SEQ ID NO: 241774 - DNA, 20 bp, Artificial Sequence
  Description of Artificial Sequence: Synthetic oligonucleotide
  Target: LAMA2; (-) strand; PAM type: YTN; PAM sequence: TTC
tctagataatcagtggtacc

SEQ ID NO: 241775 - DNA, 20 bp, Artificial Sequence
  Description of Artificial Sequence: Synthetic oligonucleotide
  Target: LAMA2; (-) strand; PAM type: YTN; PAM sequence: TTT
ctctagataatcagtggtac

SEQ ID NO: 241776 - DNA, 20 bp, Artificial Sequence
  Description of Artificial Sequence: Synthetic oligonucleotide
  Target: LAMA2; (-) strand; PAM type: YTN; PAM sequence: TTT
tctctagataatcagtggta

SEQ ID NO: 241777 - DNA, 20 bp, Artificial Sequence
  Description of Artificial Sequence: Synthetic oligonucleotide
  Target: LAMA2; (-) strand; PAM type: YTN; PAM sequence: TTT
ttctctagataatcagtggt

SEQ ID NO: 241778 - DNA, 20 bp, Artificial Sequence
  Description of Artificial Sequence: Synthetic oligonucleotide
  Target: LAMA2; (-) strand; PAM type: YTN; PAM sequence: TTT
tttctctagataatcagtgg

SEQ ID NO: 241779 - DNA, 20 bp, Artificial Sequence
  Description of Artificial Sequence: Synthetic oligonucleotide
  Target: LAMA2; (-) strand; PAM type: YTN; PAM sequence: TTT
ttttctctagataatcagtg

SEQ ID NO: 241780 - DNA, 20 bp, Artificial Sequence
  Description of Artificial Sequence: Synthetic oligonucleotide
  Target: LAMA2; (-) strand; PAM type: YTN; PAM sequence: TTT
tttttctctagataatcagt

SEQ ID NO: 241781 - DNA, 20 bp, Artificial Sequence
  Description of Artificial Sequence: Synthetic oligonucleotide
  Target: LAMA2; (-) strand; PAM type: YTN; PAM sequence: TTA
ttttttttctctagataatc

SEQ ID NO: 241782 - DNA, 20 bp, Artificial Sequence
  Description of Artificial Sequence: Synthetic oligonucleotide
  Target: LAMA2; (-) strand; PAM type: YTN; PAM sequence: TTT
attttttttctctagataat

SEQ ID NO: 241783 - DNA, 20 bp, Artificial Sequence
  Description of Artificial Sequence: Synthetic oligonucleotide
  Target: LAMA2; (-) strand; PAM type: YTN; PAM sequence: TTT
tattttttttctctagataa

SEQ ID NO: 241784 - DNA, 20 bp, Artificial Sequence
  Description of Artificial Sequence: Synthetic oligonucleotide
  Target: LAMA2; (-) strand; PAM type: YTN; PAM sequence: TTA
tgtataatgtggagtaagga

SEQ ID NO: 241785 - DNA, 20 bp, Artificial Sequence
  Description of Artificial Sequence: Synthetic oligonucleotide
  Target: LAMA2; (-) strand; PAM type: YTN; PAM sequence: TTT
atgtataatgtggagtaagg

SEQ ID NO: 241786 - DNA, 20 bp, Artificial Sequence
  Description of Artificial Sequence: Synthetic oligonucleotide
  Target: LAMA2; (-) strand; PAM type: YTN; PAM sequence: TTT
tatgtataatgtggagtaag

SEQ ID NO: 241787 - DNA, 20 bp, Artificial Sequence
  Description of Artificial Sequence: Synthetic oligonucleotide
  Target: LAMA2; (-) strand; PAM type: YTN; PAM sequence: TTT
ttatgtataatgtggagtaa

SEQ ID NO: 241788 - DNA, 20 bp, Artificial Sequence
  Description of Artificial Sequence: Synthetic oligonucleotide
  Target: LAMA2; (-) strand; PAM type: YTN; PAM sequence: TTA
tttttatgtataatgtggag

SEQ ID NO: 241789 - DNA, 20 bp, Artificial Sequence
  Description of Artificial Sequence: Synthetic oligonucleotide
  Target: LAMA2; (-) strand; PAM type: YTN; PAM sequence: TTT
atttttatgtataatgtgga

SEQ ID NO: 241790 - DNA, 20 bp, Artificial Sequence
  Description of Artificial Sequence: Synthetic oligonucleotide
  Target: LAMA2; (-) strand; PAM type: YTN; PAM sequence: TTC
aaggggagtttatttttatg

SEQ ID NO: 241791 - DNA, 20 bp, Artificial Sequence
  Description of Artificial Sequence: Synthetic oligonucleotide
  Target: LAMA2; (-) strand; PAM type: YTN; PAM sequence: TTT
caaggggagtttatttttat

SEQ ID NO: 241792 - DNA, 20 bp, Artificial Sequence
  Description of Artificial Sequence: Synthetic oligonucleotide
  Target: LAMA2; (-) strand; PAM type: YTN; PAM sequence: TTG
tttcaaggggagtttatttt

SEQ ID NO: 241793 - DNA, 20 bp, Artificial Sequence
  Description of Artificial Sequence: Synthetic oligonucleotide
  Target: LAMA2; (-) strand; PAM type: YTN; PAM sequence: TTT
gtttcaaggggagtttattt

SEQ ID NO: 241794 - DNA, 20 bp, Artificial Sequence
  Description of Artificial Sequence: Synthetic oligonucleotide
  Target: LAMA2; (-) strand; PAM type: YTN; PAM sequence: TTA
tgatttgtttcaaggggagt

SEQ ID NO: 241795 - DNA, 20 bp, Artificial Sequence
  Description of Artificial Sequence: Synthetic oligonucleotide
  Target: LAMA2; (-) strand; PAM type: YTN; PAM sequence: TTT
atgatttgtttcaaggggag

SEQ ID NO: 241796 - DNA, 20 bp, Artificial Sequence
  Description of Artificial Sequence: Synthetic oligonucleotide
  Target: LAMA2; (-) strand; PAM type: YTN; PAM sequence: TTG
aaaatttatgatttgtttca

SEQ ID NO: 241797 - DNA, 20 bp, Artificial Sequence
  Description of Artificial Sequence: Synthetic oligonucleotide
  Target: LAMA2; (-) strand; PAM type: YTN; PAM sequence: TTT
gaaaatttatgatttgtttc

SEQ ID NO: 241798 - DNA, 20 bp, Artificial Sequence
  Description of Artificial Sequence: Synthetic oligonucleotide
  Target: LAMA2; (-) strand; PAM type: YTN; PAM sequence: TTT
tgaaaatttatgatttgttt

SEQ ID NO: 241799 - DNA, 20 bp, Artificial Sequence
  Description of Artificial Sequence: Synthetic oligonucleotide
  Target: LAMA2; (-) strand; PAM type: YTN; PAM sequence: TTT
ttgaaaatttatgatttgtt

SEQ ID NO: 241800 - DNA, 20 bp, Artificial Sequence
  Description of Artificial Sequence: Synthetic oligonucleotide
  Target: LAMA2; (-) strand; PAM type: YTN; PAM sequence: TTA
gcataatttttgaaaattta

SEQ ID NO: 241801 - DNA, 20 bp, Artificial Sequence
  Description of Artificial Sequence: Synthetic oligonucleotide
  Target: LAMA2; (-) strand; PAM type: YTN; PAM sequence: TTT
agcataatttttgaaaattt

SEQ ID NO: 241802 - DNA, 20 bp, Artificial Sequence
  Description of Artificial Sequence: Synthetic oligonucleotide
  Target: LAMA2; (-) strand; PAM type: YTN; PAM sequence: CTT
tagcataatttttgaaaatt

SEQ ID NO: 241803 - DNA, 20 bp, Artificial Sequence
  Description of Artificial Sequence: Synthetic oligonucleotide
  Target: LAMA2; (-) strand; PAM type: YTN; PAM sequence: TTG
tctttagcataatttttgaa

SEQ ID NO: 241804 - DNA, 20 bp, Artificial Sequence
  Description of Artificial Sequence: Synthetic oligonucleotide
  Target: LAMA2; (-) strand; PAM type: YTN; PAM sequence: TTT
gtctttagcataatttttga

SEQ ID NO: 241805 - DNA, 20 bp, Artificial Sequence
  Description of Artificial Sequence: Synthetic oligonucleotide
  Target: LAMA2; (-) strand; PAM type: YTN; PAM sequence: TTA
taaaggtttgtctttagcat

SEQ ID NO: 241806 - DNA, 20 bp, Artificial Sequence
  Description of Artificial Sequence: Synthetic oligonucleotide
  Target: LAMA2; (-) strand; PAM type: YTN; PAM sequence: TTT
ataaaggtttgtctttagca

SEQ ID NO: 241807 - DNA, 20 bp, Artificial Sequence
  Description of Artificial Sequence: Synthetic oligonucleotide
  Target: LAMA2; (-) strand; PAM type: YTN; PAM sequence: CTT
tataaaggtttgtctttagc

SEQ ID NO: 241808 - DNA, 20 bp, Artificial Sequence
  Description of Artificial Sequence: Synthetic oligonucleotide
  Target: LAMA2; (-) strand; PAM type: YTN; PAM sequence: TTG
tctttataaaggtttgtctt

SEQ ID NO: 241809 - DNA, 20 bp, Artificial Sequence
  Description of Artificial Sequence: Synthetic oligonucleotide
  Target: LAMA2; (-) strand; PAM type: YTN; PAM sequence: CTC
aatgtgttgtctttataaag

SEQ ID NO: 241810 - DNA, 20 bp, Artificial Sequence
  Description of Artificial Sequence: Synthetic oligonucleotide
  Target: LAMA2; (-) strand; PAM type: YTN; PAM sequence: TTA
tggtcaggagcagaaatctc

SEQ ID NO: 241811 - DNA, 20 bp, Artificial Sequence
  Description of Artificial Sequence: Synthetic oligonucleotide
  Target: LAMA2; (-) strand; PAM type: YTN; PAM sequence: TTC
aattatggtcaggagcagaa

SEQ ID NO: 241812 - DNA, 20 bp, Artificial Sequence
  Description of Artificial Sequence: Synthetic oligonucleotide
  Target: LAMA2; (-) strand; PAM type: YTN; PAM sequence: TTA
ttcaattatggtcaggagca

SEQ ID NO: 241813 - DNA, 20 bp, Artificial Sequence
  Description of Artificial Sequence: Synthetic oligonucleotide
  Target: LAMA2; (-) strand; PAM type: YTN; PAM sequence: CTA
ttattcaattatggtcagga

SEQ ID NO: 241814 - DNA, 20 bp, Artificial Sequence
  Description of Artificial Sequence: Synthetic oligonucleotide
  Target: LAMA2; (-) strand; PAM type: YTN; PAM sequence: CTA
gatactattattcaattatg

SEQ ID NO: 241815 - DNA, 20 bp, Artificial Sequence
  Description of Artificial Sequence: Synthetic oligonucleotide
  Target: LAMA2; (-) strand; PAM type: YTN; PAM sequence: TTA
aggtagataaggaaatctag

SEQ ID NO: 241816 - DNA, 20 bp, Artificial Sequence
  Description of Artificial Sequence: Synthetic oligonucleotide
  Target: LAMA2; (-) strand; PAM type: YTN; PAM sequence: TTT
aaggtagataaggaaatcta

SEQ ID NO: 241817 - DNA, 20 bp, Artificial Sequence
  Description of Artificial Sequence: Synthetic oligonucleotide
  Target: LAMA2; (-) strand; PAM type: YTN; PAM sequence: TTG
tttaaggtagataaggaaat

SEQ ID NO: 241818 - DNA, 20 bp, Artificial Sequence
  Description of Artificial Sequence: Synthetic oligonucleotide
  Target: LAMA2; (-) strand; PAM type: YTN; PAM sequence: TTG
ttgtttaaggtagataagga

SEQ ID NO: 241819 - DNA, 20 bp, Artificial Sequence
  Description of Artificial Sequence: Synthetic oligonucleotide
  Target: LAMA2; (-) strand; PAM type: YTN; PAM sequence: TTG
ttgttgtttaaggtagataa

SEQ ID NO: 241820 - DNA, 20 bp, Artificial Sequence
  Description of Artificial Sequence: Synthetic oligonucleotide
  Target: LAMA2; (-) strand; PAM type: YTN; PAM sequence: TTT
gttgttgtttaaggtagata

SEQ ID NO: 241821 - DNA, 20 bp, Artificial Sequence
  Description of Artificial Sequence: Synthetic oligonucleotide
  Target: LAMA2; (-) strand; PAM type: YTN; PAM sequence: CTT
tgttgttgtttaaggtagat

SEQ ID NO: 241822 - DNA, 20 bp, Artificial Sequence
  Description of Artificial Sequence: Synthetic oligonucleotide
  Target: LAMA2; (-) strand; PAM type: YTN; PAM sequence: CTC
aggctttgttgttgtttaag

SEQ ID NO: 241823 - DNA, 20 bp, Artificial Sequence
  Description of Artificial Sequence: Synthetic oligonucleotide
  Target: LAMA2; (-) strand; PAM type: YTN; PAM sequence: TTC
cccctcaggctttgttgttg

SEQ ID NO: 241824 - DNA, 20 bp, Artificial Sequence
  Description of Artificial Sequence: Synthetic oligonucleotide
  Target: LAMA2; (-) strand; PAM type: YTN; PAM sequence: TTT
ccccctcaggctttgttgtt

SEQ ID NO: 241825 - DNA, 20 bp, Artificial Sequence
  Description of Artificial Sequence: Synthetic oligonucleotide
  Target: LAMA2; (-) strand; PAM type: YTN; PAM sequence: TTT
tccccctcaggctttgttgt

SEQ ID NO: 241826 - DNA, 20 bp, Artificial Sequence
  Description of Artificial Sequence: Synthetic oligonucleotide
  Target: LAMA2; (-) strand; PAM type: YTN; PAM sequence: TTT
ttccccctcaggctttgttg

SEQ ID NO: 241827 - DNA, 20 bp, Artificial Sequence
  Description of Artificial Sequence: Synthetic oligonucleotide
  Target: LAMA2; (-) strand; PAM type: YTN; PAM sequence: TTT
tttccccctcaggctttgtt

SEQ ID NO: 241828 - DNA, 20 bp, Artificial Sequence
  Description of Artificial Sequence: Synthetic oligonucleotide
  Target: LAMA2; (-) strand; PAM type: YTN; PAM sequence: TTC
cacattttttccccctcagg

SEQ ID NO: 241829 - DNA, 20 bp, Artificial Sequence
  Description of Artificial Sequence: Synthetic oligonucleotide
  Target: LAMA2; (-) strand; PAM type: YTN; PAM sequence: TTG
ttccacattttttccccctc

SEQ ID NO: 241830 - DNA, 20 bp, Artificial Sequence
  Description of Artificial Sequence: Synthetic oligonucleotide
  Target: LAMA2; (-) strand; PAM type: YTN; PAM sequence: CTG
ttgttccacattttttcccc

SEQ ID NO: 241831 - DNA, 20 bp, Artificial Sequence
  Description of Artificial Sequence: Synthetic oligonucleotide
  Target: LAMA2; (-) strand; PAM type: YTN; PAM sequence: CTA
aaaactgttgttccacattt

SEQ ID NO: 241832 - DNA, 20 bp, Artificial Sequence
  Description of Artificial Sequence: Synthetic oligonucleotide
  Target: LAMA2; (-) strand; PAM type: YTN; PAM sequence: CTG
tggaagagtgtctaaaaact

SEQ ID NO: 241833 - DNA, 20 bp, Artificial Sequence
  Description of Artificial Sequence: Synthetic oligonucleotide
  Target: LAMA2; (-) strand; PAM type: YTN; PAM sequence: CTA
tctgtggaagagtgtctaaa

SEQ ID NO: 241834 - DNA, 20 bp, Artificial Sequence
  Description of Artificial Sequence: Synthetic oligonucleotide
  Target: LAMA2; (-) strand; PAM type: YTN; PAM sequence: TTA
tgctatctgtggaagagtgt

SEQ ID NO: 241835 - DNA, 20 bp, Artificial Sequence
  Description of Artificial Sequence: Synthetic oligonucleotide
  Target: LAMA2; (-) strand; PAM type: YTN; PAM sequence: TTT
atgctatctgtggaagagtg

SEQ ID NO: 241836 - DNA, 20 bp, Artificial Sequence
  Description of Artificial Sequence: Synthetic oligonucleotide
  Target: LAMA2; (-) strand; PAM type: YTN; PAM sequence: TTT
tatgctatctgtggaagagt

SEQ ID NO: 241837 - DNA, 20 bp, Artificial Sequence
  Description of Artificial Sequence: Synthetic oligonucleotide
  Target: LAMA2; (-) strand; PAM type: YTN; PAM sequence: TTC
agagatcacagttttatgct

SEQ ID NO: 241838 - DNA, 20 bp, Artificial Sequence
  Description of Artificial Sequence: Synthetic oligonucleotide
  Target: LAMA2; (-) strand; PAM type: YTN; PAM sequence: TTT
cagagatcacagttttatgc

SEQ ID NO: 241839 - DNA, 20 bp, Artificial Sequence
  Description of Artificial Sequence: Synthetic oligonucleotide
  Target: LAMA2; (-) strand; PAM type: YTN; PAM sequence: TTT
tcagagatcacagttttatg

SEQ ID NO: 241840 - DNA, 20 bp, Artificial Sequence
  Description of Artificial Sequence: Synthetic oligonucleotide
  Target: LAMA2; (-) strand; PAM type: YTN; PAM sequence: TTT
ttcagagatcacagttttat

SEQ ID NO: 241841 - DNA, 20 bp, Artificial Sequence
  Description of Artificial Sequence: Synthetic oligonucleotide
  Target: LAMA2; (-) strand; PAM type: YTN; PAM sequence: CTT
tttcagagatcacagtttta

SEQ ID NO: 241842 - DNA, 20 bp, Artificial Sequence
  Description of Artificial Sequence: Synthetic oligonucleotide
  Target: LAMA2; (-) strand; PAM type: YTN; PAM sequence: CTC
tttttcagagatcacagttt

SEQ ID NO: 241843 - DNA, 20 bp, Artificial Sequence
  Description of Artificial Sequence: Synthetic oligonucleotide
  Target: LAMA2; (-) strand; PAM type: YTN; PAM sequence: TTC
tctttttcagagatcacagt

SEQ ID NO: 241844 - DNA, 20 bp, Artificial Sequence
  Description of Artificial Sequence: Synthetic oligonucleotide
  Target: LAMA2; (-) strand; PAM type: YTN; PAM sequence: TTT
ctctttttcagagatcacag

SEQ ID NO: 241845 - DNA, 20 bp, Artificial Sequence
  Description of Artificial Sequence: Synthetic oligonucleotide
  Target: LAMA2; (-) strand; PAM type: YTN; PAM sequence: TTG
tttctctttttcagagatca

SEQ ID NO: 241846 - DNA, 20 bp, Artificial Sequence
  Description of Artificial Sequence: Synthetic oligonucleotide
  Target: LAMA2; (-) strand; PAM type: YTN; PAM sequence: TTT
gtttctctttttcagagatc

SEQ ID NO: 241847 - DNA, 20 bp, Artificial Sequence
  Description of Artificial Sequence: Synthetic oligonucleotide
  Target: LAMA2; (-) strand; PAM type: YTN; PAM sequence: CTC
accccatttgtttctctttt

SEQ ID NO: 241848 - DNA, 20 bp, Artificial Sequence
  Description of Artificial Sequence: Synthetic oligonucleotide
  Target: LAMA2; (-) strand; PAM type: YTN; PAM sequence: TTG
taaacctcaccccatttgtt

SEQ ID NO: 241849 - DNA, 20 bp, Artificial Sequence
  Description of Artificial Sequence: Synthetic oligonucleotide
  Target: LAMA2; (-) strand; PAM type: YTN; PAM sequence: TTG
gggcaattgtaaacctcacc

SEQ ID NO: 241850 - DNA, 20 bp, Artificial Sequence
  Description of Artificial Sequence: Synthetic oligonucleotide
  Target: LAMA2; (-) strand; PAM type: YTN; PAM sequence: CTT
ggggcaattgtaaacctcac

SEQ ID NO: 241851 - DNA, 20 bp, Artificial Sequence
  Description of Artificial Sequence: Synthetic oligonucleotide
  Target: LAMA2; (-) strand; PAM type: YTN; PAM sequence: CTG
tccccaggcaataatcttgg

SEQ ID NO: 241852 - DNA, 20 bp, Artificial Sequence
  Description of Artificial Sequence: Synthetic oligonucleotide
  Target: LAMA2; (-) strand; PAM type: YTN; PAM sequence: CTG
gagactgtccccaggcaata

SEQ ID NO: 241853 - DNA, 20 bp, Artificial Sequence
  Description of Artificial Sequence: Synthetic oligonucleotide
  Target: LAMA2; (-) strand; PAM type: YTN; PAM sequence: TTC
accctggagactgtccccag

SEQ ID NO: 241854 - DNA, 20 bp, Artificial Sequence
  Description of Artificial Sequence: Synthetic oligonucleotide
  Target: LAMA2; (-) strand; PAM type: YTN; PAM sequence: CTT
caccctggagactgtcccca

SEQ ID NO: 241855 - DNA, 20 bp, Artificial Sequence
  Description of Artificial Sequence: Synthetic oligonucleotide
  Target: LAMA2; (-) strand; PAM type: YTN; PAM sequence: CTC
aatataccaatgcacttcac

SEQ ID NO: 241856 - DNA, 20 bp, Artificial Sequence
  Description of Artificial Sequence: Synthetic oligonucleotide
  Target: LAMA2; (-) strand; PAM type: YTN; PAM sequence: TTC
tcaatataccaatgcacttc

SEQ ID NO: 241857 - DNA, 20 bp, Artificial Sequence
  Description of Artificial Sequence: Synthetic oligonucleotide
  Target: LAMA2; (-) strand; PAM type: YTN; PAM sequence: TTT
ctcaatataccaatgcactt

SEQ ID NO: 241858 - DNA, 20 bp, Artificial Sequence
  Description of Artificial Sequence: Synthetic oligonucleotide
  Target: LAMA2; (-) strand; PAM type: YTN; PAM sequence: TTT
tctcaatataccaatgcact

SEQ ID NO: 241859 - DNA, 20 bp, Artificial Sequence
  Description of Artificial Sequence: Synthetic oligonucleotide
  Target: LAMA2; (-) strand; PAM type: YTN; PAM sequence: TTT
ttctcaatataccaatgcac

SEQ ID NO: 241860 - DNA, 20 bp, Artificial Sequence
  Description of Artificial Sequence: Synthetic oligonucleotide
  Target: LAMA2; (-) strand; PAM type: YTN; PAM sequence: TTT
tttctcaatataccaatgca

SEQ ID NO: 241861 - DNA, 20 bp, Artificial Sequence
  Description of Artificial Sequence: Synthetic oligonucleotide
  Target: LAMA2; (-) strand; PAM type: YTN; PAM sequence: CTT
ttttctcaatataccaatgc

SEQ ID NO: 241862 - DNA, 20 bp, Artificial Sequence
  Description of Artificial Sequence: Synthetic oligonucleotide
  Target: LAMA2; (-) strand; PAM type: YTN; PAM sequence: TTG
gcttttttctcaatatacca

SEQ ID NO: 241863 - DNA, 20 bp, Artificial Sequence
  Description of Artificial Sequence: Synthetic oligonucleotide
  Target: LAMA2; (-) strand; PAM type: YTN; PAM sequence: TTT
ggcttttttctcaatatacc

SEQ ID NO: 241864 - DNA, 20 bp, Artificial Sequence
  Description of Artificial Sequence: Synthetic oligonucleotide
  Target: LAMA2; (-) strand; PAM type: YTN; PAM sequence: CTG
tgtttggcttttttctcaat

SEQ ID NO: 241865 - DNA, 20 bp, Artificial Sequence
  Description of Artificial Sequence: Synthetic oligonucleotide
  Target: LAMA2; (-) strand; PAM type: YTN; PAM sequence: TTG
gcaaggccaggctgtgtttg

SEQ ID NO: 241866 - DNA, 20 bp, Artificial Sequence
  Description of Artificial Sequence: Synthetic oligonucleotide
  Target: LAMA2; (-) strand; PAM type: YTN; PAM sequence: TTT
ggcaaggccaggctgtgttt

SEQ ID NO: 241867 - DNA, 20 bp, Artificial Sequence
  Description of Artificial Sequence: Synthetic oligonucleotide
  Target: LAMA2; (-) strand; PAM type: YTN; PAM sequence: TTC
aatttggcaaggccaggctg

SEQ ID NO: 241868 - DNA, 20 bp, Artificial Sequence
  Description of Artificial Sequence: Synthetic oligonucleotide
  Target: LAMA2; (-) strand; PAM type: YTN; PAM sequence: TTT
caatttggcaaggccaggct

SEQ ID NO: 241869 - DNA, 20 bp, Artificial Sequence
  Description of Artificial Sequence: Synthetic oligonucleotide
  Target: LAMA2; (-) strand; PAM type: YTN; PAM sequence: CTT
tcaatttggcaaggccaggc

SEQ ID NO: 241870 - DNA, 20 bp, Artificial Sequence
  Description of Artificial Sequence: Synthetic oligonucleotide
  Target: LAMA2; (-) strand; PAM type: YTN; PAM sequence: CTG
tctttcaatttggcaaggcc

SEQ ID NO: 241871 - DNA, 20 bp, Artificial Sequence
  Description of Artificial Sequence: Synthetic oligonucleotide
  Target: LAMA2; (-) strand; PAM type: YTN; PAM sequence: CTC
tgtctttcaatttggcaagg

SEQ ID NO: 241872 - DNA, 20 bp, Artificial Sequence
  Description of Artificial Sequence: Synthetic oligonucleotide
  Target: LAMA2; (-) strand; PAM type: YTN; PAM sequence: CTA
acctctgtctttcaatttgg

SEQ ID NO: 241873 - DNA, 20 bp, Artificial Sequence
  Description of Artificial Sequence: Synthetic oligonucleotide
  Target: LAMA2; (-) strand; PAM type: YTN; PAM sequence: CTC
catgaaccctaacctctgtc

SEQ ID NO: 241874 - DNA, 20 bp, Artificial Sequence
  Description of Artificial Sequence: Synthetic oligonucleotide
  Target: LAMA2; (-) strand; PAM type: YTN; PAM sequence: TTG
gcctccatgaaccctaacct

SEQ ID NO: 241875 - DNA, 20 bp, Artificial Sequence
  Description of Artificial Sequence: Synthetic oligonucleotide
  Target: LAMA2; (-) strand; PAM type: YTN; PAM sequence: CTT
ggcctccatgaaccctaacc

SEQ ID NO: 241876 - DNA, 20 bp, Artificial Sequence
  Description of Artificial Sequence: Synthetic oligonucleotide
  Target: LAMA2; (-) strand; PAM type: YTN; PAM sequence: CTG
ccttggcctccatgaaccct

SEQ ID NO: 241877 - DNA, 20 bp, Artificial Sequence
  Description of Artificial Sequence: Synthetic oligonucleotide
  Target: LAMA2; (-) strand; PAM type: YTN; PAM sequence: CTA
gctgccttggcctccatgaa

SEQ ID NO: 241878 - DNA, 20 bp, Artificial Sequence
  Description of Artificial Sequence: Synthetic oligonucleotide
  Target: LAMA2; (-) strand; PAM type: YTN; PAM sequence: CTC
acaaatgctagctgccttgg

SEQ ID NO: 241879 - DNA, 20 bp, Artificial Sequence
  Description of Artificial Sequence: Synthetic oligonucleotide
  Target: LAMA2; (-) strand; PAM type: YTN; PAM sequence: CTG
cctcacaaatgctagctgcc

SEQ ID NO: 241880 - DNA, 20 bp, Artificial Sequence
  Description of Artificial Sequence: Synthetic oligonucleotide
  Target: LAMA2; (-) strand; PAM type: YTN; PAM sequence: TTG
tatgctgcctcacaaatgct

SEQ ID NO: 241881 - DNA, 20 bp, Artificial Sequence
  Description of Artificial Sequence: Synthetic oligonucleotide
  Target: LAMA2; (-) strand; PAM type: YTN; PAM sequence: CTT
gtatgctgcctcacaaatgc

SEQ ID NO: 241882 - DNA, 20 bp, Artificial Sequence
  Description of Artificial Sequence: Synthetic oligonucleotide
  Target: LAMA2; (-) strand; PAM type: YTN; PAM sequence: TTC
ccttgtatgctgcctcacaa

SEQ ID NO: 241883 - DNA, 20 bp, Artificial Sequence
  Description of Artificial Sequence: Synthetic oligonucleotide
  Target: LAMA2; (-) strand; PAM type: YTN; PAM sequence: CTT
cccttgtatgctgcctcaca

SEQ ID NO: 241884 - DNA, 20 bp, Artificial Sequence
  Description of Artificial Sequence: Synthetic oligonucleotide
  Target: LAMA2; (-) strand; PAM type: YTN; PAM sequence: CTC
ttcccttgtatgctgcctca

SEQ ID NO: 241885 - DNA, 20 bp, Artificial Sequence
  Description of Artificial Sequence: Synthetic oligonucleotide
  Target: LAMA2; (-) strand; PAM type: YTN; PAM sequence: TTC
ctcttcccttgtatgctgcc

SEQ ID NO: 241886 - DNA, 20 bp, Artificial Sequence
  Description of Artificial Sequence: Synthetic oligonucleotide
  Target: LAMA2; (-) strand; PAM type: YTN; PAM sequence: CTG
tgcaggtcaggttcctcttc

SEQ ID NO: 241887 - DNA, 20 bp, Artificial Sequence
  Description of Artificial Sequence: Synthetic oligonucleotide
  Target: LAMA2; (-) strand; PAM type: YTN; PAM sequence: CTC
tgtgcaggtcaggttcctct

SEQ ID NO: 241888 - DNA, 20 bp, Artificial Sequence
  Description of Artificial Sequence: Synthetic oligonucleotide
  Target: LAMA2; (-) strand; PAM type: YTN; PAM sequence: CTC
tctgtgcaggtcaggttcct

SEQ ID NO: 241889 - DNA, 20 bp, Artificial Sequence
  Description of Artificial Sequence: Synthetic oligonucleotide
  Target: LAMA2; (-) strand; PAM type: YTN; PAM sequence: CTC
tctctgtgcaggtcaggttc

SEQ ID NO: 241890 - DNA, 20 bp, Artificial Sequence
  Description of Artificial Sequence: Synthetic oligonucleotide
  Target: LAMA2; (-) strand; PAM type: YTN; PAM sequence: CTC
tctctctgtgcaggtcaggt

SEQ ID NO: 241891 - DNA, 20 bp, Artificial Sequence
  Description of Artificial Sequence: Synthetic oligonucleotide
  Target: LAMA2; (-) strand; PAM type: YTN; PAM sequence: CTC
gtctctctctctgtgcaggt

SEQ ID NO: 241892 - DNA, 20 bp, Artificial Sequence
  Description of Artificial Sequence: Synthetic oligonucleotide
  Target: LAMA2; (-) strand; PAM type: YTN; PAM sequence: CTC
ctcgtctctctctctgtgca

SEQ ID NO: 241893 - DNA, 20 bp, Artificial Sequence
  Description of Artificial Sequence: Synthetic oligonucleotide
  Target: LAMA2; (-) strand; PAM type: YTN; PAM sequence: CTC
tcctcgtctctctctctgtg

SEQ ID NO: 241894 - DNA, 20 bp, Artificial Sequence
  Description of Artificial Sequence: Synthetic oligonucleotide
  Target: LAMA2; (-) strand; PAM type: YTN; PAM sequence: CTC
tctcctcgtctctctctctg

SEQ ID NO: 241895 - DNA, 20 bp, Artificial Sequence
  Description of Artificial Sequence: Synthetic oligonucleotide
  Target: LAMA2; (-) strand; PAM type: YTN; PAM sequence: CTG
cagctctctcctcgtctctc

SEQ ID NO: 241896 - DNA, 20 bp, Artificial Sequence
  Description of Artificial Sequence: Synthetic oligonucleotide
  Target: LAMA2; (-) strand; PAM type: YTN; PAM sequence: TTG
cagatagctgcagctctctc

SEQ ID NO: 241897 - DNA, 20 bp, Artificial Sequence
  Description of Artificial Sequence: Synthetic oligonucleotide
  Target: LAMA2; (-) strand; PAM type: YTN; PAM sequence: TTT
gcagatagctgcagctctct

SEQ ID NO: 241898 - DNA, 20 bp, Artificial Sequence
  Description of Artificial Sequence: Synthetic oligonucleotide
  Target: LAMA2; (-) strand; PAM type: YTN; PAM sequence: CTT
tgcagatagctgcagctctc

SEQ ID NO: 241899 - DNA, 20 bp, Artificial Sequence
  Description of Artificial Sequence: Synthetic oligonucleotide
  Target: LAMA2; (-) strand; PAM type: YTN; PAM sequence: CTC
tttgcagatagctgcagctc

SEQ ID NO: 241900 - DNA, 20 bp, Artificial Sequence
  Description of Artificial Sequence: Synthetic oligonucleotide
  Target: LAMA2; (-) strand; PAM type: YTN; PAM sequence: TTC
tctttgcagatagctgcagc

SEQ ID NO: 241901 - DNA, 20 bp, Artificial Sequence
  Description of Artificial Sequence: Synthetic oligonucleotide
  Target: LAMA2; (-) strand; PAM type: YTN; PAM sequence: TTT
ctctttgcagatagctgcag

SEQ ID NO: 241902 - DNA, 20 bp, Artificial Sequence
  Description of Artificial Sequence: Synthetic oligonucleotide
  Target: LAMA2; (-) strand; PAM type: YTN; PAM sequence: CTC
cggtttctctttgcagatag

SEQ ID NO: 241903 - DNA, 20 bp, Artificial Sequence
  Description of Artificial Sequence: Synthetic oligonucleotide
  Target: LAMA2; (-) strand; PAM type: YTN; PAM sequence: CTC
agtactccggtttctctttg

SEQ ID NO: 241904 - DNA, 20 bp, Artificial Sequence
  Description of Artificial Sequence: Synthetic oligonucleotide
  Target: LAMA2; (-) strand; PAM type: YTN; PAM sequence: TTG
caactcagtactccggtttc

SEQ ID NO: 241905 - DNA, 20 bp, Artificial Sequence
  Description of Artificial Sequence: Synthetic oligonucleotide
  Target: LAMA2; (-) strand; PAM type: YTN; PAM sequence: TTT
gcaactcagtactccggttt

SEQ ID NO: 241906 - DNA, 20 bp, Artificial Sequence
  Description of Artificial Sequence: Synthetic oligonucleotide
  Target: LAMA2; (-) strand; PAM type: YTN; PAM sequence: TTC
acatatttgcaactcagtac

SEQ ID NO: 241907 - DNA, 20 bp, Artificial Sequence
  Description of Artificial Sequence: Synthetic oligonucleotide
  Target: LAMA2; (-) strand; PAM type: YTN; PAM sequence: TTT
cacatatttgcaactcagta

SEQ ID NO: 241908 - DNA, 20 bp, Artificial Sequence
  Description of Artificial Sequence: Synthetic oligonucleotide
  Target: LAMA2; (-) strand; PAM type: YTN; PAM sequence: CTT
tcacatatttgcaactcagt

SEQ ID NO: 241909 - DNA, 20 bp, Artificial Sequence
  Description of Artificial Sequence: Synthetic oligonucleotide
  Target: LAMA2; (-) strand; PAM type: YTN; PAM sequence: TTC
tttcacatatttgcaactca

SEQ ID NO: 241910 - DNA, 20 bp, Artificial Sequence
  Description of Artificial Sequence: Synthetic oligonucleotide
  Target: LAMA2; (-) strand; PAM type: YTN; PAM sequence: TTT
ctttcacatatttgcaactc

SEQ ID NO: 241911 - DNA, 20 bp, Artificial Sequence
  Description of Artificial Sequence: Synthetic oligonucleotide
  Target: LAMA2; (-) strand; PAM type: YTN; PAM sequence: TTT
tctttcacatatttgcaact

SEQ ID NO: 241912 - DNA, 20 bp, Artificial Sequence
  Description of Artificial Sequence: Synthetic oligonucleotide
  Target: LAMA2; (-) strand; PAM type: YTN; PAM sequence: TTA
ggtagttttctttcacatat

SEQ ID NO: 241913 - DNA, 20 bp, Artificial Sequence
  Description of Artificial Sequence: Synthetic oligonucleotide
  Target: LAMA2; (-) strand; PAM type: YTN; PAM sequence: CTT
aggtagttttctttcacata

SEQ ID NO: 241914 - DNA, 20 bp, Artificial Sequence
  Description of Artificial Sequence: Synthetic oligonucleotide
  Target: LAMA2; (-) strand; PAM type: YTN; PAM sequence: TTA
gccttaggtagttttctttc

SEQ ID NO: 241915 - DNA, 20 bp, Artificial Sequence
  Description of Artificial Sequence: Synthetic oligonucleotide
  Target: LAMA2; (-) strand; PAM type: YTN; PAM sequence: TTC
attagccttaggtagttttc

SEQ ID NO: 241916 - DNA, 20 bp, Artificial Sequence
  Description of Artificial Sequence: Synthetic oligonucleotide
  Target: LAMA2; (-) strand; PAM type: YTN; PAM sequence: TTT
cattagccttaggtagtttt

SEQ ID NO: 241917 - DNA, 20 bp, Artificial Sequence
  Description of Artificial Sequence: Synthetic oligonucleotide
  Target: LAMA2; (-) strand; PAM type: YTN; PAM sequence: CTT
tcattagccttaggtagttt

SEQ ID NO: 241918 - DNA, 20 bp, Artificial Sequence
  Description of Artificial Sequence: Synthetic oligonucleotide
  Target: LAMA2; (-) strand; PAM type: YTN; PAM sequence: TTC
tttcattagccttaggtagt

SEQ ID NO: 241919 - DNA, 20 bp, Artificial Sequence
  Description of Artificial Sequence: Synthetic oligonucleotide
  Target: LAMA2; (-) strand; PAM type: YTN; PAM sequence: TTA
gtgattctttcattagcctt

SEQ ID NO: 241920 - DNA, 20 bp, Artificial Sequence
  Description of Artificial Sequence: Synthetic oligonucleotide
  Target: LAMA2; (-) strand; PAM type: YTN; PAM sequence: TTT
agtgattctttcattagcct

SEQ ID NO: 241921 - DNA, 20 bp, Artificial Sequence
  Description of Artificial Sequence: Synthetic oligonucleotide
  Target: LAMA2; (-) strand; PAM type: YTN; PAM sequence: TTT
tagtgattctttcattagcc

SEQ ID NO: 241922 - DNA, 20 bp, Artificial Sequence
  Description of Artificial Sequence: Synthetic oligonucleotide
  Target: LAMA2; (-) strand; PAM type: YTN; PAM sequence: TTT
ttagtgattctttcattagc

SEQ ID NO: 241923 - DNA, 20 bp, Artificial Sequence
  Description of Artificial Sequence: Synthetic oligonucleotide
  Target: LAMA2; (-) strand; PAM type: YTN; PAM sequence: CTT
tttagtgattctttcattag

SEQ ID NO: 241924 - DNA, 20 bp, Artificial Sequence
  Description of Artificial Sequence: Synthetic oligonucleotide
  Target: LAMA2; (-) strand; PAM type: YTN; PAM sequence: CTA
ctttttagtgattctttcat

SEQ ID NO: 241925 - DNA, 20 bp, Artificial Sequence
  Description of Artificial Sequence: Synthetic oligonucleotide
  Target: LAMA2; (-) strand; PAM type: YTN; PAM sequence: TTA
ctactttttagtgattcttt

SEQ ID NO: 241926 - DNA, 20 bp, Artificial Sequence
  Description of Artificial Sequence: Synthetic oligonucleotide
  Target: LAMA2; (-) strand; PAM type: YTN; PAM sequence: CTT
actactttttagtgattctt

SEQ ID NO: 241927 - DNA, 20 bp, Artificial Sequence
  Description of Artificial Sequence: Synthetic oligonucleotide
  Target: LAMA2; (-) strand; PAM type: YTN; PAM sequence: CTC
ttactactttttagtgattc

SEQ ID NO: 241928 - DNA, 20 bp, Artificial Sequence
  Description of Artificial Sequence: Synthetic oligonucleotide
  Target: LAMA2; (-) strand; PAM type: YTN; PAM sequence: TTC
tcttactactttttagtgat

SEQ ID NO: 241929 - DNA, 20 bp, Artificial Sequence
  Description of Artificial Sequence: Synthetic oligonucleotide
  Target: LAMA2; (-) strand; PAM type: YTN; PAM sequence: TTT
ctcttactactttttagtga

SEQ ID NO: 241930 - DNA, 20 bp, Artificial Sequence
  Description of Artificial Sequence: Synthetic oligonucleotide
  Target: LAMA2; (-) strand; PAM type: YTN; PAM sequence: TTG
tttctcttactactttttag

SEQ ID NO: 241931 - DNA, 20 bp, Artificial Sequence
  Description of Artificial Sequence: Synthetic oligonucleotide
  Target: LAMA2; (-) strand; PAM type: YTN; PAM sequence: CTC
aggaattgtttctcttacta

SEQ ID NO: 241932 - DNA, 20 bp, Artificial Sequence
  Description of Artificial Sequence: Synthetic oligonucleotide
  Target: LAMA2; (-) strand; PAM type: YTN; PAM sequence: CTG
tatcagctcaggaattgttt

SEQ ID NO: 241933 - DNA, 20 bp, Artificial Sequence
  Description of Artificial Sequence: Synthetic oligonucleotide
  Target: LAMA2; (-) strand; PAM type: YTN; PAM sequence: TTA
gcagccctgtatcagctcag

SEQ ID NO: 241934 - DNA, 20 bp, Artificial Sequence
  Description of Artificial Sequence: Synthetic oligonucleotide
  Target: LAMA2; (-) strand; PAM type: YTN; PAM sequence: CTA
ttagcagccctgtatcagct

SEQ ID NO: 241935 - DNA, 20 bp, Artificial Sequence
  Description of Artificial Sequence: Synthetic oligonucleotide
  Target: LAMA2; (-) strand; PAM type: YTN; PAM sequence: TTA
ggaaaataaactattagcag

SEQ ID NO: 241936 - DNA, 20 bp, Artificial Sequence
  Description of Artificial Sequence: Synthetic oligonucleotide
  Target: LAMA2; (-) strand; PAM type: YTN; PAM sequence: TTG
ggtgttaggaaaataaacta

SEQ ID NO: 241937 - DNA, 20 bp, Artificial Sequence
  Description of Artificial Sequence: Synthetic oligonucleotide
  Target: LAMA2; (-) strand; PAM type: YTN; PAM sequence: TTT
gggtgttaggaaaataaact

SEQ ID NO: 241938 - DNA, 20 bp, Artificial Sequence
  Description of Artificial Sequence: Synthetic oligonucleotide
  Target: LAMA2; (-) strand; PAM type: YTN; PAM sequence: CTT
tgggtgttaggaaaataaac

SEQ ID NO: 241939 - DNA, 20 bp, Artificial Sequence
  Description of Artificial Sequence: Synthetic oligonucleotide
  Target: LAMA2; (-) strand; PAM type: YTN; PAM sequence: TTC
cactttgggtgttaggaaaa

SEQ ID NO: 241940 - DNA, 20 bp, Artificial Sequence
  Description of Artificial Sequence: Synthetic oligonucleotide
  Target: LAMA2; (-) strand; PAM type: YTN; PAM sequence: TTA
tgaagacattccactttggg

SEQ ID NO: 241941 - DNA, 20 bp, Artificial Sequence
  Description of Artificial Sequence: Synthetic oligonucleotide
  Target: LAMA2; (-) strand; PAM type: YTN; PAM sequence: CTT
atgaagacattccactttgg

SEQ ID NO: 241942 - DNA, 20 bp, Artificial Sequence
  Description of Artificial Sequence: Synthetic oligonucleotide
  Target: LAMA2; (-) strand; PAM type: YTN; PAM sequence: CTC
ttatgaagacattccacttt

SEQ ID NO: 241943 - DNA, 20 bp, Artificial Sequence
  Description of Artificial Sequence: Synthetic oligonucleotide
  Target: LAMA2; (-) strand; PAM type: YTN; PAM sequence: TTA
gtccctcttatgaagacatt

SEQ ID NO: 241944 - DNA, 20 bp, Artificial Sequence
  Description of Artificial Sequence: Synthetic oligonucleotide
  Target: LAMA2; (-) strand; PAM type: YTN; PAM sequence: TTT
agtccctcttatgaagacat

SEQ ID NO: 241945 - DNA, 20 bp, Artificial Sequence
  Description of Artificial Sequence: Synthetic oligonucleotide
  Target: LAMA2; (-) strand; PAM type: YTN; PAM sequence: CTA
atttagtccctcttatgaag

SEQ ID NO: 241946 - DNA, 20 bp, Artificial Sequence
  Description of Artificial Sequence: Synthetic oligonucleotide
  Target: LAMA2; (-) strand; PAM type: YTN; PAM sequence: TTG
gagctaatttagtccctctt

SEQ ID NO: 241947 - DNA, 20 bp, Artificial Sequence
  Description of Artificial Sequence: Synthetic oligonucleotide
  Target: LAMA2; (-) strand; PAM type: YTN; PAM sequence: TTT
ggagctaatttagtccctct

SEQ ID NO: 241948 - DNA, 20 bp, Artificial Sequence
  Description of Artificial Sequence: Synthetic oligonucleotide
  Target: LAMA2; (-) strand; PAM type: YTN; PAM sequence: TTG
tagtttggagctaatttagt

SEQ ID NO: 241949 - DNA, 20 bp, Artificial Sequence
  Description of Artificial Sequence: Synthetic oligonucleotide
  Target: LAMA2; (-) strand; PAM type: YTN; PAM sequence: CTT
gtagtttggagctaatttag

SEQ ID NO: 241950 - DNA, 20 bp, Artificial Sequence
  Description of Artificial Sequence: Synthetic oligonucleotide
  Target: LAMA2; (-) strand; PAM type: YTN; PAM sequence: CTA
gagtagcttgtagtttggag

SEQ ID NO: 241951 - DNA, 20 bp, Artificial Sequence
  Description of Artificial Sequence: Synthetic oligonucleotide
  Target: LAMA2; (-) strand; PAM type: YTN; PAM sequence: TTG
gggtgaacctagagtagctt

SEQ ID NO: 241952 - DNA, 20 bp, Artificial Sequence
  Description of Artificial Sequence: Synthetic oligonucleotide
  Target: LAMA2; (-) strand; PAM type: YTN; PAM sequence: TTG
ttggggtgaacctagagtag

SEQ ID NO: 241953 - DNA, 20 bp, Artificial Sequence
  Description of Artificial Sequence: Synthetic oligonucleotide
  Target: LAMA2; (-) strand; PAM type: YTN; PAM sequence: TTT
gttggggtgaacctagagta

SEQ ID NO: 241954 - DNA, 20 bp, Artificial Sequence
  Description of Artificial Sequence: Synthetic oligonucleotide
  Target: LAMA2; (-) strand; PAM type: YTN; PAM sequence: TTC
aagatttgttggggtgaacc

SEQ ID NO: 241955 - DNA, 20 bp, Artificial Sequence
  Description of Artificial Sequence: Synthetic oligonucleotide
  Target: LAMA2; (-) strand; PAM type: YTN; PAM sequence: TTT
caagatttgttggggtgaac

SEQ ID NO: 241956 - DNA, 20 bp, Artificial Sequence
  Description of Artificial Sequence: Synthetic oligonucleotide
  Target: LAMA2; (-) strand; PAM type: YTN; PAM sequence: TTT
tcaagatttgttggggtgaa

SEQ ID NO: 241957 - DNA, 20 bp, Artificial Sequence
  Description of Artificial Sequence: Synthetic oligonucleotide
  Target: LAMA2; (-) strand; PAM type: YTN; PAM sequence: CTG
ttttcaagatttgttggggt

SEQ ID NO: 241958 - DNA, 20 bp, Artificial Sequence
  Description of Artificial Sequence: Synthetic oligonucleotide
  Target: LAMA2; (-) strand; PAM type: YTN; PAM sequence: TTA
aggctgttttcaagatttgt

SEQ ID NO: 241959 - DNA, 20 bp, Artificial Sequence
  Description of Artificial Sequence: Synthetic oligonucleotide
  Target: LAMA2; (-) strand; PAM type: YTN; PAM sequence: TTT
aaggctgttttcaagatttg

SEQ ID NO: 241960 - DNA, 20 bp, Artificial Sequence
  Description of Artificial Sequence: Synthetic oligonucleotide
  Target: LAMA2; (-) strand; PAM type: YTN; PAM sequence: TTT
taaggctgttttcaagattt

SEQ ID NO: 241961 - DNA, 20 bp, Artificial Sequence
  Description of Artificial Sequence: Synthetic oligonucleotide
  Target: LAMA2; (-) strand; PAM type: YTN; PAM sequence: CTT
ttaaggctgttttcaagatt

SEQ ID NO: 241962 - DNA, 20 bp, Artificial Sequence
  Description of Artificial Sequence: Synthetic oligonucleotide
  Target: LAMA2; (-) strand; PAM type: YTN; PAM sequence: TTC
ttttaaggctgttttcaaga

SEQ ID NO: 241963 - DNA, 20 bp, Artificial Sequence
  Description of Artificial Sequence: Synthetic oligonucleotide
  Target: LAMA2; (-) strand; PAM type: YTN; PAM sequence: CTT
cttttaaggctgttttcaag

SEQ ID NO: 241964 - DNA, 20 bp, Artificial Sequence
  Description of Artificial Sequence: Synthetic oligonucleotide
  Target: LAMA2; (-) strand; PAM type: YTN; PAM sequence: TTG
acttcttttaaggctgtttt

SEQ ID NO: 241965 - DNA, 20 bp, Artificial Sequence
  Description of Artificial Sequence: Synthetic oligonucleotide
  Target: LAMA2; (-) strand; PAM type: YTN; PAM sequence: TTG
gaataagttgacttctttta

SEQ ID NO: 241966 - DNA, 20 bp, Artificial Sequence
  Description of Artificial Sequence: Synthetic oligonucleotide
  Target: LAMA2; (-) strand; PAM type: YTN; PAM sequence: TTT
ggaataagttgacttctttt

SEQ ID NO: 241967 - DNA, 20 bp, Artificial Sequence
  Description of Artificial Sequence: Synthetic oligonucleotide
  Target: LAMA2; (-) strand; PAM type: YTN; PAM sequence: TTA
tttggaataagttgacttct

SEQ ID NO: 241968 - DNA, 20 bp, Artificial Sequence
  Description of Artificial Sequence: Synthetic oligonucleotide
  Target: LAMA2; (-) strand; PAM type: YTN; PAM sequence: TTT
atttggaataagttgacttc

SEQ ID NO: 241969 - DNA, 20 bp, Artificial Sequence
  Description of Artificial Sequence: Synthetic oligonucleotide
  Target: LAMA2; (-) strand; PAM type: YTN; PAM sequence: TTA
atttatttggaataagttga

SEQ ID NO: 241970 - DNA, 20 bp, Artificial Sequence
  Description of Artificial Sequence: Synthetic oligonucleotide
  Target: LAMA2; (-) strand; PAM type: YTN; PAM sequence: CTG
gcatgcagttaatttatttg

SEQ ID NO: 241971 - DNA, 20 bp, Artificial Sequence
  Description of Artificial Sequence: Synthetic oligonucleotide
  Target: LAMA2; (-) strand; PAM type: YTN; PAM sequence: TTC
tggcatgcagttaatttatt

SEQ ID NO: 241972 - DNA, 20 bp, Artificial Sequence
  Description of Artificial Sequence: Synthetic oligonucleotide
  Target: LAMA2; (-) strand; PAM type: YTN; PAM sequence: TTG
ttctggcatgcagttaattt

SEQ ID NO: 241973 - DNA, 20 bp, Artificial Sequence
  Description of Artificial Sequence: Synthetic oligonucleotide
  Target: LAMA2; (-) strand; PAM type: YTN; PAM sequence: TTT
gttctggcatgcagttaatt

SEQ ID NO: 241974 - DNA, 20 bp, Artificial Sequence
  Description of Artificial Sequence: Synthetic oligonucleotide
  Target: LAMA2; (-) strand; PAM type: YTN; PAM sequence: CTT
tgttctggcatgcagttaat

SEQ ID NO: 241975 - DNA, 20 bp, Artificial Sequence
  Description of Artificial Sequence: Synthetic oligonucleotide
  Target: LAMA2; (-) strand; PAM type: YTN; PAM sequence: TTG
gactttgttctggcatgcag

SEQ ID NO: 241976 - DNA, 20 bp, Artificial Sequence
  Description of Artificial Sequence: Synthetic oligonucleotide
  Target: LAMA2; (-) strand; PAM type: YTN; PAM sequence: TTA
aatagtattggactttgttc

SEQ ID NO: 241977 - DNA, 20 bp, Artificial Sequence
  Description of Artificial Sequence: Synthetic oligonucleotide
  Target: LAMA2; (-) strand; PAM type: YTN; PAM sequence: TTG
taattaaatagtattggact

SEQ ID NO: 241978 - DNA, 20 bp, Artificial Sequence
  Description of Artificial Sequence: Synthetic oligonucleotide
  Target: LAMA2; (-) strand; PAM type: YTN; PAM sequence: TTG
ttgtaattaaatagtattgg

SEQ ID NO: 241979 - DNA, 20 bp, Artificial Sequence
  Description of Artificial Sequence: Synthetic oligonucleotide
  Target: LAMA2; (-) strand; PAM type: YTN; PAM sequence: TTT
gttgtaattaaatagtattg

SEQ ID NO: 241980 - DNA, 20 bp, Artificial Sequence
  Description of Artificial Sequence: Synthetic oligonucleotide
  Target: LAMA2; (-) strand; PAM type: YTN; PAM sequence: TTT
tgttgtaattaaatagtatt

SEQ ID NO: 241981 - DNA, 20 bp, Artificial Sequence
  Description of Artificial Sequence: Synthetic oligonucleotide
  Target: LAMA2; (-) strand; PAM type: YTN; PAM sequence: CTG
gattttgttgtaattaaata

SEQ ID NO: 241982 - DNA, 20 bp, Artificial Sequence
  Description of Artificial Sequence: Synthetic oligonucleotide
  Target: LAMA2; (-) strand; PAM type: YTN; PAM sequence: TTG
agtgctggattttgttgtaa

SEQ ID NO: 241983 - DNA, 20 bp, Artificial Sequence
  Description of Artificial Sequence: Synthetic oligonucleotide
  Target: LAMA2; (-) strand; PAM type: YTN; PAM sequence: TTG
ttgagtgctggattttgttg

SEQ ID NO: 241984 - DNA, 20 bp, Artificial Sequence
  Description of Artificial Sequence: Synthetic oligonucleotide
  Target: LAMA2; (-) strand; PAM type: YTN; PAM sequence: TTA
cattgttgagtgctggattt

SEQ ID NO: 241985 - DNA, 20 bp, Artificial Sequence
  Description of Artificial Sequence: Synthetic oligonucleotide
  Target: LAMA2; (-) strand; PAM type: YTN; PAM sequence: TTT
acattgttgagtgctggatt

SEQ ID NO: 241986 - DNA, 20 bp, Artificial Sequence
  Description of Artificial Sequence: Synthetic oligonucleotide
  Target: LAMA2; (-) strand; PAM type: YTN; PAM sequence: TTT
tacattgttgagtgctggat

SEQ ID NO: 241987 - DNA, 20 bp, Artificial Sequence
  Description of Artificial Sequence: Synthetic oligonucleotide
  Target: LAMA2; (-) strand; PAM type: YTN; PAM sequence: TTG
atgccaaacatcatgaattt

SEQ ID NO: 241988 - DNA, 20 bp, Artificial Sequence
  Description of Artificial Sequence: Synthetic oligonucleotide
  Target: LAMA2; (-) strand; PAM type: YTN; PAM sequence: TTT
gatgccaaacatcatgaatt

SEQ ID NO: 241989 - DNA, 20 bp, Artificial Sequence
  Description of Artificial Sequence: Synthetic oligonucleotide
  Target: LAMA2; (-) strand; PAM type: YTN; PAM sequence: TTG
atttgatgccaaacatcatg

SEQ ID NO: 241990 - DNA, 20 bp, Artificial Sequence
  Description of Artificial Sequence: Synthetic oligonucleotide
  Target: LAMA2; (-) strand; PAM type: YTN; PAM sequence: TTT
gatttgatgccaaacatcat

SEQ ID NO: 241991 - DNA, 20 bp, Artificial Sequence
  Description of Artificial Sequence: Synthetic oligonucleotide
  Target: LAMA2; (-) strand; PAM type: YTN; PAM sequence: TTT
tgatttgatgccaaacatca

SEQ ID NO: 241992 - DNA, 20 bp, Artificial Sequence
  Description of Artificial Sequence: Synthetic oligonucleotide
  Target: LAMA2; (-) strand; PAM type: YTN; PAM sequence: TTT
ttgatttgatgccaaacatc

SEQ ID NO: 241993 - DNA, 20 bp, Artificial Sequence
  Description of Artificial Sequence: Synthetic oligonucleotide
  Target: LAMA2; (-) strand; PAM type: YTN; PAM sequence: CTG
gtagtttttgatttgatgcc

SEQ ID NO: 241994 - DNA, 20 bp, Artificial Sequence
  Description of Artificial Sequence: Synthetic oligonucleotide
  Target: LAMA2; (-) strand; PAM type: YTN; PAM sequence: TTA
tgtacctggtagtttttgat

SEQ ID NO: 241995 - DNA, 20 bp, Artificial Sequence
  Description of Artificial Sequence: Synthetic oligonucleotide
  Target: LAMA2; (-) strand; PAM type: YTN; PAM sequence: TTT
atgtacctggtagtttttga

SEQ ID NO: 241996 - DNA, 20 bp, Artificial Sequence
  Description of Artificial Sequence: Synthetic oligonucleotide
  Target: LAMA2; (-) strand; PAM type: YTN; PAM sequence: TTG
tttatgtacctggtagtttt

SEQ ID NO: 241997 - DNA, 20 bp, Artificial Sequence
  Description of Artificial Sequence: Synthetic oligonucleotide
  Target: LAMA2; (-) strand; PAM type: YTN; PAM sequence: CTT
gtttatgtacctggtagttt

SEQ ID NO: 241998 - DNA, 20 bp, Artificial Sequence
  Description of Artificial Sequence: Synthetic oligonucleotide
  Target: LAMA2; (-) strand; PAM type: YTN; PAM sequence: CTG
cttgtttatgtacctggtag

SEQ ID NO: 241999 - DNA, 20 bp, Artificial Sequence
  Description of Artificial Sequence: Synthetic oligonucleotide
  Target: LAMA2; (-) strand; PAM type: YTN; PAM sequence: CTC
tgcttgtttatgtacctggt

SEQ ID NO: 242000 - DNA, 20 bp, Artificial Sequence
  Description of Artificial Sequence: Synthetic oligonucleotide
  Target: LAMA2; (-) strand; PAM type: YTN; PAM sequence: TTA
tatgctctgcttgtttatgt

SEQ ID NO: 242001 - DNA, 20 bp, Artificial Sequence
  Description of Artificial Sequence: Synthetic oligonucleotide
  Target: LAMA2; (-) strand; PAM type: YTN; PAM sequence: CTT
atatgctctgcttgtttatg

SEQ ID NO: 242002 - DNA, 20 bp, Artificial Sequence
  Description of Artificial Sequence: Synthetic oligonucleotide
  Target: LAMA2; (-) strand; PAM type: YTN; PAM sequence: CTG
gtagtggcttatatgctctg

SEQ ID NO: 242003 - DNA, 20 bp, Artificial Sequence
  Description of Artificial Sequence: Synthetic oligonucleotide
  Target: LAMA2; (-) strand; PAM type: YTN; PAM sequence: CTC
ctggtagtggcttatatgct

SEQ ID NO: 242004 - DNA, 20 bp, Artificial Sequence
  Description of Artificial Sequence: Synthetic oligonucleotide
  Target: LAMA2; (-) strand; PAM type: YTN; PAM sequence: TTC
ctcctggtagtggcttatat

SEQ ID NO: 242005 - DNA, 20 bp, Artificial Sequence
  Description of Artificial Sequence: Synthetic oligonucleotide
  Target: LAMA2; (-) strand; PAM type: YTN; PAM sequence: TTT
cctcctggtagtggcttata

SEQ ID NO: 242006 - DNA, 20 bp, Artificial Sequence
  Description of Artificial Sequence: Synthetic oligonucleotide
  Target: LAMA2; (-) strand; PAM type: YTN; PAM sequence: TTT
tcctcctggtagtggcttat

SEQ ID NO: 242007 - DNA, 20 bp, Artificial Sequence
  Description of Artificial Sequence: Synthetic oligonucleotide
  Target: LAMA2; (-) strand; PAM type: YTN; PAM sequence: TTG
attttcctcctggtagtggc

SEQ ID NO: 242008 - DNA, 20 bp, Artificial Sequence
  Description of Artificial Sequence: Synthetic oligonucleotide
  Target: LAMA2; (-) strand; PAM type: YTN; PAM sequence: TTG
attgattttcctcctggtag

SEQ ID NO: 242009 - DNA, 20 bp, Artificial Sequence
  Description of Artificial Sequence: Synthetic oligonucleotide
  Target: LAMA2; (-) strand; PAM type: YTN; PAM sequence: TTC
cattgattgattttcctcct

SEQ ID NO: 242010 - DNA, 20 bp, Artificial Sequence
  Description of Artificial Sequence: Synthetic oligonucleotide
  Target: LAMA2; (-) strand; PAM type: YTN; PAM sequence: TTT
ccattgattgattttcctcc

SEQ ID NO: 242011 - DNA, 20 bp, Artificial Sequence
  Description of Artificial Sequence: Synthetic oligonucleotide
  Target: LAMA2; (-) strand; PAM type: YTN; PAM sequence: CTG
tttccattgattgattttcc

SEQ ID NO: 242012 - DNA, 20 bp, Artificial Sequence
  Description of Artificial Sequence: Synthetic oligonucleotide
  Target: LAMA2; (-) strand; PAM type: YTN; PAM sequence: TTC
tgtttccattgattgatttt

SEQ ID NO: 242013 - DNA, 20 bp, Artificial Sequence
  Description of Artificial Sequence: Synthetic oligonucleotide
  Target: LAMA2; (-) strand; PAM type: YTN; PAM sequence: TTG
gggttctgtttccattgatt

SEQ ID NO: 242014 - DNA, 20 bp, Artificial Sequence
  Description of Artificial Sequence: Synthetic oligonucleotide
  Target: LAMA2; (-) strand; PAM type: YTN; PAM sequence: TTT
ggggttctgtttccattgat

SEQ ID NO: 242015 - DNA, 20 bp, Artificial Sequence
  Description of Artificial Sequence: Synthetic oligonucleotide
  Target: LAMA2; (-) strand; PAM type: YTN; PAM sequence: TTG
ccatttggggttctgtttcc

SEQ ID NO: 242016 - DNA, 20 bp, Artificial Sequence
  Description of Artificial Sequence: Synthetic oligonucleotide
  Target: LAMA2; (-) strand; PAM type: YTN; PAM sequence: CTT
gccatttggggttctgtttc

SEQ ID NO: 242017 - DNA, 20 bp, Artificial Sequence
  Description of Artificial Sequence: Synthetic oligonucleotide
  Target: LAMA2; (-) strand; PAM type: YTN; PAM sequence: TTC
ttgccatttggggttctgtt

SEQ ID NO: 242018 - DNA, 20 bp, Artificial Sequence
  Description of Artificial Sequence: Synthetic oligonucleotide
  Target: LAMA2; (-) strand; PAM type: YTN; PAM sequence: TTT
cttgccatttggggttctgt

SEQ ID NO: 242019 - DNA, 20 bp, Artificial Sequence
  Description of Artificial Sequence: Synthetic oligonucleotide
  Target: LAMA2; (-) strand; PAM type: YTN; PAM sequence: TTT
tcttgccatttggggttctg

SEQ ID NO: 242020 - DNA, 20 bp, Artificial Sequence
  Description of Artificial Sequence: Synthetic oligonucleotide
  Target: LAMA2; (-) strand; PAM type: YTN; PAM sequence: TTG
acatgattttcttgccattt

SEQ ID NO: 242021 - DNA, 20 bp, Artificial Sequence
  Description of Artificial Sequence: Synthetic oligonucleotide
  Target: LAMA2; (-) strand; PAM type: YTN; PAM sequence: CTT
gacatgattttcttgccatt

SEQ ID NO: 242022 - DNA, 20 bp, Artificial Sequence
  Description of Artificial Sequence: Synthetic oligonucleotide
  Target: LAMA2; (-) strand; PAM type: YTN; PAM sequence: CTG
atatatcttgacatgatttt

SEQ ID NO: 242023 - DNA, 20 bp, Artificial Sequence
  Description of Artificial Sequence: Synthetic oligonucleotide
  Target: LAMA2; (-) strand; PAM type: YTN; PAM sequence: TTC
tgatatatcttgacatgatt

SEQ ID NO: 242024 - DNA, 20 bp, Artificial Sequence
  Description of Artificial Sequence: Synthetic oligonucleotide
  Target: LAMA2; (-) strand; PAM type: YTN; PAM sequence: TTG
attctgatatatcttgacat

SEQ ID NO: 242025 - DNA, 20 bp, Artificial Sequence
  Description of Artificial Sequence: Synthetic oligonucleotide
  Target: LAMA2; (-) strand; PAM type: YTN; PAM sequence: TTT
gattctgatatatcttgaca

SEQ ID NO: 242026 - DNA, 20 bp, Artificial Sequence
  Description of Artificial Sequence: Synthetic oligonucleotide
  Target: LAMA2; (-) strand; PAM type: YTN; PAM sequence: TTA
ataatttgattctgatatat

SEQ ID NO: 242027 - DNA, 20 bp, Artificial Sequence
  Description of Artificial Sequence: Synthetic oligonucleotide
  Target: LAMA2; (-) strand; PAM type: YTN; PAM sequence: TTT
aataatttgattctgatata

SEQ ID NO: 242028 - DNA, 20 bp, Artificial Sequence
  Description of Artificial Sequence: Synthetic oligonucleotide
  Target: LAMA2; (-) strand; PAM type: YTN; PAM sequence: TTT
taataatttgattctgatat

SEQ ID NO: 242029 - DNA, 20 bp, Artificial Sequence
  Description of Artificial Sequence: Synthetic oligonucleotide
  Target: LAMA2; (-) strand; PAM type: YTN; PAM sequence: TTT
ttaataatttgattctgata

SEQ ID NO: 242030 - DNA, 20 bp, Artificial Sequence
  Description of Artificial Sequence: Synthetic oligonucleotide
  Target: LAMA2; (-) strand; PAM type: YTN; PAM sequence: CTT
tttaataatttgattctgat

SEQ ID NO: 242031 - DNA, 20 bp, Artificial Sequence
  Description of Artificial Sequence: Synthetic oligonucleotide
  Target: LAMA2; (-) strand; PAM type: YTN; PAM sequence: CTG
tctttttaataatttgattc

SEQ ID NO: 242032 - DNA, 20 bp, Artificial Sequence
  Description of Artificial Sequence: Synthetic oligonucleotide
  Target: LAMA2; (-) strand; PAM type: YTN; PAM sequence: TTA
tctgtctttttaataatttg

SEQ ID NO: 242033 - DNA, 20 bp, Artificial Sequence
  Description of Artificial Sequence: Synthetic oligonucleotide
  Target: LAMA2; (-) strand; PAM type: YTN; PAM sequence: TTC
cagttatctgtctttttaat

SEQ ID NO: 242034 - DNA, 20 bp, Artificial Sequence
  Description of Artificial Sequence: Synthetic oligonucleotide
  Target: LAMA2; (-) strand; PAM type: YTN; PAM sequence: TTT
ccagttatctgtctttttaa

SEQ ID NO: 242035 - DNA, 20 bp, Artificial Sequence
  Description of Artificial Sequence: Synthetic oligonucleotide
  Target: LAMA2; (-) strand; PAM type: YTN; PAM sequence: TTT
tccagttatctgtcttttta

SEQ ID NO: 242036 - DNA, 20 bp, Artificial Sequence
  Description of Artificial Sequence: Synthetic oligonucleotide
  Target: LAMA2; (-) strand; PAM type: YTN; PAM sequence: TTA
caattttccagttatctgtc

SEQ ID NO: 242037 - DNA, 20 bp, Artificial Sequence
  Description of Artificial Sequence: Synthetic oligonucleotide
  Target: LAMA2; (-) strand; PAM type: YTN; PAM sequence: TTT
acaattttccagttatctgt

SEQ ID NO: 242038 - DNA, 20 bp, Artificial Sequence
  Description of Artificial Sequence: Synthetic oligonucleotide
  Target: LAMA2; (-) strand; PAM type: YTN; PAM sequence: TTT
tacaattttccagttatctg

SEQ ID NO: 242039 - DNA, 20 bp, Artificial Sequence
  Description of Artificial Sequence: Synthetic oligonucleotide
  Target: LAMA2; (-) strand; PAM type: YTN; PAM sequence: CTT
ttacaattttccagttatct

SEQ ID NO: 242040 - DNA, 20 bp, Artificial Sequence
  Description of Artificial Sequence: Synthetic oligonucleotide
  Target: LAMA2; (-) strand; PAM type: YTN; PAM sequence: TTG
cttttacaattttccagtta

SEQ ID NO: 242041 - DNA, 20 bp, Artificial Sequence
  Description of Artificial Sequence: Synthetic oligonucleotide
  Target: LAMA2; (-) strand; PAM type: YTN; PAM sequence: CTG
attgcttttacaattttcca

SEQ ID NO: 242042 - DNA, 20 bp, Artificial Sequence
  Description of Artificial Sequence: Synthetic oligonucleotide
  Target: LAMA2; (-) strand; PAM type: YTN; PAM sequence: TTC
tgattgcttttacaattttc

SEQ ID NO: 242043 - DNA, 20 bp, Artificial Sequence
  Description of Artificial Sequence: Synthetic oligonucleotide
  Target: LAMA2; (-) strand; PAM type: YTN; PAM sequence: TTT
ctgattgcttttacaatttt

SEQ ID NO: 242044 - DNA, 20 bp, Artificial Sequence
  Description of Artificial Sequence: Synthetic oligonucleotide
  Target: LAMA2; (-) strand; PAM type: YTN; PAM sequence: TTT
tctgattgcttttacaattt

SEQ ID NO: 242045 - DNA, 20 bp, Artificial Sequence
  Description of Artificial Sequence: Synthetic oligonucleotide
  Target: LAMA2; (-) strand; PAM type: YTN; PAM sequence: TTT
ttctgattgcttttacaatt

SEQ ID NO: 242046 - DNA, 20 bp, Artificial Sequence
  Description of Artificial Sequence: Synthetic oligonucleotide
  Target: LAMA2; (-) strand; PAM type: YTN; PAM sequence: TTT
tttctgattgcttttacaat

SEQ ID NO: 242047 - DNA, 20 bp, Artificial Sequence
  Description of Artificial Sequence: Synthetic oligonucleotide
  Target: LAMA2; (-) strand; PAM type: YTN; PAM sequence: TTT
ttttctgattgcttttacaa

SEQ ID NO: 242048 - DNA, 20 bp, Artificial Sequence
  Description of Artificial Sequence: Synthetic oligonucleotide
  Target: LAMA2; (-) strand; PAM type: YTN; PAM sequence: TTA
gtttttttctgattgctttt

SEQ ID NO: 242049 - DNA, 20 bp, Artificial Sequence
  Description of Artificial Sequence: Synthetic oligonucleotide
  Target: LAMA2; (-) strand; PAM type: YTN; PAM sequence: CTG
gccatgttagtttttttctg

SEQ ID NO: 242050 - DNA, 20 bp, Artificial Sequence
  Description of Artificial Sequence: Synthetic oligonucleotide
  Target: LAMA2; (-) strand; PAM type: YTN; PAM sequence: TTA
caggcatgagccaccgcgcc

SEQ ID NO: 242051 - DNA, 20 bp, Artificial Sequence
  Description of Artificial Sequence: Synthetic oligonucleotide
  Target: LAMA2; (-) strand; PAM type: YTN; PAM sequence: CTG
ggattacaggcatgagccac

SEQ ID NO: 242052 - DNA, 20 bp, Artificial Sequence
  Description of Artificial Sequence: Synthetic oligonucleotide
  Target: LAMA2; (-) strand; PAM type: YTN; PAM sequence: CTC
ccaaagtgctgggattacag

SEQ ID NO: 242053 - DNA, 20 bp, Artificial Sequence
  Description of Artificial Sequence: Synthetic oligonucleotide
  Target: LAMA2; (-) strand; PAM type: YTN; PAM sequence: TTG
gcctcccaaagtgctgggat

SEQ ID NO: 242054 - DNA, 20 bp, Artificial Sequence
  Description of Artificial Sequence: Synthetic oligonucleotide
  Target: LAMA2; (-) strand; PAM type: YTN; PAM sequence: CTT
ggcctcccaaagtgctggga

SEQ ID NO: 242055 - DNA, 20 bp, Artificial Sequence
  Description of Artificial Sequence: Synthetic oligonucleotide
  Target: LAMA2; (-) strand; PAM type: YTN; PAM sequence: CTG
ccttggcctcccaaagtgct

SEQ ID NO: 242056 - DNA, 20 bp, Artificial Sequence
  Description of Artificial Sequence: Synthetic oligonucleotide
  Target: LAMA2; (-) strand; PAM type: YTN; PAM sequence: CTC
gtgatccacctgccttggcc

SEQ ID NO: 242057 - DNA, 20 bp, Artificial Sequence
  Description of Artificial Sequence: Synthetic oligonucleotide
  Target: LAMA2; (-) strand; PAM type: YTN; PAM sequence: CTG
acctcgtgatccacctgcct

SEQ ID NO: 242058 - DNA, 20 bp, Artificial Sequence
  Description of Artificial Sequence: Synthetic oligonucleotide
  Target: LAMA2; (-) strand; PAM type: YTN; PAM sequence: CTC
ctgacctcgtgatccacctg

SEQ ID NO: 242059 - DNA, 20 bp, Artificial Sequence
  Description of Artificial Sequence: Synthetic oligonucleotide
  Target: LAMA2; (-) strand; PAM type: YTN; PAM sequence: TTG
aactcctgacctcgtgatcc

SEQ ID NO: 242060 - DNA, 20 bp, Artificial Sequence
  Description of Artificial Sequence: Synthetic oligonucleotide
  Target: LAMA2; (-) strand; PAM type: YTN; PAM sequence: CTT
gaactcctgacctcgtgatc

SEQ ID NO: 242061 - DNA, 20 bp, Artificial Sequence
  Description of Artificial Sequence: Synthetic oligonucleotide
  Target: LAMA2; (-) strand; PAM type: YTN; PAM sequence: CTG
gtcttgaactcctgacctcg

SEQ ID NO: 242062 - DNA, 20 bp, Artificial Sequence
  Description of Artificial Sequence: Synthetic oligonucleotide
  Target: LAMA2; (-) strand; PAM type: YTN; PAM sequence: TTG
gccaggctggtcttgaactc

SEQ ID NO: 242063 - DNA, 20 bp, Artificial Sequence
  Description of Artificial Sequence: Synthetic oligonucleotide
  Target: LAMA2; (-) strand; PAM type: YTN; PAM sequence: TTC
accatattggccaggctggt

SEQ ID NO: 242064 - DNA, 20 bp, Artificial Sequence
  Description of Artificial Sequence: Synthetic oligonucleotide
  Target: LAMA2; (-) strand; PAM type: YTN; PAM sequence: TTT
caccatattggccaggctgg

SEQ ID NO: 242065 - DNA, 20 bp, Artificial Sequence
  Description of Artificial Sequence: Synthetic oligonucleotide
  Target: LAMA2; (-) strand; PAM type: YTN; PAM sequence: TTA
gtagagatggggtttcacca

SEQ ID NO: 242066 - DNA, 20 bp, Artificial Sequence
  Description of Artificial Sequence: Synthetic oligonucleotide
  Target: LAMA2; (-) strand; PAM type: YTN; PAM sequence: TTT
agtagagatggggtttcacc

SEQ ID NO: 242067 - DNA, 20 bp, Artificial Sequence
  Description of Artificial Sequence: Synthetic oligonucleotide
  Target: LAMA2; (-) strand; PAM type: YTN; PAM sequence: TTT
tagtagagatggggtttcac

SEQ ID NO: 242068 - DNA, 20 bp, Artificial Sequence
  Description of Artificial Sequence: Synthetic oligonucleotide
  Target: LAMA2; (-) strand; PAM type: YTN; PAM sequence: TTT
ttagtagagatggggtttca

SEQ ID NO: 242069 - DNA, 20 bp, Artificial Sequence
  Description of Artificial Sequence: Synthetic oligonucleotide
  Target: LAMA2; (-) strand; PAM type: YTN; PAM sequence: TTG
tatttttagtagagatgggg

SEQ ID NO: 242070 - DNA, 20 bp, Artificial Sequence
  Description of Artificial Sequence: Synthetic oligonucleotide
  Target: LAMA2; (-) strand; PAM type: YTN; PAM sequence: TTT
gtatttttagtagagatggg

SEQ ID NO: 242071 - DNA, 20 bp, Artificial Sequence
  Description of Artificial Sequence: Synthetic oligonucleotide
  Target: LAMA2; (-) strand; PAM type: YTN; PAM sequence: TTT
tgtatttttagtagagatgg

SEQ ID NO: 242072 - DNA, 20 bp, Artificial Sequence
  Description of Artificial Sequence: Synthetic oligonucleotide
  Target: LAMA2; (-) strand; PAM type: YTN; PAM sequence: TTT
ttgtatttttagtagagatg

SEQ ID NO: 242073 - DNA, 20 bp, Artificial Sequence
  Description of Artificial Sequence: Synthetic oligonucleotide
  Target: LAMA2; (-) strand; PAM type: YTN; PAM sequence: CTA
atttttgtatttttagtaga

SEQ ID NO: 242074 - DNA, 20 bp, Artificial Sequence
  Description of Artificial Sequence: Synthetic oligonucleotide
  Target: LAMA2; (-) strand; PAM type: YTN; PAM sequence: CTA
caggtgtgcaccaccatgcc

SEQ ID NO: 242075 - DNA, 20 bp, Artificial Sequence
  Description of Artificial Sequence: Synthetic oligonucleotide
  Target: LAMA2; (-) strand; PAM type: YTN; PAM sequence: CTG
ggactacaggtgtgcaccac

SEQ ID NO: 242076 - DNA, 20 bp, Artificial Sequence
  Description of Artificial Sequence: Synthetic oligonucleotide
  Target: LAMA2; (-) strand; PAM type: YTN; PAM sequence: CTG
agcagctgggactacaggtg

SEQ ID NO: 242077 - DNA, 20 bp, Artificial Sequence
  Description of Artificial Sequence: Synthetic oligonucleotide
  Target: LAMA2; (-) strand; PAM type: YTN; PAM sequence: CTC
ctgagcagctgggactacag

SEQ ID NO: 242078 - DNA, 20 bp, Artificial Sequence
  Description of Artificial Sequence: Synthetic oligonucleotide
  Target: LAMA2; (-) strand; PAM type: YTN; PAM sequence: CTC
agcctcctgagcagctggga

SEQ ID NO: 242079 - DNA, 20 bp, Artificial Sequence
  Description of Artificial Sequence: Synthetic oligonucleotide
  Target: LAMA2; (-) strand; PAM type: YTN; PAM sequence: CTG
cctcagcctcctgagcagct

SEQ ID NO: 242080 - DNA, 20 bp, Artificial Sequence
  Description of Artificial Sequence: Synthetic oligonucleotide
  Target: LAMA2; (-) strand; PAM type: YTN; PAM sequence: CTC
ctgcctcagcctcctgagca

SEQ ID NO: 242081 - DNA, 20 bp, Artificial Sequence
  Description of Artificial Sequence: Synthetic oligonucleotide
  Target: LAMA2; (-) strand; PAM type: YTN; PAM sequence: TTC
tcctgcctcagcctcctgag

SEQ ID NO: 242082 - DNA, 20 bp, Artificial Sequence
  Description of Artificial Sequence: Synthetic oligonucleotide
  Target: LAMA2; (-) strand; PAM type: YTN; PAM sequence: TTC
aagtgattctcctgcctcag

SEQ ID NO: 242083 - DNA, 20 bp, Artificial Sequence
  Description of Artificial Sequence: Synthetic oligonucleotide
  Target: LAMA2; (-) strand; PAM type: YTN; PAM sequence: CTC
ccaggttcaagtgattctcc

SEQ ID NO: 242084 - DNA, 20 bp, Artificial Sequence
  Description of Artificial Sequence: Synthetic oligonucleotide
  Target: LAMA2; (-) strand; PAM type: YTN; PAM sequence: CTG
aaaccatcgcctcccaggtt

SEQ ID NO: 242085 - DNA, 20 bp, Artificial Sequence
  Description of Artificial Sequence: Synthetic oligonucleotide
  Target: LAMA2; (-) strand; PAM type: YTN; PAM sequence: CTC
actgaaaccatcgcctccca

SEQ ID NO: 242086 - DNA, 20 bp, Artificial Sequence
  Description of Artificial Sequence: Synthetic oligonucleotide
  Target: LAMA2; (-) strand; PAM type: YTN; PAM sequence: CTC
ggctcactgaaaccatcgcc

SEQ ID NO: 242087 - DNA, 20 bp, Artificial Sequence
  Description of Artificial Sequence: Synthetic oligonucleotide
  Target: LAMA2; (-) strand; PAM type: YTN; PAM sequence: CTG
gagtgcagtggtatgatctc

SEQ ID NO: 242088 - DNA, 20 bp, Artificial Sequence
  Description of Artificial Sequence: Synthetic oligonucleotide
  Target: LAMA2; (-) strand; PAM type: YTN; PAM sequence: TTA
ggctggagtgcagtggtatg

SEQ ID NO: 242089 - DNA, 20 bp, Artificial Sequence
  Description of Artificial Sequence: Synthetic oligonucleotide
  Target: LAMA2; (-) strand; PAM type: YTN; PAM sequence: CTT
aggctggagtgcagtggtat

SEQ ID NO: 242090 - DNA, 20 bp, Artificial Sequence
  Description of Artificial Sequence: Synthetic oligonucleotide
  Target: LAMA2; (-) strand; PAM type: YTN; PAM sequence: TTG
cttaggctggagtgcagtgg

SEQ ID NO: 242091 - DNA, 20 bp, Artificial Sequence
  Description of Artificial Sequence: Synthetic oligonucleotide
  Target: LAMA2; (-) strand; PAM type: YTN; PAM sequence: CTG
ttgcttaggctggagtgcag

SEQ ID NO: 242092 - DNA, 20 bp, Artificial Sequence
  Description of Artificial Sequence: Synthetic oligonucleotide
  Target: LAMA2; (-) strand; PAM type: YTN; PAM sequence: CTC
tgttgcttaggctggagtgc

SEQ ID NO: 242093 - DNA, 20 bp, Artificial Sequence
  Description of Artificial Sequence: Synthetic oligonucleotide
  Target: LAMA2; (-) strand; PAM type: YTN; PAM sequence: CTC
gctctgttgcttaggctgga

SEQ ID NO: 242094 - DNA, 20 bp, Artificial Sequence
  Description of Artificial Sequence: Synthetic oligonucleotide
  Target: LAMA2; (-) strand; PAM type: YTN; PAM sequence: CTC
tcgctctgttgcttaggctg

SEQ ID NO: 242095 - DNA, 20 bp, Artificial Sequence
  Description of Artificial Sequence: Synthetic oligonucleotide
  Target: LAMA2; (-) strand; PAM type: YTN; PAM sequence: TTG
agacagactctcgctctgtt

SEQ ID NO: 242096 - DNA, 20 bp, Artificial Sequence
  Description of Artificial Sequence: Synthetic oligonucleotide
  Target: LAMA2; (-) strand; PAM type: YTN; PAM sequence: TTT
gagacagactctcgctctgt

SEQ ID NO: 242097 - DNA, 20 bp, Artificial Sequence
  Description of Artificial Sequence: Synthetic oligonucleotide
  Target: LAMA2; (-) strand; PAM type: YTN; PAM sequence: TTT
tgagacagactctcgctctg

SEQ ID NO: 242098 - DNA, 20 bp, Artificial Sequence
  Description of Artificial Sequence: Synthetic oligonucleotide
  Target: LAMA2; (-) strand; PAM type: YTN; PAM sequence: TTT
ttgagacagactctcgctct

SEQ ID NO: 242099 - DNA, 20 bp, Artificial Sequence
  Description of Artificial Sequence: Synthetic oligonucleotide
  Target: LAMA2; (-) strand; PAM type: YTN; PAM sequence: TTT
tttgagacagactctcgctc

SEQ ID NO: 242100 - DNA, 20 bp, Artificial Sequence
  Description of Artificial Sequence: Synthetic oligonucleotide
  Target: LAMA2; (-) strand; PAM type: YTN; PAM sequence: TTT
ttttgagacagactctcgct

SEQ ID NO: 242101 - DNA, 20 bp, Artificial Sequence
  Description of Artificial Sequence: Synthetic oligonucleotide
  Target: LAMA2; (-) strand; PAM type: YTN; PAM sequence: TTT
tttttgagacagactctcgc

SEQ ID NO: 242102 - DNA, 20 bp, Artificial Sequence
  Description of Artificial Sequence: Synthetic oligonucleotide
  Target: LAMA2; (-) strand; PAM type: YTN; PAM sequence: TTT
ttttttgagacagactctcg

SEQ ID NO: 242103 - DNA, 20 bp, Artificial Sequence
  Description of Artificial Sequence: Synthetic oligonucleotide
  Target: LAMA2; (-) strand; PAM type: YTN; PAM sequence: TTT
tttttttgagacagactctc

SEQ ID NO: 242104 - DNA, 20 bp, Artificial Sequence
  Description of Artificial Sequence: Synthetic oligonucleotide
  Target: LAMA2; (-) strand; PAM type: YTN; PAM sequence: TTT
ttttttttgagacagactct

SEQ ID NO: 242105 - DNA, 20 bp, Artificial Sequence
  Description of Artificial Sequence: Synthetic oligonucleotide
  Target: LAMA2; (-) strand; PAM type: YTN; PAM sequence: TTT
tttttttttgagacagactc

SEQ ID NO: 242106 - DNA, 20 bp, Artificial Sequence
  Description of Artificial Sequence: Synthetic oligonucleotide
  Target: LAMA2; (-) strand; PAM type: YTN; PAM sequence: TTT
ttttttttttgagacagact

SEQ ID NO: 242107 - DNA, 20 bp, Artificial Sequence
  Description of Artificial Sequence: Synthetic oligonucleotide
  Target: LAMA2; (-) strand; PAM type: YTN; PAM sequence: TTT
tttttttttttgagacagac

SEQ ID NO: 242108 - DNA, 20 bp, Artificial Sequence
  Description of Artificial Sequence: Synthetic oligonucleotide
  Target: LAMA2; (-) strand; PAM type: YTN; PAM sequence: TTT
ttttttttttttgagacaga

SEQ ID NO: 242109 - DNA, 20 bp, Artificial Sequence
  Description of Artificial Sequence: Synthetic oligonucleotide
  Target: LAMA2; (-) strand; PAM type: YTN; PAM sequence: TTT
tttttttttttttgagacag

SEQ ID NO: 242110 - DNA, 20 bp, Artificial Sequence
  Description of Artificial Sequence: Synthetic oligonucleotide
  Target: LAMA2; (-) strand; PAM type: YTN; PAM sequence: TTT
ttttttttttttttgagaca

SEQ ID NO: 242111 - DNA, 20 bp, Artificial Sequence
  Description of Artificial Sequence: Synthetic oligonucleotide
  Target: LAMA2; (-) strand; PAM type: YTN; PAM sequence: TTT
tttttttttttttttgagac

SEQ ID NO: 242112 - DNA, 20 bp, Artificial Sequence
  Description of Artificial Sequence: Synthetic oligonucleotide
  Target: LAMA2; (-) strand; PAM type: YTN; PAM sequence: TTT
ttttttttttttttttgaga

SEQ ID NO: 242113 - DNA, 20 bp, Artificial Sequence
  Description of Artificial Sequence: Synthetic oligonucleotide
  Target: LAMA2; (-) strand; PAM type: YTN; PAM sequence: TTT
tttttttttttttttttgag

SEQ ID NO: 242114 - DNA, 20 bp, Artificial Sequence
  Description of Artificial Sequence: Synthetic oligonucleotide
  Target: LAMA2; (-) strand; PAM type: YTN; PAM sequence: TTT
ttttttttttttttttttga

SEQ ID NO: 242115 - DNA, 20 bp, Artificial Sequence
  Description of Artificial Sequence: Synthetic oligonucleotide
  Target: LAMA2; (-) strand; PAM type: YTN; PAM sequence: TTT
tttttttttttttttttttg

SEQ ID NO: 242116 - DNA, 20 bp, Artificial Sequence
  Description of Artificial Sequence: Synthetic oligonucleotide
  Target: LAMA2; (-) strand; PAM type: YTN; PAM sequence: CTT
tttttttttttttttttttt

SEQ ID NO: 242117 - DNA, 20 bp, Artificial Sequence
  Description of Artificial Sequence: Synthetic oligonucleotide
  Target: LAMA2; (-) strand; PAM type: YTN; PAM sequence: TTC
tttttttttttttttttttt

SEQ ID NO: 242118 - DNA, 20 bp, Artificial Sequence
  Description of Artificial Sequence: Synthetic oligonucleotide
  Target: LAMA2; (-) strand; PAM type: YTN; PAM sequence: TTT
cttttttttttttttttttt

SEQ ID NO: 242119 - DNA, 20 bp, Artificial Sequence
  Description of Artificial Sequence: Synthetic oligonucleotide
  Target: LAMA2; (-) strand; PAM type: YTN; PAM sequence: TTT
tctttttttttttttttttt

SEQ ID NO: 242120 - DNA, 20 bp, Artificial Sequence
  Description of Artificial Sequence: Synthetic oligonucleotide
  Target: LAMA2; (-) strand; PAM type: YTN; PAM sequence: CTT
ttcttttttttttttttttt

SEQ ID NO: 242121 - DNA, 20 bp, Artificial Sequence
  Description of Artificial Sequence: Synthetic oligonucleotide
  Target: LAMA2; (-) strand; PAM type: YTN; PAM sequence: TTC
ttttcttttttttttttttt

SEQ ID NO: 242122 - DNA, 20 bp, Artificial Sequence
  Description of Artificial Sequence: Synthetic oligonucleotide
  Target: LAMA2; (-) strand; PAM type: YTN; PAM sequence: TTT
cttttctttttttttttttt

SEQ ID NO: 242123 - DNA, 20 bp, Artificial Sequence
  Description of Artificial Sequence: Synthetic oligonucleotide
  Target: LAMA2; (-) strand; PAM type: YTN; PAM sequence: TTT
tcttttcttttttttttttt

SEQ ID NO: 242124 - DNA, 20 bp, Artificial Sequence
  Description of Artificial Sequence: Synthetic oligonucleotide
  Target: LAMA2; (-) strand; PAM type: YTN; PAM sequence: CTT
ttcttttctttttttttttt

SEQ ID NO: 242125 - DNA, 20 bp, Artificial Sequence
  Description of Artificial Sequence: Synthetic oligonucleotide
  Target: LAMA2; (-) strand; PAM type: YTN; PAM sequence: TTC
ttttcttttctttttttttt

SEQ ID NO: 242126 - DNA, 20 bp, Artificial Sequence
  Description of Artificial Sequence: Synthetic oligonucleotide
  Target: LAMA2; (-) strand; PAM type: YTN; PAM sequence: TTT
cttttcttttcttttttttt

SEQ ID NO: 242127 - DNA, 20 bp, Artificial Sequence
  Description of Artificial Sequence: Synthetic oligonucleotide
  Target: LAMA2; (-) strand; PAM type: YTN; PAM sequence: TTT
tcttttcttttctttttttt

SEQ ID NO: 242128 - DNA, 20 bp, Artificial Sequence
  Description of Artificial Sequence: Synthetic oligonucleotide
  Target: LAMA2; (-) strand; PAM type: YTN; PAM sequence: TTG
tgttttcttttcttttcttt

SEQ ID NO: 242129 - DNA, 20 bp, Artificial Sequence
  Description of Artificial Sequence: Synthetic oligonucleotide
  Target: LAMA2; (-) strand; PAM type: YTN; PAM sequence: CTG
ttgtgttttcttttcttttc

SEQ ID NO: 242130 - DNA, 20 bp, Artificial Sequence
  Description of Artificial Sequence: Synthetic oligonucleotide
  Target: LAMA2; (-) strand; PAM type: YTN; PAM sequence: CTG
cacctgttgtgttttctttt

SEQ ID NO: 242131 - DNA, 20 bp, Artificial Sequence
  Description of Artificial Sequence: Synthetic oligonucleotide
  Target: LAMA2; (-) strand; PAM type: YTN; PAM sequence: CTC
tgcacctgttgtgttttctt

SEQ ID NO: 242132 - DNA, 20 bp, Artificial Sequence
  Description of Artificial Sequence: Synthetic oligonucleotide
  Target: LAMA2; (-) strand; PAM type: YTN; PAM sequence: TTC
ctctgcacctgttgtgtttt

SEQ ID NO: 242133 - DNA, 20 bp, Artificial Sequence
  Description of Artificial Sequence: Synthetic oligonucleotide
  Target: LAMA2; (-) strand; PAM type: YTN; PAM sequence: TTG
ttcctctgcacctgttgtgt

SEQ ID NO: 242134 - DNA, 20 bp, Artificial Sequence
  Description of Artificial Sequence: Synthetic oligonucleotide
  Target: LAMA2; (-) strand; PAM type: YTN; PAM sequence: TTT
gttcctctgcacctgttgtg

SEQ ID NO: 242135 - DNA, 20 bp, Artificial Sequence
  Description of Artificial Sequence: Synthetic oligonucleotide
  Target: LAMA2; (-) strand; PAM type: YTN; PAM sequence: CTT
tgttcctctgcacctgttgt

SEQ ID NO: 242136 - DNA, 20 bp, Artificial Sequence
  Description of Artificial Sequence: Synthetic oligonucleotide
  Target: LAMA2; (-) strand; PAM type: YTN; PAM sequence: TTA
tctttgttcctctgcacctg

SEQ ID NO: 242137 - DNA, 20 bp, Artificial Sequence
  Description of Artificial Sequence: Synthetic oligonucleotide
  Target: LAMA2; (-) strand; PAM type: YTN; PAM sequence: CTT
atctttgttcctctgcacct

SEQ ID NO: 242138 - DNA, 20 bp, Artificial Sequence
  Description of Artificial Sequence: Synthetic oligonucleotide
  Target: LAMA2; (-) strand; PAM type: YTN; PAM sequence: TTC
cttatctttgttcctctgca

SEQ ID NO: 242139 - DNA, 20 bp, Artificial Sequence
  Description of Artificial Sequence: Synthetic oligonucleotide
  Target: LAMA2; (-) strand; PAM type: YTN; PAM sequence: CTT
ccttatctttgttcctctgc

SEQ ID NO: 242140 - DNA, 20 bp, Artificial Sequence
  Description of Artificial Sequence: Synthetic oligonucleotide
  Target: LAMA2; (-) strand; PAM type: YTN; PAM sequence: TTC
ttccttatctttgttcctct

SEQ ID NO: 242141 - DNA, 20 bp, Artificial Sequence
  Description of Artificial Sequence: Synthetic oligonucleotide
  Target: LAMA2; (-) strand; PAM type: YTN; PAM sequence: CTA
ttcttccttatctttgttcc

SEQ ID NO: 242142 - DNA, 20 bp, Artificial Sequence
  Description of Artificial Sequence: Synthetic oligonucleotide
  Target: LAMA2; (-) strand; PAM type: YTN; PAM sequence: CTG
acaagaaactattcttcctt

SEQ ID NO: 242143 - DNA, 20 bp, Artificial Sequence
  Description of Artificial Sequence: Synthetic oligonucleotide
  Target: LAMA2; (-) strand; PAM type: YTN; PAM sequence: TTG
gaccatagcatatagggtct

SEQ ID NO: 242144 - DNA, 20 bp, Artificial Sequence
  Description of Artificial Sequence: Synthetic oligonucleotide
  Target: LAMA2; (-) strand; PAM type: YTN; PAM sequence: TTT
ggaccatagcatatagggtc

SEQ ID NO: 242145 - DNA, 20 bp, Artificial Sequence
  Description of Artificial Sequence: Synthetic oligonucleotide
  Target: LAMA2; (-) strand; PAM type: YTN; PAM sequence: TTA
gggggacaccaacatttgga

SEQ ID NO: 242146 - DNA, 20 bp, Artificial Sequence
  Description of Artificial Sequence: Synthetic oligonucleotide
  Target: LAMA2; (-) strand; PAM type: YTN; PAM sequence: TTT
agggggacaccaacatttgg

SEQ ID NO: 242147 - DNA, 20 bp, Artificial Sequence
  Description of Artificial Sequence: Synthetic oligonucleotide
  Target: LAMA2; (-) strand; PAM type: YTN; PAM sequence: TTT
tagggggacaccaacatttg

SEQ ID NO: 242148 - DNA, 20 bp, Artificial Sequence
  Description of Artificial Sequence: Synthetic oligonucleotide
  Target: LAMA2; (-) strand; PAM type: YTN; PAM sequence: TTC
cagcatataagttttagggg

SEQ ID NO: 242149 - DNA, 20 bp, Artificial Sequence
  Description of Artificial Sequence: Synthetic oligonucleotide
  Target: LAMA2; (-) strand; PAM type: YTN; PAM sequence: TTA
ggttccagcatataagtttt

SEQ ID NO: 242150 - DNA, 20 bp, Artificial Sequence
  Description of Artificial Sequence: Synthetic oligonucleotide
  Target: LAMA2; (-) strand; PAM type: YTN; PAM sequence: TTA
ggcattaggttccagcatat

SEQ ID NO: 242151 - DNA, 20 bp, Artificial Sequence
  Description of Artificial Sequence: Synthetic oligonucleotide
  Target: LAMA2; (-) strand; PAM type: YTN; PAM sequence: CTA
tcacattaggcattaggttc

SEQ ID NO: 242152 - DNA, 20 bp, Artificial Sequence
  Description of Artificial Sequence: Synthetic oligonucleotide
  Target: LAMA2; (-) strand; PAM type: YTN; PAM sequence: CTA
aatactatcacattaggcat

SEQ ID NO: 242153 - DNA, 20 bp, Artificial Sequence
  Description of Artificial Sequence: Synthetic oligonucleotide
  Target: LAMA2; (-) strand; PAM type: YTN; PAM sequence: CTC
taaatactatcacattaggc

SEQ ID NO: 242154 - DNA, 20 bp, Artificial Sequence
  Description of Artificial Sequence: Synthetic oligonucleotide
  Target: LAMA2; (-) strand; PAM type: YTN; PAM sequence: CTC
ccccaaaagccccacctcta

SEQ ID NO: 242155 - DNA, 20 bp, Artificial Sequence
  Description of Artificial Sequence: Synthetic oligonucleotide
  Target: LAMA2; (-) strand; PAM type: YTN; PAM sequence: TTA
atcactcccccaaaagcccc

SEQ ID NO: 242156 - DNA, 20 bp, Artificial Sequence
  Description of Artificial Sequence: Synthetic oligonucleotide
  Target: LAMA2; (-) strand; PAM type: YTN; PAM sequence: CTT
aatcactcccccaaaagccc

SEQ ID NO: 242157 - DNA, 20 bp, Artificial Sequence
  Description of Artificial Sequence: Synthetic oligonucleotide
  Target: LAMA2; (-) strand; PAM type: YTN; PAM sequence: CTC
atgacttaatcactccccca

SEQ ID NO: 242158 - DNA, 20 bp, Artificial Sequence
  Description of Artificial Sequence: Synthetic oligonucleotide
  Target: LAMA2; (-) strand; PAM type: YTN; PAM sequence: TTA
gagccctcatgacttaatca

SEQ ID NO: 242159 - DNA, 20 bp, Artificial Sequence
  Description of Artificial Sequence: Synthetic oligonucleotide
  Target: LAMA2; (-) strand; PAM type: YTN; PAM sequence: TTC
atggagattagagccctcat

SEQ ID NO: 242160 - DNA, 20 bp, Artificial Sequence
  Description of Artificial Sequence: Synthetic oligonucleotide
  Target: LAMA2; (-) strand; PAM type: YTN; PAM sequence: TTA
atcccattcatggagattag

SEQ ID NO: 242161 - DNA, 20 bp, Artificial Sequence
  Description of Artificial Sequence: Synthetic oligonucleotide
  Target: LAMA2; (-) strand; PAM type: YTN; PAM sequence: TTG
taaggatgttaatcccattc

SEQ ID NO: 242162 - DNA, 20 bp, Artificial Sequence
  Description of Artificial Sequence: Synthetic oligonucleotide
  Target: LAMA2; (-) strand; PAM type: YTN; PAM sequence: TTT
gtaaggatgttaatcccatt

SEQ ID NO: 242163 - DNA, 20 bp, Artificial Sequence
  Description of Artificial Sequence: Synthetic oligonucleotide
  Target: LAMA2; (-) strand; PAM type: YTN; PAM sequence: TTT
tgtaaggatgttaatcccat

SEQ ID NO: 242164 - DNA, 20 bp, Artificial Sequence
  Description of Artificial Sequence: Synthetic oligonucleotide
  Target: LAMA2; (-) strand; PAM type: YTN; PAM sequence: CTT
ttgtaaggatgttaatccca

SEQ ID NO: 242165 - DNA, 20 bp, Artificial Sequence
  Description of Artificial Sequence: Synthetic oligonucleotide
  Target: LAMA2; (-) strand; PAM type: YTN; PAM sequence: CTC
ttttgtaaggatgttaatcc

SEQ ID NO: 242166 - DNA, 20 bp, Artificial Sequence
  Description of Artificial Sequence: Synthetic oligonucleotide
  Target: LAMA2; (-) strand; PAM type: YTN; PAM sequence: CTC
aacctcttttgtaaggatgt

SEQ ID NO: 242167 - DNA, 20 bp, Artificial Sequence
  Description of Artificial Sequence: Synthetic oligonucleotide
  Target: LAMA2; (-) strand; PAM type: YTN; PAM sequence: TTC
acgtaaaggaaagggcaagg

SEQ ID NO: 242168 - DNA, 20 bp, Artificial Sequence
  Description of Artificial Sequence: Synthetic oligonucleotide
  Target: LAMA2; (-) strand; PAM type: YTN; PAM sequence: CTT
cacgtaaaggaaagggcaag

SEQ ID NO: 242169 - DNA, 20 bp, Artificial Sequence
  Description of Artificial Sequence: Synthetic oligonucleotide
  Target: LAMA2; (-) strand; PAM type: YTN; PAM sequence: CTG
ccccttcacgtaaaggaaag

SEQ ID NO: 242170 - DNA, 20 bp, Artificial Sequence
  Description of Artificial Sequence: Synthetic oligonucleotide
  Target: LAMA2; (-) strand; PAM type: YTN; PAM sequence: TTG
ctgccccttcacgtaaagga

SEQ ID NO: 242171 - DNA, 20 bp, Artificial Sequence
  Description of Artificial Sequence: Synthetic oligonucleotide
  Target: LAMA2; (-) strand; PAM type: YTN; PAM sequence: CTT
gctgccccttcacgtaaagg

SEQ ID NO: 242172 - DNA, 20 bp, Artificial Sequence
  Description of Artificial Sequence: Synthetic oligonucleotide
  Target: LAMA2; (-) strand; PAM type: YTN; PAM sequence: CTC
cttgctgccccttcacgtaa

SEQ ID NO: 242173 - DNA, 20 bp, Artificial Sequence
  Description of Artificial Sequence: Synthetic oligonucleotide
  Target: LAMA2; (-) strand; PAM type: YTN; PAM sequence: TTC
caaggtggtacctccttgct

SEQ ID NO: 242174 - DNA, 20 bp, Artificial Sequence
  Description of Artificial Sequence: Synthetic oligonucleotide
  Target: LAMA2; (-) strand; PAM type: YTN; PAM sequence: CTT
ccaaggtggtacctccttgc

SEQ ID NO: 242175 - DNA, 20 bp, Artificial Sequence
  Description of Artificial Sequence: Synthetic oligonucleotide
  Target: LAMA2; (-) strand; PAM type: YTN; PAM sequence: CTG
cttccaaggtggtacctcct

SEQ ID NO: 242176 - DNA, 20 bp, Artificial Sequence
  Description of Artificial Sequence: Synthetic oligonucleotide
  Target: LAMA2; (-) strand; PAM type: YTN; PAM sequence: CTC
tgcttccaaggtggtacctc

SEQ ID NO: 242177 - DNA, 20 bp, Artificial Sequence
  Description of Artificial Sequence: Synthetic oligonucleotide
  Target: LAMA2; (-) strand; PAM type: YTN; PAM sequence: CTC
tctgcttccaaggtggtacc

SEQ ID NO: 242178 - DNA, 20 bp, Artificial Sequence
  Description of Artificial Sequence: Synthetic oligonucleotide
  Target: LAMA2; (-) strand; PAM type: YTN; PAM sequence: TTG
ctctctgcttccaaggtggt

SEQ ID NO: 242179 - DNA, 20 bp, Artificial Sequence
  Description of Artificial Sequence: Synthetic oligonucleotide
  Target: LAMA2; (-) strand; PAM type: YTN; PAM sequence: CTT
gctctctgcttccaaggtgg

SEQ ID NO: 242180 - DNA, 20 bp, Artificial Sequence
  Description of Artificial Sequence: Synthetic oligonucleotide
  Target: LAMA2; (-) strand; PAM type: YTN; PAM sequence: TTG
atgtgtggtgagggcttgct

SEQ ID NO: 242181 - DNA, 20 bp, Artificial Sequence
  Description of Artificial Sequence: Synthetic oligonucleotide
  Target: LAMA2; (-) strand; PAM type: YTN; PAM sequence: TTT
gatgtgtggtgagggcttgc

SEQ ID NO: 242182 - DNA, 20 bp, Artificial Sequence
  Description of Artificial Sequence: Synthetic oligonucleotide
  Target: LAMA2; (-) strand; PAM type: YTN; PAM sequence: CTA
ggaaatccaagatccaggca

SEQ ID NO: 242183 - DNA, 20 bp, Artificial Sequence
  Description of Artificial Sequence: Synthetic oligonucleotide
  Target: LAMA2; (-) strand; PAM type: YTN; PAM sequence: CTG
gagactaggaaatccaagat

SEQ ID NO: 242184 - DNA, 20 bp, Artificial Sequence
  Description of Artificial Sequence: Synthetic oligonucleotide
  Target: LAMA2; (-) strand; PAM type: YTN; PAM sequence: CTC
acagtgctggagactaggaa

SEQ ID NO: 242185 - DNA, 20 bp, Artificial Sequence
  Description of Artificial Sequence: Synthetic oligonucleotide
  Target: LAMA2; (-) strand; PAM type: YTN; PAM sequence: CTG
ctcacagtgctggagactag

SEQ ID NO: 242186 - DNA, 20 bp, Artificial Sequence
  Description of Artificial Sequence: Synthetic oligonucleotide
  Target: LAMA2; (-) strand; PAM type: YTN; PAM sequence: TTA
aaaatatactgctcacagtg

SEQ ID NO: 242187 - DNA, 20 bp, Artificial Sequence
  Description of Artificial Sequence: Synthetic oligonucleotide
  Target: LAMA2; (-) strand; PAM type: YTN; PAM sequence: TTA
agcattaaaaatatactgct

SEQ ID NO: 242188 - DNA, 20 bp, Artificial Sequence
  Description of Artificial Sequence: Synthetic oligonucleotide
  Target: LAMA2; (-) strand; PAM type: YTN; PAM sequence: TTT
aagcattaaaaatatactgc

SEQ ID NO: 242189 - DNA, 20 bp, Artificial Sequence
  Description of Artificial Sequence: Synthetic oligonucleotide
  Target: LAMA2; (-) strand; PAM type: YTN; PAM sequence: TTT
taagcattaaaaatatactg

SEQ ID NO: 242190 - DNA, 20 bp, Artificial Sequence
  Description of Artificial Sequence: Synthetic oligonucleotide
  Target: LAMA2; (-) strand; PAM type: YTN; PAM sequence: TTT
ttaagcattaaaaatatact

SEQ ID NO: 242191 - DNA, 20 bp, Artificial Sequence
  Description of Artificial Sequence: Synthetic oligonucleotide
  Target: LAMA2; (-) strand; PAM type: YTN; PAM sequence: CTA
ggtagtttttaagcattaaa

SEQ ID NO: 242192 - DNA, 20 bp, Artificial Sequence
  Description of Artificial Sequence: Synthetic oligonucleotide
  Target: LAMA2; (-) strand; PAM type: YTN; PAM sequence: CTA
caacaaaataacagggacta

SEQ ID NO: 242193 - DNA, 20 bp, Artificial Sequence
  Description of Artificial Sequence: Synthetic oligonucleotide
  Target: LAMA2; (-) strand; PAM type: YTN; PAM sequence: CTG
ctacaacaaaataacaggga

SEQ ID NO: 242194 - DNA, 20 bp, Artificial Sequence
  Description of Artificial Sequence: Synthetic oligonucleotide
  Target: LAMA2; (-) strand; PAM type: YTN; PAM sequence: TTC
aggctgctacaacaaaataa

SEQ ID NO: 242195 - DNA, 20 bp, Artificial Sequence
  Description of Artificial Sequence: Synthetic oligonucleotide
  Target: LAMA2; (-) strand; PAM type: YTN; PAM sequence: CTG
atgcattcaggctgctacaa

SEQ ID NO: 242196 - DNA, 20 bp, Artificial Sequence
  Description of Artificial Sequence: Synthetic oligonucleotide
  Target: LAMA2; (-) strand; PAM type: YTN; PAM sequence: TTG
caaagtgtactgatgcattc

SEQ ID NO: 242197 - DNA, 20 bp, Artificial Sequence
  Description of Artificial Sequence: Synthetic oligonucleotide
  Target: LAMA2; (-) strand; PAM type: YTN; PAM sequence: CTT
gcaaagtgtactgatgcatt

SEQ ID NO: 242198 - DNA, 20 bp, Artificial Sequence
  Description of Artificial Sequence: Synthetic oligonucleotide
  Target: LAMA2; (-) strand; PAM type: YTN; PAM sequence: CTG
gcttgcaaagtgtactgatg

SEQ ID NO: 242199 - DNA, 20 bp, Artificial Sequence
  Description of Artificial Sequence: Synthetic oligonucleotide
  Target: LAMA2; (-) strand; PAM type: YTN; PAM sequence: TTC
tggcttgcaaagtgtactga

SEQ ID NO: 242200 - DNA, 20 bp, Artificial Sequence
  Description of Artificial Sequence: Synthetic oligonucleotide
  Target: LAMA2; (-) strand; PAM type: YTN; PAM sequence: TTG
tattctggcttgcaaagtgt

SEQ ID NO: 242201 - DNA, 20 bp, Artificial Sequence
  Description of Artificial Sequence: Synthetic oligonucleotide
  Target: LAMA2; (-) strand; PAM type: YTN; PAM sequence: CTG
tattgtattctggcttgcaa

SEQ ID NO: 242202 - DNA, 20 bp, Artificial Sequence
  Description of Artificial Sequence: Synthetic oligonucleotide
  Target: LAMA2; (-) strand; PAM type: YTN; PAM sequence: CTC
tgtattgtattctggcttgc

SEQ ID NO: 242203 - DNA, 20 bp, Artificial Sequence
  Description of Artificial Sequence: Synthetic oligonucleotide
  Target: LAMA2; (-) strand; PAM type: YTN; PAM sequence: TTA
acatatctctgtattgtatt

SEQ ID NO: 242204 - DNA, 20 bp, Artificial Sequence
  Description of Artificial Sequence: Synthetic oligonucleotide
  Target: LAMA2; (-) strand; PAM type: YTN; PAM sequence: TTT
aacatatctctgtattgtat

SEQ ID NO: 242205 - DNA, 20 bp, Artificial Sequence
  Description of Artificial Sequence: Synthetic oligonucleotide
  Target: LAMA2; (-) strand; PAM type: YTN; PAM sequence: CTT
taacatatctctgtattgta

SEQ ID NO: 242206 - DNA, 20 bp, Artificial Sequence
  Description of Artificial Sequence: Synthetic oligonucleotide
  Target: LAMA2; (-) strand; PAM type: YTN; PAM sequence: CTA
atactttaacatatctctgt

SEQ ID NO: 242207 - DNA, 20 bp, Artificial Sequence
  Description of Artificial Sequence: Synthetic oligonucleotide
  Target: LAMA2; (-) strand; PAM type: YTN; PAM sequence: TTC
ctaatactttaacatatctc

SEQ ID NO: 242208 - DNA, 20 bp, Artificial Sequence
  Description of Artificial Sequence: Synthetic oligonucleotide
  Target: LAMA2; (-) strand; PAM type: YTN; PAM sequence: TTT
cctaatactttaacatatct

SEQ ID NO: 242209 - DNA, 20 bp, Artificial Sequence
  Description of Artificial Sequence: Synthetic oligonucleotide
  Target: LAMA2; (-) strand; PAM type: YTN; PAM sequence: TTT
tcctaatactttaacatatc

SEQ ID NO: 242210 - DNA, 20 bp, Artificial Sequence
  Description of Artificial Sequence: Synthetic oligonucleotide
  Target: LAMA2; (-) strand; PAM type: YTN; PAM sequence: TTT
ttcctaatactttaacatat

SEQ ID NO: 242211 - DNA, 20 bp, Artificial Sequence
  Description of Artificial Sequence: Synthetic oligonucleotide
  Target: LAMA2; (-) strand; PAM type: YTN; PAM sequence: TTT
tttcctaatactttaacata

SEQ ID NO: 242212 - DNA, 20 bp, Artificial Sequence
  Description of Artificial Sequence: Synthetic oligonucleotide
  Target: LAMA2; (-) strand; PAM type: YTN; PAM sequence: TTG
ttttttcctaatactttaac

SEQ ID NO: 242213 - DNA, 20 bp, Artificial Sequence
  Description of Artificial Sequence: Synthetic oligonucleotide
  Target: LAMA2; (-) strand; PAM type: YTN; PAM sequence: TTG
cgttgttttttcctaatact

SEQ ID NO: 242214 - DNA, 20 bp, Artificial Sequence
  Description of Artificial Sequence: Synthetic oligonucleotide
  Target: LAMA2; (-) strand; PAM type: YTN; PAM sequence: CTT
gcgttgttttttcctaatac

SEQ ID NO: 242215 - DNA, 20 bp, Artificial Sequence
  Description of Artificial Sequence: Synthetic oligonucleotide
  Target: LAMA2; (-) strand; PAM type: YTN; PAM sequence: TTG
cttgcgttgttttttcctaa

SEQ ID NO: 242216 - DNA, 20 bp, Artificial Sequence
  Description of Artificial Sequence: Synthetic oligonucleotide
  Target: LAMA2; (-) strand; PAM type: YTN; PAM sequence: TTG
attgcttgcgttgttttttc

SEQ ID NO: 242217 - DNA, 20 bp, Artificial Sequence
  Description of Artificial Sequence: Synthetic oligonucleotide
  Target: LAMA2; (-) strand; PAM type: YTN; PAM sequence: TTT
gattgcttgcgttgtttttt

SEQ ID NO: 242218 - DNA, 20 bp, Artificial Sequence
  Description of Artificial Sequence: Synthetic oligonucleotide
  Target: LAMA2; (-) strand; PAM type: YTN; PAM sequence: TTC
atttgattgcttgcgttgtt

SEQ ID NO: 242219 - DNA, 20 bp, Artificial Sequence
  Description of Artificial Sequence: Synthetic oligonucleotide
  Target: LAMA2; (-) strand; PAM type: YTN; PAM sequence: TTG
ttcatttgattgcttgcgtt

SEQ ID NO: 242220 - DNA, 20 bp, Artificial Sequence
  Description of Artificial Sequence: Synthetic oligonucleotide
  Target: LAMA2; (-) strand; PAM type: YTN; PAM sequence: TTT
gttcatttgattgcttgcgt

SEQ ID NO: 242221 - DNA, 20 bp, Artificial Sequence
  Description of Artificial Sequence: Synthetic oligonucleotide
  Target: LAMA2; (-) strand; PAM type: YTN; PAM sequence: TTT
tgttcatttgattgcttgcg

SEQ ID NO: 242222 - DNA, 20 bp, Artificial Sequence
  Description of Artificial Sequence: Synthetic oligonucleotide
  Target: LAMA2; (-) strand; PAM type: YTN; PAM sequence: TTG
ttttgttcatttgattgctt

SEQ ID NO: 242223 - DNA, 20 bp, Artificial Sequence
  Description of Artificial Sequence: Synthetic oligonucleotide
  Target: LAMA2; (-) strand; PAM type: YTN; PAM sequence: TTT
gttttgttcatttgattgct

SEQ ID NO: 242224 - DNA, 20 bp, Artificial Sequence
  Description of Artificial Sequence: Synthetic oligonucleotide
  Target: LAMA2; (-) strand; PAM type: YTN; PAM sequence: CTG
atagtatttgttttgttcat

SEQ ID NO: 242225 - DNA, 20 bp, Artificial Sequence
  Description of Artificial Sequence: Synthetic oligonucleotide
  Target: LAMA2; (-) strand; PAM type: YTN; PAM sequence: TTA
tagactgatagtatttgttt

SEQ ID NO: 242226 - DNA, 20 bp, Artificial Sequence
  Description of Artificial Sequence: Synthetic oligonucleotide
  Target: LAMA2; (-) strand; PAM type: YTN; PAM sequence: CTG
gtaaagaattatagactgat

SEQ ID NO: 242227 - DNA, 20 bp, Artificial Sequence
  Description of Artificial Sequence: Synthetic oligonucleotide
  Target: LAMA2; (-) strand; PAM type: YTN; PAM sequence: TTG
cctggtaaagaattatagac

SEQ ID NO: 242228 - DNA, 20 bp, Artificial Sequence
  Description of Artificial Sequence: Synthetic oligonucleotide
  Target: LAMA2; (-) strand; PAM type: YTN; PAM sequence: TTT
gcctggtaaagaattataga

SEQ ID NO: 242229 - DNA, 20 bp, Artificial Sequence
  Description of Artificial Sequence: Synthetic oligonucleotide
  Target: LAMA2; (-) strand; PAM type: YTN; PAM sequence: TTT
tgcctggtaaagaattatag

SEQ ID NO: 242230 - DNA, 20 bp, Artificial Sequence
  Description of Artificial Sequence: Synthetic oligonucleotide
  Target: LAMA2; (-) strand; PAM type: YTN; PAM sequence: TTT
ttgcctggtaaagaattata

SEQ ID NO: 242231 - DNA, 20 bp, Artificial Sequence
  Description of Artificial Sequence: Synthetic oligonucleotide
  Target: LAMA2; (-) strand; PAM type: YTN; PAM sequence: TTG
gaagacatttttgcctggta

SEQ ID NO: 242232 - DNA, 20 bp, Artificial Sequence
  Description of Artificial Sequence: Synthetic oligonucleotide
  Target: LAMA2; (-) strand; PAM type: YTN; PAM sequence: TTT
ggaagacatttttgcctggt

SEQ ID NO: 242233 - DNA, 20 bp, Artificial Sequence
  Description of Artificial Sequence: Synthetic oligonucleotide
  Target: LAMA2; (-) strand; PAM type: YTN; PAM sequence: TTT
tggaagacatttttgcctgg

SEQ ID NO: 242234 - DNA, 20 bp, Artificial Sequence
  Description of Artificial Sequence: Synthetic oligonucleotide
  Target: LAMA2; (-) strand; PAM type: YTN; PAM sequence: TTC
agttttggaagacatttttg

SEQ ID NO: 242235 - DNA, 20 bp, Artificial Sequence
  Description of Artificial Sequence: Synthetic oligonucleotide
  Target: LAMA2; (-) strand; PAM type: YTN; PAM sequence: CTT
cagttttggaagacattttt

SEQ ID NO: 242236 - DNA, 20 bp, Artificial Sequence
  Description of Artificial Sequence: Synthetic oligonucleotide
  Target: LAMA2; (-) strand; PAM type: YTN; PAM sequence: TTC
ttcagttttggaagacattt

SEQ ID NO: 242237 - DNA, 20 bp, Artificial Sequence
  Description of Artificial Sequence: Synthetic oligonucleotide
  Target: LAMA2; (-) strand; PAM type: YTN; PAM sequence: TTT
cttcagttttggaagacatt

SEQ ID NO: 242238 - DNA, 20 bp, Artificial Sequence
  Description of Artificial Sequence: Synthetic oligonucleotide
  Target: LAMA2; (-) strand; PAM type: YTN; PAM sequence: TTT
tcttcagttttggaagacat

SEQ ID NO: 242239 - DNA, 20 bp, Artificial Sequence
  Description of Artificial Sequence: Synthetic oligonucleotide
  Target: LAMA2; (-) strand; PAM type: YTN; PAM sequence: TTT
ttcttcagttttggaagaca

SEQ ID NO: 242240 - DNA, 20 bp, Artificial Sequence
  Description of Artificial Sequence: Synthetic oligonucleotide
  Target: LAMA2; (-) strand; PAM type: YTN; PAM sequence: TTT
tttcttcagttttggaagac

SEQ ID NO: 242241 - DNA, 20 bp, Artificial Sequence
  Description of Artificial Sequence: Synthetic oligonucleotide
  Target: LAMA2; (-) strand; PAM type: YTN; PAM sequence: TTG
ttttttcttcagttttggaa

SEQ ID NO: 242242 - DNA, 20 bp, Artificial Sequence
  Description of Artificial Sequence: Synthetic oligonucleotide
  Target: LAMA2; (-) strand; PAM type: YTN; PAM sequence: TTT
gttttttcttcagttttgga

SEQ ID NO: 242243 - DNA, 20 bp, Artificial Sequence
  Description of Artificial Sequence: Synthetic oligonucleotide
  Target: LAMA2; (-) strand; PAM type: YTN; PAM sequence: CTT
tgttttttcttcagttttgg

SEQ ID NO: 242244 - DNA, 20 bp, Artificial Sequence
  Description of Artificial Sequence: Synthetic oligonucleotide
  Target: LAMA2; (-) strand; PAM type: YTN; PAM sequence: CTG
aaacaatctttgttttttct

SEQ ID NO: 242245 - DNA, 20 bp, Artificial Sequence
  Description of Artificial Sequence: Synthetic oligonucleotide
  Target: LAMA2; (-) strand; PAM type: YTN; PAM sequence: CTC
tgaaacaatctttgtttttt

SEQ ID NO: 242246 - DNA, 20 bp, Artificial Sequence
  Description of Artificial Sequence: Synthetic oligonucleotide
  Target: LAMA2; (-) strand; PAM type: YTN; PAM sequence: TTC
tctgaaacaatctttgtttt

SEQ ID NO: 242247 - DNA, 20 bp, Artificial Sequence
  Description of Artificial Sequence: Synthetic oligonucleotide
  Target: LAMA2; (-) strand; PAM type: YTN; PAM sequence: TTT
ctctgaaacaatctttgttt

SEQ ID NO: 242248 - DNA, 20 bp, Artificial Sequence
  Description of Artificial Sequence: Synthetic oligonucleotide
  Target: LAMA2; (-) strand; PAM type: YTN; PAM sequence: CTA
tttctctgaaacaatctttg

SEQ ID NO: 242249 - DNA, 20 bp, Artificial Sequence
  Description of Artificial Sequence: Synthetic oligonucleotide
  Target: LAMA2; (-) strand; PAM type: YTN; PAM sequence: TTC
tatttctctgaaacaatctt

SEQ ID NO: 242250 - DNA, 20 bp, Artificial Sequence
  Description of Artificial Sequence: Synthetic oligonucleotide
  Target: LAMA2; (-) strand; PAM type: YTN; PAM sequence: CTT
ctatttctctgaaacaatct

SEQ ID NO: 242251 - DNA, 20 bp, Artificial Sequence
  Description of Artificial Sequence: Synthetic oligonucleotide
  Target: LAMA2; (-) strand; PAM type: YTN; PAM sequence: TTC
aacttctatttctctgaaac

SEQ ID NO: 242252 - DNA, 20 bp, Artificial Sequence
  Description of Artificial Sequence: Synthetic oligonucleotide
  Target: LAMA2; (-) strand; PAM type: YTN; PAM sequence: TTT
caacttctatttctctgaaa

SEQ ID NO: 242253 - DNA, 20 bp, Artificial Sequence
  Description of Artificial Sequence: Synthetic oligonucleotide
  Target: LAMA2; (-) strand; PAM type: YTN; PAM sequence: CTT
tcaacttctatttctctgaa

SEQ ID NO: 242254 - DNA, 20 bp, Artificial Sequence
  Description of Artificial Sequence: Synthetic oligonucleotide
  Target: LAMA2; (-) strand; PAM type: YTN; PAM sequence: TTC
tttcaacttctatttctctg

SEQ ID NO: 242255 - DNA, 20 bp, Artificial Sequence
  Description of Artificial Sequence: Synthetic oligonucleotide
  Target: LAMA2; (-) strand; PAM type: YTN; PAM sequence: CTG
tgacacattctttcaacttc

SEQ ID NO: 242256 - DNA, 20 bp, Artificial Sequence
  Description of Artificial Sequence: Synthetic oligonucleotide
  Target: LAMA2; (-) strand; PAM type: YTN; PAM sequence: TTG
tgtacatcagtctgtgacac

SEQ ID NO: 242257 - DNA, 20 bp, Artificial Sequence
  Description of Artificial Sequence: Synthetic oligonucleotide
  Target: LAMA2; (-) strand; PAM type: YTN; PAM sequence: CTT
gtgtacatcagtctgtgaca

SEQ ID NO: 242258 - DNA, 20 bp, Artificial Sequence
  Description of Artificial Sequence: Synthetic oligonucleotide
  Target: LAMA2; (-) strand; PAM type: YTN; PAM sequence: TTC
ttgtgtacatcagtctgtga

SEQ ID NO: 242259 - DNA, 20 bp, Artificial Sequence
  Description of Artificial Sequence: Synthetic oligonucleotide
  Target: LAMA2; (-) strand; PAM type: YTN; PAM sequence: CTT
cttgtgtacatcagtctgtg

SEQ ID NO: 242260 - DNA, 20 bp, Artificial Sequence
  Description of Artificial Sequence: Synthetic oligonucleotide
  Target: LAMA2; (-) strand; PAM type: YTN; PAM sequence: TTC
ttcttgtgtacatcagtctg

SEQ ID NO: 242261 - DNA, 20 bp, Artificial Sequence
  Description of Artificial Sequence: Synthetic oligonucleotide
  Target: LAMA2; (-) strand; PAM type: YTN; PAM sequence: TTT
cttcttgtgtacatcagtct

SEQ ID NO: 242262 - DNA, 20 bp, Artificial Sequence
  Description of Artificial Sequence: Synthetic oligonucleotide
  Target: LAMA2; (-) strand; PAM type: YTN; PAM sequence: CTA
catttcttcttgtgtacatc

SEQ ID NO: 242263 - DNA, 20 bp, Artificial Sequence
  Description of Artificial Sequence: Synthetic oligonucleotide
  Target: LAMA2; (-) strand; PAM type: YTN; PAM sequence: TTC
tacatttcttcttgtgtaca

SEQ ID NO: 242264 - DNA, 20 bp, Artificial Sequence
  Description of Artificial Sequence: Synthetic oligonucleotide
  Target: LAMA2; (-) strand; PAM type: YTN; PAM sequence: TTT
ctacatttcttcttgtgtac

SEQ ID NO: 242265 - DNA, 20 bp, Artificial Sequence
  Description of Artificial Sequence: Synthetic oligonucleotide
  Target: LAMA2; (-) strand; PAM type: YTN; PAM sequence: CTT
tctacatttcttcttgtgta

SEQ ID NO: 242266 - DNA, 20 bp, Artificial Sequence
  Description of Artificial Sequence: Synthetic oligonucleotide
  Target: LAMA2; (-) strand; PAM type: YTN; PAM sequence: CTG
aagaactttctacatttctt

SEQ ID NO: 242267 - DNA, 20 bp, Artificial Sequence
  Description of Artificial Sequence: Synthetic oligonucleotide
  Target: LAMA2; (-) strand; PAM type: YTN; PAM sequence: TTG
cctgaagaactttctacatt

SEQ ID NO: 242268 - DNA, 20 bp, Artificial Sequence
  Description of Artificial Sequence: Synthetic oligonucleotide
  Target: LAMA2; (-) strand; PAM type: YTN; PAM sequence: TTT
gcctgaagaactttctacat

SEQ ID NO: 242269 - DNA, 20 bp, Artificial Sequence
  Description of Artificial Sequence: Synthetic oligonucleotide
  Target: LAMA2; (-) strand; PAM type: YTN; PAM sequence: TTT
tgcctgaagaactttctaca

SEQ ID NO: 242270 - DNA, 20 bp, Artificial Sequence
  Description of Artificial Sequence: Synthetic oligonucleotide
  Target: LAMA2; (-) strand; PAM type: YTN; PAM sequence: CTT
ttgcctgaagaactttctac

SEQ ID NO: 242271 - DNA, 20 bp, Artificial Sequence
  Description of Artificial Sequence: Synthetic oligonucleotide
  Target: LAMA2; (-) strand; PAM type: YTN; PAM sequence: TTC
ttttgcctgaagaactttct

SEQ ID NO: 242272 - DNA, 20 bp, Artificial Sequence
  Description of Artificial Sequence: Synthetic oligonucleotide
  Target: LAMA2; (-) strand; PAM type: YTN; PAM sequence: TTT
cttttgcctgaagaactttc

SEQ ID NO: 242273 - DNA, 20 bp, Artificial Sequence
  Description of Artificial Sequence: Synthetic oligonucleotide
  Target: LAMA2; (-) strand; PAM type: YTN; PAM sequence: TTT
tcttttgcctgaagaacttt

SEQ ID NO: 242274 - DNA, 20 bp, Artificial Sequence
  Description of Artificial Sequence: Synthetic oligonucleotide
  Target: LAMA2; (-) strand; PAM type: YTN; PAM sequence: TTT
ttcttttgcctgaagaactt

SEQ ID NO: 242275 - DNA, 20 bp, Artificial Sequence
  Description of Artificial Sequence: Synthetic oligonucleotide
  Target: LAMA2; (-) strand; PAM type: YTN; PAM sequence: CTG
gtaacatttttcttttgcct

SEQ ID NO: 242276 - DNA, 20 bp, Artificial Sequence
  Description of Artificial Sequence: Synthetic oligonucleotide
  Target: LAMA2; (-) strand; PAM type: YTN; PAM sequence: TTC
catctggtaacatttttctt

SEQ ID NO: 242277 - DNA, 20 bp, Artificial Sequence
  Description of Artificial Sequence: Synthetic oligonucleotide
  Target: LAMA2; (-) strand; PAM type: YTN; PAM sequence: TTT
ccatctggtaacatttttct

SEQ ID NO: 242278 - DNA, 20 bp, Artificial Sequence
  Description of Artificial Sequence: Synthetic oligonucleotide
  Target: LAMA2; (-) strand; PAM type: YTN; PAM sequence: TTG
taggagtaaatttccatctg

SEQ ID NO: 242279 - DNA, 20 bp, Artificial Sequence
  Description of Artificial Sequence: Synthetic oligonucleotide
  Target: LAMA2; (-) strand; PAM type: YTN; PAM sequence: TTT
gtaggagtaaatttccatct

SEQ ID NO: 242280 - DNA, 20 bp, Artificial Sequence
  Description of Artificial Sequence: Synthetic oligonucleotide
  Target: LAMA2; (-) strand; PAM type: YTN; PAM sequence: CTA
tttgtaggagtaaatttcca

SEQ ID NO: 242281 - DNA, 20 bp, Artificial Sequence
  Description of Artificial Sequence: Synthetic oligonucleotide
  Target: LAMA2; (-) strand; PAM type: YTN; PAM sequence: TTC
tatttgtaggagtaaatttc

SEQ ID NO: 242282 - DNA, 20 bp, Artificial Sequence
  Description of Artificial Sequence: Synthetic oligonucleotide
  Target: LAMA2; (-) strand; PAM type: YTN; PAM sequence: TTT
ctatttgtaggagtaaattt

SEQ ID NO: 242283 - DNA, 20 bp, Artificial Sequence
  Description of Artificial Sequence: Synthetic oligonucleotide
  Target: LAMA2; (-) strand; PAM type: YTN; PAM sequence: TTA
atttctatttgtaggagtaa

SEQ ID NO: 242284 - DNA, 20 bp, Artificial Sequence
  Description of Artificial Sequence: Synthetic oligonucleotide
  Target: LAMA2; (-) strand; PAM type: YTN; PAM sequence: CTT
aatttctatttgtaggagta

SEQ ID NO: 242285 - DNA, 20 bp, Artificial Sequence
  Description of Artificial Sequence: Synthetic oligonucleotide
  Target: LAMA2; (-) strand; PAM type: YTN; PAM sequence: TTG
atacacttaatttctatttg

SEQ ID NO: 242286 - DNA, 20 bp, Artificial Sequence
  Description of Artificial Sequence: Synthetic oligonucleotide
  Target: LAMA2; (-) strand; PAM type: YTN; PAM sequence: TTT
gatacacttaatttctattt

SEQ ID NO: 242287 - DNA, 20 bp, Artificial Sequence
  Description of Artificial Sequence: Synthetic oligonucleotide
  Target: LAMA2; (-) strand; PAM type: YTN; PAM sequence: CTG
tttgatacacttaatttcta

SEQ ID NO: 242288 - DNA, 20 bp, Artificial Sequence
  Description of Artificial Sequence: Synthetic oligonucleotide
  Target: LAMA2; (-) strand; PAM type: YTN; PAM sequence: TTC
acctgtttgatacacttaat

SEQ ID NO: 242289 - DNA, 20 bp, Artificial Sequence
  Description of Artificial Sequence: Synthetic oligonucleotide
  Target: LAMA2; (-) strand; PAM type: YTN; PAM sequence: CTA
ttcacctgtttgatacactt

SEQ ID NO: 242290 - DNA, 20 bp, Artificial Sequence
  Description of Artificial Sequence: Synthetic oligonucleotide
  Target: LAMA2; (-) strand; PAM type: YTN; PAM sequence: TTG
ctattcacctgtttgataca

SEQ ID NO: 242291 - DNA, 20 bp, Artificial Sequence
  Description of Artificial Sequence: Synthetic oligonucleotide
  Target: LAMA2; (-) strand; PAM type: YTN; PAM sequence: CTA
gtgacaaagcattgctattc

SEQ ID NO: 242292 - DNA, 20 bp, Artificial Sequence
  Description of Artificial Sequence: Synthetic oligonucleotide
  Target: LAMA2; (-) strand; PAM type: YTN; PAM sequence: CTA
gcactagtgacaaagcattg

SEQ ID NO: 242293 - DNA, 20 bp, Artificial Sequence
  Description of Artificial Sequence: Synthetic oligonucleotide
  Target: LAMA2; (-) strand; PAM type: YTN; PAM sequence: TTG
tgacagctagcactagtgac

SEQ ID NO: 242294 - DNA, 20 bp, Artificial Sequence
  Description of Artificial Sequence: Synthetic oligonucleotide
  Target: LAMA2; (-) strand; PAM type: YTN; PAM sequence: CTT
gtgacagctagcactagtga

SEQ ID NO: 242295 - DNA, 20 bp, Artificial Sequence
  Description of Artificial Sequence: Synthetic oligonucleotide
  Target: LAMA2; (-) strand; PAM type: YTN; PAM sequence: CTA
gaggtcttgtgacagctagc

SEQ ID NO: 242296 - DNA, 20 bp, Artificial Sequence
  Description of Artificial Sequence: Synthetic oligonucleotide
  Target: LAMA2; (-) strand; PAM type: YTN; PAM sequence: CTG
gctagaggtcttgtgacagc

SEQ ID NO: 242297 - DNA, 20 bp, Artificial Sequence
  Description of Artificial Sequence: Synthetic oligonucleotide
  Target: LAMA2; (-) strand; PAM type: YTN; PAM sequence: CTG
aaaacatgactggctagagg

SEQ ID NO: 242298 - DNA, 20 bp, Artificial Sequence
  Description of Artificial Sequence: Synthetic oligonucleotide
  Target: LAMA2; (-) strand; PAM type: YTN; PAM sequence: CTA
cagctgaaaacatgactggc

SEQ ID NO: 242299 - DNA, 20 bp, Artificial Sequence
  Description of Artificial Sequence: Synthetic oligonucleotide
  Target: LAMA2; (-) strand; PAM type: YTN; PAM sequence: TTA
ggccctacagctgaaaacat

SEQ ID NO: 242300 - DNA, 20 bp, Artificial Sequence
  Description of Artificial Sequence: Synthetic oligonucleotide
  Target: LAMA2; (-) strand; PAM type: YTN; PAM sequence: TTA
accatggtgttaggccctac

SEQ ID NO: 242301 - DNA, 20 bp, Artificial Sequence
  Description of Artificial Sequence: Synthetic oligonucleotide
  Target: LAMA2; (-) strand; PAM type: YTN; PAM sequence: CTT
aaccatggtgttaggcccta

SEQ ID NO: 242302 - DNA, 20 bp, Artificial Sequence
  Description of Artificial Sequence: Synthetic oligonucleotide
  Target: LAMA2; (-) strand; PAM type: YTN; PAM sequence: TTC
cttaaccatggtgttaggcc

SEQ ID NO: 242303 - DNA, 20 bp, Artificial Sequence
  Description of Artificial Sequence: Synthetic oligonucleotide
  Target: LAMA2; (-) strand; PAM type: YTN; PAM sequence: TTA
ggtaaccattccttaaccat

SEQ ID NO: 242304 - DNA, 20 bp, Artificial Sequence
  Description of Artificial Sequence: Synthetic oligonucleotide
  Target: LAMA2; (-) strand; PAM type: YTN; PAM sequence: TTT
aggtaaccattccttaacca

SEQ ID NO: 242305 - DNA, 20 bp, Artificial Sequence
  Description of Artificial Sequence: Synthetic oligonucleotide
  Target: LAMA2; (-) strand; PAM type: YTN; PAM sequence: TTG
tgtatttaggtaaccattcc

SEQ ID NO: 242306 - DNA, 20 bp, Artificial Sequence
  Description of Artificial Sequence: Synthetic oligonucleotide
  Target: LAMA2; (-) strand; PAM type: YTN; PAM sequence: TTT
gtgtatttaggtaaccattc

SEQ ID NO: 242307 - DNA, 20 bp, Artificial Sequence
  Description of Artificial Sequence: Synthetic oligonucleotide
  Target: LAMA2; (-) strand; PAM type: YTN; PAM sequence: TTA
agtttgtgtatttaggtaac

SEQ ID NO: 242308 - DNA, 20 bp, Artificial Sequence
  Description of Artificial Sequence: Synthetic oligonucleotide
  Target: LAMA2; (-) strand; PAM type: YTN; PAM sequence: TTT
aagtttgtgtatttaggtaa

SEQ ID NO: 242309 - DNA, 20 bp, Artificial Sequence
  Description of Artificial Sequence: Synthetic oligonucleotide
  Target: LAMA2; (-) strand; PAM type: YTN; PAM sequence: CTT
taagtttgtgtatttaggta

SEQ ID NO: 242310 - DNA, 20 bp, Artificial Sequence
  Description of Artificial Sequence: Synthetic oligonucleotide
  Target: LAMA2; (-) strand; PAM type: YTN; PAM sequence: CTA
ctttaagtttgtgtatttag

SEQ ID NO: 242311 - DNA, 20 bp, Artificial Sequence
  Description of Artificial Sequence: Synthetic oligonucleotide
  Target: LAMA2; (-) strand; PAM type: YTN; PAM sequence: TTC
tactttaagtttgtgtattt

SEQ ID NO: 242312 - DNA, 20 bp, Artificial Sequence
  Description of Artificial Sequence: Synthetic oligonucleotide
  Target: LAMA2; (-) strand; PAM type: YTN; PAM sequence: TTG
aagttctactttaagtttgt

SEQ ID NO: 242313 - DNA, 20 bp, Artificial Sequence
  Description of Artificial Sequence: Synthetic oligonucleotide
  Target: LAMA2; (-) strand; PAM type: YTN; PAM sequence: TTT
gaagttctactttaagtttg

SEQ ID NO: 242314 - DNA, 20 bp, Artificial Sequence
  Description of Artificial Sequence: Synthetic oligonucleotide
  Target: LAMA2; (-) strand; PAM type: YTN; PAM sequence: TTA
tacaggaagtatttgaagtt

SEQ ID NO: 242315 - DNA, 20 bp, Artificial Sequence
  Description of Artificial Sequence: Synthetic oligonucleotide
  Target: LAMA2; (-) strand; PAM type: YTN; PAM sequence: TTT
atacaggaagtatttgaagt

SEQ ID NO: 242316 - DNA, 20 bp, Artificial Sequence
  Description of Artificial Sequence: Synthetic oligonucleotide
  Target: LAMA2; (-) strand; PAM type: YTN; PAM sequence: TTT
tatacaggaagtatttgaag

SEQ ID NO: 242317 - DNA, 20 bp, Artificial Sequence
  Description of Artificial Sequence: Synthetic oligonucleotide
  Target: LAMA2; (-) strand; PAM type: YTN; PAM sequence: TTC
agagggaaaattttatacag

SEQ ID NO: 242318 - DNA, 20 bp, Artificial Sequence
  Description of Artificial Sequence: Synthetic oligonucleotide
  Target: LAMA2; (-) strand; PAM type: YTN; PAM sequence: CTT
cagagggaaaattttataca

SEQ ID NO: 242319 - DNA, 20 bp, Artificial Sequence
  Description of Artificial Sequence: Synthetic oligonucleotide
  Target: LAMA2; (-) strand; PAM type: YTN; PAM sequence: TTA
aaacttcagagggaaaattt

SEQ ID NO: 242320 - DNA, 20 bp, Artificial Sequence
  Description of Artificial Sequence: Synthetic oligonucleotide
  Target: LAMA2; (-) strand; PAM type: YTN; PAM sequence: TTT
aaaacttcagagggaaaatt

SEQ ID NO: 242321 - DNA, 20 bp, Artificial Sequence
  Description of Artificial Sequence: Synthetic oligonucleotide
  Target: LAMA2; (-) strand; PAM type: YTN; PAM sequence: TTT
taaaacttcagagggaaaat

SEQ ID NO: 242322 - DNA, 20 bp, Artificial Sequence
  Description of Artificial Sequence: Synthetic oligonucleotide
  Target: LAMA2; (-) strand; PAM type: YTN; PAM sequence: TTT
ttaaaacttcagagggaaaa

SEQ ID NO: 242323 - DNA, 20 bp, Artificial Sequence
  Description of Artificial Sequence: Synthetic oligonucleotide
  Target: LAMA2; (-) strand; PAM type: YTN; PAM sequence: CTT
tttaaaacttcagagggaaa

SEQ ID NO: 242324 - DNA, 20 bp, Artificial Sequence
  Description of Artificial Sequence: Synthetic oligonucleotide
  Target: LAMA2; (-) strand; PAM type: YTN; PAM sequence: TTC
tttttaaaacttcagaggga

SEQ ID NO: 242325 - DNA, 20 bp, Artificial Sequence
  Description of Artificial Sequence: Synthetic oligonucleotide
  Target: LAMA2; (-) strand; PAM type: YTN; PAM sequence: TTT
ctttttaaaacttcagaggg

SEQ ID NO: 242326 - DNA, 20 bp, Artificial Sequence
  Description of Artificial Sequence: Synthetic oligonucleotide
  Target: LAMA2; (-) strand; PAM type: YTN; PAM sequence: CTT
tctttttaaaacttcagagg

SEQ ID NO: 242327 - DNA, 20 bp, Artificial Sequence
  Description of Artificial Sequence: Synthetic oligonucleotide
  Target: LAMA2; (-) strand; PAM type: YTN; PAM sequence: TTA
caacccagtctttcttttta

SEQ ID NO: 242328 - DNA, 20 bp, Artificial Sequence
  Description of Artificial Sequence: Synthetic oligonucleotide
  Target: LAMA2; (-) strand; PAM type: YTN; PAM sequence: CTT
acaacccagtctttcttttt

SEQ ID NO: 242329 - DNA, 20 bp, Artificial Sequence
  Description of Artificial Sequence: Synthetic oligonucleotide
  Target: LAMA2; (-) strand; PAM type: YTN; PAM sequence: TTC
ttacaacccagtctttcttt

SEQ ID NO: 242330 - DNA, 20 bp, Artificial Sequence
  Description of Artificial Sequence: Synthetic oligonucleotide
  Target: LAMA2; (-) strand; PAM type: YTN; PAM sequence: CTT
cttacaacccagtctttctt

SEQ ID NO: 242331 - DNA, 20 bp, Artificial Sequence
  Description of Artificial Sequence: Synthetic oligonucleotide
  Target: LAMA2; (-) strand; PAM type: YTN; PAM sequence: CTC
ttcttacaacccagtctttc

SEQ ID NO: 242332 - DNA, 20 bp, Artificial Sequence
  Description of Artificial Sequence: Synthetic oligonucleotide
  Target: LAMA2; (-) strand; PAM type: YTN; PAM sequence: TTA
tactcttcttacaacccagt

SEQ ID NO: 242333 - DNA, 20 bp, Artificial Sequence
  Description of Artificial Sequence: Synthetic oligonucleotide
  Target: LAMA2; (-) strand; PAM type: YTN; PAM sequence: TTT
atactcttcttacaacccag

SEQ ID NO: 242334 - DNA, 20 bp, Artificial Sequence
  Description of Artificial Sequence: Synthetic oligonucleotide
  Target: LAMA2; (-) strand; PAM type: YTN; PAM sequence: TTT
tatactcttcttacaaccca

SEQ ID NO: 242335 - DNA, 20 bp, Artificial Sequence
  Description of Artificial Sequence: Synthetic oligonucleotide
  Target: LAMA2; (-) strand; PAM type: YTN; PAM sequence: TTT
ttatactcttcttacaaccc

SEQ ID NO: 242336 - DNA, 20 bp, Artificial Sequence
  Description of Artificial Sequence: Synthetic oligonucleotide
  Target: LAMA2; (-) strand; PAM type: YTN; PAM sequence: TTT
tttatactcttcttacaacc

SEQ ID NO: 242337 - DNA, 20 bp, Artificial Sequence
  Description of Artificial Sequence: Synthetic oligonucleotide
  Target: LAMA2; (-) strand; PAM type: YTN; PAM sequence: CTT
ttttatactcttcttacaac

SEQ ID NO: 242338 - DNA, 20 bp, Artificial Sequence
  Description of Artificial Sequence: Synthetic oligonucleotide
  Target: LAMA2; (-) strand; PAM type: YTN; PAM sequence: CTG
gagaagcaagccttttttat

SEQ ID NO: 242339 - DNA, 20 bp, Artificial Sequence
  Description of Artificial Sequence: Synthetic oligonucleotide
  Target: LAMA2; (-) strand; PAM type: YTN; PAM sequence: TTG
aaatgagaaatgagagctgg

SEQ ID NO: 242340 - DNA, 20 bp, Artificial Sequence
  Description of Artificial Sequence: Synthetic oligonucleotide
  Target: LAMA2; (-) strand; PAM type: YTN; PAM sequence: TTT
gaaatgagaaatgagagctg

SEQ ID NO: 242341 - DNA, 20 bp, Artificial Sequence
  Description of Artificial Sequence: Synthetic oligonucleotide
  Target: LAMA2; (-) strand; PAM type: YTN; PAM sequence: TTA
agtttgaaatgagaaatgag

SEQ ID NO: 242342 - DNA, 20 bp, Artificial Sequence
  Description of Artificial Sequence: Synthetic oligonucleotide
  Target: LAMA2; (-) strand; PAM type: YTN; PAM sequence: TTT
aagtttgaaatgagaaatga

SEQ ID NO: 242343 - DNA, 20 bp, Artificial Sequence
  Description of Artificial Sequence: Synthetic oligonucleotide
  Target: LAMA2; (-) strand; PAM type: YTN; PAM sequence: CTT
taagtttgaaatgagaaatg

SEQ ID NO: 242344 - DNA, 20 bp, Artificial Sequence
  Description of Artificial Sequence: Synthetic oligonucleotide
  Target: LAMA2; (-) strand; PAM type: YTN; PAM sequence: TTC
tttaagtttgaaatgagaaa

SEQ ID NO: 242345 - DNA, 20 bp, Artificial Sequence
  Description of Artificial Sequence: Synthetic oligonucleotide
  Target: LAMA2; (-) strand; PAM type: YTN; PAM sequence: TTT
ctttaagtttgaaatgagaa

SEQ ID NO: 242346 - DNA, 20 bp, Artificial Sequence
  Description of Artificial Sequence: Synthetic oligonucleotide
  Target: LAMA2; (-) strand; PAM type: YTN; PAM sequence: CTT
tctttaagtttgaaatgaga

SEQ ID NO: 242347 - DNA, 20 bp, Artificial Sequence
  Description of Artificial Sequence: Synthetic oligonucleotide
  Target: LAMA2; (-) strand; PAM type: YTN; PAM sequence: TTC
tttctttaagtttgaaatga

SEQ ID NO: 242348 - DNA, 20 bp, Artificial Sequence
  Description of Artificial Sequence: Synthetic oligonucleotide
  Target: LAMA2; (-) strand; PAM type: YTN; PAM sequence: TTT
ctttctttaagtttgaaatg

SEQ ID NO: 242349 - DNA, 20 bp, Artificial Sequence
  Description of Artificial Sequence: Synthetic oligonucleotide
  Target: LAMA2; (-) strand; PAM type: YTN; PAM sequence: TTT
tctttctttaagtttgaaat

SEQ ID NO: 242350 - DNA, 20 bp, Artificial Sequence
  Description of Artificial Sequence: Synthetic oligonucleotide
  Target: LAMA2; (-) strand; PAM type: YTN; PAM sequence: CTG
gttttctttctttaagtttg

SEQ ID NO: 242351 - DNA, 20 bp, Artificial Sequence
  Description of Artificial Sequence: Synthetic oligonucleotide
  Target: LAMA2; (-) strand; PAM type: YTN; PAM sequence: TTG
gtgctggttttctttcttta

SEQ ID NO: 242352 - DNA, 20 bp, Artificial Sequence
  Description of Artificial Sequence: Synthetic oligonucleotide
  Target: LAMA2; (-) strand; PAM type: YTN; PAM sequence: TTC
aaattggtgctggttttctt

SEQ ID NO: 242353 - DNA, 20 bp, Artificial Sequence
  Description of Artificial Sequence: Synthetic oligonucleotide
  Target: LAMA2; (-) strand; PAM type: YTN; PAM sequence: TTT
caaattggtgctggttttct

SEQ ID NO: 242354 - DNA, 20 bp, Artificial Sequence
  Description of Artificial Sequence: Synthetic oligonucleotide
  Target: LAMA2; (-) strand; PAM type: YTN; PAM sequence: CTT
tcaaattggtgctggttttc

SEQ ID NO: 242355 - DNA, 20 bp, Artificial Sequence
  Description of Artificial Sequence: Synthetic oligonucleotide
  Target: LAMA2; (-) strand; PAM type: YTN; PAM sequence: TTG
aaacactttcaaattggtgc

SEQ ID NO: 242356 - DNA, 20 bp, Artificial Sequence
  Description of Artificial Sequence: Synthetic oligonucleotide
  Target: LAMA2; (-) strand; PAM type: YTN; PAM sequence: TTA
ttgaaacactttcaaattgg

SEQ ID NO: 242357 - DNA, 20 bp, Artificial Sequence
  Description of Artificial Sequence: Synthetic oligonucleotide
  Target: LAMA2; (-) strand; PAM type: YTN; PAM sequence: TTT
attgaaacactttcaaattg

SEQ ID NO: 242358 - DNA, 20 bp, Artificial Sequence
  Description of Artificial Sequence: Synthetic oligonucleotide
  Target: LAMA2; (-) strand; PAM type: YTN; PAM sequence: TTG
agagtttattgaaacacttt

SEQ ID NO: 242359 - DNA, 20 bp, Artificial Sequence
  Description of Artificial Sequence: Synthetic oligonucleotide
  Target: LAMA2; (-) strand; PAM type: YTN; PAM sequence: TTA
cattgagagtttattgaaac

SEQ ID NO: 242360 - DNA, 20 bp, Artificial Sequence
  Description of Artificial Sequence: Synthetic oligonucleotide
  Target: LAMA2; (-) strand; PAM type: YTN; PAM sequence: TTT
acattgagagtttattgaaa

SEQ ID NO: 242361 - DNA, 20 bp, Artificial Sequence
  Description of Artificial Sequence: Synthetic oligonucleotide
  Target: LAMA2; (-) strand; PAM type: YTN; PAM sequence: TTT
tacattgagagtttattgaa

SEQ ID NO: 242362 - DNA, 20 bp, Artificial Sequence
  Description of Artificial Sequence: Synthetic oligonucleotide
  Target: LAMA2; (-) strand; PAM type: YTN; PAM sequence: CTA
cagaaaacaacgtgaagttt

SEQ ID NO: 242363 - DNA, 20 bp, Artificial Sequence
  Description of Artificial Sequence: Synthetic oligonucleotide
  Target: LAMA2; (-) strand; PAM type: YTN; PAM sequence: CTG
aaaagctacagaaaacaacg

SEQ ID NO: 242364 - DNA, 20 bp, Artificial Sequence
  Description of Artificial Sequence: Synthetic oligonucleotide
  Target: LAMA2; (-) strand; PAM type: YTN; PAM sequence: TTA
ctgaaaagctacagaaaaca

SEQ ID NO: 242365 - DNA, 20 bp, Artificial Sequence
  Description of Artificial Sequence: Synthetic oligonucleotide
  Target: LAMA2; (-) strand; PAM type: YTN; PAM sequence: CTG
agccgcacatagaacatgag

SEQ ID NO: 242366 - DNA, 20 bp, Artificial Sequence
  Description of Artificial Sequence: Synthetic oligonucleotide
  Target: LAMA2; (-) strand; PAM type: YTN; PAM sequence: TTC
cccactgagccgcacataga

SEQ ID NO: 242367 - DNA, 20 bp, Artificial Sequence
  Description of Artificial Sequence: Synthetic oligonucleotide
  Target: LAMA2; (-) strand; PAM type: YTN; PAM sequence: CTG
gatacagatagttccccact

SEQ ID NO: 242368 - DNA, 20 bp, Artificial Sequence
  Description of Artificial Sequence: Synthetic oligonucleotide
  Target: LAMA2; (-) strand; PAM type: YTN; PAM sequence: CTA
gtgtgtcagaaccaacaatc

SEQ ID NO: 242369 - DNA, 20 bp, Artificial Sequence
  Description of Artificial Sequence: Synthetic oligonucleotide
  Target: LAMA2; (-) strand; PAM type: YTN; PAM sequence: TTG
ccccatatgcacgtaggcta

SEQ ID NO: 242370 - DNA, 20 bp, Artificial Sequence
  Description of Artificial Sequence: Synthetic oligonucleotide
  Target: LAMA2; (-) strand; PAM type: YTN; PAM sequence: TTG
ggggttgccccatatgcacg

SEQ ID NO: 242371 - DNA, 20 bp, Artificial Sequence
  Description of Artificial Sequence: Synthetic oligonucleotide
  Target: LAMA2; (-) strand; PAM type: YTN; PAM sequence: TTG
caagtggcaggggccagcat

SEQ ID NO: 242372 - DNA, 20 bp, Artificial Sequence
  Description of Artificial Sequence: Synthetic oligonucleotide
  Target: LAMA2; (-) strand; PAM type: YTN; PAM sequence: CTA
ttgcaagtggcaggggccag

SEQ ID NO: 242373 - DNA, 20 bp, Artificial Sequence
  Description of Artificial Sequence: Synthetic oligonucleotide
  Target: LAMA2; (-) strand; PAM type: YTN; PAM sequence: CTG
atctattgcaagtggcaggg

SEQ ID NO: 242374 - DNA, 20 bp, Artificial Sequence
  Description of Artificial Sequence: Synthetic oligonucleotide
  Target: LAMA2; (-) strand; PAM type: YTN; PAM sequence: CTC
aaccacaaggggtgggtctg

SEQ ID NO: 242375 - DNA, 20 bp, Artificial Sequence
  Description of Artificial Sequence: Synthetic oligonucleotide
  Target: LAMA2; (-) strand; PAM type: YTN; PAM sequence: CTC
actcaaccacaaggggtggg

SEQ ID NO: 242376 - DNA, 20 bp, Artificial Sequence
  Description of Artificial Sequence: Synthetic oligonucleotide
  Target: LAMA2; (-) strand; PAM type: YTN; PAM sequence: CTG
cctcactcaaccacaagggg

SEQ ID NO: 242377 - DNA, 20 bp, Artificial Sequence
  Description of Artificial Sequence: Synthetic oligonucleotide
  Target: LAMA2; (-) strand; PAM type: YTN; PAM sequence: TTG
acataatactgcctcactca

SEQ ID NO: 242378 - DNA, 20 bp, Artificial Sequence
  Description of Artificial Sequence: Synthetic oligonucleotide
  Target: LAMA2; (-) strand; PAM type: YTN; PAM sequence: TTA
gaattgacataatactgcct

SEQ ID NO: 242379 - DNA, 20 bp, Artificial Sequence
  Description of Artificial Sequence: Synthetic oligonucleotide
  Target: LAMA2; (-) strand; PAM type: YTN; PAM sequence: TTT
agaattgacataatactgcc

SEQ ID NO: 242380 - DNA, 20 bp, Artificial Sequence
  Description of Artificial Sequence: Synthetic oligonucleotide
  Target: LAMA2; (-) strand; PAM type: YTN; PAM sequence: CTC
aacaacagtaaacaaaatgc

SEQ ID NO: 242381 - DNA, 20 bp, Artificial Sequence
  Description of Artificial Sequence: Synthetic oligonucleotide
  Target: LAMA2; (-) strand; PAM type: YTN; PAM sequence: CTA
ccaacaacactcaacaacag

SEQ ID NO: 242382 - DNA, 20 bp, Artificial Sequence
  Description of Artificial Sequence: Synthetic oligonucleotide
  Target: LAMA2; (-) strand; PAM type: YTN; PAM sequence: CTC
ccactaccaacaacactcaa

SEQ ID NO: 242383 - DNA, 20 bp, Artificial Sequence
  Description of Artificial Sequence: Synthetic oligonucleotide
  Target: LAMA2; (-) strand; PAM type: YTN; PAM sequence: TTC
tcccactaccaacaacactc

SEQ ID NO: 242384 - DNA, 20 bp, Artificial Sequence
  Description of Artificial Sequence: Synthetic oligonucleotide
  Target: LAMA2; (-) strand; PAM type: YTN; PAM sequence: CTT
ctcccactaccaacaacact

SEQ ID NO: 242385 - DNA, 20 bp, Artificial Sequence
  Description of Artificial Sequence: Synthetic oligonucleotide
  Target: LAMA2; (-) strand; PAM type: YTN; PAM sequence: TTC
ttctcccactaccaacaaca

SEQ ID NO: 242386 - DNA, 20 bp, Artificial Sequence
  Description of Artificial Sequence: Synthetic oligonucleotide
  Target: LAMA2; (-) strand; PAM type: YTN; PAM sequence: TTT
cttctcccactaccaacaac

SEQ ID NO: 242387 - DNA, 20 bp, Artificial Sequence
  Description of Artificial Sequence: Synthetic oligonucleotide
  Target: LAMA2; (-) strand; PAM type: YTN; PAM sequence: TTT
tcttctcccactaccaacaa

SEQ ID NO: 242388 - DNA, 20 bp, Artificial Sequence
  Description of Artificial Sequence: Synthetic oligonucleotide
  Target: LAMA2; (-) strand; PAM type: YTN; PAM sequence: CTA
ttttcttctcccactaccaa

SEQ ID NO: 242389 - DNA, 20 bp, Artificial Sequence
  Description of Artificial Sequence: Synthetic oligonucleotide
  Target: LAMA2; (-) strand; PAM type: YTN; PAM sequence: CTG
tgacctattttcttctccca

SEQ ID NO: 242390 - DNA, 20 bp, Artificial Sequence
  Description of Artificial Sequence: Synthetic oligonucleotide
  Target: LAMA2; (-) strand; PAM type: YTN; PAM sequence: CTG
tctgtgacctattttcttct

SEQ ID NO: 242391 - DNA, 20 bp, Artificial Sequence
  Description of Artificial Sequence: Synthetic oligonucleotide
  Target: LAMA2; (-) strand; PAM type: YTN; PAM sequence: TTC
acactgtctgtgacctattt

SEQ ID NO: 242392 - DNA, 20 bp, Artificial Sequence
  Description of Artificial Sequence: Synthetic oligonucleotide
  Target: LAMA2; (-) strand; PAM type: YTN; PAM sequence: CTT
cacactgtctgtgacctatt

SEQ ID NO: 242393 - DNA, 20 bp, Artificial Sequence
  Description of Artificial Sequence: Synthetic oligonucleotide
  Target: LAMA2; (-) strand; PAM type: YTN; PAM sequence: TTG
tgtcttcacactgtctgtga

SEQ ID NO: 242394 - DNA, 20 bp, Artificial Sequence
  Description of Artificial Sequence: Synthetic oligonucleotide
  Target: LAMA2; (-) strand; PAM type: YTN; PAM sequence: CTT
gtgtcttcacactgtctgtg

SEQ ID NO: 242395 - DNA, 20 bp, Artificial Sequence
  Description of Artificial Sequence: Synthetic oligonucleotide
  Target: LAMA2; (-) strand; PAM type: YTN; PAM sequence: CTC
cttgtgtcttcacactgtct

SEQ ID NO: 242396 - DNA, 20 bp, Artificial Sequence
  Description of Artificial Sequence: Synthetic oligonucleotide
  Target: LAMA2; (-) strand; PAM type: YTN; PAM sequence: TTC
tccttgtgtcttcacactgt

SEQ ID NO: 242397 - DNA, 20 bp, Artificial Sequence
  Description of Artificial Sequence: Synthetic oligonucleotide
  Target: LAMA2; (-) strand; PAM type: YTN; PAM sequence: CTT
ctccttgtgtcttcacactg

SEQ ID NO: 242398 - DNA, 20 bp, Artificial Sequence
  Description of Artificial Sequence: Synthetic oligonucleotide
  Target: LAMA2; (-) strand; PAM type: YTN; PAM sequence: CTG
tcttctccttgtgtcttcac

SEQ ID NO: 242399 - DNA, 20 bp, Artificial Sequence
  Description of Artificial Sequence: Synthetic oligonucleotide
  Target: LAMA2; (-) strand; PAM type: YTN; PAM sequence: TTG
tagatggctgtcttctcctt

SEQ ID NO: 242400 - DNA, 20 bp, Artificial Sequence
  Description of Artificial Sequence: Synthetic oligonucleotide
  Target: LAMA2; (-) strand; PAM type: YTN; PAM sequence: CTT
gtagatggctgtcttctcct

SEQ ID NO: 242401 - DNA, 20 bp, Artificial Sequence
  Description of Artificial Sequence: Synthetic oligonucleotide
  Target: LAMA2; (-) strand; PAM type: YTN; PAM sequence: TTA
gcttgtagatggctgtcttc

SEQ ID NO: 242402 - DNA, 20 bp, Artificial Sequence
  Description of Artificial Sequence: Synthetic oligonucleotide
  Target: LAMA2; (-) strand; PAM type: YTN; PAM sequence: CTT
agcttgtagatggctgtctt

SEQ ID NO: 242403 - DNA, 20 bp, Artificial Sequence
  Description of Artificial Sequence: Synthetic oligonucleotide
  Target: LAMA2; (-) strand; PAM type: YTN; PAM sequence: CTC
cttagcttgtagatggctgt

SEQ ID NO: 242404 - DNA, 20 bp, Artificial Sequence
  Description of Artificial Sequence: Synthetic oligonucleotide
  Target: LAMA2; (-) strand; PAM type: YTN; PAM sequence: CTC
tccttagcttgtagatggct

SEQ ID NO: 242405 - DNA, 20 bp, Artificial Sequence
  Description of Artificial Sequence: Synthetic oligonucleotide
  Target: LAMA2; (-) strand; PAM type: YTN; PAM sequence: CTC
tctccttagcttgtagatgg

SEQ ID NO: 242406 - DNA, 20 bp, Artificial Sequence
  Description of Artificial Sequence: Synthetic oligonucleotide
  Target: LAMA2; (-) strand; PAM type: YTN; PAM sequence: TTG
cagccctctctccttagctt

SEQ ID NO: 242407 - DNA, 20 bp, Artificial Sequence
  Description of Artificial Sequence: Synthetic oligonucleotide
  Target: LAMA2; (-) strand; PAM type: YTN; PAM sequence: CTG
ttgcagccctctctccttag

SEQ ID NO: 242408 - DNA, 20 bp, Artificial Sequence
  Description of Artificial Sequence: Synthetic oligonucleotide
  Target: LAMA2; (-) strand; PAM type: YTN; PAM sequence: TTA
agctgttgcagccctctctc

SEQ ID NO: 242409 - DNA, 20 bp, Artificial Sequence
  Description of Artificial Sequence: Synthetic oligonucleotide
  Target: LAMA2; (-) strand; PAM type: YTN; PAM sequence: CTA
caaggaattaagctgttgca

SEQ ID NO: 242410 - DNA, 20 bp, Artificial Sequence
  Description of Artificial Sequence: Synthetic oligonucleotide
  Target: LAMA2; (-) strand; PAM type: YTN; PAM sequence: TTA
tgaacactacaaggaattaa

SEQ ID NO: 242411 - DNA, 20 bp, Artificial Sequence
  Description of Artificial Sequence: Synthetic oligonucleotide
  Target: LAMA2; (-) strand; PAM type: YTN; PAM sequence: TTT
atgaacactacaaggaatta

SEQ ID NO: 242412 - DNA, 20 bp, Artificial Sequence
  Description of Artificial Sequence: Synthetic oligonucleotide
  Target: LAMA2; (-) strand; PAM type: YTN; PAM sequence: CTT
tatgaacactacaaggaatt

SEQ ID NO: 242413 - DNA, 20 bp, Artificial Sequence
  Description of Artificial Sequence: Synthetic oligonucleotide
  Target: LAMA2; (-) strand; PAM type: YTN; PAM sequence: TTC
tttatgaacactacaaggaa

SEQ ID NO: 242414 - DNA, 20 bp, Artificial Sequence
  Description of Artificial Sequence: Synthetic oligonucleotide
  Target: LAMA2; (-) strand; PAM type: YTN; PAM sequence: TTG
gttctttatgaacactacaa

SEQ ID NO: 242415 - DNA, 20 bp, Artificial Sequence
  Description of Artificial Sequence: Synthetic oligonucleotide
  Target: LAMA2; (-) strand; PAM type: YTN; PAM sequence: CTG
tcagcaggattggttcttta

SEQ ID NO: 242416 - DNA, 20 bp, Artificial Sequence
  Description of Artificial Sequence: Synthetic oligonucleotide
  Target: LAMA2; (-) strand; PAM type: YTN; PAM sequence: CTA
tgtgagatcaagctgtcagc

SEQ ID NO: 242417 - DNA, 20 bp, Artificial Sequence
  Description of Artificial Sequence: Synthetic oligonucleotide
  Target: LAMA2; (-) strand; PAM type: YTN; PAM sequence: TTG
ctatgtgagatcaagctgtc

SEQ ID NO: 242418 - DNA, 20 bp, Artificial Sequence
  Description of Artificial Sequence: Synthetic oligonucleotide
  Target: LAMA2; (-) strand; PAM type: YTN; PAM sequence: TTT
gctatgtgagatcaagctgt

SEQ ID NO: 242419 - DNA, 20 bp, Artificial Sequence
  Description of Artificial Sequence: Synthetic oligonucleotide
  Target: LAMA2; (-) strand; PAM type: YTN; PAM sequence: TTT
tgctatgtgagatcaagctg

SEQ ID NO: 242420 - DNA, 20 bp, Artificial Sequence
  Description of Artificial Sequence: Synthetic oligonucleotide
  Target: LAMA2; (-) strand; PAM type: YTN; PAM sequence: TTA
ttttgctatgtgagatcaag

SEQ ID NO: 242421 - DNA, 20 bp, Artificial Sequence
  Description of Artificial Sequence: Synthetic oligonucleotide
  Target: LAMA2; (-) strand; PAM type: YTN; PAM sequence: CTC
atggaaatcaaggaggaaaa

SEQ ID NO: 242422 - DNA, 20 bp, Artificial Sequence
  Description of Artificial Sequence: Synthetic oligonucleotide
  Target: LAMA2; (-) strand; PAM type: YTN; PAM sequence: TTC
tcatggaaatcaaggaggaa

SEQ ID NO: 242423 - DNA, 20 bp, Artificial Sequence
  Description of Artificial Sequence: Synthetic oligonucleotide
  Target: LAMA2; (-) strand; PAM type: YTN; PAM sequence: TTC
acccaattctcatggaaatc

SEQ ID NO: 242424 - DNA, 20 bp, Artificial Sequence
  Description of Artificial Sequence: Synthetic oligonucleotide
  Target: LAMA2; (-) strand; PAM type: YTN; PAM sequence: TTT
cacccaattctcatggaaat

SEQ ID NO: 242425 - DNA, 20 bp, Artificial Sequence
  Description of Artificial Sequence: Synthetic oligonucleotide
  Target: LAMA2; (-) strand; PAM type: YTN; PAM sequence: CTT
tcacccaattctcatggaaa

SEQ ID NO: 242426 - DNA, 20 bp, Artificial Sequence
  Description of Artificial Sequence: Synthetic oligonucleotide
  Target: LAMA2; (-) strand; PAM type: YTN; PAM sequence: TTA
tatgagtaatagctttcacc

SEQ ID NO: 242427 - DNA, 20 bp, Artificial Sequence
  Description of Artificial Sequence: Synthetic oligonucleotide
  Target: LAMA2; (-) strand; PAM type: YTN; PAM sequence: CTT
atatgagtaatagctttcac

SEQ ID NO: 242428 - DNA, 20 bp, Artificial Sequence
  Description of Artificial Sequence: Synthetic oligonucleotide
  Target: LAMA2; (-) strand; PAM type: YTN; PAM sequence: CTA
atcaaaggtaaccacaaaaa

SEQ ID NO: 242429 - DNA, 20 bp, Artificial Sequence
  Description of Artificial Sequence: Synthetic oligonucleotide
  Target: LAMA2; (-) strand; PAM type: YTN; PAM sequence: CTG
tgaaacgcataaagaccaaa

SEQ ID NO: 242430 - DNA, 20 bp, Artificial Sequence
  Description of Artificial Sequence: Synthetic oligonucleotide
  Target: LAMA2; (-) strand; PAM type: YTN; PAM sequence: TTG
aatcaggtctgtgaaacgca

SEQ ID NO: 242431 - DNA, 20 bp, Artificial Sequence
  Description of Artificial Sequence: Synthetic oligonucleotide
  Target: LAMA2; (-) strand; PAM type: YTN; PAM sequence: TTT
gaatcaggtctgtgaaacgc

SEQ ID NO: 242432 - DNA, 20 bp, Artificial Sequence
  Description of Artificial Sequence: Synthetic oligonucleotide
  Target: LAMA2; (-) strand; PAM type: YTN; PAM sequence: CTA
ataaagcagagatccagcat

SEQ ID NO: 242433 - DNA, 20 bp, Artificial Sequence
  Description of Artificial Sequence: Synthetic oligonucleotide
  Target: LAMA2; (-) strand; PAM type: YTN; PAM sequence: TTA
agggatatgtccaagatcac

SEQ ID NO: 242434 - DNA, 20 bp, Artificial Sequence
  Description of Artificial Sequence: Synthetic oligonucleotide
  Target: LAMA2; (-) strand; PAM type: YTN; PAM sequence: CTA
gattaagggatatgtccaag

SEQ ID NO: 242435 - DNA, 20 bp, Artificial Sequence
  Description of Artificial Sequence: Synthetic oligonucleotide
  Target: LAMA2; (-) strand; PAM type: YTN; PAM sequence: CTC
aactagattaagggatatgt

SEQ ID NO: 242436 - DNA, 20 bp, Artificial Sequence
  Description of Artificial Sequence: Synthetic oligonucleotide
  Target: LAMA2; (-) strand; PAM type: YTN; PAM sequence: CTG
gctcaactagattaagggat

SEQ ID NO: 242437 - DNA, 20 bp, Artificial Sequence
  Description of Artificial Sequence: Synthetic oligonucleotide
  Target: LAMA2; (-) strand; PAM type: YTN; PAM sequence: TTG
cagataatgagaatctggct

SEQ ID NO: 242438 - DNA, 20 bp, Artificial Sequence
  Description of Artificial Sequence: Synthetic oligonucleotide
  Target: LAMA2; (-) strand; PAM type: YTN; PAM sequence: TTT
gcagataatgagaatctggc

SEQ ID NO: 242439 - DNA, 20 bp, Artificial Sequence
  Description of Artificial Sequence: Synthetic oligonucleotide
  Target: LAMA2; (-) strand; PAM type: YTN; PAM sequence: TTT
tgcagataatgagaatctgg

SEQ ID NO: 242440 - DNA, 20 bp, Artificial Sequence
  Description of Artificial Sequence: Synthetic oligonucleotide
  Target: LAMA2; (-) strand; PAM type: YTN; PAM sequence: CTC
attttgcagataatgagaat

SEQ ID NO: 242441 - DNA, 20 bp, Artificial Sequence
  Description of Artificial Sequence: Synthetic oligonucleotide
  Target: LAMA2; (-) strand; PAM type: YTN; PAM sequence: CTA
gaagcctcattttgcagata

SEQ ID NO: 242442 - DNA, 20 bp, Artificial Sequence
  Description of Artificial Sequence: Synthetic oligonucleotide
  Target: LAMA2; (-) strand; PAM type: YTN; PAM sequence: CTG
aggggtgctagaagcctcat

SEQ ID NO: 242443 - DNA, 20 bp, Artificial Sequence
  Description of Artificial Sequence: Synthetic oligonucleotide
  Target: LAMA2; (-) strand; PAM type: YTN; PAM sequence: TTC
tgaggggtgctagaagcctc

SEQ ID NO: 242444 - DNA, 20 bp, Artificial Sequence
  Description of Artificial Sequence: Synthetic oligonucleotide
  Target: LAMA2; (-) strand; PAM type: YTN; PAM sequence: TTG
tacaattctgaggggtgcta

SEQ ID NO: 242445 - DNA, 20 bp, Artificial Sequence
  Description of Artificial Sequence: Synthetic oligonucleotide
  Target: LAMA2; (-) strand; PAM type: YTN; PAM sequence: TTT
gtacaattctgaggggtgct

SEQ ID NO: 242446 - DNA, 20 bp, Artificial Sequence
  Description of Artificial Sequence: Synthetic oligonucleotide
  Target: LAMA2; (-) strand; PAM type: YTN; PAM sequence: CTT
tgtacaattctgaggggtgc

SEQ ID NO: 242447 - DNA, 20 bp, Artificial Sequence
  Description of Artificial Sequence: Synthetic oligonucleotide
  Target: LAMA2; (-) strand; PAM type: YTN; PAM sequence: TTC
gagagctttgtacaattctg

SEQ ID NO: 242448 - DNA, 20 bp, Artificial Sequence
  Description of Artificial Sequence: Synthetic oligonucleotide
  Target: LAMA2; (-) strand; PAM type: YTN; PAM sequence: TTT
cgagagctttgtacaattct

SEQ ID NO: 242449 - DNA, 20 bp, Artificial Sequence
  Description of Artificial Sequence: Synthetic oligonucleotide
  Target: LAMA2; (-) strand; PAM type: YTN; PAM sequence: TTT
tcgagagctttgtacaattc

SEQ ID NO: 242450 - DNA, 20 bp, Artificial Sequence
  Description of Artificial Sequence: Synthetic oligonucleotide
  Target: LAMA2; (-) strand; PAM type: YTN; PAM sequence: CTA
aggacattttcgagagcttt

SEQ ID NO: 242451 - DNA, 20 bp, Artificial Sequence
  Description of Artificial Sequence: Synthetic oligonucleotide
  Target: LAMA2; (-) strand; PAM type: YTN; PAM sequence: CTG
tgtgctaaggacattttcga

SEQ ID NO: 242452 - DNA, 20 bp, Artificial Sequence
  Description of Artificial Sequence: Synthetic oligonucleotide
  Target: LAMA2; (-) strand; PAM type: YTN; PAM sequence: TTC
tgtgtgctaaggacattttc

SEQ ID NO: 242453 - DNA, 20 bp, Artificial Sequence
  Description of Artificial Sequence: Synthetic oligonucleotide
  Target: LAMA2; (-) strand; PAM type: YTN; PAM sequence: CTT
ctgtgtgctaaggacatttt

SEQ ID NO: 242454 - DNA, 20 bp, Artificial Sequence
  Description of Artificial Sequence: Synthetic oligonucleotide
  Target: LAMA2; (-) strand; PAM type: YTN; PAM sequence: TTA
tcggacagcttctgtgtgct

SEQ ID NO: 242455 - DNA, 20 bp, Artificial Sequence
  Description of Artificial Sequence: Synthetic oligonucleotide
  Target: LAMA2; (-) strand; PAM type: YTN; PAM sequence: TTT
atcggacagcttctgtgtgc

SEQ ID NO: 242456 - DNA, 20 bp, Artificial Sequence
  Description of Artificial Sequence: Synthetic oligonucleotide
  Target: LAMA2; (-) strand; PAM type: YTN; PAM sequence: TTG
gcatttatcggacagcttct

SEQ ID NO: 242457 - DNA, 20 bp, Artificial Sequence
  Description of Artificial Sequence: Synthetic oligonucleotide
  Target: LAMA2; (-) strand; PAM type: YTN; PAM sequence: TTC
ataaagcaattggcatttat

SEQ ID NO: 242458 - DNA, 20 bp, Artificial Sequence
  Description of Artificial Sequence: Synthetic oligonucleotide
  Target: LAMA2; (-) strand; PAM type: YTN; PAM sequence: CTA
cagaaattcataaagcaatt

SEQ ID NO: 242459 - DNA, 20 bp, Artificial Sequence
  Description of Artificial Sequence: Synthetic oligonucleotide
  Target: LAMA2; (-) strand; PAM type: YTN; PAM sequence: CTG
cagcatacaactacagaaat

SEQ ID NO: 242460 - DNA, 20 bp, Artificial Sequence
  Description of Artificial Sequence: Synthetic oligonucleotide
  Target: LAMA2; (-) strand; PAM type: YTN; PAM sequence: TTA
ctgcagcatacaactacaga

SEQ ID NO: 242461 - DNA, 20 bp, Artificial Sequence
  Description of Artificial Sequence: Synthetic oligonucleotide
  Target: LAMA2; (-) strand; PAM type: YTN; PAM sequence: CTC
caaaataaattactgcagca

SEQ ID NO: 242462 - DNA, 20 bp, Artificial Sequence
  Description of Artificial Sequence: Synthetic oligonucleotide
  Target: LAMA2; (-) strand; PAM type: YTN; PAM sequence: CTG
atataaggaagatctccaaa

SEQ ID NO: 242463 - DNA, 20 bp, Artificial Sequence
  Description of Artificial Sequence: Synthetic oligonucleotide
  Target: LAMA2; (-) strand; PAM type: YTN; PAM sequence: TTA
ctgatataaggaagatctcc

SEQ ID NO: 242464 - DNA, 20 bp, Artificial Sequence
  Description of Artificial Sequence: Synthetic oligonucleotide
  Target: LAMA2; (-) strand; PAM type: YTN; PAM sequence: TTT
actgatataaggaagatctc

SEQ ID NO: 242465 - DNA, 20 bp, Artificial Sequence
  Description of Artificial Sequence: Synthetic oligonucleotide
  Target: LAMA2; (-) strand; PAM type: YTN; PAM sequence: TTT
tactgatataaggaagatct

SEQ ID NO: 242466 - DNA, 20 bp, Artificial Sequence
  Description of Artificial Sequence: Synthetic oligonucleotide
  Target: LAMA2; (-) strand; PAM type: YTN; PAM sequence: CTT
ttactgatataaggaagatc

SEQ ID NO: 242467 - DNA, 20 bp, Artificial Sequence
  Description of Artificial Sequence: Synthetic oligonucleotide
  Target: LAMA2; (-) strand; PAM type: YTN; PAM sequence: TTA
acaaacgtcttttactgata

SEQ ID NO: 242468 - DNA, 20 bp, Artificial Sequence
  Description of Artificial Sequence: Synthetic oligonucleotide
  Target: LAMA2; (-) strand; PAM type: YTN; PAM sequence: TTT
aacaaacgtcttttactgat

SEQ ID NO: 242469 - DNA, 20 bp, Artificial Sequence
  Description of Artificial Sequence: Synthetic oligonucleotide
  Target: LAMA2; (-) strand; PAM type: YTN; PAM sequence: TTT
taacaaacgtcttttactga

SEQ ID NO: 242470 - DNA, 20 bp, Artificial Sequence
  Description of Artificial Sequence: Synthetic oligonucleotide
  Target: LAMA2; (-) strand; PAM type: YTN; PAM sequence: TTT
ttaacaaacgtcttttactg

SEQ ID NO: 242471 - DNA, 20 bp, Artificial Sequence
  Description of Artificial Sequence: Synthetic oligonucleotide
  Target: LAMA2; (-) strand; PAM type: YTN; PAM sequence: TTT
tttaacaaacgtcttttact

SEQ ID NO: 242472 - DNA, 20 bp, Artificial Sequence
  Description of Artificial Sequence: Synthetic oligonucleotide
  Target: LAMA2; (-) strand; PAM type: YTN; PAM sequence: CTA
tgtcagacaggtgacaaagt

SEQ ID NO: 242473 - DNA, 20 bp, Artificial Sequence
  Description of Artificial Sequence: Synthetic oligonucleotide
  Target: LAMA2; (-) strand; PAM type: YTN; PAM sequence: CTA
ccaccagatactatgtcaga

SEQ ID NO: 242474 - DNA, 20 bp, Artificial Sequence
  Description of Artificial Sequence: Synthetic oligonucleotide
  Target: LAMA2; (-) strand; PAM type: YTN; PAM sequence: TTA
ctaccaccagatactatgtc

SEQ ID NO: 242475 - DNA, 20 bp, Artificial Sequence
  Description of Artificial Sequence: Synthetic oligonucleotide
  Target: LAMA2; (-) strand; PAM type: YTN; PAM sequence: CTT
actaccaccagatactatgt

SEQ ID NO: 242476 - DNA, 20 bp, Artificial Sequence
  Description of Artificial Sequence: Synthetic oligonucleotide
  Target: LAMA2; (-) strand; PAM type: YTN; PAM sequence: TTA
tccttactaccaccagatac

SEQ ID NO: 242477 - DNA, 20 bp, Artificial Sequence
  Description of Artificial Sequence: Synthetic oligonucleotide
  Target: LAMA2; (-) strand; PAM type: YTN; PAM sequence: CTT
atccttactaccaccagata

SEQ ID NO: 242478 - DNA, 20 bp, Artificial Sequence
  Description of Artificial Sequence: Synthetic oligonucleotide
  Target: LAMA2; (-) strand; PAM type: YTN; PAM sequence: TTA
atgatgtcttatccttacta

SEQ ID NO: 242479 - DNA, 20 bp, Artificial Sequence
  Description of Artificial Sequence: Synthetic oligonucleotide
  Target: LAMA2; (-) strand; PAM type: YTN; PAM sequence: TTT
aatgatgtcttatccttact

SEQ ID NO: 242480 - DNA, 20 bp, Artificial Sequence
  Description of Artificial Sequence: Synthetic oligonucleotide
  Target: LAMA2; (-) strand; PAM type: YTN; PAM sequence: TTT
taatgatgtcttatccttac

SEQ ID NO: 242481 - DNA, 20 bp, Artificial Sequence
  Description of Artificial Sequence: Synthetic oligonucleotide
  Target: LAMA2; (-) strand; PAM type: YTN; PAM sequence: TTT
ttaatgatgtcttatcctta

SEQ ID NO: 242482 - DNA, 20 bp, Artificial Sequence
  Description of Artificial Sequence: Synthetic oligonucleotide
  Target: LAMA2; (-) strand; PAM type: YTN; PAM sequence: TTA
tttttaatgatgtcttatcc

SEQ ID NO: 242483 - DNA, 20 bp, Artificial Sequence
  Description of Artificial Sequence: Synthetic oligonucleotide
  Target: LAMA2; (-) strand; PAM type: YTN; PAM sequence: TTT
atttttaatgatgtcttatc

SEQ ID NO: 242484 - DNA, 20 bp, Artificial Sequence
  Description of Artificial Sequence: Synthetic oligonucleotide
  Target: LAMA2; (-) strand; PAM type: YTN; PAM sequence: TTT
tatttttaatgatgtcttat

SEQ ID NO: 242485 - DNA, 20 bp, Artificial Sequence
  Description of Artificial Sequence: Synthetic oligonucleotide
  Target: LAMA2; (-) strand; PAM type: YTN; PAM sequence: TTT
ttatttttaatgatgtctta

SEQ ID NO: 242486 - DNA, 20 bp, Artificial Sequence
  Description of Artificial Sequence: Synthetic oligonucleotide
  Target: LAMA2; (-) strand; PAM type: YTN; PAM sequence: TTG
tcaatttttatttttaatga

SEQ ID NO: 242487 - DNA, 20 bp, Artificial Sequence
  Description of Artificial Sequence: Synthetic oligonucleotide
  Target: LAMA2; (-) strand; PAM type: YTN; PAM sequence: CTG
attgtcaatttttattttta

SEQ ID NO: 242488 - DNA, 20 bp, Artificial Sequence
  Description of Artificial Sequence: Synthetic oligonucleotide
  Target: LAMA2; (-) strand; PAM type: YTN; PAM sequence: CTC
tgattgtcaatttttatttt

SEQ ID NO: 242489 - DNA, 20 bp, Artificial Sequence
  Description of Artificial Sequence: Synthetic oligonucleotide
  Target: LAMA2; (-) strand; PAM type: YTN; PAM sequence: CTC
tctgattgtcaatttttatt

SEQ ID NO: 242490 - DNA, 20 bp, Artificial Sequence
  Description of Artificial Sequence: Synthetic oligonucleotide
  Target: LAMA2; (-) strand; PAM type: YTN; PAM sequence: CTC
tctctgattgtcaattttta

SEQ ID NO: 242491 - DNA, 20 bp, Artificial Sequence
  Description of Artificial Sequence: Synthetic oligonucleotide
  Target: LAMA2; (-) strand; PAM type: YTN; PAM sequence: TTA
actctctctgattgtcaatt

SEQ ID NO: 242492 - DNA, 20 bp, Artificial Sequence
  Description of Artificial Sequence: Synthetic oligonucleotide
  Target: LAMA2; (-) strand; PAM type: YTN; PAM sequence: CTA
aaattaactctctctgattg

SEQ ID NO: 242493 - DNA, 20 bp, Artificial Sequence
  Description of Artificial Sequence: Synthetic oligonucleotide
  Target: LAMA2; (-) strand; PAM type: YTN; PAM sequence: TTG
ctaaaattaactctctctga

SEQ ID NO: 242494 - DNA, 20 bp, Artificial Sequence
  Description of Artificial Sequence: Synthetic oligonucleotide
  Target: LAMA2; (-) strand; PAM type: YTN; PAM sequence: CTT
gctaaaattaactctctctg

SEQ ID NO: 242495 - DNA, 20 bp, Artificial Sequence
  Description of Artificial Sequence: Synthetic oligonucleotide
  Target: LAMA2; (-) strand; PAM type: YTN; PAM sequence: CTA
cgtacttgctaaaattaact

SEQ ID NO: 242496 - DNA, 20 bp, Artificial Sequence
  Description of Artificial Sequence: Synthetic oligonucleotide
  Target: LAMA2; (-) strand; PAM type: YTN; PAM sequence: TTA
aaggcatataatctacgtac

SEQ ID NO: 242497 - DNA, 20 bp, Artificial Sequence
  Description of Artificial Sequence: Synthetic oligonucleotide
  Target: LAMA2; (-) strand; PAM type: YTN; PAM sequence: CTG
ccattaaaggcatataatct

SEQ ID NO: 242498 - DNA, 20 bp, Artificial Sequence
  Description of Artificial Sequence: Synthetic oligonucleotide
  Target: LAMA2; (-) strand; PAM type: YTN; PAM sequence: CTG
caaagctgccattaaaggca

SEQ ID NO: 242499 - DNA, 20 bp, Artificial Sequence
  Description of Artificial Sequence: Synthetic oligonucleotide
  Target: LAMA2; (-) strand; PAM type: YTN; PAM sequence: TTG
ctgcaaagctgccattaaag

SEQ ID NO: 242500 - DNA, 20 bp, Artificial Sequence
  Description of Artificial Sequence: Synthetic oligonucleotide
  Target: LAMA2; (-) strand; PAM type: YTN; PAM sequence: TTT
gctgcaaagctgccattaaa

SEQ ID NO: 242501 - DNA, 20 bp, Artificial Sequence
  Description of Artificial Sequence: Synthetic oligonucleotide
  Target: LAMA2; (-) strand; PAM type: YTN; PAM sequence: CTT
tgctgcaaagctgccattaa

SEQ ID NO: 242502 - DNA, 20 bp, Artificial Sequence
  Description of Artificial Sequence: Synthetic oligonucleotide
  Target: LAMA2; (-) strand; PAM type: YTN; PAM sequence: TTG
cactttgctgcaaagctgcc

SEQ ID NO: 242503 - DNA, 20 bp, Artificial Sequence
  Description of Artificial Sequence: Synthetic oligonucleotide
  Target: LAMA2; (-) strand; PAM type: YTN; PAM sequence: TTT
gcactttgctgcaaagctgc

SEQ ID NO: 242504 - DNA, 20 bp, Artificial Sequence
  Description of Artificial Sequence: Synthetic oligonucleotide
  Target: LAMA2; (-) strand; PAM type: YTN; PAM sequence: TTT
tgcactttgctgcaaagctg

SEQ ID NO: 242505 - DNA, 20 bp, Artificial Sequence
  Description of Artificial Sequence: Synthetic oligonucleotide
  Target: LAMA2; (-) strand; PAM type: YTN; PAM sequence: TTA
tgttttgcactttgctgcaa

SEQ ID NO: 242506 - DNA, 20 bp, Artificial Sequence
  Description of Artificial Sequence: Synthetic oligonucleotide
  Target: LAMA2; (-) strand; PAM type: YTN; PAM sequence: TTT
atgttttgcactttgctgca

SEQ ID NO: 242507 - DNA, 20 bp, Artificial Sequence
  Description of Artificial Sequence: Synthetic oligonucleotide
  Target: LAMA2; (-) strand; PAM type: YTN; PAM sequence: TTA
tttatgttttgcactttgct

SEQ ID NO: 242508 - DNA, 20 bp, Artificial Sequence
  Description of Artificial Sequence: Synthetic oligonucleotide
  Target: LAMA2; (-) strand; PAM type: YTN; PAM sequence: TTT
atttatgttttgcactttgc

SEQ ID NO: 242509 - DNA, 20 bp, Artificial Sequence
  Description of Artificial Sequence: Synthetic oligonucleotide
  Target: LAMA2; (-) strand; PAM type: YTN; PAM sequence: CTG
atttatttatgttttgcact

SEQ ID NO: 242510 - DNA, 20 bp, Artificial Sequence
  Description of Artificial Sequence: Synthetic oligonucleotide
  Target: LAMA2; (-) strand; PAM type: YTN; PAM sequence: TTA
actgatttatttatgttttg

SEQ ID NO: 242511 - DNA, 20 bp, Artificial Sequence
  Description of Artificial Sequence: Synthetic oligonucleotide
  Target: LAMA2; (-) strand; PAM type: YTN; PAM sequence: CTG
gttaactgatttatttatgt

SEQ ID NO: 242512 - DNA, 20 bp, Artificial Sequence
  Description of Artificial Sequence: Synthetic oligonucleotide
  Target: LAMA2; (-) strand; PAM type: YTN; PAM sequence: TTC
acaaatctggttaactgatt

SEQ ID NO: 242513 - DNA, 20 bp, Artificial Sequence
  Description of Artificial Sequence: Synthetic oligonucleotide
  Target: LAMA2; (-) strand; PAM type: YTN; PAM sequence: TTT
cacaaatctggttaactgat

SEQ ID NO: 242514 - DNA, 20 bp, Artificial Sequence
  Description of Artificial Sequence: Synthetic oligonucleotide
  Target: LAMA2; (-) strand; PAM type: YTN; PAM sequence: CTG
cgggtatttcacaaatctgg

SEQ ID NO: 242515 - DNA, 20 bp, Artificial Sequence
  Description of Artificial Sequence: Synthetic oligonucleotide
  Target: LAMA2; (-) strand; PAM type: YTN; PAM sequence: CTC
tgcgggtatttcacaaatct

SEQ ID NO: 242516 - DNA, 20 bp, Artificial Sequence
  Description of Artificial Sequence: Synthetic oligonucleotide
  Target: LAMA2; (-) strand; PAM type: YTN; PAM sequence: CTA
aaacactctgcgggtatttc

SEQ ID NO: 242517 - DNA, 20 bp, Artificial Sequence
  Description of Artificial Sequence: Synthetic oligonucleotide
  Target: LAMA2; (-) strand; PAM type: YTN; PAM sequence: TTC
aaaataaagtctaaaacact

SEQ ID NO: 242518 - DNA, 20 bp, Artificial Sequence
  Description of Artificial Sequence: Synthetic oligonucleotide
  Target: LAMA2; (-) strand; PAM type: YTN; PAM sequence: CTT
caaaataaagtctaaaacac

SEQ ID NO: 242519 - DNA, 20 bp, Artificial Sequence
  Description of Artificial Sequence: Synthetic oligonucleotide
  Target: LAMA2; (-) strand; PAM type: YTN; PAM sequence: TTG
gcaccttcaaaataaagtct

SEQ ID NO: 242520 - DNA, 20 bp, Artificial Sequence
  Description of Artificial Sequence: Synthetic oligonucleotide
  Target: LAMA2; (-) strand; PAM type: YTN; PAM sequence: TTT
ggcaccttcaaaataaagtc

SEQ ID NO: 242521 - DNA, 20 bp, Artificial Sequence
  Description of Artificial Sequence: Synthetic oligonucleotide
  Target: LAMA2; (-) strand; PAM type: YTN; PAM sequence: CTA
atttggcaccttcaaaataa

SEQ ID NO: 242522 - DNA, 20 bp, Artificial Sequence
  Description of Artificial Sequence: Synthetic oligonucleotide
  Target: LAMA2; (-) strand; PAM type: YTN; PAM sequence: CTC
taatttggcaccttcaaaat

SEQ ID NO: 242523 - DNA, 20 bp, Artificial Sequence
  Description of Artificial Sequence: Synthetic oligonucleotide
  Target: LAMA2; (-) strand; PAM type: YTN; PAM sequence: TTA
gctctaatttggcaccttca

SEQ ID NO: 242524 - DNA, 20 bp, Artificial Sequence
  Description of Artificial Sequence: Synthetic oligonucleotide
  Target: LAMA2; (-) strand; PAM type: YTN; PAM sequence: TTG
ggaagacatgaagcgatgca

SEQ ID NO: 242525 - DNA, 20 bp, Artificial Sequence
  Description of Artificial Sequence: Synthetic oligonucleotide
  Target: LAMA2; (-) strand; PAM type: YTN; PAM sequence: CTT
gggaagacatgaagcgatgc

SEQ ID NO: 242526 - DNA, 20 bp, Artificial Sequence
  Description of Artificial Sequence: Synthetic oligonucleotide
  Target: LAMA2; (-) strand; PAM type: YTN; PAM sequence: TTC
ttgggaagacatgaagcgat

SEQ ID NO: 242527 - DNA, 20 bp, Artificial Sequence
  Description of Artificial Sequence: Synthetic oligonucleotide
  Target: LAMA2; (-) strand; PAM type: YTN; PAM sequence: TTT
cttgggaagacatgaagcga

SEQ ID NO: 242528 - DNA, 20 bp, Artificial Sequence
  Description of Artificial Sequence: Synthetic oligonucleotide
  Target: LAMA2; (-) strand; PAM type: YTN; PAM sequence: TTT
tcttgggaagacatgaagcg

SEQ ID NO: 242529 - DNA, 20 bp, Artificial Sequence
  Description of Artificial Sequence: Synthetic oligonucleotide
  Target: LAMA2; (-) strand; PAM type: YTN; PAM sequence: TTG
tcatgtaattttcttgggaa

SEQ ID NO: 242530 - DNA, 20 bp, Artificial Sequence
  Description of Artificial Sequence: Synthetic oligonucleotide
  Target: LAMA2; (-) strand; PAM type: YTN; PAM sequence: TTT
gtcatgtaattttcttggga

SEQ ID NO: 242531 - DNA, 20 bp, Artificial Sequence
  Description of Artificial Sequence: Synthetic oligonucleotide
  Target: LAMA2; (-) strand; PAM type: YTN; PAM sequence: TTG
tcagtgaagcagagatagat

SEQ ID NO: 242532 - DNA, 20 bp, Artificial Sequence
  Description of Artificial Sequence: Synthetic oligonucleotide
  Target: LAMA2; (-) strand; PAM type: YTN; PAM sequence: CTG
ccaggttgtcagtgaagcag

SEQ ID NO: 242533 - DNA, 20 bp, Artificial Sequence
  Description of Artificial Sequence: Synthetic oligonucleotide
  Target: LAMA2; (-) strand; PAM type: YTN; PAM sequence: TTC
actgccaggttgtcagtgaa

SEQ ID NO: 242534 - DNA, 20 bp, Artificial Sequence
  Description of Artificial Sequence: Synthetic oligonucleotide
  Target: LAMA2; (-) strand; PAM type: YTN; PAM sequence: TTT
cactgccaggttgtcagtga

SEQ ID NO: 242535 - DNA, 20 bp, Artificial Sequence
  Description of Artificial Sequence: Synthetic oligonucleotide
  Target: LAMA2; (-) strand; PAM type: YTN; PAM sequence: CTT
tcactgccaggttgtcagtg

SEQ ID NO: 242536 - DNA, 20 bp, Artificial Sequence
  Description of Artificial Sequence: Synthetic oligonucleotide
  Target: LAMA2; (-) strand; PAM type: YTN; PAM sequence: CTC
aaatccctttcactgccagg

SEQ ID NO: 242537 - DNA, 20 bp, Artificial Sequence
  Description of Artificial Sequence: Synthetic oligonucleotide
  Target: LAMA2; (-) strand; PAM type: YTN; PAM sequence: CTG
atgggcacaaacctcaaatc

SEQ ID NO: 242538 - DNA, 20 bp, Artificial Sequence
  Description of Artificial Sequence: Synthetic oligonucleotide
  Target: LAMA2; (-) strand; PAM type: YTN; PAM sequence: TTA
ctgatgggcacaaacctcaa

SEQ ID NO: 242539 - DNA, 20 bp, Artificial Sequence
  Description of Artificial Sequence: Synthetic oligonucleotide
  Target: LAMA2; (-) strand; PAM type: YTN; PAM sequence: TTA
gttactgatgggcacaaacc

SEQ ID NO: 242540 - DNA, 20 bp, Artificial Sequence
  Description of Artificial Sequence: Synthetic oligonucleotide
  Target: LAMA2; (-) strand; PAM type: YTN; PAM sequence: CTA
attagttactgatgggcaca

SEQ ID NO: 242541 - DNA, 20 bp, Artificial Sequence
  Description of Artificial Sequence: Synthetic oligonucleotide
  Target: LAMA2; (-) strand; PAM type: YTN; PAM sequence: CTC
taattagttactgatgggca

SEQ ID NO: 242542 - DNA, 20 bp, Artificial Sequence
  Description of Artificial Sequence: Synthetic oligonucleotide
  Target: LAMA2; (-) strand; PAM type: YTN; PAM sequence: TTC
tctaattagttactgatggg

SEQ ID NO: 242543 - DNA, 20 bp, Artificial Sequence
  Description of Artificial Sequence: Synthetic oligonucleotide
  Target: LAMA2; (-) strand; PAM type: YTN; PAM sequence: CTT
ctctaattagttactgatgg

SEQ ID NO: 242544 - DNA, 20 bp, Artificial Sequence
  Description of Artificial Sequence: Synthetic oligonucleotide
  Target: LAMA2; (-) strand; PAM type: YTN; PAM sequence: TTA
cttctctaattagttactga

SEQ ID NO: 242545 - DNA, 20 bp, Artificial Sequence
  Description of Artificial Sequence: Synthetic oligonucleotide
  Target: LAMA2; (-) strand; PAM type: YTN; PAM sequence: TTT
acttctctaattagttactg

SEQ ID NO: 242546 - DNA, 20 bp, Artificial Sequence
  Description of Artificial Sequence: Synthetic oligonucleotide
  Target: LAMA2; (-) strand; PAM type: YTN; PAM sequence: TTA
taacatttacttctctaatt

SEQ ID NO: 242547 - DNA, 20 bp, Artificial Sequence
  Description of Artificial Sequence: Synthetic oligonucleotide
  Target: LAMA2; (-) strand; PAM type: YTN; PAM sequence: CTA
gttataacatttacttctct

SEQ ID NO: 242548 - DNA, 20 bp, Artificial Sequence
  Description of Artificial Sequence: Synthetic oligonucleotide
  Target: LAMA2; (-) strand; PAM type: YTN; PAM sequence: CTG
actagttataacatttactt

SEQ ID NO: 242549 - DNA, 20 bp, Artificial Sequence
  Description of Artificial Sequence: Synthetic oligonucleotide
  Target: LAMA2; (-) strand; PAM type: YTN; PAM sequence: TTG
tagccacagaatactgacta

SEQ ID NO: 242550 - DNA, 20 bp, Artificial Sequence
  Description of Artificial Sequence: Synthetic oligonucleotide
  Target: LAMA2; (-) strand; PAM type: YTN; PAM sequence: TTG
ccacattgtagccacagaat

SEQ ID NO: 242551 - DNA, 20 bp, Artificial Sequence
  Description of Artificial Sequence: Synthetic oligonucleotide
  Target: LAMA2; (-) strand; PAM type: YTN; PAM sequence: CTT
gccacattgtagccacagaa

SEQ ID NO: 242552 - DNA, 20 bp, Artificial Sequence
  Description of Artificial Sequence: Synthetic oligonucleotide
  Target: LAMA2; (-) strand; PAM type: YTN; PAM sequence: TTA
acttgccacattgtagccac

SEQ ID NO: 242553 - DNA, 20 bp, Artificial Sequence
  Description of Artificial Sequence: Synthetic oligonucleotide
  Target: LAMA2; (-) strand; PAM type: YTN; PAM sequence: TTT
aacttgccacattgtagcca

SEQ ID NO: 242554 - DNA, 20 bp, Artificial Sequence
  Description of Artificial Sequence: Synthetic oligonucleotide
  Target: LAMA2; (-) strand; PAM type: YTN; PAM sequence: TTT
taacttgccacattgtagcc

SEQ ID NO: 242555 - DNA, 20 bp, Artificial Sequence
  Description of Artificial Sequence: Synthetic oligonucleotide
  Target: LAMA2; (-) strand; PAM type: YTN; PAM sequence: TTA
ttttaacttgccacattgta

SEQ ID NO: 242556 - DNA, 20 bp, Artificial Sequence
  Description of Artificial Sequence: Synthetic oligonucleotide
  Target: LAMA2; (-) strand; PAM type: YTN; PAM sequence: TTA
aggatattattttaacttgc

SEQ ID NO: 242557 - DNA, 20 bp, Artificial Sequence
  Description of Artificial Sequence: Synthetic oligonucleotide
  Target: LAMA2; (-) strand; PAM type: YTN; PAM sequence: CTT
aaggatattattttaacttg

SEQ ID NO: 242558 - DNA, 20 bp, Artificial Sequence
  Description of Artificial Sequence: Synthetic oligonucleotide
  Target: LAMA2; (-) strand; PAM type: YTN; PAM sequence: TTA
gcgcccaccttaaggatatt

SEQ ID NO: 242559 - DNA, 20 bp, Artificial Sequence
  Description of Artificial Sequence: Synthetic oligonucleotide
  Target: LAMA2; (-) strand; PAM type: YTN; PAM sequence: TTG
cgttagcgcccaccttaagg

SEQ ID NO: 242560 - DNA, 20 bp, Artificial Sequence
  Description of Artificial Sequence: Synthetic oligonucleotide
  Target: LAMA2; (-) strand; PAM type: YTN; PAM sequence: TTC
ataaggataccagtcatatt

SEQ ID NO: 242561 - DNA, 20 bp, Artificial Sequence
  Description of Artificial Sequence: Synthetic oligonucleotide
  Target: LAMA2; (-) strand; PAM type: YTN; PAM sequence: TTT
cataaggataccagtcatat

SEQ ID NO: 242562 - DNA, 20 bp, Artificial Sequence
  Description of Artificial Sequence: Synthetic oligonucleotide
  Target: LAMA2; (-) strand; PAM type: YTN; PAM sequence: TTT
tcataaggataccagtcata

SEQ ID NO: 242563 - DNA, 20 bp, Artificial Sequence
  Description of Artificial Sequence: Synthetic oligonucleotide
  Target: LAMA2; (-) strand; PAM type: YTN; PAM sequence: TTT
ttcataaggataccagtcat

SEQ ID NO: 242564 - DNA, 20 bp, Artificial Sequence
  Description of Artificial Sequence: Synthetic oligonucleotide
  Target: LAMA2; (-) strand; PAM type: YTN; PAM sequence: TTT
tttcataaggataccagtca

SEQ ID NO: 242565 - DNA, 20 bp, Artificial Sequence
  Description of Artificial Sequence: Synthetic oligonucleotide
  Target: LAMA2; (-) strand; PAM type: YTN; PAM sequence: TTT
ttttcataaggataccagtc

SEQ ID NO: 242566 - DNA, 20 bp, Artificial Sequence
  Description of Artificial Sequence: Synthetic oligonucleotide
  Target: LAMA2; (-) strand; PAM type: YTN; PAM sequence: TTT
tttttcataaggataccagt

SEQ ID NO: 242567 - DNA, 20 bp, Artificial Sequence
  Description of Artificial Sequence: Synthetic oligonucleotide
  Target: LAMA2; (-) strand; PAM type: YTN; PAM sequence: TTT
ttttttcataaggataccag

SEQ ID NO: 242568 - DNA, 20 bp, Artificial Sequence
  Description of Artificial Sequence: Synthetic oligonucleotide
  Target: LAMA2; (-) strand; PAM type: YTN; PAM sequence: TTT
tttttttcataaggatacca

SEQ ID NO: 242569 - DNA, 20 bp, Artificial Sequence
  Description of Artificial Sequence: Synthetic oligonucleotide
  Target: LAMA2; (-) strand; PAM type: YTN; PAM sequence: TTT
ttttttttcataaggatacc

SEQ ID NO: 242570 - DNA, 20 bp, Artificial Sequence
  Description of Artificial Sequence: Synthetic oligonucleotide
  Target: LAMA2; (-) strand; PAM type: YTN; PAM sequence: TTT
tttttttttcataaggatac

SEQ ID NO: 242571 - DNA, 20 bp, Artificial Sequence
  Description of Artificial Sequence: Synthetic oligonucleotide
  Target: LAMA2; (-) strand; PAM type: YTN; PAM sequence: TTT
ttttttttttcataaggata

SEQ ID NO: 242572 - DNA, 20 bp, Artificial Sequence
  Description of Artificial Sequence: Synthetic oligonucleotide
  Target: LAMA2; (-) strand; PAM type: YTN; PAM sequence: TTT
tttttttttttcataaggat

SEQ ID NO: 242573 - DNA, 20 bp, Artificial Sequence
  Description of Artificial Sequence: Synthetic oligonucleotide
  Target: LAMA2; (-) strand; PAM type: YTN; PAM sequence: CTT
ttttttttttttcataagga

SEQ ID NO: 242574 - DNA, 20 bp, Artificial Sequence
  Description of Artificial Sequence: Synthetic oligonucleotide
  Target: LAMA2; (-) strand; PAM type: YTN; PAM sequence: TTG
tccttttttttttttttcat

SEQ ID NO: 242575 - DNA, 20 bp, Artificial Sequence
  Description of Artificial Sequence: Synthetic oligonucleotide
  Target: LAMA2; (-) strand; PAM type: YTN; PAM sequence: CTC
caaattgtcctttttttttt

SEQ ID NO: 242576 - DNA, 20 bp, Artificial Sequence
  Description of Artificial Sequence: Synthetic oligonucleotide
  Target: LAMA2; (-) strand; PAM type: YTN; PAM sequence: TTA
tctccaaattgtcctttttt

SEQ ID NO: 242577 - DNA, 20 bp, Artificial Sequence
  Description of Artificial Sequence: Synthetic oligonucleotide
  Target: LAMA2; (-) strand; PAM type: YTN; PAM sequence: TTT
atctccaaattgtccttttt

SEQ ID NO: 242578 - DNA, 20 bp, Artificial Sequence
  Description of Artificial Sequence: Synthetic oligonucleotide
  Target: LAMA2; (-) strand; PAM type: YTN; PAM sequence: CTG
tcggtgtgtttatctccaaa

SEQ ID NO: 242579 - DNA, 20 bp, Artificial Sequence
  Description of Artificial Sequence: Synthetic oligonucleotide
  Target: LAMA2; (-) strand; PAM type: YTN; PAM sequence: TTA
ccctgtcggtgtgtttatct

SEQ ID NO: 242580 - DNA, 20 bp, Artificial Sequence
  Description of Artificial Sequence: Synthetic oligonucleotide
  Target: LAMA2; (-) strand; PAM type: YTN; PAM sequence: TTT
accctgtcggtgtgtttatc

SEQ ID NO: 242581 - DNA, 20 bp, Artificial Sequence
  Description of Artificial Sequence: Synthetic oligonucleotide
  Target: LAMA2; (-) strand; PAM type: YTN; PAM sequence: TTC
acatggtgtttaccctgtcg

SEQ ID NO: 242582 - DNA, 20 bp, Artificial Sequence
  Description of Artificial Sequence: Synthetic oligonucleotide
  Target: LAMA2; (-) strand; PAM type: YTN; PAM sequence: TTG
tgaatggccatcatcatgtt

SEQ ID NO: 242583 - DNA, 20 bp, Artificial Sequence
  Description of Artificial Sequence: Synthetic oligonucleotide
  Target: LAMA2; (-) strand; PAM type: YTN; PAM sequence: CTT
gtgaatggccatcatcatgt

SEQ ID NO: 242584 - DNA, 20 bp, Artificial Sequence
  Description of Artificial Sequence: Synthetic oligonucleotide
  Target: LAMA2; (-) strand; PAM type: YTN; PAM sequence: TTG
cttgtgaatggccatcatca

SEQ ID NO: 242585 - DNA, 20 bp, Artificial Sequence
  Description of Artificial Sequence: Synthetic oligonucleotide
  Target: LAMA2; (-) strand; PAM type: YTN; PAM sequence: TTT
gcttgtgaatggccatcatc

SEQ ID NO: 242586 - DNA, 20 bp, Artificial Sequence
  Description of Artificial Sequence: Synthetic oligonucleotide
  Target: LAMA2; (-) strand; PAM type: YTN; PAM sequence: CTT
tgcttgtgaatggccatcat

SEQ ID NO: 242587 - DNA, 20 bp, Artificial Sequence
  Description of Artificial Sequence: Synthetic oligonucleotide
  Target: LAMA2; (-) strand; PAM type: YTN; PAM sequence: CTC
ctttgcttgtgaatggccat

SEQ ID NO: 242588 - DNA, 20 bp, Artificial Sequence
  Description of Artificial Sequence: Synthetic oligonucleotide
  Target: LAMA2; (-) strand; PAM type: YTN; PAM sequence: CTC
tcctttgcttgtgaatggcc

SEQ ID NO: 242589 - DNA, 20 bp, Artificial Sequence
  Description of Artificial Sequence: Synthetic oligonucleotide
  Target: LAMA2; (-) strand; PAM type: YTN; PAM sequence: CTC
tctcctttgcttgtgaatgg

SEQ ID NO: 242590 - DNA, 20 bp, Artificial Sequence
  Description of Artificial Sequence: Synthetic oligonucleotide
  Target: LAMA2; (-) strand; PAM type: YTN; PAM sequence: TTC
caggcctctctcctttgctt

SEQ ID NO: 242591 - DNA, 20 bp, Artificial Sequence
  Description of Artificial Sequence: Synthetic oligonucleotide
  Target: LAMA2; (-) strand; PAM type: YTN; PAM sequence: CTG
ttccaggcctctctcctttg

SEQ ID NO: 242592 - DNA, 20 bp, Artificial Sequence
  Description of Artificial Sequence: Synthetic oligonucleotide
  Target: LAMA2; (-) strand; PAM type: YTN; PAM sequence: CTA
agaggaatctgttccaggcc

SEQ ID NO: 242593 - DNA, 20 bp, Artificial Sequence
  Description of Artificial Sequence: Synthetic oligonucleotide
  Target: LAMA2; (-) strand; PAM type: YTN; PAM sequence: TTG
agggctaagaggaatctgtt

SEQ ID NO: 242594 - DNA, 20 bp, Artificial Sequence
  Description of Artificial Sequence: Synthetic oligonucleotide
  Target: LAMA2; (-) strand; PAM type: YTN; PAM sequence: TTT
gagggctaagaggaatctgt

SEQ ID NO: 242595 - DNA, 20 bp, Artificial Sequence
  Description of Artificial Sequence: Synthetic oligonucleotide
  Target: LAMA2; (-) strand; PAM type: YTN; PAM sequence: CTT
tgagggctaagaggaatctg

SEQ ID NO: 242596 - DNA, 20 bp, Artificial Sequence
  Description of Artificial Sequence: Synthetic oligonucleotide
  Target: LAMA2; (-) strand; PAM type: YTN; PAM sequence: TTC
cctttgagggctaagaggaa

SEQ ID NO: 242597 - DNA, 20 bp, Artificial Sequence
  Description of Artificial Sequence: Synthetic oligonucleotide
  Target: LAMA2; (-) strand; PAM type: YTN; PAM sequence: TTA
gttccctttgagggctaaga

SEQ ID NO: 242598 - DNA, 20 bp, Artificial Sequence
  Description of Artificial Sequence: Synthetic oligonucleotide
  Target: LAMA2; (-) strand; PAM type: YTN; PAM sequence: CTG
aaatcaaggtatcggcaggg

SEQ ID NO: 242599 - DNA, 20 bp, Artificial Sequence
  Description of Artificial Sequence: Synthetic oligonucleotide
  Target: LAMA2; (-) strand; PAM type: YTN; PAM sequence: CTA
caagtctgaaatcaaggtat

SEQ ID NO: 242600 - DNA, 20 bp, Artificial Sequence
  Description of Artificial Sequence: Synthetic oligonucleotide
  Target: LAMA2; (-) strand; PAM type: YTN; PAM sequence: CTA
gaggctacaagtctgaaatc

SEQ ID NO: 242601 - DNA, 20 bp, Artificial Sequence
  Description of Artificial Sequence: Synthetic oligonucleotide
  Target: LAMA2; (-) strand; PAM type: YTN; PAM sequence: TTC
tagaggctacaagtctgaaa

SEQ ID NO: 242602 - DNA, 20 bp, Artificial Sequence
  Description of Artificial Sequence: Synthetic oligonucleotide
  Target: LAMA2; (-) strand; PAM type: YTN; PAM sequence: TTC
acagttctagaggctacaag

SEQ ID NO: 242603 - DNA, 20 bp, Artificial Sequence
  Description of Artificial Sequence: Synthetic oligonucleotide
  Target: LAMA2; (-) strand; PAM type: YTN; PAM sequence: TTT
cacagttctagaggctacaa

SEQ ID NO: 242604 - DNA, 20 bp, Artificial Sequence
  Description of Artificial Sequence: Synthetic oligonucleotide
  Target: LAMA2; (-) strand; PAM type: YTN; PAM sequence: TTG
tttcacagttctagaggcta

SEQ ID NO: 242605 - DNA, 20 bp, Artificial Sequence
  Description of Artificial Sequence: Synthetic oligonucleotide
  Target: LAMA2; (-) strand; PAM type: YTN; PAM sequence: TTA
tacaacagaaatgtattgtt

SEQ ID NO: 242606 - DNA, 20 bp, Artificial Sequence
  Description of Artificial Sequence: Synthetic oligonucleotide
  Target: LAMA2; (-) strand; PAM type: YTN; PAM sequence: CTT
atacaacagaaatgtattgt

SEQ ID NO: 242607 - DNA, 20 bp, Artificial Sequence
  Description of Artificial Sequence: Synthetic oligonucleotide
  Target: LAMA2; (-) strand; PAM type: YTN; PAM sequence: CTG
ggtggcttatacaacagaaa

SEQ ID NO: 242608 - DNA, 20 bp, Artificial Sequence
  Description of Artificial Sequence: Synthetic oligonucleotide
  Target: LAMA2; (-) strand; PAM type: YTN; PAM sequence: CTG
ccataataaaataccataga

SEQ ID NO: 242609 - DNA, 20 bp, Artificial Sequence
  Description of Artificial Sequence: Synthetic oligonucleotide
  Target: LAMA2; (-) strand; PAM type: YTN; PAM sequence: CTA
gggctgccataataaaatac

SEQ ID NO: 242610 - DNA, 20 bp, Artificial Sequence
  Description of Artificial Sequence: Synthetic oligonucleotide
  Target: LAMA2; (-) strand; PAM type: YTN; PAM sequence: TTG
ctagggctgccataataaaa

SEQ ID NO: 242611 - DNA, 20 bp, Artificial Sequence
  Description of Artificial Sequence: Synthetic oligonucleotide
  Target: LAMA2; (-) strand; PAM type: YTN; PAM sequence: TTT
gctagggctgccataataaa

SEQ ID NO: 242612 - DNA, 20 bp, Artificial Sequence
  Description of Artificial Sequence: Synthetic oligonucleotide
  Target: LAMA2; (-) strand; PAM type: YTN; PAM sequence: TTG
gtttgctagggctgccataa

SEQ ID NO: 242613 - DNA, 20 bp, Artificial Sequence
  Description of Artificial Sequence: Synthetic oligonucleotide
  Target: LAMA2; (-) strand; PAM type: YTN; PAM sequence: TTG
tattggtttgctagggctgc

SEQ ID NO: 242614 - DNA, 20 bp, Artificial Sequence
  Description of Artificial Sequence: Synthetic oligonucleotide
  Target: LAMA2; (-) strand; PAM type: YTN; PAM sequence: TTT
gtattggtttgctagggctg

SEQ ID NO: 242615 - DNA, 20 bp, Artificial Sequence
  Description of Artificial Sequence: Synthetic oligonucleotide
  Target: LAMA2; (-) strand; PAM type: YTN; PAM sequence: TTA
tgatttgtattggtttgcta

SEQ ID NO: 242616 - DNA, 20 bp, Artificial Sequence
  Description of Artificial Sequence: Synthetic oligonucleotide
  Target: LAMA2; (-) strand; PAM type: YTN; PAM sequence: TTT
atgatttgtattggtttgct

SEQ ID NO: 242617 - DNA, 20 bp, Artificial Sequence
  Description of Artificial Sequence: Synthetic oligonucleotide
  Target: LAMA2; (-) strand; PAM type: YTN; PAM sequence: TTT
tatgatttgtattggtttgc

SEQ ID NO: 242618 - DNA, 20 bp, Artificial Sequence
  Description of Artificial Sequence: Synthetic oligonucleotide
  Target: LAMA2; (-) strand; PAM type: YTN; PAM sequence: TTG
atgttttatgatttgtattg

SEQ ID NO: 242619 - DNA, 20 bp, Artificial Sequence
  Description of Artificial Sequence: Synthetic oligonucleotide
  Target: LAMA2; (-) strand; PAM type: YTN; PAM sequence: TTA
aaaataattgatgttttatg

SEQ ID NO: 242620 - DNA, 20 bp, Artificial Sequence
  Description of Artificial Sequence: Synthetic oligonucleotide
  Target: LAMA2; (-) strand; PAM type: YTN; PAM sequence: TTT
aaaaataattgatgttttat

SEQ ID NO: 242621 - DNA, 20 bp, Artificial Sequence
  Description of Artificial Sequence: Synthetic oligonucleotide
  Target: LAMA2; (-) strand; PAM type: YTN; PAM sequence: TTT
taaaaataattgatgtttta

SEQ ID NO: 242622 - DNA, 20 bp, Artificial Sequence
  Description of Artificial Sequence: Synthetic oligonucleotide
  Target: LAMA2; (-) strand; PAM type: YTN; PAM sequence: TTA
tgagattttaaaaataattg

SEQ ID NO: 242623 - DNA, 20 bp, Artificial Sequence
  Description of Artificial Sequence: Synthetic oligonucleotide
  Target: LAMA2; (-) strand; PAM type: YTN; PAM sequence: TTA
tatatatataacaagaatga

SEQ ID NO: 242624 - DNA, 20 bp, Artificial Sequence
  Description of Artificial Sequence: Synthetic oligonucleotide
  Target: LAMA2; (-) strand; PAM type: YTN; PAM sequence: TTT
atatatatataacaagaatg

SEQ ID NO: 242625 - DNA, 20 bp, Artificial Sequence
  Description of Artificial Sequence: Synthetic oligonucleotide
  Target: LAMA2; (-) strand; PAM type: YTN; PAM sequence: TTT
tatatatatataacaagaat

SEQ ID NO: 242626 - DNA, 20 bp, Artificial Sequence
  Description of Artificial Sequence: Synthetic oligonucleotide
  Target: LAMA2; (-) strand; PAM type: YTN; PAM sequence: TTG
ttttatatatatataacaag

SEQ ID NO: 242627 - DNA, 20 bp, Artificial Sequence
  Description of Artificial Sequence: Synthetic oligonucleotide
  Target: LAMA2; (-) strand; PAM type: YTN; PAM sequence: TTT
gttttatatatatataacaa

SEQ ID NO: 242628 - DNA, 20 bp, Artificial Sequence
  Description of Artificial Sequence: Synthetic oligonucleotide
  Target: LAMA2; (-) strand; PAM type: YTN; PAM sequence: TTA
tttgttttatatatatataa

SEQ ID NO: 242629 - DNA, 20 bp, Artificial Sequence
  Description of Artificial Sequence: Synthetic oligonucleotide
  Target: LAMA2; (-) strand; PAM type: YTN; PAM sequence: TTT
atttgttttatatatatata

SEQ ID NO: 242630 - DNA, 20 bp, Artificial Sequence
  Description of Artificial Sequence: Synthetic oligonucleotide
  Target: LAMA2; (-) strand; PAM type: YTN; PAM sequence: TTT
tatttgttttatatatatat

SEQ ID NO: 242631 - DNA, 20 bp, Artificial Sequence
  Description of Artificial Sequence: Synthetic oligonucleotide
  Target: LAMA2; (-) strand; PAM type: YTN; PAM sequence: CTT
ttatttgttttatatatata

SEQ ID NO: 242632 - DNA, 20 bp, Artificial Sequence
  Description of Artificial Sequence: Synthetic oligonucleotide
  Target: LAMA2; (-) strand; PAM type: YTN; PAM sequence: TTA
gagagagtcaccttttattt

SEQ ID NO: 242633 - DNA, 20 bp, Artificial Sequence
  Description of Artificial Sequence: Synthetic oligonucleotide
  Target: LAMA2; (-) strand; PAM type: YTN; PAM sequence: TTA
tacattagagagagtcacct

SEQ ID NO: 242634 - DNA, 20 bp, Artificial Sequence
  Description of Artificial Sequence: Synthetic oligonucleotide
  Target: LAMA2; (-) strand; PAM type: YTN; PAM sequence: TTT
atacattagagagagtcacc

SEQ ID NO: 242635 - DNA, 20 bp, Artificial Sequence
  Description of Artificial Sequence: Synthetic oligonucleotide
  Target: LAMA2; (-) strand; PAM type: YTN; PAM sequence: CTT
tatacattagagagagtcac

SEQ ID NO: 242636 - DNA, 20 bp, Artificial Sequence
  Description of Artificial Sequence: Synthetic oligonucleotide
  Target: LAMA2; (-) strand; PAM type: YTN; PAM sequence: TTC
tttatacattagagagagtc

SEQ ID NO: 242637 - DNA, 20 bp, Artificial Sequence
  Description of Artificial Sequence: Synthetic oligonucleotide
  Target: LAMA2; (-) strand; PAM type: YTN; PAM sequence: CTT
ctttatacattagagagagt

SEQ ID NO: 242638 - DNA, 20 bp, Artificial Sequence
  Description of Artificial Sequence: Synthetic oligonucleotide
  Target: LAMA2; (-) strand; PAM type: YTN; PAM sequence: TTA
acttctttatacattagaga

SEQ ID NO: 242639 - DNA, 20 bp, Artificial Sequence
  Description of Artificial Sequence: Synthetic oligonucleotide
  Target: LAMA2; (-) strand; PAM type: YTN; PAM sequence: TTT
aacttctttatacattagag

SEQ ID NO: 242640 - DNA, 20 bp, Artificial Sequence
  Description of Artificial Sequence: Synthetic oligonucleotide
  Target: LAMA2; (-) strand; PAM type: YTN; PAM sequence: CTT
taacttctttatacattaga

SEQ ID NO: 242641 - DNA, 20 bp, Artificial Sequence
  Description of Artificial Sequence: Synthetic oligonucleotide
  Target: LAMA2; (-) strand; PAM type: YTN; PAM sequence: TTC
tttaacttctttatacatta

SEQ ID NO: 242642 - DNA, 20 bp, Artificial Sequence
  Description of Artificial Sequence: Synthetic oligonucleotide
  Target: LAMA2; (-) strand; PAM type: YTN; PAM sequence: TTT
ctttaacttctttatacatt

SEQ ID NO: 242643 - DNA, 20 bp, Artificial Sequence
  Description of Artificial Sequence: Synthetic oligonucleotide
  Target: LAMA2; (-) strand; PAM type: YTN; PAM sequence: TTA
tcaatttctttaacttcttt

SEQ ID NO: 242644 - DNA, 20 bp, Artificial Sequence
  Description of Artificial Sequence: Synthetic oligonucleotide
  Target: LAMA2; (-) strand; PAM type: YTN; PAM sequence: CTG
ttatcaatttctttaacttc

SEQ ID NO: 242645 - DNA, 20 bp, Artificial Sequence
  Description of Artificial Sequence: Synthetic oligonucleotide
  Target: LAMA2; (-) strand; PAM type: YTN; PAM sequence: TTC
tgttatcaatttctttaact

SEQ ID NO: 242646 - DNA, 20 bp, Artificial Sequence
  Description of Artificial Sequence: Synthetic oligonucleotide
  Target: LAMA2; (-) strand; PAM type: YTN; PAM sequence: TTT
ctgttatcaatttctttaac

SEQ ID NO: 242647 - DNA, 20 bp, Artificial Sequence
  Description of Artificial Sequence: Synthetic oligonucleotide
  Target: LAMA2; (-) strand; PAM type: YTN; PAM sequence: CTT
tctgttatcaatttctttaa

SEQ ID NO: 242648 - DNA, 20 bp, Artificial Sequence
  Description of Artificial Sequence: Synthetic oligonucleotide
  Target: LAMA2; (-) strand; PAM type: YTN; PAM sequence: CTG
gcctttctgttatcaatttc

SEQ ID NO: 242649 - DNA, 20 bp, Artificial Sequence
  Description of Artificial Sequence: Synthetic oligonucleotide
  Target: LAMA2; (-) strand; PAM type: YTN; PAM sequence: CTG
ctggcctttctgttatcaat

SEQ ID NO: 242650 - DNA, 20 bp, Artificial Sequence
  Description of Artificial Sequence: Synthetic oligonucleotide
  Target: LAMA2; (-) strand; PAM type: YTN; PAM sequence: TTG
gactgctggcctttctgtta

SEQ ID NO: 242651 - DNA, 20 bp, Artificial Sequence
  Description of Artificial Sequence: Synthetic oligonucleotide
  Target: LAMA2; (-) strand; PAM type: YTN; PAM sequence: CTG
ttggactgctggcctttctg

SEQ ID NO: 242652 - DNA, 20 bp, Artificial Sequence
  Description of Artificial Sequence: Synthetic oligonucleotide
  Target: LAMA2; (-) strand; PAM type: YTN; PAM sequence: TTC
tgttggactgctggcctttc

SEQ ID NO: 242653 - DNA, 20 bp, Artificial Sequence
  Description of Artificial Sequence: Synthetic oligonucleotide
  Target: LAMA2; (-) strand; PAM type: YTN; PAM sequence: TTT
ctgttggactgctggccttt

SEQ ID NO: 242654 - DNA, 20 bp, Artificial Sequence
  Description of Artificial Sequence: Synthetic oligonucleotide
  Target: LAMA2; (-) strand; PAM type: YTN; PAM sequence: TTC
atttctgttggactgctggc

SEQ ID NO: 242655 - DNA, 20 bp, Artificial Sequence
  Description of Artificial Sequence: Synthetic oligonucleotide
  Target: LAMA2; (-) strand; PAM type: YTN; PAM sequence: CTC
attcatttctgttggactgc

SEQ ID NO: 242656 - DNA, 20 bp, Artificial Sequence
  Description of Artificial Sequence: Synthetic oligonucleotide
  Target: LAMA2; (-) strand; PAM type: YTN; PAM sequence: CTG
ctcattcatttctgttggac

SEQ ID NO: 242657 - DNA, 20 bp, Artificial Sequence
  Description of Artificial Sequence: Synthetic oligonucleotide
  Target: LAMA2; (-) strand; PAM type: YTN; PAM sequence: CTA
taaactgctcattcatttct

SEQ ID NO: 242658 - DNA, 20 bp, Artificial Sequence
  Description of Artificial Sequence: Synthetic oligonucleotide
  Target: LAMA2; (-) strand; PAM type: YTN; PAM sequence: CTC
tataaactgctcattcattt

SEQ ID NO: 242659 - DNA, 20 bp, Artificial Sequence
  Description of Artificial Sequence: Synthetic oligonucleotide
  Target: LAMA2; (-) strand; PAM type: YTN; PAM sequence: TTC
tctataaactgctcattcat

SEQ ID NO: 242660 - DNA, 20 bp, Artificial Sequence
  Description of Artificial Sequence: Synthetic oligonucleotide
  Target: LAMA2; (-) strand; PAM type: YTN; PAM sequence: CTT
ctctataaactgctcattca

SEQ ID NO: 242661 - DNA, 20 bp, Artificial Sequence
  Description of Artificial Sequence: Synthetic oligonucleotide
  Target: LAMA2; (-) strand; PAM type: YTN; PAM sequence: TTC
cttctctataaactgctcat

SEQ ID NO: 242662 - DNA, 20 bp, Artificial Sequence
  Description of Artificial Sequence: Synthetic oligonucleotide
  Target: LAMA2; (-) strand; PAM type: YTN; PAM sequence: TTT
ccttctctataaactgctca

SEQ ID NO: 242663 - DNA, 20 bp, Artificial Sequence
  Description of Artificial Sequence: Synthetic oligonucleotide
  Target: LAMA2; (-) strand; PAM type: YTN; PAM sequence: TTA
aatttccttctctataaact

SEQ ID NO: 242664 - DNA, 20 bp, Artificial Sequence
  Description of Artificial Sequence: Synthetic oligonucleotide
  Target: LAMA2; (-) strand; PAM type: YTN; PAM sequence: TTT
aaatttccttctctataaac

SEQ ID NO: 242665 - DNA, 20 bp, Artificial Sequence
  Description of Artificial Sequence: Synthetic oligonucleotide
  Target: LAMA2; (-) strand; PAM type: YTN; PAM sequence: TTA
agagccatttaaatttcctt

SEQ ID NO: 242666 - DNA, 20 bp, Artificial Sequence
  Description of Artificial Sequence: Synthetic oligonucleotide
  Target: LAMA2; (-) strand; PAM type: YTN; PAM sequence: TTT
aagagccatttaaatttcct

SEQ ID NO: 242667 - DNA, 20 bp, Artificial Sequence
  Description of Artificial Sequence: Synthetic oligonucleotide
  Target: LAMA2; (-) strand; PAM type: YTN; PAM sequence: TTC
atacatttaagagccattta

SEQ ID NO: 242668 - DNA, 20 bp, Artificial Sequence
  Description of Artificial Sequence: Synthetic oligonucleotide
  Target: LAMA2; (-) strand; PAM type: YTN; PAM sequence: TTT
catacatttaagagccattt

SEQ ID NO: 242669 - DNA, 20 bp, Artificial Sequence
  Description of Artificial Sequence: Synthetic oligonucleotide
  Target: LAMA2; (-) strand; PAM type: YTN; PAM sequence: TTG
agtaccgtttcatacattta

SEQ ID NO: 242670 - DNA, 20 bp, Artificial Sequence
  Description of Artificial Sequence: Synthetic oligonucleotide
  Target: LAMA2; (-) strand; PAM type: YTN; PAM sequence: CTA
tgagtcgggttgagtaccgt

SEQ ID NO: 242671 - DNA, 20 bp, Artificial Sequence
  Description of Artificial Sequence: Synthetic oligonucleotide
  Target: LAMA2; (-) strand; PAM type: YTN; PAM sequence: TTA
gcatactatgagtcgggttg

SEQ ID NO: 242672 - DNA, 20 bp, Artificial Sequence
  Description of Artificial Sequence: Synthetic oligonucleotide
  Target: LAMA2; (-) strand; PAM type: YTN; PAM sequence: CTC
agtgtagttagcatactatg

SEQ ID NO: 242673 - DNA, 20 bp, Artificial Sequence
  Description of Artificial Sequence: Synthetic oligonucleotide
  Target: LAMA2; (-) strand; PAM type: YTN; PAM sequence: TTC
tcagtgtagttagcatacta

SEQ ID NO: 242674 - DNA, 20 bp, Artificial Sequence
  Description of Artificial Sequence: Synthetic oligonucleotide
  Target: LAMA2; (-) strand; PAM type: YTN; PAM sequence: TTT
ctcagtgtagttagcatact

SEQ ID NO: 242675 - DNA, 20 bp, Artificial Sequence
  Description of Artificial Sequence: Synthetic oligonucleotide
  Target: LAMA2; (-) strand; PAM type: YTN; PAM sequence: TTA
gaagacaatgatttctcagt

SEQ ID NO: 242676 - DNA, 20 bp, Artificial Sequence
  Description of Artificial Sequence: Synthetic oligonucleotide
  Target: LAMA2; (-) strand; PAM type: YTN; PAM sequence: CTA
tatgttagaagacaatgatt

SEQ ID NO: 242677 - DNA, 20 bp, Artificial Sequence
  Description of Artificial Sequence: Synthetic oligonucleotide
  Target: LAMA2; (-) strand; PAM type: YTN; PAM sequence: TTC
ctatatgttagaagacaatg

SEQ ID NO: 242678 - DNA, 20 bp, Artificial Sequence
  Description of Artificial Sequence: Synthetic oligonucleotide
  Target: LAMA2; (-) strand; PAM type: YTN; PAM sequence: TTT
cctatatgttagaagacaat

SEQ ID NO: 242679 - DNA, 20 bp, Artificial Sequence
  Description of Artificial Sequence: Synthetic oligonucleotide
  Target: LAMA2; (-) strand; PAM type: YTN; PAM sequence: CTT
tcctatatgttagaagacaa

SEQ ID NO: 242680 - DNA, 20 bp, Artificial Sequence
  Description of Artificial Sequence: Synthetic oligonucleotide
  Target: LAMA2; (-) strand; PAM type: YTN; PAM sequence: TTG
actttcctatatgttagaag

SEQ ID NO: 242681 - DNA, 20 bp, Artificial Sequence
  Description of Artificial Sequence: Synthetic oligonucleotide
  Target: LAMA2; (-) strand; PAM type: YTN; PAM sequence: TTG
gttgactttcctatatgtta

SEQ ID NO: 242682 - DNA, 20 bp, Artificial Sequence
  Description of Artificial Sequence: Synthetic oligonucleotide
  Target: LAMA2; (-) strand; PAM type: YTN; PAM sequence: TTT
ggttgactttcctatatgtt

SEQ ID NO: 242683 - DNA, 20 bp, Artificial Sequence
  Description of Artificial Sequence: Synthetic oligonucleotide
  Target: LAMA2; (-) strand; PAM type: YTN; PAM sequence: TTC
atttggttgactttcctata

SEQ ID NO: 242684 - DNA, 20 bp, Artificial Sequence
  Description of Artificial Sequence: Synthetic oligonucleotide
  Target: LAMA2; (-) strand; PAM type: YTN; PAM sequence: TTA
ttcatttggttgactttcct

SEQ ID NO: 242685 - DNA, 20 bp, Artificial Sequence
  Description of Artificial Sequence: Synthetic oligonucleotide
  Target: LAMA2; (-) strand; PAM type: YTN; PAM sequence: CTG
aagaagccacaggaatggca

SEQ ID NO: 242686 - DNA, 20 bp, Artificial Sequence
  Description of Artificial Sequence: Synthetic oligonucleotide
  Target: LAMA2; (-) strand; PAM type: YTN; PAM sequence: TTC
ctgaagaagccacaggaatg

SEQ ID NO: 242687 - DNA, 20 bp, Artificial Sequence
  Description of Artificial Sequence: Synthetic oligonucleotide
  Target: LAMA2; (-) strand; PAM type: YTN; PAM sequence: TTG
ttcctgaagaagccacagga

SEQ ID NO: 242688 - DNA, 20 bp, Artificial Sequence
  Description of Artificial Sequence: Synthetic oligonucleotide
  Target: LAMA2; (-) strand; PAM type: YTN; PAM sequence: TTT
gttcctgaagaagccacagg

SEQ ID NO: 242689 - DNA, 20 bp, Artificial Sequence
  Description of Artificial Sequence: Synthetic oligonucleotide
  Target: LAMA2; (-) strand; PAM type: YTN; PAM sequence: CTT
tgttcctgaagaagccacag

SEQ ID NO: 242690 - DNA, 20 bp, Artificial Sequence
  Description of Artificial Sequence: Synthetic oligonucleotide
  Target: LAMA2; (-) strand; PAM type: YTN; PAM sequence: TTA
ggaggacctttgttcctgaa

SEQ ID NO: 242691 - DNA, 20 bp, Artificial Sequence
  Description of Artificial Sequence: Synthetic oligonucleotide
  Target: LAMA2; (-) strand; PAM type: YTN; PAM sequence: TTT
aggaggacctttgttcctga

SEQ ID NO: 242692 - DNA, 20 bp, Artificial Sequence
  Description of Artificial Sequence: Synthetic oligonucleotide
  Target: LAMA2; (-) strand; PAM type: YTN; PAM sequence: CTA
ccaatttaggaggacctttg

SEQ ID NO: 242693 - DNA, 20 bp, Artificial Sequence
  Description of Artificial Sequence: Synthetic oligonucleotide
  Target: LAMA2; (-) strand; PAM type: YTN; PAM sequence: TTC
acactaccaatttaggagga

SEQ ID NO: 242694 - DNA, 20 bp, Artificial Sequence
  Description of Artificial Sequence: Synthetic oligonucleotide
  Target: LAMA2; (-) strand; PAM type: YTN; PAM sequence: TTG
catcaatgtatattcacact

SEQ ID NO: 242695 - DNA, 20 bp, Artificial Sequence
  Description of Artificial Sequence: Synthetic oligonucleotide
  Target: LAMA2; (-) strand; PAM type: YTN; PAM sequence: TTG
gattgcatcaatgtatattc

SEQ ID NO: 242696 - DNA, 20 bp, Artificial Sequence
  Description of Artificial Sequence: Synthetic oligonucleotide
  Target: LAMA2; (-) strand; PAM type: YTN; PAM sequence: TTT
ggattgcatcaatgtatatt

SEQ ID NO: 242697 - DNA, 20 bp, Artificial Sequence
  Description of Artificial Sequence: Synthetic oligonucleotide
  Target: LAMA2; (-) strand; PAM type: YTN; PAM sequence: TTT
tggattgcatcaatgtatat

SEQ ID NO: 242698 - DNA, 20 bp, Artificial Sequence
  Description of Artificial Sequence: Synthetic oligonucleotide
  Target: LAMA2; (-) strand; PAM type: YTN; PAM sequence: TTT
ttggattgcatcaatgtata

SEQ ID NO: 242699 - DNA, 20 bp, Artificial Sequence
  Description of Artificial Sequence: Synthetic oligonucleotide
  Target: LAMA2; (-) strand; PAM type: YTN; PAM sequence: TTT
tttggattgcatcaatgtat

SEQ ID NO: 242700 - DNA, 20 bp, Artificial Sequence
  Description of Artificial Sequence: Synthetic oligonucleotide
  Target: LAMA2; (-) strand; PAM type: YTN; PAM sequence: TTT
ttttggattgcatcaatgta

SEQ ID NO: 242701 - DNA, 20 bp, Artificial Sequence
  Description of Artificial Sequence: Synthetic oligonucleotide
  Target: LAMA2; (-) strand; PAM type: YTN; PAM sequence: TTT
tttttggattgcatcaatgt

SEQ ID NO: 242702 - DNA, 20 bp, Artificial Sequence
  Description of Artificial Sequence: Synthetic oligonucleotide
  Target: LAMA2; (-) strand; PAM type: YTN; PAM sequence: TTT
ttttttggattgcatcaatg

SEQ ID NO: 242703 - DNA, 20 bp, Artificial Sequence
  Description of Artificial Sequence: Synthetic oligonucleotide
  Target: LAMA2; (-) strand; PAM type: YTN; PAM sequence: TTT
tttttttggattgcatcaat

SEQ ID NO: 242704 - DNA, 20 bp, Artificial Sequence
  Description of Artificial Sequence: Synthetic oligonucleotide
  Target: LAMA2; (-) strand; PAM type: YTN; PAM sequence: TTG
gattttttttttggattgca

SEQ ID NO: 242705 - DNA, 20 bp, Artificial Sequence
  Description of Artificial Sequence: Synthetic oligonucleotide
  Target: LAMA2; (-) strand; PAM type: YTN; PAM sequence: TTT
ggattttttttttggattgc

SEQ ID NO: 242706 - DNA, 20 bp, Artificial Sequence
  Description of Artificial Sequence: Synthetic oligonucleotide
  Target: LAMA2; (-) strand; PAM type: YTN; PAM sequence: CTT
tggattttttttttggattg

SEQ ID NO: 242707 - DNA, 20 bp, Artificial Sequence
  Description of Artificial Sequence: Synthetic oligonucleotide
  Target: LAMA2; (-) strand; PAM type: YTN; PAM sequence: CTA
taactttggatttttttttt

SEQ ID NO: 242708 - DNA, 20 bp, Artificial Sequence
  Description of Artificial Sequence: Synthetic oligonucleotide
  Target: LAMA2; (-) strand; PAM type: YTN; PAM sequence: CTG
cccagctataactttggatt

SEQ ID NO: 242709 - DNA, 20 bp, Artificial Sequence
  Description of Artificial Sequence: Synthetic oligonucleotide
  Target: LAMA2; (-) strand; PAM type: YTN; PAM sequence: TTA
caggcatgagccaccctgcc

SEQ ID NO: 242710 - DNA, 20 bp, Artificial Sequence
  Description of Artificial Sequence: Synthetic oligonucleotide
  Target: LAMA2; (-) strand; PAM type: YTN; PAM sequence: CTG
ggattacaggcatgagccac

SEQ ID NO: 242711 - DNA, 20 bp, Artificial Sequence
  Description of Artificial Sequence: Synthetic oligonucleotide
  Target: LAMA2; (-) strand; PAM type: YTN; PAM sequence: CTC
ccaaagtgctgggattacag

SEQ ID NO: 242712 - DNA, 20 bp, Artificial Sequence
  Description of Artificial Sequence: Synthetic oligonucleotide
  Target: LAMA2; (-) strand; PAM type: YTN; PAM sequence: CTC
agcctcccaaagtgctggga

SEQ ID NO: 242713 - DNA, 20 bp, Artificial Sequence
  Description of Artificial Sequence: Synthetic oligonucleotide
  Target: LAMA2; (-) strand; PAM type: YTN; PAM sequence: CTG
cctcagcctcccaaagtgct

SEQ ID NO: 242714 - DNA, 20 bp, Artificial Sequence
  Description of Artificial Sequence: Synthetic oligonucleotide
  Target: LAMA2; (-) strand; PAM type: YTN; PAM sequence: CTG
acgtcgtgatccatctgcct

SEQ ID NO: 242715 - DNA, 20 bp, Artificial Sequence
  Description of Artificial Sequence: Synthetic oligonucleotide
  Target: LAMA2; (-) strand; PAM type: YTN; PAM sequence: CTC
ctgacgtcgtgatccatctg

SEQ ID NO: 242716 - DNA, 20 bp, Artificial Sequence
  Description of Artificial Sequence: Synthetic oligonucleotide
  Target: LAMA2; (-) strand; PAM type: YTN; PAM sequence: CTC
catctcctgacgtcgtgatc

SEQ ID NO: 242717 - DNA, 20 bp, Artificial Sequence
  Description of Artificial Sequence: Synthetic oligonucleotide
  Target: LAMA2; (-) strand; PAM type: YTN; PAM sequence: TTA
accaggatggtctccatctc

SEQ ID NO: 242718 - DNA, 20 bp, Artificial Sequence
  Description of Artificial Sequence: Synthetic oligonucleotide
  Target: LAMA2; (-) strand; PAM type: YTN; PAM sequence: TTC
accatgttaaccaggatggt

SEQ ID NO: 242719 - DNA, 20 bp, Artificial Sequence
  Description of Artificial Sequence: Synthetic oligonucleotide
  Target: LAMA2; (-) strand; PAM type: YTN; PAM sequence: TTT
caccatgttaaccaggatgg

SEQ ID NO: 242720 - DNA, 20 bp, Artificial Sequence
  Description of Artificial Sequence: Synthetic oligonucleotide
  Target: LAMA2; (-) strand; PAM type: YTN; PAM sequence: TTA
gtagagacggggtttcacca

SEQ ID NO: 242721 - DNA, 20 bp, Artificial Sequence
  Description of Artificial Sequence: Synthetic oligonucleotide
  Target: LAMA2; (-) strand; PAM type: YTN; PAM sequence: TTT
agtagagacggggtttcacc

SEQ ID NO: 242722 - DNA, 20 bp, Artificial Sequence
  Description of Artificial Sequence: Synthetic oligonucleotide
  Target: LAMA2; (-) strand; PAM type: YTN; PAM sequence: TTT
tagtagagacggggtttcac

SEQ ID NO: 242723 - DNA, 20 bp, Artificial Sequence
  Description of Artificial Sequence: Synthetic oligonucleotide
  Target: LAMA2; (-) strand; PAM type: YTN; PAM sequence: TTT
ttagtagagacggggtttca

SEQ ID NO: 242724 - DNA, 20 bp, Artificial Sequence
  Description of Artificial Sequence: Synthetic oligonucleotide
  Target: LAMA2; (-) strand; PAM type: YTN; PAM sequence: TTT
tttagtagagacggggtttc

SEQ ID NO: 242725 - DNA, 20 bp, Artificial Sequence
  Description of Artificial Sequence: Synthetic oligonucleotide
  Target: LAMA2; (-) strand; PAM type: YTN; PAM sequence: TTT
ttttagtagagacggggttt

SEQ ID NO: 242726 - DNA, 20 bp, Artificial Sequence
  Description of Artificial Sequence: Synthetic oligonucleotide
  Target: LAMA2; (-) strand; PAM type: YTN; PAM sequence: TTT
tttttagtagagacggggtt

SEQ ID NO: 242727 - DNA, 20 bp, Artificial Sequence
  Description of Artificial Sequence: Synthetic oligonucleotide
  Target: LAMA2; (-) strand; PAM type: YTN; PAM sequence: TTG
tattttttttagtagagacg

SEQ ID NO: 242728 - DNA, 20 bp, Artificial Sequence
  Description of Artificial Sequence: Synthetic oligonucleotide
  Target: LAMA2; (-) strand; PAM type: YTN; PAM sequence: TTT
gtattttttttagtagagac

SEQ ID NO: 242729 - DNA, 20 bp, Artificial Sequence
  Description of Artificial Sequence: Synthetic oligonucleotide
  Target: LAMA2; (-) strand; PAM type: YTN; PAM sequence: TTT
tgtattttttttagtagaga

SEQ ID NO: 242730 - DNA, 20 bp, Artificial Sequence
  Description of Artificial Sequence: Synthetic oligonucleotide
  Target: LAMA2; (-) strand; PAM type: YTN; PAM sequence: TTT
ttgtattttttttagtagag

SEQ ID NO: 242731 - DNA, 20 bp, Artificial Sequence
  Description of Artificial Sequence: Synthetic oligonucleotide
  Target: LAMA2; (-) strand; PAM type: YTN; PAM sequence: TTT
tttgtattttttttagtaga

SEQ ID NO: 242732 - DNA, 20 bp, Artificial Sequence
  Description of Artificial Sequence: Synthetic oligonucleotide
  Target: LAMA2; (-) strand; PAM type: YTN; PAM sequence: CTA
attttttgtattttttttag

SEQ ID NO: 242733 - DNA, 20 bp, Artificial Sequence
  Description of Artificial Sequence: Synthetic oligonucleotide
  Target: LAMA2; (-) strand; PAM type: YTN; PAM sequence: CTA
ggtccagctaattttttgta

SEQ ID NO: 242734 - DNA, 20 bp, Artificial Sequence
  Description of Artificial Sequence: Synthetic oligonucleotide
  Target: LAMA2; (-) strand; PAM type: YTN; PAM sequence: CTA
caggcgtgtgccactaggtc

SEQ ID NO: 242735 - DNA, 20 bp, Artificial Sequence
  Description of Artificial Sequence: Synthetic oligonucleotide
  Target: LAMA2; (-) strand; PAM type: YTN; PAM sequence: CTG
ggactacaggcgtgtgccac

SEQ ID NO: 242736 - DNA, 20 bp, Artificial Sequence
  Description of Artificial Sequence: Synthetic oligonucleotide
  Target: LAMA2; (-) strand; PAM type: YTN; PAM sequence: CTC
aagtagctgggactacaggc

SEQ ID NO: 242737 - DNA, 20 bp, Artificial Sequence
  Description of Artificial Sequence: Synthetic oligonucleotide
  Target: LAMA2; (-) strand; PAM type: YTN; PAM sequence: CTC
tcaagtagctgggactacag

SEQ ID NO: 242738 - DNA, 20 bp, Artificial Sequence
  Description of Artificial Sequence: Synthetic oligonucleotide
  Target: LAMA2; (-) strand; PAM type: YTN; PAM sequence: CTC
agcctctcaagtagctggga

SEQ ID NO: 242739 - DNA, 20 bp, Artificial Sequence
  Description of Artificial Sequence: Synthetic oligonucleotide
  Target: LAMA2; (-) strand; PAM type: YTN; PAM sequence: CTG
cctcagcctctcaagtagct

SEQ ID NO: 242740 - DNA, 20 bp, Artificial Sequence
  Description of Artificial Sequence: Synthetic oligonucleotide
  Target: LAMA2; (-) strand; PAM type: YTN; PAM sequence: CTC
ctgcctcagcctctcaagta

SEQ ID NO: 242741 - DNA, 20 bp, Artificial Sequence
  Description of Artificial Sequence: Synthetic oligonucleotide
  Target: LAMA2; (-) strand; PAM type: YTN; PAM sequence: TTC
tcctgcctcagcctctcaag

SEQ ID NO: 242742 - DNA, 20 bp, Artificial Sequence
  Description of Artificial Sequence: Synthetic oligonucleotide
  Target: LAMA2; (-) strand; PAM type: YTN; PAM sequence: TTC
aagcgattctcctgcctcag

SEQ ID NO: 242743 - DNA, 20 bp, Artificial Sequence
  Description of Artificial Sequence: Synthetic oligonucleotide
  Target: LAMA2; (-) strand; PAM type: YTN; PAM sequence: CTG
gattcaagcgattctcctgc

SEQ ID NO: 242744 - DNA, 20 bp, Artificial Sequence
  Description of Artificial Sequence: Synthetic oligonucleotide
  Target: LAMA2; (-) strand; PAM type: YTN; PAM sequence: CTC
ctggattcaagcgattctcc

SEQ ID NO: 242745 - DNA, 20 bp, Artificial Sequence
  Description of Artificial Sequence: Synthetic oligonucleotide
  Target: LAMA2; (-) strand; PAM type: YTN; PAM sequence: CTG
cctcctggattcaagcgatt

SEQ ID NO: 242746 - DNA, 20 bp, Artificial Sequence
  Description of Artificial Sequence: Synthetic oligonucleotide
  Target: LAMA2; (-) strand; PAM type: YTN; PAM sequence: CTC
tgcctcctggattcaagcga

SEQ ID NO: 242747 - DNA, 20 bp, Artificial Sequence
  Description of Artificial Sequence: Synthetic oligonucleotide
  Target: LAMA2; (-) strand; PAM type: YTN; PAM sequence: CTG
caacctctgcctcctggatt

SEQ ID NO: 242748 - DNA, 20 bp, Artificial Sequence
  Description of Artificial Sequence: Synthetic oligonucleotide
  Target: LAMA2; (-) strand; PAM type: YTN; PAM sequence: CTC
actgcaacctctgcctcctg

SEQ ID NO: 242749 - DNA, 20 bp, Artificial Sequence
  Description of Artificial Sequence: Synthetic oligonucleotide
  Target: LAMA2; (-) strand; PAM type: YTN; PAM sequence: CTG
ctcactgcaacctctgcctc

SEQ ID NO: 242750 - DNA, 20 bp, Artificial Sequence
  Description of Artificial Sequence: Synthetic oligonucleotide
  Target: LAMA2; (-) strand; PAM type: YTN; PAM sequence: CTC
tgctcactgcaacctctgcc

SEQ ID NO: 242751 - DNA, 20 bp, Artificial Sequence
  Description of Artificial Sequence: Synthetic oligonucleotide
  Target: LAMA2; (-) strand; PAM type: YTN; PAM sequence: CTG
gagtgtagtggcatgatctc

SEQ ID NO: 242752 - DNA, 20 bp, Artificial Sequence
  Description of Artificial Sequence: Synthetic oligonucleotide
  Target: LAMA2; (-) strand; PAM type: YTN; PAM sequence: CTG
tcacccaggctggagtgtag

SEQ ID NO: 242753 - DNA, 20 bp, Artificial Sequence
  Description of Artificial Sequence: Synthetic oligonucleotide
  Target: LAMA2; (-) strand; PAM type: YTN; PAM sequence: CTC
tgtcacccaggctggagtgt

SEQ ID NO: 242754 - DNA, 20 bp, Artificial Sequence
  Description of Artificial Sequence: Synthetic oligonucleotide
  Target: LAMA2; (-) strand; PAM type: YTN; PAM sequence: TTG
ctctgtcacccaggctggag

SEQ ID NO: 242755 - DNA, 20 bp, Artificial Sequence
  Description of Artificial Sequence: Synthetic oligonucleotide
  Target: LAMA2; (-) strand; PAM type: YTN; PAM sequence: CTT
gctctgtcacccaggctgga

SEQ ID NO: 242756 - DNA, 20 bp, Artificial Sequence
  Description of Artificial Sequence: Synthetic oligonucleotide
  Target: LAMA2; (-) strand; PAM type: YTN; PAM sequence: TTG
agatggaatcccttgctctg

SEQ ID NO: 242757 - DNA, 20 bp, Artificial Sequence
  Description of Artificial Sequence: Synthetic oligonucleotide
  Target: LAMA2; (-) strand; PAM type: YTN; PAM sequence: TTT
gagatggaatcccttgctct

SEQ ID NO: 242758 - DNA, 20 bp, Artificial Sequence
  Description of Artificial Sequence: Synthetic oligonucleotide
  Target: LAMA2; (-) strand; PAM type: YTN; PAM sequence: TTT
tgagatggaatcccttgctc

SEQ ID NO: 242759 - DNA, 20 bp, Artificial Sequence
  Description of Artificial Sequence: Synthetic oligonucleotide
  Target: LAMA2; (-) strand; PAM type: YTN; PAM sequence: TTT
ttgagatggaatcccttgct

SEQ ID NO: 242760 - DNA, 20 bp, Artificial Sequence
  Description of Artificial Sequence: Synthetic oligonucleotide
  Target: LAMA2; (-) strand; PAM type: YTN; PAM sequence: TTT
tttgagatggaatcccttgc

SEQ ID NO: 242761 - DNA, 20 bp, Artificial Sequence
  Description of Artificial Sequence: Synthetic oligonucleotide
  Target: LAMA2; (-) strand; PAM type: YTN; PAM sequence: TTT
ttttgagatggaatcccttg

SEQ ID NO: 242762 - DNA, 20 bp, Artificial Sequence
  Description of Artificial Sequence: Synthetic oligonucleotide
  Target: LAMA2; (-) strand; PAM type: YTN; PAM sequence: TTT
tttttgagatggaatccctt

SEQ ID NO: 242763 - DNA, 20 bp, Artificial Sequence
  Description of Artificial Sequence: Synthetic oligonucleotide
  Target: LAMA2; (-) strand; PAM type: YTN; PAM sequence: TTT
ttttttgagatggaatccct

SEQ ID NO: 242764 - DNA, 20 bp, Artificial Sequence
  Description of Artificial Sequence: Synthetic oligonucleotide
  Target: LAMA2; (-) strand; PAM type: YTN; PAM sequence: TTT
tttttttgagatggaatccc

SEQ ID NO: 242765 - DNA, 20 bp, Artificial Sequence
  Description of Artificial Sequence: Synthetic oligonucleotide
  Target: LAMA2; (-) strand; PAM type: YTN; PAM sequence: CTT
ttttttttgagatggaatcc

SEQ ID NO: 242766 - DNA, 20 bp, Artificial Sequence
  Description of Artificial Sequence: Synthetic oligonucleotide
  Target: LAMA2; (-) strand; PAM type: YTN; PAM sequence: TTC
ttttttttttgagatggaat

SEQ ID NO: 242767 - DNA, 20 bp, Artificial Sequence
  Description of Artificial Sequence: Synthetic oligonucleotide
  Target: LAMA2; (-) strand; PAM type: YTN; PAM sequence: TTT
cttttttttttgagatggaa

SEQ ID NO: 242768 - DNA, 20 bp, Artificial Sequence
  Description of Artificial Sequence: Synthetic oligonucleotide
  Target: LAMA2; (-) strand; PAM type: YTN; PAM sequence: TTT
tcttttttttttgagatgga

SEQ ID NO: 242769 - DNA, 20 bp, Artificial Sequence
  Description of Artificial Sequence: Synthetic oligonucleotide
  Target: LAMA2; (-) strand; PAM type: YTN; PAM sequence: TTT
ttcttttttttttgagatgg

SEQ ID NO: 242770 - DNA, 20 bp, Artificial Sequence
  Description of Artificial Sequence: Synthetic oligonucleotide
  Target: LAMA2; (-) strand; PAM type: YTN; PAM sequence: TTT
tttcttttttttttgagatg

SEQ ID NO: 242771 - DNA, 20 bp, Artificial Sequence
  Description of Artificial Sequence: Synthetic oligonucleotide
  Target: LAMA2; (-) strand; PAM type: YTN; PAM sequence: CTT
ttttcttttttttttgagat

SEQ ID NO: 242772 - DNA, 20 bp, Artificial Sequence
  Description of Artificial Sequence: Synthetic oligonucleotide
  Target: LAMA2; (-) strand; PAM type: YTN; PAM sequence: TTC
ttttttcttttttttttgag

SEQ ID NO: 242773 - DNA, 20 bp, Artificial Sequence
  Description of Artificial Sequence: Synthetic oligonucleotide
  Target: LAMA2; (-) strand; PAM type: YTN; PAM sequence: TTT
cttttttcttttttttttga

SEQ ID NO: 242774 - DNA, 20 bp, Artificial Sequence
  Description of Artificial Sequence: Synthetic oligonucleotide
  Target: LAMA2; (-) strand; PAM type: YTN; PAM sequence: TTT
tcttttttcttttttttttg

SEQ ID NO: 242775 - DNA, 20 bp, Artificial Sequence
  Description of Artificial Sequence: Synthetic oligonucleotide
  Target: LAMA2; (-) strand; PAM type: YTN; PAM sequence: TTT
ttcttttttctttttttttt

SEQ ID NO: 242776 - DNA, 20 bp, Artificial Sequence
  Description of Artificial Sequence: Synthetic oligonucleotide
  Target: LAMA2; (-) strand; PAM type: YTN; PAM sequence: TTT
tttcttttttcttttttttt

SEQ ID NO: 242777 - DNA, 20 bp, Artificial Sequence
  Description of Artificial Sequence: Synthetic oligonucleotide
  Target: LAMA2; (-) strand; PAM type: YTN; PAM sequence: TTT
ttttcttttttctttttttt

SEQ ID NO: 242778 - DNA, 20 bp, Artificial Sequence
  Description of Artificial Sequence: Synthetic oligonucleotide
  Target: LAMA2; (-) strand; PAM type: YTN; PAM sequence: TTT
tttttcttttttcttttttt

SEQ ID NO: 242779 - DNA, 20 bp, Artificial Sequence
  Description of Artificial Sequence: Synthetic oligonucleotide
  Target: LAMA2; (-) strand; PAM type: YTN; PAM sequence: TTT
ttttttcttttttctttttt

SEQ ID NO: 242780 - DNA, 20 bp, Artificial Sequence
  Description of Artificial Sequence: Synthetic oligonucleotide
  Target: LAMA2; (-) strand; PAM type: YTN; PAM sequence: TTG
gatttttttttcttttttct

SEQ ID NO: 242781 - DNA, 20 bp, Artificial Sequence
  Description of Artificial Sequence: Synthetic oligonucleotide
  Target: LAMA2; (-) strand; PAM type: YTN; PAM sequence: TTT
ggatttttttttcttttttc

SEQ ID NO: 242782 - DNA, 20 bp, Artificial Sequence
  Description of Artificial Sequence: Synthetic oligonucleotide
  Target: LAMA2; (-) strand; PAM type: YTN; PAM sequence: CTT
tggatttttttttctttttt

SEQ ID NO: 242783 - DNA, 20 bp, Artificial Sequence
  Description of Artificial Sequence: Synthetic oligonucleotide
  Target: LAMA2; (-) strand; PAM type: YTN; PAM sequence: TTA
taactttggatttttttttc

SEQ ID NO: 242784 - DNA, 20 bp, Artificial Sequence
  Description of Artificial Sequence: Synthetic oligonucleotide
  Target: LAMA2; (-) strand; PAM type: YTN; PAM sequence: TTT
ataactttggattttttttt

SEQ ID NO: 242785 - DNA, 20 bp, Artificial Sequence
  Description of Artificial Sequence: Synthetic oligonucleotide
  Target: LAMA2; (-) strand; PAM type: YTN; PAM sequence: CTG
tgcatttataactttggatt

SEQ ID NO: 242786 - DNA, 20 bp, Artificial Sequence
  Description of Artificial Sequence: Synthetic oligonucleotide
  Target: LAMA2; (-) strand; PAM type: YTN; PAM sequence: TTC
ccagaagagaagtatgtaag

SEQ ID NO: 242787 - DNA, 20 bp, Artificial Sequence
  Description of Artificial Sequence: Synthetic oligonucleotide
  Target: LAMA2; (-) strand; PAM type: YTN; PAM sequence: TTA
cagaataaattcccagaaga

SEQ ID NO: 242788 - DNA, 20 bp, Artificial Sequence
  Description of Artificial Sequence: Synthetic oligonucleotide
  Target: LAMA2; (-) strand; PAM type: YTN; PAM sequence: CTT
acagaataaattcccagaag

SEQ ID NO: 242789 - DNA, 20 bp, Artificial Sequence
  Description of Artificial Sequence: Synthetic oligonucleotide
  Target: LAMA2; (-) strand; PAM type: YTN; PAM sequence: TTC
acacacgtgtgtgtgtgtgt

SEQ ID NO: 242790 - DNA, 20 bp, Artificial Sequence
  Description of Artificial Sequence: Synthetic oligonucleotide
  Target: LAMA2; (-) strand; PAM type: YTN; PAM sequence: TTT
cacacacgtgtgtgtgtgtg

SEQ ID NO: 242791 - DNA, 20 bp, Artificial Sequence
  Description of Artificial Sequence: Synthetic oligonucleotide
  Target: LAMA2; (-) strand; PAM type: YTN; PAM sequence: TTG
catatatgtcatttcacaca

SEQ ID NO: 242792 - DNA, 20 bp, Artificial Sequence
  Description of Artificial Sequence: Synthetic oligonucleotide
  Target: LAMA2; (-) strand; PAM type: YTN; PAM sequence: TTT
gcatatatgtcatttcacac

SEQ ID NO: 242793 - DNA, 20 bp, Artificial Sequence
  Description of Artificial Sequence: Synthetic oligonucleotide
  Target: LAMA2; (-) strand; PAM type: YTN; PAM sequence: CTT
tgcatatatgtcatttcaca

SEQ ID NO: 242794 - DNA, 20 bp, Artificial Sequence
  Description of Artificial Sequence: Synthetic oligonucleotide
  Target: LAMA2; (-) strand; PAM type: YTN; PAM sequence: CTG
gaatgaatcactttgcatat

SEQ ID NO: 242795 - DNA, 20 bp, Artificial Sequence
  Description of Artificial Sequence: Synthetic oligonucleotide
  Target: LAMA2; (-) strand; PAM type: YTN; PAM sequence: TTC
tggaatgaatcactttgcat

SEQ ID NO: 242796 - DNA, 20 bp, Artificial Sequence
  Description of Artificial Sequence: Synthetic oligonucleotide
  Target: LAMA2; (-) strand; PAM type: YTN; PAM sequence: TTT
ctggaatgaatcactttgca

SEQ ID NO: 242797 - DNA, 20 bp, Artificial Sequence
  Description of Artificial Sequence: Synthetic oligonucleotide
  Target: LAMA2; (-) strand; PAM type: YTN; PAM sequence: TTA
caaacatttctggaatgaat

SEQ ID NO: 242798 - DNA, 20 bp, Artificial Sequence
  Description of Artificial Sequence: Synthetic oligonucleotide
  Target: LAMA2; (-) strand; PAM type: YTN; PAM sequence: TTG
tggtgacaattacaaacatt

SEQ ID NO: 242799 - DNA, 20 bp, Artificial Sequence
  Description of Artificial Sequence: Synthetic oligonucleotide
  Target: LAMA2; (-) strand; PAM type: YTN; PAM sequence: TTT
gtggtgacaattacaaacat

SEQ ID NO: 242800 - DNA, 20 bp, Artificial Sequence
  Description of Artificial Sequence: Synthetic oligonucleotide
  Target: LAMA2; (-) strand; PAM type: YTN; PAM sequence: CTT
tgtggtgacaattacaaaca

SEQ ID NO: 242801 - DNA, 20 bp, Artificial Sequence
  Description of Artificial Sequence: Synthetic oligonucleotide
  Target: LAMA2; (-) strand; PAM type: YTN; PAM sequence: TTG
gcagctttgtggtgacaatt

SEQ ID NO: 242802 - DNA, 20 bp, Artificial Sequence
  Description of Artificial Sequence: Synthetic oligonucleotide
  Target: LAMA2; (-) strand; PAM type: YTN; PAM sequence: CTC
agtgattggcagctttgtgg

SEQ ID NO: 242803 - DNA, 20 bp, Artificial Sequence
  Description of Artificial Sequence: Synthetic oligonucleotide
  Target: LAMA2; (-) strand; PAM type: YTN; PAM sequence: CTC
tcagtgattggcagctttgt

SEQ ID NO: 242804 - DNA, 20 bp, Artificial Sequence
  Description of Artificial Sequence: Synthetic oligonucleotide
  Target: LAMA2; (-) strand; PAM type: YTN; PAM sequence: TTA
atcagtctctcagtgattgg

SEQ ID NO: 242805 - DNA, 20 bp, Artificial Sequence
  Description of Artificial Sequence: Synthetic oligonucleotide
  Target: LAMA2; (-) strand; PAM type: YTN; PAM sequence: TTT
aatcagtctctcagtgattg

SEQ ID NO: 242806 - DNA, 20 bp, Artificial Sequence
  Description of Artificial Sequence: Synthetic oligonucleotide
  Target: LAMA2; (-) strand; PAM type: YTN; PAM sequence: CTC
atttaatcagtctctcagtg

SEQ ID NO: 242807 - DNA, 20 bp, Artificial Sequence
  Description of Artificial Sequence: Synthetic oligonucleotide
  Target: LAMA2; (-) strand; PAM type: YTN; PAM sequence: TTG
atggcacgagtgtaccaaaa

SEQ ID NO: 242808 - DNA, 20 bp, Artificial Sequence
  Description of Artificial Sequence: Synthetic oligonucleotide
  Target: LAMA2; (-) strand; PAM type: YTN; PAM sequence: TTT
gatggcacgagtgtaccaaa

SEQ ID NO: 242809 - DNA, 20 bp, Artificial Sequence
  Description of Artificial Sequence: Synthetic oligonucleotide
  Target: LAMA2; (-) strand; PAM type: YTN; PAM sequence: TTA
tagtgtttgatggcacgagt

SEQ ID NO: 242810 - DNA, 20 bp, Artificial Sequence
  Description of Artificial Sequence: Synthetic oligonucleotide
  Target: LAMA2; (-) strand; PAM type: YTN; PAM sequence: TTT
atagtgtttgatggcacgag

SEQ ID NO: 242811 - DNA, 20 bp, Artificial Sequence
  Description of Artificial Sequence: Synthetic oligonucleotide
  Target: LAMA2; (-) strand; PAM type: YTN; PAM sequence: TTT
tatagtgtttgatggcacga

SEQ ID NO: 242812 - DNA, 20 bp, Artificial Sequence
  Description of Artificial Sequence: Synthetic oligonucleotide
  Target: LAMA2; (-) strand; PAM type: YTN; PAM sequence: TTA
ataattttatagtgtttgat

SEQ ID NO: 242813 - DNA, 20 bp, Artificial Sequence
  Description of Artificial Sequence: Synthetic oligonucleotide
  Target: LAMA2; (-) strand; PAM type: YTN; PAM sequence: TTT
aataattttatagtgtttga

SEQ ID NO: 242814 - DNA, 20 bp, Artificial Sequence
  Description of Artificial Sequence: Synthetic oligonucleotide
  Target: LAMA2; (-) strand; PAM type: YTN; PAM sequence: TTT
taataattttatagtgtttg

SEQ ID NO: 242815 - DNA, 20 bp, Artificial Sequence
  Description of Artificial Sequence: Synthetic oligonucleotide
  Target: LAMA2; (-) strand; PAM type: YTN; PAM sequence: TTT
ttaataattttatagtgttt

SEQ ID NO: 242816 - DNA, 20 bp, Artificial Sequence
  Description of Artificial Sequence: Synthetic oligonucleotide
  Target: LAMA2; (-) strand; PAM type: YTN; PAM sequence: TTT
tttaataattttatagtgtt

SEQ ID NO: 242817 - DNA, 20 bp, Artificial Sequence
  Description of Artificial Sequence: Synthetic oligonucleotide
  Target: LAMA2; (-) strand; PAM type: YTN; PAM sequence: CTT
ttttaataattttatagtgt

SEQ ID NO: 242818 - DNA, 20 bp, Artificial Sequence
  Description of Artificial Sequence: Synthetic oligonucleotide
  Target: LAMA2; (-) strand; PAM type: YTN; PAM sequence: TTC
cttttttaataattttatag

SEQ ID NO: 242819 - DNA, 20 bp, Artificial Sequence
  Description of Artificial Sequence: Synthetic oligonucleotide
  Target: LAMA2; (-) strand; PAM type: YTN; PAM sequence: CTT
ccttttttaataattttata

SEQ ID NO: 242820 - DNA, 20 bp, Artificial Sequence
  Description of Artificial Sequence: Synthetic oligonucleotide
  Target: LAMA2; (-) strand; PAM type: YTN; PAM sequence: TTC
cttccttttttaataatttt

SEQ ID NO: 242821 - DNA, 20 bp, Artificial Sequence
  Description of Artificial Sequence: Synthetic oligonucleotide
  Target: LAMA2; (-) strand; PAM type: YTN; PAM sequence: CTT
ccttccttttttaataattt

SEQ ID NO: 242822 - DNA, 20 bp, Artificial Sequence
  Description of Artificial Sequence: Synthetic oligonucleotide
  Target: LAMA2; (-) strand; PAM type: YTN; PAM sequence: TTA
tacaaaaatcttccttcctt

SEQ ID NO: 242823 - DNA, 20 bp, Artificial Sequence
  Description of Artificial Sequence: Synthetic oligonucleotide
  Target: LAMA2; (-) strand; PAM type: YTN; PAM sequence: TTA
ttatacaaaaatcttccttc

SEQ ID NO: 242824 - DNA, 20 bp, Artificial Sequence
  Description of Artificial Sequence: Synthetic oligonucleotide
  Target: LAMA2; (-) strand; PAM type: YTN; PAM sequence: TTC
catattattatacaaaaatc

SEQ ID NO: 242825 - DNA, 20 bp, Artificial Sequence
  Description of Artificial Sequence: Synthetic oligonucleotide
  Target: LAMA2; (-) strand; PAM type: YTN; PAM sequence: TTG
gatcattccatattattata

SEQ ID NO: 242826 - DNA, 20 bp, Artificial Sequence
  Description of Artificial Sequence: Synthetic oligonucleotide
  Target: LAMA2; (-) strand; PAM type: YTN; PAM sequence: CTT
ggatcattccatattattat

SEQ ID NO: 242827 - DNA, 20 bp, Artificial Sequence
  Description of Artificial Sequence: Synthetic oligonucleotide
  Target: LAMA2; (-) strand; PAM type: YTN; PAM sequence: TTA
aaatacaccttggatcattc

SEQ ID NO: 242828 - DNA, 20 bp, Artificial Sequence
  Description of Artificial Sequence: Synthetic oligonucleotide
  Target: LAMA2; (-) strand; PAM type: YTN; PAM sequence: TTT
aaaatacaccttggatcatt

SEQ ID NO: 242829 - DNA, 20 bp, Artificial Sequence
  Description of Artificial Sequence: Synthetic oligonucleotide
  Target: LAMA2; (-) strand; PAM type: YTN; PAM sequence: TTA
tttaaaatacaccttggatc

SEQ ID NO: 242830 - DNA, 20 bp, Artificial Sequence
  Description of Artificial Sequence: Synthetic oligonucleotide
  Target: LAMA2; (-) strand; PAM type: YTN; PAM sequence: TTT
atttaaaatacaccttggat

SEQ ID NO: 242831 - DNA, 20 bp, Artificial Sequence
  Description of Artificial Sequence: Synthetic oligonucleotide
  Target: LAMA2; (-) strand; PAM type: YTN; PAM sequence: TTA
atttatttaaaatacacctt

SEQ ID NO: 242832 - DNA, 20 bp, Artificial Sequence
  Description of Artificial Sequence: Synthetic oligonucleotide
  Target: LAMA2; (-) strand; PAM type: YTN; PAM sequence: TTT
aatttatttaaaatacacct

SEQ ID NO: 242833 - DNA, 20 bp, Artificial Sequence
  Description of Artificial Sequence: Synthetic oligonucleotide
  Target: LAMA2; (-) strand; PAM type: YTN; PAM sequence: CTA
agtttaatttatttaaaata

SEQ ID NO: 242834 - DNA, 20 bp, Artificial Sequence
  Description of Artificial Sequence: Synthetic oligonucleotide
  Target: LAMA2; (-) strand; PAM type: YTN; PAM sequence: CTC
ctaagtttaatttatttaaa

SEQ ID NO: 242835 - DNA, 20 bp, Artificial Sequence
  Description of Artificial Sequence: Synthetic oligonucleotide
  Target: LAMA2; (-) strand; PAM type: YTN; PAM sequence: CTG
gcctcctaagtttaatttat

SEQ ID NO: 242836 - DNA, 20 bp, Artificial Sequence
  Description of Artificial Sequence: Synthetic oligonucleotide
  Target: LAMA2; (-) strand; PAM type: YTN; PAM sequence: TTA
caggcgtgagccagtgcacc

SEQ ID NO: 242837 - DNA, 20 bp, Artificial Sequence
  Description of Artificial Sequence: Synthetic oligonucleotide
  Target: LAMA2; (-) strand; PAM type: YTN; PAM sequence: TTG
ggattacaggcgtgagccag

SEQ ID NO: 242838 - DNA, 20 bp, Artificial Sequence
  Description of Artificial Sequence: Synthetic oligonucleotide
  Target: LAMA2; (-) strand; PAM type: YTN; PAM sequence: CTC
aaccaccaaaagtgttggga

SEQ ID NO: 242839 - DNA, 20 bp, Artificial Sequence
  Description of Artificial Sequence: Synthetic oligonucleotide
  Target: LAMA2; (-) strand; PAM type: YTN; PAM sequence: CTG
tctcaaccaccaaaagtgtt

SEQ ID NO: 242840 - DNA, 20 bp, Artificial Sequence
  Description of Artificial Sequence: Synthetic oligonucleotide
  Target: LAMA2; (-) strand; PAM type: YTN; PAM sequence: CTG
cctgtctcaaccaccaaaag

SEQ ID NO: 242841 - DNA, 20 bp, Artificial Sequence
  Description of Artificial Sequence: Synthetic oligonucleotide
  Target: LAMA2; (-) strand; PAM type: YTN; PAM sequence: CTC
cagtgatctgcctgtctcaa

SEQ ID NO: 242842 - DNA, 20 bp, Artificial Sequence
  Description of Artificial Sequence: Synthetic oligonucleotide
  Target: LAMA2; (-) strand; PAM type: YTN; PAM sequence: CTG
gtctccagtgatctgcctgt

SEQ ID NO: 242843 - DNA, 20 bp, Artificial Sequence
  Description of Artificial Sequence: Synthetic oligonucleotide
  Target: LAMA2; (-) strand; PAM type: YTN; PAM sequence: CTC
ctggtctccagtgatctgcc

SEQ ID NO: 242844 - DNA, 20 bp, Artificial Sequence
  Description of Artificial Sequence: Synthetic oligonucleotide
  Target: LAMA2; (-) strand; PAM type: YTN; PAM sequence: TTG
aactcctggtctccagtgat

SEQ ID NO: 242845 - DNA, 20 bp, Artificial Sequence
  Description of Artificial Sequence: Synthetic oligonucleotide
  Target: LAMA2; (-) strand; PAM type: YTN; PAM sequence: CTT
gaactcctggtctccagtga

SEQ ID NO: 242846 - DNA, 20 bp, Artificial Sequence
  Description of Artificial Sequence: Synthetic oligonucleotide
  Target: LAMA2; (-) strand; PAM type: YTN; PAM sequence: CTG
gtcttgaactcctggtctcc

SEQ ID NO: 242847 - DNA, 20 bp, Artificial Sequence
  Description of Artificial Sequence: Synthetic oligonucleotide
  Target: LAMA2; (-) strand; PAM type: YTN; PAM sequence: TTG
gccaggctggtcttgaactc

SEQ ID NO: 242848 - DNA, 20 bp, Artificial Sequence
  Description of Artificial Sequence: Synthetic oligonucleotide
  Target: LAMA2; (-) strand; PAM type: YTN; PAM sequence: TTC
accatgttggccaggctggt

SEQ ID NO: 242849 - DNA, 20 bp, Artificial Sequence
  Description of Artificial Sequence: Synthetic oligonucleotide
  Target: LAMA2; (-) strand; PAM type: YTN; PAM sequence: TTT
caccatgttggccaggctgg

SEQ ID NO: 242850 - DNA, 20 bp, Artificial Sequence
  Description of Artificial Sequence: Synthetic oligonucleotide
  Target: LAMA2; (-) strand; PAM type: YTN; PAM sequence: TTA
gtagagtggggtttcaccat

SEQ ID NO: 242851 - DNA, 20 bp, Artificial Sequence
  Description of Artificial Sequence: Synthetic oligonucleotide
  Target: LAMA2; (-) strand; PAM type: YTN; PAM sequence: TTT
agtagagtggggtttcacca

SEQ ID NO: 242852 - DNA, 20 bp, Artificial Sequence
  Description of Artificial Sequence: Synthetic oligonucleotide
  Target: LAMA2; (-) strand; PAM type: YTN; PAM sequence: TTT
tagtagagtggggtttcacc

SEQ ID NO: 242853 - DNA, 20 bp, Artificial Sequence
  Description of Artificial Sequence: Synthetic oligonucleotide
  Target: LAMA2; (-) strand; PAM type: YTN; PAM sequence: TTT
ttagtagagtggggtttcac

SEQ ID NO: 242854 - DNA, 20 bp, Artificial Sequence
  Description of Artificial Sequence: Synthetic oligonucleotide
  Target: LAMA2; (-) strand; PAM type: YTN; PAM sequence: TTG
tatttttagtagagtggggt

SEQ ID NO: 242855 - DNA, 20 bp, Artificial Sequence
  Description of Artificial Sequence: Synthetic oligonucleotide
  Target: LAMA2; (-) strand; PAM type: YTN; PAM sequence: TTT
gtatttttagtagagtgggg

SEQ ID NO: 242856 - DNA, 20 bp, Artificial Sequence
  Description of Artificial Sequence: Synthetic oligonucleotide
  Target: LAMA2; (-) strand; PAM type: YTN; PAM sequence: TTT
tgtatttttagtagagtggg

SEQ ID NO: 242857 - DNA, 20 bp, Artificial Sequence
  Description of Artificial Sequence: Synthetic oligonucleotide
  Target: LAMA2; (-) strand; PAM type: YTN; PAM sequence: TTT
ttgtatttttagtagagtgg

SEQ ID NO: 242858 - DNA, 20 bp, Artificial Sequence
  Description of Artificial Sequence: Synthetic oligonucleotide
  Target: LAMA2; (-) strand; PAM type: YTN; PAM sequence: CTA
atttttgtatttttagtaga

SEQ ID NO: 242859 - DNA, 20 bp, Artificial Sequence
  Description of Artificial Sequence: Synthetic oligonucleotide
  Target: LAMA2; (-) strand; PAM type: YTN; PAM sequence: CTA
catgcacacaccaccacacc

SEQ ID NO: 242860 - DNA, 20 bp, Artificial Sequence
  Description of Artificial Sequence: Synthetic oligonucleotide
  Target: LAMA2; (-) strand; PAM type: YTN; PAM sequence: CTG
gtagtggggactacatgcac

SEQ ID NO: 242861 - DNA, 20 bp, Artificial Sequence
  Description of Artificial Sequence: Synthetic oligonucleotide
  Target: LAMA2; (-) strand; PAM type: YTN; PAM sequence: CTC
cctggtagtggggactacat

SEQ ID NO: 242862 - DNA, 20 bp, Artificial Sequence
  Description of Artificial Sequence: Synthetic oligonucleotide
  Target: LAMA2; (-) strand; PAM type: YTN; PAM sequence: CTC
agcctccctggtagtgggga

SEQ ID NO: 242863 - DNA, 20 bp, Artificial Sequence
  Description of Artificial Sequence: Synthetic oligonucleotide
  Target: LAMA2; (-) strand; PAM type: YTN; PAM sequence: CTC
atgcctcagcctccctggta

SEQ ID NO: 242864 - DNA, 20 bp, Artificial Sequence
  Description of Artificial Sequence: Synthetic oligonucleotide
  Target: LAMA2; (-) strand; PAM type: YTN; PAM sequence: TTC
tcatgcctcagcctccctgg

SEQ ID NO: 242865 - DNA, 20 bp, Artificial Sequence
  Description of Artificial Sequence: Synthetic oligonucleotide
  Target: LAMA2; (-) strand; PAM type: YTN; PAM sequence: TTC
aggtgattctcatgcctcag

SEQ ID NO: 242866 - DNA, 20 bp, Artificial Sequence
  Description of Artificial Sequence: Synthetic oligonucleotide
  Target: LAMA2; (-) strand; PAM type: YTN; PAM sequence: CTC
cggagttcaggtgattctca

SEQ ID NO: 242867 - DNA, 20 bp, Artificial Sequence
  Description of Artificial Sequence: Synthetic oligonucleotide
  Target: LAMA2; (-) strand; PAM type: YTN; PAM sequence: CTC
cgcctccggagttcaggtga

SEQ ID NO: 242868 - DNA, 20 bp, Artificial Sequence
  Description of Artificial Sequence: Synthetic oligonucleotide
  Target: LAMA2; (-) strand; PAM type: YTN; PAM sequence: CTG
caatctccgcctccggagtt

SEQ ID NO: 242869 - DNA, 20 bp, Artificial Sequence
  Description of Artificial Sequence: Synthetic oligonucleotide
  Target: LAMA2; (-) strand; PAM type: YTN; PAM sequence: CTC
actgcaatctccgcctccgg

SEQ ID NO: 242870 - DNA, 20 bp, Artificial Sequence
  Description of Artificial Sequence: Synthetic oligonucleotide
  Target: LAMA2; (-) strand; PAM type: YTN; PAM sequence: TTC
agctcactgcaatctccgcc

SEQ ID NO: 242871 - DNA, 20 bp, Artificial Sequence
  Description of Artificial Sequence: Synthetic oligonucleotide
  Target: LAMA2; (-) strand; PAM type: YTN; PAM sequence: TTT
cagctcactgcaatctccgc

SEQ ID NO: 242872 - DNA, 20 bp, Artificial Sequence
  Description of Artificial Sequence: Synthetic oligonucleotide
  Target: LAMA2; (-) strand; PAM type: YTN; PAM sequence: CTG
gagtgcagtggcacaatttc

SEQ ID NO: 242873 - DNA, 20 bp, Artificial Sequence
  Description of Artificial Sequence: Synthetic oligonucleotide
  Target: LAMA2; (-) strand; PAM type: YTN; PAM sequence: CTG
tcacccaggctggagtgcag

SEQ ID NO: 242874 - DNA, 20 bp, Artificial Sequence
  Description of Artificial Sequence: Synthetic oligonucleotide
  Target: LAMA2; (-) strand; PAM type: YTN; PAM sequence: CTC
agtctgtcacccaggctgga

SEQ ID NO: 242875 - DNA, 20 bp, Artificial Sequence
  Description of Artificial Sequence: Synthetic oligonucleotide
  Target: LAMA2; (-) strand; PAM type: YTN; PAM sequence: TTG
agatggagtctcagtctgtc

SEQ ID NO: 242876 - DNA, 20 bp, Artificial Sequence
  Description of Artificial Sequence: Synthetic oligonucleotide
  Target: LAMA2; (-) strand; PAM type: YTN; PAM sequence: TTT
gagatggagtctcagtctgt

SEQ ID NO: 242877 - DNA, 20 bp, Artificial Sequence
  Description of Artificial Sequence: Synthetic oligonucleotide
  Target: LAMA2; (-) strand; PAM type: YTN; PAM sequence: TTT
tgagatggagtctcagtctg

SEQ ID NO: 242878 - DNA, 20 bp, Artificial Sequence
  Description of Artificial Sequence: Synthetic oligonucleotide
  Target: LAMA2; (-) strand; PAM type: YTN; PAM sequence: TTT
ttgagatggagtctcagtct

SEQ ID NO: 242879 - DNA, 20 bp, Artificial Sequence
  Description of Artificial Sequence: Synthetic oligonucleotide
  Target: LAMA2; (-) strand; PAM type: YTN; PAM sequence: TTT
tttgagatggagtctcagtc

SEQ ID NO: 242880 - DNA, 20 bp, Artificial Sequence
  Description of Artificial Sequence: Synthetic oligonucleotide
  Target: LAMA2; (-) strand; PAM type: YTN; PAM sequence: TTT
ttttgagatggagtctcagt

SEQ ID NO: 242881 - DNA, 20 bp, Artificial Sequence
  Description of Artificial Sequence: Synthetic oligonucleotide
  Target: LAMA2; (-) strand; PAM type: YTN; PAM sequence: TTT
tttttgagatggagtctcag

SEQ ID NO: 242882 - DNA, 20 bp, Artificial Sequence
  Description of Artificial Sequence: Synthetic oligonucleotide
  Target: LAMA2; (-) strand; PAM type: YTN; PAM sequence: TTT
ttttttgagatggagtctca

SEQ ID NO: 242883 - DNA, 20 bp, Artificial Sequence
  Description of Artificial Sequence: Synthetic oligonucleotide
  Target: LAMA2; (-) strand; PAM type: YTN; PAM sequence: TTT
tttttttgagatggagtctc

SEQ ID NO: 242884 - DNA, 20 bp, Artificial Sequence
  Description of Artificial Sequence: Synthetic oligonucleotide
  Target: LAMA2; (-) strand; PAM type: YTN; PAM sequence: CTT
ttttttttgagatggagtct

SEQ ID NO: 242885 - DNA, 20 bp, Artificial Sequence
  Description of Artificial Sequence: Synthetic oligonucleotide
  Target: LAMA2; (-) strand; PAM type: YTN; PAM sequence: TTC
ttttttttttgagatggagt

SEQ ID NO: 242886 - DNA, 20 bp, Artificial Sequence
  Description of Artificial Sequence: Synthetic oligonucleotide
  Target: LAMA2; (-) strand; PAM type: YTN; PAM sequence: TTT
cttttttttttgagatggag

SEQ ID NO: 242887 - DNA, 20 bp, Artificial Sequence
  Description of Artificial Sequence: Synthetic oligonucleotide
  Target: LAMA2; (-) strand; PAM type: YTN; PAM sequence: CTT
tcttttttttttgagatgga

SEQ ID NO: 242888 - DNA, 20 bp, Artificial Sequence
  Description of Artificial Sequence: Synthetic oligonucleotide
  Target: LAMA2; (-) strand; PAM type: YTN; PAM sequence: TTC
ctttcttttttttttgagat

SEQ ID NO: 242889 - DNA, 20 bp, Artificial Sequence
  Description of Artificial Sequence: Synthetic oligonucleotide
  Target: LAMA2; (-) strand; PAM type: YTN; PAM sequence: TTT
cctttcttttttttttgaga

SEQ ID NO: 242890 - DNA, 20 bp, Artificial Sequence
  Description of Artificial Sequence: Synthetic oligonucleotide
  Target: LAMA2; (-) strand; PAM type: YTN; PAM sequence: TTT
tcctttcttttttttttgag

SEQ ID NO: 242891 - DNA, 20 bp, Artificial Sequence
  Description of Artificial Sequence: Synthetic oligonucleotide
  Target: LAMA2; (-) strand; PAM type: YTN; PAM sequence: CTT
ttcctttcttttttttttga

SEQ ID NO: 242892 - DNA, 20 bp, Artificial Sequence
  Description of Artificial Sequence: Synthetic oligonucleotide
  Target: LAMA2; (-) strand; PAM type: YTN; PAM sequence: TTC
ttttcctttctttttttttt

SEQ ID NO: 242893 - DNA, 20 bp, Artificial Sequence
  Description of Artificial Sequence: Synthetic oligonucleotide
  Target: LAMA2; (-) strand; PAM type: YTN; PAM sequence: TTT
cttttcctttcttttttttt

SEQ ID NO: 242894 - DNA, 20 bp, Artificial Sequence
  Description of Artificial Sequence: Synthetic oligonucleotide
  Target: LAMA2; (-) strand; PAM type: YTN; PAM sequence: TTT
tcttttcctttctttttttt

SEQ ID NO: 242895 - DNA, 20 bp, Artificial Sequence
  Description of Artificial Sequence: Synthetic oligonucleotide
  Target: LAMA2; (-) strand; PAM type: YTN; PAM sequence: TTT
ttcttttcctttcttttttt

SEQ ID NO: 242896 - DNA, 20 bp, Artificial Sequence
  Description of Artificial Sequence: Synthetic oligonucleotide
  Target: LAMA2; (-) strand; PAM type: YTN; PAM sequence: TTT
tttcttttcctttctttttt

SEQ ID NO: 242897 - DNA, 20 bp, Artificial Sequence
  Description of Artificial Sequence: Synthetic oligonucleotide
  Target: LAMA2; (-) strand; PAM type: YTN; PAM sequence: TTT
ttttcttttcctttcttttt

SEQ ID NO: 242898 - DNA, 20 bp, Artificial Sequence
  Description of Artificial Sequence: Synthetic oligonucleotide
  Target: LAMA2; (-) strand; PAM type: YTN; PAM sequence: CTT
tttttcttttcctttctttt

SEQ ID NO: 242899 - DNA, 20 bp, Artificial Sequence
  Description of Artificial Sequence: Synthetic oligonucleotide
  Target: LAMA2; (-) strand; PAM type: YTN; PAM sequence: TTC
ctttttttcttttcctttct

SEQ ID NO: 242900 - DNA, 20 bp, Artificial Sequence
  Description of Artificial Sequence: Synthetic oligonucleotide
  Target: LAMA2; (-) strand; PAM type: YTN; PAM sequence: CTT
cctttttttcttttcctttc

SEQ ID NO: 242901 - DNA, 20 bp, Artificial Sequence
  Description of Artificial Sequence: Synthetic oligonucleotide
  Target: LAMA2; (-) strand; PAM type: YTN; PAM sequence: TTC
ccttcctttttttcttttcc

SEQ ID NO: 242902 - DNA, 20 bp, Artificial Sequence
  Description of Artificial Sequence: Synthetic oligonucleotide
  Target: LAMA2; (-) strand; PAM type: YTN; PAM sequence: CTT
cccttcctttttttcttttc

SEQ ID NO: 242903 - DNA, 20 bp, Artificial Sequence
  Description of Artificial Sequence: Synthetic oligonucleotide
  Target: LAMA2; (-) strand; PAM type: YTN; PAM sequence: TTC
ccttcccttcctttttttct

SEQ ID NO: 242904 - DNA, 20 bp, Artificial Sequence
  Description of Artificial Sequence: Synthetic oligonucleotide
  Target: LAMA2; (-) strand; PAM type: YTN; PAM sequence: CTT
cccttcccttcctttttttc

SEQ ID NO: 242905 - DNA, 20 bp, Artificial Sequence
  Description of Artificial Sequence: Synthetic oligonucleotide
  Target: LAMA2; (-) strand; PAM type: YTN; PAM sequence: TTC
ccttcccttcccttcctttt

SEQ ID NO: 242906 - DNA, 20 bp, Artificial Sequence
  Description of Artificial Sequence: Synthetic oligonucleotide
  Target: LAMA2; (-) strand; PAM type: YTN; PAM sequence: TTT
cccttcccttcccttccttt

SEQ ID NO: 242907 - DNA, 20 bp, Artificial Sequence
  Description of Artificial Sequence: Synthetic oligonucleotide
  Target: LAMA2; (-) strand; PAM type: YTN; PAM sequence: CTT
tcccttcccttcccttcctt

SEQ ID NO: 242908 - DNA, 20 bp, Artificial Sequence
  Description of Artificial Sequence: Synthetic oligonucleotide
  Target: LAMA2; (-) strand; PAM type: YTN; PAM sequence: TTC
ctttcccttcccttcccttc

SEQ ID NO: 242909 - DNA, 20 bp, Artificial Sequence
  Description of Artificial Sequence: Synthetic oligonucleotide
  Target: LAMA2; (-) strand; PAM type: YTN; PAM sequence: TTT
cctttcccttcccttccctt

SEQ ID NO: 242910 - DNA, 20 bp, Artificial Sequence
  Description of Artificial Sequence: Synthetic oligonucleotide
  Target: LAMA2; (-) strand; PAM type: YTN; PAM sequence: CTT
tcctttcccttcccttccct

SEQ ID NO: 242911 - DNA, 20 bp, Artificial Sequence
  Description of Artificial Sequence: Synthetic oligonucleotide
  Target: LAMA2; (-) strand; PAM type: YTN; PAM sequence: TTC
ctttcctttcccttcccttc

SEQ ID NO: 242912 - DNA, 20 bp, Artificial Sequence
  Description of Artificial Sequence: Synthetic oligonucleotide
  Target: LAMA2; (-) strand; PAM type: YTN; PAM sequence: TTT
cctttcctttcccttccctt

SEQ ID NO: 242913 - DNA, 20 bp, Artificial Sequence
  Description of Artificial Sequence: Synthetic oligonucleotide
  Target: LAMA2; (-) strand; PAM type: YTN; PAM sequence: CTT
tcctttcctttcccttccct

SEQ ID NO: 242914 - DNA, 20 bp, Artificial Sequence
  Description of Artificial Sequence: Synthetic oligonucleotide
  Target: LAMA2; (-) strand; PAM type: YTN; PAM sequence: CTC
ctttcctttcctttcccttc

SEQ ID NO: 242915 - DNA, 20 bp, Artificial Sequence
  Description of Artificial Sequence: Synthetic oligonucleotide
  Target: LAMA2; (-) strand; PAM type: YTN; PAM sequence: TTC
ctcctttcctttcctttccc

SEQ ID NO: 242916 - DNA, 20 bp, Artificial Sequence
  Description of Artificial Sequence: Synthetic oligonucleotide
  Target: LAMA2; (-) strand; PAM type: YTN; PAM sequence: CTT
cctcctttcctttcctttcc

SEQ ID NO: 242917 - DNA, 20 bp, Artificial Sequence
  Description of Artificial Sequence: Synthetic oligonucleotide
  Target: LAMA2; (-) strand; PAM type: YTN; PAM sequence: TTC
cttcctcctttcctttcctt

SEQ ID NO: 242918 - DNA, 20 bp, Artificial Sequence
  Description of Artificial Sequence: Synthetic oligonucleotide
  Target: LAMA2; (-) strand; PAM type: YTN; PAM sequence: CTT
ccttcctcctttcctttcct

SEQ ID NO: 242919 - DNA, 20 bp, Artificial Sequence
  Description of Artificial Sequence: Synthetic oligonucleotide
  Target: LAMA2; (-) strand; PAM type: YTN; PAM sequence: CTC
ccttccttcctcctttcctt

SEQ ID NO: 242920 - DNA, 20 bp, Artificial Sequence
  Description of Artificial Sequence: Synthetic oligonucleotide
  Target: LAMA2; (-) strand; PAM type: YTN; PAM sequence: CTC
cctcccttccttcctccttt

SEQ ID NO: 242921 - DNA, 20 bp, Artificial Sequence
  Description of Artificial Sequence: Synthetic oligonucleotide
  Target: LAMA2; (-) strand; PAM type: YTN; PAM sequence: CTC
cctccctcccttccttcctc

SEQ ID NO: 242922 - DNA, 20 bp, Artificial Sequence
  Description of Artificial Sequence: Synthetic oligonucleotide
  Target: LAMA2; (-) strand; PAM type: YTN; PAM sequence: CTC
cctccctccctcccttcctt

SEQ ID NO: 242923 - DNA, 20 bp, Artificial Sequence
  Description of Artificial Sequence: Synthetic oligonucleotide
  Target: LAMA2; (-) strand; PAM type: YTN; PAM sequence: TTC
ctccctccctccctcccttc

SEQ ID NO: 242924 - DNA, 20 bp, Artificial Sequence
  Description of Artificial Sequence: Synthetic oligonucleotide
  Target: LAMA2; (-) strand; PAM type: YTN; PAM sequence: CTT
cctccctccctccctccctt

SEQ ID NO: 242925 - DNA, 20 bp, Artificial Sequence
  Description of Artificial Sequence: Synthetic oligonucleotide
  Target: LAMA2; (-) strand; PAM type: YTN; PAM sequence: TTC
cttcctccctccctccctcc

SEQ ID NO: 242926 - DNA, 20 bp, Artificial Sequence
  Description of Artificial Sequence: Synthetic oligonucleotide
  Target: LAMA2; (-) strand; PAM type: YTN; PAM sequence: CTT
ccttcctccctccctccctc

SEQ ID NO: 242927 - DNA, 20 bp, Artificial Sequence
  Description of Artificial Sequence: Synthetic oligonucleotide
  Target: LAMA2; (-) strand; PAM type: YTN; PAM sequence: TTC
cttccttcctccctccctcc

SEQ ID NO: 242928 - DNA, 20 bp, Artificial Sequence
  Description of Artificial Sequence: Synthetic oligonucleotide
  Target: LAMA2; (-) strand; PAM type: YTN; PAM sequence: CTT
ccttccttcctccctccctc

SEQ ID NO: 242929 - DNA, 20 bp, Artificial Sequence
  Description of Artificial Sequence: Synthetic oligonucleotide
  Target: LAMA2; (-) strand; PAM type: YTN; PAM sequence: TTC
cttccttccttcctccctcc

SEQ ID NO: 242930 - DNA, 20 bp, Artificial Sequence
  Description of Artificial Sequence: Synthetic oligonucleotide
  Target: LAMA2; (-) strand; PAM type: YTN; PAM sequence: CTT
ccttccttccttcctccctc

SEQ ID NO: 242931 - DNA, 20 bp, Artificial Sequence
  Description of Artificial Sequence: Synthetic oligonucleotide
  Target: LAMA2; (-) strand; PAM type: YTN; PAM sequence: TTC
cttccttccttccttcctcc

SEQ ID NO: 242932 - DNA, 20 bp, Artificial Sequence
  Description of Artificial Sequence: Synthetic oligonucleotide
  Target: LAMA2; (-) strand; PAM type: YTN; PAM sequence: CTT
ccttccttccttccttcctc

SEQ ID NO: 242933 - DNA, 20 bp, Artificial Sequence
  Description of Artificial Sequence: Synthetic oligonucleotide
  Target: LAMA2; (-) strand; PAM type: YTN; PAM sequence: TTC
cttccttccttccttccttc

SEQ ID NO: 242934 - DNA, 20 bp, Artificial Sequence
  Description of Artificial Sequence: Synthetic oligonucleotide
  Target: LAMA2; (-) strand; PAM type: YTN; PAM sequence: CTT
ccttccttccttccttcctt

SEQ ID NO: 242935 - DNA, 20 bp, Artificial Sequence
  Description of Artificial Sequence: Synthetic oligonucleotide
  Target: LAMA2; (-) strand; PAM type: YTN; PAM sequence: TTC
cttccttccttccttccttc

SEQ ID NO: 242936 - DNA, 20 bp, Artificial Sequence
  Description of Artificial Sequence: Synthetic oligonucleotide
  Target: LAMA2; (-) strand; PAM type: YTN; PAM sequence: CTT
ccttccttccttccttcctt

SEQ ID NO: 242937 - DNA, 20 bp, Artificial Sequence
  Description of Artificial Sequence: Synthetic oligonucleotide
  Target: LAMA2; (-) strand; PAM type: YTN; PAM sequence: TTC
cttccttccttccttccttc

SEQ ID NO: 242938 - DNA, 20 bp, Artificial Sequence
  Description of Artificial Sequence: Synthetic oligonucleotide
  Target: LAMA2; (-) strand; PAM type: YTN; PAM sequence: CTT
ccttccttccttccttcctt

SEQ ID NO: 242939 - DNA, 20 bp, Artificial Sequence
  Description of Artificial Sequence: Synthetic oligonucleotide
  Target: LAMA2; (-) strand; PAM type: YTN; PAM sequence: TTC
cttccttccttccttccttc

SEQ ID NO: 242940 - DNA, 20 bp, Artificial Sequence
  Description of Artificial Sequence: Synthetic oligonucleotide
  Target: LAMA2; (-) strand; PAM type: YTN; PAM sequence: CTT
ccttccttccttccttcctt

SEQ ID NO: 242941 - DNA, 20 bp, Artificial Sequence
  Description of Artificial Sequence: Synthetic oligonucleotide
  Target: LAMA2; (-) strand; PAM type: YTN; PAM sequence: TTC
cttccttccttccttccttc

SEQ ID NO: 242942 - DNA, 20 bp, Artificial Sequence
  Description of Artificial Sequence: Synthetic oligonucleotide
  Target: LAMA2; (-) strand; PAM type: YTN; PAM sequence: CTT
ccttccttccttccttcctt

SEQ ID NO: 242943 - DNA, 20 bp, Artificial Sequence
  Description of Artificial Sequence: Synthetic oligonucleotide
  Target: LAMA2; (-) strand; PAM type: YTN; PAM sequence: TTC
cttccttccttccttccttc

SEQ ID NO: 242944 - DNA, 20 bp, Artificial Sequence
  Description of Artificial Sequence: Synthetic oligonucleotide
  Target: LAMA2; (-) strand; PAM type: YTN; PAM sequence: CTT
ccttccttccttccttcctt

SEQ ID NO: 242945 - DNA, 20 bp, Artificial Sequence
  Description of Artificial Sequence: Synthetic oligonucleotide
  Target: LAMA2; (-) strand; PAM type: YTN; PAM sequence: TTC
cttccttccttccttccttc

SEQ ID NO: 242946 - DNA, 20 bp, Artificial Sequence
  Description of Artificial Sequence: Synthetic oligonucleotide
  Target: LAMA2; (-) strand; PAM type: YTN; PAM sequence: CTT
ccttccttccttccttcctt

SEQ ID NO: 242947 - DNA, 20 bp, Artificial Sequence
  Description of Artificial Sequence: Synthetic oligonucleotide
  Target: LAMA2; (-) strand; PAM type: YTN; PAM sequence: TTC
cttccttccttccttccttc

SEQ ID NO: 242948 - DNA, 20 bp, Artificial Sequence
  Description of Artificial Sequence: Synthetic oligonucleotide
  Target: LAMA2; (-) strand; PAM type: YTN; PAM sequence: CTT
ccttccttccttccttcctt

SEQ ID NO: 242949 - DNA, 20 bp, Artificial Sequence
  Description of Artificial Sequence: Synthetic oligonucleotide
  Target: LAMA2; (-) strand; PAM type: YTN; PAM sequence: TTC
cttccttccttccttccttc

SEQ ID NO: 242950 - DNA, 20 bp, Artificial Sequence
  Description of Artificial Sequence: Synthetic oligonucleotide
  Target: LAMA2; (-) strand; PAM type: YTN; PAM sequence: CTT
ccttccttccttccttcctt

SEQ ID NO: 242951 - DNA, 20 bp, Artificial Sequence
  Description of Artificial Sequence: Synthetic oligonucleotide
  Target: LAMA2; (-) strand; PAM type: YTN; PAM sequence: TTC
cttccttccttccttccttc

SEQ ID NO: 242952 - DNA, 20 bp, Artificial Sequence
  Description of Artificial Sequence: Synthetic oligonucleotide
  Target: LAMA2; (-) strand; PAM type: YTN; PAM sequence: TTT
ccttccttccttccttcctt

SEQ ID NO: 242953 - DNA, 20 bp, Artificial Sequence
  Description of Artificial Sequence: Synthetic oligonucleotide
  Target: LAMA2; (-) strand; PAM type: YTN; PAM sequence: TTA
atttccttccttccttcctt

SEQ ID NO: 242954 - DNA, 20 bp, Artificial Sequence
  Description of Artificial Sequence: Synthetic oligonucleotide
  Target: LAMA2; (-) strand; PAM type: YTN; PAM sequence: TTT
aatttccttccttccttcct

SEQ ID NO: 242955 - DNA, 20 bp, Artificial Sequence
  Description of Artificial Sequence: Synthetic oligonucleotide
  Target: LAMA2; (-) strand; PAM type: YTN; PAM sequence: CTA
ggtttaatttccttccttcc

SEQ ID NO: 242956 - DNA, 20 bp, Artificial Sequence
  Description of Artificial Sequence: Synthetic oligonucleotide
  Target: LAMA2; (-) strand; PAM type: YTN; PAM sequence: TTC
ctaggtttaatttccttcct

SEQ ID NO: 242957 - DNA, 20 bp, Artificial Sequence
  Description of Artificial Sequence: Synthetic oligonucleotide
  Target: LAMA2; (-) strand; PAM type: YTN; PAM sequence: TTG
ttcctaggtttaatttcctt

SEQ ID NO: 242958 - DNA, 20 bp, Artificial Sequence
  Description of Artificial Sequence: Synthetic oligonucleotide
  Target: LAMA2; (-) strand; PAM type: YTN; PAM sequence: TTT
gttcctaggtttaatttcct

SEQ ID NO: 242959 - DNA, 20 bp, Artificial Sequence
  Description of Artificial Sequence: Synthetic oligonucleotide
  Target: LAMA2; (-) strand; PAM type: YTN; PAM sequence: CTT
tgttcctaggtttaatttcc

SEQ ID NO: 242960 - DNA, 20 bp, Artificial Sequence
  Description of Artificial Sequence: Synthetic oligonucleotide
  Target: LAMA2; (-) strand; PAM type: YTN; PAM sequence: CTA
ctttgttcctaggtttaatt

SEQ ID NO: 242961 - DNA, 20 bp, Artificial Sequence
  Description of Artificial Sequence: Synthetic oligonucleotide
  Target: LAMA2; (-) strand; PAM type: YTN; PAM sequence: TTA
gatagataaactactttgtt

SEQ ID NO: 242962 - DNA, 20 bp, Artificial Sequence
  Description of Artificial Sequence: Synthetic oligonucleotide
  Target: LAMA2; (-) strand; PAM type: YTN; PAM sequence: TTA
aaagacaaatagtagtcata

SEQ ID NO: 242963 - DNA, 20 bp, Artificial Sequence
  Description of Artificial Sequence: Synthetic oligonucleotide
  Target: LAMA2; (-) strand; PAM type: YTN; PAM sequence: TTT
aaaagacaaatagtagtcat

SEQ ID NO: 242964 - DNA, 20 bp, Artificial Sequence
  Description of Artificial Sequence: Synthetic oligonucleotide
  Target: LAMA2; (-) strand; PAM type: YTN; PAM sequence: CTT
taaaagacaaatagtagtca

SEQ ID NO: 242965 - DNA, 20 bp, Artificial Sequence
  Description of Artificial Sequence: Synthetic oligonucleotide
  Target: LAMA2; (-) strand; PAM type: YTN; PAM sequence: CTC
cactttaaaagacaaatagt

SEQ ID NO: 242966 - DNA, 20 bp, Artificial Sequence
  Description of Artificial Sequence: Synthetic oligonucleotide
  Target: LAMA2; (-) strand; PAM type: YTN; PAM sequence: TTC
tccactttaaaagacaaata

SEQ ID NO: 242967 - DNA, 20 bp, Artificial Sequence
  Description of Artificial Sequence: Synthetic oligonucleotide
  Target: LAMA2; (-) strand; PAM type: YTN; PAM sequence: TTT
ctccactttaaaagacaaat

SEQ ID NO: 242968 - DNA, 20 bp, Artificial Sequence
  Description of Artificial Sequence: Synthetic oligonucleotide
  Target: LAMA2; (-) strand; PAM type: YTN; PAM sequence: TTC
gtttctccactttaaaagac

SEQ ID NO: 242969 - DNA, 20 bp, Artificial Sequence
  Description of Artificial Sequence: Synthetic oligonucleotide
  Target: LAMA2; (-) strand; PAM type: YTN; PAM sequence: TTA
caaggacatattcgtttctc

SEQ ID NO: 242970 - DNA, 20 bp, Artificial Sequence
  Description of Artificial Sequence: Synthetic oligonucleotide
  Target: LAMA2; (-) strand; PAM type: YTN; PAM sequence: TTA
taattacaaggacatattcg

SEQ ID NO: 242971 - DNA, 20 bp, Artificial Sequence
  Description of Artificial Sequence: Synthetic oligonucleotide
  Target: LAMA2; (-) strand; PAM type: YTN; PAM sequence: CTT
ataattacaaggacatattc

SEQ ID NO: 242972 - DNA, 20 bp, Artificial Sequence
  Description of Artificial Sequence: Synthetic oligonucleotide
  Target: LAMA2; (-) strand; PAM type: YTN; PAM sequence: CTA
agtcaccttataattacaag

SEQ ID NO: 242973 - DNA, 20 bp, Artificial Sequence
  Description of Artificial Sequence: Synthetic oligonucleotide
  Target: LAMA2; (-) strand; PAM type: YTN; PAM sequence: CTA
aatagctaagtcaccttata

SEQ ID NO: 242974 - DNA, 20 bp, Artificial Sequence
  Description of Artificial Sequence: Synthetic oligonucleotide
  Target: LAMA2; (-) strand; PAM type: YTN; PAM sequence: CTC
taaatagctaagtcacctta

SEQ ID NO: 242975 - DNA, 20 bp, Artificial Sequence
  Description of Artificial Sequence: Synthetic oligonucleotide
  Target: LAMA2; (-) strand; PAM type: YTN; PAM sequence: CTA
gatgtgactctaaatagcta

SEQ ID NO: 242976 - DNA, 20 bp, Artificial Sequence
  Description of Artificial Sequence: Synthetic oligonucleotide
  Target: LAMA2; (-) strand; PAM type: YTN; PAM sequence: TTG
atgcaaatgctagatgtgac

SEQ ID NO: 242977 - DNA, 20 bp, Artificial Sequence
  Description of Artificial Sequence: Synthetic oligonucleotide
  Target: LAMA2; (-) strand; PAM type: YTN; PAM sequence: CTT
gatgcaaatgctagatgtga

SEQ ID NO: 242978 - DNA, 20 bp, Artificial Sequence
  Description of Artificial Sequence: Synthetic oligonucleotide
  Target: LAMA2; (-) strand; PAM type: YTN; PAM sequence: CTC
accttgatgcaaatgctaga

SEQ ID NO: 242979 - DNA, 20 bp, Artificial Sequence
  Description of Artificial Sequence: Synthetic oligonucleotide
  Target: LAMA2; (-) strand; PAM type: YTN; PAM sequence: TTG
agacaaactcaccttgatgc

SEQ ID NO: 242980 - DNA, 20 bp, Artificial Sequence
  Description of Artificial Sequence: Synthetic oligonucleotide
  Target: LAMA2; (-) strand; PAM type: YTN; PAM sequence: TTT
gagacaaactcaccttgatg

SEQ ID NO: 242981 - DNA, 20 bp, Artificial Sequence
  Description of Artificial Sequence: Synthetic oligonucleotide
  Target: LAMA2; (-) strand; PAM type: YTN; PAM sequence: TTT
tgagacaaactcaccttgat

SEQ ID NO: 242982 - DNA, 20 bp, Artificial Sequence
  Description of Artificial Sequence: Synthetic oligonucleotide
  Target: LAMA2; (-) strand; PAM type: YTN; PAM sequence: CTT
ttgagacaaactcaccttga

SEQ ID NO: 242983 - DNA, 20 bp, Artificial Sequence
  Description of Artificial Sequence: Synthetic oligonucleotide
  Target: LAMA2; (-) strand; PAM type: YTN; PAM sequence: CTA
gaacagagcttttgagacaa

SEQ ID NO: 242984 - DNA, 20 bp, Artificial Sequence
  Description of Artificial Sequence: Synthetic oligonucleotide
  Target: LAMA2; (-) strand; PAM type: YTN; PAM sequence: TTG
agtggggcactagaacagag

SEQ ID NO: 242985 - DNA, 20 bp, Artificial Sequence
  Description of Artificial Sequence: Synthetic oligonucleotide
  Target: LAMA2; (-) strand; PAM type: YTN; PAM sequence: CTT
gagtggggcactagaacaga

SEQ ID NO: 242986 - DNA, 20 bp, Artificial Sequence
  Description of Artificial Sequence: Synthetic oligonucleotide
  Target: LAMA2; (-) strand; PAM type: YTN; PAM sequence: TTC
ttgagtggggcactagaaca

SEQ ID NO: 242987 - DNA, 20 bp, Artificial Sequence
  Description of Artificial Sequence: Synthetic oligonucleotide
  Target: LAMA2; (-) strand; PAM type: YTN; PAM sequence: CTG
ttcttgagtggggcactaga

SEQ ID NO: 242988 - DNA, 20 bp, Artificial Sequence
  Description of Artificial Sequence: Synthetic oligonucleotide
  Target: LAMA2; (-) strand; PAM type: YTN; PAM sequence: TTG
acaatatctgttcttgagtg

SEQ ID NO: 242989 - DNA, 20 bp, Artificial Sequence
  Description of Artificial Sequence: Synthetic oligonucleotide
  Target: LAMA2; (-) strand; PAM type: YTN; PAM sequence: TTT
gacaatatctgttcttgagt

SEQ ID NO: 242990 - DNA, 20 bp, Artificial Sequence
  Description of Artificial Sequence: Synthetic oligonucleotide
  Target: LAMA2; (-) strand; PAM type: YTN; PAM sequence: TTA
caaatttgacaatatctgtt

SEQ ID NO: 242991 - DNA, 20 bp, Artificial Sequence
  Description of Artificial Sequence: Synthetic oligonucleotide
  Target: LAMA2; (-) strand; PAM type: YTN; PAM sequence: TTT
acaaatttgacaatatctgt

SEQ ID NO: 242992 - DNA, 20 bp, Artificial Sequence
  Description of Artificial Sequence: Synthetic oligonucleotide
  Target: LAMA2; (-) strand; PAM type: YTN; PAM sequence: TTT
tacaaatttgacaatatctg

SEQ ID NO: 242993 - DNA, 20 bp, Artificial Sequence
  Description of Artificial Sequence: Synthetic oligonucleotide
  Target: LAMA2; (-) strand; PAM type: YTN; PAM sequence: CTT
ttacaaatttgacaatatct

SEQ ID NO: 242994 - DNA, 20 bp, Artificial Sequence
  Description of Artificial Sequence: Synthetic oligonucleotide
  Target: LAMA2; (-) strand; PAM type: YTN; PAM sequence: TTA
aaatatcttttacaaatttg

SEQ ID NO: 242995 - DNA, 20 bp, Artificial Sequence
  Description of Artificial Sequence: Synthetic oligonucleotide
  Target: LAMA2; (-) strand; PAM type: YTN; PAM sequence: TTC
cagttaaaatatcttttaca

SEQ ID NO: 242996 - DNA, 20 bp, Artificial Sequence
  Description of Artificial Sequence: Synthetic oligonucleotide
  Target: LAMA2; (-) strand; PAM type: YTN; PAM sequence: CTA
ttccagttaaaatatctttt

SEQ ID NO: 242997 - DNA, 20 bp, Artificial Sequence
  Description of Artificial Sequence: Synthetic oligonucleotide
  Target: LAMA2; (-) strand; PAM type: YTN; PAM sequence: TTA
aatcagcaataaaaatcaag

SEQ ID NO: 242998 - DNA, 20 bp, Artificial Sequence
  Description of Artificial Sequence: Synthetic oligonucleotide
  Target: LAMA2; (-) strand; PAM type: YTN; PAM sequence: TTG
taatagattaaatcagcaat

SEQ ID NO: 242999 - DNA, 20 bp, Artificial Sequence
  Description of Artificial Sequence: Synthetic oligonucleotide
  Target: LAMA2; (-) strand; PAM type: YTN; PAM sequence: TTT
gtaatagattaaatcagcaa

SEQ ID NO: 243000 - DNA, 20 bp, Artificial Sequence
  Description of Artificial Sequence: Synthetic oligonucleotide
  Target: LAMA2; (-) strand; PAM type: YTN; PAM sequence: TTA
gaatagaaaagcaatagttt

SEQ ID NO: 243001 - DNA, 20 bp, Artificial Sequence
  Description of Artificial Sequence: Synthetic oligonucleotide
  Target: LAMA2; (-) strand; PAM type: YTN; PAM sequence: CTT
agaatagaaaagcaatagtt

SEQ ID NO: 243002 - DNA, 20 bp, Artificial Sequence
  Description of Artificial Sequence: Synthetic oligonucleotide
  Target: LAMA2; (-) strand; PAM type: YTN; PAM sequence: TTA
caacagcttagaatagaaaa

SEQ ID NO: 243003 - DNA, 20 bp, Artificial Sequence
  Description of Artificial Sequence: Synthetic oligonucleotide
  Target: LAMA2; (-) strand; PAM type: YTN; PAM sequence: TTT
acaacagcttagaatagaaa

SEQ ID NO: 243004 - DNA, 20 bp, Artificial Sequence
  Description of Artificial Sequence: Synthetic oligonucleotide
  Target: LAMA2; (-) strand; PAM type: YTN; PAM sequence: TTT
tacaacagcttagaatagaa

SEQ ID NO: 243005 - DNA, 20 bp, Artificial Sequence
  Description of Artificial Sequence: Synthetic oligonucleotide
  Target: LAMA2; (-) strand; PAM type: YTN; PAM sequence: TTT
ttacaacagcttagaataga

SEQ ID NO: 243006 - DNA, 20 bp, Artificial Sequence
  Description of Artificial Sequence: Synthetic oligonucleotide
  Target: LAMA2; (-) strand; PAM type: YTN; PAM sequence: TTA
aagcaataatttttacaaca

SEQ ID NO: 243007 - DNA, 20 bp, Artificial Sequence
  Description of Artificial Sequence: Synthetic oligonucleotide
  Target: LAMA2; (-) strand; PAM type: YTN; PAM sequence: TTA
agtgatcatattaaagcaat

SEQ ID NO: 243008 - DNA, 20 bp, Artificial Sequence
  Description of Artificial Sequence: Synthetic oligonucleotide
  Target: LAMA2; (-) strand; PAM type: YTN; PAM sequence: TTA
ttaagtgatcatattaaagc

SEQ ID NO: 243009 - DNA, 20 bp, Artificial Sequence
  Description of Artificial Sequence: Synthetic oligonucleotide
  Target: LAMA2; (-) strand; PAM type: YTN; PAM sequence: CTT
attaagtgatcatattaaag

SEQ ID NO: 243010 - DNA, 20 bp, Artificial Sequence
  Description of Artificial Sequence: Synthetic oligonucleotide
  Target: LAMA2; (-) strand; PAM type: YTN; PAM sequence: TTA
atgcttattaagtgatcata

SEQ ID NO: 243011 - DNA, 20 bp, Artificial Sequence
  Description of Artificial Sequence: Synthetic oligonucleotide
  Target: LAMA2; (-) strand; PAM type: YTN; PAM sequence: TTT
aatgcttattaagtgatcat

SEQ ID NO: 243012 - DNA, 20 bp, Artificial Sequence
  Description of Artificial Sequence: Synthetic oligonucleotide
  Target: LAMA2; (-) strand; PAM type: YTN; PAM sequence: TTG
gggcatttaatgcttattaa

SEQ ID NO: 243013 - DNA, 20 bp, Artificial Sequence
  Description of Artificial Sequence: Synthetic oligonucleotide
  Target: LAMA2; (-) strand; PAM type: YTN; PAM sequence: TTA
gcagataggattggggcatt

SEQ ID NO: 243014 - DNA, 20 bp, Artificial Sequence
  Description of Artificial Sequence: Synthetic oligonucleotide
  Target: LAMA2; (-) strand; PAM type: YTN; PAM sequence: TTT
agcagataggattggggcat

SEQ ID NO: 243015 - DNA, 20 bp, Artificial Sequence
  Description of Artificial Sequence: Synthetic oligonucleotide
  Target: LAMA2; (-) strand; PAM type: YTN; PAM sequence: TTT
tagcagataggattggggca

SEQ ID NO: 243016 - DNA, 20 bp, Artificial Sequence
  Description of Artificial Sequence: Synthetic oligonucleotide
  Target: LAMA2; (-) strand; PAM type: YTN; PAM sequence: TTT
ttagcagataggattggggc

SEQ ID NO: 243017 - DNA, 20 bp, Artificial Sequence
  Description of Artificial Sequence: Synthetic oligonucleotide
  Target: LAMA2; (-) strand; PAM type: YTN; PAM sequence: TTA
aacatgccaaacaattttta

SEQ ID NO: 243018 - DNA, 20 bp, Artificial Sequence
  Description of Artificial Sequence: Synthetic oligonucleotide
  Target: LAMA2; (-) strand; PAM type: YTN; PAM sequence: TTG
tgatcaattaaacatgccaa

SEQ ID NO: 243019 - DNA, 20 bp, Artificial Sequence
  Description of Artificial Sequence: Synthetic oligonucleotide
  Target: LAMA2; (-) strand; PAM type: YTN; PAM sequence: CTT
gtgatcaattaaacatgcca

SEQ ID NO: 243020 - DNA, 20 bp, Artificial Sequence
  Description of Artificial Sequence: Synthetic oligonucleotide
  Target: LAMA2; (-) strand; PAM type: YTN; PAM sequence: TTC
aaatccttgtgatcaattaa

SEQ ID NO: 243021 - DNA, 20 bp, Artificial Sequence
  Description of Artificial Sequence: Synthetic oligonucleotide
  Target: LAMA2; (-) strand; PAM type: YTN; PAM sequence: CTA
ttcaaatccttgtgatcaat

SEQ ID NO: 243022 - DNA, 20 bp, Artificial Sequence
  Description of Artificial Sequence: Synthetic oligonucleotide
  Target: LAMA2; (-) strand; PAM type: YTN; PAM sequence: TTG
aaaagataagagtgctattc

SEQ ID NO: 243023 - DNA, 20 bp, Artificial Sequence
  Description of Artificial Sequence: Synthetic oligonucleotide
  Target: LAMA2; (-) strand; PAM type: YTN; PAM sequence: CTT
gaaaagataagagtgctatt

SEQ ID NO: 243024 - DNA, 20 bp, Artificial Sequence
  Description of Artificial Sequence: Synthetic oligonucleotide
  Target: LAMA2; (-) strand; PAM type: YTN; PAM sequence: TTG
aagatacttgaaaagataag

SEQ ID NO: 243025 - DNA, 20 bp, Artificial Sequence
  Description of Artificial Sequence: Synthetic oligonucleotide
  Target: LAMA2; (-) strand; PAM type: YTN; PAM sequence: CTT
gaagatacttgaaaagataa

SEQ ID NO: 243026 - DNA, 20 bp, Artificial Sequence
  Description of Artificial Sequence: Synthetic oligonucleotide
  Target: LAMA2; (-) strand; PAM type: YTN; PAM sequence: TTC
ttgaagatacttgaaaagat

SEQ ID NO: 243027 - DNA, 20 bp, Artificial Sequence
  Description of Artificial Sequence: Synthetic oligonucleotide
  Target: LAMA2; (-) strand; PAM type: YTN; PAM sequence: TTT
cttgaagatacttgaaaaga

SEQ ID NO: 243028 - DNA, 20 bp, Artificial Sequence
  Description of Artificial Sequence: Synthetic oligonucleotide
  Target: LAMA2; (-) strand; PAM type: YTN; PAM sequence: CTG
aaaataagaatttcttgaag

SEQ ID NO: 243029 - DNA, 20 bp, Artificial Sequence
  Description of Artificial Sequence: Synthetic oligonucleotide
  Target: LAMA2; (-) strand; PAM type: YTN; PAM sequence: CTG
ctgaaaataagaatttcttg

SEQ ID NO: 243030 - DNA, 20 bp, Artificial Sequence
  Description of Artificial Sequence: Synthetic oligonucleotide
  Target: LAMA2; (-) strand; PAM type: YTN; PAM sequence: CTC
aacatgccctgctgaaaata

SEQ ID NO: 243031 - DNA, 20 bp, Artificial Sequence
  Description of Artificial Sequence: Synthetic oligonucleotide
  Target: LAMA2; (-) strand; PAM type: YTN; PAM sequence: TTC
ctcaacatgccctgctgaaa

SEQ ID NO: 243032 - DNA, 20 bp, Artificial Sequence
  Description of Artificial Sequence: Synthetic oligonucleotide
  Target: LAMA2; (-) strand; PAM type: YTN; PAM sequence: TTT
cctcaacatgccctgctgaa

SEQ ID NO: 243033 - DNA, 20 bp, Artificial Sequence
  Description of Artificial Sequence: Synthetic oligonucleotide
  Target: LAMA2; (-) strand; PAM type: YTN; PAM sequence: TTA
tgtttcctcaacatgccctg

SEQ ID NO: 243034 - DNA, 20 bp, Artificial Sequence
  Description of Artificial Sequence: Synthetic oligonucleotide
  Target: LAMA2; (-) strand; PAM type: YTN; PAM sequence: TTT
atgtttcctcaacatgccct

SEQ ID NO: 243035 - DNA, 20 bp, Artificial Sequence
  Description of Artificial Sequence: Synthetic oligonucleotide
  Target: LAMA2; (-) strand; PAM type: YTN; PAM sequence: CTT
tatgtttcctcaacatgccc

SEQ ID NO: 243036 - DNA, 20 bp, Artificial Sequence
  Description of Artificial Sequence: Synthetic oligonucleotide
  Target: LAMA2; (-) strand; PAM type: YTN; PAM sequence: TTG
gaagtgatgagaagacatca

SEQ ID NO: 243037 - DNA, 20 bp, Artificial Sequence
  Description of Artificial Sequence: Synthetic oligonucleotide
  Target: LAMA2; (-) strand; PAM type: YTN; PAM sequence: CTG
ttggaagtgatgagaagaca

SEQ ID NO: 243038 - DNA, 20 bp, Artificial Sequence
  Description of Artificial Sequence: Synthetic oligonucleotide
  Target: LAMA2; (-) strand; PAM type: YTN; PAM sequence: CTA
ctgttggaagtgatgagaag

SEQ ID NO: 243039 - DNA, 20 bp, Artificial Sequence
  Description of Artificial Sequence: Synthetic oligonucleotide
  Target: LAMA2; (-) strand; PAM type: YTN; PAM sequence: CTC
agtggctactgttggaagtg

SEQ ID NO: 243040 - DNA, 20 bp, Artificial Sequence
  Description of Artificial Sequence: Synthetic oligonucleotide
  Target: LAMA2; (-) strand; PAM type: YTN; PAM sequence: TTG
actcagtggctactgttgga

SEQ ID NO: 243041 - DNA, 20 bp, Artificial Sequence
  Description of Artificial Sequence: Synthetic oligonucleotide
  Target: LAMA2; (-) strand; PAM type: YTN; PAM sequence: TTT
gactcagtggctactgttgg

SEQ ID NO: 243042 - DNA, 20 bp, Artificial Sequence
  Description of Artificial Sequence: Synthetic oligonucleotide
  Target: LAMA2; (-) strand; PAM type: YTN; PAM sequence: CTT
tgactcagtggctactgttg

SEQ ID NO: 243043 - DNA, 20 bp, Artificial Sequence
  Description of Artificial Sequence: Synthetic oligonucleotide
  Target: LAMA2; (-) strand; PAM type: YTN; PAM sequence: CTG
ctttgactcagtggctactg

SEQ ID NO: 243044 - DNA, 20 bp, Artificial Sequence
  Description of Artificial Sequence: Synthetic oligonucleotide
  Target: LAMA2; (-) strand; PAM type: YTN; PAM sequence: TTA
gaaaaagtaaggaaagagag

SEQ ID NO: 243045 - DNA, 20 bp, Artificial Sequence
  Description of Artificial Sequence: Synthetic oligonucleotide
  Target: LAMA2; (-) strand; PAM type: YTN; PAM sequence: TTT
agaaaaagtaaggaaagaga

SEQ ID NO: 243046 - DNA, 20 bp, Artificial Sequence
  Description of Artificial Sequence: Synthetic oligonucleotide
  Target: LAMA2; (-) strand; PAM type: YTN; PAM sequence: CTT
tagaaaaagtaaggaaagag

SEQ ID NO: 243047 - DNA, 20 bp, Artificial Sequence
  Description of Artificial Sequence: Synthetic oligonucleotide
  Target: LAMA2; (-) strand; PAM type: YTN; PAM sequence: CTA
atatagagggagagctttag

SEQ ID NO: 243048 - DNA, 20 bp, Artificial Sequence
  Description of Artificial Sequence: Synthetic oligonucleotide
  Target: LAMA2; (-) strand; PAM type: YTN; PAM sequence: CTC
agacacagctaatatagagg

SEQ ID NO: 243049 - DNA, 20 bp, Artificial Sequence
  Description of Artificial Sequence: Synthetic oligonucleotide
  Target: LAMA2; (-) strand; PAM type: YTN; PAM sequence: CTG
caatctcagacacagctaat

SEQ ID NO: 243050 - DNA, 20 bp, Artificial Sequence
  Description of Artificial Sequence: Synthetic oligonucleotide
  Target: LAMA2; (-) strand; PAM type: YTN; PAM sequence: CTG
cctgcaatctcagacacagc

SEQ ID NO: 243051 - DNA, 20 bp, Artificial Sequence
  Description of Artificial Sequence: Synthetic oligonucleotide
  Target: LAMA2; (-) strand; PAM type: YTN; PAM sequence: TTA
actgcctgcaatctcagaca

SEQ ID NO: 243052 - DNA, 20 bp, Artificial Sequence
  Description of Artificial Sequence: Synthetic oligonucleotide
  Target: LAMA2; (-) strand; PAM type: YTN; PAM sequence: TTT
aactgcctgcaatctcagac

SEQ ID NO: 243053 - DNA, 20 bp, Artificial Sequence
  Description of Artificial Sequence: Synthetic oligonucleotide
  Target: LAMA2; (-) strand; PAM type: YTN; PAM sequence: TTT
taactgcctgcaatctcaga

SEQ ID NO: 243054 - DNA, 20 bp, Artificial Sequence
  Description of Artificial Sequence: Synthetic oligonucleotide
  Target: LAMA2; (-) strand; PAM type: YTN; PAM sequence: TTG
gattttaactgcctgcaatc

SEQ ID NO: 243055 - DNA, 20 bp, Artificial Sequence
  Description of Artificial Sequence: Synthetic oligonucleotide
  Target: LAMA2; (-) strand; PAM type: YTN; PAM sequence: TTC
agtgtgccaaatgttggatt

SEQ ID NO: 243056 - DNA, 20 bp, Artificial Sequence
  Description of Artificial Sequence: Synthetic oligonucleotide
  Target: LAMA2; (-) strand; PAM type: YTN; PAM sequence: TTT
cagtgtgccaaatgttggat

SEQ ID NO: 243057 - DNA, 20 bp, Artificial Sequence
  Description of Artificial Sequence: Synthetic oligonucleotide
  Target: LAMA2; (-) strand; PAM type: YTN; PAM sequence: TTT
tcagtgtgccaaatgttgga

SEQ ID NO: 243058 - DNA, 20 bp, Artificial Sequence
  Description of Artificial Sequence: Synthetic oligonucleotide
  Target: LAMA2; (-) strand; PAM type: YTN; PAM sequence: TTT
ttcagtgtgccaaatgttgg

SEQ ID NO: 243059 - DNA, 20 bp, Artificial Sequence
  Description of Artificial Sequence: Synthetic oligonucleotide
  Target: LAMA2; (-) strand; PAM type: YTN; PAM sequence: CTT
tttcagtgtgccaaatgttg

SEQ ID NO: 243060 - DNA, 20 bp, Artificial Sequence
  Description of Artificial Sequence: Synthetic oligonucleotide
  Target: LAMA2; (-) strand; PAM type: YTN; PAM sequence: CTA
tcacatagcccctttttcag

SEQ ID NO: 243061 - DNA, 20 bp, Artificial Sequence
  Description of Artificial Sequence: Synthetic oligonucleotide
  Target: LAMA2; (-) strand; PAM type: YTN; PAM sequence: TTG
gaggccctatcacatagccc

SEQ ID NO: 243062 - DNA, 20 bp, Artificial Sequence
  Description of Artificial Sequence: Synthetic oligonucleotide
  Target: LAMA2; (-) strand; PAM type: YTN; PAM sequence: TTC
agttggaggccctatcacat

SEQ ID NO: 243063 - DNA, 20 bp, Artificial Sequence
  Description of Artificial Sequence: Synthetic oligonucleotide
  Target: LAMA2; (-) strand; PAM type: YTN; PAM sequence: TTT
cagttggaggccctatcaca

SEQ ID NO: 243064 - DNA, 20 bp, Artificial Sequence
  Description of Artificial Sequence: Synthetic oligonucleotide
  Target: LAMA2; (-) strand; PAM type: YTN; PAM sequence: TTC
atcacatttcagttggaggc

SEQ ID NO: 243065 - DNA, 20 bp, Artificial Sequence
  Description of Artificial Sequence: Synthetic oligonucleotide
  Target: LAMA2; (-) strand; PAM type: YTN; PAM sequence: TTA
ataattcatcacatttcagt
